United States Patent Application Publication US 2005/0228172 A9 - sequence listing, part 177

SEQ ID NO: 792973 - DNA, 592 bp, Homo sapiens
agggcttgaacatacgggtttggggaggggaacacagttcagaccatgacactcattgtttcactcattaatgagttaagggtgctttgatattattacatttgaatgagagtggtctttaaaattacattttgtcgtgtagtttgttccaccctgatgcttaaagggagtcacctgcctcagccaattaaactgtgttgtctctgcagtgcgttttatcacaagaacatgaccttyaagcacaagaacaccttgtactccaccactaaaaacagaaatgacatctaccttcactgcttccctatttctctccatctttactgacttggtattttgttgttgctgtcatttctggttgttggtcaattttcatttctgttcttattttgctgataattcttataaatcagtgctgaattttgtcaaattatttttctgcatctctacagatgatcattttatgttttcgtccctgtgataatttagtgaatgtcattgatcaatttttaaataatgaatatctttgcatttaagataatatttttcactattaatgttatctctgaaatgaaagctaaacctagtcaataga

SEQ ID NO: 792974 - DNA, 632 bp, Homo sapiens
cctttaagcacaagaacaccttgtactccaccactaaaaacagaaatgacatctaccttcactgcttccctatttctctccatctttactgacttggtattttgttgttgctgtcatttctggttgttggtcaattttcatttctgttcttattttgctgataattcttataaatcagtgctgaattttgtcaaattatttttctgcatctctacagatgatcattttatgttttygtccctgtgataatttagtgaatgtcattgatcaatttttaaataatgaatatctttgcatttaagataatatttttcactattaatgttatctctgaaatgaaagctaaacctagtcaatagatattagaggtgcatgatttttaaaattgtataaaattagataaaaaatacaaagaaatatatataattttaaaactatgtaaaaatgtaaatgccaaatgatagagcactaaatgaagcttgtaatattaaatacaatctttagaaactcttttgcagtgcaggaaaaaaatagaactgaaaacaaagcagaagaaatcacagatataaaattaaagaggatagaattaagcaccggagttcccacatctaaagtgaaaatctaagaattta

SEQ ID NO: 792975 - DNA, 632 bp, Homo sapiens
cctttaagcacaagaacaccttgtactccaccactaaaaacagaaatgacatctaccttcactgcttccctatttctctccatctttactgacttggtattttgttgttgctgtcatttctggttgttggtcaattttcatttctgttcttattttgctgataattcttataaatcagtgctgaattttgtcaaattatttttctgcatctctacagatgatcattttatgttttcgtccctgtgataatttartgaatgtcattgatcaatttttaaataatgaatatctttgcatttaagataatatttttcactattaatgttatctctgaaatgaaagctaaacctagtcaatagatattagaggtgcatgatttttaaaattgtataaaattagataaaaaatacaaagaaatatatataattttaaaactatgtaaaaatgtaaatgccaaatgatagagcactaaatgaagcttgtaatattaaatacaatctttagaaactcttttgcagtgcaggaaaaaaatagaactgaaaacaaagcagaagaaatcacagatataaaattaaagaggatagaattaagcaccggagttcccacatctaaagtgaaaatctaagaattta

SEQ ID NO: 792976 - DNA, 557 bp, Homo sapiens
aaaagattacagcagattctcattattcagtgtagttacggtctagaaagttccatgaacaaataaaaagttaggtttcagcaagctactggtcacacttttgtaagcttaccaacacctacttttgttgtatgtgtgcttatttaatatatattgttggccaggcacagtggctaacgcctgtaatcccagcactttgcgaagccaaggcgggcagatcatttgaggtctggagttcgagaccagcctggccaacgtggtgaaaccccgtctctactaaaactacaaaaaaaaaaaaaaaaaaaaaaattagccaggcatggtggcgcatgcctgtagtcttagctacttgggaggckaaggcaggggaatcgcttgaacccaggaggcagaggttgcagtgagccaagactgcaccactgcactccagcctgagcaacagagtgagactctatctcaaaaaaaataataataataattaattaaatgaagaataaataaataatatacattgttcattcattaacattgaactcacagccaacggcactacagca

SEQ ID NO: 792977 - DNA, 591 bp, Homo sapiens
tccaacactgataaggaacttaaacaaatttacaagaaaaaaaaaaatctcattagaaagtgggcacaggacataaacagacacttcaaaagaagacacacatgcggccaacaagcatatgagaaaaagctcaatatcactgatcattagagaaatgcaaatcaaaaccacaatggcataccatctcacaccagtcagtatggttattattaagaagtcaacgcygggcatggtggctcacgcctataatcccagcacttcaggaggccaaggcaggcagatcgcatgaggtcaggagttccagaccagcctggacaacctggcgaaaccccgtctctactaaaaatacaaaaattagcccagcgtggtggcgggtgcctgtaatcccagctactcaggatgctgaggcaggagaatcgcctgaacccgggaggcagaggttgtagtgagccgagatcataccactgcactctccagcttaggtgacagagcgagactctgtctcaaaaaaaaaaaaaaatatttgaattttgtttaaatcgctaacacatactgggcatttaataacaaaaaaaaaaggacatgagattg

SEQ ID NO: 792978 - DNA, 544 bp, Homo sapiens
ctcattattcagtgtagttacggtctagaaagttccatgaacaaataaaaagttaggtttcagcaagctactggtcacacttttgtaagcttaccaacacctacttttgttgtatgtgtgcttatttaatatatattgttggccaggcacagtggctaacgcctgtaatcccagcactttgsgaagccaaggcgggcagatcatttgaggtctggagttcgagaccagcctggccaacgtggtgaaaccccgtctctactaaaactacaaaaaaaaaaaaaaaaaaaaaaaattagccaggcatggtggcgcatgcctgtagtcttagctacttgggaggcgaaggcaggggaatcgcttgaacccaggaggcagaggttgcagtgagccaagactgcaccactgcactccagcctgagcaacagagtgagactctatctcaaaaaaaataataataataattaattaaatgaagaataaataaataatatacattgttcattcattaacattgaactcacagccaacggcactacagcactca

SEQ ID NO: 792979 - DNA, 650 bp, Homo sapiens
gggttcaacatacagcagtctgaaacatactgtaataatttaatccaatggctcatctacagcacctaaaaagattacagcagattctcattattcagtgtagttacggtctagaaagttccatgaacaaataaaaagttaggtttcagcaagctactggtcacacttttgtaagcttaccaacacctacttttgttgtatgtgtgcttatttaatatatattgttggccaggcacagtggctaacgcctgtaatcccagcactttgggaagccaaggcgggcagatcatttgaggtctggagytcgagaccagcctggccaacgtggtgaaaccccgtctctactaaaactacaaaaaaaaaaaaaaaaaaaaaaaattagccaggcatggtggcgcatgcctgtagtcttagctacttgggaggcgaaggcaggggaatcgcttgaacccaggaggcagaggttgcagtgagccaagactgcaccactgcactccagcctgagcaacagagtgagactctatctcaaaaaaaataataataataattaattaaatgaagaataaataaataatatacattgttcattcattaacattgaactcacagccaacggcactacagcactcacgcctgaatggagtttattt

SEQ ID NO: 792980 - DNA, 594 bp, Homo sapiens
ctctcattacatttttcatatggttatattatgggatcacatttactcagaataatggtgtttctattccaaattaatcttccagagtttggatactttttattttttattttttattttagagacagggtctcagggtctcactctgttgcacaatttggagtgcagtgctgtgatcatagctcactgcagccttgaactcctggtctcaagcaatcttcccacctcagcctcctgagtagctgggactacagtktcaagccaccacatctagctttttttttttccttcattttttgtagaatcggcatctcactatgttgcccaggcttgtcttgaactcctcctcccttggcctcccaaaattctgggattacaggtgtgagccatggcacctggcagagtttgaatattttaaagccaagagcatgcatgtatgtgtagtttagtgagtgcatatataaacacatatatatgtattaatataattgcaatctaagctttaaaatattgcccactaaagcatacaaactgccatgaatctactcatgcagtacaagggaagactatgagtacagccagaacctcaattct

SEQ ID NO: 792981 - DNA, 633 bp, Homo sapiens
aaaccccagagactacctaatgataaaacttggaaaacattctttttaagataagacaaaaacagcggttcctgctgccaccacttctagtcgggcatttgtcagggcagcaagggaagctaaaagatctatgaaatttaggggggaaaaataaaactcttatttatcatagatggtatgattttttaaaatctagaaacctctaaagaataattgagtacatttatcaagactgccagacacatgaattaataaaaaactttagccacacttctatatattagcaacaaagagaaaatggaatcaaacaaatataacctttcacataacattaaaaaattaagaatcaattaccaaaaataggcaagacattaatgagaaaaaytatcaaacttaacagaaaagtattaggtaagaccaagacctaaataagtggagagacacaccatgtttatgattgaaaaatacgatattataaaggtatcagttgtcttttccatttatctatgaattcagtgcaattctagtaaaagttctgacacattttcttttttgtttgcttgtcttttattttatgatgaacttaacaaactgattctaaaatttatactgaagagcaaagagccctaagta

SEQ ID NO: 792982 - DNA, 593 bp, Homo sapiens
aggaaccaagcttctgggatttcatttctatttgccaccaggtgaataaaatgtgttaagttcatgttgtctgtgaccttttactaaaaatgttattccttagtcatattctgcattggtggtcagggttggatgccaagaatttgcttgtcatctgactgagtttccttttcacgtgtaatgcttcatctgaattacaccatcctaaatgattgtacaagctgaaraattttctatgtccagtagttttattctttaaagaagcattcaagaaccattacaaaacaaataaagcaaagatagattctgtatattctggtcatttgtgtgccaagattgatggtggttagtagagtatgtaaatcaatgaatttaggaagtctcactgagttgtacaaactctttactgggtccgtagctccattttcagagtcctgtgtgttttcacagaaactgcaccattagttatcttcactggaggatttgaccaaatttatctaaggtaatgtgcctatacacgagtttcctaactaaggttcttaaaccccttggtttatgaacttgtggaaatttatgtaatcatgcatatgtgc

SEQ ID NO: 792983 - DNA, 738 bp, Homo sapiens
actaacaatttcatttctgatcttaaaatgctaatttttaaatcttataataatgaagcctttatttttttattccaaaattgggtggataaatctcaaacccaggtgtcaagagtaattcctctcctgatcctgccttttttggtaaattctatttgttctttcaacaacacgttatccaaaatttattaagtgccaggtattatgttaagtgctggaacacatcaagttgtattacatgaaattgttrttatatgacctgaccatttttaagcctaaaaagaataatgttatactattcaatctaacagaaataaaaatgtaggttgttccatgaaaacttcacaatctgatagaagaaacttacaaataaacaaaatgataacttggagagattctgaaagatgtcctgagaaagtgctcatgctgattctggggagatgtaagaggaaccaagtggagaaggcatataggaaagaagatcttttctattagaagcaaagtgttcacagagaaattcagactctagatgacaaaaattatgagtcttgactgaagagaaggatcaaaccacaaagccttttatgtgatgagatttttttttatggcaattgagaaacattagggaatatttgcattttaagaaggtcactctagcagccttatgtgtgttggggtgttgggggaggtatacaggagttaggactggagccaggggagtgcagaataacttctgca

SEQ ID NO: 792984 - DNA, 738 bp, Homo sapiens
actaacaatttcatttctgatcttaaaatgctaatttttaaatcttataataatgaagcctttatttttttattccaaaattgggtggataaatctcaaacccaggtgtcaagagtaattcctctcctgatcctgccttttttggtaaattctatttgttctttcaacaacacgttatccaaaatttattaagtgccaggtattatgttaagtgctggaacacatcaagttgtattacatgaaattgttgttatatgacctgaccatttttaagcctaaaaagaataatgttatactattcaatctaacagaaataaaaatgtaggttgttccatgaaaacttcacaatctgatagaagaaacttacaaataaacaaartgataacttggagagattctgaaagatgtcctgagaaagtgctcatgctgattctggggagatgtaagaggaaccaagtggagaaggcatataggaaagaagatcttttctattagaagcaaagtgttcacagagaaattcagactctagatgacaaaaattatgagtcttgactgaagagaaggatcaaaccacaaagccttttatgtgatgagatttttttttatggcaattgagaaacattagggaatatttgcattttaagaaggtcactctagcagccttatgtgtgttggggtgttgggggaggtatacaggagttaggactggagccaggggagtgcagaataacttctgca

SEQ ID NO: 792985 - DNA, 738 bp, Homo sapiens
actaacaatttcatttctgatcttaaaatgctaatttttaaatcttataataatgaagcctttatttttttattccaaaattgggtggataaatctcaaacccaggtgtcaagagtaattcctctcctgatcctgccttttttggtaaattctatttgttctttcaacaacacgttatccaaaatttattaagtgccaggtattatgttaagtgctggaacacatcaagttgtattacatgaaattgttgttatatgacctgaccatttttaagcctaaaaagaataatgttatactattcaatctaacagaaataaaaatgtaggttgttccatgaaaacttcacaatctgatagaagaaacttacaaataaacaaaatgataacttggagagattctgaaagatgtcctgagraagtgctcatgctgattctggggagatgtaagaggaaccaagtggagaaggcatataggaaagaagatcttttctattagaagcaaagtgttcacagagaaattcagactctagatgacaaaaattatgagtcttgactgaagagaaggatcaaaccacaaagccttttatgtgatgagatttttttttatggcaattgagaaacattagggaatatttgcattttaagaaggtcactctagcagccttatgtgtgttggggtgttgggggaggtatacaggagttaggactggagccaggggagtgcagaataacttctgca

SEQ ID NO: 792986 - DNA, 738 bp, Homo sapiens
actaacaatttcatttctgatcttaaaatgctaatttttaaatcttataataatgaagcctttatttttttattccaaaattgggtggataaatctcaaacccaggtgtcaagagtaattcctctcctgatcctgccttttttggtaaattctatttgttctttcaacaacacgttatccaaaatttattaagtgccaggtattatgttaagtgctggaacacatcaagttgtattacatgaaattgttgttatatgacctgaccatttttaagcctaaaaagaataatgttatactattcaatctaacagaaataaaaatgtaggttgttccatgaaaacttcacaatctgatagaagaaacttacaaataaacaaaatgataacttggagagattctgaaagatgtcctgagaaagtgctcatgctgattctggggagatgtaagaggaaccaagtggagaaggyatataggaaagaagatcttttctattagaagcaaagtgttcacagagaaattcagactctagatgacaaaaattatgagtcttgactgaagagaaggatcaaaccacaaagccttttatgtgatgagatttttttttatggcaattgagaaacattagggaatatttgcattttaagaaggtcactctagcagccttatgtgtgttggggtgttgggggaggtatacaggagttaggactggagccaggggagtgcagaataacttctgca

SEQ ID NO: 792987 - DNA, 611 bp, Homo sapiens
ctggctgctttgtttacctaatcaagcctgggcaatggcgggcgcccctcccccagcctggctgccgccttgcagtttgatctcagactgctgtgctagcaatcagggagactccgtgggcgtaggaccctccaagccaggtgtgggatatagtctcgtggtgcgccgttttttaagccggtctgaaaagcrcaatattcgggtcggagtgacccgattttccaggtgcgtccgtcacccctttctttgactcagaaagggaactccctgaccccttgcgcttcccaggtgaggcaatgcctcgccctgcttcggctcgcacacggtgcgcgcacccactggcctgcgcccactgtctggcactccctagtgagatgaacccggtacctcagatggaaatgcagaaatcacccgtcttctgcgtcgctcatgctgggagctgtagaccggagctgttcctattcggccatcttggctcctccctgtctcttatgttattttctagcagttttgtgttttacatttaggcctatgatacattttgcgtcaatttttgtaaagagtataagatctgtttctaggttctttttgttgttgttgttttgcatgtg

SEQ ID NO: 792988 - DNA, 582 bp, Homo sapiens
ggaactgagttcagtactgatccaaggatgctggcatcaaagcccttacacggaactatccctaaaggttccgtatttccgtaatataccaccaatcactctaaatttataataccctgtctttaacttggtatataccatcttttgggaaaaaaattattaatattttgagatgagatacaagaataaagtcattcttgaggttccacctctaatatgaaaaaatggacgctgtttgcacatagcagctagtttgatacctcctgttctgttaggctagccttcacacaatgagcatgcatatacagccacagttcactgcatctgttttgaagttgcaaagtgctgctcattcaagtcacagatgctaccatgttatgcaatgaaacagtaaaaytgtatgtccaccatgagaaaaggaaaataaacaatgaaaaaaatgcagcaaatataggcagttggcattcagaacacgccaaaaagctaacactcatgaatcgtcattataaggttttcctttccttaaaaaaaaagtctttctttgcatatttcaaaatgtaacggtcccagagaatcatgaag

SEQ ID NO: 792989 - DNA, 642 bp, Homo sapiens
tttcttttacccagtactttctgaactagaatcaattctgattctaaagtccaacttgtataccaggggctccaaagacgatttgcaagatgaatccaatcatggagaggcctggaataaatgacctagaccagaccttctgtaaatatgttaatggtatttactagcaaaaggagaatctctatctacaaatgattttagaaggwtatatctggtctaactaggttgattaaataaacctaaaattcatggggtgtagttggatgaagattagggatagtcatttaaaccatgtaattagtgcaatgtaaaagatgttagaaaatggaaatgacttccttttgtaagatatttctccatatattgttcaataactaatcatttattccaaagccaaaacatactgtaacgaggagaaaagggatacttttgggtgttgcatcagatgcgttcagactcttttaggaaaagaatgctttggctgtatctgatgcttgcctatatcctttggatcatttgtcaatttgttgctggttaagagctgtgattctcataagtttgctttaataattcaactctgttaatatagtggaaaaaggatgactgaatattcacaatgaagaaaaaaaggctaagtgattt

SEQ ID NO: 792990 - DNA, 611 bp, Homo sapiens
gttatttagaagtgtttttcaaaacaaaagatttttaaaggttttgaaatcagtataaaaagtaattaagttatgatactgaaattttttttaactttgagatttgctttatagcttagtacataatcagttttcattagtgtcccatgaatgcttaaaaagaatgtgtattcttcatttgctaggcgtaaagtcacttatgtttagattaagcttgttttttatggagttcaagttttactgtgtgtgttttgttttgtttttttggtctccttttatataatttacagaagaatattaaaatatattactgtggggctgggcacagttgctcacacctgtaatcccagcactttgggaggccaaggtgggaggatttcttgaagccattaggtcagcctgggcaacataacaagatcccatctctacaaaaagtttaaaaattagccragtgcaatatcatgtaactgtagtcccagctactcaggaggctactcaaggaggatcacttgagcccaggagtttgacgatacctccttgagcttttttactttatgtgtttatatgtacagcatataaattttgaattgttggccaggcacagtggctta

SEQ ID NO: 792991 - DNA, 628 bp, Homo sapiens
cacaatcacagcagctacagggaaggacaatggtgaccaaggctccctggggctgtcaatttagtccatatccctacaggggacacacaaggctccacgacctagtccctccccaggtcccctggctcgtctctccctctgcccacctcacactctctgctgtagccgtagaaagttcaagaggtgagctctttttcttcaggccttggaacaatctgctcckccttgggaatgtttccccatatttgcctggccaagttttctccaatcttcagcattctgctaaggcatcgctttcttccagatgttgtcctggctccaggctctaatactgcctgactttgaagcaccttccagcactttgagcctaactctatcacagtgcatatcacagtgggtggccacagcttgctttatccccctgaattttttccattcagtaacgaattccttagggcagaaactcatttgttctggtgtcactagtacatgcgcctgagtaaattaatgaattctttcaagagaaatgaattagaatgcaagtggtgctcctcaattttcccttgagttcttgtttaaccccctctcttttttttcctgaggatgttcgtttccatctcccagagat

SEQ ID NO: 792992 - DNA, 628 bp, Homo sapiens
cacaatcacagcagctacagggaaggacaatggtgaccaaggctccctggggctgtcaatttagtccatatccctacaggggacacacaaggctccacgacctagtccctccccaggtcccctggctcgtctctccctctgcccacctcacactctctgctgtagccgtagaaagttcaagaggtgagctctttttcttcaggccttggaacaatctgctcctccttgggaatgtttccccatatttgcctggccaagttttctccaatcttcagcattctgctaaggcatcgctttcttccagatgttgtcctggctccaggctctaatactgcctgactttgaagcaccttccagcactttgagcctaactctatcacagtgcatatcacagtgggtggccacagcttgctttatcyccctgaattttttccattcagtaacgaattccttagggcagaaactcatttgttctggtgtcactagtacatgcgcctgagtaaattaatgaattctttcaagagaaatgaattagaatgcaagtggtgctcctcaattttcccttgagttcttgtttaaccccctctcttttttttcctgaggatgttcgtttccatctcccagagat

SEQ ID NO: 792993 - DNA, 575 bp, Homo sapiens
actacattccccactgagtttattcaaaatctcaaagctgggcactgtggtgcacacctgtactcccagataggaagctgagacaggattgcttgagcctaggagtccaggagttcaaggctatagtgcattatgatcacacctgtgaatagccactaaactccagcctggagaacatagtgacaatctgtctcttatttaaaaatttaaaaaaggccaggctcggtggctcacgcctgtaatcccagcactttgggggactgaggcgggcagatcacgaggtcaggagatccagaccatcttggctaacatggtgaaaccccatctctactaaaaaatagaaaaaattagccgggcgtggtggcaggcgcctgtagtcccagctactcgggaggctgaggcaggagaacrgcgtgaacccaggaggcagagcttgcagtgagccaagatcacaccactgcactccagcctgggtgacagagcgagactctgtctcaaaaaaaaaataaataaataataaaaaaataaaaatcagggctgggtgcagtggctcatgcttgtaattccaacacttt

SEQ ID NO: 792994 - DNA, 616 bp, Homo sapiens
ttactgttaacataaataatatatatttttttataagggataattagattttcctaaaacatttagtgagaagagtggtactgttttactttgcgtttttttaatgcccagcataactgaagatagttgcatccaatctgttgtggcatcatgtttggttgaygtgtgtagaaaacccattcccacacaaatgcctagttggcaaatgcaggattgatgaaatagcctttcagataattgtggatattctttctttgatactacacccaaactcaacaactggaagtttgtataggaatcggaacacctatcagtgaactttacatactctgatatattaaaacccattaatttatctagcattttgaatggatcttttaccaatatatcattttgtaacatcgatcatcggttgtttaggaaatagcgacttgctgagttatacaggggttctgaatatacagtggaaaacttcactgtatacttgtgaaagaaaaagaatggaaaaaacaaataacaacttagtattgttacgaaaatacatcaacactgcagatccactgaaaaggaaccccgggggtttatgaaccaaactttaagaactgctatttaggcc

SEQ ID NO: 792995 - DNA, 551 bp, Homo sapiens
tggcaaggacaaattctattgctttttgatatctgtgagaaggcaacagaagagttagaactaacaaagacggcaggaattacaagatccaagcaaatagtttccttgctttggattagagttggacacccaagtgtgtaaaactcctggcaggaggattgaggtgaagagcgggaaagtacaggaggattccrccaaattttagctgctcagcagacaaaataaggtatgacaggcacctagccagggctctagaaaaatatttgaccactgccagaatccagaaaaaccaatgctaccaagcatctaaaatgaaaagtacgaggccgggcgcggtggctcatgcctgtaattccagcactttgggaggccgaggcgggtgcatcacctgaggtcaggagttcgagaccagcctggccaacatggcgaaaccctgtctctgctaaaaatacaaaaattagccaggcatggtggcaagtgcttctaattccagctactcaagaggctgaggcagggagaattgcttgaactcaggagatggaggttgcagt

SEQ ID NO: 792996 - DNA, 561 bp, Homo sapiens
accactggcgtgtcaggactgatgtgcacggatggaaaatgacacctggagagttgctcacttcacctaacatacaattctaaataaaatgtttcactcttctgtgaggtctttgattatcactagcgaaatctctacaaatacagaaacatgaactgctgctgtctggttaggcctgtctttcaggggttgaaaagttgctctggaagccgggggtttcctgacttgccctaaaggtttctcagactgctctataataatgatgattgaaaagcatattatgtcaacagatacttctttggaaggaggaaaacaggaggacaatacctcactcatcagaaagagccagacatacytatagggtatgcaaagcaagccaaaactcctttgtgtggttttggggggggcggattttttgagacagggtcttgctctgtggcccacgctggactgcagtggcataatcacggctcacagcaggctcaagagatccttccacctcagcctcctagtagctgagactataggtatgtgccaccacatctggctatttttattatt

SEQ ID NO: 792997 - DNA, 597 bp, Homo sapiens
cctacctcagggaagcaagtagatgggactacaggcatgcaccactactcccagataattttggggtttttttttgtagaggtggggttttgccatgttgcccaggctcctgggctgatgtgatccacctgcctcagtctcccaaaagtgctaggattacaggtgtgagccactgcgcctaaccttaaaatgtatacttaagagakaaaaataactttatctatttgatccagtaaaattaccctaagctttcaggtaattaatctttaaacactttgctgatgtcaaagcccaaggtgaaggtattttcttgaatattatggtattgcctctggtggttaagagtcgtttgttgcagacagtaagaggcacggagacaaatttaattttagttttactttttagaaaaagaaaaatagaagtatttgttcaggtacagtataaatgtagaatatatatatgtgtatatattcacacaaacatacacacatgaaatatttctttgtttaaagcaatcaatgcaacgtaagactccaacactttgtgtaaacatgttcctgtactacatgaaagttcctatctcagtatttatagtat

SEQ ID NO: 792998 - DNA, 632 bp, Homo sapiens
caagccgggcacagtggctcatgccttttgagaggcccaggtgggaggattgctygatccccggagtttgagaccagcctgagcaatatagtgagaccctgtctccacaaaaaaaaatttttaatttaaaaattagctggatgtggtggcttgcacctgtaagttccagctactccagagggtagtagttgagcatggtaatatggtagtactgagatgggaggatcactggaggtcaaggcttcagtgaaccatgatcgtgccattgtactctaacctgggtgacagaacaagaccctgtctcaaaaaaaaaaaaaaaaaaattaaccaaaccattgtgatagatgaagttctgtcttcatgagtcagttgtgtagaaaagagcaaaagtgattgttaaattgtgactattacacacacatgcacacacacacaatttaataaaatagctgcttgtgatactttagatttcacattccacctattctgtgtacttagtattattgtcagtgagtaaaagacaacactgtgttttccttctccactgggttattaaagataaaaccaattgtatatttgaagtgcttggtgctatcagaatcaagatgtatgtaaattaaagtggtattatt

SEQ ID NO: 792999 - DNA, 589 bp, Homo sapiens
accataagattttccatatgcttatgatacccttctgaccctgaattggatcaaattatttaaatatggctcagataagaagcacattgcagttcagatgaaagagtatcctaatggacactttccaaacatttattattcttgtttgccttttgaaattgtgggcatagaaatagcaagtctctgaatttatgttattatttgtgaaatgatgaactatttagacattttgttatatgattatgagaatttaaaaaatacttatctgattaatctctaatttattgtatcacatgacctcagtattttacagttttcaaagttgagatataattggcactcggtaaaatgcacagatcttaaatgtaaaattcaatgaattttcacataaagtctatacastttttacatatattacccagatcaagatataaaacatttctgtcattcctgaaatttttattgtacccttttcctttcaatagctcccaccctgcaactagagtcagtcacacctttgtcagcatagattagttacctgctcttcaggtgcatatatatatatagcagcatacagtgtgcactcttt

SEQ ID NO: 793000 - DNA, 608 bp, Homo sapiens
atataaaattctaggctgacaattactttctgttagctttgaagatactattccattgtcttctgacctctattattactgataggaagctgggttttccctactttgtagtttatcttttcttttatagtattttagattttgctttttctcttttttttatagtygcactgcaatattttttggagttgatttgtacttatttatttttcttaacatactaaatacattctgatcttgcaactaatgtttctcttttgttttggaaaattatcatttaatatacctacaaaattcctaaaaatgtaatatttctgtctattcgagtcatattctgggcaaatcctttagtactgtaccattattcagctcataaattctttatctctatgcagtctagaatttagtttgtcattttaattctttatttctgaaatctttattgtctgaaatatcttttttttcattttaaaaatacctattttctgtcattttcctccctattttttactccatcatttatttttcttttaaattaatgctaatcattcatttgtctctttaagtctcctaagtatgttaaagtcttttctagactgcgaatatta

SEQ ID NO: 793001 - DNA, 508 bp, Homo sapiens
tctccatcaccactggactcaatgaaaccttcacacacagctggatgcattttttaatttcttggatttatgattgatgactttctcactattgttgattcattagggtttatgggttcacttataatatgattctgtcargctttagcctaaaatattacccttgaacttaaaaaaatgcaatggtgtaggccagcctttaaaaaaaaagtacagaacatgtactctggaagactgaattattcattccaactttttactcccctgcaattggattatacatctataccctttgccttgtagcattgcattgttcctccacaggacaatgagatagtgagaggggtttgcttccccctaaactcctctttattgaatatggactcggccaatgaaatatagtagaagtgacatgaacagaggctttatgtatgcttacatggtttggttgtccttttgtgctcctgtgattatcatgaaaaaagcatgacccagttagcttctatcc

SEQ ID NO: 793002 - DNA, 615 bp, Homo sapiens
atttatctatcccagttggaactaattgtgcttcctaaatctgaggattcatgtctgtcaccaattctggaaaattctcagctagtcttttttttttttccatatttcctttcctccattctctgtagtgcctatttctgtaactcatattaaacatacatttttcttttcattcagtgttatcccttagactttgaaaaatatattttctttctttttattgctctttcttgcattttgagtagtttcttcaaatatttcttctagttcattaagccttttctcacctatgtctaatcttccatttaacccttatattgagtttttaaartttcaatggtgatatcttcatttttagaagttctacttggtcatttttttttcctatctgtttttgtgtttcatagtgtcttgttatgttattattttttataacttattttgggtatttaataattttaaacatgtctattatatagtcttatgtgatagctcttgtatgtctacactcactctttgttatacctgctgactcttttatggtggaattgtgttcttgtgggttttgttgttttagattgtgagctcatgtttggtgggacattgtctactgga

SEQ ID NO: 793003 - DNA, 569 bp, Homo sapiens
tgcagtttatttcctaaagctgtttaactaagtgttaactactaatgaactacaggtgtgaattataggtgacatctacaatgccctcatatggttggtttggggagggtgctcaaagcctacccttattcaaacagccagargcagaaggtaatacagatttgcatattgatatactatttctaagggaggaggactcactaaaggcaacacctagagcactttttgagtgagccagaccctaaagtcaataaaccaaagtacagttgacccttgaacaacatgaatttgaactgtgcggaggatcctatttacttccattttctcccacctctgtcacccaccccgagtctgcaaaaccaatgccacctcttctacctcctctttctcctcaccctactcaatgtgaagatgaggatgaagacctttatgtatgatgacccacttccacttaataaataataaatatcttttcttccttataattttcttaataatattttctgtagctttattgtaagaatatggtacaaaatttgtggaaattggccatttatgttattggtaag

SEQ ID NO: 793004 - DNA, 590 bp, Homo sapiens
gcctcaaggcctcccgagtagttgaaattacacatgcatgctaccacactcggctaattttttgaattttttatagagatggggtctcagactggtctcaaactcctgggctcaggcgatcctcccacctcggcctcctaaataattttcttacctctaacatatctattctttatttctggaccttgcagtcctatccttcaaatattacaacttcccattcatagttctcctctctttgccctgtggttctgagttctgcaagaatttgtcagcacagacttccagcrtggtaatttgcttttcagtggtgaattcttctttatccctctaaattttttaatttttgctattatttttcatttctaggaaatgaaaaagtctattcttgcttgtgaatgtggtatcctccctttccctctgaagataatgatcttttgaaacactgggtttttttttttttctgtcttctttttctttatgtgcatgttcttctgatgagtttggtgcctcgctttcctggtgcagatttccctcagatactggtgattcttagaggtgggcttatccctgtcatttgagaatgcgtt

SEQ ID NO: 793005 - DNA, 593 bp, Homo sapiens
gggggagaccatataacacattgactaagagcagggactttggagccatataagtgcagttcagatcccaactttaatacttattagctctatgtccttgggcaagttatttcatctttctctgttctagctttgcttttttttttttaaagacggagtttcwctctgtcacccaggctggagtgcggtggcacgatcttggctcactgcaacctctgccacccagcttcaagcagttctcctgcctcagtctcccaagtagctgggattacaggcatgtgccaccccaccctgctaattttgtatttttagtagagacagggttttaccatgttggccaagctagtcttgaactcctgacctcaggtgatccacctgctttggcctcccaaagtgctgggattacaggcatgagccaacgcgcctggcctgaaccagctttttatctttaagtggggaaaatgatactgtaatatctacctcatttgccatgacaatccaatgagctgtacgtgaaaatcacatgccccagtatatgtgattgctcagtaagtacatagtgcatgctcaatgagtattagctatcatccatt

SEQ ID NO: 793006 - DNA, 629 bp, Homo sapiens
caattatgtcattgccatacttacagtcctcacagcttttgataaggaaaaatgttctacccagtttccagtggaactatgttgtgatcctgtgacactgtcgtctgcagccatggccgaaggaatctgagtcaagggcagcaaaacaaaggctgcctgcttatggtataggaggtcaatctaggggctagaagcattgcccaaatagaaatgagctggggccatcagactatcactcttggcggtgtgaactgggaaaatctggacaaatcaggctattaccaggaacagaagctgaaaggcattcaggtagagagaatgagagtctggaaggatcactatggacaaggagatgwcagttaggaatcagcagaggctatactagacaaaggtaaacaaggagaagggtcctaagagatctggaagtctggaggaaattcccatttccacatgccctcatattcttacaattaccttccttcttgttggtttttattcattatatcagaagcatctaattaaatcagggccacattttataagtagacttgatctattttgtgtataccaaatttgttgacctgagtaaagattgagaaattccttttgagttcatattgaatgtccaa

SEQ ID NO: 793007 - DNA, 574 bp, Homo sapiens
agataaatgcccaagagtgcaattgctgtgtcttagagtagttgcacctttagttttgtaagaaactgtcaaactattttccagagtggctgtacctttatacagtgtatgttttacattatacattcctaccagtaaagtgcaactgattcagtttctccacatctttgctagcatctggtgttgccactttttttttttttttttttttttwagccattctgatagatgaatagtgatgcctcattgtggttttaacttatatttcccacgtggataataatgttgactatcttttcatgtgctaacagtgtttgaagagctcatcctttcttgccgtgaccattgtgtgggaaacagtccccttcatccagttttatccttttccaaaacagagctagccccacttctaattccatcatggcatagtttgtattccttggttttgatttcctgttgaaaatctgtctccttgtcacttgagagaccttgtgaaggaaaaaaaaaatctgtctccttcttcagactgtgatctccaagtgggctggagcagttctgcaatcttggctcacta

SEQ ID NO: 793008 - DNA, 585 bp, Homo sapiens
caaaatgggtgggaaatggagtggaattcttttctgaccatcctcctgccaatctgtgatcagagcccaaggtccccagtctgcaaaggccattcctgctagtagccaccaccacttttgttatttctggagccagggtacttgcactgtcatgatcacatacaaaacttccattataccccattttcagtagctcaaaatcctttgaaaaataatgctcarggccaagtattccagttagcttcagggtaaaattatattttggaatatttaaaagaaataagtttccccaggtgatctatattgggggtgatgatgggtctcacacacacacacatacacacacacacacagacacacacagacacacacatacacatttttctccattgaaaaatagtttgaaactgcttacaatgttcaggatgtgtgactttggactggcatatggatgtgtgtgcaactgagcaaagactcagggacatcaggagaagcatgacacatttcatcattcagtggttttgtcttttaaaggaaaatagcttaaaaatggtaaagtgataatgttaagaatctgttcttaat

SEQ ID NO: 793009 - DNA, 627 bp, Homo sapiens
tttgcacatttaatttgcatacacattcttctgtatgccaaatatttataagcacagattttcacacactggcaggtttcataagcacccaataataggcttgtctgactattgcatgtcggtggtttgggaccccagtgtggagacctttcttactttctttaaaagaagaagtaaagaaaccctccactaacactttggctcattcggtcctgctaggtgccaggcactttcataagccctggagatataagatgaataagacgaggttcctctccacaaggaattcayggtctagtggaggaactacgccattaagctttaccacaatcaggtttaaaaaaaagcaaaaacataaaaacacatgaaactttcaaaattcccaggatgaggagtaggtgaaggacaataacatgttgtctcccttaggcgagttttctggatgaagaagaatatacctttcctttccactggtaccttccaggctaatatttccaaaatacctcctatagaatactaatcctttgaaacaattttcaaaaaaggtaggggaggggtcctcatggtcaaataattttataaaatctatagtctatatgccctacttgtaacttcgtagttcatatt

SEQ ID NO: 793010 - DNA, 643 bp, Homo sapiens
aagaaaacctaggcaataccattcaggacatagacatgggcaaaggcttcatgacaaaaacgccaaaaacaattgcaatagaagacaaaattgacaaatgagagctaattaaactaaagagcttctgctcagcaaaagaaactatcatcagagtgaacaggcaacctatggaatgggagaaaatttttgcaatctatccatcagaaaaaggtctaataaatatccagaatttacaaggatcttatatatttacgagaaaaaaaaaacaaccccatcaaaaagtgggcacaagatatgaacagacacttctcaaaagaagacatttgcgcagccaacaaacatgaaaaaaagctcgrcatcactgattatcagataaatgcaaattaaaaccacagtgagataccacctcacaccagtcagaatggcgattattaaaaagtcaggaaacaatagattctggtgaggttgtggagaaataggaatgcttttacactgttggtgggaatgtaaattagttcaaccattgtggaagacagtgtggcgattcctcaaggatctagaaccagaaataccatttgacccagcaatcccattactgggtatatacccaaaggaatattaatcattctaccataaagacaca

SEQ ID NO: 793011 - DNA, 643 bp, Homo sapiens
aagaaaacctaggcaataccattcaggacatagacatgggcaaaggcttcatgacaaaaacgccaaaaacaattgcaatagaagacaaaattgacaaatgagagctaattaaactaaagagcttctgctcagcaaaagaaactatcatcagagtgaacaggcaacctatggaatgggagaaaatttttgcaatctatccatcagaaaaaggtctaataaatatccagaatttacaaggatcttatatatttacgagaaaaaaaaaacaaccccatcaaaaagtgggcacaagatatgaacagacacttctcaaaagaagacatttgcgcagccaacaaacatgaaaaaaagctcgacatcactgattatcagataaatgcaaattaaaaccacagtgagataccacctcacaccagtcagaatggcrattattaaaaagtcaggaaacaatagattctggtgaggttgtggagaaataggaatgcttttacactgttggtgggaatgtaaattagttcaaccattgtggaagacagtgtggcgattcctcaaggatctagaaccagaaataccatttgacccagcaatcccattactgggtatatacccaaaggaatattaatcattctaccataaagacaca

SEQ ID NO: 793012 - DNA, 602 bp, Homo sapiens
tacaactttggggattcctgaataagcttttacctgtggtagaaacaacagatttcagaacattagtagcttctcatttatatagctttttaaaataattttatagcatattctttaaaacaatactgttaaacatatgtgttttcaaagttaactggtaatgattttatttctatcatagctcatttaagagaacagttactttagaaggatagactagacatgtatttctttttaaaaatataatttttggttatgtgaatgattcatgttcagatttcaaaaatagaaaatgtcctaaagtgcatcattttatttatataacttcttgaaattatagcagtctgcaacataaatggtacaacaaagaacaccaagctatatttttrtgtacatttaaatttgtagaattatgtaccatttttaagtatctgaactaaaaccagggtatttccaacatatagcttatatttttatatgattatttttaagagcagacttaaaatcaactctactagagttacattgacatgtgacttcacaaaaggtctaaaggcttaaacttgagggctttttccaaaatcaagggctcttgcacaggt

SEQ ID NO: 793013 - DNA, 569 bp, Homo sapiens
gaggtgggaggattgcttgaggccaggagtttgaaactagccttgataatatagtgatccgtctcttaaattttttttttttaaacttagcctggtgtaacagtgcacacctctagaatcagcttctcaggaggttaaggtgggaggatcacttgagcccaggaattcaaaactgcagtgagctatgatcacgccackgcactccagcctaggtgacagagcaggaccccatctctttttaaaaaagaaaaaaaatatgaactgttgatacaattacttggatgaatcccgagggaattatggtgagttataaaaaaagactacatattatatgattctacttatgtaacattcttgaaataacaaaattatagagatgaagaacagattagtggttgccagggggtagggagtggaggcgatggggaagggaggtggttgtgcctctaaagagttatcttaagagatgctcgtaatggaactgttctgtatgttggctattcagtgttaatgtggtcacacgagtctgcacatgtgaaataattgcctagaagtaaatacacatagac

SEQ ID NO: 793014 - DNA, 569 bp, Homo sapiens
gaggtgggaggattgcttgaggccaggagtttgaaactagccttgataatatagtgatccgtctcttaaattttttttttttaaacttagcctggtgtaacagtgcacacctctagaatcagcttctcaggaggttaaggtgggaggatcacttgagcccaggaattcaaaactgcagtgagctatgatcacgccactgcactccagcctaggtgacagagcaggaccccatctctttttaaaaaagaaaaaaaatatgaactgttgatacaattacttggatgaatcccgagggaattatggtgagttatraaaaaagactacatattatatgattctacttatgtaacattcttgaaataacaaaattatagagatgaagaacagattagtggttgccagggggtagggagtggaggcgatggggaagggaggtggttgtgcctctaaagagttatcttaagagatgctcgtaatggaactgttctgtatgttggctattcagtgttaatgtggtcacacgagtctgcacatgtgaaataattgcctagaagtaaatacacatagac

SEQ ID NO: 793015 - DNA, 615 bp, Homo sapiens
ttatcttattaattaaaacaacataatatgaaattctaacttcttaaattacattgtaacatttctctcaggccaacagggatctcttttggtggttttgttataaatatagcttccactctgttatagtaccttactatttstaatgcaattataagccaacaaaatgtaggatttgattgagaatcactgacatattgctaagcatatactaagttgttgcagtggtcccaagaagatggatggacttatcattccttatcatgtcgcttcctgcttaaaattcttcctggcatcctgttgcaatgaaaataaaatccaaactccttatcttggccaataaggccggggaacatcttggccctgcctccctttctgacctcatctgtgggtctctcactctcactctgctccaggcacactggctctatctccctgtccttatcatgagctggttctggctgtaggatctgtggactggctgttttccctgctactgggagaatactctgcaccaggtctttgcatggccacctgcttcttgtcgttcaggtctcagttcaggtatcccctctgaggagaggcccaacctgaccccccttcttcacatcacca

SEQ ID NO: 793016 - DNA, 615 bp, Homo sapiens
ttatcttattaattaaaacaacataatatgaaattctaacttcttaaattacattgtaacatttctctcaggccaacagggatctcttttggtggttttgttataaatatagcttccactctgttatagtaccttactatttgtaatgcaattataagccaacaaaatgtaggatttgattgagaatcactgacatattgctaagcatatactaagttgttgcagtggtcccaagaagatggatggacttatcattccttatcatgtcgcttcctgcttaaaattcttcctggcatcctgttgcaatgaaaataaaatccaaactccttatcttggccaataaggccggggaacatcttggccctgcctccctttctgacctcatctgtgggtctctcactctcactctgctccaggcacactggctctatctccctgtccttatcaygagctggttctggctgtaggatctgtggactggctgttttccctgctactgggagaatactctgcaccaggtctttgcatggccacctgcttcttgtcgttcaggtctcagttcaggtatcccctctgaggagaggcccaacctgaccccccttcttcacatcacca

SEQ ID NO: 793017 - DNA, 619 bp, Homo sapiens
tacacagaggtacgtacagtatacactcagggcagaagcagcagccctttctctgctggggcagtgctagactcaacagataaggtctggatttaagatatgtcagcaaagttgagcacagatgggtatccacattgaaactgcaacctggtgttttgtacaaatgagaaaaactcgaagaagagttcagcccttagaaagagctggcaggattcagataagcaaagtgatcaatatataggatggractctctgggtactggagaccacagtaccacagtagggaatatgggaatgatgcccaacttttgtgccagaaaccaacgcagtaggcattagaggtgcagaggtgtcctctggaggaggcaagttgcagcctgttgacgtcattgccgttgctagtttatttcactctgtgtgcttcagaactctggggttaggtggcacaaggccatttctatacccatcttgctgggcagcaaccagctcttaacctgaagtcctgcaatggcagctttaaatataggtaagatgtctggaaggtagaaccttaaaagcaatcaggttggaaccaggactgggcaagagctgctggttttaatggcaactatgtattttt

SEQ ID NO: 793018 - DNA, 617 bp, Homo sapiens
gagtaatttctctcctggtctaaggaagtggctatctggacagcctcctggagaaattagatttgtagagcagaaggcaggggttaatgatgctgcatcagaggtgaacacccaggggccttgtactgctaacagttaagcaggagaggcctgtggtatttgttactgtaaaggagctcttgcttcctctgtatttgtctctacttgacatttttcttttctgcccgaagagtctcataaaccttatctataaatgacacatacrttattttgaaataagatacttgagggctggattctagtctatttcctttctaattctatttttgtgtagtgttgtgaactcacttgtcactaagagttactgattgattcttccagataaaagggatactcactttagaattgggcttaattctgagactttaagtctgatttcttttttctctttttctttttttttttggtagttaatctcctggtaacagctggttttactttgtaccttaggttcaactatgctaaatgtttatcctttaatatctaagatatttctcaactttagaaaaagtttgagaaagtttagaaaaactaaagaaaggaaatggcacatggca

SEQ ID NO: 793019 - DNA, 618 bp, Homo sapiens
tttgctttatcttctgaaatcttctctgccattgagataatctattccactatggcttgtagaataattagtttgtctctttagacatcttccaaagtcgactgtggactcctttaggacagggccatgtcttaccactcactatgtttcttgcatcactgaatattgagccttggatacttttggctccaagagtagtagatgtcatcacagtcaatgcataaataaataaattagtgaaccactcacaatagatacactagctgtcagaacagaaaaaaaatagtttttcaaaaaaaggaggtatctgcaagtttcactagatcttcaggattggggtgttcttggattgaaaggaccacatgggatcacaattctgtagcagcacaacttataaaccttgattatgatacatagatttagagtattggaggaatctcatgttcaagaatamtagtccaatgataaattgtgggtgagagaaaaactttctccatccttttacatatccctttgcatgtagacttggtagtgggtgggggtgccttcagaagagtgagaagaacagaagtcttaagagtccgaagtcctagtttccttagtttcaaatctgcctcg

SEQ ID NO: 793020 - DNA, 622 bp, Homo sapiens
tgacggctctttgttcctttgatctggacattgaacacttaccagtgcagccaggaggaaggttaaatgaattatttatgcagccattaaaatcatgttttcaaaggatatttaatgatgcaatataataaatggaaaaatcaggcacaaaattgtatgtacagtaagatcccaattatgtataaaaatataaatatgcaagggaaaaaycctcaaaggaaatacatcaaaatgttactgattatctttggagagtgtaatcataggtgattatgattttcaactttatcaccttcttatagtttccatatgaacgtgttttatttttataatcagaaaaagtttttttaaaaaagatcttaacccttctgagaactacttatatccttactcttttcccctaattttccttatctagatctttacagattgctttgtcaaaatttcatttttgatctctagctcttgtggcatcttgaagctctctggaatataggaaccatatagttgccaataatctgtcaaatgcttctgctttacactgttattccttatgtaggagttcttatacttaattttttttaagtcaatgcctgcattttccaatgaagcagtttctatg

SEQ ID NO: 793021 - DNA, 513 bp, Homo sapiens
tcacagattgctttagtataatagaaaaatagtaattaagtggagaaattgaactatactttgatcaggatcaaaattaacattatcattgaggggtaagcaaacatcatgtgccttcagaatatcctgagaacaagagaacatcacctatttgggattctggccaaaaatgtataacctgaatctaatcatgaggaaacttaagacacatgctttattaaaaagcaggaagaggaagaattgtatccttccaaagtagcactaccataaacaaagacagaggaaatggtcctgattaaagaagcctaaagaggtgtggcarctaaatgcaatacttgactctagactggattctgtgcttgggagtttgagggtagggaaggtgaataccataatggccattattggatcatttgaccaactggagtatagatggagattaaagtatcctatcagtgttcagtgtcctgaagttgatatatttgcatatacacatacacgtgtgtatatata

SEQ ID NO: 793022 - DNA, 694 bp, Homo sapiens
gaatatcagtcagaatattatttgttgccgttattggaagactttccaaacttgtttaagccaaaggggaatttatggcttatataattgaaaatccagaggcagattggctttaggagcagccgggtgcagggacgtattgacttctgttttttctcatcttcaggctcacattctcctctgttaagtgcattcccaatcagcttctttcctcaggttggaaagtggctgccagcagctaccaaggtgctatccttccagattcacatcctgcagaaagagcatgagattcctggcagaagatttgagatgcactcaaagtatactggctgaagtcgggccttaagtctggatgggatgcccctttacctgctcccattgggtcccgtacttccaccttcataacactaacaatgctagagtgtggcagctctcaaagtgtcatcctccagcagcatcagtatcacctacctggacatttcacagaaatgcagattctctggctccacccacatcctctgaatcagaaactgttgtgtgtgtgtgtgtgkggggggggggttccgcaagatatctgtgctttaacaagccctctagaagattctgatgcactcccagcttgagaactctacttgctctaatgcgattgcctgtttactgttgggatcccacaccagatgtaagcaccaggagg

SEQ ID NO: 793023 - DNA, 557 bp, Homo sapiens
gaacaactttctgatagtgtgacagagtcagccgatctccaggtcagtcagctgatgtgcagtggtcatttgtcataatcatggacaccctacgtcttttgggctcccagcttatattttggtgattttttctctttgagatttgcacctttgtrcccaggttccaagccagcctgaacactaaggccagacatgtgatccagtttccaccagtgagatgggccccatgacgaagaaggtcacattcagcatccacctttccagagagaatggcaggaagtaactgggctttcaggagcaacagaagcaaaatacctagcagtagaatcctgcagccaccacacagtgtgtcatgcattgtatccactgggcaagctgtgttgctgcatccacaatgacagtgagactgacctgtgagtgatccagcatctgggtttacttcttggctgtggggtctctgagcctgattcactggctctgaattcctggaaattctgtgagtttagcattatctttaatgattttcttttatggcctaaactagatagcgtaggttc

SEQ ID NO: 793024 - DNA, 632 bp, Homo sapiens
tcataatgttttaagaaagtttaccaatttgtgttatgccacattcaaagccatcctgggcctcatgcagcctgcgggcaacaggttggacaagcttgttttagggttttctatatataaaatcatgtcattaacaaarcaatttcatttcttcctttcctattaagatgtcttttcctggacttagaaaaatagctttcaactattcatcattaagtatgatgctagctgtgggtttgccatatagggcctttattgtgctaaggtatattccttttatacctaatcagagagtgtctatcatgaaaggatattgagttttgtcaaatgctttttttgtgtttattgagataatatggttttgtcttatattctgttaatgtgatgtatcacatttattgatttatgtgtgttaaagcacccttgcatcccagggatcaatcccacttgattatggcgaatgattctttaaatatgttgctaagtttggtttgctagtatttttctgaggattgggcatcaatgttcatcaggaatattggcctatagtttgtttgtttgtttttccttatagtgtcctgatctggttttggtattggggtaatactggcctcataaaatatgtatgaaaa

SEQ ID NO: 793025 - DNA, 605 bp, Homo sapiens
taattcaaactccatgtccctcttctctgactgttcccaaatttcaaactgcatccctgatggatcctttcttgtaagaaggctgctcttcctgggtagcctgaaaatcttccccggctcattaccatagcaacgagagcacgccgctgaaatctgcagcacggaggggctggcagcgcagctcccacacactacgactcagatggcagcttcctcaggccactaaaggagcaaccctttctgagctcatagatattaaaaatagagaatggtatcccttgatcaaattactgcgtgcctccagatcactttcctctcctatgtgtgacagaagtgagtttttctttcattgcrgaggaaaatctagagatggttctgtctaatcccacccaaaatggcagtgactcagtatacaggtcgggaggaccctctattcggcaatcatcacccctctaagggcttagagcaccctgcacccggggttgtggaaagcggggagaagtgagctgtttgagaccaaacacaatttggtggctgatactggcatgatcctccttcgcagtgcatggggccttttggctgcagagggaagtaacccatactga

SEQ ID NO: 793026 - DNA, 571 bp, Homo sapiens
gatatattcttgacggtggttcaacctttcttcagaaaatttcaaaacaggaagaatttggttccctagttcattttcactcatccacctcgctttttggtgtttctactacctaccactatacattcattttaaaagttttaatctttagacactgtcagcttctagcattggggaaaagatggtgttcattttggggaagtgagaggaagagagtctgtgtatttcctagtaagtttttaaagcaatttaagcagaacacagtgaccttggtcatttaatcccaatgggttagaggcagagttgacaaactgtytaaatggtcagatggtaaatgtttaatcctcacaataccctatgggcagagttggtctgtgagtctctgtctctgtctcaacttttcagttctactttgtagccagaaagcagccataggcagtatttatggcagtgtatagtaaaactttaaaaaaaaaaaaaccaggcccggatatggcctgtgggccatagtttgctcacccctggcttagagacattcttgggacagggtggaatatttccaggccatcag

SEQ ID NO: 793027 - DNA, 571 bp, Homo sapiens
gatatattcttgacggtggttcaacctttcttcagaaaatttcaaaacaggaagaatttggttccctagttcattttcactcatccacctcgctttttggtgtttctactacctaccactatacattcattttaaaagttttaatctttagacactgtcagcttctagcattggggaaaagatggtgttcattttggggaagtgagaggaagagagtctgtgtatttcctagtaagtttttaaagcaatttaagcagaacacagtgaccttggtcatttaatcccaatgggttagaggcagagttgacaaactgtctaaatggtcagatggtaaatgtttaatcctcacaataccctatgggcagagttggtctgtgagtctctgtctctgtctcaacttttcagttytactttgtagccagaaagcagccataggcagtatttatggcagtgtatagtaaaactttaaaaaaaaaaaaaccaggcccggatatggcctgtgggccatagtttgctcacccctggcttagagacattcttgggacagggtggaatatttccaggccatcag

SEQ ID NO: 793028 - DNA, 554 bp, Homo sapiens
gtttatatatatgtgagatatttttaaaaattctatattctgagcccaaacatccagagagtctgatctagtgtatatttttaatctgtattttgttcataagctcgcaggtggttatcacgagcagccaggtgaggacggattgctctgaaacaacttccataacaaataagatcaaaaccccaagctggggtgtaaacaaaagctgatttgataagctgaacagatcattctgcatcagaacaccagcaagctgcagagacttactttcaggggggtgcacaactccccaggttgaaggtgatttcatcttcyattgcccaattgcccacactgctcccgaaccttacagagaagggggaaaggcaccaaggaaccacaggagactcagactctgccctccgctccactgaggaacatggctccctatgactcagaggcccaaacaaggttttccccagcattctgccaaccacacaaacccgtgctgtccaatgtgaccattatttggctatttacatttaagttcgataaaattaaataaaattcagttc

SEQ ID NO: 793029 - DNA, 546 bp, Homo sapiens
attaatgtattaatattttttataatgtaagcttgtaaaactatcattttatacatatttcataatttattcctattatcaaagaaatatttaagatatctatcagtttggattattgttctgtttcattttgtaaacgytggtgtaagaaactgttatattttaagtgaaaagtggatcatgttgaaaaattagtcaaaatattgttctgaattattgtttttaaaaatctggacaaagtgtgtgcatcatttaattttagaagagaggggaacctggctcttacctcatcctgcaaggtggcaaattcctcaagaatatgaccaagcttatctctctgtcgagccctgttatgtccatggatctgaataagactacagaatggctgcaatacacatataatttgtcaactgtaaatatgaaatttcctagtaccaaagaaacttaacattccaagttcacaatctggtttaagggaaaaaaatgctgtgtatgtaagaattaggtctatgtatacttttaattttacataggtgtttgttttaa

SEQ ID NO: 793030 - DNA, 612 bp, Homo sapiens
cattttctagccctttgcgtgctcaggctcaccccaccccacctctgggggtcaagttccagttgaatccacttaacacatcccctgtgattcccacagcagaacccagctccacagatgctcagcaaatactggtgaaatggaataacataaacacacagccttttgcaaattcagaatttagcacagaaaacaaatgtttaaaaaaaaatttgtgtattctaaaaagggaactgtactcatagactgttggaggagtataaactggaaatgcccttttcagaggtaaatatcctgtggcctaaagttccacttttagaaacctactctacagaaatatccagacccacaggcagaaataactgctcacaaattttgctacagaatgaagggagcccagaatgaagggaccagaaactaggaataacctacaagtctatgaacaggaaaacaactgaacacatcacrctacagtcacacggaatcgttcaatagaacaaatgacctcagacaagatctgtgacaaagaataatgtttggcaggatagaattaatgtagaaaactgtgtttgtagatacgcacagatgtgtatttttgtaagcaaatgggaa

SEQ ID NO: 793031 - DNA, 630 bp, Homo sapiens
agaacagaggcagatgttttattaaatttcttaaatgcgtgcctatgtgtgatttcaattttcatgttttgtggcagcatttttgatcaatattccttggctgctatctattttctctgttccttttctgactttttaaatatctctaattaaatatatataatatatatataaaccttatatataatatataataaactttagttaactagtagaggataaacctgcttctgcttcactcaaagataactttatatatatgtatatatggtttatatattacataatttgcatcagttatcctgggtaataactgccggagagatgggagtatatatatatgtgtgtgtatagatagrtagatagatagatagatagatagatagatagatagatagataatctttgagtgaagcaggtttatcctctactagttaattaaataaagttcatgcattggagacaagtattctaaggagaattttttttctgttttatactaaagttaaaagctttatggcatagatactttatggcacagggctgagcgtgtgtgtgagtgcgtgtgtgcttctttatggtataaaataactttcagggaagatctgtcactagtccaattacccgctt

SEQ ID NO: 793032 - DNA, 619 bp, Homo sapiens
tccatatccaggggagagggagggagaaggagaaagtcactcttccctgctcttcatttctcttgggtgagacattacttcctattaaaagaaaaaaaaattcactatcatttggaaactgaaatttctctggacattactattataatcattagatgtgactctaagtcggaggttggcaaactaaggcccagaggccaaatttggcccactgcctgttttggttaataaagtctggttggaagacagccatgcttatttggctgctttcacagcgcagagttgagtagttgcaacagagactcacaggtcccacaaagcctaaaatattcagtatctgtccttccagaagtttactgaccctgtgctatgtatacaatcaggttttaagtgtcagccataaatttggatatcaaaygaggctgaaccattcccagcctaaagactatttaaactaaaatgtggttatgttctgagacctatttgaggtatgaaaccatagagattttgctttagagagactgagttgcgttaatggaatattcatgtaatttttagagctgggcagttggcataaattccattgcaatgctccacaatttggataatccctcagctt

SEQ ID NO: 793033 - DNA, 628 bp, Homo sapiens
ggaggaagttattgggacaattggtggaatttaaaatagggattttacactaggtaatattatagtgatgtgaaattatgtgagagtgattatggcatgtaggagaatggcactgttcttacaagatatatgctgaagtatgtagaggtgaagaatcatgatatctgcacattatgtacaaatgattcagtagaaattatatgtctatatgtattagacatgtttctattttataaagttatatattatataattatatattattaaatatataaatatataattatataatatatattttataattatatattattaaatatataaatatataattatataatttatattatataattatatattatataattatatattatataatatatawtttataatatataatatataattatataatatataattttataaaatataaatatgtttaaatttatatataaattatatttatataattttataaaatataaatttttatataataaaacatataaatatatataattattacataaaatgtatatatacatatattaaataaaataattatatacatataattttatatagtataaaatacatagagaagcaattgtggtga

SEQ ID NO: 793034 - DNA, 628 bp, Homo sapiens
ggaggaagttattgggacaattggtggaatttaaaatagggattttacactaggtaatattatagtgatgtgaaattatgtgagagtgattatggcatgtaggagaatggcactgttcttacaagatatatgctgaagtatgtagaggtgaagaatcatgatatctgcacattatgtacaaatgattcagtagaaattatatgtctatatgtattagacatgtttctattttataaagttatatattatataattatatattattaaatatataaatatataattatataatatatattttataattatatattattaaatatataaatatataattatataatttatattatataattatatattatataattatatattatataatatataatttatawtatataatatataattatataatatataattttataaaatataaatatgtttaaatttatatataaattatatttatataattttataaaatataaatttttatataataaaacatataaatatatataattattacataaaatgtatatatacatatattaaataaaataattatatacatataattttatatagtataaaatacatagagaagcaattgtggtga

SEQ ID NO: 793035 - DNA, 589 bp, Homo sapiens
tagctgtttaacaatcagattcttagtaaaacattttttctttttcttaaaaaaaaaaaagactatccatattgcataccacttcagacttttctacatagacattcacccatcaatactgacagtgcaagctacgtacaacttcaagttgcatcagataactcatattaatggttgtagtagtgaaactgatctcctaagtatgttgataaagtcctaaatcttgttcaacatattaagaataaagaagagtagataaaccaattatggatgtagcaaaggaatcctggataatcttacttgagggtgaatcctgatggtgtatcaatttaraattccctgttaaacattcagacaaaattagaagattacaactttcagttctgctaccgctctgggaatatgagccctaatcatagttttcagggagcctaatttggtgtggcctcaaataatctcatcatccataaagatcccagaggaagggtatgttggacctggggtagtgagagttggaatttcatatattctttctagggcatgattttttcagcagaggtgttatgcctccaagagtgtgaaaactgat

SEQ ID NO: 793036 - DNA, 646 bp, Homo sapiens
aaccccaataagatacttcatgagaagatcagcccaatgacatataatcatcagttctccaaggtcaaaatgaaggaatgttaagtgcagccagagaaaggtcgagtcacctataaagggaagcccatcacactaacagcaggcctctcagtggaaaccctacaagccagaagagacgggcggccaatatttatttgatttttttttttttttgagatggagtttcactcttgtcacccaggctggagtacaatggcatcatctcrgctcactgcaacctcggcctccagggttcaagtggttctccttcctcacccttcccaagtccctgggattagaggcatgcgccaccatgcccggctaattttgtatttttagtaaagacagggttttgccatgttggccaggctgatctcaaactcctgacctcaggtgatccacctgccttggcctcccaaagtgctgggattacaggcatgagccactgcacccagcagatattcttaaataatttctaacctataatactgtatctggccaaactaagctttataagcaaagaagaaataaaggattttccaaacaagcaaattctgagggaattcatcaccaccagacctgccttgcaagagctcctgaaggaagc

SEQ ID NO: 793037 - DNA, 616 bp, Homo sapiens
acatttatttcctccaagttaaaaaaaaaagcgcttcattgaagttttgtatattttcaatacactgttttttacaattttttaaagagctgtgtactaggcacaaattccacttcctggggaagctcaccttctggcagagcaaatgcaggaataagaaatatacagaggtgaacaaacatgccttcggtttcgatttttacctgggtttgtgcctcttccccgggccggggaagcggtttgcgggctttcgarctggtatgggctgtaggcttcgaccttctccgaggcctgtgcaatcaaccgtgagaaaggggtttcctcctcgaaacggaactggctccagttggcatggccgcagagtttttctatttctttcaccaagtacctgccgcacagcttcctggcactgctgatgtcgctcagttcacgagaaaaccgaaccagcaggagtccaagccacagcagggacaagcggaggagccgcggcatccctgtgaccccaggctagtcctccgcgttgtgcaatggcggtcggccggaccctgctccctgtctgcgcctgcgccaggccgagcggcgcgcacaaacactgcggaattccgagcgcgtgggg

SEQ ID NO: 793038 - DNA, 657 bp, Homo sapiens
aggtatcatttgtagcacaaaagttttaattttgaagtagtctaatttgccccatttttctttgtgtcttgtgccatgtggaaatgtggttttagcaacatggatgtctttcttggttttagcaagagcagtttctcttgaaataatggaacagaagccaaactggaatgagttgagggataaatggaaggcaagaaaatggaaatggctatgtacatgctttcaaaaagaggccagataggctgtggccagaaggaaatgtgggattaagagattttacattttatacgggayggacattaatttagcaagtcctttgtgcctgtggattctacatctaatatgccacagaatgaggtccagaaaggcttcctggattagatggtacttgagccttgtcgaatgagtaactagataggagatggatgattggaagaaagattagcatatattacggcatggaaaattatttaatggtacttcagaaataaaatgttccttagaagcacagaaataaattaccttctttagaatattgtacatagagatgaatgtacagaaaagtcagaatatttctaaatggaattgttttgatcacaaaggaattattaggagttgaagctggcctaacaaaataatatacagaagtatgtttgc

SEQ ID NO: 793039 - DNA, 549 bp, Homo sapiens
tctttgtagccacacccacctcaaaaaacagaatagttctcttactcctagaaggtttccacatgcatcttcccacatattcacctccacccctaacttaagatacctatcatctaccatcacttagttttatctattaataaaggttgtataaatggaatgatactgtatgtattcttttaaaatctagattcttttagttagtataatgtttggagattcatttatgttgttacatgtgtcagttcattcctttttattgctgggtagtattgaattgtttgactgtayctcaaattttaaatgtattctgttgatggacatttgggttgctttcactttggggattttagggataaatttaccatgaacattcttatacatattttttggtggacttatgcactctttttttgtatatatatatcctagagataggattattgagtcatagtgatagctttagtatactgccaaacaattttttgtagttctatcagttcactcttctttcagtaatgcatgaaaattacagttgtctcatatccc

SEQ ID NO: 793040 - DNA, 566 bp, Homo sapiens
tatatatatcctagagataggattattgagtcatagtgatagctttagtatactgccaaacaattttttgtagttctatcagttcactcttctttcagtaatgcatgaaaattacagttgtctcatatccccatcaactcttaattttgtcagtctaaaaatgtcttagtttgtctggtggatgtgtactggtagctattgtagtttttattttcattgccctggtgagtaatgatgttcaatactttttcacttacttattgttcatctgaatatccttcttatgaagtgcctgtgacagtcttttgcacatttttcattgacttgtccctttctgatcaatctgtagagtctctatagattctaagtcttttgtaggatgtttgtaaaacgtatatagacatacgtcagagatayttctagttcagttctggaccactgcaataaagcaaattttgcaatgaagtgagtcacataaattttttggtttctcagtacatataaaagttatgtttacactataatcaagtctactaagtgtgcaacagcattatgtcttaaaaatt

SEQ ID NO: 793041 - DNA, 669 bp, Homo sapiens
attgttttagatgacacttggtcataatattatggtgcttgatatattattcaaattgcttcttctttacctttaggatggattttgccattagtaaactgaagaaagcaggtaatcagactggactgtatgtacttcgatgcagtcctaaggactttaataaatattttttgacttttgctgtcgaggttagtatgtcacacttattagtggtaacactttatttagttcatttaatttcctctccatatttatttaccatatttcctttttaatactgagaattatagctttggatatgataactagtataatrcttaatttcctcagagattctgtacaaataaacaagttataattcccagggtttatataaaaatataaaataatttataatgtctatctttttattttgcatttattttattttctgatgttttggtgttaccagtgtgttaaaaggtatttcatcaagtgtcttgatgtttctttgtttgcaaaactggaaatctttgccacatcatgtagaacaaaataaatcggaagcaaattttctgtttattaacagtggttgcagaattagaggaaacagaattagagaaaactaggtcaataacaaacaaatagaaacattaaagcacttttaactgatgattttctaatattttt

SEQ ID NO: 793042 - DNA, 669 bp, Homo sapiens
attgttttagatgacacttggtcataatattatggtgcttgatatattattcaaattgcttcttctttacctttaggatggattttgccattagtaaactgaagaaagcaggtaatcagactggactgtatgtacttcgatgcagtcctaaggactttaataaatattttttgacttttgctgtcgaggttagtatgtcacacttattagtggtaacactttatttagttcatttaatttcctctccatatttatttaccatatttcctttttaatactgagaattatagctttggatatgataactagtataatgcttaatttcctcagagattctgtacaaataaacaagttataattcccagggtttatataaaaatataaaataatttataatgtctatctttttattttgcatttattttattttctgatgttttggtgttaccagtgtgttaaaaggtatttcatcaagtgkcttgatgtttctttgtttgcaaaactggaaatctttgccacatcatgtagaacaaaataaatcggaagcaaattttctgtttattaacagtggttgcagaattagaggaaacagaattagagaaaactaggtcaataacaaacaaatagaaacattaaagcacttttaactgatgattttctaatattttt

SEQ ID NO: 793043 - DNA, 591 bp, Homo sapiens
catttaggaaaaacttaagagcgtttctaaagttcactttctacaacattttaaggagtgcttgtagaaaaaaaaggtttggttgtcagatgttggagaaatgctgtgttaaataaacagctatctttactgaatgaagggggccagcccctccacacctgtgggtaattctcgtcaggtgggaccagagactgagaaaagaaakaagacacagagacaaaagtatagagaaagaaaagtgggcccaggggaccagtgctcagcatatggaggacccgcaccaacactggtctctgagtttcctcagtatttattactgttttcactatctcagcaagaggaatgcggcaggagagcagggtgatagtggggagaaggtcagcaagaaaacatgtgaggaaaggaatctgtgtcacaaataagttcaagggaaggtactatgcctggatgtgcacataggccagatttatgcttctctccacccaaacatctcagtggagtaaagaataataaagcagcattgctgccaacatgtctcgcctcccgccacagggcagtttttctcctatctcagaaatgaacaaatgtata

SEQ ID NO: 793044 - DNA, 508 bp, Homo sapiens
atcagtcactgagtcacacctccacctaacactgaaacccctgctaggggccccgagaagacctggggacactggagctcacactcctcacacttgcaggacaactttcccacaggcttgatcttggggcatggtctccctccctttcacacccccttgccatccttgcgctcctagatgctgtygagatgcctgtgcaggctccagaccacagtggcacacacagtttcccaccccaggcctccagggccactggaacactcgcctcccgagacagagacaatggggaaactcctctggtttccacttcagaagccgcgagcagccatgagaacgtggttgctctttatgcagatctatataaatttcatttcctaaacagcctggccagtgcttaactccatccctgctcccagcaggctgctgtaccaaagccctttcctgggttcatgcactcctcccttgggcccacagctttcctgtggctgctctttccctcctttctaag

SEQ ID NO: 793045 - DNA, 600 bp, Homo sapiens
aaagggagttagaatgtgaagaaaaatccttcaccaagcaaacatccaccctaagtgaaggtgtgggaagcagctgcaggcagctttttcactccatttttccatcagctgctacccttgtgtgcccctcagcacttatgtcaagatgctgctctcagcacgtgacatgctaacactgcagacttcaggtcagtcctgagaggcaggcactgttcttacccacattttataagtgactgaactgaagcaagggagtggtgagaggcagtgaygggattcagcccaggaggccttcctttcaaccatatactgcactgcttccaggaggcgcttcacagatgaccccacctgtggtacactttctgctgttctccaatattcatgctgcctgtcccacaattagtaaaattttagccaagtacaggactgcctggctaaagaccacatttccaacaggaaggggacaggtcagagacaaaaagtgacaatccatttcccagtctgtccctcaaaagtcccaccattaggctgggcagtggtgaaagctgtcaacagccatctgggagccagggatgggaaccactatgtaggaatgacaac

SEQ ID NO: 793046 - DNA, 615 bp, Homo sapiens
gttgtgttttcagagctgctgcactctagttggtttcctccactcattttattactagctccaggctggagactgaatctatctgtaacacctcaatttctcttttgaatttttctgctttcattgattttgttagtactatcttccatgacactaagtctcttttctactatgtcaagtctggaatttaacctgtctattgagttttttattcactttattattcatcttcaagatttgtaattatttctatttcgtctctccttatttcttatattctggccagttctaattttatactttatatatttttaaatcactaggcatcttgatcatactcctgcagttttaaagtgtgtgtcagactttccttggctggtgtaagttcctgtaccaattgctcatttttagcctgcctttcttagtrtggtgtttccttgggtaatttggaacctggcctttctagcttatttcaaggtgaggatattgtgtctctgcatttctgcctttctctgccatcttgttgtcactgtcctctgtctagcagtgttttgtagcctctgctcccatcccgggtcccaggcttctgctctgcagtgatgcagagcatgtcac

SEQ ID NO: 793047 - DNA, 514 bp, Homo sapiens
aaattagggaaaaaattaaataagattagtgacagctactaaaaggataaaaaagtaagatacagacatgtgagacaaagaagatccaatgcctgcgttacaggagtccataagaaagaaaaacgagacaatggagcggacacattttaaagatctaattaaagaacgatttaaaaaaagaatctttggagacaatcaggcaaaatgatggagtcctttttttttttttttttttaaatggcgcaatctcggctcactacaacctccgcctcacagattsaagcaattctctggcctcagcctcccgagtagctgggattacaggcatgtgccaccacaccaggctaatttttatatttttagtatagacagggtttcaccatgttggccaggctggtctcgaactcctgacctcaggttatccacccacctcagcctcccaaagtgctggcattacaggcgtgagccaccatgcccggcccaagtctcttaatataaaaaagaaaaaataggc

SEQ ID NO: 793048 - DNA, 546 bp, Homo sapiens; identical to SEQ ID NO: 793029

SEQ ID NO: 793049 - DNA, 545 bp, Homo sapiens
tcccctaaggattgccctctgattctcaaagacattgagcaatttcaaattaactttcaaatctgtttgtgtaaactgtatcccttttcagaaagaacaatctaccacattcacttataaacagaaacttaaattgcaacagatgtttccctttttgaaaaggttcttgaattcattgacagacctttggctaaactgatgaattaatttgttcgggccagatttcataaatcctctaataattcttccctttacacatattgacttgatttatcagatctacagcatgtggtttaaatgttttaaccattactgctttaatcaaatamcatttatttcaaggttggatgatgactgaccattgaaagatatagctaactaataaagtccaatttgtcagttaagtaaacctgggtatctaaataataagtagaaattagtctatgtcactgaattttgaaatgtttggcagctttaatgtaactccttctctcccaggactttgtggaagataaatttctgagtattgctacaaagcttgggca

SEQ ID NO: 793050 - DNA, 573 bp, Homo sapiens
cccattcctccctatcccctaataagcaccattctactttctatctctatggatttgactattccaggtatttcatataagtagaatcatacaatatttgtcctttcatatctggcttatttcatgtagtataatgtcttcaaggtttgtctatgttgtagcatttatcagaatttcatttctttttaaggctgaatagtattccattttatgtataaactgtattttgtttatccattcatccatcratggacatttgagttgcttccacattttagctattgtgaatacaggtgctatgaacatgagtgtacaagtatctcttcaagtctctgctttcaattctttttggtatatacccaaagtggaagtgtaattgctggataacatggtaattttatgtttaattttttgaggaaccaccatgctgttttccacagcagctgtgccacttgacatttccatcaacaatgcacaagggttctgggttctaatttctccatatcctcaactaggacttgttttctgttgttgcttttatttttacaatagtcatccaacgtgtgtgaagtt

SEQ ID NO: 793051 - DNA, 573 bp, Homo sapiens
cccattcctccctatcccctaataagcaccattctactttctatctctatggatttgactattccaggtatttcatataagtagaatcatacaatatttgtcctttcatatctggcttatttcatgtagtataatgtcttcaaggtttgtctatgttgtagcatttatcagaatttcatttctttttaaggctgaatagtattccattttatgtataaactgtattttgtttatccattcatccatcgatggacatttgagttgcttccacattttagctattgtgaatacaggtgctatgaacatgagtgtacaagtatctcttcaagtctctgctttcaattctttttggtatatacccaaagtggaagtgtaattgctggataacatggtaattttatgtttaattttttgaggaaccaccatgctgtttyccacagcagctgtgccacttgacatttccatcaacaatgcacaagggttctgggttctaatttctccatatcctcaactaggacttgttttctgttgttgcttttatttttacaatagtcatccaacgtgtgtgaagtt

SEQ ID NO: 793052 - DNA, 530 bp, Homo sapiens
gttctaactatgatatgaggatgaaactggcagtgaacatgtatatttacttcagggaccaagagtaatatatataaagataggttttcatgggactctctactgtgtataccacatctgggatcaaacacatctaaaaccagacaaatgactgtttcgtttgtttggaaactaatgattagcaaacaagacmgtattcagctgaagaactattaaacaattttttaaaaagtgttttctctcaccagtccataacacaccacagttccttcatgttgttctgaaggatggttccagtgaggccaatgcggacattacatttcaaagctttcataacttctgttactctagcttttggattcttgattctatgagcttcatccacaatgacagctgaccattccaaactataaagtaagaaaaaagaagggtgaggttgagaaaacttcctttcttagtccttacaattttagacagtagctttctctatcaaagttttggaattattttttcctttttactctttgatg

SEQ ID NO: 793053 - DNA, 594 bp, Homo sapiens
ggtctacctcatcgaaaggctctaggggaggatcctcccttgcctcttccagtttctgttgcctccacatatttccgagcttgtgttcacatcactccagtctctgcctctgttttcacgtcttcttctctgcgtgtctatgtcttctcttctgttcaccctctctctaccaattagctcaggataaatgccatcagaaaaggtatggctttcaagatctagtcattgataaaaagaaatataacgtttgaaagcccttttgtataaagaaaaagcactcaacttgaagttaaaaggcataggtatgagtcttgactctaycccctgacataggatcaatcatttaacttctctgaggctctgcatctttatctgaaaagccaagaaagaagagggttgttaaaatccaccgaagatcagattctataaacaaaaactctttgttaaattaaccatgacacaaattattctattgtcttccccaaatcccacaaccccctccaacatttaaaattcatctttagatagcagattatcccttaaagtaccattttactctctgaaaaagtcctagaaatactaccctctgtcaat

SEQ ID NO: 793054 - DNA, 573 bp, Homo sapiens
acaaaacattaatgaaaaaaagtctaagaatacctagaaggagagacatacaatgttcatgatcaacatagtaaagatgtcatttatttataaattgatttatagattaatacaattccaataaaaatttccacaggatattgatagatataaacaaactggttctaaatttatattgaaaggcaaaggaactagaagaggcagaacaattttcaaaaacaagaaagctacaggaatcacactttatttttttctttttttttgagacagagttttgctcttgttgctggggctggagtgcaatggcaccgtsttggatcactgcaacctccacctcccaggttcaagtgatcctcctgcctcagcaggagccaccaccatgcccagctaatttttgtatttttaatagagatggggtttcaccatgttggccaggctggtcttgaactcctgacctcaggtgatctgtccaccctggcctcccaaagtgctgggagtaatcacactttctaattaacagaaagcaatgtgttattagcaaaggcagagataatgaagcagaatagagagtcc

SEQ ID NO: 793055 - DNA, 628 bp, Homo sapiens
atgaattagtgaagctatattccaataaaactataggcactgtaattgacttaagataattttaacatgtcacaaaatcttatttttttcccaaccattaaacataaaaaccatttttatggctgcaccaaaaccaggtggtggccagggtttggcctaaggcctataatttgttgatccttgccttataggtttctgaatatgacacgttatttacaatttctgattacattcagtacagcatgtatcaacatgagtttgggtaaaccatacacactataaatttcaaaattacatttgtatttgtgtatatttgtatacatagatgaattgtgaagttttagggaaaaaaatatcaaatctytctggaaatctccagcatgaggcttctgaggttgaactccatagcttttgattgcaaccaaacatgaaagggaaatgattatgtttgtattcatgaaatcaaattcctttttcaggtcttttgtttcttgtcagaagggttcttcatttttctttttaaagcaattgcttacacatgattttcagaagagcagcactatgtcagaagaaaagggaaaaacgttaagaaataaatgggatgaaaaaagaaaagtatgaatatgag

SEQ ID NO: 793056 - DNA, 620 bp, Homo sapiens
aactgatgcaatggttatgactgatttggtttggggtggcagaggatccatcccagcttctacctgcaaaagtaagtaggactaggtcaaaggtctaagaaacttaaaaaaaagtgtgtttaaactagctgaactaatacatccagtagataaagaattgcacataaggtatttgtataataattttttttgaattaatgaagttaaaaaatttggggagagagggctgggtagaagagagagaaactcgagaacttgggcctttaaacmctgcaagcataactggggccatttaactaaccaacgtcctagttgaacagagctcattttgagtacagaaacaatagtagcttggaaacttagttctacctaaccccatgaaaccctgtctgtctcctggtcagttgggaaagaacttgtgaggatttcagtaattaaaaaaataatccccttgaagaattagaatgtcactgttctctcgataacccccgtaagtccaagttaaggcaatagcagcctcctccttcaaaaaggtgaacaggaagcatggagttatacagcgggctgagaatcaagagactgaggttctagtcctatctgctattaattagttactaacc

SEQ ID NO: 793057 - DNA, 468 bp, Homo sapiens
acttggagctgtggctcactactgccgcccagcatcacgggagattatcatctcatatctatagccttggaaaagatcaaagtgtggtttctattgaatgcatgtagcttttgcatcactgtaaagttgaaaaattcgtaagttgagccataacttggggaccatctgtacaaatctctgcatcaataaaaaatctttgaaatgaaagtgattaaaactcaatttgagcttattaggcaaaagggtaaatttattggcacattaattatggtmaggacagggatgatggaacatcgaactagaggctctaatctgtattattctcttccttctcctcctgtgaatctttctaaacagtgacttcattttctcaagctggctgaaatgatgtgcaccatccctcttcctgggatcataaactcattgcttcatgactagagattaaatgttctcaatgtaaaagtcctg

SEQ ID NO: 793058 - DNA, 588 bp, Homo sapiens
ttgttgatgtgcttttctgtatcatgggcaagtaaattgcataagaataggccatttaggccctgctggatttcccatagccttttctgaaaagtttgcctgaatgaatagtaagtcaaacagcgggggctgcagaacccaggaaaatcacataaaggttaaggaaaatgacattttcttccttttatttatgatcttgaatcatcttttcaggaggtaaatcagtcttacaaagcatcgaagataagcaatgattaggtatttagaatttttgcaatagccatagaaaaggtacatatttacataaaatagtacagcatgtagagtctttggtgtttgcaaaaaaaatccctcatatgaaagtgtccaataccaagttgctttcccatctctctactcctcataaaatacacaaaatatattaaaatayattgtgagatttagttttatatatttcctgacctcatatttagtatgtcacattcccatattaaagttgatgattttattaccaatacagcacatacataatatttgaatttcagacttgagatcctcaataagaagcatcatgagtaagatgatgta

SEQ ID NO: 793059 - DNA, 465 bp, Homo sapiens
aataattttatatgtgaagtcattttgacattattattactttgtgattaattcaatgagacatttgaggtttatggaagagctgatttatatatattctttcaaaatctaaacatagaaaacacttataagtttaattgattattcaatcattttgggggttgataatcatttttaggttgataayagtatcatttacagataatgaaagttttgccttcttttcagacagttatatcttctattatacctcctctttttatttattgctttggctagaaaaattttaaaaagagtgttactgcttggcaatcttgccttattccatttattataatttctttaacatttctttgtaaagactactattggattttggccagatatatttcataatcattgtaaggaaacttcctctctattttattaagaatttaaaatcagggctgatattaaactttcacg

SEQ ID NO: 793060 - DNA, 442 bp, Homo sapiens
aatagcaactgaccaagagaaccttgttgtttctctcagctgcatcaaactttagacaggcccctggccttttcttagagcatttaccctagaaaaatgtgtagttacaaattctttctctatctctttgagatacagttgagccttgaacaatgcaggagatagaagtgctgacccttgtgcagtaaaaaaaatctatatataacatttgactacctcgaaacttaacwactgatagcctacattaaccagaaggcttactgataacacaaatagtcaattaacacatattttatatgatacatgtattatatactgtgtttttacaatgaggctagctagagaaaagaaatgttattaaaaaatcataaggaagagaaaatccatttacagtattgtgctgtatttatcaacactgtaaatttacatcatctgtttacga

SEQ ID NO: 793061 - DNA, 442 bp, Homo sapiens
aatagcaactgaccaagagaaccttgttgtttctctcagctgcatcaaactttagacaggcccctggccttttcttagagcatttaccctagaaaaatgtgtagttacaaattctttctctatctctttgagatacagttgagccttgaacaatgcaggagatagaagtgctgacccttgtgcagtaaaaaaaatctatatataacatttgactacctcgaaacttaactastgatagcctacattaaccagaaggcttactgataacacaaatagtcaattaacacatattttatatgatacatgtattatatactgtgtttttacaatgaggctagctagagaaaagaaatgttattaaaaaatcataaggaagagaaaatccatttacagtattgtgctgtatttatcaacactgtaaatttacatcatctgtttacga

SEQ ID NO: 793062 - DNA, 590 bp, Homo sapiens
gtgggtaatctgacctctctctctggctgcacttaacattttttccttcatttcaactttggtgaatctgacaattatgtgtcttggagttgctcttttcatggagtgtctttgtggcattctctgtatttcctgaatttgaatgttggcctgccttgctaggttggggaagttctcctggatgatatcctgcagagtgttttccaacttggttccattccccccatcactttcaggtacaccaatcagacatagatttggtcttttcacatagtcccatatttcttggaggctttgttcatttctttttattcttttttctctaaacttctcttctcacttcatttcattcatttagtcttccatcgctgataccctttcttcccrttgattgcatcagctactgaggcttgtgcattcatcatgtagttcttgtgctgtggttttcagctccatcaggtcctttaaggacttctctgcattggttattctagttagccattcgtctaattttttttcaaggtttttaacttctttgccttgggttcgaacttcctcctttagcttggagtagtttgatcttctgaagc

SEQ ID NO: 793063 - DNA, 590 bp, Homo sapiens
gtgggtaatctgacctctctctctggctgcacttaacattttttccttcatttcaactttggtgaatctgacaattatgtgtcttggagttgctcttttcatggagtgtctttgtggcattctctgtatttcctgaatttgaatgttggcctgccttgctaggttggggaagttctcctggatgatatcctgcagagtgttttccaacttggttccattccccccatcactttcaggtacaccaatcagacatagatttggtcttttcacatagtcccatatttcttggaggctttgttcatttctttttattcttttttctctaaacttctcttctcacttcatttcattcatttagtcttccatcgctgataccctttcttcccgttgaytgcatcagctactgaggcttgtgcattcatcatgtagttcttgtgctgtggttttcagctccatcaggtcctttaaggacttctctgcattggttattctagttagccattcgtctaattttttttcaaggtttttaacttctttgccttgggttcgaacttcctcctttagcttggagtagtttgatcttctgaagc

SEQ ID NO: 793064 - DNA, 641 bp, Homo sapiens
actacaatattatgtcttatctgcaatccagattatgtttactgggtgaagtctaagtaggtaagtgaagggagtcatttgaaaattaactcatttaatgcctaaggcaattttttaaaataaaaagctgcattattgtgatttaaagtataagatttccatagaaatagaatttgcaacgaatgtttttgggtgtaggttcagcacaccatgctatcacaaatgaaaatcacttacttattttagaacttcttaccttattaaaatgtgtcattattaaagtcccttgttacacattcaaatattaaaaggaagaaaataaagcacacctggctgtatataattgtccttgattctaatagcaaaatcatcaaaattgctctttagttaaagatgttcacgttatagtcactgatcttgctattaatagttgtatagcactttaatggtggcctgcttaaaaatacatgtgaataaatttcatwtttttcacaatatgaaataggggagacatgcagaacctgacactcacctcatcccaccctaaatcttggcattattacagaccatacaaagtccctttattctaagactatggtgtgacctagggctaatatatttttgtttgggtcaaaataaat

SEQ ID NO: 793065 - DNA, 679 bp, Homo sapiens
aaaaggtttcagccatattcttatataaactggtattcagattgaggtcacctttatgggagattattccttgtaagtgagcaaacaatatgcaatgaatttaagaggtataaaaaaaccagctctggaaatgattaactttactgctttcaatcaggtgtgtggatcagtatgacagaaaattgaattggtagccaattcttaagaattggatgaaacaggcagacaaaacctggagaatctgagaacagcaagttggtataggaaaacctccccaaaaatgagaaccaatgagtaattcagaacagtttccagaaaaaaaaaaaaaggagataatyagagtacctggttatatttaagagtgaaaacccaatgcagaaagctaaacttttgagtatgccaatataagttgtattagcaaaatatttggctgcaaatcacatatattccaactaacagaggcttaaacaaataagagtttcttttcctcatataaaaagtctagagataggcagttgctggaaatactttatctgttcatggaaactactctgctcactgcagcctccacctcctgagttcaagcaattctcctgcctcagtttctcaagtagctggaattatacgtgcatgtggccacacccagcttatagcatatatatatgtatatatatatata

SEQ ID NO: 793066 - DNA, 679 bp, Homo sapiens
aaaaggtttcagccatattcttatataaactggtattcagattgaggtcacctttatgggagattattccttgtaagtgagcaaacaatatgcaatgaatttaagaggtataaaaaaaccagctctggaaatgattaactttactgctttcaatcaggtgtgtggatcagtatgacagaaaattgaattggtagccaattcttaagaattggatgaaacaggcagacaaaacctggagaatctgagaacagcaagttggtataggaaaacctccccaaaaatgagaaccaatgagtaattcagaacagtttccagaaaaaaaaaaaaaggagataattagagtacctggttatatttaagagtgaaaacccaatgcagaaagctaaacttttgagtatgccaatrtaagttgtattagcaaaatatttggctgcaaatcacatatattccaactaacagaggcttaaacaaataagagtttcttttcctcatataaaaagtctagagataggcagttgctggaaatactttatctgttcatggaaactactctgctcactgcagcctccacctcctgagttcaagcaattctcctgcctcagtttctcaagtagctggaattatacgtgcatgtggccacacccagcttatagcatatatatatgtatatatatatata

SEQ ID NO: 793067 - DNA, 453 bp, Homo sapiens
gaaaacacactaaatatggatcacatcatatgactaaggataaactcaagatagtttcaaagaataaaaccaagcctctcctgatctaagggagccaccagtaatttaatggccaccaagaacaatctcaacaggtttttaaggagtcaacataattcacataatggattatggatccagcaatgtccagtataataaaaaatgccttgacctgcttagaaaattyaattaaaaggcacattcaactaaaaaaagacggaaacagacactttacaaaagaatgtgcttgaataaccaatcaacacttaaaatgtactaaacataattagtcatcagggaaatgcaaaataaaattacaatgaaataccattttaaaccagatagaatggctgaaattaaaatgactgaaaattcaaatgttggcaaggatttgaagcaaagtggatcactcat

SEQ ID NO: 793068 - DNA, 352 bp, Homo sapiens
ttctcccctctggtagcctgtttttgcattgctataatgaaataccttataacataagttataaagaaaagtggtttatttggctcgtggttctataggctgtgttctataggctataggttctattattgcattgctataatgaaataccttataacataagttakaaagaaaagtggtttatttggctcgtggttctataggaagcatggccctggcatctgctcctggtgagggcctcaggaagcttccaatcatggcagaatgtgaagggggagcaggcatgtcactcagtgagagtgggagcaagacagagggagcaagggcggggaaggtgccacagtgttttgaa

SEQ ID NO: 793069 - DNA, 605 bp, Homo sapiens
tatcatcataagtatgtactgtgtatcagaatatagactgagcatcgcaagtccaaaatctgaaatgccacaaaatctgaaacttttgagagctgacgtgacaccggtggaaaattgcacacataagttcttgacctctttttttttttttttttttgagacagagtcttgctctgtcatccaggctggagtgcagtggcgcgatctcggctcactgcaacctctgcctcccaggtataagcgattctcctgcctcagcctcctgagtagctgggattacaggcgtgcaccaaacttcctttcatgcacacaattacttaaaatgatgtataaaattrtattccagctgtgtataaggtatgtttgaaacataaatgagtttcttatttaaacttgggtcacaaccccaagatatcttacgtatatgcaaaaattctaaaatttgaaaaaacctaaaacgcttctagtcccatgtattttgggtaagggatactgaacctataattgatacagaatagttaacatcaaaatatcaggttgaaaaaaggtcacctctgagacagataaaccaatgtgacctcaggtttttttgtttttgagacaga

SEQ ID NO: 793070 - DNA, 595 bp, Homo sapiens
tatgcctgccaaaatgcctcctctctattaagacagcagcactcaatcaaggcacacattctggctgaacccagattcagcctcaaaatctaactcagcacatcaagcagttcttctcaattgatcaagctgagcatttgagataaaacctacttgctactcctggcataatcatgccaacttgttaactttctctcttcctcctgtgaccctattatctcccatttcctgtgaaarcctcaacttcttttcactttccccgactcctacaccaatacgatcaaaggtacccatatttgtcctgtcccttagttttcactgacgcctttgtcccctttgtttttaaattcctgaagcagaaccatataagagaaaaagtcccggatgaggaatccagggccttgattctaagccccactttgcacaggttgagtgccccttatccaaaatgcctgagaccaggccaggcgtggtggctcacgcctcccaaagtgctggggaggccaaggcaggcagatcatttgagatcaggagttcaacaccagcgtggtcaatgtggtgaaaccccgtctctactaaaaatagaaaaaaaatg

SEQ ID NO: 793071 - DNA, 654 bp, Homo sapiens
ttagggcgcagataatgccagattccaattttactgttcctagagtgaaactaagccttactttagggtttttcgatttctcttttttctttttttgaaacagagtctcgctctgtcatccaggttggagtgcagtggcgtgatctcggctcactgcaacctctgcctcctgggttcaagcgattctcctgcctcagcctcccaagtagctgagactacaggcgcccgcccccatgccaggctaattttttgtattttcagtagagacggggtttcactacgttggccaggytagtctcgatctcctgacctcgtaatctgcccgcctccgcctcccaaagtgctgggatgacaggcatgatccaccacgcccaaccttactagacagattttctaattaaagttattaatttaggctccctggcctaataaccacatgccctggtggctcacatgaccaccagggcatgtgaaaattccaaggactgtgtgtcagttggtatgtccacagaagactgcagattcttaatttcaattctcagttcaacccttagtaactcatttcagaaagcaaatggctgtcattttaaaactaataatttagtattaaatgactgacaattatttaactactttgaatgaatattaggaata

SEQ ID NO: 793072 - DNA, 628 bp, Homo sapiens
tgctttttcatgggaaaacaagtatatctggagcgttaagctttagggatttttctgaatccccttcctagttctctcagtgtctaaaaattatatatatatacacatatatataatttctataatcatatatatakagagagagactcaatatttaaatgatttactgctgtgttttctgatctaagtagtttactgaagactccaaatctctcttatccaaattaggtgaaaagggacataaagaatctaggaaaaagttcaactctgccaagaatctacatttttctggtcaccatctgtcaccagatggacagtttctgttttcaaccagaataaggagcattccatctaccaagaacagaaattaaaagatggctaagaagattttaggactgtaggtaattgtatatctgatttttctcaatagctcagcctttgcatgggcttacaaagtttataattcctgaaactcttccttgtgatgcaaaagtagaaaatgctgtctactctttgaaagacttcttgcaacgacctccaccttcgggttttcctaaatctgccaaactcttctctctgcctatcttagtacattccttgatttggaggcaaaggtaaaccttctcta

SEQ ID NO: 793073 - DNA, 626 bp, Homo sapiens
gagcccaggtgccactgcactccagcctgtggtgacagagcaatgccctgtcttaagacaaataaacaaaagtcaatatacaaaaattagttatgttcctatataccaatagcaaataattagaaaatgaagattttcaaatatcatttaaaatagcataaaaacttatcaaatacttagaaataaaactaacaaaaggtgtaaaacctgtacactgcaaacattgctaaaagaaatcaaacacgacataagtagagagatatattatgttcatgagttggaaatctcaatatttttatatgtcaattgtctccaaattaagttacatagtcaatccctaggtcaaaatactgtstgtgtgtgtgtgtgtgtgtgtgtgtgtgtgtgagtttgggtgtgtatgtaaattgccaagatgattctaaaatttatacggaaattcaaaaaatctaggagagccaagatagtttttaaacaaggaagtacaaagttggaggacttatacccaagttttcaagactcactataaagccataataattaaaactgtggtctggacttaagtatagacacgtcataatgaaaggacaaaaagcccagaaacagacctatacatatatgttcac

SEQ ID NO: 793074 - DNA, 626 bp, Homo sapiens
gagcccaggtgccactgcactccagcctgtggtgacagagcaatgccctgtcttaagacaaataaacaaaagtcaatatacaaaaattagttatgttcctatataccaatagcaaataattagaaaatgaagattttcaaatatcatttaaaatagcataaaaacttatcaaatacttagaaataaaactaacaaaaggtgtaaaacctgtacactgcaaacattgctaaaagaaatcaaacacgacataagtagagagatatattatgttcatgagttggaaatctcaatatttttatatgtcaattgtctccaaattaagttacatagtcaatccctaggtcaaaatactgtctgtgtgtgtgtgtgtgtgtgtgtgtgtgtgtgwgtttgggtgtgtatgtaaattgccaagatgattctaaaatttatacggaaattcaaaaaatctaggagagccaagatagtttttaaacaaggaagtacaaagttggaggacttatacccaagttttcaagactcactataaagccataataattaaaactgtggtctggacttaagtatagacacgtcataatgaaaggacaaaaagcccagaaacagacctatacatatatgttcac

SEQ ID NO: 793075 - DNA, 633 bp, Homo sapiens
ctctataagcttttcaacacacacacacacacacacacaaacacacacaatcatattgctttttaggtgcaaacatgcctccttcattggaaacttttctgagaaacaagttccatataaatgtggtcatggcatttcttaagaacatgtttacagtttgaccaaagtgagtggaaaacttacatcaaaatcatttccaagttatcaatgttacaagccatgctacaattaacatcactgaaaatgcctctaacttacaactgggggaaacaaaaaaattgcccaagattcmcctagaaatggaagtgctaagtttctgctcatggacattttcaactgtagtggttattaccaaattactcccctaaaaggttaaaccaatgtatgtacttctaaaagggagtaaagttttccatctctcctggtaaacacttggtttaattattcatttaatttttgccaatatgataaatgtaaaatggatcttattgtggttttattttatttcctggttgccaagcagtattttcacatattctcagacttgttaatccaaatacatccttttcttatttcccaacttgtttgcatgattttcttgatgatgttaggaattttccacatattctggat

SEQ ID NO: 793076 - DNA, 633 bp, Homo sapiens
ctctataagcttttcaacacacacacacacacacacacaaacacacacaatcatattgctttttaggtgcaaacatgcctccttcattggaaacttttctgagaaacaagttccatataaatgtggtcatggcatttcttaagaacatgtttacagtttgaccaaagtgagtggaaaacttacatcaaaatcatttccaagttatcaatgttacaagccatgctacaattaacatcactgaaaatgcctctaacttacaactgggggaaacaaaaaaattgcccaagattcccctagaaatggaagtgctaagtttctgctcatggacattttcaactgtagtggttaytaccaaattactcccctaaaaggttaaaccaatgtatgtacttctaaaagggagtaaagttttccatctctcctggtaaacacttggtttaattattcatttaatttttgccaatatgataaatgtaaaatggatcttattgtggttttattttatttcctggttgccaagcagtattttcacatattctcagacttgttaatccaaatacatccttttcttatttcccaacttgtttgcatgattttcttgatgatgttaggaattttccacatattctggat

SEQ ID NO: 793077 - DNA, 605 bp, Homo sapiens
tatttcttctttggtgtcccgcatacacagttttaaaatgcttgcagacgttttacctggctctttgcattaaattatctcatcagtcgtaattgatcttcacttctccgaagttttcatggcacatggcaaactgggatgtacccttcctcctcctctgtgttctatcagttatttaatctcatctccaagcaacatgttctcgtaatggctagattttggtctagaacaatagccttactgctattattcttttactcaacagtccrgattgttacgtacccatgatctggagctctggacttcttggttttgtgaaccgcaggactcttgcaagtctactgtgttagtccgttttcacactgtattataaataaatacctgagactgggtaatttataaagaaaagaggtttaattgactcagaatttcacactgttggagaagcctcaggaaacttacaattgcggaggaaggtgagagaggagcaaaggcacgtcttacatggtagcaggtgagagagagagacagcaaatgagtaaagggagaagagctgcttataagaccatcagatctcatgagaactcactcagtatcatgaaaat

SEQ ID NO: 793078 - DNA, 526 bp, Homo sapiens
tttgaatatatagtctttttagttttccttttttctgacataaagtatagcatatgtcatatattcttttccaatttcctttttttcaataaacaatggatgtttgaaatcactccctatcaagctgtaggatcttcctttcttctttttaaacagatgcatgtagtacaacactgtgtggagatatcatagtttattccatcagtttcctattattgaatattgtcaccaatattttgctgttgcagataatgctgcaatggttgaccatgtgcatatgttgttttagatttgaaaaggtgcccttcaacataaatgagtagaaatgagattgcagggtcaagkgcacatgtaattttgttagatgtgacgaaattgccttacatagtatttgtagcattttgtgttggccatcagaacatgttagtgaacttttgaatgtttataaatctgaaaggtaagaaattggtgtcttttatattcttaaatttgaagcaacggtagtaacaacagcacgttcctgtct

SEQ ID NO: 793079 - DNA, 616 bp, Homo sapiens
atgtgtcccttgctgaacacattctttccagggcaatagtgtgcttcaaaaagttgagcttttggtccattatgataccaaactatttcaaaaagccattcttgcccaaatgacagcaaatcaaggtcttctgaaactgcgtccaccctactctaccctccagatagccagctcttctgctcaaagaaaacatgcagatgttcaggggaaggaattccccaaagctgatctccatggcataatggatatgctgtggacactccatagaacctgctgctgctccttcaaacttgggtgggcaaaagtcgaaaaggctttggccttgattgaaggtttagcaggaagaagcagcctctgttctccctctcctcctgaattggaggctgctcagagcactgaaagttaaaccttcctscaggacacaaagaggaatggcttttaggacatcctcctcatcactgtggtgtagacctggtccctggagttctgtgtgatttttaaagaagtaattttgaaaagtggcagactctggggccatgaggtctacatgcagagcgtagtgggttcatgtaaattcttataaaaagaaaagaatgagggctgggtgcagtggctc

SEQ ID NO: 793080 - DNA, 554 bp, Homo sapiens
ttttcattgagaatacaacacagtattattacctgtagtcactatgctatacaatagctctttagaacttttccatccagtctacctgaaacttcatagcctttgcccaacgtctccccatttctccgccatccctacaacccagcccacaagatcattgtaatagacacagaaacgcatttggcaaagtcatgttttttatgacaaaaaagaaattaaaaaactaagaatagaaggaaaattcctcaatttgataaagtacatttacagcagacttatagtgaacattattcttattgtcagaggcatttaaaccagagtgactccatcttgtataagggctgtgtaaaatraaaaaaggctgagacctactaggctgcattcctagtaagtctggtattctaagttacaggataagataggtcagcccaagatacaggtcataaagaccttggtgataagacagcatgcagtgcagaagccggccaaatcccatcaaaaccaagatggggataaaagctacctctggtcatcctcactgctcattacatgct

SEQ ID NO: 793081 - DNA, 627 bp, Homo sapiens
tagttgggaacatattccccatagcacccatttctcgtatgtttttagacattctgtgaaaacatcccagtttaatttccaggggtaggattgttgagtcaaaggtttatgcatgcttaattgcattaaatacagacgaattatttctcaaaaacttaacttacaatcccactaatggtggttaagaacgacatttccccctcacgtttgccaccacagggtattatgtatatatttcaactctgccaactggtgaaattggcatttggggggttttgttttttgtttttgtttttaattttttctcygttttggtttgtgtgtctgcatttctctgactactgacatgaacatcttcagaaatgtattcgtcattttcaatttttctgctgtaactaccccatcactggcgtgaacgtcttcagaaatgtattcatcatttgcaatttctctgctgtaactaccccaccactgatcactgacgtgaaggtcttcagaaatgtatttgtcatttgcaatttctctgctgtaactacccctatcactgatgtgaacgtcttcagaaatgtatttgtcatttgcaatttctctgctgtaactacccttatcatgcctttttgcctatac

SEQ ID NO: 793082 - DNA, 643 bp, Homo sapiens
gtcatccaggctttgttgtttcatttctagagcacagggggagtagatttagcataattctaaagggtcctaagatttttgaaatgttcagtgagtgccggctttaacttaaagtcaccagctgtggtagctcctaataaaagggtcagcctctcctttgaaactttgaagccaggcactgatttctcctctccagctatgacagtgctagatggcattttcttccaatattaggctatttcatctacactgaaaatctgttgtttagtgtggccaccttcatcagtgatcttagctggatctggataacttgctgcagcttctacatcagcatttgctgctttaccttgcagttatatattgtggagatgacttcttttcttttttgagatggagttgcactcttgttgcccaggttggaatgcagtggcacaatctcggctcactgcaacctctgcctcccaggttcaagtgattctcctgcctcagcctcccaagtagctrggattacagccacccgccatcacgccccgctaatgtgttttttttttttatttatttatttatttatttttttattttgtatttttagtagagatggggtttcaccaagttggccggctggttttgaactcctgacctc

SEQ ID NO: 793083 - DNA, 556 bp, Homo sapiens
ttctggtatgtagcatgacaaccttgctattttttaaaacataagttgtgggcacaagcactctggagaatcttaaaatacagctacatggaaaaaagtatctttaatggcacagctccatctcccttgactgcattgctattgtgaattcaaattttctattgggtagcaggtccttggcagtgttgttaatgtcaacattttatttccatgtgtccaaccagcaggcaccctcaatttttaaagtattatttttgaggttaytcatacctgtttgttcaacatttaaattggaaaatgttttagtcattcctggtcagttgtatgttttcaagactgaggtaatcctgtatctctaaccacgtggaaacactgacttggaataagatataaaacaaactttgtcttccctagaactctccaatgcaaatttgacgacgatcaaatattgaccatgtttcctatttttatttatatttgaacaagaaatgatgacagtgttaatctctagagttaccacaaatgtgactttgatgcctgggttttttctatgggt

SEQ ID NO: 793084 - DNA, 541 bp, Homo sapiens
atatatgcacatttgattttcagccatttccaatcctttggaaaagtcaggttaaattgaatagaaaatttgacagcgcatctaacatatataatgaataacaggctatttggggtttttgtacgcttattatcattattttggtatgattaaattctattttcaaatcacaggccaaactgtacactgaggtaaatttctaattgtggaaataccacattccccgggctcctcargatgtggtgctggatgggcaaagggactcaggtatggggagcaagaaagagggggtggattagttttctaggggccggcataatgaatactagggacttggtggctttgatgatagaaattgacttcttcatcatcccgggcagtagaagcccaagatcaaggtgtcagtggggttgtttgtcctgaggccactctccttggcttgtgaatgggctcttccagagttttcacaaggtgtcttctgtgtgtgtctctgtccttacctcttcttataagagcaccagtcacactggattcgggtcca

SEQ ID NO: 793085 - DNA, 635 bp, Homo sapiens
atgttactcgaagtcatagctcccttatcactccttttggatgccatttcccactgatttctaccattagcactaatttccttgagttagtggttttccagttggatgccaatgtgcattatgagtccttcaggagcagtgaacttctgcygtgtttcccactgtttatccatagaacatctcaccgaactagggtactttggaaaatacataagaaacacccttctatgttcccacccggcacagatcttttgcctttagaataaattattggatagattttagtcaattttgcttcccaaattttttaacagaaaccttttggtatctctgtaggtgctagtaagtgaatccagtaaacaaaacagaccaagtatcaaaaatagttttttgttgaacaacttgtgattatagacacttgagctttagttgtgagtttatcttacatatattcaatataaacatactaacaaactctctctgatttttttctactagagatgggatgacttcaagaggcttcaccatcttaaaaacttgagttaacaagcttctcaattaaaatgcaattgaccttggaaagtttaatttatccttccagaaagactggtcattcacacatagagggggtgaat

SEQ ID NO: 793086 - DNA, 645 bp, Homo sapiens
aacaaaaactagaactcttcggaggaaaataaaaagaaggacatttgtcagtaaatattctctgtctcaatggacttagtcactggctaaagcttgctctccactgttgtgtttgattgcctttgttccaagattgtgaaatatatacctytgacttaaagaaacacaggcttcaagcaatgtttgatggaattttgtgtctgtgagatgaattctatttttctcattgacttcattctttaaattagagattcattccaaggaaaagagttgggttggtctggttgttgtataagacactggaattcaaagatttaggatttggttttaaacattgacaataagggttcaatttcccctgttgctagcctaataactgggtgtattatcagtggcaaaaaagtaatctttactatattataagaagggctattcaggacacattagagactaaatggaaatttcccctgaatgtaaaggaaggaattggaaggacactgaagagggtgaaaagtgtctacattagtgccagagatagggtttacctgactcagatatctcaaaactctttcccctaaaaacagtcaagcagccaaacaaatgtaccgtttggtaaaccacacacttgtcaaagtcaagcacaat

SEQ ID NO: 793087 - DNA, 645 bp, Homo sapiens
aacaaaaactagaactcttcggaggaaaataaaaagaaggacatttgtcagtaaatattctctgtctcaatggacttagtcactggctaaagcttgctctccactgttgtgtttgattgcctttgttccaagattgtgaaatatatacctttgacttaaagaaacacaggcttcaagcaatgtttgatggaattttgtgtctgtgagatgaattctatttttctcattgacttcattctttaaattagagattcattccaaggaaaagagttgggttggtctggttgttgtataagacactggaattcaaagatttaggatttggttttaaacattgacaataagggttcaatttcccctgttgctagcctaataactgggtgtattatcagtggcaaaaaagtaatctttamtatattataagaagggctattcaggacacattagagactaaatggaaatttcccctgaatgtaaaggaaggaattggaaggacactgaagagggtgaaaagtgtctacattagtgccagagatagggtttacctgactcagatatctcaaaactctttcccctaaaaacagtcaagcagccaaacaaatgtaccgtttggtaaaccacacacttgtcaaagtcaagcacaat

SEQ ID NO: 793088 - DNA, 628 bp, Homo sapiens
agagtagcttttattggactgttaccccaatcctacatctcttatacctttcactttctcgtcatgttttagattatgttcataacacagtgtgacctagggtctggcttctgtgtgttgccacaccgggtaagtccacatagatgtctagtaataattttatatagaagtgattaggaaccatacaaatcacaccctactaagcccaaatcaaatgcatgtccaactcagtttccctttagctagatttcaaaaatgctgtagttagtccactgtcactcaaccccacaccacttatgatgaaggaatatttagagtggaaagagagaattatcctaattctggttaaaatatcttaattttgaaaattttacaaaagcacagatctatgcaaacacatagctgagatttgttttggagccttgsaaggggcgcatgtaagtgaagagcctgaaacctaatctttatcatcttcacagaaaatttagtctgcccgtgttgtggagaatgtatgagtacatgctttggctatacccagtaagatggaatggacaaacagaatggctgagtttattcaaggttgggttcatgcctggctatgccaaggacaaagagtcataggtattaa

SEQ ID NO: 793089 - DNA, 645 bp, Homo sapiens
catttatcatgataaacttcctcttagtactgtctttgctgcatcccataagttttagtacgttgtgttttcatttcatctcaatatatttttaaatttttcttttgcttttctttttgacccagtgattgttcaagagtgtgttgtttccatatatttgtaaattttctcattttcttaactattattggtttctagctctattccattgtgacaggaaaagttacttcrtatgatttggatctttctaaatttgttaatatttgttttgtgacctaacatgtgattctatactcgagaatgttctgcgtgcacttgagaaaaatgtatagtagtctgctgttaaagagaaagttctatacatgcttgttaggtccatttgatttatagcattattcaagtctactgttactttattgattttctatttagatgttctattcattattgtaagtagggtattaaagtctcatgcaatcactgtattactgtcaatgtcatctttcagatctgtcaatatttattttgtatacttagatgctctgatgttgggtgcctgtatatttataatcattatatcttagtcttgaattgacccttttattattatgcaatgatgatctttgtctctagaggcagtttttg

SEQ ID NO: 793090 - DNA, 607 bp, Homo sapiens
acagtctctggagatttattttggtgttctgtttgaaacatgtttctcttttctttttatttctgcattttccttgactctctgtgttggtttctgcacattaaacaaccacatctctgtatcttgacataatagccttatgtaagagataagcttacccaatcagcccagccagaggttacaagtgcctctcaaatctttgtgtttgtccaaactgcaatctgtgttcttactgggcccccagatgatcaggttctaccaagtcccatcagtgccccaaggccgctgagatagaagccagtccctcaggaagcagctgcagaagttgaggtgttaaaagtatcacctggtttcctttctcctcagggcaaagtgggaaactggtgtttatctcccaatcactccrcactaagtcaggtagaggatctgtggcaaacacttatattcatgttcagaccatacactttcagcccattgctttggtctttgttgccaggcatctagtgaatgtcaggttcttaactctcaaagacaagaaggttagcttgaggtttgattctgcctctagggtaagccagggagagaagcaacaagaagtgcctacatg

SEQ ID NO: 793091 - DNA, 604 bp, Homo sapiens
actcttcacgataaatcttgctgcggctcgctctttgggtatgcaccacctttatgatctgtaacactcagcacgaaggtctgcagcttcactcctgaagtcagcgagaccacgaacccaccaggagggacaaacaactcyggatgcgccacctttatgaactgtaacactcaccgcaaaggtctgcagcttcactcctgaggccagcgagaccatgaaccccctggaaggaatgaacaactccagacgcgctgccttaaagagcctaacactcaccgcaaaggtctgcagcttccctcctgaagtcagcgagaccatgaacccaccagaaggaataaactctggacacatctgaacatctgatggaacaaactccagacacaccatctttaagaactgtaacactcaacgtgagggtctgtggcttcattcttgaagtcagtgagaccaagaatccaccaattccagacacatcaccttatacaaaaattactcaagatggatcaaagacttaaatctgagacgtgaaactataaaaattctagacgataacattggaaaaccccttctagacattggcttaggcaaagacttcatgaccaag

SEQ ID NO: 793092 - DNA, 604 bp, Homo sapiens
actcttcacgataaatcttgctgcggctcgctctttgggtatgcaccacctttatgatctgtaacactcagcacgaaggtctgcagcttcactcctgaagtcagcgagaccacgaacccaccaggagggacaaacaactctggatgcgccacctttatgaactgtaacactcaccgcaaaggtctgcagcttcactcctgaggccagcgagaccatgaaccccctggaaggaatgaacaactccagacgcgctgccttaaagagcytaacactcaccgcaaaggtctgcagcttccctcctgaagtcagcgagaccatgaacccaccagaaggaataaactctggacacatctgaacatctgatggaacaaactccagacacaccatctttaagaactgtaacactcaacgtgagggtctgtggcttcattcttgaagtcagtgagaccaagaatccaccaattccagacacatcaccttatacaaaaattactcaagatggatcaaagacttaaatctgagacgtgaaactataaaaattctagacgataacattggaaaaccccttctagacattggcttaggcaaagacttcatgaccaag

SEQ ID NO: 793093 - DNA, 604 bp, Homo sapiens
actcttcacgataaatcttgctgcggctcgctctttgggtatgcaccacctttatgatctgtaacactcagcacgaaggtctgcagcttcactcctgaagtcagcgagaccacgaacccaccaggagggacaaacaactctggatgcgccacctttatgaactgtaacactcaccgcaaaggtctgcagcttcactcctgaggccagcgagaccatgaaccccctggaaggaatgaacaactccagacgcgctgccttaaagagcctaacactcaccgcaaaggtctgcagcttccctcctgaagtcagcgagaccatgaacccaccagaaggaataaactcyggacacatctgaacatctgatggaacaaactccagacacaccatctttaagaactgtaacactcaacgtgagggtctgtggcttcattcttgaagtcagtgagaccaagaatccaccaattccagacacatcaccttatacaaaaattactcaagatggatcaaagacttaaatctgagacgtgaaactataaaaattctagacgataacattggaaaaccccttctagacattggcttaggcaaagacttcatgaccaag

SEQ ID NO: 793094 - DNA, 520 bp, Homo sapiens
gcactgtgagatatgcaaagatatagaacactgtgatctctccccctcaagaataaccttctgtatactttgtatgacaagaatgacttttctggttatccttctgagttgatagatacaattttcttacctttcatggtcctgatgctcccttttaagcctatctaggctttcttagcaaatagccaattcctaagagggaagaaatgtcttatgatctgacggtttttttctggcactgtggtctagtagttccaagcctggcatgttgtragcacccagtacatgttgttatagtaacacttgccaaatcagtacctactatgcatcccctctgttcttaggtcactaattgcctctgaaaaactaccactcatctttgccttcaacttcacattctggggcactcctcaagcagtgtgcttacttctattctgtgatacttctgattaaactcttgtgattccatggaattattcatttaaaaatgagattccagtaaccttaggtataacttgca

SEQ ID NO: 793095 - DNA, 691 bp, Homo sapiens
ggatccatatactgagaccaagtagcacttaaaaacttttttgggggaaaaaaaaattgagtgaagcataccagacaagtcaaagaggaataagagatgacaaaattgggcataatgaggaggaattgaggtaactgagtaatcttgcccttttgcttaaccagcatggtgcgatgaaaagaaatgagctgcaaggagccccgccttcacatgctccctgcaagragccccgccttcacatgctccctgcaaggagccccgccttcacatgctccctgcaaggagccccgccttcgcatgcttcctggtgctttcgagctatgtgatcttgagaaagccatttcatatttctgagtctccatttccagattaaaataatagtaatagctattaaaataatctgtttcatggggctgtttgtggaaaataagatctaatttgtgaaaaagttctatatcctaacgtgtaccccgatgaacaagctagcaatagcataaacactggtagtgccacacctagataacctgtaaagccatgacaatcagaaattcgtcagtagctgctgaaacctctcaaatttattgccttgggcaggaaattctatgtgggtggaacaaaagacgagatgattgggagagtggccaaatttttataaaaacagacattgtctattgaatcattttctttgaag

SEQ ID NO: 793096 - DNA, 691 bp, Homo sapiens
ggatccatatactgagaccaagtagcacttaaaaacttttttgggggaaaaaaaaattgagtgaagcataccagacaagtcaaagaggaataagagatgacaaaattgggcataatgaggaggaattgaggtaactgagtaatcttgcccttttgcttaaccagcatggtgcgatgaaaagaaatgagctgcaaggagccccgccttcacatgctccctgcaaggagccccgccttcacatgctccctgcaagragccccgccttcacatgctccctgcaaggagccccgccttcgcatgcttcctggtgctttcgagctatgtgatcttgagaaagccatttcatatttctgagtctccatttccagattaaaataatagtaatagctattaaaataatctgtttcatggggctgtttgtggaaaataagatctaatttgtgaaaaagttctatatcctaacgtgtaccccgatgaacaagctagcaatagcataaacactggtagtgccacacctagataacctgtaaagccatgacaatcagaaattcgtcagtagctgctgaaacctctcaaatttattgccttgggcaggaaattctatgtgggtggaacaaaagacgagatgattgggagagtggccaaatttttataaaaacagacattgtctattgaatcattttctttgaag

SEQ ID NO: 793097 - DNA, 543 bp, Homo sapiens
gcagtaataaattcatgtgagagtcagatgaccatctagcgctatgacattatttttttcttctgtatttgaaactttggtctaccaagaaatgtttgtccctcgtccttgtgctatggaaaatggattgacacgaaaggaaggaggaggaaatttaaggttgggaaactagaggacacaaccaacagtgatacctttatccaagcagtagtgtgagaacaataacacagttttgctgtaaatttctgttgcaagaagaatawgtgtgaacgattggtcttcttttacatttaggatcttgtttctagcctgtggtcgcaggcataacctggctttaaattatgctctgctttgcagttactctctcagttcagtgtttaaaaagtctttgcttattcgtgatggcttgctctcacttttgtttcaccccacagacaagaaactccaattctaatgaacaaaaccatggttttagaacctgagctctgttgcaacttgacaagaggagaattttctgaatttcctctagagttggaataaatg

SEQ ID NO: 793098 - DNA, 566 bp, Homo sapiens
ttaaaaagaaaaaaaaaactataggtactatttgaaccatacatttaaactccaaatcaacattattgcttcagcaattgttcttttatgaaaaaggatacattgatttttatttcattagtagggtatagctttttaatagataaggtaaataaataggcaatttaaatcaaggtatccattaaataaattgggtaaattaggattyactttagatttgtggttctcaaatattttggtcacaacaccattttacaactcttaaaaatcattgaggactctaaagagctttcatttctgtggattatatttatcagcagttatgatatcagaaataaaactgaattttaaaaatatttgattgattcaaaataacaataagccaattgcatgttgacataattaacatatttatgacaaatgtgttttctaaaacaaaaacatttagtgataagcgtggcattgttttacatctttgcacgtctctttactgtcagctggattctcatgtttgtttttgctttcaatctgttgcaatatgctatttgggttgaaaaaattcaaac

SEQ ID NO: 793099 - DNA, 566 bp, Homo sapiens
ttaaaaagaaaaaaaaaactataggtactatttgaaccatacatttaaactccaaatcaacattattgcttcagcaattgttcttttatgaaaaaggatacattgatttttatttcattagtagggtatagctttttaatagataaggtaaataaataggcaatttaaatcaaggtatccattaaataaattgggtaaattaggatttactttagatttgtggttctcaaayattttggtcacaacaccattttacaactcttaaaaatcattgaggactctaaagagctttcatttctgtggattatatttatcagcagttatgatatcagaaataaaactgaattttaaaaatatttgattgattcaaaataacaataagccaattgcatgttgacataattaacatatttatgacaaatgtgttttctaaaacaaaaacatttagtgataagcgtggcattgttttacatctttgcacgtctctttactgtcagctggattctcatgtttgtttttgctttcaatctgttgcaatatgctatttgggttgaaaaaattcaaac

SEQ ID NO: 793100 - DNA, 454 bp, Homo sapiens
aatgaaattctggcttgaaaattatttaagaacattgaatattggcccccagcctcttctggcttgtagggtttctgccgagagatctgttagtctgatgggtttccctttgtgggtaagctgacctttctctcttgctgcctttaacattttttttgttaatttcaaccttgttgaatctgacaattatgtgtcttggggttgctcttctygagtagtatctttgtggtgttctctgtatttcctgaatttgaatgttgccctgtcttgctaggttggggaaattctcctggataatatcctgaagagtgttttccaacttggttccattctccccctcacttcaggtacaccaatcaaacatacgtttggtcttttcacatagtcccatatttcttggagactttgttcattccttttcattcttttttctctaatcttgttttcaaacttt

SEQ ID NO: 793101 - DNA, 639 bp, Homo sapiens
cctgcctcagcttcccaaatagctaggaccacaggcacatgccaccacacctggctaagtttaaacagttttttttgttgttgttgtttttgggttttttttttttgtagaaactaggtctcactgtgttgcccaggctggtctcaaactcctgttctcaaacaatcctcccaccttggcctcccaagatgctagggttacaggtgtgagctaccatgcttggataattagttcaatttaaaaaaaaatgccaaattacattccttatctataggaaaagctaatccttagtaaatatagatttacctatacrtttttgttaaatcttacaatttttttcagtgtttttctagcaagtaagtgtatctttatatattaaattgttcctttaggggagaaatatattcttgaacttgaaacatgttaataatatgtttaaaataataaactttaaaaagctgtttttcttttccctagactggatgttgaatttgttctctcagcacctatttctgaatggaatggcaaacagggacatatttcaccagctcttctttctgaatttttgaaaagaaatttggacaaatccaaagttctcgtctgcatttgtggaccagtgccatttacagaacaaggagt

SEQ ID NO: 793102 - DNA, 592 bp, Homo sapiens
ctttgatattaatgtttaattcatagagaaactctgaactaatgttctctctcaaaattggcccttacaatctcacacacccaccacttctgtgatagtccctgggcctaggggagttgaatagttttcatttatggcactatgtctcacgaatgtactttatttgattgtcatcttctcccaaatcygaagatgataatttaactgctgtcactgtttaagatttagcaggacttggtgtcctttttagatctaggagtcaaagccctataacttaacagcatgaggactttaaaagcaatacagaaagttatatggatgtaataaacttattttttaatctcaattttctaggcaaataaaaagtttactaacaatgacataggaattatttcaataaaacataaaatctgttaggctggttaccaaaaggaaaaaaaaaaaagaacttctgcagtgtgattgcttttcattatggggagtctgtttggataatctgcaagtcaaaatgaatgaagatagtgcttgaattagttagacagaggaagagtgtatcctgggtcataagtgaaagtttttgatttcataaagt

SEQ ID NO: 793103 - DNA, 543 bp, Homo sapiens
aatatatatataagttcttttaggcttctgcatgcctttggtttgaaagccagattttcctgacttttgaagtgaagcacctctctagattctggcaattacaaaatctggatataccattttgcaccaaaagtgtaaagaataagtgtacaggtctgagctttcagcctcagattttctctcctctattaagattgactctgaccttagctagtgtaacactaattattacaggatttaamttattgttttacttctcccttcatcccccagtggtatttcccattttgaaagatgattttgttaattaatcttaaatggtgaaacatttgtgtgtgaagagaaatttgaaaggggcgatattgagaactcttgcacattcccagccccatttctggaatcagtactactccactcccaaacatagttcatcagagaattacacagaatcagcttagaaacactcatcactgaacttttcaaaactttctcccaaactttcacctaaaactaaagatctctcatacattatttattcatctg

SEQ ID NO: 793104 - DNA, 617 bp, Homo sapiens
tttcctaaatgaaatatcaaggtagatatatgagaacctctccataactcttgaacccactggttacttcaagagtatgagggttcatcatgcaaaggaatatgaagaaatgttttaataaacaaaatgaaaaataatatgagggttgagcaaggaggccttgttgaatagatttacttccttcatcccaaagctagtgatggtgtatctgaaattggtgggttcttggtctcactgacttcaagaatgaagccacggacccttgcggtgagtgttaacagttcttaaagatggtgtgttcygagtttgctccttctgatgttcggacgtgtttggagtttcttccttctggtgggtttgtggtctcgctggcttcaggagtgaagctgcagaccttcacggtgagtgttacagctcataaaggcagtgcagacccaaagagtgagcagcagcaagatttattgcaaagagggaaagaccaaagcttccacagtgtggaaggggacctgagcgccttaccactgctggctccagtagcctgcttttattcctttatctgaccccacccacatcctgctgattggtctactttacagagaactgattggtctgtttca

SEQ ID NO: 793105 - DNA, 528 bp, Homo sapiens
tcccagtttttcccctggaaaatatattcccaaaggttccttgcactctggtcttcagctagctttggtcaaagggaagcactaacaggagactggagagcaaggggataaaaaatatccagagtatttcttttcccttctttttcaggcagtgcatcctacaaatggctgcatctcctctagataagccacctgtcttctgtmtgtaagccactatgtaaacctaccactccccacccaagggcagctcttgggctctggtgacactctctcactttctccctcaagcactaaagttttagcaatttcctgtttgtttctaatctctatgctgcttcttccaactcctttattactatttctttacatcacaagtcttcttttgagtcacctactgtggattctttttccatataggaccttgtgtaacacagtacaatgaagttggaggaaaggagtaaaggatgatgtccaggttttgagccttggcaaccccatggtcagtgatgacattgactgaattggtaa

SEQ ID NO: 793106 - DNA, 630 bp, Homo sapiens
tgtttaaataatgcacacatttaattcttaacatctcttccaaaagtacagctgaagcagccttagatggaatggaagtgactagtacttcatttatgtgcaatgcacctccaacccatatgtatctaactaggtttcaggctcagcttccaatctaggtcatgaaggtatgcacagcctccctaactttccccatcatcccatgggtccactttgttaccattagtcacctgtcatgygggttctattgatgtgatctgtcctcctcagctttataggttacattttttcctataatcgacttaaatttaggggaaaggaaaagtcagaggaagcaggtatattgaaagcttgcttatctttacagcagctgctgaaacagctgaaatagaaaacactagcttctttctcaagagcttttatttaaaataataataataatatcactgtacatataaaatagtgaaagcattagaaatatgatactcttaagacctgatctacattttcctagttcaatgaaaagagaatgggattatcatatggaagagagccaaaggcacagataatacaaaataacaaatttaagttaccaaacatagacactttcacttgtaatacattttgggg

SEQ ID NO: 793107 - DNA, 643 bp, Homo sapiens
cttattcccatttagggatacgggtttccaggattgagggtggggtaagggaactgccctcttctacccagtatctccctgcttcctgtttgtatcagaggtaagtatgagttcacagtcacacaaaaactctgtgacagaggcaggcatcaaatgcactrtttccattacacctcaaatggtggtctccagggagggagacccagacggggaggtgagcaggcaaggcttctgtggctgaacactctacctcgaggggactgtaactcagtcagctcagtggccaccagctaaaaggggcttgtttcttccagtatgaagtctgcttctccagcaaacacctgctttgcactggagcagagcagaccttaggttcttgtccctatttgccaccttctgatctgctcctgtctgaaccccctgagcccctcctagactacgttgcctggaccagttcccctggtcaagggtgatcatggaatagaaaaggatcagaagctttgactttaaattcacagccatttgctacccgtaattttttttttcctggacccatcacaaaaatttcctgtggtttcagccttcttatccacctatccagattgtgttgagggttaaatgtgataatgtagagagaaatgct

SEQ ID NO: 793108 - DNA, 606 bp, Homo sapiens
caaaggcagttaaaaaaaattttttttaaataagaattactgcttaactgcagtaaatagcattctattatgttgaaaaaaagggcacgtagatgtcaaattctccagtggagttttagttattctctgagagcctaattaatacttttaaattattatttaataaatggaagtttaaaaaataaatataaaaaggtctttgaagattacatattatcaacagctgcttgagttgatggtataatagatgactaattaaataaaaccatgtwcctctctaataaaaaaagttattattattattatttgagatggtctcactcgttcacctgggctgaagtgcagtggtacaatctcagcccactgcgatctccatctcccaggttcaagcaattctcctgcctcagcctcccaagtagctgggattacaggtgtgtgccaccacgcctggctaatttttttgtatttttagaagagatgggatttcaccatgttggtcaggctggtctcgaactcctcacctcacgtgatctgcccgactcagccttgcaaagtgctgggattacaggcataagccagcgcgcccagccaggagaagttatttca

SEQ ID NO: 793109 - DNA, 611 bp, Homo sapiens
gaagttgaaaatcaaggtgtaagcagagacatgctgtaaaagcctagatctaattcttcctcgcctcttcctgaattctggggatgatcccaatctttggcgttcctccaatatcagcttctgttgtcctgtgttctcccgtgcattcccatggcattctcttatttgtgtgtctgtgtccaaatttccttctttttattagaacaccaatcatataggattagagcccaccccaatgacctcattataacttgattatattgcaaagactctatttccaaataaggtcacatttgtgggtcccrgaaattcagacttcagcatatcttcctgggggacgcaattccacctgtaaccctggatgaatacacctgtgtaaacaccaccaagataaagaaatggagcatttccaacatttatcaggctccctcacactccttctcagtcagcacttcctacaggttgcctttattctgaacaccatggcctacttcggtatctacagagcagatttatgctgaagcaatagaaaataagataagaagtaattagagcagccatatcgtcaaagataacctacactttaatggctggactttgagccatttcta

SEQ ID NO: 793110 - DNA, 608 bp, Homo sapiens
acaggtcttctgttatctttgtatagtttctgcacacatgctcagtttgtctataaatgtgacaaagcttgttgccacaacaaatggtgatatactacaattatatcttaaagctacctttgtctattaacttttggatatctggaggtttttgctaatttcatattaattctaagatgagattcccaggctttctacttggaccattatatcatctgcaataataacaatagttttttctttcccaatagttgtaawtcatttctagtttgggtcctactgcattaaaaaaaattgtatcaatattctgatgacaagccctgaaaacattaaagcatgtattaaaaacaatatctttcacaagcaggcttataaaggatatgtaaagctctcaagctttagagaaaaatctgaaattcatcaattttgccactttctagaatgtttcatctaatttagggctaaagaacacctcgaagtgtttaatagatccggtgtgacaatatctggagaaggcactcaatattgggggcatggggtcccttttccctcagctgtgcccatcacattcaaaccaacagcaggtgatagctcctattaacctatgc

SEQ ID NO: 793111 - DNA, 536 bp, Homo sapiens
taaagggctccaggccagtctctgaggtgttcgcctcaccttcatgaaaaagatcaacagcttaggtgtcacatcagccaaggtctccagttctggctttttgcctcctgtgtgagtgactgaatatctctttcttacattttttttttgagatggggtcttgctatgttgcccaggctgatctygaactcctggcctcaagcgatcctcctgcctcagcctcccacagtgctgggattacaaatgtgagccacaacacccaggcgagactgaatatctctaaacttcaatttggaaaagttaaattaaatgatgggggagacttctggtttccagtcaggtgcgtaggaagcttggaagttgtctcttctgtccacccagcaagctgaaaactaacaattcttcttatatccatcagagaactgaggccatagagcaaacagctgtcccccaaactgaagagactgacatgcagatagagagaatcacaacttaccagagcagaagcccaggagcagtaacttccaaaggaacga

SEQ ID NO: 793112 - DNA, 599 bp, Homo sapiens
atcctatgtttacatttatgatgaagaaaaaaatccctcaaaacctgccaatttaaatataaatcagatgcagtcacacataataaatgtgctaagataaataactttgtatatttgtaatttttaaaaattttaatttccaattttgccaagttcagaaatacatacaacttaaagcaaatagggtacaatgttaacaccaggtgagggttacatggtgttcactctactgttttacttttgctgtagatttgcaatttttcaaaataaaaaatgaaaaaatgtttataagacaaagtctatgtcacwgagtatcactagttttagagttaaaaggtgccctgtcttataggtaaaaacttttctgctaagagaagcatgggagaaatatttgacatgcattaaaggacaaaactggtttagaagccaataaagagagaacacactgcatgtaccaccctcatcatctcgagttttcaaaacaagcatgttcctcttgctccaacagactcccatgctaatcatgcaaaaacacagcaatccaccaacttccacatttacaaatgatgataaaagtttaaaaacatatctctcaataa

SEQ ID NO: 793113 - DNA, 537 bp, Homo sapiens
ctctagtacccacatagctctgaattttaagtttgcatcacctagacatgattgcttgggcagatggaggcacaccagtaatcttcccatcaggttccatgcctgccctccacacctttctgtatccctcttatttcacaaargctgaggagggcagcagtggagattctgccaaccctatggcaacatggagaaatgaggaaggcttccttccttctactgcttggaggtcctaattgttcagcaaatcgattctaagcccaaaacttaacaagacatatgaaatcttaaaatataaaccaagcttttcccccttttctgtctttctagtgattgaagctttcattacatcattcagtaataagcatttaaagaaagggagaaatatttcgaggttgaagactaggtaatgtggccatgagttggcacagatttctatagtattctttaatgaatggtagatgaattgtagtagatcagaatgcaagtatactttccttacctaaactcctaatttataggtaataatcctgggag

SEQ ID NO: 793114 - DNA, 625 bp, Homo sapiens
ttacagtagattgtatatattagttctcttagtcagtgccagttcgcttctcttaattgaatgattcatccaagttgaaaaatgtcttaagagaatttcttctatctcataattgttgcaagtgtggatattgcttatctagggattttacaaataattcaagttattttttgttgaaatagcagcaaatatagcaatggggaactcaagagacttgaaatgcattattgaccatgttactagtaactaattgtatggctttgggcaagtaacttatctgtattttagttaataaaatacaggatttgactacaaattctagtcattagatgatttaatatttgataaatatcttaggatccaataaataattgcttagtcttttaatttctgtttatcttacacaaatgcagtgttttagagaccctgaaagrttttaaaatttagacaaaatccgcctcatttctgtatgtgcaaagtgttcctcggaattactgaattaaaatctctggaatattttataagaatacctcaccagtgattctgatacgcaccagaggttaagaaccactggcttagagtctgcctgagagactgaaggtctggacgaagttgggaacgttaa

SEQ ID NO: 793115 - DNA, 625 bp, Homo sapiens
ttacagtagattgtatatattagttctcttagtcagtgccagttcgcttctcttaattgaatgattcatccaagttgaaaaatgtcttaagagaatttcttctatctcataattgttgcaagtgtggatattgcttatctagggattttacaaataattcaagttattttttgttgaaatagcagcaaatatagcaatggggaactcaagagacttgaaatgcattattgaccatgttactagtaactaattgtatggctttgggcaagtaacttatctgtattttagttaataaaatacaggatttgactacaaattctagtcattagatgatttaatatttgataaatatcttaggatccaataaataattgcttagtcttttaatttctgtttatcttacacaaatgcagtgttttagagaccctgaaagattttaaaatttagacaaaatcygcctcatttctgtatgtgcaaagtgttcctcggaattactgaattaaaatctctggaatattttataagaatacctcaccagtgattctgatacgcaccagaggttaagaaccactggcttagagtctgcctgagagactgaaggtctggacgaagttgggaacgttaa

SEQ ID NO: 793116 - DNA, 554 bp, Homo sapiens
tcccactctctcctcaattgcatgagtgaaaaatacaatggtctcagcttgattccaactatactttatttcctgaactgacactttggttttctttaggatagagctgtttagagtcaattgtagcaataaaaaataatgacaacgtcatgaatattcttactgaaaagctgctgcaccttgtttaggcactgaatatactgtcagtctgttcaaaaatagaggatcacaacagctgactgatgtagcaagaaatgtctatcttaacaatcagaaaaggtggtcattttccaaagtgaattcatyatgtggatagtaaaaaaaaaaaaaaaaaaaaaaaaaaaaaattctatgaccaaataagtacacggtgtagagttaaataaaagttaaatgggttacttttccacatttctgagcttttaatactctgacatgtattatgaatttaaaataatttcttattgaatttttcttataaagtgcaacagtttgtagggctagtcttccacagagctttttgaatcttcggaataggccacttaaaagtgtct

SEQ ID NO: 793117 - DNA, 605 bp, Homo sapiens
gtgcaaatctattaaaatgctctgaaaagcccaagggggatcagcttttgaagtaattagtaattctattataataatttgtgcaaattaaaaaatatatatttgatgcaaaaagataaccacagaactgtttaaaagatggatttattatttatttatttatttattttttttttgagacggcgtctcgctctgtcgcccaggcaggagtgcaatggcatgatctcggctcacagcaacctccacctcctgggttcaagcaataaaagayagaaatatttaatttcttcaaatctacacctgagaggttaacaatttcatgaacactttgaacactttcaaagaaaatacaaacatgtaatggcacaggtgaggaaaagtaaatacttaatacatagatctttttgaatgctctctgaaccttgctttttacatttcaagatcagcacatactctttatttacagatactatataatagagatatataccctgattaatttaaccaatcccctactgatgaacattccaaggttttgctatttcaaacagtgcttacaatagataccttatacagtaaagcaaaaatgtaaatttaaagataga

SEQ ID NO: 793118 - DNA, 615 bp, Homo sapiens
ccacacataacctatcatggcaagtaatttttagtgttgcagtagaaatgggcaagaaaaaaagttttgctgtttaggtattttttagacttaactagtcatgggcacaaactcctaagtctagactgaatatgacttattaattctccagaaataatagaggtagaggcttgcctatgtctttgatcccagggatgtcttcttgaattgcctccccgggtatcttttaaaatcccacctacccttactgatgcagctcaactgctgccacttctgtgtggctcagcattcccatcccaggaacaaccttctccacgactacatgcaacattagragtctccccacttcctcctcttttaatgcactttgtgtacaacactttactgtagttacttacagatgtaatcttctagagcatgacaggctccaggagagcagaaaggcgtatgtcttccacacatttatgtctgcagaaatagactgttttcttgtatttataaggttgctataaggtatttatttgaaaaaacacctatgagtgattttgaggctgagtattaacgtagtcttcacccatatctttagttacttaaaccaaaagtaatgttaatact

SEQ ID NO: 793119 - DNA, 572 bp, Homo sapiens; identical to SEQ ID NO: 747460

SEQ ID NO: 793120 - DNA, 623 bp, Homo sapiens
gacaggtgtgggtgggtccttttattcaatgcactgtctcctgcaggctagtgaggcccgaaatcagaaaaggagcagtttgctccaaaggttgctgtctttacccttgtgagctgggcatcatcagccacaatctctgacctttgtgctttttccagacaagtctcagaaaccaggtctcatggctctcaagttccaggagggatagccagtgtctctcagtggtgtctggaagcccccttgcttgatgggaagggtgaatgcaagcgccctcctcatcctgatggagagtgcatagtggcacagtgacagcttctgaagaattatgctttactatgccagcctttttcatcatttagaccctgcaagtgggtgactggccgawcctgactatcttagtttcaaattcacaaaccttagctggttgtccacagttgatgtaactccttgctttagtgtttggcattgatttcaatgttctagactgtgatgactactgtggtaccactagccacatgtggcttttcaaaacttaacatgcagttagtcctaactgagctgtgctgtcatttagaaactaccaattgtgataatttggtaagataaaaatgtaaaaaatatca

SEQ ID NO: 793121 - DNA, 406 bp, Homo sapiens
atggctaatgttacattttattttaccacagttttgaaaattaatagtgtactataccaaaatcactgattgacactttacctgggtgaactgtttggtatgtgaattatatctcaacaaagctgttaaaaattatttttgcactttgggaggccraggcgggtggatcatgaggtcaggagatcgagaccatcctggctaacaaggtgaaaccccgtctctactaaaaatacaaaaaattagccgggcgcggtggcgggcgcctgtaatcccagctactcgggaggctgaggcaggagaatggcgtgaacccaggaggcggagcttgcagtgagccgagatagcgccactgtagtccggcctgggcgaaggagtgagactccgtctcaaaaaaaaaaaaaaaaat

SEQ ID NO: 793122 - DNA, 406 bp, Homo sapiens
atggctaatgttacattttattttaccacagttttgaaaattaatagtgtactataccaaaatcactgattgacactttacctgggtgaactgtttggtatgtgaattatatctcaacaaagctgttaaaaattatttttgcactttgggaggccaaggcgggtggatcatgaggtcaggagatcgagaccatcctggctaacaaggtgaaaccccgtctctactaaaaatacaaaaaattagccgggcgcggtggcgggcgcctgtartcccagctactcgggaggctgaggcaggagaatggcgtgaacccaggaggcggagcttgcagtgagccgagatagcgccactgtagtccggcctgggcgaaggagtgagactccgtctcaaaaaaaaaaaaaaaaat

SEQ ID NO: 793123 - DNA, 540 bp, Homo sapiens
tcggctgtccaagctgctgttcctctctccgcagtaagagggtgtttctctccctgttcaagaggagcaccaacacttgaggtttggattccatcttttcctgccccttctgcaacattatcttctctgcccagtaktaacagcctctgccatagctaaagacagaccagaaagaactctcctgagaactcataccccttcataggtacatcccctcccctctccttccctttagggaccttcaaaagcagctattttgttctcctctttcactttgatcctttatttctagctctgtaatatactgtttttgtctccaccattccactacaaactagaagtttagactccagaagttcttcaagagctttttatgttgattttatatattttttctattaatcaatctagacacacacacacacacactttttagccatttgcattcttgacgtcttatgttgattgccaatgctgatgcctctcaaatcgaaaactcataaccatacttttgtttcaagccctaggccagtatccaat

SEQ ID NO: 793124 - DNA, 542 bp, Homo sapiens
tacaatctgcaattgctaactaaactgtctatagggacaatccatcatcagctgtcacaaagactgagcaggcttaggaggtgggagcagctaacagggcaatgatggagggcctttgaaaattaaataaacacgaagaaaaatttaaacagtcagctaaaataactcttgttgttcttaaatatttagagcttccagttttataactttttccacaaggttagaagaagaacactcaggatttaggaatctgtctaataataagtgtcttcaatgacttagggaggatgggcaggtaraaagtgatttgttttgagaccagcatcctaaactaggttcattcacaaccattgtctgagaggctgccattcacacagaatagatgccagggaggagcagctcctggaaactgcatccccttccttccatctgctcaccaagtcctgaccacattatggggaccaacagaatttaccctgccttgttcccttcaaatgtgatttgggaaatcaggaaatttttatctggagccagtaagagac

SEQ ID NO: 793125 - DNA, 632 bp, Homo sapiens
ttctgtttcaatgtctgctgtgccttctcacatccctgacttcaccacatggaggaatggcagggtacatatggttctctgcttgatttcctttctctctctttctctcgctctcacttcaaggagatctgaagggatagattctatcatgtccttctctctccagccctggataatgctaaacttaatgtcttattgtccaggcctggatcttagcagaaacagaaaaaaaaatagaaaatccttgacttataaaacaactgttttgctgcagattaaaaaatcatgttctagatgtcagaatataatatggaatctttcttcatattcatagastagcaaacctaaatatccctgaagcaattgaatgccaccaacatagtaagaagaaggtcagtataaacaaatgcaaaagagaaaaggacatcaatatatttcaacaatattgtccccatttcattatagcctctctacatttttttttgaaaaacaagactaaggtcagaaaaaatttcaatcagtcttgttaattctctttttgtttttttccgtccattctttgagctttctctaagttcaattttgaaataacatgtaccagtcacaatgctatcatctttaaggaagacaaa

SEQ ID NO: 793126 - DNA, 625 bp, Homo sapiens
ccactgctggctagggcagcctgcttttattctcttatctggccccacccacatcctgctgtttagtagagcccagtggtctgttttgacagggcactgattggtgcatttacaatccctgagctagacacaaaggttctccacctcctcaccagattagctagatgcagagtgtggaaacaaaggttctccaagtccccatcagagtagctagatacagagtgtggattggtgcattcacaaaccctgagctagacacagggtgctgattggtgtgtttacaaaccttgagctagatacagagtgccgattggtttatttacactcccttagctagasgtaaaggttctctacgtccccaccaatctcagaagcccagctggcttcacccagtggatcccgcaccggggctgcaggtggagctgtctgccagtcccgcgacttgcgcccgcactcctcagcccttgggtggtcgatgggagtgggcgccttggagcagggggtggcgctcgtcagggaggcttgggccgcacaggagcccacggaggggcgggggggaggaggctcagacatggccggctgcaggtccggagccctgccccgcgggaaggtggctaaggcctgg

SEQ ID NO: 793127 - DNA, 564 bp, Homo sapiens
tcttccattatgtaggttatctgtttactctgttgatagtttcttctgctgtggagaatttctttagtttgttttgacactttgaatgtatcacatactgccttctggcctctaaagtttcttatgagaaatctgctgacaatcttaggaagaatcccttgtacatgctcatttgcttctctcttgctgctttcaagattccctcttcgttaaacacagttttgacagtccatcataatgtgtttcattgcacatctttgagttcattgggctagttgggagtttatatttatgttttwaatcaaatttagaaagttttcagccattatttcttcaagtgttctctcttcccttttctctctcttcttcttttggaacacctaccatgcacatattggtctatttaatggtttcccacatgtcccttaggcactgttcatttctcttcaatcttttttttctttcagactcaataattcccattgtcctatgttcaagctcacagattatttcttctgctagttaaatattcctttgaatttctcttttcatttcagttacgtt

SEQ ID NO: 793128 - DNA, 599 bp, Homo sapiens
tataaaatatagatgcacttaacaacatatccttaaaatagaaaagcaaaatttgtatcattttcaaaattgggaaacactattgtaagtgggaaatttttaaatatctttattggaacctgatagaatacatagacaaaaatagtaaacaaatttaaccagctttattatatatgtgtgtacatattcccgtatatgcacactatattcaaaaattgatcatataatttttagaaaatacaaaaagtacacatatatttacaacatacatagacatttataatatatgcagtcatcaagaatataaaatattttaaagacwtgatattggctgggtgcggtggctcaggactgtaatcccagtactttgggaggccgaggcgggtgaatcatgaggtcaggagtttgagaccaggctggccaacatagtgaaatactaaaaatacaaaaattagccagtcatggtggcgcgctcctgtagtcccagttactcgggagactgaggcagcagaatcacttgaacccaggaggtggaggttgtggtgagccgaggtccgagccactgcactccagcctgggtgacagagcaagactccatc

SEQ ID NO: 793129 - DNA, 542 bp, Homo sapiens
agcggagaatacataggtctacctctcttcttgggctgccttcaccttcttacttggccactccttgaagaataaatacaaatactacatccttgtcttcatttagtacttccttcctccagtgtctcagtggttgtttataggtggatgatatggagaaatgtaagcatataataatattactaagtagatttacaactacatcaaggaagggataaatatgtggaataacttaaactaaactgggctacaaaatagtctctatgatctttgctgctagggatttttaattcaatgcacatggatgaacacgttgaagaatgcgaaacggctagagatacaaaactggcaggcatagctaatatcagagaaagcaagattaaaaattcaaaatgattctgacatttgggataaatataaaaacctacagcaagtgtctgatagttaataattgcaaggatcagtaaagcaaarggcatagaactcgagcctgaaggctcaagagctctggtccttcccagggctgcctcaaaaaagggaaa

SEQ ID NO: 793130 - DNA, 619 bp, Homo sapiens
gcacctaggattctctaaaatactatgcacttgaagtgtttgttgtttttgcccctttccttcacaaacactagaacagcatttccatgaaggaagaatttttttgggggttgcacttgtcccctgcatcaagaactgttcttggcaaacaataggtgctcaagaattacttgttaaataaatacagagaaaatgcccgttactcrgttcctacaaggtccctgggcacgtgttagattctccatacacatttcttatgatcacaagtaccatgcaaggaaagcattgtatccatgaaacagaggaaaagaggaggtcatagagtttaagtcctctgcccgaggccacacagtcccggatcacaggtgaacattgcctctgaggctggcacatttcccatattccaggctggcacaccatcaatctgcatcaagacagcaatttgggaagagatttttctcttaatggcacatttctttgggagagaagctatgttatgtattcctcacatcacacattgaggaagcactcagttattttcttttcattttacaggctagtatttgttctcaatatattcagaagccatggaagcagtttgcctgctgaatccagaatg

SEQ ID NO: 793131 - DNA, 548 bp, Homo sapiens
agcagccagggggtagtgttttttaccattgaacctgggattcccctctaccactaagagatacagggtgcccagatggcactagaaagagaaaccacactacaacaagtgcctagcccaggaagctgctttgtattcacaggcctgagatgccactccaccacctagagacatcagagtagccaatgggcacctccagggagtattctgmcagaacaagcacaagagcacagatgcattctccatgcccaaagacaaagaggatcctaccacagcaagccccaaattagggatgtctccttatctccataggcctaagattcccatccctcacagaaagacactggtggcctagccaggggaaaccccatatggccccttaggcacgaccagtggtaactagagggagcccctgtggcaacaggtaaactgaggagaacaaaatagcactatgaggctccttaatgagattaacagctgattatgcattcaaaattatggagtccaaaaagcagtagatgacatagtgaaagcactaaaagaaaaac

SEQ ID NO: 793132 - DNA, 574 bp, Homo sapiens
ttcatatcatacaagtagaatgcaaaacaagaacattcccagagatgaaaggagacattatctaataatagaggccaatgcaatagacagatatcaatcctaaatttgtgtacttggaaattcttggatgttttatctacctgttttagtaataggtaaaacaaatacacagcaagtcagtaaggttatggaagaactgaacaacttcatcaactatctggatttaactaacttttatagaacactctaacaaccactgagtacacattcttttgaagtgcatacagaatattttctaagatagaacatgctatgaacacaaaaccgattttaacaaattaaaaagagaattgtaaaaatatgattctctgatcataagaaaatttaaaaaggaataaaaattatatgaagataatacctaaatattgagaaaytgaaaataacacaattaaataggagtcaaagaacaaacagtggaaattggaaaatgttcttaatgaaataaaaatgaaaacttaacctaataatacatgttaaatattactacagcaatgcttagagggacttgtatagc

SEQ ID NO: 793133 - DNA, 535 bp, Homo sapiens
catgagctacacatagttccagctctcagggactttgagaagcacagtatatggaataaagacaacagacaactaaatgttacggtgtcatagtctagaaaggggtaagaagaggaggatataggacatgaatataaaccagattagggcagatgtttataattttcacgaatttaatcctggatatgtatgaaaggcaaaacatatcttaaaaatagaaataaatttccaggtataaaagatatggcatggagagagagaagataaatctcaggaatagrcacaaggaaaactaggatggaattggggcagcacccatagaggcttctccttcagagcttcttcctattaatgatttcctagtgaaatacttttatgcctttacttcatagaacaaatttatctgttactgaaagaattttggtcaaaatttatatttatgccctcaaatgcaaaacaatatattggaaatctcattactttccaaaacaattggtaaaatgtctgattcatgtgtagatgtttgaaaactcac

SEQ ID NO: 793134 - DNA, 593 bp, Homo sapiens
tcattctgctgtcagtattgaaaaaggatcaaaggagcaatactgaaggcaatgagactagctaaaaggctgtagaagtaatccaagcagaacattctgagcatttcacagaagcaaagaaaggggagtagagaagctgatggattttagaaatataaggaaatcaactcaagtgtccaataggatagcaaagggcatggtaagcataaaatattaatgtgcaaatggataacttttgaagtgaaaagggccactattttcattgcactgygtaagcacacatgaagtgggcgtcctgaggaaaactgggaactatggcaaccacagtgatgtgtcatggagaataataataaaaaaaaaattcacaagggcatatatctatcaggcactgtgaaagtcttttccataggtcatttcacataatccagataccaccccatacagttaagttcaattcttacttggcctttctgattttcaagtcattcacctcactattgcaattattgccctttcattctgaaatgttgataaagaatctcttaaaataccatcctcaaacaaaattagtaataacatcttaagacaggtgt

SEQ ID NO: 793135 - DNA, 630 bp, Homo sapiens
tgttactaggaaaaataccagattcattgaaatagaatcattactttgacaagaatttttaaaaatgacttacttaagtacttttataataccaaatggtgttcctcaaaaagatatgttgaagacaccccccgaccctattatctgtgaatgtgatctcatttagaaataaggtaggtgcagatgtgatcagttaagatgaggccatactggagtaaggtgggagtccaatccagtataactggtgtccttataagaagagggaaatttagacatagcacggggaagacagccacatgaccattggagacagcaattaaaatgatgtatttacatgccaaagaatgcctggaactgtcagaaactaggaaagccaagaaaggagcctccgatagaggcttagaggtagcatggtcctgtcaacaccttaatttcagtcttccatccttcggaactgtgagagaataaatttctgttgttttargttacctaggttgtggtcctttgtacaacagccctatgatactaagtatacccttccaggtactaaagtaacatgaagactattttaattagatcctttaatcaacttacctttaagatcataaagattgattgctatatggcata

SEQ ID NO: 793136 - DNA, 605 bp, Homo sapiens
caaatatagaaaaatatgataataggacaataaattgtttatagaaaacaaagcagagcaaaggctagagaatttttcatgggatgatccacagaggacagttgaatagaactctgaatacagtaagaaaatgagctttatggggaatgaacattcctggcaaagaagaaataaagtgcaaaatctgaaatcagaacaatcttagcttatcaaaagttaagtcagaaataggtgtggcaaatgaagtgaataacctagaaccatatgagagacaaggttggaagggcaggcatgtgttgggtcatgcagagcttccttggtgtggaaaaatttgccttttgctgtgagtagataagaaggctcaggagatctgagtggaggagtggtgtaatctgatgtacaattatgaatgatcagtcyggctgctgagtggaaaagtgtcagtaggtggaaaggagttgaaactgtgtcattaagaagacattacctggtttaggaaagatgacggtcatttggaaaagggcagaatcaatcatggtaatgagaaaacacagtttcgggaaatattttgaagatgaaacaaacgacttgctgagaaattgaat

SEQ ID NO: 793137 - DNA, 547 bp, Homo sapiens
gggctcatggtctcgctggcttcaggagtgaagctgcagaccttcacagtgagtgttacagctcataaaggcagtgtggacccaaagagtgagcagtagcaagatttattgcaaagagcaaaagaacaaagcttccacagtgtggaaggggaccggagtgggttgccactgctagctccrgcagcctgcttttattctcttatctggccccacccacatcctgctgattggtagagcctaatggtctgttttgacagggcgctgattggtgcgtttacagtccctgagctaaacacaaaggttctccacgtccccaccagattagctagatacacagtgtggacacaaaggttctccaagtccccaccagagtagctagatacagagtgtccattggtgcattcacaaaccctgagctagacacagggtgctgattggcgtatttacaatccctgagctagacataaaggttctccaggtccccaccagactcaggagcccagctggcttcacctagtggatcccgcaccagggctgcaggtggagc

SEQ ID NO: 793138 - DNA, 547 bp, Homo sapiens
gggctcatggtctcgctggcttcaggagtgaagctgcagaccttcacagtgagtgttacagctcataaaggcagtgtggacccaaagagtgagcagtagcaagatttattgcaaagagcaaaagaacaaagcttccacagtgtggaaggggaccggagtgggttgccactgctagctccagcagcctgcttttattctcttatctggccccacccacatcctgctgattggtagagcctaatggtctgttttgacagggcgctgattggtgcgtttacagtccctgagctaracacaaaggttctccacgtccccaccagattagctagatacacagtgtggacacaaaggttctccaagtccccaccagagtagctagatacagagtgtccattggtgcattcacaaaccctgagctagacacagggtgctgattggcgtatttacaatccctgagctagacataaaggttctccaggtccccaccagactcaggagcccagctggcttcacctagtggatcccgcaccagggctgcaggtggagc

SEQ ID NO: 793139 - DNA, 547 bp, Homo sapiens
gggctcatggtctcgctggcttcaggagtgaagctgcagaccttcacagtgagtgttacagctcataaaggcagtgtggacccaaagagtgagcagtagcaagatttattgcaaagagcaaaagaacaaagcttccacagtgtggaaggggaccggagtgggttgccactgctagctccagcagcctgcttttattctcttatctggccccacccacatcctgctgattggtagagcctaatggtctgttttgacagggcgctgattggtgcgtttacagtccctgagctaaacacaaaggttctccacgtccccmccagattagctagatacacagtgtggacacaaaggttctccaagtccccaccagagtagctagatacagagtgtccattggtgcattcacaaaccctgagctagacacagggtgctgattggcgtatttacaatccctgagctagacataaaggttctccaggtccccaccagactcaggagcccagctggcttcacctagtggatcccgcaccagggctgcaggtggagc

SEQ ID NO: 793140 - DNA, 653 bp, Homo sapiens
gagattacaagcacccaccaccacgcctggctgctttttgtatttttagtagagacagggttttgccatgttggccaggctggtctcaaactcttgacctcaggtgacccacccacctcggcccctcaaaatgctgggtttacaggcgtragccaccatgcccagccagaaacataagtttaatttaagaaaactaaaacaacaaaaattcaaaaatagttctgactgtaaaaataacacttgcccactgtcttaaaatttaagaaaatattttgcttaaaatttctggcaacattaaaaatgtagccagaaacaagggcaaaaatgtgttcaacctcaaaagtaagactattttaagtagtcaaatctagtgaagaaacatttctaataaaattacttttaaaaaaaatcaaagagaaaatgttttacataatgatattttgtattattgaaaacttccatttaatatgagaaaatgtgatgtatagttataaaatataattaaatcaattaatgttcaaaaatgtctattggagatagtattatatttttattgataatagtattaccaatagtatgatttaaataactggaaatgaataacagccaataaatataaaacagaaatttttggttatatttttctcctagat

SEQ ID NO: 793141 - DNA, 453 bp, Homo sapiens
ataataaataaaaaaatgtagccaggcatgatggcatgtgcctgaagggaggctgaggttagagaagtacttgagcccaggagttcgaggctgcagtgagccatgatcatgccactgtactttagcatgggtgacagtgcaagaccctgtatctgaaaaaaaatattctgtatgatattataatggtgaatatatgttattatacctacaaaatgtgcamcagcaaaagtgaaccctaaactactgactttgggtaatagtatattctagacacaaatcctttatcagatatgtgattttcaaatattttctctcatttttatctcatagttttcattctcttcatggtgtctctcaaaaactagttctcagatttgatgaagttcaatttgtcatttttttcttttataaatcatgcttttagtaccttgtctgagaaatattttcctaact

SEQ ID NO: 793142 - DNA, 619 bp, Homo sapiens
aaagctaatgagtaataatatttatactaatgattgataatgtctatggttatctctatatctaatttgtattataactattcttattctaactattttccttattatactgcaacagtttgtgccttcagtctcttgcctcagcacctgggtaatccttcgcccacactatggcatgttaagtcagggtaaggcttttctttggaaaagatggaggaggtagtgactggaaggaggttttggacaggaggttttgctacrctagcagtgttagagatgcccacatgatttttgaaacatttaattatttctgattaaactcttcagtaacctaagaatataattacattttcttaacataataattactatctaactgccaataatatctctgttaaaggattagcaaaaatccaagggtgttccagaatgtctatactagcagaatccagctcaaattaattctaactgtacttatctggtatagactggttcaagtagattaaaccattgccaatttctccacgtaacttcaaactgatccaaataatttaaaattaacccagactatctcttagcacaactaatatctgactgttaaagttgaggttatcattgc

SEQ ID NO: 793143 - DNA, 601 bp, Homo sapiens
gaactcaagtatatgacttaacatctctaaacctcttatctaaaaagggtaaaataatagtacctatcagacagaataattattaagactaactaaggtattatatgtaaagtatttagcccaatgactaggcattcaaatcaggaagcactcaatgaatatttgctactattsttatgatccatttcatcagtcagcagaggacaagctctaccatggtagcagataacccctgcatatcagtggcttaacacaaccaagctttgttttttgcttctatttggggctcagaggagtcagcgagcttttcttggcagctgtcctatagtgatcacttggggatgtcagctggttctttcttgccagtctgtcctctcagaggtttctagcttccaaccacacaatgtaagaatacatggagaatttacaccatctctttactgcatcacattgccatcagcaaatctctgtcacatggtttttgccaaccaatgctaaccctacggggccgggaaatgcctgggaagaacctatgggatgaacacataacattgtctctgtcttcataccgaggttcatgctgagggaggcagcaggggtg

SEQ ID NO: 793144 - DNA, 601 bp, Homo sapiens
gaactcaagtatatgacttaacatctctaaacctcttatctaaaaagggtaaaataatagtacctatcagacagaataattattaagactaactaaggtattatatgtaaagtatttagcccaatgactaggcattcaaatcaggaagcactcaatgaatatttgctactattcttatgatccatttcatcagtcagyagaggacaagctctaccatggtagcagataacccctgcatatcagtggcttaacacaaccaagctttgttttttgcttctatttggggctcagaggagtcagcgagcttttcttggcagctgtcctatagtgatcacttggggatgtcagctggttctttcttgccagtctgtcctctcagaggtttctagcttccaaccacacaatgtaagaatacatggagaatttacaccatctctttactgcatcacattgccatcagcaaatctctgtcacatggtttttgccaaccaatgctaaccctacggggccgggaaatgcctgggaagaacctatgggatgaacacataacattgtctctgtcttcataccgaggttcatgctgagggaggcagcaggggtg

SEQ ID NO: 793145 - DNA, 424 bp, Homo sapiens
tgctaaaagcctagactttaccactacacagtatattcatgtaacaaaagtgcacttctaccctctaaatctataaaataaaaattaaaatgaaagaaatgaattaaggatcagaaacttgctttgcatcgcatggttggtgagtgatgatgacaccaggaatcagatccaggacttcccagctccatagcccatgctttttacacttacattgcaaagcccacttcaaccaaatttctytgattcctcacatcctcttctcgcacaatttataccccaaaataagccaacctttcctggatgaactcttagccatggcttcctcaggctaaagttttgaagcatggcaggttagcagagccaaaagatagttgggttttgctttaagtgttttctcaagttgttaaaactggctctcaaattg

SEQ ID NO: 793146 - DNA, 650 bp, Homo sapiens
aattgtcacagtgtgaaccaagctgccatcatttgcagtttacaaattcattgcaccattatttttccactcttcttcatgacacatagtcagctcaaaatatctttacacagcaagttttttttttttttcacctttgcattagatacttggaatatactccccaaacyggtttctcttggtcaggggttgtacttaagtgtgtggtttttattagaactgctaaatagttctccagaaagattgtgtttattcacatcaccactatgtatacaggaaaggtatgatacctttcctcatccatcataaggttattcttttttttttttttttttgagacggagtctcactctgtcacccaggctggagtgcaatggtacgatctcggctcaccgcaaactccgtcccccaggctcaagcgattctcctgcctcagcctcccaagtagctgggattacaggcatgcaccaccacacctggctaattttgtatttttagtagagacagggtttctccatgttggtcaggctagtcttgaacccctgacctcaggtgattcacccgcctcagcctcccaaagtgctgggattagaggcgtgagccaccataccaagcaaggttattcttataataaaagacagataaacaag

SEQ ID NO: 793147 - DNA, 520 bp, Homo sapiens
cacctctgacacatttcgcagcatttgggaggcagtggttaggccacaaattacgcatctgccattgcactgaggggattcttgggctattgaccccagggaggccacagagcagagcagttaaaggcccaggtgttggagtcagcctaaacatgggttcaagcccctgctctgccatatattggccaggtgaccttggctgagtaaactcacttccctgagcctccatgtcttgtctccaaaatggaggggtaggaatccccgctttaaagagctgctgtatggagtaagaaagarccaaagggtgtaggacacataacacaggaataggcactaaacgaaaagtgactgtcaccattttcattatccaggggcttcagtattatggcgtgagatgccctttattgagggccagttacgtcaccagggactatgctggctcttttaaaatattttgtccctagacctcacaaccaatcctgcagataggttcagttatgtttattgtggggtggttagg

SEQ ID NO: 793148 - DNA, 587 bp, Homo sapiens
atgcatgccttttgatacccattgtgcaacctttgctaatgtcaaggcaccaaaatgtctgcaaatgtaatcatttaccatgacctccatgactaatatggtctaaattacccttaagctcctgctttaaggttcataaatacccctaaggaaaaatccacctggcgtgcwcagtcctctcttgctgaggtgccccactacacttttctgcactgttttttctatctcataaaacttccctttccaacctatactattgtcagtaaattattttacaacccatgagccaaccactctccactgctggggctctgacacctcacctggcacaaacactgaaatttgacttctctacaattttacatgtcacaaaatattattgtttcttgaattattttcaactatttaacagtttttaaaaagcattcttagcttacaggccatacaaaaacagatgatgggccagatatggctcacaggtcatagctcaccaacctctggcatagagaaatcaattgatttttccatcgtctgggatgtgaggagcgcctctgcccagccgccccgtctgggaagtgaggagcgcc

SEQ ID NO: 793149 - DNA, 615 bp, Homo sapiens
taatgttagctataggtttcgcataggggccctttttaagagtaaggaaattcctttttatttctagtttgctcagagtttttgtcatgaacggctgttgaattttgtaggtgctttcttggcatctattgagatgatcatgtggcttttatyctttgtcatactaatgtggcaaattatgtatgattgattttcttttttttttttttctttttttaactttcattttaggttcggggtacatgtgaaggttttttatataggtaaactcatgtcataggggtttgttgcctagattatttcatcacccagctaataagcccaggccccgttagttatcttttctgctcctctccctcttctcaccttttaccctcaaatagaacccagtgtctgttgtttccttctctgtgtcataagttctcatcatttagctcccacttataagggaaaacgtgcagtatttggttttctgttcctgcagtagtttgctaaggagaacagcctccagctccattcatgttctcacaaaatacatgatctcattctttgttatggctgcatagtattctgtgatgtatatgtaccacattttctttatccagtctgtcatca

SEQ ID NO: 793150 - DNA, 523 bp, Homo sapiens
attattgaatcctaaaaagaaagaaatcctaccactggcgacaacatgaatgaacctggaggacattatgcttagtgaaatcagccattcttagaaagacaaatactgcatgacgcacctttatgtgaaattatttaaaaagagcgaaagtcagctaggcacagtggctcacacctctaatcccagcactttgggaggctgaggcaggtggatcacaaggtcaggagatcaagtccatcctggccaacatggtgaaaccctgtctctactaaaaatacaaaaattagcctggcatggtggtrcatgcctgtagtcccagctactctggaggctgaggcaggagaattacttgaacctgggaggcagaggttgcagtgaaccgagatcgcaccactgcactccaccttggtgacagagcgagactccgtctcaaaaaaaaaaaaaaaaaaagagtgaaagtcacattaacagagagtagaatgggtggttaccagacagagaggggtaggaggaaaggggaaat

SEQ ID NO: 793151 - DNA, 634 bp, Homo sapiens
catcacacagctttatagaaacagcatctattcaaaaataccagtatttccaaaatatttaaaataatatttcaagtaataatattcaaataaataaatatatttaatatttcaataaataaaataatatttaaataattctatacccatgtttttcaaaataaaccaataaawtagatagtatatattagacgtgttagtatatatatctgagacatgttaaaaatcacaactgaattctcacaattcagtcacagacctaaacagcaaataaaaatttctatcaccagaattatgtttttttctggtggggaactaccaatagctataaatagaagagattattatggaagtatcatagataaaaagagtgctcacttcaggagcacatataataatacagaaacaaatttaaagataataaaatatttaggataaaaagaattgtctcttaaaaatgaaaagaaaattatctttatgtatatataacaactataactctcatcaaaaaactacaggaacagcatgttttcaaaagtacaacaatttccaaactatttgaaataaatctatgaataattcaatggccaacattttccaaacaaaccaataaaatgcagagtgtgcatgaagc

SEQ ID NO: 793152 - DNA, 589 bp, Homo sapiens
taaggtcgggagtttggccaacatggggaaaccccgtctccactaaaaatacaaaaattagccaggcgtggtggcatgcgcctgtaatcccagctactggggaggctgagagaggagaatctcctcaatccagggggcagaggttgcagtgagccgagatcgtgccattgcactccagcctgggcaacagagtgagactctgtctttaaaataaaataaaataaaataaaatagggctctctcctctctggcagtayccccactccccacaacatacacagtagggcagtttgccacttgcgttcttgcataaaggtccacagcctaaggggcagtggcaggagcagcggcaggaaatattcctggcaggggttctttgtctgaaattttccgcctagagatggtgtctttttttttttttttggaactcctcaaaggctggggtttgttcaacacacccaaggggccaccagtgctctgaagcaactgaaaatgaatgacgtggcccaagaaagaatgtgactgttggccacaaaatggggagtggtgttgagcaaagaaatttaaactctaatacccataatcccag

SEQ ID NO: 793153 - DNA, 522 bp, Homo sapiens
atacaggtaagggccctggtgccagagagtactgaggacaggtccagctaacaaggcagagggcaagtagtgtagcgtagtgaggagagccctgggctggacacagcaagcccacaccaaccctagcactgctgccgcctgcagaaacctgcctttcctgcggcccccatcgggcttagtctttcacccctatattctccaggggtgggaaaaaagggaaccagcattctttttgcacctcatctatttccaaccactastcctcttctctttttctatgagggtcattcctaactctatttcaacctcatagctatcagctggtatcttccttcactccacttcactaaagaggattctgatatgaggcacaatcttcctctccactcagagcttctcaccatcctgggtaacttcaacatccctatggacagcccatctaatcctagggtcatggtgcttagacctctgtcccaaggacactccttggccacactctgacacctcgtcatagactggtca

SEQ ID NO: 793154 - DNA, 596 bp, Homo sapiens
atacaagaaaaacattttcagagacacctaatagactattagaagaaagcatctgtgcaaaaatgatagtaggtgcccatctgttgaacgggttggtggcctccccacatcaggcatgtttaggcagagggtgagctgagctggygtgttgccatcttgcagggagtgatttagagaaggttcctgtactgagtgagattggacagctggtaacctctaagagctcttccagcagggagattttagaatctcaacaatacttattgaacaagttctaccattcaaagggatgagaagactctggaagttttcttgttggtgagaaaagttcagacgaagcccagaggtcactatctagggagatccccattgaggtcaacttgacctgaggaacttgggtccctgacctcgtcacatcccaatgcctgctatgggctgaaacactcacccttgccatgagatgtttcgataatccaggtgcagttcaagttgttggggtagaagtcagggaaaccctggcgacaagatggtcccactggagccttgaatgaagccaccacagagagctacagaaggagtgaagagggcagtgaaag

SEQ ID NO: 793155 - DNA, 596 bp, Homo sapiens
atacaagaaaaacattttcagagacacctaatagactattagaagaaagcatctgtgcaaaaatgatagtaggtgcccatctgttgaacgggttggtggcctccccacatcaggcatgtttaggcagagggtgagctgagctggcgtgttgccatcttgcagggagtgatttagagaaggttcctgtactgagtgagattggayagctggtaacctctaagagctcttccagcagggagattttagaatctcaacaatacttattgaacaagttctaccattcaaagggatgagaagactctggaagttttcttgttggtgagaaaagttcagacgaagcccagaggtcactatctagggagatccccattgaggtcaacttgacctgaggaacttgggtccctgacctcgtcacatcccaatgcctgctatgggctgaaacactcacccttgccatgagatgtttcgataatccaggtgcagttcaagttgttggggtagaagtcagggaaaccctggcgacaagatggtcccactggagccttgaatgaagccaccacagagagctacagaaggagtgaagagggcagtgaaag

SEQ ID NO: 793156 - DNA, 632 bp, Homo sapiens
agggcacaaaggccgagactgggagacatcccagggaattggggaaaataaacatgtggagaaggaaagagtgacaggcagcttgaaagacccgaaaactcgcagcgctgccaatgctactttgggctgccggagctcccctgggcaggagctggaaacagggatcttaatggctgtgataccgaagagagttctcatttgaaagaagaggtgcttttgatrcctgacaatccagagccgtttctctactttaatctctggttataatttaaattcctacgcacagtggccttatgaagcccctgctattccagcatgagggtgagagagtggcccttcgttctgggagaagaggaaggaccaacgcagaaaggaaccaccatggcctgggctgcttgctccccctccccagcctctctggctgacaatggccactgctcccagcctgcaggctcgtaccttcacaccgcagcacagcgctgttccagaccacgctgccctccttcaggacgcaggtgatggtctctgagccctgagtcccaaggaagccttcatcacagaggaaggagatggagctgcccagctggaggctgtccccaaaccgtttgccatttactggaacgccaggatcc

SEQ ID NO: 793157 - DNA, 529 bp, Homo sapiens
cagatgcagccgctgagcctctgaggatccatgggctgggcggtggcattcgattttccctcctcagattccatcctcctgagtcacacagatcccatgacatctgacaatccaaggccactgctgatttctacaccaataaaatgtgactgctgtgtggcttaggctgtggggagggagagctgtatctgactcmggagaggggaagctccgctcctactctgccccttgcccccttccctaggcaggcagccctgcagaggtcagctccaggcggctgccaggcaggaaggggccactctggcagcttaaaaggagctagcagaaacgcgaactttggaggatttgaggaaggaacacaaccagaatattggagctgcaactgctgtgggcttgcttccttttaggattatggggctggcagaagacaaggacctccctaaaatctttcaacaccacagatgttccaaccaccacagagaagaaagcggtggcttgggcttgctgtaaatacaattctgggatggag

SEQ ID NO: 793158 - DNA, 529 bp, Homo sapiens
cagatgcagccgctgagcctctgaggatccatgggctgggcggtggcattcgattttccctcctcagattccatcctcctgagtcacacagatcccatgacatctgacaatccaaggccactgctgatttctacaccaataaaatgtgactgctgtgtggcttaggctgtggggagggagagctgtatctgactcaggagaggggaagctccgctcctactctgccccttgcccccttccctaggcaggcagccctgcagaggtcagctccaggcggctgccaggcaggaaggggccactctggcagcttaaaaggagctagcagaaacgcgaactttggaggatttgaggaaggaacacaaccagaatattggagctgcarctgctgtgggcttgcttccttttaggattatggggctggcagaagacaaggacctccctaaaatctttcaacaccacagatgttccaaccaccacagagaagaaagcggtggcttgggcttgctgtaaatacaattctgggatggag

SEQ ID NO: 793159 - DNA, 594 bp, Homo sapiens
gggtagcccatcattctacaagactgcgagcagcacctccgtgtcatctgtcagggcagaaagcaaagggcaaagtggaatgaacccaaggctgaaggacttgggagagcaccgagatgccgggtgctgacctcctatgtggccagccagccccatgytggggtctggaggcacatcagacttgtcctgaccctgaggagctgccaggctaaggacaaaaacgattacacagagagaaataagcttaagtgttggcttaacctgccaggggctccaagagagggtgatgcctacctccctctcactcccagacaggtaaactgaggcccagtgtggccacagcatgtaggcctggtacccccatgagccaaccggaactgggatgagaactggggtccactgacgggtcagagctctttccactgcactgcactgcctctgcagggtgatggcagcaggaccaagccctggggtagacctcaacatgggggaaaatccccactcctgaatctgggaaaaggaggcaggaaacacgcccacttcctgtccagccttccagctgccctggaccctgttaatggactcgctattcca

SEQ ID NO: 793160 - DNA, 594 bp, Homo sapiens
gggtagcccatcattctacaagactgcgagcagcacctccgtgtcatctgtcagggcagaaagcaaagggcaaagtggaatgaacccaaggctgaaggacttgggagagcaccgagatgccgggtgctgacctcctatgtggccagccagccccatgctggggtctggaggcacatcagacttgtcctgaccctgaggagctgccaggctaaggacaaaaacgattacacagagagaaataagcttaagtgttggcttaacctgccaggggctccaagagagggtgatgcctacctccctctcactcccagacaggtaaactgaggcccagtgtggccacagcatgtaggcctggtacccccatgakccaaccggaactgggatgagaactggggtccactgacgggtcagagctctttccactgcactgcactgcctctgcagggtgatggcagcaggaccaagccctggggtagacctcaacatgggggaaaatccccactcctgaatctgggaaaaggaggcaggaaacacgcccacttcctgtccagccttccagctgccctggaccctgttaatggactcgctattcca

SEQ ID NO: 793161 - DNA, 625 bp, Homo sapiens
tctggtgggagccacaaagctaaagggcaaggcggggctgccacttcggagctcactacagattatttgttgggcatctaccaggtgcacacagcagggctttcttgtttgcacccaccaagaagagggccagagcacccaagaacacacacatygcttaggatcccggtgagagatctgctaagggggtggggcctgggaggatcggaggcacgcgggctggtcagaggcttctgaagggacatgggagttcatccactgagaattctgacccaaactcagcttctgaaacaaacacgggacttctcatagaggtggtccatcccctactcatgccacccatcgatatggtattgaaaacacaaaggaaggtctttacaaaacatttattggggtcccattcagagaagaataacctattattacttacacatatttagtacctagtaccagcttacaaaggcctttctttcacacatatttccttgatgaatacagcaaccaccctctgcacaggcaggttcctctctctgcaacactcttctcctctctactcaggcctgggtgataccctttcgtcatttatgtgtttctcagcacagtgtttgtcacacctgactgttaa

SEQ ID NO: 793162 - DNA, 346 bp, Homo sapiens
acctgcaaaagagtaaaagtaagactggcagctgacttctcaacagaaagaggcagtgggtgacaaagcagaaatgcagtttgtcaagtccctgtcccagcgtcacagagctgactgtgaagggtggttagaagctaagaggcagcagattaataattggcatggataaaaaatagwtaccatgcaaatactaactaaaaggaagccagtgtagctgtattaatgccagacaaagtagactttatacttaaaggttgaggtaaaagcactactagggacaaagagtaatgcctcttagtgatgaaaggtaaatttaccaagatgataaaacatttctaaatctgta

SEQ ID NO: 793163 - DNA, 614 bp, Homo sapiens
tggtcttgattgggtcaacgcatttcagtgaatttgaaacatgtatcagatgcacatgacttacatcctagttgattgactccctgcaagctgaggatttctatcctcttcctgtccaaaagtgcctgagttatacattttgtgttcttgagagcacaaactacacagctaaccagtggggactaccatatggaaccgactgattttgaaccccagctcactgatcctcatttttaattttttttttaatttcrgggagtctgtgtagtccagacctgtaatgaaggaattgaagaaataatcacaaggtatgtgtatgtgtgtatgcaggtgggttccagacctcctgggcccactgtgagagcgtctcgggcctgcatccctctgcctgcggacccagaagaagctggcaggtaccagagatgagcaatccagagaccaggaggttaaggaagcatttattgaaaacctgtgatgtacctctggcccagaccaagaggcagagtcaagccaaggcttcaatcagtcatcaggagactggggatcttgggcctgacccctactcctcaccagtagacttagctgtatcaaaatagctcctttatttcctgaaa

SEQ ID NO: 793164 - DNA, 614 bp, Homo sapiens
tggtcttgattgggtcaacgcatttcagtgaatttgaaacatgtatcagatgcacatgacttacatcctagttgattgactccctgcaagctgaggatttctatcctcttcctgtccaaaagtgcctgagttatacattttgtgttcttgagagcacaaactacacagctaaccagtggggactaccatatggaaccgactgattttgaaccccagctcactgatcctcatttttaattttttttttaatttcagggagtctgtgtagtccagacctgtaatgaaggaattgaagaaataatcacaaggtatgtgtatgtgtgtatgcaggtgggttccagacctcctgggcccactgtgagagcgtctcgggcctgcatccctctgcctgcggacccagaagaagctggcaggtmccagagatgagcaatccagagaccaggaggttaaggaagcatttattgaaaacctgtgatgtacctctggcccagaccaagaggcagagtcaagccaaggcttcaatcagtcatcaggagactggggatcttgggcctgacccctactcctcaccagtagacttagctgtatcaaaatagctcctttatttcctgaaa

SEQ ID NO: 793165 - DNA, 597 bp, Homo sapiens
atcacccagaagccctgcaggtgccctggcctgtctctgctcgagcctgggggcggttcccatggggacccctttctacctccgagtggggtaattgctccctgagagccgctcctggggacacgtgggcctctgtagcaacctcagcatccaccccgaggggacagacttcactcaaaggtcagcatcaaacacaggagacactgactgggaagagacgggcgtcagccttgaggcaccatcatgtccatggacatgtgggctcccatttagacaggagctggcctagccacactcctcactcagtgagtggctgcaaccctccatgcctkccttccacatggatgacccacctaattttcctttcaatgtttttgaaaagtcagatctgattctaccctgccctgacctacattaatgtggaaaaaatgttgctgaaattgctttgctgttgtgttgagggtttccgtttgaaactctaagtgcctgggaacctctgtgggcctgcactgtgccctatctgtgccctcgatcaggtgagcaagaagccggagccccgtggtttggcctttaaggcagatcaggatctgtaagagg

SEQ ID NO: 793166 - DNA, 635 bp, Homo sapiens
atattaagcagccaaatccagaaacccaaaaaccaatgaaagaactccatccttaatattctgttcctctagaaccattcctggtaccaaaatctgtattaatcagggttctctagagtatatatacacactatatatacatataaagggaagtttattaagattaatttacawgatcacaaagtcccacaatgggctatctgcaagctaaggagcaaggagagccagtctgagtcccaaaactggagaacttggagtctgatgttcgagggcaggaagcacccagcatgggagaaagatatagactgggagtctaggccagtctcaccttttcatggttttctgcctgctttatattcgctggaagctcattagatggtacccaccagattaagggtgggtctgccttcccggcccactgactcaaatgtgaatctcctttggcaacaccctcacagacacacccaggattaatgctttgaatccttcaatccaatcaaattgacactcagtattaaccatcatgggtaggctcttttcaacagccatctcttgggcgaactaataaagtgagaagtcactacaccagggcattaatgtattcatgagggatccacctccatgacccaaacacc

SEQ ID NO: 793167 - DNA, 635 bp, Homo sapiens
atattaagcagccaaatccagaaacccaaaaaccaatgaaagaactccatccttaatattctgttcctctagaaccattcctggtaccaaaatctgtattaatcagggttctctagagtatatatacacactatatatacatataaagggaagtttattaagattaatttacatgatcacaaagtcccacaatgggctatctgcaagctaaggagcaaggagagccagtctgagtcccaaaactggagaacttggagtctgatgttcgagggcaggaagcacccagcatgggagaaagatatagactgggagkctaggccagtctcaccttttcatggttttctgcctgctttatattcgctggaagctcattagatggtacccaccagattaagggtgggtctgccttcccggcccactgactcaaatgtgaatctcctttggcaacaccctcacagacacacccaggattaatgctttgaatccttcaatccaatcaaattgacactcagtattaaccatcatgggtaggctcttttcaacagccatctcttgggcgaactaataaagtgagaagtcactacaccagggcattaatgtattcatgagggatccacctccatgacccaaacacc

SEQ ID NO: 793168 - DNA, 546 bp, Homo sapiens
acttaagagtatagtgcagcaattaagagctcagtttctggaattagacagtttagcggtcccaatcttggaggtgccttctgcctccctggagacagctgtttctggacaggggccagcgggccatgtcagggagacatgagagagggaggagggagacaggcggcagcaggagcagagctggctggacagggctttgtccacttgataaagctggcatgttccttccagctgtccctgtgatgctcgcttatgtctggttttctcatgactcagagccacagggcaggcctctccagcagtagggagaatttggatttggatatggtttgagawgaaatgaggtagaagactgtcttcctttgctgccacccaccacaactccccaggccagtgctggatcccttctggtgatcagtgagcctggggacagcctgccagttagagctggtgaccactttggctggaggtctgcaggagtgtacaggacccaagagccagagaatcattcctttctcctaggaagaggcaatgagaagccagaga

SEQ ID NO: 793169 - DNA, 591 bp, Homo sapiens
ttttccggataatgatttttgtagttaatgaggttccccctcccagttctctaattacatgactctgcagtcaaatttagtaaccatccagctatctatttatacaccactgggcttctcagctcttcctcctgaggttcttccatgaccctgttatttctcaccactgtagcaaatgaagtatgtcttgaagaagatggttatttcccctraaaggactctcggtatgtgaagagacactgctgttgtgaataattagcagaaatattgttgggatgcttggtcttaagactaagtgtttgaaagctcggttaatgctcgtctggaattgcctaatgttcttataggttttctcactattaaagtggaacctcataatgatgcccaaaaggaattgcccttccttgtcaatcatatttatcacagaacatctcaatcaacttatgaaatccttcttgaacatttgttgaacccagtaatgtgctgtgagctctagggaaatggctgggggagctttcaaggaatagatcctcaagcctcatcccaggattcctgggatcagaaactatctgccagagtctaatatgcagc

SEQ ID NO: 793170 - DNA, 534 bp, Homo sapiens
taaatgatgattctgggctgagtggcaccaggagccatcgcttggtgcttttctccagctccctctggtcctcagaggaggcagaacagggcctgtaaccatggcaattctctaatgttctttcataaaccataaatataggggaaggcttcattacagctccttcaagaagaaaacaaagctttccctgaatggggcagggcagggtggcggggggagaggggaggagaagggaagaaggaagactttaggctttttttttttttttttttttttttttgccacaaagacaaactgcgtcagaattggctcarttcagaatgtggctccagcatttaagcaagatgtagcccagggccaggcacaaagcaggcgctccttaagtattagttgaaagcaggaagggagaaaagcagggagggagtgatgtggaagggagaggatttggaatcacacagagtaaatgtgagtggccagatgagcccacattttgaaagggtttaatgttctgctgacctgtctaacaggcccctt

SEQ ID NO: 793171 - DNA, 632 bp, Homo sapiens
ttaaatttttaggtgtagtgggatccttgtgacaaaactgttctatatttgactgtgatgctgatcacacaaatatacaaaatggcatagaactaaacacatacaagtaagtgcatgtaaaatctgaatacagtcagtgggctgtataagcatcagtaccctggctgtgatacgtactgtggttatgcaagatgtcaccccagggtaaagcagatacaggatctctctgcattgtttcttaccatggatgtgacactacagtgaactcaggataaaacatatttttctgaaaaactagtcattactcagattaagattctggatgtaccaggcaccattgtgagaggtaaccagttggctgagttgtgtggtcatggcatttstggtgtcatagccaaagaattgttatgctgtgctctgtgctggggctcccatttgcactttcccagacctttccttcccacggcgctgctctgtaattagatgtagttccctcagagcggaccaccgagagcccaggccaaggccgaaatggccgagccttcctctgcatctgggcagcctgtgatgcaccaggtcaggcatggcgggaatgggaggacttctgcatactgcattcttcactcttaaaa

SEQ ID NO: 793172 - DNA, 582 bp, Homo sapiens
ttgatgagaaggtcctaaatttagatgatggtgatagatacacaactctgtgaatttactaaaaatcattgacatgtacttaaaacaggcacattttatggtatgctaattgcacctcaatagagctgcctaaaaaatactgctgccagataacactacaggcaacaagagtcaaaggtcagggggtcacacaatggctgcacaaacagtggggagcactttggccacagtaagcccaccctcctccccaggagtcataaactcaggatggggctgatgcagctatgttgggggcactgggcaagacctcccaggccccacactcggaaagagctgcaccagaccaagtgtctcctggagagcggcaggtgtarccctcaccctttcactcatcgaacagagctcctgagaacttgcaggtcccagcccaggccctgtccccaaggtgctgatgggccagggtggatgcacacacacacagactcccttacaggacacagttgccccagtggaaactcgtcccaagcacagccagggcctccgggaaagccagtaatacccaggaccaccccagtccacagg

SEQ ID NO: 793173 - DNA, 611 bp, Homo sapiens
gggttgttccccaattcctaggctgctgcagaagcatgtgtccttagaaatgccccagaatggcaggaaatcaggaccagaatggaaagaaaagcaggaaagcaaggtgcacttacaattacttggtagatttgctcatgtggtttggacgcaatgttccttgatgcgtattcatcttaagcccacctcagcttagaccatccacatttgctaagccctttcctcagcatcctgcagccaggttgtcgctgttctaccatcaagggcaagcagagggtgatgtgttctgagctcagaaaggctgcaagscttgtccgagaccatgtcccatggagggagctagggttaccctacaccctgtctctccttctccaggaacagaccacacacctcacatatggagggggcccttcatcaactgtccctgctccccagtcttaatccatcctcccaattccagctccttctctgccagagacacttccctcccttccttccccacctttgctccccctattgtgttggtccctccaggagcagtggagatgtctactctctctaaccccagcttccagggcttgggggtccactatgtgtagccatagcaacaa

SEQ ID NO: 793174 - DNA, 538 bp, Homo sapiens
atatggttttattcattgtagtcgtatacccttccttaatatagacatctaagcatctgcagtacttcaccaagaaatagaggttaagaaaagcagttctgagattaaagaaaaacaaaaactaaatatagaacaaaaatccttaggataaaaaaaaaaagcatccagtatagcattatttaaagaacaaaaaagcggctgagcgcagtggctcacgcctgtaattccagcactctgggaggccgaggtggacagatcacttgaggtcaggagttcgagaccagcctggccaatgttgatgatgaaaycccacctctaccaaaaacacaaaaattagccgagtgtggtggcacgcatctgtaattccagctactcaggaggctgaggcacacgagttgcttgaacctggcaggcagcagttgcagtgagctgaggtttcaccactgcactccggcctgggcaacagagcgagactgtctcagaaaacaaacgacaacaaaaaaagagcaaaaaaactaaaaatctcaaaaaaataaat

SEQ ID NO: 793175 - DNA, 437 bp, Homo sapiens
tctagagcaaccaagagagccactcacgagaaggacagccgaggagccagaggagaaagtcactgcaggcgccgctgaaccttctttccagctgtgggatatcattccattctttttccagagctcaagtaaccctggtgctcaaattgctcaaggacacacaggaataagaaatgatggaccaatttcacctatgagcaaaaattcaataayattaaaaataagcagattcaatacagagatatattaaaatatataattttatgaccattaagatttatttaagagaataagaataggtcaagaacacaatatctatcaatatatttcagtgaatgtgagaaatatattttaaaatgtatatatttaattgtgaattatgatgaataatgaatttatgtggaattttaaagatggtttaaaattcatgtttaata

SEQ ID NO: 793176 - DNA, 561 bp, Homo sapiens
aaaggcatgaatatgcatttaaaatttacatgatttagaggctgggtgaggtggctcacacctgtaatctcagcaccttaggaggccaaggtgggaggattgcttgagcccaggagttcaagaccaccctgggcaacgcaggcgaaaccccatctttaccaaaaatgcgaagattagccggatgtggtggcctgtgcctgttgtcccagctactcaggaggctgaggtgggaggatcacttgagtctgggatggagaggttgtagtgagccgagattgtgccgctgcacttcakcctggggacagaggcagaccctgtcttaaaaaagacctagctgggcatggtggcaggcacctgtaatcccagctacttgggaggctgaagcaggagaattgcttgaacccaggaggagaaggttgcagtgagccgagattgtgccgctgcactccagcctgggtgacagagcaaaacactctcaaaaaaacaaaacaaaaacgaaatttacatgattttcagttggattcctagtatatcacatgacaaatggtcccaagtaggcca

SEQ ID NO: 793177 - DNA, 609 bp, Homo sapiens
ctttctttctttcctttttaaatcgctcctccatccgtagcttttgtgtaagtgccgattctgattataccgtttcactgatggatatgacggctgcttaaatggaatattccagtctttaaaagagttatttctgtactttttcaggtggcataaaatgacactccaagagtctttcaccaaataggtagctgttcattgtttcagtaactatcttggcaacatcctcagactcaaactccacaaatgcatagyctttgctatttccagtccttttctttctggacagtctgaaccttgtaacagtgtcacactgggagaaataggaaaggatctgggtttccttaagtagattaggtaggtggcgcacatagactacaccaggagaaagttgtttttgttttttttttttcgcttggttatgcgcttgtgaacctgtgccacttccttctgcaactcggcatcttcctgcgggttcagcgacaggattggcccagccgagcgggaaaaggccgccatgccaaaagtggcccagcagctccaggcggcgctcccggaaactcccaattttttgtatttttaatacaaagagggtttcgccatgttgcc

SEQ ID NO: 793178 - DNA, 634 bp, Homo sapiens
cattcatccatatggggagtgggggaggaagggggagcggtgaggtcatggccatcgttatgaactcatagagcacctttcaggagcacaaagagcttgctgggagacagggcatagggacacatgggcttggagatgacctcctctggctgtgatttggcatttcctccgtatctaacttgcctgggrgactcctgccaagccagaggagcagggcacaaatggaggcagatcctgctggagatgggcatggggagggggactgacagagcacccttggctgctgttagacagttgttcagtcatcacacctgttaacccaagttggtcaggtctgtccaggtgctgtgactcaccttgccggctcagaagagacactgaatgatacggtggggagcacaggcctaggggaatcctgcagctgagtatctggcttttgctctgccaatggtccagtagattagggggtctgtggcctgtttcctcatgctctgagattctgtgcccagcccaggtctctctgttctggaaacaaaggcccagatccccatatttccttcttgctgttttgttttggtttttgaagagtctcgttctctctcctggagtgcaatggtgtgattttggctccctg

SEQ ID NO: 793179 - DNA, 621 bp, Homo sapiens
tgaattgagttctagttaacaaattccatttggagaaaaccattctctcttttttttttttctttttcttttttttttttaagatagagcctcactctgtcgcccaggctgaagtgcagtggtgccgtctcggctcactgcaacttccgcctctggagttcaagcgattctcctgcctcagcctcccgagtagctgggactacaggcatccgccaccatgccwggctaatttttgtattttcagtagagatggggtttcaccatattggccaggctgggaaaaccattcttttgaaataaattggaactctaatggagagaaatggggatgattgctaagagctgatcaatagtgtggtggctgagaaaccggtcgtgagagagaactatgaggggaagttcggggctgagagctctgtgtgcactgaggacttgcagaactgttcacctgggaggccaaaagttgcaccctaggatgagtcaccagagaatcagctcaagaggagcaaggaagccccaagtgaattccaaaggaatgcactactcacccccttatgagaagatgggcagtggggctgtcaggcttgagtatagttagaatagaataatcatgtcctgaaa

SEQ ID NO: 793180 - DNA, 611 bp, Homo sapiens; identical to SEQ ID NO: 770372

SEQ ID NO: 793181 - DNA, 635 bp, Homo sapiens
gaaccctgaccagtgggagacaggagagaggagagagagagaaaatacattcctctcccttttccccttcaatgggctgtactgggatgctgtgttctctatggctcctctgaagacaacccatgtgactaagcaactagctgtgtgttttcctgaagccatggccagttctggaacatgtcttcttttatttgcttcccctcgtctcctgaggcgattcccttttcccacttcccacttccctctttccttactctcactgacctggaattgggcctctcatgaaatgttagcacttaagctttgcctgatgctcagttttctaggaagcctggtccaagaaagactctaactagcaaaaaataagyaaatgaataagttaattaattaatttaatttaatttaattaaagaattttgacgccagccatagtggctcacacctgtaatcccaatactttgggaggctgaggcaggagaatcacttgggcccaggagttcaagaccagcctgggcaacatggcaagaccccatctttaccaattttttttttaattagcaagttgcggtggtgcgcatctgtagtcctagctacttgagagactgaggtgggaggatcccttgattacaggagat

SEQ ID NO: 793182 - DNA, 546 bp, Homo sapiens
gtcgcccaggctggagtgcagtggcgcaatcttggctcgctgcaaactgtgcctcttgggttcacgccattctcctgcctcagcctcccgagtggctgggactacaggcacccgccactaaggccagctaatttttttgtatttttagtagagacggggtttcacygtgttagccaggatggtctcgatctcctgacgtcgtaatctgccggaattgacctcccacagtgctgggattacaggcgtgagccaccgtgcctggcctgtggcaacttcttaatagctgaagttgaattcccttgtcctttgcaaataactcactttagtttagctattatttgtttatattggtaactttgattactgtaatatttgtaggtggaaagaatacatatacatacgtatatatatacatacatacatatatatatggaatttttttttttttcatggaatttcgctcttgttgcccaggctgctggagggcagtggcgcgatctcggttcaccacaacctccgcctctcgggttcgcgtgattctcctgc

SEQ ID NO: 793183 - DNA, 596 bp, Homo sapiens
gcattttggattattgtaggagtatatatatcaaaatggaataattatttacttgagcagaaaatttaaataaaaaaagaactgactattctctttacaaaatccattttaggaagccttcatatccctctgagatactatagagcttattctgcttaaaattaacatgccatctgacctagattctaacgaagggtgaataaaaccctcaaacctttgctttttgatcattataaaagtaggcttcgttttggaaaacatttaaaattaattgtgtggtatttttaaaaggtataattcttgctattaattgcatatgaccataatcattttgcaaagaaaagcatattaactgtcctgataaaaaaatgtacctgttctagtaagtgatttttayaatctagtctcctatccaatgcctgaggcaatcaacaaaataatgactttcagtactttgctcgatttgtgtcactgatgacatcaaaagcatagtgttacgtaagtataagaacttgtcacaaaaggttattaaaacattcaacagaattctttttttttttttttttttgagatggaatctctgttgccaggctgga

SEQ ID NO: 793184 - DNA, 630 bp, Homo sapiens
attattgatgaaaatggatatactaaacaacatattttcaatggagatgaatacagccttctattagaagaagatgtcatctaggacttgcacacctagaaaggagaagtcaatgcctggcttcaaagcttcaaaggacaggctgactctcctgttaggggctaatggagctgatgactttaagctgaagataatgctcacttgccattccaaaaatcctaaggccctgaagaatgttgctaaatctactctacttgtgccctagaaattgaataacaaagcctggatgatagtccatctgtttatagcatgatttactgactatggaaagcccactgttgagacctactgctcaraaaacaaagattcctttcaaaatatgaatgctcattggcaatgcacctagtcatccaataactctgatggagatacatatggagattaatcttcattttatgctgttaacacaacatccatcctgcagctcatggatcaaaaagtaattctgactttcatcaattattatttaagaaatctatttcataaaggctatagctgccataaaaattgattcctctgatgaatctgggaaaagaaagttgaaaaccttatgcaaaggatacaccagtc

SEQ ID NO: 793185 - DNA, 596 bp, Homo sapiens
tttgatgtaggcatgtattgctatcggcttccctctaaggactgcttttgttgtatcccataagctttggtgtttcaatttttatttgcttcaagaaattttaaaattaaaaaaattgtattgacccatttgttgtttaggaacattttgtttaatttctatatatactgttttcaatgttcttcctcatattgatttctagtttaattccattatggtcagaaaagatacttgattttgatttttcaaatttgttaaggcttattttgtaaatgaacatgtgatctctcccggagaatgttccatgtgcatttgtgaagaatgtgaactctatagctgtttgatatartgttttgtaaatatctgttatgtccatttggtctagaatacattttaaatctgatgtgcctttgttgactttctgtctggatgatctgttcattgctgaaagtggaatgttgaagtaagctattattatattcctttctatctctctctttaggtctactaatgtttgctttttatatatgagtgtgctgatgttgggtgcatatatctttattattgttatatatctttttatattgaccccttta

SEQ ID NO: 793186 - DNA, 649 bp, Homo sapiens
aatatggacctctctcagccttcatcgaattgaagggagttatggtcttgctctggattaagctttgccttaaaggaatgttgtggctgcattaatctgctatccagaccactcaaactttctccatgttagcaataaggctattttgctttcttaacattcgtatgttcactggagtagcacttttamtttccatcagtaacttttcctttgcatatactacttaatttactatttggcacaagaggcctagtttttagctcatctcagctttcgatatgcctccctaagtgtaatcatttctagcttttgatttgaagtaagaaacatgtgacttttcctttttttgaatacttagagaccattgtatggttattaattgacctaatttgaagattgttatgtctcagggaatagggcccaaggatggggagaggtacaggagaactgccagtcagtggagcagtcagaatacacaagatttatgaagtctgctgtcttacatgggtgaggttcatggtgccccagaacaattacaagagtaacatgaaagatgtgtgatcaccaatcaccataacagatataataataatgaaaatgttgtgagaattaccaaaatgtgacacagagacgagaagtgagcacatgc

SEQ ID NO: 793187 - DNA, 649 bp, Homo sapiens
aatatggacctctctcagccttcatcgaattgaagggagttatggtcttgctctggattaagctttgccttaaaggaatgttgtggctgcattaatctgctatccagaccactcaaactttctccatgttagcaataaggctattttgctttcttaacattcgtatgttcactggagtagcacttttactttccatcartaacttttcctttgcatatactacttaatttactatttggcacaagaggcctagtttttagctcatctcagctttcgatatgcctccctaagtgtaatcatttctagcttttgatttgaagtaagaaacatgtgacttttcctttttttgaatacttagagaccattgtatggttattaattgacctaatttgaagattgttatgtctcagggaatagggcccaaggatggggagaggtacaggagaactgccagtcagtggagcagtcagaatacacaagatttatgaagtctgctgtcttacatgggtgaggttcatggtgccccagaacaattacaagagtaacatgaaagatgtgtgatcaccaatcaccataacagatataataataatgaaaatgttgtgagaattaccaaaatgtgacacagagacgagaagtgagcacatgc

SEQ ID NO: 793188 - DNA, 649 bp, Homo sapiens
aatatggacctctctcagccttcatcgaattgaagggagttatggtcttgctctggattaagctttgccttaaaggaatgttgtggctgcattaatctgctatccagaccactcaaactttctccatgttagcaataaggctattttgctttcttaacattcgtatgttcactggagtagcacttttactttccatcagtaacttttcctttgcatatactacttaatttactatttggcacaagaggcctagtttttagctcatctcagctttygatatgcctccctaagtgtaatcatttctagcttttgatttgaagtaagaaacatgtgacttttcctttttttgaatacttagagaccattgtatggttattaattgacctaatttgaagattgttatgtctcagggaatagggcccaaggatggggagaggtacaggagaactgccagtcagtggagcagtcagaatacacaagatttatgaagtctgctgtcttacatgggtgaggttcatggtgccccagaacaattacaagagtaacatgaaagatgtgtgatcaccaatcaccataacagatataataataatgaaaatgttgtgagaattaccaaaatgtgacacagagacgagaagtgagcacatgc

SEQ ID NO: 793189 - DNA, 597 bp, Homo sapiens
tttgtatagctgtcttagagtttactctgcgaattgcaacacacacatatggcttatcacagtctactgataaccaacattttaccacttcaagtaaagtgtgagaacctctcttgtatttagttctctttactttccctatttgaaacattattgtcttgagtatcaaatgggctttacagattttgattcagtcatcaaatatracttgtaaaactcatgaacagaagcatagtgtattgtatatgcccaggttcctattcattctactgctctttcttcttgaaaaccttctattaaccagttattaagaatatgtttctagtgacaattttttaaaaaaaattttccttcccttgagaatgtttttaaaacaaatttcccttaatttctgaagaatgattgcaatgattatggaatccatggctgatagttctttccttttatcagaggcatttaaaccagagtggctccattttgtgtagagtctgagtaaaatgaagctgagatctactgggctgcattcccaggaggttaggcattctaatcacaggaagagataggaggtcagcatgagatccaagtcataaagacctt

SEQ ID NO: 793190 - DNA, 597 bp, Homo sapiens
tttgtatagctgtcttagagtttactctgcgaattgcaacacacacatatggcttatcacagtctactgataaccaacattttaccacttcaagtaaagtgtgagaacctctcttgtatttagttctctttactttccctatttgaaacattattgtcttgagtatcaaatgggctttacagattttgattcagtcatcaaatataayttgtaaaactcatgaacagaagcatagtgtattgtatatgcccaggttcctattcattctactgctctttcttcttgaaaaccttctattaaccagttattaagaatatgtttctagtgacaattttttaaaaaaaattttccttcccttgagaatgtttttaaaacaaatttcccttaatttctgaagaatgattgcaatgattatggaatccatggctgatagttctttccttttatcagaggcatttaaaccagagtggctccattttgtgtagagtctgagtaaaatgaagctgagatctactgggctgcattcccaggaggttaggcattctaatcacaggaagagataggaggtcagcatgagatccaagtcataaagacctt

SEQ ID NO: 793191 - DNA, 597 bp, Homo sapiens
tttgtatagctgtcttagagtttactctgcgaattgcaacacacacatatggcttatcacagtctactgataaccaacattttaccacttcaagtaaagtgtgagaacctctcttgtatttagttctctttactttccctatttgaaacattattgtcttgagtatcaaatgggctttacagattttgattcagtcatcaaatataacttgtaaaactcatgaacagaagcatagtgtattgtatatgcccaggttcctattcattctactgctctttcttcttgaaaaccttctattaaccagtyattaagaatatgtttctagtgacaattttttaaaaaaaattttccttcccttgagaatgtttttaaaacaaatttcccttaatttctgaagaatgattgcaatgattatggaatccatggctgatagttctttccttttatcagaggcatttaaaccagagtggctccattttgtgtagagtctgagtaaaatgaagctgagatctactgggctgcattcccaggaggttaggcattctaatcacaggaagagataggaggtcagcatgagatccaagtcataaagacctt

SEQ ID NO: 793192 - DNA, 587 bp, Homo sapiens
aaaagtattttatcaaatggacatcactccaaatcaatggtacacacatggaaaggcaatgaacacttgagtttgctcagatttcaggactgggtcagctctttgcatgtgtgtggtgatacggtttggctgtgtccccacccaaatctcatcttgaattgtagttcccataatcatcacacgtcataggacggacccagttgaaagtaatttaatcatggggggtggtaatcctcatgctgttaccatggtggtaatcctcatgatagggagtgggttctcacgagatctgatggatttataagggacttttctcccttttgctcagtacttccctttgttgccactatgtgaaggacatgtttgcttccccttctgccatgaytgtaagtttcctgaggcctccctagccctgcagaactgtgaatcaattaaacccctttcctttataaattacccagtcttgagtatttcttcatagcagcaggagaatggactgaaacagtaaattggtactacagagactggggtgctgctatagagatacaccaaaatgtggaagaaactttggaactgggtaataggca

SEQ ID NO: 793193 - DNA, 593 bp, Homo sapiens
gcccttcatcccagctgttccagctatgactaaaaggggccaaggtacagctcaggttgtggattcagagagtgcaagccccaagatttgccagcttccacgtggtgtgagcctgcaggtggaattggggtttgggagcctccagctagatttcagaagttgcatagaaatgcctggatgtccaggcagaagtttgctacaggggtggagcccttagggaggacctctgctagggtagtgaagaagggaaatgtgggattagagtgcccacatagatgcccactggggcactgcctagtggagctgtgaaagacagtcactgtcctccagacctyagaatggtgttaaatttatccaccaacatcttgccttgtgtgcctggaaaagccacagatgctcaatgtgagcccatgaaagcatcagggaggggggctgtaccctgcaaagccacttgggcagaactgcccaaggttgtgggagcctacctcttgtattagcatgatctggttgtgagacatggagtcaaaggagatcattttggaatattaaggtttaatgactcccctgttggatttcatacttgcatggggcct

SEQ ID NO: 793194 - DNA, 596 bp, Homo sapiens
ggactccacatctagaagtgcatataccttccagataaggggttggaatggaggtgtgttgtaccctactaaattgttaaggatcttatctgaagaatgcccagccactggaataagtatgggactcacatcaagacatttgctcagtcaacatacaacttttagaggttgtatgcagttgcagtcccaggctgttatgacttttccttttggcttcaattcgayggttagttattcagccttattgttctcccactccttcaataggctaagggactcgccaccccaaaagtttcttaacatttctgtgactattttgttagaatcttttacccaccttcctttaagactgttgtgaagcatgattcagatccggcctgtcttgtgcttttcctcggtaaatataggaattcttagctttccggggaagtccatttgatctagacttttatatccctgtgctcatatctaactcagtgtctggttaagggaacctatagcatgtgtgttccacagaactcctagagtcctcaggactagcaaagagagtgcttacttatacatgcctctctcatcccctctcacctgccagggct

SEQ ID NO: 793195 - DNA, 576 bp, Homo sapiens
acttttgttacagcacctctgtaccaaacagagagaggctgggagagaagtccattcctgcagggagaagtgttgtatgactgactctagaattcttggtatatggtgataataaaaagcaggaagattcttttttgttgttgtttgtttgttttttgtttttttgagacagagtctcactctgtcccccgggctggagtgcagtggcgggatctccgctcactgcaagctccgcctcccgggttcacgccattctcttgcctcagcctcccgagtagctgggactacagacgcctgccaccacgcccggctaattttttgtatttttagtagagacggggtttcacgtgttagccagggtggtctcgatctcctgacctcgtgatccgcccwcctcggcctcccgaagtgctgggattacaggcttgagccaccgtgcccaggctaaaagcaggaagattcttatttggttttattattgctttttaagtgctttgaatataatttatctctgcctgctccagggtggacagctcctacatcttctcacccttgtatgctactggtcttttatat

SEQ ID NO: 793196 - DNA, 576 bp, Homo sapiens
acttttgttacagcacctctgtaccaaacagagagaggctgggagagaagtccattcctgcagggagaagtgttgtatgactgactctagaattcttggtatatggtgataataaaaagcaggaagattcttttttgttgttgtttgtttgttttttgtttttttgagacagagtctcactctgtcccccgggctggagtgcagtggcgggatctccgctcactgcaagctccgcctcccgggttcacgccattctcttgcctcagcctcccgagtagctgggactacagacgcctgccaccacgcccggctaattttttgtatttttagtagagacggggtttcacgtgttagccagggtggtctcgatctcctgacctcgtgatccgccctcctcggcctcccgaagtgctgggattacaggcktgagccaccgtgcccaggctaaaagcaggaagattcttatttggttttattattgctttttaagtgctttgaatataatttatctctgcctgctccagggtggacagctcctacatcttctcacccttgtatgctactggtcttttatat

SEQ ID NO: 793197 - DNA, 576 bp, Homo sapiens
catttatatggctgtgaacttacatgcacttttcattatatacgataaacttcaatgaattaaaaatctgtttttgaaaaatgacactataagtggaggtgaggagaaaaggtgcagggaaatttggtactagatccttcatggcgattaatggatattgacgctgtgtgggagagacagagacatctcaagaaacagtgcaagagccaagcagtaggcagaacttacatggcaaaaggctgcatgatgtctttatgccagattttgcctattactatttgccccattcctgtccttggaagctctactctgaatgacaagggggttgggagactacattttgtaggcttccttgccagstgagttactgttagattttgccagtggacttcatagctcagggactagaaagtgggaggaaatgagaaacggtcctgtttctggctctagccatggcaggtgattgcctgtggttgcaagcagtcacaagtgattacaagcctccagcaccatcagcaaatacaggttataagcaccagaccaagggtgctatcctgatttctgggtaaaattccc

SEQ ID NO: 793198 - DNA, 577 bp, Homo sapiens
gaaatgagttgctctgccaggcccttggttcaagaagagcccaggtgggatcctcttttcacacaatgcgtccagaagccaactgatgagagagtgcaagtgtgcagaataggaactgagggctgggccgaggcccgcccccggggrgaggacctggggcacagagacaacacgaagatgagctaaggtgcccggtagctttaatgagcaccttttcctcactttgtccctccctctctactcttccccttcccgtcttgacaggtccagcctgccctagggctcttaaaccgcaggtatcaatccttctgtccccttagccgctccaggcgcctgcgaaggtccgggggcaccttggccccagctgccagcagctcgcgcagcctctgtttgggagtcttggtgagcacgaaattgcaggggaaggggccctcttcaaaggtgacccgacagttccgtgtcactgaatggtagccctcggcactggcagtcaccatgtagtcccctggggtcagcagacgccaataatccccgccccacgctgaggagagtgaagggcacgatcaggacccaatta

SEQ ID NO: 793199 - DNA, 530 bp, Homo sapiens
cctagagcacatcttctgatttcaggctgggttggttactttctttacccgggggtatagttgacatcccaggcctttctcatcgtcccttttctgtgtttaatctcatttattgaatgccatattgctctctttcttagtttaattctttgttttgctgaagcacatcctccagtagctttcyaagaaagggtatatgcaaggtcaaatttctgagaccttgtatgattgaaatgtcattattctaccctcccaattaataatcattcagacctatacatttctatattagacatcattttgagggcatttattgtcttctagctaccagtattggtgtttagaagtgtgataccattcttgcttcagatccgatgtatgtgatgtttttatttggtggaagctcttaggattgtctttttatccctgctaatgtgaatttcattatatgccttgatgttagctgccctgtttcatgtattgggctgtgaattggtggaaagttatggtctagagaatcatgtccttca

SEQ ID NO: 793200 - DNA, 594 bp, Homo sapiens
atacctcaataaagctgtttttttcttaaaggaaggaaggacaaaatccaccccctaaaaaacaagcaaaccctgggaggtgggcaccatggttattattccatttcacagaccagagatctagacccagagagggtcagccacttccctaaggtcactgtcacaggcagtggactggggtcctcagcctggtacctggctgggggacttccctctgagtccctccacatccctgcctctccatcagcccctgttctaagctctgatatgccatcaacccagsagtgggttctttacagtcggaaacctaaagccctggcatctggggctgtgtcctccccactttctgtatattctgagcctggtctgcaaaccagcctattcctgccctacttcccagcttgggtggcaaacacccgagctctcaaaattgagtttagcaaaatggaaaagcagggggaggctggactgcccttgatctgaaatgtggtgatgagagctgctcagcaccatccctgttaggccaagcttctccccagtgtacattttgaatgagtctgatttattggccgcgtttgaagggatcctaaaaca

SEQ ID NO: 793201 - DNA, 619 bp, Homo sapiens
ccttccttgtgctccaattattcttccaactcttaatcccttttgcttttatcctcatggaacatggggtacttaatgtgaaacaactttaacgttcattttttccaatgtattaactttataatggctagatgagaacacaaatatagtccctccccagtttggatgggggtaagtaaaaattgtttttgaaaaatgaatattcagatgtatttttcaccattatagraataagagttaatattgtgatgaaaagagctgaatacaacatgaatgtagaactctatcatatttcaagacagaaagaattttttctaggacttgagagtacttgaccgagtagagtgtagtttaatctcaatgttaaatagtctttaagaaaaggcagataatccataggttgtccggttgttaaaaatcaggattaagctcctggtcttagttaatagatgtgttaagtaaatgaatgtggctagttttatgctatctgccatataatatcaaatttatcaggtctttgaagaggtgccaacaaaacacctctaaatccagacagaattttagaacacactaataattaaacagataatgaaatttaaaaaatatattacttgagtgt

SEQ ID NO: 793202 - DNA, 535 bp, Homo sapiens
ataaagcatggctaaaataccactaaaggtatgacaaggatcgaaactgcagccaatttagtacacagcacacagatcattggattgttccagctcttcccatgatcaataccaattgacatggctgaattgattctgcagcaaggtgctccaattgttgaaactcatcacgtgggccgtgctccagagtcccggcctcttcgtggacatgcctgcaattctgcaggattgaccccattagcacagtcagaggcttggcaagtgcccgacaccaggcaaggmtggattccatacccacggttctccacaaaatgctagatgtgatatggggttccttcaactcttattattaatcaacataaccaaaatttcaagatacaatttttcaaaagtacaaaatttagaaaacttaaaacatttacaaaataataaatttgacattataatttccaaagaggcctagtaatacaataatacaattttgtgctcatgatgaaaaattctttgaaaatcccaattcatatttaattcctat

SEQ ID NO: 793203 - DNA, 638 bp, Homo sapiens
tggggtagtaagagggtggcaggaggtgcagctgaaagacaagctgggcctgggcacaggaggcccgaatggcttgaggcaaggaagcaacatgatgtcacttaagttgctatattgcccttagaggaactgcaccactaaggagggtcctgagtgtcctctagtttggaagaggtcaaggctgactggcatctatacgttcaatcaatgggcttgtccaaatatttcaataccttacttattctttgcatttttcagaagtggatgacatacaacttttgggcatgtggaagaggtaagaatgctacttgcaggcttgaaatgaccagaacttctgagaatgaccttaagcataaccaggaaggactatggcatggcagagagagggccaygctgggtgacacacacaccctggcgtggagggaagaggaaatggagcagaagcaggctctccggtgaggcagagaatgaggcactacacacaaggaggcaggcacgaccctcccacaggacagatactgggctcacagatacttataaaaatgagatgagttaacagcagctgtggattgaggaatagtaccctgtttcgaatgtgtgaaatacacccacggatgcgttttaaacctagtaaaaaa

SEQ ID NO: 793204 - DNA, 609 bp, Homo sapiens
aatgtcttagagttgtgctgtccaatacgtcaccattaatatgtggctatcaagcacttgaaaagtagctagtctgggctgggtgcggtggctcacatcggaaatcccagcactttgggaggtagaggtgggcggattacttgaggtcagaggttcsagaccagcctggaccaatacagtgaaaccttgtctctactaaaaatacaaaattaggagggcgtggtggtgcatacctgtaatcccagctacttgggaggctgaggcacaagaatcccttgaacctgggaggcggaggttgcagtgagccaagatcgagccactacactccagcctgggcaacagaccaagactctgtctcaaaaaaaaaaaaaagaaaaaaaagaaaagtagctagtctgaactgagatttgctaaaagtgtaaaatacacaccagatttcaaagagtactaaaaaaagaatgcaaaatacctagttaataattttttttctttttaaagcatgcaattggcatctgaatctctggttaataattttaaaatactaattacatactgaaatgttttgatatactagattaagtaaaatacactatcaaaattaacatcatc

SEQ ID NO: 793205 - DNA, 630 bp, Homo sapiens
tggcaaaataaaaggtatttctgccaaagggctgtattattgggatgcaaaaatatcagtttctgccactctttgaccagagtggagggctcccagaactctgtgcagagcttcagcttggccagtttcagatccacactgctctggttgctctcaatggcccgctccagaatggccagcttcttctccagaatgagcttcagggacctctttcgcttttcctgctctccttcctcgatggcatacaggccaggacttttcatgacctcgtcctcaacaacaaaaacaccaatttacaaatgcaaatggacctgggagatcctgagtttcaacaatgcttaytgattttcttaccaccccctagggactttcttaaaccaccagtttgccactatttcttttaaagaaaacctggatcctaaagtgcttgtgtcacctgatatgtttgatcttgtatttatcacttaattatccactctctgccattttaagctttgatttctgcatcaatgactagcatacaatgccttgaaagtcttttctgaagagcagaccttaccaataaaagggccaaatgtggcacaaaatatggtaattgtatgagtggttcaaaattagggattcagacaa

SEQ ID NO: 793206 - DNA, 545 bp, Homo sapiens
agggctcccagaactctgtgcagagcttcagcttggccagtttcagatccacactgctctggttgctctcaatggcccgctccagaatggccagcttcttctccagaatgagcttcagggacctctttcgcttttcctgctctccttcctcgatggcatacaggccaggacttttcatgacctcgtcctcaacaacaaaaacaccaatttacaaatgcaaatggacctgggagatcctgagtttcaacaatgcttactgattttcttaccaccccctagggactttcttaaaccaccagtttgccactatttcttttaaagaaaacctggatcytaaagtgcttgtgtcacctgatatgtttgatcttgtatttatcacttaattatccactctctgccattttaagctttgatttctgcatcaatgactagcatacaatgccttgaaagtcttttctgaagagcagaccttaccaataaaagggccaaatgtggcacaaaatatggtaattgtatgagtggttcaaaattagggattcagacaa

SEQ ID NO: 793207 - DNA, 647 bp, Homo sapiens
aaaacattgccaatccagcctccaagggacagtccatccaagcttaaaagacaatgattgggggtgggagggaggaaaaaaagaaaaaaagacaatgatcatatccctgcttaaggccaaatgcccatctagtcctcacatgacagtgctggtcaaatcctaaccgttcacyttcatttcaatgttctcggcgtgtcagtgttcctcctaaagtgtgaaaattcagtacctgacacaaaattgttaactgcagaaccagttcaaactacttcagctttgtcaataacagaacaatgagttgttgttcagttgcagtggacccacagctcgcaagtcacaagcatgcacagatgaatcaagcgtgcccaattggtgaccccaaagccagggaacaaaaatgtcaaccgcacagggaaccaaggtacctaaaccaaggagcacggaccaaattaagaagtgaggagagttgctgcagtatgaatttaagagccaataacccacaggccgggcgtggtggctcatgcctgtaatcccagcactttgggaggctgggatgggcggatcatgaggtcaggagattgagaacatcctggctaaaacggtgaaactccatctctactaaaaatacaaaaatacaaaaaaactag

SEQ ID NO: 793208 - DNA, 627 bp, Homo sapiens
tataaaaaaggacaagtagctagaagttgagttttgggaagacgtaacaattaaagtagcttgctttaaagacacagtaaaaggtaaggacaccaataacatattcattcattcatgtaacaaaaacaaattcagtgcttactctgtaatgggccctgtgcaccacgtgctgtgggaatatggtggtaagcaagacaggcctgattcctaccctcaaaaattcagtcaaattcagaacctttttgcyggactgctttattttttcctctaaagagcaagcttgggggctgggtgcggtggctcatggctgtaatcccagcactttgggaggcagaggcgggtggattacctgaggtcaggagatcggagatcgagaccagcctggccaacatggaaaaaccccgtctctactaaaaacacaaaaattagccgggcgtggtggcacatgcctgtaatcctagctacttgggaggctgaggcaggagacttgcttgagcccgggaggcagaggttgcagtgagccgagatcgtgccactgtactccagcctggccgacagagcaatactctgtctcaaaaaaaaaaaaaaaaaaaaaaaaaaaaagcttgggttacaaaaattagctgg

SEQ ID NO: 793209 - DNA, 663 bp, Homo sapiens
agttttcatatggacacattttcatttctcctgagtggatacctaggagcggaattgctgggtgatatggtaactcatatttaacattttgaggaaatgccagattgttttccaaagtagctgtaccattttagattcycaataacaatgtataagaattccagtttctccatatccttttttgtcatattatcttttttattatagtcaccctagtgggtatgatgtgtcatcttgctgtagttttgatttccatttccctaatgactaatgatgctgaacatcttttcatgtgtttattagccattcacagatcttctttgcagaagttctttattctgggtactagctccttaagtaactgtattagtccgttctcacactgctataaagaaatacccaagactgggtaatttataaaggaaagaggtttaattgactcgtagttccacatagctggggaggcctcaggaaacttacaatcatggtggaaggtgaagaggaagcaaggaccttcttgatgtggtggcaacagaggaaagagtaaagagcaaagggggaagagccccttataaaaccatcagatctcatgagaactcactcactatcgtgagaacagcatggggcgaactgcccccaggatccaatcacctcccaccagtt

SEQ ID NO: 793210 - DNA, 609 bp, Homo sapiens
ccaacacacctggctttttttttttaataaggggaaaaaatttattaggtccagaaatcaaagatgacttagggtagaattatgattacatgcagaattggatggttagaaatgaaaccaatctatttaagtccagcctaaggttctgatagccaatcagtagacacaatgagagtagtagtattcctagaaacccggataaatctccaacttgcgtgagtttaatgaaccaggtagattattgtatatctgcccttatcccattctcagtcagatgaattttcttgctcatgaagtccacattgaaaacagcatgcycagaaatgggagtgaaacccccttctctacaaagaatttaaaagtcccaactactcaggaggctgaggtgggaggatggcttgagcctgggagtttgaggcttgagctccttccctgcgtcctccttgacttaaacctctccctttgatgaggcctgtgtaagatcctccaggaactcctcactcaggacaggttcccacccagctgaccctggttcctccagctgagcagaaccaaggcaggtttggatcatttgcttttttggggccaaggagaaaaatctttggcttc

SEQ ID NO: 793211 - DNA, 572 bp, Homo sapiens
tttgtagttgaggaaaccagatccagagagggaaagttggctgtgctcctctgtgtgatgaagccaagttttctaattcctgagcaagtatggcatatatacagtagatgcttaataaatgttccatgacaatgaaaaccaaaattaaaatatgaagcccctccaccaatggaatggacctctcctctcagccaaggcattcctaaactatcctgatgggaagtggggttggacrtgcctcattataccctcctccactgggaattcaggcacagctgaccatcttttaaagacattaaaacagagaccttaaggctgacaaagcagactcttggcagcaataagataccaacatgacagatagcaggccctagaagaaatcaaagcattttaccccaaaatatatttctttgacatattttgaaatggccttgcaaagctgtctcttatggggaaaacccttcctttccaggaattttcctgatccagtagagaattaattaagagtctgccaccttttaaagtctaataagaaacatttacaatttagtctctctgaagcctgcaacctg

SEQ ID NO: 793212 - DNA, 622 bp, Homo sapiens
ggcggatcacgaggtcaggagctagagaccatcctggccaacatggtgaaaccccatctcaactaaaatacaaaaaattagcctggcatggtggtgcacacctgtagtcccagctacttgggaggcggaggcaggggaattgcttgaacccrggaggcagagattgcagtgagctgagatcgtgccactgcactccagcctggcaacagagcgacactctgtctcaaaagaaaaaaaaaaaaaaaagactccagcccagctgggcccagtgggtcacacctttaatcccagcactttgggaggccgagcaggcagatcacctgaggtcaggaatttgaggccagcttggacaacgtggtgaaaacccatctttactaaaaatacaaaaaagtagcccggcgtggtggcacacaaccgtagtcccagctacttgggaggctgaggcaggagaatcacttgaacccgggaggcggagggtgcagtaggccgagatctggccactgcactccagcctggacaatagagcgagattacgtcttaaaaaaaaaaaagaaaagacttcatccagcaagaaagaaatctgtcataccggattcctaaaagtcaattggaatctcatcct

SEQ ID NO: 793213 - DNA, 658 bp, Homo sapiens
tgaattgcttgaacctgggaggcggaggttgcagtgagtagagattgcaccactgcactccagcctgggcgacagtgccagactccttcaaaaaaaaaaaaaaagtaataaatcaaaaacaatattgcatcactggagggatttcaaaaaaaaaaagtaataaatcaaaaacaatattgcatccctggaggaatttcagagattagtgccaccatcaaggacttgaaagatgcaggggtggtgatttccaccacatcccctttcagccatcccatttgacctgtgcagaagacaaatggatcttggagaatgacagtgaattattggaagcttaaycaagtggtgactccaattgcagctgctgtaccagatgtggttttattgcttgagcaaattaacaatctcctggtacctggtatgcagccattgactcagcaaatgttttttctccattcttgttgataaggcccaccagaaacaatttgccttcagctggcaaggccagcaatatacctttactgtcctacctcaggggtatatcaactctatggctttgtgtcataatcttattcagagagaccttgattgtttttcacttccataagatatcgcactggtcattgatgacattgatgacattatgcttattggatccaat

SEQ ID NO: 793214 - DNA, 619 bp, Homo sapiens
atcaggaaggctccagaaactgtctctccttctgctccttttgaccctcttctctctgaacttccttttctgggcaatttcatttttcctcctccttcccctactctcttgcytcaagccacagagggaccagaaatagctggagaaaataacattgtagttgttccttttagagtaagacccacaggcagaggggatcctaacataatgtataaaccctggaccaagtcagagttaaaggccctggtatctggattccccaatccgagtgaagatccctttggatttgctaaggaattccaattaatgctttagacttatgatccggggttctctgacctgtatcagctgatcgagttagtggtccccaaaaaaaaaactgaagaatggtttagagcagcagattagaaatagcctttagaagattttgacaaaatagatgcaactggaagagagagatgcagagaagctttgcatttgcctccatgaaactgtatcacggatattccccaaggtcatagattgggcaaaggtgcaacaatgtaaaatacgcccaaatgaaaccgtacctgacttttatatcaggtttgaaaagacattcaaacagttttcaggaata

SEQ ID NO: 793215 - DNA, 619 bp, Homo sapiens
atcaggaaggctccagaaactgtctctccttctgctccttttgaccctcttctctctgaacttccttttctgggcaatttcatttttcctcctccttcccctactctcttgcttcaagccacagagggaccagaaatagctggagaaaataacattgtagttgttccttttagagtaagacccacaggcagaggggatcctaacataatgtataaaccctggaccaagtcagagttaaaggccctggtatctggattccccaatccgagtgaagatccctttggatttgctaaggaattccaattaatgctttagacttatgatccggggttctctgacctgtatcagctgatcgagttagtggtccccaaaaamaaaactgaagaatggtttagagcagcagattagaaatagcctttagaagattttgacaaaatagatgcaactggaagagagagatgcagagaagctttgcatttgcctccatgaaactgtatcacggatattccccaaggtcatagattgggcaaaggtgcaacaatgtaaaatacgcccaaatgaaaccgtacctgacttttatatcaggtttgaaaagacattcaaacagttttcaggaata

SEQ ID NO: 793216 - DNA, 541 bp, Homo sapiens
ggtgctgatggatgacacggatcccctggtcacagtgatgaaggtagaaaaggccccccaggagacctatgcagatattggggggttggacaaccaaattcaggaaattaaggtatgattgattggtaaccatctctgggtttcagttttggtttctgttgtcccatttaggatactttgcaggtgttttgtatgtttgcttatttattaatcaaaccagtagctgagtcagagcttgccagttgtggtatttttgtatttgttaatactgagttaggtgatagaaataacagtcagttgtgtgatagttcctgcagcagctgcagcttccttctttttagtgtaatgttgaatgcattgtctgtgtgaatatgtaatgtttctgattatgttgacttcagttgtgtttatctggaagcctccagtgctttgtggagatagcatgtgtayttgcacacatttagacagcagtggggttggagcataatcccagtgccttcagcagccctgggggctggaccatatgcagggcatatggtca

SEQ ID NO: 793217 - DNA, 623 bp, Homo sapiens
catgcctgtagtcccagctactcaggaggctgacgtgagaggattgcatgagcccaggaggttgaggctgcagtgagtcgtgatagtgccatcgcactccagcagcctgggcaataagaaagaccctatctcaaaaaaaaaaaacaaaaaaaactttggctgagagtgttaatgtatatgcaaaacagcgcatttgaaagtctctccyaaaaatgaggttttaacctgctaaattccaacattagtggaaaattttaattgctgtttgtccaattcctttccctcccatattctccgtggccaagaataagctttaattccttcaaactttttttttttgagatggagtttcactcttgttgcctagactggagtgcggtggcgcgatctcggctcaccgcaacctccgcctcccgggttcaagtgattctcctgccttagcctcccgagtagctgggattacagacatgtgccactacgcccggctaattttgtatttttagtagagacagggtttctccatattggccaggccggtctcgaactcccgaactccttcaaacatttttacagggaaaaaagtgcaagcaagcaaataagcttgcatgcatgttgcaagagta

SEQ ID NO: 793218 - DNA, 505 bp, Homo sapiens
aaaaaactaagatgctacatgctcatggccatcttgttatctgccacggtgctttataggctcattctttggccatattcttaaagagatcagagaaaaatgtaattgacatttgaaacatgttttttttttttctctagaaaccacgccaatattttgcatcccattatgttcttttttcactactttcatatggcaggaagcccattttaaactccttaagagagaaaaagctatytcctttcctcactaaagaacttcacactggagaggcatggcttctacttctatcccttctccagctcccattcccaatcaaagtagagctaggtgtttagcagagttccttacacacagtaaacatcaatagagcatatccactgaatgaacactattaatattgggtgataggttgttggaagtaggaagatggcactgaggaagaaaagattaaaaaatgaaaggtgttgcgtgaagtctgttggtaggtgtaactagtagttgc

SEQ ID NO: 793219 - DNA, 589 bp, Homo sapiens
gggctctgctcagttaacatcatgaggctcaagttagtatctctttggagtgaaaagctctttctgaatcataactttgtggtcagataagagaaagtttctaggtcttagctcagtaggaaaggtaactgccatcagaattccagaccatctttcataacttctcgaagaggtgacaataactaccatcaccatcattcctctggccctatctgtgactcagaaccagttctgatattttgacattgcccattggtacccaacgcttccctctggtgttyctagtttcactagtgactttagatctctgaacactctgactgtcacggtggtgttttggaccctcactaggatagaatggccatagttttggggagatgctgattcactctaatctcctactgggctctcaaatatattatcgtggaagaacattaccctactggctaatttcataaagatatcgtgtttgttaaggtctgtgatgcgacgtatcttattgcatggccttaggcaagttacttaacctctctaagactcagtctctttatctgtaaagtggaggaagtaataggattgatcctgcgag

SEQ ID NO: 793220 - DNA, 546 bp, Homo sapiens
caagagagcagcattacaggaaagggatcccggtgctagctcccggaaaggctaggctcttgtcattttaaggaagctgaggcgggggaaaagagccacatgtgcatgtttacgtgggttcttctctgtgcctgtgttgtgaggcttcacgccctaaagtgcgtcccatgcacagaaaaaggataamgcctagggtggataaagccccgccttaggtgggctcagtattacaataagattataatgagaagaaagtcagtcctggagttctcgtcgcctgccagccagatctggtcaggtttttatcaggaaaaccagagtcccgattcagcaacctggaagacattactcaaggagattaacggttaggttcttccttttatagttagaaattcggcttggtcagctaagttgggaaggcggctttctgctacgtggcttaggtcagcttaagagaggcaagaaggtagggcagagaatatgcccggacatgtgagacctactgggattctgatcatcatgtctcttgtctgccaggaccgactc

SEQ ID NO: 793221 - DNA, 587 bp, Homo sapiens
tggagatattacacttgctgatctcaaaatacattacaaaactgcagtaattaaaacattatagtattggcataaatacaggcatacagaccaatagaagagaatagagaacccagaaataaagttgcacatgtgtggtcaacttattttcaagaaaagtgccaagaatactcatcgaggaaagtagtttctttaaaaatggtgttgggaaaacttgatatccacatgcagaagaatgaaattgaaacctcttacactacccacaattatcagctcaaagttgcatgaaagtcttaactaagacttgaaactgtaaagctgtaaatctcctagaaggaaacayaggagaagttccttttttttttttttttttttgtttctctcttgttgcccaggcttgagtacagtggcagcgatctcagctcactgcaacctctgcctcctgggttcaagcaattctcctgcctcagcctctcaagtagctgggattacaggcatgtgccaccacgcccggctaattttgtatttttagtagagatggggtttcaccatattggccatgctggtctcaaactcctgacctcagg

SEQ ID NO: 793222 - DNA, 587 bp, Homo sapiens
tggagatattacacttgctgatctcaaaatacattacaaaactgcagtaattaaaacattatagtattggcataaatacaggcatacagaccaatagaagagaatagagaacccagaaataaagttgcacatgtgtggtcaacttattttcaagaaaagtgccaagaatactcatcgaggaaagtagtttctttaaaaatggtgttgggaaaacttgatatccacatgcagaagaatgaaattgaaacctcttacactacccacaattatcagctcaaagttgcatgaaagtcttaactaagacttgaaactgtaaagctgtaaatctcctagaaggaaacataggagaagttccttttttttttttttttttttgkttctctcttgttgcccaggcttgagtacagtggcagcgatctcagctcactgcaacctctgcctcctgggttcaagcaattctcctgcctcagcctctcaagtagctgggattacaggcatgtgccaccacgcccggctaattttgtatttttagtagagatggggtttcaccatattggccatgctggtctcaaactcctgacctcagg

SEQ ID NO: 793223 - DNA, 587 bp, Homo sapiens
tggagatattacacttgctgatctcaaaatacattacaaaactgcagtaattaaaacattatagtattggcataaatacaggcatacagaccaatagaagagaatagagaacccagaaataaagttgcacatgtgtggtcaacttattttcaagaaaagtgccaagaatactcatcgaggaaagtagtttctttaaaaatggtgttgggaaaacttgatatccacatgcagaagaatgaaattgaaacctcttacactacccacaattatcagctcaaagttgcatgaaagtcttaactaagacttgaaactgtaaagctgtaaatctcctagaaggaaacataggagaagttccttttttttttttttttttttgtttctctcttgktgcccaggcttgagtacagtggcagcgatctcagctcactgcaacctctgcctcctgggttcaagcaattctcctgcctcagcctctcaagtagctgggattacaggcatgtgccaccacgcccggctaattttgtatttttagtagagatggggtttcaccatattggccatgctggtctcaaactcctgacctcagg

SEQ ID NO: 793224 - DNA, 586 bp, Homo sapiens
ctatgaaatactatgaaaatgctgtggaaaactgtgtctcactttacctgtcatttattgcacacttgctagatgccaggcactcttctaagtgctttacctgcaataacttatttatccctcatagcaatgctctaacttacttactactactatccttgcttgatagacaaaaaaactggaggcaaaagaaatcaagtaatttgtccagygtaaccaactagaaagtagcagggcctcagttaagtcgggaaatctggatccagagtctgagattttaaacaccctcttttacttacgtattattaaaattaaaaagaagaaagaaaagtctgagccactttacctttcttttttaagattctactagaagttttacttatatatactctttaatatggtgctcatatatcatgttaacttttacagaacagagtgtgaagcacaaaattgatagaaatacctcattcctaaaaatcagaatccaattattgttctattctccctacctctgcactctaaatcctgtaccaagtcccacttatgtgtttttggtgggcgaaacacattataagtaacatgtcat

SEQ ID NO: 793225 - DNA, 601 bp, Homo sapiens
ggctgagaggaagcactgggcaagatacaaatttattcaaagtgaccatgttcatcttaactacatattccttcaccaggatattccatttttaagccacttcaaaacatttttagaaaaacgcacaaataaattcaataatatctatttacagggacccagcagaatttcttaccaaaaagaaagagaaatggggaaagtgtggggtgggggagagtagggagagatagaggaggaagggcgggagggagggagggasgaaagaaggaaggaaggaaggaaggaaggaaggaaggaaggaaggaaggaaggaaggaaaaatgaatggactttccaacaatgttaacatcactaaaatttagtcaggtaccttttacatttgtgaaaaacatttaatacattaactatgttttctccaccaatgtgtcaaaccagtaaatctaccattcccttcacacattaacagagaagagtttctgtagaaatgtgcacatccagtgttaatgaagaaaaacagctgacttgctcttaactgaagggaaagcaattatcatttagttcagtgaatcagctagtgttactccccaccttcacttctatc

SEQ ID NO: 793226 - DNA, 484 bp, Homo sapiens
gatgatgtttattataaattttgcttgtctgtgtacacgttttcaagaaagttcttacctgttcctaatttagcagttttcccaagaattgttaaattttatcaagtctttcttctgcatctattgtcattatagtattttttctcatttagtttgttgatgaggtaaactacatgtacagatttttctattaaaagccaccctttgcacatctgatataaatccaacatggatatgattttccttttacatactgttcaaggtttttctgctattamatcccccaaaatcccttatttaaaacccttggaataagctatgtttcagaaatcaaacatttctagtcactagtaataatgcatggtgcaaaaactgggtattttttaacaaccttagcaaactgagtgtcagcatccagtattcaaacacattcatgttttcacagtgaactgtacagatactcactctaaacaatgattgtaag

SEQ ID NO: 793227 - DNA, 618 bp, Homo sapiens
ccatcccatcactactccaaacaccaagaacagataaaacgtaaaaagatatttaaaagggatgctctaaagcaagataatgatctcttttggcccaactgatttcagctcttcaggattcatgggaattccacacatggtgggtaccctgagccaagctcactatgagaaatcaggactataccagtgtctcccacccatcctaccagtgacataagagctactacagctgctgcctgacgtttaagcctcctgtgaagcttcaaacaaagggagacagaaggaaactgtcacagtcctgaaattaaagtaacttatcctgagcaagctgccacaaacgcagggactgracttgtgacctattcagtccccactacccataaaatacctggttctgagctgacattccagggggactaagggagagacaaccattcaggaaggaatgagtgaagaaagagggaaagagggacactctctaaatgaagaaaaccaacaaatgtcagccaacacagcaaatgcaatggaaaaaataatccaaaaagggtatatatattttcaggatcttcacagagatagtggaaggaataacattcatttaaaagatgaaatgaaaac

SEQ ID NO: 793228 - DNA, 625 bp, Homo sapiens
aaaattaataaatatgtgaaaattaaacaacattcttttttctttttttgagacagagtctcactctgtcgcccaggctggagtgcagtggtatgatctctgctcactgcaagctccgcctcctgggttcacaccgttctcctgcctcagcctccagagtagttaggactacagcatgcgcccgccaacacacctggctaattttttttttttgtatttttagtcgagacggggtttcaccgtgttagccaggatggtcttgatctcctgacctcgtgatccacctgcctcggcctcccaaagtgctgggatcacaggcgtgggccactgtgctcggccaaacaacacattcttcaacagccaatggaacaaagaagaaattacaaayaaaattagaaaacacttctagatgacgatttagtgggtgcagtgcaccagcatggcacatgtatacatatgtaactaacctgcacaatgtgcagatgtaccctaaaacttaaagtataataaaaaaaaaaaaaaaggaaaaaaaaaaaaaaaagaacaaataacctaaaaaaaaaaaaaaaaaagagagagaaaaggaagtggaatatacaaaagaaaaaaagatctggcaggaaat

SEQ ID NO: 793229 - DNA, 525 bp, Homo sapiens
aaaaaaaaaataaaaaaagctcaaggtcaaagttcattgagcaaaataaatctaatttagtctaaggaaaccatcaaagggcagtttaactctgtgacaaaatagaagaatggaagttcctcctctaatcagcatcagtccatttgatttcccttcccataagcaactctagccattgcttatgrgaagggatttataataatgtagtcaatgtagcaaaatctcctttaccaaagtaagttctgtgaccattgaaatttctaatgaatatattttgagaatatatcatcaaaggcaagagtaaagaaattgtgtgtaaataatggactgtaggcaatattttggagtaatgaggagtgcagttgatagaaaagaaaattctaatgtggaaggcagagaatcactactgtttcttaaagagatgagtgacatggtgaaaatggtgtttgtacaaatggcagacaattatgcacaaaagggattacaggaagaggagagaagctagaagacttctgttttgggtgg

SEQ ID NO: 793230 - DNA, 560 bp, Homo sapiens
tcctcagtgtcaagtgggttgtaacttctgctttttattaggtcatcaccggcgagtcctcagactcctgggctgtatttctgctggtgttttcctgggagcagggttcatgcatatgactgctgaagccctggaggaaattgaatcacagattcagaagttcatggtgcaggtgagagcagagatttcaagccgcaggtctatgaggccaaaatgataaacaggacaaagggaagagagcgggaaagtgatggagccaaggacatgggtggaacgacaaggaaaatgacagctctkgtgtgggatggtgaaagcaagtcagattaggctttaaggaaaacagaattgctgaagggacagcacaggaagctgtgctgctccatcccacatctaatttctgctgctttcttcttagaacagatcagcaagtgagagaaattcttctggtgatgctgattcagctcatgtaagtacctcccaccatcccctatctggagagtgaggagaaccagagaggcctttcatatccagacccttttgagaggaatacatgaggagta

SEQ ID NO: 793231 - DNA, 525 bp, Homo sapiens
gaaactgaaataaccttttgattgttttcagaagatatgaattcccagcaaggagccagagagggttatacggaagcagaagatgaatgtgatttctgaatgagattaaaacaagaaaggctggaataagaacaggcataagaaccctaggacaggaaggagagccgagatgcccagggcatggkgactgcaaacctgattcaggagtaagccttgattcactcagccctaagagatagcttataacaaatggtaactagaatggtgagagctgaaaaaataaaaaaagaaggaaaaggcgaggcacagtggcacacgcctgtaatcccagcactttgggaggccaaggcaggcgtgtcgcttgagctcaggagttcaacaccagcccaggcaatgtggcaaaaccccatctctacaaaaaaaaataaaaaatatatatatacacacaaaaaatacaaaaaactagctgggtatggtggtgcacacctgtagtcccagctacttgggaggctgaggtgagaggat

SEQ ID NO: 793232 - DNA, 647 bp, Homo sapiens
tgagtgacagccttcatccccttgaccctacttccctaaatccccattgttccagtctaccctccctaaccctgccaactgtgtgactgtagagacagggccgaaacagactttagagatcatctagacattccagaagtcaggaaaatgtggcccagagaagggaagtgacttgcccaaggtccatggctattttaatagtagatttagactaatttccaagtgtctagtatctragccaggcaattagggcttggtagcttttggaggacattagtgtagagaatttggtacctgatgcccactcctcttccaattcttatttagggtttaatctcaggcctcctgcctctcacctactcccttttttaattgtcctgtctgaactaaaagctctttctacagtggatattgagtcggggagtgggagtgaagtcctcaggcagcagcctagtcagaataactcctctggaaacaaaaaacctaccctccctctgcacacgccacactcattcccacaccacactcctcctcccccatgagtgaacggctcttaccagagtacctgcccacagctgtatctgggccctaagaaagcagcaccccatgccagtggcagagcaagagctccaagcacttgttctaag

SEQ ID NO: 793233 - DNA, 554 bp, Homo sapiens
tgggcatttagggagtttccagtatgttgctactgtaactgaagtgactagtctggcactcaagttgctttgcatagctggtagagcatggataaggtacattcctggaaggagaatggctgcctcacaggttcctgcatttgtcagcctgacccggaagcccaaatcaccctccacaggggctgtgcaaaatgatgcccccaaagcagtgagcgagagagagggcctggcggccggcagcctcgcacacaaagtgttgtcactcaccggggtattggtcactctaatgaaccacatgcccattctgcagacatctcaaacttyaaaaaaaaaaaagattaatagaagatttatttagcaaaaatacatatagccattattgcaagacttaaatgagatgttaaatgttcaacccaattttctttcctggataagtttttctttcatatccctgtcagttttgaaaacataataccagaagaaggggggcccaattccacagagagctcccaagagtgagtttctgggagtgagtctgaagttgagataaacct

SEQ ID NO: 793234 - DNA, 627 bp, Homo sapiens
acattctgttacgcgcatcaaatgtgtagtgatcaagtgggaatgttcaggacatccctcacctggagcactcatcatccctacgtggtgggaacactgcaaatcttctcttttggctattttggagaatacagtaaatatagttgttccatggcagagtcggtgacagcagttaatgtgaggcctttccctgtacctgtgtgtgtaccattaagcatcctctccatccgctcccctcccacccacatgccctcccagcctcrtgtcagtatcaaccatcaccccactctctacctccctgagagccacgttagctccctgtgagtatgaggacatgcgctttgtctttctgtgcctggctgatttcacttcacgtcatgacctccagctccatccatgtggctgcatgagaggattcccttctcttgatggctgaatggtcctgcatcgtgtgcaccacgctccttatccattctccagttgacgcctatttaggcggatttcagcaaccgagcagcgctgcagtgaacacgcatgcaggcgtccctgtgtgctgactcgtttcctttgataatgctcggtgctgggactgccggatcctctgggagtcctatgtgtagttttgtt

SEQ ID NO: 793235 - DNA, 684 bp, Homo sapiens
gtcaggatccgcgtctgcagactatacaaagacaaacaacacagattaaaagcataatcatcattgaaatcacagagcttccaagtgtttttatccatttgaatgggttactagcttttcatctgtctgcagctccttcaagcactccagttcctggcattaacgtcaggtgtgcctgggatgctttaaatatttgttcttttaattttgcaatatccaaaaacaagtttgtagggtgtccttctcgatgcttttttattctttcccaaatttcgatcttattaagagctattaatagtttccacaaatccttatgtttagctcctacaacgagccatatcatttgaggttgaggtgccactatactgccatggttccagataataggaactcttgtcatatgttttatcatttctgccatctgatcattttgttcagatcagctgaacatagtgtggttgtggcacgcagactgagaggtgcgatttaagctaaacatscccttaggggaccagtccataatgattccataggaatctctgcgcagcacctctgcctgttctgcaatgcggtcttcctaaacaagtatgttcattatttctggccaggttctattttgtttacaaataggtttttgaggacggtatgcctcaattataggagcagatttattatggtaaatac

SEQ ID NO: 793236 - DNA, 543 bp, Homo sapiens
accctgacaccgcttgaaaatatcctgcctttccaggctgtgccaacctataccttccatgtgttgatttatgtcttcgccggtaactcctgcctccctgaaatgtgttaaaccaaactgtaatccgactaccttgggacagttactcaaagcttcctgggtttgtgtttgctcctggctgtggtcactcatattggctcagaataaatccctgcaaaacattctacagagtttagtttttacattaacatttataacacgcccctttcagccatagctgaatttctgttaacaagaggactggtggctgaagcccctaggtagctgcaggctgggggctgcagaggaggcccccatgtgattggagggctggaaccttcagtcctacytgacctccagggagaggagagggctggggttgagttaagtactgatggtcagtaagttaatcatgcccatgtacataatggaaactccatgaaaaccctaaacggaggggtttggagagcacatccacgtgtcaggagggcggtgcacctgact

SEQ ID NO: 793237 - DNA, 545 bp, Homo sapiens
gctctgaaacaactgaaaaacctgaggctgggcgtggctcacatctctaatcctagcactttgaggggccaagttggcacatcacttgaggccaggagttcaagaccagcctggccaacacggcaaaaccccatctctacattagcagagcacggtggtgtgctcctgtagtcccagctacacgggaggctgaggcacaagaattgcttgaacccggcaggtggaggttgcagtgaaccgagattgcaccactgcacttcattgggtaaaagaacaagactctgtcaagactctgtcaagagcctgggtgacagcacgagactctctctctaaaaaaaaaaaaacaaccctgagaaagagaaaaatctacaagacgagctttcgtgacactgagcrtcaggcaatgaaggaaaacgggaatcaagtggggtgagccctgagatgcccggctagccgcgtggagagtctccaggccatggggtaaggagacgggaccagcctcctcctgagcggagcacagccagctgggagtccaggcaagccta

SEQ ID NO: 793238 - DNA, 642 bp, Homo sapiens
cctgctggggtgagatcgcggctctgtgttgggagagcccctgctgtccccctacttcctgggccctctcctttggcccacctgagcctcacctggctgaggcaagaagccctgtctgctcccacctgagccaactgcatcctggtatcctgggcggtcggaaactctccctgatgactctcggatgcttcccacgcctgggccagggccaggggtttggggggctgttttcttgacacggcgcccgtctcctcgctcaaggacccgggactcctcagtctctcccacctcgcaccgcctggacccctgtggtctcagtccagggcccgagcacagggcagttcctgggacgcttcctggtccactcctgtatctgggggtcccgctttggtgtccaggacaatgtgtgtctgggacaggggactgttcatcttctgaggacttgccctgcaggtgcctgagtctgcagatctgtgggccygggctctgcctccatcctcctgggccgtccaggtctggatctggatcacagctggagccccccaggtgtctgtcctgcgccgtcatccccgggccgggtgggcagaggcgctgcctgctctcaggtgctctctctgagcctggttccatcgcagccgtctt

SEQ ID NO: 793239 - DNA, 571 bp, Homo sapiens
cgattagaactccatgcaaccagttgatatgagggggatccacttactattacccccaataacaaccagctggcaggatttttgcttcctgtcgcagcaactttgagctctgctaatgtgaaggtcttagtcccggagaggaacatccttcaaccaggagacacagcaatggtttcattaaattgaaagatgatgccgccacctggccatctggggctcattctgtcatgacaccaaaagacctaaaaaatgattgctctcttgactgcagtgataggttctgattctcctgggagaccaggcagctgctactatgtctggaaatcagggcattcattctctgcggcacttctgactatttccatgkccaatagaaaaggttcatggaaaactaccccagccatagaaaggcaggaaaattgaggactcagaaccttctgaaatgaaagttttagttgtttcatcaagtaaagatcaccaactagctgaggtcccggctgagggaggggaaaatccaggatgagtgatgggagaaggaaccatggacttcaagcctcggctcccaactgtc

SEQ ID NO: 793240 - DNA, 575 bp, Homo sapiens
gggggctgaggggctgcaaggcagcacagggtcagaggatgggagttctgggggcgaccagggactgctgggtatagcagcagtcagtatgggtatcgcccatcggtatgacttctccctggcaagcccctcccacrgctcagctatcatcctccatagtgatcgcctgacaaaaccagagtcttggttaaactcagccctgtgattacagtctgcacctcagcgctgaacttggcttcacgccaagtcacaggttgctgatgaacccacttcaaagaggcgctggacatggctggttgagcctacccctgagacactaaagtattttcctcctctctcctcccatctccagcaacaccactttcattttctcagttaaatgttcagttataaaatgctaataatataacacattcacatgcctcataatgaaaatttacaagctatacggccaaatacctccttcctaacttctgtccccatccaaccctgttcacctctctctctctctctctctctctctctcagacacacacacacacaccacaaactctgctctgcactgtgcttttttc

SEQ ID NO: 793241 - DNA, 569 bp, Homo sapiens
tgcatggggggctgaggggctgcaaggcagcacagggtcagaggatgggagttctgggggcgaccagggactgctgggtatagcagcagtcagtatgggtatcgcccatcggtatgacttctccctggcaagcccctcccacggctcagctatcatcctccatagtgatcgcctgacaaaaccagagtcttggttaaactcagccctgtgattacagtctgcacctcagcgctgaacttggcttcacgccaagtcacaggttgctgatgaacccacttcaaagaggcgctggacatggctggttgagcctacccctgagacactaaagtattttcctcctctctcctcccatctccagcaacaccactttcattttctcagttaaatgttcagttataaaatgctaataatataacacattcrcatgcctcataatgaaaatttacaagctatacggccaaatacctccttcctaacttctgtccccatccaaccctgttcacctctctctctctctctctctctctctctcagacacacacacacacaccacaaactctgctctgcac

SEQ ID NO: 793242 - DNA, 562 bp, Homo sapiens
ttttttcttttttttttttcttttcttttctgagacagggtctccttctgttacccaggctggagtgcagtggcgtaatctctgctcactgcaacctttgcctcctggactcaagcgatcttcccacttcagcctcccaagtagttgggaccaccatgccctgctgatttttctattttttctttttggaagagacagggtttggccatgttgcccaggctgctttcgaactcctgagctcaagcgatccactcgccctgacctctcaatgtgttgggattacaggcatgagccactgtgcctggccagttttttcactttttaaggtactataaaagaaacattttacaggattgaacatatgcttatatctattatgaaaaaatacataatttaaaaaaatacctggctgggcacagcakcccacgcctataatcccaacaatttgcaaggccaaggtgggaggagttcaagaccaacctgggcaatgtagggagacttcgtctctataaaaaattaaaaaataagttggtcatggtggcttgtacctgtaatcccagct

SEQ ID NO: 793243 - DNA, 531 bp, Homo sapiens
tttctgcctgctttatattctatccacgctggcagctgattagatggtgcccacccagattaagggtgggtctgccttccccagcccattgagtcaaatgttaatctcctttggcaacaccctcacagatgcacccaggatcaatactttgcatccttcaatccaatcaagttgacactcagtattaaccatcacacyatctttgccaaaaaataaaaaataaaaaaattaggcaggtgtggtggcacatggctgtgatcctagctactcaggaggctgaggtaggaggatcacctgagcctgggaggcagagtaagaccccgtcacaaacaaataaaaacggttcacatacaagtgtttgtgtaggcagatgttttcagttattttgggtagtatctaggagtagaattattgggtcatatgataaacttacgtttaactttttaagtaactgccaaattgttttccaaagtggctattccattttacattccaccagcaatgtatgggttccctttctttatatgctca

SEQ ID NO: 793244 - DNA, 531 bp, Homo sapiens
tttctgcctgctttatattctatccacgctggcagctgattagatggtgcccacccagattaagggtgggtctgccttccccagcccattgagtcaaatgttaatctcctttggcaacaccctcacagatgcacccaggatcaatactttgcatccttcaatccaatcaagttgacactcagtattaaccatcacaccatctttgccaaaaaataaaaaataaaaaaattaggcaggtgtggtggcacatggctgtgatcctagctactcaggaggctgaggtrggaggatcacctgagcctgggaggcagagtaagaccccgtcacaaacaaataaaaacggttcacatacaagtgtttgtgtaggcagatgttttcagttattttgggtagtatctaggagtagaattattgggtcatatgataaacttacgtttaactttttaagtaactgccaaattgttttccaaagtggctattccattttacattccaccagcaatgtatgggttccctttctttatatgctca

SEQ ID NO: 793245 - DNA, 641 bp, Homo sapiens
cttcttcttttttttttttttttttttgagatggagcctcactctgccgccaggctggagtgcagtggcgtgatcccaggtcactgcaacctccacctcccgagttcaagtgattctcctgcctcagtctccctagtggctgggactacaggcgcaygccaccatgcctagctaattttttttatctttactagagaaggggtttcaccatattggccaggatggtctccatctcatgacctcatgatcctcccgcctcgccctcctagagtgctgagattacaggccgtgagtttttcttcttcttcttctttttttttttttttttttttttttttgagacagagtctggcttgtcacccaggctggagtgcagtggtgcgatctcggctcgctacaagctccgcctcccgggttcaggccattctcccgcctcagcctcccgagtagctgggactacaggcacccgccatcacgcccggccaattttttgtatttttagtagtgacggagtttcaccgtgttagccaggatggtcttgatcttctgacctcgtgatccgcccacctcggctcccgaaagtgctgggattacaggcttgagccaccgcgcctggactcagtttttcttcttttatttgg

SEQ ID NO: 793246 - DNA, 641 bp, Homo sapiens
cttcttcttttttttttttttttttttgagatggagcctcactctgccgccaggctggagtgcagtggcgtgatcccaggtcactgcaacctccacctcccgagttcaagtgattctcctgcctcagtctccctagtggctgggactacaggcgcatgccaccatgcctagctaattttttttatctttactagagaaggggtttcaccatattggccaggatggtctccatctcatgacctcatgatcctcccgcctcgccctcctagagtgctgagattacaggccgtgagtttttcttcttcttcttcttyttttttttttttttttttttttttgagacagagtctggcttgtcacccaggctggagtgcagtggtgcgatctcggctcgctacaagctccgcctcccgggttcaggccattctcccgcctcagcctcccgagtagctgggactacaggcacccgccatcacgcccggccaattttttgtatttttagtagtgacggagtttcaccgtgttagccaggatggtcttgatcttctgacctcgtgatccgcccacctcggctcccgaaagtgctgggattacaggcttgagccaccgcgcctggactcagtttttcttcttttatttgg

SEQ ID NO: 793247 - DNA, 579 bp, Homo sapiens
aacacatccttccatatgctttacatcatctctagataacttataatacataatacattgtaaatggtatgtgaatagttgttatttgtttttaagtttacgttatttttattgttattatttttattttaaagatttttccatctgcagttttccatctgttgtttgaatccacatatgcagaatccaccratagggagggcaactgaacttaattatctgcatccattgtttggcatttagtagtagtagtatttttagagacagggtcttgttgtgttgccgagagtagagtgcagtggctattcacagacattatcatcatagtggcgcactacagccttgaaatcctgggctcaggtgagcctcctacctcagtctcccaagtagctgggactgcaggtatgcgccactgtacccagctgtttggcatttttaaccaaagagtagtttaacctttttcttatttatccagggcttcttaaccatatctaaacatacaatatttagctaccagtactagaactgttgtttgcatttgttaaaaaagaggcataataggaccttctggtctcctac

SEQ ID NO: 793248 - DNA, 604 bp, Homo sapiens
actgaataaaaaacacaggggaaacaacgagaagccctttgttccaatgctgctgctttatcaggtactgaggccacctctctctccatcctgaaaggcagattgaatgctttgctaagtatcatagttgcctgacaagatacatagtagttacagtcatcattatggtctttgatagagattggattggcaccaaattcctggaatttgatcgtttttggaaaggctgtaaatatttcccttatattgccctgcgtaaccaaggttctaaaactgtgttctttgtccatcaaaactgggtagagtttccagtgacacaactttttgcattttttgaccatcgattggttgctatcggtacagctatgtagagaactaggaaaatgaatcaagtaacaatgatttccccatgtstaaacctaactttccctttgtactgttagttcctgaaaatcgctcctaatttaggcttatccaagttgctggtccactctgcgagtgaggcaaggtgggccaaagagagaggccattgctcctgcgccactgcttcatcaggcactgaggtcacctattattccagcttttgggggaatgctgccttcat

SEQ ID NO: 793249 - DNA, 571 bp, Homo sapiens
aagttgtgcacatccagagagattaattgaagtaagtgatgggggttgaagggctttctttgtttccattttatacaattctacttttgaatttcattcctgagaaaattattaccaacatgcattttgttcaacatgtctttgagctttttsaaaaaccaagacggtgaggagcacttccttaaaaccattatggacaggtttgattatagagcccatatttgatagaggattgggctataacattaatctgtttaaaaatttggcaatacacttagtattattctcatttttcctaggagaacatcttagagacattcaatatggtgatataaaatataaatggaattatttattagccattgtaactcaaactttacttcaagtcactaatataaatgagatctatgccttgtagaccttcttatatcagcaaaataagaataattggatcatactttatctgcaaatgatactaaattcctttcatctaacctaaaaagttgtcattttgctcatagtacaaatatattacagtgctgaattatctgcatgctatgggagaaaaggt

SEQ ID NO: 793250 - DNA, 571 bp, Homo sapiens
aagttgtgcacatccagagagattaattgaagtaagtgatgggggttgaagggctttctttgtttccattttatacaattctacttttgaatttcattcctgagaaaattattaccaacatgcattttgttcaacatgtctttgagctttttgaaaaaccaasacggtgaggagcacttccttaaaaccattatggacaggtttgattatagagcccatatttgatagaggattgggctataacattaatctgtttaaaaatttggcaatacacttagtattattctcatttttcctaggagaacatcttagagacattcaatatggtgatataaaatataaatggaattatttattagccattgtaactcaaactttacttcaagtcactaatataaatgagatctatgccttgtagaccttcttatatcagcaaaataagaataattggatcatactttatctgcaaatgatactaaattcctttcatctaacctaaaaagttgtcattttgctcatagtacaaatatattacagtgctgaattatctgcatgctatgggagaaaaggt

SEQ ID NO: 793251 - DNA, 623 bp, Homo sapiens
cacttgtccaaagatgttctgcatgaatctagaggcagaaattgagcctatatgaggatttctcaacagtaactattagcataattctcgaatccacttacgtattgtttagtgaaatctggaggcatcattacacagatgatcttgctatctaccttgtcatcataaaataaaactacttgtatagaaagatgaatgaagttttcttcattattcattctgtagctcagtataaatacaagttttgaattttaaatcaagtaaaacacataataagaagaaaatatggcatgtaaagaaaatagattaaaaagaaaaataaatgtgtttcttaaccttgattgtaactcctgtaaatactggctggtggagaaaaaattgagcagatcctgttattatcmttccaacttcattttcagtgtctgtctgtctatccattacactttaaaaataaagagcaggcacatattttaaagcaacccacaacatgattaataagggtagcacagtaaagaaacataaaattgtcctgtctccttcatctgttcttctggtgcagtgattaacctttgagtttatgagtacttttgcacttacttcagataaagtattttatgagttct

SEQ ID NO: 793252 - DNA, 540 bp, Homo sapiens
ttcacggtagatactcaataaatgttattgaatggttgaatgcataaatagaagtattattttcctttcacccaatccctgtcctgatttggagtctcatggaaagagaaaagaaaaacagaatttttcaatttaattgttaaactctaagtacaacagactcaaggtattacagaattcaagtgtcaacatgtgacacatatttgagaaggcccttttcctaactcttctttagatcacattcayctagcaatcctaagaaccaggactgctttgaaaatgacatttttgattgtcagggatcataatgaacttttataatttacatttaagagcagagaatatgactcagcaagaaagaaaaaaaatgagaaaacagtatgtgtggcctgcaaaagacaagctgctgttagcagtggtgaatctgtatgggcctgcagcaacttgattcttgcctcctcaaaggaaagaatttgtccaaggggcataaggcagaggaagagactgaggcaagttttagagcaggagtgaatgtttatt

SEQ ID NO: 793253 - DNA, 540 bp, Homo sapiens
ttcacggtagatactcaataaatgttattgaatggttgaatgcataaatagaagtattattttcctttcacccaatccctgtcctgatttggagtctcatggaaagagaaaagaaaaacagaatttttcaatttaattgttaaactctaagtacaacagactcaaggtattacagaattcaagtgtcaacatgtgacacatatttgagaaggcccttttcctaactcttctttagatcacattcatctagcaatcctaagaaccaggactgctttgaaaatgacatttttgattgtcagggatcataatgaacttttataatttacatttaagagcagagaatatgactcagcaagaaagaaaaaaaatgagaaaacaktatgtgtggcctgcaaaagacaagctgctgttagcagtggtgaatctgtatgggcctgcagcaacttgattcttgcctcctcaaaggaaagaatttgtccaaggggcataaggcagaggaagagactgaggcaagttttagagcaggagtgaatgtttatt

SEQ ID NO: 793254 - DNA, 635 bp, Homo sapiens
aagaaaaaaaatagctcttttctactgcaaaaacgtattgtatagtacggtattgtgaggagaactcataggttctagagttaccatgtgcagaatttgattatttcgaacagcatctacattgaaaataggagttagtatttttacaagttgtagatgttagtaacaattttgcatttatttggtaatcattcaaatgataattttgtgtacaaaacgggcaatttttgaagtaatctaacattttatttagaaaataaagagcttgcaaaaatcaggaagacccrtgtgtccttcttcgaagaaaacacttattaaaatccagggttacctccattagtaaataaggacattgtcaaaactaagttcattttctttaaagtacatgtttttaaaaattacatactttattagataatggggcctcatgtaaacaggcactgcactttattcatcatgattcaccccagtgagcaacagaggtctttcctaaggatatgcatgtaggaaggaaattgatggaatgacgctattcacacaatcagggtcagagaggttcaagttaacatgtctatgtcacccaggccacttgttctattatattcatctctttctgaaaatgtaaaccaggtgtt

SEQ ID NO: 793255 - DNA, 658 bp, Homo sapiens
cattcaactaacagtgccagaaatccaatgtattgtaatataaggaccagatacatttagagttagagataaagtagataaatgtagcttcattttgcagggagggttttggccaaggaagctgctaaaacagacaataaatttcttactttgatctgctgaaaatgtcggtcagtatctttaatcaacacagtagagatgttacttcatacaggcctaagttggcatttctgtgacttcaggtcaaaggcgatgctaaatttagagagagcaaaaaattctctttctstatgtcctatctctgctatagataagaaaatgatggctagaaatatggggacatttgtagagtatgagcagtcgctgcaaatatattgctgataatcttatttcttctcttagaaaatgaaaggaagagaattctctgtcagtactgacctaggtgtatccattagtttgagcaaagcctttgtcccttaaataaaaaacagactaatcttcagttagaaatattgagtacaccacaggagctgataatcaaaaattgttcaccatgtcagtttcaggagtgggaagtataatcttgagcttaatccagactccatcctcaagaaagcctgattttgcataattacacaggctggaactagggagcata

SEQ ID NO: 793256 - DNA, 509 bp, Homo sapiens
aggaaagaccttttccttagtccacatttttactattctctagactgagtttcctctcttaatgctcatatgcattgtatagtatgaaatgtaaatgccattgtatgttaaaatatttacttttaaaacaatttttgggaaaggcatattttacttagatgtgaaaaaatgtaatagagatcatctcccttattttacttgcctgtgatacccagtcttatcatttgtttgccactttcaaatcctagagtggattatttaaattmtttgaatctaaccgagtgtgctacaaacctaagcctcataatctttcctggctgactaatcagggccataacttccacatttgaccttaccctgggtccacttcatacacagcagcctgagtaatctttcaagaatgcatattagatccagttgcaccctggctcaggcatcttcagtgcatcctcattgtatatatgccaaatccggaatcctaacctggcttgtaagaacccataactggc

SEQ ID NO: 793257 - DNA, 619 bp, Homo sapiens
aaaataccattgactaatgggttaaataacagattttttttttcgggttctggaatctgtaagtccatgataaaggggttggcaggtttagtttctcctaaggcctcttttcttggcttgaagatggccgtcttcttgctgtgacttcgcatggattttcctctgtgcacaccagttcctggttttacttcatcttcttctaaggacacaaatcctagcagattagagccccatcctctgacctcacataaccttaatttttctttaaaggccctattgccaaatacagtctcattggggattggggcttcaacataytgaatttgaggagaacaaaattaagtttataacaattggcattatcagttttcagtctttccaattctggagatgtatattgtatgcctgaggtttgacaattaatgaggttgacaccttttcggatgcccacctggccatgcaaatcaacaagtatgcaaggtttctattaaagtttttagccaatttttttcctccttggtttaaattatttttttctttttaatttgttaaaattatgtaaacatttattgtgttaattattatcattacaggggtctgtccccattctgaggttttg

SEQ ID NO: 793258 - DNA, 561 bp, Homo sapiens
acgacactcattcagtaactgccagaacatctgagacacccaatactccagattgacatgatccattcccccgtccaatatgactgtgtcagccattttcagtcacaaagaatagaggaaaaagaacattacttttgtcctagttagagagagcccttgagcaaatgccatttattcaacctttcatttgtttgtttagcaaatatttgttaaatgtgataccagatgcttggaatacaaatggtaagggaaaaaaggagttattacactagtgagaaggcagacacctaaaatctaattataggacaatatggtaagcattgtaatttagcaatttgtacaaagtggtgtgagagcacagaggaggaatcaaattccgtcgttacctatttctgrcaacatgaaaatggaaatgtatatatacttttttgtgaggagcggaggaagtgagtgaagttcacttctcttgtgctttggttttgcatgagtagtttttcattgctgccttttctacctttctttggggctgtgatggagagagtatgctgttttccacatgag

SEQ ID NO: 793259 - DNA, 653 bp, Homo sapiens
tcagatggtagatttccacttctacctaacaaaaattatgtacccctgccccttcttgctggggctgtgatattggagacctaatggagacttgggacttttaccattgcctagtggtcatggtgctaccctcacatcagtgtctgaggaggccacagagagatctagaaaccccaaccatatccagcagttaaaataaaytcccacttgggtgtcagcgaaggccaagtggggaacctggacctttatacctggcaatatgagatggcattcttccttcccctatgggagcaaggtcaggaaaagccagtgaaaacagaaggtttaaataaggttcaaggtctcagagcataatataaaaatgttcagctttcaattgaaaatctctctttatacaaagaaccaggaggacctcaaattgtatgaaaagagacagtcaatagctgccaacattgggatgactgtcagaattatctgaaaaggatttgaaagcagctatggtagaaatgcttaaactagcaattacacttgaaataaatgcaaaaatagaaagctcagcaaagaaatagaaagtctcaccaaggaaatatgaagaggaactaaatgaacattttacaactgagaatacagaaactgaaataagatgctcagca

SEQ ID NO: 793260 - DNA, 653 bp, Homo sapiens
tcagatggtagatttccacttctacctaacaaaaattatgtacccctgccccttcttgctggggctgtgatattggagacctaatggagacttgggacttttaccattgcctagtggtcatggtgctaccctcacatcagtgtctgaggaggccacagagagatctagaaaccccaaccatatccagcagttaaaataaattcccacttgggtgtcagcgaaggccaagtggggaacctggacctttatacctggcaatatgagatggcattcttccttcccctatgggagcaaggtcaggaaaagccagtgaaaacagaaggtttaaataaggktcaaggtctcagagcataatataaaaatgttcagctttcaattgaaaatctctctttatacaaagaaccaggaggacctcaaattgtatgaaaagagacagtcaatagctgccaacattgggatgactgtcagaattatctgaaaaggatttgaaagcagctatggtagaaatgcttaaactagcaattacacttgaaataaatgcaaaaatagaaagctcagcaaagaaatagaaagtctcaccaaggaaatatgaagaggaactaaatgaacattttacaactgagaatacagaaactgaaataagatgctcagca

SEQ ID NO: 793261 - DNA, 653 bp, Homo sapiens
tcagatggtagatttccacttctacctaacaaaaattatgtacccctgccccttcttgctggggctgtgatattggagacctaatggagacttgggacttttaccattgcctagtggtcatggtgctaccctcacatcagtgtctgaggaggccacagagagatctagaaaccccaaccatatccagcagttaaaataaattcccacttgggtgtcagcgaaggccaagtggggaacctggacctttatacctggcaatatgagatggcattcttccttcccctatgggagcaaggtcaggaaaagccagtgaaaacagaaggtttaaataaggttcawggtctcagagcataatataaaaatgttcagctttcaattgaaaatctctctttatacaaagaaccaggaggacctcaaattgtatgaaaagagacagtcaatagctgccaacattgggatgactgtcagaattatctgaaaaggatttgaaagcagctatggtagaaatgcttaaactagcaattacacttgaaataaatgcaaaaatagaaagctcagcaaagaaatagaaagtctcaccaaggaaatatgaagaggaactaaatgaacattttacaactgagaatacagaaactgaaataagatgctcagca

SEQ ID NO: 793262 - DNA, 488 bp, Homo sapiens
cctaaaaacattaaaaatggaatcaccacatggccgagcagctccacttctggatatctgtccaaaagcactgaaagcagaatctttgtaatagttacacatcgtgtgcaaatatgcacatgttcatatcagctctattcacaatagcctagaggctgaagcaacccacatgtccatcaacagatgaatagataacaaaaatgtagtgtatacatacaagggaarctttaaaaaggaagtaaatcctgtcacgtggtaccacatggaagaactttaaggacattatgctaagtgaaataagtcagtcacaaaaggacaaatactgtgtgattccacttatacgaggtaccaagagtagggatattcatacagacagaaagtagaatggtggttaccaggggctggggcgggggagaacagggagttattgttcatgggtacagagtttcagatctgcaagatgaagaagttcaggagagggactgtga

SEQ ID NO: 793263 - DNA, 633 bp, Homo sapiens
gtggtgattttcctggtacatatttatgtacatctctatttctctagtgtagaaatctacaagcagatttgccaggtcaacagagattatttttatgacttttgttatatgttgaaaaatttctattggattaattctttgtcaaccctgagaattataattctaacaaaacagcatggcactggtacaaaaaacagacacatagaccaatggaacagaatagagaacccagatacaaggccacacacctacagccatctgatctttggcaaagctgacaaaaacaagcaatgaggaaaagcctccctactcaataaatggtgctgagataactggctagccatatgcagaagattgaaactgtaccccttccttacaccatatacaaaaattaacccaagatgggttacagacttaaatgtaaaacccaaaactataaaaaccctggaacacaacttaggcaawacctttctggacataggaacgggcaaagatttcatgatgaagacaccaaaagcaattgccacaaaagcaaaaattgacaaatgggatctaattaaactaaagagcttctgcccagcaaaagaaactatcaacagactgaacagacaacctacagaatgggagaaaatt

SEQ ID NO: 793264 - DNA, 514 bp, Homo sapiens
gcagatcctgactgttcccagctcccccaagagcacagggaagcttggatccacagctgcagtttggccagctgtagccccatccaggagctccatgaagtatgcagccccagtcgagcctccgtgctgcagctggcataatgtcagtgccatcattcccccctctgaagaggtacacctaactgctgttaggatagagatgatgactgctcttaactgcttcatgctgacaaggggcattattttggcaaaacgagagtaatgtctctctctctcagaggcctatctaagggtccccagtacaaaggagccattgtctgaggctccattttcatgaccwtttggagtttgatggcccacatcccttgtttcctctgagttgcagtctgagatcactggtggttcaccctacaattgttaaaagctacaaatagctcaaaagaaagacttccttgattctgaaaaacagaacatagggattagcaatgttccaagaaaaagcaaatagcaaaaa

SEQ ID NO: 793265 - DNA, 634 bp, Homo sapiens
tgttcccagctcccccaagagcacagggaagcttggatccacagctgcagtttggccagctgtagccccatccaggagctccatgaagtatgcagccccagtcgagcctccgtgctgcagctggcataatgtcagtgccatcattcccccctctgaagaggtacacctaactgctgttaggatagagatgatgactgctcttaactgcttcatgctgacaaggggcattattttggcaaaacgagagtaatgtctctctctctcagaggcctatctaagggtccccagtacaaaggagccattgtctgaggctccattttcatgaccatttggagtttgatggcccacatcccttgtttcctctgagttgcagtctgagatcactggtggttcaccctacaattgttaaaagctacaaatagctcaaaagaaagacttccttgattctgaaaaacagaacatarggattagcaatgttccaagaaaaagcaaatagcaaaaagtcaaaaaagattcgtcttccagtagctcagttcacccagtccattcctgttcacaatcttcaaagttatcagaaacctgcacttgagggttataatccatcctatgaagaggatcaaatcaagacaattgt

SEQ ID NO: 793266 - DNA, 625 bp, Homo sapiens
ggggccaggatgggaattccattctatttagtgttgtcatgggttttgtaaacagtcacattttgccttttcttacaactgaatagagacagtatataggagatgatggccagccctggtgattcacagacaaggcagggattcgaaacgctgtgtactgagatgtaaatccatgtggagtgcatgcacctcagggctccgtgtggtgcattgtgctcaggtgagagctcaaaggaagagaggttggtgatgtcacagaaacttcgcagcatgtcacccagcctggcagaagggaaagtggtagtttcctgaggaagatgatgacattatttacagaggcaagacgaaaagataggggrctgacttaacccacagggacctctgctggatatctcttctgcccaaatatgagcaaggttttcttctagaaggctagggagcctatagtgagggagggcttccacaggctgggagctgaggaggggcatatgggtggggcagaccagacattggccagacgctgcctccagaaggcttggggggaattaggtctgagcccattatctgtgatctggtaactctaaaggaaagacgacttgggaaggacaagaaacttccaagaatg

SEQ ID NO: 793267 - DNA, 625 bp, Homo sapiens
ggggccaggatgggaattccattctatttagtgttgtcatgggttttgtaaacagtcacattttgccttttcttacaactgaatagagacagtatataggagatgatggccagccctggtgattcacagacaaggcagggattcgaaacgctgtgtactgagatgtaaatccatgtggagtgcatgcacctcagggctccgtgtggtgcattgtgctcaggtgagagctcaaaggaagagaggttggtgatgtcacagaaacttcgcagcatgtcacccagcctggcagaagggaaagtggtagtttcctgaggaagatgatgacattatttacagaggcaagacgaaaagataggggactgacttaacccacagggacctctgctggatatmtcttctgcccaaatatgagcaaggttttcttctagaaggctagggagcctatagtgagggagggcttccacaggctgggagctgaggaggggcatatgggtggggcagaccagacattggccagacgctgcctccagaaggcttggggggaattaggtctgagcccattatctgtgatctggtaactctaaaggaaagacgacttgggaaggacaagaaacttccaagaatg

SEQ ID NO: 793268 - DNA, 670 bp, Homo sapiens
ctgaaagtctctatacttaatggactcctagcctcttgcgtggctctgcccccagaatagtgttgaccaagtatattatcttcctttctacccagggccctgccaggagattaaaagagtcttccttgaacaaactgaagtgcctcagaagaaaagaccaatatgtaaggtcttctgtgggggcctgagaaaatatctgtaccccacttaatttctctgtgtggcctatacaccctctcctccacccattcacacagaccttccawcatctttagattgcctcacttttaattaaacagatcaacagatagttgaagaaactaccttaaaacttgaaaatcagagaacaaagcacacaaacagatgaagaaattgtctttgagaactggaactcaggagtagagaggagtggagcaaagaaaccctcttttcatttataagtcttgttgaattatttaacttttgaatctatgtacatgtatttttgtgatcattatatgtatatttttaaagaaagaatgtttcaggaatagacattcaactatacagaattctgggcagtgacttttttgcatatttgatatgtttctgttatgcttaaattttcacagtaattgtatgttttaaattttttaaacaaaatgcaagtatttaaaaacaaaaagataaa

SEQ ID NO: 793269 - DNA, 611 bp, Homo sapiens
caaaaacaatcaggaaattaaaataaacccaattctaatctgtatgtgtgctttgtgcatttgcatgcttatgtgtatgtatgtactcacaaagaatgcgagggaaatactggaaaaccaaacaactaaattcaacaaaaagcagtggccttacctgttaacttctgagctatttttgtgacatgaaatgctgcattttggcactttttgtttcgtgaaggcccttgggtagattttttatgaatgtcattattcgccaaagtgaatttagtagagaaaaccccaagggagcaagatgatgagttttttaaacaaacattttgtaatataattttacattaacatctctctttatcgtgtctattcatgaccagacagtgaattttaaatcagctccttttgtaatccatctcgagaagaatgaagatggaacttgatgaaaggaaaggcccacaggggaggaattccartgctgggctaagcatttatgtgagtggagaaagaactatgtgaaagaagaaccgttaaaaaaaaaaaaaaaacatgattgaagcaatatgtggagaagggaatgagaaagaggcaatttgacaaaagaaaataaaaatgac

SEQ ID NO: 793270 - DNA, 638 bp, Homo sapiens
aggaaggcagaaggtagcagaaactacaaagggggaagtgtagagagggccgcagcttaacaaagtagtagctcagtaaaagaaacacatactggaattaaaattttagacaaaatgttactttcctatccactttcttttttcatgtctttatttgatttggttgataacaaacttttctaattattaagtataggttataccatctaacctatactttaattatattcatgcttttttgcctaaagtttcattattattagtgggggatctttttgatttgatactggcatttattactgtcttcctctagttgaatccaaaatgtttcagagaatttatcaagaatcatcattaataataactatatcctactgatatgcatggaaataaatggggatataaacaaaaagttgaaatgcatctcagtgatgtatttacaattctgattataraatcctatctttccttccatgtttagcaatcacatggagaaggcacaaattagtctggctttaaaacattgaactaaaaactaggatttgactatctgagccatagctttacagtgtcagaatatgagagtatacttcgtaaaggcaggaaggatgcatttttcaagaacttcaccaattaat

SEQ ID NO: 793271 - DNA, 605 bp, Homo sapiens
cagttcagtggcattaattaaattcacaatgttatgtaaccatcaacactacaatgagaaggttagggaggccagtccccctacacagtcaaaaatatgcatataactttttactcccccaaaacttaactactaatagctcagtactagtgaccagagccttaccaataacataagccatcagttaacacgttttctatgttatatgtattatgcattctaatcttacagtaaaataagctagagaaaagaaaatgttattaaaaatatatatagatacatagccagtgtgtgtgtgtgtatgtgtgtgtgtgtgtgtgtgtgtrtatatatatatatatatatatatacgtatacgcttctttttttaattttaatgtagtccaaaagtacaagaagctgtttcagaggtcaagaatatagtaggtcttcaaacaaatggcagctaattatgtgtcagagattcttgtacttagttaaaaatgatgatctctaaatttctctacagcactaatgttcttatactggcttccacaactattgctgcatgatcatttgtgaataaaatatgaaatatttaatataacttagtacctatttctaaa

SEQ ID NO: 793272 - DNA, 626 bp, Homo sapiens
tacacatattattttttctcttctgagcacaagtttaaatatacttttctccttattacattaagaaacataacaatttaaaagtgaatcaatgagaaagttacctattttggtgtattcatttctatgccatatttttccatttcttatttcttagagacacatatcatattttttttgttcttggtttactcattgcatacaaaagccagtcaagatgtacataatctgtgcctttattagaaaacttttatttaatttccataccattctgataggtaagatcaacttggcaatagaggagcctagagttgrcctttgcatttgtggctggtgtattgtgacataatggatgcaggtagaagtgaattaacaggggctacactaacaggaaggtatagatgttgtgcacgtagccaaaggatacaccaaaggtgagaagtgaggagataagatgagcaggacagataggacaagaatacaggcatgacctgtgtcatagattttagcctatgcaagagtcccaaaatgccaggagaattagaatattgagttacatggactgattagttcatatgttggtaaaataagaacacgtaactgatttatattcctcatgtcctgtt

SEQ ID NO: 793273 - DNA, 552 bp, Homo sapiens
atcatcttacaagaccactgctaccctttggattcctcatgtcggaatcagacaccaggtatgaatcagattagttcataattacttgagatataaataaacaattgctcagaagtacaacttttttatacccaaatgacataaatttctctcctgttttcatgaaaggaattttgtacacacagtatcccaggtatattaatagcatacaagtaaaagtcaaagcattacaactttgacaaaaataaacagaatgttttcagacttcaagatagaaaaatttcttacaagcacagccataaaggaagaaaactaaatccagggaccagaagaaatgctaaaaattattattcaaraaaactttcctgaaataaaaaagattagaagttacatattgagagagttctccatacacctaaaaagatcaacccagaattataatatcaagacactctaccacaattactgggttttaattttttaaaaatcctttgactatttagaggggaaaagagcacatgatttataagagatcataattagataaacttc

SEQ ID NO: 793274 - DNA, 527 bp, Homo sapiens
tactgcgcacccccacagttttctctcttattaacatctttctttaggtgttaatattctgtattatttattacttattactaatactccctattatttagatgttagtatgccctattatctgcatttgctatgattgacgaatcagtatgatacattattatgaagtaaagccattgtttacattagtgttcactgtgttgcatagttctaccggtttggacaaatgcgtaagcagctttactgatcacgtgagatcacttctgtgttcattctgggactttggaggggttgggatagttgagtgtgataaatcaggccccagacaagatccctgaatctaaagtaggggttgtgtgagtgtmtgagccttggttccgcaaggaggctctgttgtgataatgggtttatggttcctaaaagtcaggtgatcatggcaaactttttagctgttccacccctaatcacacacattgctgattccctctggaaaatttaacctgcttggaagtccgtacatctcccag

SEQ ID NO: 793275 - DNA, 519 bp, Homo sapiens
cggagacctttttatttcctctatgagacaagtggctgacctgtctgtaatagaacagatgaccccaggctaaaaacattgccatgtgccgtctccaacagtattctggttgtctcatcccagtatttaccaacatarcccgtaagatagtggataaaaaaataagttacaaaacaaaaatgattgctattcataccacatgtaaaggctgagtccttaaaacattctgatcccaagagagaaaaggtaaattgcctacatatagcactgttggggcacagagaacgagatcccaagtatggtgttttggtacactgaacattttttttttttttttgagatggagtcttgctctgtcgcccaggctggagtgcagtggcgtgatctcagctcactgtaacctccacctcccaggttcaagcaattctcccacctcggcctcccacgtagctgggattacacgcacacgccaccatgcctggctaatttttgttgttttttagtagagatgaggtttca

SEQ ID NO: 793276 - DNA, 519 bp, Homo sapiens
cggagacctttttatttcctctatgagacaagtggctgacctgtctgtaatagaacagatgaccccaggctaaaaacattgccatgtgccgtctccaacagtattctggttgtctcatcccagtatttaccaacataacccgtaagatagtggataaaaaaataagttacaaaacaaaaatgattgctattcataccacatgtaaaggctragtccttaaaacattctgatcccaagagagaaaaggtaaattgcctacatatagcactgttggggcacagagaacgagatcccaagtatggtgttttggtacactgaacattttttttttttttttgagatggagtcttgctctgtcgcccaggctggagtgcagtggcgtgatctcagctcactgtaacctccacctcccaggttcaagcaattctcccacctcggcctcccacgtagctgggattacacgcacacgccaccatgcctggctaatttttgttgttttttagtagagatgaggtttca

SEQ ID NO: 793277 - DNA, 519 bp, Homo sapiens
cggagacctttttatttcctctatgagacaagtggctgacctgtctgtaatagaacagatgaccccaggctaaaaacattgccatgtgccgtctccaacagtattctggttgtctcatcccagtatttaccaacataacccgtaagatagtggataaaaaaataagttacaaaacaaaaatgattgctattcataccacatgtaaaggctgagtccttaaaacattctgatcccaagagagaaaaggtaaattgcctacatatagcactgtyggggcacagagaacgagatcccaagtatggtgttttggtacactgaacattttttttttttttttgagatggagtcttgctctgtcgcccaggctggagtgcagtggcgtgatctcagctcactgtaacctccacctcccaggttcaagcaattctcccacctcggcctcccacgtagctgggattacacgcacacgccaccatgcctggctaatttttgttgttttttagtagagatgaggtttca

SEQ ID NO: 793278 - DNA, 563 bp, Homo sapiens
cacgaccttgtttaaactgaatcatcccccaaagaccttacctccaaataccatcaacataaattggggaggcggggagctcataaacattcagtccataatagtccatcgcctcaaaagtttatagtgtaactaggggtcagacagaaatcacacaatcccacagtaaagggatgagaatagtgataagtgtggcaatgggtacagcttagttaaagttataagaagtcatgtttcatatttattgttattgaaaattgctyaccaagtacattaaacatctgcctcttccaggacttcagcaggtccgtgacccatgctccggtgtcttgaccctacgcctgtgtcacatgaaggctttgtagacatgctatcagatagtaattttttttttgacagctgaaatttcacctttttctaaaatgaatttcatggtgttcctagtagttatgtctttcctgaaaacagcatatagtaatgaattaattgctgcgtctggaggcaaattgttttagccttttttagtgttcattcattaaaatatagatcatatttaaaggaat

SEQ ID NO: 793279 - DNA, 563 bp, Homo sapiens
cacgaccttgtttaaactgaatcatcccccaaagaccttacctccaaataccatcaacataaattggggaggcggggagctcataaacattcagtccataatagtccatcgcctcaaaagtttatagtgtaactaggggtcagacagaaatcacacaatcccacagtaaagggatgagaatagtgataagtgtggcaatgggtacagcttagttaaagttataagaagtcatgtttcatatttattgttattgaaaattgcttaccaagtacattaaacatctgcctcttccaggayttcagcaggtccgtgacccatgctccggtgtcttgaccctacgcctgtgtcacatgaaggctttgtagacatgctatcagatagtaattttttttttgacagctgaaatttcacctttttctaaaatgaatttcatggtgttcctagtagttatgtctttcctgaaaacagcatatagtaatgaattaattgctgcgtctggaggcaaattgttttagccttttttagtgttcattcattaaaatatagatcatatttaaaggaat

SEQ ID NO: 793280 - DNA, 563 bp, Homo sapiens
cacgaccttgtttaaactgaatcatcccccaaagaccttacctccaaataccatcaacataaattggggaggcggggagctcataaacattcagtccataatagtccatcgcctcaaaagtttatagtgtaactaggggtcagacagaaatcacacaatcccacagtaaagggatgagaatagtgataagtgtggcaatgggtacagcttagttaaagttataagaagtcatgtttcatatttattgttattgaaaattgcttaccaagtacattaaacatctgcctcttccaggacttcagcaggtccgtgacccatgctccggtgtcttgaccctacgcctgtgtcacatgaaggctttgtagacatgctatcagatagtaattttttttttgacagctraaatttcacctttttctaaaatgaatttcatggtgttcctagtagttatgtctttcctgaaaacagcatatagtaatgaattaattgctgcgtctggaggcaaattgttttagccttttttagtgttcattcattaaaatatagatcatatttaaaggaat

SEQ ID NO: 793281 - DNA, 576 bp, Homo sapiens
tgatgctataagaggtatctggtttatttttcatctgctaataatgctgtcctatgctgtgcttttcaattttgggacctggctcagtagtttttagctctaaaaaccgacaatttagctgcatgatggagtccttccagaagactttacatgccctgtgaaccccagatacctgagacaggtctcaatcaatttagaaaggttttttttttttttttttttttttttttgccaaggtttagggtgcacccatgacacagcctcaggaggtcctgatgacatgtgcccaaggtgtttggggtacaacttgcttttatacattttagggagacataatatatcagtcaatacatgtaatggcttacaatggctccatctgaaagggcaggacaactcgaaaggggrgtggactttccaggacataggtagatttaaaaattttctgattggtaattagttgaaagagttattattaacagaaaagaatgtctgggtaagataaggaattgtggagaccaaggatttatcatgcagataaagcctccaagtaacaagcttctgcgagaatagattgta

SEQ ID NO: 793282 - DNA, 663 bp, Homo sapiens
gatagatgttttatgtaacatttgcagaaggcagttagtgttcaaggatgcaggtccagggtggggctggaggaaaaatagtatatatcatctatatccctattttgtatgtgtaacttgacagtttattcttttattttttaatggctatattattcagatgatgtttcttttaatagaagtttagrtagtttccagatctcttaagttttgaataatattggtcatccatttaatgtttttcatgaggtttagtggcatatgttttgctgattttgtaaaacagattgggaaaccatctatattgtgttctgatataggatgacatgacattactaagaactctgcttttaaatatccgtttaatgttttgcatgcagtttagtagcaaaggttttgttaattttgtaaaacagattagaaaaccatccatctatattgtgttctagtatagcatgacatgacattgctaagaactttgctttaaaatatttggaataaaaaatagataaaagatgatcaatgtatttcttactgaataccttttagttttttgttttgtaaaattaaatgatatatgcattaatttgcttaacttagaaatatccgagaaatagatctccataaattgcacaggatcctcactatctcttttattcccca

SEQ ID NO: 793283 - DNA, 637 bp, Homo sapiens
agggaggaaaaattgcaggagctgacaaaagaagttgaaagagagagttattatctcaggccttttcaaggggaaaaaaaaattgaatgcagcaagacacgacaaagttgcacttctgagatatgaattctgagaagttttaaaaagaaacagattatacaatcaaaatccaaacctcatgtacaagatcgtttcacatacaaaattattctattttccttataatakaagcagacagggaaggtttctccaggtataggaatttaattaacctgatcaatcagcctgttttatggcttcctgcccttaagcctattcttccccaaaccctgggtagaatagggtcaactccttggtttaagtcagctcctgagatacccctgagaacttgtagatgaactcaagtgaacttgcctcattactatgctaaagtcttcatcttgggaggagctataactttatgactgtaacatgcaacctatgtgctgacatgatgattcacagcatctgcaccactggggctcctcttttacatgcattgacatacgctttcacctctcaatcaccccatgagatcctcctgtcactttcctggcgggcactgttaatgaagaatatttccagtatcctctttact

SEQ ID NO: 793284 - DNA, 637 bp, Homo sapiens
agggaggaaaaattgcaggagctgacaaaagaagttgaaagagagagttattatctcaggccttttcaaggggaaaaaaaaattgaatgcagcaagacacgacaaagttgcacttctgagatatgaattctgagaagttttaaaaagaaacagattatacaatcaaaatccaaacctcatgtacaagatcgtttcacatacaaaattattctattttccttataatataagcagacagggaagktttctccaggtataggaatttaattaacctgatcaatcagcctgttttatggcttcctgcccttaagcctattcttccccaaaccctgggtagaatagggtcaactccttggtttaagtcagctcctgagatacccctgagaacttgtagatgaactcaagtgaacttgcctcattactatgctaaagtcttcatcttgggaggagctataactttatgactgtaacatgcaacctatgtgctgacatgatgattcacagcatctgcaccactggggctcctcttttacatgcattgacatacgctttcacctctcaatcaccccatgagatcctcctgtcactttcctggcgggcactgttaatgaagaatatttccagtatcctctttact

SEQ ID NO: 793285 - DNA, 656 bp, Homo sapiens
taagttacacgaaatatttacctacaggatttacctcatttatgtttaattcagtttttatagtttatttagattacttattagcaaagataagttattaataacttataattaataagtaattaataacacaaagctagttattattttcttgttaattatttttgtaacctgtacatattaggtgttcatctaggaaccttaaagttaagcatatgagtatcttcaccaataactcagtagattcagctgttttcattaaactaacaacattacacttgtcttatttatccaaaaaaccacacaaagatcattttcttcttggcttggtttacagtcttataatcttttgtgccaaactctgacacattaaaatatctggcagagacaaatataaaatccagayaaaatgtatgctgacaattctgaaggcatttctacttttattttatcagtaatcctaaagccagcttgtttattaaatatttacttaaatgatatgaacttgaaaaatgggctctcattggctgaagggcatgccagtataaaactatccttctgaaataagtggacaagactggtgccaggaggaaaaggagtcttccaacagatagaaaacaccaggagccagtaaactgcgtttgctgataaggttt

SEQ ID NO: 793286 - DNA, 574 bp, Homo sapiens
ttagtttgctaaggatgatgggctccagctccatccatattctacaaaagacatgatgtcattttttttctggctgcatagtattccatggtttataagtaccacattttctttgtccaatctgtgattgatgggcatttaggttgattccacgtctttgctattgggaatagygctgcaatgaacataatatgtgcatctgcctttatagtagaatgatttatcttcctctggttatatacccagcaatgggattgctgcaaatagtatttctgcttttagctctttgaggaatgatcatactacttttcacaatggttgaattaatttacacttccacttgcagtgtctgcattcccttttctttgcaacctcaccaacgttggttattttttgactttttaataatagtcattttgactggtatgagatggtatctcattgtggttttgatttgcatttctctaatgatcagtaaaattgagggtttttaaaatatgcttgtttaccacatgtatgccttctttagagaagtgtctgttcatgtcctttacccactgtttaatggggttgt

SEQ ID NO: 793287 - DNA, 574 bp, Homo sapiens
ttagtttgctaaggatgatgggctccagctccatccatattctacaaaagacatgatgtcattttttttctggctgcatagtattccatggtttataagtaccacattttctttgtccaatctgtgattgatgggcatttaggttgattccacgtctttgctattgggaatagtgctgcaatgaacataayatgtgcatctgcctttatagtagaatgatttatcttcctctggttatatacccagcaatgggattgctgcaaatagtatttctgcttttagctctttgaggaatgatcatactacttttcacaatggttgaattaatttacacttccacttgcagtgtctgcattcccttttctttgcaacctcaccaacgttggttattttttgactttttaataatagtcattttgactggtatgagatggtatctcattgtggttttgatttgcatttctctaatgatcagtaaaattgagggtttttaaaatatgcttgtttaccacatgtatgccttctttagagaagtgtctgttcatgtcctttacccactgtttaatggggttgt

SEQ ID NO: 793288 - DNA, 445 bp, Homo sapiens
accccctatcagcagttaggtttacttctccagaggggggaaataatacaggagttaagaaataatttttaggcagcttgaaagtgtggaggttatcagtggaatttttctttaataaaaagcaacctctgaacaatttccgttstaacagaaagtggcttgaacaaccagaccagcaagcattaatgttcacataccgatagctagaagccagatccacccaacatggcggttccttccctcttctccttgtcaccatgtgtgacaagtgtcacggctatctgaagataacaccatgtgtgcaggacattatggtgatccacatttgcatcttaaaaggctagggtaggaggaccagttttttcccggctacatgaatgacacacctggtcaaaccaatcccctgggccctatgcaaatcaaacactgcctcttccagactccc

SEQ ID NO: 793289 - DNA, 636 bp, Homo sapiens
ggggaacatgagagcaaagtcaatatttgaagtaaaaatgggatccttaatttctgaagaactgagttccttcagctcacacatgcataagtatcaggcccaggaagcagcaaagtcttacagaaatggcaaaatgttactaaagatactttacagtggaaacttcaaaaaaaaaatgaagcctcccaaattagtctcatctaaggatgcctaatgataygcagaaacttctaaaattttttcaatatttttatttaaagcttttacaaaaggcaaataaaaagcttaagcaattacttaatataaaaaattaaatctgctaactttttggcttagttactatcccgatccaaaggaaatcgacttcagtaccaattagttgacttttggtaagtagtggggtacgtttgacctgggcaaagaatggaattgagtttgaggcccaacttaggaagtttagattccctcctaagacatagggagttagaggccctcccctcattaaaatctctcttggttaaaaacggatttggcactatgtgatgttaactcctattctctttggattaatcggccttgcactttttgctgatggctatgggtgacaggattaggcatgtacaggatcataggaca

SEQ ID NO: 793290 - DNA, 636 bp, Homo sapiens
ggggaacatgagagcaaagtcaatatttgaagtaaaaatgggatccttaatttctgaagaactgagttccttcagctcacacatgcataagtatcaggcccaggaagcagcaaagtcttacagaaatggcaaaatgttactaaagatactttacagtggaaacttcaaaaaaaaaatgaagcctcccaaattagtctcatctaaggatgcctaatgatatgcagaaacttctaaaattttttcaatatttttatttaaagcttttacaaaaggcaaataaaaagcttaagcaattamttaatataaaaaattaaatctgctaactttttggcttagttactatcccgatccaaaggaaatcgacttcagtaccaattagttgacttttggtaagtagtggggtacgtttgacctgggcaaagaatggaattgagtttgaggcccaacttaggaagtttagattccctcctaagacatagggagttagaggccctcccctcattaaaatctctcttggttaaaaacggatttggcactatgtgatgttaactcctattctctttggattaatcggccttgcactttttgctgatggctatgggtgacaggattaggcatgtacaggatcataggaca

SEQ ID NO: 793291 - DNA, 595 bp, Homo sapiens
ttgtctttcagtgagctctctctgttgggtttctttcttctatcagtaaatgggaccagcagccagctacttgcctatccagtcatgaagtgaaagcatccttcttccaaatattccttgccattatcaattccctcccagcctaactcttactttgcctgaattcgtcattattttttccatccctttgccctagttttttcaggccccctctgcatagaaggtgyttagtgaataaatgagtccaaatatttttccattattagaggctttaagctaattgctattttgcaagtattgggttttcttttcttttgcttttccccccaagacttggtattggtcataggtcctaacttgggtgcctttctaaggtggtcttactctagttcatgatccttggatttactgggaaaatgggcggccctcctaactaaattctacagttttttgcagggcctttaaaaaagtcagtcatgtgatcaatgctatcacctctaaacttgattttttttttttttgtaataaagttgtgttttcattttttggtaaatataggcatttaagttcatcttttatttttcacaattaatgc

SEQ ID NO: 793292 - DNA, 595 bp, Homo sapiens
ttgtctttcagtgagctctctctgttgggtttctttcttctatcagtaaatgggaccagcagccagctacttgcctatccagtcatgaagtgaaagcatccttcttccaaatattccttgccattatcaattccctcccagcctaactcttactttgcctgaattcgtcattattttttccatccctttgccctagttttttcaggccccctctgcatagaaggtgcttagtgaataaatgagtccaaatatttttccattattagaggctttaagctaattgytattttgcaagtattgggttttcttttcttttgcttttccccccaagacttggtattggtcataggtcctaacttgggtgcctttctaaggtggtcttactctagttcatgatccttggatttactgggaaaatgggcggccctcctaactaaattctacagttttttgcagggcctttaaaaaagtcagtcatgtgatcaatgctatcacctctaaacttgattttttttttttttgtaataaagttgtgttttcattttttggtaaatataggcatttaagttcatcttttatttttcacaattaatgc

SEQ ID NO: 793293 - DNA, 480 bp, Homo sapiens; identical to SEQ ID NO: 763882

SEQ ID NO: 793294 - DNA, 480 bp, Homo sapiens; identical to SEQ ID NO: 763883

SEQ ID NO: 793295 - DNA, 626 bp, Homo sapiens
caggttcctcatctcactgtaaaacatgaggttttggctcagattcataatgatgtttaaggaccagcacccctctgagaatctgatgagcccacccaacacccagtagggcacacattctccatgtagtcagcagtttgtatctaatttccggggctcacaggacctktggggtgcctggctcagaatccctggcccaggtgttttccaaggcagtggactccagtgaccagggctacactgagctccctccaatgcccctgactgagcagttctgggcaaggggcataggcatccaccatcaaaggctcctgatgggattctgatgcaactggcccctgggaattacatgtctaagatcccgcccaaccctagggttttagatcactctctgttctaccagttagatgagtttttttggcaaggatggaaaaaaaaaaaaaaaacaggcagtgggcagagactttaaaaagaattctaggcctggataccatgggttggttcatttcttcattccttcacacgcatttcctgggcacgtgctgttattgctctggacagagcaggtgacacctgtgccccaaaggctggtctgggccccatgggaaccagtgtcccattggacc

SEQ ID NO: 793296 - DNA, 626 bp, Homo sapiens
caggttcctcatctcactgtaaaacatgaggttttggctcagattcataatgatgtttaaggaccagcacccctctgagaatctgatgagcccacccaacacccagtagggcacacattctccatgtagtcagcagtttgtatctaatttccggggctcacaggacctgtggggtgcctggctcagaatccctggcccaggtgttttccaaggcagtggactccagtgaccagggctacactgagctccctccaatgcccctgactgagcagttctgggcaagggrcataggcatccaccatcaaaggctcctgatgggattctgatgcaactggcccctgggaattacatgtctaagatcccgcccaaccctagggttttagatcactctctgttctaccagttagatgagtttttttggcaaggatggaaaaaaaaaaaaaaaacaggcagtgggcagagactttaaaaagaattctaggcctggataccatgggttggttcatttcttcattccttcacacgcatttcctgggcacgtgctgttattgctctggacagagcaggtgacacctgtgccccaaaggctggtctgggccccatgggaaccagtgtcccattggacc

SEQ ID NO: 793297 - DNA, 626 bp, Homo sapiens
caggttcctcatctcactgtaaaacatgaggttttggctcagattcataatgatgtttaaggaccagcacccctctgagaatctgatgagcccacccaacacccagtagggcacacattctccatgtagtcagcagtttgtatctaatttccggggctcacaggacctgtggggtgcctggctcagaatccctggcccaggtgttttccaaggcagtggactccagtgaccagggctacactgagctccctccaatgcccctgactgagcagttctgggcaaggggcataggcatccaccatcaaaggctcctgaygggattctgatgcaactggcccctgggaattacatgtctaagatcccgcccaaccctagggttttagatcactctctgttctaccagttagatgagtttttttggcaaggatggaaaaaaaaaaaaaaaacaggcagtgggcagagactttaaaaagaattctaggcctggataccatgggttggttcatttcttcattccttcacacgcatttcctgggcacgtgctgttattgctctggacagagcaggtgacacctgtgccccaaaggctggtctgggccccatgggaaccagtgtcccattggacc

SEQ ID NO: 793298 - DNA, 542 bp, Homo sapiens
cctgctcagcttcctgagtagctgggatcacaggcgcgcaccaccatgcccggctaatttttgtattttttgtagagacaaggtctcaccatgttgcccaggctggtctcaaactcctgtgcttaagtgatccacatgtcttggcctcccgaagtgctggggttataggcatgagccaccrtgcctggctctctttgatctttaaagctaagctgttttctctttttcatcatgatagctactcatcaaatttggtcaaatataggggggtggtactcctttggcttaattgtaccttagttgcccaggactggaccccctcagcaggggtgggggctgtctgtgaaagcacagctggatatggtcttgcccatcaggcagtgtttcaaattcaatatgccaagagttcctggaaccaggactgtcagtgtgatgagcattcgttctaagcacacaggaagggagaaactatgtagttcatatcctcaggaataacacgcacctaaaaaatgtggcatactcatgagccaccatcactgccc

SEQ ID NO: 793299 - DNA, 623 bp, Homo sapiens
gccgcccttgaactctctggagtgcttgtgccaggagcagccagacaccaagtaagaaggcaggtgaagccagccccacggagaggctgtgaggagggaagatgcctggccagccccagccattccaagcgtgccctcccaggcaccrggcatgccgatgaagaatccgtcttggacacactatccctgcagatgcaacgtggagaaaaaccaaggaaccaagctgatgccagaactgagatccagatgtaaatccccgggtgagccagcccagctctcttaggcagttcaaggcatcccacctaagcccaagtcagcacagagcagagtcgagacctccttgccatgtcctgccccaaaccctgacccactaaatcaggagcataataaactcagcgtcattttatgccattaaattggggggtagcttgttaggctacaagagatacttgggggacatacccaagactgggtaatttataaaggaaagaggtttaatggactcacagttctgcaaggctggggaggccttgggaaacttacaatcatggcagaaggggaagcaaacacgtccttcttcacatagcggcagccaggagaggtgcagagcaaaggggcagagc

SEQ ID NO: 793300 - DNA, 623 bp, Homo sapiens
gccgcccttgaactctctggagtgcttgtgccaggagcagccagacaccaagtaagaaggcaggtgaagccagccccacggagaggctgtgaggagggaagatgcctggccagccccagccattccaagcgtgccctcccaggcaccaggcatgscgatgaagaatccgtcttggacacactatccctgcagatgcaacgtggagaaaaaccaaggaaccaagctgatgccagaactgagatccagatgtaaatccccgggtgagccagcccagctctcttaggcagttcaaggcatcccacctaagcccaagtcagcacagagcagagtcgagacctccttgccatgtcctgccccaaaccctgacccactaaatcaggagcataataaactcagcgtcattttatgccattaaattggggggtagcttgttaggctacaagagatacttgggggacatacccaagactgggtaatttataaaggaaagaggtttaatggactcacagttctgcaaggctggggaggccttgggaaacttacaatcatggcagaaggggaagcaaacacgtccttcttcacatagcggcagccaggagaggtgcagagcaaaggggcagagc

SEQ ID NO: 793301 - DNA, 623 bp, Homo sapiens
gccgcccttgaactctctggagtgcttgtgccaggagcagccagacaccaagtaagaaggcaggtgaagccagccccacggagaggctgtgaggagggaagatgcctggccagccccagccattccaagcgtgccctcccaggcaccaggcatgccgatgaagaatccgtcttggacacactatccctgcagatgcaacgtggagaaaaaccaaggaaycaagctgatgccagaactgagatccagatgtaaatccccgggtgagccagcccagctctcttaggcagttcaaggcatcccacctaagcccaagtcagcacagagcagagtcgagacctccttgccatgtcctgccccaaaccctgacccactaaatcaggagcataataaactcagcgtcattttatgccattaaattggggggtagcttgttaggctacaagagatacttgggggacatacccaagactgggtaatttataaaggaaagaggtttaatggactcacagttctgcaaggctggggaggccttgggaaacttacaatcatggcagaaggggaagcaaacacgtccttcttcacatagcggcagccaggagaggtgcagagcaaaggggcagagc

SEQ ID NO: 793302 - DNA, 623 bp, Homo sapiens
gccgcccttgaactctctggagtgcttgtgccaggagcagccagacaccaagtaagaaggcaggtgaagccagccccacggagaggctgtgaggagggaagatgcctggccagccccagccattccaagcgtgccctcccaggcaccaggcatgccgatgaagaatccgtcttggacacactatccctgcagatgcaacgtggagaaaaaccaaggaaccaagctgaygccagaactgagatccagatgtaaatccccgggtgagccagcccagctctcttaggcagttcaaggcatcccacctaagcccaagtcagcacagagcagagtcgagacctccttgccatgtcctgccccaaaccctgacccactaaatcaggagcataataaactcagcgtcattttatgccattaaattggggggtagcttgttaggctacaagagatacttgggggacatacccaagactgggtaatttataaaggaaagaggtttaatggactcacagttctgcaaggctggggaggccttgggaaacttacaatcatggcagaaggggaagcaaacacgtccttcttcacatagcggcagccaggagaggtgcagagcaaaggggcagagc

SEQ ID NO: 793303 - DNA, 631 bp, Homo sapiens
cgtctctactaaaaatacaaaaattagcccagtgtggtggtggaagcctgtaatcccagctacttgggaggctgaggcaggagaattccttgagcccaggaggcggaggttgtagtgagcagagattggcaccactacactccagcctgggtgacagagggagactttgtctcaaaaaaaaaaaaaagaaaaagaaagaaaagaaaaaaaaagctgctgagaactgagacaattctgtgtgccaagcactgtgctaagtgtgctttgttttatttggtcctcacaataacctgctgtttcttaggtaaagacactgaggctcaaagagatgaaataacctgctttaggtcacagagccattaaggggcagagctggggtccaaacccaggtctgcgtgacatcaaacccatgcttagcttccagttctggccatgaaggagtaacaggtatcatatttaayttctcttatagaaagctgtgaaactgaacaaaatctatgaagcaattctttagagtcattggacaacagagagacaggtctgtaatccttgagaggcaggaaacatacaaaacgagccccatagtcatcctggatttctacctatgggcacttctcaaatcatggcacag

SEQ ID NO: 793304 - DNA, 619 bp, Homo sapiens
acagaaggagttccagaaatctcataggggttcactgagcctttggccaatatgaagctgcacatgtgcagggtgagactccagaggcctggtagagaaaagctactgggaagctgtgaactgaatggaaattcacacagggctgggagatgctggcattctgacaaccaaagtgacagaccctgctgaacaccccggacattcagctgagattccagaaagggcagaccttagctgcagggatactctagccctagagtaagaacactctastcccacttaacaaagcctgaaaataagcttcagtaggatggagttaatcctccaaattcaatactcttaaagcagaatggtgacacaatccagaccttcaaaaatgtgagaaacacaatgtctagcatttaatcaaaagctccttgacaagcaaaaaagcaggaaaatgtgactcctatgaggagagaaaacaggccatagaatcagatcggggatgacacagatgtcagaatcagcacaccaggactttaaaacagctattatgagtacacttaaaaccttaaaggaaaagatagttaaaatgagtgaacagatggagaatctcagcagagaaaggaaaactgtg

SEQ ID NO: 793305 - DNA, 619 bp, Homo sapiens
acagaaggagttccagaaatctcataggggttcactgagcctttggccaatatgaagctgcacatgtgcagggtgagactccagaggcctggtagagaaaagctactgggaagctgtgaactgaatggaaattcacacagggctgggagatgctggcattctgacaaccaaagtgacagaccctgctgaacaccccggacattcagctgagattccagaaagggcagaccttagctgcagggatactctagccctagagtaagaacactctagtcccacttaacaaagcctgaaaataagcttcagtaggatggagttaatcctccaaaytcaatactcttaaagcagaatggtgacacaatccagaccttcaaaaatgtgagaaacacaatgtctagcatttaatcaaaagctccttgacaagcaaaaaagcaggaaaatgtgactcctatgaggagagaaaacaggccatagaatcagatcggggatgacacagatgtcagaatcagcacaccaggactttaaaacagctattatgagtacacttaaaaccttaaaggaaaagatagttaaaatgagtgaacagatggagaatctcagcagagaaaggaaaactgtg

SEQ ID NO: 793306 - DNA, 619 bp, Homo sapiens
acagaaggagttccagaaatctcataggggttcactgagcctttggccaatatgaagctgcacatgtgcagggtgagactccagaggcctggtagagaaaagctactgggaagctgtgaactgaatggaaattcacacagggctgggagatgctggcattctgacaaccaaagtgacagaccctgctgaacaccccggacattcagctgagattccagaaagggcagaccttagctgcagggatactctagccctagagtaagaacactctagtcccacttaacaaagcctgaaaataagcttcagtaggatggagttaatcctccaaattcaatactcttaaagcagaatggtgacacaatccagaccttcaaaaatgtgagaaacacaatgtctagcatttaatcaaaagctccttgacawgcaaaaaagcaggaaaatgtgactcctatgaggagagaaaacaggccatagaatcagatcggggatgacacagatgtcagaatcagcacaccaggactttaaaacagctattatgagtacacttaaaaccttaaaggaaaagatagttaaaatgagtgaacagatggagaatctcagcagagaaaggaaaactgtg

SEQ ID NO: 793307 - DNA, 277 bp, Homo sapiens
aaagaagagtatgttctgtgtcaacaatcctttgcacagagtccaaatggctttttgtacatacttcttttgacccaggcccataatttttttaggttagaattttatgagcccgatgcaaagtctatcaacattttytttgtgagacatactcagggtacagcatgtttctgaagtgtgcgaatatttggggatatttctatcattccatgccaagagaagacactgggaaaaaagagggaggggagatgtggagaggcagtctaatgaccactta

SEQ ID NO: 793308 - DNA, 613 bp, Homo sapiens
cttgggcaaatttaggtagcaaatttctgttccttgcaaccaagaagtctgaactagtacaatttattcacataacttgagttattattttctttttcactctaaagtagcagatactttgtctgcatgccaaagttggtgcatgacaccaaaacagaaaggtataaaggctacacaccctcaagtttgcttgagaacacatttgattcttattttactaaatcaacaccattgctgtgctgaagacaatgtctgtagctttcccatacgtggaaatgagctcattccaccactcagttctcttggggattcttcarttcctttggaatcttatgcaaataaaaacagtagccctttggcagcaacatttaatccatgttcaaagtaatccaagtgtcttcataggtcaaaactccacagacattccattaagtaaaaattataaattataattagtgtaaatacaaataatgtagactgaggcagagcaccaaaagatgaaagaatttgaaataaaaacccaaaataaaatagaataagtgaattttttggcctccaaccttactcaacaatttgctgatgttttcaagaaagtaaatacttttaaactacc

SEQ ID NO: 793309 - DNA, 629 bp, Homo sapiens
atgtttcagtagtgcaagattaaaaattttctagagctctcctgtactacattgtacttatagctcacaatactgtactgtacacataaaaatataagaggggggagctcattttatgtgctatttactaccagcacaacaaaaaaatgcaattattttatccttcagttttatctattcagttaccagtgctttttatttttcagtgtggattgagttactgtttcatgctcagtgtggattgagttacatgtttcagcttgaargattccctatagtgtttcttataaggtgaacctgctagtgataaattatctcagcttttatatatctaggaatgcttaatttcttcttcatcatttttgaaagacagtttttctggatatagaatttttggttaattctttctttccttcagcactttgaatatgtcatcccattgccatatggcttctatggcttctgataagaaatcagctgctcatcttattgataattttttgtatgtgatgagttgcttctttttgctgctttcaagattttctctttgtctttcaacaacttgattatttgcctttgtctttcaacaacttgattatgatttgtctgatgtggatccctcagtgtaa

SEQ ID NO: 793310 - DNA, 602 bp, Homo sapiens
tcaacagtggccgagttgttaattagctgcatggaagtaatctctggaattttgcagctaggtctccatgcttggtctgtccgtctcaagattacctcctggaacttctaagaaggcacataatagatactagcatgcagttagctaaatgtgcagggagtatatatggtgagaaagggagctattttatagctaagagaaaagrcttctgcagtttgcttcaaggttatatcttgaaacccaagagaagggaaaaatgttttaaaatatattatgaagttaagctgcccagttacgttaggaagatggaaattaaaaccacagtgagacaccattctcctcttccagagtggctaaatctaaaaagactaagcataccaagtgttggcaaagaaactggaattcttatacctcattggtgggactatcaaatagtataactactttggaaaacatttgataggacctactaatgctaaacagatatttacacactatggccaagcaatttcactcctgggacccacacagaagaaaggaattctgtgtctgcccaaagatggagaaattagtcatagtagccccaaaccagaaaaatccaa

SEQ ID NO: 793311 - DNA, 644 bp, Homo sapiens
agcctgggagacagagtaagactccgcgtcaaaaaaaaaaaaaaaaaaaaagaaagaaagaaagaaagaaaaagaaaaatcaccactgggtaaacagtaaactttcacttgggattcagatggttacatccatgtttgggaggccagagggtcacatgcaggtaccaccactaagccattagctcccccatttctaggagggcgtgagtcgccatgttcaggctgcatggttcctcagctgcaatcctgaacaaggctggggaatgatgggccaggcctgaacgggacgacatgaaggagaagccgtatgctggctcacagtggccaggctgcctgcattcaggtccccacwctgccactcattggctggaagccttgagccaattacttcacctctcctcgtccattttgtcatctataaaatggattattcagagtatctgattcattgggttattgtgaagattaaatgagttatctaatgttatatgcatcagcagttattattgtcatcatcattattatttgacacaaagcaagggagacttttttttaaggaggaataagtttatttctcctccatccactcaaaatatatcttaacaccagtggcattatggagacagcatttggttagggagtgc

SEQ ID NO: 793312 - DNA, 648 bp, Homo sapiens
actcacttttggtgggtttatggactcatctacatgttctggtggtcatggcttattttttgtggcttttgttccctgtagctatggcattgctggttctaccaacgtgacaggtgatcaagttaagaagctggacgtcctctccaacgacctggttatgaacatgttaaagtcatcctttgccacgtgtgttctcgtgtcagaagaagataaacacgccatcatagtggaaccggagaaaagggtgggtctgtacttccaccattgagggttttaatgtagccggtcttcttcccagcttcataattgactccacttgttcagctgagctgggtttctgggagtccctctagatccytgctgtggtcttttcatagcttccacctcactgctgccatctctcgaatcctccctgagccactgtgcagatgagtgttgtggctcacgccgccttctccccagtggactcccacaaactcatctccatttctaactttttattgccatgtttaaggctcttcaaaccctggcttctgttggtcacctcttgtactacatccctatccaccaaattcctgaccttcacactgaccctcctgttgacctagactgcttgaaacttccatccctgatgcacgcattggagtc

SEQ ID NO: 793313 - DNA, 650 bp, Homo sapiens
acggtggctcacgcctgtaatcccagcactttgggaggctgaagcaggcggatcacgaggtcaggagttcaagaccagcctggccaacatggtgaaaccccgtctccactaaagatacaaaaaatgagctgggcgtggtgacgtgcgcctgtaatcccagctacttgggagcctgaggcaggagaatcgcttgaacccaggaggcggaggttgcagtgagccgagatcgygccactgcactccagtctgggcaacagggcgagactccgtctcaaagaaaccaaaaaacaaaagaagctgcctggatgatggggatagcatcttcactgtcatatgcgtaattccctacagctgaccatcccaggcatgaaggtctggtctatttcagatgtccccaccgaccactccaacttggagtgagcgctcattctgccccactggttttatgcttatgacaatccagaatgttctttggttcttctggtgcactggctcctttgttcgttgttgttgtaacttacattttgtcgaacacccaccatgttgcactgtactaggcaactgtgtagaaggtgcccgtagcaatcgttacagttcagagtgaaagtagtgcaaagtccagaaaaagcagtgattgactcttccggcga

SEQ ID NO: 793314 - DNA, 650 bp, Homo sapiens
acggtggctcacgcctgtaatcccagcactttgggaggctgaagcaggcggatcacgaggtcaggagttcaagaccagcctggccaacatggtgaaaccccgtctccactaaagatacaaaaaatgagctgggcgtggtgacgtgcgcctgtaatcccagctacttgggagcctgaggcaggagaatcgcttgaacccaggaggcggaggttgcagtgagccgagatcgcgccactgcactccagtctgggcaacagggcgagactccgtctcaaagaaacmaaaaaacaaaagaagctgcctggatgatggggatagcatcttcactgtcatatgcgtaattccctacagctgaccatcccaggcatgaaggtctggtctatttcagatgtccccaccgaccactccaacttggagtgagcgctcattctgccccactggttttatgcttatgacaatccagaatgttctttggttcttctggtgcactggctcctttgttcgttgttgttgtaacttacattttgtcgaacacccaccatgttgcactgtactaggcaactgtgtagaaggtgcccgtagcaatcgttacagttcagagtgaaagtagtgcaaagtccagaaaaagcagtgattgactcttccggcga

SEQ ID NO: 793315 - DNA, 629 bp, Homo sapiens
caaagtccaatgctaaatgcttcctaattgtggggactcgaatatgaaatctgagcacgtcattttcacttcttaaaagaataaagtcaggtgacaattttaggtatttttaagttttcctttctacagtttgaaggagagggagcgtaggtcaaatgtggcatttctttctgcagtgtttctaacccgagacaataatgggccacctattgggtgatcctttggcttcaagctgcagagttgtctttgctgccagccccaaatcctttaccttctgttttcaagatactccccaagacagctctagaagagagcttgtctttatacctcygaatatctctacgttaacaagttcaaaagaaagcagagtcacgatgacgaggtgctgcaatctaccagatacagaaggaaataagcaacgaagatcacctgagctaataacaatatttttttttttgagacagaatctcgctctgtcacccaggctggagtgtagtggcgcaatctcagctcactgcaacctccgcctcccgggttcgagcaattctctgcctcagcctcccaagtagctgggattacaggcacccaccaccacgcccggctaatttttgtattttgagtggagatga

SEQ ID NO: 793316 - DNA, 594 bp, Homo sapiens
agggagcactcggggagcactcccacgcacctgacactggctgagcctcctgtgtcctgcctcactgacacctcgcagccccgggggcaaatgatgtccatttggaagatgaggacatggccctccaacccccattcctcccaggaccacctgtcctccagctgtcactggtctgccccagaagccccctttggcatgagtttcccctgactctatgccaggcagaccttgaccccaggcattgatggacasggggactctgttcatggctttgacttcagagcaacccctgcagcctgacagaagggagacctgccctgggctgcttcttgctttgcccttcagccctagcttggcagaaccttcccagacccagcccacctgggcagagcctaagaaggagttaggagaaagacttacaggactcaacgagtggcaggctgatgatggctgtgcctgggaaagcagagaaagcctcctaaaggagggacgttcgggctgagcctgcaaagatgagtcagcgtgcgtggggtgagaggaggcgggtaggtggagcacaggctcagaggtgggagctgcagaagtctggggcag

SEQ ID NO: 793317 - DNA, 608 bp, Homo sapiens
aagccagacacatctgtagggctgtgcacatgctctggaaagatgtgggaaggccttaaactctcacctctggctaaccttgaagctctgcgtcagcaggaagtgaaggcaaaagcggagttgtacgctgcctgactggatgttgaaggcatgccccaaaacacacatatacacaaatatagcccctcaaagagacttagggacttattggttctaggcatttaaraaaatgtcgactgggcacggtgcttacgtctgtaatcccagcaatttgggaggccgaggcaggtggatcacgcaatcaggagatcgagaccatcctggccaacatggcgaaaccccatctctactaaaaatacaaaagttacctgggcatgctggcgcgtgcctgtagtcccaggtacttgggaggctgaggcaggaggttcacttgaacccgggaggcagaggttacagtgaaccaagatcgtgcactgcactccagtctggcgacagagcgagattccatctcaaaaagaaaagaaaagaaaagaaaagaaaagaaaatgtctgtccagctgttacctggcccactaaggtaacaaatcagagatttcagtagccaacac

SEQ ID NO: 793318 - DNA, 591 bp, Homo sapiens
tgagattctgaggagcttcagaataaatgaagacaggttcctgcactcactccccatataattcatttgttaaactgcatcccctctcattccctccctctttctcacatgcatacatgtccagttgaagccacctgaatgtcygatgttgaaagctcagtttcccgctgttgtcctgacttccttagggagttttgatgagtcattctggctccgagccccgccacttcctcctcctgcagaggaagctcattttcagcactcacacccacaaaccacacaggaaagcgagaagtgggattaagtgaaaatgttgagctccttccatcgcctctggtccactattatacatgatcttgccaactgttccttgactgtgtctgcagcttgtctgagaactggagtggcccctggagcacacatccctgcctgtgcattgcctggaaagtcgagctctatagccaaggaaaaacctcctgattggaaggcagaaagcactgggttttgatccagctgaactggatacaaagatcttagtttcttcatcagcaacctaggcataaatagttaggcatacttcatagtgttatg

SEQ ID NO: 793319 - DNA, 694 bp, Homo sapiens
ctctgatactctagaagatgaggtttaaatgtagagttcttgaactccacagagctctatgctggcacatagcagcacagagtgagccagaccttcgcctgtggcccccacccttttgtctttcttcccgcagctttatccatgctgtgaggggcctcatgcacacatgtgtacatacttcagcctgcatatctaagctgtgttcacgctcctcacaagcatgcttgtaggtggcaactctggcctatgcccgtatgctggagcattctactttctttcatttttattttatttatttattcatttatttatttatttatttagagacagggtttcattctgttggccaggctggagtgcagtggtctgatcatagctcattacagccttgaacttctggactcatgcagtcctcctgagtagytgggactacattaattaccacacctagtattttttttttatttttattttttgtagcaacagggtctcgctgtgctgcccaggctgggtttgaactcatggcctcaaacactctttctgcctcagcgtcccaaagtgctgggattacaagcatgagccactgtgtcgggccagcattccactttgataatagacctgtggaaaaggcccatgcaagtcctgaatgtgggcatggattcaattaagtagggaattccaggatcctggatac

SEQ ID NO: 793320 - DNA, 555 bp, Homo sapiens
ctatgaagaaatactcaagactgggtaatttataaagaaaagagatataattgactcacaattccacatggttggggaggcctcaggaaagttacagtcatggtggaaggggaaggaaagacctcttcacatgatggcaagagagaagtgcaaacaggggaaatgccagatgcttataaaaccatcaaacctcatgagaactcattcactatcacgagaatagcataggagaaactgccccatgatccaagcacgtcccactgggtccttccctcaacacacagggattatggtgattacaatttaagatgagatttgggtagggacacagagcctaaccatattattctgccccttgcctttcccaaatctcatgtcctcacatttcaaaacataatcatgccttcccaacwgtccccccaagtcttaactcactacagcattaaccctaaagtccatgtccaaagtctcatctgagacaaggcaagtcccttccacatatgagcttgtaaaatcaaaagaaaattagtcattttcaagatacaatgggaatac

SEQ ID NO: 793321 - DNA, 546 bp, Homo sapiens
ctttatcttttaggaaataatcagatttatatcattttcaccataacatatatagtgccgatgttcaattcaccagtagaaactgataccacatktaaacacacattgatgaaaaataaaataaaagtgaaacaagtcagcaataatcaattatgtaaataagatgtttaaatcactattgtttaattatcacatatactttgatgtactctattttaataatatttcaaattcaactttttaataacttaaactgtttattaaacttgccattgattcttgattttaaagattagaaataaaacaaatctcccttatatgacaaatggtatctatgtaaaactggagcaaacagtatgtaggtatgaaacgttagaaacattcccataaatttagtaagaaaagacagaaatatttacacaaagaaacagaaaaagatgtcttttacaataggtaatattgacattgttctggaactgtttgtaaatacaaaaaggtttcattttaaaatactaattataatatttatatgtacaaggaaataat

SEQ ID NO: 793322 - DNA, 546 bp, Homo sapiens
ctttatcttttaggaaataatcagatttatatcattttcaccataacatatatagtgccgatgttcaattcaccagtagaaactgataccacatgtaaacacacattgatgaaaaataaaataaaagtgaaacaagtcagcaataatcaattatgtaaataagatgtttaaatcactattgtttaattatcacatatactttgatgtactctattttaataatatttcaaattcaactttttaataacttaaactgtttattaaacttgccattgattcttgattttaaagattagaaataaaacaaatctcccttatatgacaaatggtatctatgtaaaactggagcaaacagtatgtaggtatgaaacrttagaaacattcccataaatttagtaagaaaagacagaaatatttacacaaagaaacagaaaaagatgtcttttacaataggtaatattgacattgttctggaactgtttgtaaatacaaaaaggtttcattttaaaatactaattataatatttatatgtacaaggaaataat

SEQ ID NO: 793323 - DNA, 619 bp, Homo sapiens
taacagagcttgatttttctatgaagctaatgaagtctaagcttcagggctcctaatttgaacagacaccatcaaggacctgagctggcccttaataacgtttctgcatggtcacctatttttgtaaaaaattgaagagaattaatctcttaattgcaagagaatgaacggctgtctctcttattctatgctgatttccccttcattgcatttccactgattcagttgacattacagtttcaggcatttgaaggatgcaagaaaaagttacacatagaatgctattagtttgagatttatgtggtatattttacagtctcaattaaatataatttgataactgatggtcctccaagtgtaagaatggcttccaggaatactcctaccacccctgtgccaaatmaatttgcatcataacacaaaacttcagtgtctgaagacagcacatatgaatatgcccgacaccagaagtctatgtgtagtgaaggagaaacaagattaaaaagtataaagactatgatcagctgtgtaaaattttaagtggatgattccattctcattgattcttctcctagtaaaaatgaaaacttgctcaagtcattcacaatatattggcatc

SEQ ID NO: 793324 - DNA, 597 bp, Homo sapiens
aggtgatgaagattccttttgattacatatgaaaaccttctttaaaaattactcacagataaaaattttcacttctccatggtttcagtgccagggtattatatacaaaaatggttaaactgctaaataaaatatgcaattctaggtgtcttatttgtaatccttagtcctgtttcagcagttgtccaaggtcaggctaattgtaatgatcacttttgtagaacacaatggtaaggatgactttttgttgttgttgtttaagatggagcctccctctgtcacccaggctggagtgtagtggtgtgatctcagctccctggaacctctgcctcctgggctcaaacaattctctsgtctcagcctcccgagtagctggaattacaggcatgtgccaccacagccctgctaacttttgtattttcagtagagacggggtttcaccatgttgaccaggctagtctcaaacttctgacctcaagtgatccacccacctcggcctcccaaagtgctgggattacaggcataagccactgtgcccagctgagggtgactatttttataatggcatcttaaaatgattaaactatttaaatttaa

SEQ ID NO: 793325 - DNA, 597 bp, Homo sapiens
aggtgatgaagattccttttgattacatatgaaaaccttctttaaaaattactcacagataaaaattttcacttctccatggtttcagtgccagggtattatatacaaaaatggttaaactgctaaataaaatatgcaattctaggtgtcttatttgtaatccttagtcctgtttcagcagttgtccaaggtcaggctaattgtaatgatcacttttgtagaacacaatggtaaggatgactttttgttgttgttgtttaagatggagcctccctctgtcacccaggctggagtgtagtggtgtgatctcagctccctggaacctctgcctcctgggctcaaacaattctctggtctcagcctcccgagtagctggaattacaggcatgygccaccacagccctgctaacttttgtattttcagtagagacggggtttcaccatgttgaccaggctagtctcaaacttctgacctcaagtgatccacccacctcggcctcccaaagtgctgggattacaggcataagccactgtgcccagctgagggtgactatttttataatggcatcttaaaatgattaaactatttaaatttaa

SEQ ID NO: 793326 - DNA, 655 bp, Homo sapiens
gcaaggaaagctactgttggtgatctcagctgctaccagcagctgctaccagataatgccttgcctttcacttggtccaagttttcttcaggtacatctcatgggggaatctaagggagaagcaagctaaaatacaaatacagctacaaatacaaatacaagctaaaaataaaatagcttgtaaaatacaaatacaaattaaaataaaaattcctaatacagatygtattaggaataaatagaaaatcaaaacaaacaaataatgagtaagttgattaaatcagtaataaaattcacctatcaaaaaagcccaacgcctgttatcttcactgctgaattcaaccaaacagtataaaaaactggtagtattttttttcaaactatgcataaaataaagatgagcagacatacacaaaccaatagatgtaacatatcacaataacagaatgaacaaaactatatgatcattttcatagaagtactaaaaacatttgagaaactttgacatttcttcatgataaagagtctccacaaattaggcagagcagagccagatggtggaataggagacaccaaccattcccctcaaagataccaagttaacaactatgtacacagaaaaaaaaaaaacaccttcataaaatgaaaacattat

SEQ ID NO: 793327 - DNA, 655 bp, Homo sapiens
gcaaggaaagctactgttggtgatctcagctgctaccagcagctgctaccagataatgccttgcctttcacttggtccaagttttcttcaggtacatctcatgggggaatctaagggagaagcaagctaaaatacaaatacagctacaaatacaaatacaagctaaaaataaaatagcttgtaaaatacaaatacaaattaaaataaaaattcctaatacagattgtattaggaataaatagaaaatcaaaacaaacaaataatgagtaagttgattaaatcagtaataaaattcacctatcaaaaaagcccaacgcctgttatcttcactgctgaattcaaccaaacagtataaaaaactggtagtattttttttcaaactatgcataaaataaagatgagcagacatacacaaaccaatagatgtaacatatcacaataacagaatsaacaaaactatatgatcattttcatagaagtactaaaaacatttgagaaactttgacatttcttcatgataaagagtctccacaaattaggcagagcagagccagatggtggaataggagacaccaaccattcccctcaaagataccaagttaacaactatgtacacagaaaaaaaaaaaacaccttcataaaatgaaaacattat

SEQ ID NO: 793328 - DNA, 353 bp, Homo sapiens
tcatttttgtgtgtggtgagactgcttaaaatctacactaagtagttttcaagaatacaacatattattgttaactaaagtcaccatattttacaacggattgcatgtataagtgcaatcatgtggttttgtctgtcttattccacctaacttaatgtcctccctgtttattctatgytcttgaaaatgcaggatttccttttttcaaagctgaatagtattacattgtgtatatagaccacattttctttatctattcatctgtaatggatacttaaattgattccatattttggctattataaataatgctgtaatgaagatgggaatgcagataactctttgacatactg

SEQ ID NO: 793329 - DNA, 565 bp, Homo sapiens
tttttccagtctgttttatttatttctgttctgtaccttactatttttttctttccagtagctttgggttaatttttttcttcattttctagtttcctgagatacaaagttacttgctttattaggatcttcatggagtcattcatatctctaaacatccctttatactgcttttgttgcataccatatgttttttagaatgttgcttttccatttttgtttttctcaagatatttttaaatttccctttgaatttcttcattgccccattggttgttcaggatcatgttgtttaatttccatgtatttgtgaatttcctaacatttcttctgctattgttttctartttcatatgacaatgttaaaaaaatttatgtaatttcaatctttttaaaattttttaagacttgttttgtggccccacatatgatctatattggagattataccttgtgtgcttgagaagaatgtttattctgctgttgtcaaatggaatgttctatataggtctgataggtccatttggtctaatatagagttcaagtccaatgtttttattgattt

SEQ ID NO: 793330 - DNA, 640 bp, Homo sapiens
ttgaatgtgggttattgaagtcccctactattactgcatttttgtctatttcttcctttagatgtattaatgcttgctttataagtttcattgctcccatgttgagtgcatacatatttgcaatagttataatctatttgtgaattgactcctttgtataatgaccttccttgtttctttttacagatttgacttaaaattcaattttagttaatgttagtatagcccccctgcttkcttttggtttccatttacatggaacatatttgtttatccctatgctgtgctatggtctgcatagtagtaccctttcaaaatatgtgtgttacgtcctcatcactatggtgatagtatcaggaagtaaggactttttaggtgattaggtcatgaggattccaccctaatacattggattagtctttttacaaagaagagtcatggaactcccttgccccttccacattgtaaggacatagtaggaaggcaccatagtgggaaggcaccaaaacagggagcaagcccttacaagacatcaaatcagttggtatcttaagctggaaaatctcagcctctaaaactgtatgaaataaatttctattttttataaactagccagtttatggtaatttcttatagtggc

SEQ ID NO: 793331 - DNA, 640 bp, Homo sapiens
ttgaatgtgggttattgaagtcccctactattactgcatttttgtctatttcttcctttagatgtattaatgcttgctttataagtttcattgctcccatgttgagtgcatacatatttgcaatagttataatctatttgtgaattgactcctttgtataatgaccttccttgtttctttttacagatttgacttaaaattcaattttagttaatgttagtatagcccccctgcttgcttttggtttccatttacatggaacatatttgtttatccctatgctgtgctatggtctgcatagtagtaccctttcaaaatatgtgtgttacgtcctcatcactatggtgatagtatcaggaagtaaggactttttaggtgattaggtcatgaggattccaccctaatacaytggattagtctttttacaaagaagagtcatggaactcccttgccccttccacattgtaaggacatagtaggaaggcaccatagtgggaaggcaccaaaacagggagcaagcccttacaagacatcaaatcagttggtatcttaagctggaaaatctcagcctctaaaactgtatgaaataaatttctattttttataaactagccagtttatggtaatttcttatagtggc

SEQ ID NO: 793332 - DNA, 506 bp, Homo sapiens
taacaggcaggggttagaaccatttggaggggtcagaagaagacaggagaatgttaaaatgtttggaacttcctagggagttggacggctcagaagacaagatgtgggaaagtttggcacttcctagaggcttgttgaatggctttgaccaaaatactcacagtgatatggacaatgaagtccaggatgggktggtcacagatgaagatgaggtgaggaacttgttggaaactggagtaaaggtcattcctgctatgcaaagagactggtggcatattgccctgccttagagatctgtggaactttgaacttgagagagatgatttagggtatctggcagaataaacttctaagtggcaaagagctcaagaggaagcatagcataaaagtttggaaaatgtgcagcttgtaaatgcaatagaaaataaaacttcatttttctggggagaaattcaagcctgctgcagaaatttgcaaaaataataaggagccaaagttaatcacca

SEQ ID NO: 793333 - DNA, 506 bp, Homo sapiens
taacaggcaggggttagaaccatttggaggggtcagaagaagacaggagaatgttaaaatgtttggaacttcctagggagttggacggctcagaagacaagatgtgggaaagtttggcacttcctagaggcttgttgaatggctttgaccaaaatactcacagtgatatggacaatgaagtccaggatgggttggtcacagatgaagatgaggtgaggaacttgttkgaaactggagtaaaggtcattcctgctatgcaaagagactggtggcatattgccctgccttagagatctgtggaactttgaacttgagagagatgatttagggtatctggcagaataaacttctaagtggcaaagagctcaagaggaagcatagcataaaagtttggaaaatgtgcagcttgtaaatgcaatagaaaataaaacttcatttttctggggagaaattcaagcctgctgcagaaatttgcaaaaataataaggagccaaagttaatcacca

SEQ ID NO: 793334 - DNA, 475 bp, Homo sapiens
atctgagaaaattaaggtggttagagttcatatgagagggtaccaaagaggagagagatgcacagagaaaaatttcagagatctgcagtggtctccctcaagtaatcaagagagtgctaatctgtgtatgcaaggctagggaaataaccacccacaaggattgtaaagaacagtgctcagagatcatacatattcaraaaaattatctactgtcaatagtcaatgtgtaacatcttacaattcaggcagcattggttagaacagtagttcccaaaggaaggcaattttggccccaaggggacatttggcaatgactggagaaatttttggttgtcacaactgggagcatgctactgatatctagtctgaaagttaaacaatgcacaggaaatctcccaccactaaaagttatctgtaccaaaatgtcagtagtgatgcaattgagaagtcctaggttaaagtactaaaaaggtct

SEQ ID NO: 793335 - DNA, 632 bp, Homo sapiens
caacataatcaaattagaactcaagaataagcaactcactaagaaccacacaactacatggaaactgaacaacctgcttctaaatgactcttgggtaaataattaaattaaggcagaaattaagaagttttttgaaactaaggagaaaaaagaaatgacatatcagaatctctggaatgcagctaaagcagtgtcaagagggaaatttatagcactaaaggcctacattcaaaagcttgaaagatctcaagttaacaacctaacatcacaagtaaaagaactagagaaccaagagcaaacaaaccctaaagctagcagaagataaggaataaccaagattagagttgaactgaaggagatagggacatgaaaaacccttcaacaatcagtaaatccaggagctgtttttttaaaaaagttaacaaaatagactgctagctagatagctagactaataaagaagaaaagatagaagmtccaaataaacacaatcagaaatgataagggggatatcactactgactccacagaaatataaacaataatcagagaatgctataaacacctctatgcacataaactagaaaatctagaagaaatggataaattcctggatacatacaccctcccaa

SEQ ID NO: 793336 - DNA, 527 bp, Homo sapiens
atacttatgaaatcaaataaatgtaataataaataagagaaaagacacaaatctttcatgtagaagaactagaactgattcatacaggtactttcctctcratgaagtgcagcataactccccactccttaaaagtgacttccttccaaagagtacagtgtggaaaaggaggaaatagagcaactttatggtagacaaatctgataaacactattgcaaccatgtcagcatcaaaaattatgagtcgtgttgatagtatgaacttttgatgtgacatgatgagaatgccacttcatctctgtagtcttcctccccaaacccataatctcagtctaataatgagaaaaatatcaggcaaactacaattgagggtcattaagcagaatacctgacaattatttttcaaaactgtcaaggtcatgaaaaataatgaaactgttagaaactgacacagccaagaggagcctaaggagacatgttgactaaatgtaatgtgttatctgttctgaataggatcctgacaccca

SEQ ID NO: 793337 - DNA, 618 bp, Homo sapiens
taggcttgcagccaggtttgagaaatagtggatgagtgcctgaggctgaggacactgagcaagtgccaggaaccacttgcatattgacaatgcttattggccgtaatttaatctcataaaatcatattccctcaacagataccatctccytgcttcttaggataagtgaatggcaccatacaaaatacactgatgtctttaatattgttttagattaaagagcactattcaaaagagcttttgtgatgaaaatgttctacatatacactctccaatatggtaaccactagctacatgtggctattgagcgcttgaaatgtggctagtgtgactgaaaaagtgaagttttaattttatttaatgttaattaatgcaaatttaaatatcaacatatgactagtggctaccatattggacagcattgctctataaaaatgcaatcaggttcctaagagacttcttaatgttcttttttgggatatggactaatttttctcattccgacttttttcttcctacaaattggagtctcctactttctaggagacatttttactttaaaacagcagtacaaatgctatgccactcccccagatttgcaatagaagggtctggcat

SEQ ID NO: 793338 - DNA, 564 bp, Homo sapiens
agaccctcaggttttggagtaaagcccaatcatcgtatggagataagtaggctccttttgagagttaacttatggcatgctactgggcctcagtaaaaacctaatgcttaattataggtcatcaagctatcctgcaatctaaactgcgcgtcatgaagtgggatttttctgacccaccaaggcacagagttgaacatacattacagcagtctattatcaaataraagaggtatgtatgagatggggtttgagcagaaactgaaggaaaaaatgtaagctatatgaggccatggtccaaatgtccatagctcctattattaatgcattatctcctttctctcagcttgaacttatggcaccgtggtaacatccttataataaattgacagagaaacagcaacaacaaaaaacttcagccaaatctatagaaaattctgcataatatacaggcaccacaccaaatatgacagctgcagcactacagccccttgtcaccacatctctgaaggacaatgatgaagaaaaattatccaagtgttcagaacttaagtaagcacaacttct

SEQ ID NO: 793339 - DNA, 564 bp, Homo sapiens
agaccctcaggttttggagtaaagcccaatcatcgtatggagataagtaggctccttttgagagttaacttatggcatgctactgggcctcagtaaaaacctaatgcttaattataggtcatcaagctatcctgcaatctaaactgcgcgtcatgaagtgggatttttctgacccaccaaggcacagagttgaacatacattacagcagtctattatcaaatagaagaggtatgtatgagatggggtttgagcaraaactgaaggaaaaaatgtaagctatatgaggccatggtccaaatgtccatagctcctattattaatgcattatctcctttctctcagcttgaacttatggcaccgtggtaacatccttataataaattgacagagaaacagcaacaacaaaaaacttcagccaaatctatagaaaattctgcataatatacaggcaccacaccaaatatgacagctgcagcactacagccccttgtcaccacatctctgaaggacaatgatgaagaaaaattatccaagtgttcagaacttaagtaagcacaacttct

SEQ ID NO: 793340 - DNA, 557 bp, Homo sapiens
taactcaatccagtgtacaaaaatcctcctgcttcaaaatctcctcaaatctgaaaacttctgtttcagcagagtcgagttcaatctctctcatcttgcaataatcttgaccccttattgtaatagccttaaataatttcttgcctgttttactrtgccttttttccttgaaagatgtgtgactcttttattttaaaaataattttaaaaaggaagaaattttactatcaaaatctgtaatagtagatagttgatgctatttgtggttagcaagtttcagttagaagtttagagtattacttatttaacaaagtgctggtctcccagttggctttatattgatatttttacataatttatgcaaactattttttaaaaatcaccaaattttaaagaaagcacaacttcttaaatttcgtataagaagaattttagaaaaccagcatgtcattaggtcaaaaactcctatcaatctttttggcaaattggattaatgttaaaaatacagttgattctccactattaaaataaacaataagacatttacaaatttattt

SEQ ID NO: 793341 - DNA, 557 bp, Homo sapiens
taactcaatccagtgtacaaaaatcctcctgcttcaaaatctcctcaaatctgaaaacttctgtttcagcagagtcgagttcaatctctctcatcttgcaataatcttgaccccttattgtaatagccttaaataatttcttgcctgttttactgtgccttttttccttgaaagatgtgtgactcttttattttaaaaataattttaaaaaggaagaaattttactrtcaaaatctgtaatagtagatagttgatgctatttgtggttagcaagtttcagttagaagtttagagtattacttatttaacaaagtgctggtctcccagttggctttatattgatatttttacataatttatgcaaactattttttaaaaatcaccaaattttaaagaaagcacaacttcttaaatttcgtataagaagaattttagaaaaccagcatgtcattaggtcaaaaactcctatcaatctttttggcaaattggattaatgttaaaaatacagttgattctccactattaaaataaacaataagacatttacaaatttattt

SEQ ID NO: 793342 - DNA, 604 bp, Homo sapiens
gccaagatcgtgccactacactccagcctgggtgactctgtctccaaaaacaaacaaacaaaacactacagtacaaaatgtgtatattagggctgaagaaatatagcatagaagagtgatctgagtggatgagagtaatcaagatttcctatgggggaaattacttttagaaactgaagggtagagagaagtctagtgtagtagtccaagcacgtagttctccactgataatactgtgtagcctctagcaagttacttaacctttctgtgtctcagactcatttccagaacagaatagtgcttactagataggggtggagtgctccctcgcaggtggtgctcactggaaggcctcagtgagttaatgggtaartggggcttagcgcttgatcaatagaattagcaacatcatctgacatcccatcttcacattcctgggagtcccctacaattgctcctacttctcttacaaagcaacatttcgttctcctaaattattttctagtccttgttcatagtcaacttgctttgttaaaattactttattctttgtagaaaatgatgcatgctcataaaaaagagctccaagcaataaagtacaaat

SEQ ID NO: 793343 - DNA, 540 bp, Homo sapiens
aagcattccaatttgaaataaagttttaactgtagaattttatttaggaagtgatcccaggatataccaggagtggaatagggaagggaaactgggaagggaaggcagcccataaaggatcattatcaggaaaattacccctgggagtcatcaaagctcaaggccactgagtaactctgggagccaggttagaacgggcaccacagaatcattttacctgggaaacaaaggggtagargtatgttatacaccagctcccaacaacgattagtttctaccctaatcatcatcacccactgaggcaaccaaccagaacacctcaatccaagctcatacttcttattttacacactagtaggatcccttcctctacttataacacttgtttatactcaaaatacctcaggttcactaaatatgctagtaataatacttgctacccgagagctattaactgccattggttgagggtttctggggtgtgtgttagttttctgagaattaccttttgctggatgcaaggtgtattagtccgttttc

SEQ ID NO: 793344 - DNA, 569 bp, Homo sapiens
aaccattaccatccaggtgcaagtggatcctaactcaggcaggacatacatggtaaactctccgctctccataccaacattctttgagcgctgtgccaggtgccgtgctatgacttaccagtataagcccaatcctcagaacaagcctgatgaaagggaccattatctcctccattttacacatgaagaaactgaggcatggagaggtcaaggcaattgtccaaagtcatccgactagacaagagcagagacacagygcatctcagtggccatgctgtagaccatgtccgaactgctcctccttccccttgtagcggctgagctgttgcacccttgtctgggagttgcaggctgaatgggcagaagctgaagctgatgggagctgtgggcagggagatgactcaggactggtcactccagggcccccaggacagtacccttggcagttcccctacacacagtgccatgaacactggttttagagcaaatggctctcctaagttctctctaaggcactttcctgcccttgtcacttgatcctccagccactgccttagaccagaccctca

SEQ ID NO: 793345 - DNA, 635 bp, Homo sapiens
ccagtgagtctgcagtcacacaaccacagggttcctattggttggaggagcccttgggaaccatgcactccagctctcttatttttcaaatggagaggcccagttattaagtaatttacccagaattacactgtgaggtagtggcaaagctggacacatgataaatygtgatggaagtgattgatgacttgccaatctcaccaacaatcaaaaatcctcaagtgaaagccaagtgtcagggtgtggaaagcactggtgtctgttgtcacttcatctacaacatccattgctcacagtagataacacagctcccattatatagtttgagaagaagataactatccagcatcctataggtgggaactgtctaagctggaaaacattcattcatttatttattcatccattcatccatttaacacatgtttaggaagggcctcctgtttgcctgcctagctgctaggtgaacaaataagatatagccccagtcacaatcgagattttgctttggaaaggaaggccaatatcatttgaattgtcccataaagttctttaaagtttaaattgtaacaactgctacaaaatgctgagagaacttaaaatatgaggaattgatggagagttaggagtcacag

SEQ ID NO: 793346 - DNA, 635 bp, Homo sapiens
ccagtgagtctgcagtcacacaaccacagggttcctattggttggaggagcccttgggaaccatgcactccagctctcttatttttcaaatggagaggcccagttattaagtaatttacccagaattacactgtgaggtagtggcaaagctggacacatgataaatcgtgatggaagtgattgatgacttgccaatctcaccaacaatcaaaaatcctcaagtgaaagccaagtgtcagggtgtggaaagcactggtgtctgttgtcacttcatctacaacatccattgctcacagtagataacacagctcccattatatagtttgagaagaagataactatccagcatcctataggtgggaactgtctaagctggaaaacattcattcatttatttattcatccattcatccatttaacacatgtttagsaagggcctcctgtttgcctgcctagctgctaggtgaacaaataagatatagccccagtcacaatcgagattttgctttggaaaggaaggccaatatcatttgaattgtcccataaagttctttaaagtttaaattgtaacaactgctacaaaatgctgagagaacttaaaatatgaggaattgatggagagttaggagtcacag

SEQ ID NO: 793347 - DNA, 640 bp, Homo sapiens
gccttgaatcaagtcacttttcctttcttggcctcagtgtcctcatcagaaaatgaggctgttaatcttcagggcacaactctgaggattaacattcttgggtgctgaacaaaacagtcttgcctaacttctgcctctttttaccctgcctagcatctgtctctttgagtaggtggatatattttacaaaaagaaaaatgaaaagaaatggtgattgcatttgcagtagggaattctcggaggattgtcaaagggagtcaagtggctagtctgacattcacctctgtgtagcaggccgtgccggagcctgggcactcccattatcgctattggctgcatccaccagttatctcaagtctacaccttgcaaccccaggtgttccttcatccatcattggccattgtttgtatccactcctccttccctcaccacctcctgccagatgactccttgttaataagccagtttgctcacatmctgaaaactatctgattctggccccttttatcccaaacaccgcccatccatcaaatgcttgctccacatgcttgcttaggaaaatgggaatgggggagggagacaaatcatagataaaacttcttagctgcttatctctaaagaaatagaatggataaatag

SEQ ID NO: 793348 - DNA, 634 bp, Homo sapiens
cagggctcttgggctgtgtatttactatacagttattaaaataagacaaaggcagcccagatgattaagccatgtgaggagagtgattggggtgggaaagacatttaatcaaagtcccttaaattaccatcacatttatatatcatggctggttgtttgattataactccctttcaggaagattctgagtagagcatttacccttgttgcacaaagttggaaacaggaaacaatctcaggggaaaaaccgtattcgtaatctaatctccattcatccattcatccactcattcagtaaatgctcactgagcacccgtgatttctgggaacacagggktgagacacacagagcccttccctggagaaatgtgcagtcagttgggtgccaagaataacataatgtgataaatgtttaaatagaaacaaatacagtagaagcacaaaggagggagccacaactttttctgcccctcccacttgctagaccctaaagacattcaaaactcatcttccaaaattactaggagtagaagtttacctggaagagaagggagttgcatgggaatggttggggcagcaagtaggtaaggatgagtaaaaggagatgaatgtccagattcactcaaaggttgga

SEQ ID NO: 793349 - DNA, 625 bp, Homo sapiens
gcatctctctaaaattgtggaacctgtttacctgctctggagaatggctgcctgtggcagacataggagttgtcctcatgctgtgcttcctatcttccacagtaattgacttgtagctgcaatacagttaccaaccaggaatacaatttmtcagccccatgtcttgcacctacagctaagtgtggccatgtgaccagttttcaccaattaagtgtgaatagcaacaaagtgcaccaccttcaattggaggctttgaagaagcagggcagccttcccttgctctctttccccttgttctggtgggatacagatgacaataaggccctgggttttgaggtagccacaagatgcaaaatacctcagacctgagtcaccacaaggaagagagaagcccactgacatggaatacccagcctagtctacagatgaataagaaataaacttctattatgttcgaacattacagattttgttctgttatagcagtttatctcaccctgactaaactgttgcctatcttccaagataggccctccttccctgaaagtgactttttcatacatgtaatctgtattttaattcatattctccaaagcatatccacatctattcaactattttcatg

SEQ ID NO: 793350 - DNA, 590 bp, Homo sapiens
ccaatgtcccatggttttttgaaaggtgtttttgtcttccgaatgtgaagatagaatactgtatcgatttatcttctttgtattcattattttttcaggccttctgaatctttgcatgtttgtttgtttgtttgttttttgtctagctgctctgccatgagccaagggatcattaaagacctctacaatgagtgtgtttttgtccatttctcctggtttaactttatggattttgtaattcataaatacccataatgatttgactttccctgtagagactgcctttgatcataaaaagtggtgagcgcctgctgttttcagggctgtgctctaggctctgaagatgcaagggtaataggacacctgtcagtcttgctctggaggaacaggaagaagcccatagtctctcaataatcacktggccacttactaaatacctcctgtttgccttgtgttttatatgcatttgctcacaaatcctccattgacactaaaaagagtcattaaaagtatatacttcttagctgttttacatatattatccccatattacagttttagaaattgaaactcaaagggaaagtaaatga

SEQ ID NO: 793351 - DNA, 549 bp, Homo sapiens
agcgaatagacattttagccacaggataaatgcaaagtacccagacttcaatggctcccggaaaacacaggcaggaaaacaaaagcaccttcctaatgaggcccttgttatcatttccccataccttctgtagtctaaaatcctggacccgaatacaaacgggagttttccttcgttaaacctttctctgactgggtatcttccactaactcattgctcatgtctacttcttgacaaaaagtgagtatattatacatgtaaaggaaaatgtaacaatctcaagcacccccaaactccttatgcaaaagggaaagttaagcctggagactgagtcatacaaacaaatagctgttgctagcattatgcatrcaaaaagcattttagagatgcttgtgactgccagaaagagtgatagaaacaaaagttaacacaaattagcctctactaggtatgcgtctctcacttcgtgatgcatccttttatttaaatcttcatcacagcttcatgagatagttttcattatcctcttatgtcgtggtggtgtttttc

SEQ ID NO: 793352 - DNA, 644 bp, Homo sapiens
aagatttttctgatgagataaggtaaaagttaaatgcaaaaatcaatgattatcaaattaatgatttcacttaactttgtagaattaagcgctttatattttcttacagtttgcatttcaaactgataaggtaatgtaaatcattgtttctcttgtaaaattggtcaaaatagtcaaatagcttcaaagttcaaaagtgtataaatccgacartgaatattttatggagactgctatggtttaatattagaacataagtaaatgaatattttttcaacactctctaatttaaactgtgtgcactcatcagtaagaaaattatgaaactccaatatttgtttcacaagtggtatacatgtattactacatacatataaaacatttttgaagataaaatataaatggatgaaattgaagcataaaatagaaattataatatgttcttcccacactccagtaaactgttttgtgtgcacctgttttggaaacaattgctccaatttttgaccccggttcccgtcttcattagattgagagcagttggcagtttacagtctcttttggccatgacacacaggctctgggagccttgggtgagggaacagaccttggtctttcaggtgctgctcaccctgctggccacc

SEQ ID NO: 793353 - DNA, 584 bp, Homo sapiens
gtgtagtagttactatattttggaaatgacctctaagaaactgtattattttccaggaatctattgatttttctaaaatctaatgtacttaacaggctatggtaaaagaatctctacttcccctctagcctgcagtaagcatgcacattagttggttataatgagtggataaaggcccagatagcatcagaggatctgagttccagtcttgatccttcagtacattagggctatgatgttaggtgggtgatgacttatcctcattgagtctcctcattggtcaaatctggaaagcagcaaggtctgctttactacagctccacactcctttatctgagccctcaagtagagaagtatttcagcattcagaacattttcagatttggggtaatatgatctatgtaccgcccattgatacctccagtgtggtcygggctgcaccctataataaaacacattcacatttctacctcaaaacagatggctactcacagtaagcagaataagtaaagaaccccaataaattcaggtcagataaagtttttcatccagggacaaacaaaacaaaaatttgtcttgccttg

SEQ ID NO: 793354 - DNA, 616 bp, Homo sapiens
acaacacagggatcctaggctctcattggcagcatcaggagacatagaagttggaaccagaaggcagagaagtttagctatgcttctgggataaatgtccatgggaatgtgggacagaggataaattatttcacaggctttttctcccaactcttgcttttctgggamctggagcttgggtggcaataggacatatagtgagggagcagagcaggcatgtgcttgctgataggtaggagccaatggatgcaagcttgtcatccctgggcaaaacacagaaaggaagagtggatgcagactgtgtgtttatggcagataagaaaagatttcctagaataccactgaacatatagtatatagaaaaagctattaattaaaagtttaaaaacagcttgaggcttcatgagaaagaaagagtgtacagaatacattcattcattcccacactcatttatccagtttcaaatactatttatggtgtctttcccatgtcctggataatgagcttgggctagcaatatagagatagggaagtctgttgctgctgacctcaaggagctcttagtccaagagaaaggagagacatataaaagacaagtaagaataactgaggtgt

SEQ ID NO: 793355 - DNA, 630 bp, Homo sapiens
aagtgcccagggtaagggacctggaattctgcatggtcagccacctcaacgtgcacctgggtttactggctgcaagggggaggcaatggaatgaagtagttctgagaacagacacgggggacgttctggattcagatcctgtctccagcatataccagctgtgtgactgtgggcaagttaatgaatttctttgagcctcagttttctcatctttaatttgagaattataatagtacctatggaatttgactataaggattaaatgagataatctatgtaaagcacttagcacagtactggcataaataatagaaggacattacttattattcacacaaatacagtgtacccttctgtgaaaaaataagagttaaaaggtcctaagttttagggctttttagagtgtgtaaagagcattctgaagtgggctgctgaagggtcctgtgctgtgcagatgctgacayggccataagcagccatagactcagctagagacaaggagtcctccagccagcatctccaaacccaacccagttgtttccacatctacaggcatgttagaagtactcagaattgtttactggtgtgtaacaaaatttcctgatcctcaggatgtgcatggatcccctt

SEQ ID NO: 793356 - DNA, 475 bp, Homo sapiens
tactcagggcctaatgacatcaataaagattttagggatccagtggtcagtggcatgctagacattccctccaaagtaaaagacaattactgcatctcgtacccctaccacaaagaaggacgcacaatactttgtagatcactttgggttttgggaaaaatacctcccatatcagtaagtattgctctgccccatatactaaatactattatctgaatgtgtgtatccccctcacaaatttatatgttgagatcctaactcgcaaagtgatggtattaagaggtggagtgcttaggttttgaggkcagagcccatagagctagctcatactttccaccatgtgagggcacaatgactagacaccatgtatgaaccagaaagcaggcccttgccagacactaaattaccagagccttgatcttggactttctagtctccaaagctgtgagaaatgaatttcttttgtttatatgct

SEQ ID NO: 793357 - DNA, 561 bp, Homo sapiens
tttacatataatcctttcatgaagtcattttcctgagagtatgggaatgttcaaagggctatcatgaaacgttctcaacctgtgcaattggagggtcttgagctcaagggggatccagagctcagctcaacattcaccagacagggaagtgacttggaaggcaccagcattctgaggttggccttgtaaggtaaggtgttcactggaagtatagggaaggtggcaatagcgacagataaacaagaaggctgatgagatgccagtgaagatgttatggacccgcagagctgaaatacagttgcatctgacaccagtgctttgaaattttggctacttgtatgctcttggctttgcctatamtattttttaaggatttatgtaaagtttgttgttggttttgctttttgaatgttaaccagtttcaactgtggtgagtcaatgcaaaaaaaaaaaaaaaaaaagtttttggttcaagccagggccccagttctcacgaggctacaggatatctccaggaaagacagaaggttgagtctaagtctcccagggaccttgggaatc

SEQ ID NO: 793358 - DNA, 614 bp, Homo sapiens
ctctaggtggaatctatttctctacccccaacaatctgggctggccttgtgatttctctggacaataaaatacagtgacagagatgtgtaacaagcttaggaacctaagtcttaagataccctgcagcttgggtcattaccctattggaaggcggctctgagatgccatcagggaagatgacccttgtgagaaagacctgttgagaaggagagaggcccagctatttgtgctgtctcggctgagcccaaaccccagatctctgaattagctgaatgtgtcatgtgaaagaagcaaggattgactagcaggaaaactgcaagtcaaccctacgtatcctgacagtaacagattgttgttgttttaaggtctagggtggtttataawgcagcaacacgtagcggaaacagaggccaataaatgtaactgaccctttttccttgacattttcaaaaatctaaggtcagaattggaagtgacccgaggaggtcatttcatgtctgtctgtttcaacaatttatatgaggttaactggaaattcaccaaacataattattcattctcaaccttgaagttcatttgcttttaattgaaaaaaactttacccatttatatg

SEQ ID NO: 793359 - DNA, 614 bp, Homo sapiens
ctctaggtggaatctatttctctacccccaacaatctgggctggccttgtgatttctctggacaataaaatacagtgacagagatgtgtaacaagcttaggaacctaagtcttaagataccctgcagcttgggtcattaccctattggaaggcggctctgagatgccatcagggaagatgacccttgtgagaaagacctgttgagaaggagagaggcccagctatttgtgctgtctcggctgagcccaaaccccagatctctgaattagctgaatgtgtcatgtgaaagaagcaaggattgactagcaggaaaactgcaagtcaaccctacgtatcctgacagtaacagattgttgttgttttaaggtctagggtggtttataatgcagcaacacrtagcggaaacagaggccaataaatgtaactgaccctttttccttgacattttcaaaaatctaaggtcagaattggaagtgacccgaggaggtcatttcatgtctgtctgtttcaacaatttatatgaggttaactggaaattcaccaaacataattattcattctcaaccttgaagttcatttgcttttaattgaaaaaaactttacccatttatatg

SEQ ID NO: 793360 - DNA, 614 bp, Homo sapiens
ctctaggtggaatctatttctctacccccaacaatctgggctggccttgtgatttctctggacaataaaatacagtgacagagatgtgtaacaagcttaggaacctaagtcttaagataccctgcagcttgggtcattaccctattggaaggcggctctgagatgccatcagggaagatgacccttgtgagaaagacctgttgagaaggagagaggcccagctatttgtgctgtctcggctgagcccaaaccccagatctctgaattagctgaatgtgtcatgtgaaagaagcaaggattgactagcaggaaaactgcaagtcaaccctacgtatcctgacagtaacagattgttgttgttttaaggtctagggtggtttataatgcagcaacacgtagcggaaacagaggccaataaatgtaactgaccctttttccytgacattttcaaaaatctaaggtcagaattggaagtgacccgaggaggtcatttcatgtctgtctgtttcaacaatttatatgaggttaactggaaattcaccaaacataattattcattctcaaccttgaagttcatttgcttttaattgaaaaaaactttacccatttatatg

SEQ ID NO: 793361 - DNA, 582 bp, Homo sapiens
tttcatccctctccagttctttccttggctttctggagtggtgaaagtggtaaatattgctctgtctactactggtttttgggcatggcaggtttataagacataagataaaataagaacatgtattctcagactccgggtaatgcaattgttcatggagtcatgtgttccttgagagggtatagtctatcatgctctactaatgttagcaatttccttttytcccccattttttgaaaatttttttatctcactaacgaagcaaagcagttgtctctctttgattatgctgttactcccattcagactgatgttaacgctgctggaggtgccaattagcagtaaatccagtaccatcagttttcatttaaatatggaaaatcttaagtaaaccagaatgctttcagagtaatctctacattgccttcagaaacacattttttttaaagtcatagaacagctagtaatttatttccaccttatcttatatggactggcttccaattgatccaatgtgggctatttagtaaacaaggcaatcaaaattataggttattaatgatttttacagttttaaaattt

SEQ ID NO: 793362 - DNA, 582 bp, Homo sapiens
tttcatccctctccagttctttccttggctttctggagtggtgaaagtggtaaatattgctctgtctactactggtttttgggcatggcaggtttataagacataagataaaataagaacatgtattctcagactccgggtaatgcaattgttcatggagtcatgtgttccttgagagggtatagtctatcatgctctactaatgttagcaatttccttttttcccccattttttgaaaatttttttatctcactaacgaagcaaagcagttgtctctctttgattatgctgttactcccattcagactgatgttaacgctgctggaggtgccaattagcagtaaatccagtrccatcagttttcatttaaatatggaaaatcttaagtaaaccagaatgctttcagagtaatctctacattgccttcagaaacacattttttttaaagtcatagaacagctagtaatttatttccaccttatcttatatggactggcttccaattgatccaatgtgggctatttagtaaacaaggcaatcaaaattataggttattaatgatttttacagttttaaaattt

SEQ ID NO: 793363 - DNA, 624 bp, Homo sapiens
gagttttgagatttatgcgcagcagaagtggctaggggaggatataaggatttacctgaccttttggatctatggcttagaaagaatgacattctttttcttacagtatggaagacctatacttttcctcactggacttccttagaktgtctctgacaactgtatctggggagaattatcagggacctgaatcagtggggtggctctttgccaatgtctggtagcaaacagtaaattctacctctttttctccttccttccttcctttctttctttttgctagttcagaaaaaatctatgttgtcatatggttgagatgtcttcagttccaaagtacatgtttctgttgtacagtggtcacctgtaagtgccctgccactgcattcagggaatatatattcaattgactaaaccgtgatactctgagtaacactctccttttcaagaaaataggcttttgaggtgacagctctgcctaagaaagcagaaacagtattccttgcaatttcaaattcatcatacagatcattcccttgaggccatcttcttctgggtttcttggctttcatctctcccatctttaaacagactgccagaacaaatgtcttttaaggccactcattt

SEQ ID NO: 793364 - DNA, 624 bp, Homo sapiens
gagttttgagatttatgcgcagcagaagtggctaggggaggatataaggatttacctgaccttttggatctatggcttagaaagaatgacattctttttcttacagtatggaagacctatacttttcctcactggacttccttagattgtctctgacaactgtatctggggagaattatcagggacctgaatcagtggggtggctctttgccaatgtctggtagcaaacagtaaattctacctctttttctccttccttccttcctttctttctttttgctagttcagaaaaaatctatgttgtcatatggttgagatgtcttcagttccaaartacatgtttctgttgtacagtggtcacctgtaagtgccctgccactgcattcagggaatatatattcaattgactaaaccgtgatactctgagtaacactctccttttcaagaaaataggcttttgaggtgacagctctgcctaagaaagcagaaacagtattccttgcaatttcaaattcatcatacagatcattcccttgaggccatcttcttctgggtttcttggctttcatctctcccatctttaaacagactgccagaacaaatgtcttttaaggccactcattt

SEQ ID NO: 793365 - DNA, 619 bp, Homo sapiens
ttaaaatcatgatctaaaaattgtttagaataagttcctggatatgtatgtaatgaaaatgcacctatatgctccaaatctagggttcaggaatcaactacaatattaccattggtaatgtggacaaagatgaagacaaygatgacaattagtaatcatgagcagtaagcctacaaaaattattacggatttcttcaaaattgcttcagactcttctaatacagattttctaatccctacattattgtaagatgtacagtaattaaccgtatgacttaaaaaataattgccaaatatcctccactctgaactacctttggagtctcctttctcaagacagtcataaagcatacttgagagtgaacagcatggtccagggctttaaagtcacctaagtgacagccagttagttgcaatcagcaccacacaatcacagcgtccacaagttaacaaatgcatttgtttctcaaataggaacacattgagcagaaactgaactactttttcaagtctgagcctgagttgaggtttcaatctgagttaataatgataagaatgaatgaaaataaaagtggtataaagtggagggtggttagctctgacaacagaaaacaattct

SEQ ID NO: 793366 - DNA, 619 bp, Homo sapiens
ttaaaatcatgatctaaaaattgtttagaataagttcctggatatgtatgtaatgaaaatgcacctatatgctccaaatctagggttcaggaatcaactacaatattaccattggtaatgtggacaaagatgaagacaatgatgacaattagtaatcatgagcagtaagcctacaaaaattattacggatttcttcaaaattgcttcagactcttctaatacagattttctaatccctacattattgtaagatgtacagtaattaaccgtatgacttaaaaaawaattgccaaatatcctccactctgaactacctttggagtctcctttctcaagacagtcataaagcatacttgagagtgaacagcatggtccagggctttaaagtcacctaagtgacagccagttagttgcaatcagcaccacacaatcacagcgtccacaagttaacaaatgcatttgtttctcaaataggaacacattgagcagaaactgaactactttttcaagtctgagcctgagttgaggtttcaatctgagttaataatgataagaatgaatgaaaataaaagtggtataaagtggagggtggttagctctgacaacagaaaacaattct

SEQ ID NO: 793367 - DNA, 534 bp, Homo sapiens
cctaatctaagaagaacctccaaacttccataaattttgtttggcaacaactatgattttctttttattattattttaattgttgagaataataccaacataatgttgctgctgcagaggattatgccttagaaagctgaaaactcctggctgggacgctcctcctgccagaagccaaggttctcctgcctgtgatggcaaaacaaccttttacctgatcagattccagctctgactagtactgtgtgtatatatacatatatatatctccttcttgacatttttctgttcatggataaacattacacatgtatgtgtgtgtgtgtrtatatatatatatatttaaattatctatatagcaaatgattacacaaacttgatcatattacacatttttatgcagcttgaactttcacttgatgttacttcttagccatgtttccctatccatgcatgtaggcgtacctcatcccatttaatggctataaacaatttcatgagataaacctattaatttaactcaattaaacctta

SEQ ID NO: 793368 - DNA, 547 bp, Homo sapiens
tagggggtgggtagcagtctctacaggtgtgccattcattcttaattggctagcagagacccagtgctccatgtgttttcagaaaaaaggtctgaggatgagaagccttgaaaacaaaagtgaaagaggatttttaggtccacattttacttaccattcctcygatctccatactagccacaaaaatgatgcaggatttttgctccttagctcagctaagttcaggttcttgtctcatgaccaagaagaattaggtatgtggccatcaaggattgagtgagtggagtagcatttattaagcaaaaggaaagctctcagcaaaaagaagggatgcaggggggtggttctcctacctgaagacaggaaagttccccaatatggctgagcctggggcttttatgggctcagcatagggagcgtgtactgattggtttgtgagtatgcaaaaacagtacaagtgaagacaccactcaaaggtggtgacaacagtgtagaaacccaattaggaaagggtaggtatatttaaaataggtaaaggatggggatc

SEQ ID NO: 793369 - DNA, 634 bp, Homo sapiens
aattgagagggtcttgaattatctaataaccatcatttttagcaaaggtatctgaggcaaattcacactcataatgctctaatccccattccagtatctttcaaattcttttttactggggaaaaaaactatgtatttgaaatacctaaattaatgtgttgcttaaaaactcaaccatattgayccatgacatcttctgagacctagatgggtggatcaatttattttatggcaacccatgaacagctgtccacaataatttctaatgagttcatttgattctgacacacaatgtcttgacctcatgatctgggcccatctgtgagaatggcaggaagccctcaagcaaggtggcaggccacaggccatctgcagcctggcacaggtaggagggtgggtggagtggagctggcagaacgatgttgccaccaagccaagtcctttcatagcggcagcttggccacctctcaaatttgcctttttaatacatttattttttatttttattttttacttttattcgtgaccagtaacaaccagggaaaaataaaagagtgtaaaataaaatctagtgaaggctgtgaaataaaaggaactaaaactcaccaaaatgtagactgggttgcgattaaga

SEQ ID NO: 793370 - DNA, 607 bp, Homo sapiens
ttgtactgtatctgtccatacctacgtaactgaattgcattacctgcctgtgacccagaggaagagaaagccatcatcctgtagtacgggtatgttgagcctgcgcatctcatcatctgtcagggtcccatagggcagttccatgtgaatatcccagggtgggtcagccatcacaactgcaaacttgcccaagatactgacgtccaggtagcggatatcacaacagatccactgcataaagtggtatttggtcatcttccctactttaactctgagattcatggcccgagtccctcttttccatttgatttttcctattcccttaaaagcttatctatccccctccattcccaataagcaagacaagattgctgaattatgctctgctttyttaacgtgtatggctgccctatcaaacataagtccgtaagttgagacgagttttctgagcagacaggtacctgaggtgggaagagtcggtctgcactggaatcacctccgacactctgtgtaagagcaagctcctggcttggcgtgtggtctttgctgccaggggcctcagaatccatgcaagcatcaatttcatagtgaacatacttgcaggtat

SEQ ID NO: 793371 - DNA, 577 bp, Homo sapiens
cggcctgtgtctgtgacttttctaggtgcatggtgcaagctgttggtggatctaccattatggtgtctggaggacggtggccctcttttcacagctccactaggcagtgccccagtgaggattttgtgtgggggcttccaccccacatttcccttccacactgccctaacagaggtttcccatgaggaacctgcccctacagcaaacttctgcctgggcatccaggcatttccatatatcttctgaaatscaggcagaggctcccaaacctcaattgttgacttctgtccactcgcaggctcagaaccatgtggaagctgccaaggcttggtgcttgcaccctctgaagccacagcctgagctctccgttggcttctttcagccatggctccatggctggactgtctgggatgcagggcaccaagttcctgggctacacaaggtatggggaccctgggcctagcccaggaaaccacttttttctcctaggccttggggcctgtgatgggaggggctgccacacaggtctctgacatgccctggagacattttcctcattgtcttggtgattaacatt

SEQ ID NO: 793372 - DNA, 577 bp, Homo sapiens
cggcctgtgtctgtgacttttctaggtgcatggtgcaagctgttggtggatctaccattatggtgtctggaggacggtggccctcttttcacagctccactaggcagtgccccagtgaggattttgtgtgggggcttccaccccacatttcccttccacactgccctaacagaggtttcccatgaggaacctgcccctacagcaaacttctgcctgggcatccaggcatttccatatatcttctgaaatcyaggcagaggctcccaaacctcaattgttgacttctgtccactcgcaggctcagaaccatgtggaagctgccaaggcttggtgcttgcaccctctgaagccacagcctgagctctccgttggcttctttcagccatggctccatggctggactgtctgggatgcagggcaccaagttcctgggctacacaaggtatggggaccctgggcctagcccaggaaaccacttttttctcctaggccttggggcctgtgatgggaggggctgccacacaggtctctgacatgccctggagacattttcctcattgtcttggtgattaacatt

SEQ ID NO: 793373 - DNA, 587 bp, Homo sapiens
ttttcttcctgcttaagttacccaaaagatgattcctgttgtttgcaaccaagaatcctaacacaattattagggcctaaattatagcaatatggttcaaaagatagtgatagaattgtttattggccttttgctaagatcaagtttaaaaaataataatgggagggaaatgacaaagccagaaacacttaagggataaaaatcagtagaacctggagttcagagggaaagatgaatagtttagccatattgaaaatgagctgcctagagctgggcgyggtggctcatgcctgtaatcccagcactttgggaggccaaggcgggcatatcacgaggtcaggagatggagaccatcctggctaacacggtgaaaccccgtctctactaaaaatacaaaaaaattagctgggcgtggtggtgggcacctgtagtcccagctactagggaggctgaggcaggagaatggcatgaacccgggaggcggagcttgcagtgagccaagattgcgccactgcactccagcctgggtgacagagcgagactccacctcaaaaacaaacaaacaaacaaacaaaaaccaaaaagaa

SEQ ID NO: 793374 - DNA, 587 bp, Homo sapiens
ttttcttcctgcttaagttacccaaaagatgattcctgttgtttgcaaccaagaatcctaacacaattattagggcctaaattatagcaatatggttcaaaagatagtgatagaattgtttattggccttttgctaagatcaagtttaaaaaataataatgggagggaaatgacaaagccagaaacacttaagggataaaaatcagtagaacctggagttcagagggaaagatgaatagtttagccatattgaaaatgagctgcctagagctgggcgtggtggctcaygcctgtaatcccagcactttgggaggccaaggcgggcatatcacgaggtcaggagatggagaccatcctggctaacacggtgaaaccccgtctctactaaaaatacaaaaaaattagctgggcgtggtggtgggcacctgtagtcccagctactagggaggctgaggcaggagaatggcatgaacccgggaggcggagcttgcagtgagccaagattgcgccactgcactccagcctgggtgacagagcgagactccacctcaaaaacaaacaaacaaacaaacaaaaaccaaaaagaa

SEQ ID NO: 793375 - DNA, 587 bp, Homo sapiens
ttttcttcctgcttaagttacccaaaagatgattcctgttgtttgcaaccaagaatcctaacacaattattagggcctaaattatagcaatatggttcaaaagatagtgatagaattgtttattggccttttgctaagatcaagtttaaaaaataataatgggagggaaatgacaaagccagaaacacttaagggataaaaatcagtagaacctggagttcagagggaaagatgaatagtttagccatattgaaaatgagctgcctagagctgggcgtggtggctcatgcctgtaatcccagcactttgggaggccaaggygggcatatcacgaggtcaggagatggagaccatcctggctaacacggtgaaaccccgtctctactaaaaatacaaaaaaattagctgggcgtggtggtgggcacctgtagtcccagctactagggaggctgaggcaggagaatggcatgaacccgggaggcggagcttgcagtgagccaagattgcgccactgcactccagcctgggtgacagagcgagactccacctcaaaaacaaacaaacaaacaaacaaaaaccaaaaagaa

SEQ ID NO: 793376 - DNA, 587 bp, Homo sapiens
ttttcttcctgcttaagttacccaaaagatgattcctgttgtttgcaaccaagaatcctaacacaattattagggcctaaattatagcaatatggttcaaaagatagtgatagaattgtttattggccttttgctaagatcaagtttaaaaaataataatgggagggaaatgacaaagccagaaacacttaagggataaaaatcagtagaacctggagttcagagggaaagatgaatagtttagccatattgaaaatgagctgcctagagctgggcgtggtggctcatgcctgtaatcccagcactttgggaggccaaggcgggcatatcacgaggtcaggagatggagaccatcctggctaacacggtgaaaccccgtctctactaaaaatacaaaaaaattagcygggcgtggtggtgggcacctgtagtcccagctactagggaggctgaggcaggagaatggcatgaacccgggaggcggagcttgcagtgagccaagattgcgccactgcactccagcctgggtgacagagcgagactccacctcaaaaacaaacaaacaaacaaacaaaaaccaaaaagaa

SEQ ID NO: 793377 - DNA, 628 bp, Homo sapiens
ggtgacagaatgagaccctgtctcttaaaaaaactgcatgaagcaataattataaaattgttatagtgtaaagatataatctgactaacaggaatagcacaaaggaggaggaaaagaatatagccacattggagcaaaattttgtaaactattaaaattaagttgatcttcatcctaattatatagtttttaagttaagatattaattgtaatcctcagggtaattacttggaaaagaactttacaaaaggaaaagagacaatatgagaattaaaatggtaattttaraaatatttacttgatacaaaataaaacaataataaagaaataaaagaacaaaaaagacataagacatgtggaaaacaaacagaaaacagtaggtgtaaatcctctcttagtggtaattatattaaacacacatgtacgaaacacttcaatcagaaggcagatactgaacaatggattattaaaaaatggtcaaaatatgagctgcctaaaagagacacaatttagattcaaaagcttaagtggttgaaagctaaaggatgtaaaaagcccataccaagcataaagacagccataagacaactaataccatacaaaatagattttaaacaagatctctcac

SEQ ID NO: 793378 - DNA, 631 bp, Homo sapiens
tagagggaaggaagctattttcctgaattccaattccatgttctttggagatcttccttgataatctttgtcgcctttctcctcaactagaaagtgcttagcgttactatccctcatgtgagacatcctgtgctctgacaatggaaaatgaaaaatcatactcaaagatctatttttgttcacttccaagcaaagtatagataaagaagatccaaagaggtgcttgaatggaattttcagttcatgtaagtgtccacatttctctctcctgactatttcaaaagtgattgctagttgaatgtgcctttgtagcatgtcagtataaaccattttgatagaattatatgtttccttttcacctaagatcctcctttcccctaaaccttttgttctgttcttgtctctaattctgtctcttcattggaagtgatttactcaggatacaaaagtcactctctgcttctttccaaatgtcartcctcagaactttctcacacactcttagaaccatatcagaaataaaaaagactctcaaatcaggctttaattacaatcactcttgagggcacatcagcctctcaataacgactaagttcacagtattcaaagaacaactcaaagtatagcatgt

SEQ ID NO: 793379 - DNA, 645 bp, Homo sapiens
cttttgtgcatctattgagataatcatgtggtttttgtcattgcttctgtttatgtgatggattatgtttattgatttgcatatgttgaaccagccttgcatcccagggatgaagctgactggatcatggtagataagctttttaatgtgctgctggattcagtttgccagtattttattgaggattttctcactgatcatcagggatattggcctgaatttttcttttttgttatgtctctgccaggttttggtatcaggataatgctggcctcataaaatgagtcagtgaggagtccctctttttctgttgtttggaatagtttcagaaggaatggtaccagctcctctttgtaactctggtagaatttggctgtgaatctgttcggtcctgggctttttttggtttgtaggctattaattactgcctcaatttcagaacttgttatcggtctattcagggatttaacttcktcctagtttagtcttgggaggatgtatgtgtccagaaatgtatccatttcctctagattttttagtttatttgcatagaggtgtttatagtattctctgatggtagtttgtatttctgtgggagcagtggtgatctcccctttatcattttttactgtgtctatttgattc

SEQ ID NO: 793380 - DNA, 627 bp, Homo sapiens
tgcctggccatccaggcttttccatacatcttctgaaatctaggaggaagttctcaagcctcaactcttgcattctgtgcacctgctggcttaacaccacacggaagccaccaaggcttatgatttgcatcctctcaagcagtggcccaagctgtacctgtacccaagctgggccccttttagccacagctagaactggagcggctgggatgggagagaagtgtcctgaggctgcacagggcagaagggtgctgggtctggcccgcaaaaccattcttccctcctacttctccaggcctgtgttgggaggggctgtagcaaaggtctctgaaatgccttcaaggcctttttctccattgtcttggctatcagcacttattttccttttagttatgcaaatttctgcaggctgcttaaattgctcccctgaaaataggamacttttctatttttcttttctaccacatggctaggctacaaattttccaaacttttatgctgtggttcccttttaaattagaatttccaattacaggtcttttctttgctcactcacataagcataggttgttagaagtagccatgttacaacttgaatgctttgctgctcagaaattcctttcacca

SEQ ID NO: 793381 - DNA, 591 bp, Homo sapiens
ttctaaaccttaaactggttggcttaggattgagctcaggtgaagggaatccagaagcccaacacagcagcaaaagggtaaagtttttttttttttttaccagtcgggcttttggcctccctttccctgtgtaaactggtaaaaggcctcagaatttttgagctgtctttacaccttggcttgttttgttttgatacatgttttctagtaacccggcttatcttcttgccttcaggccatcaaactccaaacagtcatgcaaccggagcctytgatggtggctccttaaataggactctggggaagctctgactgccattttcccaaaactgcaccctgtcagcaggaagcagttaagatcggtcttcatctgtatcctaatctaatggcagttagatgtacttccttagagggagggatgagacagccagatgggaggggttccccagagaaactccagccagcctgcccactgaggtggagcattacaactttcacaacattttcagcagggaggagtctggcacctcctgttcctgtgaggaacttgggatttgaatggtgagagggaagcactctagcaggaactct

SEQ ID NO: 793382 - DNA, 591 bp, Homo sapiens
ttctaaaccttaaactggttggcttaggattgagctcaggtgaagggaatccagaagcccaacacagcagcaaaagggtaaagtttttttttttttttaccagtcgggcttttggcctccctttccctgtgtaaactggtaaaaggcctcagaatttttgagctgtctttacaccttggcttgttttgttttgatacatgttttctagtaacccggcttatcttcttgccttcaggccatcaaactccaaacagtcatgcaaccggagcctctgatggtggctccttaaataggactctggggaagctctgactgccattttcccaaaactgcaccctgtcagcaggaagcagttaagatcggtcttcatctgtatcctaatctaatggcagttagatgtacttycttagagggagggatgagacagccagatgggaggggttccccagagaaactccagccagcctgcccactgaggtggagcattacaactttcacaacattttcagcagggaggagtctggcacctcctgttcctgtgaggaacttgggatttgaatggtgagagggaagcactctagcaggaactct

SEQ ID NO: 793383 - DNA, 613 bp, Homo sapiens
aacatgtacagaataaaaaagagctagtaataagaacagccatggacaacctaagtcaggggggagtgagatcaaaagctttatgtagaaactatagaaatagaaaacctgcataggatactcagaagaggaagcacagtcagaggccccaagaatctggactcaagcagccaagactgttatttgagtcacaatgcattaaaasaagtttcatcgtttaaattttccctctttccaccacatattatatataaagaattgttgcttattttatagaaaaaaatgtataaggtcttagtcaaccttgtcaacaaaacccttccaggtttttttttaggataattattgaatacatcctttccatttatataagtcatttctggcaaaccagagaaaagtaacattatttttatccaccccttttagaatgttgttctaatgaactgttttatagaaaacctgcatatgctgcatggtgtacaaggacaaggccttgttcttgtcattcatttgttacactagaatgtttgaataaaggaaagtaatttctttttttgtttctcgattgttctttgaggaagctatttggaattgacatttgcttcattataaa

SEQ ID NO: 793384 - DNA, 613 bp, Homo sapiens
aacatgtacagaataaaaaagagctagtaataagaacagccatggacaacctaagtcaggggggagtgagatcaaaagctttatgtagaaactatagaaatagaaaacctgcataggatactcagaagaggaagcacagtcagaggccccaagaatctggactcaagcagccaagactgttatttgagtcacaatgcattaaaacaagtttcatcrtttaaattttccctctttccaccacatattatatataaagaattgttgcttattttatagaaaaaaatgtataaggtcttagtcaaccttgtcaacaaaacccttccaggtttttttttaggataattattgaatacatcctttccatttatataagtcatttctggcaaaccagagaaaagtaacattatttttatccaccccttttagaatgttgttctaatgaactgttttatagaaaacctgcatatgctgcatggtgtacaaggacaaggccttgttcttgtcattcatttgttacactagaatgtttgaataaaggaaagtaatttctttttttgtttctcgattgttctttgaggaagctatttggaattgacatttgcttcattataaa

SEQ ID NO: 793385 - DNA, 634 bp, Homo sapiens
gccccagtaagtttacttaatctagatgggtccaggcgccaggggtgattacccttatcttgtctccttctaaatcatggaggtttggggagttccttcagtccccaataaagcttgtttgtggaggtctggggaattccttcagatcaccaataaaatttttttaatcctaaacgagttctattaagaattcctttgttatcttgtcgtgtttcaaggcccaggaaaggccaaagccaaactcttggtgggcttttgttacattccagcctttgtatgagggcactggctctatcagctgttaacatttaatctaactactcagtcagtgctgaaacagttgtaatggaggcctgcattagtgagacctggcctgccactagttgacatacctgcaccttcctataatgtagtatttttattttctgttttaaagcccaaggaggactgattttggtagctsgattttaaaggccatttcctttcttaacttcagtttcagcttaagtatgtgtttaaaagcttaataagtatacataaagctgctaagtttatatttaatgtaatacaccaaacatatataggctgttgatttttttctgaataatattaattttgtctttattttacacac

SEQ ID NO: 793386 - DNA, 564 bp, Homo sapiens
aattataattaattgatttaaatcttgccttaatgaaagaatccaagcagataagattaatttcttagtctctaactacataatatacccaagaggctattctaaaatgctcagcaatgcagactcctatcgattataatttatataaattatctgtttctctccaaaactrctgaggaagtacactgatacacaaatcagtgggctgttggaaacatacagaacatactttctccaagtgggttattatgaaagttgatttaattatttcttttagaagtttaatatgcaaaaagctaacttatagaaatattcagaccattgccagatgcctatgaaaattgtttttcattaaattggactgtttaaattttccaggtccatgaatccatacacagtttaatcatagtcaagagggaattgtaactctggaaaactaagcagaaccctgtagccagaactataatgataattataatgaaataagaccacacgatcaggagttagcctacaggaaggtaattctagacattcagagtctgacataaaagctgcatcaaaggc

SEQ ID NO: 793387 - DNA, 564 bp, Homo sapiens
aattataattaattgatttaaatcttgccttaatgaaagaatccaagcagataagattaatttcttagtctctaactacataatatacccaagaggctattctaaaatgctcagcaatgcagactcctatcgattataatttatataaattatctgtttctctccaaaactgctgaggaagtacactgatacacaaatcagtgggctgttggaaacatacagaacatactttctccaagtgggttattatgaaagttgatttaattatttcttttagaaktttaatatgcaaaaagctaacttatagaaatattcagaccattgccagatgcctatgaaaattgtttttcattaaattggactgtttaaattttccaggtccatgaatccatacacagtttaatcatagtcaagagggaattgtaactctggaaaactaagcagaaccctgtagccagaactataatgataattataatgaaataagaccacacgatcaggagttagcctacaggaaggtaattctagacattcagagtctgacataaaagctgcatcaaaggc

SEQ ID NO: 793388 - DNA, 670 bp, Homo sapiens
atatatcaagatatctcatgtgtcccataaacatgtacaattattatgaatcaattaaaatatttattacacatgaaattaaaagcaattaaaatctcagtaagacaacaaacattccttaaaaaattattgttgtttcaatagttttgagggtacaggtagttatggataagttctttagtggtgatttttgatattttggtaaacccgtcacctgagcagtgtacactgtatccaatatttagccttttakcccttactctcctctcacccttcccctttgaatccccaaagtctgttttatcattcttatgtctttgcatcctcatgccttaactcccacttataagtgagaatacacaatatttggtttttcattcctgtgttacttcacttagaataatggcctgcagcttcatctaaattgctggaaaagacattattttatttctttttatggcttagtactaatccatgttgtatacatactacattctctatatccactggttggttgatgggtacttaggtagttccatatttttgcatttgcaaattatgctgttataaacatgtgagtgcatgtgtctttttcatataataacttacttttcttttagtagatacccagtagtgaggttgttggatctaatggtaattctacttttgg

SEQ ID NO: 793389 - DNA, 511 bp, Homo sapiens
tgttacatgtttataatatgtaattatacttgagttcacagtaagcaaatattatttttattaaattaaaaaaatctcctctagtcaagtttgcttaatgcctgacattaaagcctattggacagtaaggagaatccatgtttaatccyaagtgagctcctgcttaacaatacccacaatctctagtactccaaggtgaatatttttttttaaaaaaaattggtattatctacttgatgccagaacaactagtttaaatttaggtaggataaataaaaataacattttaaaaccagtaacccaagagtgggacccacttatgatattaaaagaaactgagttaatagttgagtatttgtgagaaatttttactcccattgaaagtatttctactcttatggtgggttaataaactcagggataacatgttccaagttaccatagaacatcggtcacctggcaaaaaataaagtttaaatataaaataatcttagccatatttttaacttaa

SEQ ID NO: 793390 - DNA, 612 bp, Homo sapiens
aactcccacttataagtgagaatacacaatatttggtttttcattcctgtgttacttcacttagaataatggcctgcagcttcatctaaattgctggaaaagacattattttatttctttttatggcttagtactaatccatgttgtatacatactacattctctatatccactggttggttgatgggtacttaggtagttccatatttttgcatttgcaamttatgctgttataaacatgtgagtgcatgtgtctttttcatataataacttacttttcttttagtagatacccagtagtgaggttgttggatctaatggtaattctacttttggttcttcaatgaatctccacactgttttccatagtgattatactagtttacaatcccaccagcagtgtaaaagtgttccctttccaccacgtccaccccaacatctattattttttaactttttaattctggccattcttgcaagagtaaggtggtatctcattgtggttataatttacatctctctgatatttactgatgttgagcatttttatatgtaaaacaaatatatttttaagtgagcaaatgatctgggtggacaccttaccaaaatata

SEQ ID NO: 793391 - DNA, 612 bp, Homo sapiens
aactcccacttataagtgagaatacacaatatttggtttttcattcctgtgttacttcacttagaataatggcctgcagcttcatctaaattgctggaaaagacattattttatttctttttatggcttagtactaatccatgttgtatacatactacattctctatatccactggttggttgatgggtacttaggtagttccatatttttgcatttgcaaattatgctgttataaacatgtgagtgcatrtgtctttttcatataataacttacttttcttttagtagatacccagtagtgaggttgttggatctaatggtaattctacttttggttcttcaatgaatctccacactgttttccatagtgattatactagtttacaatcccaccagcagtgtaaaagtgttccctttccaccacgtccaccccaacatctattattttttaactttttaattctggccattcttgcaagagtaaggtggtatctcattgtggttataatttacatctctctgatatttactgatgttgagcatttttatatgtaaaacaaatatatttttaagtgagcaaatgatctgggtggacaccttaccaaaatata

SEQ ID NO: 793392 - DNA, 600 bp, Homo sapiens
aaccactttaaaagagatagtttggcagtttcttacaaggctacgcatagtcttaccatatgatccaaaaatcacacccctaggtatttacccagttgagttgaaaactattgtctacacacaaaaagtttcatttgaatgtttatttattatcaccaaacactggaagaaacaaagatgtctttcactagataaaggataacaagctgtggcacaatcatactagggaattctattcagtgataaaaagaaatgagttattgagtcagaaaaagacaaggaagatgcttacatgcatatagctaaatgagagcwatcaatctgaaagggctacatattgtatgattctaattataagacatcttagaaatcataaaaatatagacagaaaaaaaatcagtggttgctaggggtcagtggaggggagtccagaatttttagggatgtgaaacccagaatgaataggtgaagcccagaatttttaaggaagtgaaactactctgtataatattgtaatggtgtatacatgtcacacatttgtcaaaacccataaagtatacaacagaatgaacccctaatgtaaactgtagattttagtta

SEQ ID NO: 793393 - DNA, 575 bp, Homo sapiens
ttgagaagtccaagatcaagtttggttatctggcaagggctgctctcagcttccaagaggcaccttgctgccgtggaaaggaaagctgtgtcttcacatgacagaaggcggaaggtctaggcagtccaacactgcatgaagcctctttcacgagggtcttaattctatccatgaggaaaggaatcctaatgacctaatcacttcataaaaaccccatgtcttaatgtcatcacattggccatcaagtcttaacacctaaattttggagggaacacattaaagccatagcaagcctttagtattttttcaagtattatttrtaatagttaaccatctcattttttgttaggtggaaaataactgggtctttgacatcaacattttgctaatgatatatctgtgttgtttgatactcatcctttttttctttggtgtcacttaggatttttattttatttttggtatttttagtttcattccaacatgtctggatgtggttttgtgaatttgcttcctctgtagttcttaaagtgatatgtttaatctcaggttatgtgacctgccacttttttgtt

SEQ ID NO: 793394 - DNA, 495 bp, Homo sapiens
acaaataaaactgtgcagcacataccattttggtttggcttcttttgtaaatattaggtttgtgagagtcatccatgttgtagagaaagaagtaatacattcttttttattgttgagttatagtaaccatattaaaattgcctacccattttcctgtttatagatatttggattattttaagattaggctattatgaacaaaagtgctatgagtattcttgtataagtcttttgtgaacatgtattttcatttctcctaggtaaatacctaatagtagaatgycggagtcataagaaagatacatgttttgattttgatttttttcttgtaaaatgttgccacaattttgtaacagatttattgtattatagtcaaattccaccagtaatgtagaagattttcatgttttccataccctcatcaaaacttggtaataatcactttaatgtatccattctagctcatataggtatctcattgttgttttaactgca

SEQ ID NO: 793395 - DNA, 620 bp, Homo sapiens
ctggcaatctttcctgttcatttggagcagctactccatttacatttgaattaattattaatatagttgaatttaattctattatttttctaattgttttctattttcccattgcttccttgttccattttttcttatatttgtaaaatcgatttttttaaacttttactttaagttcaggggtacaagtgcaggtttgttacattagtaaactgtgtcagggagtttgttgtacaggctatttggtcattcaggtattaagcctagtacccattgtcaggcctctgagccaaagctcagccattataacccctgttacctgcacatatatgtccagatggcctgcwggagccaagaagtctggagcagccaaaaaaccacaaaagaagtgaaacagccagctcctgccttaactgattgaccaaccttatgacattccaccactgtgacttgttcctgccctgccccaactgatcaatcaaccttgtgacattcttctggacaataagtcttatgatctccccaccatgaaccttgtgacccctcctctgctaataatagataaccacctttaactgtaactttccactgcctacccaagccctatattgctgcccctc

SEQ ID NO: 793396 - DNA, 658 bp, Homo sapiens
gacattcttctggacaataagtcttatgatctccccaccatgaaccttgtgacccctcctctgctaataatagataaccacctttaactgtaactttccactgcctacccaagccctatattgctgcccctctcctatctcccttcactcactctcttttcagactcagcccacttgcacccaagtgaataaacagccttgttgctcacacgaagcctgtttaggtggtcttctatatggatactcatgacaccygttagtccttttacttgatccttttccttctcaaactctctaacctccaaaaggccccagcatctgttgttcccctctatgtgtccatgtgttgtcatcatttagctcccagaaatgaaaacatgtggtattttgatttctgttcctgtgttagtatgctaagaataatggccttcagcttcatccatgtccctgcaaaggacatgttttttttttcatgactgcatagcattccatggtgtatatgtaccacattttctttacccagtctatcactaatggacatttagattgattccatttctttccttttgtgaatagtcctgcaataaacataggtgtgaatttttttatactttatctgctcaattggctttcaacttcaactgtgtctacttctttg

SEQ ID NO: 793397 - DNA, 510 bp, Homo sapiens
gcccacttgcacccaagtgaataaacagccttgttgctcacacgaagcctgtttaggtggtcttctatatggatactcatgacacccgttagtccttttacttgatccttttccttctcaaactctctaacctccaaaaggccccagcatctgttgttcccctctatgtgtccatgtgttgtcatcatttagctcccagaaatgaaaacatgtggtattttgatttctgttcctgtgttagtatgctaagaataatggccttcagcttcatccatgtccctgcaaaggacatgktttttttttcatgactgcatagcattccatggtgtatatgtaccacattttctttacccagtctatcactaatggacatttagattgattccatttctttccttttgtgaatagtcctgcaataaacataggtgtgaatttttttatactttatctgctcaattggctttcaacttcaactgtgtctacttctttgtgtttcatagggtttactta

SEQ ID NO: 793398 - DNA, 510 bp, Homo sapiens
gcccacttgcacccaagtgaataaacagccttgttgctcacacgaagcctgtttaggtggtcttctatatggatactcatgacacccgttagtccttttacttgatccttttccttctcaaactctctaacctccaaaaggccccagcatctgttgttcccctctatgtgtccatgtgttgtcatcatttagctcccagaaatgaaaacatgtggtattttgatttctgttcctgtgttagtatgctaagaataatggccttcagcttcatccatgtccctgcaaaggacatgtkttttttttcatgactgcatagcattccatggtgtatatgtaccacattttctttacccagtctatcactaatggacatttagattgattccatttctttccttttgtgaatagtcctgcaataaacataggtgtgaatttttttatactttatctgctcaattggctttcaacttcaactgtgtctacttctttgtgtttcatagggtttactta

SEQ ID NO: 793399 - DNA, 658 bp, Homo sapiens
gacattcttctggacaataagtcttatgatctccccaccatgaaccttgtgacccctcctctgctaataatagataaccacctttaactgtaactttccactgcctacccaagccctatattgctgcccctctcctatctcccttcactcactctcttttcagactcagcccacttgcacccaagtgaataaacagccttgttgctcacacgaagcctgtttaggtggtcttctatatggatactcatgacacccgttagtccttttacttgatccttttccttctcaaactctctaacctccaaaaggccccagcatctgttgttcccctctatgtgtccatgtgttgtcatcatttagctcccagaaatgaaaacatgtggtattttgatttctgttcctgtgttagtatgctaagaataatggccttcagcttcatccatgtccctgcaaaggacatgttttttttttcatgactgcatagcattccatggtgtatatgtaccacattttctttacccagtctatcactratggacatttagattgattccatttctttccttttgtgaatagtcctgcaataaacataggtgtgaatttttttatactttatctgctcaattggctttcaacttcaactgtgtctacttctttg

SEQ ID NO: 793400 - DNA, 611 bp, Homo sapiens
tctgctcgtccagcatagcaatgcgttcacatgcacattctgaatccctcttccccaccacacctctaactcacctgcagtctcttcactctcagttctatttcctggatatcagagggaggctttgccatctttaacatttccagctctgcttcagtttttttcagccaagtagtgatggcgctgatatcagagttcagctgttgcaaattttgttttattttgagcttattgtgaagctcctgtgcttgaatcatctcccatctgtcgaaggcacctggaattaaaaaatcgccaattaaaaaaagcaataatgcaacagatttctctgcctccagctaattaggggtcagggtggttwaaaaaaaaaaaaaaaaaaacaaaaaaactgtaggggattcccctgacagaagggtctggttttgggagttctctcttctcctggaatgtggaatagcacatgatctgaggcgtacactcccacagaggctggaatgaagtggaaggtctatgtgctacagtttcaagctcaacagttcagttcctgctgaattttttcagttttctcctttggtccacaaatgaccaggtcgatgctgtcagctttagat

SEQ ID NO: 793401 - DNA, 595 bp, Homo sapiens
ttgaaagttttgcaataggcaaaggatgtttttgatggtaggaatagcatctatgagggcatgggaaatctgggacacatttagacactcatgagcagctaagattgcgtggaaggtagagctcctatagaatagcatggaaggcagactgctaggctgggtagggccagattaatttacatgtcatccctagagagtctgatttaaagacctcaactgaagtttgggcattggaatgttttaaatccccgtaggtgatttctaatgtgcagccagggctggggaccactgggctagatggtctaaaagccctttctggcctcyggtaagagaattttgccattttgacaaaagggtctgggtttgaaaatgtgggtggcttgtagtaacttatgacaatggctgaaaaactgatttaaaatcctttgtctgcaggcagtgggttcctgaagtctggagggctgttctaagagcagagtccaaagcctaagcacatagagaatgtaaacattatgtgggcttgctggggactgacaacttaggaatcctgccccatccaacaggggcagcctccactcagctcccaccaattgct

SEQ ID NO: 793402 - DNA, 595 bp, Homo sapiens
ttgaaagttttgcaataggcaaaggatgtttttgatggtaggaatagcatctatgagggcatgggaaatctgggacacatttagacactcatgagcagctaagattgcgtggaaggtagagctcctatagaatagcatggaaggcagactgctaggctgggtagggccagattaatttacatgtcatccctagagagtctgatttaaagacctcaactgaagtttgggcattggaatgttttaaatccccgtaggtgatttctaatgtgcagccagggctggggaccactgggctagatggtctaaaagccctttctggcctctggtaagagaattttgccattttgacaaaagggtctgggtttgaaaatgtgggtggcttgtagtaacttatgacaatggctgaaaaactgatttaaaatcctttgtctgcaggcagtgggttcctgaastctggagggctgttctaagagcagagtccaaagcctaagcacatagagaatgtaaacattatgtgggcttgctggggactgacaacttaggaatcctgccccatccaacaggggcagcctccactcagctcccaccaattgct

SEQ ID NO: 793403 - DNA, 668 bp, Homo sapiens
aaattaactgattttgcattgtatttacattttgataggctgaaaatatgtcttaatgttgcagcgcctggggggcctcttcttatctttactttcacccccttggtgatctcatccagttccaaggctttgaatacatctatgaatagatgactctcaaagttatattccattgtagactaccctgtctgcctatttgatttttccactggacagtctaatagacatcccagaatgagcatcgggtawgtccaaatcctggtttccatctgcagccttcttcatctaagtaaatggcaacttcatttgtccagctgctcaggacaacaaatttagggtcatcttttactcttcctttattctcactcccaggaggggttggctcaccttcaaatatatccagaattcaatcctttctgacccctttttctgctatcgctctagttcaagccgccatcatctcttggcttggtgattccaacagccttctaacccttccttcttgtggtcccactcctatctcagtggccagagtgatcttgttcattagtaaatcataacatctcacgcctcagttcatgccctccagtggctcccaccttacttagaggagagcttgaaactgtcttctctgaaaaagaaaataaaactaaaaaaaccaaaccaac

SEQ ID NO: 793404 - DNA, 629 bp, Homo sapiens
gcagtgaagttgtttttgtgtgattcacacttgtgggtatatgacactgtgcatttgtcgaaacccgtaaaactgaacaacacaaagagtgaaccctaatgtaaactatagatattagttaataatagtgtatcaatattgattcatcaattgtaactaatgtatcacactaatgccagatattaatggggaaaactagcggggaagagaaagggggtaagagaggatggaaactgtattttcygaccaatttttctataaatctaaaattgttcaaaaaaataaagtctattaattaaaaaaaatctttactatgacataaaagactcttcactgtcaagatggtatcattcgccctaaacttagctccacaaattcttgcctatatcctttgcattttttaacttctcatttttcctaaccacgcagtgccattttttttgggtccagaacattgcactttgcttagaatactgctgtctttattcactgactgacaaacttctatgcatcaaggtaagcactgcttgcatgcctactatgtgccaggcctatcaaagtccctaccctagagaagcccacagtctattggaaagaaaacaactcaaacaaccattataatttttttt

SEQ ID NO: 793405 - DNA, 629 bp, Homo sapiens
gcagtgaagttgtttttgtgtgattcacacttgtgggtatatgacactgtgcatttgtcgaaacccgtaaaactgaacaacacaaagagtgaaccctaatgtaaactatagatattagttaataatagtgtatcaatattgattcatcaattgtaactaatgtatcacactaatgccagatattaatggggaaaactagcggggaagagaaagggggtaagagaggatggaaactgtattttctgaccaatttttctataaatctaaaattgttcaaaaaaataaagtctattaattaaaaaaaatctttactatgacataaaagactcttcactgtcaagatggtatcattcgccctaaacttagctccacaaattcttgcctatatcctttgcattttttaacttctcatttttcctaaccacgcagtgccattttttttgggtccagaacattgcactttgcttagaatactgctktctttattcactgactgacaaacttctatgcatcaaggtaagcactgcttgcatgcctactatgtgccaggcctatcaaagtccctaccctagagaagcccacagtctattggaaagaaaacaactcaaacaaccattataatttttttt

SEQ ID NO: 793406 - DNA, 641 bp, Homo sapiens
aaaataaaagattacacggaaagagcaaaggtgttggctgtatgctaggatcaaatgacattcatttgttgaagtagtctgagtgactcaaagacatacagcagctattattcacttagctacaacacagcaaatattaacacatattttgaaaaagagagatgttgcttcatgtgacaatactgataatatttaagaagagatgtcagtgactcatcagacactcaggcagtcatgatttttccccttaaatgtcactaataatttttcttactgccttttttatttaggcayatgttcagtggcactcacaatcaaaattctattacaaaacacagtatcgaatatcttacttttattttatttaaataaatattgtaaatgatcatagtgaataacataataagtattattcgtatcaccattcttctgtattgtagtgatttttatgtcatcactgtgaatggtggatggtcttttgtctcttctaaatgtcccattcctcatgggataatttaaaatgacccataagcaaagttaagtttcaagaggattttttttcaaatagacagccttgccttgtactattatcctccaatttcctttttacattttcgaaaataatatgtgagttttaaaac

SEQ ID NO: 793407 - DNA, 587 bp, Homo sapiens
tcacagctgtctgtgaaatctttggcaatgatctggccgtcctgttctacttgcattttcctaaatgtgtcatgaggtgatgccaccattccctgctatgtgcttttctttttgtcttctagaatgtccttacggctaacttacgcaaagcctgtatgtcttagctcaagtgggacctgtgaaatagttccctgacctcytctaaatgtcgagaactgtgttattttacgccacttttgagctaacacttaagcctgccactgattcacagatgctgatagaagacacaacactcctgggtaagagacaaaggactttttccctccctgcatagcaagtggcatgcaatgaatgcttgtgtcagttcccttcgtctcccaagtcccactggggccacacagagtggtcctggatgtttaattagttatatttatttatgtatttttatttatttatttattttttaattttactttaagttctgggatacatgtgcagaatgtacaggtttgttacctaggtatacatgtgccatggtggtttgctggatctatcaacccgtcatctaggttctaagccccacatgc

SEQ ID NO: 793408 - DNA, 561 bp, Homo sapiens
acctaaccacactaacattccaagcacaggacttgcagctagatttaagctaccacatcacaaacaagtcatatatccagatggttttaagacctacaaacttcaaaaacttaggcaatggtctaaagacccaggagagggagtttccttcttgtattcatctgttctctcattgctataaagaattacctgagactggataatttataaagaaaagaagtttagttggctcacagttccacagactgtacaggaagcatggcagggraggcctcaggaaacgtacaatcatggcagaaggggaaggggaagcaggcagcttctacatggctggagcagaggaagagagcaaagaaggaggtgtgcacacttatagacaaccagatcacatgagaactcactatcacaagaacaacaagggggaagtctgccccccacaattcaatcacctcccaccaggcccctcctccaacagacccgtcctttagttgtaatcctccaactggggattataattcaacatgagatatgggtggggacagagagccaaaccatatcact

SEQ ID NO: 793409 - DNA, 638 bp, Homo sapiens
tctcttaactgtaattaacaatatctagagtcctttaaaaacatattttctggccaggcacgctggctcatgcctgtaatcccagctctgggaggccaaggtgggtggatcatgaggtcaagaattcgagaccagcctggccaacatggtgaaaccccgtctgactaaaaatacaaaaattagccaggtgtggtggtgcgtgcctgtaatcccagcaactcaggaggctgaggcaggagcattgcttgaaaccaggaggtggacgttacagtgagccaacattgcaccactgcactccagcctgggcgacagagtgagattccatctcaaaaaaaacccaaacaaacaaacaaaatatattttccatctccccaccagaatttaagcttcttgagggcaaggtatagttctttttcactactgtatcccccaaattttaatgaattctctgcacatactggatgtttactgtatttgttggctgtctcatcarttagagcataacctactttgggagcaaggaatgtggtctagttttggttttcctccctcgcatctaacagtagcatgcacgttgcagagacaatggtaagtaagattgaggggtccattctctttggtatagtgttagagataag

SEQ ID NO: 793410 - DNA, 646 bp, Homo sapiens
tagatcttatttaagaataaatgattcccattctctttaaaggatggagttactagacccatgacagcagtgagagcagctggttttaccaaagcagctttgagaggtttgttacactgtctctactaataatcttttttggatcttttaatcttttatcattttgtgatataaatattactgtcattttaaataaaatctaacaatgccattgattataagatgcactgatattttaggtaccattaagaaaggaaaaggatgatgaaaaccttctacatatctgttggggtggtaattaaaccatggtgtaatttgtcaaaatgcattgaaataatatgtaaaaagttaaatgataatttaaaaataaaattataacaaaaattaatgtttrgtatgccaataaggaaaattaaaaagccaatagcaggttataagacatgtgactgataatttagagttgataatagagatagatcactgtggaagagaaagtaaatgctgagaatatcttatttttgtttttaagtttaacacacgtattatttacatagctttatgtgtgttaaaaatcttaccaatttgccagtatatgaaatgtttatgtagacacaatgttatctccatttaataaatagataattga

SEQ ID NO: 793411 - DNA, 637 bp, Homo sapiens
cttgttttttattattccattttctttttctgttatcttggtagtttacgttctctgactattcttttagtgtttccctaaatattatgatactcatctctaactttttaaagtctagtataaattaacagttttactactgcctggacagtgccaggattttatattatttttagctatttttcagttctagaatttccatgtatattccttttttatagtttttagttcattttccgttgctattactaatcttttaatttattgatcatgttaagcatagttatgttaaagtctatgtgtgatatttscattatatgtacccacttctgagtttctttctattcttttgtttatcttggcttttggttaggtagtcttgcctcttgtatgtctggttggttttaattgagagacattataaatgaaaaattttagagatactttatggctctatgtctgcactactcagtatgagagacactagccacatgaaactatttacatttacattatttaaaactaaaataaataaattcttgttgtactacttacatttcatatgtttaacagccttgtgtggccaatggctgtcttatcagaaagggcagatatagaacttttacatcactacaga

SEQ ID NO: 793412 - DNA, 588 bp, Homo sapiens
gtaggcatcagtgcggggcccctgcctgccaccctgccgcttagtttccaggctgtcctcggggctccagccccaggaaattcgcctgaccttcctgttggctgccaccgccttccctgccctccaggccggcagctgcggtggcaagtcctttccgmaggctttggtacagggaggagaggtgttcatgccgcacgaggcccagagctttctgtaaggatcgggaaggacaattctttcctgcatttcctggagctgaagcgctattgctcaaaacatggccctctgagaagaagggaaaagcacggggttcctcctctgctcgtggataaacaagcatatctcagctctctggaggctgttaaagtcttcctccatgggtggcttgtaggacttggccacgataaataatagcagagatttgtcagcagcatcccagaaggagaggtgggtaggaagggtaaaccgaaaagcgcaggagaggaaacaggctctgtacgaccaggcggctatgtttacaaccagagagagagaggtgaagaggaaaaggttctagaatagaaaaaagattttgctaaaataataaaa

SEQ ID NO: 793413 - DNA, 620 bp, Homo sapiens
ggtaagaacagggttatttgagagatagaaaacctaccccaaatctccataataatttttctgcagtagttttccttttactcatctcagatgtccaggctgttggaaagaggggacgaatcctaatttttctggcttattaacgtcaacagtgatgaagtcctggagccaggagagcagccggccgtggctgccttggcccatgcagactcacgcctgaccctcgttactgggccgctgacttccacggtgctgagaggtgggaaaggaggtgcacccacagcccatgggaggtggggagggtgatgtgttcacagaccgccggcagctcttgattcaaatcattcacaaccacaaagccaagtttctaagaccaagggcagtaggaggaatggaggcaatattccaaacaccgactcaaaacmaccaacaaaagaatgtgctatctagtatttactctcacaatgtttgcctttctctgattcctaatgagttcaagcacttttgtatagatctactggccatttggttattctctctgtgatctgccacttccagccttgtgcccattttcctgttgggtgtcattttccatacccacttgggaactctttgtatcc

SEQ ID NO: 793414 - DNA, 636 bp, Homo sapiens
ggatccaaaattactagatgcctttcttctatggagtttaaactacttcacatatactatttcactatcctcacaccacgtttttgaaacaagggtgggaaacagatagttgtggcacacactgttcaaagtttccacaagatcctggaagtctgctcccctgtagtgtgctttgcaaaaagaagactctcrtgggcttctgttggcaatgtagactcatccagtctcctgtggatggccacttcattacttctaacccacctttccccccagagctgacatatgtgaaaatgaagactgcaaaaatttgcctctatgtatcttcttggagttttttgatttttaacttttttagtctcggctattttgaactattttctccactgctctaatacattgaagtagagaattgagagtaggccatttcctcttttcctggaaaatattctgatggctctctttgataatttgtctgattgtctcaagcataactgatctttcatgaacacgcagggaatcataatggcgctgcactcggaaagttgagtataatggtgctattcatgaaaatagatgaattcaaaaaaatgggaagcgaatatcaaaatgaagttggacaagtaggtttttataggc

SEQ ID NO: 793415 - DNA, 565 bp, Homo sapiens
atggggaaactcacttccggggatccaggcccgacgagggcgttcccgggcacctcggtgactctgaaactcatatctacagcaaagcttgaacgtttgtaactgttcactttggactctgcgtcacacccagagagaccctgaaccatctgtcacaggtgacgtaaccctcagttccccttcacctgtgccagagcctcccagacacaaaggctggagccccaaaacctgtcaggggcctctcaggggccagccacaactcactccgcctgtcactgctggacgcccgctgcggcctgacggagccgctccttcacctgtccacatgcatttcccayacagcacattgtcttgaatgaaggcaagttattttctttctcggccttggcgtcctccacagccgacactgttcttgcaatctgtgaagggatgatttctaagctccgcctttgttcttcactcactcacccaccgtatacatagttgcacattgatgcataatagacatatacttgctgctacggaaggccttgtattcctgtctctcttcctaccacagcactcc

SEQ ID NO: 793416 - DNA, 659 bp, Homo sapiens
gcttcactggcccccttccaatcgagttcctgccctctcatctttgtggagaccacgctgactatgatttccgaaaatttacttgttctctgccaaatccaaggattcccactccctcccacccataccctcgctttgcttcttcccggctctgcacactccccaacttgcttctgcaccaggggcccctctggggaaaagcagatgtcccttgagctaaagaagttgcagttcacccaggctgggctgtcctggaggttgtgggcacgtgagcgtgggaggggtcgtgtgttcctccacgctcacccagagcagccccctctcggcttcgtgtaatatgctggtgtcatacatacttaggtctgttggaagaaaatgtcccaggactcacatamatgatgaaaaccgtcgttccaggcagcccatggctggcatcttgagtgccaataacgtgctccctgaagctttccctggtggacacgaagcagcacttcgctcgtgatggctgattgaaaacatgccggtgaactggacgacggtgagcacgacccccgccccccgccgctgtggccgccgcggggaagcctgcgcgtgagtgggacacactttgcccttcgtattctgaggacagaggtttggcgtgttagcgaggccgccag

SEQ ID NO: 793417 - DNA, 659 bp, Homo sapiens
gcttcactggcccccttccaatcgagttcctgccctctcatctttgtggagaccacgctgactatgatttccgaaaatttacttgttctctgccaaatccaaggattcccactccctcccacccataccctcgctttgcttcttcccggctctgcacactccccaacttgcttctgcaccaggggcccctctggggaaaagcagatgtcccttgagctaaagaagttgcagttcacccaggctgggctgtcctggaggttgtgggcacgtgagcgtgggaggggtcgtgtgttcctccacgctcacccagagcagccccctctcggcttcgtgtaatatgctggtgtcatacatacttaggtctgttggaagaaaatgtcccaggactcacatacatgatraaaaccgtcgttccaggcagcccatggctggcatcttgagtgccaataacgtgctccctgaagctttccctggtggacacgaagcagcacttcgctcgtgatggctgattgaaaacatgccggtgaactggacgacggtgagcacgacccccgccccccgccgctgtggccgccgcggggaagcctgcgcgtgagtgggacacactttgcccttcgtattctgaggacagaggtttggcgtgttagcgaggccgccag

SEQ ID NO: 793418 - DNA, 664 bp, Homo sapiens
ggaggttgcaatgagccgagatcacaccactgcactccagcctaggaaacagagcaagactccatctcaaaaaaaaatttaaaaatagataaataaataaataaaagcaaaaaaaaaaaacctactagggtagagatgacagagagagataatacatgttaatgaaaaattcaattgacaaggaaaacttaatgatctcaaatgtgtataaaccaaaaaacagtcttaaaatacatgaagcaaaactgatagacttaaaaggaaaaacagacaactccacaattattattggaaaatgcaacatgatctttcagcaagtgacaaagctactgacagtaaattagcgagaatatagaagatctgacyaatataatcaaccaatcatggagtgacacatcactccacccaataagcagagtacacttttttttcaattgttcatggaagattcatcaagatagaccatgtcctgagccatacaacaacttcaacaaatgcaaaataaatgaaagtatacgtagcatgtttcctgacaatattggaatcaaacagataatcaataacgaagacaacaggaaactctctaaacacagagaaattgaacaacataaattttaaatcattgctgggacaaagaggaaaatctcaagttaaaaatgaaact

SEQ ID NO: 793419 - DNA, 643 bp, Homo sapiens
aaggtagagtagaaattcacttaggtcactaagcattatgctgcgtaacagtagctttatccatagtatccagaagtagaaacaatccaaatatacatcaacaggagaatgaaaaaaattgtagtatatgtattagttcgttttcatgcggctgataaagacatacccaagactggataatttatagagaaaaagaggtttaatggacctgcagttaaatgtggctagggaggcctcacaatcatggcagaagttgaaaggcatatcttacgtggcagccggcaagagagaatgagaaraaatactgggccaagcaaaaagggaaaaccccttataaaaccatcagatctcgtgaaactttttcactaccacaagaatagtatggaggaaactgccccatgattcaattatctcccaccgggtacctcctataacacgtgggaattatgggagctacaattcaagatgagatttgggtgaggacacagccaaaccacatcagcatattcctacagtgtaaaagtactcacaagtaagaaagaaacaacctctgatatataataatgtgaatggttctcaaaaattttatgttgagcaaaagagccagatacacaagagtagacactgtatgaccatttgtgtg

SEQ ID NO: 793420 - DNA, 623 bp, Homo sapiens
cactgtctacctggagatagtgtcacatcccacaggttgaggatcagtcctcaagaatgcccactgccagcccctgcgaccttcactcctgccgcaagttcaggcctctggaacttctttttaattaattaatttttttgagacagagtctcgctctgtcacccaggctggagtgcagtggcgtgatcttggctcactgcaaccctcacctcccaggttccagtgattctcatgcctcagcctgggattactcagtagctgggattactgacawgcactaccacgccccgctaattttttgttttttttagtagagatggggtttcgctatgttggccaggctggtctcaaactcctggcctcaagtgacctgcccgcttcggcctcccaaagtgctgggattacaggcgtgagccactgtacccggcctggaacagatcagcttcaagttggggttcccacaactctctctttgggttcggttaatttgctggagcagttcacaaaactcagataaacacatttactggttcattataaatgatattacaaaggatacagatgaagagacatgcagagcaaggtacaagggaaggggcgcggagcttccatgccctctctag

SEQ ID NO: 793421 - DNA, 584 bp, Homo sapiens
atattcccctggggctaggaccaggaaatctttacaggagtcttcctcccacatcatctgggcttctcaatatgtttcagaatcgctcccctctgtctgctccatcagcctctgctgctgcccctcatctcttctcatcctaagactgcacttctcctgctttttccacccagttggttgagtctcccatctcagtagatccatggctcctctctctcctccctcagtggatgctctgatccagtgatatgctagtaaatggcaataaactctcctcatttgtagtgtttgccaatctctatagttaattacacccaccatggcctatttgaatcttgcmctgtgacatcgctgagcatggatttaggaagagatgggcagtagcacatcgttgtacagattttccaccatgcagacacaatagaggcaagtaacctcaagagaaaaggtagacaaataattaggaagtgatgagttctgaggatacatgacctttacttttaacctaatttgtttaattgcaagtctatatgatttaattgttattgatgactgtcttcacaaccagctcagaacaattgtga

SEQ ID NO: 793422 - DNA, 636 bp, Homo sapiens
aaggaaacagcttggatcccaaaagctaaattcacaaagctttttaatgctagatcaacatgccaatcacaaccatattttagtttattaaaagtaattatttcttgcttagaccccataaaattccatgaaatatcctggcttatcagttgaagacccaatggtggggagagggtgggcaggaagaaggctgcgcatgtgttccctccaacaatcctaaataggagcttctaaaccacttgcatatgggaaaataagtgtttttgacatgtcatccacccaccttcaccctctaagattcctgccagaatgaagcagtgaggaagacagtgaatcaaaactagctgatgtgtgataggcccattcttgagttctagtgcaattccctggaaaatgtgtaaatgctgaatgtggtgattaaatgatatacaaagcatgtcagttaaaaaacttgaaaargaactgtgtgggtgtgtattttgaaggaaatttctaaaagttcttatcaaattggctctctgaagatttacagagagcaaagtcaggaatacttcccttcagcaaagagttgcaatcaggaagaaagtgagcaaggtgaagtaaatgatattttaagacatggttattttagtacca

SEQ ID NO: 793423 - DNA, 500 bp, Homo sapiens
ccatcctgtctcagggagtgagtatagctgagtagtgagtacttccataatagatgtgactgctcaagacacaaagcaaatgctaggccaatccctccctctctccctagtgctcagagctgttatctgtgaaatgaagcaattggagttcatcttttataaaatttgtccagagttaccatcctataactatatttgcttcatgaaattccattttcacttcaatatatggactctgggtaagtgacatctctttgtacctaagcctgcattgaggaaaacsaggactatgtctatctcaccccttctcttgaaaagaacatacaaatctattggtaaatggtaaattaaaaccactctctgactttatttgtgaaggatgcttttgttgtcccaagataagcaatgccatttgaaaaatgactatttctccaggttgatgcattttttttaacttcagattgatgctttttgtctgctcaaactttcctacttatagg

SEQ ID NO: 793424 - DNA, 609 bp, Homo sapiens
aagtataccatcagtgaggtgttgaagccgactcacactagctcatgagcatcagtgatcacatttttggaaatattgtgagccagttaatgtcctgctacaagcttgaaatcagtcctggtaagagtggctacatcatggaaggyggcaaacgccacaaatcagtgcttctcattcctagagagctgattattaaaaatgtacaacataccttggtatataatggaaacaaaaccaaaagaaaaccgatatagttattttaatatgagtcaaagtagacataagactactactagatattaagagggacattttggaatgctaaaaaggcagtacactggctaggcatggtggcttatgcctgtaatcccagcactttaggaggccaaggtggggggatcccttgaggccaggagttcaagaccagcctggccaacatggctaagccctgtctctactaaaaatacaaaaattagctgggcaatcacttgaacccgggaggtggaggctgcagtgagcggagatcatgccactgaactccagcttgggcgacagagcgagactttgcctcaaaaaaacaaaacaaaacaaaacaaaacaaaaaaaggc

SEQ ID NO: 793425 - DNA, 607 bp, Homo sapiens
ttaacaatatatattttaaaaataaataggccgggccctgtggctcacgcctgtaatcccaacacttcgggaggccaagcgggtcggatcacctgaggtcgggatttggagaccagcctgaccaacatggagaaaccccatctctactaaaaatacaaaattagccaggtgtggtggtgcatgcctgtattcccagctactcgggaggctgasgcaggagaattgcttgaacccgggaggcggagattgccgtgagctgagattgtgccattgcagtccagcctagacaacaagagcgaaactccgtctctaaataaataaataaatattatgtgaaaggaccttaggttattttagatattattgtcaataaaatggttaaagactatttttaaacatgatttttattagtttagaaaaatgaggtctttagtagtatttctgaataacaaaaaaatagacactatagcttgatgagtaacaatgtaatgtgaactttccaatgagaccatttttaagactcaacttaattttttattcacaatggtgggaattctgtattgcagtatttacccacaaaacccagaactttctaccacaggaatat

SEQ ID NO: 793426 - DNA, 607 bp, Homo sapiens
ttaacaatatatattttaaaaataaataggccgggccctgtggctcacgcctgtaatcccaacacttcgggaggccaagcgggtcggatcacctgaggtcgggatttggagaccagcctgaccaacatggagaaaccccatctctactaaaaatacaaaattagccaggtgtggtggtgcatgcctgtattcccagctactcgggaggctgaggcaggagaattgcttgaacccgggaggcggagattgccgtgagctgagattgtgccattgcagtccagcctagacaacaagagcgaaactccgtctctaaataaataaataaatattatgtgaaaggaccttaggttattttagatattattgtcaataaaatggttaaagactatttttaaacatgayttttattagtttagaaaaatgaggtctttagtagtatttctgaataacaaaaaaatagacactatagcttgatgagtaacaatgtaatgtgaactttccaatgagaccatttttaagactcaacttaattttttattcacaatggtgggaattctgtattgcagtatttacccacaaaacccagaactttctaccacaggaatat

SEQ ID NO: 793427 - DNA, 641 bp, Homo sapiens
caaagaccaacaggattaaaagactaccaaaacatagagactgaaatgtagaaatgcaatgaaaccagtttccgtagagcaactctggtttcttggcagtcaaggacagtgaggtttttcaagaaaagggactttcacaaggtcttgggtgcaggctgagcaatgtaagaagaggtgggggaagtggtgtgcacacacacacacacctttggaccaagtttcaagctactgtaaaatcccttcatgtttgactgcttaagaatcaaatgagttcaatgggttgaagacacagaccacaaagaccaaacatatgctaccttcaatgcatggctggcatcaagcacactgccaagcacaaagtagactttcaatatgtatttrctgatttggctggacttttatctatgcagtaacaaggtacagtgttattaaaaactcctacaaatatcttaccctccccaaattaggtattgccataaaataccagttgaactcatgtagaaatggtcaaacttctgtcaattgtgcaggtcaagaagaaattagaaacttagttcccatcaacaaattgcttccatattattttaatgtcaaactgagacctttcccaaaaaaaagaggctgatatatcaatcatatca

SEQ ID NO: 793428 - DNA, 590 bp, Homo sapiens
agctagagtttctacaacggtcacccattgaatgaaatttggtctgtgtctagtaatttgctattacaaataaagatgctatgaataatagtgttcaattttttgtgtggacatacgtttccatgtctttatgctctggagagtgattgcagagtcatatggtaaatgtatgtctaaatttatgagaaactgtgaaactgtttttcagagaatttgcaaccattttatattcccaacagcaatgtttcagtgatccagtttctccacatctttaccaacatttagcattatcrtatgttctattttagctgttctaataggtatgttataatatccctttgtagttttaatttgcattttcctaaaggctagtgatgttgaatatttattcttgtgcttatgtgatatccatgtctcctctatggtaaaatatattttgatgtcttttgcccattttacaactggattaattgttctttttactgttgagttttgagagttttttatattatagatataaggactttgttgaatatatggtttatgttgtgggcttgtgtaccccaaaaagatatacgtaggtcaaaacc

SEQ ID NO: 793429 - DNA, 512 bp, Homo sapiens
agcacagcctgctgttgcagaagcctcagctcagcctccaagcccccccgagtgcttggggcccatctctggcccacttgctcccaccgcctggacaaagaggctgggctgccctccaagcacccagccaatcccggcaaagcccagcttacagcagacggagagcctctcaagccacagagagggcacccagagaggtggaggggctggcccaggggtccagagggaggcaggggcagggctgggatcagaacccaggtgtccggttcctcggctgagggstcgcttgactccatggtctaggcagcagaggttgaggaaaggggtgctctggaggccaatggaggaatgcttatgataagggctggggccagaagcaacacagcttggatgaccccaaatgaggtcatccaggcttggctatgtggggggcctactaatagtttccagtttcagtctgggttgaaaaagcaaaacaaccattttttaaagtagctttcgccttagtttcc

SEQ ID NO: 793430 - DNA, 620 bp, Homo sapiens
ttttaaggacccttctaattacattgggcccacccagataagccaggataatctcccttttttatagttagctattagctccttaattctccttttaccatgcaccttaacatattcacaggtcctgggaattaggaggtcggcacttctcaggaggcattgttytgcctaccacagtgctccataagtatttgctatttattagtaggagtaggaattttaaaacaatatgaagtcactacttataaaatgattaatattgagttaataaaatcttaatattttacagctgccttgtttccacttaattcaaagcaacagttattttttttctttcttagcagtttaaatgtatgaatctgtttaaagtatttaacttagttttcataggaacaaaaactcttgtcttttcacactcacctggggcgaagaatttatacaatatttaattaaactaaataacgatagtgataattatacctgcgataaatgcatggggagaagcacaaccggctattggtaagcatagaactcagactcagctggagaagcaagagagtttgggctcatcagaggaatgccaaccagtgacagacacacagcatacagggagcattcat

SEQ ID NO: 793431 - DNA, 659 bp, Homo sapiens
ccaattgaatcaaatagaatcatcatggaattgaatcgaatggctcactgtcgaatcaaatcaaatggaatcatcatcgtatggaattgaatggaaacattgaaaggaattgaatggaatcatcattgaatggaaccgaatgaaatcatcaacgaatggaatccaatgtaatcatcatagaattgaaaccaatggattcattaaatggactcgaatggaatcatcgagtggactcgaatggaatcatcatcaaatgaaatagaatgcaatcatcaaatggaatcgaatggaatcatcatcgaatggaatctaatggaataatagaatgaactcgaatggaaacatcgcatggagttgaatggaatcatcatcgaatgagatcgaatggaatcaycgaataacatcgaatggaatcatcgtcgaatggagtctaatggaatcaacaaatggactcgaacggaatcgtcatggaatgtaattgaatagaatcttctaacggactcaagtggaatcatcgaaagcaagcgaatggaatcatcatcgaatttcatcgaatggagtcatcatcatatggaatcgagtggaagcattgagtgggctcaaaagaaatcatcggagtatggaattgaatggaatcatcaaatggactcgaatggaat

SEQ ID NO: 793432 - DNA, 484 bp, Homo sapiens
aatcgaatggaatcatcatcgaatggaatctaatggaataatagaatgaactcgaatggaaacatcgcatggagttgaatggaatcatcatcgaatgagatcgaatggaatcatsgaataacatcgaatggaatcatcgtcgaatggagtctaatggaatcaacaaatggactcgaacggaatcgtcatggaatgtaattgaatagaatcttctaacggactcaagtggaatcatcgaaagcaagcgaatggaatcatcatcgaatttcatcgaatggagtcatcatcatatggaatcgagtggaagcattgagtgggctcaaaagaaatcatcggagtatggaattgaatggaatcatcaaatggactcgaatggaatcatcatcaagtggaatcaaatggaatcatcgaatggacacgaatcaaatcatcgttgaatggaatcgaatggaatcatcgaatggactcgaagggaatcattatc

SEQ ID NO: 793433 - DNA, 593 bp, Homo sapiens
aatcgtcatggaatgtaattgaatagaatcttctaacggactcaagtggaatcatcgaaagcaagcgaatggaatcatcatcgaatttcatcgaatggagtcatcatcatatggaatcgagtggaagcattgagtgggctcaaaagaaatcatcggagtatggaattgaatggaatcatcaaatggactcgaatggaatcatcatcaagtggaatcaaatggaatcatcgaatggacacgaatcaaatcatcgttgaatggaatcgaatggaatcatcgaatggactcgaagggaatcattatcgaatggaattgaatgaaatcataatcgaatggagtcgaatggaatcatcatcgaatggagtcgaatggaaacatcactgaatggaatcaaatgaaatcaccgaattgaatcaaatggaatgatcatcaaagggaatcaaaggaaatcatcgaatgggatcaaatggagtcawcgaatggaatcgagtggaatcatcgaatggatttgaacagaatcatcatcaaatggaatcgaatggaatcatcgaatggactcgaatggaatcatctaatgcactcgaatggaataa

SEQ ID NO: 793434 - DNA, 595 bp, Homo sapiens
aatcgtcatggaatgtaattgaatagaatcttctaacggactcaagtggaatcatcgaaagcaagcgaatggaatcatcatcgaatttcatcgaatggagtcatcatcatatggaatcgagtggaagcattgagtgggctcaaaagaaatcatcggagtatggaattgaatggaatcatcaaatggactcgaatggaatcatcatcaagtggaatcaaatggaatcatcgaatggacacgaatcaaatcatcgttgaatggaatcgaatggaatcatcgaatggactcgaagggaatcattatcgaatggaattgaatgaaatcataatcgaatggagtcgaatggaatcatcatcgaatggagtcgaatggaaacatcactgaatggaatcaaatgaaatcaccgaattgaatcaaatggaatgatcatcaaagggaatcaaaggaaatcatcgaatgggatcaaatggagtcaacgaatggaatcgagtggaatcatcgaatggatttgaacagaatcawcatcaaatggaatcgaatggaatcatcgaatggactcgaatggaatcatctaatgcactcgaatggaataatc

SEQ ID NO: 793435 - DNA, 615 bp, Homo sapiens
tcaagtggaatcaaatggaatcatcgaatggacacgaatcaaatcatcgttgaatggaatcgaatggaatcatcgaatggactcgaagggaatcattatcgaatggaattgaatgaaatcataatcgaatggagtcgaatggaatcatcatcgaatggagtcgaatggaaacatcactgaatggaatcaaatgaaatcaccgaattgaatcaaatggaatgatcatcaaagggaatcaaaggaaatcatcgaatgggatcaaatggagtcaacgaatggaatcgagtggaatcatcgaatggatttgaacagaatcatcatcaaatggaatcgaatggaatcatcgaatggactcgaatggaatcatctaatgcactcraatggaataatcatcgaatgtaatcgaatggactcatccaatggaatcaaatggaatcatcaaatggaatcgaacggaatcatcatcaaaaggaaccgaatggaatcattgaatggaatcaaaggcaatcatggtcgaatggaatcaaatggagacatcattgaatagaattgaatggaatcatcacatggaatcgaatggaatcatcgtaaatgcaatcaagtggaatcatcgaa

SEQ ID NO: 793436 - DNA, 598 bp, Homo sapiens
cgaatggatttgaacagaatcatcatcaaatggaatcgaatggaatcatcgaatggactcgaatggaatcatctaatgcactcgaatggaataatcatcgaatgtaatcgaatggactcatccaatggaatcaaatggaatcatcaaatggaatcgaacggaatcatcatcaaaaggaaccgaatggaatcattgaatggaatcaaaggcaatcatggtcgaatggaatcaaatggagacatcattgaatasaattgaatggaatcatcacatggaatcgaatggaatcatcgtaaatgcaatcaagtggaatcatcgaatggaatctaagggaatcatcgaatggaactgaatggaatctttgaatggattcgattggaatcatcatcgaatggacttgaattgaattatcgaattgatttgaatggaatcatcatcgaatggaatccaatggaatcatcgaatggaatcgaatggaatcatcattgacttgaattgaatggaatcatcaaatggactcgaatggaatcatcatagaatggaatcgaatgcaattatcgaatggacttgaatgaaatcacctttgaatggaatcaaa

SEQ ID NO: 793437 - DNA, 528 bp, Homo sapiens
tcgaatgggatcaaatggagtcaacgaatggaatcgagtggaatcatcgaatggatttgaacagaatcatcatcaaatggaatcgaatggaatcatcgaatggactcgaatggaatcatctaatgcactcgaatggaataatcatcgaatgtaatcgaatggactcatccaatggaatcaaatggaatcatcaaatggaatcgaacggaatcatcatcaaaaggaaccgaatggaatcattgaatggaatcaaaggcaatcatggtcgaatggaatcaaatggagacatcattgaatagaattgaatggawtcatcacatggaatcgaatggaatcatcgtaaatgcaatcaagtggaatcatcgaatggaatctaagggaatcatcgaatggaactgaatggaatctttgaatggattcgattggaatcatcatcgaatggacttgaattgaattatcgaattgatttgaatggaatcatcatcgaatggaatccaatggaatcatcgaatggaatcgaatggaatc

SEQ ID NO: 793438 - DNA, 561 bp, Homo sapiens
taatcgaatggactcatccaatggaatcaaatggaatcatcaaatggaatcgaacggaatcatcatcaaaaggaaccgaatggaatcattgaatggaatcaaaggcaatcatggtcgaatggaatcaaatggagacatcattgaatagaattgaatggaatcatcacatggaatcgaatggaatcatcgtaaatgcaatcaagtggaatcatcgaatggaatctaagggwatcatcgaatggaactgaatggaatctttgaatggattcgattggaatcatcatcgaatggacttgaattgaattatcgaattgatttgaatggaatcatcatcgaatggaatccaatggaatcatcgaatggaatcgaatggaatcatcattgacttgaattgaatggaatcatcaaatggactcgaatggaatcatcatagaatggaatcgaatgcaattatcgaatggacttgaatgaaatcacctttgaatggaatcaaagggaatgatcgaaaggaatcgaatgccatcatcattgaatttaatcgaaaggaatcatcgaatggaa

SEQ ID NO: 793439 - DNA, 561 bp, Homo sapiens
gaatggaatcatcgaatggactcgaatggaatcatctaatgcactcgaatggaataatcatcgaatgtaatcgaatggactcatccaatggaatcaaatggaatcatcaaatggaatcgaacggaatcatcatcaaaaggaaccgaatggaatcattgaatggaatcaaaggcaatcatggtcgaatggaatcaaatggagacatcattgaatagaattgaatggaatcatcacatggaatcgaatggaatcatcgtaaatgcaatcaagtggaatcatcgaatggaatctaagggaatcatcraatggaactgaatggaatctttgaatggattcgattggaatcatcatcgaatggacttgaattgaattatcgaattgatttgaatggaatcatcatcgaatggaatccaatggaatcatcgaatggaatcgaatggaatcatcattgacttgaattgaatggaatcatcaaatggactcgaatggaatcatcatagaatggaatcgaatgcaattatcgaatggacttgaatgaaatcacctttgaatggaatcaaa

SEQ ID NO: 793440 - DNA, 585 bp, Homo sapiens
catcaaatggaatcgagtggaatcatccaatataagagaattgaatcaccatagaayggaatcgaatagaatcatcgaatgaactcaaatggaatcatcattgaatggaatcgaatcatcaacgaatggaattgaatggaatcatagaatggaatccaatgtaatcgtcatcgaatggaatcatcatgaaatgaaatcaaatggaatcatcgtatggactccaacggaatcatcatcgactggaattgaatagaagcatcgaatgaaatcaaatggaattatcatcgaacggacccatatggaatcatcattgaattgactcatatggaatcatcgccgaatggattccaatggaataatcatggaatggattcgaatggaaatatcatctaattgaatcaaatagaatcatcatggaattgaatcgaattgctcaccgtcgcatggaatcaaatggaatcatcgaatggaatcgaatggaatcatcatcgaatggaatgaaatggaatcatccaatggacgagaagtgaatcatcattgaatggaatcgaatagaatcatcaagtgaaatccaatggaatcatc

SEQ ID NO: 793441 - DNA, 555 bp, Homo sapiens
cgattggaatcatcatcgaacggacttgaattgaattatcgaatggatttgaatggaatcatcatcgaatggaatccaatggaatcatcgaatggaatcgaatggaatcatcattgacttgaattgaatggaatcatcaaatggactcgaatggaatcatcatagaatggaatcgaatgcaattatcgaatggactggaatgaaatcacctttgaatggaatcaaagggaatgattgaaaggaatcgaatgccatcatcatcgaatggaatcaraaggaatcatcgaatggaattgaatggaatcaccattgaatggactcgaatggaatcatcatggtatggaatcgaatggaatcatcatcatatggaatcaaatggaatcatcgaatggacaagaatggaatcgtcgtcaaatggaatcaagtggatcatcgattagaaactaatggaatcattgttgaaagaaatggaatggaatcattgaatggaattgagtggaatcaccaatgaatggaatcgaatggaatcatcatcaaatggaatagaatggaata

SEQ ID NO: 793442 - DNA, 644 bp, Homo sapiens
aaagggaatgattgaaaggaatcgaatgccatcatcatcgaatggaatcaaaaggaatcatcgaatggaattgaatggaatcaccattgaatggactcgaatggaatcatcatggtatggaatcgaatggaatcatcatcatatggaatcaaatggaatcatcgaatggacaagaatggaatcgtcgtcaaatggaatcaagtggatcatcgattagaaactaatggaatcattgttgaaagaaatggaatggaatcattgaatggaattgagtggaatcaccaatgaatggaatcgaatggaatcatcatcaaatggaatagaatggaataatggaatggacacgaatggaaacctgtggaaccatagaatgaacacgaaakgaatcataatcgaatgcaatcgaaaggaatcatcattgaatgcaatcacatggaatcatcacagaatggaatcgtacggaatcatcatcgaatggaattgaatggaatcatcaattggagtcgaatggaatcatcaaatggaatcgattggaagtgtcgaatggactcgaatgaaatcatcatcgagtggaatcgaatggaatcatcgaaaggactcgaatcaaatcctaaaatggactcgaatggaatcatctaatgcac

SEQ ID NO: 793443 - DNA, 564 bp, Homo sapiens
atggaatcgaatggaatcatcatcatatggaatcaaatggaatcatcgaatggacaagaatggaatcgtcgtcaaatggaatcaagtggatcatcgattagaaactaatggaatcattgttgaaagaaatggaatggaatcattgaatggaattgagtggaatcaccaatgaatggaatcgaatggaatcatcatcaaatggaatagaatggaataatggaatggacacgaatggaaacctgtggaaccatagaatgaacacgaaaggaatcataatcgaatgcaatcgaaaggaatcatcattgaatgcaatcacatggaatcatcacagartggaatcgtacggaatcatcatcgaatggaattgaatggaatcatcaattggagtcgaatggaatcatcaaatggaatcgattggaagtgtcgaatggactcgaatgaaatcatcatcgagtggaatcgaatggaatcatcgaaaggactcgaatcaaatcctaaaatggactcgaatggaatcatctaatgcactccaatggaatcaacatcgaatggaccctaccggaa

SEQ ID NO: 793444 - DNA, 566 bp, Homo sapiens
gaatcatcaaatggaatcgattggaagtgtcgaatggactcgaatgaaatcatcatcgagtggaatcgaatggaatcatcgaaaggactcgaatcaaatcctaaaatggactcgaatggaatcatctaatgcactccaatggaatcaacatcgaatggaccctaccggaatgatcaaatggactcgaatggaatcattgaatggaaatgaatggaatcattggttggactcaaatggaattatcgaacaggctcaaagggaatcatcgaatggactcggatgtaatcattatcgaatggaatcgaatggaatcatcgaatggaattgatcgaaatcattaacgaatggaatcaaatgaaatcatcaaatggaatcgaatccaatcatcatcgaatgsaatcgaatggaatcatcatcgaatagaatagaatggaatcatcaaatggaatggaatggaatcgtcatcaaatggattcaaatggaatcattttcgaatagaatcgaatggaatcattgaatggaatcatcatcaaatggagtccagaggaatcactgaattgaatgga

SEQ ID NO: 793445 - DNA, 573 bp, Homo sapiens
aatggaattgatcgaaatcattaacgaatggaatcaaatgaaatcatcaaatggaatcgaatccaatcatcatcgaatggaatcgaatggaatcatcatcgaatagaatagaatggaatcatcaaatggaatggaatggaatcgtcatcaaatggattcaaatgkaatcattttcgaatagaatcgaatggaatcattgaatggaatcatcatcaaatggagtccagaggaatcactgaattgaatggaattatcattgaatggaatcgaatagaatcatcgcatggaatcaaatggaattatcatcaaatggaatcgaatgatatcatcgaatgcactttaatggaagcatcaacgaatggaattgaatggtatcatcgaatggactcgaatggaatcatcttcgagtagaatctaaaggattcactaagtggactccaatggaataatcattaaatggaatcgagtggaatcatcctatataagagaattgaatcaccatagaatggaatcgaatagaatcatcgaatgaactcaaatggaatcatcattgaatggaatcgaatcatcaac

SEQ ID NO: 793446 - DNA, 666 bp, Homo sapiens
gaatcatcgaatggaattgatcgaaatcattaacgaatggaatcaaatgaaatcatcaaatggaatcgaatccaatcatcatcgaatggaatcgaatggaatcatcatcgaatagaatagaatggaatcatcaaatggaatggaatggaatcgtcatcaaatggattcaaatggaatcattttcgaatagaatcgaatggaatcattgaatggaatcatcatcaaatggagtccagaggaatcactgaattgaatggaattatcattgaatggaatcgaatagaatcatcgcatggaatcaaatggaattatcatcaaatggaatcgaatgatatcatcgaatgcactttaatggaagcatcaacgaatggaattgaatggtatcatcgaatggactcgaatggaatcatcttcgagtagaatctaaaggattcactaagtggactccaatggaataatcattaaatggaatcgagtggaatcatccwatataagagaattgaatcaccatagaatggaatcgaatagaatcatcgaatgaactcaaatggaatcatcattgaatggaatcgaatcatcaacgaatggaattgaatggaatcatctaatgtactcgaatggaatcaccattgaatagaatagaatggaatcatcgaatggaatcga

SEQ ID NO: 793447 - DNA, 576 bp, Homo sapiens
ctgagctttaatcaagaaggaaaatggaaatccactggaaacatgacagacaccccacattctgggaaggagagttcaggcaaacagccaccatgatggcgtctggctgataaaagtgagtgatgccctgttatgtgagaggggcagagagcctccctctgtgactcacctttccactagggatccaagtaacttaggccaagagagagcaccttgtttctcccaagccccaggactatcttggggagaggcttggagacactgagagggaaagacaccaggaacagctgcaggcattttcccagacctgggactgaaagcaggatgccagttttaatccaggttcatacaaartcagccatactttggcaaacggcaggcatttttgcctcaggctagagattggaacacctgctgtggagcagcataggagttttcacagccagattgtggaaagtgcctccccagtaagcactggaattttgctctcccttgtcacaggcctgggatgggaggagagctgctacagtcatagtttattctgggtgactagacttgtgtcagggcttgcttggt

SEQ ID NO: 793448 - DNA, 597 bp, Homo sapiens
ctgaaaaagttgattttgactttttttttttttttcttgccagtgttcttgttggttttatggaggaaaggatttttggaggtcctttacttacttcacatgccaaatgtccttctggcctgtacttttgaatgacatttcactagatggatgtgaaatttggggttggtagttattttcatttagcacattaaagatatcattcctttttcttctgagtcctactgtttgaatagaaaatttagttgcttttttgctgttgttgttgttgttgttgtacttttgctcctttgatggtgatatattttttttcttctgggtgcctttgagatttttgtatatgtccagttttcaggagcttcagtatgcccaggtgtgattttcttggtgattaatatttatagaacttttaraatctggggtttgatgttttctacctgtttggaaattttcagccaccaccacttgagctacttcttctaacttgttgtctttctctttcccttctggatctccaggttccttcatattcaccctttgcataaggttctgtacatctctaatgctattttctgtactttccatatattttgtttg

SEQ ID NO: 793449 - DNA, 533 bp, Homo sapiens
gtgtataggctttttaaagaggaggttatgcatttgctgctacttccccaggccggatactgcactggccacgaggccggctgctcctgtatctcagccaagcgggccggagcggcaagctctggggattgattactcagaagattgaatgatccatctttggagcccttgggatttggctccgaaaccaatgcagtcggcagtaatggggacttattgaagraggccatgtggcttgtgctctcagagcacaggctgagcctaaaagaatcaggttctccttggggaaggtttgatttgatagacagagcacgaaatgcaagtccaatggattatggttagagcaaatgaaggatatcttagacctttagttttccacagagccaattgatttcaaggacttcctgctccctgccatctctcctccaaccctgcctctcaaggagcaaacatagacaccacctcattaaaaaaatatattatgaactaaacacagccacctttcagctttgctggaaaatgaacaaccctcc

SEQ ID NO: 793450 - DNA, 649 bp, Homo sapiens
atctgggttacaaaatgcaaggctatggttcttctccatagttgtaaaatgaaagctgaacgtttatgtattccttcttctgcatcatgtgaccagggtgggcctcataagaagaaggcaatgggccaacaggaaatttaatagagaccctgtttctctttctttatttgttgagggtgggyggggggaggtggaaatctttgtcagagttgtatttatcttggggtcagagtgttctctctcagtttatgaatatgtggtgggacaaaatgaaagtgtagattagataaatataagtaggtaaaaataggaatttgctgatagaaggctgctgagcattttggcaggcctaatggttttggaaagctttttgtaaggccgagctgattttgtttgcttctaaaacaatgataggccctgagtgttgagctgtaagatacctgcttttataggtatttccccattgaggtaaattaattgtatatttctttttgaaggttcttaaaaaattaaattctgttggacacacagagagcaccatgaatatcagcacactcagatgtcataagtttcttaattagggtttgcaaagaacatcacgctaaaagaggaatatctgaatgaaagttttgattaacttttctctagt

SEQ ID NO: 793451 - DNA, 628 bp, Homo sapiens
  misc_feature 490: n = A,T,C or G
actatttagtgaattaaaaatttttattattattaataataaccatttacaaaagagaatattttaatgaactatgagactataataatgaactataatgagaatataataatgatgtctataatagtttaaatattactcattttcaacaattatcaactcattgccaattttgctagttttatatatgccttccataccctgactgaagcacatttatagtcatatattttatttgttatatattatgttttaaaatcattgactagagttttctttgttgtatagtatctgtattctccatgtttttcaagacctatattgtgaatagaatatgtaacttcattaawaatacaaataagcatttcaattctccacctgaaatattttgtaggcaaccaaacctgtatatagtggcaaatgtatagccttaagttctgtagctatttaaaaaaagaggtactaatgaagttagaaaaaaggtaagggnaatataaattagtatcacacaatatcaatgaagtagcagaatatatagtattgcccctacttctgagatcaatatctttgaaaacagcattgagatatacatatctctgacaagttaaataacaatgggtttaaatat

SEQ ID NO: 793452 - DNA, 624 bp, Homo sapiens
aaaaaatatcaattagtttcttcagaaaggttacttggaatttctttatttgatcatctgttcatcctgccttcatgttagttcatctctttattcatttcattcatccattcattcattcaacatttactagtctcctaatgtataccaagttctgtgttgggcactgggagcacaatagtgaacaagacttggtccctgcccatgagggattcactgatagagctagaaacataaacaggtaagtataccacagtgtgataagtgtcagtgcaattcattcaattcagtgtgtattgagggtctgatctgtccagggtgctgtgctgggcattttcacaggaagcagagattgagatatctggccctgccctcagggagctcgaagtctagtgtgggagatggtaaacaacccagtaakgaaatcattacaaataaccatcacttacaagggaattaagcagagttctggagtggagaataacgagacaggggagcctatttcagcagaatggtccagaaagtactatgatggaggcatgtgcaaggaactgtgaaaccacggaggggctgctaatgtaatacaccctggaggagacagggaaggctttgcaaggagggtcc

SEQ ID NO: 793453 - DNA, 620 bp, Homo sapiens
aaaaaaatccactctgccaatatctgtattttaattggtgtattgaggccatttgcatttaatgtaactattgatgtgttagggcttaagtctgccattttattttttgttttatgtttgttccctctgttttcagtttctcttttctcccctgccttcctgtagattacgtaaacatttcttagatttccatttttatttagctctagtatatctctttgtataatatttttagtgtttgctttaggtattgcactatacacacgtaagtttttatttatttattttagagtcttgctctgttgcccaggctgaggtaagtggtgtgatcctagctcactgtggcytcaaactcctcggcttatataatcctctcacctcagtctcccaagtagctgggactacagctgcataccaccacacccagctaatttttcaccttttttttttagagacacggtcttgctatgttatccaagctggtcttgtacttctggcctaaaacaatcctccctccttggcctcccaaagtgctaggattacaggcatgaaccactatgcctggcttatacacacagaatttattatagtgtactagtattgatattttatcagtttga

SEQ ID NO: 793454 - DNA, 620 bp, Homo sapiens
aaaaaaatccactctgccaatatctgtattttaattggtgtattgaggccatttgcatttaatgtaactattgatgtgttagggcttaagtctgccattttattttttgttttatgtttgttccctctgttttcagtttctcttttctcccctgccttcctgtagattacgtaaacatttcttagatttccatttttatttagctctagtatatctctttgtataatatttttagtgtttgctttaggtattgcactatacacacgtaagtttttatttatttattttagagtcttgctctgttgcccaggctgaggtaagtggtgtgatcctagctcactgtggcctcaaactcctckgcttatataatcctctcacctcagtctcccaagtagctgggactacagctgcataccaccacacccagctaatttttcaccttttttttttagagacacggtcttgctatgttatccaagctggtcttgtacttctggcctaaaacaatcctccctccttggcctcccaaagtgctaggattacaggcatgaaccactatgcctggcttatacacacagaatttattatagtgtactagtattgatattttatcagtttga

SEQ ID NO: 793455 - DNA, 573 bp, Homo sapiens
tgaaacttccacaagaaaacacagggaaacactttcacgatctgtgagcagtccagaatgtcttagatgggacagcaaaagcaacaaacatttaaaaaatcgataaattgggcctggtatagtggctcaatgccctgtaatcctagcacttcgggaggctggggtgggtagatcacgaggtcaggagcttgagaccagcctggtcaacatgatgaaaccccatctctactaaaaatacaaaaaaattagccaggcgtagtggcgggcacctgtaatcccagctacttgggaggctgaggcaagagaatcgcttgaacctgggaggcggaggttgcagtgagccaagatcgtgccattgcactacagcctgagtgacagagtgagactttgtttmaaaaaaaaaaattgataaattgacttcatcaaaatgaaaagtctttattgttaagaaaactaaaagggaaaccacatactttgggcaaatactgcaacccatatatctgataaaaggctagtatccaggttatatagataatcctgtaactcaataataagagggtttatgtgctggaa

SEQ ID NO: 793456 - DNA, 614 bp, Homo sapiens
atataaatactttgagtcctacctgtggtgaaacattcccaaaatctgtttcaaaaaatatatctagacttttaatgccataaatttatgaatcttttcaggttcttcgtatatgacatttgagttttgcacttcaccccctgatcatgttgtgtttgaatccctgttatttttagagcatcagtaagagatggggcttgtgaaaaattatcctctttcttctacayaggagatgtggcctccccagtcaagagaaatgctatagctggcattttagagtttggaggatctttaaaaacatccttcagatcttgccatatctctcattctaattactgggatttctggtaaaagccttaattttcagtaagagaccaagtcagattgtaagttaaaatagcaatctgcagagttaatctgtgcatttggattttagttattttagccccatactacaagtcaaaggcattcagtgatttctaagcatttttgactattacctacattataaaataaattttatatcataaataagtttatatacacatataattgaattgtaaattacatgaaacatttcttacccctactatatataatatactttaatattt

SEQ ID NO: 793457 - DNA, 506 bp, Homo sapiens
tcatttgactcctaactaatctaaagtaaacgtgattactttccctgctttgcgtcaagaaaaaaacagagtgggccgggtgtggtgacttgcacctataatctcagcactttggaaggctgaggcaggaggatcacttgaagctaggagttcaaaaccagcctgggtagcatagggagacctcgtttctagaaaagtttaaaaattagccaagtgtggtagtgcatgcctgtagtcccagatactcaggacactgaggtggaagactgcttgagttcargtcaaggctgcagtgagttgtgatcaaccaatgcactccagcctaggagacagagtgagaccctgtctcaaaaaagaaaaaagaaaaagaaaaagaaaaaaaagaacacaacattggagcaatattcccaagataatgaagggtacagccaggactggaagttgaatctcattccacggcttaggatgataaccactgcactattccaagatagtgtcatgaacct

SEQ ID NO: 793458 - DNA, 646 bp, Homo sapiens
ccagttctgtgaagaaagtcaatggtagcttgatcgggatagcattgaatctataaattactttgggcagtatggccattttgacgatattgattcttcctatccatgagcatagaatgtttttccatttatttgtgtcctctgttatttccttgagcagtggtttgtagttctccttgaagaggtccttcacattccttgaaaaagtcrgcaaaggatatgaacagacacttctcaaaagaagacatttatgcagccaacgaacattgaaaaaaagctcatcatcactggtcattagagaaatgcaaagcaaaaccacaatgagataccacctcatggcagttagaatggtgatcattaaaaagtcaggaaacaacaggtgctggagaggatgtggagaaataggaatgcttttccactgttgataggagtgtaaatcagttcaaccattgtggaagacagagtggcaattcctcaaagatctagaactagaaataccatttgacccagcgatcccattaccaggtatatactcaaaagattataaatcattctacaataaagacacatgcacacatatgtttattgcagcactgttcacaatagcaaagtcttggaaccaacccaaatgcccatcaatgataga

SEQ ID NO: 793459 - DNA, 646 bp, Homo sapiens
ccagttctgtgaagaaagtcaatggtagcttgatcgggatagcattgaatctataaattactttgggcagtatggccattttgacgatattgattcttcctatccatgagcatagaatgtttttccatttatttgtgtcctctgttatttccttgagcagtggtttgtagttctccttgaagaggtccttcacattccttgaaaaagtcagcaaaggatatgaacagacacttctcaaaagaagacatttatgcagccaacgaacattgaaaaaaagctcatcatcactggtcattagagaaatgcaaagcaaaaccacaatgagataccacctcatggcagttagaatggtgatcattaaaaagtcaggaaacaacaggtgytggagaggatgtggagaaataggaatgcttttccactgttgataggagtgtaaatcagttcaaccattgtggaagacagagtggcaattcctcaaagatctagaactagaaataccatttgacccagcgatcccattaccaggtatatactcaaaagattataaatcattctacaataaagacacatgcacacatatgtttattgcagcactgttcacaatagcaaagtcttggaaccaacccaaatgcccatcaatgataga

SEQ ID NO: 793460 - DNA, 650 bp, Homo sapiens
tgcagaaatcaagataagaattaagcctgtaactcacaagcaaaacgtgtactcatgatctaaaaagcacatgtgttcttcctctcattcacttctgggaaataaaacagtgtttaaaactactctagaagtccagggtagtacattagggaaatgtcctaaataatgtctccgtggaatccacttcttgctctggattttcctaagaagcaagtaagttggcccacaraattagatagactgtgggcattttcacatgcttaaggaaacatcaaagctccatagaaaatgtgggtgctgacaagaaattagggaacatctgtcttattcctctataagtatttaacaaaaaaagtgccaaaaataaatttataaatgtggccagttaatggtagacaagaacaagtccagggctccaaatgtccagttcagagctccttctgtaagaagtgttccaacaagagtgactccatcttgagtgagggctaggaaattgaggctgcgacttgctaggctgcattcccagaaagttaggtattcttaacctcttagatgtttacggctaagggaacagattgataatgtttactaaacatacctggacttgggagtgtccagatatcccaatatcttgagaacaaaggcattcc

SEQ ID NO: 793461 - DNA, 650 bp, Homo sapiens
tgcagaaatcaagataagaattaagcctgtaactcacaagcaaaacgtgtactcatgatctaaaaagcacatgtgttcttcctctcattcacttctgggaaataaaacagtgtttaaaactactctagaagtccagggtagtacattagggaaatgtcctaaataatgtctccgtggaatccacttcttgctctggattttcctaagaagcaagtaagttggcccacagaattagatagactgtgggcattttcacatgcttaaggaaacatcaaagctccatagaaaatgtgggtgctgacaagaaattagggaacatctgtcttattcctctataagtatttaacaaaaaaagtgccaaaaataaatttataaatgtggccagttaatggtagacmagaacaagtccagggctccaaatgtccagttcagagctccttctgtaagaagtgttccaacaagagtgactccatcttgagtgagggctaggaaattgaggctgcgacttgctaggctgcattcccagaaagttaggtattcttaacctcttagatgtttacggctaagggaacagattgataatgtttactaaacatacctggacttgggagtgtccagatatcccaatatcttgagaacaaaggcattcc

SEQ ID NO: 793462 - DNA, 616 bp, Homo sapiens
aattttggggtcacccattagcaaagattaaaaagaaatttaatatccagtttgggcaagtatgtggaaaaacagtcttgtacactgctagtggaaatataaataaataaactgtgtgtggaactaatgggtaaaactttattaaaatattcatacccattgactcaacaattccccttggctgtgcatggcagctcacgcctgtaatcccagtactttgggaggctgagggaggaggaytgtttgagcccaggagtttgagaccagcctgggcaacatagggagatctgcctctccaaaaattaaaaaattaaaaaataggtggttgcagtggcacatgcctgtggtcctagttacttgggaggctgaggtggattgcaacagagcaagaccctgtctaaaaaacaaagaaacaaacaaaacaaaataaaacaaaaatccttataggagagacacatataagtatgaaaatatatgtatacaaggatattctctgcagaatggtttatggtcaagaaaaattgaaaaacaaccaaaataagcatatgacatttaagttcatccatacagtgaaatgctatacataagctagaaataattaataaaatcatatgtt

SEQ ID NO: 793463 - DNA, 630 bp, Homo sapiens
aacttgatcgtgtatatggaaaattctaaggagtctcataaatgaatttagtaagggtgcaggataaagtcagtatacaaaaatcaaatgtatttctatatactagtaacaagcaattgaaaatgagattttttaaagtaccatttaaaatagcatacaaaacacaaaatacttaggaataaatttaagaaaatatgttgaaaatttgtatcctgaaagctatgaaacatttctgaaaaaaaatttaaaagacctaaataaatggagagctattccatgttttggattggaagactcaatatttttttactcaatatttttaagatgttaattttccctaaattgatctatagattcaatataatcccaacccaaattccagatggctttctttttggtaaacttcacaagctgattctaaaatgtatatgaatatgcaaaagatctagaatagccaaaacaatgttgaargagaagaacaaagttgtaggacttatattacctgtttgcaagactcactataaagttacagtaatcaagacagtgtagaaacacatataaatcaatagaacaaaattaagagtccagaattagacctacacataagtggtcaattgatttttcaacaaa

SEQ ID NO: 793464 - DNA, 659 bp, Homo sapiens
atttttctttagtcttgtcatgtccttaagcttcacacactgattgctcctttttcatccttcttttctgtatccccttattcttctagatctcttaatgttagtatgccctaaggctagcactctgatatcttttataaaytctcacgccataggtggtctcatccagctctgtaactctaaatatcatctatatgttgatgccctccaaatctataagcaggcttaactccctaaactctatgaagcaggtttattgtgtgcagattaccaacttgtctgaagccagcagacataacacattcatacacaacattttatgtgaaatggatttattacttattgataggcaacaagggaaaacagaagtctaggattcattgcaagctgatctcccaaggctcagaaaagctgcctagggtggtttgaattttatttgcacgtgctcaacttgcacagcagctgagggaccccagaaaacagcctgctctgagtttataccctagagtaacatgagacactgggctgaagcattgagattatgttttagggcagctggaggagcagatagaacagtcctggctcttctaaccattgcctccctttcttgggatattgcattatcagcacattctacagttattcttgagaactgtaag

SEQ ID NO: 793465 - DNA, 659 bp, Homo sapiens
atttttctttagtcttgtcatgtccttaagcttcacacactgattgctcctttttcatccttcttttctgtatccccttattcttctagatctcttaatgttagtatgccctaaggctagcactctgatatcttttataaactctcacgccataggtggtctcatccagctctgtaactctaaatatcatctatatgttgatgccctccaaatctataagcaggcttaactccctaaastctatgaagcaggtttattgtgtgcagattaccaacttgtctgaagccagcagacataacacattcatacacaacattttatgtgaaatggatttattacttattgataggcaacaagggaaaacagaagtctaggattcattgcaagctgatctcccaaggctcagaaaagctgcctagggtggtttgaattttatttgcacgtgctcaacttgcacagcagctgagggaccccagaaaacagcctgctctgagtttataccctagagtaacatgagacactgggctgaagcattgagattatgttttagggcagctggaggagcagatagaacagtcctggctcttctaaccattgcctccctttcttgggatattgcattatcagcacattctacagttattcttgagaactgtaag

SEQ ID NO: 793466 - DNA, 659 bp, Homo sapiens
atttttctttagtcttgtcatgtccttaagcttcacacactgattgctcctttttcatccttcttttctgtatccccttattcttctagatctcttaatgttagtatgccctaaggctagcactctgatatcttttataaactctcacgccataggtggtctcatccagctctgtaactctaaatatcatctatatgttgatgccctccaaatctataagcaggcttaactccctaaactctatgaagcaggtttattgtgtgcagattaccaacttgtctgaagccagcagacataacacattcatacacaacattttatgtgaaatggatttattacttattgataggcaacaagggaaaacagaagtctaggattcattgcaagctgatctcccaaggctcagaaaagctgcctagggtggtttgaattttattkgcacgtgctcaacttgcacagcagctgagggaccccagaaaacagcctgctctgagtttataccctagagtaacatgagacactgggctgaagcattgagattatgttttagggcagctggaggagcagatagaacagtcctggctcttctaaccattgcctccctttcttgggatattgcattatcagcacattctacagttattcttgagaactgtaag

SEQ ID NO: 793467 - DNA, 659 bp, Homo sapiens
atttttctttagtcttgtcatgtccttaagcttcacacactgattgctcctttttcatccttcttttctgtatccccttattcttctagatctcttaatgttagtatgccctaaggctagcactctgatatcttttataaactctcacgccataggtggtctcatccagctctgtaactctaaatatcatctatatgttgatgccctccaaatctataagcaggcttaactccctaaactctatgaagcaggtttattgtgtgcagattaccaacttgtctgaagccagcagacataacacattcatacacaacattttatgtgaaatggatttattacttattgataggcaacaagggaaaacagaagtctaggattcattgcaagctgatctcccaaggctcagaaaagctgcctagggtggtttgaattttatttgcaygtgctcaacttgcacagcagctgagggaccccagaaaacagcctgctctgagtttataccctagagtaacatgagacactgggctgaagcattgagattatgttttagggcagctggaggagcagatagaacagtcctggctcttctaaccattgcctccctttcttgggatattgcattatcagcacattctacagttattcttgagaactgtaag

SEQ ID NO: 793468 - DNA, 628 bp, Homo sapiens
attaaagggggccaaaaaaagacccacatgggttatatgctgtgtttagtacccaagagacctaccagctgtggggcttctttttcattagtaagtgccaccagcaccaacaatttttgtttgactatatctgggatacttccttggctttctgtccaagtgaccttgacattcagcctgtgactatccattagtcttcatgccccaaaggcctttctgactagccagactaggcgagtgcattgtgacatttttatctgtagtgggttttgaattaagaaagtagcgtcttattctccacttggtatgcagtactgctttcgctgagtaacttaagaggttttgggtmagtcttgagtaacttatgaggtcttaggtggcaggccgggttggatatgcaccactggtatagctcaaattcttagctacgaggggcatacctcctcaggtggtggtgatgttctgcaccacaagcaaccaaactatcaatatccgtactcagtggtgggaactgtggtcaccagcacccaaagtgacacaaagtatcctactcacagcagataagcaataagcatagtgagtcattacattcacctgaaaccctcccatggtcatcagtttaactttt

SEQ ID NO: 793469 - DNA, 524 bp, Homo sapiens
actttatatatataagttttaaactataaaactttattaaaaatggccattcagatttgaatatttgtttctgtttcagagtgggctggagaagaggaaatgataccatgttcttttaagaaaaaagaggaaaaagcccacaagatgaacactatggtgtataaccctgtcatgtctttttagcaatgaactttggagccctggaaacaagtagccctaagttacaacactcaattttaaagtaagcttttyttcatgaccctggcaaactcatcaactcactctccaccccctaccttcatggactatcccactttttatacattctttcactggcttgtttatttcctgacaggtaggtgctatttgatcctaaagaaaaaagaaccatggcaatttatttggttgattcttctgtaatccctaattcctagtttaatttgctaatttaatataacttatggccctagtttgtagagttttccacttgttttataccaatttgtgattttaaacattttttt

SEQ ID NO: 793470 - DNA, 524 bp, Homo sapiens
actttatatatataagttttaaactataaaactttattaaaaatggccattcagatttgaatatttgtttctgtttcagagtgggctggagaagaggaaatgataccatgttcttttaagaaaaaagaggaaaaagcccacaagatgaacactatggtgtataaccctgtcatgtctttttagcaatgaactttggagccctggaaacaagtagccctaagttacaacactcaattttaaagtaagcttttcttcatgaccctggcaaactcatcaactcactytccaccccctaccttcatggactatcccactttttatacattctttcactggcttgtttatttcctgacaggtaggtgctatttgatcctaaagaaaaaagaaccatggcaatttatttggttgattcttctgtaatccctaattcctagtttaatttgctaatttaatataacttatggccctagtttgtagagttttccacttgttttataccaatttgtgattttaaacattttttt

SEQ ID NO: 793471 - DNA, 646 bp, Homo sapiens
agcaagttgttcaattagcataaaagtcacaagactacatttcatgtgaattatttttttctatgttaattgtctagaggggaggaaattagccaaaaggaagaaaaaatgatgtgagaagacagattaccaatgaatcattataatttaaaatgttgtgtatcctgctactgaccaagaatacaaatatgcaaatatcaatccaactttcattaatattttacctcaaaaatataattgtaagctatrccctgactaatatgtcaaacctaatctgggagtcagttctaattttcaatatgaagaaattttagctgttttaaactctattcatggtagttgctagtttaaatttctgctaataatataactccactatgcttgtgaaatctttattgggtctttctgtatctgtcatgggtctgactaaagaactccctgaaattcatgtattaggtgagactgaggaacattgacaaagcaataagggttgacatcctccaccctacaaatctatcatggaaattaatgatctgctccattttaactaaccaatggtgcaaagcagccatcttctagggctttcaggaagaatcttgaaatctgaagcaataacctgagacatttaaagctacaatttatttca

SEQ ID NO: 793472 - DNA, 517 bp, Homo sapiens
tgacttcttcctggtttagtcttgggagggtgtatgtgtccaggaatttatccatttcttctagattttctagtttatttgcatagaggtgtatgtagtattctctgatggtagtttctatttctttgggatagtggtgatatcccctttatcatttttttattgtgtctatttgattcttctctcttttcttccttattagtctggctagcggtctatctattttggtaatcttctcgaaacccagctcctggattcactgaagagagagggggccaatattcaacagtcttaaataattttcaacccagaatttcatatccagccatactaagcttcaaaagggaaggasaaataaaatcctttacaggcaagcaaatgctgagagattttgtcaccaccaggcctgccttacaagagctcccaaaggaagcattaaacatggaaaggaacaaccggtaccagcaactacaaaaacataccgaattgtaaacaccatcaacactatgaagaaact

SEQ ID NO: 793473 - DNA, 538 bp, Homo sapiens
atgacttctagggtttggtgaatagttataccatttaatgtataatgtagaagaataagagtttcataagagttccaaaatcaagtgttcagtttgggacaagtaaattttgagatgctgacaagatattagtggaaatgttgactgggcagtggcattcaggagcttgatggataatcatgtgtctgcactgcaacaagcactgatttagaggtgggagcrttggtagtgcagcctggggtaaaaataaaggctggcatccattggctgcctggactgattcataggttatgtaacccatctcttgtgtacacacaaatgtgcccaatattgggatataagaaatgcatccaaataacgtgtccccatgttattttcactgtacaatgtatttcacaattaatatttagtcaatgtgtacagataagtgatgctttcttaggggagacagtgtggtataatgagaggttactgggtgtggagccaaagtgtgataattctccttcaacgaagaacttgttgcttcaactgctgggag

SEQ ID NO: 793474 - DNA, 598 bp, Homo sapiens
gtgtgttaactcctttccggccaagtcaaccaagcataatggttgggaaagtttctcatgagtagtgccagggtggtgatgcggtacagtttatctctgttccttgctgatatgctccaggtccatgagctgatgcctccaggtactttctgccagaggagccrtgaagactcccaggggccactgccctgcccttctgcccagtatcagttgatgcttccttggtgccattggcatcagttcatggtccaaatgggggttggaggggagagtccctgaggcagacagagggcagattatagaattaatagcctaaaagccccctggaaatgaactatttgaggaaacatgagttctggtctccatgtcctatgtaatctcgagctgctcaccaaagctttctgggcctccatttcccttctgaggcctttttttttccagctcagtcccctgagccatcctgagaacagaaaggagtttagttaaacaagtttctagtgatcatgaaaccaggctgtaagtagggagggacatcttcaaattctcctgggtttatgacagggctggagtatgttttcaagtgtccagataagatatt

SEQ ID NO: 793475 - DNA, 626 bp, Homo sapiens
attcctgttccaagggcaagaatccaagtaggtcagtgctacaaaactatgttggagtatggggaaagcatgggttaggaataatttctgccaaagaatgaataatagcaagaagaaaaacatcatttgcaatttttcttttaagaaaaggttaaggaggttatatagtgggtctgctgaaggaggtgagggttatctgagaccactgaattacagttggaaagataactgacaaggaaaatctccactaaaagtatagttgattattttccagaacttgtacttataaaaagtaaaaattctccaaagagtgttcgtatggttacatttttttaatatctggaatttcaagtgctatgaatggttaaaagtctaagttgttgaattggaaaaaatggaaacatyggaacatgaacattggaacacgaacattggaaaaaatgttcatcaagcatattattttgttgtagtaaaacgtatataacgtagtatattcttttaaggatgaattataaagacttcataaacatattgcattttaatttaatttaatttaatttttgagacaggatctcactctgttgcccaggctagagtgcaatgatgtcgtctcggctccctgcagt

SEQ ID NO: 793476 - DNA, 626 bp, Homo sapiens
attcctgttccaagggcaagaatccaagtaggtcagtgctacaaaactatgttggagtatggggaaagcatgggttaggaataatttctgccaaagaatgaataatagcaagaagaaaaacatcatttgcaatttttcttttaagaaaaggttaaggaggttatatagtgggtctgctgaaggaggtgagggttatctgagaccactgaattacagttggaaagataactgacaaggaaaatctccactaaaagtatagttgattattttccagaacttgtacttataaaaagtaaaaattctccaaagagtgttcgtatggttacatttttttaatatctggaatttcaagtgctatgaatggttaaaagtctaagttgttgaattggaaaaaatggaaacattggaacatgaacattggaacacgaacattggaaaaaatgttcatcaagcatattattttgttgtagtaaaacrtatataacgtagtatattcttttaaggatgaattataaagacttcataaacatattgcattttaatttaatttaatttaatttttgagacaggatctcactctgttgcccaggctagagtgcaatgatgtcgtctcggctccctgcagt

SEQ ID NO: 793477 - DNA, 645 bp, Homo sapiens
gtctctcaaataatgcattttgaacaacaaagttctttttaaagaaggcacattatcttgaaattacgtcaatcaatgctaattttggatagtttgaaagatcacgtggaagaattagttaattaaaaaaagatataaatatcaaacattaatcctagtaatattcttgggggtaatctcaccgaaagtgttggaatgttactataagtaagcttttaaaaataagttttattttttattatttttgagacaaggtcttactttgttgcccagcctggaatgcagtggtgcaatctcggctaactacagtctcaacctccaggctcaagtgatcctcccacctcagccttctgagtagctgagactacaggtgcttccatcacaactggctaatttgtgtttattttttgtagagatggggttttgccatgttgcccagcctggtcttgaactcctggacttaggcaagccacccaccctggtctcccaaagtgctgggattrcaggcatgagccactgcacttggcctaaaaataatttttaaaagctacactgtaaatgattacactgtactgatcagtaacaagcatcttagaaggtaaaagaaaaaactatctttttattacataaataagtacctaatgc

SEQ ID NO: 793478 - DNA, 616 bp, Homo sapiens
caattgatgacaatacaattcttcaagttgcttaagctagaacaaccttgttgtcacccttgattttctttctctcagcccacatccagtccgtcaagaaatactatttgctttcccctcaaaacaatccagaattcaaccacatatcaccatttataccactttcatcctaatctgtgcctttatsattcctcatccagttactgtacttgcttcataaatgtcttttcactttcacccctgcccaccacagcccatcctcaatacagcagccagagcgatgcttttaaaacttttgtcaggttacagcactgctctgcctagaatcctggagtggctcccctgtttcactcagaacttgaagacggcccacaaagcccagagatgatttattccatatcccatcccattgtgtctctgacctcatctgccacattgttttgtcagtgaacatttgagtgctactaggtgccagaggttgctctaagcacttgaagtaacacaatggccaaaagcaaaaatctctgcctttgtggaggccacgttctaaagatggtgggaggatgttgggaaatgcaatcaacaagtcagttatgtgttatattagaagtggtac

SEQ ID NO: 793479 - DNA, 627 bp, Homo sapiens
tccatttttaggaggtatgcttattaaaattcattttcatagtgtctaattaaataacatcaatttgaataaagtgagttagataatataactattctattgtaattaattaggacatttaaaaaataattcaacagataaacattgacttcctcccatggctaaattattagggaaataccttctacattacatcttaaattattcagctcaggtggtggtttctgagarcactttcaacaccatgaggtaatatgctgaatcataaacaaccacgtcagccgcctacattaacatactgcaaacaagactcttcagatcttttttatggcatttaagtccaattcaaataaaacttcaattctttatggactggagtatatctgtgacaaagaaacatcagataacattttaaaaagaatgtatgctaccattgttatttttattactatctgtagaagcttttatacgtgccccaaaagtagctatttttgaaaatgagtttgatcaataatttaaacacttgcacaaaatatattggtatgcctgttataagtgcataggcatgtataatttaaaatcacttacaatttaaaagttttagcctcttttttaagattttcctct

SEQ ID NO: 793480 - DNA, 551 bp, Homo sapiens
ttaggaaaagactgctcagcccataacactatcttaaaaagcaaagcaatgctacagcaaaatgatgaaattcctgtagacatatctttgaacacttttgcaggcatatgggtaagataaatttcaatttgggggtcaaagagtatgctcagcaataatttggatagatgttgataaatttcctacaaaaggtttgtaataatttattctatcaacaatatatagacctgcatagttcccttcagctttgggcttacataaccttttaatattcttaattggataaaaaaatacactttgttcttcagtttatgtattttaaaatattaatatggttaagtatcttttcaggtgtgaattgcgcactcatattttttccataaactcctttgcccactttttttctattgggttatatatctttgtttctgtttttgttttggagacagggtttcactctgccacccagatagagtgcaatggtgcaatcatggctcactgtagcttcagacttcgaagctcaaacrgtcctcctgcttcagcctctccag

SEQ ID NO: 793481 - DNA, 587 bp, Homo sapiens
ttatgtattttaaaatattaatatggttaagtatcttttcaggtgtgaattgcgcactcatattttttccataaactcctttgcccactttttttctattgggttatatatctttgtttctgtttttgttttggagacagggtttcactctgccacccagatagagtgcaatggtgcaatcatggctcactgtagcttcagacttcgaagctcaaacggtcctcctgcttcagcctctccagtacctcagactacaggtacatgccaccactcccagttaatttttgaatttttcttttgtagaggccatagggtctggctatgttgaccaggctggtttcaaactcctggcctcaaggaawgctccagcctcagcctctcaaagtgctgggattacaggtttgagccaccatgctcagccttaccttttatttacttatttggaagaattttttttatattaaggtgccttgtcgtatttgttgcaaatattttttcccaatatgtgcttgtcttctatttgaccttttttcacggcagagtgttaaaattgatagaaattgaaaatgttaagattaaaatgtaga

SEQ ID NO: 793482 - DNA, 632 bp, Homo sapiens
tgaatggagataataatatctaccacttcttttttttttttgaaacggagtttcatttttgttgcccaggctggagcgcaattgtgcaatcttggctcaccgcaacctccgcttcccaggttcaagtgatttctcctgcctcagcctcctgagtagctgggattacaggcatgcgccaccacacccagctattttttgtatttttagtagagacgggttttctccatgttggtcaggctggtctcaaactcccgacatcaggtgttccgcccacctcggcctcccaaagtgctgggattacaggcacgagccaacgtgcccggccacacttacttctgtataagaatgaaaatcaccctgttaagtccctagcacaatgcctagcacataaaaaatatccaacaagtggtagccattattataatttctaaatgacagcctgatgcagtcagtgtaacatgaggcaaactgtaatggttatgaattgctgagaacwtggaatctctgtagttggaaactctgaaaatgaagtgttgtagaatggcttgatggagtatgaatttttcttgtaagcctggatgattggggtaaagcagaggttctccaccagaagcagttttgctccccaggga

SEQ ID NO: 793483 - DNA, 625 bp, Homo sapiens
ggtgcgccctccatgctgggtttctgacatcatagcccaaggtagtaaattaaagatgctataattcactttccacaggtggtcttggctgcattccacagtcttttggctgaaaggttgctgattttgaagcactggcccaaagtcaaaacttagcccagatgactggccagccgagcaatgagcaatagcrtcaacagatgagccactgatttttctgtggaggtcttttgtgttcacttcatatgtatttaatttttgctgttttgagtatttctggagtgatggagaaacagaaattgcaggcatttttcagggatagagaaattcgtaatttgatatacttccatcagtcttttcgatttaggctgtctttgctgcaggacaccaagggtggtaagggtcagtttttgagtcctaatccaggccaccactggattgctacaccaattagcacatccaatgattggcagattttatgagctaaacctctggcagggccctttatgtgcattttactattttttcaaaaagagggtaaaaaactagcaccaatcttgagcctaaaataatttcatgtttgccacaccatttcaaatactatgtaagagtttggctcgctgtc

SEQ ID NO: 793484 - DNA, 624 bp, Homo sapiens
attagatgtgaggtcttcgtgatacagttttgagttttaaagaaaaacgtctgtagcaggggttagtggcaacttgtattgcagtgttcagccttctacatgaaggatgttcagctagagcttagtagtgttgagttttctggtaagtattaataggcattgtcctaacttcttacaaacataacattttactaaaaatgtatcattaaaatagatatttaatagaatagaaaaataatgtggattygaacattagaagtagggcagaatattaataatacacatttttcccgttatataactttctttttgcttttcatgtttctccattgctatctgatctctattaaataagagagaatttctgcaaacataatataccaagtatcagatgcacagaaatacacatatttaaaccacacacataaaccataattgatgacactttcttttaactactaactttcaaaggtttatagatgtatctattttaaaatatactagtaggacccacataaagaaaacaatgaaagttttccaagaaatttaaaaacagattgtagacaatggagaaacaagtactgttcttggatgggaaaactaaacgctggggaaggatgctaa

SEQ ID NO: 793485 - DNA, 624 bp, Homo sapiens
tgcaacatcatcattaatgctgaactttatttccaagtccactggaggcagaagagaaaacaattcaggtaaccagcttcgcagttttactgtattcctctgtccagtgctttcccgtttctgggttttgtgatctaggtttggattagggattcatagtgggaagctccatgttcctgaaacctggtaattattttgaattaaggataagagtttcacttccctaataaaatgtcaacaacaataccttacccttcatgctttctgctctgtcttgagcatttttcatgcagtaactagtgtaataatcatgaaattctaggcgttaagtcttatcctaacaggtaaggaacsaggtctgctaagattgacctgtgctacctcatgtgtgctatctgtctgggggtgaggagtgatatcacagtctagtaaaggtcacttgaacaggccattctccctgtgatttctatttttttatgtacatcataaaagatggcaggatgctatgagactattggctatgaagctctagggtcctgagtctggtatttctagggtagggctttctgagttatggcgtcttcacctcataaacaggaataacacctctgcttcagattgcac

SEQ ID NO: 793486 - DNA, 486 bp, Homo sapiens
actgtttgccccagtggaggcttcatgaggcagcgtgagtacaacatcatgaaaaaattggagccagaatcatccagcaaatttactcttgaattcctgatcagataattgtgaaacaaatgtcttgttttaaagtyctaaatttaggaaaaattttaattgttatgggcatcacatagttctgtaaagagaaaaatgggtgacagaaacatttgtgatacctttttattcatcacaatccacaaactccctgtttgctagaggtaaattacagtaactctcaaattacaaatttttgtttgaagagtaggatatttcctattagaactactcaagcaaaaacactttcttgtttctctgtctatgaggtatgctcttaatattgccactttatttaattttcagaatcgacttaatacatttatgaaagaaaaatgcctgtttggattccctactattccgtaaaaaccccaagcttcctgtcct

SEQ ID NO: 793487 - DNA, 486 bp, Homo sapiens
actgtttgccccagtggaggcttcatgaggcagcgtgagtacaacatcatgaaaaaattggagccagaatcatccagcaaatttactcttgaattcctgatcagataattgtgaaacaaatgtcttgttttaaagttctaaatttaggaaaaattttaattgttatgggcatcacatagttctgtaaagagaaaaatgggtgacagaaacatttgtgatacctttttattcatcacaatccacaaactccctgtttgctagaggtaaattacartaactctcaaattacaaatttttgtttgaagagtaggatatttcctattagaactactcaagcaaaaacactttcttgtttctctgtctatgaggtatgctcttaatattgccactttatttaattttcagaatcgacttaatacatttatgaaagaaaaatgcctgtttggattccctactattccgtaaaaaccccaagcttcctgtcct

SEQ ID NO: 793488 - DNA, 556 bp, Homo sapiens
ataattacagaaagagcactgagtcagctattgtgaataaagaataaataacttaataaacattttatgatctacaattggacatgactttatacatccttaaaaagtggttgtgccttttttatggatgtgtcattgcagtattgtgcctgtccaaaagagaattttctacaaaaattattttaaaatagcccccctttaatttttacttaaaatatatatttttgttacgtagatacaaaaacacatagggtagaatgtcagcatacatcctgagcaagccagggataatgttggaaaacaagtaaaacaggaatacacagtttttcaaattttattggcaataaacagcccttctttaccttcagagttagtaatgatgcgtytatgatggatttttaaaaactgtatatgctaacaacatttctgctaagagaattatggttcttaacataagatagggcaaatcccagttcaaagaaagcactgtgtgtgtatggaaagcaaacagcagactggaacagatacgcatttgataagcaaaataaagtgtttt

SEQ ID NO: 793489 - DNA, 550 bp, Homo sapiens
gcatattatttaggatgcccagaatcctggaaggctgccatattgtgagtgaatcatttgctttgactgcatggacgacatgagtcatggaggataacttgtggtttgctcaaggtaacaaaacaaaaggtattattttacaaatacaaaaacagtcttaaatcaatcctgtaaggtgtgtggaactgaaagctatagactagaatatttttaaatattctgaaatctcttcatactactctctagctgagtatcagttctgtctttgttctagattatttatccacaatataatcaaatcactctgtattacaacctgttttcatcataagcctcatatcatatgtgttttgtttaaaatattatttattasatggattttattatatatgatagattttatcatactcaagtaattcatactaaagcatttgagtgtgtttcaatttgtaaataatattagaaataagtggagcaaccagctagaaacttaaatatatacatacatatattcatatacatttctgataaaatgtgtaaaaatttagga

SEQ ID NO: 793490 - DNA, 603 bp, Homo sapiens
taaaaaaaaaaaaagtgccaattccaggcacagtggttcacactcatgcctgtaattccagaatcttgggagaccaaggcaggaagataacttgagccaggagttcgaggccagctgggcaacacattgaggctctgtatgtaccaaaaaaaaaaaaaaaaaaaagaaaaaagaaaaaagctgggcatggacactcaagaggctaaggtaagaggattgcttgagccccaaaattcgargctgcagtgagctatgataacgccatagcactccagcttgggtgacagagagatcctgcctctattaaaaaaaaattatgacaattaaaaacaatacatgccaatcctcaagcctcaagctcattaaaaagacaatttgggtcatgtgagcaggcaagctttcttaaattttactgatttagaaaatacatatttattcactccataaacacttttgagtgtcaatatatgtcaaccatttttctcaataaacaagacatgcatgctttctctcgccatgcaacttacaatttagtggaagagaaacagtgaagacagtaaataaaacaggtattgtgatgactgctctgaaggaaacacagga

SEQ ID NO: 793491 - DNA, 603 bp, Homo sapiens
taaaaaaaaaaaaagtgccaattccaggcacagtggttcacactcatgcctgtaattccagaatcttgggagaccaaggcaggaagataacttgagccaggagttcgaggccagctgggcaacacattgaggctctgtatgtaccaaaaaaaaaaaaaaaaaaaagaaaaaagaaaaaagctgggcatggacactcaagaggctaaggtaagaggattgcttgagccccaaaattcgaggctgcagtgagctatgataaygccatagcactccagcttgggtgacagagagatcctgcctctattaaaaaaaaattatgacaattaaaaacaatacatgccaatcctcaagcctcaagctcattaaaaagacaatttgggtcatgtgagcaggcaagctttcttaaattttactgatttagaaaatacatatttattcactccataaacacttttgagtgtcaatatatgtcaaccatttttctcaataaacaagacatgcatgctttctctcgccatgcaacttacaatttagtggaagagaaacagtgaagacagtaaataaaacaggtattgtgatgactgctctgaaggaaacacagga

SEQ ID NO: 793492 - DNA, 603 bp, Homo sapiens
taaaaaaaaaaaaagtgccaattccaggcacagtggttcacactcatgcctgtaattccagaatcttgggagaccaaggcaggaagataacttgagccaggagttcgaggccagctgggcaacacattgaggctctgtatgtaccaaaaaaaaaaaaaaaaaaaagaaaaaagaaaaaagctgggcatggacactcaagaggctaaggtaagaggattgcttgagccccaaaattcgaggctgcagtgagctatgataacgccatagcactccagcttgggtgacagagagatcctgcctctattaaaaaaaaattatgacaattaaaaacaatacatgccaatcctcaagcctcaagctcattaaaaagacaatttgggtcatgtgagcaggcaagctttcttaaattttactgatttagaaaatacatatttattcactccataaacacttttgartgtcaatatatgtcaaccatttttctcaataaacaagacatgcatgctttctctcgccatgcaacttacaatttagtggaagagaaacagtgaagacagtaaataaaacaggtattgtgatgactgctctgaaggaaacacagga

SEQ ID NO: 793493 - DNA, 576 bp, Homo sapiens
ctgcaaaatggtataactaccttttttttttttttttgaaatggagtcttactctttcgccaggctggagtgcagcggcgtgatcttggctcactgaaacctcgaacttcctggttcgagctattctcctgcctcagcctcacgagtagctgggattacagacacgtgccaccatgccctgctaatttttgtatttttttagtagagatggggtttcaccatgttggccaggatggtctcgatctccttggcagwttcttagaaagctaaacataaattttccattcagcaatcacagttctagttaacttatctaatggcttcatataaatatagatagttacacacacatgtattcatatatatttttgtatacacaatttagtatacaagcatgtattcctttgttctgtcagcttagagggactagaaacaactatatcctgatagcaaaaatcttacctagtgttcaaatcttgatttctcattctccaaccaaaggaactaggacgtttaggaaaaaatagttaattataggactgaggcagaaaatagacaagatgagcctggaatctc

SEQ ID NO: 793494 - DNA, 620 bp, Homo sapiens
cagtctcctacttataatagtttgacttaacgattttttgatgtcatggtagtgtgaaagcaacacagtagaaaccataatttgagtaatcatgtaaacattctgtttttcacactcagtacaatactcaataaactatataaaatattaaacactttataataaaataagcttcctgttaagatgattttgcccaacttcaggataatgtaactattctgagcataattaaagtagwctaggttaagctaaccttcaggtttaataggttaggagcattaaatacattttttatttatgatattttcaaattacaatgagtttgtttcgatataccatggcttattaagatgtaactcaatatatatagtatatataaatatatatacatatgtgtgtatatatatgtaaggattcaacatatattgattattttctatttatctatgtcttgactaattgcatgataaaaatgatacaaacttaaaataaattttgaaattatctatcaattacaactttctcacattacctatgcatattttgaagcccagaaatttgatttcccaaggtcatagagctaattgacaggatagctgggatcagaaatcaagtactac

SEQ ID NO: 793495 - DNA, 597 bp, Homo sapiens
actaaaaaaaaaaaaaaaaaaagctgggtgtggtagtgtgtgcttgtaactccagctactcgggagattgaggcaggaaaatcgcttgaacccaggaggtggaagttgcagtgagccaagatcacgccactgcactccagcctgggtgacagagtgagactctgtctcaaaattaaaaaaaaaaaatcaatgaattaattcatgtagtaactacaaagtagctttgattaaagtgtcaaatgatttagtagaaaaagtagataacaagcatgaatcaatgaggaatttcagtaaagctggaccttatggaaagaataatttggaaaaaaatggaaaatataaattaagaaggtatttaatagaatcactaratttgatagatgaggggaaaatcagccaacttgaagataaagcactagtacttatccaaatggaacataaagagtaaatagagtaaaaaataaaaacaaaatagagcatccactagatggtagggaaaggtttatagagcagtactaaatggtgccaatatacatgtgatatgagttccaataggaaaagaaacaggatatagggttcaagttatatttgaagaca

SEQ ID NO: 793496 - DNA, 634 bp, Homo sapiens
ttactcctgttttacaaaggaaaaaacaaaacttggagtggtcaagtggcttgcccaaggttacttagccggtaaggggcacagccagaattccagctgtggcacgtgatctgactccagagatcaggtgtgaaaatacttcctgtactgcctctcaggaggctggacatgagggctaaataaattagaggtggtggagttttggtgactgtcagtctcatgttgtctctagcccctttgttttgttaaccagatatagacaacacatgtctagtaagaatattgtcacagactaaagagaatgggttttacaagaagacacctggggcagcataaatgattgccatagccatgacaatccaatgaagtgaatttccaagcaataagtgttctgtgctcataccaccttgcacctgaaaagcatgcattgcattatktgtattcaattaaataaaaaaaataaaaaatatactggctcagtgcctggcaaaaagtaggcacttaattgtaagatactctcatctgtacctttatttccctaatgcctaacacagtgcttagcaagtagtaggtgcttaatacatatagttttttttttttttactagtagcacttagtacttaataaaaatgac

SEQ ID NO: 793497 - DNA, 604 bp, Homo sapiens
aacacacagaacaacccttgaagaatgtacatgtgggcctaccttaaaaactatgcaattcagtctttcataaataaattaatggattaatatataataaatgaatgaattttcttcatttagccttacgagtttcaccctcatcaaatggactccctaaatcttgccttgttctcaaaaaggctgaatgcagaggtagccatgccaagaccacactgactgagttccagcaacctcactgctaactctgctttactggttgggaacaaatcagttgtcaaaattgcttgataggaaatgaartgacattggcctagttccttttggctactctggctttctccaaccgagagggacagcagtcggcctccctgtcagaaactctggcctgagataaagaaaaaaaccaccaacacagcaagatgcaaaagaagccagaggcccacctgccccaaatcattcatctccttggactgcttctgagtgtgaaactcctgccattggcttctcttccctggattaaagaccagttaaaatatggatctgtaaactcaaggtaagagcacaaaggtaactcttggtaacacttttcacatgaacacag

SEQ ID NO: 793498 - DNA, 557 bp, Homo sapiens
ttcaggccaggcgcagtggctcgcgcctgtaatcccaacactttaagaggccgacacaggtggatcacttgaggccaagagttcaggaccagcctggccaacatggtgaaaccccgtctctactaagaatacaaaaattagccaggcatggtgatgcacacctgcaatcccagctacttggaagtctgaggcaggagaatcacttgaacccaggaggcagaggttgcagtgagctgagatcatgctactgcactccagccggggtgacagagygagactctatctcaaaaaaaaaaaaaaaaaaagaaaagaaaaaagaagcctattttaaatataaaggcacaaagaaagtataagcatgtgaaaagaaacatcaagctaaagctaatcaatagaaagctaaattcactatattaatatcagccagtagatttcacaacaaagaatattaacaaaatacagtggcttactcatcaagatacaaaaatcctaattgtttctgcacctaatacccaccgctcacaataactgacagaacaaacaagcaaaaaacgagt

SEQ ID NO: 793499 - DNA, 565 bp, Homo sapiens
tctcgagctgttgacctcgtgatttgccttcctcggcctcccaaagtgctgggattacaggtgtgagccactgtgcctggcctttttttttttttttttgagacatggtcttgctctgtcacccaggctgcattgcagtggcacaatcatggtttactgcagcctggacctcctgggctcaaactgttcccccatctcagcctcccaagtaagtgggaccacacgtgtgcaccatcacacctggctgatttttttattatttgtagggaccaagtcttgttatgttgcccagcctggtctcgaactcctgggctcaagagaccctcctgtcatggcctcccaaactgctggcattacaggcatgagccmccatgcttggctttaggttatgtttttaaaatccagtctgtcaatctttggctttttttttttttttttttttttttgagatggagtatctctctgtcaccctgggtagagtgcagtggtatgatctcggctcactgcaccctccacctagtgggttcaaacgattctcctgactcagcctccagagtagctatta

SEQ ID NO: 793500 - DNA, 631 bp, Homo sapiens
acgataaaacttaagttcacaatccaaaataaggaaacatggaaggaaccaatccccacgatgacaaatcaacagatacaaacatttagactgccctccaagacacttcgaaaatagaaatggcaaataaatattataagataaatattttaaatgattaagaacctaagaggatgcattttttaaatgtgagaaaagaacactctatataaaaaagaagaacacagagtatcttgtagtggtaggcagaattctaaagacaggttggtgtttgctatcccctggttattcaatgaaacgctaatctaggtactgctatgcagaccgaattaaggctattggttagctgacttggaaacaaattatctggggttatctagaaggatccaatgtaatcacatgagcctttgaaagcagaagaggggctgrgtgcagtggctcacttgaggtcaggagttcgagaccagcctggccaacagggcgaaacgcctgtgatgacacacgcctgtaatcccagctacttgggaggctgaagcacgagaatcgcttgaacccgcaaggcagaggttgcagtgagccaagatcagaccactgcactccagccttggacgacagaggaagactctgtctc

SEQ ID NO: 793501 - DNA, 508 bp, Homo sapiens
tcatgtttttttacaaacattattttcatgtttcagatacatttcaactttgtttattgcaatttttgcttctataatactgatagaatcaaactgaaacttaagactattttatttctcatttacccctactttttttttgtttgttttgttttttgagatggagtctcactctgccgcccaggctggagtgcagtgacgtgatctcggctcactgcaagctctgcctcctgggttcacaccattctcctgcctcagcctcccgagtagctaggactacaggtgcccaccaccacgtcyggctaatgtttttatatttttagtagagatggggtttcaccatgttagccaggatggtctcgatctcatgatccacccgcctcagcctcccaaagtgctgggattacaggcatgagccactgtgcctggcttttacctctacttttatatgaagaaaatccatgctcatgtaatagccaaatacagtcaaattcatttttctctagtg

SEQ ID NO: 793502 - DNA, 649 bp, Homo sapiens
tggccgtcttctcattgtaccctcacatgcccaaagtggccaacacctctcttaagcttctttttaaaggcactaatccctttcatgagaagtctgccctcatgaaccaatcatctcccagagaccatacctcttaatascatcatcttgggaggtaggatttcaacatatgaattttgaggggaaacaaacattcaactcatagcagataacaaggcagtaaaacaattagccaacactttataaaaatcttcaatgttttattaattaatatttttaaaagataactctttttgaaaagagaaaagataaaaatattatcatccattaaatgtgggtagtgattaacttattacctcaggttaggttcctttctagttgagatttttataattaaacaaatttctagataagagtcagaaaatttaggataataaccttggatgacaaaggaagaaagttttaggatattttaaatattagtgaaattccaaataaatttaagcttagagctcactggttaccatatatgtttctctttaacacaagaaattggaaaaaatgagttaggtcaattcaactaataacatttggaaataggccaggtgccgtggctcacgcgtataatcccagcactttgggaggccga

SEQ ID NO: 793503 - DNA, 578 bp, Homo sapiens
tgtttacacacagaatttccccaaaggaatatacaagaaaatgataatagtgattggctccaaggaggaaaactgggaagtcaggggagaagttggagggagactatgttttcatacaaaatccttctgtgccttttgagttttgtatcatgtgcaggaattgcctatgtataagacaaaataattttaaatgaattaatgaagataatttttgatattaagacaagaactaaaagttagcttaatactaggaataactggccgggtgcggtggctcacacctgtaatcccagcactttgggaagccgaggcaggcagatcacctgaggtctggagtttgagaccaggcctgaccaacatggaaaaaccttgtctctactaaaaawacaaaattagccaggcgtggtggtgcacacctgtaatcccagctactcaggaggctgaggcaggagaatcgcttgaacccgggaggtggaggttgcagggagctgagatggtgccattgcactccagcctgggcaacaagagtgaaactccgtccaaaagaaaaagaaaaaaactaagaataactaactgta

SEQ ID NO: 793504 - DNA, 621 bp, Homo sapiens
attaaaccaggaaaatatagaaactctgaacagatgaataacaagcagcaagattgaaatggtaatttaaaagttgccacccaaaaaaaagtccaggaccagatgaattcacagctgaagtctatcagacattcaaaaaagaattggtatcaatcctattgaaactattccaacagatatagaaaaatcctccctaagtcattctatgaagccagtatcaccctaatacccaagccagaaaaggacacaacaaaaaaagaaacctatagaccaatgaacacagatgcaaaaaccctcaacaaaatactagctaactgaatccaacagcatatcaaaaaaaaaatccaccataatcaagtaggttttatatcagggatgtagggatgatttaacatgtggcaagtcaataaatgtgatacagcacataaacagaatcaaaaacaaaaatcacatgatcatctgaatagaagyagttaacaaaatccagcacctctttatgattaaaaccctcagcaaaatcagcatagaagggacatatcttaaggcagtaaaagccatctatgacaaacccacaaccaacattacactgaataaggaaaagttgaaagcattccccctgag

SEQ ID NO: 793505 - DNA, 504 bp, Homo sapiens
ggggtacaagttcttgcagtcttgtactcttcaaaaaggccactacaggagaaacgaaacaaaacaaaaaacccaaaacaacaacaaggcgaaagcaaacaacaatgaagaaaactaaatggaaaaggattctttgggcttcctgagtcatccacttcctttttccaagctgagttaatatccctagtgctacgtgcatttgtaaaatttcyggtaatgtaaacactgttctctctcacccattctcttacagtcatatattttgtttttcatatattcaggcaagaatagtagaaaagtgctgttaagtttttatatgaattgccttctgccagttagctggatgtacattgccctgttgtgttaaaagatttcacaaagccacatgcatgcttggatttatctgggaaaagcaaaagagttcacttgctgttaaaaaaaaaaaaaaaaaaaaaaaagagccaaaggtatatagagaaaaagttgggctagtttttatttaat

SEQ ID NO: 793506 - DNA, 564 bp, Homo sapiens
acagggtgtatttgggaaaatgcagacacatgcctgagggctatgcaggtagttaggagaactgggttctagtctcagctttgagattacctccctgtgttgattaggtgggtattattccctccaggttcatgtataaaaggaaggggctgaaytgaaaagatctatctactctgcttctttgaactttatcttcctcatccgtacagtggaggcagttacatccaccttgcagggtgttctgaagattgaatgagatcgtgtgtgtaaatcacctatagcagtgtccagcagggtatatgtattcagaaagttctagccttcctcctttctcccattttaagtttcctccaatttagaacactttgtaatcaggaacacgtggtgatcttcatgagcagtgtcatcaaataaaactatgattgcaatagatacacctggcatccactccctgtgagtgacttgactcgggattttttgaagtgagggtcaaactgcagctcacctttccagtgttgaaagaagccccatagaaatcacttgggatataaatatttatgcacc

SEQ ID NO: 793507 - DNA, 570 bp, Homo sapiens
caaatgggttggaggaaaataagtctcaaattaatattcctattttaaaaaacgtgtcagcaggacccaagctcttcaacttgcaaggccaaagccatgaagcaaagatttacctgtctcaatatgagtaaagacaatgtagctgatgaaacttttggtaggtacattcaaatctaacctaacaccaaaggaccatggcagaaatatggtgttctttaattataattacaacttgaccgaagtgaagcaattcctcgaggataaagaagggctcagtttttccctgartacttttgatgcatgtgatttttacatatagttataccaggaattactcatacctcttcagattaccaatatgaaaaatctaaaccaattcttctcagatctcttcctctgctttctgagatttgtgaggcttagggtgtatttttcacgtttgttttatctttagcagccaggtacagcccatcacggactctatggtctataaagaggggggaggtttcagagcacgttcctatacctctcatttgatggtcaaagtaaccttgtgaggctgagtatgaa

SEQ ID NO: 793508 - DNA, 616 bp, Homo sapiens
caacatattttaagggattgtcatacatttggacaaattgttctccagaaagatggtacaaattgaccttctcatagcatggtattagatcatccattttctcatacccttaacggaactgcattttatgtttagaaaaaaattttttaataaattgaaggtgaaatggtattctcttgttttataagagattttcataatgtctgctctaaatrtgaaaaggatgatcccaaaaggcttggttatgtttcctgaagagcacgtgcccaggaggctgatttgtagagaagcaatgtggtttttatgttgctgtagaatttgcacaggactttgctatgttcctgaagtccattcaatgtcaatattgttataccatgtttatcttcttaggtctataatattccatgtttatgcttccagtttggttttatgttaatcctggaaataacagagcaacagtatgcactatttaataggttgttttaccctaacccttgctctctgaaatcattgttttttccttttcatttctctatttctgcctagtacctttcaaatgttcaagatcctactcagaaagaaatgcaaagttcatagcggatattaagataataag

SEQ ID NO: 793509 - DNA, 621 bp, Homo sapiens
tagctagaattcaaggggcagagatgagagctccacagagtgaaaattctagaaatttgcagagggttgcccctaagtattcagccgagcactaatcagtgcatgagtgtgaaaaaagcaggcaaggctgggggaagagccatctgaaaggatgaaaggtatagtgcccagcactcaaatagacctgaaaacagtgcctgtttccattagccagactggaaaccattaagactcgcagggcattgggtagggtatacaaaagggtcttgtcgagcaagtggcttctgttgcctgttatcaggagtagaagtctgagygcttctgtgcactgcatcttgctatcagagttgccaaggaaaacacagcacattcaagcactaggaacgatactttactcagtccctcatggtgggtgggtctctcccagcaggcatcctgcacgcactcacctcttgcgctgcagcagaagggcccacacccactgttgaagctgaccttgctctgcctcttctatatgtgagtaaagtttttttttcatccagtgcttaatggcattatgggtttgttggtggtggtggtggtttgtttttgttttgtttcatttggtgactcagataaata

SEQ ID NO: 793510 - DNA, 621 bp, Homo sapiens
tagctagaattcaaggggcagagatgagagctccacagagtgaaaattctagaaatttgcagagggttgcccctaagtattcagccgagcactaatcagtgcatgagtgtgaaaaaagcaggcaaggctgggggaagagccatctgaaaggatgaaaggtatagtgcccagcactcaaatagacctgaaaacagtgcctgtttccattagccagactggaaaccattaagactcgcagggcattgggtagggtatacaaaagggtcttgtcgagcaagtggcttctgttgcctgttatcaggagtagaagtctgagtgcttctgtgcactgcatcttgctatcagagttgccaaggaaaacacagcacattcaagcactrggaacgatactttactcagtccctcatggtgggtgggtctctcccagcaggcatcctgcacgcactcacctcttgcgctgcagcagaagggcccacacccactgttgaagctgaccttgctctgcctcttctatatgtgagtaaagtttttttttcatccagtgcttaatggcattatgggtttgttggtggtggtggtggtttgtttttgttttgtttcatttggtgactcagataaata

SEQ ID NO: 793511 - DNA, 579 bp, Homo sapiens
ctcttgtatttgagaactagggtttctgcctctcttttacatgttctcttttattttaaatagtagaagattttctgacagtataggaatttggactattgtactgcactgtactctgtatgataaaataccttgtcaggagcgactggatggctcaggggattggtaatgggatatatagagcctttcacctgtaggtcattggcttgaattttgtccaggttggcagtgactaaaagtcattaacatctcatgactgcttggtggcctatgtgaaatgagtttcttaatttatttatttaagtccatatayagtacctatggccagggcatttgggcatctctcttgcttttactgatgcattccaccagatctacactcattttagttctcaagattagtgatgaactggagtcctcctacacgaaataaattgattcacataaagttcaaaccaataccgagtaccgccacaccattctccagcacagaccggaacgccgcacgaaagctgattcgatagtaaaggagccatgggttgcggagacccaatgtccaattctggcttgcttagtctt

SEQ ID NO: 793512 - DNA, 630 bp, Homo sapiens
caatcttattttagaaagaaatacaaaaaaccccaccaaacacatacatacctacatacacaggaacaggaacagaaactaaatctaggagggtacgtagtgcatatatatgaataatggttatttctagatagttgggatggtggtggtctttactcctttttccctgaattcaggaagaaggagtaaaacacaacacttttacagcctaatatagagaatattactatttgccttcaacataggaagagttttaaagttcctccaggatttcttgagagctgcttttctgtttactaagcatttaaaaggcatggcactgaaatttaagaaaaagatgasgatagtactcataatcccaagatggcagaatcattaagagtaataatgaaaaggcacaagtagatctgcaaaaagaaaaccctccaaatgccattggtcagaggttctgtgctcctcatactgcgggagcctgcaggacagcaaagggcagtctcttccaaaatgttccagtcaacccctaaataggcactctcggactttataacattttaaacaaggccactcatttatcttttgcctgacttaagatttctctgagataatacattgactaaactgttaaaaaat

SEQ ID NO: 793513 - DNA, 607 bp, Homo sapiens
atccctaatgtacttacttttctctagaacacttatcaacatctgatatacttaaagaaaagtataaatattgtgagtgtataaaagaagccattaatttcatttagactaatatatatgtttttatccatactcatacatttttatgtaacaatttaaaatatcaattataaatgctaacatcatgtttatagtattaattcaagcattttgtttcagtttttctataattcccttcttctaaattatttaaacatataaagcatttaaaatagaatatcactatataagattcatacttttatactataagagtcaacatctaacaacatgayttattctccattttataaactatctcactttaaaatatgagggcgaaaatgagatacattattctacctggatttcaaattatcatattcattaaactggaatgggcttatttttttcaaaaataaaaagtaaaaaagagaaagaaatctaaaatcatcctctaaggtttacagtcttatatgtgtgcttaatatgctcacagtttctgaagattttcatagctaaatatacaatttctggagatctcataggtaagtatccccaaaaacaa

SEQ ID NO: 793514 - DNA, 559 bp, Homo sapiens
attaaaggggagataataagtaacggggaattattatgtaacgggcacacagtttcatttcaggatgatgaaagcgttctggagatagtgatgatggttgcataacaatgaactgtatacttaaaaatgattaaatggtgaattgtgttatgtacattttaccataayaaaaaggggggatgtatattactatgatattattttaataatcatttgcccaaataatattttgtatattcaatgtaaaattatagacttctagtagttaacattaaattattaataaaatagttacaaaaataattaccgagttttatatttaagtatctggtttcctgaaaaaacaaacataataccaaaaaaacttgaaaaataaagttattttaattttagcaatatctttaatccatttactctaactctgcaaaccgtctgcctataacacaaacacttaaagatggctataatcaacatatccatatgtctttaacatttacacataaattcacctccattttctcgacagaagcttgtccgcacttcctgattttcaactaag

SEQ ID NO: 793515 - DNA, 499 bp, Homo sapiens
gttaatggcttttcagattattgacttgaatctagaaaatctaaaaaattgtagtttcaagcttttgtgttgctttccaactccaatccatatgccttatctcaaagaaacgacctagttataaacatctgaattaatcttttgtagtctgacttgtgaacacattttcttatatgaaaaagacatagcaaattgagtacaaaatattaacttaattactataaggggaaaaaaatcccaatgctagtagcacctccattgctcttcctttcatgccagagggctctaaaacgacatccctttggaagaaawacaaatggccccagcagtaaagtcaatgaaagggcccaatgaggttgagggaaaataactataaactattttcctgaaattatattcccttatataaacatgggcctatttgcttagtctgttttcagactgtaattacatggtattaccacatgacttaggtgattcagctcttgaaagtagtctc

SEQ ID NO: 793516 - DNA, 570 bp, Homo sapiens
aaaagaacaactgggaatctgtctcttaattttaagagagaggaaaccactgacagtcatctcccctgaagacctgcacatcttcctagccaagattgagtcatctgtcccttgtaaactcaatcactgacaaatggaatagattcccattaccagcttagactaatcagaatttatccctgagggtaggctccaaaacaaaactgggaccctaaaaacaagaaagaacraaagaatgactacaataccctacaagaatgctacatacaacactctatgttttttttaaaaaaacactcaccctcttccattattctctattataacacaaattggcttatttatctatttcctatactaaaaggtatgtatcagtagagcaagagctaaaagtatacatagcacctaaaacagagcaagctctttattagtatttgttgaataagcccatacatattatccaaatttatatttatttaatacctatattcaaaatcccaagcaaaataaaaattaaatcaggccttataagaattagaactaagattcaaagtcattttcatatgttta

SEQ ID NO: 793517 - DNA, 616 bp, Homo sapiens
tcttatgtatgtatctatacatacatacatacataacactatttggaacttagaatcttttattttgattttcatgatggcaatcacaagcatttccctctgttattaaatattcccagaaaatgttattctgatggttggatagtattttgttgcatgagcatctcagattgtaatattgtaatgcacatcagtgaacataaatatttggcctctgattggttccttaggatatgccccagaagtatattgtaaaagctgtgactatttgtcagactctcaacatttattmtgaaagtgtaggacagtagcttatccattagtaaacattcattaagccaaaagccattcacttggggtgtggggctgggggttaggttgataagaagcaagaggagagtaaagaacagaaaaatgggggaaagcttctgctgaagaagtgaaggagacaggatgagctgggaccctgaggcaccgacaggttaatggcctgtgtttttgatctcctttctttggcagatccatcaaatcttcctttacatatcccccctcatagctctggctaattctcaaattaggatttgaagtggcatgaacagtctagagaaaggagagg

SEQ ID NO: 793518 - DNA, 599 bp, Homo sapiens
aagagctttttagagacacagattcccaggccttacttctgaggattttaattcaktatgtctagaatgaagtgtaggtatctgtcttttttaaaacaccacaggctttctgacctgtcacacagttggagaatcactgcattatgttttcaggttccttgaggatcatctttacaaccttaacatctattacggtgcctagaactgtcagggcttaattcatattgaacaaacagatgaataaatgtggggtttgattgaaataataataatagagataatagaataatagaaataataattttttgattaacaagaatagggcaaaccagaagaggaatttattggatcatggagaaagtaatgaatctggtgttagacttgttgcatggaaatattcagcaggaagctgagaatgtggaaatattatttgggagatgtagaaacattatttgggagaggtcatgagtgagcctgggaagttgaatacatttcccagtcactgtagacagaaaacagaaatggacaaatagttgaacctggggaatccccacatttacagaacatgaaggacagaagaaaataatacatcaactaat

SEQ ID NO: 793519 - DNA, 636 bp, Homo sapiens
atgatattccctcttccttcacttcctttctgctctccacccatcccatactgtagttcctctatgacacctgccttgatgcccccaagcaggctcagatggtttttctttatggtttttgcatcttctacaaacacctaatattgctatttccacattgatttgtaaccagttattttttccgtttagcttctttagaatatatatgtctctatgccttgcttaatatcaagagctttttagagacacagattcccaggccttacttctgaggattttaattcattatgtctagaatgaagtgtaggtatctgtcttttttaaaacaccacagsctttctgacctgtcacacagttggagaatcactgcattatgttttcaggttccttgaggatcatctttacaaccttaacatctattacggtgcctagaactgtcagggcttaattcatattgaacaaacagatgaataaatgtggggtttgattgaaataataataatagagataatagaataatagaaataataattttttgattaacaagaatagggcaaaccagaagaggaatttattggatcatggagaaagtaatgaatctggtgttagacttgttgcatggaaatattcagcagg

SEQ ID NO: 793520 - DNA, 587 bp, Homo sapiens
gcaggcagccaacctctgccacatcaaatatttgtgattgttcatggaaagcatgatctctgcaaagatttaagtgctccatgagaaataaaacacctaatagaatactagatttatcatcagaaaattcaagaatgtgcttgttttttgtttgtttgtttgtttatttgtttgttttgagacagattctcactctatcacccaggctggagtgcagtggtgcgatctcggctgaccrcaacttctgcctcctgggtttaagcaattctcctgcctcagcctcccaagtagctgggattacaggtgcccaccaccacgtccggcaaatttttgtgtttttattagagacggtgtttcaccatgttgaccaggcttgtctttaactccttacctcaagtgatctgcctgcctcagcctccaaaagtgctgggattacaggcataagccactgcgccccaccgaatgtgctcgttttaatacataagcactgaattttagttaacattagaatgaacttaatagatcattagtaagtagcccctagtcatatataaagctatgtctgtatgcccagtgaccattttcta

SEQ ID NO: 793521 - DNA, 610 bp, Homo sapiens
ctcagtcttctcctctgtgtctctgtatcaaatctcccacccatttctcttacaaggacactagtcattggatttaggccctactcaaaatccaggatcgtctcgtcttgggatccttaacttgattatatcggcaaagaccctgtttccaaatgtcacattcacaagtaccggggttggkacatggacataatttggggggccggggagacacaacgtaacccttcacaacaagctttacttgttattacttccaaaggaagtagttactaaaaccaagcttttgtgctgcccaggaggccagggacaatgagactggaacttgaattcattgatctaactgtgaacctaagaggagtagcagagctctattcagatgagtgcttttgaggtattctatccagagttctttctaaagtgtctctgatggagagacccctttttatattttttctacatgctacattcttctacttaaaaatattttttcattaaatagtttaaaatggatgaagttttttagaattgtggaatcatcattacacttttctttctcttacagcaataaatcaaagaaagacaaaacgttgcctattttgattgcccactt

SEQ ID NO: 793522 - DNA, 610 bp, Homo sapiens
ctcagtcttctcctctgtgtctctgtatcaaatctcccacccatttctcttacaaggacactagtcattggatttaggccctactcaaaatccaggatcgtctcgtcttgggatccttaacttgattatatcggcaaagaccctgtttccaaatgtcacattcacaagtaccggggttgggacatggacataatttggggggccggggagacacaacgtaacccttcacaacaagctttacttgttattacttccaaaggaagtagttactaaaaccaagcttttgtgctgcccaggaggccagggacaatgagactggaacttgaattcattgatctaactgtgaacctaagaggagtagcagagctctattcagatgagtgcttttgrggtattctatccagagttctttctaaagtgtctctgatggagagacccctttttatattttttctacatgctacattcttctacttaaaaatattttttcattaaatagtttaaaatggatgaagttttttagaattgtggaatcatcattacacttttctttctcttacagcaataaatcaaagaaagacaaaacgttgcctattttgattgcccactt

SEQ ID NO: 793523 - DNA, 654 bp, Homo sapiens
ctgtaagaccttgcaatcaaatggcaggacttagggttcttaataatacataaaataaaagcataaattaaataaggaattaatattatgtacaatgagtaaagtgcattttgagaggcactatttgaagagaacttcaaaagttgcatatcaacttcatatgcagaatatttttctgaggggttcagatgcttctacacattttaattggagggctttcaaatattctagacttagaatgcatattaacctcgtgtcttctcccctacagaccacatttgggtagtttttccatgctcttgattcttttgtttctaatccaataagaatattgaggaatagaggtaacaaaggatagtgaagatcagacattttcaagcgattcatccaatgaagctttactgggtacctgccaagtgagtgaaaccctgagatgtatatattctagtgccgaggacagagttccacacctagcagatatttagtaaatttttgttgaatgaatkaagtgaatgaaagaatgaataaatgaaaggaacggtcttctctgaggtatctggatgtgacgccaaaagggtcagaaccacattttcaattccgcttgataatttctagaatataatagacggtgcgaacaaagagaaaaaaaataaa

SEQ ID NO: 793524 - DNA, 513 bp, Homo sapiens
gaatcgtatcagtaatttaagaacacctacagacctggatgcaaagcattaatatgtgaacaaaccaaagcgtatagttgtaaataccagatgccaatatatagaaagtgtttttccctttaaaccatctttactttgaacaagtaggtattacgaattctactaaactaggtaagggctagttatttactgtcttctttctcaagctgatttagttggctataagaggaggctggaayattgaggaaacagattttgcaaagagatgatgtgggaatacctagtccctaggaagggaattaaagttagtatgaaataacattaatatgaatatatatacatagatatatttttttctccattcttaacagccatcagcaaaaattatgattcctcacattaaatatctttccagcttttaatagattttgggagatttcatgcaaagtagggataatatgcaacattgtgttagatgcagagtggtaagttacttttagtgtaagtttcact

SEQ ID NO: 793525 - DNA, 600 bp, Homo sapiens
gtgcttgcatggtttcaccctcatttcttaactaatcttccttgtgacatttgtactgtacctgatggcatttgtatcataaaacagaatataaataaatacatacactacaaactacagtttgttacagtgatattaacaagcacacacatttgtactttattgagatagcagctctctgtgatactgggaaaatcaagatgaaggttgcttcagagtctgctcatagggaaaatacattccctggacaactatgaagaggagttgggatttatttayttatttatttatttatttatttttttttttgagacagaatctcgctctgtcacccaggctggagtgcagtgggctcactgccacctttgcctcccaggttcaagcagttctcctacctcagcctcctgagtagctgggactacaggtgcatgctgccatgcctgcttaattttttgtattttagtagagacagggtttcaccacgttgccaaggctggtcccgaactcccgagttcgggcaatctgcctccctcggcttcccaaagtgatggaattacagatgtgagccagcgtgcccgaccaggagttgggatttaatac

SEQ ID NO: 793526 - DNA, 614 bp, Homo sapiens
tgagaaagggtattaaagtattaaactactcaaagaacaccccaaaatattttcattaataagattaataatttgcactgcatttatctgaaaaaaaacacacacacacagtgctacattaatcagtttggcagttgttttaaaaggataatgtcttctgaacaacctattagaagagagagacatgatgcagacttggaggttcagcatttggaaaccatccagagcatcacactgaggagccatagagtaggcttttgtggcatagagccctagaatttttggaaattctaacttgagtgccaaaagagctgtggttatctgtgatttcagaggcagctcactggrttctctatgatgtagaaagcttgaaccctagttctcacggagatcatcagctccacaaaattggctggagaattattattattgcagagaaggagggcaattgtcagggtttgttagtctgtattctataatagtctgtgtattggtcagggttcgccagagaaaaagaacacacaggagatacacacacacacacacacacacacacacacacacacacacacgctttaatatgaggaattgtctcaagaaatatggaggccaag

SEQ ID NO: 793527 - DNA, 614 bp, Homo sapiens
tgagaaagggtattaaagtattaaactactcaaagaacaccccaaaatattttcattaataagattaataatttgcactgcatttatctgaaaaaaaacacacacacacagtgctacattaatcagtttggcagttgttttaaaaggataatgtcttctgaacaacctattagaagagagagacatgatgcagacttggaggttcagcatttggaaaccatccagagcatcacactgaggagccatagagtaggcttttgtggcatagagccctagaatttttggaaattctaacttgagtgccaaaagagctgtggttatctgtgatttcagaggcagctcactgggttctctatgatgtagaaagcttgaaccctagttctcacggagatcatcagctccacaaaattggctggagaattattattattgcagagarggagggcaattgtcagggtttgttagtctgtattctataatagtctgtgtattggtcagggttcgccagagaaaaagaacacacaggagatacacacacacacacacacacacacacacacacacacacacacgctttaatatgaggaattgtctcaagaaatatggaggccaag

SEQ ID NO: 793528 - DNA, 586 bp, Homo sapiens
agcattttgaagatcgttcttaggtacttgaataatatcttgatatattgactcctttatcattatgaagtgcccagttgcttctctgtcttttggctaagatcatgtgtatgaaatgcccttttttatttctaatratattccttactgtgaaaatctactttttttaatatttatgtagacactccagctttcttttgattagtgtttgcatggtaggagtatttcttatagcgtacgtctgctaacaattttctcagtttttgtttctctggaatgtagtttaccatttataggattcttggttgatttgggtgttttaaacccccaccactttgaatatgtcattctgctgccttcacgtttctgttgtttctgatgacaagttagccagtagtcttgaggttgtttccttttacataatgagccaattttcttttgcagttttcagtatttctttttttctttggcttttagtagtgaatgatatgtctacatgtagttttctttgtatttctcctacttgggctttgttgagtttcttgaatcagattattatgagttgtattagttgctttgaagtatt

SEQ ID NO: 793529 - DNA, 584 bp, Homo sapiens
aagagacaatgggagtgagaagccattttccattaatttagatgaaagctgatgaggtgaggggcagccatctatcatttctagggggttttagtactagtatcctcccccaactgcctcccgattcactattctataartgtgggggtcaagaatggttggcaaatcaccactttcaacaatgtctatttaggcttaaacatggccctcctgcatcaagttgataatgaacaagttgctaaacagacacatctgtgcttaggagacctgtggcaacttgccggcatggcctagggggccttttgtaattggtcctcgccttcctttctggcccaagcactggccactccctattctgcagctataccaggcagcctgcacctctttactccagatggggtcaaaggcaagtcatggctacattttggacttccaaggattggtttcctacttctagcctgcaagtttgagatttagtggttctaggatggatgaggtggtcctgggatgataaccaactcatgcagccaaaccttcaagacacagaggaaattcaatgtcatcatttaaggcaggagacccct

SEQ ID NO: 793530 - DNA, 622 bp, Homo sapiens
ggatataattatctgtggatctcttgcatttctgtattttttttgtttttgtttttgtttttgtttttgtttttgtttttgtttgagggagggtcttgctctatcactcaggctggagtgtagtggcgagatctcggctcagggaaacttccaccttcccggttcaagcgatcctcccacctcagcctcctgagtagctgggattacaggcacgcaccaccatgccctgctaaattttgtattgtttgtttgtttgttttagtagagactgrgtttcaccatgttgcccaggctgttcttgaactcatgggctcaagtgatccacctgcctcagcctcccaaagtgctgagattacaggtgtgagccaccatgccgggctgcatttctgtatattttgagtagaaacactgcctgtcctttgctctggcctatcttttgaaggatgtttctgtagtgaacaaacttgaaaacagagatcatatgtaccttgggagcaaagggtaggtttgcctacatccttggaagatagagataataagtaatcctgaaatcaagggcgtgcatgcttactgccctttgttcaggtcccctaagctcagaattcctgtcctaaaatgcaac

SEQ ID NO: 793531 - DNA, 649 bp, Homo sapiens
gtcacccatgccttgcaccatagccaacagaggtgagaaacatggcttctgttccaggtgatccgctgtataccctgttctgatagttactgagtacttaccaagtgtatgccacctactgactgtcttacaaaaggtgcaacttggcatcataagaacatgggctccacagtcaggcataggttcaaatcccaggtctgccacttagtagttgcgtgaccttgagcaagttaccaacctttctgtgcctcagctttccatctgtaaaatgggactgacmacaatagtacctccctcataggattgctctgaggaataaatgagttaacagaaaaacagtgcctgggatgtagttggggccacacaagtattagctgtcattattcatgtgcattagttcatcgacttctcacatcaccccattttacagatgagaatactgaggctaaagagacatagaagcccagacctaagcatctccagcatccatgtcctcaaccagtgaggccatgcatggcccaaatcccctcagccatgcagctaggcctccattcccaacgcttaaactgggcaaatcttccacatccttatattgatatcacctatcattttagtaggaaatgagctctgagttgattcaaaggtagga

SEQ ID NO: 793532 - DNA, 649 bp, Homo sapiens
gtcacccatgccttgcaccatagccaacagaggtgagaaacatggcttctgttccaggtgatccgctgtataccctgttctgatagttactgagtacttaccaagtgtatgccacctactgactgtcttacaaaaggtgcaacttggcatcataagaacatgggctccacagtcaggcataggttcaaatcccaggtctgccacttagtagttgcgtgaccttgagcaagttaccaacctttctgtgcctcagctttccatctgtaaaatgggactgacaacaatagtacctccctcataggattgctctgaggaataaatgagttaacagaaaaacagtgcctgggatgtagttggggccacacaagtattagctgtcattattcatgtgcattagttcatcgacttctcacatcaccccattttacagatgagaatactgaggctaaagagacawagaagcccagacctaagcatctccagcatccatgtcctcaaccagtgaggccatgcatggcccaaatcccctcagccatgcagctaggcctccattcccaacgcttaaactgggcaaatcttccacatccttatattgatatcacctatcattttagtaggaaatgagctctgagttgattcaaaggtagga

SEQ ID NO: 793533 - DNA, 618 bp, Homo sapiens
tcccctcagccatgcagctaggcctccattcccaacgcttaaactgggcaaatcttccacatccttatattgatatcacctatcattttagtaggaaatgagctctgagttgattcaaaggtaggaaatcctcctacttaaaaacagttcgtttcataaaaacgaaaacccttgttaattaacactccattaacaggaaaatgatatggtggcagactgagggctcagggttccaagttttgactcagtgttgtcaacaagcacctctttttgcccagggaatatcagagaattgttcatacagagacagcgaccacagatggggcactagtgccttcagctgcaaaaggtcgtctggcaggaagcatgttggtcccctggcagtttcttgggccaygtgacataaccgccaggttatacttctgcaattacagtccccagggacctgccgcatgaaacagacattggttgtgatcctgtaaaaagccgcaagcagtggctctttcagtacaaggaaacccttgggacagaaaagtttacttttgctcaggctttatggtgacagccagcgtgatcaacaggaatgctgcagttgggtgacgcatgaggctcaggagc

SEQ ID NO: 793534 - DNA, 623 bp, Homo sapiens
ggttgttgctgaacttcctttacacctcttgttttgaacacagtgagcaaacaacgtctaatcttctggctgtggagttccaagtacaccacaaggcatcgggacacacctttaccccagctgctttgtgtggttgcaggttaaccagacatgcagctaggagttcacctaaaaccttcctttccccggtacataccttggtgttgatttgacagctggakgctgagtattgatcccagtgttcagggatagttacttcattaagacttctgagatcccccatttgcttgaagataaaaacaggcaaaggtataaacagataaacagtcacacaaataagtagctgtgtgggccattacttttaaagcatagtagatgttatttgtgtttggagaagcttaatgatacactcaagaatccaatagtagaaactgtttgctttcaggaagaaaacgttataccaggaaggtatgtttgaagaaaagaactatataacagcgatccacaatacacctgttcatttgtagcataatagttacacctgctgccctggggcttttttgagatttcagtctttggtgtaagacacacatacacacatgtgcacacacaatggtaagcat

SEQ ID NO: 793535 - DNA, 623 bp, Homo sapiens
ggttgttgctgaacttcctttacacctcttgttttgaacacagtgagcaaacaacgtctaatcttctggctgtggagttccaagtacaccacaaggcatcgggacacacctttaccccagctgctttgtgtggttgcaggttaaccagacatgcagctaggagttcacctaaaaccttcctttccccggtacataccttggtgttgatttgacagctggaggctgagtattgatcccagtgttcagggatagttacttcattaagacttctgagatcccccatttgcttgaagataaaaacaggcaaaggtataaacagataaacagtcacacaaataagtagctgtgtgggccattacttttaaagcatagtagatgttatttgtgtttggagaagcttaatgatacactcaagaatccaatagtagaaactgtttgctttcaggaagaaaacgttataycaggaaggtatgtttgaagaaaagaactatataacagcgatccacaatacacctgttcatttgtagcataatagttacacctgctgccctggggcttttttgagatttcagtctttggtgtaagacacacatacacacatgtgcacacacaatggtaagcat

SEQ ID NO: 793536 - DNA, 621 bp, Homo sapiens
cagcctcgggaggaaaggttgaatccgagagggactggactcaaggacaccaggcacaaccaagacccggcgtgtgacacaccatagaaacggaattaaaagacactctgtgctttatcgtcattgttgttttgtcttgctgtcacccaggctaaagtacaatggcatgatcgtggctccccgcagcctcaaattcctgagtagctgggaccatgggaacatgccaacatgcccagctaattttcgtattttgtagagatggggtctcactatgttgcccaggctggtcttgaactcctggtctcragcagacctcctgcctcagcctcccaagtggctgggactcctgagtgagccactgcacccaactgcactctggattataggacaccacagcctccttccccctcttagatcccagaatgctggcaatgagggttctaccccatgggcagaagattcgaggattcatcattagggaagctgaccagttggagaaaaaagacttatagagaatgacctagtgggttccttaatgaaacatccagctctccactgaatcacctgacaatgagcccattggttgacaagcttcactcatgcacacgtcacttgagtgtc

SEQ ID NO: 793537 - DNA, 615 bp, Homo sapiens
tgtttatcctgatccattaggttaaaatggccagggagagcatcctaaaagaggaaaataaagttactagaggctgacaagcagcctcccgaacgtgtgccgactgcaggaagagccaggcctgggcgacttgcatatcctaggctggctgggggcacctgatacccgaattttgtaaccrgggctgccagtggccctctttacctcttccttcctgcctctcagctgccactctgagcatctagaccctgcagaacagagattcctcaaggtataaagcccaggccacagatgcccccggccctaaggatacactgaactccttctatgcagccatagggaggggacttgtctttccccaacatgagaagcttaactggtctcttaccctttggtagaggcaggcccaggtgtggccaatggagacaaaggggtcccccagtgttcctgcctaacctagggtcttatggggtggaggtggggccttggaactcaccaatgtgcatgatgatctggcaaaatcatccagtcagtttcctctatctcgatagaaaacattttccaatctccatattgtaagacttgggataatttagcaaaggatctcttttggtt

SEQ ID NO: 793538 - DNA, 626 bp, Homo sapiens
actctagtttcctaatcataggtatcaccgtagagactcaatatgtatttattgaatattgttcagaggtaaaggaagacgtcatgtcattcccattggaaggtgtgtagaaggaagtgggtcaatgcaacacatcccaaaagaagtcctctggtgaagcagtgctgtcatgtaaggcactccgcatggcaggcttgcaccacgtagggcctgggcaggtggttaggggtacagaggagttctttcctgttctccccatcatcactcacattgcccatgtctggaactccacattcagaaatgtgctctttggcagatgtggccaaayagggagtgcagtttctggccctgaattaccatgattaggtcagcatcttcagcagcagggccatggcgcccaagtgtgttgtgatccattgtgaggaatgcgcttattgctaaaggtaactgagcatccgaggtttcccagaaatgggaagttccctaccttacaacccagttcatttcattccttggaaagatcttacatataatgggataaaatctgttcctctttaatctgttcctgtttcttgattttaggtcttcctttcacaaccagtgaatgcaaaattgtcctccatcta

SEQ ID NO: 793539 - DNA, 637 bp, Homo sapiens
gccacgtgtaagaatagagttatcttgcaggtggaactgagacagcactacgcttatatctctctggatgtgcttggagggtggattctgacccctgagcaagataaggatgaaatgtgctagctagtgacttagaatgcactgtttaaagtttgaaactcagctagagtttaaattgatggtttstacctggttcaaccacttatagagcccaggttgtcttgaccaatggggatataaaatattcagtaaactcaagcctgaccttcttgagactgaaatatgttacagatatcttgattcttcatatccaaagatgaggtgtatataatgtgactgcgaaatgacactgatgcctgtacctacagacatctccaactgtttgtgcttgctttctttcatgtgtctcatcttttacattgattaaatctttgtacaagcatactgtgaatcttcgtgaggcattttaattatctaatcccgtgtaaatcaacacaagcattaagtaaatcataaaaagaaacataactcatttctttttaatacgcatattttatcaattatgtttgtgataattaacatatgtgtaattcaattttaaaacacattataaatgtaagcttttatgaatgattga

SEQ ID NO: 793540 - DNA, 637 bp, Homo sapiens
gccacgtgtaagaatagagttatcttgcaggtggaactgagacagcactacgcttatatctctctggatgtgcttggagggtggattctgacccctgagcaagataaggatgaaatgtgctagctagtgacttagaatgcactgtttaaagtttgaaactcagctagagtttaaattgatggtttgtacctggttcaaccacttatagagcccaggttgtcttgaccaatggggatataaaatattcagtaaactcaagcctgaccttcttgagactgaaatatgttacagatatcttgattcttcatatccaaagatgaggtgtatataatgtgactgcgaaatgacactgatgyctgtacctacagacatctccaactgtttgtgcttgctttctttcatgtgtctcatcttttacattgattaaatctttgtacaagcatactgtgaatcttcgtgaggcattttaattatctaatcccgtgtaaatcaacacaagcattaagtaaatcataaaaagaaacataactcatttctttttaatacgcatattttatcaattatgtttgtgataattaacatatgtgtaattcaattttaaaacacattataaatgtaagcttttatgaatgattga

SEQ ID NO: 793541 - DNA, 637 bp, Homo sapiens
gccacgtgtaagaatagagttatcttgcaggtggaactgagacagcactacgcttatatctctctggatgtgcttggagggtggattctgacccctgagcaagataaggatgaaatgtgctagctagtgacttagaatgcactgtttaaagtttgaaactcagctagagtttaaattgatggtttgtacctggttcaaccacttatagagcccaggttgtcttgaccaatggggatataaaatattcagtaaactcaagcctgaccttcttgagactgaaatatgttacagatatcttgattcttcatatccaaagatgaggtgtatataatgtgactgcgaaatgacactgatgcctgtacctacagacatctccarctgtttgtgcttgctttctttcatgtgtctcatcttttacattgattaaatctttgtacaagcatactgtgaatcttcgtgaggcattttaattatctaatcccgtgtaaatcaacacaagcattaagtaaatcataaaaagaaacataactcatttctttttaatacgcatattttatcaattatgtttgtgataattaacatatgtgtaattcaattttaaaacacattataaatgtaagcttttatgaatgattga

SEQ ID NO: 793542 - DNA, 430 bp, Homo sapiens
aggcaaagcatgagatgctaactttatttatttatttatttactttttgagatagggtcttgctgtgtcatccaggctggaatgcagtcgagcaatcacggctaactgcagcctagacttcccaggttcaagcgatcctyctgcctcagcctctcaagtagctgggactacaggcgtgcaacatcatgcctggctaatttttttattttttgtggagataaggtctcaactatgatggccaggctagtctcaaactcctgtgctcaagcgatcttcctgcctcagcaccccccaaagtgctggaattacaggtgtcagccagcatgcacggcccaagacgctaactttaaatcacttgttgctcaagtccaatatccctgtgattctgcagaaaaatgtaaaacagctacaggtagttttagtatcaaat

SEQ ID NO: 793543 - DNA, 430 bp, Homo sapiens
aggcaaagcatgagatgctaactttatttatttatttatttactttttgagatagggtcttgctgtgtcatccaggctggaatgcagtcgagcaatcacggctaactgcagcctagacttcccaggttcaagcgatccttctgcctcagcctctcaagtagctgggactacaggcgtgcaacatcaygcctggctaatttttttattttttgtggagataaggtctcaactatgatggccaggctagtctcaaactcctgtgctcaagcgatcttcctgcctcagcaccccccaaagtgctggaattacaggtgtcagccagcatgcacggcccaagacgctaactttaaatcacttgttgctcaagtccaatatccctgtgattctgcagaaaaatgtaaaacagctacaggtagttttagtatcaaat

SEQ ID NO: 793544 - DNA, 539 bp, Homo sapiens
tcgtttttatagagaaacccagtccctacaaacagcatcctgtttttgggaaaagccctgggggacaatgccataaacatttccctctcatttttcttcccatatttctggtcctgcctgctgctttatttcacaaaaagcattaattacattttktcaggagtgaaaggtcattttgtgctggtggcctggcatggagaatatcagggactgtggaaattcagtgagtcaaagatgaaggcgaaattgatagcctgggaaaaataagtgtactgtttatggaagtaagcatttaaaactgattttttttaaaaaaattgtacttttaggagctatggggacatactgaaatagacttaccctttttaagtacagtttcattcatataaacacattgttttataaaggcttggaagcagatgaattaatacttgggcatttggcgctaattttactgtttaacaagagagagaaggcaggctgggaggagcctggattctcctttgttctgttcattagagggcagtagcaatgacttc

SEQ ID NO: 793545 - DNA, 565 bp, Homo sapiens
atcagagaaatgcaaatcaaagctacaatgagatatcacctcaccctagtcaaaatgccttttctcaaaagataagcaataataaatgctggtgaggatctagagaaaagggaactctcctacattgttggtgggaatgtaaattagtacaaccactaaggagaagagtgtggaggttcctcaaaaatctaaaaagagagctaattatatgatccttgcagaatatataccaaaaagaaaagaaatcaatatattgaagagatagctgcactcccatgtttatggcagccctgttcaaaatagccaagatttagaagcaacctaaatatccatcaacaratgaatgaaaaaagaaaatgtggtacttatacacaatgagttctattcagccattaaaaaaagaacaagactcaggcttttgcaataacacagatgaaactaaaggtcgttttgttacatgatataagccaggcacagaaagacaaacatcgcatgttctcacttatttatgggacctataaatcaaaacaatcgaacccacagagatagtgagcaggacggttac

SEQ ID NO: 793546 - DNA, 708 bp, Homo sapiens
aggagagaaatgaatgaagggccaaggtttaggagatgaggatagcagacaagaggaagaagaaactcctcaccaagccagaatcaacaagatccacaggttaggaaggaaattataaagatcaaaacgctgggccacataggaggttcttgctgaaaaaataagatcttcagcgtctctctttagggagagatgacaaaaatggcacaggcacaatatcaataccataggggtgaggatttgtagacagctctgctgacacttggtcaggggttcagaccctaacacccaagttttattagtcacatttgcagagggatgtgttttrtgctattttctatgctagtgatacagtctgattaattaattcacatattattccaaccagtggccctgatgactcaggacaccaatttcaagcctgcggtcagcaagaatggcaatctgtgagaatgagctcaacaaatgctaattgggccatccaaattctgaaccgttgaccttagtccttaatcaacaaaagagactgaccgtattcaaagaaacagcaaatttgcctttgtattatgtgaaagaaaagtatagctgttttgttatctaagttagaaataggtcctaaaactgtgagttttaaacaccagcacatagacaacttgaaatattgtttaaagtatttgaaataaatatggtttatatagacagttactt

SEQ ID NO: 793547 - DNA, 660 bp, Homo sapiens
agaacagccatagaagatgagatgggatagacaggcatccagcctgttggcagagcatgggggaagagctagaaaaggcattcaaaagttgagtctgatcctgaggcaccaagcatttaactgcgaacaaagcaagcagccagggtgagcaaatgcaaaggagcgaaatcctgattctttayaaagaagccctactattagaaatgcttccattcgtgcattcctttgggtgaaagcatcttattttttcaaaaagacactccttaagttgcagaagggtgggtggtacagttaaattgttaactttatctgatgagttagttgttgaggtcatttcttgtaaaagaggaggtgggaactgatgaagctacacttcatagtcttcacaatattttttccctaagtcaagcactgaattccagtggccccaactatgagcttgtggattgagggtgagactcggttggcctagctcattgctcaacataggattccatttgtagagtagagacaggctgaagaaaccatgaaggaatatttagattaaacaaggctgaatgtatctattcagtctcatggttattcccagtcacacagtacaaataacatactgtaaagacgtttgcaaatacacttctaagacagttgctaaatgttagt

SEQ ID NO: 793548 - DNA, 611 bp, Homo sapiens
catttatttatttattgcatcagacacaaagctgggtgtctaggatggaaagtggtacaagacatctttccagccctgtagaatatctattataaataaggaactattttttcaaggtgctcagaaatccaaaaaacatattagataggccrattttgagggcatttatttgtagagttatataggtttgattagagtctttcgtcaagaagaaaaatcattggcttaccaaacgagaagcattacactttatttatttaagtaggaaacgctcagctgctcttgaaccatgatgcaagtgcccagcgaagggtcatgttgctcttgtcccctcttccctttgcagccatcaagctggatggggtggatgtcatcgggtataccgcatggtccctcatggatggtttcgagtggcacagaggttacagcatcaggcgtggactcttctatgttgactttctaagccaggacaagatgttgttgccaaagtcttcagccttgttctaccaaaagctgatagagaaaaatggcttccctcctttacctgaaaatcagcccctagaagggacatttccctgtgactttgcttggggagttgttgacaactacat

SEQ ID NO: 793549 - DNA, 442 bp, Homo sapiens
gccctgctttggaaggacggttttccagtttcattagtgacacgtcattttatctttgacttccacagtcaatacttagaatctgacttggtcctgttggctcatgcctgtaatccccacactttgggaggccaaggcaggaggatcaattgaggctagaaatttgagaccagcctgggcaacatagtgagacccgtctcwacaaaaacttctaaaaattagccgggcgtggtgctgtgcacctgtagtcccagctactcgggaggttgaggtgggaggatcacttgaactcaggaggttgaggctgcagtgaactatgttcatgccattgcactccaacttgggcaacagaatgagacctgtctctgaaataataacaagaagactctattagagccttggaagttttccattaaattatttatgatagtgctgttcaaca

SEQ ID NO: 793550 - DNA, 583 bp, Homo sapiens
ccttgactaacaccaggggacccatacgaagtaccactagtgatgctggaagtgctcctaagaagcagagaaaagtcatgacattccaagaaaaagttgaatttcttgttatgtaccataaattaaggtctgcagctgtgggtgcccatcatttgaagataaatgaatccagtgaaaggaccactgtgaaaaaaaagaaagaaaagaaaagggaattcatgaagttgtggctgcagctataccagcaagacatgaaaatagcacttttagtgaaataccttttaatcatatattgaaaatgtagcttttatrtgtgtacaggattgctacaagaaagacatacctacaggctttaatataatttgaggaaaagcaaagttattatatgataacttaaaacaaaatgaaggcaaaggatctaaacctggagaatttaatggcagcaaaggatggtttgataattttagaaaaaagtttggcttagaaaacgtcatgataacaagataagcagcttctgctgaccaagaggaagcagatgagttcccagatgtcattaagaaaatcattgagaagaaaggatatc

SEQ ID NO: 793551 - DNA, 473 bp, Homo sapiens
actgatatactgctgtggtctgaatgtttacattcctccaaaatttacgtattgcaatcctcacccccaaggtgatggtattaggaggtgggaatttggggaggagattgggtcaagagggcagagccctcataattggaattagtgctcttataagaaggtccragggagcttgtttgttccttgcaccatgtgagaacacagctagaagtcactgtctatgaggagtgggccctcatcacacagcactgaatctgccagtgcttttatcttggacttcccagtctctagaactgtgagaattaaatgcttgttgtttataaaccactgagtttatgatatttctttatagctgcctgaaagaacagactaagacagataccaaagttaagaagataacctttgtccttaaggagctccctgtctaccagggaatagaaaggtataaacaaacactgcaattacaaagtaaa

SEQ ID NO: 793552 - DNA, 473 bp, Homo sapiens
actgatatactgctgtggtctgaatgtttacattcctccaaaatttacgtattgcaatcctcacccccaaggtgatggtattaggaggtgggaatttggggaggagattgggtcaagagggcagagccctcataattggaattagtgctcttataagaaggtccgagggagcttgtttgttccttgcaccatgtgagaacacagctagaagtcactgtctatgaggagtgggccctcatcacacagcactgaatctgccagtrcttttatcttggacttcccagtctctagaactgtgagaattaaatgcttgttgtttataaaccactgagtttatgatatttctttatagctgcctgaaagaacagactaagacagataccaaagttaagaagataacctttgtccttaaggagctccctgtctaccagggaatagaaaggtataaacaaacactgcaattacaaagtaaa

SEQ ID NO: 793553 - DNA, 582 bp, Homo sapiens
aaaaaggatcaggatcagggaagaaaatttgtttattttttaatcccttatttcttagcttgtaaaacatattttctagagaaaaatgtgtctcttcaaggcaactggatattttgatgcaagatccctgactttaaaactttgggattgtcagaggcactgaaaccagagtgactctatcttgaataggtgctgggtaaaatgaggctgagacctgctgggctgcattcccaggtgaggcatttttaggcacaggatgtttacaattcagggaacagattcgtaatatttacccaatagacccaggacttgtaacagacccagcaaaagtcctgatgtcccaatatcttaacagtaaaagcattcatagtttaagaattagttttgctttaaagatagtaacataaattcttgtggaagayaatagttacacaaagcttggcaatcctttgtcaggaacctttgtagtagagcacaccttccccatgactttttgctctgttgtcttatacgtaaacaagcttcaaacctaaggtgagtgcgtccctcctcttgctttggggaatgccctgctctgtctat

SEQ ID NO: 793554 - DNA, 595 bp, Homo sapiens
acacattgtagtcccaggtactcagcacggtgaggtgggaagatcacttgagcccgggaggtcgaagttgcagtgagctgtgatcacgccactgcactccagcctgggtgacagagcgagaccctgtctcaaaaaaaaggaagaaaaaagtagctaatgtacaagttaaaacagaggcgcctagcaacttgtcaaattttgttggaacatttctcaaacttcccttgggaactactgaatcagacgctctaaagagttaacacatcttctggaatttcccacattttaagcagaacttacttcctccacaagatctgtcctaaattattatataacttactagtaattgytcatgctagaacataagggaagcttaacaaatgggtgacattgcttgatttaaaattaagagtcgatgctgataatacaataaaattagtccatgtagaacagtttgactttaagttatatgttatgcaatatcaggtttataaattaaatctaagtagtttgagttaaaataattggtcatgaattgaaaatatgttgaaaaaataaatcatatttttgctcaatgaaataacatccattttcc

SEQ ID NO: 793555 - DNA, 641 bp, Homo sapiens
taaggaactcaaacagataaaagagaaaaaagcccaaataacctcattaaagagttgacaaagaatatgaaagacccttctcaaaagaaaacatacaagtgtccaacaaacatgaaaaaaatgtttaatatcactaatcatcagagaaatgcaaattaaaaccacaatgagataccacctcacaccagtcagaatggctattattaaaaggtcaaaaaataatagatgttggcgaggatgtggagaaaaggaaatgcttatacattgtcggtgggaatgtaaattagtacaacccccacggaaaacagtatagagatttctccaagaactaaaaacagaactaccacttcatccagcaatcccactactggatatctacccaaaggaaaagaaattgttatatcaaaaagacatgtgcactcatatgtttatcgctrcactgttcacaatagcaaagccatgaagtcaacctaaatgtttaccactggtctattgggtaaagaaaatgtggtatttatacatcataaaatactatgcagccacaaagaagaatgaaatcatgtcttttgtagcaacatggatggaactggaggctattatcccaagtgaaataactcagaaacagaaaaccaaataccgta

SEQ ID NO: 793556 - DNA, 641 bp, Homo sapiens
taaggaactcaaacagataaaagagaaaaaagcccaaataacctcattaaagagttgacaaagaatatgaaagacccttctcaaaagaaaacatacaagtgtccaacaaacatgaaaaaaatgtttaatatcactaatcatcagagaaatgcaaattaaaaccacaatgagataccacctcacaccagtcagaatggctattattaaaaggtcaaaaaataatagatgttggcgaggatgtggagaaaaggaaatgcttatacattgtcggtgggaatgtaaattagtacaacccccacggaaaacagtatagagatttctccaagaactaaaaacagaactaccacttcatccagcaatcccactactggatatctacccaaaggaaaagaaattgttatatcaaaaagacatgtgcactcatatgtttatcgctgcactgttcacaatagcaaagccatgaagtcaacctaaatgttyaccactggtctattgggtaaagaaaatgtggtatttatacatcataaaatactatgcagccacaaagaagaatgaaatcatgtcttttgtagcaacatggatggaactggaggctattatcccaagtgaaataactcagaaacagaaaaccaaataccgta

SEQ ID NO: 793557 - DNA, 586 bp, Homo sapiens
aagaagctgaccaaaaccttacatggaaaatgtggtgaatgaattgtccatagggtctgtgtgcttgggctgccacaacaaaataccagagactgatcatttgaacaacataaatttattttctcacagtcctggaggctagaatggtccagcatggtgaagtttttgtaaagcctctttttcaggcttctttctcactgtgagctcctttggttaacatgcagagacagagcaacatctctggtatctcttcttttaagggcactaatcccatcatgagttcccattcacatgatctcatctaaccttatttatccacccgaaagcctcatctctgaatatcatcatattaacatawaactttgagtggcacacatatattcagttcatacattctgccctagacccccaagatgtccttctcacatgcaaaatacattaattttatcccaaaagcctcaaaagtcttaacagattccagcatcaattctaaagtacaaagtctcatttaaatagtatctaaatcaaatataagtaagccttatccccaaaatcaaaattattctccagctgtaaacctgtaaaa

SEQ ID NO: 793558 - DNA, 603 bp, Homo sapiens
agatgacttaaacccacgacttcaaggctatagtaagctatgatcgcaccatcgcactccagcctgggtgacagagcaagaccctatctcaaacaaacaaacaaagaaaaagacaggataaaagtcacagaaatggtctacacactaggaaaaaatgtgacaattttttcatgaacacagcattgtctcctcttyaaagccctccatgtgccccagctaacatctggtatcaagtcaattacgtggaacaaagtctgcttgcaccatgagaaagctcagcagcatttagtttctacaagccatacgaacaaatagcacatttacaggaatgcaattacaaaaaagctttatctgagttaaacttggaattctcattaaaatttttttaattggttgtttttattacaaatagtacagagttaaaaatgataagatactaggactttggttaacagctctgtaatggagtttataatatttggaaaactgcctgtaaacagaatttctctacatgtgggatttgaagtgcaattgcaatgaaatattgtttgtttttgggacggagtctcgctctattgctcaggctggagtgcagtggcacca

SEQ ID NO: 793559 - DNA, 597 bp, Homo sapiens
tgtttgttttaaattatcaatggcattatctattaattattatcaattgccaacatacatttcaacatattgcaatcaatattttgcatacttaataaatatttatgaaagatggtggtggattacagactgtaataaatatatcattgattacagggtttccacctatagcatttacattcaaaaagatcaacatatttttacattggaccacagaaaggagatctaagatggttcagctagaaaaaatattattcccagataaacatatttattttataaaataaaatttagtttgaatatttttatgtgcagtaagtcaatgtagtgctgagtgattgctactaaggtatccacactaatttgcatgtactttgctttaaatataaaagatgtaacagtaattcactcttactaactgaaaagccttggccaggcgcagtgcctcmcgcctgtaatcccagcattttgggaggccgaggtgggtgaatcacttgaggtcaggagttcgagaccagcctggctaacatggtgaaaccctgcctctactaaaaatacaaaataaattagccaggcacggtggtggatgcctgtaat

SEQ ID NO: 793560 - DNA, 598 bp, Homo sapiens
ttttacagcatttcttcaggacatttataaattatttagactaaataatggcattaaattgaattatatttaataacttatgaaatagtcattaaataggagtttagtaaatatgattacatagtttatgctattttttcatctttgaaaatgatcaaaattatctttgtgctctagattaatttttgatcttatctattgtatcaattttggagaaaatcagtacaatttttaaaattttctttccatgccattaaccctgtgttgcaagtgtaattttgctctttatgaaccacccacattttcctacttattacttctcagtgattttccccagaagactggatcttgcatatgttcgtattcctaacgctatacctgaaagacacagaattacatagtagtagatatcggtcaaacaagcaaagggttagaaatgtctcctacggggagaygtgtttaaaaagtcaaatctagaattagattggatctctgtgaaacatgttaagatattgtgtgagctctttctaaagattcttagcctctgaagacaggttttatgtcttaatctccccaaaggttaggtgtatatttaaac

SEQ ID NO: 793561 - DNA, 601 bp, Homo sapiens
gtcatacctgaaacacaaacttctttgtggttctaagcacctgacttttaagtgagccaattcacaatcctaagtttattccaggaagcctcaactcggcttcgtagaggaatcacttggagagctttgaaaaatactggtaatcaaggtagaaatttaccctgaagacatatctctagaagtacaaaatactataaggcacaaggaggcattgtttataataggagaagccaggaaacaactcaagggttcatcccgagggtactggtagaataaacagtggcacacccatccactatgcagccagagaagaggatgaacaaagasagcggtgttggaatgatcccaaggataagtcgttttaaaagaaaaaatactgtgtagaatgatatatatggtgtgcaacatttggtaaggacagggaaaaataagaaaaatatgtgtaagtttacgtatgtgtatttgtttattttttcaaaaagaaacagtggcagtataaatcagaagctgacacaaatggttactaagtagaaagaaaaatgggcagagaggctagggaaagaaataattttttgtgtgaacctttttatttaatttcaat

SEQ ID NO: 793562 - DNA, 504 bp, Homo sapiens
ttgctgagatgcctctaaggtagaaagggtagcaaggtgaatggcatgatgaggaaagtgaaaatgctgtcgcaaattggataaaagtgatgagttggtagcttccatacctttcacaccttgatgtttcccatcactaattcacagtagcatcaagaatgtatcaaaatgtagcttgtcttcactttattaaaatttctctaaaacacaaattttgaatgttataaacaaggagttaatagatgttcattcaatcactcagcttagtcccttccaatgtttcctttaaaaacaacawacgcttttattctctttttaaaaaatgctctactaaaatctacacaccttctgcaccttctataaacattttgctctagtccaatcctgtttcctttcctgcttcaggttttgtcattttcctcctgatgccaacttgagattccaccatggtttatccccatacatggctgaatccacagaaaatggcaattatgacacagatac

SEQ ID NO: 793563 - DNA, 552 bp, Homo sapiens
tcatcaggccacagccagcctctacagggccttagaaaaagtgctctccctgggtggataaattaggagaagacatacactggtcaggtatactctctctgatttggcttatccacattagagacccatagagtccagctaggcaactagaactyacatttccaacctcatttgatcttttggtcaggcatgtttaagcagtgtgcaaatatacaactgtatatggtaatctggtttacctcatcttctctttgatttttttttttttgtagggtgacggcaaatgtcctcttgtctttcttaatcaagacagtaccagttctgcccagcttaaaaagatataaaaataaaatgtttgcattctattgatttataccatattcaacatccatgtcagtctttatttttcaaggagagtatgttagatagattagttcctttcttctttatatggtaagctataaataaattttataggatctttttaaattttggaaaccaaaaaaaaaaaattgagccctgaacctgtacattttagtttttggaacattc

SEQ ID NO: 793564 - DNA, 644 bp, Homo sapiens
agactttaaaactctgcatcaaaatcacctcccaggttcttccttctctccagtatgtgatgtctggcattgaaaatttctgtgtatgactttatcatggtgtgttatagctatttaattcaatgtctgtccctccaaacaaattgtaaattcttggtgagcaagactgggtctcattaattttcctttcccttgggatagaagcaatactaagagaattatgggtacttaatgcttgttaaatgaagaaatgattgaaagaagacaaatgagaataagaaggataagttggtaaatccattacggagggcagtttggcaagatttgctctaccaaarttaaaatgtgcaaacacatgggcccagcaattacatttttaagaatttatcctacagattcacacatgtgccagctgatttatgtacagtgttattgatggcagcattgttagcagaagtttgaaaataatggaaatgcccatcaacagtggattgatgacatagattatggactatccatgtcatggaataccaagcaactgtgaagaatcaatatagcaagatcttcagaatataatcttaaaggaaataagcaatattcagaacagtataatatatccatatcttacatttgcttgtatatgc

SEQ ID NO: 793565 - DNA, 574 bp, Homo sapiens
attggaacagtgaattttatagctacctattcaatgacaactggtttacttctagatacaagaactgatcatcctgaatcctccttgtaatagtatacttgatagctctaaaaatctgaataatttattctttgtctgtagacccaagtttccctgactctaaaatgtgattacgtatccttcatatgaagcctcctggggaaagacagtgaactataagccatattttccaaactgagatatatacatcccaggagactgtgtcartgttctagaaaatgcaataaaattatgaaataagcatggcacatgtctgtatggagagctaattttagttaaaaagctttggagaaaactatccctattgccctgccctctccccagttctccccagggttccctcttttgtcattagagatgctgtgtgtaaaagtttaaaagaaatttatatacaaatgcatgcagtgagctgaaatctagatagacttgaatttgaaccatgattccatgtggacaaacggtgacatgtatgagtatgcctaactcacagcaccagcagataaaaagaaaaatt

SEQ ID NO: 793566 - DNA, 531 bp, Homo sapiens
taagcaatagctcacaggtgatgaaaaggatggagccccaggcactggaaggagttgctgtggctgaagccagagtgtgagtgggaagtggggagttgggggaaatgaggctggagggtatggccttgtcagccttsttatcagttcgattttatcctgacagaaagggaacacccttgaacgactttaagtaggtgatgactactttggcaccagtgaggaggagagtggattaagtgaggaagtctggagattgagaatgtagctgggaagccgttggaatagtcaggagattatggtagtttgaattggtgtcttgcaaatagaaagatacacaagagatgttgaattataggacttgacgattgcttggatttcaaggtcagaaagaagattgatggatggtctacaaagatggcttttaaagagtgaaagtggaagaaattataaagggaaaaatagggaatgcaaaatcaaaagcttctgatacaaaatttataattagaagctaaatgaaaaactagtaaagat

SEQ ID NO: 793567 - DNA, 625 bp, Homo sapiens
ccaaggtaagggggttgagatttcaatataaaaattgggggagaacacagttcagcccataacacatgctaagtgtgtgctttgggaaaattcagagaagagtgagctactctagatattgctaatagtagaattcactcacaaatcaactgattaacaatgacatacttgccatgtgtggttactgataatccaagaatgagctatccttcccagaatgtacggtgacaaatggaggaatcctgatgaagacatatagaaacagtaaataaaatgatggaacacatttatgtcttcatgaaaagcactwagaaccaagtacagaaattctttggtgcagttgttcaattccattctcaggtgacaaacaaagccaacagctatgagccttctgatgattctgcccttttgaagtaactaagtttgcacaatgacatttactatacttttaggaactggcatgcctaggcttaatgcatctttgttgagacaaaaaaaaaagttatggtttctataagagaatctgttccaggagaaagagaatgacatattggatatgttagataagcaaaatatgctaagttccttggggtcctaattaacatattccagagaaaagtcccac

SEQ ID NO: 793568 - DNA, 645 bp, Homo sapiens
tactgaagtaagggagggtcctaagaccaatcgtgagagttcctgggtcttctcaaacatgtgtccttacaatccctttgcctatgtctgtaccagtttgcagaaatgccatatactcaggatggtacataattatgcagtaaatctccrtatgttaagatgaatacaattactaaaaggaaaaaaatctagaggcaaacatttgtcaatgtgcagcatttatttttaatcatgtctctttaaaattcttccagaattctcctccttataagaacttcagcctatcataagcaaaatttaaattttttactctgataaaatcagagcaaagacagcccgggatgctctaaggaccccatttagtgcagcacatggaaattgagtccatagtgtttcagtccttttgaaagttgtttctcttttgctttactttacttggctgggaaggaggacagaagtgatataagccctttagaaaacagagaaacatgtcaccattgtgtcaaaattatttagaagaaaaggatgcattatttttaatatatattcacacacactgtatgatggctcaaatgtcatgactggagaatgtaaagtattgttaatatgctttggagctctgccttgtcagctgcattaattgta

SEQ ID NO: 793569 - DNA, 583 bp, Homo sapiens
tttagcatagtgtctggcacacagtagatgccatataaattatagttactattggtaatgaaacagaataaaaataaggccttctgtaactcttcagaaattaaggatgcacactatcaccttttaccaaaattaaaatggtatcagtgagcagtcaatgcagaatacagttttaagtcctttcttttcacagctattttcagttttgtctagttctcactcctattttgccaattcctaattttgcctttcttcaccaaagtggtcaagagaaaggataaacaccccatctacaattatcatattcaatcttcctatgaaataggaattgacaactaaccactgattttaccctattccaraataaggcttgtgggtttttcctcatatgccaaacctcaacgtggaattaagaaggtggatctctgaccgctagagagtgacatggttggaattagtgctaaaaagtctttgccatacagtatattgatgcatcttcctgttactctagaaattttattaacaaggacttaagcaaatcaaggcatattatagatttcttgctatgtttaattagaaaaca

SEQ ID NO: 793570 - DNA, 613 bp, Homo sapiens
aaaaacaatcctaaaattcatatggaaccaaaaaagagcctacatagccaaagcaagactaagcaaaaagaacaaatctagagacagcacattacctgatttcaaactgtattagaaggccataatcaccaaaacagcatggtactggtataaaaataggcacatagaccaatggaacagaatagagaacccagaagtaaacccaaatatttacagcyaactgatcttcaacaaagcaaacaaaaacatacagtgaggaaaggacaccatattcaacaaatggtgttgggataattggcaagccacatgtaggagaatgaaactggattctcatcactcatcttatacgaaaactaactcaagatggattaaggacttaaatttaagacctgaagctataaaaattctagaagttaacattggaaaaacccttatagacattggcttaggcaaggatttcatgaccaagaacccaaaagtaaatgcaataaaaacaaagataaatagctgggacttaattaaactaaagagattttgcagaacaaaaggaatagtcagcagggtaaacagacaacccacagagtgggagaaaatcttcacaatctatacgtct

SEQ ID NO: 793571 - DNA, 418 bp, Homo sapiens
cgtagaaattcccttgaaatgctcaagtactgtggcactgcggtacaacataatgtctctccatgattgattagtttagccaaagttcttcactctttatatgaataaaccaaggtaatgcatagcttaattaataaataatatattctcttaacaagcattatggtcyattgttaaatcttttaaatatataaatatattgtaaatgtattttgcttttgttatataaatgtaggaacttgacagagaccggaatggagaaatagacaagaatccacaatggagggcagatggaatacagtcattgtcttaggctcttgggtctaatagatctggtctgaaagattggctccttctgtttaaagttgtgtgactctgagcaacttgtttaaattctacaagcatcagtttcctcaac

SEQ ID NO: 793572 - DNA, 634 bp, Homo sapiens
ccagatcattgcatatagtagatgcttaaaaaaccagggtaaattgaaatgaatcacatcaatgatagcttcagcgtgaagtttctgaaaattcaacttcactgttatgactacatatgttaagtcaatataacgacaaagtcatgaagcttttcctttatgttttcttctaggagttttaaaaattcatgtcttatgttttaagcctttaatctatttttagttaatttttatgtatggtttaagataagggtttaatttcagttgattgcatgtggatatccagttttccaatttccatttgttgaagagactatccttctcctgttgtatgttcttggaatgcttgtgaagatcagctgaccatggtgtgtgggtgtatttctgggttctctaytctgttttgttcatctgtatgtccgtctttatgtcagtaccataatgttttgattactctagatttgtattttgaaatcaggaaatgtgatgcctccagttttgtcctttctcaagattgatttggctattcatggtcttttatggctctacatgaattttaaaattgtattttctattgctataaaaatgccatttagattttgttagggattacactgagttggtagattgcttt

SEQ ID NO: 793573 - DNA, 656 bp, Homo sapiens; identical to SEQ ID NO: 783605

SEQ ID NO: 793574 - DNA, 639 bp, Homo sapiens
ggcaggaggatcgcttgagctcaggtgtttgtggctgcagtgagctatgattgtgccactgcactctagcctgggcatcagagtaagactctgtctctaaaaacaaaaccaccaaaaacaagaaattattctcaactctcctccctccctttttacctcccttctctctacctgtcttcctctctcttcyccctcttcctttttcctctctcactctattcactctcatatcacacatacctttttacccccttctgcattgcctgttctatctgaaatgtccttatcctctttcatactcttctactcacccctccttttctggtctgtcttgcccattaaactatgatctacctaaggtaaggaccacattttagtcatctttgcattcccagcctctggtgtagtgtccagtacaggagtttagggtaaggtgtagtctatggatttatttctcatgactttaggactaaggtaatgtctgttggtaataatggggcattttctaagaaccgtatttatgtagaggttttgttttgttattgctttaaatttagctaaataagagtgtctgagtcaaaggtgtctaattacattgacagtcatccactgagaaacgcagtcaatacaaaatgctac

SEQ ID NO: 793575 - DNA, 521 bp, Homo sapiens
ttcttactttcagccttgaggcagactttgaaactctttgcttcttcctttcccactgtgcacgcttgtctaattatgagcttgcttagaaattccagggaccaactttgaaacataccaggcagagagacccagctgcaggatcctcccactcaagaagagttagcaacagtgagccccccactgccgggctgaagtcagtatgatgcgaatcagacctccccacaagccattaccgagatggccacagagcagacaggcggacctgcgccccttttcactactcctgcctattcccacaccttttscttcctaaaacccttccctcggcctaaaaagttggaatgatcttccaaaggcatgagcttggccataccccaaccaccagcattttcataaagttgctttcctttctccacacctctcttcttctgttttctacctctgagcggcgagcagtcagacttcagccagttacaaaatggggcccagagtcgcattccctctgccctctgccctct

SEQ ID NO: 793576 - DNA, 481 bp, Homo sapiens
tattaaatgtctacatggaaggcatttatatccagtcttttatttaatcctcacaaaaatcttaatgatatgtgttttttcaccttactgaggaaataaatgaaagttcagagacataatttacccaatatgcaaaaaagtgaggtcttacctttttgacaatagagtagacatgattttaagaaaaatccctcmctatactaggaaaaatataaaaaaaattttaaatgtatgacagatctatctagaaagtaattccttgggccccatgaatgatcagaatgcccaaatccagagtcatcatcaagtgatggagtcagcatttcctgcacatgagagaaaaaaatctgaagctcaaggtgagtgaaatatcagaatggagacccacaaataagccaatatcatggaaaggcaacactccattgacggagctaaaaaaacatctatcccacagaacaaggtggagatacatgactggctt

SEQ ID NO: 793577 - DNA, 615 bp, Homo sapiens
aaagtagttaatgaaaatataatgcagaaggtgctactattatgaaggaaggaaatatctcttacggtgagtgagtatagaaactgcttgaaatagatgtcctgacccttgacttccaatcatctgtctatggggtgatccttcaaaagtgatttgacctctctgggattccatttccccatcctctacaaaatgaccattttgccagttctgcagtaaacaatggaccccattctctttcttaatgttagacagactctagtcttttaaaactccccataatttctccattcyaaaagccattccaaatctataggtaagagctccatggtccttcagcagaccatctggctggcaatatattattgtcccaagttaaagagaaggtcaagagaggttaagtggcttgttcaaggtcatgcatctagttagtaggggttaaggatctggaacccagaactttttgccactttctgatgtccccctttcaatacactgctcaaccccttcagggagagttggcttcatggctgctacaacagggtggagaaaatggaagagtagattttccctctttgactgtatgaaaatcacccacttttagaataccaaacc

SEQ ID NO: 793578 - DNA, 633 bp, Homo sapiens
gggcctagtcaactttcataaaattatagagccaaaactcaggcgcttcttctctcagtggatttctcaaatgctagatcaaaacagctgccaattgtccattctcactcatccaatgcctgtaaagtaaaatagttgctgtaataagaaagggttttataatggccttttccctcaagttcaatatgagatgcactctagactttttatgatacatctactactagtgaaacattgccttacataaagaacttaatagttgttctttagttccttgtcattgatattaacagctaaagaccatcatctcacatgacattgctgctgaaatttccagcagtggggtcagggataatcttttgatcactrtgttcaatagcatccataaccttccttttgagacattgaattaaaatattacatttatctgacgaaaatcattgaaaaacattggctggcctgtatagaaaagcttagatttttgatttcagaagcaatcagcgttacttttaggcgacccattatctactctttatttttcttctgcctctatttcccctgctagatgcaattcaaagtttacactttagaaaattgctgctgtaaagttaaaaggactgtacattcaaaagt

SEQ ID NO: 793579 - DNA, 594 bp, Homo sapiens
acactaataacaaactatccacaaaagaaattaagagaacagtctcatttacaatcacatcaaaaagaataaaatacttaggaataaactaaggaagtgaaggacttgaacactgacaatcacaaaacattactgaaagaaattaaagatgacacaaataaatggtaaaaccttccatgttcatggagtggaagagtaatgttgttaaaatgtccatgttacccaatgtgatctatagatacaatgcgttgcctatcaaactcccagtaactgattattatagaaatggaaaaaacagttctaaaattcatatgaaacaaaaaasaatctggaatgttcagaacaatattgagagagaacaaagctgaaggcatcacagctcctgatttcaaaacattttataagctacagaaattaaaatagtatggtactggtgtaaagatatgccagtgtaaagacacttggtgtaaaagacagacatatacaccaatagaacacctagaataacactcacacatacacagtcaactgatctttgacaaaggttccaagaatacacaatggggaaaggtgctgggaaaactggatatccac

SEQ ID NO: 793580 - DNA, 500 bp, Homo sapiens
tgccatcacgcccagctaatttttatatttttagtagaggcagggtttcaccatgttggccaggaaggtctcaatctcttgaccttgtgatccacccgcctcggcctaccaaagtgctgggattacaggcgtgagccactatgcctggccaaaacraatgctagtatttttaaaatttaatctttttttgttgttgtttttgagacaaaatcttgcgctgtcacccaggcttgagtacagtggcaagatctcagcttactgcagccgtgacctcttagactcaagtgatcctcctgcctcagcctcccgggtagctgggactgcaggcgtgcatcactacaaatggctaatttcttttggattatttttttttttgagtagaaacaaggtcttgctatgttgcctaggctggtcttgaactcccgagctcaaccaatcctcctgctgcaacctcacaatgtgttgggattacaggtgggagctacttcaccaggtgtaat

SEQ ID NO: 793581 - DNA, 537 bp, Homo sapiens
tggatcctttgagaggtgatgaagttgtgaaggctgagcccgcttggatgggaccagggcccttctaaaagggcttgagggagtgggttcgccctcttccatctctctgccatgtgaggacaagcgttcctcccttttgcctttgtgaggatgcagcaatgaggtgccctctagaaagcagagaacaaccttcacagatgcccagcctgccagcaccttgatctgggacttcccagcctccagaactttgagaaataaatttctattctttatacattccccagtctcctgtgtttattttggtgtcrggaatggtccaagacagcctccctcagcctttgggcttgtaggtctgctcgccataggaaacggctcctggacctaggtgtatgcgggagtgtggtgcaggttgaaggctgcgggttgggtgaaggtatggaggtgagggggagatggctgttgggctgggcaccagcaaactgtggaatggagcaatttggtggactgctatggagtcaccttagtgaagcttcccca

SEQ ID NO: 793582 - DNA, 476 bp, Homo sapiens
ttcaatattgaaactttttcatggtgtgttgaaaagaactgaaaatgaatacagcaaacacccgtctgaaggacagagatgaccagtgccgagcagcctcctgcagcccccgccagctcagcctccactcgccctgacaggctaccgcacagaggtgagtgtttcttagactcttgtgttgctgtcatcattgtaatcacacatgtatgcaccttggggcatttccctatctcgttttacagactttatgarcatggttaatatgcctagctcaaggatttcttgggagcccgagggttacaaattagcacacaatctcctagaaagacagcacagccttggaaataggtgttttctctatttcagaattcattttccacactctcttataggagtttcttttttcttcccattctgtgtttaagcctcttctgacctatagtaaatctcactgttttgacattgtcttctctgac

SEQ ID NO: 793583 - DNA, 476 bp, Homo sapiens
ttcaatattgaaactttttcatggtgtgttgaaaagaactgaaaatgaatacagcaaacacccgtctgaaggacagagatgaccagtgccgagcagcctcctgcagcccccgccagctcagcctccactcgccctgacaggctaccgcacagaggtgagtgtttcttagactcttgtgttgctgtcatcattgtaatcacacatgtatgcaccttggggcatttccctatctcgttttacagactttatgaacatggttaatatgcctagctcaaggattwcttgggagcccgagggttacaaattagcacacaatctcctagaaagacagcacagccttggaaataggtgttttctctatttcagaattcattttccacactctcttataggagtttcttttttcttcccattctgtgtttaagcctcttctgacctatagtaaatctcactgttttgacattgtcttctctgac

SEQ ID NO: 793584 - DNA, 589 bp, Homo sapiens
cttccttccttccttccctccttcatgttttccttatttacttttagatcaaatgtgtgtctagtgaaatgcaaatatattaaatgaaccactggctaagtactgccaatgtgcatatctgtgtgagccaaatctctatcaaggtatagaacatgcccattatctagaaagttccctcacacaccttccttgttaattccagccccactgcactgccccccgccccctggcaatgattgtcccagttatcctccatagattaattaagcctaatgtagagtwtcaagtaaatggaatcatacaatatgtagccttttgtgtaaggcatctttcactcagcattatgtttttgagactcattcatgttgtatatttacatctttttactactgagcagtaattgtgtctatttttaatcaagggatctgatgacctgacccccccaaacagctcattccattctttcacaacaaaaaaaagttcttcatccagtcaacccaacatggatctccctaaaacttgcaggttttgatgctggctcaactccttagtattaatgaaataaaagtacttttttcatgtgacatcc

SEQ ID NO: 793585 - DNA, 638 bp, Homo sapiens
ggatttacattgtttgggataggtttagttacagattactttgacaggttttacaaatatgcagaaatgatgtgaagttcatattggagaaaattaaacgacataaactcaaactttataaaatgcaaaatgaatggtatatgaaatgctggttaagtgaaaggtatgccatatcttgaagacatcttggagtgaaaattttgaaaaaggtcaggggatacaaggagccagcacatcaaacgcagaatctcaaaggcttggccacttaccagttgtgtgactttggaaaagttatttaacttytctcaggcttctgtgtccttgtatgtacaatgggcctccaaagtcttgtagacttgaagtcagaaatatatgaaatatatatatttaggtaactagttagataggtacctccctcagagtcagacattaccggaggcatgtaataaatatcagattcttcacttccattcacaccaacatgtgaattgggtgatgatatttattacctgcctccagtatgccaaatgaaattagataaatcctcctcaagaaagtgccctatcagtagattcagttacacagtgaacaagttcctatcttctgccatcattctgaagtcatggatggctctctgc

SEQ ID NO: 793586 - DNA, 638 bp, Homo sapiens
ggatttacattgtttgggataggtttagttacagattactttgacaggttttacaaatatgcagaaatgatgtgaagttcatattggagaaaattaaacgacataaactcaaactttataaaatgcaaaatgaatggtatatgaaatgctggttaagtgaaaggtatgccatatcttgaagacatcttggagtgaaaattttgaaaaaggtcaggggatacaaggagccagcacatcaaacgcagaatctcaaaggcttggccacttaccagttgtgtgactttggaaaagttatttaacttttctcaggcttctgtgtccttgtatgtacaatgggcctccaaagtcttgtagacttgaagtcagaaatatatgaaatatatatatttaggtaactagttagataggtacctccctcagagtcagacattaccggagrcatgtaataaatatcagattcttcacttccattcacaccaacatgtgaattgggtgatgatatttattacctgcctccagtatgccaaatgaaattagataaatcctcctcaagaaagtgccctatcagtagattcagttacacagtgaacaagttcctatcttctgccatcattctgaagtcatggatggctctctgc

SEQ ID NO: 793587 - DNA, 649 bp, Homo sapiens
caatttgtaaaaatcctcttgggaatgggattctgattgcattgaatctataggtcaatttgcagagatttggcatcattacaatatcaatattccaatccatgaatctagtatatattccccccaattatttaagtctttaaaaatctcctgtcaatatttttgtatttttctgggtacttycatggcttttgttaaaatttttattaggcatttaaagatttttgatgcaaacaggaactttaaaaaattttactcagtaattgatgatatacagaaataaagtgatttttatatattgaccttttagataatgaccttagcagattcatgtattaatttttataatttatttggagtctttttgtactgctacaattcttttctatatttagtcatataacagatttattagttcctttccaatattcttttaattttattattttattgcactgaccaggacctccaataaatattgaacaaaagtggtgataacaagcatctctatctttttccaggtctccagaggaaagcttttaatatttactattaaagatcatatttgctgtagggtttagttgtttgtttgttttgtagataaactttatcatttgaaagaaattttctcttattcttagttgtttat

SEQ ID NO: 793588 - DNA, 496 bp, Homo sapiens
aatcagggtaattaccatatccatcagtttaaacatttatttctttgtagtaataacactcaaaaatcttctcttctagctatcttgaaatatataatacattgttatttgctatagttaccctactgtgtaatagaacaccagaaacttgtaaccttgtacctgttaaccagtctctcccattccccatcttctatactctccccagcctctggtaagcactcttctactctgtacttctatgaaatcaagtattttagattccacatatgagtgagarcatgtagtgtttgtctttctgtgcctggcttatttcacttaaaataatgtcctacagattcattcatgatgccacaaatgacaggattttattatgttttatggctgaatactatttatgtgtgtgtgtgtgtgtgtgtgtgtgtgtatgtgtgtgtgtgtgtgtgtcattttctttataaagtcatctgttgttgggcacttaggttgattccat

SEQ ID NO: 793589 - DNA, 468 bp, Homo sapiens
accaagctgaggaaaaaatctcagagccttgaagactagcttttggaaataagacagtcagacaagaagaaagaagaaagaatgaaaagaaataaacaaaaactctgagaaatatgggattatgtaaagagaccaaatctatgaatcactggaatccctgaaagagatggagagaatggaagcaacttggaaaacatatttcaggatttcagccatgaaaacttccccaacctagctagagaggccaacattcaaattcaggaaaygcagaaaacttctgcaaaatatgtcacaagaggatcatccccaagacataatcagcagattctccaaggtagaaaagaaagaaaaaatgttaaaggcagctagagagaaagaacaggtcacctacaaagggaagtctattagactagcagcaggcatcttagcaaaaaccatacaagccagaagagactgggggcctatatt

SEQ ID NO: 793590 - DNA, 631 bp, Homo sapiens
cagtacctcctctgccctcaaagagttgcagcccagcagaaacaacacaaactacccacaatgaccaggcaaggtagaaatggccaagtgtcaattgcttccagggaccttctcatctggccatgtcttctcttcccctgcaaacccaggcaacatacagacctccttactggcttgggctccttaggccacccttttccccctttcctctcatgaacttggttaatttggtttaagtacaattataaaatgttgctttcagatctaaaactcacttcagatatggataatgtgagagtagtgttaatacaatatattttggagagtattgatattatatactatatttcagtrtatatgttctaggatttggagtatatatgcataccatatattttggagagttttcctcatactctgaaagatgagtacttacaagtctgaccctgagaatttgggctgatgtggagccgtgtgtgtggaggggatcatattgctaaggcatgttagagcagccttggggtgagggagtcgggttgtgcctcataataataaaggtaagtcaatggagtcatgtataatgcctgctgactctcgagcaatgactgtacctaagatgatagagtagcaa

SEQ ID NO: 793591 - DNA, 632 bp, Homo sapiens
catatattttggagagttttcctcatactctgaaagatgagtacttacaagtctgaccctgagaatttgggctgatgtggagccgtgtgtgtggaggggatcatattgctaaggcatgttagagcagccttggggtgagggagtcgggttgtgcctcataataataaaggtaagtcaatggagtcatgtataatgcctgctgactctcgagcaatgactgtacctaagatgatagagtagcaaagaagtgctgaagtatgtgagggtcctcagccttctctgggggaggagtcatttgtcatatttccctggaagcagaagattaggataaagctattttataagatarcatttaagaatgtgagtttgaagggaatgaataatttccacctgctttcatctcataatagctaatgtgggcaagaatggagccatagctcaggctcctcatgagaaatcatgtcccttttccattaagtgatttctagtaccttgagttgtttaatatctcacagaaatacatccagatattcctctcacatcagcatccaggtgaggttttgctttctgaggtagtctcagaaattggacactgcttttcactcacctgatgttgctaggcttgattgtga

SEQ ID NO: 793592 - DNA, 593 bp, Homo sapiens
ctggaagcagaagattaggataaagctattttataagataacatttaagaatgtgagtttgaagggaatgaataatttccacctgctttcatctcataatagctaatgtgggcaagaatggagccatagctcaggctcctcatgagaaatcatgtcccttttccattaagtgatttctagtaccttgagttgtttaatatctcacagaaatacatccagatattcctctcacatcagcatccaggtgaggttttgctttctgaggtagtctcagaaattggacactgcttttcactcacctgatgttgctaggcttgattgtgatttcctgcaattyttcatgtcctttctcaagcaagactccagctctaaccagcacatcaaacagagtagattcaaatcatagaatcaaatggggtgagtggaacatggttctaccttctggccggagcaataaacaaagtgcctagagagggaacagaaccagtcaagagttctcctgatttagatggtaagtgagaatgacagtattgttgctgaaagcgcataccacccagcacgcttgcttggggaagacggattggactattcat

SEQ ID NO: 793593 - DNA, 413 bp, Homo sapiens
tggaattttttacaatttcaaatatcaagttaatgggcaatttcttggaaagtctgcacagaatccatttcttatgattttatctcttggtatgaaaatcagaccacatctcagtttctcaggaaacttagcatttctcaggtgtcaaactatgccatagccaagtttgccgatatttgaataataaaggtcactaagtcaaatcttgtttaggtattattgtcatcaagatatgaagtattkcactttagtgaatgtttcagaagatagaatttataactgtaaagttttgaagcttattttttctaactttaaacatataggtaggaacatttctcaaatatgtgatacgtttctgtcctttctgaagcaaagcaatctgggtgactaggggccatcattacataaacaat

SEQ ID NO: 793594 - DNA, 538 bp, Homo sapiens
acagacatgtgatacaaattttgtttgctttccttaatctcctggttaccaggattgctttggacaattgaagtgatttgatgagtgatattttaggtaagttatgttttgctgtaatcatcaatagatgcttttaatgaattcacttaataatatgccctaaaaatacttagaatacattttggccccattgtttagaaatgtaagatgagcaactgagtcacagaattctgtgattgtgatttgactgtattagctggtcagtagcagcacagatggtcccttaactctcccgtgttcagagggctaattcattgattcactcattaaagtggtatttaagaaggaataattttgttcttgtatgcttaatgatttcagtattaagaaagaacagagcttcatagaaatataacrctaaaggaactttaaaccaattagtggcatttttaataacttagcgtgaaaattcatctttacttgacagtcccacttgattgaacatgttttcttcatccattagctttgaggttcttaa

SEQ ID NO: 793595 - DNA, 624 bp, Homo sapiens
aaattcaacatggaaattttaaagctgtgactgaagaaataaaaatataatgtttttgtctccatgtatttcatggccatgtagtctttaaacaacgttagaaaggaagaataaaaggactaatggactgttaatgtagaagctcaaatgtgaaactkaaatacattatatctttgattacgtaaaagtaaatttagctctcttatcaaacataagttatttagaaataagagtgacaaagtataataatgggatgcatagattgaaatttcatacaaataacctagaatcattcacttgtaattaataaaaggcatgatgagaaataatatgaaaatgtcccaggtactgtcaacaccattataatttcttactatcttgtttgagaaaaatgaggtaatggcagaaaggattcaagagctctgttgaatgttccatttttgtacaaaaacaaacagaaaaagagttaccaaaaaaaagttttaaaaattcattgaaaccaatatttcgaaaatgtgaatcaagtaaaatatgtgagatatttattatttaaaagaccatttgtgctagtcaatggttggtttaaaaccacagaacaacattcagatcattctgaaaagcatg

SEQ ID NO: 793596 - DNA, 641 bp, Homo sapiens
gcctttgctacatccccgctagttctttccactttctgtcttaaattaatgcacatagtttgcacatttgtgtctgaaggccaggccagagagaatgttcaaagctatgtttcaaaggagaatattaggaatctaagtctgcttctaagagaacacttattgggaaataaagttctgatatgtttatatgaaaacaagtcatattaatcactttatgtttacacctcatgtgtgaagacacacctgctttagattccctgcaggcacatcacacttcgacttctgaaatttttccaaaacagtatattctgcctggaatgctttttcttcaggcagccaaatggtctttcccatcatttaaacagcttctggaattctatcaatcctccagtattctaagattsattggccaactgacacattatttttggctcagtctggacatggaacacccacagctattcttcgcttcctgatcatgtatttagtcctcactacctaacccctactaaagtacatttaccctttctttacattggcagatataatttgtttccatcacaaattaaacagagcataatgtctgctgctaaaggaatagtttgtaaacccaagactcagaattctacacataatgttat

SEQ ID NO: 793597 - DNA, 585 bp, Homo sapiens
ggaatggatttggatcaccaggttggggatgggtgggagaagcagggctcccacacagctctgcatactaaaggggtgaggtcttcagggtccttggggagcactgaagggaaaggggaggaacagcaaagaataactgctggcagctcagccagcagggaccctgtagcaggagtgaccggtagcgtctttaggttgctgtggggttaagcagcagcagctggggttaggaaagagagctgggaagagaaaaggaagagagctgggaaccagagggacaccctctcctctgtctctcctaytggagttctttgctacatttaccctaagcaaattggttgaggtaagtaaagccaagaaggggttagctctgcatccaggcctgtgtggcccccagagccaggagaagctgaattttcaggaatgtgagatgcctttcagcagggtcagagtccctcccttgtgactgccccttcccccagcccctacctgagactcagtgccgcaggtatcaaagcgggcctggatcctgaggttgccgccgacctcctgggcggcacagctccggctgcccaggtagacctt

SEQ ID NO: 793598 - DNA, 638 bp, Homo sapiens
gcagagggttccaggagccccagtgaaggtgcatgtgaggttgatggaggatgtggaaggccgatggagggagtggtatttgatctgagcttgaagggtgagccagatgttctcaggtggaaaaagggaaaaaagactttccagacagaggggacagcagggcttaagatccctgagggtgaagcagaaggggttgtgattcccctgccagagcatgggatgcccaagggatgcaggaaackgaggctcaatacgatatggaagttggagcccacactcagagggcactgaataccataagaaggaactttgatttcacttgcttggcagtgggatgggcagcagggtctcgggaggagaataaagactcttcagcaataggctgggtgcggtggctcatgcctgtaatcccagcactttgggaggccgaggcaggtggatcatctgaggttaggagttcgagaccagcatgaccaacatggtgaaaccccatctctactaaaaatacaaaaattagctggtcgtggtggcacatgcctgtaatccctgctactcgagaggctgagacaggagaattgtttgaacctgggaggtggaggttgcagtgagctgaaatagggccactgcactccagcctg

SEQ ID NO: 793599 - DNA, 507 bp, Homo sapiens
cagcctgggtcctggctcgtgatgggtgctggggaagggtgtcccaaaggaggcatggggaattgctcggtctatagaccaaagttactcaggwggaaggtggcagagatagactggaatccagagctcagctcactgtgtcaaactgacattttccaacagtgtgtctggttctaatagatcaagagcctttctacatggtaggctgtgtcccaggagaagacatcaatgacagaaaaggatattcgcttgcccctcttggtccagtgggtgcccttgttctgaagccaaggacacagggggccgcttccacagtggttccaagagaagcagccagtgccatcttggtgccttaaataataacttcccagcctgtctttctaacattgccccaatacacctcccagcaccccctacagccctcttcctggctcccagccatgacaggctctttcatgcctctttgcatttgcacatgctgttccctatgcctgggatgccattccc

SEQ ID NO: 793600 - DNA, 507 bp, Homo sapiens
cagcctgggtcctggctcgtgatgggtgctggggaagggtgtcccaaaggaggcatggggaattgctcggtctatagaccaaagttactcaggtggaaggtggcagagatagactggaatccagagctcagctcactgtgtcaaactgacattttccaacagtgtgtctggttctaatagatcaagagcctttctacatggtaggctstgtcccaggagaagacatcaatgacagaaaaggatattcgcttgcccctcttggtccagtgggtgcccttgttctgaagccaaggacacagggggccgcttccacagtggttccaagagaagcagccagtgccatcttggtgccttaaataataacttcccagcctgtctttctaacattgccccaatacacctcccagcaccccctacagccctcttcctggctcccagccatgacaggctctttcatgcctctttgcatttgcacatgctgttccctatgcctgggatgccattccc

SEQ ID NO: 793601 - DNA, 548 bp, Homo sapiens
atgcagctttaggaatcgctggactgtaagcaaatgaaaaccatggtagtggaagaggtctttcagagagagtaagtagagaggactgaatgaagaagatattgccaagggaagaggcagcagtgtgcttaggaagggagatgaaaagccatggatgtatggtatcatgtaaatcaaggagagcacagctaatgrgagtgcaagtaagaagaggactaaaacgtaatcactgcatctgggaattcagaagtctctgctactgcagaatgcaccattttagaaggatggctgaagcaaagtcgtatttcagtaagtgtatgcagactggacaacctactttcatccagataatgaaatagtactctaaagatccagttaaatggaaccggaaagttgtccagctctctcaatctgtctttttagctcctgatgtatgatggtaacagatgatttttccttttagattgatataattgaacagccctatgttcttatgttttcttgttgaatttctacctaatatttcttgtggcttagaggagaaataa

SEQ ID NO: 793602 - DNA, 522 bp, Homo sapiens
taatagtttttagggcacctaacaataatttatagatgtatattgtggaatgtaaagctttaagaacttaaacaaaggtaataattaaaataacctcacaagaagtttaatgagtagagagaattcccatgtacacttcaccaaacttcctctaaggataatgtataatcatagtatatggtcaagtccaagaaatcgatgttaccttgctggtagatagagacttagtcagattttactatggtttgcatgcactctgtgtgtgtgtgtacgtgtatgtgtgtgtgtgtggttatatcaaacttttaygacttttacatttgagtaaccatcaacacgattagtttacagaactgaaaaggaatctgagatctgtactgtatcaggattacaaaggatttagcctcaagtagttccctttttgtattaataaccacacgctttctgcaaccctatcccttgcatccacttgactatgaagtttttttaaagcacagataaattgaataatcagggcaatag

SEQ ID NO: 793603 - DNA, 549 bp, Homo sapiens
tatatttgagacagtgtctcactgtccacattgcctaggctggagtacagtggtacaatctcggctcactgcaacctccgcctcctgggcccaaatgatcctcccatctcagcctcctgagtagctgggactacaggtgcacgccaccatgcccggctaatttttgtattttttggtagatggtgtttcaccatgttgatcaggttggtctcgaactcctgacctcaagtgatccacccaccttggcctctcaaagtgctgggattacaggcaggcatgagccaccatgcccggctgaggctggcaaaatactaatgttccgatttctttagaacgatatagttaagttccatgrtggcaggaatgatgtctacctctagtgtctagcacagtaccttgcaaagagaataggcgcacaatacatatttatagactttatcaagtgacaatacgtttggaagcgattaagtataattgagtaataatcaatatttgtattcaaaaacaaagtatcatctaaacattaatttcttttttacctttatgttt

SEQ ID NO: 793604 - DNA, 612 bp, Homo sapiens
ctaatggctttcctggacaaggggctcacaagagtggtagggctaaagcctaaaactgtacaatgtcaggtttcttcttctttttcagctaaaatttactaagaaccctcactgcctattcttcttttttttatgtgtgtgtgtgttttgaaatggccttrtgcacctgctggaccatctgccttgggggcaagtctgcctctttgctttcacttcacatgccacatgacttcttaaacacacactccctgttatttgtgtgcccgtggcttttactgtgtttgcatggcagcaaagacacgagctcccttgcagatatcccgagatttatacttgttcttaccctaccagcttccacgactctaaccctttccctgtctgctggcacatggccaggacagacattaattggaactccagctctgccagctccttgacttaccacatgctttttgttcctgttatgtcccagggccaagttttccagtgggttttgaagtagtctgtccacctgcatagggcctcactctgacgctttaaggatcccacctattggcttttttgagttagcactccactgagaggaaaggatattcttcctttgccatttgc

SEQ ID NO: 793605 - DNA, 597 bp, Homo sapiens
tttcaccactgattttctcttctttatagtacctgcttccgagtactaataaacagagcaaccttgacttaatgccttagatagagaaaagaaggttcaattgcacaccttgagaaaaatgaaccagaaggtttgctagaatccctgcaggagaggacattatttggtttgggaaggaaatggacttcaattctctggtctcttcattgtttgactttgcagcttttttttttttttttttttccccaaactccatgggtcaaggaaaaaggaaggtgaaacccatggacaactgcgacatcagacacagctggctgggccgytccgccagcccccactcagcaggcgggatgcaatgttcagggcaagggaggcagccagcccctggcgtgacattttcagctgtgcagctgtgggccctggcacgttgctgctggagcttgatggttgccttccagcccctgaatagcttttgattaggatgggatgcctagcagatgagtcagatttaaaccacgctgcatgtggttagtagcagccatttttttaatcactgtcatattgacggggattacaactccccatgagatgtcttaa

SEQ ID NO: 793606 - DNA, 597 bp, Homo sapiens
tttcaccactgattttctcttctttatagtacctgcttccgagtactaataaacagagcaaccttgacttaatgccttagatagagaaaagaaggttcaattgcacaccttgagaaaaatgaaccagaaggtttgctagaatccctgcaggagaggacattatttggtttgggaaggaaatggacttcaattctctggtctcttcattgtttgactttgcagcttttttttttttttttttttccccaaactccatgggtcaaggaaaaaggaaggtgaaacccatggacaactgcgacatcagacacagctggctgggccgctccgccagcccccactcagcaggcgggatgcaatgttcagggcaagggaggcagccagcccctggcgtgacattttcagytgtgcagctgtgggccctggcacgttgctgctggagcttgatggttgccttccagcccctgaatagcttttgattaggatgggatgcctagcagatgagtcagatttaaaccacgctgcatgtggttagtagcagccatttttttaatcactgtcatattgacggggattacaactccccatgagatgtcttaa

SEQ ID NO: 793607 - DNA, 623 bp, Homo sapiens
acacctgtaatcccagcaatttgggaggccgaggtgggcagatcataaggtcaagagatcgacaccatcctggccaacatggtgaaaccccgtctctactaaaaatacaaaaattagctgggcatggtgtcatgtgcctataatcccagctactcaggaggctgaggcaggagaattgcttgaaccagggagtgggaggttgcagtgggccaagatcacaccacagcactccagcctggtgacagagtgagactccatctcaaaaaaaaaaataaataaataaataaaagcaactgacacagggcctacacacaattggatgttcarcaaattactggttgaacgaatgaataaatatctgaatacatgaaagaatgaaagaggccacttgtattagactgttctcatgctgctgataaagacatacccaagactggctaatttataaaaaggtttaattgactcacagttgcacatggctggagaggcttcacaatcatggtggaaggcaattgaggagcaaagtcacgtcttacatggtggcagacaagagagcttctgcagggggaactcctatttatagaaccatcagatcttgtgagacttattatctaccaagagaa

SEQ ID NO: 793608 - DNA, 589 bp, Homo sapiens
ctaaagataattttttgaaaagggcattactagagataagtagggtcactatacaataataaagggtttaatacatcagaaatacataaaaattctgaacatctacacatttaatagcacagcctcaaagtatacactgcaaaataagataaaagtctatgtaattatttataaatctatagtcayagtggtctcttttaaaacaattttcagcagtttatataccaaacagattaaaaagtcagcaaagatagagataatctggaaagctcatatgattaacaaccgtgaaatgaaacattgatatggtttggctgtgtccctaccaaaatctcatcttgaattgtagctcccataattctgaggtgtagtgggagggatccagtgggataaaattaaatcatggctatggtttcccccatactgttctcatggtagtgaataagtcttaaggtatctgatggttttatgagagatttcttctttcacttggctttcattctgtcttgcctgccaccatgtaagacatgcctttctccttctgccatgattgtgaggcctccccagccacgtggaactctgagtccat

SEQ ID NO: 793609 - DNA, 345 bp, Homo sapiens
tctaactcactatgagttgttttcacgataaagcatagctatctgatcatgtataagaaattccatgtattataacccactacttttcacgcaatagcctttctcagtacacacaactagaaaacttaataagtaagtttggaatagtatttaraataacacatcctaagtggcaaattatgagtgttttcaaagttctaagtatagatatatttttcttgccaagtgaatccagaaagtaaattttggctccatatttgttttatattctactcaaatactaccagatgggagaagattaaaaataacccccaaatgtcttcccaccctcatctcatcataaac

SEQ ID NO: 793610 - DNA, 619 bp, Homo sapiens
ctcagtctccaaatcacttaacccaagtaaaatgttattctggtacttaattgccccagggaatagcagaaactcagaagtatctgagagcattgcggatactcatgactagaatgctggtcagtctatttaagctatkaagagtctatagacttgagctgaaacttatttaggagaaatctaccatcaagtattaatggtgtatttgccatacctgatgggggaaaatgtctcactaatctactttcctttttttttttttttttgaggcggagtctcactctgtcacccaggctggagtgcagtggctttatgtcggctcactgcaagctccgcatcttgggttcaagcaattctcccgcttcagcctccctcccgagtagctgggactacaggcacatgccaccacgcccagctaatttttttgtatttttagtggagatggggtttcactgtgttagccaggatgatctcgatctcctgacctcatgatctgcccactttggcctaatctactttcttaaagggctgcatttatgaaactcctgcctttcacaaaagcaaggacatacccatatgtggaagcccctgttaattcaaaacctcttaacactcttga

SEQ ID NO: 793611 - DNA, 561 bp, Homo sapiens
tggctggtgtgttccgagaacctctgaaggcctctagggctagagtgaagtgagattgagggaaagttacagaagagatagcaaggaaccaaattagatagacctttgtaggccattgtaagggctttggtttttaccctaggggatacagggagtcactgtaggactttgagtagaagaggaacatggtctctttacttgtttgaaggatcaccacatactatttcccaggcagggagcaaggrcagcattggagtgtctctgtagatctcccagtgaggaatggccgtggatctacccagggtgtcatcagaggacatggtgagtgtagttggactctgggtacgtttgaagaaacttacaacagaatttatggacagactgtttgcttagtgtaagtgagaggggtcaaaatctttgagaaactacaaggatagggatgtgcaaggctgtgggtagagtaggctagggtgtagaggagatgaggagttcaactgaggatatgaaatattgttatcagagagcagcagccttttcctgtagatcttgcagaaaagccta

SEQ ID NO: 793612 - DNA, 570 bp, Homo sapiens
gggctcccagaccttgaccatactctagcctgggtacttcccaggactgaactccactgttcatccctacctgggctacttcaattgtcactacccttatgcaaatcagcctaacaaagatgggtctcggtgttatatttgcccactttttttcctaatggtggcccgattactctaggttcctctctgcttttgtgaacctgttgtccctctggckaccacagactctaaacactcttcattcattgatgccataagtgattaatctctggctcatttcctcccatctcccccagagtgtgtgcagtgcccattcatcaagatgcccagataattgaagcaatccaccttcattcgggccatgctctgggcagtgacgccagcctggcgatctgcggtgctcaatgtgattactgtttcttagtgaatccctggggctcctcagcctcctgcagaaccgcatcaccttgaatggcttttctgtaaatgcctccccttcctctccatcaagtccttctgtggattttaatcttaggttggctttagcaatacacagtcctgacttacatt

SEQ ID NO: 793613 - DNA, 553 bp, Homo sapiens
tgcattcagtagaaattgtacttaaattttgatttttgatcttttcccaggctagcgatatgtggcgtggtaccctctcttgatgctgggcagtggcggtgagcacagctcccagttagccatgcgatcatcagggtaaatgaccaatactgtattctacaatgtactgtattcaataagttatatgagatattcaacattttcttataaaatagactttgtgttagatgaccttgcctaactgtgggctaatggaagtgttctcagcatgtttaaggtaggctaggctctgctatgatgttcagtaggttagatctactacatgcattttctacttaragtgttttcaacttgtgatgggtttattatgaggtgaccccattgtaagcggaagagcatctgtagtcttaccatgaccctgagatgaattgttgtcattgaagaaccaggcagataggatgggcttaaactgtggtttgagggagttgagttggccattagaaaaaattttttctctgaaggtggagaaactgaaatatactactaagaaggg

SEQ ID NO: 793614 - DNA, 601 bp, Homo sapiens
gtagctcacgcctgtaatcccagcactttgggagactgaagcaggtggatccacgaggtcaggagatcgagaccatcctggctagcacggtgaaaaccccatctctactaaaaatacaaaaaattagccggtcgaggtggcaggcgcctgtagtcccagctactcgggaggctgaggcaggagaatggcgtgaacccgggaggcagatcttgcagttagctgagattgcaccactgcactccagcctgggtgacagagcaagactccgtctcaaaaaaaaaatatatatatrtatgtatgtatatatatatatatatatatatatatgtatatatatatatatttctatactaaaagtacactgattttttttaagttattccaaagttttgttgcctttgtgtttacaaaaggtggtttatttttataagattatttaaaataagtttaagttaaatttgtctctacatagtgttacttagctttatgaatatagcataaaatgagctattcatcgttttctttgactgttacgtcgatggaagtgtaaggcctaccttcccagcattatcaggtgttttttttttttttattgtttagc

SEQ ID NO: 793615 - DNA, 537 bp, Homo sapiens
ctctcaggatgtcagtttcctcctgtaaaaatggggatcctagcagagtgccagcttcatagggttgttatgaagataagttaatacatacatagttgttagaagagtgcctggtatattgtaaaccctcaataaattttattttattttatttttttgagacagagtctcactctgtcatccrggctggagtgcaatggctcgatctcggctcactgcaacctccgcctctggggtacaagtgattctcctgcctcagcctctcaagtagctgggattacaggtgcctgtcaccacgcccagctaatttttgtattcttagtagagatggggttttgccatgttggccaggctggtctcaaactcctgacctcaagtgacccacctgcctcggcctcccaaagtgctgggattataggtgtgagccactacacccgccttcaataaattttagctattactgttagcactgagccactggaacaaaccttacctgaactgaaactttcctttgaacttcactgatataggaatcca

SEQ ID NO: 793616 - DNA, 537 bp, Homo sapiens
ctctcaggatgtcagtttcctcctgtaaaaatggggatcctagcagagtgccagcttcatagggttgttatgaagataagttaatacatacatagttgttagaagagtgcctggtatattgtaaaccctcaataaattttattttattttatttttttgagacagagtctcactctgtcatccgggctggagtgcaatggctcgatctcggctcactgcaacctccgcctctggggtacaagtgattctcctgcctcagcctctcaagtagctgggaytacaggtgcctgtcaccacgcccagctaatttttgtattcttagtagagatggggttttgccatgttggccaggctggtctcaaactcctgacctcaagtgacccacctgcctcggcctcccaaagtgctgggattataggtgtgagccactacacccgccttcaataaattttagctattactgttagcactgagccactggaacaaaccttacctgaactgaaactttcctttgaacttcactgatataggaatcca

SEQ ID NO: 793617 - DNA, 640 bp, Homo sapiens
caacaaaagaatgtattttgggtgatttttctttaggacatgcccacacattttatcatgatacatgtactattccagaagggcggggagagtgggactgttgaaagtccatgtaaagaaatcataatgtgaagcaagcaacaagagagaaaacccttcttatggtttcacatctatacatcaattgctacgattttttttaagttttagtgtaagatatttaagttcatgtttgcatatcagtgtgcagcgtagaaacatacatatttctccgggctcaaccacacatgtggcaatgtctctccagcagcrgactcctctcacagtaagtctaaggagcgttggccgaatgagacttcacattcagtgaatttccactatctcttcagtttctccgtgctactgaaatctcattgttccactcagaatttatcttctcctaggaatctctttcaaagcatttcactgactatgtcaagccagagtaagtaaaacgctgatgagcttggatttccactccagtctctcagcctttctgtcttatagtttggcatctcatttctacatgatatcagatgccatattagaaattcctgcttgatcttgagatacatcaaaggtactgactgacaggtcatta

SEQ ID NO: 793618 - DNA, 610 bp, Homo sapiens
atctatgaatattctgagtttaatttacatttctccaaaacaaatatgcattttcttcccccaggtatgttagactctaccaccctggggccaaattaagacaaatattcatcttaggagtttgtgaagaagtcagataggtaatataatatttttattttttatgaaagtaaaatacgtatgcacaaaaatgtgcacgtattacaatgaaagggaaaaatgaattttcacaaactaagcatatctgtgaagccagtaccgaaaacaagaaacagaaaattataggtacctagatgccccccacacgctctgccgtgtgtgtgtgtgtgtgtgtgtgtgtgtgtgtgtgtrtatatagtttgtttgcttttgttttatttttcttggccctgagcaaaggctgagttcaggaggtgccctccacgtctcctgtatgggtttagctcacctgtcctggggctgggctctgttttctcacctgttggggtcccagatattatccacccacggtcccaggttgtatccactcttctgtctgtgattggccaaattacgcttagggaattagaaatatgtaaatatccccagggcaaacattgtttctagcact

SEQ ID NO: 793619 - DNA, 632 bp, Homo sapiens
attatgagccaatatgaattaaagaatacagtcaattttttgacacccccgccccactatcccaagcaaatggacaaaatttaatgtgtaaacctcttagacaatgagataacaagctcacgtatttggagaaaaaggaaattattcagcaaatcagtggctattacggaggctgtcaagggttctttagccagggagctcagaccagcaacactagcatcacctggaggcttggaaggcacacacatccatagcgcaccccatacctgctgaatcagagtctttgtagcagggcccgggagtgtrcccttggcaagatctccaagtaatgatgcacactaaagttttagcagcactctactgcagcaatggttctcaaattttagtgtccatcagaatcacctggaggattgttagaacagattgctgggcttcacctccagagtttgtggtgcatggatttggaggagggccagaaaagtctgcatttctcacagccttccaggtgatgatgatgccattcaagatccataattggaaatagttgtacgtacccatccagagataaatgtattggtttatttttttctttgcagatgaatccttaaatagggattttttttaaattaaag

SEQ ID NO: 793620 - DNA, 638 bp, Homo sapiens
gtatggaattttttaattcctggaatgcaaggttgttccaacatgtaaaaattgatcaatgtaatatactacattaacagaacaaaggtcaaaacttatgtaattatctcaattgatacaaaaaagtatttgacaaacttaatgccctttcatgataaaaacactcaaaaaatcaggagaagaaaaaagttacttcaatgtaataaasgccatatatgaaaatcccacagctaacattatactctatggtgataaagtaaaatgtttccctctaagatgaataaaacaaggatgcccactctcacaacttttattcaatataatactgaaagttctagacagaacaactagataagaaaaagaaatggaagacaaccaaattgcaaaggaagaagcaaatttaactctgctcacagtagttagaaaactctaaggattatacacacccacacacaattagaactaacaaatgtagcaaaattgcaagatacaaagtcaatatacaaaaataagttgcatttctatataccaacaatgaacaattcaaaaaggaaattaagataacaatctcattaaaaatagcagcaaaaggaataaaatacttaggaccaaaattaaccaaaaaggctaaagacttg

SEQ ID NO: 793621 - DNA, 560 bp, Homo sapiens
gattccactctactatggaagttcaaatctttcctagaaaggggcctggggacttccgtttccatagtcatatcttcctcaggagcataatttccatgacacatgaccctccaaccgtcctgcacatggtgcttctctgaactgctacactgatccagaagccaaaaccaggcattctcaccatctcctaccctctcctcacccaaagaaggcacttcgtatgtatggtagagtttcatcagtatttagagggactgagaaagaaatcaagttgcaagaacacacactctgatttttttcatgcagggtaatgcagcctcttcccccaaatttggatctaggcttttttgttgggggggggggggggtacagccaagcccatcagggagctcagagctaaaaggcmgtgctctatttgagaaaggacactatttagaagactgtggaagcaatatttcccttgttgagcagaaatgttttattctttctgtaagttcttggaatatgaggcctcacatgactagaggagctattttaaatatcacaggagctgttcagaa

SEQ ID NO: 793622 - DNA, 635 bp, Homo sapiens
ttgatttcctttttatggagacttgattttgacagaagccctaaacttgtaataaagataatgctgaaggtaccacccattgtgttcacgagaacacctcacctgggcatttctatagcaactatcattacagagcaacaggccaaggcagaacgcactgaagaacactttttytttggttttgtttgtttgtttgtttgttttcttgaactcagctgttttttgtgacccaagcaatgtttctgaatccaggctgtgccctttgtggaaaatgtgttcattattttatgcagggatttgcaaatgctcacaaactgaattttagcaagttgagctctggtttccccatttacttacattttattttcccaaatgggttttccgtgggtgttgaatgaatatttgatggttccttgctctacttcctgtccttcagagtttttctaactcattgtaataaaccaacaaaaaggagagctaactattcaaagaaactaatcaatcaacattgatctaaaacccaggttcatttaaataatgcaaatcatcagaccatatcatttttaatattgggaaaatgcagtacagcatgtaagagcatggactccagagacaaatgtccagggtttgaatcc

SEQ ID NO: 793623 - DNA, 598 bp, Homo sapiens
gtagatgtacatgtgggaggggagatattgtggcagccaaaatgcagtcacccacagaggctatcaagctggaagatatttacattatataaataaatattttttttttcatttaaatgtgttttagctttttatcagtcttctcaggctgccatcataaaatatcacagacttgatggcttaaacaacagaaatttatttctcacagttctgtagggtagaagtccaaggtcaaggtgctggtagggttaggtttctagtaagggctctcttcctggtttgtagatgatgctttctccctgtgtcctcacacagcctttccttgatgtgtgcctgtgggagggaaggaagggagaaagactgtgagctctctggtgtctcctgttacaaggacactaattctattagataagggccctatmttatggccttatttaaccttaactacttcctcagaggccctatctccaaatgcagccacactagggggttagggcttcaaattatcaggggacataaacattcagtctatcacattcttcccctgctcccctgaaatttatgtccttcttgcatgtaaaatgcattcattcattcc

SEQ ID NO: 793624 - DNA, 451 bp, Homo sapiens
ccctggttttttacttctcttggcaattctcatttttctagaaaagtgtgctgttatggactgaattgcatccctctcaaattcatatgttgaagcctgtgacccccaaatatctgagacaggtctcagtcgatttagaaagttycttttgccaaaattaaggatgcccccgtgacacagcctcaggaggtcctgacgacatgtgcccaaggtggtcggggctcagcttggttttatacattttagggagacatgagacatcaatcagtatatgtaagatgtacattaattccatccagaaaggcgggacaactggaaacaaaggcaggacaacaacaaaggtagggagggggcttccaggtcataggcagataaaagacaaacagttgcattcttctgcatttcggattagtctttccaaaggaagcaatcagataggcatttatctcag

SEQ ID NO: 793625 - DNA, 679 bp, Homo sapiens
agtcatctaaattaatcttattgaggatcctttgtatgtgatgaatcacttttctctggatgctctcaaggttctctctttgtctttgggttttcaccatttaattatggtgtgtctaggcatggctatttgagtttatcctacttggagttcactgagcttcttggatgtgtagatgaattttttttgtaacattttggaagtttttgcccattatttcttcaaatattcttatcgccttctcttctctacttctgagactcccatggtgtgtgtgttggtacacttratggtgtcttacacgtccctaaggctctgttcatttttcttaattcttttgaaaaatttttctcagactggaaaacctcaatggattaatcttaaaggctgccttattttttatctttcctgctcaaatctgctgttaaaattctctagtgaagttgtcattccacttcttatacttttcaattccagaatttccattttatcgatattttctatttggtgagacattattcttatactttactttagttctttagacatgattcttttgttttttgaatatatttaaaagagctaatttaaaggctttgtctattaagtgcaatgtctgtgcttcctcaggcacagtttctgttgaccacttctttcctgtatatgggccatactttct

SEQ ID NO: 793626 - DNA, 563 bp, Homo sapiens
cataagaatgtcaatttttactgggtaaaatatttcaaagtacagaggtattataaatgaatgcgaaaagacaaaccatcaattgaaaaatggccaaaaagcaatgaacatgaagttcacagaagaaatacaatcagccaatagactttaaakgtcatcctatgcactaataatttaaaaaaatgcaaattaaaagaaagagatacgatgtttactagaatactccatgctggcaagagaggaaaaaggtgtgtgctcatagggactgtaagtggtaccacctccctgagagacatctggtaacacattacatttggtaacccatctgttggaagacctctgacccagaaatttcaatgctgagaaatttaccctaaaaaatactcccactccctctccctctccctctccctctccccacggtctccctctccctctctttccacggtctccctctgatgccgagccgaagctggactatactgctgccatctcggctcactgcaacctccctgcctgatttcctgcctcagcctgccgagtgcctgtgattgcaggcgcgc

SEQ ID NO: 793627 - DNA, 617 bp, Homo sapiens
taccaaagcacttaccattttctagcatcctatgtgactcacttatgtttactgcttattgtctacatcctccagctagtatataggttccataagtacagggtttattgtctgttttgttcacctagtagatgcttmataaatatttacaggctgaatcaacgtcataaaacatggcaagcacagtccatggaagataccagtactggaggggctcccactacactgtgccttgtaggctctgtacctggttcaatttcttgaactccaccacttggaagaagacgtgctcaaggatatgtttggcatcctgttggtcctttggtagtttactggttactccaagaatatcaccacacttcctgacataaaattccaggtcttcttcagtacctaagacagttggagtagtagttagattaattcttaacttctgcccttcccaaagtacagacttagtgtgtttcaggtatgccctgtcatgtttccacatttcctaagatcactcacctcttcctaaagtaatgtgactacaggatttcaacactgaaaaaccctagagctctctaatgtgctgcttttataataaaggcactcctaatcagaataaaactgga

SEQ ID NO: 793628 - DNA, 575 bp, Homo sapiens
ctaaagagttgatctaaagcataacttagataggtttcgtgagaaatgattgtccgttcaaaccagaatcttggacttcgcatctaagcccttaaacagagatgctgtcactacaaaaggcattgatacttctctctctccctttctttcttatccatgtggcctcatttgctgcctccttccaattccttttttccataggaagaagcatctccagtgctcttcattcctctttagatccatatttccatctggttccttctgaaggccatcctttaaccatgtagtgtgggcttgctggtgatgagttctaatttttatatttttttgctaatttttstatttttttgtagagatggggtttcgccatattggccaggctggtctcgaactcctgactcaaatggcctgcctcggcctcccaaagtgctgggattacaggcgtgagctgtaatccagctgttattcctttgtagagagtctctttagttatccctcaaatttgacaggctgtatggtggtgtggtatttctctatttttttcccccccggctttcatatcagactaaagattc

SEQ ID NO: 793629 - DNA, 605 bp, Homo sapiens
tctgtcacttggagttcagcaatcaaacagggaaggacttgcggggtagggagtttgggttcaaagtcagggagaaaccgcgggtgaacgctaaggcctgcccagaggcgggtggacccaaccgcaagctcctccagccttacggcagctcctggcaacatcctcaccctcctccgtgaaaaccggaggggaatgtcaggccttggagtcaacccgagagtctcgccgcccgcaggtgacccggggcaagtgacrtgccctgtttcgaggggcctcccatgtaaaccgaggccaaaggctccaggatgctccatggcagcgcccgcgccacgggccgccagactgcaccgtcaggagggcgcaggggaactccgagatcccagtctgagcccgcgcctgggatcaggcggcccgcggggcatcgcgggagtcgcgtccctgacgtcaccgtggggcgcctgtgcgcaggtacacctggagccgggctgcgacggctctggggctctaaccagccccgcgccccagaggcttcttctcggtggcgtggtctcgttcgtgtggaggacgggtgaaagaaagtcgcagggatgagagggagcaaggga

SEQ ID NO: 793630 - DNA, 635 bp, Homo sapiens
gaaagaaagaaagaaaaagaaagaaagaaaaaaggaatgttcatttcagtgatccctaattgaaaacaatctaagttatgctcatttgggcattggagaaataaacaatagaacaatcatttattaaatcccatctgaccatgaagaaggttggggagattcctattgctggattgccaacaatctacgaaatgaaaaaggggtgttcatcgacttcccgcatccaaaacatcatgacatgtggccagccacatcccctcagcaacccctcgagtgaccacgtgtcacgacggccatcatgcgtttacctccacgtggaagcatccctctctcttcctcctctttcttgattgctcctctagcaaaaaagtcttcacacaacaaccaaactgagcctgtaraaacacaaaccagaggaggatacatccaaaccatttcctgtggtctgcgaagctctatctatgctggcctctgcctgtcacttacagtcatctcgccctacactccaccccgacactggctgtcttgctgatccttgaagcaccaatgtcatttctatccttcagcctttcaggggctgttcctctgtaggggattgggggtggggtgggactcatttcctagctctaaaaagc

SEQ ID NO: 793631 - DNA, 654 bp, Homo sapiens
tagccctggccaatcttatagatcttcttgttgatctcagtgcggtgatggtagcctttctgcccagcgcgtgccacagagaatttgatggcgtgatgtctcacagaaagttctccgctcccagacatgggtccctcggcttcctgcctcggaagcgcagcagcaggcatcgtgggaaggtgaagagcttccctaaggatgacccgtccaagccggtccacctcacagccttcctgggatacaaggctggcatgactacacacttctaaacaaccagawctcacaataactcacccactcactatcacaaggacagcatggaggggatggttataacccatcatgagaactctgctcccatgatccaatcacctcctaccaggccccacctccaacatcggggattacaattcaacatgagatttggacagggacaaagatccaaatcatatcagatatataagcaaaaatttaaaatagtggtcatttctggacagtatgatttttgtacagatattttcttctttttgcaaatctgtattttcttaattttctatcattcacatggctatttctgtaatagaaaaaataattttgaacattaaacaaaatacctgtttttattacgagaaagcataggaatggaatttgcaa

SEQ ID NO: 793632 - DNA, 537 bp, Homo sapiens
acctcccacagataccaaaacctgcagatgtttaagtctctgatataaaatggcatagtattttcatataacttatgcacattctcctgtacactttaaatcatctctagattacatgtcatacctaataaatacagtgtaaattctatgtaaattattgttattctgtattgtttaggaaataatgacaagaaaaactaagtcaatacatgttcagtacagatgcgatttttttwaaaatattttcaagccaatctatgattcaaccaatctataattggttgaatccatgggtgtaaacccacagatacacaggctaactgtatttggaaactaaacactcttctaatgctccacggggcaaaggagcaatcaaaataaaaatgagaaaatattttaaactgagtaaaaatgaaaacacatcaaaatttatagaatgctgctagagcagcacttagggagaaatttatggcattacggaataagaaatgtctcaagtcaattatttcagctttcagctttagaaactagctaaag

SEQ ID NO: 793633 - DNA, 537 bp, Homo sapiens
acctcccacagataccaaaacctgcagatgtttaagtctctgatataaaatggcatagtattttcatataacttatgcacattctcctgtacactttaaatcatctctagattacatgtcatacctaataaatacagtgtaaattctatgtaaattattgttattctgtattgtttaggaaataatgacaagaaaaactaagtcaatacatgttcagtacagatgcgatttttttawaaatattttcaagccaatctatgattcaaccaatctataattggttgaatccatgggtgtaaacccacagatacacaggctaactgtatttggaaactaaacactcttctaatgctccacggggcaaaggagcaatcaaaataaaaatgagaaaatattttaaactgagtaaaaatgaaaacacatcaaaatttatagaatgctgctagagcagcacttagggagaaatttatggcattacggaataagaaatgtctcaagtcaattatttcagctttcagctttagaaactagctaaag

SEQ ID NO: 793634 - DNA, 549 bp, Homo sapiens
cgcctgtaatttcaacattttgggaggctgaagcaggcagatcacctgaggtcaggagttcgagactagcctggccaacaagttaaaccctgtctctactaaaaatacaaaaattagctgggcgtggtggcaggtacctgtagtcccagctactcaggaggctgaggcaggagaatcacttgaaccygggaggcagaggttgcagtgagccgagatcacgccactacacttcagcctgggcaacagagcaagacgccatctcaaaaataaataaataaataatcatttcaagtgctagaaacatagaagctacttactacatgttaggaccacccccttcccctcccacctctcccttccaaacactatgcctggcaggttaaaatgctcaccaataaatcactgaatggatggattttaagaaggtgctgaggttttactcaatacagaatccttaaaagagccaggagagatctaactcaggggagaacccccatgtctttgccacagaaaaagttctaggatggatccagcgagattctcaccact

SEQ ID NO: 793635 - DNA, 631 bp, Homo sapiens
ttagtccaccacaagaataatcacaccacatatatacaattccaaggaaaatccaacttccaaaaggaagagattccttctcaccaattcccaccacctggttattcctatgaagccttggtagagtaggttcaactctaattctggacactttgttatatgagcttctgcaaaccctcatcctgctaraatatggtgtaatacatctgtgtctcaatcccaacaaaagacttggtcagcagtggctgcataatctgtggggcacagtgtaaaatgtagaagcagaggcacttgctccaaaagcaggaaaaacgtgccctgcaaggtactgaaatgtaccctcactgttccttcctctctctccctacttgtcacggtgtctttgtttgctatgtatttgtcattctaagtaaagaaaaattaaacttaaattattagcatgaagtgtatcatacatctttatatcgtgcaattccagtttaaacacaaatataagagcatttaactcatgcatagaataaacaaaattatacaatttgtactttgcagcttgtatatgcatgtttatttcattcttaccagaaatatggaaacgctgcagaaaattaactccacttttttatttcacttc

SEQ ID NO: 793636 - DNA, 549 bp, Homo sapiens
cccctccttctgaggcattagagagcaggccgcctgctcatcctgacgctgtctccactgcccacgccaggagccagtgatggtcctgctctggaagccacccacagagaggcagctcgagggtacgggaggctgacaggtgcccaggtgtcggacgtgacggcccagacacctgcctggctattactgagcctcggtttccatgaactagggacaccagcttggtgttttccggacatgatgaccaccgggagaggaatcccactcaatctgctcaaacaggggacagagggtgaggggatgaggcaggggaggggcaactgaaatctcggggcaggaggacaacaaartggggctgacacttggggccaaccgtggagaacagaagtttgtgtttttctctggctttatcccccatatctgacacacacatacacgcacacacacatcaacaggcacacatgcacacacacattcatatccacgcatttatgcacacatacacacattcacaccattgcatgtgcgtgcacacacacattcacaccc

SEQ ID NO: 793637 - DNA, 569 bp, Homo sapiens
ctttgcacgttcaggagactcccatggggagtgaggtcagcctgttcccctttcgttcacttcgacttgatggttttctcaaaaacacaatggaactgctgggctggagatgttcagttggtcagaaggctgtaggctgctcaggacccacagtataatggtggycttgaaggtttatattttcttagatcattaagatgttagatggcctcatttctcaggtgtgtttctagctcaggtgtgttttactctgggcaaacacacttccattccagcctgcatttattaaccaccagttgtatgcaagggccattgctaggggaccaggaggccaaaggagcacatatattttggtggttgtgcattggcagtctgtctcctcattgggaacattggtacgccatgggggtggggtcaccagatgtgtttgcaccctgtccccaggacacggggaacatgcagtcaccagggctcaagatgctgctatggagcagatgaggctaaacagaaaacagtacacatttcctgggtttcagtgagaaactaaaatgctcattcacaaaatctcc

SEQ ID NO: 793638 - DNA, 645 bp, Homo sapiens
gaagctccagcatcagacaccaaagcaacagatttacagggactgctccagcagccccgcagctatgaggttgcggtcaaaacccaggtgtagatccctttctgtctgtactcacatgtaccttctagtggttctgcttctttgacccaaccctgactgatacaagaagacacgcccccagctggctaacctcctggactcaaacataacaagtgctctgagttgtggatgctgacacatcatggagcaggggagcaaggggaagctaccgaggggtgacgcttgagccagcctggacgagcctgccaggcggaggggaggaggrtggcccagggtgagggtgcagacccaagtgaggttcagcagtcccaccaggctccatcaggagccagcgcccccccccccccacagtaaaggagcacacccgaggatctgccgctcccgccacaggcccgaggggttgttcaaacccagaccaggtctgttcagccttgacgcctccccataagccctatcacggaggatgaagaccaaccaagggagcaaatggtctgagccaaagagaaagtcagaagggcgggtatgggcattttctatggagaaaagggtggcagaggaggagtttggcccatctaagaatagagt

SEQ ID NO: 793639 - DNA, 632 bp, Homo sapiens
cactttatgcgtgggctcttaatcgctgtattaaacagcttttattctctccaccgcctactcactgcccgccccacaacacacacactactcaagctttctaaaccactcctaccatttcttcttgagaactagtttggcctttgaagagctttttctctaaactgacatctcctccctcacttcctttgctttactgcctcttgagccatgaattctccatggtgattatgacctcagagagtacgcatcacttggggagcagaaccccattcctagaatgcactgccctgggctgggtggctcccctttggcagttgctctctcgtccccaagccacttatattaacccttcccaacatgctgagttgggggtcagggagaggagaggaaaatggatccgtggcttcacctgaagagcagggctctgatggtgcccaaagtgtcacatggaaacttgaggcwtctacctggcttcctttatcactggataggaattttcacagttgccttaatgtgatgctaataatctttagatttaacaaacaacggaatccgtactaagttgattttattttaatacatttaaaataaataaatctaatggagaaggataaaattttttcttccat

SEQ ID NO: 793640 - DNA, 622 bp, Homo sapiens
ctccagcctgggcaacaaactctgtctcaaaaaaaattaaaaataaataaaaaaaacacgacaggcttctctggcccgcatgctggctgtgtgttctagcccacgggccactcactgtgtgtccctggctgggatgtctgagttgagcctgtagtcccctcctcatgaagcaggaatagattagattaagaagtctccccttggggtgccctataagaactaatggttcttattttgaatatgtttatattccccctctaaggtaatccagaatcaaatgtgaatacactttgggttgttcaaatttccattttctaatatacccccaaaggtcatcctgatctctagtacagtttactgacttcattctttcttttttgttcattttaatttttttagagwcaaggtaggtctagctatgttgcccaggttggtctcaaattcctaggctcaagcgatcctcccgcgataggcatgtgccaccatgtccggctcttgacttcgttctttcaacattcattgagtaaaattcattgactatattcttacaggccagatcgaggttctagaaacatactgcctgaactcagtttgagttctagtttcctcaccatctgcttct

SEQ ID NO: 793641 - DNA, 669 bp, Homo sapiens
attatagtggttttattgagtagttaagctgattatgtgccagtccacagccataaaattaaaacaaatttataaatgaaataaaaaagaaaactataaaaccaataaaaatccaaatgaacaattgttttaatataacgaggtagatgatgtttttctgctggaacgaaatcactcttctcttcacaacacagctacggaactgatgtttccacacaaatgtttttgagtttggcatatttatactaccacgtgttttgtgatggctcaattctcttaccaattgactctatttgaagtactgtcaaatcaccattagcatcaaatgtcatgatagcttttgacttcgcttggtctaaatgcatcacttacatcctaagttacttctgttcttttctcatgcacacaggataatccaagaagcacaacttaacaccagctgtgttataaatacaactgcaaacacaatttataacataagatggtcayccagaaacctagaaaaataaaacttacatgcacactaagaaactataaataaatgttcatggcagctttatttgtaatagccaagaactggaaagaacccaaacatccttcaacaagtgaatagtgaaatacactgcagtacattatacagtagaatattactcagcaacagaaagaaac

SEQ ID NO: 793642 - DNA, 571 bp, Homo sapiens
cgtgtaattagttggccaaggccacccgcataaattatttcctgagtttgggccctactggctggcctcacttgaaggagtgcccaatggaacagccccatgcaacaggacatgaacctggctgttgctccagttttgatctgctgtgacctttcagacagagaaggcaaaataactgtttggaggaaactcaatgaaattaaagataacactgacaagtaagttagaattctggccggtcatggtggctcatgcctgtaatcccagcactttgggaggccgaggcaggtggatcacgaggtcaggagatcgagaccatcctggccaacatggttaaatcccatctctactaaaaatacaaaaattagctgggcatggtggcacgcacctgtagtcccagctacttgggaggctgaggcaggagaatcrcttgaacccgggaggcagaggttgcggtgagccgagatcgcaccactgcactccagcctggtgacaaaacgaaacctagtaaaaaaataataatcatcatcatcatcatcaaacttccaaaggtcaaggataaataaaggat

SEQ ID NO: 793643 - DNA, 602 bp, Homo sapiens
agaaatgaatgcatctttgagctggagaacgagtggaggccagagtgatataaatggcccaccagcaggcagcatcctccatcagcaggaggagtgaaatgcacttttatcacaggagaaggttgaaggagaatggatgagcaaatgtgattgggaccacaagcaacaagaggagggggaatgttccacacaaagggaaccacatatacaaagactctgaggacaggcgagaagcacgtaacaggaactgaaaggcagccacaaagggagagcagagagcaagaggagggcggtgtcagatgcaacgaaaggggcagaagccagatcatggrgattattagcatgtggagggggaggatgatgcgcgggagtgctgagttttctctttcaaaagctcactttgttttcgtgtggagaacaggttgacatgaaagaaggaaggagctgggaagacagttattagtcctcttgccagtcctccacctgagtcttggcgagagatcggaccaggagtctaatactaactagctctgtgaccctggataatttgcttcacccctttaagcctcaaattccccacccgtaaaatggcaataatcatg

SEQ ID NO: 793644 - DNA, 593 bp, Homo sapiens
cagtggctcacacctgtaatcccaacactttgggaggctgaggcgggcagatcacctgaggttgggagttcgagatcagcctgaccaacatggagaaacccccatctctactaaaaatacaaaattagccaggtatggtggtgcatgcctgtaatcccagctacttggggggctgaggcaggagaatcatttgaacccaggaggcagaggttgtggtgagccgagatcatgccattgtactccagcctgggcaacaaaagcaaaactccatcttaaaaaaaaaaaagaattttcctctattactgagtttgaaggggtcatcaataataccctccattttcctattggatttcagaacaaactgaaagatgaagacatgggatwcagacacataaaaattaagtatcactttcattactggttaaggtgatttgggagaatatagtttaggtgtgaaagccaaatgagattgctaagaagatgcccaccaccaccacaatttaacttagactccaaaactgcaggcttcctcacaaggacagagctcaccctacaaacaagagcaaatgaaaccactacctctgaaggcaggt

SEQ ID NO: 793645 - DNA, 588 bp, Homo sapiens
aagcagtcagaccttatggttgtcttccctcattccctaaaatcactgttattctgttcattttcaaggtgcactgatttcatattgttcaaacacccatgtttttcaatcagatttcatattgttcaaacacacgttttacaatcaatttgtacagttaacgcaatcatcacagggtcctgaggtgawgtacatcctcagcttatgaagataacaggattaagagattaaagtaagacaggagtaagaaattataagagaattatcaggaaagtgataaatgtccatgacgtcttcacaatttatgttcctctgccacagctccagccagttcctccattcggggtccctgacttcctgcaacattaagatttctttttagcaaaagaacccttgtgtgagtacaaaatgtaaaggagaaaaaatcagcacaattctcttgaaagtcaaggtgggagaccccaacccccaagctcaatggcctccagctggtcccctgcagtgcccccttcacatactccccatggaatttttaggacacaactgggctcagcttaaaaaccactgggcttagaagaactgtaaagt

SEQ ID NO: 793646 - DNA, 593 bp, Homo sapiens
gggctgttaggagagataatggttgaaagccccaaattgttagtcgtggaagcagcacacactgttacattctgtgccatcttcaaatagattgccttggtaatagaactaacaaactaaccaaatagctattcattcttctttttctcaagaatgtgtgatatcattgcaagatatcagtactaggactaaacctattaaggccaagtggtttgtgyaatcccggaaaaacgagctacggttgctaaaagatgcactctcccgttactacaacataaattcaaagcttacaccagccagcaagtgcaatcttacaaatatctcacttcaactcactcaacacacctactagcaaagaagcatgtctattgatgccttcaaccaaagattggaaaaaacaaaatgcacatattttatgtactgtctcattgaaaaaagttgagattatagttgtaaaatgaagtaattataaataaatgaatacagaatataaaatgaagccagagatgacagatcccaagtgtgtgaccagagtcctatttaacgacaagtactaggaaggtatgttacttggtgagtattagaaacttggg

SEQ ID NO: 793647 - DNA, 578 bp, Homo sapiens
cctatggaggaaaaaaagcactagttatctctatttacaaacagaaaaactgagcgtagaaaaattaatatctgatctatgttgtcagtagaagggtaacttatttcccaattacatagtgattattaggtgccaggtataattcaaccctgtsaggttagcattatttttattcccattttaagataaggaagctgaggctcagagaagttaagtaactatctcaagtcacaggagtctggctccatagactgtcctgttcaccattcagtaaggctaggacacgaaagaaaatcctgacttgtggggttaatcctctttccattaaaggtaagtgcacattcagttatctcatgaataatcaaagccatatttacatttctgtccaatgtattcttgaaaaaaaaaaaaaacaatctcttccttctcttccaggttcattagcttgtctgtaaattaaattgacataaggcagattaacaagagaaaaacaattttaattacgtacatatgcatgagagtatgcatatgagactcaagctagatgattgaggcttatatatcaatctgagctacag

SEQ ID NO: 793648 - DNA, 578 bp, Homo sapiens
cctatggaggaaaaaaagcactagttatctctatttacaaacagaaaaactgagcgtagaaaaattaatatctgatctatgttgtcagtagaagggtaacttatttcccaattacatagtgattattaggtgccaggtataattcaaccctgtgaggttagcattatttttattcccattttaagataaggaagctgaggctcagagaagttaagtaactatctcaagtcacaggagtctggctycatagactgtcctgttcaccattcagtaaggctaggacacgaaagaaaatcctgacttgtggggttaatcctctttccattaaaggtaagtgcacattcagttatctcatgaataatcaaagccatatttacatttctgtccaatgtattcttgaaaaaaaaaaaaaacaatctcttccttctcttccaggttcattagcttgtctgtaaattaaattgacataaggcagattaacaagagaaaaacaattttaattacgtacatatgcatgagagtatgcatatgagactcaagctagatgattgaggcttatatatcaatctgagctacag

SEQ ID NO: 793649 - DNA, 627 bp, Homo sapiens
tgtgactacgaaaggataaagtaaaggatcctgtggtaatcagaaagttatgtatcttaacttcatcaatgtcaatatcctatttgtgaaaaggaaacaaggcacgtagattggaaaataattttttaaactgtccctagttgcagatgaggcagaaaatcagagggggtcggacatatgtggttcccacatataatcccagcactttgggaggctgaggtaagtggattgcttgaatctaggaattcaagagcagcttgagcaggatggcaaaaccccatctctacaaaaaatacaaaatatagccaggtgtagtgacacacagytatagtcccagctacttgggaggctgaggtgggagtattatttgatcctgggaaatagaggctgcagtgagctgtgatcaagctactgcactcaagcctgggcaacagagcaagactcatcctcaaaaaaaaaaaaaaaggaaatttaagaaatttaaaaaatcagaggaaaatatttcttaattctagaataagagaattagcaagattacaggatagaagataaacttagaaaaacaaaacacttctacatcttagcaatgaatacatggaagctaaaatgaaaaaaatatcatttaca

SEQ ID NO: 793650 - DNA, 515 bp, Homo sapiens
aaaggtgctcaacataagtgatcatcagataaatgaaaacctatctgaatgaaaatgaaaatgaaaatgaaaatcactacaatgagatatcgtcttgccccagttaaaatagtttttatccaaaagacaggcaatagaaatagctggcaaggatgtggagaaaaaggaacccttgtacactgttgagggaatgtaaattagtaaaccactatggagaatagtttggaggtttcccaaaaaactaaaaatagaactaccatatgacccagcaatcccactcctagatatacagccaaaagaaaagaagtcagtatatcaaagaggtacctgtactcccgtttattgcagtrctattcacaatagccaagatttggaaccaacctaagtgtccatcagcagatgacttgataaagcaaatatggtacatacacacaacagagtactaatcacccataaaaaacgatgaggttctgtcatttgcaacaacatggttgtaactggaagtcattatgtta

SEQ ID NO: 793651 - DNA, 519 bp, Homo sapiens
cagcctcctgaatagctgggactacaggcatgcgccaccatgcctggctaattttaatttttttttgtagagtcagggtctcactatattgcccaggctgatctcgagctcctagcctcaggcgatcctccaccttcacctcccaaagcactggaattacaggtgtgagccattgcacccagccaagacaagagtttttaaatgaaaaatcaggaggwttacataattgttttgggataattatccttagctgcaaagatcaataacaagagtgatgccagtctgaggttgaacaggcagttattaggcagatgtcctcacagaagcatttctcgtgtaaggttgggatggcctttgtgcaagactgcagtttctgcagaatcttttgtgattgtttttgtcatcaggcatttatgcaagaaagctttctcttcatagccttctctggctctatttgttagaatgtgttttattttttaaaaaaaatgactccattttgattctgacaactttcacaaa

SEQ ID NO: 793652 - DNA, 528 bp, Homo sapiens
acagatttttaaacgacacttaggagtcttggctactataaaacactacttcgtttttttccgtcttgcctcaatatcttgacaatttctaggataatattcttacttacctctttagtccacatgtctcaccacagggacagacgcactcttcacttggcatatcaagtgattactgaaatgtacattttttcagggtaactacattttagtggggattaccagagagaataagaatactaacrtttatcccctgcattttttgttagtcctataacaatatagacagttaggttgtattgttcctcttttgcaaagacaatcacaataaataattttcctgggatatagatattgaactgttagaacctatcttccccaaccccctcaactgatttaatttcatctgaactttagtaatgttatttttaaaatataaataatactaccagcctcacagggtgatttagaacattaaacattataagtgcaaagtttcagtcagatatttgattagtttcttcctct

SEQ ID NO: 793653 - DNA, 492 bp, Homo sapiens
caggaagatctaaaattgataccctaacatcacaattaaaagaactagagaagcaagagcaaacactttcaaaagctagcagaaggcaagaaataactaagatcagagcagaactgaaggagatagagacaaaaaacccttcaaaaaaatcaatgaatccaggagctggttttatgaaaagatcaacaaaattcatagaccactagcaagactaataaagaagaaaagagagaagaatcaaatagacgcaataaaaaatgataaaggggwtatcatcacagatcccacagaaatacaaactaccatcagagaatactataaacacctctacacaaataaactagaaaatctggaaaaaatggataaattcctcaacacatacacactcccaagactaaaccaggaagaagttgaatctctgaatagaccaataataggctctgaactttaggcaataattaatagcttgccaaccaaaaacagtccgggacc

SEQ ID NO: 793654 - DNA, 628 bp, Homo sapiens
actttgaagttatttagttcacacttttaccaaatatgagagtaccataatttatgacaagggattaaatggattcacaccttttttctggatttcttagaagagattaacgtttttgtcttgcaaaatatttttcttaattaaaatgaaattgaatgaatttagcatttactcattggtgctcacttcaaccccaggaatgtcaagagtgggttcacattttcccacagagttgtcaatgctttcctcatataataacactaaacattggattgtargaattatcaccctcttacatagactactgtctgagtaaaacatttgttctcaatttacttagttttcttgggaagtaatgattcagtcattctgatttgtaaatgttttcttgtatatctcatggccaagacataatagagactccaggaaggtctgacttactcttgaagggaacattaataaccactacaggcactatgtaagttgtagattgtttagttctccttttgtcgagaacccttatagggcagatttcattattgtcatttcttcatcaaagaaactgagatctaccttggttatatcactttatttagatctagtcacaaagacagtcagctctcaaacc

SEQ ID NO: 793655 - DNA, 613 bp, Homo sapiens
tattgaagaaaacaaagtgtatataattttttcatataataatgtgtttataatacaatctacttaatattttggaaaattatttttctgtaaaacactgaagtgctaattaaatttcaataaatattttttaaaaataaataaagccggtcacagtggctcatgcctgtaatcccaggactttaggaggccaaggcaggcagattacttgattgcccagcctgggcaacacagcaaaactccatctctacaaaaaatacaaaaattatctggacatggtggtgtgtgcctgtagtcccagctrctcagtaggctgaggtgtgagggtcgcttgatcccagtgaggtcaaggctgcagtgagccaagatcatgccactgtactccagcctgcgtggcagagtgagaccttgtctcaaaaaaaataaaaatttgtaataaaaaagtaaaataaatagaaactcaaaataagatgaaaaagtaaatccatgtccatcagaaataagtaagttgaagaattggaatgtgaacctactcacagaggattccagactctgtgcaatcaactatctttaccaggaaatgggagaaggagaaaagagagaggaaagaaaa

SEQ ID NO: 793656 - DNA, 613 bp, Homo sapiens
tattgaagaaaacaaagtgtatataattttttcatataataatgtgtttataatacaatctacttaatattttggaaaattatttttctgtaaaacactgaagtgctaattaaatttcaataaatattttttaaaaataaataaagccggtcacagtggctcatgcctgtaatcccaggactttaggaggccaaggcaggcagattacttgattgcccagcctgggcaacacagcaaaactccatctctacaaaaaatacaaaaattatctggacatggtggtgtgtgcctgtagtcccagctactcagtaggctgaggtgtgagggtcgcttgatcccagtgaggtcaaggctgcagtgagccaagatcatgccactgtactccagcctgcrtggcagagtgagaccttgtctcaaaaaaaataaaaatttgtaataaaaaagtaaaataaatagaaactcaaaataagatgaaaaagtaaatccatgtccatcagaaataagtaagttgaagaattggaatgtgaacctactcacagaggattccagactctgtgcaatcaactatctttaccaggaaatgggagaaggagaaaagagagaggaaagaaaa

SEQ ID NO: 793657 - DNA, 589 bp, Homo sapiens
ctgaaacatcggctcttcctgagtcttgaacctgctgaccttccaactgggactacaccatcagctcttctgattcacaggccttggaactgagactgtaactatatcccatttcctctgggtctctgagcttgccaactcaccctgcagctgttaggacttttcagcattcataatcacatgagcaagttctttatgataagtccctttacacacacaaacacacacacacacacacacacacrcacgccctattggttctgtttctctggagaaccccaactatcacagactcctaatttgatttcctttacataaccccatgccaagtgatcattcagtctgtgtgtaattttctactttcctggctcagggggatgtggggttggtctcttcaactctgccaaagcgtagtagttaggccttttatcaccaaattcatcttgctaggtgcttagcattccactctccgccctttaatctctgaagtctaaacatctggactgttgtgaggctgtagtgggagtgagttcccctcaggagatgagtcttccaggggctgtgcgaagtcttgcccctcacatgcttc

SEQ ID NO: 793658 - DNA, 558 bp, Homo sapiens
tcccactctctcctcaattgcatgagtgaaaaatacaatggtctcagcttgattccaactatactttatttcctgaactgacactttggttttctttaggatagagctgtttagagtcaattgtagcaataaaaaataatgacaacgtcatgaatattcttactgaaaagctgctgcaccttgtttaggcactgaatatactgtcagtctgttcaaaaatagaggatcacaacagctgactgatgtagcaagaaatgtctatcttaacaatcagaaaaggtggtcattttccaaagtgaattcatyatgtggatagtaaaaaaaaaaaaaaaaaaaaaaaaaaaaaattctatgaccaaataagtacacggtgtagagttaaataaaagttaaatgggttacttttccacatttctgagcttttaatactctgacatgtattatgaatttaaaataatttcttattgaatttttcttataaagtgcaacagtttgtagggctagtcttccacagagctttttgaatcttcggaataggccacttaaaagtgtctgaaa

SEQ ID NO: 793659 - DNA, 611 bp, Homo sapiens
acataacctatcatggcaagtaatttttagtgttgcagtagaaatgggcaagaaaaaaagttttgctgtttaggtattttttagacttaactagtcatgggcacaaactcctaagtctagactgaatatgacttattaattctccagaaataatagaggtagaggcttgcctatgtctttgatcccagggatgtcttcttgaattgcctccccgggtatcttttaaaatcccacctacccttactgatgcagctcaactgctgccacttctgtgtggctcagcattcccatcccaggaacaaccttctccacgactacatgcaacattagragtctccccacttcctcctcttttaatgcactttgtgtacaacactttactgtagttacttacagatgtaatcttctagagcatgacaggctccaggagagcagaaaggcgtatgtcttccacacatttatgtctgcagaaatagactgttttcttgtatttataaggttgctataaggtatttatttgaaaaaacacctatgagtgattttgaggctgagtattaacgtagtcttcacccatatctttagttacttaaaccaaaagtaatgttaatact

SEQ ID NO: 793660 - DNA, 504 bp, Homo sapiens
agtattgctagtaatcaaaattaaaacccagtggccatgtttggtaacagaagagaaaattggtaaattagaagatagaaaaagaaaaaaaaacagaccaaaatgtgacacaggaggcaaaaagatggaaaatgcakaataaaaagagatgtggtggggggtaatgtcagcaagatggaagaataggaatttctgacacacatccccttaaataaatattaatttgaacaactatctgcaagcaaaactaccttcacaagatctaatgaatacaggtgagaaattatagcatctgggtggagcacagaactaagaaaatactcatttaagaagtagaaagaacagtttcacactacccatgtcacccttctctgtactgcccacgcagtacagtacaaagagaaatggcctctgcatgggataggagagtgaagttagcacaaaactttaccagtgaccccagcactatgctcaccctattgaatttcaatgccaagctggttt

SEQ ID NO: 793661 - DNA, 504 bp, Homo sapiens
agtattgctagtaatcaaaattaaaacccagtggccatgtttggtaacagaagagaaaattggtaaattagaagatagaaaaagaaaaaaaaacagaccaaaatgtgacacaggaggcaaaaagatggaaaatgcagaataaaaagagatgtggtggggggtaatgtcagcaagatggaagaataggaatttctgacwcacatccccttaaataaatattaatttgaacaactatctgcaagcaaaactaccttcacaagatctaatgaatacaggtgagaaattatagcatctgggtggagcacagaactaagaaaatactcatttaagaagtagaaagaacagtttcacactacccatgtcacccttctctgtactgcccacgcagtacagtacaaagagaaatggcctctgcatgggataggagagtgaagttagcacaaaactttaccagtgaccccagcactatgctcaccctattgaatttcaatgccaagctggttt

SEQ ID NO: 793662 - DNA, 533 bp, Homo sapiens
ctgtaaaacccaatgcaggaagcaatctacaacaaagaaacccaaacacagcctcagcactctgaaagcagccagaaaaaaagccaatcaactatacacaacacaccacagtcaaggcttcaaaggaaaaaaagaatataaaaacaaaaagccccatgaaaacagcagcaatttcaaaaaggaaaataaacaccagcctcctcagatgagaaggaatcagtgcaagaactctagcaatttaaaaattcagagtgttttttcacctctaaaggattgcggtaattccctagccagattcaaatgtctgaagcatagacatagaattcaaaatctggacggcaaagaarcttaacaaaattcaagaaaaaaatgaaatctaatccaaggaaacaagtaaaacaatccaagagtttaaaagatgacgtagccattttaagaaaaaaccaaagtggacttctggagttgaaaaattcactacagaaattttaaaatacaattgaaagccttaataacagactagaccaagctcagga

SEQ ID NO: 793663 - DNA, 544 bp, Homo sapiens
aaatgccaaagaaaacaaacaaaaatttgcagaatgtaatagccaatttctttaacaaaagtcaacatccaaatgatactctgtattagaaaaatgtgaaggatctccccaacttagcctcattaataacaactgtgtaatttctgcaaggaatgttaactaaaagaaagactaagggtgaccaagttgagatggctgacaatgagagaatcctgtcacttctcattagattggaacaggcttcccaaaaacgaaaatttatgagcaatagacatgaatgtaaacacatttccaatagccaaagaatttctatttsaatagaactgtaaactacgacaggctcttattatattccttgtagacaaactgaaaggcatgaacttcagccatgactttcaccagtatagcagaggtatccatttattctcagaaaacatatgtagagaaaaatgtttcaagtaaggaagaaaaacattcatgatcaaatatgtaatttaacatgttaaacaggaatgaatgtcacactttcccctaacttcataaa

SEQ ID NO: 793664 - DNA, 636 bp, Homo sapiens
agaggggagagaatgcaattgccccaaataaagactcactttggaactcagtgattatgtgtgtgcatatatgtgtatatatgtatattatacatgtgtatgcatgtatatatgtaatattatacatatatatgcatgtatatatatgaatatatataaaactgaaaactgcacacatyccatatacaccatatacatgaaagtgaacacacacacatacataaacatatatattcagtttcaaacaattgttagggaacctgaggaagaaactaaatggaatataatggttgcatctatgatagccatggtactagaactagtagtagttctactaaggtgagaattgacatagtaaaagaaataagatacaaagcagtaagagagagctacattttccttaaggccaggctgaatattcactaacaaggaaatttctacagtcattattttaatctgattcattctcttggtgggatattccagagttaccacctacagaaattccacttttccttactgaggttttcttttttttcttttcagtccaaatattagtcattttggtagagaaggtagaaacaattaacaattgagtaattcctcaagaatcatgttaaaaggtttccaaatcat

SEQ ID NO: 793665 - DNA, 626 bp, Homo sapiens
ttgaataactgcaaaacacatcatcaacccagcttttttttgctggacctgggcatatataaactgattagatttaaaaataaaaaaattagagttttttctgttgtgtttgaagaggtgaacccttggactcaaaatctctcaaaagtcctgtctttcacttcagaatctgggctaatttgcacaggaatatacttctgtgttttaataaacacatgtaatttttctgttttcatcttgcaagtaatgacagctttgttctcaaaccaattttgttttttatagattttaccctgatatataatgaagagacaattacatgatctgtgtagaaattcttcctctaaactaaattatactaccttagaaatctgacatgaaagtaccaaaactatgtaaattcayttcaccaagaaaattattacataaaacagtgattcatggaaataagacttgatttgggcaacatagaaagtattaaaactaaaaaggagttgcttgagataaagtttacccaagtgacaattttacctgtgacaaacatatttccatccactgcagtaacaaatgtgtttagtttattaaagtatatgtttaacagcaaaaaataaatagaataaatttat

SEQ ID NO: 793666 - DNA, 603 bp, Homo sapiens
gcatcgtgggaacgctctatgttcccaggatgtgggacatggtttcaaaggagattattttggaacatcgagttttaatgactgccctgctgggatttgaacttgtgtggggcctgtagcccctttcttttggccaatttctccttttgtaatgggaatgtttacccaatgcctgtaccccaattttatcttagaagtaaataacttgttttgattttacaggctcatcagtggaagggacttgccttgtctcagaagaaactgcactttcgagtgatgccgaaacaggttgagacttttgggggactattgagaagggatgattgtattttgcaatgtgagaagaacatgagatttgaagggccagggatggaatgaaatagtttggatgttgtaccctttaagtctcatgtcgaattgtaattyccagtgttggagtcggggtctggtgggaggtgatggggtcatgaaggctgatttctcatgtttaacaccatcctcttggcactgtccttgcaagagtgagtgagttctcattacatctggctgttaaaagtgtgtgacacctctccctgcttgctgctgctctggccatgtgacata

SEQ ID NO: 793667 - DNA, 567 bp, Homo sapiens
attttgcaatgtgagaagaacatgagatttgaagggccagggatggaatgaaatagtttggatgttgtaccctttaagtctcatgtcgaattgtaatttccagtgttggagtcggggtctggtgggaggtgatggggtcatgarggctgatttctcatgtttaacaccatcctcttggcactgtccttgcaagagtgagtgagttctcattacatctggctgttaaaagtgtgtgacacctctccctgcttgctgctgctctggccatgtgacataccttcttttgcttcaccttctgccatgtgtaaaagctccctgaggacccttcttgaagtcaagcaactgccaatgcaaagcttcctgtacagcctgcagaactgtgagccaagtcaatcttttttttcagtataaattatgtagtgcttaggtattcctttatagtaacgcaagaatgccataatacaaggcataatggtttgcattttaaaaatgaaaattaaatttttgtaatttatcatgaaaagatgaaatgtgttaataatgagcaatatctacatgttgtcttag

SEQ ID NO: 793668 - DNA, 567 bp, Homo sapiens
attttgcaatgtgagaagaacatgagatttgaagggccagggatggaatgaaatagtttggatgttgtaccctttaagtctcatgtcgaattgtaatttccagtgttggagtcggggtctggtgggaggtgatggggtcatgaaggctgatttctcatgtttaacaccatcctcttggcactgtccttgcaagagtgagtgagttctcattacatctggctgttaaaagtgtgtgrcacctctccctgcttgctgctgctctggccatgtgacataccttcttttgcttcaccttctgccatgtgtaaaagctccctgaggacccttcttgaagtcaagcaactgccaatgcaaagcttcctgtacagcctgcagaactgtgagccaagtcaatcttttttttcagtataaattatgtagtgcttaggtattcctttatagtaacgcaagaatgccataatacaaggcataatggtttgcattttaaaaatgaaaattaaatttttgtaatttatcatgaaaagatgaaatgtgttaataatgagcaatatctacatgttgtcttag

SEQ ID NO: 793669 - DNA, 590 bp, Homo sapiens
atacctgtccctggtgggatagaagcctccagagctgggcagtatttgggctgtagaaacctgagaagcccctgacccatcatgcatcagagcccactcccaagatgtggagccatcagctggaagagctgggcagtggcaggggaccccggaccctgaggccttcctcccttccatcaggtgaccctaccatgtggcctcagctctagagaggtgggccctagctggaggcactgcacagcagcatcctgggtaaaggtrccagaagggcaggcctgcctttgaggctgtgaggcagggctgcggcaggcagtggccagtggagggaaccgggtgggtgccgagggactacatggccatctcctggacatggggtctggctaggggacatgggatgggcagacactgccatcttgacttcatcggcccatctgtgggctgggggggcagctgggagtgtggccagctgggaggtaggaggactcttggggaagtgagagtcacctgcatgaactcagggctagagggctgtggctctgggacacacagggtggccagggggaggctgcagcggcctctgctgttgggaa

SEQ ID NO: 793670 - DNA, 626 bp, Homo sapiens
ataaacaatgcctaataatattttaattgggattgtattgaatctatatttagggataatcacattttaccatgtgaattttctaacccatattcatattacatctttccatttatttaagtcttctttaactttctgcagtgttttgagttttagtgtaccagactcacatcatttgatagattaattcctaattcttctacatttttcatgatattattaatagtacttttattttaattttttattgttcattgctggtatatggaaatattagtttaatatgttgctttttttcttttttatgttgctaactcacttattatagccagcagtgtttttgtagatttcagtggactttctacatagacatgccgtctataaataaaaccaatctacattttcctttccyatctgtaattcttttgtttatgttttttgtctattttacttggtagaacgtctagtggaatgttaaaacaaagtgctaagagttaatggactcatcttgttcctgaaatagggggaaataaactgatttttcttcattaagtatgatgccagctattgtttttacatagatatcttttattaggatattcttgaatttcttctagacagtaata

SEQ ID NO: 793671 - DNA, 622 bp, Homo sapiens
caccaattagtcttaggtttcattgtcttaggccccaccactggggccgctacacgtgacatgggatgtgggccatcgggcaaagggtgcggagatggggcgctgccaggggagccaaggaggaaagagagcgctttccaaattgtcttccagggtttcaatgtgcattttattaactcagaatctgtcgggaataatactagggcgctacctttccctggagataggtcttgtcagtggagtgagataggctggggggaggaagaggaatgagagrctcagtttataaatattaagatcagcaagggtgtgctgctggcaggagcagagggagcctagagatttgggtggctgccgttggtaagtggttgcaatccagagagtgggattgagttcctcccttgtcatgttagcatcccgtttcctgggcgcgggtctaatgccctgcaggtggtcatttcactcatggtggctttgtctctcttctgccatctccagactcagcttcacactccagggctgtgtaccaccagccactgtcatgttaaccccttcccaggccagtgtgtccttggcctggagcccaatctgctggacagcctgggaccgtccattttcgggg

SEQ ID NO: 793672 - DNA, 646 bp, Homo sapiens
tatgagtcccttgaagacagtatgccattgggtcttgcttctttatccagcttgccattctgtgcattgtttgtgtggtttctttatactgtcactggtctatatacttaactgcatttttgtagaggctggtaactgtctttccttattatatttagtgcttctttcaggaactcttgttaggcaggcctggtggtaatgtattacctcagcgttgagttgtctgaaaaakatcttatttcttcacttatgaatcttagtttggctggatatgaaattcttggttggaatttcttttctttaataatgttgaatataggcctccaatctcttctggctcgtaggatttctgctgagaggtctactattagtctgatgggcttccctttgtagatggcctttcctttctatgtagctgcctttagcatttttttctttcatttccatcttggagaatctgataattatgtgtcttggggacagtcttgtgaagtatcttgtgggggttctctgcatttcctgaatttgaatgttggcctctctagctaggttgggaagttctcatgaatgatatgctggaatatgttttccaggttgctcccattctccccatctctttcaaggacaccaataagtcatagatttg

SEQ ID NO: 793673 - DNA, 598 bp, Homo sapiens
cagtggacagtgctgcagggaaaggaggggcaggatatactcacaccagcagcagtggcatggcagggcacacgctcacacgtatgctggtggggaagggaaggtgaggtctgcctgtacacgcaggtactggcaaagtgatatgaagggtggctgtgggcaagtgtgtgcaagcaaagcracaagggggaggctgtagttaggggatgagctgggtgggctggtgtgtgtccatgggggctactctgctgcagcactctgacagtctggcatggtctgccagcacaggtgctatgatgtgggctcccaggaggtacctggtggctgcactgcaagcaggcatggacaggctggggccctgggaaaggctagcagaccaaagggtgctgaagtcagactggccctatctcatgggcaacaccgccctgcagaatttaggaccgacagctcccctggtgctaaagtctcctatggaagcaagttgagcctagggagatggacatcgctggctgtactccaccacaaacactcccgcacgaaacctactgggctccacatcacctggagctctgcccctaccacttctctaagcagctct

SEQ ID NO: 793674 - DNA, 600 bp, Homo sapiens
gtatgaaaaaccaataaattgtacaatttaaggtggtacattttatggttgtgaattacatatcttaatcttaaaaatctctaggtagggagagaacaggatctgagtccactgatgccattatattacactgccacatggtgtcaccgttgaggaatggatgaagtccaaagaaggcttacacaaagcttgtgtccaggtcatgcccaagctacagaggtgccccaggattggagtgaaggttaaaatccagaatttggrgagcaccatcccagaatggtttaatattaaggaggttctagcctcagccccacactgtgcaactatttgcagtccttcacagaccgaagttcttggctaaacctggttcccagctcaatggggaaattcaaatccttgtgaaagcatctctgttaaaaggagacactgctaggcacatcttaaacttccaaacactttattttttgaaaaactgcttctttatggaggtccaaggaaatattgggcaatttttactgtcctgggatagggagcatcaaatgagttgaggattttacatcaattttctctaaaatatttatactacttaactcagtgtat

SEQ ID NO: 793675 - DNA, 605 bp, Homo sapiens
gctctccctccccttgtcccctaacccccaacaggccccggtggacactacttactgtaagcctgcagtaattaagatagtgtggcattgacaaaagaacagaaaaatagatcaatataacagaataaagagcccagaaatagacccacataagtagagtcaactgatttttgacaaaggatgaaagacaatgcaatggagaaaacagtctcttcaacaaatagtgctgaaacaactagacatccacatgaaaaaaaaaaaagaatctagacacagacattacacctttccctgaatattgcatacaatgaaatattactcagtctcagaaagaaatgaactatcaagctatgaaaagacatggagaaatcttaaacacaytctaagtgaaagaagccaatctgaaaaggcaatatactgtatgattccaactacataacattctgggaaaaggtaaaactatggagacagtaaaaagatcagtggttaccacagggttatggggagaggggaataactagatgaagcacagaggatttgtagggcagtgaaactattctgtatgatactataatgatgaatacatgctattaagcatttgtcaa

SEQ ID NO: 793676 - DNA, 656 bp, Homo sapiens
gggtccaattccattcttttgtatgtagtatccagtttttttcttggacttatttgatatataatgggtcttcttattttgtttcctgaaattcttaactcttgatatggtttggctgtgtccccacccaaatctcatcttgaattcctatgtgttcagggagggacttggtgggaggtaattgaatcatgggtgcaggtctgtcctgtgctgttctcatgattgtaaataagtctcatgagatctgatggttttataaaggggagtttccctgcagaagctctcttgtctgccgccaygtgagatgtgcctttcaacttctgccatgattgtgaggtctccccagccatgtggaactgtaagtccttttaacctctttattttctaaattgcccagtcttgggtatgcctttatcagcagggtgaaaacaaactaatacaaccccccttcatattatctttatcagcagggtgaaaacaaactaatacaaacccccttcatattatctgggtcactttgtactgtctcctgggtatttttcttagaattagctgctttccattattctaggtgaagtaactgaggaatggaaaaccaaacattgaatgttctcactcataagtaggagctaagctatgaggatgcaaagggaaaa

SEQ ID NO: 793677 - DNA, 656 bp, Homo sapiens
gggtccaattccattcttttgtatgtagtatccagtttttttcttggacttatttgatatataatgggtcttcttattttgtttcctgaaattcttaactcttgatatggtttggctgtgtccccacccaaatctcatcttgaattcctatgtgttcagggagggacttggtgggaggtaattgaatcatgggtgcaggtctgtcctgtgctgttctcatgattgtaaataagtctcatgagatctgatggttttataaaggggagtttccctgcagaagctctcttgtctgccgccatgtgagatgtgcctttcaacttctgccatgattgtgaggyctccccagccatgtggaactgtaagtccttttaacctctttattttctaaattgcccagtcttgggtatgcctttatcagcagggtgaaaacaaactaatacaaccccccttcatattatctttatcagcagggtgaaaacaaactaatacaaacccccttcatattatctgggtcactttgtactgtctcctgggtatttttcttagaattagctgctttccattattctaggtgaagtaactgaggaatggaaaaccaaacattgaatgttctcactcataagtaggagctaagctatgaggatgcaaagggaaaa

SEQ ID NO: 793678 - DNA, 588 bp, Homo sapiens
agagtacttttggaagatattaggatttaaattggaagactgagtgaagcagactgccttccctaacataggtgggcctcattcaaacagttcaagatccatatagaacaaaaatgcagaccatctctcaagtgagaggattcttccttcctgacagtctttgaacagaaacatcagctctcaagggtctccagcttgccaataaaccctcatcttgggacgtggtagcctccataattgtatgagccaattccttataatcaatctctttctctccatatatataaatcttattggttctgtttttctggagaaccccaaccaacactggtcaatttgacgggttggtaataaaagttagagatctacttgattttattttaaaattattatctacaatacaggtttcagatggytattaattaatggctccatagtggcctctgtttcaggtcaatacaaaacaaaaagctggagaggggaggaacagctgctttccctttgctggaaggctacaggccagctgcatcttttcaaggggcatggatgtcccatttgacagggtagaagggtataacaagaggatta

SEQ ID NO: 793679 - DNA, 655 bp, Homo sapiens
atcaggacttgctaaatggatggcaataacttagaataaaatctcaagagacagtggtggaacacttcattgagaactgaagcaccagataacatcagcaagatggcagaatggaggtccctggctctagtctcccatgccaaaatcctgattagtaactattcagacaagattgcctttgtgaaaatcccagaacctgagggtgaagatgaagcaccttcctggagcataaaaatcaagaaaacagagcattagaagaataagaggagtaattttactttgacaacactgcccctctcccaggctggcacatcaccacagagagggaacccgtatgcctacagtttctctggtgtgaaaaaaatccaaaggctgacattcagctttcccagcattccagggtgcttcccatgaggtgagaargaagtgggccctgcttaaccagggagcctagccagcaaccttgccccaccaggaacacatccaatcatcgtgcctaggtaggtggggaacccagctggtgaccatgcccaactgcaaggcacagcatgtggccccacctaattatggaacccagcctgtgttcctacccaactgtgaagcatagcccacagccccactcaatcataagagcccagctagcagcaccacctgt

SEQ ID NO: 793680 - DNA, 700 bp, Homo sapiens
cagactcagtaaattataatctttaggactctggcatattttaattgttctcatttacaagtattaattctatttagttaataagtgcactttaaaagttattaaaatcattataaaaacagaaacaaaaaaccaaaaaacaaaaaaacccactaagcagataagtgttctctttgtccttggtaaagccaattctgcttttacacttaaaacccacacattaacagtcaggcattcagggtgtactgaatgtagacatcacaatcctcatcagcaggaaaataaaaaccatacctgatctgttcctacaagtttcccacactagaactaaatgcactgccaacaggctattgatgtataatacattatcacatgaaaatgtgattacgacaaatacaagactgccactgtctgcaagtatataatgcattcaacataagttatgcaggaactttctcaaaatttaagctggttttagtggacatgagctcattcaaggaccctgaatggtatggtatggaaagaaataattactgcataaaayaacatgaaaagagaaacatcaggatagtaccaaaagctgagaagtgggaaagttctatgtgagaggtggcagcaccttttccaagaaacttcaaggtgaatcaggctaagtctgtactcagatcctaaaccatatggtatcattattattagtgtt

SEQ ID NO: 793681 - DNA, 645 bp, Homo sapiens
gcactttgggaggccgaggcgggtggatcacctgacatcaggagttcgagaccagcctgaccaacatggtgaaaccctgtctctactgaaaatacaaaattagccaggcatggtggtacatccctgtaatcccagctatttggaaggctgaggcaggagaatcgcttgaacttgagaagcggaggttgcagtaagtaagatcatgccattgcactccagcctgggcaacaagaatgaaactccttctcaaaaaaaaaaaaagaacaccttgctgattatgtggcattgagcattatccaagtctctgagtgactctctccccattctaaggactaggtgagaataascccggacaaaatgtctctcaatgagagcagtgcactggggctgtgaagccactgcatccctcccctgctaggagagctgtgcaagaggcctgcctggagcctggttgtgcactgttgttcagtcccctgatgtcccagcctggctccattaggacgatggagtcagggtcctttgggtggaacaggaagaaaatatagacaagcagatcctgatgtctcctcatcattgccgtcagctacaggttttcacaggagacattgggacttacaaaggcggaaactgcttgtctgtcacgtg

SEQ ID NO: 793682 - DNA, 596 bp, Homo sapiens
tctgcccatagaggaggaacgaaatatgggattctatcttctaagtgtttctccctcttcttgcaaacaaaaaggagaagagcatgctgatttgaataataaacaaagagtatttataaaagaaaaaatacaaataatcataaggaataaacaaatttttctttacttataaacaaaagaacaaattaaaacattaatatccctcccccatcccccttacttccttattgtgtgtttatggttgggtgggtcaggaccctggggaagaggttctcccattcactgctggtaagtccttcgagtggtaatttggcaatatgtatcagaagccttaagagttcgcacatgctttgatccagcagttccttctggaacagatcctaaagaaacagagatgtatgcagaaatttaawtataagtgtatttaccaaaacattgttgatggtagtgaaaaagcaaaagcaacttaaatgtctgacgattgagctggttatatatcatagtggatttctagggcagtcattaaaaaataatgttgtggaataatatttaatggcatggaaagatgtacatgataaagtattaagtgagaaaag

SEQ ID NO: 793683 - DNA, 489 bp, Homo sapiens
aataatgaatttatatgcacctaaaaaaattacctgaaaacatacaatacagacacagacaggattagaaaaaaaaatgaccaatataaaaaataatgggagatttcaacaaacatctattagaaatcatataccaagtggccaggtgcagtggctcatgcctgtaatcccagcactttaggaggctgaggtgggtggatcacttgaggtcatcagttccagaccagccatgccaacatggcgaaaccccatctctactaaaaatacaaaaatcagccaggcgcggtagtgcacgcstgtaatcccagctactcaggagttagaggcaggagaatcacttgaacccaggaggcaaagcttgcaatgagctgagatcgtgccactgcactctagcctgggcaacagagtgagactcggtctcaaaaaaaattaaaaaaagaaaccatataccaagtagacaaaatgttattaaggtatagaaggtttgaa

SEQ ID NO: 793684 - DNA, 429 bp, Homo sapiens
aatagtatgaaactatgcatgagaatgaaaaacactgagttgagggtggtgtttgcctcaggagagggaggaaaaagaatgagatcaactaggagcatacacagcttcaattatatctgaaatattttatttattttttaaaagaactgaagcaaaaaagaaaatctgtcatttaaatttaccagattaacaaattaaggtagaaaaamcatgcaatcatctcaatagatttagaaaaagcatctgatgaaattcagcaacactaattaatgattaaaaaaaaaaaacccttaaactaagaagagaaccttaacatgataaaaatcacctgccaaaaaccaacagcaaatatcatgtatgatggtgaaatgttagaagtatttctttcaaagccaagaacaaactaggatgtctggaggtcctagacag

SEQ ID NO: 793685 - DNA, 603 bp, Homo sapiens
gagattgggtaatttataaaagtaagaggtttaattgactcactgttcaacatggctagggaggcctcaggaaacttacgatcatggcagaagctgaaagggaagccaggcaacttcttcacaagaaggcaggaaaagtgccgagtaaagggggaagagccccttataaaccatcagatctcatgagaactcactgactatcatgagaacagcatggggaaaaccacccccgtgattcaattacctctacctggtctctcccttgccatgtggggattatgaggattacaatttaagatgakattttggtagggacataaggcctaaccatatcaattgtctactggtgggctttcaggaaaaaggaaaatggaaaacccacctggcccacttgatcatgtccattccaagtcctatcctttggcaacatcacgccaaagacatcaaggtggaatttctaccttttgaggcctaatatccaaaatcctttccttcctgttatttgcccccttgtttcaatcccacctcccttcctctccctctccctcaattctcctgccacccctcccccaatcctctagcatatggcttagtgtcatggag

SEQ ID NO: 793686 - DNA, 628 bp, Homo sapiens
ggtatgggctctccaatcgtgccccaaggcaggcccagctctgggttcagcatgtccatgtagctctgtatgtctgcagctctagtgctggaaagccctggggaggcagaaggaagggccagatttggaagcatgcagacagsctttcccccaagaatgagactcaccaccacctggaaacaacttgccgagggccaaggtgggctccgggcaccacttggtacacctgttgtggcccctggcgttgctgggcttcctctccctggccctgccctgccccagcccagcacttactgggggaagaccaggcactccggtttggaggggaagcactggaggctttggtgtgtctagagggcagggtcacctggaaggggagggtctactccttgggagtacagatggccacatccaatctttgcagggcaccctgccaggtctggaggccaccatctggtggcgtgaagcaggcattgcaagtggatggacgcccatgctcagggcacggtcagggtgtgtgtacacacaagcctgcaagtctgccgaggcgattgtgaatttgtgtatgtttgagtgtgtacacatttgtgcacatgcttctttgtattgatgaatgtgtgtgcattgc

SEQ ID NO: 793687 - DNA, 628 bp, Homo sapiens
ggtatgggctctccaatcgtgccccaaggcaggcccagctctgggttcagcatgtccatgtagctctgtatgtctgcagctctagtgctggaaagccctggggaggcagaaggaagggccagatttggaagcatgcagacaggctttcccccaagaatgagactcwccaccacctggaaacaacttgccgagggccaaggtgggctccgggcaccacttggtacacctgttgtggcccctggcgttgctgggcttcctctccctggccctgccctgccccagcccagcacttactgggggaagaccaggcactccggtttggaggggaagcactggaggctttggtgtgtctagagggcagggtcacctggaaggggagggtctactccttgggagtacagatggccacatccaatctttgcagggcaccctgccaggtctggaggccaccatctggtggcgtgaagcaggcattgcaagtggatggacgcccatgctcagggcacggtcagggtgtgtgtacacacaagcctgcaagtctgccgaggcgattgtgaatttgtgtatgtttgagtgtgtacacatttgtgcacatgcttctttgtattgatgaatgtgtgtgcattgc

SEQ ID NO: 793688 - DNA, 628 bp, Homo sapiens
ggtatgggctctccaatcgtgccccaaggcaggcccagctctgggttcagcatgtccatgtagctctgtatgtctgcagctctagtgctggaaagccctggggaggcagaaggaagggccagatttggaagcatgcagacaggctttcccccaagaatgagactcaccaccacctggaaacaacttgccgagggccaaggtgggctccgggcaccacttggtacacctgttgtggcccctggcgttgctgggcttcctctccctggccctgccctgccccagcccagcacttaytgggggaagaccaggcactccggtttggaggggaagcactggaggctttggtgtgtctagagggcagggtcacctggaaggggagggtctactccttgggagtacagatggccacatccaatctttgcagggcaccctgccaggtctggaggccaccatctggtggcgtgaagcaggcattgcaagtggatggacgcccatgctcagggcacggtcagggtgtgtgtacacacaagcctgcaagtctgccgaggcgattgtgaatttgtgtatgtttgagtgtgtacacatttgtgcacatgcttctttgtattgatgaatgtgtgtgcattgc

SEQ ID NO: 793689 - DNA, 568 bp, Homo sapiens
tttttaattcaggtgtctaatttaagggatccatcttcaggccattggcaagtagaatttccaatggtgtaattattgcaatagcaattcaaccaaatagcccctttgtggaaagcccaggatgtcattttccaggttaacctcctgggaagggcaaagaagaagcaatcccaaagattcccctgyaagaaaaaagttcaatgcaaggagtagaccacagatgggtaaggatgatgttggcctccagtaacccagatatttatgggggcttccagtcacagacctctgaatctataataccaggtaggccctcttgggattgagctttcctaggactaaccaggcaacaagaattgagatgacaaaagcctcaaagggatgggacttcttaagacaaaccccaagagcttgacatggtcagaacaaaaagtgtgctggggttcccagccattttcagacaggccacctagtatgacctgatagttactgcctctttccagatagtggaaaccaagagaaagcgctcccacttgctcacaagtcaagctctcaaggacataaaataaga

SEQ ID NO: 793690 - DNA, 555 bp, Homo sapiens
tcatggttttaggattacaaagaatgctgcagtcaccattcttgtacagatatctttggtcattgtggaaatgtctacactgcagacatttctatagtgtagagagctggatgcgccattgctacattatagtgcttatataatgcttctaatttgagtccattctgcaaatgtgtctttcacgggagcagtaccaaataatattccaatatgaatatttataaaatgaaaatgtgcagatgtgcagttgagctgcatgcctctccatggggcccatgttcataaaatggtggcgttagcaatcatctgagagtggagtttgtggccctctgacgtcaaaatctgaggcaatggacatgaaaaccctcrctgtacatcctccgtagtctggccagaatcattcctgggtcggtggtctcttatcaggagggaatgctgcttgctttttttgtcaaaaccacaaaagggagggaaagcatcaggctgttggttgataacagtagtgaagcaagtctctccaaaggcttggtttgttaacccttaggaaaaaaatcc

SEQ ID NO: 793691 - DNA, 555 bp, Homo sapiens
attcatcttgaccctatgggatccactccccacatacaaataggaagcagcctcttccctgcttaacactccccgcacccggctccccagtgctccaggagaaagtccgttctcttctgggcctctggccaggtcttggtaacctggcccccactgaggtctctccagmtcagcgacccccttcctccaggacagtcagggccacatccactctcacttccagactgccctgtcccacctgcggcacttcagccccctctccgcctggccacccctcactcgtcttccaagtgttaccttagacatcacctcctccttccctaacacaccccccagcccacatataaggtggccagttagggctgccccagtcccctgcgttccccattgcagctggctgtgttgcatcagcccaggtacttctctccactgccacccactctctcacactgccccattttgtgtgcttggtgactcgcacacatgtccgcagccaccttagagcaggccttgatatgttcaccatgaatccccagaggctacaagcgtgtgggg

SEQ ID NO: 793692 - DNA, 414 bp, Homo sapiens
tgattcatcttgaccctatgggatccactccccacatacaaataggaagcagcctcttccctgcttaacactccccgcacccggctccccagtgctccaggagaaagtccgttctcttctgggcctctggccaggtcttggtaacctggcccccactgaggtctctccagatcagcgacccccttcctccaggacagtcagggccacatccactctcacttccagactgccctgtcccacctgcggcacttcagccccctctccgcctggccacccctsactcgtcttccaagtgttaccttagacatcacctcctccttccctaacacaccccccagcccacatataaggtggccagttagggctgccccagtcccctgcgttccccattgcagctggctgtgttgcatcagc

SEQ ID NO: 793693 - DNA, 341 bp, Homo sapiens
aatttaggctggatgcatattaagtagagtgattatagttaattgatacagctgtcaagataagttattttagtcttatcgttataatattaaatacatctagctagtaatgggcatatatttttattttgaaataacataacaaagcttgatataatataaaagtgtatacaaaaatacttcattagaattctcctctgactrgtgaattcttaaacaaccactgttcttatttaaaatccatccttatgataattctaggcactagattttgtatgattatctttattctaaaagtgcctgaaagtatagtgggtggctaggcagaaatagaactatca

SEQ ID NO: 793694 - DNA, 621 bp, Homo sapiens
atttcacttaaaggtgagcctagaatctatcaattacattaagcaagaacttactgtataattcctatattaagataaagaaatgaaggcatagaaagacttcaattagcttgcttggtattgcccatctcctaagtggtgaaaacctgagtgttactttgacatcaaagctcaagttcttaagcactgtgtttgttaatatacaatatgtgaactctaaaagaatacattctaatttgaaaccagaattccatacttatcacactcaacatattcattcaatgaacacttatttatactgctgtatatgacacagtctattaatcaactatggatccaggaaaaagtaaactaatatctctgcctttggaaccttataaaagcaatggcaccaccaacaaaatccaatcatagaaggatattatatttacatgaaactacatttggtacaaatcacaaatcctcacytaagtagaaattgaaaagaaataggatattaaatgaaagattaaagtaatggcaatatttatttcagatacatgtagagttattgattaatttagtaattaattaaagttaaccctcaaaaagaaaaaatcctgtaccaggctctttttaggt

SEQ ID NO: 793695 - DNA, 598 bp, Homo sapiens
tgtcagacccaaagtgtgctgcttgtggacctagctttccagggcaattactctctgaactggttcggtccacctgtgtcacaactacctggcacaatatgtcaggggcttaagatgtgggaggggtcagctccttatatgcacctgccaggtgaaaatagtccctagttatgttctcctgaaggagaaacctcattggagccactgctgctcttaggaggcattcctcccagacaccytcacatgattctcagtcacatgagaatgccctgaaaggctgagaaaagcatggtgctcttttttcctttggagtgaaaattccacactcataggctagaggggttcagaattcatcaaatctgataggtttgagaccaaaaccaaccaaaaaaaaaaaaaaaaaaaacccaacaaaatcccaagaagacagaaacaaacaagcaaaaccagctaagcaaaacaatgatcacacaaattatacaatttctgagaactcgaattgtaagtagaaattaagaccagctggttgttaaaacttttagtcattatagagaatttgcaagacaaactcccagctcagctccttacctagcaatgg

SEQ ID NO: 793696 - DNA, 655 bp, Homo sapiens
ggaggcaatatgtagactgatacctgaagtacaaggaaaacatatgccagacggaaggaagaagcaaatgccaagagctggagctgaggaagctccctgtggaattccacgtggtctagggtggctggatgccagagcaaaggggcccgaagaacagcaaggggtgagaaataaggttgaataacgtcacaaggaccacattgatgtgggtatttttattccatgctaaggaatttggaacttctcctgagggcaaagggaaaccaatgacaaagtaaatgactggagatttcaaatgtcacctgtcaagcaactgcttatgaactgtaattccagactagatattactagtgagtctggggtctttgggccttaaatcaccaccataaccttgagaagttgatgatgtctttgttttctaagaataatttctgcatgctggckacagttctatggggatggcagaagtgaagaaagtgtagagccggaaaaaaaagaggtgcaaagatttcttgagtttttttaaagctatggaacatgatgaattaatgagacaaagtaagtatactcttcactatgaatattcatgttttcacatctttcattagatgtgtgtaagaaagaacatttaatgtagtatctattagccaaacaa

SEQ ID NO: 793697 - DNA, 597 bp, Homo sapiens
agaaactccacattgttttttataatggctgtactactttacattcccaccaacaatgtctaagagttccctgttctctgcagccttgctggcatttgttattttttgtcttttgatagtagcgattctaactggaataagatcatatcacttggtggttttgatgtgcacttccctgatgattagtgatgttgagcattttttccgtataccttttggtcattcgtatgtcttcttatgagaaatgtctgtttcagattttttgcctacttttgaattagaatattctttttgctgtygagttgagttccttgtatattctggatattagtcccttgtcagatgaatagtttgttatttttttgactttttaataatagccattctggctagtatgagatggtatcttgttgtggttttgatttgcatttctctaatgatcaatgatgttgagctttttatcatgtttgttgggttgcatgtatgtcttcttttgagaaatgtctattcatctcctttgcccactttttaatggggttgttttttccttgtaaatttgtgtaagttccttatagatgccggatataagacctttgt

SEQ ID NO: 793698 - DNA, 544 bp, Homo sapiens
ctggaaagtacaacattttattgacattcactaataaagtcctaaatgaaagcttagaccaggttcataggcttgaacagtttaataatgaaagtcagctcaaaataatctatgagataaatatagcacattatccaaaacaggtgtttatctttttaagaaaattggacaagctgattttttaattactgaaattgtacagagccaakacaagttaagacaaatttgaataagaaaaagaaagctggaaagctaaacttaccagacattagaagtattatacaaaatcctaatgtttaaaatactgtgcttttgacatcagaaagaaatcagatatatcgaccaatgaggcaaaatgaacagaagtcagaattagatccatacatatatagccaccttttatgacaccctaatgggcaagtgaaaaaaatatttttaaagcaaatgtggtacatacatgtcatgggatactatgcagccataaaaaagaataaatcttgtccttcactgcaacatggatgcagctggaggccattatcataag

SEQ ID NO: 793699 - DNA, 490 bp, Homo sapiens
tggttttagccttgtcatataccaaataaaatatgctaaatgtttattttcactaattattacttactgatacttaattgtagttgtagttctgtcttagtccatgtgtacagctgtaacaaaatgcctccaaaagggtaatgtgtaagtgagagaaatttgtttctcacggttctggagcctgggaagtccaatatcaaggcactggcagatttggtgttgatgagggcctggtctctgtgttcagttttgcttgttkctgtgtccttgcatgaaagaaggcagaagggcaaaaagggcctagcaagctttcttcagtgctaatcccattcatgagggcagagacctcgtagcctaatcaccttctaaaggcctcacctcttaatactgttgaattgagattaagtttcaacatgaattttgaatgagacacaaacactgaaaccatagaagatataataggctcttcttacattactataaaaaaata

SEQ ID NO: 793700 - DNA, 614 bp, Homo sapiens
ttcttagaaatgctttttctgatcacctatctaaaccaatgtgatcaccatttgtttctagtctttatcttgtttcatttctctccatagcttttggagtccatagtgtgtgtgtgtgggtgtgtttgtgtggatgtgtgtgtgttcatctcccccttcgaataaaagctccatgaggcagggacatcactgctgcaccccaggatcaagaacagctgcacacaaaaagtcagctataagtattgatgacattaatgaatgaatgaaccaataagtgactaagctggccctttcatttactagctttatgatgttgagtaacttattaccttttctaaattcaagtacctcttctgtacagttttgtgaatgaaataaatgccatagtacagggcctgtaatatgtttactgagtgcccagtaaayattagttcatagaatttagagagagggagacaggtggcaaaagagggagggggatagagaaaataaagcaaaacaaagctacccatccaatatttccattttggtgagtggccctccctcgttttagactcactgtcacaaacaggaagccaaacaaaacaaaatcaacaaaagcaaattttaaactt

SEQ ID NO: 793701 - DNA, 615 bp, Homo sapiens
aggaggtaataaaacaacttatttcccagtcatcatctgaaggctgaagaagtgctttgggttgacctctggtaaagtcgttttatggcaggaggtttctgtgtggaagacaaagctttacagctgatggatgtctttccacygccggtgaatcaccacagtgaacctcagtgtcgctgacgaggaggctggcccccttagagctttgctccactctgtccctgtcgggctgtttactcagtgttgagcctctggatttgggcttcaataccaccacgcgatgcagaggacaccgagaagtcaatcagacctgtccacacccgagcagccttcagagccacctcctgtgattcgggggcatcctggggtgggacggtccatgtctctgcagctcctgtgacctcaccaggctgtaaacatttgacttgcattctttctgggctaaattgtttacctacagagaagtccaaggttcgggtcccaaacccaggtgagtgtaagaacaccctgaggaggcttactgagtatggcctgtctctccaggaggaaggaggacccaggacttcacccccggctcctgatcacgagaccagtgtcgtaaatccagctctgaga

SEQ ID NO: 793702 - DNA, 615 bp, Homo sapiens
aggaggtaataaaacaacttatttcccagtcatcatctgaaggctgaagaagtgctttgggttgacctctggtaaagtcgttttatggcaggaggtttctgtgtggaagacaaagctttacagctgatggatgtctttccaccgccggtgaatcaccacagtgaacctcagtgtcgctgacgaggaggctggcccccttagagctttgctccactctgtccctgtcgggctgtttactcagtgttgagcctctggatttgggcttcaataccaccacgcgatgcagaggacaccgagaagtcartcagacctgtccacacccgagcagccttcagagccacctcctgtgattcgggggcatcctggggtgggacggtccatgtctctgcagctcctgtgacctcaccaggctgtaaacatttgacttgcattctttctgggctaaattgtttacctacagagaagtccaaggttcgggtcccaaacccaggtgagtgtaagaacaccctgaggaggcttactgagtatggcctgtctctccaggaggaaggaggacccaggacttcacccccggctcctgatcacgagaccagtgtcgtaaatccagctctgaga

SEQ ID NO: 793703 - DNA, 615 bp, Homo sapiens
aggaggtaataaaacaacttatttcccagtcatcatctgaaggctgaagaagtgctttgggttgacctctggtaaagtcgttttatggcaggaggtttctgtgtggaagacaaagctttacagctgatggatgtctttccaccgccggtgaatcaccacagtgaacctcagtgtcgctgacgaggaggctggcccccttagagctttgctccactctgtccctgtcgggctgtttactcagtgttgagcctctggatttgggcttcaataccaccacgcgatgcagaggacaccgagaagtcaatcagacctgtccacacccgagcagccttcagagccacctcctgtgattcgggggcatcctggggtgggacggtccatgtctctgcagctcctgtgacctcaccaggctgtaaacatttgacttgcattctttctgggctaaattgtttacctacagagaagtccaaggttcggktcccaaacccaggtgagtgtaagaacaccctgaggaggcttactgagtatggcctgtctctccaggaggaaggaggacccaggacttcacccccggctcctgatcacgagaccagtgtcgtaaatccagctctgaga

SEQ ID NO: 793704 - DNA, 601 bp, Homo sapiens
tagtaagattaaccaagaaaagaagagaggaaatccaaataagctcaattaaaaatgaaatggaagatattacaattgacatcacagaaatacaaaagatcattcaaggctactaaaaacatccttacacgtataaactagaaaacctagcggagatggataaattcctggaaagatacaaccctccttcttaaatcaggaagaacyagatactctgaacagaccaataacaggcagcgagactgaaatggtaataaaagaattaccaaccaaaaaaatccaggaccagatggattcacagctgaattctaccagacattcaaagaattggtaccaatcctattgacactattccacaaaatagagaaagagagaatcctctctaaatcattctatgaagccagtatcaccctaacaccaaaacaaggaaaggacataactaaaaaagaaaactagaccaatatccttgatgaacatagatgctaaaatccttaacaaaatactagctaaccgaatccaacaacatatcgaaaagatagtccaccatgatcaagtaagtttcaaaccaggaatgcaggggtggtttaacatatgcaggtca

SEQ ID NO: 793705 - DNA, 447 bp, Homo sapiens
atgaaggacccttaaatgtacattactctgtgaaagaagtcaatctaaaaggctacacactgtatgatcccaactctttgacattccagaagaggcaaaactatggagacagtaaaaagatgagtggttgccaggggacaggggagggagggagggaggaacaggcagaggatagaggacttggggcagtgaaagtgctctgcgtgttactgtcgtgggggatacatgtcattayacatccgtcgaaacccatagaatgtccaacaccaagagtggaccctaacgtggactctggatgatagcgatgatggcagaggcggcccatctggagcggtggctgccatcatgctgggtacagtggggaggtgtggctggggctgcatatgggctgcacactccacagagccggcgggagccagggacaagtgggatccctgccccttctga

SEQ ID NO: 793706 - DNA, 631 bp, Homo sapiens
cctcaggctggcttcccttgggctgcactcctggatgaagtagtgtatagctttgcctccagctctacttttcagggaattgctgctgaaccaggtagaaggaggcttcatcagagcagctacgatttctacagccctgccctcccccagtcccatgcagggcaatttgcttggattcactctctgcatcccatgggaggcctgggaggctggtgctatgtgaagacaaaatgcagcgtgcctgaggccaccaggtgagcagcctgcccagggtcmccaggaaccaggaactaggaggaaacaggatgtgattctgggcagtttggatccagaatatctgctctcaagtgtcatgatggggtcagaggctgatggtcacctgcccatggctattctccacgtgtgactccaggagcttcacataaagtatcccagttagttctctggaaaaccctgaggagggagatcccatgattcctgttttacagatgaagaacatttgactctgagaggtttgagtatttattcattcagcacacatctgccggatgcctctcctgtgcgaggtgctggtccagatgctggggctgcaagcgtgggcaagaggctcatggcctgttgaccatgtgca

SEQ ID NO: 793707 - DNA, 631 bp, Homo sapiens
cctcaggctggcttcccttgggctgcactcctggatgaagtagtgtatagctttgcctccagctctacttttcagggaattgctgctgaaccaggtagaaggaggcttcatcagagcagctacgatttctacagccctgccctcccccagtcccatgcagggcaatttgcttggattcactctctgcatcccatgggaggcctgggaggctggtgctatgtgaagacaaaatgcagcgtgcctgaggccaccaggtgagcagcctgcccagggtcaccaggaaccaggaactaggaggaaacaggatgtgattctgggcagtttggatccagaatatctgctctcaagtgtcatgatggggtcagaggctgatggtcacctgcccatggctattctccacgtgtgactccaggagcttcacataaagtatcccagttagttytctggaaaaccctgaggagggagatcccatgattcctgttttacagatgaagaacatttgactctgagaggtttgagtatttattcattcagcacacatctgccggatgcctctcctgtgcgaggtgctggtccagatgctggggctgcaagcgtgggcaagaggctcatggcctgttgaccatgtgca

SEQ ID NO: 793708 - DNA, 631 bp, Homo sapiens
cctcaggctggcttcccttgggctgcactcctggatgaagtagtgtatagctttgcctccagctctacttttcagggaattgctgctgaaccaggtagaaggaggcttcatcagagcagctacgatttctacagccctgccctcccccagtcccatgcagggcaatttgcttggattcactctctgcatcccatgggaggcctgggaggctggtgctatgtgaagacaaaatgcagcgtgcctgaggccaccaggtgagcagcctgcccagggtcaccaggaaccaggaactaggaggaaacaggatgtgattctgggcagtttggatccagaatatctgctctcaagtgtcatgatggggtcagaggctgatggtcacctgcccatggctattctccacgtgtgactccaggagcttcacataaagtatcccagttagttctytggaaaaccctgaggagggagatcccatgattcctgttttacagatgaagaacatttgactctgagaggtttgagtatttattcattcagcacacatctgccggatgcctctcctgtgcgaggtgctggtccagatgctggggctgcaagcgtgggcaagaggctcatggcctgttgaccatgtgca

SEQ ID NO: 793709 - DNA, 442 bp, Homo sapiens
ggggagggaaggtgtagcctggggtcatgtaagtggcagtggctgtagacttttcctccccagacctcacagctttctcggctgtcagaaaataaattcaactggaacttggactcatgcggtctccatgcaggcatcttttggttgctttgttgcagatgcttatgctgtgagacacggaggttttcagcaccaagtgagcttgcagaggggttgaaacccactgggggccccagccatgtgttcaccyggcacatgggcttccatggaaagctgaaagggggtggggggcacacctcaaaggaatccacaggagagagaatcagaaggaattctacgccactgggagtgtcttcccacgctctccagcttgcctcgtccaggccctctgaggctgctcaggaagccagaggccatgccgtgctctggtagctccacttgt

SEQ ID NO: 793710 - DNA, 584 bp, Homo sapiens
tacatgatatgagagccttcagaaatgaagatccaaagaaacaaaggaaactattttgaggaagagagtggaagttttggagaagtgtgtttggatcaaagtgggtggaatctaatggtaataaactcagggaacttagcaagccgtgaattttttttgttcttgttgttgagatggagtctcgttctgttgccaggctgcagtgcagttgtgtgatcttggctcactgcaacctccgcctcccgggttcaagttattctcctgcctcagcctcccaagtagctgaaytacggcgcacaccaccacgccagactaatttttgtattttttgtagagacggggtttcctcatgttggccagacttgtctcgaactcctgaccttgtgatccacctgcctcagcctcccaaagtgctgggattacaggtgtgagccaccacacccgggagcaagccctgattgttgagattcctcttggcctaggtctgtgccattccttctctcctggtatagggcaggacccccctggagtaagaaccttctgttctactttcagaagaagtaggtcagaggattctttttacg

SEQ ID NO: 793711 - DNA, 595 bp, Homo sapiens
atgaaggatcacatcacccaagtactgagcatagtagccatcagttagtttttcaaccagtgccccccttcctgtctttctccctcccttctctagcagtccccagtgtctattgttgccgtatttatgtctgagaatacccaatgtttagctcctacttataagtgagaacatgtggtactcagtkttctgttcctgcattaattcacttaggataatggctttcagctgcatccatgttgctacaaaggacatggtttcattctttttatggctgcatagtattccataatgtatatgtaccatattttctttatccaatccactgttgataggcacctagattgattccacatctttgctattatgaatagtgctgcaatgaacaggcaaatgcatatgtcttttggtagaacaatttgctatcttttaacaatctactttcttaaggtaataagaaaatttgttaaaatttctgaagaagatggaaaggaacaactgtgtggacatgaaaatcacctgggcaatttatctaaaatgctaattttcatacctacttataaagtttcttatatgggaaagttttggtgcattt

SEQ ID NO: 793712 - DNA, 595 bp, Homo sapiens
atgaaggatcacatcacccaagtactgagcatagtagccatcagttagtttttcaaccagtgccccccttcctgtctttctccctcccttctctagcagtccccagtgtctattgttgccgtatttatgtctgagaatacccaatgtttagctcctacttataagtgagaacatgtggtactcagtgttctgttcctgcattaattcacttaggataatggctttcagctgcatccatgttgctacaaaggacatggtttcattctttttatggctgcatagtattccataatrtatatgtaccatattttctttatccaatccactgttgataggcacctagattgattccacatctttgctattatgaatagtgctgcaatgaacaggcaaatgcatatgtcttttggtagaacaatttgctatcttttaacaatctactttcttaaggtaataagaaaatttgttaaaatttctgaagaagatggaaaggaacaactgtgtggacatgaaaatcacctgggcaatttatctaaaatgctaattttcatacctacttataaagtttcttatatgggaaagttttggtgcattt

SEQ ID NO: 793713 - DNA, 642 bp, Homo sapiens
tctcattaggttgcccatgctggtctcaaatttctggtctcaagcgatcctccagcctcagcctcccaaagcactgggattacaagcatgagccaccatgcctagcctaactcttttcattatattcttccacatgaactcttttcatagataagcaagaatrtctttcctggcatagttaaacaatacacagtacatttttctaaccaaggaagggggaaatattttatctttgctgatcccatttagagttactgtttcgctctctataaaagtaattttcaaactttgatgtgagttagaataaccagaagtgcttattaaacacatagacccaatattttgaatcagcagctctgaagtgagtcttgcaaattgcacttctgtgaaacgttccaggtacttgtgatgcagtaggcccacagattggactttgagactccataactgctgaccacattccaacagtgctgaactactaatatgtgttggtctaatgtcgttgacagttcaaacatcagacagaagtttgaaaatgcaagacatataaaccctgccccattctttctacactaaactaagcaatgctgcagtgcacaaatagaaacatgctcacctggtcatcagatcaaggtcacagaa

SEQ ID NO: 793714 - DNA, 644 bp, Homo sapiens
tactgcaactcatctgtaacttctgggtcaggccactcactaccatctggtaaaaatgaatgttgaaaactcccttttattctgacaaaaggtaataagaagaggttaacagcagatgatttctgagcatttcaatttggttagaccaatgcatccacaagcgggtttgcgacgttccacatgtctaattattccaagaggtattagaatgctttaaaattatgaaattccaaaataatggtaggaaggaatgtaattatgtgtatacccccctcttctcctctgttgccccctgtctgaccttyttattgaaagtgtttattctcgaaaaggcattgggaaggaagaaataagaaggattgctgtcttgaaaaatgtaattttttttttaaatgtgagcgagactagaaatgttttacatttccttaaggggggaagtattagaagtattaggaaccatggaaggagagtgtaagtggaaaggtttctcctcaattgaatgagcttcctaactgagtgattcaaaggtggagggggcacagtttagggaggaggtgagtgtctggtcactggaggtgttaggaaagccctggcatatgcctggggagagatatgttaaaaaggattcaaacttaagatagatg

SEQ ID NO: 793715 - DNA, 563 bp, Homo sapiens
caggaagctgaggcaggtggatcatttgagctcaggagtttgaggttgcagtgagctatgttcacaccatagcactccagcctggatgacaccgtgagaacctgtctccaatttaaaaaaaaaaaaaatccaattcttcatgaaattcttactcattagttctatatccattgatatcccttggataaactattactatgatgattgctaaatgatgattgkctaattccatcattctgtctatatctattgacattctactataggaagatttgttctttctcattaatttttattggcaaaatctcatgagttcgtattttgttcaattgataaaattcattatcattatccattttgatgtttaaatttatttgacatcctggaagccctttcaagttgacatcagtttcatttgtcacagctatgattctctgagaacgttcttattttctggctgaaaacactctgtacttacctagttctgccccagccctggtatcaggctttattctaagaagctttgatttcttttggtagagaatggtatttagaaaccaaga

SEQ ID NO: 793716 - DNA, 524 bp, Homo sapiens
atttctgaccccagcgtttgcatttgttattctttctacctcaaatgttctgatttctactcaccactaagttgtgcgtcttgatctattcagagctttcttctttattccagcagccattttgtagtggagccctgcccagcgtytatctcctttcttctgatcacagcagttcagttttccttggagggtgcttccctttcacatcctttgtccattgcatttgggggagtgatcagtccctagttctaggcagggtcatgggaagaagtcttggccagtcagagtcacagtaatttgttcaagggaatatactatgcttctgatccaatgacactggtctctagacttatgctggaattacagggaaagtcaagttacccaccatcttcactcccaccttcaaatagggtttgccaagttcctagaatctgaggctacatgtattagtccattttcatgctgctgataaagacatccccaagtctgggtaatttataaagaaaaagaggtttagtggactc

SEQ ID NO: 793717 - DNA, 613 bp, Homo sapiens
tacagtaatagctgcactattctataaatacactgaaaaccatggatttgtatactttaaacaggtgatttttatgctatgttaatttagtctcaataatgccatcagaaaagacaaaaaaaaaaaaagaacagttggaagatcaggtaatactgatgccacatttccctatggtaaaaactgctggtattttattaggactttttctatttaaatggattctacgcttttctgctcacctcagtccctactaattcttcaaatcactctcaatcctgaggccaaagcccaatttgtccctgcactgttttcctcaccataaaattaagagaaatttaattttttttggtatccgtatctctagcaaatataagtaattgaaagatacaactgaagatgaatcatatgttccatgattaatgaggaacagccactttctccgtggcctcttgtctatctcattgattttgyatcacctaccatgctgccatgtcttagagctcttcctaagatggatgagacagaaggagcaaaggtgtgttccaccagaatgcactggtcccgccacagctggtgtgcatgcatgaggtcaaacccaccaatgtatcatctg

SEQ ID NO: 793718 - DNA, 568 bp, Homo sapiens
tttaattataatgtatcttgctgtggatttctttggatccaacctgtttggataccagcttcttgcatttgtaggtttaagtctcttgccaatttggtgtgtgtttttggccattatttctttgagcacttgttcagcccagcctcttttcttttctccttctgtgactctattaagaaaatgaaagacaacctacacagtggtagaaagtatttgcaaaccacatataagacaagggacaagttaatacccagactatataaagaaatctcaaaattcaacagtaaaggaaaaaaaaaaaacaaaaacagccggcgcagtggctcacgcctgtaatcccagcactttgggaggccaaagtggacggatgacgatgtcaggagmttgagaccatcctagctatcacagtgaaaccccgtctctactaaaaatacaaaaactatccaggggtggtggcgcgtgcctgtagtcccagctactcaggaggctgaggcaggagaatcacttgaaccagagaagcggaggttgcggtgaaccgagatcatgccactgcactccagcctgggct

SEQ ID NO: 793719 - DNA, 459 bp, Homo sapiens
tgtccagcccaccaatatgaacagtgaaaaaggggacaaatcaggagtgtgccattactatttgccaataattattagttgaagaattgcattagtgatacttagatagtatctctttttaaaaaatgggaaacagcaaggaggggatggattgaacatgaaaaactaggagctgtgacaataaaggtcaagaaatgatcctgagacagaagctgatcataaacacaggagcagcagcagccactacatcacattttggagtttctaataattttcctaaattaaactttatgaccagacawctaatggcaaactgccaataagacaatatattttatagcattttagtcatagataagcatatgcttttatgaatcttaatattatggtagaatactacataagatataaatactaaagttttgaaaataaatgtactaaatcatagttttaaaataa

SEQ ID NO: 793720 - DNA, 538 bp, Homo sapiens
tgcatgctgttctctctgcttacttccttttgcttgttcccttgcctttagtaaagtcttatgaaatattccagctttatctatattgtgctgcaaaactcggaaaatatcagagaaaaagggagagcagttcccctccacaagaccgtggtagcagctataaatagatccaatctccccaaccaaagatgactctaaatacagagctggagtgataagccttttgctgttaaggatatgaacatttaattggtgtattctcttttcttcctattgacaaattaggccaagcagaaattcttttaaaaatccactaatcattctttattattttttaaaaagccacaatgaaactgaaatgtttgaagcattgaaggcatctctaaaratatcagaagtatactttaaactgccatgaatccattctcattcttatttctctttctttttcttggaaagttctctcccttttctccagcttctcaagacactcaaaaacctcccctgaatggaaaatgaagccctaatggaacagcta

SEQ ID NO: 793721 - DNA, 542 bp, Homo sapiens
gcattaggagatatacctcatgtaaatgacgagttaatgggtgcagcataccaacatggcacatgtatacatatgtaacaaacctgcacattgtgcacatgtaccctaaaacttaaagtataattttaaaaaaaagttctaaaatacaaccacaacaacaaaaaaagacatggaaaaataaataaataaataaataaataaataaataaagagctccggttccgatggatctaccactgactggctgtgtgacaccacagaaatctcctaacctctctggggccttggwttcctcatttgcaaaggaggaaaagagcagcatcaactgcagggttgctcagcctcaccactactgacattcaggccagacaattcaccgctgtaagggcctgcctgtgtgctgcagggtgttaagcagcatccccagcctctacccactggatgctggtagcacctccccaatcaggatgtaacaaccaaaaccatgtccagacactgccaaatgtctcccagcacacttccagttgaaaaccactgatcta

SEQ ID NO: 793722 - DNA, 595 bp, Homo sapiens
gaagggctgaaccaagggtgtgacctaggacgatgagtagaatgtggcagggcacagtgggaaaaaagaggcaccttatggagcatttagcaagccttgtctaacaggtgagaattgtctaacacggctccagggctctccctaaagtatggctggcagttcagcctcaagttcctcatctacaaagtgagaataaataattcccagcttctggaattactgagaggctctaatgggaccatatacttggaaaagcattataaacgtgaaaaatgcgatttagatttactattacttgtgaatgtctagcatggaaaacagtgaatagtaagtggaaatgggcttatcatatttacacaagcacatagattcttcctgtctacaaaggtcaatgacatggcccaagcatgagcctggcaaagatgagctttgctctcrgtaatgcttaggaagtttgagtttaggaactcttgtaaatcttgaggccactagggtaaaccttggaacaactcagtcaaccaatggatgtacaggagtctagattcagtgggttgggaattaatgggaaacttgcttctctcagataagagcctct

SEQ ID NO: 793723 - DNA, 564 bp, Homo sapiens
tgagtatgctgaattgtacagctcaaatgatatgtgttgaaggagttgagagcaggagagccattaaggaaactttcatgttggttcaaacagtctagcatagaattcttggagaacatattccattagtttaagctaattataagcttgctgcctgctatttgagattgcatttgaaatttgwccatacttttgtgtgtatcagtagtctactcctttttaccgatgagtaatattccactgtatggatgtttcaccgattgttaatttatgtaccattgagggacatttgagttgtttccagtttttgatgatgacgattaaagctgctataaacctttttgcacagggtttttgtatataagtttttattttatttatgtaaatacccgggaataggatttctggatcatatggtaaatttgtgtttaattttttgagaccctgccaatctactttccaaagtgactgtaacattttgcattttcagtagcaataaatgagagttccagttgttttacatacttgtcagcacttgatactggcaggtttcttttttgtttt

SEQ ID NO: 793724 - DNA, 579 bp, Homo sapiens
aagtcatgcataatggaaagaaagatgtaaaactacctctatttgcatgtgacatggtcttgagcatagaaaaatcctaaaaagtcgactaaaaagctattagagttaataaatgagttcagtaaggttgcatgacacaagatcaatacacaaaagtcagttaaatttccatacactagcaatgagcaatccaaaaataaaattaataaaataactctgcttacatagtatcaaaaagaataaaatgcttatagataaattgaaccaaagaagtgcaagatttgtacactgtgaactataaactattattgaaataaatttgagaacaaactaaatggaaagatatccatgtttatggtttggaaggtctgatattgttaaaatggcagtatttccaaaattgatctgcagatttrttagggctcagaacgcaataccccaaagtatggtgccttggcttgcgagtactttttaactgaaggagataggagagcctcaaaagcaagaagatctcaccttcttccactttcctgcctcccattcctctttctcccccaaatcaagtgataaaacctacaa

SEQ ID NO: 793725 - DNA, 639 bp, Homo sapiens
ggcaaaatgttaacctcatttaaatcaagcaatgagacaccaccagttaaagtttgaaagacattgtcagggaatatgtatttcattgtcccctagtttataataaacattgcaggtagctcaaatgttggtctcaatgctcttcataaagatttctattgtttttcctttttattattcttttatccccaggctgtgatttttctcactttggccttttcatatgttccctccagcaacaatgttggctatgtctgcacagaatttctaatccaaagaggtgactcaaaatattttggaggttctctatgcagcatcagagaaaaaaagtcccatgcgtccgaatcacaatttacacytaagggctcattaacattaagaagcccttaggtgtaaatgctgtattcccaaagttatcaacagttttttaaaaagagctgcccagatgaaatgggcaaagctatcatttgctgccaaacgtcagtcaaccagggaaaaaaagagaaggaggaaaccatttaaataagtgttattcttaatttggatacatttttaatttttgaaaaataggggttatcttatctataaaatcaaccaatactaccttcttcaatttgaatgtaaaggtttaaatgtaaa

SEQ ID NO: 793726 - DNA, 639 bp, Homo sapiens
ggcaaaatgttaacctcatttaaatcaagcaatgagacaccaccagttaaagtttgaaagacattgtcagggaatatgtatttcattgtcccctagtttataataaacattgcaggtagctcaaatgttggtctcaatgctcttcataaagatttctattgtttttcctttttattattcttttatccccaggctgtgatttttctcactttggccttttcatatgttccctccagcaacaatgttggctatgtctgcacagaatttctaatccaaagaggtgactcaaaatattttggaggttctctatgcagcatcagagaaaaaaagtcccatgcgtccgaatcacaatttacacctaagggctcattaacattaagaagcccttaggtgtaaatgctgtattcccaaagttatcaacagttttttaaaaagagctgcccagatgaaatgggcaaagctatcatttgctgccwaacgtcagtcaaccagggaaaaaaagagaaggaggaaaccatttaaataagtgttattcttaatttggatacatttttaatttttgaaaaataggggttatcttatctataaaatcaaccaatactaccttcttcaatttgaatgtaaaggtttaaatgtaaa

SEQ ID NO: 793727 - DNA, 621 bp, Homo sapiens
ctagaatccactatcgtatttcttaaaggagctctggttcctgctgctggaggatgatatatagaagccataaactgagtgccagatgtgctcagtgctactggagtatctagcccctctcactggacatagccagaaaagatatgtatgtatgctaacttatgcatacacacacctatatttatttctgtatctgtctgtatatattaacaactataagttcattttgatatttctaattctaatctaacaaacacaaggctttttccctttcccttttccttcctcctttctttattataacttgttccctgaaagtgaaaaatgtgctttcattatctatatttattagtccaattctagtatatacacaaagtagattcagaattgcttgccatatccccayaagaaccaaatttagaagctagagtacaaaatttgtgtaaaattagttatgtctttagccttctagtatgcaatcaaaagttatgaatattatgaattttcatatgaaattcaagctatttccaaagttaatttttttctcaatcccttttagtgtgattaagctattcaattgtaatacagtgagagttcatttgtatttttatattctagttt

SEQ ID NO: 793728 - DNA, 647 bp, Homo sapiens
cacaatcaggtctacataacaaccagctaataatacaatggcaaaatcaaatctgcacatatcaatattaaccttgaacatacttgggctaatcaccccacttagaaggtaagtcggataaagaagcaagacccaattgtatgctgtcttcaagaggcccatctcacatgcaatgatacccatgagctcaaagtaaagggatgaagaaagatytatcaaataaatggaaaacaaagaagagcaggggttgctactcttatttcagggaaaaaaaacagactttaagccaacaactatcaaaaagaacaaagaagggaattacatgataaaaagttcaattcaacaagaagacttaactatcctacatatatatgcactcagtactggacacccagattcataaaacaggttcttagagaactaagaagagacttaaataaccacacaataatagtgggaggtttcaacacttcactgacactattagacagatcatctaggcagaaaactagaatttgggacctaaactcaacacttgaccaaatagacctaacagacatctatagaacactccacccaacaacagaatatacattcttatctccccatggcacatactctaaaatcagccacatacttgccataaa

SEQ ID NO: 793729 - DNA, 647 bp, Homo sapiens
cacaatcaggtctacataacaaccagctaataatacaatggcaaaatcaaatctgcacatatcaatattaaccttgaacatacttgggctaatcaccccacttagaaggtaagtcggataaagaagcaagacccaattgtatgctgtcttcaagaggcccatctcacatgcaatgatacccatgagctcaaagtaaagggatgaagaaagatttatcaaataaatggaaaacaaagaagagcaggggttgctactcttatttcagggaaaaaaaacagactttaagccaacaactatcaaaaagaacaaagaagggaattacatgataaaaagttcaattcaacaagaagacttaactatcctacatatatatgcactcagtactggacacccagattcataaaacaggttcttagagaactaagaagagacttaaataaccacrcaataatagtgggaggtttcaacacttcactgacactattagacagatcatctaggcagaaaactagaatttgggacctaaactcaacacttgaccaaatagacctaacagacatctatagaacactccacccaacaacagaatatacattcttatctccccatggcacatactctaaaatcagccacatacttgccataaa

SEQ ID NO: 793730 - DNA, 590 bp, Homo sapiens
ttactgctttccacccccccttcccccaccacatacacacacccatatatgttttgctattttaaagaaagagatttaacagccataaggcacttttaaaaataacattcacatctgggctgaccacctgtatgccaaaatttagcttgatgttaattaaaacaggcatgttataaacctcaggaaatagcagctgacccctgactatgaatgtaatgctataataatacgtagtaaaaataagacattttgaggctgttgcccaaaccactcrtgcattaaaattctcaccactgtatactcttgcacgaggatgggtaaatcaactgcagaagtggtccaaccaaaaaaataataatgataacaatttaaggggtaagcgccattcattaatgcaacagatgactttaaatggctatcctggacaggcaccaccagtctgccttgtggagaggactgtgcatggagcttggaagactgatcagctccatcctgataggataataataatatcaacagtaaagttattgaacactttactgtgtgtctggcactgtgttaagcacttttaacatacatgagtgcattta

SEQ ID NO: 793731 - DNA, 588 bp, Homo sapiens
tccgtctttgtaaatgataacatgcaggggtgcctccacattccacccttcagccatgggctccactttgtttccaaatttctattttgctttctgcttcctgatggtaaacacccatctgtattttgaatttttttaaagacattgacagtaacctgatygctggctacgttcagggatatgtggtagggtcagagaaagagcattaggtttgcacatagaaaatgaattctggcttctgctcactaattatgtgaccctaaataagtcacttactctgagcctcagtgtccttatcaataaaatgggcatgacaacaacagttacttcacagattacaggacaatcaaaagaaattgtgaatgtgaaaacactttaaatcagtggttctcaatactggctgtgcttcagaatctcttgttttgtttcctaaaagacagatagctttcccagacctactgagtcaaaatatccaagggtaaacctcagacagctatatttctaaaaagtttctaaagtgattcaaatgtgcaggcagagttaaaaaaaacattctggatataaccttttggttgcacgctgctgtcc

SEQ ID NO: 793732 - DNA, 588 bp, Homo sapiens
tccgtctttgtaaatgataacatgcaggggtgcctccacattccacccttcagccatgggctccactttgtttccaaatttctattttgctttctgcttcctgatggtaaacacccatctgtattttgaatttttttaaagacattgacagtaacctgatcgctggctacgttcagggatatgtggtagggtcagagaaagagcattaggtttgcacatagaaaatgaattctggcttctgctcactaattatgtgaccctaaataagtcacttactctgagcctcagtgtcctyatcaataaaatgggcatgacaacaacagttacttcacagattacaggacaatcaaaagaaattgtgaatgtgaaaacactttaaatcagtggttctcaatactggctgtgcttcagaatctcttgttttgtttcctaaaagacagatagctttcccagacctactgagtcaaaatatccaagggtaaacctcagacagctatatttctaaaaagtttctaaagtgattcaaatgtgcaggcagagttaaaaaaaacattctggatataaccttttggttgcacgctgctgtcc

SEQ ID NO: 793733 - DNA, 629 bp, Homo sapiens
aacttttgattgttatgatgatgatacttcttataattttgttatagtgttatgaataaattactctcttaaatactcttggaaataaactcaatataaataaataataaaagtaattataaacaatttctaaaaaattaattctgccaacttttccgataagagttcatagatacaaagaacatatggatgctagaacrtgcttgtttgtttgcttatttgtttcatgcaataataaattgttttcatcaagcctaattttaacactgcattttaaataagcttattttctgatatatgtttatatttctaatggaaaattgtattctaaaaaatcgaagtaaaattaaatcatattgttaagaataatgtcatttcctgcattatatttacataatagattaagcacaattaggccatttgaagtacttgcaaattatctctttctcttgtctattttatacctatccatctctctattttgtaactgcctctctctccatccctgcttccactgtttttttctttaaaatcttattatttttccttggaaatggtctctgaatcactctgattgtattcaataaatttttattaaatgttcaatgactaaatcagaactgggtcac

SEQ ID NO: 793734 - DNA, 608 bp, Homo sapiens
aaaacttatattgaaaatatgacattgacatattcacccaaataagttcatctgcaaatcatttctttaagcattgaccctaaaatttcattactatttctgattgttttcccggggagtttgctgtgatttatataaattgccattgtcatcagccaggtgaacagaaaccttaccttcaaaattgttttccttgcttgagttttgaccatgaatttcttaatgttcccttctacctaaaactgaactccatatctcagcatggttttgaccactaaatgtgtaccttatctctgttaccaaaatctgaggtaatctggcaatgcgtcagttacttggaagtgagctactaaggtacrgtcatgtagtagttgtctaaaaagtgagtgaacgtcaaactgaaggccatgctgctaaaggatgaaggccagagtcacatggatccaggtttgcattacagctttagcacttaccagttctatggccactgctaattaattacctttcaaaggcttagcttcctcatgtgtaaaatgaggctaattttaccacctaacctgtggtttattgtcctccgtactgtgaatgtcaaacaataaacacttaat

SEQ ID NO: 793735 - DNA, 592 bp, Homo sapiens
acccgcctcagcctcccaaagtgctgggattgcaggcgtgagccaccgcacttggccgctttatacgatatttttgaataattatgtgcatgaaatgaagttttgattgcatttggctgtgactcatcacaagaagtcatgtgggggatcttccacatgtggcatcatgtaggactttggagcattttggatttcagattttcagattagggatgctcaatctgtatctcaatagctctcaaactatgtatcactgtccctattttacagatgaatatactaagtctcaataagactcagggtctttcccaaaatgttaatgccatagcagagagtagacccaaatctttctgattccaaggctcattcccttgttaccatgacacactgcttaataaaagtttgttaaaygtatgaatatgtacattaatgttaaaaagcatacaaagttatctttcattctatgcttaatttcatgcttcatgttcacttattttgtaaaagcttataacatttacaatcatgttcaaaggtagcaacatagtatctttaaccctgcacttgactatagaaattcccccttgaattaact

SEQ ID NO: 793736 - DNA, 563 bp, Homo sapiens
atctcccctactacatataatgtctatgttgtattttggatacaaaaagattagattactattaaggggaaaaaaagattcacagaaataaatgaaaatggtagaaattttctatgaatttgtacggtactttctgccaaaaattcactgcattttttttaacattagtttatctacttttaaatatgccaaaaataactaacacattataaaatgtctccttttttgttttgtttgtttgtttcagacaatgtctcattctactgtccaaactggagtgcactagtatgatcctagttcactgcagcctcaaaactcctgacctcaagcgatactcctacctcagccttcaaaagcgctgggattacaggcamaagctacctaacccggccaaaatcagtcttaaaaataaaggctattctcactgggtacggtggctcacacctgtaatcccagcactttgggaggtcgaggcagatggatcacctaaggtcaggagttcacgaccagcctgatcaacatggtgaaaacccgtctctactaaaaatacaaaaattaggctg

SEQ ID NO: 793737 - DNA, 631 bp, Homo sapiens
aaagcccccttttatttcaaagatgctactttgactgcaagcaaatctgcaccgaaagtttacagctccgggagctgggtcctgcgcgcccggagtgagcagtgggaccctggaaaatgccctttttttaaaaagccatttttctttcactttaagaaatatgatatcttttttttttctctcgacccaaaaggagataggcgtgtgcagattacaggcaatgcccccttcggtcagtgcagcgtggagtcgcygtgtgtgcgtgggttggacttgtgcgtcctggctgcgtgtctcaggcagggctttcgtgctcgcagtgtcggggtgggaaacctgtgccggatgtccgaggggctttgcagaaagcctggcagtgggcggcgtgacctctgcctgggggcggagtggctccttggggctggaaggcagttctcttgagttgggggagatcttagctggggagagggaggcgggggaagtgtgctcctgcatttcgtgacacgtacccttcggaggcgcccgcggcccccgcctgtctgagtctggggatcgtaagcaggggggcagcctggcccatggacagcgtcagtccgcctggagaaactcccctggggatcggctgtgtccc

SEQ ID NO: 793738 - DNA, 511 bp, Homo sapiens
tctgggtgccacagcacattttacctgtcatattcatggaaacccagctgccaaccatacttggttttatattgcacagcctattcatccttccccatgacatctaactgcaggaaattgactgaaagtcagtggggttatcatggaagatactgggctgtatcagtgtttracagataatgggactggatttatgcagtctactggaagacttgaaattggaaaaagacaatggattcaagccagttataatcatggcaccaataagtgcaaaggtggtatgtggagtctttgtcactgtgtcctgcaatgccactgggctgccagtgccagtctttccttggttatgacagctatggattaatagccagccatctgtcttaagtccttagatctaagtccccaaagtcacacttatcaagacctggaatcttggacctgaagcctgtctacttcatcatgtcccaagttggctctagctgtctccatattcaggatgtgactcagaaac

SEQ ID NO: 793739 - DNA, 608 bp, Homo sapiens
ccaagttgtaagatatatctgggaatgcggtttacactcaaaaccatatttattcttatcatttgattcagaaaacaaattaaatgactggcacaactgaaaataacccaagagatttgttcaatgaaacaaagctgaacctcaaccaaatagataagctgctgcctaagattagcacaatttcttagtattcaagagtgagtaaaccctgctttttaccactgtcaaggtgtccagtgttgtcctttttagagcatggctagctgagggttagatggcaagaaacatcatacttgtattttastcccttaaatgaatgatttagataggaatgattctccaaattttgaaaacacttgtcagaaatgttctcttattccttcactctataccatgtagactataataaactgtctctcttctgccttcacacatttcatgcagaacattaggggttagcagagagaaagcttatcaccagcttcttttggactcgctgcttttttccaagcgatctgagatgataaaattattcaccttagggatccaacccagcactccttttttgattttcacctatgttttgtgagcttttctgttgatgctag

SEQ ID NO: 793740 - DNA, 640 bp, Homo sapiens
aaaattaggcagatggcacaccaagttgtaagatatatctgggaatgcggtttacactcaaaaccatatttattcttatcatttgattcagaaaacaaattaaatgactggcacaactgaaaataacccaagagatttgttcaatgaaacaaagctgaacctcaaccaaatagataagctgctgcctaagattagcacaatttcttagtattcaagagtgagtaaaccctgctttttaccactgtcaaggtgtccagtgttgtcctttttagagcatggctagctgagggttagatggcaagaaacatcatacttgtattttactcccttaaatgaatgatttagataggaatgattctccaaattttgaaaacacttrtcagaaatgttctcttattccttcactctataccatgtagactataataaactgtctctcttctgccttcacacatttcatgcagaacattaggggttagcagagagaaagcttatcaccagcttcttttggactcgctgcttttttccaagcgatctgagatgataaaattattcaccttagggatccaacccagcactccttttttgattttcacctatgttttgtgagcttttctgttgatgctagaactctatgcaa

SEQ ID NO: 793741 - DNA, 551 bp, Homo sapiens
atgtattatttgtaaaacacaaattatcaatattacctctgacattaggtgagatatttctgaattttaatttctcttgcctactttcactgaaaaagagtcatgcaaacagatttttaagttgcaaaccaattgcaaaatatttcttatccaacttcaatgataggtattgctgttattctaagaaatgttttatgagataatcaggacgaaaataaaatgacattaatgtttcaactaatgggtgtaaacgagaygttctgaaaatgaaggcaaaaaggagatccaccttctactttcataaagtttctatcttcctctgctgactcaaataagcatttaatacatttttataacgaattaattatgaatatatttcaaataaataaattatttccaagtgttgaaggaaattcagacttctaatttgctctgattctgaaactaaaacaaaatgctgtgagagtttgcgtttccagtgaagtaggcgtgagaaatccaagttcagacagctacaatgaaactacaatttacccagcctctctgccaga

SEQ ID NO: 793742 - DNA, 602 bp, Homo sapiens
ttcaagcaattctcctgcctcagcctcccaagtagctgggataacaggtgcccaccaccatgcctggctaaattttttttattaattatttttaatcacaacctgtaaattatgtgttattgtgacatttaacaatatctctgctttcagagtgtatatttctaaagggccaacataaaagtattacaattgcattgaattataccaagcagtcagaagaaataaacccatctctgttattaattttagagyggcagcctaccatcagcatattttattgtgcatgaggacataggaagtgaagtccttccctccctgctttcatggatgtggggagatcatcttaatagccgatgacctcaaagactatgtggtagaatgttttatgaaatttgttgaactgatagtgtgtacggtacaaatagaatgaaaagaccaagaatgagcactggaaaaagaaaagaaaaaagtaaaacaatgagatttattcattctaaataggaccagttccaccttagagtggctttccaccttttttagtgtcacatttaagaggtaaagtgaagatgtgtgagattgagtttaattcaaaaatctgaaag

SEQ ID NO: 793743 - DNA, 597 bp, Homo sapiens
aaatttagcaaacctgcatcagtttattgtaactgaaatcttggaccttgggatccgatgggcctatgtgtaaagtaagtgcactatactataagcttcacattatttgccaacaataatactgtaaaaggcatttatgaacaacgtaatttatattcatttaaaataaataagaagctgaaattgtttgctattggaataggttatttcacaatatcagtgcactgtttatttctacatatggagcttattctctttttgctaatctgaaaaaatggatgtttttcttgtaccttatggattttttaaaaaatgttatctccattgtactatgagctttgagaagagaactttatttattttgaggcrcattttatctgtagcctatggacaaatgacaaatattcaccaaataaatgaagtaatgactttggcaaaaagtagttgaaagtgtctttttatactgtccttcaccagagcaagaataattagattatttgaattctgaagaaatagagcttaactgaatcctaataactctttcaagtatgtttcaaatcatatcacagttttctagatttacagacattccatgta

SEQ ID NO: 793744 - DNA, 446 bp, Homo sapiens
gaaagggagttttattaagacatttatctccctaagaaaggcaaaatcttggccttggcaggttctcaaatttttattaagggactataaaatgtggacaagattttatgttgtcaaaatatcaattttaatgctttgcatggaagttccrctgtaaagcttaaatttgaattgcatgatctactatcaaattatgtaaaaagagctagatatccttcaggtgtatctgacccttacgtttgataaatatctccccaaattttaatgtagttatttattttggagggcatacaataaaatttcaatcatttttgtgtccttatgcttgtctgcaaagacaatttatttattgctatcatattattaaattatagcaattactttgatttattttgttattaaactttgaattgcaaccatttatacttttagaatcattttctaaa

SEQ ID NO: 793745 - DNA, 554 bp, Homo sapiens
tccatactattgtcgaatcaaaaactggtaagtcaaaccattgtaagtcagggagaaagtcaacaagggagtttaatccatttacatttagtattattactgatttggggagtactaatttataacatcttattttgtgttttgcatttattatgctttttaatttttttctatttttaattgtattgaggcttttattgtttttgtttttattttgctttttatctctccttttaactttggaagttatacattcaatgtctattcttgtggcaattgcmcttaattgccttttaccatgtgtagttgatttaataatatctgaaacagtaaatattctaaacctcttattgaacaacaatattcttataatattttaattgtaatctaccactgacattttatattattgttgttcaatattttactttcatcttgtttataatgccttcaacatacttgattattattacaagtagtattcctggatcttaggaattattctttctttagattcacttacatttttacaattcctttacataccattttct

SEQ ID NO: 793746 - DNA, 596 bp, Homo sapiens
ttccacacaaaaattaaaattcgatctaggcctcattctgcacacaaaaattaattctagatggattaaatccctgaatgagaaaaaacttttaaatttaaaaatagcatatttatgaaaccagaatgggggaatatttttttcaacaagacacaaaaaccctaagcacaaaggaaaaggatgataaatttgaatatgttacaggaaatttttctgtatagacatcagaaaacaccmtttatagtcatgccacagactgggagaagatatgtgaaacatacacgactgacaaagatttgtatctaaaatatacaaagaactgcaaatcaagaagaaaaagacaaactaacagagaaattggcaaaggatgcaaagaaacaattcatgggaagaatatcctaatggtgggaagtcatgtggaatgatggtcagctcgtttgcagtcaaataaattttaaaaactcacaaacttcagcagggtagcatttctcaaatatcaacttggcatttagtctgataagagctaatgtttcaagaaaatgaggaaagtggaactctcatagtgtgctggtgggagtgcaattggcccgacctct

SEQ ID NO: 793747 - DNA, 596 bp, Homo sapiens
ttccacacaaaaattaaaattcgatctaggcctcattctgcacacaaaaattaattctagatggattaaatccctgaatgagaaaaaacttttaaatttaaaaatagcatatttatgaaaccagaatgggggaatatttttttcaacaagacacaaaaaccctaagcacaaaggaaaaggatgataaatttgaatatgttacaggaaatttttctgtatagacatcagaaaacaccctttatagtcatgccacagactgggagaagatatgtgaaacatacacgactgacaaagatttgtatctaaaatatacaaagaactgcaaatcaagaagaaaaagacaaactaacagaraaattggcaaaggatgcaaagaaacaattcatgggaagaatatcctaatggtgggaagtcatgtggaatgatggtcagctcgtttgcagtcaaataaattttaaaaactcacaaacttcagcagggtagcatttctcaaatatcaacttggcatttagtctgataagagctaatgtttcaagaaaatgaggaaagtggaactctcatagtgtgctggtgggagtgcaattggcccgacctct

SEQ ID NO: 793748 - DNA, 625 bp, Homo sapiens
agtatctggtgcatagaacagggcttggcagagaataagagtttaaatgattgttgaataatttaataaagctttaagtagtattctgatatgtcttttgaactctgattcttaagttaaactctagacataggcctgtggatactgagtatctcagattctgcttctgtgtacaatgatattttttgtcttgtgatgttatataaatgggttaaagatggacccccatgtttttcttacttcttcacagcaggctaggaccattagcccaaagccaaatggtacccaactccgatttttatacatccagttgctttaaatatagctcaaataaatatatttttagccatttaaagcctacctgctttgcatacctgataaaatttaactgaacatctgctaaccatagataaagtaaactctgggacactaaaagaccccaagccattgatacccttcaaagttcyctgacccagacacttcccaatttctagtaagtggtatcacctagacgtgcaagccccctctccaatttccccttctcctgggagttcgcttgtcatcttctccttctgggtggtagccaggcaccattgtctctggaaggtctcctgttgtgagggac

SEQ ID NO: 793749 - DNA, 436 bp, Homo sapiens
ctttcatcttagacgcaaaggggtggggggcagttccagattactgcattatttatactctgacaagccagacactctttcttctcggtgcaatgattttcacgacaaaatgaactccaaatcaccagttattttaacatggcaaacaagtttsagaaaaaagtttattgtaaaaacaaaacgaaacaaagaaacgagagagactctaattttcaaaattgattaaactagatttttctcattgttgccatagtttatgcaaactgattattaatgacttgaaaaaataactgtaaaattattttagttaatttttccttctttctcttcattttctatttggaaatatttaagttgttgcccttcagaagcattttaatattgtaagttacaagttaccatatattttttgagattgcaacgttgtatacttaat

SEQ ID NO: 793750 - DNA, 436 bp, Homo sapiens
ctttcatcttagacgcaaaggggtggggggcagttccagattactgcattatttatactctgacaagccagacactctttcttctcggtgcaatgattttcacgacaaaatgaactccaaatcaccagttattttaacatggcaaacaagtttgagaaaaaagtttattgtaaaaacaaaacraaacaaagaaacgagagagactctaattttcaaaattgattaaactagatttttctcattgttgccatagtttatgcaaactgattattaatgacttgaaaaaataactgtaaaattattttagttaatttttccttctttctcttcattttctatttggaaatatttaagttgttgcccttcagaagcattttaatattgtaagttacaagttaccatatattttttgagattgcaacgttgtatacttaat

SEQ ID NO: 793751 - DNA, 629 bp, Homo sapiens
gtatacaatgtggaatggctaaattaaggtgattaacatatgcattaccttacctacttattttttcgcggtgagaacacttaaaacctatctcttagcaatttacaaatatgtaatatattaattatagtcaccatgttgtacrttagactcctttgaacttctcctcttgtctaactgaaattttgtattctttaaccaacatctccccaatttctctcttctcccagccctttataaccactgttctactctctgcttctataaatttgactttttaagtttttttagatttgtttttctgtgcctgacttatttcacttagcataatatcctctatgtttgtccatgttgttgcaaatgacaggttttcctccactgggaagtcagaatagtattctattttgtatatataccacattttccctattcattcacccattattagatattaaggttgattccatatattggctattgtgaataatgctacaatgaacatggaactaggaagcttttgagggtactgaatataaccattattttcattttggtgatagtttcacgggtgtatacatatgtcaaaacttaacaaattgtgcaatataaatgtgtaatgttcacctcat

SEQ ID NO: 793752 - DNA, 629 bp, Homo sapiens
gtatacaatgtggaatggctaaattaaggtgattaacatatgcattaccttacctacttattttttcgcggtgagaacacttaaaacctatctcttagcaatttacaaatatgtaatatattaattatagtcaccatgttgtacgttagactcctttgaacttctcctcttgtctaactgaaattttgtattctttaaccaacatctccccaatttctctcttctcccagccctttataaccactgttctactctctgcttctataaatttgactttttaagtttttttagatttgtttttctgtgyctgacttatttcacttagcataatatcctctatgtttgtccatgttgttgcaaatgacaggttttcctccactgggaagtcagaatagtattctattttgtatatataccacattttccctattcattcacccattattagatattaaggttgattccatatattggctattgtgaataatgctacaatgaacatggaactaggaagcttttgagggtactgaatataaccattattttcattttggtgatagtttcacgggtgtatacatatgtcaaaacttaacaaattgtgcaatataaatgtgtaatgttcacctcat

SEQ ID NO: 793753 - DNA, 520 bp, Homo sapiens
cttactgataatgaatgagaagaaagaaatacctgagactatggagaaagacaaatataagagaaggcagaatttagatcagttgtagtttaggagtgtggactgcattttgaaaaacctgttacctaatcagtctttgtacctgaaggtacaaaccacagtagactgtggaaaatatttccttggccttaaacggcagggggaccctatgtaacagtttgcccctttccaaaaggattgagttgaaatgatgattaggstcacttctatatgtgaagttctgtgatatttgatgttcaggcaggtattttcatgcaagaattcagacactattggatatcagaaagaacattaggaatagaggaatcagaaaccataactgtgtgacttatgacaaggcatttgacttctcaggttgttttagaactaccatttgacccagcaatcccattactgggtatatacccgaaagaataggaatcattctatcataaagacacatgcacgcatatgttaatca

SEQ ID NO: 793754 - DNA, 632 bp, Homo sapiens
tttgagaccagccttgccatcatgatgaaaccctgtctctactaaaaaaaaaaaaaaaaaaaaatacaaaaattagccgggtgtggtggcacaaatctgtaatcccagttaccagggaggctgaggcaggagaattgcttgaacctgggaggcagaggctgcagtgagccaagatcgtgccatatcactccatcctgggtgacagagagagactctgtctcaaaaaaacaaaaacaaaaacaaaaacaaaaactttaggggagggcttatggcatgacacttcccaaagatggctgcaacagtcctccaggccacatcaccctctaaactgtggccttgacccccattgggagatggagtctacattctattcttctatgcctgggtagatttgtgacaattatggcagaagggatgctatgtgtcttccaattctaggtgttaagaggcaatgcaggttctgctctatcactcttagttttggagttctgagtcrtcaggcaaaagatctgactctactaagacttccatgctatgaggaagcccaggccacgtgcagatggtacagttaatagctccagctgaggaccaggctgacaggcatcaacctccaggcacatgcgtgaagacac

SEQ ID NO: 793755 - DNA, 599 bp, Homo sapiens
attggttgattatctgttagtgcaatctgtaatccattagaaaattagaaagaagggtgaggctgtccatactcaactcagctaatgaggaagaatttctaaagcaaaatatccatgtatttctctagccctcttacacactgcttccctcctgattaggtaagaactataaaaaaaaaaaaagaaagaaatgaggacaacagagttcagttcagactaatgttttgaatgattgagaaagatctcagatcttgtgttggatctactgattgtagcttcatcgcattctcattaaaccagcagagacatagcttctggatgatttacagtaatactttcctctattaaaagagataaacaagaattggctgcatttatatttcactgtattttgttgaattctcttttaatagaagaatgcaatcagacatatttattgatgttagtttgtgagagggcakcggcattcatctaattgatctccaagactcagaagagttcacatggtttttataaggccaaacaactggccaggaccataagcaggactagatactttgtcttcagtcatcccttggtatgcacaggggactggctcc

SEQ ID NO: 793756 - DNA, 571 bp, Homo sapiens
cacacttcataaactctcttattgttaagtgtggccacattgttaatttttggctaataggatgaaaagagaagtgccatgcaccagcttcaaatttcttcaaaagacagctgatatgggggttttcctcgttgaatttgttctttcctcactcctgctgcctttatacagatgtgatgacaagtgctaaagtcttaatatatcccatagagaaaactgagkgagttcaggtgtatcagtgatggagtgaaagggtcttggggtctccatgaggaagagttgccatactagcgctggtatgcataccttcagactttatgtgaaatagaaatatactcttatcatctctcatttatgatgctcttaatttggtcctcccagtaaaatctaatcccactagatactgtgacatttccatgggaataaagatattcagggcagtgctactcaaagtatggtctgctatgaattatttgttataggtctttgataggctaagtacagaaataggcaataaacatttagaaactttttgaggacttgacaatgacgtatttttattgtttttctt

SEQ ID NO: 793757 - DNA, 571 bp, Homo sapiens
cacacttcataaactctcttattgttaagtgtggccacattgttaatttttggctaataggatgaaaagagaagtgccatgcaccagcttcaaatttcttcaaaagacagctgatatgggggttttcctcgttgaatttgttctttcctcactcctgctgcctttatacagatgtgatgacaagtgctaaagtcttaatatatcccatagagaaaactgagggagttcaggtgtatcagtgatggagtgaaagggtcttggggtctccatgaggaagagttgccatactagcgctggtatgcataccttcagactttatgtgaaatagaaatatactcttatcatctctcatttatgatgctcttaatttggtcctcccagtaaaatctaatcccactagatactgtgacatttccatggraataaagatattcagggcagtgctactcaaagtatggtctgctatgaattatttgttataggtctttgataggctaagtacagaaataggcaataaacatttagaaactttttgaggacttgacaatgacgtatttttattgtttttctt

SEQ ID NO: 793758 - DNA, 549 bp, Homo sapiens
ccaggacacagttccaaagcacagctgtgtattttcctacctgtgttagctaattcactaatctgagcttctcttttctgatctatgaaaaataattaataatataaatgctgttattgattggtacaatctttaggcagtcagacaacacttggctscaaaaaagcataaaaattttaagaacaatgactcagtgatctcaatcctagaaactcattttaaggaagcaattcagcagaaacaaacccattctgtgcatgaagacgtttattcagaatactattcaatagcaaaatacctaacattacctaactatccacaataaggaaataattagtcacaaataatatttaaacacgatgggctatgtttcaacaatcaaaatgaatgcttctgaagactaaacacagaatctatcatcttcagtgctgccagagtgttcctttaagaaccaaatctgttcctgttgctacccttatcaaagttattctatggttaaaaatttagtaggcagagcatggtggctcatgcctgtaatcctagcatttt

SEQ ID NO: 793759 - DNA, 603 bp, Homo sapiens
tccacctgaatatcccataggaacctctaacaaatgctcaaaactcaactaatatctttatatttcaccccaataaaaaccagctcctcctcatctcaatcaacggattcactattacctcagtcatgctagccagaaactgaggaatcaatcagctaagagttccaaatctaactcccaacatccaaactcttatcaagtcatatcaattttatctcttaaatattccttgaatccatgtctttctgtaactccaaatgcttaattcagactctcttcacttctctactggactttgtttttttctattatacaactggcttttctactacctgtaatgtttcccctcccaggtccattctctacactggggctggagttatctttctaaaatacaaatctgacgccaccaccactctagctaaaattcttcaatgactgcccyatatcaagaaaaattctaaactctgaatatggtgccaagtactttaagatctggcctcacccactaattgcaagtattctgggatccagtcattcagaactacctagcgtttcccaaatacaaaatactgattcttcaatctatcctttgcttatttt

SEQ ID NO: 793760 - DNA, 517 bp, Homo sapiens
atagatggtatgggttaaaccatgtccctcaaaatttttaggcaactcctaacccccagtacttcagaatgtgactgtatttagagacaggagaggtaattaaggtaaaatgaggtcatatgggtgggctctaatcsaacatgactggtgtccttataagaagaagcggttaggacacaaaaacccctaaggggaagaccacatgaagacgccgggacaagatggccacctataggccaaggagagaggccccagagtgcaaccaccctgcctacaccttggtcttgtacttctagcttccggtactatgagaaaatacaaactaccatcagagaatactacaaacacctctacgcaaataaactagaaaatctagaagaaatggataaattcctcgacacatacaccctcccaagactaaaccaggaagaagttgaatctctgaatagaccaataacaggagctgaaattgtggcaataatcaatagcttaccaaccaaaaagagtccaggaccag

SEQ ID NO: 793761 - DNA, 517 bp, Homo sapiens
atagatggtatgggttaaaccatgtccctcaaaatttttaggcaactcctaacccccagtacttcagaatgtgactgtatttagagacaggagaggtaattaaggtaaaatgaggtcatatgggtgggctctaatccaacatgactggtgtccttataagaagaagcggttaggacacaaaaacccctaaggggaagaccacatgaagacgccgggacaagatggccacctataggccaaggagagaggccccagagtgcaaccaccctgcctacaccttrgtcttgtacttctagcttccggtactatgagaaaatacaaactaccatcagagaatactacaaacacctctacgcaaataaactagaaaatctagaagaaatggataaattcctcgacacatacaccctcccaagactaaaccaggaagaagttgaatctctgaatagaccaataacaggagctgaaattgtggcaataatcaatagcttaccaaccaaaaagagtccaggaccag

SEQ ID NO: 793762 - DNA, 591 bp, Homo sapiens
tatacctgactatatttattttagcagttgctctagcaattacagtatgcatcgtgccagccatgtgagagctacccttggatgactgtagttctggtccatgtattaactgtgacttcctgcgagaccttgtattagtcagagtcctgcagagaaacagaaccaacaggatgtgtatatataaagaggtttattttaggcagttggctcacacsattatgggggctggtaagtccaaaatctgtacactgagcgggcaggttagaggcccagaaagagctgatactgcagttcaggtccaaagggtatcaggctggagacccagggagacccagtgttgcagttgaaatctgaaggccatttgcttaatttcttcttcccagtgtgggcggtgggggcagtgtggcggttcagtgttgtgttttattcagaccttccattggttagatgaggcccacccacattaggaagggcaatctgctttactcaaagtccaccaatttaaatgttaatctcattgaaaaacatgttcacagacacatcagaaataattttctttttcttttttctatctaagatgaagtttcactc

SEQ ID NO: 793763 - DNA, 550 bp, Homo sapiens
tttcccatctttgttatggtcagcttcattatttggatgtattgcattcaaagcagcagttccaaacataacacacatctattttcttagagttttgtaaatacaaactaacctgatgacattaaaaattgtggatcctacatgttcctatgttcattctctaaaaacctgagtaactttatgaaaacacacaaacctggaaaaacatcacatttttgtcacatttttactgacaaatgtatattcatatgatggtacggcagcagggagtggcccccagttaacatggctgtgagtggacacagtgtctcgcaggatcactgcatgttatgatggcttgtaagtgcgttgttaaracttttgtttcagtgtttgtctcccagtatttgaacctaatttaaagaaaaagacgtttccaagttgtatttattaaatgtgtttttccttaccttttgtgctgctactttgctaatctcattagcttagctgtgtttgtgcataggttatatttggtaataaatttatagagtgttggttgtcatcgctttct

SEQ ID NO: 793764 - DNA, 547 bp, Homo sapiens
ggctgagcaaacatattaaactaagtcagctagttattggggatctaccatgtatgccaaatatgtatacagtacatagtcacacatatacatacatgtgaaaatactcatttaaggtttgtgtgtgtttacctgtgcttacaaattttaacaaaatttattttgtattttgtattaattattctgaagtgactacaattgttctcatctctatttagaaatatttttcgcctgagatttagttcaacacgtttctgttgcctagcagtaggtttttgagaatagctttttgtatagccttaattgaacaggttgattgcatgaaatcttcttagcaaaagtaaagtcatcacagtgaaggtaaaaggaactatgttgacaactaattggatagaatgtcataaaccrcagtggatctggaagagatttgcagaaacgtagcaacaaaagaagggagtttgttcaaggcagctagaaaccgcattcagaaatattcgtgttaaaagaaaggcaccattttccttggttctcattagggaattgtgta

SEQ ID NO: 793765 - DNA, 565 bp, Homo sapiens
atttacatttttttgtgtgaggccccatgtcacctgcatgactaggtgatgccgccagcacctggagggagcagatgctaccagcagagaagggcctggggcttctcttgggcagccagtgcttgggcctatgcccttcaaaggcttgactttgcctctccagagcttctgatgtgctccttacatatgcgcttgctcaaaaaactgctcaatcccccaaaggacttctctccacgtgtgcactgtccctgagggcttagaggctgcgagcggccacaaccctgcctgcaccccagctatgcttccaggccatcagtggccactgcacttgatggtgtgatcttcggactgcgtctacctgctcccgcactcagctgggratatgggaaatagtggcattgggctcgcgggctgccctgagacaacccaggtttctccaaaggattaccctgtgtgttagcttcctaatgctgcagtcaaaaattacccccaaacaggtggctttgaacaacacaagtttattctcttacagttatggaggccagaagtcaaaaatcagtttcac

SEQ ID NO: 793766 - DNA, 618 bp, Homo sapiens
cagcattccacagttgcagacactagatttaacatcagccttatgacaacacatgagtaatgcattgcacaatggtgttaacaacggcagagttactagatgataggaatttttcagctccattgtaatttcatgggactgctgtcatatatgggatctgttattttgtggcacatgactggtttttggaattcagtgttttcagtcacatgagagatagtcaagttatcacgctctgcatgcctgcatgtgtgtgtccctcctgtgtatattacggggaaatgattttaattaaataaatatcatttaattgaatatttaatgccagagcctattagaacagatacggtgttactacagaataccaagtgaatttttttctaaatgggctttttcctaagcagagttacattgtgctaaaatacatccatccatctatctatayatcaggagagcatttagaagtcactgctacttaaaaatgttgagcattctcagtttgagccaaattggtttttaaattaaaaaaaaaagcctcaaggaaatcaaatgctttgagtctattaaggaatttactgagactccagtagtatctactctgtgtacttagcataatac

SEQ ID NO: 793767 - DNA, 579 bp, Homo sapiens
aagagattggttcagctgtagttctacaactcaagatagtagtcagagcctgagcatgcagcggttacacgcttgcaggggagagctggaggctcgattgagaattagtaaatgcatgacactctgctgctcacagaacatgtgcacatttgctatctcagatgcttttcaaggtggccaaaggagagaccacaaagaaagaataattatgttaatagctaacaattagtgagggcctactgtgtactaggcactgtgctcaggattttgcatacctcagacctcacctccctatgaggtgtcattattatatcccatttkcatagaaagtacctgaaaccagggtatccatggtcacagaactaatacatggccaagctgggacttgaacccaggtctgatggcctaaggtccccagccttggttaaacagagaaggaaaggaggtgcaacaataggggaaaatcagaatccaaaagaagaaaaaattgcaaggagggcagatatggttggtttctctgtttattcgtttgccattagaaactttgagaataaaggtccagaatgtagttgattaaaa

SEQ ID NO: 793768 - DNA, 606 bp, Homo sapiens
caaacattgtatttaatatctgcttctgtaggcctgaagcttggtcacatgtgttttttatggcttacagcttctgtactaactaactcataggtgcaaacacatgctgaccaatttgatgatgtcctaatgaaaattttggtaggaattttctccaacatttcccactgagatcaaatcaccattggacttccttccatayagtatcttccatttcatcccataatgttcaacagtgctttccattttatttaattaatcctactggggaccatatttattgctgccacctgagagaggaggtatgatgagacaggcttttgcagtcattcttggctcagaatcctcctttcaacattaggaacatatgggcaatgttggctgcttaagatcacacccatctgctcagatgctgagaaatctgcagggaagctactttcttccttgccttagggtttaagtgtcataaagtgataggtgcatatgaacaagttgtagggcctttgacaacaatgcctccatttcatctagatcaaaaagggggcccaaactcttctttccttgctgctcttcaacacttgccaaaatatactgggaaagggagca

SEQ ID NO: 793769 - DNA, 544 bp, Homo sapiens
cagggagtgtatgggaattttctatactgtctacttaatttttctatgtaataaaaactgctctaaaaataaagtctattaagataagaaaatatataattgattaaaaaaactagcaaagtaacttaggctttataatatttgtggaagtaaaatatatgtcaatgatatcaagaatgatacaaagtgagagatgaaaatgagagatgtaccctcataagggtcyttcagtatgtatgaagtaatataatgttactttagggcagactgtgatagttaaagatgtattttaaataccaaatagtagagaaaaaaatgaaatatatagcataggcagttaatctatgaaaacttagtaaaagaggaaaagagaaaaaaactacagcagaaattgagatcaaatggcaagattgtagattcaatgcaaacacatgcacacacacaaacacacatattaacatatgtatgtgtgtgtgtgtatatatatgcatatatacagaagtataaagggctaggtaaaatattttagaacccaaaacactaa

SEQ ID NO: 793770 - DNA, 496 bp, Homo sapiens
ggcatacatattcccgaagtttagttttacaattaaaatcaaactgctattccagttggaatgggcgcactgtacctgcatcacacaacaaagatttcataacaagttaaagtcgtcttagtaatgccccctttctaagagttacaaatattttaatgttaatcattagtaatgggttttagagactagaatgttttyttaaatttttgcctagtttctgtgaacagtctattttgccaacttgtaatctgctaaacaaattcttcttagaaatatatacattcaactttccctacatcatgaaaagaagttcattaactcaaatcacctagattatgcttgtattcaaaataaattgtgtaagaacttgaatccattccaaaaccaactcaaaaacaacagggatagcaacatgttaagctgcactctgcccctgccattttacttccttgaagggtcttttcaagcagggcttcagctttgcatgtctcttgcc

SEQ ID NO: 793771 - DNA, 621 bp, Homo sapiens
ctgcccctgccattttacttccttgaagggtcttttcaagcagggcttcagctttgcatgtctcttgcccacccctttgtctagactacaacacaaagtcttgcacataaacctaaaccatcatattttggtacagctcagtaccgtacagcaaaatacttaggttctcagcacttcaaactgtgagctgaagcatctcattaactgtttctggttttcattgccacagttcacctcgaattgttataagattcagttaagtaaatcctaatagaaccaaaaatataatagggaaaaaaagtattgatgaatttatagcaactaatttaaatggaaccttttcaggacaaggggtgaggctgattgggcaatgtggtttaaaaaaaccaaaactaagatgttataaggaaagactcaaatgaaggttttcatcaataataacmgctgtatgagaagttcattctcctccattcttctcagataagactgagagaggaaaacagacatggaggaaagagtgtgtctcaaggacaaatggccacattctgccatgaagctgactgtgatgcaaattcctcagtgcttttcattctccttagtaatgtggcaaaactggtattc

SEQ ID NO: 793772 - DNA, 621 bp, Homo sapiens
ctgcccctgccattttacttccttgaagggtcttttcaagcagggcttcagctttgcatgtctcttgcccacccctttgtctagactacaacacaaagtcttgcacataaacctaaaccatcatattttggtacagctcagtaccgtacagcaaaatacttaggttctcagcacttcaaactgtgagctgaagcatctcattaactgtttctggttttcattgccacagttcacctcgaattgttataagattcagttaagtaaatcctaatagaaccaaaaatataatagggaaaaaaagtattgatgaatttatagcaactaatttaaatggaaccttttcaggacaaggggtgaggctgattgggcaatgtggtttaaaaaaaccaaaactaagatgttataaggaaagactcaaatgaaggttttcatcaataataaccgctgtatgagaagttcmttctcctccattcttctcagataagactgagagaggaaaacagacatggaggaaagagtgtgtctcaaggacaaatggccacattctgccatgaagctgactgtgatgcaaattcctcagtgcttttcattctccttagtaatgtggcaaaactggtattc

SEQ ID NO: 793773 - DNA, 488 bp, Homo sapiens
ttaaataatataactgcaatgtcattatcacaccagaaaacaattgcagagtaattccttactgtcatgaaatattggtattcaaatttcccttattgtcttgtaaattctccccttccccattggttggttagaattagaatccaaacaaggactactcatrtatttagctaataaatctcttaggcttttagtctatagcaagcttttctaacctgtggcctgtgggccacatgctgccaggacagctttgaatgtggttcaacaaaaattcataaactttctgagaacattatgggatttttaaatttaaatttaaattaaattaaattttttttttagctctttgggtatcattagtattagtgtattttatgtgttgctcaagacaattctcccttacagtgtggcacaggaaactgaaagattgggcatccttgagtctgtgggttcacccttctttttttccttgcaatttatttattgaa

SEQ ID NO: 793774 - DNA, 580 bp, Homo sapiens
ggaccttagaaaaaaatgagtgaatccctatactgacacaactccattccaggtgcagttctctggggctgcaccactttgtactgaaacaagaagcagctagccaaacctaacagccataatactcacttacaaaatgacaaggtttataaataaccatagctgctccttgtatgatgacagaagccccaagttttggggaatgccaccaggtggtaaacctctgaaatgcaaagtggagtggccaggtatcccacataatgcccccaaatctgagttctygagtacatggcatttctccactaactcagggttctggcacctaattggagtggaaacgaagttcccagattcaaactgggacttgcattttgccatgatttctgctaggcccatttgtgcaaggaagaccctattgtcacagttcctaaatttattttttaactaatgtctttaaattattgttaaaagatattttttaaaggcagaataatgactcatacaaatataaaataaacgttgtcaaaattttacttactttcttattttttttttgagacaagatctgactctgttgctg

SEQ ID NO: 793775 - DNA, 644 bp, Homo sapiens
ctactaaacctgccgtgcaagaaatgcttacgtcttgcaaggtgaaatgtaagaacactagacagtaactcaaagctatatgaagaaataaaaatctcaatgaaggtaaatacatggacaattatagaagctagtattattgtaacaatggtttgtaactccattttttgttttttgcatggtttgagattcatacgttaaaaactattagtctaaaagctagtattattgttaactttggcttgtaactcctattgacagaaattaaggctgttgaggcagaaataatttgataaaggtttattggaagccaaatgtgaggatcaacctgggaagacacatcagaaagttgggagtgttccagaatctgttacaagttggaaggcttttataagtaagtttaggagaagggagaggggctcctcatagtgaagttgtcctttttcattggagggtacaacacaaagattggctgcaaagtaygacatacagggcaacatacaggttaaaattctatgcacaagacaatcagtgaaacttcatgattcagaaacaaatcaccaaaacattatgattcagaaacaaatcagcagcctttttgatgtcagtaggttataaattaatcattatacgtcaataatttg

SEQ ID NO: 793776 - DNA, 616 bp, Homo sapiens
gtcaatagcatgaggcagttgaggtgggagaaaatgaaacagaagatggagtgtggcacatgaggcaatgttagagtgtggcaacttctcagccaggaggtggtctcagagccatggccacctgacaaagggaaaggagcagagaaatggcaggaaggagtgctgagggtaaactttgcttatttcaaaagtcctgtctcagactggtcccttgatgcagagattctgcttaagggaaattaaattggcaacaaataatcttttccgaaaactgtgataagaaattattgcttgcaccatagcactggccttcctttcctgtactgtcattctgtatcagtgtaaagttagtcataagatcatgtttattgagagtccttgacccaggcaaactcaggatgtggaakaatccatggatggagaaattgtatttcttctcttattaggaaagactagtttcccttaagcagctgtgggatgggaaactgacaaagacttactcatttaggctctgttatttacaactctttttcattcctgcttacaaggttttcagcactgacactttttatcagccttgcacttttctcttcctctccaaaatttgtcagacaaa

SEQ ID NO: 793777 - DNA, 596 bp, Homo sapiens
ctgccctggctatggccactattgagtgcccaatttgccagcagcagagaccaacaccgagccctcgatatggcaccattccttggggtgatcagccagctacctggtggcaggttgattatattggacctcttacatcatggaaaggacaaaggtttgtcctcactgacatagacacttactctggatataggatttcctatcttgcatgcaatgcttctgctgagactaccatccgtggactcatggaatgccttatccaccatcatggtattccacatagcattgcctctgaccaasgcactcactttttggctaaagaagtgcagcagtggtctcatgctcatggaagtcactaatcctaccatgttccccatcatcctgaagcagctggattgatagaatggtgggaaagccttttgaagtcacaattacaaggccaactaggtgacaatactttgcagggctagggcaaagttctccaaaaggctgtgtatcctctgaatcaatgcccaatatatggtactgtttctcccatagccaggattcacgggtccaggaatcaaggtgtggaagtgtgacaccactcacgatca

SEQ ID NO: 793778 - DNA, 595 bp, Homo sapiens
gcaatgttgctatccattctgaatttttaaatctctcttggtttgcatggaggaagtctgtcctcacgtctccctctctcttaccttcactttgcacacttctgagtggttttgatgtctcagggtctcaggtgtctcaggttcccatcccagcactgcccaggcacccatcttgtgctcatagatccaaacttgcaagaagtttgctgaccagaaagagcccttgattttgatccaaggcacaaatgaattcatttgtagatttaaaaatccactatcttaatgcaatggccaggaggaagctttgtggtaactagcactcaccttggtgttcaaaatgtggtggtttgtagatactartcaacaccacctgactagatgtttattagagcttattaggaattattaagtttattttctaatcaacttattagagcttattagaagcaaggagctttttagaaactcagactctcaagccccatctcatacctactgaaccagaatctgcatttctgaaaagatcccaagtaatttcaatgcacattaaagttagagaagcacggatataaaacaagaagactcatttctcaag

SEQ ID NO: 793779 - DNA, 678 bp, Homo sapiens
tggagttactaatacctgtctcttggatgtgaccattaaatgagggatcaaagtaaactcactttttgtaaagtaagttcagtgcagatactgtcttctgtagagcaaatataaaaagaagttgcttctcatttcaggaggagaacaatcatcacagcaaagacaggcatgagtgtcctcatcttasccttccctcagactgcctgggtgtattttatgaattgtgacttctttatgccagcgactcaaatgctctttgccttggattttcattttatagtggccagggcagtgaagaaggggaggtgctcctttattactgctaccatgacctggaggatccccaatggatctgtgcctggcagacagctctgtgtcagcacctgcacctcacaggcaaggtaacaccttctcctatattccttccttcactgggtccatcttgcctgccaaccttggattgcaaatgctgtgctcattataaaaaagattcactgttgagttcttaaaagttagggaaattctgctgagcatttaagtagaatattaggcagccattaacatggtattttataagaatatttactggcataaaccaggagtcagcaaactttttcttgaagaaccagatagtagataattttaggtgttgcacaaaaaactattcagttttgttat

SEQ ID NO: 793780 - DNA, 678 bp, Homo sapiens
tggagttactaatacctgtctcttggatgtgaccattaaatgagggatcaaagtaaactcactttttgtaaagtaagttcagtgcagatactgtcttctgtagagcaaatataaaaagaagttgcttctcatttcaggaggagaacaatcatcacagcaaagacaggcatgagtgtcctcatcttagccttccctcagactgcctgggtgtattttatgaattgtgacttctttatgccagcgactcaaatgctctttgccttggattttcattttatagtggccagggcagtgaagaaggggaggtgctcctttattactgctaccatgacctggaggatccccaatggatctgtgcctggcagacagctctgtgtcagcacctgcacctcacaggcaaggtaacaccttctcctatattccttccttcactgggtccatcttgcctgccaaccttggattgcaaatgctgtgctcattataaaaaagattcactgttgagttcttaaaagttagggaaattctgctgagcatttaagtasaatattaggcagccattaacatggtattttataagaatatttactggcataaaccaggagtcagcaaactttttcttgaagaaccagatagtagataattttaggtgttgcacaaaaaactattcagttttgttat

SEQ ID NO: 793781 - DNA, 609 bp, Homo sapiens
gttcatctcagagcaaacccattctttttacattaaggagtaaaatagaacacgtgcatacaccttacagtaagccttaagatgtcaaagaagcttcggccgggcacggtggctcacgcctgtaatcccagcactttgggaggccgaggcgggcggatcacgaggtcaggagatcgagaccatcctggccaacatggtaaaccccatctctactaaaaatacaaaaattatctgggcatggtggagygcacctgtagtcccagttacttgggaagctgaggcaggagaattgcttgaaccagggaggcggagtttgcagtgagctgagatcatgccactgtactccagcctggtgacagagtgagactctgtctccaaaaaaagagatgtcaaagaagcttcatacctgcatctttctctgactccggggaccctgagactaaaaggactcattcattttatagaagagagaaccagtggctggggagccacgactaaaaaccagttctctgacttatttttcaagtaacttatttagtgattactgcatgctaaacaatgtcataaacattttacaaaagctaattcattttttcctatcaatctaag

SEQ ID NO: 793782 - DNA, 624 bp, Homo sapiens
aagataagcccctttttcagggccatagggtcagcatttaggaagcaggatttgaatccaggtctctttgactctaaaactcacacttattccactgcagcatgttgcttttgatgttaaaatgctttcttttttatgaatggggactcagtttttttttttccactacatgaaaatttttgctgaatggttgtataaatgtatgcatgggaaaaagattggaatgaaatattacaaaattctaaacagtggttatacctgagtgagactatcacaagtttttaacttttttattgtaraacatggcaaacatacagaaaagtgcataaaacttaaatgcacagcttaaggaatcataacaggcatgtaacccctgtccaggtcaagaaacgaaaacattaccaacctccagaagactttgtcccttcccaaccataaccctttcaaaaccattcacaacttgctccccactctcatgcctccatgcctttccctcctcatggaatgtcctcccctgcctctaccctcttctctgccttctgggtttagttgaagtttcactttatcttagtggtgttctagagacagcttgaaccagcttgcaagatctgattgtggatatct

SEQ ID NO: 793783 - DNA, 604 bp, Homo sapiens
atcagagggagcagtcttagtcaggaatagcaatcagggagggttgcttggaggaggcagattttgagataaacccgtagatgctgggtagaccctgacttcccacccacagggtgaaaagtatctcaggtgacatggaggccatggcatcccaggtgcagagaggagtggggaaagccatggagcccatccacacaggctcacggtacccccagaggaaagccagaaagggggttaggagtcrgagagctttgaatgggtaggtttagggaaagtgggctgtgctgtgctctgggaagatggttctggctggatgggaggggactgggggcaaggagagggtatcagggcccaggagatcagccaggagctatggcctccaggaccagggggctgtggggaggcgctcctgcctaactggagttgggtccggcaggggaagggctgaaggcaggtctcagggagggggctctgctgactcaggctcaggaggaggccacctgtgcctccccttcaggtgccccagccccaggctggggggaggcagggcagtgtgacacagaggaggtggcgagtggcatttgatttattcctttattcctca

SEQ ID NO: 793784 - DNA, 630 bp, Homo sapiens
gaccctcattttacagatgggggatccaaaaccagagagcaccagtgccccgtctgtggcctcacagccctgggctgagaacccaggttatcaggtagggtgcagcttcgctacaagtaacagagactcagaataatgtgatttgtgcagtgttttatccatccctcaagtaaaagtccacaggtaggcaatctagggctgggatggagctcagctccccagacttctcagagtcctagaytttgtccagctcatctttctgccattcctaaggtgtagccctatagccataatagccacattccaggcatccaaatagagaaaaagggatggggagggggagggataaaagaaaggagaaaagccatgattcaagtcccttttaaggaaagttaccagaaattgccactggacatttctcatatcattgcctggaacttaattatatgactcaacctagctgcaaggagcctgtgaagtgtagcctttaatctgagcagccaagagctcaactaaaaagtggaggctttcttttattgctaaagaaggggaagcttgaatcggggacgatttggagtctgtcactgtgggttcactagtgtgatggcctgatgttctactctgctgaaa

SEQ ID NO: 793785 - DNA, 576 bp, Homo sapiens
agatttctacgaaggaatggcttgagaggatattctagtccagctttctatctgacacctaagggtctagagactgagcataactaagatggagggacagctgtcagttcccaaacaccagcaagagcgaatccagtccggggctctcttcactacacaggtataaattaaataactatgctgcgtgctttgatttctaacacgaggtttcttgtgtmacctctgtacaaggcacagaaaatacaattccctcccttttttttttttttctgagacggagtgtcattctttgtcaggctggagtgcagtggcgcgatctcggcttactgcaacctccgcctctcaggctcaagtgatcctcccacctcagcctcctaagtaactgggaccacaggcgcgggccaccacgcccggctaattttttttttgtttttgtattttttgtagagacggggtttcgccacgttgcccaggctgatcttgaactcctgagctcaggtgatccacccgcctcggccttccaaagtgccgggattacagatgtgagctactgcgcccgccgataatacaattttc

SEQ ID NO: 793786 - DNA, 597 bp, Homo sapiens
tatcagtgttactgacataaaattgagattgaaatgcttaaataataaaaccaccaagtagttgcggacagggaagaaagtcccaattatcgattgctgcataacaaaccattcaaattttaaatggcttaaacaatggccactttttaatatctcatgattttgtaggtcagaaatttgtattggtctaggtgattattctgtttcaygtggcatgaacataagtcactctgaggaactgagctaatgagtagaccagtctggagggtccaaggtggctttgcttgcatgtctgttgcttgtcagaggatagctggaaggctgagttcagctaggactgctgaccatagcctctatacatggcatctctaggatgatgatctcagggtagttggaggtatatgactggccagggcttctagaggaaatgttccaagagatctgggctgaaaattcaaggctctgaccttaggcacagaagatccagaatatctcttttgttatattgtattggccaaggaagtcattaaggccagccagattcaaggggaggggaattagactcattgcttcttaatgaaaagattagcaaaaaat

SEQ ID NO: 793787 - DNA, 662 bp, Homo sapiens
tttcctaaaacacatagatacacaacttttataaagaatattagcagattcatatccacttccagaattatatatattttatgatactttgagttaaatacccttatttactgcttacgctcgactataaagttaattttaaakttgaaaggagcgtcaaaaaacatataggtcagagagaagctaaagctcactgaggtttgattacataacaaatcagtggtgtgtctgggatcagaaccctggactgctggactaactcaaccgaccctctgaaaggtctgactttccttttctaaaaatgtttaaaccaatcgtttatagcccattgcattatatttatttccttccccattaaccctcacccataatttaaaaaaaaaaaaaaaaagagtccaaaatacacattagggaactatggattctaacaccttctctctgaacatccattttacatacttttcattcataatgttccttaatgtatctctattggacaggggaccctcccctcaaactgttaactcacaccaaacatggtgactgaggggaaagatttaagttctgagaattaagatttggcctcttctgttctctcactccttagttagacccaaaggaatgcaggttgttgggcagattgcccctatttgtaccacatt

SEQ ID NO: 793788 - DNA, 634 bp, Homo sapiens
aaagctgcaatcaacagaagagtggacaagtatattctagaatattcaaacagaaaatgaaaaagaactactactacacatacaatacaaatgaatctcacagacacaaagacaagacaaagaagtcaggcacaaagcatatatgctcagactgtatttacataaaattcaaatagtaatacttatctccgagataaagtcaaaatagtgattcctaaaggggaggattaggactgactgaaaggtgaaacaaattatgagtgctgatcattttccatatcttgatttcggtgagggttacatgtatatttaatttgttaaaaaaatccttgggcacactttttccctttaatgtatgttatttctcaakttttcaaagtttgcaaaataagacatataatcaaagcaaaaactctggggcattccagtgaatgatgtaaaaacacgcctcttaaagaaggcaagtagtagcgacagcctgtatacataaagctacaccttgtctatccgcaactatgaatttaaagttcattcaccagacattcaccttaaaatgaatgcagagcacaggaactaaataactgaagacaaagttggtctaccactgtgatgtgtggccctccacagggttgat

SEQ ID NO: 793789 - DNA, 566 bp, Homo sapiens
tgttaaaaaaacctcatagaaaaagatgagagcctagatgaaggtaatggcaagaaaaaaaagaaaagatacagactcattcattagaggcaatcaaaaggactcagtgaccagttggtaactgttagggccaggaggggtgaatgagtgagasaaacagaggtcaactctcccagtgattttaatctgggaaactagaactatcaggacatcatttagccaaaagaacagcagaaagataaatatatggttttagaggaaagagaaatatggttatattccttttggacatactgagtttgaaatgcctctagaaaacaggaaataattgaattttaatttcatgaaggtaggaagttttgtgttgctgttgtttcctttttctctcagggctatatccccagcaccagaagtaatggctgtgagataaattaaaaatcctagtggaatcaataacattcctgcaagctccaagatgaaatagtgtacatatagagaggagcatattatctaaaaaaataaaatttgccatgatcctttcttattcagctccatactaaaccaaa

SEQ ID NO: 793790 - DNA, 672 bp, Homo sapiens
taaacaaatatttatgatcattttgcataaatgctaacatgctttatacacttttttatcttgctttttggttgatgaaatagtcaatttcccttttacctttctgtctattttttcttctatatttaaaatttgttttttcaaatttttttgttcatttttctattcctttcacaggtatggatacttttctgtttattatctttttgtattggttagaaattccagtataatattgaatagcaatgggaacattttcacttttcctgatttatagtggctgctttattaagtatgatgtttaccataccttaaaaataatatcctctattagattgaggaagtctattcttaggttgctgtgaatttttattgtgaataaaatgtgtaaaaagtgtaaaattttatcatgatattttaaatcaatagagatagttatgtgataattttctcatttcaaggcatccctcagakatattgtgggctctgttccagactcaataaagtgagtcatataaattttttggtttcccagtgcatatgcaagctatgtttatactataccatagtccattaattttacaatagaactatgtctaagtaaacaatgaacataccttaattaaaaatatttaattgctaaaaatgttaacaattgtctgaaccttcagt

SEQ ID NO: 793791 - DNA, 536 bp, Homo sapiens
ctaataagagagtcagcctgttctttgaagctttgaagccgggcattgacttctcctctgtagctacgaaagtccttgatggcttctaatttcaacataaagctgtttcatctatattaaaaatctattgtttagtgcagctacattcattaatgatcttggctaggtcttctggataacttgctgaagcctytacattagtacttgctgcttcaccttgcacttttatgtaatacaaatggcttctttccttaaacctcatgcaccaacctctgctagcttccaagggatctgcctgcctttttttcctgcagcttccttacctctttcagccttcatagaattgaggagagttagggtcttgctctgaattaggcttttggcttaacagaatgttatggctgttgtgatcctctatccagaacactgaaactctttccatatcagctataagactactttgttttcttatcacttatatgttcactggagtagcacatttttttttgagatggagttttgctcttgttgcccag

SEQ ID NO: 793792 - DNA, 505 bp, Homo sapiens
caattcacttggatttttgcactgaccttatttattttgtaatttgtgttaacacctacccctcacagccctcagaattggttagcatggtctaatagaagagcaacagagggtttgtgtaggactatgagagtggcggctgctgacctgttcatatttctccagttctgtgtgatagatttgtctgatctgggtcaatttggctctgtaatctgagtgttcaatagagttatctgaakaacctccagaggctgccgcggctgcagctgctgccgccgatcccccacctttctcaggacctgaaaccccttctgccaaaagcatattgtccagtctcattagctggggatcgggagggtcctcctcctgggctcctctgatgctgagaccttcaaggaaagagagagagagacagagagagaagaagcgagaaacagaggacaaatagtgtgagtattttgtttattcgagaaaatgatcaaacaacatcagtgtactacaattc

SEQ ID NO: 793793 - DNA, 639 bp, Homo sapiens
ctgcgcctggcaaaatgtatcattacctgcaccttgggcacttcccagatcaatccacttcttaaatgtagtaatagagaagaggattaggtactagaaaactcattatgaaaatggcgtactcaaattctttaaaggtgatatttcataaaatatacccggcctgccgtgtgcctcaatcattctttttaatagctctgtagcagccagaaaataaagtattcatgaagattgaagaagatgatcccatgaacttcaatataattggtgcaaattaaaacgatccatcttttcgtactgtccgtctatctccaatcagccccacaccgcacgtccggcaccctgattacaattatcttttaataggaaaacttgtcagtttttgtgtgatttacataagcttgagcaaacttatgagtatcasatagggcctcggtgtgtggtttcctctccccagctccctggctcgggggacggccaggtgggggcaggggcggcaaggtccaggtggtgggggaggggctggggatgggtttgaggcatcactgagcctgcagttctgccagagatggggccgggtgagacatctgcgtgcgccacatcaggccgcagcccctggccactccctccgggaccaca

SEQ ID NO: 793794 - DNA, 547 bp, Homo sapiens
gcccagagaagtgagatgccccgggggaggctgcaccctgtcattcttaagcatcctgacccccattcatttctcttcactgagcccctgccctgacctcacattatccttttaacaaacctggaaagaaggcccrgggcctggctcatagagaatgctcaataaatgttggtgaaggtatcataatccacattttacagaccaagaaactgaggctcctaagggttgagtgactgctttgaaagagacagagccaggactcaaatccagatctgcccccgctcctttatcccggagctgatgggtgctgggatcagtcaggggctaaaagggaaaacggggactaccaagggtctcatactcacctgggccctgaacttggggtggtggatgcagaggaaagaaatcatgaagactttgtctccctgctttttcagaatcattcatcattcattccttcatttaggtattcaacaacttcattcaatagacaaatctggctgggtgtggtggcttacgcctataatcccagcactttgagaagcca

SEQ ID NO: 793795 - DNA, 547 bp, Homo sapiens
gcccagagaagtgagatgccccgggggaggctgcaccctgtcattcttaagcatcctgacccccattcatttctcttcactgagcccctgccctgacctcacattatccttttaacaaacctggaaagaaggcccggggcctggctcatagagaatgctcaataaatgttggtgaaggtatcataatccacattttacagaccaagaaactgaggctcctaagggttgagtgactgctttgaaagagacagagccaggactcaaatccagatctgcccccgctcctttatcccggagctgatgggtgctgggatcagtcaggggctaaaagggaaaacggggactaccaagggtctcatactcacctgggccctgaacttggggtggtggatgcagakgaaagaaatcatgaagactttgtctccctgctttttcagaatcattcatcattcattccttcatttaggtattcaacaacttcattcaatagacaaatctggctgggtgtggtggcttacgcctataatcccagcactttgagaagcca

SEQ ID NO: 793796 - DNA, 643 bp, Homo sapiens
aataccacaacacacctgctagaatggccagaatctcaaacactgacaatgccagatgctggagaggatgtggagcaacaggaactcatattcattgttggagggaatgcaaaatgctacagtgactttggaagatagtttggcagtttttaaaaaaactaaacatattcttaccatacaatccagcagttatactcttctgtattttcccacatgaactaaaaacttaggtccacaaaaaaacctcacacaaatgtgtacagtagctttatttataattgccaaaacttggaaggcactaagatgtctttcagtaggtgagtaaataaactgtgacacatccagacaatggaatgttactcagcaataaaaaggaatgtgccagcaagccatgaaaagacatggagggaacttacatgcattttgctaagtgaaataagccagtctgaaaaggctrcatactatctgattccaactatataacatgctagaaaaggcaaagctaaggagacaataaaaggatcagtggttgacaggggttagggggagggaaagataaaaggcagcgtgcagaggatttttagggcattggaaccattctgtatgatactacgatggtggatacatgtcattgtacatttgt

SEQ ID NO: 793797 - DNA, 497 bp, Homo sapiens
ttataaaattttattgtaagacattttaaaagatctaaataaatgaagatagatgtcttgttcatggattaaaagactcaatattttgaagatgtcaattcccctcccttcatctatttattcaatgtgatctcaattaaaattccaacgatttttaaaaatgaaacttgacaagctaattctaaaatttctacagaaaygcaaagggctaagaatggccaatgtattcttaaagaacaaagtgagagagcttgctgtatcaggtatcaagactaattataaaactctgagagtgaagccagtgttaccacactggctcagagatagacacacagttcaacagccaggacagcccaggagcagatcaacacatggagacacttgacgcatgatggagatgctactgcagaccagtggggcaaagatgaactttccaataaattgtgtgggacaatcagacccctacctcaaaccatatgcaaaaaggagtaactata

SEQ ID NO: 793798 - DNA, 557 bp, Homo sapiens
ataatttaagaactcaggtttttgtactctgacttgagaaatgaaacagcaacatgttcttaaaccatatacacactggcacactcaatttttctgttctattttgtgacaaaagtaagatgcacccaacccctctccatgagctcaagccagagccgaatgcattcacaaagtttatcaggtktgaatcatcacaagtcactgttcacttgacttctcattaaattaaatggtggggcagatgggtcctggttggaagcacccagcacaggttctgcatggatgtgtagaccacttccatggggtcagaggaaggagttttgagcccaaaccctaccctgctagaaaggccccactggggcatttctcctacctgtgattgcacattggctccgacttgggacccttggtaagaatccccattcagactctgcatgttcatgaacatgtccccagaatttgggaggttaaaagaaccagaagaacctggaaaggaaagagttaagtagctgaataacagagagctacacacataatcctcaaagacctagaggcag

SEQ ID NO: 793799 - DNA, 634 bp, Homo sapiens
attgaaaatttaaaattgtttttatttcctgtaattataaggctctacatatttaatatttccttctggactaaaccatcattatagttagtttaaaactaatcaaagcaatacaaatacttattttgataaataaaaatatacttattttgaccatcaaatgtaggtttcatcatacatgcatttcttaattgggagtggggtggttgtacagtgctgattaaaggaggtttggttatcaccaatatttcataatgtctcttgttgggcacccaagagggtctcatacytcggggcaatgaaccaggtgggagtatccctttctttcataaagtaagaaaagggcaggaagggaaaagaaaaccaacacaatgcttccatcacagccactttctggggcaggtggatttaggaaggcgtacacatatacgtaaggaaagctggccagtgaaaaccatgaaaccgtgcatacctgagtcctctttggaaaaccttcagctcctctgtacagtatgcgtccccccaagtttgcagagtgctgccttaagtgttcaggctaactctggttacattttaacttctctatgtgagcacagcatgggaacccctcatactgggtatgcgtaaagacttt

SEQ ID NO: 793800 - DNA, 599 bp, Homo sapiens
aataaaataaaaatatacaaaaaagggccacacatcataggtatagagtttaatgaattttcataaagtgaacatacccatggaactaacacttagatcaagaaatagttcttcctccttccaatcaccattcccccaaaaataactattaatctgatttctaacccccaaggttaatttctcttgtttttctattttttataaatgaaatcaagtttttccattttttataaatgaaatcaagcacttcttttacttagcattatgtagttacatatagttatagttcattcattctcattgttaaataacattccaaatatacataaatataccatactggtttacctattttcctcttgatggacgtttgcattgtttctagttttggctattacraatactgttactaaggatattcctatacatatcttttggtgagtatgtgtacacatttctatcaggtaggacatgggtctgtctggttaagttcactgatgtctctttcatccctagcacagtatttggcacataatcagcattattcaataaatgtttattaaacgaatggaaacagtctttttaaattctgttactta

SEQ ID NO: 793801 - DNA, 579 bp, Homo sapiens
ggtgatgggcacctgtaatcccagctatttgggaggctgaggcaggagaatcgcttgaacctgggagttggaggttgtagtgaaccgagattgcaccgctgcactccagtctgggtgacaagagcaaaactccatctcaaaaaataaaaaataaaaataaataaaaaataattacagctaattcatttctggataatttagactgtcctatatttcacctagtcaaccagtaacctcctcwcttatattccacaaccagttcttggtggaaataatatgagcactgttagaagggccaagttgtcttactattattattttgatgaaggaaagaaagagcaaatcataatttcattgctaatgaggtcacctactatttaagactttgtggattacgttgcaattcaacaattgaactccattgagaaacaagggacaagaaatggtctgtatgatattgttgatcaacttgggtaggagattcaagcaagtactaccctctttgtatctattgcttatataacagaaactatttagtaccatttaaataaattaataaataataacaacacacaagaa

SEQ ID NO: 793802 - DNA, 531 bp, Homo sapiens
cgcagacaatgtatagattcataccaggttccaaaatactgccgaacatcctcctcttgaaaggctgcaaaagagtcactgtcgaagatacattttaggacatcaaacctaaaaactcaatcctggcaaactaatacacacgcaaacaaaatgcctctttttattccttagcacctcatcaccgatttcattattcacttcttcaggcaagctgcgcgggttagcttcaagctcttcccttaattgcaccagaagttaagtctgggcgttggamatacacactctaaatccttacgcgtgggtctgtctgtgaacagcccggagcagcggagcaagttagtgggagggtatcgccaactgtctgctcgctccaagtggcagccttcatggatccatcacccctaaacccacagcccctgtcactgcctctgcactgagtcggctcaaacagaatccaaagcaggttcatccctgaaattcagacttgcgcctgaagttaccggtccggagcccctgggagccgcaacgctc

SEQ ID NO: 793803 - DNA, 551 bp, Homo sapiens
gcaaaataaaaacagtaaacagcttgtaaagaaaaatagaaaatatttctcttttgctgctcctttgaaaccaccattattattagtgttcaggtaaagaaagtaacactttaattttgggaatggtggaatccttcataagtaaaataataaactttatctcagttgtrtgacatcttatttagaaaagaagatttcttcagttcaaagtattataaaaaggttcatttttgcatgaaaagtgaaatttaaagttaaaaaattagcaatttgaactaacaaatcaccaattagctcattttagtatctttaacaaatccataatgatggaaaaatagaaaagatgttatttttccaaaaattgttcagattagctatgaattactatgcaaaccataaagcactctgagccttagagtcttcacctataaaatgagggaacatgattaaatgccctttaacctcccttccaatctaccaatttaggtagtagcattaccattttaaataatcctttaaagagtgagggtttcacctcaaagtattttcta

SEQ ID NO: 793804 - DNA, 670 bp, Homo sapiens
cgataagtctcatatttgttcatatttttgttttaaatatatagcataactcctgatttaaaaatgagatattctgctaataactatatttagagcagtaaaaaatacatagtacatatatttggttggttagtttagtaatattttgcctcattctctaatagaatcctggatctacatcacacttctgaggttaaatgagtaggaaaaggagagattgtcagaagtgatacactagagaagaaagggtgattgaaaaaatggaatagacaattagtaaatcaggacttaggtgatctgagatttaaagcatatcagcctaagaaaatacaattaggagaaaaagattaggacttcagagaggaaataaaatgcttcctcagctctgacttaatcagcctgagggttgtatagtcatgatttgtttctctccacttccttcttttagaracctcttaaatattttaaaggccttacacattctcctttaaacagaaactccaatagagaaaaagctagggcttgatctttcaataattgtaagttaccgtttgctgcccacattcttaggacaaaatttcgagttatatttccttagggtgaagatagaacattattttcttaaggagtctggttcttcaagaggtaggatttttgattggctaagtgt

SEQ ID NO: 793805 - DNA, 586 bp, Homo sapiens
tgagcatcatcagtaatgggacgaactgggattccacaccctgcgatgggaggcaacgagaacagtgccgcttctgcactatccctgcccaagatgcataactggaaaagtatcatgaagacacatcggataaactcacactgtgaggtgttctacaaaatagctgctcatgatcttccaaagtgtcaaggtcatgaaaatagtcaargactgagaaactgtttcatgctacaggagactgaagagacatgacaactaagcacaatgattctaagcaggagtctttcaggactgaaaaaacgttatgaggctgttggtgaaacttgaatggggtttgagaattaaataatcatattgtatagatgttaacttcctgattttgatggttgcgttatggttatataggagaatatccttgcttgtaggaaatactcactaagtattcagggatcctaagccatcagactggtaacttatttccaaatattttaaaaggaaaaaaatttctttgaattgtacttgcaactcttctttaagtttgtgaatattgcaaagtaaaatttaatttttaaatataagtacccaa

SEQ ID NO: 793806 - DNA, 644 bp, Homo sapiens
ggcagaacagggttgcgacatctttgcaaccaatattagctatctaatgctacgatacaaattactccaaacctagtggcttcaaaaagcaatcattatttgtgatctcactgtgaatttgttttttaaaaaatatatttaccagtttattataaagaatattacagagaatacagatgaagagatgtacgaaagaagaggcacagagctttcctgcctttctcaggcacaccaccttccaggcatttccgcatgttcgactatcaagaagctctttaaaccttgtccttttgggtttttatggaggcttcaatatgtaggcatgactgattaaactatcggtcattggtaatcaaattaatcttcagcccccctttcctctccagaggttggagatggatagaaaattcagacaaggcctatgggaatcaatgctcactttctcatcatgtttgaagcctcaactggaagactcaaaggctggaggctggaattayctgaagactcattcactcacacattgatattgactgttgcctgggtttagctgaggctgtcagaatggtttctccacatggcttctccatgtgcactgagactcatcacaacatggtggataaatttttagaacaagcatcctcact

SEQ ID NO: 793807 - DNA, 537 bp, Homo sapiens
aaataattagttgggcttctagactttcttctttttttctctctattttttttttagtcaactgcaatgtcatcaagctgagagaactaaaaagaacacttcatcacataaatagaatcagggataaaaaaaccttatgatcatttcattagatgctaaaaatttaaataaaatgcaacattgctttatgataaaagctgtcaacaaacagcatatagaaggaacatctcaacacaataaagaccatataggacaagcytacggctaatacactgaatggcaaaaaactgaaagcacttccactaagatctggaccaagacaaggattcccactttcactgcttttatttaacatagtactagaagtcctagccagagtaatttggcaagagaaataaataaagggcatccaaattggaaaggagaaagtcggattatccttgtttgcagatgacacaatcttatatttacaaaaacctttaggctccaccaaaaacccttagaactgataaatgaatttagtgaagttacaggaca

SEQ ID NO: 793808 - DNA, 537 bp, Homo sapiens
aaataattagttgggcttctagactttcttctttttttctctctattttttttttagtcaactgcaatgtcatcaagctgagagaactaaaaagaacacttcatcacataaatagaatcagggataaaaaaaccttatgatcatttcattagatgctaaaaatttaaataaaatgcaacattgctttatgataaaagctgtcaacaaacagcatatagaaggaacatctcaacacaataaagaccatataggacaagcctacggytaatacactgaatggcaaaaaactgaaagcacttccactaagatctggaccaagacaaggattcccactttcactgcttttatttaacatagtactagaagtcctagccagagtaatttggcaagagaaataaataaagggcatccaaattggaaaggagaaagtcggattatccttgtttgcagatgacacaatcttatatttacaaaaacctttaggctccaccaaaaacccttagaactgataaatgaatttagtgaagttacaggaca

SEQ ID NO: 793809 - DNA, 645 bp, Homo sapiens
aatcctgctctgaagaggaagagaaggagggagaatgacatctattgagcacctggtttattaccaaaatacatacttttgctaaattcctggccttataacgtttgcattattttctccattttataggtgagggaactggagttcagagaggtagagtgacttacccaaggtcactcagataaactgtggcactgaccacrcaaccctggtctttctggctccaaagcccaagactacctttcccagtgccaaacgaggctttccacagcctcttgttccagcagtgtcctgagggagggagagatttggcctgctcatgaggctccagtctatgtttccatgacaaggccatgtggtcagcacaatgcaagtgggaggaagcctgcatcagccagggcgtgaatgagggctgcaagtcaggagctcagcacctcccatccatctgccttacctcccacaatttaactattaccctcaccgcccacccccaagatcaggacaggagagaagatgctgggattgtatgcgtgcttctgtgttggccttgcagtgagagatgatcaagaaatacttagaaactctatgtgcatgcaatttgggtacctcctgagtgtgaagagctcattgatcccattgcaagta

SEQ ID NO: 793810 - DNA, 645 bp, Homo sapiens
aatcctgctctgaagaggaagagaaggagggagaatgacatctattgagcacctggtttattaccaaaatacatacttttgctaaattcctggccttataacgtttgcattattttctccattttataggtgagggaactggagttcagagaggtagagtgacttacccaaggtcactcagataaactgtggcactgaccacasaaccctggtctttctggctccaaagcccaagactacctttcccagtgccaaacgaggctttccacagcctcttgttccagcagtgtcctgagggagggagagatttggcctgctcatgaggctccagtctatgtttccatgacaaggccatgtggtcagcacaatgcaagtgggaggaagcctgcatcagccagggcgtgaatgagggctgcaagtcaggagctcagcacctcccatccatctgccttacctcccacaatttaactattaccctcaccgcccacccccaagatcaggacaggagagaagatgctgggattgtatgcgtgcttctgtgttggccttgcagtgagagatgatcaagaaatacttagaaactctatgtgcatgcaatttgggtacctcctgagtgtgaagagctcattgatcccattgcaagta

SEQ ID NO: 793811 - DNA, 645 bp, Homo sapiens
aatcctgctctgaagaggaagagaaggagggagaatgacatctattgagcacctggtttattaccaaaatacatacttttgctaaattcctggccttataacgtttgcattattttctccattttataggtgagggaactggagttcagagaggtagagtgacttacccaaggtcactcagataaactgtggcactgaccacacaaccctggtctttctggctccaaagcccaagactacctttcccagtgccaaacgaggctttccacagcctcttgttccagcagtgtcctgagggakggagagatttggcctgctcatgaggctccagtctatgtttccatgacaaggccatgtggtcagcacaatgcaagtgggaggaagcctgcatcagccagggcgtgaatgagggctgcaagtcaggagctcagcacctcccatccatctgccttacctcccacaatttaactattaccctcaccgcccacccccaagatcaggacaggagagaagatgctgggattgtatgcgtgcttctgtgttggccttgcagtgagagatgatcaagaaatacttagaaactctatgtgcatgcaatttgggtacctcctgagtgtgaagagctcattgatcccattgcaagta

SEQ ID NO: 793812 - DNA, 685 bp, Homo sapiens
ctgaaacttatattctagtctggaagattgggtagatgaaaacacaaatcaaaaatcagataatgtcagataacaagagatgctaagaaaaataaaacagggtgaggagatggagtgacatggatgggaacttggtcagggaagcctcctttgaaaagataccattttataacagtcctgaatgaagagaacagatcagtcaagtgaagatgtcaggcaaaagtattccagacagagaaaatagctcagacaacgcccaagacagaagtatatttgggatgtttcagaataaaaggaatctcattggggttaaaaattatccaagcagagaagaaggcagaagccaagattatgtaggccttgtagactatacaagcaattaaggttgtattcttttgggatggactccagtggaggatcttaaatggaaaagtgacattactacttttatgaacgagcactctaacttttcttctagatggaggataaagtagggatacaagaatggaagcagtgaaaccatttagaaggtcatttctttggaccacgyaagagatacatgatggcatgaattagggtgatagcactgaagagagagagggagaagttgacaagtcttaggtatcttttagtgacagagccagcaagacttgctgatggatttgacatgaaggatgagagagag

SEQ ID NO: 793813 - DNA, 610 bp, Homo sapiens
caagattgattagaaagtgtgtggttttgctcagcgtttggggggatagaatgggacttggtcctgggtaccaaggacttgagttttaccatctgccttcttccctccctttcaggccatgaaggttcacttatttactttatgaatttgccaaaagcaaaagtaatatgccctcagttagagacggtctcacagggttctattacctgcaccttgttccaatttcttgtggcaccattatcaaaagcttggagtaaagccaaaaaagagaacayagaagatagttgttatggtctaaatgtttgcatcccttcaaaatttatatgttgaaacttaacccccattatgatggtattaggaggtgggggctttgggaagtgattaggtcatgagggcagagcccccataaataggatcagtgcccttacaagaggctacagagatgagttcttcctctccaccatgggaggacacagtgagaaggcactgtctatgaggatgtaagccctcaccacacaccaaatctgctggttccttgatctcccacctctcaagctctagaactgctagaaataaatttctatttttataagccacacagtctatggta

SEQ ID NO: 793814 - DNA, 582 bp, Homo sapiens
gcaagactctgcctaagaaaacccacaaaacctattatatagatactcttattgtaggacctacttattttatacacgaagaaactgaggttcagagaaattatgtatcttgctcaaagtcatgtagctaattgtgttggggattctaactaatgcagtgcactgagccaatgtctcagttcattcaggctgctgtaacaagatcccttagacagcrtaatttacaacaaaagacatttatttcttacagttctaggaccaggatcttggaccaggaagtccaagatcaaggtgccagcagattcagtttccggtgaggggtctctgcttcataggtggctctttgctgtgtgcttacatggcagaagggaacggcagctccttggtgcctcttttataagggcattaaccccagtcacaggatggagccctcgtgacctaattacctcccaaaggccccacgttctaatatcatcgccttggtgatcaggtttcaacatgtgaatttggggaggatacattcaggccataactgccaatatgggaaatcccccctcctgctctatatacattacaatactc

SEQ ID NO: 793815 - DNA, 559 bp, Homo sapiens
tctagcatgatgctaataagtgttctagaaaaagagaagggaaagcaaaaaggagaacattatcaaaaaaaatacaagaaaatttcccagaattgaaggacttgaatttcaggattgaaaggtaacattccaggccagacacagtggctcctgcctataatcctaacactgggatgctggggcgagaggatcgcttgagcccgggagtttaggaccagcctgggcaacatagggagacctcatctctacaaataatttaaaaagtagctgggcatggtggcatgtgccagtggtcccagctactcgggaggctgcggcagaaggatttgcctaagcccgggaggctgaggmtgcattgagccgtgatcatgccactgcactccagcctgggtgacagagtgagattctgtctcaaaggaaaaaagaaaggcaggaaggcaggcaggaaggcaggcaggcaggcaggcaggaaggcaggaaggaaggatggaaggaaggaaacactctagcccaatgaaaaaagactcacacttaggcatattgttgtgaaatttcagaa

SEQ ID NO: 793816 - DNA, 606 bp, Homo sapiens
aaaaataataacatagtcttttatagttatccctatggtactatttctagtgctcttcattgttttgtgtagatctgcatttgtgtagatctgcatctgatataattttccttcagcctgaggaacttttttgaacatttctcatagtgttggtttgttggtgatatattctctcagcttttgtttgtctgaacaaagtctttattttgtctttgtatttgaaggatgttttccttgggtatagaaatctaagttggcattttctttcagtactttaaagatgttgckacaaatacaaaaaattagctgggtgtgatggtgcacacctgtaatcccagcagctcaggaggttcaggtgggagaatcacccgagcccgggaagtcaaggctgcagtgagctgtgattgcgttactgcactccagcctgagcaacagagtgaaactctggaaaaaaaaaaaaaaaaaaaaagatgttgctccattatcttatggcttgcattgtttcttataagaagtctgctgtcattcttacatttgtttctctgtacatagagggtttcaggctgtctttaagattttctctttatcactggttttaagcatttt

SEQ ID NO: 793817 - DNA, 615 bp, Homo sapiens
tccatacatttaattccattccaattaaatctcaaatgtattttcttacttgcaatgttagctcactgggaattataaatagtcaagaatgcctaagaacatcttgataaatgcaattgattggggcaaaagcaaatttttttttttttttttttttttttttttgagacagagtattgctctgttgcccaggctggagtgcagtggtgtgatttcggctcactgcaacatttgcctcctggattcaagcaattctcctgcctcagcctcttgagtagttgggaatacaggcrtgtgccaccatgcccagctaaatttttttttttttggtattttttaaataaagacaggcttttgccatgttggccaggatggtctcaaactcctgagctcaagtgatctgcctgcctgggcctctcaaagtgctgggattacaggcataagctaccacacccggcagaggcaaaagcaacttctaaggtcagatattaaaatgcaagaagcaagagggtgatgcggtgttgtcactgctccattgcccacggtggaatcttggtttctagaacagtacctggtccacagaactactcgatacatattcattgaatgagcaag

SEQ ID NO: 793818 - DNA, 618 bp, Homo sapiens
gattctgcttcttcctcaattcccacatttaatctggtctgcctttcatgaaacatcccttgagcctcttcttgccagagtccttgaccttgacattcttgcctgtttgtccttccttttcattcaccttgcagtcttcccccctgaaagcagcctggcttctccacactcacaccttgcagtaaagccttcaggggagcacaccacggtgctaaagattggtgcctcttataaatcaagttctccaacctcacatgttccctcagtttctcccctcgctgtctcagaagaagccgggaagcttcccccatctaagagtaatatctcactagaaattaatgattaaaggagagctaaaatgttccatatgtttggaacctttaatagctaacaattatatagcacttgctctatgcaggcacgttctrtattggtcattacatgagctaatactcatttaaattgactgtttttaatgaaaaaagtaaggcacagagaggttagtaacttgtccatggttaaacagctagtgagtgatacagcagggattcaaacccaggcagacaagctacaaagcctctgaatttaccacgtataatatagtactaaatgtactga

SEQ ID NO: 793819 - DNA, 615 bp, Homo sapiens
tccatacatttaattccattccaattaaatctcaaatgtattttcttacttgcaatgttagctcactgggaattataaatagtcaagaatgcctaagaacatcttgataaatgcaattgattggggcaaaagcaaatttttttttttttttttttttttttttttgagacagagtattgctctgttgcccaggctggagtgcagtggtgtgatttcggctcactgcaacatttgcctcctggattcaagcaattctcctgcctcagcctcttgagtagttgggaatacaggcgtgtgccaccatgcccagctaaatttttttttttttggtattttttaaataaagacaggsttttgccatgttggccaggatggtctcaaactcctgagctcaagtgatctgcctgcctgggcctctcaaagtgctgggattacaggcataagctaccacacccggcagaggcaaaagcaacttctaaggtcagatattaaaatgcaagaagcaagagggtgatgcggtgttgtcactgctccattgcccacggtggaatcttggtttctagaacagtacctggtccacagaactactcgatacatattcattgaatgagcaag

SEQ ID NO: 793820 - DNA, 648 bp, Homo sapiens
gcctcccaggtccgcattgctaccaggggagggctgtgccgctctcacctccacggtgcagctgagaaaactgcagagaaggcttgcgctcgagacatctctgtgaatgggtcgcagagcagggattcaaacacgcgcgaaatctcgcctttgcggacgcggcggaagagctgattgcctcattggtggaacatccgcgatgaacacccttatatccaatcagggctcagccccatcccggctctggtctttctcctgggacagcttcaagaggcctcttaaactcctgcctccacccacccacccccccacattctggccatgcttctagtcaccacccagttagtccccccagatctgygattccgtgaagttgcatggttaaggtatatttggctttttttctcccttagtttatcagttttcttttacggcctgtctcccactcattaattcattcactcaccatttgctcattcggcaaacactaaggacctgttatgtgctggctttgtgcagtgagatcaaacccagcagggccctcgccagactccctgaagaaggagggcccacaggtatcttatgagacggtggatcttgggaagccaagggagcggggacctcagctggtccgcagaggagtggggt

SEQ ID NO: 793821 - DNA, 693 bp, Homo sapiens
gacagagtgagacctctgtcttaaaaaaaaaaaaaaagacaagttctgtgctagatatgtgtattgtgaatattttctccaaatctgtagcttgcctgttaattatcagtatattttgataagcagtttttaactttaataaagtccagtttatcaactttttctctcagttcatgctttcttctgtcctctcaaattaatctttgcctaggaatgtatttctcctataattgcttgtagaagctttatagatttagcttttatgcttcatcttgaattaatttttgtgtggtgtgaggtaggggttgagttttttttcacattcatttattcagttgtgccagcactaattgttgaaaagcctttccttttcatattgaatagccttgctgcctttgttaaaaaaaaaaagaraaatcaatggattctctatctgtgagtctgtttctggactctatttgagtttgttgatccatttttctgcccttgtgctggacctcactgtcttgattactgtaccttttgagtaaggttgaaaatcaggtagagtgaatcttctttttaaagattaatgatgttatctatcgtaggtcctttgcttttccacataaattttagaattggcttgtcaattactgctgaaggtctcttgagacttcaactgggatccaaatttttccataagtcacttta

SEQ ID NO: 793822 - DNA, 614 bp, Homo sapiens
gctagatatgtgtattgtgaatattttctccaaatctgtagcttgcctgttaattatcagtatattttgataagcagtttttaactttaataaagtccagtttatcaactttttctctcagttcatgctttcttctgtcctctcaaattaatctttgcctaggaatgtatttctcctataattgcttgtagaagctttatagatttagcttttatgcttcatcttgaattaatttttgtgtggtgtgaggtaggggttgagttttttttcacattcatttattcagttgtgccagcactaattgttgaaaagcctttccttttcatattgaatagccttgctgcctttgttaaaaaaaaaaagagaaatcaatggattctctatctgtgagtctgtttctggactctatttgagtttgttgayccatttttctgcccttgtgctggacctcactgtcttgattactgtaccttttgagtaaggttgaaaatcaggtagagtgaatcttctttttaaagattaatgatgttatctatcgtaggtcctttgcttttccacataaattttagaattggcttgtcaattactgctgaaggtctcttgagacttcaact

SEQ ID NO: 793823 - DNA, 617 bp, Homo sapiens
ctctgaaagtccctgagtggccaccttcaactatccttcctgctaatatcatttcctgaaaaatcactatttcacctaggacattgtcctttaatagaaaccggcccagagagaaggctggggtatccaagagcccagaaccccacrcttattgtgacagtgcaatctagtcctagaggtaaagaaacaagagtcattgcctgggttgaaatgttattatctctgggatttgcttcaaaataattgagggagagcaaatggtaaaatggatgaaacaaaattggttatgagttgatcatgattgaaactcgtgaaggctgcagagggctcatgatattatcagctctacctttgaatgtttgcaatttttatggcaaaaatttaaaaaatataccctctccaatgagtcaacctcctccctcccctcccattatttaccccaagccagggcctggatcctgctgctctttggttaatgacaaccccttggccatctgcagcgtccccagtggccactctgtccccatgccccgtgcatcacggagcagacgctgaccctgtgggggcgtgacctggctgtgcagttggccgtatccgggcgtctcctgatgtggagt

SEQ ID NO: 793824 - DNA, 593 bp, Homo sapiens
catcattccttggaagccattcatatccaagctaccagtgacctccatgttgctaattctgggggatcactttttcatcctcacattccctgaactctcagcagcattgggcaccgttgctcattctcttggaaacacattcttcactttcttcaccttcctcacccttytggctttcctctcacctcacagatgctctcctgttttgttgggagatcctcctaactgctctgtgctgccagtcctgttctcctctcactcccttctactcttgcatccacaatgatctccctgatatggtttggctctgtgtccccacccaaatctcatgttgaattgtaatctccagtgttggggaaaggacctggtgggaggtgatcggatcatgaaagcagatttcccctttggtattctcatgatagtgaggaagttctcacgagatctggctatttaaaatgtgtaacaattccccctttgctctctgtcctgctggccgtgtgaagatgtgcttgcttcttcaacttccaccatgattgcaagtttcctgaggcctctccagtcatgcttcctgtacagcctgtggaacggtgagc

SEQ ID NO: 793825 - DNA, 511 bp, Homo sapiens
agatttttaaattttctgtgagtttttgcacatcttattttatttctaatttttaatgtctttaattttttttcaatatgattagcaaattatgtgcttctgttacatagaaaggcacttgatgtttgtatgtggaccctgtatttggtggtcttgctaaattaatgtgttggttgtagggttattttgtgtagatcccatagaatttctatgtacacattcatattgycatttttctgattgtgtggttgatttgccttatgctagccatgaccttcagcacaacattgaatagaagcagtaggaacaggcttccttgccgtgttcccaatatcatggggaaaaccagcagtacttcaacattaaatattttagctgtacatttcatcagactaaggaagctccctactatttctactttgctgagaggtttttaaaaataactattgaattttatctttttctgcatttttattttaactttttctgtggcatactactttgattttcg

SEQ ID NO: 793826 - DNA, 490 bp, Homo sapiens
aaaagcagaaattgaaacacacagtggggcacactcccagtttgtgctttctttatctttgctaccaaacagatgccacaggaaagcattttcttctcttcagtatatataatgaaagaaaccagttattttactacttgttacaattaaaaaaaaaaaaagctcatgtccccttctggtgttctaatcatcatcatcactcagagttttaaatwgcttactaaagtgccagacattctactgagtactttatatgccttacctcatttaaattttatgtaaatatcaccatttccaatttacaggtgaggagactgaggaacagaaagcttaagtaatgtgctcaaagtcatccagcatgccagaggatttaaactttgaaagtctggtttcagagacccgcctctaaactgccacacaatttcaacaccgtagtctaacatgagacagggaaagtagattggaaagccttcctgggaaatgagaaacg

SEQ ID NO: 793827 - DNA, 589 bp, Homo sapiens; identical to SEQ ID NO: 748198

SEQ ID NO: 793828 - DNA, 627 bp, Homo sapiens
gtcatagactctgtgcatttcaaagatattaccaaattggcccttgtcaaggctgcgctgttttatatttctgagggtctcattctcttagcaggggttgtggggatagatgatgaatatgaaactgctttgagctccataaagtgctgggaagatgccagaggttatggctctgaagaaagggcttctcctggctsttcctcctttggcttagggtttctgatgggcatttcgctcttccatgctatagtcaggttgtagggtcgttttagtcactgccatcatgtaggactgttatttccttagcaagtgggggtggctggggaggaggcttcctttagactgctgctttctttcctgacatctactgaacctacaaatgccacataatgttccaagtgctccgtggagtcattgtgatgtaatttaattctgcaccacaagctagagagtttgagatgaaatggaaactgagagagctggtgtggtttgcttaaggttaagcagctaattcctagcaaagtgaggattctttctgcctttaaaccaaacctgccagtttatacaacaaaccatccattatagtcaggacgccttaggttttaagtgacagaaactcatctcaaa

SEQ ID NO: 793829 - DNA, 627 bp, Homo sapiens
gtcatagactctgtgcatttcaaagatattaccaaattggcccttgtcaaggctgcgctgttttatatttctgagggtctcattctcttagcaggggttgtggggatagatgatgaatatgaaactgctttgagctccataaagtgctgggaagatgccagaggttatggctctgaagaaagggcttctcctggctgttcctcctttggcttagggtttctgatgggcatttcrctcttccatgctatagtcaggttgtagggtcgttttagtcactgccatcatgtaggactgttatttccttagcaagtgggggtggctggggaggaggcttcctttagactgctgctttctttcctgacatctactgaacctacaaatgccacataatgttccaagtgctccgtggagtcattgtgatgtaatttaattctgcaccacaagctagagagtttgagatgaaatggaaactgagagagctggtgtggtttgcttaaggttaagcagctaattcctagcaaagtgaggattctttctgcctttaaaccaaacctgccagtttatacaacaaaccatccattatagtcaggacgccttaggttttaagtgacagaaactcatctcaaa

SEQ ID NO: 793830 - DNA, 627 bp, Homo sapiens
gtcatagactctgtgcatttcaaagatattaccaaattggcccttgtcaaggctgcgctgttttatatttctgagggtctcattctcttagcaggggttgtggggatagatgatgaatatgaaactgctttgagctccataaagtgctgggaagatgccagaggttatggctctgaagaaagggcttctcctggctgttcctcctttggcttagggtttctgatgggcatttcgctcttccatgctatagtcrggttgtagggtcgttttagtcactgccatcatgtaggactgttatttccttagcaagtgggggtggctggggaggaggcttcctttagactgctgctttctttcctgacatctactgaacctacaaatgccacataatgttccaagtgctccgtggagtcattgtgatgtaatttaattctgcaccacaagctagagagtttgagatgaaatggaaactgagagagctggtgtggtttgcttaaggttaagcagctaattcctagcaaagtgaggattctttctgcctttaaaccaaacctgccagtttatacaacaaaccatccattatagtcaggacgccttaggttttaagtgacagaaactcatctcaaa

SEQ ID NO: 793831 - DNA, 627 bp, Homo sapiens
gtcatagactctgtgcatttcaaagatattaccaaattggcccttgtcaaggctgcgctgttttatatttctgagggtctcattctcttagcaggggttgtggggatagatgatgaatatgaaactgctttgagctccataaagtgctgggaagatgccagaggttatggctctgaagaaagggcttctcctggctgttcctcctttggcttagggtttctgatgggcatttcgctcttccatgctatagtcaggttgtagggtcgttttagtcactgccatcatgtaggactgttatttccttagcaagtgggggtggctggggaggaggcttcctttagactgctgctttctttcctgacatctactgaacctacaaatgccacataatgttccaagtgctccrtggagtcattgtgatgtaatttaattctgcaccacaagctagagagtttgagatgaaatggaaactgagagagctggtgtggtttgcttaaggttaagcagctaattcctagcaaagtgaggattctttctgcctttaaaccaaacctgccagtttatacaacaaaccatccattatagtcaggacgccttaggttttaagtgacagaaactcatctcaaa

SEQ ID NO: 793832 - DNA, 586 bp, Homo sapiens
caagagtatgcccttcctttcccaagcacctcattaaaaatcaccttattaacattttgctatctccccaggtgctgcaggcctgcaacttcccacataatcaggggacaaaattttattctgaaaaaaaattcctttgtgtgatgcactattttcttttttttttttttttttttttttgagatggagtctcgctctgtcgcccaggctggagtgcagtggcgcgatctgggctcactgcaagctccgcctcccgggttcagtccattctcctgcctcagcctcccgagtagctgggactacaggtgcccgccaccacgccyggctaatttttttttgcatttttagtagagacggggtttcactgtgttagccaggatggtgtcggtctcctgacctcgtgatctgcctgcctcggcctcccaaagtgctgggattgttgttgtccttttgtaaagaatactgtaataagcatattactgcaaaaaggcttattctctatttgggagtatttccttggttcaagtcctcacagttaatttttaatctgacttatctccttgtttctatatttaattgcctattg

SEQ ID NO: 793833 - DNA, 524 bp, Homo sapiens
cacaaggaaggttagcatgggtactgatgcagaacttaaatttgttcaatgtatccactgcatcctgatgacccagcgttcttgccaagtcctgaaattccatgttaggagagatttctgggtttactatttgctttgtaaaaaattattctaaacttggcttaagacagtatctcagtttgagtgctaagaatctgggcatcttaattgggacttttttttttagggtctctcataggctgcagtcaaggtataggctggggttgtagtttcatctcaaggtccacctggggaagcgcccacttccaagctcattcaygtggttgttggaaggcctcagtttctcactggctgctggtcagaggttacacttagttctttgccacatgggtccctccacagagcatctcacaacatggcagagtgagcaaggtagcaggcaagaaggagcaccagcaggagagagaggactatcgaaagggaagtcacagtcttttataacctaatctaaaacacgatatgcc

SEQ ID NO: 793834 - DNA, 605 bp, Homo sapiens
aggggtcccattacaatcagaagcatatctctggtaaacacataaatggtggtaggttccctgaagagttaactggtagagtcccactgatcacctttcacttcctccttgatagtgaggtctccaggcttttcaccaaagcctctaatgcaatcccacagcaaccggctgtgctccctggtgaaggcaatgcattagtagtgtgaaaaaattgcagctcacaagccattccttgagcaactgtgctgacagcaacaggccccttctactgccacagggacaggtctcctagaagaayatccaattcctgaaaattagaataacccagttcacctcaaatgaatgaaaattgtcattctgtttggatttctgtggtcataagcccgaatattgtctgcagtcttgctgtttcaggcagttactgaggctaatagagctaggagagaggactgaatagcatctcagctactctgcaaaatggaacctgaaagagaggtgaaaaactgcacatgattttttctcttcctctggttgataatgacaacaaatcactatttatggtggacatcacaaagttgccttcctggatggtgggataaaagaca

SEQ ID NO: 793835 - DNA, 657 bp, Homo sapiens
gcatgcatgaactttgaaaacataatgctaagtgaatgaagcctgtcacaaaagactgcctatcacatattatatcactccatttatatgaaatgtccagaataggcaaatctacagagaaaggaagtataaattaatgatgtcttagggttggtggtatagaagatagggtgtgatagctaaagggtmtggagatgtttggtgaggtgatgaaaatgctctaaaatgaactgtggtgttggttgcacacatccacaaacatactaaaatacattgaattgtgcagtttaaatgagtgaactgtgtagtatatgaattacatatcaatggaattattacaaaaatgaaaaaaatcattgaaaccagacatttttccatattgcgatgtgataactcagtcaacaaagatcctttatttttccaggatttttcttttttttggaggggagggttctttgtttttgctatgggttgtaattgtttgtttgcttagtaataactctgacgatttttaagacagtattttttggtcacgtgtggttgtgaatattctgtaactttttgtagcttttaaaaaatttatgttattaaaaatgttttggatatataatagttgtgcctattatagcatacatgtgatattttgatatgagcata

SEQ ID NO: 793836 - DNA, 657 bp, Homo sapiens
gcatgcatgaactttgaaaacataatgctaagtgaatgaagcctgtcacaaaagactgcctatcacatattatatcactccatttatatgaaatgtccagaataggcaaatctacagagaaaggaagtataaattaatgatgtcttagggttggtggtatagaagatagggtgtgatagctaaagggtctggagatgtttggtgaggtgatgaaaatgctctaaaatgaactgtggtgttggttgcacacatccacaaacatactaaaatacattgaattgtgcagtttaaatgagtgaactgtgtagtatatgaattacatatcaatggaattattacaaaaatgaaaaaaatcattgaaaccagacatttttccatattgcgatgtgataactcagtcaacaaagatcctttatttttccaggatttttcttttttttggaggggagggttctttgtttttgctrtgggttgtaattgtttgtttgcttagtaataactctgacgatttttaagacagtattttttggtcacgtgtggttgtgaatattctgtaactttttgtagcttttaaaaaatttatgttattaaaaatgttttggatatataatagttgtgcctattatagcatacatgtgatattttgatatgagcata

SEQ ID NO: 793837 - DNA, 619 bp, Homo sapiens
agtattaatgactgtggtcctggaacatgcatagtgagcaaacatacatgtaacagatgacccatgttcatcttggggtggagagttaacatttaaatgtacacaattaggccctatccttcaaaaggtaaaacagggacacaaaggcatttgagtgtgcagcctctgtaaactggccagaaccagtccatggtcagtggtctcattatgmggaggaagtttctgaaatcagtctcttgtccaatcaaagctatagttatagctggtagaacaggagctgggagtcagttcagtgtctggtgaagcgacaaattgttttaatattgtttatctggaggccagtgattgtttagctgctagagaaaaagaaaaatattgtggcaattagaacatagtttcttctttaagtgtagggggagtgtgacctaacgcttgcctggcatagccataggttccatttataatttggcattttattgacagagtctgttttgttaatcttataatcactttaatgctgatcagttgtggctaaactcagaaagggaaggggtataaacaggcatgtctgacctcctttcccatcatggttggtaatttagtttttaagggtttattg

SEQ ID NO: 793838 - DNA, 619 bp, Homo sapiens
agtattaatgactgtggtcctggaacatgcatagtgagcaaacatacatgtaacagatgacccatgttcatcttggggtggagagttaacatttaaatgtacacaattaggccctatccttcaaaaggtaaaacagggacacaaaggcatttgagtgtgcagcctctgtaaactggccagaaccagtccatggtcagtggtctcattatgaggaggaagtttctgaaatcagtctcttgtccaatcaaagctatagttatagctggtagaacaggagctgggagtcagttcagtgtctggtgaagcgacaaattgttttaatattgtttatctggaggccagtgattgtttagctgctagagaaaaagaaaaatattgtggcaattagaacatagtttcttctttaagtgtagggggagtgtgacctaacgcttgcctggcatagccataggttccatttataatttggcaktttattgacagagtctgttttgttaatcttataatcactttaatgctgatcagttgtggctaaactcagaaagggaaggggtataaacaggcatgtctgacctcctttcccatcatggttggtaatttagtttttaagggtttattg

SEQ ID NO: 793839 - DNA, 622 bp, Homo sapiens
attattctgttcaagaaataattctgaaccctggcttggagggatacactgtttctgtatttctaggctgtttttatttaacatccttgaacagatggtccaaaacagaattggattcaaaatgtgcagaaatttgaaaattatggagaattatctcccaacaatatgcaaatatcagaatatttgggggaaaatagagttttttaataaaaaagtcattgtctacaggwtaactatcattgaactcatcatattatctttatcactgtgtggcaggaaagaacaaaatcaatgtgatggatgatttaagaaatttcaatctaaatttggtcatgtgtgattttccctttacatactgagtttaaacttaaaatatttttccacttccttcatatttaatttccaaaactcctctgagagttgtggttgttgtcactatagttgctgtcgttcttgtgttattatttttaccttcttacatatcagacaaatgaggttcatagaggttaagtaaatttgccttaggccatatagctaaaggcttttgtttttttaatgtacaatgctgctttacaaaaataattaccaaaagatgacagttccttagtttaccatagatatg

SEQ ID NO: 793840 - DNA, 638 bp, Homo sapiens
atgttaatcctaaaagtgaaggatttcttcaaattcacacacaccccatcactacttgtttgcaggccagtggccattggcttttctttcacctaaacgaaagaaggagccatttccagtctactcgcctactcatttactgtgagctcaactctgttatttggaaagctgccatacatttatgagagcctaagggatattagatgattgtcatctttctcttgttccctcgcccccctccaccaaatgccctggcaaggttgccgcacctggacatggaattccctgsagagtcccttgttaccagaattgtggaaaacttggaccgagttcagagaagagctactaaaatggttaaatgactgagggggccaatttataaggaactcagaaatgtttggttaagtggtaattaccctaaaaaaggtgtggtgactggcattaagtttaaattccaagccatacttggcaagaggccttctttcaggcagcctccacattcagaaatagtctgaagaaggagtagaatcttacttttgcttgagcctccaacccctgcacaggctgcttgggtggtatccacatgccaagtgtagtaacctctataaacaagcacagaaggcaacaccactaacgca

SEQ ID NO: 793841 - DNA, 615 bp, Homo sapiens
catttcagctcacttcaacctccacctcccgggttcaagcgattctcctgcctcagcctcccaagtaactgggattacaggtgcctgacaccacacctggctattttgtgtgtgtgtgtatttttagtagagacaggttttcaccatgttggccaggctggtctcgaactcctgacctcaggtgatccgcccgcctcggcttcccaaagtgctgggattacaggcktgagctaccgtgcccggccattaaattctgtttttaaagaatctgtacatttcttctgaattttcaaatttatttgaatgaaaacataattactctcttaagatgtatttaatacatagagatctgtgttgattcccctttttttaccccaatattgataattcattttttttctcttttgttctttcttagactggcaaagaacttactgattttcttggtctattcgaagtatctgcttttagctttgtggactttctccattgtacctccttttttttctatcttattagtttcagttcatctttattgtttcttttattctactttattagtgtttaatcttcagttttttatgtttttgagatagatacttgaatcacaagttt

SEQ ID NO: 793842 - DNA, 623 bp, Homo sapiens
tcaaagactgaatcccttctgacaagggaaatagaaaataatatcactccacatttgactgttacagtctgttcttagctttcctcagggaagaaatttttcctggtatgatcgttcttactcagaatatacggactgctatttaaatttatatctcccctctctctttttttttctttacytcacattctttttttttctgggtggtgagaatatctgttttctgaactgttttgggctttttgatttggagaatcagagctaccttgaaggccaggaaatccaatctatgcagtccttgaaatataatcatttcagctgaattaatatactcagactgctggtttatttagatgacttactttgtcataaagaattaataaaattcttaatatgaaagataagttgggataaaacataaaactgcttcacaaactttaagaaaatgtgcagatgctgctatgttctataaagccaattttaagaagatagggctaattattttcattttacagataggaaaactgtggcttggagctgctctgaccccattttatttatttttcattatattgtatgatctttgatgtcaaccaaattcctctagatgcattattatctgg

SEQ ID NO: 793843 - DNA, 592 bp, Homo sapiens
gtgcctcaaaagtgcaagtgaatggatttgagaaggagtctcgctctgtcacctaggctggagtgtggtggcgtgatctaggctcactgcaacctccccctcctgggttcaagtgattcccctgcctcagcctgccaagtagctgggattacagacgcctgccaccacgctcgggtaatttctgtatttttagtagagatggggcgaggctggtcttgaactcctgacctcaggtgatctgccrgcctcaacctctcaaagtactggaattacaagtgtgagccactgagcccagccaagcggatggatttcaagggttttcatatatatgcttataatcatatttaaatgtattgatggggttacaaacttaaaaatgtcctatggcctcctatggccattttttttaagcaaatgaaacaccatattcaattttatgcatttggaagttatttttttttgtgaatgagttggttcaagccaaattcattcataggaaataattcctgagcccaggaagtccagtaggtctcgggtgaaatgttggcaggtggaggtgtttctagctagtatagaaccgctgatgagtgtg

SEQ ID NO: 793844 - DNA, 619 bp, Homo sapiens
tgtatatagtggggaggcgtgggaatgtgatcagggagagggaatttcagaggtattggtatttatgaaatcaggttaagacaagttaagctaaagtaacaaatagccctaataagtcaattgtttaaaataaagatttggttttcactcgtttcatgtttaatgtgggtttggcaggtgactgtgttgcacagtcactccgttttttggtgctgtcttgtaggagtttaccatagtaggaagaaaagaagattgaaaattgaacattggcaattaaatcctttcaccagtaaatgacatgtgacactcctacttttatttaccaaaagcaagtcatataacttgggagacaggaaataaattctctcttctaaaaggaggattatgtctatccttaaagagtagttacttctactactgtcatattttatttyttaaactttctttttaatcatataggttggaagactgagtgtgtgtgtttatgagtgtaacacatgcatatatttgatgtatggtctatttcataatgaaaaattggaagaaaacagtacagccacatgctgtcaatttttagttaaattatttattcagaagagttattcttcatactgattct

SEQ ID NO: 793845 - DNA, 538 bp, Homo sapiens
tagagcttttaactatactttgggaaattcaaataataagcttgttttgcttcaaaagtcaatatgccaaatttgaaagtcccatttgagttgttcatttacaagaactgataacttcacttcccaggcatttaagagagaatgctatttatagatcttatgaaatatagtatgaatgtgggtcagattctccaattgtctgccctaagatgttaacactggcatggacagtccaaaaagtataatagaagtgttattatttataactttaaagatatttccccccagttgttttatcttctattgctttactgaggctactattaaaatcagtttgaatgcattgattaragcctgactaggcttcggggagtacaaccttggattgttctgtaggatgaaagacaacaatttaaggttaactagcattcctagaaataagagacttcactcaattacatgcctgttatagcatctgaatatgtatcacatatgtaccaaattgccctaaaagctgttaaaatttaagagagggtaa

SEQ ID NO: 793846 - DNA, 616 bp, Homo sapiens
ttacattacatgctaatacctcgctaactctaggtgctccacaattttaatcaaaaagatctttcttttggaatctttaacaaaagcctgtcagattaaaaagtagaaattaattcccagactaaaagtatatgccatcaagtgtagcacataattatctgtctacccatccattttagcattaggtagccagacaaagccattgctrcttacatacctggactgcagtatttgaccattctgtttggccatagaattatgctaatcaatcagtctatatatatatatttttaaatggcaaaacatgcattgtactctaaatatgttgagcgcattgcttactaaatttcataatataacttttattatcacttatgggagaaacttctacgcttcttttaagtacttttaatatatatatatacacatacatacatatatatacatatatgtatatatatgtatatatatgtatgtatgtgtatatatatgtatatatgtatgtatgtgtgtatatatatatatatatatatgacactgcatatcatttcccccctctgttttggttctgaaaagattcagggcaaaagtatgatccagctctagaaagtatatg

SEQ ID NO: 793847 - DNA, 601 bp, Homo sapiens
cttagcagggaataaccccacttgactcaagaaccccctaaataatctcttagttctgacatattgttcaccctaaagaattatctctaatgtcaatggcacccagagtggctgaagcctcacaggaaaagaggttctatctctggaattaaggattcaacaaggggggtccaaagactttcaggcgttcgttgaagattaaaaagtccaaaatattaagaggaacwtggtccaaaccactgctatgaggacgtagtgggatgtcacaaacgtttgtccttccttttcgtgtttgttgaggaggcagtgcagctttgtgggctttaaaatcattactgtctgccccagggcctcttgtcttcatatttttgtgacttagttaccatctatgcactgctgattccctgtccagaactcattctagtactcctgaccctcctatcaatctgcctacaagactcttctactttagtattccatagacgaaaaatatttatttgacatctactatgtaccaagtagcgtcccaatctgaacttataatcttcattctccacaaaagaaaactggatgaaatcttgagcctacaccaaggttttct

SEQ ID NO: 793848 - DNA, 520 bp, Homo sapiens
aaaacttgacataagaacttctgattttggaggaaaccttggtttagaggaatgaagatcaaaaccttaaagccatttaaatgttttattgcactaaattactagttgcagctccctctctaaaaactgaaattttttaacactatcaagaaccatattgaaaaatgttacttgcccaagggaccacaaataaatacatgcttaaatgaaactaaagaaatttaattaagtgtatgaacagttatactaaatgatttctccaggaagccaatgggaaattatacctaacaagtagctacagaataaggtctgttgttgagaggttattaacctaatcacataatcaaatttcaccaccaaccgtagccatctgattygccatgtcaaaataaaaccattgttaacccttcttaatgaaatcagaatggggaggaggggggtggctggttttagaacaatgtagttctttaaaagcaaggcttacaaattttattttcttctcctgacaccaaaaacaata

SEQ ID NO: 793849 - DNA, 643 bp, Homo sapiens
gaagccttccctagcaagcaacatttgagccagggcttaaagaatgaggtagaatttgcctgttggaggatgagggctggatatggacatccaaacagaaaggacgtcttgaaaacgtgcaggaagttacaaaaatttacgctgtgtttggggaacattctaggtagggccgttgtggcagtgccctgtgtattggagtaaagacaagacaagaagtgaagcaggttgtgaagggaaacactcatttcctagaagcagaaagcaacagtatctcatttctttggtcacaagcaacagaaatggattttggccctttgagagaatggagactttgtaggaactatytggggcaccaacaggagggaagggaagaccgtcttcctcaggcactatcccactgtgtttgctacctttgctttgattcaaggtctcaggagacagaaactctgattgcctgaactcaggtgaaatgctcacatcttggctgtactaggtggtgaaaagaatgtctggtgggcagagcctccacctttcaacttctaaggtggacagtcagcacactagagggcaccaagactacaccaaatcaggaaaggtaattccccagaaggaaatcagggagcagctacttgatggacagacc

SEQ ID NO: 793850 - DNA, 613 bp, Homo sapiens
tgtacatatgtacatatatgcatacatatatgtgtacatatatgcatacatatatgtgtacatatgtatacatgtatgcatacatatatgtacatatatatgtatacatatatgtatatgtgtacatactatatgtgtgtgtatatatatatgtacaagtcaagtcatcaaaatccttaatagcatttatctctgggtaatgagaatttggatgacrtttattttccagttttttttttctgtaatttccaaggtctccacaatgactatctattaccactgtaatcagaaagcaatgttaacaaaaggaatcctatgggaggaaaataaagcctccttcaatagaaatacatgctgaagtcataagcccaggttctctagggcagttctgatttgaaatacttgattccattgaccccaaagtactgtactctcttgtcacctgtgttgctgcagtctaagtgagaagttcctttgtaaatttgattcacctagaaaagcatccaaggggtcctggcacagtcccagcttgcataagctgttcccatatgagcaactatctgcctgtagcagctcccactgcactaaggaagattgcaataatgctctacca

SEQ ID NO: 793851 - DNA, 610 bp, Homo sapiens
tttgaagaacatagtacacatttccataataaagcatttccccttttgtgcctgtgataagctgttcagtggtgtcaaatattttttgactttgataaaaatgtattgagggtcaagatcatctcttaatagttcacacttctatttaataacctgcctcratgtcaaaagacaaccccattgtctcgcagttccaggaagtattatgcgctgccgtcccatctccagatgtgcatcagacatgtccatgttattccatattcggtccattccagagaaaggctaaaggagacaaagggtacggatcttgttaggtgcagcctctgacactatcactatcaattgtcttttgccgaggctgatcatcacctcaattatctagtgtccagcctacctgataggtttttgcaaactataactcttctgtcgatgagcatggaataatgacaacgaggagcaaatggacagaatacaaaagagataaatccagaagtaaaatacgtaagtctatctccacatatagacatacaatatgctttcagtatcaagtgattcaacataatgtatagctagtggtttttttgcaggcttattgagattatgctaatac

SEQ ID NO: 793852 - DNA, 566 bp, Homo sapiens
cccattgtctcgcagttccaggaagtattatgcgctgccgtcccatctccagatgtgcatcagacatgtccatgttattccatattcggtccattccagagaaaggctaaaggagacaaagggtacggatcttgttaggtgcagcctctgacactatcactatcaattgtcttttgccgaggctgatcatcacctcaattatctagtgtccagcctacctgataggtttttgcaaactataactcttctgtcgatgagcatggaataatgacaacsaggagcaaatggacagaatacaaaagagataaatccagaagtaaaatacgtaagtctatctccacatatagacatacaatatgctttcagtatcaagtgattcaacataatgtatagctagtggtttttttgcaggcttattgagattatgctaatacgctaagtaaattagatagagctgttggtttaaatgtttttcccattttatcatttcaatggaaacatacccaatatttaaaaatattgcaatatgtcaaatgaacataaatatatagaatttcccctcaaat

SEQ ID NO: 793853 - DNA, 668 bp, Homo sapiens
cctctaagcacttcctttgctacatcccacaaactgaaaaattgtatttccattttaatttagctcaaaatatttttaaattttacttgagatgtcttctttgacccatgtattatttacaaatattttgtttactctcaaagtattttggaattttctagctatttttctgttattgatttctagttttattctattgtggactaagaactgatattttgtgatttcaattattttaaatttgttaagatatgttttatggccctgagtgtagtctatgtttgtaaatcttaccttcagcttgaaaaaaatgtacaatatgctgtttttggataaaatagcttatagttgtcaactatatccagtttatgactggtgctgctagrttcaattgcgtctttactgattatctgtctgatgaagctgtctatttctgataaagggatgttgaaatctgcagctataatagtgaattcatctatttctccttgcatttatttcaatcattctttgcttcatatatcttgatgttctgttgttagttgcatacacattaaagactgatatatcttctagagtgttgatctatgtatcattatgtactgtgttctttatccctgataactttccttgttctgaagtacagcctgcctgaaattaatatagct

SEQ ID NO: 793854 - DNA, 625 bp, Homo sapiens
attatctgtctgatgaagctgtctatttctgataaagggatgttgaaatctgcagctataatagtgaattcatctatttctccttgcatttatttcaatcattctttgcttcatatatcttgatgttctgttgttagttgcatacacattaaagactgatatatcttctagagtgttgatctatgtatcattatgtactgtgttctttatccctgataactttccttgttctgaagtacagcctgcctgaaattaatatagctaatcctgctttcttttggttagtgttagcatgtatatctttttccattccattgtttttcatctataaatggcattatatttaaaatagatgccttgtaaacaacatattattaggttttggttttgattcmgtctgataatctctgtcttttagcagttgtatttgggccaacaacatcaaaagcaattattgttgtagattagtatctaccatatgttattcttttacatttgttgtccttgttctttgttcctaattttggcttccacactttttctgccttttgttgttttaatggtatattttatataattccattttctctcctttcttaagatattaattcttttctttttcttt

SEQ ID NO: 793855 - DNA, 645 bp, Homo sapiens
cttggggtaagtctccaggacattggactgggcaaagatttctttaataataccacacaaggacacgcaactaaagcaaaaccggacaaatagaataacatcaagtgaaaaagcttctgcaaagcaaaggacacaatcaagaaagtgaagaaacaacccacagaatgggagaaaatatttgaaaattacccatctgacaagggacaaaaaaccagaatatataaggagctcaaacaactctatgggaaaaatatctaataatctgatttaaaactggacagaacatcttaaccggtatttctcagaagaagagatacaaatggcaaacagacatatgaaaaggtgcttaacataattgaccatcagcgaaatgcaaatcaaaactgcaataagatatcatcacattccmgttaaactggcatttatacaaaattcaagcaataacaaatgttggagaggatgtagagaaaaggaaattcttgtatactgttggtgggaatgtaaattagtacaaccactatgaagaatagtttagaggttcctcacaagactaaaaatagacctaccacatgattcagtaattccactactaggcatataaccccccaaaaaggaaaacggtatatcaaagagatgtctgcactc

SEQ ID NO: 793856 - DNA, 642 bp, Homo sapiens
gactactcctacatgatttgtgtatcttatatttttacctctaagcataaatttccaggaaagctatgtatgaggagacaagccctttttgcatgctaatttttaatatatcatttgaaaagccccatttgtgtcattgggaaaaaattgctatttgactttaataattgacattttctaacaggaaagacaaagtcctattcataaaaccattatattttgtaatagtttaataaaatacatgcatacacaaaatattttagaaacactatgcgatcaagttctaagaggttaagtttattttcatatgctttttatgaatctactaatttaakgtatacttggaattgttgaaaataaccctgtgaatctacaaattatgttagttaaactaggtcaggcaatacaattccatttggacataaatagacataacagaaattatgctgaagtcacttaaatggtattctctttatctttagtgcagcagggaattcaatacaagtagagatgattgacatttttttctaacctctctgtcctttcctcatgaaaatgcttagctgctcttgggaagcacagctgttggacaaagcacagggtccaaggctgtgcctttgggagggctaactgagaaattta

SEQ ID NO: 793857 - DNA, 642 bp, Homo sapiens
gactactcctacatgatttgtgtatcttatatttttacctctaagcataaatttccaggaaagctatgtatgaggagacaagccctttttgcatgctaatttttaatatatcatttgaaaagccccatttgtgtcattgggaaaaaattgctatttgactttaataattgacattttctaacaggaaagacaaagtcctattcataaaaccattatattttgtaatagtttaataaaatacatgcatacacaaaatattttagaaacactatgcgatcaagttctaagaggttaagtttattttcatatgctttttatgaatctactaatttaaggtatacttggaattsttgaaaataaccctgtgaatctacaaattatgttagttaaactaggtcaggcaatacaattccatttggacataaatagacataacagaaattatgctgaagtcacttaaatggtattctctttatctttagtgcagcagggaattcaatacaagtagagatgattgacatttttttctaacctctctgtcctttcctcatgaaaatgcttagctgctcttgggaagcacagctgttggacaaagcacagggtccaaggctgtgcctttgggagggctaactgagaaattta

SEQ ID NO: 793858 - DNA, 600 bp, Homo sapiens
agtgtgggacattgcagttgtctggagagagggtaggcttgggagccaggagctctctgggttttcattcctccttctgcagagggaggattctgaaattgccctggctgcctgtcaagttagcttggggacccataagatgagatatcccctctttgggctgacttccttaccatccagggaagtctcatgacacctgtcctgtccgcctcacgtggctttcctcatgtcgagcgtgctcgtcattctgtcattctcacaggctccttgatgcctaaagcccaatgtctggcattcgagccctccatgacaggttcccagctttcctgcaaggccatgctcctcacggcctatgactgcctcctgttctgcgcctgtcaggtyttccacctcacccctcttctcagcctatccaagcccattcagtcttcaggcgagctctagcactatctcctccaggaagtctccaggattgctccaatcctcagggccatccatgggccatcttgcagtctttaaggtgtgacttcaatttctcatttgtagacacagaatggctgaccactaacaagctgtttgagggcaaggcctgagctcatg

SEQ ID NO: 793859 - DNA, 628 bp, Homo sapiens
tgagtagtatggacattgtcaccataattcttctgatccatgaacatgggatcttttcatttatatcttcttcaatttctttcattaatgatttatagttttcattgtagagttttttttttttgagacagagtctcactgtgtagcccaggctggagtgcagtggcatgatcttggctcactgcaacctctgcctcctgggttcaagtgattcttctccctcagtcccccgagtagctgggattacaggtgtgtgccaccatgcctggctaatttttgtatttttagtagagacagggcttcaccattgttggcaaggctcgtctcgaactcctgaccttgggtgatccgcccaccttggcctcccaaaatgctgggattacagacgtgagccatcgcatctggtctycactgtagagatctttcatctcctttatttattttttaagagacagtgtttccctctgttgcccaggttggagcgcagtggtctgatcatagctcactgtggctatgaattcctgggctcaaatgatactcctgcctcagcctcccaagtagctgagactacaggcatgtgccaccacacctggcagattttttatttaaaaaaattaaaaaaaatttt

SEQ ID NO: 793860 - DNA, 626 bp, Homo sapiens
tgcttatctgtattttgcttgtttgttcatatttctgtggagtctgcttccaccccaggcctctgtttgttttatgtaaatggtaacattacatcctcactcccagggccagcaccatgccttgtaagatacatgcactcaataaatacttgttggatggaaagatggatggatggatggatgggtggtggatgaatgaatagtaaaaatmtttccaaataaggtactaagatcttccaaagaacagtgctattttatgttatttctgttattttctattatttctgcctgttacaggttgagcatccctgatccaaaaatctgaaatccaaaataatccaaaatctgaaacgttttgagtgccaacatgacattcaaaggaaatgctcattggaggattttggaatagggatgttcaaccaacacaatattctgcaaatattccaaaatctgaaaaaatccaaactgaaacatttctggtcccaagcattttggatcggagatacttaacctttatttctatttcagcactgtgtctcctcttttcaggactgcctaaaggagagcctttgattgggaaaaaaaaatgtaagtaaatatgagaaatagactcaaagaggacatca

SEQ ID NO: 793861 - DNA, 573 bp, Homo sapiens
gtggatcacctgaggtcaggagttcaagaccagcctggccaacatggagaaaccccatctctactaaaaaaatacaaaaattagcagggtgtggtggctggcacctgtaatcccagctacttgggaggctgaagcaggagaatcgcttgaacccggaaagcagaggttgcagtgagccgagattgcaccattgcactccagcccaggcaacaagagcaaaactctgtcaaaaaaaaaaaaaaaagaaaagaaatggctttctttttgtggrcataggtccctctcatttttccttcttaggaatattgacagtgtttgtgtgtctgaagcaaataggtacccactctctcaggtagatcagtgtaaacattgtttcaaaccaagatgttctgaaattttcaggaatgggtacatgtgctattcaagtaccctttgggaaaatttgaaatgaatactttttattcattttaggatgacactcttattcttatatgtatttttcctgtaaaagcttttaattattcttaaatttttatctgaaaaccttgcttcaaggtttgcttccctataaat

SEQ ID NO: 793862 - DNA, 573 bp, Homo sapiens
gtggatcacctgaggtcaggagttcaagaccagcctggccaacatggagaaaccccatctctactaaaaaaatacaaaaattagcagggtgtggtggctggcacctgtaatcccagctacttgggaggctgaagcaggagaatcgcttgaacccggaaagcagaggttgcagtgagccgagattgcaccattgcactccagcccaggcaacaagagcaaaactctgtcaaaaaaaaaaaaaaaagaaaagaaatggctttctttttgtgggcataggtccctctcatttttccttcttaggaatattgacagtgwttgtgtgtctgaagcaaataggtacccactctctcaggtagatcagtgtaaacattgtttcaaaccaagatgttctgaaattttcaggaatgggtacatgtgctattcaagtaccctttgggaaaatttgaaatgaatactttttattcattttaggatgacactcttattcttatatgtatttttcctgtaaaagcttttaattattcttaaatttttatctgaaaaccttgcttcaaggtttgcttccctataaat

SEQ ID NO: 793863 - DNA, 573 bp, Homo sapiens
gtggatcacctgaggtcaggagttcaagaccagcctggccaacatggagaaaccccatctctactaaaaaaatacaaaaattagcagggtgtggtggctggcacctgtaatcccagctacttgggaggctgaagcaggagaatcgcttgaacccggaaagcagaggttgcagtgagccgagattgcaccattgcactccagcccaggcaacaagagcaaaactctgtcaaaaaaaaaaaaaaaagaaaagaaatggctttctttttgtgggcataggtccctctcatttttccttcttaggaatattgacagtgtttgtgtgtctgaagcaaataggtacccactctctcaggtagatcagtgtaaacattgtttcaaaccaagatgttctgaaattttcaggaatgggtayatgtgctattcaagtaccctttgggaaaatttgaaatgaatactttttattcattttaggatgacactcttattcttatatgtatttttcctgtaaaagcttttaattattcttaaatttttatctgaaaaccttgcttcaaggtttgcttccctataaat

SEQ ID NO: 793864 - DNA, 529 bp, Homo sapiens
gtttttaatacaatttatttacttgtgagtttacataacttaatttttaataatgcctgtgttccataaccagctcacaaaattcatgaaatattaacaattggttcttgtgagctggtgtgagccatctctagtacattgctggctgaaatgtcagggcaggctttctggagaagatggactgaaaactgggctttgaaggatgaagaggagtttgataaggcttgatagaagtcactctaagcaaaataaayacatggcaaatgagtggccagaaaagcagaaggcatgaataacaaggatgcagtttactcctatttctgtaatattttaaggttaataaagtactttttaaacaaacaaaaaagggatggagagaccaagcatgcattaaatacacttgttaggcatttaaaatacataaacaaagcatcaaatattcatgatatgctaaatatacacatgatatgaggcactcactattcatgaggtctaaaaatggtccctttgctcacacctcaactctggt

SEQ ID NO: 793865 - DNA, 567 bp, Homo sapiens
aggtaaaataggatgttgttggagtggggcctaggcattttctggggctttccacagtccgcatgtggctgtctgcctcagctgcgtgagttcagggaacttgtcagtcctgtccactcttgtatctgtagtacccactagaatgtctggcatataagagacacttactatgtacctgaacctagatcacagtgcaacaaagaacctgcatgatcttagaccaaaagagcgcgatatggcttagtgagaaataaagctaatacccaatctgttgatgggggcctctgctgccttctagaagaatggcataattcctctctgctgcagactgttgcttctttctttcattcttgaggataaaagtatccttattggttttgtgagccagktggaggagggaggagaggcctgtgaacatagtctgcctggggaagggtgagatcagaaagcttggaagcaggcttggtgcggtggctgatgcctgtaatcccaacactttgggaggccaagactggagaatggcttgagcccaggagtttgagtttagttgtagttagctgtggatcg

SEQ ID NO: 793866 - DNA, 607 bp, Homo sapiens
atgctgtcttcaagtggtttgaatgatcaagaagacttttcctgccacaagggtgggttgcaatgaggagagaagcacaagttgcttcaatgcctccacctttgttcttgcagcactgttaacagaaagctcaccagctgtaatgagcggatgcctgttgagttccagtgtccccagggaggggtctaccaccaaagaatggtcgcctaggaagcgtactatccggctgtgacatcccaattrcagtgtaatgccatcttgagtggctggagagtttgaaagtctgtagcaggaaccctgaaagctgatgcttatgttgataaccacagtgctggaataaaagcatgttgatgcaaatcttttttcagttttggtcacacaaggtggcagtgactggtgctaattgaaaaggaaaacgataattcaatgttgtaacggttcacacctaccccatgctttctcatccagaagacattttcaaccagacacattttccacaaagggaaataatctaaggtcatttcctgtggggtatggggtcattctgtgtctctgaagaggccaggcaatacttacacggtgacagcaccttctgcagaaggaccag

SEQ ID NO: 793867 - DNA, 538 bp, Homo sapiens
aaggcaagatttgggtggggacacagagccaaaccataccatgggccatctgcattttccgcacgtttttgttgaggtgacagctgtacttcaacctaaaagctgggtatctgctaaaaccaaggtctacagatgggaacataaagctattttwgaataagagttcatttaggtgagaggactttagttcaggtaagtacaaaaaacgtatgaaatttatacatttttgagatactcctctcttgtcactctcagtaagttttagaacgtttttagttttacttccagggcaataaatgtaaggagtccccttaaaactccagagagggtagggagtaagagtaaaacagaggagtaagtagttttatactttgagtacatgaaggagatgcaccccgtcacaccccaactgtacacacagactccaaatcgcaatagaaaatgtgagctgctcaagtgatttaatcaattgtaaaacaaatctctttgggtccaacagcatttgcttaattctttaatcacatcacgttatgctgaa

SEQ ID NO: 793868 - DNA, 604 bp, Homo sapiens
tcaaataatgaaaccattcatattgccacataagaaataaaagaattggccctagactagtgaattataattgatttacatgaaaatcattttactaaggttgacttctgtgaagaatatatcttatctaacattctaatgtgttgcttaattagctgtttgtgccacagcaatatatcagaatatattagtacatttatagagagagtttaagtacctcattttaaaaaacagaggggaaattgttttgaagggtaatttttmaaactttagttgtaaatattccctattggattatattttggtttaaattaatgatgttctcaataaataagaaacaagatgtattacttaggaaaacagttatgaaacatgagctattttttagaatttggacgtgaatttcagtttttttcaatttaagttgaaatgttacaaaaaattttaatgcaggattattaaaataaatgttaccggataaatagaattgccttctaaagtagagatttttctatggacagtattttcagagtaggtacactcaaaacatatgtgcagcataatcatattttttaagttatcggttgtgaatagagtgaatttt

SEQ ID NO: 793869 - DNA, 604 bp, Homo sapiens
tcaaataatgaaaccattcatattgccacataagaaataaaagaattggccctagactagtgaattataattgatttacatgaaaatcattttactaaggttgacttctgtgaagaatatatcttatctaacattctaatgtgttgcttaattagctgtttgtgccacagcaatatatcagaatatattagtacatttatagagagagtttaagtacctcattttaaaaaacagaggggaaattgttttgaagggtaatttttaaaactttagttgtaaatattccctattggattatattttggtttaaattaatgatgttctcaataaataagaaacaagatgtattacttaggaaaacagttatgaaacatgagctattttttagaatttggacgtgaatttcagtttttttcaatttaagttgaaatgttacaaaaaattttaatrcaggattattaaaataaatgttaccggataaatagaattgccttctaaagtagagatttttctatggacagtattttcagagtaggtacactcaaaacatatgtgcagcataatcatattttttaagttatcggttgtgaatagagtgaatttt

SEQ ID NO: 793870 - DNA, 634 bp, Homo sapiens
gtcgtaatcatcttatgttctcttctttgaggtagactaaaagagcatcattatatttgaagaaaccaagattgaatgttcattggcttggcagtttttaacacagtgcagtttggaacatgtcccagttcttgtggatcacatttatggaaactcttaaaggactttaatgcccctccctaatcctttttctactgtaaaacctcattaatatatcctcaatgtataatttattagtaataaggatttgggtcattcgagatttaaaactttgagataagttggatattcggaataatgtaatgatttgtaatataggtcttaaacatttaaatagcttaactcattgtttaagactagtcatcagctatatttgartacatattccccacagtaaaactattttcaataatattactatgcatctttgtaagtgccttataatttgggcttttaaaaattgcctgcgctttcttcccttaatttagcccatttactcccaaaataaagaggctgtgtttctttttttttttttaaggcattgtttatctgtaacgtttgtatctaactttactgtatctaattacactttcagtattatacaaaaatttttttgtttttcttgtccaaactt

SEQ ID NO: 793871 - DNA, 595 bp, Homo sapiens
tgggcttttaaaaattgcctgcgctttcttcccttaatttagcccatttactcccaaaataaagaggctgtgtttctttttttttttttaaggcattgtttatctgtaacgtttgtatctaactttactgtatctaattacactttcagtattatacaaaaatttttttgtttttcttgtccaaacttaagatcggttgtaattttattggccaacatctacttcattaaatacattgactttgtttatgtagaaatatttagccagaargagttgaggatgcagtggtgagatgtggattttgttactgtatgatgtgaataggtaccttctctcagcctcagtttcctcttgatcttgtgaggctgatgaaaacaggaaaatcacctcacacagtggtacttagttgccactcaataaatattagaccttccctgaatctctgtgttcctcaccaaaaatatattggacaaatgattggtgaatatgaagcactttataaacctggataatactatataaatgctgtttgtatggttgagtattagataatcatattggattctctaaaactgaaaacttgacctagggatag

SEQ ID NO: 793872 - DNA, 590 bp, Homo sapiens
atgataaaatagaaaagtaaagtttcccataattccacacctagattatacttttaaaaaagatttatagctatcctagtggatgtgaagtggttatctccatgtggctttgatttgcatttcctaatgactaatggtgttgaacaacttttcatatgcttactggacatttttatatcttctgtggagaagtgtctgttcaaatcctttgcctatctttacattgggtcatttgcttttaatcgtttagttgtaaaagttattcataaattttggagactagtcccttatcagatatataatttgcaaatattttcttctgtggggtcgctttccactttctagatagtgtccctttaggtatgaaatattttaatattgaacaaatcgaattattgattttttctcttgtacttgtgcttttggtgtcataactaraaaacttttgcctaaaataaaggccataaagatttacacctgttttcttctgagttttatggttttaacacttacattgaggtttttatcctttttgaattacttttcatatttaatgtgaagtaaggatccatattaactcttttgcattt

SEQ ID NO: 793873 - DNA, 634 bp, Homo sapiens
ttttcataagcatttactgagatgacaatgacttggagatggtactctatggtaaccgtaatataaaactagaaatatgtgacagtcttatttctgctataagttataaatataaaacaaaaccaagacaaatctcattgatatcctagaagacaagtgattcagaaataaggggaatgaacagttcctttagaggyttaatctgtggcctctatcaagtactttaataaaaataacatatctgttgtagtgggtcttattccctaaaagtcaactgaactttaccctaaatccatcaccaactacagttttaaacatccacatgcattggggatgtgctgggctctgagcaaaacatgtaaaagatacagttcctgttctccctccgaggagagcaattctcctgcccttacaaccacctacaattgtttgttaaaaatgaagattcccgcgtctaatctccaaaaatttcaattcagtgggggcacatccatgtacaatgaactgtataacttctaggttgttacatctcatcattcacattagcaactctaagcccttaagagaattctattcattttccttgcatattctgaagcagacagggagcacataatgttccacttttacaggg

SEQ ID NO: 793874 - DNA, 592 bp, Homo sapiens
aacaattcctcagctattctttaagctttattctctctaatgtactttagaatcatttttgaagtgaaaaaataaatcagtggtttttaatatattcacagaattgtgcaaccattgctcttatctaatttctaatgttttcaccacccccacaaaaccccattcctattagaagttacatcccattccctcctccccagcctctggcacccactaacctgctttgcctattctgaacatgttatataaatgaaatcatacaatatgtggccttgaatctgactgctttcaatcagcatgttttcaaggttcatccacgttatagcatgtatcagtatttccttccttttttatggccaatgttctattgcatggatacgccacattttgttttccattcctcaggtgaggtattattttttggctattataaataatatggctattaatgttctmatacaagatttggtatggaatgtgttttcacttctcttgggtatatacctaggagcagaattacagggtcatatatggtaatgcatgtttttctccaagaatatgatatatattaactatagttttattaatatat

SEQ ID NO: 793875 - DNA, 534 bp, Homo sapiens
ttcctttctttccacctcaaaattcctatgcttctgtctcaaaagaatccttcctttgctttcatctagtatcctcccatcttcttgaagacttaattccctcaattgagcctctcccttacattttcaatctctttttccctcaatggattgttctcctcagcttataaagcaggctcaagtcttcctatactaaaaataccactttccctctrctacaccattgttgtgatatatcatactctctctccttctcttttatctcccaacttattgaaaatgaagtctgttttcactgctttccatttcccttcccccacgcctcccttcaacccttgcccctggctgccacttccacctaccacaaagacaatcaaggaaatccaagagtcaaatccaatggctttgccttggttgcaccgtcacccatggggtgtgctgtgtgagtgacaggggctctcctcaccccttccagcttccatgacactgtaccacttcacttccatcatttttctccaattgccccttgtttaa

SEQ ID NO: 793876 - DNA, 606 bp, Homo sapiens
ttgtagacatattcaccaggtagatagaaactttccctacaaggacagaaaaagcactggaagtgtgcaatttcttacttcaatcattccaaggtttggattaccaaaaagtttgcaaagtaataacaaaccttcattcacagctagggtgacccagccttaggcttcctcagcctcaggcattacctatcatcttcactcctcatggaggcctcaatcctcatataaagtagaaaaagccaaccctgtttcaaaaaggatattaacgaagctccgtcaggagaccttggaggcctgtgtttctctcctacctatagttctcttgcacataagcatggctccaaagggaacattaaaacttagctcatttgaaacgatgtatgrgaggccctttttaacttcagacctcctgttttatgaggagacacatagaatactcacccatattatcaactcaggtcaggttcaaaaggcccttcaagattatggaaataaagtattgttattctccacaaaggaaaagaatagcatccctgttcaaccagaagacttagtcttactaaaaacttggaaagaaggatcctctgaggatcaattacaactgaa

SEQ ID NO: 793877 - DNA, 613 bp, Homo sapiens
gctgtgtatgctctaaatgaggatccaatatatggtactgtttctctcaaagccaggattcatgagtccaggaatcaaggggtagaagtggaaacggaactactcaccatcacctctagtgacccactagcaaaatttttgcttcctgttcccatgacattacattctgctggcctagaggtcttagttccagaaggaggaatgctgccaccaggagacacaacaatgattccattaaacaaagtagatagcaacctggccacttcgggctcctcctacctttaagtcaacaggstaacaaggaagttacagtgttggctggggggattgacccagacaatcaagatgaaatcggtttactactccacaatggaggtaaggaagagtatgcatggaatacaggagatcccttatggcatctcttggtattatcatgccctgtgattaaggtcaatgggaaaccacagcaacccaattcaggcaggactacagatggtccagacccttcaggaatgaagatttgggttactccatcaggtaaaaaaccatgacctgctgaggtgcttgctgaaggcaaagggaatacagaatgggtagtagaagaagctagtca

SEQ ID NO: 793878 - DNA, 613 bp, Homo sapiens
gctgtgtatgctctaaatgaggatccaatatatggtactgtttctctcaaagccaggattcatgagtccaggaatcaaggggtagaagtggaaacggaactactcaccatcacctctagtgacccactagcaaaatttttgcttcctgttcccatgacattacattctgctggcctagaggtcttagttccagaaggaggaatgctgccaccaggagacacaacaatgattccattaaacaaagtagatagcaacctggccacttcgggctcctcctacctttaagtcaacagggtaacaaggaagttacagtgttggctggggggattgacccagacaatcaagatgaaatcggtttactactccacaatggaggtaaggaagagtatgcatggaatacaggagatcccttatggcatctcttggtattatcatgccctgtgattaargtcaatgggaaaccacagcaacccaattcaggcaggactacagatggtccagacccttcaggaatgaagatttgggttactccatcaggtaaaaaaccatgacctgctgaggtgcttgctgaaggcaaagggaatacagaatgggtagtagaagaagctagtca

SEQ ID NO: 793879 - DNA, 571 bp, Homo sapiens
ccaattgcaaaatcgtggaaccaatccaaatgcccatcaatcaataagtggataaagaaaccgtggtgtgtgtgtgtgtgtatatatatatatgcacaatggagtactactcaactataaaaaggaatgaattaacagcatttgcagtgacctggatgagattggagactattagtctaagtgaagtaactcaggaatgaaaaaaacaaacatcgtatgtacactgatgtgtgggagctaagctatgaggactcaaaggcatargaatgatacagtggactttggggactcagggagaagcatgggaggggcactagggatagtaaacaacaaatatggtacagtgtattgctcaggtgatgagtacaccaaaatttcacaaatcgccactgaagaacttatgttaccaaaaaccacttataccccaataatttatggagaaaaataaaatttaaaattattttttaaatttttcgtgggtacacatagtagttatgtatgtttataaggtatatgagatgttttgatacaaacatgcagtgtgaagtaagcacatcatggagaatggggt

SEQ ID NO: 793880 - DNA, 571 bp, Homo sapiens
ccaattgcaaaatcgtggaaccaatccaaatgcccatcaatcaataagtggataaagaaaccgtggtgtgtgtgtgtgtgtatatatatatatgcacaatggagtactactcaactataaaaaggaatgaattaacagcatttgcagtgacctggatgagattggagactattagtctaagtgaagtaactcaggaatgaaaaaaacaaacatcgtatgtacactgatgtgtgggagctaagctatgaggactcaaaggcataggaatgatacagtggactttggggactcagggagaagcatgggaggggcactagggatagwaaacaacaaatatggtacagtgtattgctcaggtgatgagtacaccaaaatttcacaaatcgccactgaagaacttatgttaccaaaaaccacttataccccaataatttatggagaaaaataaaatttaaaattattttttaaatttttcgtgggtacacatagtagttatgtatgtttataaggtatatgagatgttttgatacaaacatgcagtgtgaagtaagcacatcatggagaatggggt

SEQ ID NO: 793881 - DNA, 600 bp, Homo sapiens
ttggaatctatggatgtggaactaatggatgtagagggccaactgtatacttgaattattttaaaaattaaaaattgaaaaaaacctcactgaatgtgattttaaacatgtttcaaacatttcaaaatacacatataatatccaggagagctaagtctataaccttaccaccctaaattttatattttccagactttaaaacgattctttcacatttatttttccagtgaaatttagaatcattttgttaagccaaaaaaagttctattaagattttgattagatctacatggaatttatgggctaatttggggaaggttgacatcttttcaatactgaatttttctatcccaaataagagcccttatgtccttccatagagttcttcagaaatttaaaaattgagatataattcaaataccattaaattcacccttttaaagtgtaggattggatsgattttaataagtctgaagagttgtatggtcatcatcattatcaaattagtactttaatttctacaaagaaacccccacccattagcaatcactcctcattcctgcttttccaagcccctgtcaaatactaactgaccttctg

SEQ ID NO: 793882 - DNA, 577 bp, Homo sapiens
gtgatagttctactggagcaaattaacacatttcctggcatttttagatgaaactattgacctggaaaatggattttgttcaattctaattctaatgcgtaattacaattattagcaaatttatttattttttatttttttattttttagactgagtattgctctgtcacccaggctggagtgcaatggcgccatcttagctcactgcaacctgcgtytcccgggttcaagtgattctcctttctcagcctcctgagtaactggtggtatctgccaccatgcccggctaattttttttgtgtgtttttagtagaggtggggtttccccatgttggccaggctggatttgaactcctgacctcaagtgatccacctgccttagcctcccaatggtagggagaatagtatcccttcactgccttgactttgtgctatgctgactctcctgatatctattatcttacagtctggcagagcttggggatcttgatatatcacagaacatcatgctggtttgttatatacgtgaccttatgctaatttgatttggtaagcaggatgtaaaaagtggcctaca

SEQ ID NO: 793883 - DNA, 610 bp, Homo sapiens
atgtttcagaaattcgtttactggaatgagaaaattccccttacccatgagtcataagaatcttcttgccattggagttttattttaataaatccagtgggttttttttttttttttttttgagatggagtctcactctgtcacccaggctggagtgcagtggcatgatctcggctcactgcaccctccacctactgggttcaagcaattctcccagcctcgcctcttgagtagctgggattacaggtgcccaccaccacacctggctaatttgtgtgtgtgtgtgtgtgtgtgtgtgtgtgtgtgkattttagtagagaatgggtttcaccatgttggtcaggctggtcttgaactcctgacctcaggtgatccacccaccttggcctcccaaagtgctgggatctgcacctggccaggcaaattattaggttcgtgatgtccagattctcacaatctgcctacacgtgttgcttaccttttatttgggattctccatcacttgggtgaatagacctcagataaggcagatggccaggtcattctctccttctaaatggtaatgtcatgagatacctgatgaccagatggtggctaggtgaggagctgg

SEQ ID NO: 793884 - DNA, 381 bp, Homo sapiens
cccagaggtccacagtgagagtggcctgtccctccatcccttcacttatcccttccccaggaggcatccaggtctgggaactagccctgtcatgcaagtatcctgtgcagggtttccagcttcctccctcttcagccttgttgtctgcatcacctctgtaatgactctcagcattttctctctgaagatgggctcaaaatacgttggtktactcaatattttggtgtctctcagtgggagcagtgcttcctggctgtgtctagttggccatcttgttatggtaacaatttcttttggagattttttggagtccacttgtggcagtcaaaagataactagacagtggtggcagatgacaactgggtccacagattgcacaac

SEQ ID NO: 793885 - DNA, 554 bp, Homo sapiens
ttaaatgttctgcaaataaaaattcaagataattaaaatccagaacaaaggagaaaatatttacataaaacacacttctacagtattttaatttattctgaatcatcattgaatagaatattttaatttgttcaagtaaatattttactgtgttcatgataggggcttagtatctgcaagtgatgggccttgttaatcttcagaataagtttaaatgacagctcagcagggcagtgtctcccatgcagcagcccctgtggagcagcaggaaggaaggctccggaggaagcygcaggaagctgatggctcctgtgagaaactgcctggctgatgctgtcacggtgttgaccctctccctaagagccctgagatcacacttgccctttttacatcacccaacaggactgacttaacatccagggaggacaaataaaggggaagaataaaataatccaacaaaaccaggacagaatgcactcatgtcattaatggagctacattcttactttgaatgaattacctacattatgttaccttcctaaagacttactgaa

SEQ ID NO: 793886 - DNA, 608 bp, Homo sapiens
gcagatattgaataagctattgcaatgaaaaaaataaaagtatgccctagtgagtaaaaaatgtaagctgatgaaatataatacaattaatatgaaaactaaatatcaagatggaaggtttgctagttcactgtggayaatagatcatgtacatttttctagtaaatagaaatacttggcttccattcactagaagtccaacatcatctctttaaatttaagttcgattaagcaatctattactaccaatatttaaagtagtaattcacaaagtgtatctgcttattaaagtcccatgattatctacatttaagagttaatgctgcatatcacaccccttggggacgccatacattaacatatttagttctgataggactgtttacttgtctcaatcctgattttccaaagtcatttaatcacaaaattatgtaggcaatgtcatatgatcaggaaaaaaaatgttctgtgaaccccaccctgcaaagggtgatctaaaaaatgtcagagattcgaaaatgtttcaactgtctttagaacaaagcaataatctcctgtggattgcaatacttcctttactgagaatttggaaagttttttgtagattt

SEQ ID NO: 793887 - DNA, 629 bp, Homo sapiens
tatatctctattgtcttttgctttatattttgtttatattttgacaatttgtgaaataagtacatcttttaatgctctttatatagttctaatgtaacaacatagctagacaccgttctcataaaaacaaggacaggacattcagaggtaacaataatgagcaaaggtaacatttcaatggaaactgagctaaatgagtaaaagcaatataaatgatatgtaaaggattacaaggttgataggatattgtgttcaagccctagataaatccaaccaactaatctttgagagagaagtatgtagtatggaagcatgtaactgtaattattttgagaaatgctaaacctcaaaataaaaagtttttttgcacttgtcataattgaaagtttgtttttcctctctttttggtaacattctatcacyctcgcctgcaaccaaaatgaccctcaccctggcagccagcactgggattccatcctcatcgagctccttgacacgcaggtcggcttcactgtgggcaagcacaatcatcatttgcagacaaaaggagatcccagttatttgatcttgattataagatgtgacaattatctctcaaatatgacagattttatgtcataaattgctgt

SEQ ID NO: 793888 - DNA, 638 bp, Homo sapiens
tcacattataaaagttggcttcctggttatttctacagtgcagcccataataccgatttccttaagagcaaaaaaaaaaatgccttatttctttcctcaaaaatgagaattggccttttaaaacttttcctcaaatgacaggactggtgctgtaaatgcttatgaagactggtccctttgcatgtacgggcttatcttcctgaagataygaagctgtggctagctgctttcttctgtttcctaacgaccacagaatgcacaaagtagaggtgcaagtggaagctgcaaagagctctacaacctctgtcaaggtgcttgtccttgcccaagctattactgttcttggtggagattattccccgctgatctaaaatatgctctaaggccaaggtgggcggatcacacgaggtcaggagttcgagaccagcctggccaatataatgaaaccacatttctgctaaaaaatacaaaaattagctgggtgtggtgatgcacacctgtaatcccagctactcgggaggttgaggcaggagaatcgcttgagcccaggaagtggaggttgcagtgaaccaagatcacaccaccgcacttcagcctgggtgacagagagagactccatctcaaaaaaaagtaataat

SEQ ID NO: 793889 - DNA, 638 bp, Homo sapiens
tcacattataaaagttggcttcctggttatttctacagtgcagcccataataccgatttccttaagagcaaaaaaaaaaatgccttatttctttcctcaaaaatgagaattggccttttaaaacttttcctcaaatgacaggactggtgctgtaaatgcttatgaagactggtccctttgcatgtacgggcttatcttcctgaagatatgaagctgtggctagctgctttcttctgtttcctaacgaccacagaaygcacaaagtagaggtgcaagtggaagctgcaaagagctctacaacctctgtcaaggtgcttgtccttgcccaagctattactgttcttggtggagattattccccgctgatctaaaatatgctctaaggccaaggtgggcggatcacacgaggtcaggagttcgagaccagcctggccaatataatgaaaccacatttctgctaaaaaatacaaaaattagctgggtgtggtgatgcacacctgtaatcccagctactcgggaggttgaggcaggagaatcgcttgagcccaggaagtggaggttgcagtgaaccaagatcacaccaccgcacttcagcctgggtgacagagagagactccatctcaaaaaaaagtaataat

SEQ ID NO: 793890 - DNA, 638 bp, Homo sapiens
tcacattataaaagttggcttcctggttatttctacagtgcagcccataataccgatttccttaagagcaaaaaaaaaaatgccttatttctttcctcaaaaatgagaattggccttttaaaacttttcctcaaatgacaggactggtgctgtaaatgcttatgaagactggtccctttgcatgtacgggcttatcttcctgaagatatgaagctgtggctagctgctttcttctgtttcctaacgaccacagaatgcacaaagtagaggtgcaagtggaagctgcaaagagctctacaacctctgtcaaggtgcttgtccttgcccaagctattactgttcttggtggagattattccccgctgatctaaaatatgctctaakgccaaggtgggcggatcacacgaggtcaggagttcgagaccagcctggccaatataatgaaaccacatttctgctaaaaaatacaaaaattagctgggtgtggtgatgcacacctgtaatcccagctactcgggaggttgaggcaggagaatcgcttgagcccaggaagtggaggttgcagtgaaccaagatcacaccaccgcacttcagcctgggtgacagagagagactccatctcaaaaaaaagtaataat

SEQ ID NO: 793891 - DNA, 638 bp, Homo sapiens
tcacattataaaagttggcttcctggttatttctacagtgcagcccataataccgatttccttaagagcaaaaaaaaaaatgccttatttctttcctcaaaaatgagaattggccttttaaaacttttcctcaaatgacaggactggtgctgtaaatgcttatgaagactggtccctttgcatgtacgggcttatcttcctgaagatatgaagctgtggctagctgctttcttctgtttcctaacgaccacagaatgcacaaagtagaggtgcaagtggaagctgcaaagagctctacaacctctgtcaaggtgcttgtccttgcccaagctattactgttcttggtggagattattccccgctgatctaaaatatgctctaaggccaaggtgggcggatcacacgaggtcaggagttcgagaccagcctggccaatataatgaaaccacatttctrctaaaaaatacaaaaattagctgggtgtggtgatgcacacctgtaatcccagctactcgggaggttgaggcaggagaatcgcttgagcccaggaagtggaggttgcagtgaaccaagatcacaccaccgcacttcagcctgggtgacagagagagactccatctcaaaaaaaagtaataat

SEQ ID NO: 793892 - DNA, 511 bp, Homo sapiens
cctgctgcctgcagctcagtgaacaggggtgcgttacatctcctttgttactgccacccgcagcttcgggagttcccacaaccaacaagaataaggtgtgtggacagcagagagtcagaaaggcagagaagaattttattgagcgacagaaaagctctcaacacaagaggggacctgaagtgggtagacttctgtgtgaaagggggcctgaaagccggcagccatctgtgtagctgagtataggatttttaagggctcagaatggaggagtgcatgctgattgggccgggggtggtcttggaaaaakcaccatttattggttaaaaggcatagaggatgttctcactccggttgtggactctacctagaactggcagttgggttttcaggggtcaggctgtctttggcttaaaggtcgggtttcaaaaacaaaaataatcactagtccctataaaatgctacagaagcagaaattctaattttccaccccagaccaagagaacatataggc

SEQ ID NO: 793893 - DNA, 583 bp, Homo sapiens
ctaaagtagagcttaaattagtgataattttcaatatcagttttgaggtatgatccatcaatgaataacattgaatcagagttcacaatgagagccagtctctcatcaatctgagtgaggtacagaaactcccctgacttataaccatcatgaggttcccttcttctggcagggggagaagagtggcagtttaaggaattgcatcagtgaatagtaaagygagagagagggagtaaaactctcataacaagttgatcagctggttgaaaagtattgcatgctctttgtcagtggttatgtctacactggccagggaatcatgatgtgaggtggggagcctagaaatagtttaaaagaagcaccaacaaatgttgcagtggaagctgttgccttaagacaagggctataagcctttgcagctgggtcaagggtaaggatatggaaaatgatgaatttttgatggtttccatgacattgagttaaaaacaaaaaagcttgtacaagttatccatgcacaattagacaaaatggcatattgtagtcaggggtgcctaattatgaaagagagtgcctaactaccaaa

SEQ ID NO: 793894 - DNA, 583 bp, Homo sapiens
ctaaagtagagcttaaattagtgataattttcaatatcagttttgaggtatgatccatcaatgaataacattgaatcagagttcacaatgagagccagtctctcatcaatctgagtgaggtacagaaactcccctgacttataaccatcatgaggttcccttcttctggcagggggagaagagtggcagtttaaggaattgcatcagtgaatagtaaagcgagagagagggagtaaaactctcataacaagttgatcagctggttgaaaagtattgcatgctctttgtcagtggttatgtctacactggccagggaatcatgatgtgaggtggggagcctagaaatagtttaaaagaagcaycaacaaatgttgcagtggaagctgttgccttaagacaagggctataagcctttgcagctgggtcaagggtaaggatatggaaaatgatgaatttttgatggtttccatgacattgagttaaaaacaaaaaagcttgtacaagttatccatgcacaattagacaaaatggcatattgtagtcaggggtgcctaattatgaaagagagtgcctaactaccaaa

SEQ ID NO: 793895 - DNA, 583 bp, Homo sapiens
ctaaagtagagcttaaattagtgataattttcaatatcagttttgaggtatgatccatcaatgaataacattgaatcagagttcacaatgagagccagtctctcatcaatctgagtgaggtacagaaactcccctgacttataaccatcatgaggttcccttcttctggcagggggagaagagtggcagtttaaggaattgcatcagtgaatagtaaagcgagagagagggagtaaaactctcataacaagttgatcagctggttgaaaagtattgcatgctctttgtcagtggttatgtctacactggccagggaatcatgatgtgaggtggggagcctagaaatagtttaaaagaagcaccaacaaatgttgcagtggaagctgttgccttaagacaagggctataagcctttgcagctgggtcaagggtaaggmtatggaaaatgatgaatttttgatggtttccatgacattgagttaaaaacaaaaaagcttgtacaagttatccatgcacaattagacaaaatggcatattgtagtcaggggtgcctaattatgaaagagagtgcctaactaccaaa

SEQ ID NO: 793896 - DNA, 624 bp, Homo sapiens
tggcctgcattctgaatccaatcaatttaaagagagcttcaaccactgtaaaactcaatgcatctacataaatggaaatcaattgaattgatttttgacagacttgctccactgccttcaattcaaaatctgcttatacatagtgttccagaacaaaaycattaccatgtacaacagaaatactgttttattaaaagcataaaggttacagttttgcaaaggcttcactttacatgaattttcagtgaaataaaaatgtttttaaccacttatactataaatctgtaatatgcttgcattctgcaagagctaataaatctattaatccattgacctgaaaaaggtttaaatgccccaaaattatcagcattaatggttctgattattttctccatgaatttgcactgtgtacaattattatccaaagtatgtgaagtgatgattctttatcgagcttatattaaacatgatacattaaaatatattaaatgctagagtatctgtatcataaaatacattaaaatactgtaccagaatatctagaaagaaaggacttatgaagtagacctgcatgcccttctctctcatggcagagtttgggtgatgcatcaaaggaagaaagaa

SEQ ID NO: 793897 - DNA, 624 bp, Homo sapiens
tggcctgcattctgaatccaatcaatttaaagagagcttcaaccactgtaaaactcaatgcatctacataaatggaaatcaattgaattgatttttgacagacttgctccactgccttcaattcaaaatctgcttatacatagtgttccagaacaaaatcattaycatgtacaacagaaatactgttttattaaaagcataaaggttacagttttgcaaaggcttcactttacatgaattttcagtgaaataaaaatgtttttaaccacttatactataaatctgtaatatgcttgcattctgcaagagctaataaatctattaatccattgacctgaaaaaggtttaaatgccccaaaattatcagcattaatggttctgattattttctccatgaatttgcactgtgtacaattattatccaaagtatgtgaagtgatgattctttatcgagcttatattaaacatgatacattaaaatatattaaatgctagagtatctgtatcataaaatacattaaaatactgtaccagaatatctagaaagaaaggacttatgaagtagacctgcatgcccttctctctcatggcagagtttgggtgatgcatcaaaggaagaaagaa

SEQ ID NO: 793898 - DNA, 575 bp, Homo sapiens
gatctattcaagttttgccaagtcaggatccagttcagaatcaccactgcacttatttctcacgtctctttcatcttcagtctggaacagttcttcagtctttccttaactttcatgactttacacttctattacaggccaattattttgtagaattttccttaatttgaatttgttgctttaggattagattccaattatgtattattggcaggagcatcatagaagtgatgctgtgttcttcttgctagactatcaggaggcacacgattgcaatttgtcctattactgaggatgttcattttggttrcttgattaaggtggcgcctgccagatttttccactgtgaagtgacttccttttgtaactaatgaataatttgtgaagagctgctttgaaatgatgtaaatatctgttgatttgaaaatacaacaaaattatactatgaattgaataatacatctaaattaatttgcattttatcaatgacaaccagatccacatacttttgtaaaacagttgctggtgtgtgtgcgcaacaggttgttgacttaggcaatgtgtggaatgttctg

SEQ ID NO: 793899 - DNA, 575 bp, Homo sapiens
gatctattcaagttttgccaagtcaggatccagttcagaatcaccactgcacttatttctcacgtctctttcatcttcagtctggaacagttcttcagtctttccttaactttcatgactttacacttctattacaggccaattattttgtagaattttccttaatttgaatttgttgctttaggattagattccaattatgtattattggcaggagcatcatagaagtgatgctgtgttcttcttgctagactatcaggaggcacacgattgcaatttgtcctattactgaggatgttcattttggttacttgattaaggtggygcctgccagatttttccactgtgaagtgacttccttttgtaactaatgaataatttgtgaagagctgctttgaaatgatgtaaatatctgttgatttgaaaatacaacaaaattatactatgaattgaataatacatctaaattaatttgcattttatcaatgacaaccagatccacatacttttgtaaaacagttgctggtgtgtgtgcgcaacaggttgttgacttaggcaatgtgtggaatgttctg

SEQ ID NO: 793900 - DNA, 575 bp, Homo sapiens
gatctattcaagttttgccaagtcaggatccagttcagaatcaccactgcacttatttctcacgtctctttcatcttcagtctggaacagttcttcagtctttccttaactttcatgactttacacttctattacaggccaattattttgtagaattttccttaatttgaatttgttgctttaggattagattccaattatgtattattggcaggagcatcatagaagtgatgctgtgttcttcttgctagactatcaggaggcacacgattgcaatttgtcctattactgaggatgttcattttggttacttgattaaggtggcgcctgccagatttttccactgtgaagtgacttccttttgtaactaatgaataatttgtgaagagctgctttgaaatgatgtaaatatctgttgayttgaaaatacaacaaaattatactatgaattgaataatacatctaaattaatttgcattttatcaatgacaaccagatccacatacttttgtaaaacagttgctggtgtgtgtgcgcaacaggttgttgacttaggcaatgtgtggaatgttctg

SEQ ID NO: 793901 - DNA, 668 bp, Homo sapiens
gatgagctcctcctgtccctaaaatatgaggccccttagccatccagcccccatccagttattgagaaacaagtattacctgtttgaaatcataaacgggtggtttatgatgcagcaaaaactaacttacatacaacatgacctcatgtgggtttcttaatttctctcagtctcagctttctcatctataggatggagataaggcaatcaacctcgctatttagaggattaaatgagaaaatatatgcaaagtgcttggcatagcataaatactcaacacatatggtaattttttaaaaaccctctatattagtcccttttaattaaaattttaattaaaacaaaagaaaaacaaaacaaaacaaaaacctctgctgggtggacgaggggcagccctcaggctagatgcactgatttagtacttttaatagtggcaggagtcagacaagcccctaggcagatagtggcatgtccccaacgaaatccaactttcaaaccraaggcagtttaaagcccgaaagctaagctacaagtcttggataaatccatggactgagctgagaacatctcttcctgttggtgcactttcctctgactgatccccacccttcacttactttacatatatctacccttccctaggtggttttctacactgtcatgccacc

SEQ ID NO: 793902 - DNA, 621 bp, Homo sapiens
aaaatcctgcgtcactttggaagcagtcttcctatcctagaatgccagagggcaagcatctgaaagatctggaaggatgaggcagcaaaggccaagatgtgaatgtacactgcccctgtcagaggtgatcgaaccagagtgattccatcttgaataggggctgggtaaaataaggctgagacctgtgaggctgcattcccactagcttaggcattctaagtcaggatgagatagaaagtccgcacaagatacaggtcacaaagaccttgctgataaaacaggatgcagtaaaggagccagccaaaaccaagatggtgacgaaagtgacctctggtcatcctcactgctcattatatgctaattataatgyatttccatgctaaatgacactcctgccagtgccaggacagtctacaaatgccatggcaacatcaggaagttaccctatagggtctaaaaagggtaggaaccctcagttgcaggaattgcccacccctttcccggaaaactcatgaataatccacgctttgtttagcatatgatcaagaaataactgtaagtatagtcagtcgagcagctcctgccgctgctctgcctatggagtaaccattctttcattcc

SEQ ID NO: 793903 - DNA, 580 bp, Homo sapiens
taatctatttgtaaatagctctgtcacctgctgaatggctttcatatgtttcaagtaatatttaatttctaaagagtatcctagactttactctgaggatttattatattaactctctcaaagagcccttatattgtaaagagagtgttatctagaaaacaaacctcctgggtgtcacactttgctagttatgatattgcttaaggtaaaatgggaaaattacagcccaaggctatttcccagttacctctgcttagggacaataactgaaygaccccacagaaaacacattagggtagaaggggcctgttttccaggaattcctgcttcttcatgttaagtaccctcccaaccaagtgaaagcaaagacttcttagtagaaaggcaaattcagcaaactactttccttttttatctgagataaaaattaagtgagtctttgtgtttttgtgtatttatgttctcaagttttgcccttgtttattttctgttctttattaatgaatcagtagttccattcttgagttgttttgaattatttcacctggaaggagacaaatttaagaagtcctagtaagta

SEQ ID NO: 793904 - DNA, 602 bp, Homo sapiens
acataggtataaaatgttgaacagcattagagattaaccctgtgaggtaggggagataaagaaaggtttagtggtggtacaattagctgaggagtcaagagaaatagaaaacaagaaatcttctattttgccttctttggatcatgaatccattgttatgttttatttttattaaacaattatttcccatgctggaaatgtgaaagagttgagccatcctaaggaacttaaggtgtgacaatttacagagaagaatagttgtaacattgctcatttactctgagtataaacatgaaaaatatttttaaaaactacagtgaaataatttattccacagagaagtcatggagctctgttacacatcatattgtatactaatagctttgggtgggtggtcttcagttgatagcacagaaatggagtacgaatttgcagggaaatkacaccaattgaattaggcttcagtttaccagctactgattcctattaacagggcattttgatgtgagtctccactaagcacgtgagttagaaaatagctctaaagaccatccttgatggatcattactttgagatgcaaaccccagattgcattattaaa

SEQ ID NO: 793905 - DNA, 660 bp, Homo sapiens
gctctggcatggatatgaccacatcattaatacagtttacttctctggatcctagactctttttttttttttttttgagatggaatctcactctgtgcccaggctgaagtacagtggtaggatctcagctcactgcaagctccgcctcccgggttcacgccattctsctgcctcagcctcccgagtaactgggactacaggcacctgccaccacgcctggctaatttttgtatttttagtagagacggggttttgccatgtttgccaagctggtcttgaactcctggcctcaggtgatccacccacctcggctttgagaacaagaacaccatatctgctggtctcgaactcttgacacctcaggcgatccacggtcctcagcctcccaaaatcctaggattacaggcgtgagccaccgcacccagccaaaaaaactgatgctattttctacacaccttgcaccttatggatgtgcctaccagagatctggattataaccctaccttgtcaccataaaaaattcactcctattggacactgacatgaaagccttctgttacgttttgtgattgagcagttttctcttacagcttatttacaagggaaagagaaaggaaacaagaaatagtttcaaaaaaacagccaaaatttcagtaatca

SEQ ID NO: 793906 - DNA, 660 bp, Homo sapiens
gctctggcatggatatgaccacatcattaatacagtttacttctctggatcctagactctttttttttttttttttgagatggaatctcactctgtgcccaggctgaagtacagtggtaggatctcagctcactgcaagctccgcctcccgggttcacgccattctgctgcctcagcctcccgagtaactgggactacaggcacctgccaccacgcctggctaatttttgtatttttagtagagacggggttttgccatgtttgccaagctggtcttgaactcctggcctcaggtgatccacccacctcggctttgagaacaagaacaccatatctgctggtctcgaactcttgacacctcaggygatccacggtcctcagcctcccaaaatcctaggattacaggcgtgagccaccgcacccagccaaaaaaactgatgctattttctacacaccttgcaccttatggatgtgcctaccagagatctggattataaccctaccttgtcaccataaaaaattcactcctattggacactgacatgaaagccttctgttacgttttgtgattgagcagttttctcttacagcttatttacaagggaaagagaaaggaaacaagaaatagtttcaaaaaaacagccaaaatttcagtaatca

SEQ ID NO: 793907 - DNA, 688 bp, Homo sapiens
aaacacaacaagacagctgaatcgcaaataatagtatgctgagggaaagaagcttttaacaaatgcctacctgcctgccctccttccttttcttcttttatgtttttaacctggcttaattttcttggcttcattattttaagcaatttttgcagtgttgaaaaatttgcaagtaagttttcagaaacagttaacttcaaaatcctatacatgctatacatgaagacagtaaaaacatggatggaaagaaataatcagtttatttacattttctgtttatatgataagtagtaatttagctgaggttgacaattcatttaaatgagataaaagtcatttacattgtctctgtggctgttttcacgatacaaagggatgcaaatgtagggtgttactgagcaaacaatgggcttgctgcctaatgtacatggaggccaagaccatggcactggcttttgaggaaaaaaaagcttcattgcaagtggactggtaaggagacaggargaagtgctccaatatatcacccccagctggtgtttgggtagggttttataagcatagggtaatgaggtgtgatctgattgaattctgcaatgagatgattccaggaggcatgatctgattcgatcccacaatgggctgatgccagagctcaatttgattggatcctggatccttccatactgcg

SEQ ID NO: 793908 - DNA, 688 bp, Homo sapiens
aaacacaacaagacagctgaatcgcaaataatagtatgctgagggaaagaagcttttaacaaatgcctacctgcctgccctccttccttttcttcttttatgtttttaacctggcttaattttcttggcttcattattttaagcaatttttgcagtgttgaaaaatttgcaagtaagttttcagaaacagttaacttcaaaatcctatacatgctatacatgaagacagtaaaaacatggatggaaagaaataatcagtttatttacattttctgtttatatgataagtagtaatttagctgaggttgacaattcatttaaatgagataaaagtcatttacattgtctctgtggctgttttcacgatacaaagggatgcaaatgtagggtgttactgagcaaacaatgggcttgctgcctaatgtacatggaggccaagaccatggcactggcttttgaggaaaaaaaagcttcattgcaagtggactggtaaggagacaggaggaagtgctccaatatatcacccccagctggygtttgggtagggttttataagcatagggtaatgaggtgtgatctgattgaattctgcaatgagatgattccaggaggcatgatctgattcgatcccacaatgggctgatgccagagctcaatttgattggatcctggatccttccatactgcg

SEQ ID NO: 793909 - DNA, 562 bp, Homo sapiens
aacaagtagtctctttcaaaaagacaagatacaaacgagtagaaaaaaatccattctcttatctcatgatggttagattatttaagagttgaagtgattgctatgtcatttgcataaattcaaggacttttatttatttattttttcatttttgagatggagtctcgctctgtcacctaggctggagtgcagtggcgcgatctcggctcactgcaagctctgcctaccgggctcaygccattctcctgcctcagcctcctgagtagtgggactacaggtgcccgccaccacacctggccaattttttgtattttcagtagagacggagtttcatcctgttagccaggatggtctcgatctcctgacctcgtgatccgctcacctcagcctcccaaagtgctgggattagaggtgtgagacaccgcgcttggccaaattcgaggacttttctctctcaattgcttacaattaaaaattttgtagtagcaaatgctcacagatttggggctttcagaaatgtcttttcaaactaaaaacttttaaaataaataatattgcagat

SEQ ID NO: 793910 - DNA, 562 bp, Homo sapiens
aacaagtagtctctttcaaaaagacaagatacaaacgagtagaaaaaaatccattctcttatctcatgatggttagattatttaagagttgaagtgattgctatgtcatttgcataaattcaaggacttttatttatttattttttcatttttgagatggagtctcgctctgtcacctaggctggagtgcagtggcgcgatctcggctcactgcaagctctgcctaccgggctcacgccattctcctgcctcagcctcctgagtagtgggactacaggtgcccrccaccacacctggccaattttttgtattttcagtagagacggagtttcatcctgttagccaggatggtctcgatctcctgacctcgtgatccgctcacctcagcctcccaaagtgctgggattagaggtgtgagacaccgcgcttggccaaattcgaggacttttctctctcaattgcttacaattaaaaattttgtagtagcaaatgctcacagatttggggctttcagaaatgtcttttcaaactaaaaacttttaaaataaataatattgcagat

SEQ ID NO: 793911 - DNA, 478 bp, Homo sapiens
tcttgccagaattgtaaacttcaaattaggatgcaaactcaatgtcactcaagaagtggtcatgaggctggacttagtcattggtaattattctggattcatcagcagggcagagctgattttaccatttcataacmaaccacttctgaacagtttcctcccaggtgcttaagaatgaagaagtggctgtcaggactgcactggcaatatttttcaaaatgtggatccctggtcatattaaaataaaagtttttcccccgtcaggttagcagaaatgtaaaatggagattggaatttagatgtagaattttgtgtcagaaccacgtttgatagtcagttacacacatctggcccacagttaagaatgtaaactaacagcattaagagccagacatcctgggttcaaatcccagctctgctatataaggcttggcctttctgtgcctcagttgtctcacttgcaaaatcaggatgatat

SEQ ID NO: 793912 - DNA, 478 bp, Homo sapiens
tcttgccagaattgtaaacttcaaattaggatgcaaactcaatgtcactcaagaagtggtcatgaggctggacttagtcattggtaattattctggattcatcagcagggcagagctgattttaccatttcataaccmaccacttctgaacagtttcctcccaggtgcttaagaatgaagaagtggctgtcaggactgcactggcaatatttttcaaaatgtggatccctggtcatattaaaataaaagtttttcccccgtcaggttagcagaaatgtaaaatggagattggaatttagatgtagaattttgtgtcagaaccacgtttgatagtcagttacacacatctggcccacagttaagaatgtaaactaacagcattaagagccagacatcctgggttcaaatcccagctctgctatataaggcttggcctttctgtgcctcagttgtctcacttgcaaaatcaggatgatat

SEQ ID NO: 793913 - DNA, 606 bp, Homo sapiens
tttggcagtgttattatgagttaactgctcagtaagaagatggttaatattgagtgtcaacttgattagattgaaggatgcaaagtattgttcctgggtgtgtctgtgagggtgttgccaaaggaaattaacatttgagtcagtggtctgggagaggcagatccaccctcaatctggtgggcaccatctaatcagctgccagcgaggargcaggagaagatggaagagcagactactgagtcttccagccttcatctttctcctgtgctggatgcttcctgccctcgaacatcagactccaagttcttcagcttttggactcttggacttacaccagtggttttccaggggctcttgagcctttggccacagactgaaggctgcgctgtcagcttccctacttttgaggtttggggactcagacggaaccaccactggcttgcttgctcctcaacttgcagacagcctatcctggaattttaccttgtgatcatccgagtcaatattccttaataaattccctttcgtatatacatatatcctattacttctgttcctctagagaaccctaatacaagggattaacattagaattttgaattcacc

SEQ ID NO: 793914 - DNA, 606 bp, Homo sapiens
tttggcagtgttattatgagttaactgctcagtaagaagatggttaatattgagtgtcaacttgattagattgaaggatgcaaagtattgttcctgggtgtgtctgtgagggtgttgccaaaggaaattaacatttgagtcagtggtctgggagaggcagatccaccctcaatctggtgggcaccatctaatcagctgccagcgaggaagcaggagaagatggaagagcagactactgagtcttccagccttcatctttctcctgtgmtggatgcttcctgccctcgaacatcagactccaagttcttcagcttttggactcttggacttacaccagtggttttccaggggctcttgagcctttggccacagactgaaggctgcgctgtcagcttccctacttttgaggtttggggactcagacggaaccaccactggcttgcttgctcctcaacttgcagacagcctatcctggaattttaccttgtgatcatccgagtcaatattccttaataaattccctttcgtatatacatatatcctattacttctgttcctctagagaaccctaatacaagggattaacattagaattttgaattcacc

SEQ ID NO: 793915 - DNA, 606 bp, Homo sapiens
tttggcagtgttattatgagttaactgctcagtaagaagatggttaatattgagtgtcaacttgattagattgaaggatgcaaagtattgttcctgggtgtgtctgtgagggtgttgccaaaggaaattaacatttgagtcagtggtctgggagaggcagatccaccctcaatctggtgggcaccatctaatcagctgccagcgaggaagcaggagaagatggaagagcagactactgagtcttccagccttcatctttctcctgtgctggatgcttcctgccctcgaayatcagactccaagttcttcagcttttggactcttggacttacaccagtggttttccaggggctcttgagcctttggccacagactgaaggctgcgctgtcagcttccctacttttgaggtttggggactcagacggaaccaccactggcttgcttgctcctcaacttgcagacagcctatcctggaattttaccttgtgatcatccgagtcaatattccttaataaattccctttcgtatatacatatatcctattacttctgttcctctagagaaccctaatacaagggattaacattagaattttgaattcacc

SEQ ID NO: 793916 - DNA, 536 bp, Homo sapiens
taatatggtgatatccataccaacaacaattccattgacttatgagttaaaaatttactttatactgcagatggttggttcccatgccctgagaaacacaagatgctccatggaaatgctgatgattttaccttcataaaaccagttttcatgccccagaagtcaagcacgacctactcaaaactttagctctgcagtatagaggtctccttcttctccaagataagatcttttggggaagaagagcttataagttgatcagaatttgctcccacaagttccagtgagcagagtagtaactgagaacccaggctttgtggccttataaatctgaatctactagctgtgtattcttgggaaagttacttaacatcttggascctcaatattctcattaaaaaatgagaatttaaaagtagcattgtcataggtactgatggctatgtggtgtcatgtgattcttggcgcaggtccttcatgacattgtaactattgttttaattgcaccatgcactaacaaataaaatgttgtatga

SEQ ID NO: 793917 - DNA, 707 bp, Homo sapiens
gcattaaaagcactagtgtaaactaattttattactcctatcctcctgcaagcctggaggacattgcctgtgtcccccacattgacttcttcaagcagtttttgattcaattgtttccaccctgacataacataaaagacaatatggaacacacaggtaacatttatatcctggaaggctttctctacctcagagagatgacagatgtctccatgtataaasttgattccttccagaaaggtttgagcagggatacttatgtcaaacagaatcatatggactcccttctgattcagaaacagcctaggcagaacccaaaatatctaccacttcctgtaatgacaacaatttctttttaaaaaaataattttgattttattttatattcaggggacatagctgcaagtttttacacaggtatgtggaataatgctgatgtttaggatatggattccatcacccaggtagtgagcatattacctaacaggcagtttttcaacccatctctcctccctcctgccccttccagtagttcacagtgcctagtgttaccatatttatgtcaatgtgtactcagtgtttggctcccacttacaagtgagaacaagctgtatttggttttccattcctatattataacaatttacttagggttatggcctccagttgcatccatgtttctgaaaaggacatgatttcattatttt

SEQ ID NO: 793918 - DNA, 707 bp, Homo sapiens
gcattaaaagcactagtgtaaactaattttattactcctatcctcctgcaagcctggaggacattgcctgtgtcccccacattgacttcttcaagcagtttttgattcaattgtttccaccctgacataacataaaagacaatatggaacacacaggtaacatttatatcctggaaggctttctctacctcagagagatgacagatgtctccatgtataaacttgattccttccagaawggtttgagcagggatacttatgtcaaacagaatcatatggactcccttctgattcagaaacagcctaggcagaacccaaaatatctaccacttcctgtaatgacaacaatttctttttaaaaaaataattttgattttattttatattcaggggacatagctgcaagtttttacacaggtatgtggaataatgctgatgtttaggatatggattccatcacccaggtagtgagcatattacctaacaggcagtttttcaacccatctctcctccctcctgccccttccagtagttcacagtgcctagtgttaccatatttatgtcaatgtgtactcagtgtttggctcccacttacaagtgagaacaagctgtatttggttttccattcctatattataacaatttacttagggttatggcctccagttgcatccatgtttctgaaaaggacatgatttcattatttt

SEQ ID NO: 793919 - DNA, 707 bp, Homo sapiens
gcattaaaagcactagtgtaaactaattttattactcctatcctcctgcaagcctggaggacattgcctgtgtcccccacattgacttcttcaagcagtttttgattcaattgtttccaccctgacataacataaaagacaatatggaacacacaggtaacatttatatcctggaaggctttctctacctcagagagatgacagatgtctccatgtataaacttgattccttccagaaaggtttgagcagggatacttatgtcaaacagaatcatatggactcccttctgattcagaaacagcctaggcagaacccaaaatatctaccacttcctgtaatgacaacaatttctttttaaaaaaataattttgattttattttatattcaggggacatagctgcaagtttttacacaggtatgtggaataatgctgatgtttaggatatggattccatcacccaggtagtgagcatattacctaacaggcagtttttcaacccatctcycctccctcctgccccttccagtagttcacagtgcctagtgttaccatatttatgtcaatgtgtactcagtgtttggctcccacttacaagtgagaacaagctgtatttggttttccattcctatattataacaatttacttagggttatggcctccagttgcatccatgtttctgaaaaggacatgatttcattatttt

SEQ ID NO: 793920 - DNA, 634 bp, Homo sapiens
acgcaggttttgcaggtgagtttgaggatgaagctcagagatggcacaaagctcatccaaagccacacagcagagcagggcttccaatcctgtctgactctcaggtttgcgctcccagtcactccttcctgcaaactcctagcaggaagactctttatgactyttcataaagagtcaaaggtgattttatcctcacggtgcccttctaagttcagggtgcaagtatctcaatgacctccagttcacaggagggcccctgtgtgtggtggggaggcagagccgcagaatgacttgtggaaggctacacaccccagtggggaggacctttcccctgctccaggctagggagacccggggactcccaggagcagcagagccacaggacacacctgccaaggcatgtggaaggtgggccaccctggagtggggagagaaaggcaaagaggggctgtgcttattttggcagttggggcttggcaccaccccaggcaggacagtaattcagcaactggctgattcacccaccgcagggctcccctgcactggctgcctgcccgccggcccctattaccagcccactgagtcacgcaggttgccaagaagctgaggatccaagaatccaggccctgcccca

SEQ ID NO: 793921 - DNA, 640 bp, Homo sapiens
tagatgagagaaaattctggaatcctgagcaactttgcctggggggctccgcggtggagggcagcagcacccaaggaccagctagccactctctctgcccctccagcctacaggtgggaggataaggctcagggccgacaagtcctgtggcctcatgcagcagagctgagccgggacgaaccctgtcccctggagaagcaggggacaccctggctggctgtgaccactttggccaccctgggcttcctgggttggtcaaggggtctctggtgtaaaaaggggactccctgtcaaagactgagtgagatggagctgcccggcaatgtgggcctctcccagtgactgtccctgttctcttgggcaacggaagcccgaggatacaatgatgtgtcccttccttggccacactggtacccacagggattattgtgtttctacctgtggagtcagctctcaggcgcctccagcactgtgggagaaacccctgggaccccagtgcytcttcccaacccttgggactggcacccgtctcttgttgagagaaagcacagtcatgtctgtcattcagaaaatcacatccctggatggccaagccacgtcagaagggatgggctgtggggatccaagcgtgttctacctc

SEQ ID NO: 793922 - DNA, 482 bp, Homo sapiens
ccaggccttgggaaatttacacaaaccctatggggaggagaagctgtatacctaacctacagcctacggttttgctcaatgaattacttgacccaaaatgaatgtaaggcccagcagtcaccgccagaaacaaggaggtcttttcttcctaaagcagttcaacagcagaggaaactaacatagtcccatggctcaatgctaacctggaaggtatgggccaaatctcagaatgcraggcactgaacacccagagatacaggagagttgacagtggatgctcatccactgccaccctaagatcagggccaaccctgtgtagtcacagatatgggctgattgtgctctttctattcaggtaaaacagagatggtggttatgaaaaacctctccccaaagctcattcaccttagaaaaatagtaagatacttcttaaataattcactgacaatcagaaggtaaattactgacatcgacatctctaa

SEQ ID NO: 793923 - DNA, 521 bp, Homo sapiens
cctatttgaatctgtaaagacccttaagagcactttgaatttgttcatctataagctgttaacccaaattcatgtcccaggtttttaagagaataagcaatagaatataggcgtttccaaagaggaagacgtacagaagcagataggtgtatagttcattcattcacagataggcactaggttagatccagtagttggcgtgcatgyatcaacatgttaatcggaattaaaggctgctacatttaggcttggctagatcatctataaattgaaacccaaaagagaattgttaactaggaaagtagctgtccaggttccttaaagtttaaatacagggatccaactagtattctccaaaatttttcaggaatatcagactttactgctgtggaacacttggctgttgtaagaggagtgtttcatctctcataaggatgtaatgaaaggaaattaggagccagtgggagagtgcagggacttaggtgtaaatcataggtgaatctttttttttttttcagatg

SEQ ID NO: 793924 - DNA, 653 bp, Homo sapiens
aggaagcacagagattctagaacagtccaggttttgtttttttcctgctgcacatctctataacaaacatttctgacagcgtaggtatccgctccctgaagttgccattaaatcttttaaccaaattcatttcctgttgcctagagacyatcaagcttcagatgatcatgcaacaaaagttccaggtgaagacaccacccctggccatttaaggagctaccctgccaccaatagacagagtagggtgagagttctgtgatcctcaacagggactatgccccaagccagcatgaagcagttacagaaaaaagaccatcggtccctctgactctcataaaatgtatggggatcacatctctcagtggggagatgaagcaggaaaatagggtctggaggcagggaacataaggccaattcacactttagctatgacaggaatatcctctccattgggaatagagccaagtaaatgactttgtaactttatgtcatcctttccatttacatagggcataccccaagtaatcagtggaatcctctagggggtatttcaactcccaaaaattctgtaacgggaccttttagctcccaagctcaggcctgctcccacaccatggagtactttcattttcattaaaacccttctttgtgtg

SEQ ID NO: 793925 - DNA, 604 bp, Homo sapiens
cccaccctccagctgaagtgacttccaaggtatgaaacagccagcaccctccccatctcctcctttatttttttccccttttcggcaaccgggcattaaaaactaggacattcaaggtgaaagttagagagtgactgcatatgtctagggaaaggtgcagactcagaaacaccctgagaagaccttaagatcatacytcaggacaatctttacacagagacagcctgcaacaatcaaatcaagaacaaaataatatcaacaatcaccaaagactgggtaaggggttaatcttatttccagaattactacattattagatttgaatgtcgagttttcaacaataaaaataatcacaattttctgtgttaatagtacattaacacataaaaatatggcccattcaaaaaaaggtctcagaaatcatacctaaaaaagatttgatagcaaatctacaagataaagactttgaagtaactcttaaagatgctcagagaattaaaggaagatgtggagaaagtctcaaaaatgatgcacaaacaaaatgaaattatcaataaagagatagacaacctataaagaaaacaaaaaaaaaatctggagctaa

SEQ ID NO: 793926 - DNA, 559 bp, Homo sapiens
taaatgcaaaagagttaatatggatccttacttcacattaaatatgaaaagtaattcaaaaaggataaaaacctcaatgtaagtgttaaaaccataaaactcagaagaaaacaggtgtaaatctttatggcctttattttaggcaaaagttttytagttatgacaccaaaagcacaagtacaagagaaaaaatcaataattcgatttgttcaatattaaaatatttcatacctaaagggacactatctagaaagtggaaagcgaccccacagaagaaaatatttgcaaattatatatctgataagggactagtctccaaaatttatgaataacttttacaactaaacgattaaaagcaaatgacccaatgtaaagataggcaaaggatttgaacagacacttctccacagaagatataaaaatgtccagtaagcatatgaaaagttgttcaacaccattagtcattaggaaatgcaaatcaaagccacatggagataaccacttcacatccactaggatagctataaatcttttttaaaagtataatctaggtgtggaa

SEQ ID NO: 793927 - DNA, 640 bp, Homo sapiens
aacttctctcttttcctttcactctgagtatctcatttatttttaattgtgttcatctatcatctctctctctctctctgtactacctacctatatacctacctacctacctaccatctacctagctatttatctgtcctaaaattcatcacagctagatacatacaaattctccaggctatgaaaaycagcataatatatgtaatatttgatctcattttctcaggagtacttggatattaaccagtacatagaattattattcaaaccagataggaaataatatttggtttccttaggctttgtgtgtcagaaaccttaatattttggtgccaaaactaaattctgtagtgtggttattaatattacaaccaactctgtatttagcccatccctcacttttgaaaaactagttaaagaacagaaagcagttaagcaaaatcttaaataacgtgtcttttaaaacacatttctaaatgggtatcaattgtttctattgcatgtattagcttggtattagctgcattttggctcagtcacagaccttgtcagcagaaaccagagtgatcaatataaatctgctgatgggctctgtttctgtacataaacagcgatcaacagaaaaggaatacttggaata

SEQ ID NO: 793928 - DNA, 640 bp, Homo sapiens
aacttctctcttttcctttcactctgagtatctcatttatttttaattgtgttcatctatcatctctctctctctctctgtactacctacctatatacctacctacctacctaccatctacctagctatttatctgtcctaaaattcatcacagctagatacatacaaattctccaggctatgaaaatcagcataatatatgtaatatttgatctcattttctcaggagtacttggatattaaccagtacatagaattattattcaaaccagataggaaataatatttggtttccttaggctttgtgtgtcagaaaccttaatattttggtgccaaaactaaattctgtagtgtggttattaatattacaaccaactctgtatttagcccatccctcacttttgaaaaactagttaaagaacagaaagcagttaagcaraatcttaaataacgtgtcttttaaaacacatttctaaatgggtatcaattgtttctattgcatgtattagcttggtattagctgcattttggctcagtcacagaccttgtcagcagaaaccagagtgatcaatataaatctgctgatgggctctgtttctgtacataaacagcgatcaacagaaaaggaatacttggaata

SEQ ID NO: 793929 - DNA, 352 bp, Homo sapiens
atcacacagtaagttaatatttcaggcttaggtttttgagagaaggcatcatggccacaagttatcatacaagataactgttgtagtcacgacattttacacgttaggaagaggaaccacccaagttattttaagaaaagtttagcatagtgctacagaagatgtataaatctaagaagaagagccattacacaagsctttgaaagtagtcagaggcttaggatcctcctttcccagtagtgatgccaaggggaagaaaagatgtcaatctgctttccccaaacccgctgaaaagtatcccccagttcaactgtttaaaagagtggttgctctgcaagctcagttcaagaga

SEQ ID NO: 793930 - DNA, 617 bp, Homo sapiens
gttcttttttatggctgcatagtattccaaggtgtatatgtaccaaatttgatttatccagtccaccactgatagacatctaagttgattctatgtctttgctattgtgaatagtgctgcaataaacatatgagtgcatgtgtttttaaaaattttttttctgtgatctgggtttacttctgttatcatttgattttatcttgcagagtttccrtagatatttcttgtactttagatctgtttgcaatacattatctcagctttgtctgaaaaacgtatttatttttgcctttacatttgaaaacattttttctggatgaaaattctagattgaactttcttcctccagcactatattaattcatttcattgtctcctggtttgcattgtttctgataagaagagaaatgactaatgcttcttattattgttcccagtttataatatgcctttacctactttggctgcttttaaaattttctcattaccattttttttagttaaaaataaactttttattatagaaacatttgaatatattcaaaaaaataaagacaccagtataatgaactcccacttacctatcacccagcagtaataattactgctattatata

SEQ ID NO: 793931 - DNA, 534 bp, Homo sapiens
taaaatgtgtttctctgaattgtgcttatatcatcaacatctgggttatcatttattctcttctatgtattatagttgctgacggctgataatatagtcatgtcagcatcatcacaatgttttattagctatatctggccagacatactaattataatataggtgacacctctgtcacatttgttcaaatatcatacttaatattacaatcttgattagatatatgtatagctatgattgytcaactctgtgtagccaagcatattgtggttgtattgtctaggagtcttgactgaattatctaaaaaacttcaaaattgtagtggcttaataaaatataattgtataattttcccatgtaatggtcctaatttacagttcagattggatgacaatctatccctctcctataagtactaactcaaagaccttggctatttacctctgagggtccaccacctcttagaaacttgtcatcagagattgcatctagcaaaaggaagaaatcacttctcagccttttggctaagatca

SEQ ID NO: 793932 - DNA, 676 bp, Homo sapiens
aacacagagggttttagggcagtaatgataccatttatggtactataattgtagatacacactattatacatttgacaaaatccatagaatgtacaccaccaagagtaaaccgtaaagtaaattattgtctctgggtgataatgatatgtcaatgaatgttcaccagttataactaaatatcattctgtttagggatgttgataatgggggattggggatattgtaagtgcatgtgtaaaagtgggagatatatagcaatctctaaattttgctgtgaacctaaaaawgctctaaaaacaataaagtctaaaataaagtaaaataaaataaaatgttgacagtgaaatatatagtagcagaaataggtaacaaaactgtttttaaattcctgtttttaatttcctcttaataattttaacaacattagcccaagttttaggtatgcaaccaaagttcagtaaaatgggattgtttttggctctgcaatacttttccaacatattcttaaaattgatcagtttctcttactatgactatttcttgtattgtcagagaaattagttataaagcaatctgttaaaattaattataaaagtctataaaagattttcattccaaggttcttttttgggatcttcagctccatagtaaagacatttatacatttgtgttccc

SEQ ID NO: 793933 - DNA, 676 bp, Homo sapiens
aacacagagggttttagggcagtaatgataccatttatggtactataattgtagatacacactattatacatttgacaaaatccatagaatgtacaccaccaagagtaaaccgtaaagtaaattattgtctctgggtgataatgatatgtcaatgaatgttcaccagttataactaaatatcattctgtttagggatgttgataatgggggattggggatattgtaagtgcatgtgtaaaagtgggagatatatagcaatctctaaattttgctgtgaacctaaaaatgctctaaaaacaataaagtctaaaataaagtaaaataaaataaaatgttgacagtgaaatatatastagcagaaataggtaacaaaactgtttttaaattcctgtttttaatttcctcttaataattttaacaacattagcccaagttttaggtatgcaaccaaagttcagtaaaatgggattgtttttggctctgcaatacttttccaacatattcttaaaattgatcagtttctcttactatgactatttcttgtattgtcagagaaattagttataaagcaatctgttaaaattaattataaaagtctataaaagattttcattccaaggttcttttttgggatcttcagctccatagtaaagacatttatacatttgtgttccc

SEQ ID NO: 793934 - DNA, 543 bp, Homo sapiens
ctaggccccattcccagagattctgattgggaggtctagggtggggcctgggaatatctatagctcacaattttgtccaggttaaatgatgcccactgaggaacaatcttttaaggaaaatacacctggggccactgaccgcagaaagtctttattcctgagttaaaatcaggttctagaactacagcccgtcccccagggcagccaatgctagtagggyagatggaaacctctggtggaggcagccacagagttcacggctcgggcctgtgacccacgatctcatcctagccctttcgacaggtacgggtgatccactcatgctcgtcatcatctgcaaggaaagaggaagagctggtcatgcttggtgctcgctgggacctttcctggcctggggggttccccaggtggggcgttgggactgggatggtccgtcgatggccagtctgtgtagttttgtgtggggaggaacagacctttcatttacactgaattcctcggagtggctggtcttggggaaattgaacacagaagggtttctaa

SEQ ID NO: 793935 - DNA, 541 bp, Homo sapiens
agaaacccttctgtgttcaatttccccaagaccagccactccgaggaattcagtgtaaatgaaaggtctgttcctccccacacaaaactacacagactggccatcgacggaccatcccagtcccaacgccccacctggggaaccccccaggccaggaaaggtcccagcgagcaccaagcatgaccagctcttcctctttccttgcagatgatgacgagcatgagtggatcacccgtacctgtcgaaagggctaggatgagatcgtgggtcacaggcccgagccgtgaactctgtggctgcctccaccagaggtttccatctrccctactagcattggctgccctgggggacgggctgtagttctagaacctgattttaactcaggaataaagactttctgcggtcagtggccccaggtgtattttccttaaaagattgttcctcagtgggcatcatttaacctggacaaaattgtgagctatagatattcccaggccccaccctagacctcccaatcagaatctctgggaatggggcctag

SEQ ID NO: 793936 - DNA, 517 bp, Homo sapiens
acttctgggagccttgtctcatagattaaatagagttggtgaaatttaactgcctagcatccagtaggaattttatacatgctaggttctttctgctgtctcccaacattattaggaaagtggctttcttaaaaataaccaataaggctagatagaacaatagacctatgcaatcatgaactccctctcktttttaagagaactttggatgtgttttaatgtaagattaaaaaatgagtattttttcctatccagttacctaatgtgaattaaatcattcagatgagtcttcaaatgcagaacatggtaatttcttaagggactgagacaaggaggaacgagatgagattctcactcctcaggaggggagaaatggccacagatcccatcaggccattgcttgtagcggcttgcaggacctcccacataacagaagaaaaggaagctgagagacccagtcttgggaatcctagatccagttacagcattgtctcagctaatccatgatgtgaaaaga

SEQ ID NO: 793937 - DNA, 571 bp, Homo sapiens
cactcaattctgaaaaatccatcattaggcaattttgttgttgtacaaacatcatagagttcacttacactaacctagatgatacagcctactacaaacctaggctatatggtatagcctattgctcctaggctacaaacctgtatagcatgttactgagctgaatactgtagatcattgtaacacgrcggtaagtacttatgtatctaagcatagaaaaagtacagtaaaaataaactataaaagatttaaaaatggtacacttgaatagggtgcctaccatgaatggagcttgcaggactaggagttgctctgttggtgaatgaggggtgagcaaacatgaatgtctagcacattaccgtacattactgcagattttataaacactgtacacttaggctatgctaaatttattttttaaattttttctttcttcggtaagttaaccttaacttactataacattttcacattataaactttgtaattttttaaaactttttgagtcttttgtaaaatacttagtgtaaaacaaacacattgtacagttgtacaaaaatagttgatttct

SEQ ID NO: 793938 - DNA, 571 bp, Homo sapiens
cactcaattctgaaaaatccatcattaggcaattttgttgttgtacaaacatcatagagttcacttacactaacctagatgatacagcctactacaaacctaggctatatggtatagcctattgctcctaggctacaaacctgtatagcatgttactgagctgaatactgtagatcattgtaacacggmggtaagtacttatgtatctaagcatagaaaaagtacagtaaaaataaactataaaagatttaaaaatggtacacttgaatagggtgcctaccatgaatggagcttgcaggactaggagttgctctgttggtgaatgaggggtgagcaaacatgaatgtctagcacattaccgtacattactgcagattttataaacactgtacacttaggctatgctaaatttattttttaaattttttctttcttcggtaagttaaccttaacttactataacattttcacattataaactttgtaattttttaaaactttttgagtcttttgtaaaatacttagtgtaaaacaaacacattgtacagttgtacaaaaatagttgatttct

SEQ ID NO: 793939 - DNA, 571 bp, Homo sapiens
cactcaattctgaaaaatccatcattaggcaattttgttgttgtacaaacatcatagagttcacttacactaacctagatgatacagcctactacaaacctaggctatatggtatagcctattgctcctaggctacaaacctgtatagcatgttactgagctgaatactgtagatcattgtaacacggcggtaagtacttatgtatctaagcatagaaaaagtacagtaaaaataaactataaaagatttaaaaatggtacacttgwatagggtgcctaccatgaatggagcttgcaggactaggagttgctctgttggtgaatgaggggtgagcaaacatgaatgtctagcacattaccgtacattactgcagattttataaacactgtacacttaggctatgctaaatttattttttaaattttttctttcttcggtaagttaaccttaacttactataacattttcacattataaactttgtaattttttaaaactttttgagtcttttgtaaaatacttagtgtaaaacaaacacattgtacagttgtacaaaaatagttgatttct

SEQ ID NO: 793940 - DNA, 584 bp, Homo sapiens
ttttaaattttttctttcttcggtaagttaaccttaacttactataacattttcacattataaactttgtaattttttaaaactttttgagtcttttgtaaaatacttagtgtaaaacaaacacattgtacagttgtacaaaaatagttgatttctctatatccttattctgtaagctttttctattttttttatttttttacttttaaaactttttgttaaaaactagatacaaatacgcacattaggttaggcctacacagggtcaggataattaatatcactgtctyccgcctccacaccttgtcccactggaaggtcttcaggggcgataacatacctgaagctgtctctcctatgataacaatgcctcattctggaataccttctgaaggacctgcctgaggctgttttacagttaacgttttttaagagaagaggagtatactctaaaataatgataacaacgttagtaaatgtatcaaccagcaacacagttgtttattataattatcgcatatcaagtgttatatatatacctaatatttttatacagttggcagtgaagtgggtttgtttatacc

SEQ ID NO: 793941 - DNA, 584 bp, Homo sapiens
ttttaaattttttctttcttcggtaagttaaccttaacttactataacattttcacattataaactttgtaattttttaaaactttttgagtcttttgtaaaatacttagtgtaaaacaaacacattgtacagttgtacaaaaatagttgatttctctatatccttattctgtaagctttttctattttttttatttttttacttttaaaactttttgttaaaaactagatacaaatacgcacattaggttaggcctacacagggtcaggataattaatatcactgtcttccgcctccacaccttgtcccactggaaggtcttsaggggcgataacatacctgaagctgtctctcctatgataacaatgcctcattctggaataccttctgaaggacctgcctgaggctgttttacagttaacgttttttaagagaagaggagtatactctaaaataatgataacaacgttagtaaatgtatcaaccagcaacacagttgtttattataattatcgcatatcaagtgttatatatatacctaatatttttatacagttggcagtgaagtgggtttgtttatacc

SEQ ID NO: 793942 - DNA, 577 bp, Homo sapiens
aaatcgttacatgaaaggacatatatgttttctatcttttgatatatgttgccaaatccgttttcagaaagactccccaatatacatttccaacagaattgatagagggtccttgggatttttttttcaatgtttatgctaagggaccagtcactaccataaaagatttttctacctgatccttcccactctttcttccaaagaatgcatcaattcagaaatattgtgctactatgrctgcctcagccttccagattccaattctcccttttatggaattattaagagtagttgaaagttgagaaagcaattacctccctaatgatatcctagaaatctgaaccttttagtataacgtcaaatgattccatttgaaaagagggaagaggaattgataagcacctaacataccaccccacctttcaaaatggaaaaagtaagatctaaagagaagatgctgctagtttcacagaaccaggggaaagttgaacctaaaatccaaattctttattctttatccagtgctatttctgctgagtccagcttccaaaaaatacagataaaaaatactttaaca

SEQ ID NO: 793943 - DNA, 588 bp, Homo sapiens
aaaattgaaggccgggcacggtggctcacgctgtaatcccaatactttgggaggccgaggcaggcagatcacctgaggtcaggaattcgacaccagcctggccaacacggtgaaaccccatctctactaaaaatacaaaaaaaaaaaaaaaaawagccaggcgtggtggcagatgcctgtaatcccagctacacgggaggctgagacaggagaatcacttgaacccaggaggcagaggttgcagtgagccaagatcgcgccactgcattccagcctgggtgacaacagtgagactccgtctcatctgaaacattcatctcccttgtcaaacaaaataccaaagcaaagcagttaaattgtggttgcagtctcctagaagaacacagctgaattgaaccaagcaaggacagaaaagcccaccaaaaggaaggagcttttgtattatttctatatttgcatttttataatatttttaatcattaaattttggactcccttggagcctaaagatataagcatctagtgttgactgaactcctttcagggaaacatttgccctttgagactaaactatgtgtatatgaaaac

SEQ ID NO: 793944 - DNA, 388 bp, Homo sapiens
aagaagaagtaaaattatttctatctgcagaagacataatcttatatatagaaaattctaaaaatggcacaaaaaactggctagagctaataaattcagcaaagttggagaatagatcagaacacaccaaaaaaatccactgtttttctacatattggagctgaaaaatatgaaaaggaaatttagaaaacttcatttccaayagcatcaaaaagaataaaatactcaggagtaaacgtaaccaaggaacaactgtatactgaaaacaaaaagttgctgaaagaaattaatatgaactaaatgaaaagaaatcacatgttcatggactgaaggacttaatattgttaagatggcaatattccccaaagtgatctatagattcattata

SEQ ID NO: 793945 - DNA, 388 bp, Homo sapiens
aagaagaagtaaaattatttctatctgcagaagacataatcttatatatagaaaattctaaaaatggcacaaaaaactggctagagctaataaattcagcaaagttggagaatagatcagaacacaccaaaaaaatccactgtttttctacatattggagctgaaaaatatgaaaaggaaatttagaaaacttcatttccaatagcatcaaaaagaataaaayactcaggagtaaacgtaaccaaggaacaactgtatactgaaaacaaaaagttgctgaaagaaattaatatgaactaaatgaaaagaaatcacatgttcatggactgaaggacttaatattgttaagatggcaatattccccaaagtgatctatagattcattata

SEQ ID NO: 793946 - DNA, 613 bp, Homo sapiens
catagaatataaagttactacaaaaatcaattgcattgacttatactagcaatgaaaaattgaaaaataaaatttataaacaccattgataataccaccagagagcaataaatatgtagggataaatctaccaaaatttgttcaagacctatgcactgaaaaccatgaaacagcactaagagaaattaaagatgccctaggaaaatggaaaagtgtgtcatgtctatagattgaatgattcaatattattagaacatcaattttactcaaatttatctatagattctatrtaactccaatcaaatactagcaatttttttttacaaattgacaggttgattattttatatgaaaatgcaaaggacctctaagagtttacacaattttgaagaacaaatttgaaaggcttcatgattaaaagacctactataacttcattagtcaattcaatgtgtattggcataaggatatacatatacatagattaatggaagagaataaaaaataaagaatagaaagagaatgactcacttatggttcagttaacttttcagataatttcttaaaactttttaaaattcacagaaagttgcagaaacggtgcagagatatc

SEQ ID NO: 793947 - DNA, 632 bp, Homo sapiens
agatcattggcagactgcttctttaagcagggacctgacccacttctcaatgggcaggatctcccagttggaccctacagccatgcctgccagcaggtattagggaaagagtgctgatctctccctgggatagagtgcctggggawggggaaggctgccacctgggttggttggatgacagccattccagcctgtgggctttaaagagtccaatctgacaggggaaaaggcagttccccaccacaacacagctgttttgtggaggcatggccagactgcttctttaagcaggacccccaatccactcctcctcatagggtgtgtcctcccatccagggccttcagacacccctgcccatgttctccctgggacagagtgcctgagaggcagggcaggccaccactgtggttattcgagcttcttagctggtccagcctgagggccttggtagaccccaaacccatcagacactgaagggatctccgacaccacaaagctgctctaccaaaaagcagccagactacttctttaagctggtccatgatcctgttcctcctgactgggtgaaacctcccaaccagggtctccagccacctcctacaggtgtgttccagctggcgataggtcagta

SEQ ID NO: 793948 - DNA, 632 bp, Homo sapiens
agatcattggcagactgcttctttaagcagggacctgacccacttctcaatgggcaggatctcccagttggaccctacagccatgcctgccagcaggtattagggaaagagtgctgatctctccctgggatagagtgcctggggatggggaaggctgccacctgggttggttggatgacagccattccagcctgtgggctttaaagagtccaatctgacaggggaaaaggcagttccccaccacaacacagctgttttgtggaggcatggccagactgctyctttaagcaggacccccaatccactcctcctcatagggtgtgtcctcccatccagggccttcagacacccctgcccatgttctccctgggacagagtgcctgagaggcagggcaggccaccactgtggttattcgagcttcttagctggtccagcctgagggccttggtagaccccaaacccatcagacactgaagggatctccgacaccacaaagctgctctaccaaaaagcagccagactacttctttaagctggtccatgatcctgttcctcctgactgggtgaaacctcccaaccagggtctccagccacctcctacaggtgtgttccagctggcgataggtcagta

SEQ ID NO: 793949 - DNA, 658 bp, Homo sapiens
atggaaaacaggaaaaagcaggggttgcaatcctagtttctggcaaaacagactttaaaccaacaaagatcaaaaacaaagggtattacatgatggtaaagggttcaattcaacaagaagatctagctatcctaaatatatatgcacccaatacaggagcacccagatttgtaaagcaatttcttagagattttcaaagtaacttagactcccacacaataatagtgggagactttaatatcccactgacaatattagacagatcattgagaaagaaaattaacaaagacattcaggacttgaactcagttctggatcaagtggacctgtcagatatayatagaactctccacccaaaaacaacaaagtatactttcttctcattgccacacagcacttactctaaaattgatcatacccagaagtaaaacactccttagcaagtgcaaaaaaagcgaaatcataataaacagtctctcagaccacagcacaatcaaattagaattcaaaattaagaaattcactcaaaaccatacaattacatagaaagtgaacaacctgctcctgaatgactcttaggtaaataatgaaattaaggcaaataccaggaagttcattgaaccaatgagaacaaaaatacaatgtaccagaatctctg

SEQ ID NO: 793950 - DNA, 579 bp, Homo sapiens
aactctctaaggctcagtttctatacttataaagtgcaaacacctatctcacagggctgttgaaagaattaagtaaaatcacagatgtaaagaacttagcattcactgagtgcttattactattattttcccaccatttgaaaggaaattccaaagggctgaagtgaggaagagacagagaaaagttctcctcatgtactttctgatccaaggaaaggccaaacagtatctcggagataaacttacacttcatttcaataaacagatatgttaatttgctcacccattgtagtaatttcactatgtayaccaaaatagcatggtgttcaacttaaatcatacgatttttaaaaagaaataaatagtggatagactcagagcaatactcagaaaggcctacagaataggactcaaaacgtcactagatatttcattgtttgatgggcctggttctcataatttaaatttccattctaacaatacatattgtcaaagaacatctggtagatacagagggcctgtctgccacattactttttccttcttgacaaatattcctagaggcggtgagaatcagac

SEQ ID NO: 793951 - DNA, 570 bp, Homo sapiens
gatttttaaaaagaaataaatagtggatagactcagagcaatactcagaaaggcctacagaataggactcaaaacgtcactagatatttcattgtttgatgggcctggttctcataatttaaatttccattctaacaatacatattgtcaaagaacatctggtagatacagagggcctgtctgccacattactttttccttcttgacaaatattcctagaggcggtgagaatcagacattcttccaggacatcctttcgttcttcttgcaataacccaaatcctttctgtacacgtatttaacccaamggtgcaggaaaattgcagccttcttattcttgctaaggttccaaatgcaggtgtgaactgacttcccaagaaagtcttctaaagaattcctctcaagagactgcttaagtatatctctagggcatagcatggacatattacatgtatttaaattttcttattgttttctgatcttagtcactgaagacaacgaagactatgaagacactcaggcactgaagataattttggagtgccttcccagcttgcctcctcctttaaa

SEQ ID NO: 793952 - DNA, 611 bp, Homo sapiens
ttgagaatctctatttataagtcacctccaagtgattctgaggcagctggactatggaccagtatttgggaaataatataggttgtcatttgcatcactagctttcagatgtgttgataaacatgagcagtgtgtttggcttactcaattagattaaagaggactggagtaggtctcactctaaatgtcttctttccacagtttctacgactctactcccaaaggcagaaaaatcagtcctttacttgcacccttcaagaacttccacttgttctttgagtaacatgtccaaaccttaacatgacctatagtgtgcakgatctggctccaacttctctcaagccaccctttgccttgtacccgttattaacaatataaagccaggtcaggggagagggggtgatgatactatttactcccaatgtctactttctcagttaagttaagcatagatatggaattgggaaattgtatagagcaataaaaatctgaaaaatttctaaggagaataatatgtgatttaggatgagaaaggggaatgatgatcaacctcaatgacccagctgagttgaaaatcatatatcagtatctacaggaaaattatgtcattc

SEQ ID NO: 793953 - DNA, 602 bp, Homo sapiens
cttgggaactgaaacaaaggtgactcttgttatgttttagcaaagagactggtgacattttacccctgccctagagatttgtgcaactttgaacttgagatgatttaggctatctggtggaagaaatttctaagcagcaaaacatttaagaggtgacttgggtgctgttcaaagcattcagttttaaaaggaaaacagagcataaaagtttgggaaatttgcagcctgacaatttgatagaaaagaaaaacctattttctgaggagaaatttaagccagctgcagaaaaatgttgcgtaagtaatraggagccaaattttaattgccaaaataatgggaaaaatatctccatggcatgtcagaggtcttcacagcagcccctcccatcatacacctggagacctgggagaaaatggtttcatgggctggactcagggtccccatgtggtgtgtagcctagggacttggctccctgcatcccagctcctccagccatggctgtaagagggttgggccatggtttcagagggtgcaacatagagcttgggctgtggcttcagagggtgcaagccccaagccttggaagcttccacatggtgttg

SEQ ID NO: 793954 - DNA, 607 bp, Homo sapiens
attcaatttctcagcaagtcgtttgtttcatcttcaaaatatttcccgaaactgtgttttctcattaccatgattgattctgcccttttccaaatgaccgtcatctttcctaaaccaggtaatgtcttcttaatgacacagtttcaactcctttccacctactgacacttttccactcagcagccrgactgatcattcataattgtacatcagattacaccactcctccactcagatctcctgagccttcttatctactcacagcaaaaggcaaatttttccacaccaaggaagctctgcatgacccaacacatgcctgcccttccaaccttgtctctcatatggttctaggttattcacttcatttgccacacctatttctgacttaacttttgataagctaagattgttctgatttcagattttgcactttatttcttctttgccaggaatgttcattccccataaagctcattttcttactgtattcagagttctattcaactgtcctctgtggatcatcccatgaaaaattctctagcctttgctctgctttgttttctataaacaatttattgtcctattatcatatttttctatatttgtt

SEQ ID NO: 793955 - DNA, 631 bp, Homo sapiens
ttatgccatatagcaatcaatctttatgatcttaaaggtaagttgattaaaggatctaattaaaatagtcttcatgttactttagtacctggaagggtatacttagtatcatagggctgttgtacaaaggaccacaacctaggtaacytaaaacaacagaaatttattctctcacagttccgaaggatggaagactgaaattaaggtgttgacaggaccatgctacctctaagcctctatcggaggctcctttcttggctttcctagtttctgacagttccaggcattctttggcatgtaaatacatcattttaattgctgtctccaatggtcatgtggctgtcttccccgtgctatgtctaaatttccctcttcttataaggacaccagttatactggattggactcccaccttactccagtatggcctcatcttaactgatcacatctgcacctaccttatttctaaatgagatcacattcacagataatagggtcggggggtgtcttcaacatatctttttgaggaacaccatttggtattataaaagtacttaagtaagtcatttttaaaaattcttgtcaaagtaatgattctatttcaatgaatctggtatttttcctagtaaca

SEQ ID NO: 793956 - DNA, 633 bp, Homo sapiens
gtctttttctgcttgacttatttcacttaatatgatgtcctccaggtacatccaagtatccaagttgttgcaaatgacagcatttcattctgtttcatggatgaatagtattctattttatatatatatatatatactttttattgattcatctgtagatgggcattttggtygattccatatcttggctattgtgaatagcactgcaataaacatgagtaagcagatgtctctttggtacactgatttcacatagaccaatgaacaaaatataggccctgaaaatatatccatacatttacagccaactgatttttaacaaaggtgtcaagaatacacactggggaaaggagaatctctttaataaatggttctgggaaaactggatattcacatgcagaaaatgacactagacccctctctctcaccgtgtataaaaatcaactctaaatggattaaagaaataagtgcaagactcaaaactgtaaagctactagaagtaaacataggaaaaagcttgatatttgtctgggcaagaatttttttagtaagatctcaaaagcacagacaacaaaacagagtagacaaacggtattacatcaaactaaaaagcccctgcacaacacacaatta

SEQ ID NO: 793957 - DNA, 617 bp, Homo sapiens
ttttaatcccagtgctttgcgaagccaagatggaagggttgtttgaggctgggagttcaagacctgcctgtgcaaaatggcaagaccctatatctgccaaaactttaaaaattagatgtgcatggtggtgtgagcccatagtcctagctgctcagaaagctgaggtgggaggatgacctgagcccaagagtctgaggttataatgagctatgactgcaccactgcactccaggcttggcaacagagcaagacactctcaataaataaataaataaatagcacaaattcattaggaagacataacattcctaaatgtgcttttgcctaataacagggccttgggttatttgagtattcaaagcaaaaatttacagaattgaagacagaatcgaagaatttcacaaatatcattttagcatccttctcaacaaccaytgatagaataataatacaaaaatgatcagtaaagagaaagaatatctgatacagccctactaggtagacttgatatttatagcagaccacccttaacaacaacagaatacatattattttcaatatagtttacaagctggccataaactgtcttaacaaattttaaaagaccaaaatagaaa

SEQ ID NO: 793958 - DNA, 456 bp, Homo sapiens
ctctgagtcacagagttctgataggtatgtggtattgtaattcagttgaattttgctgttggaatatttaggtaaattgtcagacgtaattaagatttgcagcatgaaatgggcccaaatatatatggagtcttgctctgttgcccaggatggagtgcagtggcacgatctcagctcactgcaacctccacctcccaggttcaagtgattctcctgcctcagcctcccaccacgccctgtctgtgataagatttttttttttttttcttgagacggagtcttgctctgttgcccaggctggagtgcagtggcacratctcagcttactgcaagctcgtcctcccgggttcacaccattctcctgcctcagcctccggagtagctgggactacaggcacctgccaccacgctcagcctgtgataagatttttaaataaaaatttcacggctcgttgc

SEQ ID NO: 793959 - DNA, 543 bp, Homo sapiens
tcctcaacaaaggccatttccagcagacaataaatgcctatgacagcaggctgtcatatttgtgtcacgaatttcagttgcgaaacctacccgagtctccccaaaatggcaggcgtgacgtcagtgtctggcctagctctggcagcattctttcagggtttatcattagtccccacctgcaactcccacagcacatcagacacttctctgggtttgccccaggggccccttcttacctgccccytccccgtgccaccaacccgtagacagggagggcaagcagtgaaaggtccatctagaggaggtaaaagacagggctgagggaaaacgccttgtacagtcaggatggcagatgtactctgtcagggaagacagccccacagaaaaggctcggcttggccaagaagcaacaaaagggattctacacctcagaccagggagggggaatgtgtacaaagattggatttactaaattcagagccacagactttcaggtacttcggtgaagatcagtgctctttcaaacccacacttcagaggcag

SEQ ID NO: 793960 - DNA, 601 bp, Homo sapiens
tagtaagactaaatccctagctgagcagaaactgaattttcctcccatgtgggaggggaagactcttgtatccatattcacagagtgtctttgcacctgtcctagattgatgacatatttttgtaattgatgagtcttttcatctattaggagatctgtgcttaggaaaggtcttccgaatgttaactcaacaggatttaattataagttttactttggaacagttcaaacccgcagtaagctatgggtgttagagayagtcaggcttctgatttagctagagtcttctttagagtaggattagccctttcacctttccagaggactgcggtctgcacacagagtgaagttaatattgcattcttaaagctgaggataggtgttgggatacacctgctgtgaaagatgggccattgccactttgcaggcttttagattacccaaactgatgagttatttcttctggtaaacatgtttcagatggggtggggaatgcctcgatctaaccaatgaaggtatcagtaagcattagcaaatatttgaatctcctgcagaaaggtagctcagtaaattagagttgccagttctcacttggataggt

SEQ ID NO: 793961 - DNA, 636 bp, Homo sapiens
ttggatccctttgtggcctatttttgtaaaggaaatatcttcaaataaaaactacacggaagcattctgagaaacttctgtgtgacgtgtgcattcatctcacagaattgaacatttcttttgattgagccgttttgaaacactctttttgaagaatctgcaagtagatatttgaagtgctttgaggcctattgtggaaaaggaaatatctttgcataaaaactacacagaagcattctgagaaacttctttttgatgtatgcattcatctcacagagttgaacttttgttttgattgagctgttttgaaacactcttttgtagcatctgcaagtggatatttggagcactttgaggccaatcrtggaaaaggaaatatctccatataaaaactacaaagaagcattctgagaaacttctttgtgatgtgtgcattcaactcacagagttgaatctttcttttgatggagaagttttgaaactctctttttgtagcatctgtaggtggatatttggagccctttgcagcctatggtggaaaaggaaatatcttcacataaaaactacacagaagcattctgagaaactattttctgatgtgtgaattcatctcacagagttgaaactttcttttga

SEQ ID NO: 793962 - DNA, 615 bp, Homo sapiens
ctgagtacagtctggttctgcttttcactgtgacagggtagtactgagtttattgcaaagcctcacaaactatgttctccctctcccaaacatactatctctgcacgacgtagccactactggtggttgaaaaagaggtggcatccttgcttctagaccgtcttttatttgtttgtcttctccaatgtctgtttcagtcgatatgaagttaataccaggtactgtgattgctcacccaatttttggtccctttgacagagcttcttgaatgtagtgagttgtgaaaatttggtgtttttgtgtggtggatgagaatgtaggcttcycttctgccctcttattctgtctctgccttaaattttttagattcagggagtatatttgcaggtttattacctggatatattgtgtgatgctgagcaatgtgggatattattgatcccatcaccaaggtagtgagcatatattgtgggatatatttgatcccatcacctaggcagtaagcatagcactcatagtttctcaccctctgccctcctcctttcctccttcatctagtagttctcagtgtctattgttgtcatctttatattcatgagtaccccatgtttagat

SEQ ID NO: 793963 - DNA, 407 bp, Homo sapiens
tctataagctttgaaattaagaggtaaaaatctaaaataaatcggacttcatgttatttatacattcattgggtttgttaattattccacaggaaaacagatgaaagacttttgtagaattcaattctgcttcaccatatttagggttacaagaagggaattatattgaygtaattgacagactgaattaacctcagtcatcgcatgtgatttttctagagttttttttttaatggtgctgacattctcctcaatatgtccatgcttagttgggtttctgggggagagatgagtagttagtactacccatctaaaacataatgttcattagttggaatgatggtgtgatatgatagtcttcgagatgatgccctcaattcctttcctccctgcatgcacatgctgct

SEQ ID NO: 793964 - DNA, 407 bp, Homo sapiens
tctataagctttgaaattaagaggtaaaaatctaaaataaatcggacttcatgttatttatacattcattgggtttgttaattattccacaggaaaacagatgaaagacttttgtagaattcaattctgcttcaccatatttagggttacaagaagggaattatattgacgtaattgacagactgaattaacctcagtcatcrcatgtgatttttctagagttttttttttaatggtgctgacattctcctcaatatgtccatgcttagttgggtttctgggggagagatgagtagttagtactacccatctaaaacataatgttcattagttggaatgatggtgtgatatgatagtcttcgagatgatgccctcaattcctttcctccctgcatgcacatgctgct

SEQ ID NO: 793965 - DNA, 407 bp, Homo sapiens
tctataagctttgaaattaagaggtaaaaatctaaaataaatcggacttcatgttatttatacattcattgggtttgttaattattccacaggaaaacagatgaaagacttttgtagaattcaattctgcttcaccatatttagggttacaagaagggaattatattgacgtaattgacagactgaattaacctcagtcatcgcatgtgatttttctagagttttttttttaatggtgctgacattctcytcaatatgtccatgcttagttgggtttctgggggagagatgagtagttagtactacccatctaaaacataatgttcattagttggaatgatggtgtgatatgatagtcttcgagatgatgccctcaattcctttcctccctgcatgcacatgctgct

SEQ ID NO: 793966 - DNA, 616 bp, Homo sapiens
gacccacttgaggaggcagtctgccagttctcagatctccagctgtgtggggaaccactgctctcctcaaagctgtcagacagggacatataagtctgcagaggttactgctgtctttttgtttgtctgtgccctgcccccagaggtggagcctacagaggcaggcctccttgagctgtggtgggctccacaaagttcgagcttcccgtctgctttgtttaactaagcaagcctgggcaatggcgggcacccctcccccagcctcgctgccgctttgacatttgatctcagactactgtgctagcaatcagcaagactccgtgggcataggaccctccaatccaggagcaggatataatctcctggtgcgcctttttttaagaccatcggaaaagtgcagtattcgggtgggagtgacctgattttacaggtgccgtctgtcacccctttctttgactaggaaagggaactccatgaccycttgtgcttcccgagtgaggcaatggctcgcccagcttcagcacgtgcatggtgaacacacccactgacctgcactcactgtctggcactccctagtgagatgaacccagtacctcagatggaaatgcagaaatca

SEQ ID NO: 793967 - DNA, 644 bp, Homo sapiens
tgttagagtacattaattatattctaggtttttacccaagtacacgagattctttaacatgcggattctttctccaccttcaacctcattcagaatgttctaacactgaaaaaaatgttgtcaaaggataaacatacaagaatgctatggaggaagaataggattcagaggttcctgagagaagrcaaagggctggtttgttgctcttttacctactagaaaagataattaaggccaggtgggatgcatacagtaaaagagggcacctgaacaaacaagcattgaatttggagaatgcctacgagtctgtgctgggctacgttcccaagacagactcagaagttacctgccctgccaggtacctcctaatctaccctctccaaagggaagattttcttcatggctgtaggaagcgcctcttgaaagctccaaatcttattttttttctacatgatgaattggcacagtactaagtttgactcattatattaaacaagaaatttttgatggtggaatggatccagagttctttgaaactgtccaaatggtcccgcataaaggaaacacttcacagtcgtttcagtgtacctacaactaaaaaattggtgtcagtctctagattcaagctgatggttcctgtggga

SEQ ID NO: 793968 - DNA, 654 bp, Homo sapiens
agaattgaagtggaatatcaaggcccaccttactgttgaaggcagttcccagcgttgaccacgtgtttttgtggctggctagtactccccagcaagcaaataggccagactctgaaatcttgtatactacgtaggcacatttggaatcctgaattggaatttaattcctgggcagaggtaagaaaatggtgactcctttttcactctcgaaggtagaaagaccttctgctttttggaaggayaccttttgaaatccctcatttgattttgaaatccctcatttgattttgttttccctgtatcaaagaaaatggcctagaaatcaggatggggacacatgagatgctttgtggataaggaaccagggaaatggaaggcagaagcaaaaaggaagcgcctggaattagttggaaaacaaggaataaacggggaaatgtatattttatagatgttggtgtgaatggaggaataggtgttgtggaaattatttacctgatgtagtttctcggcctctcaatgtgtttcctccactgtctaatggagataatgttagtaccacactcacgagggtgaatgaaatgctgcatgagaaatgcctagcataggacctggccagaggaaatgcacaataatttattcagattcagagagaat

SEQ ID NO: 793969 - DNA, 616 bp, Homo sapiens
aaaaaacacaagaatgaagtaaaaggagaccatttctagtgggaatgccgttatagtctgggaaactcctggagtggctaggacataaagtaaccagctaagtgcttttagagcagattattatttttttatatttctctggaacagaggttactttgtgttgacacaaggtgaataaataagccttctattgattcaggtagggttcagggcatctgtcttaaaggggcagcaccttacttcagctgyccagctctaagccagagttcccagggagaggacctcatttttcccactcgtgcttccagtgagaaccacgcccctccaacccacatgccattgttccatcatgacctgattgcattttcaccccagagccacttaggggaaggattgccacctccttgaattagagttctcggagcaaggccaataagctgagcagtgggagcagggagaggagaagaataaatggagtgagtgcagcacagcctgcctgcaagagcgtgacctgcgtttctcctttcttgccctggcttgaattagtgaaaaggtgaagtgggcgggcagtgaacaaaggagtaatgtagacatggattcaaaaatgaggtttttc

SEQ ID NO: 793970 - DNA, 616 bp, Homo sapiens
aaaaaacacaagaatgaagtaaaaggagaccatttctagtgggaatgccgttatagtctgggaaactcctggagtggctaggacataaagtaaccagctaagtgcttttagagcagattattatttttttatatttctctggaacagaggttactttgtgttgacacaaggtgaataaataagccttctattgattcaggtagggttcagggcatctgtcttaaaggggcagcaccttacttcagctgcccagctctaagccagagttcccagggagaggacctcatttttcccactcgtgcttccagtgagaaccacgcccctccaacccacatgccattgttccatcatgacctgattgcattttcaccccagagccacttaggggaaggattgccacctccttgaattagagttctcggagcaaggccaataagctgagcagtgggagcrgggagaggagaagaataaatggagtgagtgcagcacagcctgcctgcaagagcgtgacctgcgtttctcctttcttgccctggcttgaattagtgaaaaggtgaagtgggcgggcagtgaacaaaggagtaatgtagacatggattcaaaaatgaggtttttc

SEQ ID NO: 793971 - DNA, 556 bp, Homo sapiens
tctttaccctatcacagtccactccactttcgccgacgccacatccgctcgctgtagcatgagtccttacagcaatcatgccccattcctcccctcctgacctgggtgctggttttggcataggtcttacatctacagatgttataaatgccactctatacttccattatttttgtttaaacagtatcctgtraagaagtttaaagaataaggaaaaaaaccttacatatatagtggaatgcggataaatatttaatgggatgtcataaccttttccagtgttccttgctgctttgtgtagatccaggcctccctctggtatcgttttcctcctgcctaaagggcccctttgatatctgctgtgctgtgaggcgtctggggaagaagccttcttgcgtttgtctggaggagtctttgttcatcttcatctatgaaaggcattgcgtctggcgcagagccccaggctggcagcagtcctctcctctctgcacttgggcctgccccactgccttcctgtctgccttgtgccacaagacggctcccatcaccctgctgc

SEQ ID NO: 793972 - DNA, 556 bp, Homo sapiens
tctttaccctatcacagtccactccactttcgccgacgccacatccgctcgctgtagcatgagtccttacagcaatcatgccccattcctcccctcctgacctgggtgctggttttggcataggtcttacatctacagatgttataaatgccactctatacttccattatttttgtttaaacagtatcctgtgaagaagtttaaagaataaggaaaaaaaccttacatatatagtggaatgyggataaatatttaatgggatgtcataaccttttccagtgttccttgctgctttgtgtagatccaggcctccctctggtatcgttttcctcctgcctaaagggcccctttgatatctgctgtgctgtgaggcgtctggggaagaagccttcttgcgtttgtctggaggagtctttgttcatcttcatctatgaaaggcattgcgtctggcgcagagccccaggctggcagcagtcctctcctctctgcacttgggcctgccccactgccttcctgtctgccttgtgccacaagacggctcccatcaccctgctgc

SEQ ID NO: 793973 - DNA, 667 bp, Homo sapiens
attaaaatagtaaaattaaaatgttctggaggtggcttgagatttggaaccgacaggtgagaagtacgcaaacttgtctggatcttgaaatgaagctgtaatgaacacattcttgaagcaaatcaataaaataaattttaggtcatgtacatatgtaatggtggaccctactccttacttatatgtaaacaattacaaatcatcaagctatcagaaaattgaaaatgtatgccttttctagaaagagtgaaaacacacttttaaagagaattattaaacttagcatttaaaattttaggcttaattggtataacattatatgaaagcctcatccattttttttattcaattccwtcagaaacccagaaattaacctatatctatctatcaatcaatttatgctatgcctttttaaaaacagttttattaagatataattcatatacttccatacaattcatccatttaaattataaaattcaatgtttttaatatattcacctattcataactgctctaggatgtgcaaccatcacaacaatcaattttagagcattttcatcactccagaaagtaattccatacacattagcagccgttctgattttctcccaaccctctaccattccccaccccagccacagacaatcattaagctacttactaa

SEQ ID NO: 793974 - DNA, 643 bp, Homo sapiens
tctggttccacttttgtttttgaccactccaacttacgctgatcttagccactaaatctgagttaatcttttttaactgacctatacaattacttaactcccttgtcaaacatatcttatttgtctaccagtaggcaagctccacgttagggatcctatgaagtgctttttgcacagcactaaacacagtgaatatttaatggtcaagattatgtgttgaatgaaagaaagaatgattaaatggccgaatractgacagtgaaggaataaatctgagtggttgcccagaagtcatgaaagcacataagtcattaaagcacatttttacgtctgggaaacactggtgttgataaactagaagatgggtattggagattaaaagcaaagctatatatctgggatgtatgtatatatatgtgtgtgtatatatatatatatatatatatatatttatatataatatttttatatatcccaaatctgctgtgtccagaaatgttaaagtgtagtgttcactgcagaaacttctttcactccaagcaatgcttgctttgctcttcctggggctcacctgggcttgcccttcctaagctgtgctctgtgacatctgtcctgcctaatcccactctttcttacataaaac

SEQ ID NO: 793975 - DNA, 769 bp, Homo sapiens
cagagaacgttacaaagttacaaataagcaaggcattgaggctagaatgaacactaggatattggattagcttcagacagtatgaattcatgtttagtttaatatatatatattgaaccatatgtttatacaaacacggatggatacagagataattgcaagtattacatatgcatgggtgactaaacactcatacatttcctagctctgtccactgagakggcctagcagcagtgacaccccattagcaatgaatatacccagagtacagatcttgactccaagtaatcattgtccagtaaaacaaaccaaggctgcttggaaaaatgtcaagcctaacgtttttaggcctacattggccctaaattatattatgccatttaaatgtggaaaattagcttccaatataatttaggtgtttgttaccaatgtgcctagatagcatatgttaagaagcagggaaagaaggctactcattacgtctgcaagtctttttcaccacaattcttttgtccactattaattgcaaacacctatcactgcaaataaataattacatttaaattgctttctagggtcctggcaatgacttaaataaaacctggggaaatgaaaacccaaagggaaaaagagacaggacttctcaccagtgcaccccacaccagctctactcacattctatttccaccatcaaggtaagaaacgaaattgcatcaccattagattaaatccaaaagattgttccaggattctcaaggtcgtggctaat

SEQ ID NO: 793976 - DNA, 635 bp, Homo sapiens
tgatgctattgattagtctatttcttgaattctctctctctttactttcaggagggcgtgctttgctggttctcatcatttgtctttgttttcagaactctctttaaatgtgcacagtctctgacatttcatctgatcctgattcttctttctctagataaatgttgctatcctttgccaacaaacatttatatgttggtgatattcaaatcagtcagcaggcagacaactgttcccaaacagttccatccctgactctggggacagggccctaaacyatgcatcgtggctgttgagctggagggtctctgcggtctttccagatgtgctccccaatctgctccatgctgctttgactcaggtctcatcaccccttgtctggttaattgcaacagcttcccatcccagcacctgccatcagtgtgtctcctttcagccagtttatcagctccctgcccatctttcttaagtgaaaaaataaccaattatatatttgtcttttaaaaaatcttagctggtggtccacagctcacgtgatgctcttcaaattccttaacttaaaaataatatgcccaaatgatatggttcaaatctacttcccggcctcatttccaaacaaccataacatttcatga

SEQ ID NO: 793977 - DNA, 625 bp, Homo sapiens
tgtctccagaagtggaaatgtgggtgaacagtgggtattgaagatggtttttggtgtgaatgagaaagttaatcatcatgagagaattcagctcagagagcagaacttttttacataccagatgctggccagtcccgctgtgtggtcacgtcaggcataagatgcatctaacttgtggatttcattctgtttccaacatgcctcgtgactgtgtagaatggtgaygggcacagaacagatctcggaggtgtcactagagagtgcctacgaaacggtcttactctgacttggggaagtccaccacctgcagactggatggcccagggaaacagcgcaggggagctcctgcctcctggcctatccccacagcagagccaggtgggccctggggtggccttgaggctggactggctgcaaaggcaaagcattgcagcttttccttgcgcccagccctctaacctggtcctgctgtgcggagctgcctgccgtgcggcgctgcctgctgtgcggagctgcctgctgtgcggagctgtcggcatggcttatgaggatgctccatgcactggagcttcctgtgagaggaaaggtgctctgtctggggatgcagggagaagagcactctcag

SEQ ID NO: 793978 - DNA, 520 bp, Homo sapiens
ttactgagacatgggaggaacttgcaagaaggaagacgcccgctcacccatgagcatggtgcaaagtggtaactgcggtgcttaaactctgggagggagcacaccgcaatgtcttatcaccttttctgctgttcacaaaagcaaggtgcttccccaccagccgcgccttcatctcaacagtcagggctgcaaggtttatcttaatttaaaaaacaattacaagcgaaacagaaactgcyaggaattatccactcttcagaaggaaagaacaaaaggaagtgacgagagacagggccccatcttgtcgtatgatattaacacggctgctcggaaacacctcgagagagacaccagctttccccacgctcttcctttggtttctcttctggggggacattggatcgcacagctttgcaggtgagcacagcctaaacatagctccatgcgttttgcatccataactctaaaggcttttgtgatttaaagcggcaattatacagaggaacgagataaagactcc

SEQ ID NO: 793979 - DNA, 520 bp, Homo sapiens
ttactgagacatgggaggaacttgcaagaaggaagacgcccgctcacccatgagcatggtgcaaagtggtaactgcggtgcttaaactctgggagggagcacaccgcaatgtcttatcaccttttctgctgttcacaaaagcaaggtgcttccccaccagccgcgccttcatctcaacagtcagggctgcaaggtttatcttaatttaaaaaacaattacaagcgaaacagaaactgccaggaattatccactcttcagaaggaaagaacaaaaggaagtgacgagagacagggccccatcttgtcgtaygatattaacacggctgctcggaaacacctcgagagagacaccagctttccccacgctcttcctttggtttctcttctggggggacattggatcgcacagctttgcaggtgagcacagcctaaacatagctccatgcgttttgcatccataactctaaaggcttttgtgatttaaagcggcaattatacagaggaacgagataaagactcc

SEQ ID NO: 793980 - DNA, 651 bp, Homo sapiens
gaagcagaacactttgtggtggttttttctttctttctcttttcttccaccgaaagggatagtgcaatgccaccatgagccaacatgaaaaaccacagtgattctgtctgaattctgaaaatgtaaaggtttttcaacagacattttcatacttttgtcaaattgtcaaactaaacatctatgaaagtctaaataacagacacataccacatagtccataatgcagaagtgagaaacaaacataaaaagcacagaagggcattttatttgaagaagcaaacagaaacacaatccacaaaacaaacaggggaacaaaaggaagagggaatcattcaggctggcgtcagctgtgttttktgtcactgtcctcgtcctcgtcctcatccccatcctcatccaaagttgtgattagatcttgtttggcttctgggacactattaagcccttagaggagagggatccagaagggacaggcgcacatagccacaagccattgatggcgcatgaggggctatacctgagagtgaccacctgggcctatgggagagaatgctacaggaaaatggaggccgtatgactcctcctccccccaggacagcccattctcagggaatgttcgaacttagccagaggccacttatctttgaacct

SEQ ID NO: 793981 - DNA, 619 bp, Homo sapiens
gcaattcacctccaaagttgcataatttggaaagtgctttgggatccatttggttgaaaggttgttaattatgatgatttatgacactggaaacaaatctgagccttgacagtatggagaatatacataacgtataattcttttgcctgtcccattggaaagtccctaagtacaaatgtttttaaaaatcttgttgtgccttatgaataggttccacagttgtgtaagacagagtatcattgacttttgagttagggtgataacctaaaaagagaacatctagaggctgatgggtaatacttagcagcaccttatgattatcccaattcgtggtgtttttctccacctggttctctccaccctgacttttccctccccctcactgcacacatctgttggtcaccacgccattcggggtttcccaaatctgccttytcatccccactgcccttgcctctgttcagtgtgtatcacctcttccttagggccccccttccactgttggtctatattcaagcccagccttcataccgcttccagagttactttcctgaaattatcaatgaaacaaagtaaaaggctgagtgttcacttactcccatgcctagaaacatcctgt

SEQ ID NO: 793982 - DNA, 520 bp, Homo sapiens
gcaaataataggcaactcacctccttcacaaataaaccaggagtttagttctgtagtatcatttgagacccaagctccttccgtcttatggcttctgtagcctttgtgactttgcaaagtcacttcatggtgcaaaatagctgccagaactccacctatacatccagcttccaggcaggaagtacaaggaaggcaggcagggcaaaaagaacatgtctctcagctgaatcagcccctctaaagtcatctcttggaaggctcacctaattatttctgcsaggacctcatcaagttacaaagaaggttgagaaatgtagcatttttccctggggcatatcattgccccaggtaaaatcagggaattggttaggcagaagaggagaaagaaaattggaaagcaattaagaatctatgtgctagcgtctgttagtttatcattgaatcagatgtctattgtgtacagatgctgggctgggggaatacataaacaaataggacacatctcccacactgcctcatc

SEQ ID NO: 793983 - DNA, 487 bp, Homo sapiens
aatttgtaagaaactaggctatatatacattgggaaaaacagccttcatttgtcaatgcactagtgttccaaaggtttctggtaattgtgtgctattgctttttgttgacttgcaaaaaaaaaaaaaaaaaattactatgacttgtggtagccctacaaccttcggaagtgcttagcccagtctgaccatacatttatatttagaatgcttaggtaaataaataatatgcctaaacccaatgctataagatactatataatatctcwtaattttaaaaatcactgttttgtataataataaaacaaggcaggcaagctgttctacaatgactgttggtaagggtgctgaggaagaaaaacaaacaatcttgattcagggatagtgaatagacaaaaaatgtcctaatcaatgaagctgtgtgatgattctgattgacagagagtgctgccacaagattcttaggctacactcaaatcagcagaaaaa

SEQ ID NO: 793984 - DNA, 583 bp, Homo sapiens
acaaccaaggctgttaacaggtgtgccttggttctcttccatatggcttctcttttgttttcagtactctgcagtttaattatgatgcatgcaggtgtgaatttctgtttattctgcttgggatgtgttttccttctgggatctgtgaatcggtttctcattatttttgtaaaacctgaagccagttatctcttaaaataccagctctccttggctgggcgtggtggctcacgcctgtaatcccagcactttgggaggccggggcrggtggatcacgaggtcaggaaatcaagaccatcctggctaacacagtgaaaccccgtctctactaaagatacaaaaaaattggccgggcgtggtggcaggcgcctgtagtcccagctactcgggaggctgaggcaggagaatgacgtgaacctgggaggcgaagcttgcagtgagccgaggtcgcaccaccgcactccagcctgggcaacagagcaagactcgtctcaaaaaaaaaaaaaaaaaaaatagcagctctccttcatagtctctatttttccagagaccctaattagatactttgggcaaagacttaaca

SEQ ID NO: 793985 - DNA, 637 bp, Homo sapiens
ggatcctggccagctttctccatctccaaagctagcaacactaggtcgagttcttatacggccatctctctggatctttccagcagcaagaggctttctactttttagaactcatgaaattaaattgagtctattcagataattcagtataatcttttcatctcaaaattcttaacctttattccttctgcaaaaactccttttccatggaggcacaggtgctggagattaggacttggcatctttaargactaatctgcctaccctgtagttaaataagtagagaatttttcctgcactaataatagaagcaaagacaagaaccttccaatgggactgaattcaagtgatgacatgtgactggcatttttcttttctattgtggttttgaaaacactctgagacctaactaaatcatttatttattaccatagaacttttaatagccacctactgcacactgtcactcttcaaaagttaaaactaataactcaaggagaaaaataaacaaatattagagtgtcctgtccttgcatcaataagttgccaccatgcaatatgatatatcacagcagtggaagcattttctataactccagatattcagggattatgaaaggtttgcttaccactgtac

SEQ ID NO: 793986 - DNA, 624 bp, Homo sapiens
tgtcattctttcatattgggagattccctcaaaatttgggtgatgttttgttatccttttgtatttaatagtccctaaaacttttactggaaattgtctaagcatgtatgatactttcaaagaataaaatatactgaagggagagacattaggtttctcagagaatctgcctataccattatttttaggcagtttctccatatgatacagtttctcttaagtaaaatctcagcgaaattcttacctggaaaattttgtctgtcagttctatggtgctggwaaggtgaagagagtttgggagtctttacattcagtaatgcctgataccagtattcattcaaacgtgcatgatgttgctaaatctagagtctggagtttaatgtctacagataatagactttctgaaaatctgtgctcctggaaggagcagattggctgctgggatgaggaacgccacataaaattacccttttaaacagagttttaacctagtccccctattttaattttcttgtttcatcaaacctactagattacacaatggtaacaagtgccaatctgttctatgatactactattggattttctcagttatcattcttttctgcttatttaggatcctca

SEQ ID NO: 793987 - DNA, 618 bp, Homo sapiens
gagtgaggctcagtagttccacaatatgccctttgcaagctggaacactgggaaagccagttgtgtacttcaatccaagtttgaaggcttgagaacgaggagctcaagatgcccaaggacaagagaaagtggatgtctcaattaaagaagagagtggattcacatttcctcccccttttgtttctattcgggggatcccataatggtaagggtggatctactttactctgyccactgattcaaatgctaatctcttctggaaacatcaaaaatagacacacccagaaaaaacgttctacaaggtatcttggtatcactttacccagtcaagctgacacacaaaagtaaccatcagaaaatatatggatggcttatatgtagtctctcttttttattctattgatctcttctatatgccaatatcacaacatttttactatttcagctttaaaattggcttcaatatcacatagtcagttccctaacatgaatctttttttttcaaagttgttttgattgttctatattctattctgtgtatttttatgaattttgaagactttaaatcagttatgcaatttctacaaaaaaaaaatcccctgtaatttttattgaaat

SEQ ID NO: 793988 - DNA, 602 bp, Homo sapiens
tgtgttcaccacaaaaagtggtaaatatttaaaatgataaatatggtaattaccccaatttgatcattatacaatgtatacatgcattgagacatcacaccatgctacataaatattacaatcattatgtatcagttaaaaaaaattaagtaataaaaaatttaaatgaagtattcaagaagaagaaaaatgacataaagaaacttataaacaaagaatggaaaggcatcagaaaataaatcaaggaaggtaaaatataatctttaatattttaatacataattgatttaagggataatatacagttaaagcaatgaattgggtgcttatagtatatataaaagtgaaattaatggtagcaatttcacaaagaggaaaaaaattggaacrattccattatatttgtgctaaacataacgtgacctgatactatttgaaggaagaaatacaatatttaaaaatatagtagaccccacaacagccattaaaaatgcattaataggtgaaataaagagcaatcataaaaatgttcaattaaaacaagagaaggctgaaaaagaggaaaagaagataaaaaatacaccatatagaaaacagcaatc

SEQ ID NO: 793989 - DNA, 548 bp, Homo sapiens
tttaatacaatcatatcaataatcacttaaaacttgaataatataaacactcaaaaaacagagattgtcatttgggtttaaaggaaaacaagtatgtgctatatagaagaaacatactataaatacgaggattcagaaaggttaaaagtaaagagatggagaaacatattatgctaacactaataaagagamaactgaagtactcatattaatttgaataaggaataatgtcagggataacaagggcaagggatattacatgaagcggtcaatattcagagcagtgatagcaatgctagatgtacaatataactaacaaccgagattaaaaatacaccatgtaaaaacttatagaactgaaaggagaaataggttcacattatagttggaaactttaaaattttaattgcagactttaagacacctcttttagtaattgaaaggtcaggtagaaattaagttaggatatataagctgaaaaccacaatcaatgaatttgatctagttgacatttatacactattccacctgacaacagtagaatacaa

SEQ ID NO: 793990 - DNA, 651 bp, Homo sapiens
caaaaaccatgcagaacagatacacttgacttagcatgcactgtattttatttgttatagccaaagggctttctttctaaaaagaattaaaatgttcagtaaaagatttataaatcagcttttgatgttgctaattcaaaatcaagcaggacatttgcmatgcatttaactaatgtatcagtgaggcataattataaattgtggatactatgcaaaactatttcttagcataatagctgagtaagtgtaaattagagacacatggtttttacgtgctatttataccttttgtaaatatttgctctttgaaaataagtggcttttttgctactcatttttgtttgctatacattttttcagcatctttatatcaatatttcctcataggagggattaatcaggtttactgcagatgtccaaattaattgttattgctcttccttaatttaataagaagtctaaaatatgcttcattgttaaagagtggtttcatattattagaaaatgtatacttttgaatactgtgtgcagaattgactttattagttgttaatcactatgtgtagaataacatttcatggaaaataggaggtataaaagttcttatgtatatttgtgtggggatatgtgcatgtgtgtgtgtgtgtgcat

SEQ ID NO: 793991 - DNA, 674 bp, Homo sapiens
ggccaacaaaatgcatcatagagaggatccctattccactagatggtactgtaagtcttgaaataccatgtgctttctggccaggcacattggcacacgttgtaatcccagcactttgagaggccgaggtgggcggatcacttgaggtcaggagtttgagaccagcctggccaacatggtgaaacaccatctctactcaaaatacaaaaattagctgggtgtggtcgtgcactcctatagtctaagctagtaggaaggcygaggcaggagaatagcttgaacctgggaggtggagcctgcagtgagccaagattgcaccactacactccagcctgggtgacagagcgagactccgtctaaaaaaaaaaaaaagaaagaaatacaatgtgctctccatgtgctctccagaccaaggatagagagagagatgtaaactgttggggggcagggaggaaatcctctgttcctagaaaatcacaaaaatgccaatcccctgagctatattcctggttactatggcatttgctgatcttgcctaataggattattttcctgaactgcaaaaatttccacagcattgcatacagagaggggacaggaggcaagacggtccaggaaagaaaaggaggaaagttgcaatagaaaaagattgaagatcctactgccaatgccca

SEQ ID NO: 793992 - DNA, 608 bp, Homo sapiens
gttggccaggctggtctcgaactcctgacctcaagcgatctgcctcccttggcctcctaaagtgccaggattacaggcatgagccaccacgccaggccatctcactgtttttttgtttaattgctttaataaattctaagagaagactgatgaaatgttcaactrtaattgtccatttatctatttattgctcctcttagttatatcagattttgtttcacttatttcgagactgtgactgggtgcatatacattcgagattattatgtctttttggtgaattgatcctgtattattatgcaatattcttatttatctttgttattatttattgtttatattttttgtcaaatattatattgctattagggttttattagtatcagtgttgcatagaatacattttcccatttttttaaatgttagtctctatgtatatttatatttaaaatgttcctctgcagacattatataattgaggcttgttttcttcttcactctgacagtttcgtctttttatttggactatttgaatcaatcatgttaactttaatttttttggctttctaattatttttatttcaacttttattttagatactggggag

SEQ ID NO: 793993 - DNA, 623 bp, Homo sapiens
cacctgacatttgcctgaatggctttcactatttaagtaagatgtgctcttgcagaagatctaaattttagtcaagtgaattactttcctgaaggcacctgagcaacttaatagaaccaaaatcaaattcaactggattaagaagaagggaaagatgaagagagaatagaaaagacggaagaaagagaagaaatagttacctggtctacctagagaccagaagttggtaccacagaatagttgagaaagttttgactgaatcactctgttaggattaaggagacttaccctggataacttatttaatgtcaatgaccttctcttcgaaacacagatattgaactttttcaggaactcatcaggctcatagattttggttgtaggagattaagaagttaaacatttcttgagctttcaacatcaaaccgtattagtccatgayactgggaagtgagctcccattacctcaacctgactctatgacagactctgctatgtgcaacatccctttcaatccccatggtgatggtgctatacccattttagagaggaagaatttttgggtcagaaagcttaggtgactttctcaaggtcaaagagccaaagggacagaacagggatta

SEQ ID NO: 793994 - DNA, 612 bp, Homo sapiens
aagcaccatgtctatataccactccccaaaatcatttctgagacattattaagtattatatcaatcttaagtgtcagaaacgtcatctttagagaggtttcctttcattttcacaattgataagactagtgtttgagaatgttttgaggaaatctcttcaccttttccttatctcttgcacagcagcatttaaactctctagtatgacacacctggtttctcaaaggtctagccctgctgcctttcactctaaccatttttttcccctatttcctatactttaaattccaaatccaaaaggaacgtgtgttgcttctgcagccttcatgtgttaccttctrcatggcattcactctgctggaattacttagtggatttgcttagtacactggtgaattattagattgtatgtatccaactctctgctggaatgtggtaggatttttgtttgggtggttggttggctttgctttgtttgttttgtttttgctattccatatccaagatattgctcactctcctttctctactatttctgcatcctgagtacttgtattgttgtactcaggtactgtgattgttttgatatttcttcagctagccagtaagcgt

SEQ ID NO: 793995 - DNA, 624 bp, Homo sapiens
gagtttttaaaatattttcttctgaactgagagatagatttctagtttctttatcaactagagttttctcctttcttggagatggcatcaatatgattctctacttctttcagcatagccacctcaggtatttattggaaaattaataatagatggattttttttgtttatttttattgagatacaattcatatgccatgaaatctgcttctttaaaagtgtgcaattcagtgggttttactatatttgcagtgttgtataactaccatcagtttctgactccagaacattttcatcaycccctgttccccacaaagaaaccccactcctgttagcagtcactctccaaccaaccctccaccctctcctggaaaccactcgtctattttatgtctctatggatttgcctattccagacatttcatacaaatgaaatcatgcaatatggtttcacttaacataatatttttaaggttcatccatgttgtagcatggatcagtactctgtccttttttattctcttttatagttaaataatactccattgtatggatattccccatttgtgtatccattcattagctgatagtcatttgagttgtttctacctttggactattatg

SEQ ID NO: 793996 - DNA, 596 bp, Homo sapiens
gaaatgtacctccagctattctacatttttatgttaatcatttgcatttaaattctgaagtttagagaaatcatgggtatcagaaaatcatatcctatgcctcatatgcctataaatttgtaagtctctacctttactctctttctttttatgcttctctttccatcactccttcccattctttcctcccattccaccctcactaaatccctttcttcttccctatkctgtcttattccctttcatcccttactttcattcacaactttgtacaaaaagaaagctggatgactttcaaacatatgcacataagttgagaggtgctaacaatatagttggaatcattaaatactagagtatctcatggtgtttacattaagtgttataacacttggaatctgattctcctatataaatcactcttgcttagttattgttttatttgcttaacagggaaacaattacattttactttgatagtctgtgtattctgtaactatttaattgattctattagttttgtgactctgtatgtctttctgttattattttaattgtagcctttctggattaatatccaaaaaagaaaaatattc

SEQ ID NO: 793997 - DNA, 635 bp, Homo sapiens
actatccattatagttatagtctctcaagggtaaatttctgatttctgcttgcatttagtcactttacatttccttccaatagtttcattttaattgacacataataattatacatgtttatggggtagaatgtgaggttttgatacttgttacaaygtgtaatgatcaaattagggcaattagcctatccgttacttcaacaatttataatttctttgtgttgagatcttctagctattttaaactatacaatgtattattgttaactgtattctccctactgtgtaatggaacactagaacttattcctcttatctaactatcatttgatacccattgactaatagattgatttccctttcctcctatgctttctagcctctagtaactgatattctactctctacatctatgagatcaacttttttggatttcacatatgaataagatcatgtggaatttttcattctgttcctggctttcacttaacatacaggaaatcagtttttgaaaatcatattttattcagtttttataatgattatccttgggagggttcacaggacatttcattctgccattaccaaaagccagaaccctatctctaatatttgaaatgatatcttatcagatg

SEQ ID NO: 793998 - DNA, 635 bp, Homo sapiens
actatccattatagttatagtctctcaagggtaaatttctgatttctgcttgcatttagtcactttacatttccttccaatagtttcattttaattgacacataataattatacatgtttatggggtagaatgtgaggttttgatacttgttacaacgtgtaatgatcaaattagggcaattagcctatccgttacttcaacmatttataatttctttgtgttgagatcttctagctattttaaactatacaatgtattattgttaactgtattctccctactgtgtaatggaacactagaacttattcctcttatctaactatcatttgatacccattgactaatagattgatttccctttcctcctatgctttctagcctctagtaactgatattctactctctacatctatgagatcaacttttttggatttcacatatgaataagatcatgtggaatttttcattctgttcctggctttcacttaacatacaggaaatcagtttttgaaaatcatattttattcagtttttataatgattatccttgggagggttcacaggacatttcattctgccattaccaaaagccagaaccctatctctaatatttgaaatgatatcttatcagatg

SEQ ID NO: 793999 - DNA, 492 bp, Homo sapiens
aagcttttatttagcataaaatgaactacatttcaagactttctttattgcctcattactgaaggttgattatggtattagtcactcctagtttctaggtttttgacaaatgaaaaacaaatgcacgctccaactacggatcaacctatatcatctgcttgattttaattaataaataataattgaaatcttagcagaatctctcatctctttttttttccctaagcctgaactttggtgacttttcagtcctgacttattgtatctaatttcaagctgagaaattggaacttggggagcagagacacagctggagcttctgttgcaccgcttacatgcagatataccgcatawctcagcacaagagtccaaaaggcaatgtttgcaagctagttttcaagactgacctttttcatgcacaaatcctctctcctgattgacattgcttccaaactttaggtattccttctcacaaaacaaatgagatactct

SEQ ID NO: 794000 - DNA, 540 bp, Homo sapiens
agggagtataatatctctaccattgttcttctggctcaaaatttttttggttatgccagttttctgtttctaagagaattttatgatttttttctacttgtgtaaaatatgccattggattttttattgggtctacattgaacctgtagttaacttcgtgtagtatgaacatttaaacaatattaatagtcccaattgataattttttwaaagtatctttttatgtatttgtgtcatcttcaatttcttttatcaatatcttgtagtttttactgtacagatttttcaacaccttcattgaatttatccctaagtattttttaatgctattgtaaatgaaatttttaacttttttcagattgtttgttgttagtgtatggaaatgtaactgattttgtatgttgattttgtatccggcaactttactgaattcatgtattggttttaagatttttttttggttgagttgttagggtttctttatataagattgtgtcatctgcaaacagaaacaaggtaacttcttctcttctgattggg

SEQ ID NO: 794001 - DNA, 633 bp, Homo sapiens
gtgagttcttatgtgttagatgagtcacttaaagacaccagatacagggttggcgaattcttatcctttctgacattctgtatcttttaagtgtagtattccggccatttacattcaacattagtattgagatgtgagctactagtaattctatttatcatgttagttgttgcctgaataccttgtatgtgtttttgttttatttgttgtgttattgttttataggccctgtgagatttatgctttaagggggttctattttggtgtattttgaggttttattttaagatttgaaactctttttagcagtttttatagtgctgtcttggtagtggtaaattctctcagcattaatttgtctgaaaaagattgtatctttsctttatttatgaaacttagttttgctacatacgaaattcttggctaataattgttttgtttaaggaagctaaagataggactccaatctcttctagcttgtagggtttgagaaatctgctgttaatctgataggttttcctttataggttacctgatgcttttgcctcacagctcacagctcttaagctcacagtttaagagcctcatagctcttaaggttctttccttcatcttgcctttagataacatgat

SEQ ID NO: 794002 - DNA, 577 bp, Homo sapiens
tctttcttttgttttctctgaggcagagtcacactgtgtttcccaggctagaggacaatggggagatcttggcttattgcagccttgaccttcatggttcaaatgatcctcctgcctcagcctcctagttgggactacaggtgtgcaccaccatgtgtggctaattttttgtatttttggtagagayggggtttcacccgtttcccaggctggtctcaatctcctgggctcaagtgatccatcagccttccccccttgaagtgctgggattacaggcatgagccaccatgcccagccctcttttagcagttttatgaattaaggtcttacacttaagtctttaattcaccttgaattgattttcttatatggtgtgagataagggtccagtttcattattttgcatgtgaatatccagttttcccaggaccttttatttaagagactatccttttccctttgtgtgtttagcaccctttacaagagatagttgactataaatatatggatttatttctggactctgttatgttccattgacctagatgtccattttttgccagtattttactgtttt

SEQ ID NO: 794003 - DNA, 577 bp, Homo sapiens
tctttcttttgttttctctgaggcagagtcacactgtgtttcccaggctagaggacaatggggagatcttggcttattgcagccttgaccttcatggttcaaatgatcctcctgcctcagcctcctagttgggactacaggtgtgcaccaccatgtgtggctaattttttgtatttttggtagagacggggtttcacccgtttcccaggctggtctcaatctcctgggctcaagtgatccatcagccttccccccytgaagtgctgggattacaggcatgagccaccatgcccagccctcttttagcagttttatgaattaaggtcttacacttaagtctttaattcaccttgaattgattttcttatatggtgtgagataagggtccagtttcattattttgcatgtgaatatccagttttcccaggaccttttatttaagagactatccttttccctttgtgtgtttagcaccctttacaagagatagttgactataaatatatggatttatttctggactctgttatgttccattgacctagatgtccattttttgccagtattttactgtttt

SEQ ID NO: 794004 - DNA, 660 bp, Homo sapiens
atgttccattgacctagatgtccattttttgccagtattttactgtttttgtagcaggacaagctgcagacaaaaccccttagacactgagttaaagaaggaagggctttatttggccgggagcttcggcaagactcatgtctccaacaagcgagctcccgagtgagcaattcttgtcccttttaagggcttacaattctaagggggtccgtgtgagagartcatgattgattgagcaagcagggggtatgtgaccgggggctgcacgcaccagtaatcagaatggaacagaacaggacagagattttcacagtgcttttccatgcaatgtctggaatatatggataacataaccggttaggtcaggggtcgatctttaaccaggcccagggcgtggcgccgggctgtctgcctgtggatttcatttttgccttttagtttttacttcttctttctttggaagcagaaattgggcataagacaatatgaggggtggtctcctcccttattctgattattgtagttttgtattgtattttgaaataaggatgtgtggtgtctccagctttgttttgttcaaggttacttcgggtatttggggtcttgtttttttagatgtttttctatttctggaaataatgttattggaattctgatcgg

SEQ ID NO: 794005 - DNA, 569 bp, Homo sapiens
gaaggaagggctttatttggccgggagcttcggcaagactcatgtctccaacaagcgagctcccgagtgagcaattcttgtcccttttaagggcttacaattctaagggggtccgtgtgagagaatcatgattgattgagcaagcagggggtatgtgaccggggrctgcacgcaccagtaatcagaatggaacagaacaggacagagattttcacagtgcttttccatgcaatgtctggaatatatggataacataaccggttaggtcaggggtcgatctttaaccaggcccagggcgtggcgccgggctgtctgcctgtggatttcatttttgccttttagtttttacttcttctttctttggaagcagaaattgggcataagacaatatgaggggtggtctcctcccttattctgattattgtagttttgtattgtattttgaaataaggatgtgtggtgtctccagctttgttttgttcaaggttacttcgggtatttggggtcttgtttttttagatgtttttctatttctggaaataatgttattggaattctgatcggaattg

SEQ ID NO: 794006 - DNA, 569 bp, Homo sapiens
gaaggaagggctttatttggccgggagcttcggcaagactcatgtctccaacaagcgagctcccgagtgagcaattcttgtcccttttaagggcttacaattctaagggggtccgtgtgagagaatcatgattgattgagcaagcagggggtatgtgaccgggggctgcacgcaccrgtaatcagaatggaacagaacaggacagagattttcacagtgcttttccatgcaatgtctggaatatatggataacataaccggttaggtcaggggtcgatctttaaccaggcccagggcgtggcgccgggctgtctgcctgtggatttcatttttgccttttagtttttacttcttctttctttggaagcagaaattgggcataagacaatatgaggggtggtctcctcccttattctgattattgtagttttgtattgtattttgaaataaggatgtgtggtgtctccagctttgttttgttcaaggttacttcgggtatttggggtcttgtttttttagatgtttttctatttctggaaataatgttattggaattctgatcggaattg

SEQ ID NO: 794007 - DNA, 569 bp, Homo sapiens
gaaggaagggctttatttggccgggagcttcggcaagactcatgtctccaacaagcgagctcccgagtgagcaattcttgtcccttttaagggcttacaattctaagggggtccgtgtgagagaatcatgattgattgagcaagcagggggtatgtgaccgggggctgcacgcaccagtaatcagaatggaacagaacaggacagagattttcacagtgcttttccatgcaatgtctggaatatatggataacataaccggttaggtcaggggtcgatctttaaccaggyccagggcgtggcgccgggctgtctgcctgtggatttcatttttgccttttagtttttacttcttctttctttggaagcagaaattgggcataagacaatatgaggggtggtctcctcccttattctgattattgtagttttgtattgtattttgaaataaggatgtgtggtgtctccagctttgttttgttcaaggttacttcgggtatttggggtcttgtttttttagatgtttttctatttctggaaataatgttattggaattctgatcggaattg

SEQ ID NO: 794008 - DNA, 478 bp, Homo sapiens
taaagaaacaagtagagggctgggcgcggtggctcacgcctgtaatcccagaactttgggaggccaaggcgggcagatcacctgaggttgggagtttgagaccagcctgaccaatatggagaaaccccatctctactaaaaatacaaaattagccaggcgtggtggtgcatgcctgtaatcccagctacttgggaggctgaggcaggagaattgcttgaacccaggaggcagaggttgcagggagctgagattgtgccattgcactccagcctgggcaacaagagtgaaactccgtctcaaaaaaaagaaaagaaacaagtagaataaccaragaagaaaatatatcgttattggaactgaaaactcaattgttaaaataaatagctgaaaaccacattggtgacccagcaatacaattgaatacattatcttcagtagaaaggataaaaaaattaaaatgtctttgtactcctataa

SEQ ID NO: 794009 - DNA, 628 bp, Homo sapiens
taaagacttgggtctatgaatgttcccaccttgtttggtgaactccacacacataagtatttatgaccaattctttggaagtaaaggtcctgcagagaaagatatatttattattaaacttaagagtaagacagactcttattacacatccttatatgttctgtaggaccaagaaatgaaagttaacaaaagtggaacagtgagtcttgtccagcgggctgattgatcctgatgaacraatgaaggttaatctagactggtgcataagaaatgttgattttctctatctcttgttaaacaagttagttaagcatcaaataataggatttgccgtaaagctttataccttaacaattttacccatttgtagagttcttcttatgtgcccgaaaagtgctattttgttgtaagttttaccatgggacatgtggtaaacatttttacttctatttaaatgcaataatatgaagctcagagagattggatttaagatctttctgaatggaaagacttttcttagaactcagtaaaatataattaatacatctaagtgttgggagatgaacttccagtggcttttagtaagaatattattaaataatatattaattcccataattttgcactt

SEQ ID NO: 794010 - DNA, 632 bp, Homo sapiens
ttgaattaatttggctgcttccctagtagtgggattgctgaattatattgaaatgctatttttaatttttttaaggaacatccatacatttctcataatggctacagcatttgacatttgaacgacaatgcacagcaattctaacttaatacgctcaaaaccactagttattttctgtccttgggataatggccattacaatggatgtgaggtgatatctcattttggtatgaattttcatttcctttatgattagtgactttgagcactttttatatgctgttggccagacttttaggattttggttgatttttttatagctattgaccatattgggtagaattgatagcttracaatacagggtcttcagcatcatatacattgtcatattcatttagactatctaatttctcttcagcaaagtattgtacttttgaatacataggcttaacaatctctagtcagttttatccttaagtattcatatatttatcattgttgtaaatgttattgcttttaatttcaattttggatttttctaaaactgaataatgacagcttatttcttcatttctaatccgtctctctctcctaccctcccttcctttctttttttgcggttggtaaaac

SEQ ID NO: 794011 - DNA, 612 bp, Homo sapiens
caaatctaccttattctcctgcttaaatgccctttaatgccttcccaagcctgttttcttgttcaattcctaacctctgcagagggcccagggagtgcctctcttttaagccacctgccccatcactgctacattacttctctgtctaaaccaactcaccaaaatctgtggacaagcggtgtttgaatataaggtcccaaaaattgcattttcaacaagtgtcttattcttaggtatagtagaatctaacaccccttcagcatgtctgcactggacctggaagtcagaatatttaacagaaccgatgactgtttgaggaagctgtaaaatacttccttaagctttagcttaagaattgagtttgtcacattagaaaacagagagaggctctctgaaagaaaaggatatttattcaaaaatgggcattgtaacagcaatatacataccatmgcaaactacatgcatgctcagctcaggtaggtaaaggaagacaaatatttttaaaggaaaaatgaagaagattataaaattgttttgtgataattattgttagctataaggatccataacaagggtggtgccggtccaaggttagacaggaagttgctgtgc

SEQ ID NO: 794012 - DNA, 639 bp, Homo sapiens
tcttagagtgaaagaaatcagtctggaaggctacacactatataattcttattatatgatattctataaaaggcaaaactgtggaaagattattgatgtcacatctatatttgcagtgacaataaaataatgttttccaacataaaaatcagatatgcaagataattaaggcaactatgcagattttttatcatttggcaggaagtcataagcaacatcttatgcaacctttcttctttcattattttgcctcacttcaggagataaactttaacataagttgttcacattttccttgctctttgagtaagtatgggttgtgtcctaaactttttactgctggttgtccagactctgggtgctgttttgatcctccaggcaaatttgttttagcattcaatcatatcaataaggttcagaatgtaaattctgtcttaccttctttgtacggtgatccaartcttagtttctttttctgtatttttactacatggcttgtatcagtcctactcatgcatgtctctcaagttaggctgtgacttctgtgaatttatgcataaaaacaagagatccctttctctagttatcattccaagatttgctcctcattccttaacctgcagtggttcttctgagttt

SEQ ID NO: 794013 - DNA, 629 bp, Homo sapiens
taatttaaccaatttttttctttcttttcagtaggcagaaatgttttatctttctcttgtgtaattgcactattttggacttccagtacaatgttggatagaagagattgtgagacttcttattgattttaaaggcaatggtttcaacatttttacaggttttttaaatatgatttctattaagttttatatttaacatatttcaattaactttattagtaattagagaaatgcaattgaaattctcaattaaaatatatcaggatttggtttggtttactgctaaagggcatattttatttaaatgcatgagttaattttttttcactgcaatgagaatttggccattggcatgagttagtggctcaaggatatcaggtcargtttttggtgattcccatcgtcttttcatcacgataccaagtggactcctggaactccaacaatcacttctacatttcaagcagcagcattcagaaaattcaactggtaaaatgtttttgtattcttggtagtactaccaaataattctcactgacaaagcttataggtaaaacagacttgaaaaaaatggtttttcatttgggggttattactgtgtattttatatgacagggatatatatatat

SEQ ID NO: 794014 - DNA, 616 bp, Homo sapiens
atcccgggggatgtcagcaattttcagtcgtgatttatgcactgctctgcttcatccagtaacgccattcctcacccaaattcttcaacttcctgtaccagcctcacagctccttcctctggatctgattgccttgccaatttggcttaagtcacattttcttcacttacttatcaataaattcagtgtgttttcagactgttgtagctgaaatgcatgtgtgtgattggtgagtactcatgatcttcttaaatggaggaccctccagctggcctacaggaccttaacaggcagggccaagaagtgaaatgattaccgcatcctgcttgcctctgtatacacaatacccaccatcctccctgtgcttaggacagtttgaaaatgcctttgaaaattaaaactgcaatttagtgtgaaaaaatgagcataactctatttcyctttaccaatccacagtccttcttgcctgccaggatagaccaatgttgtgtccccagtttttagcacagagcccagatggcacatgttgggatctcagtacatgtttatccttgaatggatgagtttttttttttttttccccacagcctaatcgcttaactttacagaatgctag

SEQ ID NO: 794015 - DNA, 565 bp, Homo sapiens; identical to SEQ ID NO: 793545

SEQ ID NO: 794016 - DNA, 542 bp, Homo sapiens
tgtttatagaagcacaatttgcaattgcgtgaatatgtaaccagcccaaatgcacatcaatcaataaatggataaacaaaatgtgacatatatatcatacacacacacacacacacacacacaccatggaatactactcagccataaagatgaaataatggcatttaaagcaacctggatggtattggagaccattattctaagtgaaataactcaggaatggaaaaacaaacatcatatattctcacttataattgggagctaagctatgaggacacaaaggcataagaatgatacaatgaamtttgaagactcatgggaaagggtgagaggtgggtgagggataaaagactacacattgggtacagtgtactctgcttgggtgttgggtgcaccaaaaatctcagaaatcaccactaaaggacttactcatataaccaaacactactgttcccctaaaaccaattgaaataaaattaaattttaaaaaaatgaaataaaatgttccagccaggtgcagtggctcacccctgtaatcccag

SEQ ID NO: 794017 - DNA, 705 bp, Homo sapiens
gagaaaagggcctggcatacagtaggcattcagtaaatgctttgtgactctgtcgagaggtgacagcatgctggcagccctcacaggccttgctcgctctcggtgcctcctcggcctcggcgcccattctggccgcgcttgaggagcgcttcagcccgccgctgcactgtgggagccccctcctgggatggctgaggcaggagccggctccctcagcctgcggggaggtgtggagggagaggcacgggcgggaaccagggctgggagcggcgcttgcgggccagctagagttccgggtgggcgtgggcttggcgggccccgcactcggagcggccgggcagtgaggggcttagcacccgagccagcagctgcggagggtgcgccaggtcccccagcagtgccggcccaccggcgctgcgctcgatttctcgccgggccttagctgcctccccgcagggcagggctcgggacctgcagcccgccatgcctgagcctgcccccgcacccccgccgtgggctcctggcggcccgagcctcccctatgagygccgccccctgctccacggcgcccagtcccaacaaccgcccaagggctgaggagtgcgggcgcacagcgtgggactggcagacagctccacctgcagcccccgggcgggatccactgagtgaagccagctgggctcttgagtctggtggggacttgga

SEQ ID NO: 794018 - DNA, 581 bp, Homo sapiens
atcggggacggcaggcggagaaagtgcggtttccatagcgccggggagagggcggacccgcgagccagcggtccctgagccgggagaccgcgcgggcgtctctccagcccccgcaggagcgccgccttccttccgcaggggcgtcctctccccccaccgctgcaggagcacccccttccttcctcggaagcgtcctctcaccacaccgcttcaagagcccccccttccttccacaggggcgtcctttccccctccgaggcaggagcgccccttttccccccacaggagcgccctccccaccccaggagcgccctgcgcccagcagacgggcaggtgggcgggcgtccactacctgtgtgcgcggtgcgggcggtgactgccaagttggagatgcccttggagaactgcttcgaattcatgtatctactgggcttttgtgactttcaaagcctatagcaaataagcacccctgcaattacrtctcctcaatgaccaagtcagggtgaggtgagggcttcctgagttcagatcccagcaagctcccgatcctgcgcaacgaagaaaactcaacaaaacaggct

SEQ ID NO: 794019 - DNA, 542 bp, Homo sapiens
tcgcgtcacattcgaaaaggaggctcaggctgaccaaggttgaagacagatggctagagtcacacattattcttttgtttcactacttttcacactgcccaccacctattttttttcaatctctttatattgtttaattgatttgaatttcctttctccaccaatctttccatttttcttagtttcastgaattggcaaactcttaagagtttgcaagtttggaatttcatttgtccaaatgagctactctttgggagaaatgaaggccaagttaggtgatgcagaaacaagcagtttttcattagtgatattagtccctttcctgcatctgccctgcccccacaccacggattatctcttatatcaggcattttcacaactgattatatggtctgtacaatgaattcaaactgtgcaacaggttctcacagacaccaaaacaatgttttggtttgttttgatgcagttgttttgcttatgcaattgccttcaggcctaacacttcagagcactctatctacactaatgtttacataagtca

SEQ ID NO: 794020 - DNA, 633 bp, Homo sapiens
cactggtctcctagcactgttgtagcaaaagtaccatacactggctggctccgagaacagacatgtattctctcatagttcaggaggccaggggtccaaaatcaaggtgtggccagcagcccgccctgccacagaaggacctgggggagcccttctgtgtttcttcctagctyctggaggctcccagagggacctggcctctctcggcttgtggcagccccactccggtctctgcctccttctttacaaggccttctccctgtgagtccgtgcctgtatcttcatgtggcatcttcccagagagtctctgcgtctcttctaataagaactccagtgactgggtttaggcccaccctaatcccatgtggctcatttggacttgattacatctgcaaaggtactatttccaaaaaaaatcccattcgcggatactgggaattagggctcggtcatatctttttggggacacagttctagccacagcagttggcagtgtctgtacaacaaagtattacaagaaagggataagcttgtcagtggcaggcaggactcagaggggcagagagccctcaaattcagggactcgtaggattggaacagacagttgcttctcccttgatagcgtaaaaagta

SEQ ID NO: 794021 - DNA, 633 bp, Homo sapiens
cactggtctcctagcactgttgtagcaaaagtaccatacactggctggctccgagaacagacatgtattctctcatagttcaggaggccaggggtccaaaatcaaggtgtggccagcagcccgccctgccacagaaggacctgggggagcccttctgtgtttcttcctagcttctggaggctcccagagggacctggcctctctcggcttgtggcagccccactccrgtctctgcctccttctttacaaggccttctccctgtgagtccgtgcctgtatcttcatgtggcatcttcccagagagtctctgcgtctcttctaataagaactccagtgactgggtttaggcccaccctaatcccatgtggctcatttggacttgattacatctgcaaaggtactatttccaaaaaaaatcccattcgcggatactgggaattagggctcggtcatatctttttggggacacagttctagccacagcagttggcagtgtctgtacaacaaagtattacaagaaagggataagcttgtcagtggcaggcaggactcagaggggcagagagccctcaaattcagggactcgtaggattggaacagacagttgcttctcccttgatagcgtaaaaagta

SEQ ID NO: 794022 - DNA, 616 bp, Homo sapiens
ccttctgatgttcagatgtgttcggagtttcttccttctggtgggttcatggtctcactggctcaggagtgaagctgcagaccttcgcggtgagtgttacagctcttaaggcagcgtgtctggagttgttcgttgctcccggtgggctcttggtctcgctgggctcaggagtgaagctgcagatcttcscggtgagtcttacagctcataaaagcagcgtggacccaaagagtgagcagtagcaagatttattgcaaagagcgaaagaacaacgcttccacaaagtggaagaggacccgagcgggttgccaatgctggctcgggcagcctgctttttattctcttatctggccccacccacatcctactgattcgtagagcccagtggcctgttttgtcagggtgctgattggtgcgtttacaatccctgagctagacacaaaggttctccacgtccccatcagattagttagatacagagtttggacacacaggttctccaaggccccaccagagcagctagatacagagtgtcgattggtgcactcacaaaccttgagctaaacacagggtgctgattggtgtatttacaatccctgagctacatataaagact

SEQ ID NO: 794023 - DNA, 424 bp, Homo sapiens
ctctgcagagacttcaggacccagctgagaacggttcctccaggtcctggggtcctccactccctcatcccccggcccacaatcccctgggcacccacactgggacgctgattccatctcgaaggcactgtggtgtcagctgtgaaggcttgcattccctgacacccgggaaggggcctcgttctcccccagcagggccctagaaataagcggattcatcaccttagcctcagcgtgagcttmgaagcacacgctctgaacagaacctcctggacacaatgcgtgggggaggcccatcgcccggccaaggcgtccttgagaccccaggagggagtcagattcctgctccgaagggcctgcaggccctggagcacccggacctcggctcctgacagcaagcagtggatgtacccgtgcaggggat

SEQ ID NO: 794024 - DNA, 647 bp, Homo sapiens
ggagggaagaaatattttcagcaagtctgctaccacactcctcaaattcaactaagagtggtgatttaatgtaagatttatatttttattaactggtgctttgttttcatgttgatattaaaagtgcctgtcttctgmattactttttatttttagggaggagaaatttattttgcattttccgggttcttgggagctgcttcagcactctagagtctttatggataagatcctgggtcgctggcacctgagtgaattagtagtgggttccctgatcttccctcaggtcagaaaagctccgcatccagccctattagcaggggcagaaacagacgccaggagacactgcccacctcctgggaatcggaatcagccttcacagcaccaggagcctggggtgggctgctgtttctgtaaggttttaaaaagtcagagagcacagagttcttccggagcctattctgactcctcctgagttttgttcacgtgagataatatcctcctgggaaaaaatcttgatggaaagccaaggcccccctgctggctgcaagaaaccggaattcggccttttcggcgcgcacccggacacggcgctgggatgaaggcgcccagttcatgcccagccagggcctgcagggacaacgggg

SEQ ID NO: 794025 - DNA, 647 bp, Homo sapiens
ggagggaagaaatattttcagcaagtctgctaccacactcctcaaattcaactaagagtggtgatttaatgtaagatttatatttttattaactggtgctttgttttcatgttgatattaaaagtgcctgtcttctgcattactttttatttttagggaggagaaatttattttgcattttccgggttcttgggagctgcttcagcactctagagtctttatggataagatcctgggtcgctggcacctgagtgaattagtagtgggttccctgatcttccctcaggtcagaaaagctcygcatccagccctattagcaggggcagaaacagacgccaggagacactgcccacctcctgggaatcggaatcagccttcacagcaccaggagcctggggtgggctgctgtttctgtaaggttttaaaaagtcagagagcacagagttcttccggagcctattctgactcctcctgagttttgttcacgtgagataatatcctcctgggaaaaaatcttgatggaaagccaaggcccccctgctggctgcaagaaaccggaattcggccttttcggcgcgcacccggacacggcgctgggatgaaggcgcccagttcatgcccagccagggcctgcagggacaacgggg

SEQ ID NO: 794026 - DNA, 609 bp, Homo sapiens
agaaagaagagggagagagaaagagtgagtgagaaaagagagagagacagagagtataaggtttatgatgaagatgtggcacatattatggaggatgtgaggaaatacagtgtttgtagaaactcataaaccctgctcacatgagaactgttaagacagttcacaaccacatacaaccatgcacaaccatgtacaaccactcacagccatacacagtccttcaaagctgcataaccaamcatgcacaaccattcacagatattcataaccattcccatccatgtgcagacatgcgcaattgtgcactttcacaaccttacagccatgcacagccatgtgcaaccatgcatattcacagctattcacagtcatgcacaaccatgcacaatcatgtgcaaccactcccagctgtgcatagccatgcacaaccatgcacgttcgcaaccgttcacagtcatacaaaaccatgcaaagccatgcacaaccaggcacagtcatgtgcaactatgcacatttacaacattcaccgtcatgcacatggaaggcacagccatgtggaaccatgcacaaccatgcacaactatgtacaatcattcccagccatgcaca

SEQ ID NO: 794027 - DNA, 609 bp, Homo sapiens
agaaagaagagggagagagaaagagtgagtgagaaaagagagagagacagagagtataaggtttatgatgaagatgtggcacatattatggaggatgtgaggaaatacagtgtttgtagaaactcataaaccctgctcacatgagaactgttaagacagttcacaaccacatacaaccatgcacaaccatgtacaaccactcacagccatacacagtccttcaaagctgcataaccaaccatgcacaaccattcacagatattcataaccattcccatccatgtgcagacatgcgcaattgtgcactttcacaaccttacagccatgcacagccatgtgcaaccatgyatattcacagctattcacagtcatgcacaaccatgcacaatcatgtgcaaccactcccagctgtgcatagccatgcacaaccatgcacgttcgcaaccgttcacagtcatacaaaaccatgcaaagccatgcacaaccaggcacagtcatgtgcaactatgcacatttacaacattcaccgtcatgcacatggaaggcacagccatgtggaaccatgcacaaccatgcacaactatgtacaatcattcccagccatgcaca

SEQ ID NO: 794028 - DNA, 594 bp, Homo sapiens
tgaaaatggacaaagaataaacaaaaaacaaatagtagatgttagacttaaaattaatcatataatcatattaaaggcaagtagtacaaacactcctattaaatggcaatgatggtcagattagatgagaaagcaagatccaactatatgttgcctacaagaaacacactttaaataaaaaaggctcaaatagcctaagtgtaaacacatggaaaaatatatattatgccaataatagtttttwaaaaagctggattggctatattaaagtagatttcagtgcaaaaattattataaaaggtaaagaaaattatttcgtaatgattaagatgttctttcatcataggacataatcctaaacatgcaaacacttaataacagagcttcaaatacatgaaatgaaacctagtaaaactgaatgagatagataaatccacaatgacagtaggagattctagcaccccgtctcggtaactgattgcacaagaagacagaaaatagggattcagaagtattaattatcactatcaacctatatgattcattgatatttatggaatgtttcacctaacataaaaacatgtattctttgtc

SEQ ID NO: 794029 - DNA, 602 bp, Homo sapiens
agtagactcaatgcatgaaggacccccacccattggcaccattaatctcgtctttacagcaatattccataacggcattgaaggatggcagagtcatggactgatttttctgtcttaccttcaccctgaatctaaggcagctactccaaaattccagaaaccccctcaatacttcctagaccaatggcaaagttccctacttcccaataatatattgtcccttcactttatgaattctgagtgccttttcctcacctgtaaaattggcttagtgatacttatgggagagggttgtaggaatttaatggaaaatatctggaagggccttggccctggcaaactgcccttccttcccctcctctgtcctgcaatcactcttcctccctrtggtcttagaatcgcctcctctaatggagctgttgctggtaagtcaaccggatctacagatgcactgtgaatgtgattgttcactgccctgggtagctcctactagaaactaagggctttgtttggctttgtttaaataaaatatcaactgagtcaatgtgcttctgcagaaagagtcgtgggtgggtttgagcacatcaggagcgggttttatg

SEQ ID NO: 794030 - DNA, 602 bp, Homo sapiens
agtagactcaatgcatgaaggacccccacccattggcaccattaatctcgtctttacagcaatattccataacggcattgaaggatggcagagtcatggactgatttttctgtcttaccttcaccctgaatctaaggcagctactccaaaattccagaaaccccctcaatacttcctagaccaatggcaaagttccctacttcccaataatatattgtcccttcactttatgaattctgagtgccttttcctcacctgtaaaattggcttagtgatacttatgggagagggttgtaggaatttaatggaaaatatctggaagggccttggccctggcaaactgcccttccttcccctcctctgtcctgcaatcactcttcctccctgtggtcttagaatcgcctcctctaatggagytgttgctggtaagtcaaccggatctacagatgcactgtgaatgtgattgttcactgccctgggtagctcctactagaaactaagggctttgtttggctttgtttaaataaaatatcaactgagtcaatgtgcttctgcagaaagagtcgtgggtgggtttgagcacatcaggagcgggttttatg

SEQ ID NO: 794031 - DNA, 602 bp, Homo sapiens
agtagactcaatgcatgaaggacccccacccattggcaccattaatctcgtctttacagcaatattccataacggcattgaaggatggcagagtcatggactgatttttctgtcttaccttcaccctgaatctaaggcagctactccaaaattccagaaaccccctcaatacttcctagaccaatggcaaagttccctacttcccaataatatattgtcccttcactttatgaattctgagtgccttttcctcacctgtaaaattggcttagtgatacttatgggagagggttgtaggaatttaatggaaaatatctggaagggccttggccctggcaaactgcccttccttcccctcctctgtcctgcaatcactcttcctccctgtggtcttagaatcgcctcctctaatggagctgttgctggtragtcaaccggatctacagatgcactgtgaatgtgattgttcactgccctgggtagctcctactagaaactaagggctttgtttggctttgtttaaataaaatatcaactgagtcaatgtgcttctgcagaaagagtcgtgggtgggtttgagcacatcaggagcgggttttatg

SEQ ID NO: 794032 - DNA, 602 bp, Homo sapiens
agtagactcaatgcatgaaggacccccacccattggcaccattaatctcgtctttacagcaatattccataacggcattgaaggatggcagagtcatggactgatttttctgtcttaccttcaccctgaatctaaggcagctactccaaaattccagaaaccccctcaatacttcctagaccaatggcaaagttccctacttcccaataatatattgtcccttcactttatgaattctgagtgccttttcctcacctgtaaaattggcttagtgatacttatgggagagggttgtaggaatttaatggaaaatatctggaagggccttggccctggcaaactgcccttccttcccctcctctgtcctgcaatcactcttcctccctgtggtcttagaatcgcctcctctaatggagctgttgctggtaagtcaaccggatctacagatkcactgtgaatgtgattgttcactgccctgggtagctcctactagaaactaagggctttgtttggctttgtttaaataaaatatcaactgagtcaatgtgcttctgcagaaagagtcgtgggtgggtttgagcacatcaggagcgggttttatg

SEQ ID NO: 794033 - DNA, 586 bp, Homo sapiens
atatttcgatacaagcatacaatgtgtaatgatcaaatcaggataactggagcatccatcgtctcaagcatttatttctttgttaggaacatctcaattccactgttttagttattttgaaatatacaatagagtactgtgaacttttattgtagcactattcaaaatgtttgttcttgattcttgttactgaaacaccaggggtttggttgaggtcccgctgcgcaccacacagaaagccaatcactgaaccgagtattaccaaggaagaaggccttaatcaggtgccgtagcccaggagacacgagctcagtctcaaatccatctcccttacagattcaggccagggatttatatagcagggaggaaatgtaacaatgtttaagaaaacaagaactagggaggggcaaggaagyagtcatggtgaatgagtgcagtgttgtggtgagtttcagtcctttttttgaggggcctgaaggttatttcctgaggaaggaactcagataaaacaaaagtttcaaactttaagaccagaagggttagtttctatgtttatcaaaaagaacagtctatgggactattgggt

SEQ ID NO: 794034 - DNA, 596 bp, Homo sapiens
aaatgcaccaaaactttcccatataagaaactttataagtaggtatgaaaattagcattttagataaattgcccaggtgattttcatgtccacacagttgttcctttccatcttcttcagaaattttaacaaattttcttattaccttaagaaagtagattgttaaaagatagcaaattgttctaccaaaagacatatgcatttgcctgttcattgcagcactattcataatagcaaagatgtggaatcaatctaggtgcctatcaacagtggattggataaagaaaatatggtacatatayattatggaatactatgcagccataaaaagaatgaaaccatgtcctttgtagcaacatggatgcagctgaaagccattatcctaagtgaattaatgcaggaacagaacactgagtaccacatgttctcacttataagtaggagctaaacattgggtattctcagacataaatacggcaacaatagacactggggactgctagagaagggagggagaaagacaggaaagggggcactggttgaaaaactaactgatggctactatgctcagtacttgggtgatgtgatccttcata

SEQ ID NO: 794035 - DNA, 596 bp, Homo sapiens
aaatgcaccaaaactttcccatataagaaactttataagtaggtatgaaaattagcattttagataaattgcccaggtgattttcatgtccacacagttgttcctttccatcttcttcagaaattttaacaaattttcttattaccttaagaaagtagattgttaaaagatagcaaattgttctaccaaaagacatatgcatttgcctgttcattgcagcactattcataatagcaaagatgtggaatcaatctaggtgcctatcaacagtggattggataaagaaaatatggtacatatacattatggaatactatgcagccataaaaagaatgaaaccatgtcctttgtagcaacatggatgcagctgaaagccattatcctaagtgaattaatgcaggaacagaamactgagtaccacatgttctcacttataagtaggagctaaacattgggtattctcagacataaatacggcaacaatagacactggggactgctagagaagggagggagaaagacaggaaagggggcactggttgaaaaactaactgatggctactatgctcagtacttgggtgatgtgatccttcata

SEQ ID NO: 794036 - DNA, 529 bp, Homo sapiens
atcttgactcactgcaacctctgcctcctgggttcaagcaattctcctgcctcagcctcctgagtagctgggatcacaggtgcccaccagcacgcccagctaatttttgtatttttagtagagatggggttttaccatgttgagcaggctgttcttgaactcctgacctcagatgatcctcctcccttggcctcccaaagtgmtgggattacaggcttgagccaccacgtccagccgtattggtaaatattattaatattttttaaaggtggaactaaaattctggataaaaatgacaaggagagggcacggagggttacagagaagggctccacaggtgattgcacctatggattctacctattgcacaggctattgcacctatgtcaacaattgtaatattgttgacatctcaaatatttacttgttttgcattcagaaaagacctttgaaaaatgcttgactgtcttcactttcttttaagcaagggagatttgagagaagacaaatcttttatcagattatttcc

SEQ ID NO: 794037 - DNA, 639 bp, Homo sapiens
ttctgtgaccttgatctgatgaccaggtgagcatgtttctatttgtgcactgcagcattgcttagtttagtgttagaaagaatggggcagggtttatatgtcttgcatttttcaaacttctgtctgaatgtttgaactgtcaacgacattaggaccaacacatattagtagttcagcactgttggaatgtggtcagcagttatggagtctcaaagtccaatctgtgggcctactgcatcacaagtacctggaacgtttcacagaagtgcaatttgcaagactcacttcagasctgctgattcaaaatattgggtctatgtgtttaataagcacttctggttattctaactcacatcaaagtttgaaaattacttttatagagagcgaaacagtaactctaaatgggatcagcaaagataaaatatttcccccttccttggttagaaaaatgtactgtgtattgtttaactatgccaggaaagacattcttgcttatctatgaaaagagttcatgtggaagaatataatgaaaagagttaggctaggcatggtggctcatgcttgtaatcccagtgctttgggaggctgaggctggaggatcgcttgagaccagaaatttgagaccagcatgggcaacct

SEQ ID NO: 794038 - DNA, 639 bp, Homo sapiens
ttctgtgaccttgatctgatgaccaggtgagcatgtttctatttgtgcactgcagcattgcttagtttagtgttagaaagaatggggcagggtttatatgtcttgcatttttcaaacttctgtctgaatgtttgaactgtcaacgacattaggaccaacacatattagtagttcagcactgttggaatgtggtcagcagttatggagtctcaaagtccaatctgtgggcctactgcatcacaagtacctggaacgtttcacagaagtgcaatttgcaagactcacttcagagctgctgattcaaaatattgggtctatgtgtttaataagcacttctggttattctaactcacatcaaagtttgaaaattacttttatagagagcgaaacagtaactctaaatgggatcagcaaagataaaatatttcccccttccttggttagaaaaatgtactgtgtattgtttaactatgccaggaaagayattcttgcttatctatgaaaagagttcatgtggaagaatataatgaaaagagttaggctaggcatggtggctcatgcttgtaatcccagtgctttgggaggctgaggctggaggatcgcttgagaccagaaatttgagaccagcatgggcaacct

SEQ ID NO: 794039 - DNA, 614 bp, Homo sapiens
ttgagcccaggagttcgagaccagcttgggcaacacagtgagatttcatctctgtaggaaaaaaaaaaaaagagtgtaagcgtcagctccactggtggttctgtgagttccatatttggaaggattgggaggctttgtctgggctcagcagaaaggagctggaattgattagcaatgtctactacagatgcagtagagaagtaacatgtgtatcatcccaggactgaggggcccctgctcttatattctctgagatgtttcacaggacgagatcattccttggtgaaccctgcctatggcctgggtaagagaaagaagaatgtggccktcatgtttttccccacttttccttagttgaagtctttttcgacctattctcctggcccaagatctcatggaaggaggtcattccactcaagatagcacaaagaggggaggaggagtggtggaaggcactggagtcaggaatctctgaatggcaagagtgatcagagaggtctgaaggataggaggatgctgggctgtggctggtccttgagactttggggagtggagaaggtctgggcctggcagttgcaccagtctggagcagccagggttcctgggaccctctc

SEQ ID NO: 794040 - DNA, 596 bp, Homo sapiens
tgtccatccagattgtggagggtagtctactctactcagtccaccaaagctaatctcttcctcaagaaacacccagaaataacgtttaactagatatctgggcaacctgtggcccagtcaagttgacacaaataattaaccagcacagtgttctgcattatttcccagtgttctccagcaggattaagacctagatgcctgcaagaaagttgcttgttaacaatgtttattggctgtctcccctccctgtttcactcccctactaccctaccagtgtttcctgagattactttgcaaatcaactacctgcactcaaatacttgtctcagtagccgggcacagtagctcatgcctgtaatcccagcactttgggaggccaaggtgggtggatcacckcaggtggggagttagagaccagtctggccaatatggtgaaaccctgtttctactaaaaatacaaaaattagccgggtgtggtggcgcttgcctgtaatcccagttactcaggaggctgaggcaggagaatcgcttgaacccgggtggtggaggttgcagtgagccaagattgggccactacactccagcctgtgtaacag

SEQ ID NO: 794041 - DNA, 617 bp, Homo sapiens
gagtagtggctcatgcctgtaatcctagcattttgggagaccaaggcaggtggatcacttgaggtcaggagttcgagaccagcttggctaacatggtaaaaccccatctctactaaaaatacaaaaattaactgggcgtggtggtgggcacctgtaatcccaggctgaggcaggagaattgcttgaaccgctcgggaggtggaggttgcagtgagctgagattgccccactgcactccagcctgggaaacagagtgagactctgtctcaaaaaaaaaaaaaggaaaaaaaaataataaagagctgtagggcaggaattgtacaaggctaatatccaagatattatgtaattttccttgttttcctttctttccattcaggcagatgtgattctccttgtcacrtgctctatcaggtgcgaatttgttcttttcctaggagtgaatgtattttatgtaataatgccagagctaacagtgcctggcctggctatctatggagatgagccagtggccccatggcagtaggacttgcagttttcccacagtggagatagtctttatacaactggctgacattggctgggcatgtaccgtggtgtcaggttctgagtgagta

SEQ ID NO: 794042 - DNA, 531 bp, Homo sapiens
aattaaaaagttaattactgttctcttaaagctacttttaatcaaacaaaaacatttctgccacttccactgtagcatgtaaaattcaacttacttcactcctaaaacctaaatctgaccaaaaaacaaacaggccagacatggtggctcacaccaataatcccagcacttgaggaggcctttgggaaaccagcccagccaatatagcaagactgcatctctacaataaataaaaatwaaaaaaaaaaattatccaggcatggtggtacgcacctatagtcccagctactcaggatgctgaggtgggaggattgcttgagcctaggagtttgaggctgaagtaagctgtgatcatgccattgcactccagcctgagtgacagacaaagactgtcttctaccaaaaaaaaaaaaacataaaaaacaaaaaaaaccttacttcgctgtcaccctacaaagtattttgatgcactgcttccaaattaactatacaatcaaccaattattttagggacctataatacatttatgg

SEQ ID NO: 794043 - DNA, 585 bp, Homo sapiens
gctgcttttggtattactgttgccgctgcatcaagtttagactgtccttgaggctgctgccgctatcagatataccatcagaaaccagaaataggaagaggatggcttcttccatcctccagtcttccagtcttctcccagtgtcttccattggcagaacatactggaagccagccagaagagtagctggaagattcagttttcggtgtccctgtctccttaaatatcaaagcacaaaatgtcatgaatgaggccttagagcaaaatgattggctacataaaacctataaccaaaactgtacataactgaaattctagctttttaaaagtyggggacaagtgaaagggttatcacaactctttttttttatttttttaagttcaggggtacatgtgcgggtttgttacataggtaaactcatgtcatgggggtttgttgtacagattatttcatcactcaggtattaagcctggtacccattagtgatcctctccctcctcccactctccaccctccaggaggccccatctatatgtccctgtgttctcattatttagctcttataagtgagaacatgcagtatt

SEQ ID NO: 794044 - DNA, 587 bp, Homo sapiens
gatttctttattctggacttaagtataaatgcaatcatacaatatttgtttttttgtgactggcttccttcacttaatgtttgcaaggttcatccatgattgtagtatttatcagtacttcattatttttatggccgaataatattccattgtaggattataccatatttcacaatatttatttaacattttcctttaagttgtgactagtttagtttaaaaagaagcacgaatcttgggaaattaaggtaaaattgtccttattttctgattatagaattgtgtgtcttgaaaagccaaaaggattacggaaaaatgattatagctagagagttctgcatggtgactttcctgtatgacaaccagttagcaaacattttgaaaactacttcatttatatctacaaaagcttctgtacttataaamaaaaataagatgcaatatacaggctacacacacacacacacacacacacacacacacacacacaagtcttctcagagacatgcaacttctataattcagaagccaacatgttcctggagtaaagacatattgtaaattgagtgtaaattaatttataaata

SEQ ID NO: 794045 - DNA, 674 bp, Homo sapiens
agcgatttatatcttttgaaaatgtcatttgattaaaactttgatgaagaaacatattcactaccgccttaccatgcctcatccgccatgaacttcactctctgaaaaactctgtcccagacatagataaatcctttggctttcctccactttcttcccctttgaatataacagagacagtaattttgtaaaaaattattttgtctaagaaatgagccctccttgcttttacagttactcatgggctccagcatacggtgctttgcatttttgcatcaaagcactacacgttgaatcytgcgcacaagtacgtcataactccttacaaaaggggcacagataacctcttagatttcaaataaaaaatgctatttttattcttcttttatttaagacttttatggcatttcatattgtatactgttctatgtttccatgtgtttcccagttcagctcctaccagaggctgctgcttcccagtctctcattcaaggacctctcctccaacaacaatccgtcaaaatgttaacactgtataagactccacatgtgcctttctgcacagtagaaacactgcctggacaatctcaaatatctatatagcttaaactctcaaatacccattattcacttttccattcttagctccttgagaaaaggggccttaacctgct

SEQ ID NO: 794046 - DNA, 576 bp, Homo sapiens
ttcttcaaatactgatgagagggcaggataacctaattgtttccctaattgggccataaactttgcccccaaattttgtctattccaatttccaaattataaaattagcttatacactgcccttcagagtatcaacaatttttaaataagattaagaatctggttgccattgtatggctcaaatacagtataaagctttgagggaagaagrgagaaattgaaagaatgggctttcagtcttttggaatagcaaacctgaactttccccagcagtaaatgattgggtatctgtgttcaccgtgactgggtcaggctggctgaggcacaacggcacaacatcactttaattaagacaaggtaaagcatgagttggcaaaattgcccactatttgtcacctgaagtccaattacgactgtaatcactgagcatctccaatgctgaaaattagatccagccatttacctgtaatatacttcaacataacaaatatttggagattacttaaacagagcaaatcctttgaaattttggtcaccctccttccgctggccaaattaatgatctttatgcctgaa

SEQ ID NO: 794047 - DNA, 615 bp, Homo sapiens
taattttagggttgaattttgatcagagccattttatgtaaaatgaaattgtttgtgaatctgtaatttgaaagtgagatttacttgctccttaaatccacactctttagtgtgtgtaaatagtgctttgtgtgattaatatctctgcttcccttgggccaagtttcactcaactatttaggagcattctactgcaccatartttacatgaacatctaagagatagtttattaatgaaatacattgccatgtcttatgaattatgtctgtctatactcaatattgtttggattaatctttagctctatcatcatatatggtattctaatatgtcaaatgttcataaaaataaatgtttgtatccatttgccaaatacgtgtcatgcagattaagtcaggaagattaaaaatactctaagattttaattattcaagcatattttaggtctgctcaaacattttggaggctcaccttacaaaatcaacttcaaaagttttctattaattgcaacatgttatattagattataagcagtaacacacatggcctatttcaaatgaattattcattttattgcactgtatgaatctttgtaatgtcatccttgggatgac

SEQ ID NO: 794048 - DNA, 569 bp, Homo sapiens
tgcatctaatatatcacaaaatgcaaaaattggaagcagagaaagactttaaaaaggtgtactatattctataagtactcccaaatatagaactaaatgtgtaaattgtaaaatcacgaaatctattaaactcttatgaacttggatttgactcatcttttactctatcctttacaaaggcttccagtttaatttgaaatttttagttacaaaatgcatgatggctccaccatttaacattagcgctatttccagtgtgcaaaaagtcatatcccattagtttcaagcatttggtcagatattargaagccattgcttaaagaaggaattcacaaaatcagtgcttctccatgctttttttttttaaagaagagatctggctttgaaatacaataacaacagttatactacagaattaatgaattgccaattgtaaaatgtgaatgtataatgaatttcagggcagtgctcttgcagccagactgaattaagagttaaagttctaaagactcaattgcctctgaaaatttgaggggggatgtttatcagttaaagaaaacatcagctgc

SEQ ID NO: 794049 - DNA, 635 bp, Homo sapiens
ttgcctttatagattacaaaccttgagcccaacccttgcaagactcttctcaaagcatgaggatcaaatcagagaatatgagtgatgaatcgcctctatacctggaacacaacccaaaaccatggttcctgacaatgttttaataaaatacaattgaactcacaaggcttatgctataatcccatccccatgagtcctactgcagttacattaaaataataagttttaaagaagtacagagcacatccttgcagaaaagtttatttgtaccctgcttctcaaccagggtttaaggtgtttcacaactataaaacaaaaataaaaatattggcaaaatataagtataaagaagcataaccagagataataagattaagcaaagaaatcaagatcatgaaaaatgccttcctggaattacttttgtgacatctattcaccggaattatttcatctctaaacttttatctctgactgttaattgtctaaacyctggcactctcactgacttattcattgtaaaataagttaggctcaacttgctcaatctaaaatacttattaatccacttaggggctttcccagggaaatataggacatgagcaagtaacactatataaaataatctgcccattttg

SEQ ID NO: 794050 - DNA, 622 bp, Homo sapiens
gaaaataaagttcatgagtggttatatgacatgtttttgttttctgtctcaaaaaccctagcagtttgcacactttgcttccatctgtaccctgttacctattgtgacatatcacatgctcgaaggccacatctgggactttcgtaagtagcaaccgtttttcttttctgtggtttctaacatgctatataagattttatctctattgtatttcccgtaacactgaccttccattggcttctttctcttttctacagagtatatttttggagggcaaatctgttaatgtgtattctttatgctctgtacatcctatgtaagatcatcagtaaatatctatttacatttttttgaagggcagagaaattagcaagtgtatgttcatgggtttagatgaagtagagtgtagtaattatgaacaccaactcakaaactcaacattttgggtacaggtgtaaactacaccacttctagccatgtgatcttggacaggttacttatgcatgctatagccatgtttcctcaaatggaaaatcagaatgataaaataatacttagttcagagagttgtggagttcaaatgcatgtagaaagcttagcatattgcagaatatatgtaagt

SEQ ID NO: 794051 - DNA, 624 bp, Homo sapiens
cttgtttctttacatcacagatattttgttgaaaactattaagatagtatttctagaatataataaaacattcagaatagcattgctaagcaaatacactgtgccatgattatgtttttttgcaatgtgtatgcaattgctttattttacattaggaaatagacaaaatgcatctattcatttttytttttaattttaatctttttgaacatgcatttgtggttcagtcaaatagcagaatgaaaaagtagctctatccacactttggaggcactttttaaaaaagggaatagtatagcaacctgtggcttcttctagttcacttctttggttttcttcaccacttctatcatatcagaaatgccctttattcagtttttgtttctctaggcacataattttggttctctttgaagctgaatccctcaacacctcttaaaaatctattgttcctcaggcttagcaacttactgacatgaacttcctcctttgtcttccctgtgcaactatacttggggagaatgataaacatgaggtttctcaaaccaaaagttaaccattgttttcctcaattaaaaaatccagagtaattacatatttctagccattcaagtaaataaataa

SEQ ID NO: 794052 - DNA, 623 bp, Homo sapiens
gatacatatctgtgtggtctttggttaatgaattaacaagataaggcaaaatgataatagtttgtagaatgacatgttctcatcatgtagtccatgctgtaggataatacacaagactcccagctcccagaccaaattactattcccctagccaagagaactsttagctgtcaatgactcacagtcgagtatctctcggatatttcaatcagctgaaagggcagtgtgtatctaatgattagttattaaaaggtttcgaaggccagccccttttctcatctatgagaactctttttggtgagacaattcctcatggcagtccatctcatttgcacatcttgcaaacagaggcattaactagctaaagatatgtgcacattgaactaacttggaagatagagataggacaattttctgtgaaaaaagggaaggtttatttaaagtcttggaagatagagatagtatctccttcactagcaatgtacaggcatatttattgccagtatataagattttatttccttaagttcaacttacttcatatgcagccatccatctttttctaatgcattgccccatggaacttggcaaggaaaactgacacaagtattccagtgctcata

SEQ ID NO: 794053 - DNA, 537 bp, Homo sapiens
caaatattttatggcttaagacctcaaaagtaaaagcaacgatagcaaagatagacatgaaattacgtcaagctaaaaaagcttttgcagagcaaagaagacaagagtaaagagacatcctgcagaatgggagaaaatatttacaaaccattcatttgacaaggggttaatatcgagaatatttacaaggaacttaaacacatccacatcaaaaataacaaataatctcattaaaaagtggacaaagtatctgaatagacattcttagaataagacatacaaaaggaaaaaaaagtttatgaaaaaatgctgaacatcactaatmaaggaaatgcaaatcaaaaccacagcaaataacaaataacaaatgctcatggatttgaagtcatattattactaaaatgtctatactaccatagcaatctacagcttcaatgtaattcttatcaaaatatcaatgacatttttcacagaaatagaaagaaaccctgaaatttgtgtaaattctcaaaagaccccaaatggctagagcaaaat

SEQ ID NO: 794054 - DNA, 635 bp, Homo sapiens
tcaaagatctaaaagaaagaggcttgggtttacttttatgggcaattgtaaatgtggaatcattttacatgatgataacttaaattaatatttttgctatacttcttttgtattttttcccaattttgattatgaaaattttcagatacagcaaagttaaaggaatttttaggtgagaatccatatactcaccacttccatgctaccattaacatttaactaaactttctttatcatgtctatccattcttccaaccttctatcyagcaattaattatcatttgctttcagtgcatttgaaagtaaattgcagacattggtaaaatttctactaaatattgaaatatgcctatcacaaattaaaatttagcatttacttatattcttttcctgtaaaatttatgtgaaatgaattgcaaaaattgaaagtgtacgttctctgaatttcagcacaatctcacctttctaacccaatgttctaccaggatacagaaacttaacatcaccccagaaagttcctcaagcctttcccagtgagtcttcaatccactttctaaggggcaagcactcctgtgattttctccctcccccatgattatttttttctcttccagaatcttctatcaatacactgc

SEQ ID NO: 794055 - DNA, 655 bp, Homo sapiens
  misc_feature 347: n = A,T,C or G
gtaaataaaccgtgcctggtgcctgttttgactcatcctagcaggtgcttgactctagagtgtgcttggccacacagatgcttctggattgcctgcctatgccctcagtcttcacgggatcagctagatcaataccaaatgattgagttctaaaaagtcaagactatattaggctgggtggtggctcatgcctgtaatcccaacactttgggaggctgaggtgggccaatcacttgaggtcatgagttcaagaccagcctgaccaacatggtgaaaccctgtctctactaaaaatacataaatttagctgggcgtggtggcgggtgcctggaatatccgctactcangaggctgaggcacaagaatcatttgaaccttggaggcggaggttgcagtgagccaagatcacaccactgtacttcaggctgggcaacaaatctcgataaacacacagacatgcatgcaaatttaaaaagtgcgackatgtaacagagaaaagaattttgcttaatttatgcagagaaccagtttaaattcaccattttagtctgtctgcttcacaggcacccctgttcttataattggattttccatatgttcacaaacagatgttttagtatcagtagtcttcccgctgtgtttctcttttgggtac

SEQ ID NO: 794056 - DNA, 617 bp, Homo sapiens
tggagagagctgctactctacagctcagaagctggtgggttgtgaggcttctctagaagcttgctgcctctggagactcactctgggaaattaaagcatgtattgctgcattcccttaaagaaatctggcatttctcttagagcttatgttattgtactgctgttctaccacaagctcatgcttgsgggtaaagtgctggtcgctcttgaagttcaggcaatagaccttacccatgtccagtcttctttttcaataagtttttatttaataaataaatgttaacagtttctatcatgcaaagtacacatgcagtggctccagcctctttgctgggactctttgaagaggtttaactagctagcaactaacaactttcaagcctttgtaggctcatcctataagtctaatgtgaaggttctatgtaaatgaatgacggtttaaaaaactactatatgtgaaaggaaaaacacgatcgattactgctaagaacatataattaagtttagtcaataaagtattctgtaaggaacttgctttaataaatataaaaatgatgttgtttaaagagattttcatgaattttaaacattagccctggcattcatttgtaatatag

SEQ ID NO: 794057 - DNA, 617 bp, Homo sapiens
tggagagagctgctactctacagctcagaagctggtgggttgtgaggcttctctagaagcttgctgcctctggagactcactctgggaaattaaagcatgtattgctgcattcccttaaagaaatctggcatttctcttagagcttatgttattgtactgctgttctaccacaagctcatgcttgggggtaaagtgctggtcgctcttgaagttcaggcaatagaccttacccatgtccagtcttctttttcaataagtttttatttaataaataaatgttaacagtttctatcatgcaaagtacacatgcagtggctccagcctctttgctgggactctttgaagaggtttaactagctagcaactaacaactttcaagcctttgtaggctcatcctataagtctaatgtgaaggttctatgtaaatgaatgasggtttaaaaaactactatatgtgaaaggaaaaacacgatcgattactgctaagaacatataattaagtttagtcaataaagtattctgtaaggaacttgctttaataaatataaaaatgatgttgtttaaagagattttcatgaattttaaacattagccctggcattcatttgtaatatag

SEQ ID NO: 794058 - DNA, 622 bp, Homo sapiens
ctataaataagagtgtgcgatgtgagggttactttgaaagaatagtgttatcctgtctgagtctgaaatttgcagctacaggcattccctctatatatcttccaacacccctatttgaccttcactgtatttggcagtcttttctcaggtattattgattttccaggtattactattttctataggaatgggatgtgcatttttttaaaaaatcctcctagttgcttttgggtgatcatgccaggagaagaggcatatactgtcctgtcttctgtcttataaattggaagtaaaaatggagcttaaatcaattaattaacaaggtgtaatgttacgtactcagaggtaagtaaggrtgagctagacattctttcttgtcttagtaatcttacaatttattaaagtggccaagaaatgcaaatatcaatggaaaactaacccagtaataggcaacatatgagtgctacctaaagggacaataagagtttgggaatttggaccagggaaaagtggctgaggtctgccgtggtcacgcatgaaagttactctccatttcctgcttcactgccctggaggaggctgccagaagtcagaacaagcctgactctttctacctccagtc

SEQ ID NO: 794059 - DNA, 535 bp, Homo sapiens
ccttctctggattggccgaggccggagccggctccctccgcttgcggggaggtgtggagggagaggcacgggccgggaaacggggctgcgggcggcgcttgcgggccagcgcgagttccgggtgggcgtgtgcttggcgggccctgcactcagagcggccggccggccctgctgccccgggcagaggggcttagcacccgggccagcagctgcggaggatgcgacgggtcccccagcaattccggcccacaggcrctgcgctcgatttctcacggggccttagctgcctcccagtggggcagggctagggacctgcagactgccatgcctgagtctccacccacccccagccgtgggctcctgcgcagcctgagcctcccagtggagcgccgccccctgctccactgcgccgggtcccatcgaccgcccaagggctgaggagcgctaaaacaaggcgcgagcagctccccctgcagccccagtgagggatccactgggtgaagcccatctgggctcctgagtctagcagggactt

SEQ ID NO: 794060 - DNA, 484 bp, Homo sapiens
gaagctgtaccttttttttgttctgaaaagagatatttgaaagtcacttttctgaaataaaagggtgagttagaggaagagaaacgaaggcatctgatcaaaatcacagcgcagaatcttaaagtgagaaagaggtttaaactcagtttgaggtgaggtatggaaaawtagtcatttgcaaggatgaaggagtagaatcctaaatgtcactgaaaggttggtgttgtagaggatgtgattttcttttctgacttaagtgaaactgctagtgcgtatgtattgagcactatgtgtcaatacttgacatttgctatctcgcttaatctttgctatagcttcatgagctaaactgcactatgatcatctccatttttctgatgaaaaacctgaggttcagtaacctgcccagtgacacacagtttgtaaatagcaaccaggccctctgaccactgccaaggtgggcacaatgagcttctggaggaag

SEQ ID NO: 794061 - DNA, 582 bp, Homo sapiens
ctataggaaacccagaagcaaaaccttttattcctttgtaggatagtatcaatatatgaaccattgtgtttataatgataataatattaccatggtacatatttacagtgtttgttatttgcctgacatcatgctaagtactttcctttccttatttcattttatcctcaaaattattctatatggtggtttcttctattatctccaccttacagatgaggaaacaatattagagtgctgagtacttacttgaccccaggctgtattagaagtcagtgggggaggggctatcccagatgtgattcctctccaaagtcctcatcttgaccacggtaggaggtgggggctgcctcaccaycactacacctgtattctacttgtaattctcactagcaagggagactctttttaacttcgagaccgggaatgaatataaccaatgcatacagcaaagattcccagagacataaatttcaaagggatatgatatatcacagtgactcttacaggggaagtggtcattgggtatagcataaaaggagaaataggaattcactgtggaggaaactttagtatagaggg

SEQ ID NO: 794062 - DNA, 624 bp, Homo sapiens
ctctttgaagagagaaagcctcaaaatgcttgttgtcaaggatgtttcactggaattacagagcgcttcaacaacagtgaatgtgactgtatcaacttcagactcccaccttaagtacaaaacagtatctgtcagaaccataaactatctgaaaagagaaaggagttttcgtgggtaggctttaaagtctcaaaaaataataataatttccttctgtatctctctgttgcttattcaagctaaccttcttcctgatcctctcccacatcaccactaatctttattgaacamccctgctgcctctaaaaagcatattccaggagcatgctaaacttgtgactgcaaagaacaactgcccagacagagttcaaaaagtttacacggatctacaccctccacaggaaattagcaattcccaatattaaattgcttgcttgttattgtatattgtcagtttggttttgactctgtttgcttttgtgaggaatgctgaaaattctcttgtataatttaggaaggtaagaaagaaaatgccaaacttaatttccaacctaactctccattttgatattgtggccaaccaaaattgagacttagcatccccacacactgactaccacccta

SEQ ID NO: 794063 - DNA, 561 bp, Homo sapiens
ctgagcccaggagtttgagtcacagtgagctatgattgtgccactgcagtccagcttgggcaccacagtgagaccctttctctaaaaaaaagaaaattataaaaaggttttaaaaaagtctggaaataattattcctttgaattgatagaaaataaataatatcctgaatattctttggactcatyaataatatatatagtttattagaaggaatatggctttaagcttctaattggcctctgggattagttgcagttaaaaagcatttgcagtttagacatgtgatttttatctaaactaaaagatttttggagcagaggggaagggaaactatcgatgtggactgggaaaaattgaagggatttagtagtcttctgaacagataatgaacagtactcatcatggcacatgcaagagacccattccacccctgttctttgagcaccatgagcctgagatagacaagcaggaggagtgaaggcacatgtgatgcactcgtagtctgcataggccattgccacccagtatggctggtggaataggaaactaagctgtttgga

SEQ ID NO: 794064 - DNA, 634 bp, Homo sapiens
taaacattccggtctgacagctctgaagagagcagtagttctcccggcacagcgttcaagctttgagaatggacagactgcctcctcaagtgggtccctgacccccgtgtagcctgactgggagatacctcccaataggggcaacagacacctcatagagacagggggcccctctgggacaaagcttccagaggaaggatcaggcagcaatatttactgttctgcagcctctgctagtgacacccaggcaaataaggtctggagtggacctccagaaaactccaacagacctgcagctgaggggcctgactgttagaatgaaaactaacaaacagaaagaaatagcatcaacatcaacaaaaagcacatccacaccaaaaccccatctgtaggttaccaacgtcaaagaccaaaggtagataaaacaacaaagatggggagaaaccagagcagaaaagctgaaaattccaaaaamcagcacacctcttctcctccaaaggatcacagctcctcgccagcaagggaacaaaactggatggagaacgagtttgatgagttgacagaagtaggcttcagaaggtcggtaataacaaacttctctgagctaaaggagcatgttctaacccatctcaag

SEQ ID NO: 794065 - DNA, 513 bp, Homo sapiens
gagttgcggataacagaagataggacccacaacacaagctcacacaaggactcaaaaaatggaacagaattaatacttcaaaaggaaattcaagtactgctacaagaaaaaaaatctgtataaggaaccaaaaaattccagaaaaatttaccatatcctaatttattgaatgtgctcatgggagatagacataggaaacataacagtcatatatacacarttaatttcattattagctcctgaaatttgcaacccagagaaatattatgtggtacatatttatttccagatattttctatgaaattatcttttaagtttaacagaactaagtattttgttactgttttcttttttgtattttgctttctttcattcttaatttggtggtacatatttttatactaaataccatatgtccatgatttatttttaaagagataaaaggaaactcagtacattattatttttattaggttaaatcttttttttctttttctaaaattaatttaggt

SEQ ID NO: 794066 - DNA, 598 bp, Homo sapiens
gaagcaatttgtcttcagctggcaaggccagccacgtaactgtaaggtcctacctcaggagtatatcaactctccggcttkgtgtcataatcttatttggagacattgttttttgcttccacaagatatcacaccattccattacattgatggcattatgctgattggatccagtgagcaagaggtagcaagcacactggacttattggtgaaacatttgtgtgacagaagatgggaaataaatctgactaaaagtcagggaacttctacctcagtaaaatacctaggggtccaatggtgtggggcctgttgagatattccttccaaggtaaaggataagtttctgcatctgactctttctacaaccaagagagaggtacaatacctagtggacctatttgaatttggggggcaacatattcctcatttgggtgtgttacttgggtctatttatcaagtgacttaaaaggctgccagttttgagcagggtccagaaaaggagaaagctctgcaacaggtccaggctgctgcgtaagctactctgccacttgggccatatgacccagcagatccagtggtgcttgagtggcagatagtg

SEQ ID NO: 794067 - DNA, 598 bp, Homo sapiens
gaagcaatttgtcttcagctggcaaggccagccacgtaactgtaaggtcctacctcaggagtatatcaactctccggctttgtgtcataatcttatttggagacattgttttttgcttccacaagatatcacaccattccattacattgatggcattakgctgattggatccagtgagcaagaggtagcaagcacactggacttattggtgaaacatttgtgtgacagaagatgggaaataaatctgactaaaagtcagggaacttctacctcagtaaaatacctaggggtccaatggtgtggggcctgttgagatattccttccaaggtaaaggataagtttctgcatctgactctttctacaaccaagagagaggtacaatacctagtggacctatttgaatttggggggcaacatattcctcatttgggtgtgttacttgggtctatttatcaagtgacttaaaaggctgccagttttgagcagggtccagaaaaggagaaagctctgcaacaggtccaggctgctgcgtaagctactctgccacttgggccatatgacccagcagatccagtggtgcttgagtggcagatagtg

SEQ ID NO: 794068 - DNA, 598 bp, Homo sapiens
gaagcaatttgtcttcagctggcaaggccagccacgtaactgtaaggtcctacctcaggagtatatcaactctccggctttgtgtcataatcttatttggagacattgttttttgcttccacaagatatcacaccattccattacattgatggcattatgctgattggatccagtgagcaagaggtagcaagcacactggacttattggtgaaacatttgtgtgmcagaagatgggaaataaatctgactaaaagtcagggaacttctacctcagtaaaatacctaggggtccaatggtgtggggcctgttgagatattccttccaaggtaaaggataagtttctgcatctgactctttctacaaccaagagagaggtacaatacctagtggacctatttgaatttggggggcaacatattcctcatttgggtgtgttacttgggtctatttatcaagtgacttaaaaggctgccagttttgagcagggtccagaaaaggagaaagctctgcaacaggtccaggctgctgcgtaagctactctgccacttgggccatatgacccagcagatccagtggtgcttgagtggcagatagtg

SEQ ID NO: 794069 - DNA, 577 bp, Homo sapiens
aaattattcaatagcatcttaaggtgtctccttgttttaatttcccttattttttatttattctcagtaaagcagccagaaaagcatcccatatatacactaggctttctctttttaatgtccttgattgaatttccatatccttctgagtaaaatcaaagtttgcagtcgtaggcaagtaaccgcatggactgacctttcattatctctctggcctctttcctacttctctacctctcacttgttctaacttcctactacatcagtctctggtttctactgaaaaactgtttaaattaacccaactcagtattagtgtttgctcttctctttaatgaaatagtcattccctagctatctacatggcttaatccctcatttaattttttgtgttaattcaaatattaacatttattggcaaaggttcttctaacaatrctatttataagtgaaactttccaattttacctacactcttctctgcccttttccccaattatcatcaacatactcttatatgtattttaatcattactttttactatctgcttgacttaaatataaaatgtctgaatgc

SEQ ID NO: 794070 - DNA, 398 bp, Homo sapiens
agacaatgtgatggtttatgtgtcaacctgactaggataaaggatgaccagatagctggtaaaacattatttctacgtgtgtctgtgaaggtgtatctggaagggattggcatttgcattggtggactgaggattgtgctgcccagtttgggtaggcttcatttaatccattaagggccttgaatagaacagaaaggtagaggaakggcaaagtcactttgtctctcccttacagaactgggacatccatcttctcttgttttcagacattggagctcctggttcttgggcccttgaactcagatggagatttacatcactgactccctttcttagacccttgaactatgactgagacttaaaccaagactttctcttgttctcaggtctttgggttt

SEQ ID NO: 794071 - DNA, 642 bp, Homo sapiens
ttatgagcatgaagctaaagtttatttgaattgctcatatattctcataccatgaaacatcaaaattacttaaataaggtgaacatgttttaacaaattttttataatgtactgtttctatgtctgtagaggcagaaaatgctaaaggatctgaataattagtcaaaagatcagaaattttcaggacaaatatttgacatcatttcacacagaatttttctaaatgttggaattatactttatgtaaatggaataggtattttactgagaaatatattctattcaaagagattatttcctrcttatttactgataccttttaatttcactaccaaaattctaagccttatttacttttttagagatgaaataaatgtaactacttctttaattaatgttttgaagaaatagtgcataaattatggacaaaagctgctctcttgtgtgattagttacactttttgcaagattattattattagttatttcacaataattaattgttttctttaataaggaacatattttccatattctaaattcagctaataataaaataataatacaatatccatatggaattgtggctctgagttgtcttttagaaaatgctctctaaaaagcagtaatggctcagaagtt

SEQ ID NO: 794072 - DNA, 642 bp, Homo sapiens
ttatgagcatgaagctaaagtttatttgaattgctcatatattctcataccatgaaacatcaaaattacttaaataaggtgaacatgttttaacaaattttttataatgtactgtttctatgtctgtagaggcagaaaatgctaaaggatctgaataattagtcaaaagatcagaaattttcaggacaaatatttgacatcatttcacacagaatttttctaaatgttggaattatactttatgtaaatggaataggtattttactgagaaatatattctattcaaagagattatttcctacttatttactgataccttttaatttcactaccaaaattctaagccttatttacttttttagagatgaaataaatgtaactacttctttaattaatgttttgaagaaatagtgcataaattatggacaaaagctgctctcttgtgtgattagttacactttttgcaagattattattattagttatttcacaataattamttgttttctttaataaggaacatattttccatattctaaattcagctaataataaaataataatacaatatccatatggaattgtggctctgagttgtcttttagaaaatgctctctaaaaagcagtaatggctcagaagtt

SEQ ID NO: 794073 - DNA, 500 bp, Homo sapiens
tgttatattcaaagtgcagaaagctgtttgtggaaataaatgcaaaatcttaaacaaagccagagaaaataaacaccttacctagaaaggtagaaggataggaatttcagtgggctgctcatcagtaatcatgcaagtaaggggggaacgtgaaatatttaaagtgttgaaggaaaataccaacataaaattagatatctaattaaattaccattcaaatttgaagaagaaatagtttcctaacaaacaaaarctgaaggaaataattgccaacaaatctggtctacaagaaatgttaaaataagtttttaaggagaaaaaaggataatataagtcagaaaatacttaaagaaaagaagaatgccagtgaagtaatgaatacaggtaaaataatatatatcattttttattcttttttttttttttgagacggagtcttgccctgtcacccaggctggagtgcaatagcacaatctcggctcactgtaacctccgcttcc

SEQ ID NO: 794074 - DNA, 512 bp, Homo sapiens
gtattatatttctatgaaaaagtaaatagccaaaaatgtccctgtgtgacatgaatggagtagctctgagcttcaagtactcaagataaaaatattaccatagagttagaatttgtttaaaataacttggaatacatatatacacacacacacacacacacacacacacacgcacacacgcacacaccatgtatatgtgcatgcgtgtgtgtgtgtatatcatgaaaacaatgctaaggaattcagtgaaaacaatgttcaagaatagagaatttacaaagttaaggaaattgttactaaaagtatatccaagcaaggggagtaaactcaattacaaggaacaaattttgtaaccatgtaaagtsttagagaaatggcagggcattctctatgttttaatataaaatatgatgggaggtgaaggagagaaggagaagagagaggagatatgaaaataaagatcctacagaaatctcccttttgtttctgtgttaatgttaatcgcttagcca

SEQ ID NO: 794075 - DNA, 598 bp, Homo sapiens
aaatggtcagacattatattttttttattgttctctcatttaatgtgggctgcccaaggaaggagtgggcaagacgcctttctgaagctaacataattactgaagggtctgacagtagaagacatcagccaacaacagtccctgctgctaggtcaacaagtctttccttagagggatstagaaggcacaactcagtgttcatcagttccttcactggattttcagctgcatgtctgtcattattcttctagttgttcctgtagggattgcaatataaatccttatcactgtctacttagaattaaagttgtgccacttctcataaaatataaggactttgaagtattatagttccacttattaccatccttagttatattattgtcatatttatcatatctaaatacattataaatccccaatacagtattgtctttttaaaaattaagagaaataaaaaactgtgtaatcttcatatgtgccatatacttactatttctgatgctccttgcttgttcctgtacttctacaattacatttggagtcgatttttttcagcctgaataactttttttgctattccttataatgtgaatct

SEQ ID NO: 794076 - DNA, 598 bp, Homo sapiens
aaatggtcagacattatattttttttattgttctctcatttaatgtgggctgcccaaggaaggagtgggcaagacgcctttctgaagctaacataattactgaagggtctgacagtagaagacatcagccaacaacagtccctgctgctaggtcaacaagtctttccttagagggatctagaaggcacaactcagygttcatcagttccttcactggattttcagctgcatgtctgtcattattcttctagttgttcctgtagggattgcaatataaatccttatcactgtctacttagaattaaagttgtgccacttctcataaaatataaggactttgaagtattatagttccacttattaccatccttagttatattattgtcatatttatcatatctaaatacattataaatccccaatacagtattgtctttttaaaaattaagagaaataaaaaactgtgtaatcttcatatgtgccatatacttactatttctgatgctccttgcttgttcctgtacttctacaattacatttggagtcgatttttttcagcctgaataactttttttgctattccttataatgtgaatct

SEQ ID NO: 794077 - DNA, 616 bp, Homo sapiens
tgtaccctgcaaagccacaagggcagagttgtccaaggctgtgggagccaccattttacatcagtttgacctggatgagagacatggagtcaaaggagatgattttggaactttaaggtttaatgacccccatcagatttcagacttgcatggggcttgtagccccttcattttggtcagtttctcccatttggaatgggtgtatttacccaatgcctgtacctccattgtatctaggaagtaactaacttgcttttgattttacaggctcatgagtggaagggacttgccttgtctcagatgagactttggactgtgaacttctgagctaatgctgaaatgagttaagactttgrgggactgttgggaaggcatgattagttttgaaatgtgaagatatgagatttgggaggggccggggcagaatgatatggtttggctgtgtcctcacccaaatcacatcttgaattgtagctcccataatccccatgtgttgtgggaggggcctggtgggaggtaatcaaatcatgggggtgggtttttcccatgcttttctagtgatagtgaataagtcttacatctgatggttttataaagggctgtttccctgcacaca

SEQ ID NO: 794078 - DNA, 603 bp, Homo sapiens
atgatggaggacccttgcatagtgagaaatttctttctgcccatatggtggtgcaggatatggaaggcatatttagagtcagtattaatattgatttgtagtccctttgcaagagtgagggcccaagttcaggcaatgagttcagcttgctgagagatagtggggggcagagcrgtagcctcaatgatagatgtggaagatactatagcatagcctgcctttgctggtgtgtggcgattaagcctggtggaactgccattgataaaccaagtgtgatcagggtgaggaacaggaaagaaggaaatatggggaaatggggtgaatgtcaggtggatcagagagatacagtcatgggggtcaggtgtggtatcaggaataatgtgggaggccagattgaagtccaggccaggaacaatggtaattgtgggagactcaactaagagtgagtatagctgaaggagccaggtgagaggaagaaaatagattttggaaattatgagaactgtagagagtgagctgagcatagtttgggattttgagggcctctaaaagcattaacacagtggtagccaccacacacagacatgagggctaggctaaaac

SEQ ID NO: 794079 - DNA, 550 bp, Homo sapiens
ctgaccataaacacaatggtttatttctggagctggtgggagaaatgggagctggtggtcactgcagtctattccacctgcctgtgataaatcatccagaacatggatctggcagggatgggagcaatcttaaatgccatagacacctactattcttaccaagattcagtagattttctttaataaatgttcctcaatttaattgacctttcatcaatttmcagagactaaatagttatttttgacaactttgtccaattttattgctgtgttttgggaagaagatttattgagctctcacacagtcattccagaagtcctcccatgagcatgaataacagaattcctacatgcttgttatcttgccatgttttataaatgtataagaagcaaaaatttactgaaaatgtttgcttttgtatattgtagcaaattaattctaaggcattatttgttgctatttaccaacttttcctgatatatttattttgtctggtagtaatgaggaagcataatggagaagaatttggtagattcagtgacagaagac

SEQ ID NO: 794080 - DNA, 637 bp, Homo sapiens
cagccactagccacatttggctatttaaatttaaattaaataagattaaaaacacaattccatcaccacactggccacatttcaagtactcaacagccacatgtggccagtaactaccacactgatcagcgcagacacagaggatttccgtcatcatagaaagttctactggagagtgctggtccagactcagtggagaaggaattaaggaagcctgattagggctgcagatcctaaccagatttaccaataataaagtagatacatttaattccatttttctgatttattcatctaactctcaaggttccaaagtcagatcagagaggtgtgattaatattcatgtccaaaatacttaacaataattactaacatatatagaagatttatgatgtgtcagccaytatgcaagaggcttatgtatctaatttaattatcagtacaatcttataaaagaagatactatcatcatatccttttcacagatgagaaaactaaggtttagagaaaagtgattttcttatcacttatttttttcaccacacagctagtaagtggtggagtcaggattcaatttaaaaaatcaaacaagccaacaaaactgtaggtgcaattcatatgtaacaatgagtagga

SEQ ID NO: 794081 - DNA, 638 bp, Homo sapiens
attactacacttttcgtaatagttttttaaattaccaagcagatttttacaagatcaaaatcagacttctagaaattaaaaatacaacaactaaaattggaaatgcaacatatgggttccacagctgaggagagaatctgttaggaagatatgagttgaagaaattacctagaatgcaacccaaagagacacagagataggaaataagaaagagamattaagagatgagaaggataaaataacacattctgataggtgtagctagagtttcagaagaagagaaaagaataactggttcggaggcaatgtctgaaaagacagtggctgagaattttccagaatgatgaaagacactaatatgcagattcagaaagcccaatgaatgcaaaagaagaaaaataggaaagaagatctgtatcttaaaacatcaaaatgaaattgcatctataccagacaaatatcaaccaaatggagcaggtgtaactatttgaaagggaggaaaacttcactagagttaatcacaaatgacaaatggttcaattcaccaggaaaaaatagcaattctgaaattgtgtgaacataaaagcataacatcacaatatacaaagaaaaaatagtcacaattaacaagaaaaaat

SEQ ID NO: 794082 - DNA, 622 bp, Homo sapiens
agtaaattggtaccagaagagtggggtgttgctgaaaagatactccaaaatgtggaagtgactttggaactgggtaacaggcagaggctggaacagtttggagggttcagaagaagacaggaaaatgtgggaaagtttggaacctcctagagacttgttgaatggttttgacaaaaatgctaataacgatattaacaataaggtccaggctgaggcagtctcagatggagatgagaaacttgttaggaactggagtaaaggtgactcttgttaygttttagcaaagagattggtagcattttgcccctgccctagagatctgtgaaactttgaacttgagagcgatgatttagggtatctggcagaagaaatttctaagcaggcaaagcattcaagaggtgacttggggactgttaaagtcattcagttttattaaaaaaaaaaaaagagcataaaagtttggaaaatttgcagcctgactatgtaatagaaaagaaatatccattttctggggagaaattcaactcagctgcagaaatttgcataagtagcaatgagcctaatgttaatccccaagaccatggggaagatgtctccaggccatgtcagagacctccacagc

SEQ ID NO: 794083 - DNA, 597 bp, Homo sapiens
gttttatctcatatatactagttggttgcatttcattattttaatcattatgcatcaactctggggaatattagaaagacggaaattcaagcacggcacagtggtgcaatgaggtgtgggagagaaggcacaggatttgtttctttgcctcactggacctcagtttattcatgtggtcaatcaggaacatactatttatctcacaaaggctgtaagaaatgtatatgaaacccttgaaaactgtaaagtgctgtagcatttttcatcactgtttttattatataaagtcatagagtgatgaagcaggaagcgacaatagaaataaattcgtccaggccaggtgtggtggttcacgcctrtaatcccagcatttggggaggctgaggctggcagattgcttgaggccaggagttcaagaccagcctgggcaacatagtgggacctagtctctacaataaatacaaataaaaataattagctaggcatggtggcacatgcctgtagtcccagctacttgggaagctgagggaggaggattccttgagcccagcaattcaagcttacagtgagctatgattgcaccactgccctcccacc

SEQ ID NO: 794084 - DNA, 685 bp, Homo sapiens
taaactagtctagatttaagggctgagaaaactgaggacaagagggaccaaacgacctactcatggacacagcatgttaggcgcaactcaaactttccatgcagatgtccgaatccttctcaagtacacaccccactatgagggccatgcagataaaaaragatgctggctgccagttgaggaatcaacagcatggttgagactgtagagaactggaaatggacctgtgccatccaagaggacagatagaatttgtctctaggtagttttcaccatatcagagtataggcccaggattgccagactttcttgttttccctagaaataccaaaattttagatttttttaatatatgaaatctcccaatttttaaattatatttcaattttcaagataatggtgtgttgccaaacaaaatatctgagggtcaaaaccagcccatggtttaccaggctgtgatctctgatttacagatgttctggtctgaatgtgtccctccaaaattcatgtcgaaattctatggtagtggtattaagaggtgtggtctttgggtaaataattaagccatgagggcttttccctaatgaatgggattatttcccttatcaaagaggttgaagggggtacccttgactgcttccattatgtgaggatgcagccagaggcaccatcgatgaagtaagaa

SEQ ID NO: 794085 - DNA, 634 bp, Homo sapiens
catctgtaaaatgggggcattaattatctttacctcatggaggtattttaataatttaatacaataatctgtgtgaaaggcttagaacactccctggcacaaaacaaatatcaccaccaattttacttggagtcaacctggacaggcatctcttaacaccatcttttaacacctgcctgtcattaacacactctgaaccccttcagacccacgagaactcttgctcattgatcatcaggaattgcccatctctactaaaaatacaaaaattagccaggcgtggtggcgggtgcctgtaatcccagctactcgagaggctgaggcaggagaatcgcttgaacccagtaggtggagaatatgacaaaagaaatatgtcaaaattttaacaatggtcttctttgccttctacttyttgcatttccaaagtgtctaccatagagccgggagtgtcgactcacacctatattcccagcactttgggaggctgaggcagaagtatcacttgaagccaggagtttgagaccaacctgggcaacttagtgaaatcttggctctacaaaacttaaaaaaataaataaataacctgggcatgatggcacatgcctgtagtcctcactacttgggaggctgaggc

SEQ ID NO: 794086 - DNA, 600 bp, Homo sapiens
ctcttacaaggattattcaatggtctcctaaatagtctccctgtctccactcttgccccctacacatggcagccagagtgtttctactaaaacataaatcagatcatgtttcttctcatctcattattttccagtgacttgccatcccagagtaaaagcccaaatcctaatgacaatcttggatccatgtggtaaggccatcgctacctttctgatcttgcctcttatcactcttcctgtcacccacttctgctctagcacagtggtccccttgcttgtctttgaacatgtcactttcccactttagagtctttgtatttgctgtttcatcaaatatacttattacttcctcccagacattttcacttgttcagatatactcaagtctcgctctgttgcccaggctggagtgcagtggtgcgatctcatctcaccacaacctctgcctccygggttcaagcaattctcctgcctcagcctcccgagtagtcccgagtagctgggactacagacgtgcgccaccatgcccagctaatttttgtaattttagtagagatgggatttcactatgttggccaggctggtcttgagctcctaacc

SEQ ID NO: 794087 - DNA, 604 bp, Homo sapiens
gattagacctcaaaatcacaggcaacaaaagcaatattggaaaaatgggattacaacaaactaaaaaacttctgcacagcaaagaaacaattagcagagtaaagagacaacttatagactggaagaaaatatttgaaaactacacgtctgacaagaggttgatatccaaaatataaaaggaactcaaacaactcaatagcaagaaaacaaacctattacaaaatgggcgaaagacttgaatagacacttctcaaaagaagacatgtaggctgggcacggtggctcatgcctgtaatcccagcattttgaaaggctgaggtaggcagattgcttgagcacaggagttcaagaccagcctgggcaacagggtgaarccttttctctgcaaaagaaccccacaaaaattagcctggtgtggtagggtgttcctgtaatcccagctgtttgagaggctgaggtaggaggatcacctgagttgggaaggttcccaaatatgaaaaatgaaaaactaattacaccactgctctccagcctggacaacagagtgagactctgtctcaaaaagaacaaaaaccaaaaacaactgcataatctctcatgtgaa

SEQ ID NO: 794088 - DNA, 486 bp, Homo sapiens
acacacacacacacacacacacactacactacactacagcttatatttaatgctgaaagtctgaatgctttccccctaagagcaggaataaggcaaaggtgtccattctcaccatttcttttgaatatctcactggaaacctgggccagtgcaacagggcaagaaaaagaaataaaaggcattttgaaaagaaagaaacaaaactgtccctrttcacagatggcatgattttctacacaggaaatcccaagaaattacaaaataaattttaagactaataagtgattttagcagggctgcaagatacaaggttaacacacaaaaatcacttgttatttctatatgttaacaatgtacaactgaaaatggaaatttaaatacattgtgtgacatagctccaaaaggtaaggattaggtatgtaacaaaatatatataggatctatactctgacaattataaaacactgatgaaagaaatcaatgaat

SEQ ID NO: 794089 - DNA, 622 bp, Homo sapiens
cctaaccttgtttttactctaagtcgctactttgaatcttccctgttggtctctttaatcacctagccttgcttctcatgtaaataaggctctctgtagctgggaatgctggacaaactccaatcgaccccttaatttacgagacacgaagggctccttacccaacccccttccgcaaggagttgacctgtgtaagcagatactcagcatttcaagggagcccaatcaactgataagrtactggcacaaacagtgcatgaagttcccaggatttttctcgaagagataacaacataaagccttgagttcgtgtccagcatagcacctatatctaagtgtcatgaaggatttagagccccgcacctggtaccgttgccttttgtaaccatttgccttttaaaactgtttatctctctataaccatttgcttcttttgattcctgcatgtttttacttctgtagaattaccgcatttgagttcccctccccttcctaaaccaaggtatagaagttagtcaagccccttcctcggggcccagagaattttgagcgttagccatctctttggccgccggcttaaataaaggactcttaatttgtctcaaagtgtggcgttttctct

SEQ ID NO: 794090 - DNA, 458 bp, Homo sapiens
gcaccaatgggtgataggcagcatgggctcagacagcagggagagttaggggagacacccacgtgcctggaatagcggacggccatttggagcaagcctcagatggagagcgacgtatcctggggttcggtcaatccttgtgaacccgagagcgttcctacggacgttagactctcttcgaggtgatctctcttggargttttgtcttgcgatttaattatttccttcccccgccggtgccttcaagtatgaatgacaataaatatgatacacacttaccgtgtgtgacgtcttcattagggaattcactagaatcggccgaattcacacacttatcgccccacatgcgtcccctgtccctgtcgggagaattttcagctctactcccgtgggtatattcacgagaaccttacattctgctccaccgtactcgcgttgccctgccacggatatccagg

SEQ ID NO: 794091 - DNA, 594 bp, Homo sapiens
aatgtggtatatacatataatggaatattattcagccttattaacaatgaaatcctgtcatttatgacaccatggatgaaactggaggatattatgctaagtgaaagaagttaggcacagaaagacaaatattgcatgatctcacttatatgtggaatcaaaaatagggaaatacatagaaacagaaagtaaaatggtgaaggggctggtgagggagaaatrggcaggttttggtcaaagagtacaaagtttcagtatttatttatacacaataaataagatctggatgtcttcttaccataaagagcctatgattcacaatagtgtattatatacttaaaaataagtaaagagggtagatctcacattaagtgttcttaccacaaaaggtgggggaagcccaaaggggtggaaacttttggaagtgatagatgaatttatgggattgatggcatgatggcttaatggtttcacaggtatatatacttacctccaaacacatcaagttgtgtatattaactgtgtacagttatatcaatcatagctcaataaagcaattttttaaagtatgtatagttttatacttgagaatat

SEQ ID NO: 794092 - DNA, 538 bp, Homo sapiens
cattagcttaggactacacagaatcaggatcatcaatatcactgtcttctacctccatcttgtcccactggaaggtcttcagggacaataacacacatggagctgtcatctcctatgatagcaatgccttttctgcaatacctcctggaggtattgtctgaggytgtcttacagttacaaggacttgtctgaggctgttttacagttaactgattttaataagtagtaggactacactctcaaataacaataaaaaggcccagcatggtggctgataactgtattccctgtgttttgggaaactgaagcgagaggctcacttgaggccaggagtttgaaaccagcctgggcaacatagtgagacctctgtctctacaaaataataaaaataacaattaaaagtatagtagaataaatacttaaaccagtagcatagttgtttattatcataatccagtattatgtactgtacataattgtatgtgctatacttttatacaacagagagtgtggtaggcttgcatacaccaacatcccc

SEQ ID NO: 794093 - DNA, 538 bp, Homo sapiens
cattagcttaggactacacagaatcaggatcatcaatatcactgtcttctacctccatcttgtcccactggaaggtcttcagggacaataacacacatggagctgtcatctcctatgatagcaatgccttttctgcaatacctcctggaggtattgtctgaggttgtcttacagttacaaggacttgtctgaggctgttttacagttaactgattttaataagtagtaggactacactctcaaataacaataaaaaggcccagcatggtggctgataactgtattycctgtgttttgggaaactgaagcgagaggctcacttgaggccaggagtttgaaaccagcctgggcaacatagtgagacctctgtctctacaaaataataaaaataacaattaaaagtatagtagaataaatacttaaaccagtagcatagttgtttattatcataatccagtattatgtactgtacataattgtatgtgctatacttttatacaacagagagtgtggtaggcttgcatacaccaacatcccc

SEQ ID NO: 794094 - DNA, 567 bp, Homo sapiens
ctgtgagttttgggctattttaggcagagggagagcactggcaaaggcaaggaaaatggaaagtgtacagcattttgaggaaatagcaattgaggacatggtgggagatgagatcagagggtattatggccagattgtgaagtgctactgaatgctggctgaaacagtatgratttttattttgaggcagttgaaggatggggagggctctaaatggttttaagcaggaaacagccatggcccaattggtacagcggttggattggggatgtgcacagagtgtggtggggactgaaagcagtgagactacgtatgagggcctgagccagaaagtgtccacgacgatagagaggcatgaccatttttgaggatattttgaaggtaggatgaaagaacttggggctttcctccatttgctcctccaagctcactctcagcttattcttctcttcccttgtgctcaggaggctgactttgatggatggactcgatgggcttttgtagttggcttctcactgggttcagccaatggcagcaccagcaggaggtttggtgagaagtggttgg

SEQ ID NO: 794095 - DNA, 567 bp, Homo sapiens
ctgtgagttttgggctattttaggcagagggagagcactggcaaaggcaaggaaaatggaaagtgtacagcattttgaggaaatagcaattgaggacatggtgggagatgagatcagagggtattatggccagattgtgaagtgctactgaatgctggctgaaacagtatgaatttttattttgaggcagttgaaggatggggagggctctaaatggttttaagcaggaaacagccatggcccamttggtacagcggttggattggggatgtgcacagagtgtggtggggactgaaagcagtgagactacgtatgagggcctgagccagaaagtgtccacgacgatagagaggcatgaccatttttgaggatattttgaaggtaggatgaaagaacttggggctttcctccatttgctcctccaagctcactctcagcttattcttctcttcccttgtgctcaggaggctgactttgatggatggactcgatgggcttttgtagttggcttctcactgggttcagccaatggcagcaccagcaggaggtttggtgagaagtggttgg

SEQ ID NO: 794096 - DNA, 607 bp, Homo sapiens
cttctgtcatcctccattccctcccatttccgcccatccttcaccacctccaccacattttgttttctagctcaaatggtaatgatcttgctcttacatagcccctttctgccaaatagatccctgagcacggtacaggtgttggtaacggatattacccgccatccatctttcttaatcacactctgctcctgaaatgcagccacttctagagtgaaatatagcccccatttagccttgcttaacaccaatgggagagcccatgaaggcaggtctgcctttccagacaaaggtgcagcacactccgaaacagaggtcagaagcttttyctggatctgggatttgagcaagctgtcacttcttggagcctgcctcggacacttccctgaggggttgtctcatactctctgatgtgcctcagggccagtactgaaaactgaggtgtcttggcttctgaggaaagcctgagacacaggcttctaagctgcagtgagagaaattcactacccagctctgctgctgcaggccagggaaaagggaacgggtcccccacattactgactctacaacctactcttcttaaacaatcagtaaacacacactgtgg

SEQ ID NO: 794097 - DNA, 635 bp, Homo sapiens
tttactaaggaaattggctatcatgattatggaggctgagaagtcctacaacagaccatctgcagctggagaccctgggatgctgggttcatggctcagtacaagcctgaaagtgtcagaaccagggaagctgatggcgtaactcagcctgaggcccaagggtgagaatctggggtggctgatgtgagttctggagtccaaaagctaaagagcctggagttctgatgtccaaggactcttagaagctggaccgtgtactaggctaccagggatgtatcagtgaacaggacagacatggttctagttctcatagggtgggaaagatattgtccaagtaattacacaaataattacctaattacaaatytgtatgtatgatttaaggaagacatacagggcactgtgagagtgcaggaaagggcaccctcactaagcctgagaaagcagaaagaagtgacttttaagctaaaggagatgacctgcaaaaggagtgtgaacacatctggctcctgaatgttccttagaagatgacgactttttcctcctacccaaccctaatacagctgtcattcagaactttctgttctcacttcaagcaacaacatagaatatctacctacagatacttgtttaaa

SEQ ID NO: 794098 - DNA, 598 bp, Homo sapiens
ctgggctccgctgtctccatactcaccttctgtctccaagtttggttcactaggcccatcctcaggaagcctcccttaggatccaggatgagtcaccagcaccccaagtgtgctcgctggtgaggattataggagggggaggtaggctgtgtctacaggagatcctggggcacatctgggggatggaggtgaaaggttatccctctgycctacagaatgagggtcccccttcaatcccctagaggtgacatgccagaacgcctgaatcagagaaggcactcattcctcccacctaactctttttattttttttaatactgagtcttgctctgtcactcaggctggagggcagtggtgggctcccagatcactgcaacctccgcctctcaggttcaagtgattctcctgcctcagcctcccgagtagctgggattataagtgcacaccaccatgcccagctaacttttgtatttttggagagatggggtttcatcatgttggccaggctggtctcgaactcctgacctcaagcaatccacctgtcttgtgcctcccaaagtgctgggattacaggcgtgagccattgcacccggcctct

SEQ ID NO: 794099 - DNA, 660 bp, Homo sapiens
ttaaacatatgtacaggctgttgaagaaagggaaatgtcgttcattttggtcacaattttgtgaatgtagagtaaggactgtcgatttcttgcaaggctctcatttgaaaaaatggatgctgaaacccatctatattaggcaatcaatttcttcttttatttcaatgcaatagrtgtttgtgaaagtcatctctattattatgatgtcaatatttgaccatgtttgacctgtgaaagagtggaaggttgaagtggttcagtgtcatattaacgtataaagaagaacgacatttgttccaaactaaaatggcttttaagctcccactttgctgagagtgggtgcttctggatgttgaagacagtaggtgacttaggggaagttgtgagaaatttcctgtgtgtttgctcttcagtcttgagtgatgggacaccatttccttagatttagccacaagatttcctggagtttcagagaaaatagaatttttttcatccttctctactttataggctcaagaatgtcaacccacccaggtggtgaaggaataaattctgtaaatgatcatcacagactttttccagcttgacagacatttatcgagagtctcctaaaagcctcaccttaagaatataagcatcatgaatgtcataaggattatg

SEQ ID NO: 794100 - DNA, 623 bp, Homo sapiens
atgttttatttttgttaagaaattaaatatcgcagaaataaatgaatctctgtatgcacttatttcctcacctgtttccttctgtcccttcccagtggtaattactatccttaacttagtgtttttcaatactattcatgctttaatactttatatgattatacctgaaattactttatagtgccatttgtcacatttttaaactaataagtgatgatagcatgctgtatgtatcctgcaaaagctattatgtgctcaacattatttttaatatttgaaatatattttaccagtttatgtactgtaactattgctacattccattgtattactataccaaaatgtatccattctcttgacaaagaaatttagattttgtctaattctttaattttgcrataatgtttcagtacagtcttgaacatgtctccatatatacatctgagattttttttagtatgtctacctaaaattggcgttatcttaagatttactagaattgctggaggtggttgcaataattttcattctaattcatggtctataagagtgttcattgtgaaacaaccttttaacatttggtagtaatgtcaaatattttgttttgtcagtttgacttgtgt

SEQ ID NO: 794101 - DNA, 628 bp, Homo sapiens
gtaatgcgatgcaaagtgagtgtgtgagtgcaggaggaatcccagaggacagttccacgggccaagtcagggaaggcttcttggaagagcagagttgtgagtagagtagttcgtctggaactggaaggaatgggggagcacattcattctaggctgcaggatacctgtgacacagggagctcaggcaaaaataagcattycacaggaaggagtgagcaaaggacaaggggcgagagaggaccctggaccctcaggaatcccagttcactgctctgatgctcatcttactcagctgggttgttatcaagagctgggcttgttccagcctcagaggccaaggcagagggaggcccaaccccagccctcaaggagattccagtgaagccacaggaagccaggaagcacccagtcaatattcctctgcaagctctccagagttggggtcatgaaaagtttcttttttagaataaattgcttaccaaaagtgttgattgaggagaaaaatatattcatacatttttttttaaagaaattgctgatttttctcatgtcaagccatcgctgtaaagcacgcgtgtgtcttctggggcagctgactgttttccgggataaatttctgataatacca

SEQ ID NO: 794102 - DNA, 610 bp, Homo sapiens
actattctgggcacaggggaaacaaacagaaaactcaaaaacccttacactcatggatcttacagtttctttcttctcatttctacaaaaggtttaggaaactgaatttcagagctgtttcttccccgctctgacagagtcgtgagctcttacagagcccctcacttgttcccctggtcctcctggaagggcagtgccatcacatactgactgctgtcttagtcttccctcactgtccctctagacctgtgccattctgagctggatcttcctgctggcttcattttcctctttctgggatcatgcccttgtcctggtgaagtatatcctcctaaactttctaagaaagtacatttctaagaagtctctgagaaagataatcttggcttcctcctcwttcttgcacatctgttggtattcagcctttacttgcacacttacagtttggctaagtttagaattttaggttgaagaattatttcaccctgagttttgaaggcaatgcttccatttcttttagcttccaatgttgctgtggaagggtgcaaagcaattccatttttcacactttatatgtggctgctttttccctcttggaacctttctggtc

SEQ ID NO: 794103 - DNA, 501 bp, Homo sapiens
cctcccaagatataagtccctgaagcaaatggacttaaatcatgtggttcttttaaacctccttaagtgtcttattgaagctgaattgttgtgacagtgatcctaagtcacaaagtgactttctggggagagggctctaatgctgcatggatttggtaagaaaggagagtccagggaggcaggaagtgcccttagaggcagggggcagggccagcctccgtgaggccctcagacasgacagtggcccacggaccctgtgcctctcaggccacacaggatcaagggtggactagagccttgtcgtagtactcagtgatggttcctctggctctgtcttcttctctctgttggaactcagctctccaaaggaagtctgggatgccccagggaagctcagacagcctggaggatgggtccccgaggttcccgggcacctgccagccccctcctcactcccgtctgcttgggtgctgtcagcttgcactaaggggacagcttgtc

SEQ ID NO: 794104 - DNA, 593 bp, Homo sapiens
ccttgctgtctcgtgcaaggtcccacggctgtcaatgccccagtgaaggctgggggtttccaacctggaggcacttccgacacctgtgccgaggccaccttctttctgtggcggatgcaatgctctcagtgttctgagcgggtatcaggggagggtggtacctagcaggctggccctctcttctagggtgtgaaggctagcatctctcagactcctttacaaccaaagatccagaggtgacttaagaacatgaatttgatgacttatgagggcacttgcattcttgagcagagtcaaacagggagagagccagagtgtggsccctggttttgctactgtggctcaagcatgagcctcattgctctacagccagccaccttaacatgtggcttctctgtgccatcaagagcttactggctgtagcgggaacggctccttgtcattcttggaaaactggcctagggtttgcttcttcagctctcctgtgaattctgttgaccaattactgtccctggagaaatctcactgggcttgaattcgctggagtagatgctgtgctgtatgataaagctctgtctggtagaaggggtgtg

SEQ ID NO: 794105 - DNA, 535 bp, Homo sapiens
attgtagttgttctttattcccaggacctttggggatcttctagtcactgccatattgtgttttttgttgttgttgcttgtttgtttgttttttgaaacagagtctcactctgtcacaagcccaggctagagtgcwgtggcacgatctcggctcactgcagtctcctcctcctgggttcaagtgattctcctgcatcagcctcctgagtagttgggattacaggcgcccatcaccaccatgcccggctaatttttgtatttttagtagagatggggtttcaccatgttggccaggctggtttcgaactcctgacctcaggtgatccgcccacctcggcctcccaaattgctgggattacaggcatgccactgcgctgggccaactgccaccctctttctttagcctctgacttgctcagagacgaccttcctgttcaggattcttgccagcaccatggcccgagtggtctcctgcctcctctggactctgcacatacatgtgtgtaacatgggatccagccagctgactgaatcg

SEQ ID NO: 794106 - DNA, 498 bp, Homo sapiens
tatggcctgtgtagctggaggcttctaaacattttttttcttcatctgtggaacatttttatcattctggggaagatttagacattgaatgtactaaaaggatttcatttgactgctatgtatttacccctgcctgtaatccgctaataaatactcgcaggcagaacagcctaattggcaggatgagttaatgcacaggccatttatctgccaagcacatgacacagaccatgaacaaaataagctggtaactgcctctccctcttagcaaatgcttgtccgcaccccgccctctcccaacctgctcttcctctggccttgagcttggggrcagtttgatgcacaactgccatgcgccagcaggcttcagataagcctggaaagaaatggaatggaaagaactttctggtcaggagcacctctctccgcagggaagtggccaccccaagttaaaacgtgtgctggctgggcacggtggctcatgcctgtaatcccagc

SEQ ID NO: 794107 - DNA, 541 bp, Homo sapiens
atttcaatggctaaagtttgtagtaagtttgagaaatataaagagaggagtatggggaggagagctggcgggaggtgggtgctggaaatgattaagaccactggaagggaaaaaaatggggtatgatatcaccatggaaacgaagtttacgtattgcaaaaatttgcccaagttggatagcattcattcattcattcattcattcattcattcaacaaacatttactcggtgtctwtgcatgcctagaaccatcaaagttacaaatgagaaccaaacaagcttggttcttgtcttcacggagcttccattctagtgggggaaggtacacaaagaacaaacacaagtaggtttccccctggaaagaataactggcaggtttgcaggcattaccacctaatttctttttaaaaagaaacctaaagacttctttgggtgtccaaaggtctaaaattttagaagttcaaaatggcaaagtgaaagagcacacattattcaggcaatcttggcagtatctaatgtcataacatttaaaaatcagaa

SEQ ID NO: 794108 - DNA, 541 bp, Homo sapiens
atttcaatggctaaagtttgtagtaagtttgagaaatataaagagaggagtatggggaggagagctggcgggaggtgggtgctggaaatgattaagaccactggaagggaaaaaaatggggtatgatatcaccatggaaacgaagtttacgtattgcaaaaatttgcccaagttggatagcattcattcattcattcattcattcattcattcaacaaacatttactcggtgtctttgcatgcctagaaccatcaaagttacaaatgagaacmaaacaagcttggttcttgtcttcacggagcttccattctagtgggggaaggtacacaaagaacaaacacaagtaggtttccccctggaaagaataactggcaggtttgcaggcattaccacctaatttctttttaaaaagaaacctaaagacttctttgggtgtccaaaggtctaaaattttagaagttcaaaatggcaaagtgaaagagcacacattattcaggcaatcttggcagtatctaatgtcataacatttaaaaatcagaa

SEQ ID NO: 794109 - DNA, 618 bp, Homo sapiens
ggaatataataggatccagagttcctacaatgaattatttacaatatctaggatacaatgcatgagtagcatgtagtcccagctactcaagaggctgagatgggcggatagcttgagcccaggagtttaaggctgcagtgaaccacgactgtgccactgcactccagctcaggtaaaagagcgagaccctgtcaaacaacaacaaaaaaaccraaacccaaaccaaaaaaccccccaaaatactagacataaaacagaaaaatgttacccatattttagaggaaagataataatcaataaagacagacgctgagatgactcagaataagcgtacacagattttaaagctgctgttataactatggtcaaagctgtagagaaaaatattctcaaacaatgaacacataggaaattttagagaaatagaaacagtaaaaaagaactaaatggaaactgaagcactaaaaagtataatatttaaaataaatctaaaataaaaaattcattggataggcttaacttcagatttgagatgacagaagagtcactaaacttgaatacagatgaacagaagttatctacattagaaaagagaaaaaacactgaaaaaaatgaaca

SEQ ID NO: 794110 - DNA, 617 bp, Homo sapiens
ctctcaatcccccctgcttctaatccatgtctaagctgcttctgttcaactgctttactttacatgcatttctctttttcttgcagagggaaagtaacacggcatatcgtggtcttttagagaactacttcaagatatattgaagtcaaatgtcagaaaaataggttttttaaccacataccattaatgtaaattagtccaatagactcctgagtactgtgttacacagtacaaaacccaaagcagatgcataataaaatacctatgtaagaatgttgctcaaatttctagctccctttaccaatctggctctaaactcttatcaccttttatgttacaagaacagggtacctagttgactccagtgtctagaaacagagggaaaaaaagaaagtggtaagaagtaaacatgatacagaaggacataaagataattcagaaaaraaaaaaggcaaatagcaagcctatgaaaaacatgttcaacttcaataagaatcaagtttgaattagagcaatgagacaccagttttctcctacattcaaactgacaaatgtcttcttaaatgattgtaactaaatgatggtacttcaaggaaatgttgttagtgatttcaaca

SEQ ID NO: 794111 - DNA, 630 bp, Homo sapiens
ttattttgttggaacatcaggggcatctgtttactgagagttgttttaataaaccttagtgttatatatatatatacatatatatataaaatatattacatatattatatatagtagtagtgttaaaccccttacacaagtattgatgcaacatcgtatgtcaatgacagaatctgataagttggaagagtatactgtagaagatacatacttcactttttttttttttttttttttttgagatggagtcttgctctgttgcccaggctggagtgcagtggygcaatctcggctcactgcaaccaccgcctcctgcgttcaagcaattctgctgcctcagcctcccaaatagctgggattacaggtgcccaccaccacacctggctaatttttgtatttttagtagagacagggtttcaccatgtggccaggctgatcttgaactcctaactcaggtaactgcccgccttggcctcccaagtgctgggattataggcatgagccaccaccctgactcatacttcactattgaaacaaactttttttgtgtacagaagaaaaaaaatcgtacagttaatagtgtcagagatagtgaaaatatgaaacaagaactgcttacaagaaaggagc

SEQ ID NO: 794112 - DNA, 639 bp, Homo sapiens
tttacattttcctccacaatcatttactttgaaagacttcaaacctatagaaaaattgaaaaaaaaagaactcctctacaccattcacccaagttcaacagttaacattcctttaccttttttctctgtctacacacatctacacacacattcatatttcatagtaaatgcagaccaaaaaaactccacttcatccctaaatagttcagcatgtatttcatgagattaaggacattatcctatataattataatacaattcaattatcaaacctaaggatattaacatttattcaataacattatctaatatayagtccagatagaattttctgtttagaaaatgtcacatctatacacatatatgtgcatgtatatagatatttatgcatacatagtgtgtgcatgtgtgtatgtatgtgtatatataacacacatgcacattacatatgcataaatgttttaatttaataatatttatatgcatcaatatcttaaagatatatacatatcattagctggaagctgcctctatccatatattaaaggtttctccatatgtagtgaactgtaacctaactggatgtgtaaacaacctgtaacctactcttgagccaatgactgagttttagccaatcaa

SEQ ID NO: 794113 - DNA, 576 bp, Homo sapiens
aatttgtgcttcttaccactcaacctgtcagaaagcaagtgatgcaagaacaaaatattgtgaatatgtttacatcgaaagtgttaaagaaaactcagcatctgccagcaagtttatggcgtgccacggtggtatagtgattggcactttgtgttgtgaatgcagaaccttgattccaatccaaaatggcagtgtgtggcatctttttggggagaaactgagctgtcttttggtttgttttcaatccgtgcactgactgagtcctttagcagggtttaccwctgactcctgcaatgcagtgcagtcaggcaaaaaggagaccccacattgcacatacctagggcccaggacatgccctatgtctcaccattgagcagaaaatatcccaaagggtaaaatgtcacctttcaaaccgccatgttggtagcttccactaatgcagtggtgtggtcataactggtttttactgttccttacaatggctgcaacccttatttgtgactagagaacaaggcttaccactgaattgccagcatgatacagccagggccatcaaaaacacacctgcactaggtc

SEQ ID NO: 794114 - DNA, 553 bp, Homo sapiens
cctagacttcctgtacagtgccccttataaacgcaagcacttgttatatgataagagtcttctagagtagagccaacaacagcaaagcctgtatttctaataattcttggggttggccaagcaatctctttccatggatctccaaragctttgcaaacatttgctgtgaagaaacctcacacacacacacacacacccatatttttaaaaatcacccttgtgaataagggtgattatacacactcccatttaattaacaaacatgtcctcttgtaaccacatgcctcctgtgacatgaataagacattcaacacccaggaggtggaaatgagtcctgctgttttttaaccctttgtaaaagtatgagaacactgtataaaggaggtggtttctgagcagaggtatgtaggacaagaatgctgtaagccatggaagcaccgaaaggcagaagccctggaggctgtgagcatgtaaacagtcatgcctgtacaaagctgagctcagtcatacctgtccaggtccctctgggtcaatctatgaagtctcggagttg

SEQ ID NO: 794115 - DNA, 585 bp, Homo sapiens
gagttcaaggttgagaggaagagtaacttaattgtatagattcctttttacggttggctttttatttatttacttatttttgagacagagtcttgctctgttgcccaggctgaagtgtagtggcacgaacatggctcactgcagcctcaacctcctgggttcaagcgatcctccaacccagcctcccaagtagctgggaccacaggcccacgccatcatggctaagtttaaatttttttcttctagagacaaggtcttgccatgttgcccaagctggtctcaagctcctgggcttcccaaggtgctgtctcagcttcccaaggtgttgagattacaggtgtgagccttcatgcccagcccagtttggctttttctgtaccactgaattgtttactatgtacaggtattataagtgaattgaaaaaaaatgtaccaataatkttcttttatagagggatctttcatatcacctctgtctacctggaaagtaagtagtaggtaccccctccctctttaggaaaacaccaaagaatcactgctcataagatatctgcttcagcctaatggtccctgccaggggttccc

SEQ ID NO: 794116 - DNA, 614 bp, Homo sapiens
aaaaaataaatggattttataaaaatttgattcaaatagtaagtttaactttgaaaccaataaaatcattcttgcttttaaaaaactgagtgcttttcactgattttcattttactaagaattacttttgagtaagttattttaaacayctaacacttaaaaattttaagcatgaaaattttacattgaaataatctagaagttagttctgtcaaattcagtgttttctcccacccatttataaaatcactatgtcccaatataaagccctgtgttaaatatcttattacaaggagctacaaacaaaaatggtcaactgtgcatgcaacaaagctactagaggagccaaatcatcttgtttcaccattcaaatgtgcaaaaagtcttactggattggattctccactaaattcacatagcaaaaataattctgcatgtgattttttttggcaataatttattataggtgcttacgctatgtttacttttgaagtttcaagataaaccaccatatgttattaaggggaaaccaagatggcacaatgacttcctgtaatgacaacatgcaatacctgatattgcaaagcccaatgccttcaattcttttgttattc

SEQ ID NO: 794117 - DNA, 545 bp, Homo sapiens
actccataccaggttgcagatacaagttccagtctggtttctcagttacttccctggcagagaagtgaaaccacctatcagaaaaataactcacctttctgagagagaatgccactcaccttctcatcccaaattcactgyaacaaagtataaactgcatttgaaaaccaaaggccttgctcatgcatttggagactttgattagatccctaaatccttactatttaacttaatgtaaagtctggataagtaaatttctgtaaaggctgctagaaaggcttatcattgagttaacaattaacatccaaacaatttgactcttggaaagcctatttactttgattacctggttcaggtagttttcaaaatgtaattcttaaacattcaaagtgagggttagaagggcctcaagtacaggcaaaagcaaagaccaggtgctctctcactaactggccaagcaatgttggaaggcggtaaagagaaggggctgatagcccagactcaagccattttgttgcctggtgttgtgctgaactcctatagac

SEQ ID NO: 794118 - DNA, 559 bp, Homo sapiens
atcatcagagaagtgcagatcaaaaccacagggagataccttctcataccagtcaggatgactgttattaaaatgtcagaaaataacagatgttggcgaggttgtggagaaaacggaacacttatacactgctgtccagccactgtggaaagcaggaggtttctcacagaatttaaaacagaactaccattcaacccagcaatcccatttactgggtgtatacccaaaggaatataaattattctaccaaaaagacacaagcrcaaatatgttcattgcagcactatccacaatagcaaagacatggaatcaatcacctagatgtccataacagtggtctgaatgaagaaaatttggtacatatataccttcgaatactatgcaaccataaaaaaaacatgaaatcatgtcctttgcagcaacatggatgcagctggaggctattaccctaagcaaattaacacaggaacagaaaaccaaatactgcatgttctcacctataatggtaactaaacattgaatacacacggacacaaaggtgggaacaatagacacccgg

SEQ ID NO: 794119 - DNA, 646 bp, Homo sapiens
atgttttcaaggttcatccatgctgaagcacatatcagtattccatttccttttattgccatgtaatattccactttctggattaccatatgacaaaatactatactttgtgtttgtcagttgatagatgtttgggttgtttctactttttcctrttaatgaaaaaatatgctataattgtataatagtcaaagacgagaaataaccagttgtctttgagtagacaaatgattaaacaaataatgatacagccataccatagaatagcattcaacagtaaaaaggaacaaattattgatatgacagcctccacaaatgttcagtaaatgattgagtgaaaaaagccaatccccaaaggttttatatgttgcatattttcatttgtataatattctttaaatgacaattatagcaatagagaatggattagtggttgctgctgattaaggagggagtggaaatgggcattgctattaaagggcagcatgcggagtacttctggtgatggaaataatctccttcttgactatattactgtcagtgtgctggttgtgatactgtaatatagttttgcaatgtgttgccattgggagaaactggggaaaagggcataagggatgtctgtgttatttattatagattatta

SEQ ID NO: 794120 - DNA, 626 bp, Homo sapiens
agaggcaaatttttatcttttctgagtgcatgtaatacaaagtgacatgctttctggatgtttgtgattgttagtactcaagaggcttttccagggagtttatatctcacagacagagagcttttatggtttagtccctgattgcgccaatggatgctcaataaatgtgaatcattgattaagtaattaaaattggattttgggattttagttaaataacttctttgaaatttgctatcatattttgcttgagtctccattaaatcaaaatacctcctctgaataaaaataaaatcaatcaggttttttattgacaactacatgttgtcaataaaccaatttaattcatgttttttccctttagtaagttgttttgattttttttcactcatttcttttgtagaaaatttaaaatgatttctttattcagaggtcagcttttgggggcaacttcaagaatcatgarctgtaagttcagaaacatttccagcaatgaggatggtcttttaaggtgtgaagagtaatgaaaatagttgagaaggccaagactccaaaattattcctgttgtgatagcattaatcagttcactattggtagaaaggggccactctaattgactagtgat

SEQ ID NO: 794121 - DNA, 370 bp, Homo sapiens
gtgttgtcaatgattgctagttaagatctttggttcttgagaagtctgactaatgattgataaagcaattgtaaacatcttgggtatcattgctttgctttattttattcagagacatatatagtggcttcctcacttcttgttagtagcgttagttygagtaaacatcaatcttacaacaaacttctgattttcaaataataaaattcattctttgctcttattttatatatgttgcaaaaggtgggaattaatgttacattaatttatgctctctttcataaaactttccgcaattatgttagaaaatcaattttacataacctccctgaaattatcagtatcctgttacatttctaaaatatttgaa

SEQ ID NO: 794122 - DNA, 612 bp, Homo sapiens
ataaaattgtgtagctttaaagttcagtcatttaaaaaattaaaagagaatggctagtattgagaggaccacactgtctaccatgccagacttgtgactgcagtggagacctgtggtgcagggtacctgggtgcatagtctgtgcttcttgtattttttcatggcacatgattcaaaccacttttgaggtttttgacactgcagtgcactatggaggaagatgaaaaattcacattgtatattcttgcctatatcaaactgaagcaaattggaaatctaaaattgatctttttaaaagcaaataccattttatacttttaaagcacacaagraaaaaaacctgagaagtataaaaatagatatgctagctctgacacatcttgtgtattgacagtgagctacagtcttttaaggatttaaaatgagtggcttgtctaatttgttcactttgttttcacttctttcctcccaactgtcttatttttaccccactgtcatatatcatacttttcaacccctgtccaactcttgcaaatttcacaatcttatttttcttaatgtggcaacccctttctgatttaacacttcatcttgcatttcattgtctttttt

SEQ ID NO: 794123 - DNA, 612 bp, Homo sapiens
ataaaattgtgtagctttaaagttcagtcatttaaaaaattaaaagagaatggctagtattgagaggaccacactgtctaccatgccagacttgtgactgcagtggagacctgtggtgcagggtacctgggtgcatagtctgtgcttcttgtattttttcatggcacatgattcaaaccacttttgaggtttttgacactgcagtgcactatggaggaagatgaaaaattcacattgtatattcttgcctatatcaaactgaagcaaattggaaatctaaaattgatctttttaaaagcaaataccattttatacttttaaagcacacaagaaaaaaaacytgagaagtataaaaatagatatgctagctctgacacatcttgtgtattgacagtgagctacagtcttttaaggatttaaaatgagtggcttgtctaatttgttcactttgttttcacttctttcctcccaactgtcttatttttaccccactgtcatatatcatacttttcaacccctgtccaactcttgcaaatttcacaatcttatttttcttaatgtggcaacccctttctgatttaacacttcatcttgcatttcattgtctttttt

SEQ ID NO: 794124 - DNA, 632 bp, Homo sapiens
gaagtaaaattagtatgaaaaaagtatgcagtatgcatatcattgtgggctattgtctgtttacattatatggctattgtattagttaacactttcaccagcaatttataagattctcatttctcctcattttcccacatatgcatacatacataaatacatacatacataccctttgtgacttatttatcaaataatagttaatgatatgtctgagcaatgctaaagagatcaactatggatatgtgctattgtacataataaccattctcctattgtaatataattacatcattgttttcttttcctgaaatcaatttctttgcaattatttattcaggataatgttcaaattgaaaattattgagtctaagttggtgactgtattaaactcttggtaagtcyttcaaaatgattgtaccaatgtaactatttcagaatcatgtataatattttaatgtttgatatttcaatatatacatagtttattgtttttattagcacgaattatattactttcaaggttaaacattataaatatatctgttaattaacaaaaatctctttgcaatgggccaaatatttatgtcttcccgaaatttatatattgaagtcctatccccctgatgtga

SEQ ID NO: 794125 - DNA, 618 bp, Homo sapiens
gatttgggggccttggtctcatgagaagtggaatcgtctctaacttgctaaaaatgggtcacacagtgactgtctggaaccgcactgccaagaaacgtgatttgttcatctaggagggggcccgcctgggaagaacccctgctgaagtcctctcaacctgtgacatcactttcgcccgtgtgttggatcccaaggcggccaaggacctggtgctgggccccagtggtatgctgcaagggatctgccctggaaagtgctacgtggacatgtcaacggtggacgctgacatagtcacttagctggcctgggtgattgcgtccaggtcggggggtcgctttccagaagctcccatctcagggaatcagcagctttctaatcacrgaatgttggtgatcttagcagctggagacaggggcctataggaggactgcagcagctgcttccaggcgatagggaagacctcctccttcctaggtgaagttggcaacgcagccaagatgatgctgattgtaaacatagtccaagggagcttcatagccatgatcactgaggtgctgaccctggcctaggtgacagatcaggcccagcagacactcttggacatcctcaatcagggac

SEQ ID NO: 794126 - DNA, 644 bp, Homo sapiens
tcaactttgtaaaatctgccttcctaaaatctacgctgttcgtcatgcccagtcttctctcactggttgtcattaagtctacagttatgcagtcacagacaataggctgagtcaggaagacatggattgtaattctgcattttactcataacttggccatgaacaagttacattacttccctgagcccagatttcatcatttgaaaagtgaagctaatattctactagctgcctcataaaattactgggagaattaagaaatacaatgtatataaagtggctgccacattaagtacttgataaatattttcccttactcatcaccygaaaaaaactctctctggtcagaattaagttccagctagtggatctcttattctgttagctgaagttatcactaaagccagtcaagaacatgtcaaatgttcttggtttataagaggtttagaatgtttccaacagctgaaaatatccatcactaccgtagctcaccattatggagttttgtgatctgataatacaaacttaccatctattctgtcatttggcaatgtgaccaatagtaaaattacacaatacaattgtttcttttcttttatctctttaacaatagattttctgataggcatatttgtaattgccca

SEQ ID NO: 794127 - DNA, 568 bp, Homo sapiens
tctccatcaggataaggagcatatttgatgtgttcaccatagtacatatagttttaatgaataaatatttgttgaataaattaatgaatgatgataaaaatcgcccagttttccactcaagccagcacactgattaggctcctgacatttcagaatagaatgctaactttgttaccttcttatctgtttttatcccaygcggtcctgccttcagtcattcatagaaaggattctatgcccttgtcaaaaaatacaacctcaaattgtctgttttcctctttctttacagacctaggcaagaaaatttgagacaaattgccctaaaagaaaacgatctgcctttttttctctacatgctctaaactatttacaaagtctaagaaaaagacagtttcacattactataaaaataaagataagaatcaagttggaccaccaaaagtctacatagttggaccatattagtttagtccctcaaagactcacctgggccactactacatttgaaaactccatgggcattatgcactgagaaatttgtgtgaaaggcacacacacatactttata

SEQ ID NO: 794128 - DNA, 572 bp, Homo sapiens
atgcaaataaaatatacagtgagataccatctcatacccactaaaatggccatcctaaaaaagataataacaagtgttggtaagaatgtggagaaattggccagcatggtggctcacacttgtaattctagcactttgggaggccgaggtgggctgatcatgaggtcaggagatcaagaccatcctggccaacatggtggaacctcgcctctattaaaagtacaaaaattagccgggtgtggtggagcatgcctgtagtcccagctacttgggagcctgaygcaggagaatcacttgaacccaggaggcagaggttgcagtgagctgagatcacaccactgcactccagcctggcaacacagcaagatgccatcttaaaaaaaagaaaaaaaaaggggagaaattgggaatacaaaatggtgaaggcactttggaaaacagtttggcagttcctcaaatggttaaacctagagttaccatataaccccacaactctactcctaggtatatgtatatacccaggaaaaataaaaacatatattcacacaaaaatttgtagataaatgttcaga

SEQ ID NO: 794129 - DNA, 488 bp, Homo sapiens
aaaggtcacttctagaactttggagggtgggttggaggggtaaagatgagctgtgaaggaggcaactggtgctctctctgggtagagagggtgagtacacctcaacaaagacagtctcagtggcaagagacagaggcacagggactagagagaaagaaattagactcgatggcactcagctcttgatctgagcaagagcctsttacgtgcctggttgtctgggtagaacagtgctttccacagacagaaacacaggagaaatggcagatgagggagtaaatcctgatttcaccacttagtagctctgtggtcttgagtcaacgacttaacctctctgggcctggcttccacatccattaagctggaataatgccaatacatgtcttataggattgttgtgagaactaaataagttcaacagcaagagccaggccagttcagttttgggtgtgctgaatgtgagggtgtgcagagtatcggtggtggta

SEQ ID NO: 794130 - DNA, 602 bp, Homo sapiens
acacagagacccaggagttttatatactctggccccaggttcctcagcaaggtgggagatccatatgtagatatacttaggaagggggctgaatccagagagccaagcagcatcattctgcaggccctacttccatggcacctcacaagttaagacccactgacttggaattccagccagccaatggcaacaggctggagtctgcctgagatgggactgatatcctgggggaaggggtggccaccatctctgtggtttggtagcckcagtcattgcagtctgtgggctctagagaataaaaatggtctggaagaagaagggcaccccacagtgcagcacagatgccttgccagattgtggccagactgtttctttaagtggaaccctgatccattcctcctcacaaggcaggacctccatgtgtgggcttcagccactccagcaagggttctacagacagaactctgatctctccctaagatggagctctctgggggaggggcggctgccacctctatagtttggtcaactcagtcataccagcccattggctctggagaagacaaacagtcttgatgaagaagggtccccccagtgtggca

SEQ ID NO: 794131 - DNA, 602 bp, Homo sapiens
acacagagacccaggagttttatatactctggccccaggttcctcagcaaggtgggagatccatatgtagatatacttaggaagggggctgaatccagagagccaagcagcatcattctgcaggccctacttccatggcacctcacaagttaagacccactgacttggaattccagccagccaatggcaacaggctggagtctgcctgagatgggactgatatcctgggggaaggggtggccaccatctctgtggtttggtagccgcagtcattgcagtctgtgggctctagagaataaaaatggtctggaagaagaagggcaccccacagtgcagcacagatgccttgccagattgtggccagactgtttctttaagtggaaccctgatccattcctcctcacaaggcaggacctccatgtgtgggcttcagccactccagcaagggttctacagacagarctctgatctctccctaagatggagctctctgggggaggggcggctgccacctctatagtttggtcaactcagtcataccagcccattggctctggagaagacaaacagtcttgatgaagaagggtccccccagtgtggca

SEQ ID NO: 794132 - DNA, 624 bp, Homo sapiens
agcttgcaggagagacggccctgccatctgaagccagccactcatcagttacttttaagagaagtttgaatatgtaattaagcaaggtgttctgtaagtagtagtcatccccggagaggttcactaattgcactggagttctccctgctgggcggggagaccctgcagccagctcacagctcgtgtttcctcctgggctcagccctgtagggggttgcggctgtcagagccggatctcactgttktggggctgagcagccccaacaggggcctcccatgatgtccgcaggacccttttttatatgtctgtacctcagtcatgtgtgctttcctgggattctccacggtggaattttgaggaaggacttcggaagtcacaggccactcggctgcatcaggccttccctttcaaaggcagatgtgaaatctctctttcgggggatcctgcggatgcttactgcacccaaggtattatgtacgcagtacacagaagaccgactcgaaagaagaaaaggagagtacataagcatattcatctatgaaaaagaaaagcaagcagaaaagacgaaagagaaggaaagtcctaacagtgcaccctcctggagctcctccaggagctgcttc

SEQ ID NO: 794133 - DNA, 647 bp, Homo sapiens
gggggtcgtggtctcgctggtgcagcctcctccgggcaggccccgcctctgctcccttcccctcactccatctgattcggccccgtttccttgtccactccacgttcttctgagcgtgtctctgggacatggttaaggttaagaagcggcctctgaacgagggagaacgtactgaaattgcctaagtgaacttcaaacacaggaagaagcgctcagtcgatgttcatggtgagaacgagggttgatcttttgaatgagtcacgggtttgagagagacctaagaaccattcgatctgaaaactagattcactttgaacaaaatatctcaggtgctaaatactccagttagtgtggggaaatgtctctgagaacgaaagctctgactgaccggagcctgctgcagtggatctgaaagatgctcacgaataattctcgctgcagagcttagtaaaccaacaatacaaacgattttctgtaacgamctcccgtaaagcagccactcccctcacagcgctgagcaggcgtaaccgccagggtcctcccccttctgaagccgcggcttccttgcaggccggtgtccgccgttgatcctttaactgaccatgggcagttttagttcacgagtgtggattcttgggatacggtcg

SEQ ID NO: 794134 - DNA, 474 bp, Homo sapiens
gctttagtagtattccacctttagtgacatgcaagaaggtaaaggaaagtattaaatcttaatgaaggtaaataattccaaaacttccatttattcatttcttttttttcttcttacttctattctcatatatgcttctacttatgttatacataattttttttactaaaagggattgtggtagacccactctaaggtaatccamaataagccacatccttgtataattctctgtctttgaatataatataaagacataaagtctaaaatatataaaatatactttttaaaaaaggcagaacctacagattacttctaactaatacaatatggcacaaataaaaagatttgcagacgtaattaagtcattcatcagctgactttgagttcatcaaaaggaagattggtttgagtgggcctgaactaatcaggttatccctttagaagagagtgcagtcctttcctgtagttaga

SEQ ID NO: 794135 - DNA, 631 bp, Homo sapiens
ttgtatctgcaaacatagtataatcctttcagcctcctgctaaaattttaagtatttaaaactgcctaatagcatagcagagttgaggtattcatcacatatgtttctaattcagacttgtagttctctttcttaaaattttgtctccctttctatcrattttctttactagaaagtgtgcgttcagcttttaaaataggcaagagattaaggtggctcattcactgattcccattttattgcaggatatatgaaacatgtatcttcttgttatatacatcccatattatagctctatgaaatacctaagttttagatttgcatttcaaaagagaattgcaagccttcttaagagtaatgttacctatctgatgctttcattgaaaacaaagtttaaatttcatctcattggcaaggtcaactctaaatcttactacacaaatttagaatttagagtggttgtattcagaggcttttattttgtgattgagtttatgcttatcttctttttatcttacggatattataaaagtagtaagagtagttaaaacgggtgtattcagtaaaggatttggaaatagatatcatgaaaagtactcttcctatctaggtacacgaatcacattagaat

SEQ ID NO: 794136 - DNA, 631 bp, Homo sapiens
ttgtatctgcaaacatagtataatcctttcagcctcctgctaaaattttaagtatttaaaactgcctaatagcatagcagagttgaggtattcatcacatatgtttctaattcagacttgtagttctctttcttaaaattttgtctccctttctatcgattttctttactagawagtgtgcgttcagcttttaaaataggcaagagattaaggtggctcattcactgattcccattttattgcaggatatatgaaacatgtatcttcttgttatatacatcccatattatagctctatgaaatacctaagttttagatttgcatttcaaaagagaattgcaagccttcttaagagtaatgttacctatctgatgctttcattgaaaacaaagtttaaatttcatctcattggcaaggtcaactctaaatcttactacacaaatttagaatttagagtggttgtattcagaggcttttattttgtgattgagtttatgcttatcttctttttatcttacggatattataaaagtagtaagagtagttaaaacgggtgtattcagtaaaggatttggaaatagatatcatgaaaagtactcttcctatctaggtacacgaatcacattagaat

SEQ ID NO: 794137 - DNA, 572 bp, Homo sapiens
cagttttaagagttgtttgaatattaaatacaacagtattttattaaatatttctttccaaatattctttctccatttgtggcttgtcttcttattctctagacagtgtctttcacagagcaaatgtttttaatttgaatggaatccaactttatcagtcccatatgccaatatactcctgagaaaaacatcaaacaaattcctataaagtgcatcctacagtagtacttctcaaaatgtcaagatcatcatccttatgtcttaggaatgagtaagcactatactaaacatgccagaataaatcacaaatcatacgggaataaataataaatttgagttaatcatactaaggtttcactgtctaagtctagagcttctgttcaataaaaaccaacttgtgcaaatttaacagagatgtacatattacaatatatttgcaaaacataaaatcaatggtgaaagagtayctatgatacaaaagaagacctaattaaaattgacaaaaaggcaaaagaaacaatagaaaaatgggcaaagtcaatttgtagaaaagcaaaagtaaatcattaaca

SEQ ID NO: 794138 - DNA, 586 bp, Homo sapiens
tcacaggtaaatgtttgtaaataagcagtatatacttgggaggctgaggtaagaggatcctttaagcccagggttccaaccctggacaacatagtgagactgtgtctcaacaacaacaaaaacaacatcaaaaaaaaaaaamaaaaaaaaagctggataattttagggttgtaagctttgttaatccaatttcttaacatagacatataatattgattttcaaactcccagctgaatatttttcccctaaaacatactgtttccaaggttaatgtgtgttatgaaagataaaaatgtatgggagataattatacgagagacctgatatggtggattaattgcaaaatggccctcaattctctgctcctctttgtatccattccctctgatatctgactttgcaactcctcccatcaagaggtagggtcaatttccccatcccttgaacctggattggctttgtgacttgctttgaaaacaggatacagggggagtgaaagtgtgccagttctgagactaggtctccaaaggtcttgtgagcttctcctctctcagaattctgcctaccaccaagctggccagctgg

SEQ ID NO: 794139 - DNA, 446 bp, Homo sapiens
ctctatttgtatgttatgactttttaacattactatctttattataatcattacctaacgatgtgaaaagcatcattgcatctttggatcactatgatttctgaacgaactgggtaatgattattttccgagttataaaggtgatgaaattgaaagttggtgaagtcagtttgtcattcattccttcattgattcattgtttattycgtaagtgtttactgagtgcttcctaatgttactgcagctctgaatatacaaagatgacatgtccctgccctggaggagcacttaagctactcgaggaatggatagctatagataactaacagtgtgtgatcagcattaggaagcaaataattaccaagcattagaggggtgcacagcagggtgtcagattaattctgacaagggagttggggtgcctttcatagacaagggaactaagc

SEQ ID NO: 794140 - DNA, 465 bp, Homo sapiens
agcatagtattaagtgggtgggatgttgagaacatgtggagagtacaggaagatgaggcttggaaaggtcacgtcggttgtaaatgacagagttgggaaagtacagggttttctgcttcccagtttgatgtttttcctttagactaggttctttgttatttagtttttttcyccctaaatacatcattagcaccctctatatatgccatgttgaggaatatgacaactaggagtttcacttgacaaggttatccatttaagctagaggtgtagcttgcatttggtccatgtacaggtcagggcgtgttcctatggatcagttaaggtgacgtgagtgggggctaaggcccagacattctcatttaagtgttctgcccgtgaagcaaatgtcattttaatcaaccccaagttgcaagcactcttacctcatgaccttagccctagtttagagggctcacagattat

SEQ ID NO: 794141 - DNA, 646 bp, Homo sapiens
accattcgggtcccgtcctctccctccgtgctcgcgtccctccttgaagtcggagtttctctcgtgcacgtttgcactttgcaggctccagccgggtcccttgcacacgccgatgccctggggatgccggttgtagtgacctggtccctgtgactaaggggccttggggaggcctgtctgtccctccttctgcctctgatctccatatgaccccgccatgccgctgtagaacttggcccaggaagctccagcaaatggggacgagaaccagactttgcccccaaacagaagccctggctgggcacccgctcaccaagcctaggtttgccattctcaccccagcacctgaatcaaattcctttcaagtttcaaagaagtaaaaactcggtctgtgacaaatgtctctaacatgaaacatgttcccagacttccaggacacaacacagagccrcggtcctctttccctgtatgaacagtgtctttgtgagagagcgtctttgttcagaaggggaagaaagaatgaatcatgctacggaacactcaggcaggtgccggccattctggaaacacgtgtatttcggcgtatcgtgtactggcatgctgcggggaatagcaatgaatagcgtggaggacaatcgtgcattgt

SEQ ID NO: 794142 - DNA, 646 bp, Homo sapiens
tgtactggcatgctgcggggaatagcaatgaatagcgtggaggacaatcgtgcattgttgatgtttgttaaaataaagatattcaatttataataaaagggattaaaagcttaattcatgactatgttaatatttgtctgcaagtacacagataaatggcaacgcaccttatcacgttgaacacctgtgcgcacaagttcctctgctgagatcgccatgggattgtgtgtttcacagagcttaaactttcatttcccaaaataatgatatcattcatttacaggtacagataggctcgccttgctctcactctatcctgaaatgagtattgtggcttcagctacaaaaatacgggattaattatggcagtgatatgccacaatctgccggcggcaacaacagctggctgaacgcaccactgccgctggcgtccrcatgcacccctcctaaaagcccgtgggacggggcggcacccagctgcttcctcctcccgcagagtgggtgcagcgaacacagcttcatggagaattgctattcacggatgcttggacatcaaatcatgtttccaaatgtcccagggaacttgctcttaaaagagatttatgataaactatttggataaagcatcctgcttaaaaaaaaacta

SEQ ID NO: 794143 - DNA, 552 bp, Homo sapiens
tcagcccacgcactgccctgtgaccccactgccttcccgccagtcctgcatccagtcagagggccctctctgagcctgctgccttcccgccaatcctgcatccaatcagagggcgtccccactacgtggtttgcasagcggccaatcaaaactaggatccgagccttggcccgcctcccaggacctccggaccaatggtggcctggcaccagcaggccaatcccagacagcgcacggcgggaggctgtcgttgggcgtgcgcagctgcagcggcggttgaggtcaagtagtagcgttgggctgcggcagcggaggagctcaacatggtaaggccaggtcactcccaccccgcagacgcccaggctggagggtggacgaagttggcctcctgaggtggctggatggagggatgctgttgcgggccagggtgcagaaaggaggtcagagaaggatgcggggcccagggcgggacacgaggacacggcatcgtctgctgggtctgcgggctccagggcagggatggcagcttttgttttagacgaagctgccggc

SEQ ID NO: 794144 - DNA, 552 bp, Homo sapiens
tcagcccacgcactgccctgtgaccccactgccttcccgccagtcctgcatccagtcagagggccctctctgagcctgctgccttcccgccaatcctgcatccaatcagagggcgtccccactacgtggtttgcagarcggccaatcaaaactaggatccgagccttggcccgcctcccaggacctccggaccaatggtggcctggcaccagcaggccaatcccagacagcgcacggcgggaggctgtcgttgggcgtgcgcagctgcagcggcggttgaggtcaagtagtagcgttgggctgcggcagcggaggagctcaacatggtaaggccaggtcactcccaccccgcagacgcccaggctggagggtggacgaagttggcctcctgaggtggctggatggagggatgctgttgcgggccagggtgcagaaaggaggtcagagaaggatgcggggcccagggcgggacacgaggacacggcatcgtctgctgggtctgcgggctccagggcagggatggcagcttttgttttagacgaagctgccggc

SEQ ID NO: 794145 - DNA, 525 bp, Homo sapiens
ctcctcacttttgagaatagcagttttctccaagtggtatcttatttcagtacaaaaagcttttcaaaacagtaagataccataatgtatacttagtggtaatttattgataagtagtattttgttcctagtgagctagtttagtgttttctcctatctcacatttaatactgtttctaacattgtgaaggaarcaaaagttattgaaacagcaagtaatctcatgattttctaagaagagctctgtaaaattcatctatttaccattggtgtcttggagaaataagcttcttttgtatttacatatttacaccacagaaggaacagtgattttggggaggagcaccagaagtagaatcagaagacctggggaaaatcttgcagcttgcttctatttgtaaactctccttttcagagttgtggtaaatgagtttattgatgtatgtagaagtgcttagtacaatgacttgatggatcatttatcaataaatgtaactattacaacattataaaaatgatagaaaa

SEQ ID NO: 794146 - DNA, 610 bp, Homo sapiens
attgtatgaaataaaccatgcatccatgttgatctaagtaaatgaataaattgaagattttatgaggaacagagatatttacatagtcttaaattacctccccacaatatatgaattaattacaagatgaaaaagtaacactgcagaaaagaaatccagcagataccatcattaattgtcaatgctaatatcaccagtaataagacaaatcaaaattataggttatatggtaggatgcaatgagaagatcccaggatcacctctgagatactcttgctgaaaataacacaatctaaatctaatcataatgaaacatcaggaaaaaacaactgagagacattctatactctgaactttactcttcaaaagattcaaagccatgaagtcaaggaaacctgaggaactgctccagactgaaggagtgtaagagacacaacatctacatgcaacccatggctctgaatgggatcygtctgctataaaggacatgacagacaattaataaaagctcaaaagaagctgaagattgaatgacatgatgtattaaagttaacttactgattatcaaggttgttatgtagagtgtcctgacttgtgggaatacctacta

SEQ ID NO: 794147 - DNA, 627 bp, Homo sapiens
ggaactgaaggagatagagacatgaaaaaccctttaaaacatcaatgaatcctggagctggttttttgaaaagataacagaatagatgggccactagctagtgtaataaagaagaaaagagagaagaatctaatagacatgataaaaatgacaaaggggatattaccactgatcccacagaaatacaaactaccatctgagaatactataaacacatctacacaaataaactagaaaatctagaagaaatggataaagtcctggacacatacaccctcctaagactaaagcaggaagaagtcgaatccctgaatagaccaataacaagttctgaaattgaggcagtaattaatagcccaccaaccaaaaaaagcccaggaccatacagattcacagcggaattctactatgattacaaagaggagttggtaccattccttctgaaactattctatacaatakaaaaaggactcctccctactcattttatgaggccaccatcaaactgataccaaaacctggcagagacacaacaaaaaaagaaaatttcaggctgatatccctgatgaacattgatgcaaaaatcctcaataaaatactggcaaaccgaatccagcagcaaatcag

SEQ ID NO: 794148 - DNA, 587 bp, Homo sapiens
taatctacaaagctcatgaataaagaaaaatacaaaaacctcaagttttacaaaaaaaaaaaaacttttaagtctacatacattaacaataaaaccatttcttccagataacaggtaaaagtataaaggcataccactgactttttttttctrgatagccaggaatgaacgaatgtttaatatctatgacgcttattagggccttcaaagttgcccccttgacttcctctaccaaagccaccaggaccaccactcacaggacctacgccactcattggtgcttgaggggtttcagaacctgttctactccccataggtgaacccatctgagatggtggtccttgaggaaatctgtcattgtgctatgataccacacaataaggaatagaatatgaagtccatttggaacacgccaaatataagtgacaagaaaaattggcaaaatcccaagtggtggtgtcatgaagttcggcagaaagcccagcagaatcaggatcacacatagaaggaagaaaggagcaatttaattagttactatgtttttttaaaaaaatgcagcatctgaagatttacatattgctaatgct

SEQ ID NO: 794149 - DNA, 608 bp, Homo sapiens
  misc_feature 99: n = A,T,C or G
aaactgggatggataccttctgactttcacagctctccagactttattatatcagtggtagccctcagaaaacaaatatttccctattaggtctaatanagttagcaaagagtgttaggattaaacgtttccaagacttaatttgttgtaagttttcccacatgtggcttaggagacagcttctgaaatggcagctccagggctgattctccaaatcccaggaggaagttagtgcagcatctgcagtctaaattattttggctccaccagctgcatgccctttacgaagtgattgtctgatgtgtggctacttggttttatcaaacaagtactgctttctggaaactttcaaaatggyaatgagtctccaggacctaaaacaacttaataaattgaaattctacatttgttccagcttctaaaaagcccatgattttatgtttttaagtcttgaaaatattagagcaaaactacaaaatatctacatcccaggtaactctgaagagctgaatgtgtatgaaataagtattggaaagtagtcccctaagaagagttactgataaagcttcagaaaagacttttcttcttgtacttgcctgatggatgca

SEQ ID NO: 794150 - DNA, 605 bp, Homo sapiens
tagcactattatgagggctgaagttagagaatgggaggaatgagaaagtgctgccctggcattagatacgcactcggtagaaaacatacttcacgtgttcatatagccattttgttttttcactttcactacagtatttaacaagtgagatattcaacactttattataaaatgggatttgtgctggataattttgcccaatggtaggctaacgtaagtgttccgagcatgtttaacataggctaggctgctatgatgtttgataggttagaagtgttaaatgcattttcaacatcatattttcaaattacgatgggtttaytgagacataaccccatcgtaaatagagaggcatctgtatattttggaaattaagcccttatctgatacatagtttgcaaatatttttcccattccacaggctccctttccactctcttgttgctttctgtgctgtgcagaaaaaaaaaaaagaaagaaaagaaagagaagaaatcaaagactctgaatgtgtaactgatttgcccaagaccacagaattagaaaaaggcagaatcagaacttgaactttattattctaaatcatccacacttgttggtgcaaa

SEQ ID NO: 794151 - DNA, 540 bp, Homo sapiens
attttttgccttttctgtctttacctaggaaggttctctgcagggtggaaaacatcttatcaactaaagttttaaaagaaaatcatgttagatataattacttgatgcacttaaactttttattatgggagaaacctaatatataataaaatcaagattaaaaatatctttaggaattkttgagactttgtagggaatggttatttaaatagggactgtgtaaagaccttttagtatgtcttggggaccactcgatttggaatacattttcattagatagataatagtttactaaacacttctgagatggaataaaatttaatcaaaacattattttgcatgaataattaaaagtctcttcctttatgtcggaactagtaagtgataaagctaattctaggaatcagctcataagatggttaagaagaaagtttgaaaaacaaaatttctcttcaaaataaaatattattttccttatctgtgtgtcatagctaggatgaactgtgaatttattgtctacattctttataagcttagaca

SEQ ID NO: 794152 - DNA, 542 bp, Homo sapiens
tgaatagctcactgtaaacttttaaactgaactctgataaggaagaactacctctagcctgccgtaaattgtggagttttatctactttgtggtcttttgtgatgaattggattacagtttcggaagtgagaagtaacatagaaaccaaaattttgcattgattcatgacgttagggcatgaggagggacaggtttatgcaatttaaaggaaattcagcaccctgggaacttacaccasctggttttatgcctaagaagtaggtacagggtggaaaaaaaagagaaaccaactacaagccaaaataaagctaaccctctgaggctagtcagtgattcactctggaatttcaaaactgcagaaattgcataggacttccatgcctcatgaacggcactccctgtgggaaagagccagcggactgttgcattcataaaaaaatgatacatgacgtgctctcagcacccctccataggatccaatagattgtctaaaagtcaacatcctctcatgttagaaattaagtctcttaaatattatttt

SEQ ID NO: 794153 - DNA, 667 bp, Homo sapiens
atcatcattcactgaatatggcaaataaaataaatatgtgcatatactgtgcatatcacttagctagatttttgaaatggcattttcaatgcctgataaggtcgaaattttattaactagctatgatttagaaacgtatgctgcgaagttcttgtgggaaaaaaaggttttaagtcaacaataaaagtcaaatattaggaaaagagcaaagaagaaaactaatattgaaagctgcttctttcaacaagttgacctttcctcctgtacatattttcctctattagakctgagataatggagttattcctaagctttgccttccctctcccctgccccttgtctgtcgaggaaaggttatgcccagcagatgtttgtttcaataaacaccgcattaagcctcctaggcagccaggatggcacagatggtcttctcaaactatttatgtgctctttctcgatgcgtgattttttcctttacaatgatgacttgggtgttagagagattgacagcagcacagtccttgtgacaggaagcccatgattctcactaacatagatcagcagccaggcacccaacacacagcctgggcctcaccttggtcacctgtgggtagcactgaaatatcacctccctgagaaacgagtgggaatattgaccatctactca

SEQ ID NO: 794154 - DNA, 562 bp, Homo sapiens
aaggcagaggctgcctccaaggctacatgacctgcaggcagccccggaccccctggggaggactcaggtctccactgaagggacagccgaacagagggaaatggaagtagagccgtggggactcctgggagggggaagaaggcataggaggggagagtgaccagggagacaagcccctcaaggtcagagagggaagccagtgggtccccgagggtggggtcgtgcagtgaaatgtactgtaggaggtgggagcaggtgttgggagcacgtgaaagtcacagccagcctcaggcagcaccactcaagtctatctcagttgctyatctggtccagagaggttgaaaggatgggaaagcttcaagactggattcttcgcatctgctctatgacagagaaggttaggaccagaaagtggcctctgcaaacacagccatttatatgtttggactactgtgtttgctttgattttccagtttcctaaataagaaaggctgctgcttaagagtccagtctgatctcaactaaggggaaaagacatttgtttcatttccattaagggtgg

SEQ ID NO: 794155 - DNA, 562 bp, Homo sapiens
aaggcagaggctgcctccaaggctacatgacctgcaggcagccccggaccccctggggaggactcaggtctccactgaagggacagccgaacagagggaaatggaagtagagccgtggggactcctgggagggggaagaaggcataggaggggagagtgaccagggagacaagcccctcaaggtcagagagggaagccagtgggtccccgagggtggggtcgtgcagtgaaatgtactgtaggaggtgggagcaggtgttgggagcacgtgaaagtcacagccagcctcaggcagcaccactcaagtctatctcagttgcttatctggtccagagaggttgaaaggaygggaaagcttcaagactggattcttcgcatctgctctatgacagagaaggttaggaccagaaagtggcctctgcaaacacagccatttatatgtttggactactgtgtttgctttgattttccagtttcctaaataagaaaggctgctgcttaagagtccagtctgatctcaactaaggggaaaagacatttgtttcatttccattaagggtgg

SEQ ID NO: 794156 - DNA, 700 bp, Homo sapiens
aatccttacactgttatcagtaggatcccatacagccaccagtggtttatagtaatagatttaaaagatgccttctgggcttgtccattagcagaggacagctgggacctatttgcttttaattgggaaaaccatcactcaattyctcaaaaactgatattaggtctgtcttctgccctctcctccctcaagactcaaggcattctagcccagactccacctcttgaatttccagttcaccaccaccagcctggagatcacgtcctcatcaggagttggaaagaaaggaggctcaagcccacttgggaaggaccttttttagtgctcttaacaactaagacagcagttcagaccaccaagaagggctgggctcatcacactcgagttaagtgggcaccacccttcccagaatcatggaccattgttccaggaccaactcctgccaagctaaggctaaagtggtttaaccctcttattctgtatttctttccttcccccttctatcactaatccccttatcattaatgtaaccaagtcaagctcaccccaaactattacctttgatgcttgccttgttataccctgcagagatttgtcaagtcaaaagcaactctccacctcagaaaagtatctctgtccttcctggctgtcctcagattgggcatttgttaactgggataaattagtttgggaagagttt

SEQ ID NO: 794157 - DNA, 700 bp, Homo sapiens
aatccttacactgttatcagtaggatcccatacagccaccagtggtttatagtaatagatttaaaagatgccttctgggcttgtccattagcagaggacagctgggacctatttgcttttaattgggaaaaccatcactcaatttctcaaaaactgatattaggtctgtcttctgccctctcctccctcaagactcaaggcattctagcccagactccacctcttgaatttccagttcaccaccaccagcctggagatcacgtcctcatcaggagttggaaagaaaggaggctcaagcccacttgggaaggaccttttttagtgctcttaacaactaagacagcagttcagaccaccaagaagggctgggctcatcacactcgagttaagtgggcaccacccttcccagaatcatggaccattgttccaggaccaactcctrccaagctaaggctaaagtggtttaaccctcttattctgtatttctttccttcccccttctatcactaatccccttatcattaatgtaaccaagtcaagctcaccccaaactattacctttgatgcttgccttgttataccctgcagagatttgtcaagtcaaaagcaactctccacctcagaaaagtatctctgtccttcctggctgtcctcagattgggcatttgttaactgggataaattagtttgggaagagttt

SEQ ID NO: 794158 - DNA, 620 bp, Homo sapiens
ggagcaaagataagaagtataccagaattctcttgagaaattattcaagcaagaaaaaaagtagagtgaagtatttaaagtgttgaaagaaaaaaaccaccaacctacaattatgtatccagcaaaattattcttctgtatttgtccattgttgcactgctgataaagacacacccaagactgggcaatttatacaaggaagaggtttagcgggacttacagttccacgtggctggggaagcctcacaatcatagtggaagacaataaagagcaagtcacatcttacrtgggtggcagcaggcaaagagagagaacttgtgcaggaactccactttttaaaaccatcagatcccatgagacttattcattatccccagaacagcacaggaaagacttgcccccatgattcagttacctcccattgggtccctcccacagcacatggaaattcaagatgagatttgggtggggacacagccaaactgtatcaccttcaaaagcaaaggagaaatactttctcaagtaaaaactgagagaattttttactggtagatctgccttgcaaaaaattatttttaaaaagttcttagagaaaaggaaagtatataggttagaaact

SEQ ID NO: 794159 - DNA, 540 bp, Homo sapiens
ctaggcccacacaatttatatcatccctgcgggtgatgaaaaacgttccacctaccatgtcttcagcttgtccactggccgcttcttcagagggctccctcgcctgccaaggcctgattgatgctgtcacagcacctgaaaaagggtttaaggcagggagatagggatgagagtttgcttaagatagggctatttgtccctggtgggtcagcattccttatcagagactgcttcaaacaacattgctgataataacatatcccctcaaaggcaccaagagagtctgtccatcttagtttgtgctrtccataacaaagtattatagagtgggtggcttataaacaacagaaatttatttctcacggttctgaagactaggaatccaagatcagagggccggcataatcatgttctggtgggggccctcttctgtgttgcagactgccgacttcccattgtatcttcacaaggtggaaagaggaccagagagctctctctttcataagggcaccaatcccattcatgaggactccaccctca

SEQ ID NO: 794160 - DNA, 486 bp, Homo sapiens
tgtaaataatgaattttgttccttctatcccaatgcttatatcttctattactttttatttcttctttttctcttttctttccttcttttttttttgagatggagtctcactctgttgcccaggctggagtgtagtggcactatcttggctcackacaacctccacctcctgggttcaaaagattctcctgcctcagcctccccagtggctgggactacaggcgtgcaccaccatgcccggctaatttttgtattttttagtagagatggggtttcactatgttggccaggctggtctcgaactcctgaccttgtggtccacccgcctcagcctcccaaagtgctgggattacaggtgtgagccactgtgcctggccttctattactttttcttacctgatttttctggctaggccttcaaaccatgcagaatagaggcattgacccatgaggttttaacttcaacaattgcaattttttacttct

SEQ ID NO: 794161 - DNA, 658 bp, Homo sapiens
gtgtcttcgtgcgatttctcttcaaaccatttcctgatgtctaagctgtgcgtgtgaacaatgcaatgcccagaaaccaaacagaagcagctgctaagaggctggagagctaagccaagatgctggcacgctggtggtgctgggtggacgtaactgtcagttcaggcacaaaggagcaggcgccctgtaagtacctcaggttgtcagctgagacccaggagaccaagtggcaagagtaagggccagcaggtgagcggccttcagacaagagcaacacaggctctgatgggctcggtttctgctgggacgtgtgcagatggcctgcatgcagtctgtcttctgccacaagcaaagaaagcctttctggaggaagggaacatattccttgccacaccatgttttgtattcaatccatagttactaggcaagaacaggggaggaggcaccagctggcaaggtgcagcrcaggggaggtgctattgcatcaaggaagtaactgtactccctgaggaatttatggggtgctccgtgggccagatgtggtccatgtaggggggaaagtcagcctgaaggcactttaagaccttgtccagtggccaggatggaggaggtaatggactcctcctaagagtctgcaagaagaactgcaggcgggctg

SEQ ID NO: 794162 - DNA, 655 bp, Homo sapiens
atgtgtattttatttgtgtttttaaatgggaggggtgtttttaccttttggaggagttatgatttagattcatttttccagcactggctctgagctcagcacattctagggtatttcggaatttatgttccacttcacatttttcagccccactatttctttgtaaggtatcccagtgggaagtaaccaaaaaaaccatttcttttttttcttccccaagaatcttaaaagtcgcgtaagaaagatgaaatgaccaacgatggctctcaaggggaacctgagaaacagagaagattcatgagggcttcttaatgtacaagtttctctctctgcattcacaacccacatgaatgtgagaacacacagattggaggatgcaggagtgtgagctctgcttacactttcatggagtcagctagtagggacagaygccctcctttctcccagagacactgcccacaactcaatgaaacacaccgcccaattcctcctagatcaaccccttccacttctcactggaaggacttgagctaaatgaaggtggtcaagttgtataaaaggttttcctcatgccaaatccacactgggtccatgccaaggatacgcggaaaatattccacattgcttccataagcgactttctaaacaagaattg

SEQ ID NO: 794163 - DNA, 655 bp, Homo sapiens
atgtgtattttatttgtgtttttaaatgggaggggtgtttttaccttttggaggagttatgatttagattcatttttccagcactggctctgagctcagcacattctagggtatttcggaatttatgttccacttcacatttttcagccccactatttctttgtaaggtatcccagtgggaagtaaccaaaaaaaccatttcttttttttcttccccaagaatcttaaaagtcgcgtaagaaagatgaaatgaccaacgatggctctcaaggggaacctgagaaacagagaagattcatgagggcttcttaatgtacaagtttctctctctgcattcacaacccacatgaatgtgagaacacacagattggaggatgcaggagtgtgagctctgcttacactttcatggagtcagctagtagggacagatgccctcctttctcccagagacactgcccacaactcaatgaaacacaccrcccaattcctcctagatcaaccccttccacttctcactggaaggacttgagctaaatgaaggtggtcaagttgtataaaaggttttcctcatgccaaatccacactgggtccatgccaaggatacgcggaaaatattccacattgcttccataagcgactttctaaacaagaattg

SEQ ID NO: 794164 - DNA, 516 bp, Homo sapiens
acagtgtgttccagaagcttctcccaagagagtgggggtcccaagggctgtggcaattacattagactcattttatgtttcctctgctgtcccttacttatttcatataatagcacattttgaatctatgagtttgcaaaatccaggtaagccaccataaaggtgtagaaaccactctactttcttgaactccatgggcaattagggaaagctgatgcgtcaaattcagaattccaccaacaaaatggcatttgcaattgctgaatacaacaattgtgttctacgagtaagatattttgygtataacaaaaagtttaaaacatcagtgtatattagaaaaatatgcagtgaaacatgggagtaagtgtgcttgcaacacaaaagttagtcagtgtcatgaaaattttagccagagaacttggttggcgtagtatttaatgaaaagtaagtctgtgtcttctcctaaagttaaaagtataattctttttagttcctgcatcagtttatttttataca

SEQ ID NO: 794165 - DNA, 516 bp, Homo sapiens
acagtgtgttccagaagcttctcccaagagagtgggggtcccaagggctgtggcaattacattagactcattttatgtttcctctgctgtcccttacttatttcatataatagcacattttgaatctatgagtttgcaaaatccaggtaagccaccataaaggtgtagaaaccactctactttcttgaactccatgggcaattagggaaagctgatgcgtcaaattcagaattccaccaacaaaatggcatttgcaattgctgaatacaacaattgtgttctacgagtaagatattttgcgtayaacaaaaagtttaaaacatcagtgtatattagaaaaatatgcagtgaaacatgggagtaagtgtgcttgcaacacaaaagttagtcagtgtcatgaaaattttagccagagaacttggttggcgtagtatttaatgaaaagtaagtctgtgtcttctcctaaagttaaaagtataattctttttagttcctgcatcagtttatttttataca

SEQ ID NO: 794166 - DNA, 506 bp, Homo sapiens
ctggttgattaagatcaccattctccatttctgtgcctattcctcttttgtcccccatcctagagatactttgatttagctcacctcagattcatacctgttaggcactatctcataaaatcacaaaaccaccaggcgaatcaacagcttcaaccctagaggtagacacgggttgaccaccaatggggaaccccatccagttgaatttactcgccgacgcmtttacatcatctcacccctccataccagaccccactggattcagcaagagctatctgtctcttccatttgtgctccatttctgcttcaaggccagacagctcttagaatcttagtcctcagcatcaaattagatgcctcatttagtaaaaagctttcactctgctcagaattcctaccttcacaccagccccctctaggtctaatattctgtatatctcattacccagctccaacaataacactcgaatttagcctcatcaaaggtcatactagcttccgtacct

SEQ ID NO: 794167 - DNA, 528 bp, Homo sapiens
atggctcgtacctgtaatcccagcactttgggaggcctaagcaagcggatcccctgaggtcaggagttcaagaccagcccggccaatgtggcaaaaccccgtctctaataaaaatacaaaaattagccagtgtggtggcaggcgcctgtcatcccagctactcgggagcctgaggcatgagaatcacttgaaacctggaggcggaggttgcagtgagctgagatcctgccactgcattccagcctgggagatagagtgaaactctctcaaaaaataaataaatwaataaataaataaataaataaataaataaaaagagtcaacgccggcacagtggctcactcctataatcccagcactttgggaggctgaagcaggcagatcacttgagcccaggagttagagaccagcctggccaacatggcaaaaccctgtctctactgaaaatacaaaaattagctgggcatggtggcacacacctgtaatctcagctactcgggaggctgaggcacaaaaatcacttgaact

SEQ ID NO: 794168 - DNA, 593 bp, Homo sapiens
ttacttttttccctgcttttccagtgagtttctattattcattaagtcatgattcagggtcccagagtagggatcaccacataaccaggttcccctcaggcactctgggagaaggacagaggagaagttgatggacccagcttagacctgcccaggagacgtgcccctgctccgcaggcatctcaggctgagacgcagctggtcsggccagcagttcctggtgtttccaggtggggaagcagctgtcagaagggccagtcctgtagttctcggtttggtcttgatgccttccgccagggtgctggctcctaaagacgcctcggtacggtgcccggctcagtgtgaccctcaccaaagacccacttcatgctagaaagttgaactgcttgttctggcttcactaggggcggtggcatggagctgggtgatgtgggcatggctggcccctctgggcctcagtttcctcatcaggcaaatggagacacagccgggcccatctcaccatagggcaggccagagatgtggcatcctctccccttgtctgtctcctccttccctggcccactgttggcgccccctcctgccttttcctg

SEQ ID NO: 794169 - DNA, 551 bp, Homo sapiens
gtctatgtatctatttttgtaccagtaccatgctgttttggttaccataggcttgtagtatagtttgaagtccagtaacgtgatgcctccaggtttgttctttttgcttaggattgctttgtgtgccgccttctgaagtctagtcaccctgtgtaaattacctacatttgttactgaccaaggttcttccacaggggagcctgctgctaagatggcaacagggctccctcccagccacccctgggaaccaggattgaatgtgctgcacctgcgtcctcagctgtgcagggtgcctggttcctcrcagtggtgtctggatattcactgagccacagcgctgctggctgaggggcaggcaggggccagcacacccacctcagggccagaccttggtccagagcaggggtttgaggacttggacaggcagtgggcgccatagcagacagggatcagtctctggggggacctggtgagaggatggacgcatggggaggagctggggccagtggctgagcctgctctggcccccagggcccacacatggggggctg

SEQ ID NO: 794170 - DNA, 595 bp, Homo sapiens
aaagaaggaaaaccacctttgtcaaatatgatcataattattatttcaggtaagaaacatcgatggaaccaggttaaaactagggatgtaaatggagtgaagaacaggatattagcttagcactggagcccgggagttccagttcagcctgggcaatatagcttgagcctatctctaaataaataaatagacagaaaatgaacaattctaggaaaaacagaaagctgcacaagagaataaatgcaatcacagtactctacattgctgggctatcaacactgttcacatggccacaaaataaacccccaatatttatctaaccaaaaattatgagatgagatgatcatataaggaagatggtaccaggggaagtaggggcagsgtggtatgggaagcaaattctaatcttccaaagtaagaagagagtagattatacataaaactgaaagtccagaaataacggtatagacatgtgataacagtggaagcataaaggcaaataaaaaagaaacttgtttcttgttaaaaagcagttacctctgatggttgggaactgggagcaaagatggattagacaggagacagctgtttttca

SEQ ID NO: 794171 - DNA, 655 bp, Homo sapiens
aagcgggagttgaggaggctaaagacttcagttctgagtggcggctcgcagcctcactgcagcaggggagcgtaatcttcagggttttcttcccatttacgggtttttttgttgttgttgtatatttgtaaaatgaggcttctgctggcaaaagcaggttttagcgagtgcggcggctcttccaggacctaataaggccccaacggagggtgaattccagcaacactttccttccccacatggcccccccattccgtcttgcctcatacactttgggcacagggtaccattcatcttgcttcccattaatggaattaccgccatcacttctgtgggatgagatgggccctttggaactgtcttggggacagaggcaggattggccgccaggcagttttgcttagaggggaagggaaagaaagagagggagagaaaactcttacaaatggatgcttccttgggtggtaaagatccttggccatggaggacagaggccgcagggcccatcyaatctgcttcctgcgcatgtcccgtgtgagcctcgctgtggcagggcatgtgatggccccagtggcagatgtgaacggggcttgacacctgtgtaccacagccccttgacttcagaagaagggaaggagggacccagcatttatgg

SEQ ID NO: 794172 - DNA, 507 bp, Homo sapiens
gagaaggctgaaaacgtagggtgttgcctcactgtggtcgtgtgttgaaatgaagagctgaaactatgcaaccctgtgttttgtggaaccaactgaacttctcagggaaacgcactatattccaaacttttctgaactaaataaactgatacaagttactcaaacctaaggcttacaggttacttcccctgtgcccccaccgaacaacccacacacttagagttggggttcagtggagataatttttgcttataattagaaaaaacaacagatgtttgaacagttttgcactgtttgacaayctttggagatgaaaatggaaaatgaaattctttcatagctctgttgggtcataatttttgaaaaggaactgatgatatctccttgtatacctataattgtgacctagagcattctcaggactgatcaggggatcaatagttgccaggaattgctcaatcaaaattgcggtaattgaaagcacaaaacaatcctctttatttacct

SEQ ID NO: 794173 - DNA, 644 bp, Homo sapiens; identical to SEQ ID NO: 760708

SEQ ID NO: 794174 - DNA, 636 bp, Homo sapiens
ctcaggcgctggacaccaacgaaccctccagcaatgacattccggaaaaacggaaagccctcatgatcccttcttgcagtgggaaattagaggcctgggaaggacagtctattcaagggcacacaagttcacacagcagagtcagaagtagaagccagatctcctgactccaaatccatagcacctgtccacactagtacctctccaaaggcatgagccagagtaccaggaaactcagaaggtgtggcttcttctctaagggactccttgacaaagctytcagctccaatgaggtaaccagcatccccctccaaatatcctccaagatctagagaagtcactcctttgttcaagaaccttccacagctctccatcacccagtgaacatctcacccagcatccagggtcccaaccttcctctccagcggctcccgctcattcccccacctttgccttccatcctggtcaccacatagtaatgactgtccccatctcctggcctttctgattctggtcccccatcctagaatttccctgctccttcctttaagaccatctgaaggtcacctcctccaggaagccttcctgctccccaggttaaacatggcctctccctcccctaggctaccagaggag

SEQ ID NO: 794175 - DNA, 639 bp, Homo sapiens
gagatttcccatttcccctcaaccctaacaatatagatcatatcaatatttttttaaccaggtgggtaaaaatagctgtattagtccgttttcatgacactgtaaagaactgcctgagactaacttataaaggaaagagaattaatggactcacagttagcatggctgaggaggcctcaggaagcttacaatcatggcaggaagccaaagcaagacaccttcttcccaaggcagcaggaagccgaaaggctgagagaaaggggaagagccccttataaaaccatcagatctcgtgagaactcattcaccatcawgagaacaacctgggggaaactgcccccatgattcaattacctccacctggtctctcccttaacaagcggggattacagagactacaattcaagatgagatttcagtggggacacaaagcctaaccatattaatagttatatctaatttatgtttatatgattattaatgaagttgaacatctttttatatatttactgacatatcaatctataattttctgtatgtatttcttcttctgataattacctcttttatcatttgcccatttttaataggttgttgtctttttcttattaatttgtaagcacagttaataccttatgg

SEQ ID NO: 794176 - DNA, 639 bp, Homo sapiens
gagatttcccatttcccctcaaccctaacaatatagatcatatcaatatttttttaaccaggtgggtaaaaatagctgtattagtccgttttcatgacactgtaaagaactgcctgagactaacttataaaggaaagagaattaatggactcacagttagcatggctgaggaggcctcaggaagcttacaatcatggcaggaagccaaagcaagacaccttcttcccaaggcagcaggaagccgaaaggctgagagaaaggggaagagccccttataaaaccatcagatctcgtgagaactcattcaccatcaagagaacaacctgggggaaactgcccccatgattcaattacctccacctggtctctcccttaacaagcggggattacagagactacaattcaagatgagatttcagtggggacacaaagcctaaccatattaatagttatatstaatttatgtttatatgattattaatgaagttgaacatctttttatatatttactgacatatcaatctataattttctgtatgtatttcttcttctgataattacctcttttatcatttgcccatttttaataggttgttgtctttttcttattaatttgtaagcacagttaataccttatgg

SEQ ID NO: 794177 - DNA, 669 bp, Homo sapiens
caaaggatcctgaatacctaaaacaattttgtaaaagaggaacaaagttggagaactcatgcttcctaatttcgaaactcactacaaagctacagtaatccaaatagtgtgttaccaacagaagggtagatatgtggatcaatggaatataattgagagtacacaaacccatataactgtcaattaattttccacaaggatacaaaaaaaaaaccctctgtcacattatatatgaaaattaactcacagtgggtcaaagacctaaacataagagctaaaactataactgttagaagaaaacaggggtaaatcttcatgagcttggatttggtaatggattcttagatatgacattaaaagcaggagccagaaaaaaaaatagatgaactggacttcatcaaaattaaaaacctttgtataccaaaggacaatatcaaaaaaatgaaaagacaacatacatactgggagaaratatttacaagttgtatatctgataaggaaattgtatccagaataaagaactcctataacgtaacaagaagacaacccaatttaaaaatgggcaagggacttgaaaagattttcaatatcatagtcatcagagcatgcaaatcaaaacaatgagataccactttacacccactaggattgctgtaataataataataa

SEQ ID NO: 794178 - DNA, 505 bp, Homo sapiens
acagcctccgaccaccaccatgtagcacagctcctgacacagagaaggaataagaaaggcccccagcctgggcacctggcacgggtgtctgtggcacagcagagaaagctagatctgctgctaacggctgtgtgaacctgggcaagagatgcaacctctctgagcccacagcccctctaatgatattgacttttcaccacacactccgtgatctcatgcaggcaaaggatttggccctcagtgtgtgctcaagtttaatgtcctggatttgaactttgactttttttttccttttgttttggatttttactctctagttttcagattcttccagcaatgtactacaaatttctggggaaamggaaccatgtgcccctgccaagatgcccagtgcagtaccagcaagatggccaacgcctagagctcccttgttgatctgaaacctccccttttccttacttctccctctgttcagaatgtgtagacttctctaagctttgttaaa

SEQ ID NO: 794179 - DNA, 584 bp, Homo sapiens
ctctcctgtagaaaccatcaagaaatggcctaagatggtgatattcaaactttggcaagatcatgatccctcggggcatgtttaaaatatagggtctgggcaccacccctagagattctgattccagagttctgggtrtggggactaggaatcacatattaattacctccccttggtgattccggagcacaccacagtgtgagaaccacacacgcttacagatgaggaaacggagatttagttccaaggccaaagttcaagacccttttctggagggccccagcctgccctgtcagaatgactagctttcagcagaaggcatctccccagaaggtaagtctgccttcttgctagtggctaagaagctaagcaggcttctgaggacatgtcccaacttggtgaggaagtatgctggaatccattaatgatgtctgccatgggttggagggaggaatagcagcacctgtgccaggcatctgccctttaggaatgctctgctctagccaaagaatgcttgcctctacctctctgtttattctaatcctgttcatccttcaaggccaagctgagaggtatcttcctcc

SEQ ID NO: 794180 - DNA, 626 bp, Homo sapiens
attaagcatttcctaggtatccagcactgtcgcggctttacaggcattaacttatttaatcattactatgaggtagatactattattatccccattttatagatgagaaaactgcagctggagcagttaattaacctacttgagtccacaccacagtagcgagtggagcagggggatttaaagccaggcaatcaaactccaaagtccatgctctttctgcctggtcacttggaatctggaccaggagtggacagtcttcaatggccagtaggtcctcctgcctcagcccattgagttttctgggattgcagagtacatccggtccttccctcctgcagakgtaaggaaattgaggcccaccatgatgcccaaggttaaggagccatttggccctaattcccaaaccacaacttttcccactgaatgactccatgggacaagttcattttgtcacccgctcgcctcctcagcctatccccagctcccagatcagatgagcttgctttagggcaaagagcctggactctggatgcagatgtgagccccgattttgacgtgctatgtgaccttgggcaagtcagctcacctctcagaacttcagttttcccctctgtaaaataggcgtg

SEQ ID NO: 794181 - DNA, 601 bp, Homo sapiens
attttcttggagctatagaaagctgtgcatgcagagcaaactgtcaccctgaaatcaagcaaaacaggcaaatccagagtcacagctgaaatctgcttatttgtaccagttgcaaccagagccatgaactggtaagaacacataaatagtaattttgatgaataactggaggcttgagtgtagaccagcttgagaattggatactcttgtgggcccactatttcatatgttttacatccaggaaacctgttaggttctcaaggtggagatccaaaaaattatttctgtgatctggcagagatgggaaagataattcttstgaaatacactcaaagatttctccacagcaaatccttctctactggagggaaggctttactagagcctgtctcagagccatcagggagatacatttctcccatttccaatgccatctagacttcctatttcacccaagatggggagattctctacaagaaaaaatactggtgaagggcacaggccagataggcagacccactaaaacactgagatttaattcaaatattataaaatgcacactctccctcatatcttattggacaacaaacagggatccagt

SEQ ID NO: 794182 - DNA, 601 bp, Homo sapiens
attttcttggagctatagaaagctgtgcatgcagagcaaactgtcaccctgaaatcaagcaaaacaggcaaatccagagtcacagctgaaatctgcttatttgtaccagttgcaaccagagccatgaactggtaagaacacataaatagtaattttgatgaataactggaggcttgagtgtagaccagcttgagaattggatactcttgtgggcccactatttcatatgttttacatccaggaaacctgttaggttctcaaggtggagatccaaaaaattatttctgtgatctggcagagatgggaaagataattcttctgaaatacactcaaagayttctccacagcaaatccttctctactggagggaaggctttactagagcctgtctcagagccatcagggagatacatttctcccatttccaatgccatctagacttcctatttcacccaagatggggagattctctacaagaaaaaatactggtgaagggcacaggccagataggcagacccactaaaacactgagatttaattcaaatattataaaatgcacactctccctcatatcttattggacaacaaacagggatccagt

SEQ ID NO: 794183 - DNA, 522 bp, Homo sapiens
gatggcaaattgggatttcaaaaaaacatcgaaggagcattcattttacgaaataaaactgattcattttttatgaaataaaagcagtttaaaaagggatcacattagccttaataatatcaaagttggtggctattcataccagtttgttcattttatctcactatgttctattctctcaggtcattttcaattcattttgttagaaatgagatttgtgatgctttctaggtctcttctagttgttcatgattggaatatgcatttataggtaaatctttccagtgcaacaaattttatgatatcctgaggctccgaatccctcttccacataatacyctaaaagaactctagttttttcactaaccagatttttattcaagaaaataaataaaaataaatagcaaaatccccaaatagttagcgagtaaatttatttacaaatcatgcaggttaaatacaaaaaagacaactagtacatttctgtaagtggaaaacaggatcaccgtaagtttgaataag

SEQ ID NO: 794184 - DNA, 615 bp, Homo sapiens
tgtaaatttactcgtatgtttaggtaaatattccatcactgtgcatttgtaaagcaccttgtattctactgatgttttgtggaatgttctattaatgtgaactaggcccattagtttgcgagtgatcaagttttctatatcctcacgtatttttctgtctatatttttatcagagaagtgtcctgaaatcttccattgtaattgtgaatatgtttatatatccttcctgtttcggcaggttttgctttatttatttaagctctgttgttgcatacacacacaataagatggttatgtcttgtattgtattgcggtgtgtaaactactcrtttcttgagtagaaagactaaaagatgaaccaatcagaaataataactacaccaacttttcaagacatagcacaataagatataaatagaaacacaaaaggttaaaaagagggggaacaaagttcaagtgttgaatttttattcatttttgctgtgttttgttgttactttgtttatgcaatcagtgttaaattgcaatcagttttgcaatctttatggtaacttcaaatcaaaaaaacatacaacagatacacaaaaaataaaaagcaagaaattaaaatatatg

SEQ ID NO: 794185 - DNA, 497 bp, Homo sapiens
agtacttgttaggattaacaatctcaccctttaaaaaaaataaaatcttttggtttagttccttcagttacttataccatattacacatcactttactcagcctgctaggttcctcacaagatgatttcaaaatcgataaagaaaatagcaatgttcacagccatgaaaaagaatgaaatcaagtcctttgcagcaacaaggatgcagctagaggccattatcctaagtgaactaatgcagaaagagaaaaccaaatattgcatattctcactcataagttggagctaaatcttgggttcatgtggacataaatatkgaaactatcaacaccggggactctaaagggaaggagggacgcagcaagggctgaaaaacttcctgctggaactagtatgttcactatctgggtgacagcatcaatagaaacccaaacctcagcaccatacaatatacccttgtaacaaacctgaacacgtacctctgaatctaaaataaa

SEQ ID NO: 794186 - DNA, 662 bp, Homo sapiens
cagaatgatcccataggtctcaaggcctagtgtcagctgcaaattcacttatccgtcagccctctgcctccctcctcctttgaaagagcggtggcctgccccgcttctaaaagccctggggttccggaaagcccaccgygctttacaggacacctgcatagaggaacaggggcgaatccgaggtggagaccatgtgaccacgcgtggcactggcctatcccacagcagttggtgttaatgtgtgtcactggaggcatacagggcgacggcgaaacaaagggtggtgtccaggcatgtgccggttgaatggggaaacggttgacctttccatcaatgccaaggaaaatcgaagaacacctaggaccgggggggtgggggtcctgtgcctgacccaagccacgtttttaaatgcctaccaaaggagcaaagaggtttctgcaaatttgcccccaccccaacccttcaccgccctggtagccctgacacaacttcagctgcgcccagccccagccccagccccagccccagcccagtccctttggtttcctgacattcgtttcggccagaagatcaagggagtcaggccacccaggagcagaggagaggatgtccctcatgaatgagacaggaagtgcagaggaaatgtgacactacctttcctg

SEQ ID NO: 794187 - DNA, 662 bp, Homo sapiens
cagaatgatcccataggtctcaaggcctagtgtcagctgcaaattcacttatccgtcagccctctgcctccctcctcctttgaaagagcggtggcctgccccgcttctaaaagccctggggttccggaaagcccaccgtgytttacaggacacctgcatagaggaacaggggcgaatccgaggtggagaccatgtgaccacgcgtggcactggcctatcccacagcagttggtgttaatgtgtgtcactggaggcatacagggcgacggcgaaacaaagggtggtgtccaggcatgtgccggttgaatggggaaacggttgacctttccatcaatgccaaggaaaatcgaagaacacctaggaccgggggggtgggggtcctgtgcctgacccaagccacgtttttaaatgcctaccaaaggagcaaagaggtttctgcaaatttgcccccaccccaacccttcaccgccctggtagccctgacacaacttcagctgcgcccagccccagccccagccccagccccagcccagtccctttggtttcctgacattcgtttcggccagaagatcaagggagtcaggccacccaggagcagaggagaggatgtccctcatgaatgagacaggaagtgcagaggaaatgtgacactacctttcctg

SEQ ID NO: 794188 - DNA, 662 bp, Homo sapiens
cagaatgatcccataggtctcaaggcctagtgtcagctgcaaattcacttatccgtcagccctctgcctccctcctcctttgaaagagcggtggcctgccccgcttctaaaagccctggggttccggaaagcccaccgtgctttacaggacacctgcatagaggaacaggggcgaatccgaggtggagaccatgtgaccacgcgtggcactggcctatcccacagcagttggtgttaatgtgtgtcacyggaggcatacagggcgacggcgaaacaaagggtggtgtccaggcatgtgccggttgaatggggaaacggttgacctttccatcaatgccaaggaaaatcgaagaacacctaggaccgggggggtgggggtcctgtgcctgacccaagccacgtttttaaatgcctaccaaaggagcaaagaggtttctgcaaatttgcccccaccccaacccttcaccgccctggtagccctgacacaacttcagctgcgcccagccccagccccagccccagccccagcccagtccctttggtttcctgacattcgtttcggccagaagatcaagggagtcaggccacccaggagcagaggagaggatgtccctcatgaatgagacaggaagtgcagaggaaatgtgacactacctttcctg

SEQ ID NO: 794189 - DNA, 486 bp, Homo sapiens
ttaatatgtcctgtattcattacaacattaattgcattaaattcagctactatgaataaataatctatcacatatacattttaaaggtagaagcatttcagttttatacaaggatgtctttttgagctgacataggtttccaagatttgagacaatatcagaagatttattaaaawtgatatgagacagcaactccccacatcactttgctggcatatatctgcatgggtgggctttacttgcttcaacagcacatgggaatgcagtgtgcccccatttatccccaccaaccaccactgctgatggatccttgttgggtacagagtcatcaagccccatctacaccagtgccctgcccttgtgctgtgctgcacacagagcaggggatccccccacaacctgagcaattgctcctgcttgcagaccacagataaggcgccaagacctccactggccagcaccccaccccaagccatcaccacctac

SEQ ID NO: 794190 - DNA, 490 bp, Homo sapiens
agaggagaaaagaaagaaattcagactttttttttttgatacaggagtccacataatacttccaggtcctcttagggagaaaaactggtgacactggaaggttttagaatgaatgcattgaccagtagtgcttatctacctgtgatatggctttggtccatattggatgtcagtraccatggttctcacttgtgagtgcattattggtattgaccccccgacttcttgtagcacaaaaatcaccattgcctgaggggacatactctttgacaactcagaattcaagccataacagtggggcatatcctgcctgccacctaaactacccaagccccagtggattatttaacaaaagcagtactacatggtaagtggagaataggacattactttattaattcaggactacaacaaactatcccttttaagcagcctgtaaggatccattggattctcctgtggcaacctggggcccaggactcatagacat

SEQ ID NO: 794191 - DNA, 584 bp, Homo sapiens
agaattcaagccataacagtggggcatatcctgcctgccacctaaactacccaagccccagtggattatttaacaaaagcagtactacatggtaagtggagaataggacattactttattaattcaggactacaacaaactatcccttttaagcarcctgtaaggatccattggattctcctgtggcaacctggggcccaggactcatagacatgcttactgacagcatggcattgtcatgcatcagtgcatcagtgtgaagagactaccaaacaggttttttgtgagcaacaagactgtttatttcacctgggtgcaggcaggctgagtccaaaaagagagtcagtgaaggaagatggggtggggccgttttataggatttgggtaggtagtggaaaattacagtcaaagggggttattctctggcaggcaggggtgggggtcacaaggtgctcagtgggggagcttctgagccaggagaaggaatttcacaaagtaatgtcatcagttaaggcaggagccagccattttcacttcttttgattcttcacttgtttcaggccatctggacgtacacgtgcagg

SEQ ID NO: 794192 - DNA, 566 bp, Homo sapiens
gcatcagtgcatcagtgtgaagagactaccaaacaggttttttgtgagcaacaagactgtttatttcacctgggtgcaggcaggctgagtccaaaaagagagtcagtgaaggaagatggggtggggccgttttataggatttgggtaggtagtggaaaattacagtcaaagggggttattctctggcaggcaggggtgggggtcacaaggtgctcagtgggggagcttctgagccaggagaaggaatttcacaaagtaatgtcatcagttaaggcaggagccagccattttcacttcttttgattcttcacttgtttcaggccatctggacgtayacgtgcaggtcacaggagatacgatggcttagcttgggctcagaggcctgacattcctgtcttcttatattaaaaagaaaaataaaacaaaatagtgttgaagtgttggggtggtgaaaattttggggggtgctatggagagataatgggtgatgtttctcagggctgcttcgagtgggattaggggaggcatgggaacctacagtgggagagattaagctgaaggaagat

SEQ ID NO: 794193 - DNA, 617 bp, Homo sapiens
gtgcttgcaaaacagcctacataatccacacggaaattttgaggattcacaggagtttagcaaagttgctgtgttcaaaatctataggcaagattccattttcttactatatattaacaacaatggtggaaaaataaaatttatgaaaagacataatagcacaaaatatcaagaatctaagaataatgtgcaaggtcactatacagaaatgttattagtaggcattaaagatggtctaaacaaatggagataccatgttcatggattagaagactcaaaatgaattcttcccaaattaattaattttttccaaattgatttgtagaactaaagaaattgctatccaaatcctaaccaggtttttgtggaacttaaaatacttactctaaaatttgtgttgttttcgtttttgattttttttttctttttcttcttcttcttatattgagayggggtttctctatgttttccatgctggtctcaaactcctgggctcaagccatccacccgcctcagcctctcaaagtgcttggattacaggcatgaagcactttatccagactaaaatttgtatggaaatacaaattcaatttgacaaatatttggccaggcatggt

SEQ ID NO: 794194 - DNA, 555 bp, Homo sapiens
ccgcacacacaacgcggctcgtccaggacacacacatccactccgagcgcgcacagtcacaagcgcccacctgatcacccagagtcagcaccacacagccacagtcacagaccacgaagacccacggcaaccatcgcaatcacacacgcaaactcctctcctcagccctccacacacaaaaggaccagagccggattcctcatcctcagctttctctagttccgctsggggccggcctggccaagttactccggactccaaggcgtggcagcagctaattgggcacagcgaaagattctgccacctggctaagaggaagccaaaatctcgcgagacatggtgttggcccgcagaatcctccgggaaatgtagtccagagcccgactgctcccctactaaaaatacaaaaattagccgggcctggtgggcgcctgtaatctcagcttcttggaaggctggggcagcagaatcgcttgaacccgggaggtggaggttgcagtgagccgggatcgcgccgttgcactccagcctgggtgacagagtgagactccgtct

SEQ ID NO: 794195 - DNA, 555 bp, Homo sapiens
ccgcacacacaacgcggctcgtccaggacacacacatccactccgagcgcgcacagtcacaagcgcccacctgatcacccagagtcagcaccacacagccacagtcacagaccacgaagacccacggcaaccatcgcaatcacacacgcaaactcctctcctcagccctccacacacaaaaggaccagagccggattcctcatcctcagctttctctagttccgctgggggccggcctggccaagttactccggactccaaggcgtggcagcagctaattgggcacagcgaaagattctgccacctggctaagaggaagccaaaatctcgcgagacatggtrttggcccgcagaatcctccgggaaatgtagtccagagcccgactgctcccctactaaaaatacaaaaattagccgggcctggtgggcgcctgtaatctcagcttcttggaaggctggggcagcagaatcgcttgaacccgggaggtggaggttgcagtgagccgggatcgcgccgttgcactccagcctgggtgacagagtgagactccgtct

SEQ ID NO: 794196 - DNA, 578 bp, Homo sapiens
cattatttagtgtaatctatgtgacaatcctctgagatatgtgttactattccaatttaaacaagaggaaacaggttcaaggaaggtaagttatgtgctgagggacacacaagagggagtggagctggatttcaagcccactgggtgtrcagaactgagcctcttcaccatgggggcaaatccctcctgaggacagggctggaaaggccatggagatcatcttgtgcttggacaagcctctcaccagtcaccacagggccctgactcccattcctaccttcaagaagctcagcaggctactactcgtgttcatgttgggtcactacatacggttttatttgaaggaaggaccccagagttaaactcatttgaaaacccctgataaattcagtcccctccctctttttacaggtgaggcccggagagaagatatgacttgcttaaggtcacacacttagtttctctgtcaatctttctaaatcgaggacgagttctcttcccactgtatcaggctgcctcaacaaacagggaagtacaaaaatagccaaatccaggaaggagggcagtggtctgtgtgt

SEQ ID NO: 794197 - DNA, 673 bp, Homo sapiens
tcatgccttcccaacagtcccccaaagtcttaactcatttcagtattaacccaaatgtccactgtccaaagtctcatctgagacaaggcaagtctcttctgcctatgaccctgtaaaatccaaatcaagctagttacttcctagatacaatgggggtacaggtcattgagtaaatacagccgttccaaatgggagaaatttgccaaaacaaaggggttacaggccccatgcaagtccaaaatccwgcaaggtagtcaaattttaaagttccgaaatgatctcctttgactccatgtttcacatcaaggtcatgctgatccaagaggtgggctcccacagccttgggcagttctgcctctgtggctttgcagggtatagcccacctcgtggctgttttcatgggctgacgttgagtgtccacagcttttccaggctcatggtgcaagctgtcagtgaatctacaattctggggtctggaggagagtggccctctcctcacagctccactaggaagtgccccagtaaggactctgtataggggctctgaccccacatttctcttctgcacagccctagcagaggttctccatcagagcaccacccctgcagcaaacttctgcttggacatccaggtgttttcaaacatcctctgaaatctaggtggaggtttcca

SEQ ID NO: 794198 - DNA, 621 bp, Homo sapiens
acccaaatgtccactgtccaaagtctcatctgagacaaggcaagtctcttctgcctatgaccctgtaaaatccaaatcaagctagttacttcctagatacaatgggggtacaggtcattgagtaaatacagccgttccaaatgggagaaatttgccaaaacaaaggggttacaggccccatgcaagtccaaaatccagcaaggtagtcaaattttaaagttccgaaatgatctcctttgactccatgtttcacatcaaggtcatgctgatccaagaggtgggctcccacagccttgggcagttctgccyctgtggctttgcagggtatagcccacctcgtggctgttttcatgggctgacgttgagtgtccacagcttttccaggctcatggtgcaagctgtcagtgaatctacaattctggggtctggaggagagtggccctctcctcacagctccactaggaagtgccccagtaaggactctgtataggggctctgaccccacatttctcttctgcacagccctagcagaggttctccatcagagcaccacccctgcagcaaacttctgcttggacatccaggtgttttcaaacatcctctgaaatctaggtggaggtt

SEQ ID NO: 794199 - DNA, 621 bp, Homo sapiens
acccaaatgtccactgtccaaagtctcatctgagacaaggcaagtctcttctgcctatgaccctgtaaaatccaaatcaagctagttacttcctagatacaatgggggtacaggtcattgagtaaatacagccgttccaaatgggagaaatttgccaaaacaaaggggttacaggccccatgcaagtccaaaatccagcaaggtagtcaaattttaaagttccgaaatgatctcctttgactccatgtttcacatcaaggtcatgctgatccaagaggtgggctcccacagccttgggcagttctgcctctgtggctttgcagggtatagcccacctcgtggctgttttcatgggctgacgttgagtgtccacagcttttccaggctcatggtgcaagctgtcagtgaatctacmattctggggtctggaggagagtggccctctcctcacagctccactaggaagtgccccagtaaggactctgtataggggctctgaccccacatttctcttctgcacagccctagcagaggttctccatcagagcaccacccctgcagcaaacttctgcttggacatccaggtgttttcaaacatcctctgaaatctaggtggaggtt

SEQ ID NO: 794200 - DNA, 368 bp, Homo sapiens
ataaaaaaaaaaaaaaaaaaaaaaagaaaaaaaaaaaaaaagaatgatcatataaaaagatcttttcatttttcttggctttttctagtttgcccaaatcgcaccaattatttcttctatactgttggatcatgagttygtgactgtacatagttagtaattacttaaaatcagattttttttttacattttactgaaacatagtttaattcacctttgcttttctcccactagcttgatatattattgaactataataattttaaaaagaaaaatcacactatgccaaagataaggaagcattttaatttcagaactattttgtgtgaatagagacgctagatcatatatagagaagagaaaatgag

SEQ ID NO: 794201 - DNA, 536 bp, Homo sapiens
aaaagcaagctcacgctgcctccctgatcctccagaattgctagttagaaacgtgcacattgtcctaggttcagttttgcaaagatggagcctggcagtgaaagcatttgtttgagttcatgcattaaggtttgctttgtctatttcttttaaatttaattatttggtttttttttttttttttttttttttttttttttttttgagacagagtttcaatcctcttgcccaagctggagtgcaatgtggcggtcgccgctcactgcaacttccgcctcctgtgttgaaacggttctcatgcctcagcctcccaagtagctaggattacaggcatgctccaccatgcccggctaatttttgcatttttagtagagatggggtttcaccrtgtaggccaggatggccttgaaatcttgagctcaggcaatccacccgcctcagcatccaaagtgctgtgattacaggcatgagcaccctcagccggcctattttattttaagatggagtctcgctctgtcgcccaggctggagcgcag

SEQ ID NO: 794202 - DNA, 615 bp, Homo sapiens
tttagtcaaatctcatcttttgtcccttgtttttgtttttaaaagttgtaataataattgatatttactcaatatcttcatatattgagtaaaaccatataccaaacaaaaattgcatcctttatataagtagagaaattagacttaaaataaataacaagtgagagaccatggtgccaacctagtttgtcatttttctttwgaaaatcctaagttatttgttgtcaaaattatcaatattttatattttgttgctcttgcaagtaaagcatttctaattaaagaccttagggcttcacatatccttcagatagctggtaaaatgctgctttttgctagaagccttctccgccctttctatataacagcaacctctcttctcagtttcttgtcatctccagtacaccttctagctgcttttctaattttatttttcccaagcacaacttagcactttactggaagtcatctgttttctgcttcacaaagcaaggacttgtctccgttgtgcccagctctagcctcagggcctagaaaagtactcagcgtgtaatgtgcaccaaatacatgtatattggattaatatttaaatgtgtatatacttagctgtgaata

SEQ ID NO: 794203 - DNA, 610 bp, Homo sapiens
gtacctgccaccgtgcctggataatttttgtattttttagtagagttggggataagccatcttggccaggctggtgttgaattcttgaccttgtgatccacctgcctcagcctccaaaagtgctgggattacaggcgtgagccaccgagcctgaccagtttgggttttttgagaccgtcttactctgtcatccaggctggagtgcagtggcrtgatctcggctcactgcaacctctgcctcctggattcaggtgattctcctgcctcagcctcctgagtagctgggattataggcgcatgccaccaatcacggcttttttttttttttgtatttttggtagagatggggtttcactgggttggccaggatggcctcgatctcctgacctcgtgatctgcccgcctcggtctctcaaagtggtagaattacaggcatgagcaagcatgcccagtgaactgtgaccattttgaaagccatgatttatgggaatagcagttatttctctttgtgtaaataaacagaggccaccaaaataagaacaaagagaggcttatgcatacagaacttgctacagagtaagggatccatttgtttatgttgtctatagat

SEQ ID NO: 794204 - DNA, 610 bp, Homo sapiens
gtacctgccaccgtgcctggataatttttgtattttttagtagagttggggataagccatcttggccaggctggtgttgaattcttgaccttgtgatccacctgcctcagcctccaaaagtgctgggattacaggcgtgagccaccgagcctgaccagtttgggttttttgagaccgtcttactctgtcatccaggctggagtgcagtggcatgatctcggctcactgcaacctctgcctcctggattcaggtgattctcctgcctcagcctcctgagtagctgggattataggygcatgccaccaatcacggcttttttttttttttgtatttttggtagagatggggtttcactgggttggccaggatggcctcgatctcctgacctcgtgatctgcccgcctcggtctctcaaagtggtagaattacaggcatgagcaagcatgcccagtgaactgtgaccattttgaaagccatgatttatgggaatagcagttatttctctttgtgtaaataaacagaggccaccaaaataagaacaaagagaggcttatgcatacagaacttgctacagagtaagggatccatttgtttatgttgtctatagat

SEQ ID NO: 794205 - DNA, 514 bp, Homo sapiens
tcttgaccttgtgatccacctgcctcagcctccaaaagtgctgggattacaggcgtgagccaccgagcctgaccagtttgggttttttgagaccgtcttactctgtcatccaggctggagtgcagtggcatgatctcggctcactgcaacctctgcctcctggattcaggtgattctcctgcctcagcctcctgagtagctgggattataggcgcatgccaccaatcayggcttttttttttttttgtatttttggtagagatggggtttcactgggttggccaggatggcctcgatctcctgacctcgtgatctgcccgcctcggtctctcaaagtggtagaattacaggcatgagcaagcatgcccagtgaactgtgaccattttgaaagccatgatttatgggaatagcagttatttctctttgtgtaaataaacagaggccaccaaaataagaacaaagagaggcttatgcatacagaacttgctacagagtaagggatccatttgttta

SEQ ID NO: 794206 - DNA, 610 bp, Homo sapiens
gtacctgccaccgtgcctggataatttttgtattttttagtagagttggggataagccatcttggccaggctggtgttgaattcttgaccttgtgatccacctgcctcagcctccaaaagtgctgggattacaggcgtgagccaccgagcctgaccagtttgggttttttgagaccgtcttactctgtcatccaggctggagtgcagtggcatgatctcggctcactgcaacctctgcctcctggattcaggtgattctcctgcctcagcctcctgagtagctgggattataggcgcatgccaccaatcacggcttttttttttttttgtatttttggtagagatggggtttcactgggttggccaggatggcctcgatctcctgacctcrtgatctgcccgcctcggtctctcaaagtggtagaattacaggcatgagcaagcatgcccagtgaactgtgaccattttgaaagccatgatttatgggaatagcagttatttctctttgtgtaaataaacagaggccaccaaaataagaacaaagagaggcttatgcatacagaacttgctacagagtaagggatccatttgtttatgttgtctatagat

SEQ ID NO: 794207 - DNA, 514 bp, Homo sapiens
tcttgaccttgtgatccacctgcctcagcctccaaaagtgctgggattacaggcgtgagccaccgagcctgaccagtttgggttttttgagaccgtcttactctgtcatccaggctggagtgcagtggcatgatctcggctcactgcaacctctgcctcctggattcaggtgattctcctgcctcagcctcctgagtagctgggattataggcgcatgccaccaatcacggcttttttttttttttgtatttttggtagagatggggtttcactgggttggccaggatggcctcgatctcctgacctcgtgatctgcccgcctcggtctctcaaartggtagaattacaggcatgagcaagcatgcccagtgaactgtgaccattttgaaagccatgatttatgggaatagcagttatttctctttgtgtaaataaacagaggccaccaaaataagaacaaagagaggcttatgcatacagaacttgctacagagtaagggatccatttgttta

SEQ ID NO: 794208 - DNA, 305 bp, Homo sapiens
agatgaattcattcctgccctccagaagtttgcttaaacttctgaaaaagagagagagagaggcaggagaccgaggcaggaggctcatttgagcccagaagtttgagaccagcctgggcaaaacagcaagaccccatstcaaaaaaaaaaagagagaaaagaaaaagagaacaattgagattgttaacatctcactgtactacagttttgaaggctttgtggcctttaaatcttctagtgtgcacatgtcttggagttatcagtgtaattaaaacagttaacctatttgctaaccacaaccatta

SEQ ID NO: 794209 - DNA, 625 bp, Homo sapiens
tgctttacttgtattgatcatctcttggaaagaaaacgtatatttttaactttgttagtagggagcaattcctagtgaatgatacaatgaacaaacaatttctgcacccctgcaaaacatatacctacatttgtttagattttaataagtctaaaattaacactgaccactgctacagcactgtctatagttatgattactagttttgataaatctgccttaaacttgccaagatatttgtcartaccttggaagtcatttcatgtcatgaaaacccagtctaaaacctttttaatcacgtcaaaattctcctgacgccatatacctaggtgtgtggtacaagtttagcttgggaccagaattgtttcaggtttcattctgaaatatctgcattatacttaaccagttcaacatcactactccaaaaatttgaaatccttaatgttccaaagagcatttcttttgagcgtcgagtcagcactcaaaaagtttcagatctcagagcattctggatttgggattttcagaccagggatactcaacctgtatatgtatatctgtggcttcatcatctataatagaaactgccagaaatcattaaacttattcacacaacacgccctta

SEQ ID NO: 794210 - DNA, 584 bp, Homo sapiens
ggaagcaagcaaagccatcaggaagcagttaaaaggttggtgtgatcttttcatttcagtcgaacattaggtgttagtgtatcacagcctgtttctcccctccaatcgtcagtgcctgtgacatctggtacctgtagttccgggtgtccaggagtcatgagtgagccgacttctccctgtctgacttctgagtcagcagagatgcttccagatcagccctctaggatccgccccagctgtgggaaagaaggggaagggtgagagtaggcagctcagagcgagggaacccacatttctgtatwcaaggaaggaaaaggaaggaggatggccttacttagcccgatgtgagagccagggtggacaagagagacagggagatagacaaacacaaacacctcatactttccaacagcatagtcgcgttcacggaaaaccgaaccataagtaggtaatgtcaccaatataaaagattaagtcttccaaactaccgcttatctctcaggagtgaatcccagtgctgcagctaactcccagttcggtggccagtcaggccacaccatagtccaccctctgccctgatctgc

SEQ ID NO: 794211 - DNA, 539 bp, Homo sapiens
ttggggttggccctcttggaaacctgaaaccaccatgccctaagaagcctgagatgaacaacttcatggagaggggcccagccaggccaggtttatctcagtcgaacccagagcagacctgtaggagaatcaaccagccaacacattgcatcatgaggacgggaaaaatcattgtcattttcagccactaagttttagcagtgttttgttaccagcaatggataactgaggcagtcccaataggaactttggttgaatccctgtattattttaagatagtggttctcaaactccagcattcaaagagctgggtcaaaattcaagtgtctttaggggagagacattgttggcctcatttgcctttatrtcccagttcctggaatggtgtttatcacatacctagacctgaagaaatatttgtaaataaatgaacaaatggatcttgggagtttgtttaaaatatgcccacctctggagatttctaatttggtaggtctaatttggtagggcgaggtccaggaaactgcatctgagtgatg

SEQ ID NO: 794212 - DNA, 645 bp, Homo sapiens
acatgtggcatttggttttctgttcctgtgttaattcacttagggtaatggcctccagctccatccatgttgctgcaaaggacatgatctcattctcttttatggctgcatcatattccatggtgtatatgtacaacattttctttattcagttcaccattgatgggcgtttaggttgattccatgtctttgctattgtgaatattgctgcaatgcacatacatacgcatgtaygtgtctttatgatagaatgatttttattcctttgggtatatacccagtaatgagattgctgggtcaaatagtagttctgttttaagtactttcagaaatatccaaactgctttccacagtgactgaactaatttacactcccaccagcagtgtgtaagcattcccttttctccacaacctctccagcatctgttactttttgactttttaataaatagccattctgactgctgtgagatggtatctcatggtggttttgacttgcatttctctgatggttagtgatgttgagcattttatcatatgcttgttggccatgtgtatgtcttcttttgagaagtgtctgttcacatcctttgcccattttttaatagagttgtttgcttttgcttgttaatttgtttaagttcc

SEQ ID NO: 794213 - DNA, 645 bp, Homo sapiens
acatgtggcatttggttttctgttcctgtgttaattcacttagggtaatggcctccagctccatccatgttgctgcaaaggacatgatctcattctcttttatggctgcatcatattccatggtgtatatgtacaacattttctttattcagttcaccattgatgggcgtttaggttgattccatgtctttgctattgtgaatattgctgcaatgcacatacatacgcatgtatgtgtctttatgatasaatgatttttattcctttgggtatatacccagtaatgagattgctgggtcaaatagtagttctgttttaagtactttcagaaatatccaaactgctttccacagtgactgaactaatttacactcccaccagcagtgtgtaagcattcccttttctccacaacctctccagcatctgttactttttgactttttaataaatagccattctgactgctgtgagatggtatctcatggtggttttgacttgcatttctctgatggttagtgatgttgagcattttatcatatgcttgttggccatgtgtatgtcttcttttgagaagtgtctgttcacatcctttgcccattttttaatagagttgtttgcttttgcttgttaatttgtttaagttcc

SEQ ID NO: 794214 - DNA, 453 bp, Homo sapiens
gccctcttgggccccatgctgtgctgtggctaattgtccctggaaacaagacctctactagcttctggggttgcagaggctgacaaaggtcaagttttcctaaggccttgcattccttttggcctctctacactcaaatcttatgtctggaaaagcaccctcattctstgatcagctatcatgtggttcctttctacaaataaactgctgaaaggatttgcccagcacatggcctgctggtcttccatgtagaaggcatttaggctgggtcgcctctgccttcacagccacaatccccaatgctgtccaggtatggagaaaggatgctgtctctgcttttggctgctttctagccagatggcccatgataaagtggaagtcaagatgccaaagttcttcctaacccagcgttgagcaggcaattccaggctgcaggctgcaatgaccagccag

SEQ ID NO: 794215 - DNA, 580 bp, Homo sapiens
aacagcagaatggagatgacagaaataagtcagtgaacgtgaagatggatgcatagaaattatctaatctgaataacagaggaaataaagattgaaaaataatggacagagccatagagacttgtgaaacaatatcgaaaggtggccagacagtgcctcacgccttgtaatcccagcactttaggaagccaagacakgtgggtcccttgagcccatgagttcaagaccagcttgggcaacatggcagatcccaatctctacaaaaaaattacaaaaaattagctgggcttagtggcatgcacctgtagtcccagctacccaggagactgagatgggaggatcacctgagcccaggagttcaaggctacagtaagccatgatgacatcactgcacactagcctgggcaatagagcaagaccctgtctcaaaaaaacaaacaaacaaaaaagccagtatcagaagatttaatgttcatgtcattggactcccaaaagaagaaaagagattggaaaaaaaaatttaaagaaataatgtccagaatttcccaaatttcttgaaaaacttaaatttacagattta

SEQ ID NO: 794216 - DNA, 580 bp, Homo sapiens
aacagcagaatggagatgacagaaataagtcagtgaacgtgaagatggatgcatagaaattatctaatctgaataacagaggaaataaagattgaaaaataatggacagagccatagagacttgtgaaacaatatcgaaaggtggccagacagtgcctcacgccttgtaatcccagcactttaggaagccaagacaggtgggtcccttgagcccatgagttcaagaccagcttgggcaacatggcagatcccaatctctacaaaaaaattacaaaaaattagctgggcttagtggcatgcacctgtagtcccagctacccaggagactgagatgggaggatcacctgagcccaggagttcaaggctacagtragccatgatgacatcactgcacactagcctgggcaatagagcaagaccctgtctcaaaaaaacaaacaaacaaaaaagccagtatcagaagatttaatgttcatgtcattggactcccaaaagaagaaaagagattggaaaaaaaaatttaaagaaataatgtccagaatttcccaaatttcttgaaaaacttaaatttacagattta

SEQ ID NO: 794217 - DNA, 637 bp, Homo sapiens
agcctatggtcaaattaatgttgtcatatgtcattttgcttaaagtcactataagtaactacttccaagaaaacattgtgaaaatttactgtaccaacaaaaatacatatattgtaaagtcttaagaatctagagaaaagaataaattacttctagaagaacaatgattcaaatgactattgatttctcattataaaccacagtggctacattaacactttaaagtgctaaaagaaaataactttcaaccaaaaattgcatatccagtgaaaaatctctttttttctttttttttgagatagagtctcactctgtcacccasgctggagtgcagcggcaatcatagctcacggtagcctcaaactcctgggctcaacctatcctcctgcctcagtctcccaagtagcttgaattacatgtgtgcactaccacacctggctaattttttttacttttgtgtggaattggggtctcactgtgttgcccaggcttgtcttgaattcctgagctcaggagatcctcctaccttggcctcccaaagtgctgagattacaggtatgagccaatgtgcctggcctccagtgaaaatatctcaaaggaatttaagtgaaatgaagacattctcagatgagagaaa

SEQ ID NO: 794218 - DNA, 646 bp, Homo sapiens
agaagattaggaagggagtcacgcagaagctggaaaatgaacctaactgtatcaaatggctgctaaaattgaaaaaaaaaattaatgctcaatataggttataaacaggacccagagtcaataaagtaatgatgaaaatatctaggatatcattcaaaattacttgtcatacaaagaaccaggaaaatctcaacaactcgcaagacaaaagacaataaaaagacaccaaccctgatacagctcagatttgggacgattagatgaaaamtctacaacaactattacaaaggtttcaaaaaagtagagcaaacaatcttgaaacatggaaaaacagaagaagtctcagcaaagaaatgtaagatataaagaaacaaaaggaaaatttattgctgaaaaataaaatatccagaacaaaaaatttactggatgaactgtatgggagaatggggataaccaaaggaaaagagactgtgaacttgaagacagatcaacagaacactataaacaaccaagaggaaaaagctttggggaaaaaacagaggacctccagaactgcagaagattaacaaaagctctagtgtttgagtcactgcctgtcagagaaagaggaaaaagaatactacaaaaaaaaaaaaaaattgaagaa

SEQ ID NO: 794219 - DNA, 599 bp, Homo sapiens
gctcgatggtcttatgttaaaagacatgtgaaggtttttttttttaaattgtaaatcaacaatatctataaattataatgtataattgaatatgtttatgagtgcaacgtgatgctataatttatgaataccatgtggaataattaaagaaaactaattaacatatccatcacctcatgtgaaggtattttaaagtacataaatactagcacctattatttaatagtaagatagtgattaagagccctgactttgtaattggacaattctgtgtgtgagttctggctctgtcaattaccagttgtgtgatcttggacaagggtcttaatyaagccttagttttctcttttgtaaagcagggataatacaccaacctgtttcttaagcttgttgtgcagacaaaatgagacaatgtaggtagaatgcacagcaccacagaagcttagtaaatgttagtcaccatgattttctctttagcgttctacaagctaataggattctttttatatttcacattgtgaggactaaaaacaagacctcagggcaaagagggcagctattcatatccctctagttcttaatgccatttagaactctaa

SEQ ID NO: 794220 - DNA, 631 bp, Homo sapiens
aatattcataagataggccatatatgggataaaaagaagtcccaatgaacttaagaggactgaaatcacacagtgtatgtcctctgatcaaaacaaaattaaatttgaaactagtaacagaaagatagtcaggaaatccccaaatatttgtaaattataaaatataactttaaaataaccaatgggtcaaatttccacaagggaaattttaatatattttgaactgaatgaaaatgaaaacccatttcaaaatgtggagattacaaagtaaaagtcatggttagataaaatacacagttttagatgctttattgtaaaagagaagggtctaaagtcaatatctaagcttccactttaagaagctagaaaacaaagagcaaattatacccaaagtaagcagaaggaagtaaataatgataagaacagaaatcagtgatttagaaaayagaaaacagaaaaaaatcaatataaccaaaagctggttctttgaaaagattaaattgataaatatctagctaggctgatcgagaaatagagaaaacacaaatcactaatatgaatggaagaaacgacatcagtacagaccctacagacacaaggataaaaggatacaagggaatgttacaaaaaa

SEQ ID NO: 794221 - DNA, 621 bp, Homo sapiens
gcaaaatatatcattattattattactattaatatattttaataacaatgatggtaaggaaaagacagtttacagaataagaaattcaatcttactcataattgaagtaatgcaaattaaaataataatgcaatagattcattcaattattgagcacctactgtgtgccaggcattgttaaaggtgctgggggtatagtagggactaaagctgacgaaatcatagttcttaaagagcttgtattctagttggggagacataaagtcaacaattgaataaataataggtaagtgcatgagcttataagtwgagtcctggttgaagctccgtttactggggggtctgctgggcccatgaatccagatagaggtcattttcgtagtccccagttataaaattgagatcaacatacatgaaaattggagaaaatcaatgggatggacaacaatattacagttttgctccaggctacgttaactatcctaatcatttgtcataaaatattctgaaaaagagagctgcacaatccagacttccctcaaaacactatgacattgataaattcatgctgatcaggcaaaaaaacaagaggtggttagcatgctggagaccttggtcaga

SEQ ID NO: 794222 - DNA, 613 bp, Homo sapiens
ttgttctattttattattagttattgttgttaaactcttactgtgcctaatttataagttaaaagttataggtaagtacgcacaggaaaaacatagtatatatagggtttaatgctatctttgctttcaggcatccrctaggggtcttggaacatatcccctcaatcaggggggactactgtactcttatctcatgctcttctttctctcaagtaccttgctggggcttccccatagccaaaccccaccagaaagtagagggcaaagaagtctattgatacagtttatatagactttggcctcccccaacacagagctgggtagagaaggatgcaaagttgctctggagaggcaaacagagagccatccagcctagtgagattagagacacaagctagagcagggcaaactgataatgcatatttctgacaaattggaagagattgagattcaagtctcaaatagttgaatggaacttaaataggaaccataactttgttattctgagaagagagaagtagtagaaaatgggttatatttgcagacagctttttatggatttcattttgtctgtgaagacatctattgagacatagtgcagggaggatgagaa

SEQ ID NO: 794223 - DNA, 446 bp, Homo sapiens
aacaactagcaatgacagcaactaatattataaagagaaaataagtgaataaaatgatcgcagtcaaggaaagaaaaaagacatacacatctctgtgtttaataggttaaatgtaggccacaggtaaaaagcatgtcaaaaaaaaagtaggactctaaagtttttgaatttcaggagtctagytgactctgtatgagcagttagctcaatgcactgaactacggaactggaagatactaacgaatatcacattgctcaacacatttctaccttgattttagctgatggcaaaactcaaaaacaaaaacaaaattcagaaggaacacaaaaaacattataaactccaagatgtcttattataagaaagacttttatgaagaatgacattcatttaaatgcaagatacactaaaaggcaactttctcaatggctagccaagatttgtt

SEQ ID NO: 794224 - DNA, 630 bp, Homo sapiens; identical to SEQ ID NO: 785131

SEQ ID NO: 794225 - DNA, 499 bp, Homo sapiens
cttattgcttatagtagttttaagttgatcctttggttttccagatattttattataacttctgcaaataattaaaatttaatcacttattttccaaatttctatctctaattcctctttttaattgcattggctcgtayacacaaaacagcattgagttaaaaattggattttaatggtaatgcttcaagtatttccccttaagtagactctgttgttattcttattgaacttttacttccgttgtatttttcatttctagaaggtctacttggttctttttcaaattgtgtcagcttttaatagtttctcttgcatttcaggtattttctatctttctttttatttctttataaatggtaagcatggctgtctgagaatatatacctttattctagtcatccaagtctcattaatttgtggctgcaatcttgtttctgctaattatctttaaaggggtattaaatttgaaaatattatttgtaggaataatataaag

SEQ ID NO: 794226 - DNA, 488 bp, Homo sapiens
agtgaaagattttaacacctttctgtaactcagaacaagcacacaaaaatcagtaagaatagagaagctttgaacaacatgagcaacaaatggacttaatgagaatatatagagcactgtagcctatacctgcagctgacacgttatatgcaaacacatatagaacattgccaaaattggccatataacaggccacaaatcaagtttcaccaaatggtagctctgcttcttattctgatagtataaccttagtcaagtatctaacgtcttttagcctcagttcctccatccaagaaataagggttattatagtaatttcactaygtggtatatatgtatgtgtggttggcagttggtaggtgcgaaatagactatagctgttattatatttgtatattttgtatatttgtatattctatttgtataattctatattgtatgcgttagagtctacgagccttggaagcaggtgctgtatcttatttcct

SEQ ID NO: 794227 - DNA, 597 bp, Homo sapiens
aacaggattgcatggtggcaatggggcaggtcatccctgagtgcctccttatcctgaagaaggctgtgtcccattgcgggtacatagtgtgtgctggaccactgggggtgccgagcgtgtgctggaccacggggggtgcacagcgtgtgctggaccacggggggtgccgagcgtgtgctggaccacggggggtgccgagcgtgtgctggaccactgggggtgcacagtgtgtgctggaccattgggggtgcatagcgtgtgctggacagaccccgggagaacactgcagatactgcgtgtccaggcgctgtgcatcccgtgggttggccacatggcacgrcgcagatccagacagggtggagaggccagtgtagtcctgtctcacacacacgcgcacatgcagggtggggtccggctcctctctgaccaggggtccaggccctgcctcactcagaagccctggggaccctgactggccctccagaccccaatccacagctcccgcttctgctggcctggcagcccccactagggggatggtgctgccctgtctatgcgccaggtggagacgaggagtggggactggagtcacaaaga

SEQ ID NO: 794228 - DNA, 595 bp, Homo sapiens
aatggtctttttggagttatgttataaagtgaaatgatgatggatccaatccaatgatggattcctacaaagttataaaaaatcaaattaaagaaagagacttaggactatgcattatcaaacagacatcaactctttttatggtctataaagatatctatttcaataatccataatttcagtgcaactcaataaaattcccttaaagattttcataaaacttaacaaacttattctaaaatttacacaaaagaatcaaattgcagaaactmatcaatttaataccattaacatgaaaaacaatatgggttggggggcagataatacaaggaagaaaacagtattttttccttcaccttccttaggcttatggctgaggctcctataacaaaggataaattaacaagaaaagcatataaatttatttaataagttttatgtgacatagaagccttcacaagaaaatgaacacctgaagaaatggataaatctgtatatctttaagctaggtttgatgaagagcgggaaaaatgtggagaaaaatggtagggcaaaaagggtatcagctaatggtaatgaactggggggaagtttg

SEQ ID NO: 794229 - DNA, 625 bp, Homo sapiens
aggctgagacgggcggatcacgaggtcaggagatcgagaccatcgtggctaacatggtgaaaccccgtctctactaaaaatacaaaaatttagttgggcgtggtggcgggcgcctgtagtcccagctactcgggaggctgaggcaggagaatggcatgaacctgggaggcggarcttgcagtgagccgagatcggccactgcactccaggctgggtgacagagagagactctgtctcaaacaaaaaaaaaaaaaaaagaaaatgtgtttttcttttctaccacgtggtcaggctgaaaattttgcaagcttttatgctctgcttcccttttaaatataagttccagtttcagatcctctctttgtgcacatatatgagcatatgctgttagaagcagccaggccacatcttgaatgctttgctgcttagaaatgtcttccaccagaaagacagtgtggcgattcctcaaggatctagaactagaaataccatttgacccagcaatcccattactgggtatatacccaaaggattacaaatcatgctactataaagacacatgtacatgtatgtttattgcagcactactcataatagcaaagacttggatccaacccaaatgtcc

SEQ ID NO: 794230 - DNA, 579 bp, Homo sapiens
aattgtatgactcatacacctgtctccatagtaattaacttcctggctggaatcccatgatattcaccccttgatatgactaataatcccttggtctgacaagccttctagtcctggtcatccccatcaggttgttaatgctctggcaaaatgcaaatttttttcttagtttaggttttgctgtggtctgaaaacgccctataaataaaagaacagagaccaggggtctagttcagactaagcctttaacgttttacattctctatgaccttggccacggtattttacctctcagtatctcttcctccaacctaaccctgttatctgaaaagtgagaggtttgaactagawaatctttatgattctagaaattcctaacacaagcaatcgtttattctcagttataatttatgctcatttactatcactccaattagattgtaaacttcttgaaggcaggcattttatcttataattctacctctaactacttctgctacgactgaccttcagggttttcaacaattgtctttgatgatgacttttgtgctgaaaaacaaagcacttattcagctaatc

SEQ ID NO: 794231 - DNA, 556 bp, Homo sapiens
gtttgcaccgctggatccacacatgccaaaagttccacccctagacatttcaggtctgtgggccaatgatttcttttctctaagtctgattaaataagaagttttataatttgggaaaaataatcctgacattgagagctacacgtaactcaaaggctatcaattttgtcaccaatttacacttaaagtgaactgattgtgtgaatatagtgcacgggtaggaagagaatggtgtgaaaaaaggaagattggtccttagtccatgttctaggataatgatattgaggagagaaagaactcaagtaaacgaacaaacaaaacaaaatgaagctayaagcaacatgagtgagaggcatcaaaagaaaaagagtggggaacatgcaacaccactctctgaaaaatagaaaaaaaattaaatatgaaaacagaggctttgcaaatacatgtgtccctgctctaaggtagcagggagagagtgttagaaggggccaaattttttttaaaaggcaaggagactagaatggaataagacaaggacaaagcatttctatgtggg

SEQ ID NO: 794232 - DNA, 584 bp, Homo sapiens
ggcatcaaaagaaaaagagtggggaacatgcaacaccactctctgaaaaatagaaaaaaaattaaatatgaaaacagaggctttgcaaatacatgtgtccctgctctaaggtagcagggagagagtgttagaaggggccaaattttttttaaaaggcaaggagactagaatggaataagacaaggacaaagcatttctatgtggggcatatttgggacaacattcagcaggaggaggcattgaagtctaggatcttcccttaaaatttaaattaagcagttaatttagtctgtygcttagtggacaaacttagagaaatctgtctgaatttatcatcagcaaatatcctattttcacatgtggtagaggggaattgggaaaatcacccgcacaaaattcataatgctagaatgcattcataaccaagacaccatgctgacagacaaaagcaaaaacaatttcagcatataatttcatttaaatacaaaaaaaactccctaaataatctcaggcaaataaataaattatgtcctcatagatggatttaattccatgtgactcagtagtatttgcttttaattttt

SEQ ID NO: 794233 - DNA, 716 bp, Homo sapiens
aaaatgatatttgacatttggttttaaaaacattttttaggttatgtgaataattccatgaaccaaagtagaaattatgtagtttaacatcagtttaccccacccccatttcaatcttacacaaccccgctgcctccaccagacctaccaggtttagcacagtgctttgtgtatatccgtagttcactttctctttatagtgcctggcatatcataatcactcaaagaactgttgaatgaataaatgtagatagatattaatattaatatctccatcttagtgacaccagctcagaacaatcagcttggacagtcatgccattcattcatagcagagctgggatttttaactctttctccaccctcttgctttgcctaccactaagaagcttatcaaggaatctcaacccatgcagtactcttttagaagagatctaraaaatagaatgttctctattttgtacatttccagcaatgttcaagtatctcatgatttttctgctattccatttaactccaccttaaatcctacagctcataaaacatggcttatgtcactagtttagcaataaaacacctttactatgacatctctagtgctattattttattttacatattttgtaacctcaactcaagtttacattctttgaaggcagaagccctgtgttacttacattttttaaattactttcagcatcttgtgctgtgttgtt

SEQ ID NO: 794234 - DNA, 595 bp, Homo sapiens
tgcctgtgcaagaagggagcatttggacaagagctagctagaggggaattgcccatttcagcaatcagaactcgagtttcttagcaagccttgccaccgcaggccaaagtgccctggggtcctaggtaaacttgaaagacaatctaggacacaaggactacaattcctaggcaactctctagtgctgggccgggctcagagccagaagactagggtggcatgtgacctagggagacaccagccagggcagctaaaggaatgcttgtgccatccatyccccaaacccaggcagtgtggctcacagccacaacattgtctcttttcttctatttaagggatgaaggcaaagagtaaagaaaattttgacttgcattttggattctagctcagctgcaatatgataggacaccaggcagagtcatgaggcccccatttcaagccctagctctcaaaagacatttctagaccaaagagaacttgctgccttgaaggtaggacccagtcctggcaacattcatcactggttgactaaacagctcttgggtcgtaaataaccagcagtgatagccaggtagcatatcatgggccttggggt

SEQ ID NO: 794235 - DNA, 640 bp, Homo sapiens
acatggctgggataaatttccagaaacagtattacacattcagattcaaaaaatgaaataaaagtaaaggcaacagtctctagaaaactatattaagcaattcaaaaaatagctctcagaatgacaaaggctctgatgctccttgcctgtctccacgatgcacatgaagagttcaaataaaaatgatcttgtyaaatgtgaactcaaaaaattggttctaaaatactatatcattatatagaagatgtgattttaatcatgtgagattaaattaatgcactaaatatcataagtaaatatttaactgaacaatatccattactcttaccatattaagctagccaaaaggcttctttggggattagatcatgagaaaaatggtgtctcaccatatattgaggttggccttactttcgggcacccatggggagcatgactacacataatgtgggtgggggtggaaggtttggaatggacagacagctggatgaggggctggctcaggaaaaaagaatggtgacatattttcttattttttcacagcaaggtcacaagtgtgtcctgtactaagaaatattgggacactctggtctggaggacaagaactaattcacttgagctcattttgttccattctcag

SEQ ID NO: 794236 - DNA, 640 bp, Homo sapiens
acatggctgggataaatttccagaaacagtattacacattcagattcaaaaaatgaaataaaagtaaaggcaacagtctctagaaaactatattaagcaattcaaaaaatagctctcagaatgacaaaggctctgatgctccttgcctgtctccacgatgcacatgaagagttcaaataaaaatgatcttgtcaaatgtgaactcaaaaaattggttctaaaatactatatcattatatagaagatgtgattttaatcatgtgagattaaattaatgcactaaatatcataagtaaatatttaactgaacaatatccattactcttaccatattaagctagccaaaaggcttctttggggattakatcatgagaaaaatggtgtctcaccatatattgaggttggccttactttcgggcacccatggggagcatgactacacataatgtgggtgggggtggaaggtttggaatggacagacagctggatgaggggctggctcaggaaaaaagaatggtgacatattttcttattttttcacagcaaggtcacaagtgtgtcctgtactaagaaatattgggacactctggtctggaggacaagaactaattcacttgagctcattttgttccattctcag

SEQ ID NO: 794237 - DNA, 608 bp, Homo sapiens
aatctggttcttctctaaagaattacgtaagtcttttattaagattcatttctgtcttgacctccaacctgtcactgcttcctttctgcctttcatgttttctcaccttgatgcaagtcaaaatactgtcttgctatagtgctgacattttattttaggtaactgtatagtttaactttgctcaccaccattcttaacatatggaaacaattaattcattttctttgccatcattaggattgcaaacctaggatattctacatgtaacctcatcacagatttcccttaactaattacataatatcyaacccattttcttaaaagtaaaacttgctagttaaggaataaagaaacagcattgcttataataaactctgcatgttacagtgtaatttaaactgtactgttatgtatggtgaagggctgaaagtttagagttcctcctcttggtaaaggtttttttttttttttttaagggttgcttaaataagcagtacagaaaccagatgtcatttggtaagagtatctgaatgaccaaaaatttgctgtctgggtattttttcctttataaaaacaagaaaaattctttggatttatatcatatttag

SEQ ID NO: 794238 - DNA, 648 bp, Homo sapiens
tgcctctgatgtactaggcaagggctgagcgttctgcagggactaacgcatttacatctgaacaacagcccaatgaagcaggtttaactaagctccttgtttaatgggtgaggcagcagacgattagagaggataaataactgttctgagaactcgcaggaggtaagcataggagtaytacctgggagttaactgagcccagcgcctctgctcttaaccatgaagctccaagcctcacaggcactgcacacaagctccttagaaagattgcccaccccagagaggtggcaggaagctgggccttaccagttgtgatcagataggcatcggggactgtgatatcacaaacatatggcggcttggcagtagccagtgttggtgtgtcgactgttgcttcgagagtgaaggcagtcacgggacgcagggatggcaggggaggagcagcactactctctggggggctctgacttgcggcgtcacccatcagggtggagtcgaggggaccaccagtggcagcaccggtgctggttgtgctcacttccgtggaggtgttcagtggcacctctgtgggtgtgagtgatgggcccacgacggtcagctctgtgggcagagggaagggggttgcttcagaaacaaacaaggatcctg

SEQ ID NO: 794239 - DNA, 648 bp, Homo sapiens
tgcctctgatgtactaggcaagggctgagcgttctgcagggactaacgcatttacatctgaacaacagcccaatgaagcaggtttaactaagctccttgtttaatgggtgaggcagcagacgattagagaggataaataactgttctgagaactcgcaggaggtaagcataggagtactacctgggagttaactgagcccagcgcctctgctcttaaccatgaagctccaagcctcacaggcactgcacacaagctccttagaaagattgcccaccccagagaggtggcaggaagctgggccttaccagttgtgatcagataggcatcggggactgtgatatcacaaacatatggcggcttggcagtagccagtgttggtgtgtygactgttgcttcgagagtgaaggcagtcacgggacgcagggatggcaggggaggagcagcactactctctggggggctctgacttgcggcgtcacccatcagggtggagtcgaggggaccaccagtggcagcaccggtgctggttgtgctcacttccgtggaggtgttcagtggcacctctgtgggtgtgagtgatgggcccacgacggtcagctctgtgggcagagggaagggggttgcttcagaaacaaacaaggatcctg

SEQ ID NO: 794240 - DNA, 573 bp, Homo sapiens
actggctgatgaatgaataaacaaacggtggcacatacacacaatggaatatcactcagcctcaaaaaggaaggaaattctgacacacactacaacacaggtgaagcttgaggtcattatgcaaaggcacaaaaagaaatactagatgattccatttacaggaggtacatagaggagtcaaattcatagagacagaaagtagaagggtggmtgccaggggataggggagaggggaaatgaggagttgcttgatgggtacagaggttctattttgcaggatgaaaagtgtcgtggagatggatggtggtgacgatggcacagcagggtgaaagtatatcatggcataaaatgtttacaatataatgaaaactgcaagatgcaaattgtatacatagcatgatcccattttatgaaaaaagtaaagtctcatatacatattttgaaacactaggaagatgcatatcaaactgtttatataatagttattgttaggtggcagaaataaagatgattattttctactaaatatacttctgtactttccaaagtacctacaaatgaggaccatttata

SEQ ID NO: 794241 - DNA, 555 bp, Homo sapiens
attgtaaatcctcatgtgttgagtaagttcacctcctctgaagtggagcccatctcccactacagaagctggaaattccagagactttctcatctttcctcgcagctggggcagagtgacatgatatagattctacccctcaatgctgtacgccacaatgctgtaccccaaacagcctcactttgaaatcagaagctgataatccagagaaacaaagactgtacagaatcatttggacactgggtggcagcagttcagctttcaggatgtaacayccctgttgctggcaatgctgcctgcagcatcccgttgggtgtcttaatggactggttcttaagcacaacttggttccagcagcacggcctccgagctttcctctactgctcttcagagtctataagccacccaatattcttttaacaaattccttgacttgcttaaaccagaattgctttctacagcctgcaactacaaccattgaccgagaaagtatatgattggcatgtttagccctatttctgttactttgttttggatgctccattttgttgttgt

SEQ ID NO: 794242 - DNA, 617 bp, Homo sapiens
cttgaagcttgacatgtatgtacctgaactacagattaatcaacatgcaagcgtggactgttgtgtcttgctgattaattatgctgaatgatggattccggtttaatcactttacctgatagatgtagagagcttgcaaatgacagtcacygtatcatttctcaataagctgctttctaaccagcttactgaagaaacttcaggaagttgttgttccaggaaaaaaataagtacacacttttccatgaataactttacatttctctaatatcttacaccttaacatttgtcctctgaccaaaaaattatataaatacaataattatccaggaatcccattgtctggaagtctgtctgtctcatcctggaaccggaaaacaaaatttaaaaggttaataggatttataattggttttataatgttaagaaaatgactccttaggctagaaaaccattgactcatggttaaaattacctgtctaaaaataaaaaaaaaaaaaagaaacatagctatgaataagccctctgctcttaggaggggaatgctagtttgattcataaaagaaaaattgaagagttgattgataatttctctatctgaaaaaaaggatatgtga

SEQ ID NO: 794243 - DNA, 563 bp, Homo sapiens
atatatacacacatgtagctgaaatatcagcctaactaagcctacttttaattatagagctcttgaagggaatttttttcaaatatcttattaccagattttatccaggacagatgatacctctgtctcttaagcctttttaatgataggtattctaagtgaaaccaataagccttaactaaggttataacttaaacatggacacatgaggtgttttcaaaagagacagtgagcagtttttacaagatytggaatcatcccaaaggtgaatgaaagaaaaaaaaaattaagataagaaatcagaagctgcccatagaggggaagataatcaataaatggcaaactatacaaacatcaaaccagaaatggctcatttcctaagctggaaataaaacccatgcaaagtcttagctactgagctacagtatgaggcagttgccaatgctcttcgcagaatgggtctagatgaggcatttttgaacttgaaaataattttaactgctagagagatgttttatggctagccataacactattaattgtccttttctaaatttaacctt

SEQ ID NO: 794244 - DNA, 558 bp, Homo sapiens
gaataccctctcttcattgtttttcaaaatcatactggaagtcttagttaatgcaataaaacaagaaaaggaaataacagatttactgattaggaaataaataaaactggttgcaaatgacatgaatatatagaaaatccaaaagaactgacaaaattctcctggaactaatcaacaactacacatggtgaggttacatgatacaaggttaatatacaaaaggccaatattttctacataaatttagtcttaatgttrtcaataggttttttgaaactgtgactttaagtgaaacgatgtaacatcatttcatttagtatagttttgttaaaatgttcatgagagaaaaaaaatttttttaattcatatgtcctttcacttaaagttgcagtttcaaagaacctgttaatgatgttaattgaagacttattgtacctgcaataaaattgaaatttgaaataaaaacaatatcatttgtagtagcacactccaaaaataaaatatgtagatataattttagcaaaatatttacaaggtctatgcaagaaaaaccacaaa

SEQ ID NO: 794245 - DNA, 573 bp, Homo sapiens
agagttaggctcaaagatggaaacgacatagcagcaagtagttttgtttcactattaaaacaaaaatcatgaggagaggcgaagttaatagtatattttctattaacatggtatgaagtaacttaaatagcttaaaaaacaatgacatgaggtattagaatggagactgggtctgaaaggacatggggaaattataaaactgccaggctggaaaaacaatgatatataaaaagtgcttagtattgctttatttcctaaatatacttgtgttttaatggacaataaaggcatttcttacagtaatcaatgtatttaacggaatgctttttttacttsaaaatgcagatgttgtacttctgaccactcagcttcaattggcctcatggtaggttgtaatatcattaaaaaaggaactggttgtaaaactaagtcctcatctcagtggaggaatttatggctccaataaaagaaagaaccccaaggttcactgactggactctactgaagaaagggaaagtaatgcttaggggtttttctgtactatatgactaggtcatggtaacaaaggtgggt

SEQ ID NO: 794246 - DNA, 598 bp, Homo sapiens
aatcgatgtggaagacagaaaaggcaagaagaaggaaattttactaatctgagtgtgaggtatagtcatcctgaatcacgttcactttggaaaattcttcccaccctctccagaaaatccaagctagtctctggttcgcatgaacatggaactagaagagcggttttggatagaaattttgttggagtgaacctagtcccgtggtagacctgtatctaccctcaatatcccaaaggcaactgtaaattaagaataatctcatggcagcccagttctccaggccaagggagactcccttgaaataccctagtgtaaacccaaatctgcctccctctggatggaaagaccrtggaactcttcacttctcaaaattctgctcttcatggactgccttctgcctccacctttccccacacaaaattaaagcaactctcttctctgtgcaactgttcagaaaatatttttgctgtttacaactccatcagagctcctgaaaacacaaacttggtgtcatatgaattctactgctgactctttaagtcagaaagtcagatttattttttttcttatggccagtcaaaattaagatgcagataat

SEQ ID NO: 794247 - DNA, 626 bp, Homo sapiens
acggaaagagcaaaggtgttggctgtatgctaggatcaaatgacattcatttgttgaagtagtctgagtgactcaaagacatacagcagctattattcacttagctacaacacagcaaatattaacacatattttgaaaaagagagatgttgcttcatgtgacaatactgataatatttaagaagagatgtcagtgactcatcagacactcaggcagtcatgatttttccccttaaatgtcactaataatttttcttactgccttttttatttaggcayatgttcagtggcactcacaatcaaaattctattacaaaacacagtatcgaatatcttacttttattttatttaaataaatattgtaaatgatcatagtgaataacataataagtattattcgtatcaccattcttctgtattgtagtgatttttatgtcatcactgtgaatggtggatggtcttttgtctcttctaaatgtcccattcctcatgggataatttaaaatgacccataagcaaagttaagtttcaagaggattttttttcaaatagacagccttgccttgtactattatcctccaatttcctttttacattttcgaaaataatatgtgagttttaaaac

SEQ ID NO: 794248 - DNA, 625 bp, Homo sapiens
ctcagtcccatgggtaccaatgcagtcaccagccatctcaatcagtccccagcttctctttccacccagggatatggagcttcaagcttgggttttaactcaaccactgattgcttggattataaggaccaaactgcctcctggaagcttaacttcaatgctgactgcttggattataaagatcagacatcctcgtggaaattccaggttttgtgaagacctgtaraacctctttttgtgggtgatttttaaatatactgggctggacattccagttttagccaggcattggttaaaagagttagatgggatgatgctcagactcatctgatcaaagttccgagaggcatagaaggaaaaacgaagggccttagaggggcctacaaaccagcaacatgaaatggacaaaccaatctgcttaagatcctgtcatagttttagatcattggttatcctgatttgcaaagtgatcaaaagcattctagccatgtgcaaccaaacaccaccaaaaataaaatcaaacaaaactaagttgtgaaggaagggagggaaggtcatagccttcttaagcagaggtgttccattgttttagccaatccttggttgaatcttaggaatgaacagt

SEQ ID NO: 794249 - DNA, 529 bp, Homo sapiens
gcagcacttttaaataaaattatttttattctaaaatgctgaaatctttatgaataagtggagcccaagtaacagtatatacagtcttaagtactaaatttccaagtagaatgttgacattttatcttgtgttcaagggaaaataacttgagagaactctagggagaagaccatcatttgtttccactaattttaagcaagtgagarctgctagagaatctagttgatgattcctattatctttctctttttcctcttcctctgtccctctttcagacccactctgcacatgcgtgcgtgcagcacacacacaaacacacacacactttttctttctttctctgcccttttgctctttccatttcttcttcctctaccccctctcattcttctttccctccatcaaataccttttactctttttttcttctctctcttctctctcatgtttttcactctttctcttcaaatgggtctcaataggcggattcatttagtacgagaaaaaaagttattttttccttcacca

SEQ ID NO: 794250 - DNA, 492 bp, Homo sapiens
tacttgaggtcaggagtttgagaccaggctgatcaacatggcaaaaccccgtctctactaaaaatacaaatattagccagacgtggtggtgcacgcctgtaatcccagctactcaggaggctgacagaattgcttgaacccgggaggcagaggttgcagtgagccaagatagcaccactgcactccagcctgggcaacagagcgagactccatctcaaaaaaaaaaaaaatatatatatatatatatatrtgtgtgtgtgtgtgtgtgtgtgtgtgtgtgtgtatgtgtgtatatatatatgtgtgtgtatatatatgtatatatatgtgtgtatatatatgtgtatatatatatgtgtgtatatatatatgtatgtattctctcctattttactataagcagttaaaagtagctatgcagcaactggaatgctttgctgtttagatagtttttctgctaaatattctaatttgtcactcttaaattctgcc

SEQ ID NO: 794251 - DNA, 571 bp, Homo sapiens
gctttaatgactcaaacctaaaatagtactcagggaaagacagagtttggaagaattttgaattgggagttggctattttggttgttttcttctgatctggaaacactgggggaggggtggttcttctactgaagtaaacaggaattgtacacaaagcaggactcacataagagtgargggatgtcctaccaatgcccacgatgacccactaacatccagatttctacagtggagttccctggcctttacatatcagtgggcaagtccatgagaaacaatgtggcaggtggactaaggaaaaatggaagcatgatgtggattttcttttctttgcatctctttgttttgaacatactgctctttatcaaaatgcctttcttcaatttcctcagcccagcagtttgaatatttgcatgaagtaggcacatatcactacatatgaaccatgaaatgtatttgaaaataaatgttttaattaaaattgacatttctgagcctactgctgagggcagctgctttttctcttaaattgctttgtccgtctccataggagcccaatagaagagcagt

SEQ ID NO: 794252 - DNA, 552 bp, Homo sapiens
cagactagggactcagtatgtacatcacactttctttttctaggtttatggccaaaatcttactctcaaagtatttcttgtccaagagcacatggctggagtagaaacttcatgatctataggaaaaaattgtaaaccagatgtctggtttttttctgctttttcttttgtttgttttgttttaacatttctgttcartggctccctatcacatgtgggatgaagtccagacttcttggcgtggttcaggcttttactggtccagtgcttgcctttctctctgctcttatctcccaccatgccccataagcactctgtgctccaaccccatggttccttaaggggccatattctccctggtccgccagcctgtgtgctttcattcagattgtttcccttgtagctcccccggcccctcctccagcagcagaagtcatcctctcatccatccttcatacatcctttatccatccccaggacgattagaatcagtttcctgtgagctctgctctctcttaggctgagataacgtgctccctcctctgttctccc

SEQ ID NO: 794253 - DNA, 595 bp, Homo sapiens
agtgactcatacctgtaatcccaacactttgtgaggccaaggcaggcagatcacttgagctcagaagttagagatcagcctgggcaacataatcaaaccccatctctacaaaaaataccaaagttagccgagcatggtagtgtgcatctgtagtcccagctacttgggaggctgaggcaggaggctcaagctctacttgagctccagggctcaaggctacagtgagctgtgactgtgccattgcactccagcctgggcaacacagtgagattttaaaaaatgcataactaggccgagtgcggtggctcacctctgtaataccagcactttgggaggccgaggtgggtggatcacctaaggtcaggagttcaagaccagcctggccaacagggcaaaaccctatytctattaaaaacacaaaaatcagctgggtgtggtggcaggtgcctgtaatcccagctagttgggaggctgaggcaggagaattgcttgaacctgggaggcagaggttgcagtgagctgagatggcaccactgcactccgacctgggtgacagagcgagaatctgtctcaaaaaaaaaaaaaagcgtaatta

SEQ ID NO: 794254 - DNA, 595 bp, Homo sapiens
agtgactcatacctgtaatcccaacactttgtgaggccaaggcaggcagatcacttgagctcagaagttagagatcagcctgggcaacataatcaaaccccatctctacaaaaaataccaaagttagccgagcatggtagtgtgcatctgtagtcccagctacttgggaggctgaggcaggaggctcaagctctacttgagctccagggctcaaggctacagtgagctgtgactgtgccattgcactccagcctgggcaacacagtgagattttaaaaaatgcataactaggccgagtgcggtggctcacctctgtaataccagcactttgggaggccgaggtgggtggatcacctaaggtcaggagttcaagaccagcctggccaacagggcaaaaccctatctytattaaaaacacaaaaatcagctgggtgtggtggcaggtgcctgtaatcccagctagttgggaggctgaggcaggagaattgcttgaacctgggaggcagaggttgcagtgagctgagatggcaccactgcactccgacctgggtgacagagcgagaatctgtctcaaaaaaaaaaaaaagcgtaatta

SEQ ID NO: 794255 - DNA, 655 bp, Homo sapiens
agaactggaaggtaagcttgttccttgggtgagtcatcatgttgtcttgcagtcggtcatgtgttttcttagcaactgctgttgatttcaggtttgagcagggtgagcatgttttgaagtgatccaacagattcttttaggttatatatggctgctaaatcttatacacttactgttactattatgtgtcttacaaggagtgaaagattgaattctttttttatctctaccttccaaatcatttctyttctaatttgtttttcaggggtagtgaggactgggagtgggggtaaaaaaggagaaaaataaatgaatctgggatatcatgagtctgcctgtttatgcccctggactagagcagaaccaaaaggacctccatgtgctgatagggttaaatatgatttcctggggtgttgatcttgagtaatactccgtgtgcatacattctataggaacaagtgaattttagaaatgtctgtggtatagtgtagtggttaaaagcttgggttctgaaatcagtctgacccctggttcaaattctagctttgccatatactagaggtgttattttgggcaaattacttaacctctctgagtagagtttcctcatctgtaaaagtgaaactaaaatcccacgtacttatattactgagat

SEQ ID NO: 794256 - DNA, 534 bp, Homo sapiens
gtactgcaggagatcagggtgtatttcagtccttacttcaaccacataagacagacactcccagagcagccgtctacagacctacccccaggaatgcattccttccccagggttatcaattattaatattcctttcgaaaaagaattcagcgatatttctcctactcacacatctgtctataggatctctgcaagaagaaaaatatggctgtattctgcccgaccctgcaggcagtcagatcttatggttgtcttcccttgttccctgaaaatctgttactctgttctttttcagtataagcagagatatcatgcacaaatcgggtgatgaaatccactgatttggtattgttcaaacacgcatattttacaatcagtttatataatagtggtcctgaggtgatgtacattctcagcttacaaagataamaggattaagagattaaagacaggcataagaaactataagagtattgattggggaagtgataaaagtccatgaaatcttcacaatttatgttcagagattgcagt

SEQ ID NO: 794257 - DNA, 406 bp, Homo sapiens
atggacacaccatcacaggaacacacaaacacactgccacatggacactgccacacacagacacaccgccacactgtcacatggacacacctccacactgtcagacaccaccacacagacactgccatgtggacacaaggacacacagacattgtcacatggatacacacactgtcacacggagacatcaccatgcagawacatgaacacaccaccacatggacatagcaccacacagacactctgccacacggacacaccaccacacagacacaccaccacgctgccacacagagacaccaccacatcgttgccacattttcatgtgtcagctggcggtgtgggccccacgactctgagctctaatagataaattacttaggcatatagtgaaggcaaaattttt

SEQ ID NO: 794258 - DNA, 547 bp, Homo sapiens
ggagaattttgcaaaagctctgaggatgccctttttattctcccactgcaaaattgttttaaaaagcaaaaactccagcaatgtccgggaaaagtcaatactgagtgtcagcgcgggatgctgccgctgatacggtcccggcgtcctggccgaaagtggcctcctcggggaccgcatctccgcgcaccatggcagcaaacgccagcggtttgtgggcggatggtgtcccygtggccatccccgctcctgagtgcggaaggacagacaggagcggggacttctgggtgttcctggtgtcagccagcttgacgccgttgttcctcctggaaatccgggatttggagaagcacctggttcctgatggaggccgtgggcctcttggtccccgcttaccaggcagcggcgccagcctagttctcagccccgtccctgatgggcgccgccttccatcaggccaaagactttcctccaaactacccttcttggggcagggaagcagcatcctgggccttccctggggcctgtggtgctggcagcagctccacgt

SEQ ID NO: 794259 - DNA, 592 bp, Homo sapiens
acatacaacctaccaagactgaaccatgaagaaattcaaaactggagcagtgcaataataaataacaatattgaagatgtaataaaaagttactcagcaaaaagaagcccaggacccagtggcttcactgctaaattttaccaaacattaaaagaagaactaataccaatcccactcaaattattctgaaaaatagaggaggggatacttccaaactcattctatgaggccagtattaccttgacaccaaaacagacaaagacatctcaataaaagaaaactaggtcaatatccctgagaacactgatgtaaacatcctcaacaaaatattaggaaactgmattccaaaacacattaaacagatcatttatcatgacccagcaagattaatcccagggatgcaaggatggttcaacatatgtaaatcaatcaatgtgatacatcataccagcagaacgaaggacaaaagccatatgaacatttcaactgatgctaagaaaacatttgataaaactcaatatccccttaggataaaaaagtcaccaataaactgggtatagaaggaacatacctcaacacaataaaagccaaa

SEQ ID NO: 794260 - DNA, 578 bp, Homo sapiens
taagtaacagtaaaacattgttattatcggcttttatccattgacattcttatataagaaaatatatttgaatttatcagactatcccacttcaatttttctgattcttaaacttctttcacattaatatgtagtcttatgagttctctgaaaagtttcttatatcatttcatatttctgagtggtatatggtaaagaagtggcctttagtaaagaaaacacaaactattttgttttatattcattcattaataaagattaattacagggcttattttataacttttggacctttcaatacagttaaagaaaattcttgactttttccatttaagcratgcatgcttattgattttttaaaaattaattaagaaggaagcattacttgttcactacaaatttttgttgaattttttattatattatttttgtttgggggaccaaatatttattaaagaagattgaaatttatgtgttatgacatcaacaacagataaattatggaagcagaaattctttactagagctaaaataattatctggttatgttttttaatgataaaagaatacatacaagc

SEQ ID NO: 794261 - DNA, 647 bp, Homo sapiens
tcctcttcataacagtcagagtgatcatttaaaactcaaatcagccaggtgtggtggctcacgcctgtaatcccagcattttgggaggccaaggtgggtggatcacctgaggtcaggagttcgagaccagcctggccaacatggtgaaactctgtctctactaagaatactaaaattagctgggcatggtggcgtgtgcttgtaatcccagctacctaggagactaaggcaggagaatygctcgaactcaggaggtggaggttgcagtgagccaagattgcaccactgcactccagcctgggcaacaagagagaaactccgtcaaaaacaacaacaacaacaaacttaaatcatatcccatcttcttcaccttgtctcctttaatgaccttccccacacttctcattcaactgaaataaaatctaaacccctgacccacaaggtcctttgtaatctggaccctgaacgtctcttcagactcatcctacgtgtctcttcctgatactcttgccacccggagattctttctgtctctcaaacatgcaagctattcccttctcagggcctttgtccaagcaattccctctagctgaaagactcttccctgagccctctgaagggcctgcttcttcctgttctggtttcag

SEQ ID NO: 794262 - DNA, 608 bp, Homo sapiens
cccaccacatctgactaatttttgtatgtttagtagaggttgggtttcaccatgttggcaaggctggtctcaaactcctaacctcaaatgatccaaccatctcagcctgccaaagtgctgggattacaggcatgagccactgcacccagccaggagttacctattttaggcaagcacagtaaggagataattaaaacctttagartccagttattaaagatttacaactacttaagaactgcaccaactcttgaggataatgcacaatgaagaatagaagaaaaatatgaagagtaattaagaataaggtcatagaagacaatctctggagtaatgcctgcatttagtactattcatgaaaaaaacaggaagcatatatttgggcatgaatttaactactaggaaaccacagtcctatttattctgaaagcctatatttcaacattttcttatctaaaagtaaaattaatttagcattttaattgaacattctccctcatctaaataccattttttctcttagtgttcaatagctatatgctatgaaactatattagcatatttttgtgaatctctaaaatatatctgaaatctcaaacctcattttt

SEQ ID NO: 794263 - DNA, 491 bp, Homo sapiens
tcatcaatctattgtcaaaacatgaagacttgattggggttgctggagaggtaaatgttagtaatcttcacaagatcaaagtaaacacgttggactttcaggaggaagagaacctatggaggaaagggcagaagcactcatttcttcatctcacaaagagagagtcaagaagtattggcagaagttgatggaaaaaaaaacgrgaggaggttaagaagaatgctatcgatagtttaaaaagtagttttaaaacctttaaagtaatgatattaaaatatctaattgagagaaggtagaatagtatgagataaatcctcatgtaccgaattatgaagacaagatgtattttagtatttttttagtcaagaaatagaggtacaagtatatcgttcagagttgtgaaggtaattatcaccccaaactaaaagagacagttaaaggagcttacctttgaggaatagaaccagaggtggccattagatgttcttttg

SEQ ID NO: 794264 - DNA, 601 bp, Homo sapiens
cctgggctcccactttggcggcacttgagggacccttcagcccatcactgcactgtgggagcccctttctgtgctggccaaggacagagccggctccctcagcttgcaaggaggtgtggaaggagaggcgcgagcgggaaccggggctgcgcgcggcgcttgcgggccagctggagttccaggtaggcgtgggcttggcaggccccgcactcggagcagccggccggccctgcgggcccygggcaatgagggatttagcacccgggccagcggctgcggaaggtgtactgggtcccccagcagtgccagcccaccggcgctgcgctcgatttctcgccgggccttagctgccttcccgcggggcaggcctcaggactgcagcctgccatgcctgagccttcccccgcctccgtgggtacctatgcagcccgagcctccctgacgagcgccgccccctgctccacggcgcccagtcccatcgaccacccaagggttgaggagtgcgagcgcatgcaggactggcaggcagctccacctacagcaccggtgcgggatccactgggtgaagccagctaggctcctgagtctggtggggacgtgg

SEQ ID NO: 794265 - DNA, 600 bp, Homo sapiens
acatcacatgttctgccagaagctttattttaaatacccttgtctgctaccttctgggttaaatagttttgaatatacatttaattcaaattactttctatcacagtcagtgactgcagttaaatttactgaacagctttaaggttttctagaaaaataatgaaggggaggtacagaaaaggctacccccatcttgttcattcaggaacattcattgtatctgaatataaagtagtctcatttggtacctcgattaatgctccctgattaaagccagctatcacaattcttaaaatgtaaacattataaaaataagtgaaaaaaggcttagaataggcaataatttaatagattagtcctagccccaagaggaattctcactatgaggctagggtttaatcttcaaaaggaaatttctggatacytaagctatatctatatcaaattaatctcttacaaacataaaggttactaagttgtgctgattcagctagctgtgaaaatatggatcagtgttaataattgcaaggtccacctatgatatagcaagtgttttctttgtttttttaaaattagtgtttattgattagtatatattta

SEQ ID NO: 794266 - DNA, 523 bp, Homo sapiens
aagttaatgcaggagagcagaaaactaaataccacatgttctcacttataagtgggaggtaaacattgggtctttataaagatagcaacaatagatactgaggacttctagagggggatgggagggaggaaagggttaaaaaatttattgggtactatgctcagtacctcagtagcaggatcaggcatatcccaaacctcagcattttacaatgcacccatgtaacaaaactgcacacgtaccccctgctaaatatawaacaaaaattgaaattattaagaaaaaaaaaacatctcttcttaggaacaagatttttttctactaatttcaatctatataggattctactgtttcgattcttggatctgaaatttctccaaaaattatttttatcttgttatatgaatagtgttttctcaaacctgtggaattcatctgccatttttaattggtccctaagtttgagatttttctttctgtctagtttagattgaaggtagagatacaaaaggttttaattatc

SEQ ID NO: 794267 - DNA, 571 bp, Homo sapiens
cagtcagcaaggggaggtgggacctgcactgggtcgttctctccccatgaagatcatgggttgcatgtcaccagagtgaacgtcagcgcgtcagccatcaagaaggccagtgacagactctgggagttatctcacacacgcataggaggatcaaaagagtttcactgaagagctgactggctcacataagggctagtatcagaaagaggcctctcctccatcccctgaactctgctctttaaatccctgacaaccatattttctcttgggtccagaatccatcttccagaagaaaagagaaagcaggggacagcttcagccacatcatgaaatttgcctttgaagagacaggacatttattcaaatgatgctatgtaaatcaggaaaaattgagatatcattaattgattcttaaaatattattctagcttactgcctcccagcaattaggaagattaaattactgaagataaaaatgttgtattttaattgtttatctgagttttatgaacaaatttgctrtccaactacagtataaattttaattttccaacataaatgtatgctttgt

SEQ ID NO: 794268 - DNA, 521 bp, Homo sapiens
attttcttaaattcttatggattcttattggaagtctcaattatagaatcaaatactgtcattgaaaggagcatcaactcaataaagcagagagatcaatgccatgtctaaggatgctggtctatttcctttaggctgcattagcttacactggacttgaacaggttactgaactaatgagtgtttaatcttactgtaatttataacatgacaacttattgaggctgaaaaagtgatcagtttcaaaagctctcccttaatatgtgggaagtagtttgcacactgggcaagtataaatcacaaagtaataacagtcgtgtaagattgtaacaaatataaattgctatgtaaatattaaatagattacacagtatttttaagcccygaaacatcaaatcactttgcaaagaactaaatgtcaaatgacatggtgtgtgtttatgcatacttcttctatgggccattattacaactttagtaacattgctttaaaattttcatatccagagcatactcacttt

SEQ ID NO: 794269 - DNA, 531 bp, Homo sapiens
acccgtccccacacctagcccactgctgccacttttggcactagaaaaactctctggaggcccaagaattggtgtgcttagacccactcacaccaattaatgctcatgtatattacctggaggcccaataacaagcatccttagcttattgattccactactggggcctgagatctggcccacctggcatccctcaggtggatggaaacctcactacagcctctactatcaactgtagcctaagccagcaaagaagtcagacacmactgattgtatttacagctgaaaaaatcatattaaaaactaccactacatttacccagaatcaaggtcaaaatgccttattcaaccaacactataaatatatatttaggaaaaaatatttccctatgaaaggcaaaaaagttagaagaagtgactgttacatcagatggatggatataaatataaggacatgagaaatataaaaaagcaaggaaatatgacacctacaaaaatgcaataattcctcagcaaaatattttaattaat

SEQ ID NO: 794270 - DNA, 630 bp, Homo sapiens
aggcacagacttaaatctgcaaaacaaaccatatgcagatttccacttttcctggtcaccttctcataacttgcctctcccttccagaaatcccaaactccttttcctttgttttagcctaagatgatatgtaaacccaggttctaaccaccccactggttttcgcttcactgggtgcccccgtgtgtatatgtgcaatgcacatgttagtaaacatgttttttctctcattaacctgtctttggcccgtytaatttattgagacccatctagagagtctaagataagtaatttttttttttcctctcctatactcaacaaaacaggaagaatccacattctacttccccgttttcatatgcaggagtacagaatgaactattaatacacaaatggattgattgtgagtatgaatcatacatatgctaattatttattaggtaatgcttgggatggtaatatagtatttcttgaaatacctacaatccttttggtggcataactcatcatattctctctgttcaaaacagttaagctactattatgtccttaagctcacttgtaagtatacgagaggaaaaaaatctctttctctaactaccctgggtttatggctaagctcactatagc

SEQ ID NO: 794271 - DNA, 466 bp, Homo sapiens
tttttaactttttatattggttgttctagggtttgaaagataaacttgctactaatttaaattcacttttatttttattttattttatttgagatggagtctctctcttgtcccccaggctgcagtgcagtggcacagtctcggctcactgcaacctccgtctcctgggttaaagagactctcctgcctcagcctcctgagtagctgggatttacaggctcccgccaccacagctggctaatttttgtacttttagtagagacggggttccgccatgttggccaggctkgttttgaactcctgatcttgtgatccacctgcctcggcctcccaaagtgctgggattacaggcgtgagccaccactcctggccttaagttcacttttaaataacagtgtactacttcacagggggtgcatgtactttataatgacaaaatatttataattcctctttcctatctctt

SEQ ID NO: 794272 - DNA, 608 bp, Homo sapiens
aaggagcactaaatgcagaaagaaaaaactgctaccagctaatataaaaatacacagaccagtgtcactataaagcaaccacacaaacaagccaacataataaccagctaacagcacaatgacaggatcaaatccacatatgtcagtactagcattgaatgtaaatgggctaaatgccccacttaaaagatgcagaatggggycaggcatggtggctcacacctgtaatcccagcactttgggaggctgaggcgggtggatcacctgaggtcaggagtttgagaccatcctggccaacatgaaaccccatctctactaaaaatacaaaatttagccaggtgtggtggtgtatgcctgtattcccagctactcaggaggctgaggcaggagaatcactgtcctgaggcaaaagaacccgggaggtagaggttgcagtgagccgagagtgcaccattgcactttagcctgggcaacaagagcaaaattccatctccaaaaaaaaaaaaaagaaagaataaaaaagaaatagaaatagaaaaagatgcagagtgacaactggataaaaaggcaatagccagtgatgtgctgtgttcaagagacccatctca

SEQ ID NO: 794273 - DNA, 558 bp, Homo sapiens
ggtggtaaatgttatattatgtatattttaatacagttaaagcttttaaaaatatgtcacattagctgtggataaaatagctgttaaagattgaggtgtgcgaggaataaaacatctagaaagagtccacatcgagattgtttcccagtggtcgttaagttttcataatttcaggaaaccaagataggaaacttattttaagtttaaaatgaaacatttaagttgtgtacgtrtcttgggctaggctcctggggaacagactcacagatggagattgaggccattggaacttgtcctcctgtgttgatcagaccttggatgtgggctgctccccaggggaggggcataacctcgaacaaggcgaacttctttggctgagcgtgagtctcaggaggttcttagctgagaacaatcagcaggtaacactccagcagctgggggatctgagtggtacactacagcatccacaacagtgtgtctccattttgtgtgtggttttccctttataacagacttttaaagattaactgattaacttctggtccagattgcttcaaa

SEQ ID NO: 794274 - DNA, 572 bp, Homo sapiens
aaactacatgacacattcaggaatgtgaagtttgcatcactgcagcagagagcatgtggctggccgggaggcagggggtagtctagtaggggtggggaggagaggaacatgtggcagaagagatgccaagatctaggtagagctctgatggtaattagggggcttgtgtactccaagagattggattgctttcctaacctgagaacaagagaaatggaacagagaaaataaaagattcactagagttctcaaggtggtagaattaatgatagcrtagaatttatctaaatataatctagttaacccattaatcctgctgaaattacacttcagttgaaagtcaatctcttgggtatctggtttcttcatttctggtcatttttgtgcaccatatgatgacttacgtgttcttaaatatgacctgttttccattattttctaggttctttttctatccagtgaatagtcagccagtaatccttgtcccaaattgattataataatgaacaggtggaataccaagatattagcaataagagtatcttaccaaaaaaaaaaaaaaaacagatttc

SEQ ID NO: 794275 - DNA, 602 bp, Homo sapiens
cataagctggaaatgatcaagcagttgaaatggggagtcccaatgtcttgttcttggtactgcttgcagtgtgtacacagctttgagttggcagtgtattacaaattggcgttcctttctttgtccaatgggaccagcctgggtttttggcaaagaccctcaaaatctccgaaagcccagagttattagctgggcataggactgtgccatgaatccagagacctgctctgctatgctaggtaggaaagcagcttcgtgcatctgagcctccattttcccatctgtaaaatgaaagagtggggctgggtgatttttttttttttgaaagggagtttcgctcttgttkcccaggctggagtgcaatggcgtgatctcagctcaccacaacctccacctcccaggttcaagcgattctcctgcctcagcctcccgagtagctgggattacaggcatgcaccaccacgccaggctaattttgtatttttagtagagacggcatttctccatgttggtcaggctgctctcgaactcccaacctcaggtgatctgcccgcctcgccctcccaaagtgctgggattacaggcatgagccactgctcccg

SEQ ID NO: 794276 - DNA, 396 bp, Homo sapiens
ggatttatcttttgttttgataacattgtttttaaaaatattttgaattttatggcatatttattttcccagataaacttttgatttatcaaatttcccaaagaaagtaaacaaaaaactctacagtccttctatcaygtattattaaaaatatatcccactcaaaatattatactattaaaataagcattatttgacaactggtattttctgactctgaggaagtatgctttttaaaaggcaagcttccgtctaaacaatggctaacaatgtaattaggagggcatttacaaatggcttgatatttatagttcacatttcaacttcaactctatttgttgcattagcaaaatgaaactcattaagccttattcttttagtccatctctccaagct

SEQ ID NO: 794277 - DNA, 706 bp, Homo sapiens
agacctgatgcccagagctcttggatccattccccactcacccaggaacttctaaaccagacatgagcttgtaatgagtactttcttccccaacagaacttcatgcatcccagagatgcagaatgagaatgatctccatcctggtcagcgaaatacagcatacggtgggataaaggattgaaaaagatgcatgctccgtgaattacttccccatgtggtttctgcctggctgagttatgatggtcaaatcttacctctgcagcctaaactagatcagagatgcagcatgactgaggcagttttagttgttattgttgttgtatagttctttgctttagtctgtaggttgcctaacgctacacagctaatgaaacactgtcccctctccctctccctctccctytccttctccctccccctccccctccccctctccccacggtctccctctgatgccgagccgaggctggactgtgctgctgccatctcggctcactgcaacctccctgcctgtttctcctgcctcagcctgccgagtgcctgcgattgcaggcgcgcaccgccacgcctgactggttttcgtatttttttggtggagacggggtttcgctgtgttggccgggctggtctccagctcctaaccgcgagtgatccgccagcctcggcctcccgaggtgccgggatggcagacggagttgcgttcact

SEQ ID NO: 794278 - DNA, 650 bp, Homo sapiens
aaatgcttccaaaaaattgaagaggacagagtgccttctgctttattctatgagtccaggatcgcatcaataccaaaaccagacaaagatagacaagaaaactaaaaaccaatatctctcatgaatatacacataaaaattcttaacaaaaaaagcttagcaaatcaaatccaataataamggtaaaagataatacatagccaagtggagtttattccagaaatgcaggcttgatttaacattagaaagatcaatcaataaaatggacaatagttagaactaaaaagaaaaaaaaaagtcaaatgatcatctcaatagacacagaaaaaatatttgacaaaatccaacatctattcttggtaaaacctgttatcaaactaggaatagaaggaacttttatcaacttcataaagagcatctacaacaaaaagcaccacagctactattatatcaggactgaatgcttcccctctaagattaaaaacaaggcaagattttctgctcccatgacttctatttaatattgtattggaggttctaaccatgccatcaaacaagaaaaagaaataaaaggtaatcaggttggaaagaaagaaggaaaattgtattcaaagattatgtcattatctttgtagaaaatcccaaagaat

SEQ ID NO: 794279 - DNA, 650 bp, Homo sapiens
aaatgcttccaaaaaattgaagaggacagagtgccttctgctttattctatgagtccaggatcgcatcaataccaaaaccagacaaagatagacaagaaaactaaaaaccaatatctctcatgaatatacacataaaaattcttaacaaaaaaagcttagcaaatcaaatccaataataacggtaaaagataatacatrgccaagtggagtttattccagaaatgcaggcttgatttaacattagaaagatcaatcaataaaatggacaatagttagaactaaaaagaaaaaaaaaagtcaaatgatcatctcaatagacacagaaaaaatatttgacaaaatccaacatctattcttggtaaaacctgttatcaaactaggaatagaaggaacttttatcaacttcataaagagcatctacaacaaaaagcaccacagctactattatatcaggactgaatgcttcccctctaagattaaaaacaaggcaagattttctgctcccatgacttctatttaatattgtattggaggttctaaccatgccatcaaacaagaaaaagaaataaaaggtaatcaggttggaaagaaagaaggaaaattgtattcaaagattatgtcattatctttgtagaaaatcccaaagaat

SEQ ID NO: 794280 - DNA, 650 bp, Homo sapiens
aaatgcttccaaaaaattgaagaggacagagtgccttctgctttattctatgagtccaggatcgcatcaataccaaaaccagacaaagatagacaagaaaactaaaaaccaatatctctcatgaatatacacataaaaattcttaacaaaaaaagcttagcaaatcaaatccaataataacggtaaaagataatacatagccaagtggagtttattccagaaatgcaggcttgatttaacattagaaagatcaatcaataaaatggacaatagttagaactaaaaagaaaaaaaaaagtcaaatgatcatctcaatagacacagaaaaaatatttgacaaaatccaacatctattcttggtaaaacctgttatcaaactaggaatagaaggaacttttatcaacttcataaagagcatctacaacaaaaagcaccacagctactattatatcaggactgaatgcttcccctstaagattaaaaacaaggcaagattttctgctcccatgacttctatttaatattgtattggaggttctaaccatgccatcaaacaagaaaaagaaataaaaggtaatcaggttggaaagaaagaaggaaaattgtattcaaagattatgtcattatctttgtagaaaatcccaaagaat

SEQ ID NO: 794281 - DNA, 575 bp, Homo sapiens
agagtgcaagagtgcaatctcggctcactgaaaactccacctcccaggttgaagcaattctcttgcctcagcctcccaagtagctgggattacaggcatgcaccaccacacccagctaactttttgtatttagtagagacagggtttcaccatgttggtcaggctggtctcaaactcctgacttcaggtgatccacctgccttggcctcccaaagtgctgggattacaggcgtgagccaccacgcttgacgggtacttagtttcacagacattagggaaatatggtagcagaggagggaggtcttccaaaaatacttgaaaaagacatatgtacaatagtgagcagtggcatttatragaaagatggtctataaacattactattgctctggctttacctttaggttggtgtgatcctgaaggaaggaagtgcgtgtgtaggaaaaggagttccaggggggttatgttaatttacaatcatatcaaaataacatgactcttcctcctctccctgtagctgtatctaggaagtaggagtttaacatttccccattcaacctcttaccagaaaacta

SEQ ID NO: 794282 - DNA, 591 bp, Homo sapiens
tgactgatacacagagggaattgggtgctgggtgggtggaaacagtatatatgccccagagaggccaactccaaaagctgtgtgaattcagagagaaacacccatggcttaaggcttgaaacaagaggcaggaggttgggggatattggtttttggtgaacttactgggcttgctgaggcagagcaacacctgtttctctgggccattactacaaaggtcagattgcgagtcttgtcctagattcagccttctttgagagttttccttaagacacagtttgagcagattactttcttgcttagaatccctcagtaggtccccactgccccaggataaagtctagacccccaagcacgtcctgcayggccttgctgacatgtctgagtctgggcattgtactagtgagccacaaagtgtgcaggtcctggtgcccaccccatctccactgctgcccagggcgcaaatccacatcaccccttagctggactagggctagtgcctcctaactggaaggattccactcagctcccttctaatccaccgtccacccagccacttctcaaatgtaaacccagtcttgttgccatcct

SEQ ID NO: 794283 - DNA, 635 bp, Homo sapiens
ctccattgtatgttatttgtttcttttctcttgctgctttttggatccttttttaatcctttacctttgcaagtttgattattatatgcctataggttgtcttgtgtattagtccattttcgcactgctataaagaactaactgagactgggtaatttataaagaaaagaggtttaggccgggtgtggtggctcacgcctgtaatcccagcactttgggaggtggaggcgggcagatcacctgaggttggaagtttgagacctgcctggccaacatggagaaaccccgtctctactgaaaatacaaaattagccaggcgtggtagtgcatgcctgtaatcccagctactcgggaggctgaggcaggagaatcgtttgaacctggaaggcagaggttgcagtgagctgagatcactccattgcactccagcctgggcaacaagagcraaactccgtctcaaaaacaaacaaaaaaaaattggtttaattgactcacagcacagttccacaggctgtacaggaagcatgtttggggaggcctcaggaaacttacaaccatggcagaagataaaggggaagcagacacatattacatggcctgagaaggaggaagagagagtgaaggggcagctgcta

SEQ ID NO: 794284 - DNA, 527 bp, Homo sapiens
tttattgcaacagattgaatgcagaagcagctatgagaatccagccatctttggtttagccagaattaaagagatttacagaaatgcaaaagcatgccattcttactaaattttttgttttggaaaatagtttttttttttttttttttttttttgagacggagtctcgttctgtcgcccaggcgggagtgctgtggcgcgatctccgctcactgcaagctccgycttccgggttcacgccattctcctgcctcagcctcccgagtagctgggactacaggcgcccgccactgcgcccggctaattttttgtatttttagtagagacggggtttcaccgtggtctcgatctcctgacctcgtgatccgcctgcctcggcctcccaaagtgctgggattacaggcgtgagccaccgcgcctggccgaaaatagttttttaaagctatgttaacatgtaatgagtttcttgttatttaaatgaataaatactttaaaagttcttcagttataatttccaatgtagtgga

SEQ ID NO: 794285 - DNA, 614 bp, Homo sapiens
tcaaattcttcttttaacatcaataattaatgttgcgggaagtcagggatcctgaatggagggactggctggagcttcggcagaggaacataaattgtgaagatttcatggacatttatcagttcccaaataatacttttataatttcttatgcctatctttacwttaatctcttaatcctgttattttcataagctgagggtgtatgtcacctcaggaccactgtgacaattgtgctaactgtacaaattgattgtaaaacatgtgtgtttgaacaatatgaaatcagtgcaccttgaaaaagaacagaataacagcaacttttagggaacaagggaagtcaaccataaggtctgactgtggggttgggcaaaaagaaccatatttttcttcttgcagagatcctataaatggacatgcaagtaggagagatatcgctaaattcttttcctagcaatgaatattaatattaataacctggaaaaggaatacattcctgggggaaggtctataaacggccgctctgggaatgtctgtcttgtgaagttgagataaggactgagatatgccctggtctcctgcagtaccctcaggctgactagagttgggaaact

SEQ ID NO: 794286 - DNA, 614 bp, Homo sapiens
tcaaattcttcttttaacatcaataattaatgttgcgggaagtcagggatcctgaatggagggactggctggagcttcggcagaggaacataaattgtgaagatttcatggacatttatcagttcccaaataatacttttataatttcttatgcctatctttacattaatctcttaatcctgttattttcataagctgagggtgtatgtcacctcaggaccactgtgacaattgtgctaactgtacaaattgattgtaaaacatgtgtgtttgaacaatatgaaatcagtgcaccttgaaaaagaacagaataacarcaacttttagggaacaagggaagtcaaccataaggtctgactgtggggttgggcaaaaagaaccatatttttcttcttgcagagatcctataaatggacatgcaagtaggagagatatcgctaaattcttttcctagcaatgaatattaatattaataacctggaaaaggaatacattcctgggggaaggtctataaacggccgctctgggaatgtctgtcttgtgaagttgagataaggactgagatatgccctggtctcctgcagtaccctcaggctgactagagttgggaaact

SEQ ID NO: 794287 - DNA, 614 bp, Homo sapiens
tcaaattcttcttttaacatcaataattaatgttgcgggaagtcagggatcctgaatggagggactggctggagcttcggcagaggaacataaattgtgaagatttcatggacatttatcagttcccaaataatacttttataatttcttatgcctatctttacattaatctcttaatcctgttattttcataagctgagggtgtatgtcacctcaggaccactgtgacaattgtgctaactgtacaaattgattgtaaaacatgtgtgtttgaacaatatgaaatcagtgcaccttgaaaaagaacagaataacagcaacttttagggaacaagggaagtcaaccataaggtctgactgtggggttgggcaaaaagaaccatatttttcttcttgcrgagatcctataaatggacatgcaagtaggagagatatcgctaaattcttttcctagcaatgaatattaatattaataacctggaaaaggaatacattcctgggggaaggtctataaacggccgctctgggaatgtctgtcttgtgaagttgagataaggactgagatatgccctggtctcctgcagtaccctcaggctgactagagttgggaaact

SEQ ID NO: 794288 - DNA, 520 bp, Homo sapiens
tggtatctcattgtggttttgatttgcacttctctgatggccagtgatgatgagcattttttcatgtgttttttggctgcataaatgtcttctgttgagaagtgtctgttcaaatccttcgcacactttttgatgggttttttttttcttgtaaatttatttgagttcattgtagattcttgatattagccctttgtcagatgagtaggttgcaaaaattttctcccattytgtaggttgcctgttcactctgatggtggtttcctttgctgtgcagaagctcttgagtttaattagatcccatttgtcaattttgtcttttgttgccattgcttttggtgttttagacatgaagtccttgcccatgcctatgtcctgaatggtattgcctaggctttcttctagggtttttatggttttaggtctaacatgtaagtctttaatccaccttgaattaacttttgtataaggtgcaaggaagggatccagtttcagctttctacatatggctagccagttt

SEQ ID NO: 794289 - DNA, 595 bp, Homo sapiens
cccagatttcctgggatcccttttttatggattttgcgtgcatcctagctgctttcatgtgatttcatttcaaggaaatgccttcatttattttcctgaaaactgtttgcaggttcccagagcccacttttcctagcaaagaactggaaatgcccaggagtttaattccaagagtggggcagtcacccttaaccaatgactaagatgactggaagtaagaaaacatagctcctttgcttcagggtcaaataattgaggtatagcttacacttcagatggtccctgcaggattcagctacagctgtcctctaaggtactttgcctggattttggcttttgcccctcccttaycctactccttccactcccctatggggtttccccagaaacacttctgtaatagttctttccatacaaattcttgtcccagtaaaactcattataaaccagtagaagaaagggagacactaagggatgttttccctgtccctctgcctcagtgctgtccccagcaaagtctgcatctgctcctcggctccaatttccatcaggtagccttcactggggttattcaatgcaagtacactcaagtctt

SEQ ID NO: 794290 - DNA, 594 bp, Homo sapiens
tgaaatgatggagactctgcccctccagtgatccagggcagtcacagccccaacaaatacagccattcccagtggaatcagcaggggtgcctgggagctttggtggtggtgcctggaaaagcagcagcaggaatgggcagaagtggtggtaccattgggacagggcaataccatggcagatggtctggagcctaacagggaaagcaggtggacacwgctttctacccagtgtgtaaaaatctggggtagaattgtctaatacagagtgggagagacattttcagataactgtagcaaaagctaccttgaggttctaggttcagaatcaattaggccatcacatttctctctaaacattaattcctactacacagaaaatatagccatagaattgtgagctgatgtagaagatgtaagatcatagatcagtgttttaaagctgtctgggaacttactggctaagctaatcatcgaaacttttaagagttgctcagcagttactattgctgaacctaaaacacaaataataaagccccagatgtgagcatctctaagctattgggctttatatttcctaagtggaataccacaaag

SEQ ID NO: 794291 - DNA, 594 bp, Homo sapiens
tgaaatgatggagactctgcccctccagtgatccagggcagtcacagccccaacaaatacagccattcccagtggaatcagcaggggtgcctgggagctttggtggtggtgcctggaaaagcagcagcaggaatgggcagaagtggtggtaccattgggacagggcaataccatggcagatggtctggagcctaacagggaaagcaggtggacactgctttctacccagtgtgtaaaaatctggggtasaattgtctaatacagagtgggagagacattttcagataactgtagcaaaagctaccttgaggttctaggttcagaatcaattaggccatcacatttctctctaaacattaattcctactacacagaaaatatagccatagaattgtgagctgatgtagaagatgtaagatcatagatcagtgttttaaagctgtctgggaacttactggctaagctaatcatcgaaacttttaagagttgctcagcagttactattgctgaacctaaaacacaaataataaagccccagatgtgagcatctctaagctattgggctttatatttcctaagtggaataccacaaag

SEQ ID NO: 794292 - DNA, 625 bp, Homo sapiens
ataaatttgaaactcttccacacatatatggtagcagaaatcttgggcatggatggggagcctcttgcctgtccatccactgaattattgtatttaatgtcttttgatttcctctcttttctttttactactattttctaccctttgtttctttacaaaaaaatagatttcatttgccccttctcaattcctttccagcatcaagcataactcttactttttgattcattattatcttcatcaccctccttcttacacttacttttttcataattgtttctaatcatctttcttttgtaacaaaagctttattccttaacaccactcyaaatatagaatgattctaaattatggtcctgtagttttttaacttcttaacattatcatgtagaatcaatacatacacaaaaacagatagaataatataacaaattcccatatgcttcaacagggagctatattccttaaaataaaataaaatcaatgcatgaccactgcaatcatataccaatctcattcttgtctcacaacagaaaataagaatcagaacagatttttttgtgtgtagatatccacatttttatccttaaatcctttgccctgtactgtgcaccattctagcaaa

SEQ ID NO: 794293 - DNA, 601 bp, Homo sapiens
ttcagttttttatagtcatcggtttattttttaatctgtatactgtttaatacattgtcagcaaggattgatgaaaaggtcagtgacactttttctacaatgtatagtattatttcaaaaagaattaaagaaaatattttaaatgttaaragacattcctatttaattccttaagaaacattttccttgagattctgcaaccttggaaaaattcagttctcaaggtattccaaatatgcagcaaatgatatatgttttataattaatgtataacaaacattttattaaaatgcatagaaggttatatggaagactaagcataacgaatacaataatgaaaatggtagaaccttttagacaacaaatatgtttccgtttcagagagaacagctgtgtaaactactatagcaaccacagtctatgtaatcatataactgaggcatagtcttcaagatcaagtgcttggttatagtcagccatagcttcctcaatcagacctattttaccacgaacttttgctctaaaattatatactagagcatcattaggcttcaaagacagggctgcaaaagaaaaaaaatcaagatatatttaagttggc

SEQ ID NO: 794294 - DNA, 601 bp, Homo sapiens
ttcagttttttatagtcatcggtttattttttaatctgtatactgtttaatacattgtcagcaaggattgatgaaaaggtcagtgacactttttctacaatgtatagtattatttcaaaaagaattaaagaaaatattttaaatgttaagagacattcctatttaattccttaaraaacattttccttgagattctgcaaccttggaaaaattcagttctcaaggtattccaaatatgcagcaaatgatatatgttttataattaatgtataacaaacattttattaaaatgcatagaaggttatatggaagactaagcataacgaatacaataatgaaaatggtagaaccttttagacaacaaatatgtttccgtttcagagagaacagctgtgtaaactactatagcaaccacagtctatgtaatcatataactgaggcatagtcttcaagatcaagtgcttggttatagtcagccatagcttcctcaatcagacctattttaccacgaacttttgctctaaaattatatactagagcatcattaggcttcaaagacagggctgcaaaagaaaaaaaatcaagatatatttaagttggc

SEQ ID NO: 794295 - DNA, 643 bp, Homo sapiens
gtacagaggtgcattgtctgcagagaatgtaaaaagctaaacccaaccaaaagttgacctgctttttgttattaccatgtgtcagcaattctagacaatgtcaacgatataatactcctgttggctgggttaaaatgctcccactggccaggtgcagtggctcacgtctgtaatcccagcactttgggaggccaagacgggtggatcacctgaggtcaggagttcgagaccagcctagccaacatggggaaaccccatctctactaaaaatacaaaaattagctgggcatggtggcaggcacctgtaatcccagctactcaggaggctgaggcaggagaactgcttgaacctgggaggcagaagttgcactgagtggaggtcacaccaatgcactccagcctgggtgacagagcaagactccatctcaaaaaaaaaaaaaaaaatcctcccactgcctcttaccccaaatcccagatcccygtatagagctaaaaaatgttaaagcataaaatagaaaagaaggccacaacaacaggataaaatacaaattagaaaagtaacactttggtttttgtcattggttctgtttaggtgatggattacgtttattgatttgcatatgttgaaccagccttgcatccc

SEQ ID NO: 794296 - DNA, 639 bp, Homo sapiens
actatcatttactaaatattttcttttaagtcaacttactttttttacttaactatatttatttttaaaagcaaattaatttaaataccataagttgaaaaattatctcatgccataaataaaataataagctaaaatgataagcttggagctggatactttattctgcagaacacagcctgagtgctgcaccattgattacaaacaaagtttttaaagactagctctggccgggcacggtggctcacgcctgtaatcacarcactttgggaggctgaggtgggtggatcacgaggtcaggagttccagaccagcctggccaacatggtgacaccccgtctctactgaaaatacaaaaattagcaaagcgtggtggcaggcccctgtagtcccagctactcgggaggctaagacaggagaatcgcttgaaactggaaggcggaggttgcagtgagctgagatcatgccactgcactccagcctgggcaacaaaagcgaaactccatctcaaaaaaaaaaaaaaaaaaaaaaaaagactagctcttagctgagacattctccttgatgtgttcagaaggtttgagaaagaattcattttgaaactgaaaggcaattcagtttctcacaatgtgatacggt

SEQ ID NO: 794297 - DNA, 684 bp, Homo sapiens
cctacacactgacaggctagagggatccagcattatcatggaaaggagtaagataatacatacagtttgatcagtttttatccaagaaaagtcctgctcattatgactttgaaatttgaatatgcagattgagaggttgatctcacagaggttatttaaaaataaacaaattctaaaaatgcagaccacacacactataggaataaaaaaggacaagatttttggaagaaaaaaaggcatatttatggcaacaggtctccaactcccctcttctggtggtggagggggattctaaagtatgttttgcattgtcttccagagttccccagtagaactgagccctggttgcccacaatggtaaactgatcagtaatgggctcttyatttgtttcttcccttccctatcagatgtccctactccctcatcagtgcttccttggattgtctccgaagaaactgcttccacacaaatcctcatgtcagtgcctacttctaatgaaacccaacctaagacggtgtgtatacccatgagtccctcaggactgtaagaataccctatttctgtattttcctcagggaggcaatagtgaataagaagcagtgtaaagctcgatctgaaaacagaaaagaactctagtcctcctgaaaaagtacgcttataggtggaggtcagtctcatgcatg

SEQ ID NO: 794298 - DNA, 684 bp, Homo sapiens
cctacacactgacaggctagagggatccagcattatcatggaaaggagtaagataatacatacagtttgatcagtttttatccaagaaaagtcctgctcattatgactttgaaatttgaatatgcagattgagaggttgatctcacagaggttatttaaaaataaacaaattctaaaaatgcagaccacacacactataggaataaaaaaggacaagatttttggaagaaaaaaaggcatatttatggcaacaggtctccaactcccctcttctggtggtggagggggattctaaagtatgttttgcattgtcttccagagttccccagtagaactgagccctggttgcccacaatggtaaactgatcagtaatgggctctttatttgtttcttcccttccctatcagatgtccctactccctcatcagtgcttccttggattgtctccgaagaaactgcttccacacaaatcctcatgtcagtgcctacttctaakgaaacccaacctaagacggtgtgtatacccatgagtccctcaggactgtaagaataccctatttctgtattttcctcagggaggcaatagtgaataagaagcagtgtaaagctcgatctgaaaacagaaaagaactctagtcctcctgaaaaagtacgcttataggtggaggtcagtctcatgcatg

SEQ ID NO: 794299 - DNA, 543 bp, Homo sapiens
gagccaactgaaagagctcccaataaaactctaagcaacagaacaggaacaaagctggaacaattcaagcaaaaatttaatattaggttataatccaaagtacaaaaaaacctcatgagtgcccacaaatctgtatgaatataagccrctgaataaataaataacctgggagaatggacaaatttcccatgcagaagaatttaaaataacttatgccgatactcaagaaggtggagcataactccctactctttaaatgtggccttgcataatgacttccttccaaagagcacattacaaatatgaaaagggatgggggagagaaactttataatgaagaaacctggaaaacactacctaaccaggtgatgaaggttaggtgatgaaccaggttatcaacgttgataaggcctattgacagtatgtacccttgatatgatgtgatatgatgtgatgactgtcacactccagtggtcttcctcccaaaatcccattgatagaagacattaaactaaactaaatttggcctgagaatgcctccat

SEQ ID NO: 794300 - DNA, 585 bp, Homo sapiens
atgaatagagatttcagaatttataatattccaacatgagaatatatatttaagcacaaattctgaaataattagctaatctcccttttatcagacagaaaagaatagccacttgtttgagagtagcatttggctcccggcaaggtaaaattttttatcattctttatatttaaattaaatagagaaaaagaaaaaaaaagaaaaattatactatttgtcttggttatctgctgccttgaaatttatgagaacagaattctgctgcagaaacagagtaagggtgagttgtaaattcaggtgttcagcacttttctcaaatatacctgtttctcaaataaacctcctattatctaatacttagtactattttaaaggkgctaaaatttttaattctactattgttttaaaaataaaaataccaattgattatgaagattcaccacctggatttcaatttgtatataatacaaatgactgatttcatctttatcctaaaccaaaggtaaagggaggaagagtgaaggaatcacaatcagtcaaaaagggcaggctgagtctcagagacaaacttcattgacttcaca

SEQ ID NO: 794301 - DNA, 558 bp, Homo sapiens
cttctaattctagatctcttgctatttctaccacatttgcaattaccttctccgtggaaagccttcttcatgggaagtcttctccatgtaagtcttgaactcttcaaagtaatccatgaggactggaatcagcttcttccaaactcctgttaatgttgaggttttgatctcctcccatgaatcataaatgttcttagtggcatctaaaatggcgaattatttcctgcaagttttaagtttactttgcccaaatccatcagagaaatcattgtccctatggcagctatagccttataaaatttcttaaataataagattgaaaatgaaaattactccttgctccatgggctgcagaatggatgttaaatcagcacacacgaaarcagcattaattggattgcacatctctggcagagctcttgcataactaggttcattgccaatgagcagtaatgttttcaaatgaatcttttttttctgagcagcaattctcagcagtggtcttcaaatatccagtaaaccatgctgtagacaaatgtgctgtcatgcaagctttgc

SEQ ID NO: 794302 - DNA, 553 bp, Homo sapiens
caaataaaagacatgcaacttttccttttacttgaacacttagaggctattgcaaagctattaattggcctaaatccaatattgttgtatctcaaagaatagagaggcctgaagagaaggagagagatgagggaagagtaggttggtggagcmgttagaaacaacatttatcaattgtctgccattctacatgggcacggcttgtggtgcccaaaaataattaaaatagtaacataaaagattactggtcacagatcatataacatgtgtaataataataataaagtttgaaataaatattttgggaattaccaaaatgtgacacagagacatagagtgagcacatgctgttggaaaaatggtgccaatagacttgctggatccagggttgtcacaaaccctcagtttataaaacattaaataactgcaaaggacaataaagtgaaacacaataaaagaggtatacctgtatattaaaaagaaaaattattttaaataaatttatatactttcatccatgtataatttgctcctgatttgtgtgtgtgtgtgt

SEQ ID NO: 794303 - DNA, 553 bp, Homo sapiens
caaataaaagacatgcaacttttccttttacttgaacacttagaggctattgcaaagctattaattggcctaaatccaatattgttgtatctcaaagaatagagaggcctgaagagaaggagagagatgagggaagagtaggttggtggagcagttagaaacaacatttatcaattgtctgccattctacatgggcacggcttgtggtgcccaaaaataatkaaaatagtaacataaaagattactggtcacagatcatataacatgtgtaataataataataaagtttgaaataaatattttgggaattaccaaaatgtgacacagagacatagagtgagcacatgctgttggaaaaatggtgccaatagacttgctggatccagggttgtcacaaaccctcagtttataaaacattaaataactgcaaaggacaataaagtgaaacacaataaaagaggtatacctgtatattaaaaagaaaaattattttaaataaatttatatactttcatccatgtataatttgctcctgatttgtgtgtgtgtgtgt

SEQ ID NO: 794304 - DNA, 553 bp, Homo sapiens
caaataaaagacatgcaacttttccttttacttgaacacttagaggctattgcaaagctattaattggcctaaatccaatattgttgtatctcaaagaatagagaggcctgaagagaaggagagagatgagggaagagtaggttggtggagcagttagaaacaacatttatcaattgtctgccattctacatgggcacggcttgtggtgcccaaaaataattaaaatagtaacataaaagattactggtcacagatcatataacatgtgtaataataataataaagtttgaaataaatattttgggaattaccaaaatgtgacacagagacataragtgagcacatgctgttggaaaaatggtgccaatagacttgctggatccagggttgtcacaaaccctcagtttataaaacattaaataactgcaaaggacaataaagtgaaacacaataaaagaggtatacctgtatattaaaaagaaaaattattttaaataaatttatatactttcatccatgtataatttgctcctgatttgtgtgtgtgtgtgt

SEQ ID NO: 794305 - DNA, 681 bp, Homo sapiens
aaaaaaattaggaaatttgtagggatccacaaaggactccagatagcaaaaacaatcttaggtaaaaagaacaaagctggtggcatcacactacctgtcttcaaaatatactgcaaagctatagttattataatagcatggtattggcataacagatgcaaagacaagtgaaacagaatgaagagcccaaaaataattccatgcatttagggtcaactattttttgacaaaaattccaagaacagacaattgggagaggacagtttttttaataaaataataataattataaaagaaaggaaaaatacatataatgttaacataaatcaaaagaaaacttcaagggctattttaattacatgcaaagtatgtttcagaacaaaggacattaccacagataaagaaggccatattttacagagaaaggggtcaattaaccatcatgatataacaactgtgtacctccccartaataaagatttaaaatatatgaaacaaaaattgatagaactacaaggagaaaaggcacacacaaatttataattaaatactttaataccctctctcaataactgataaaccaatttaatataattgatacagaacactttgaccaaaatgtcagaaaactccttcttttcaaagtacacacacattttagataatacacatagaaaacat

SEQ ID NO: 794306 - DNA, 525 bp, Homo sapiens
tatgtgaaaataaattaaatgtctccctagacatattaaactctggagtgaacactgtttgtagttaaactctctcaccatgacatatgtaaaagcatccccagccatctgacatatctttcctgtcttctctgcctgttgtctgtcttcttggacacagttctcttgactactgaagttgtgacttcatttttcatcttctattctgttctttgtctgcttcatttaataacttacttgctatacttggttagtcttttgtgtggaaaataatgtggagrgtagtgttttgcaatgttttatactgatatgacatttatagacaacactagtggtttatatgtgaaaggactgtaataattgcatagttgtttttgtttttgttattgttttgagcataaactttgattttgaactaatcaagtttaaatctcaactctaccacttaatcaaaccagctgactagtaagtttcaggaatagcagagtcagtagacagattatctgagttccactcagaaattta

SEQ ID NO: 794307 - DNA, 525 bp, Homo sapiens
tatgtgaaaataaattaaatgtctccctagacatattaaactctggagtgaacactgtttgtagttaaactctctcaccatgacatatgtaaaagcatccccagccatctgacatatctttcctgtcttctctgcctgttgtctgtcttcttggacacagttctcttgactactgaagttgtgacttcatttttcatcttctattctgttctttgtctgcttcatttaataacttacttgctatacttggttagtcttttgtgtggaaaataatgtggagagtagtgttttgcaatgttttatactgatatgacatttatagacaacactagtggtttatatgtgaaaggactgtaataattgcatagttgtwtttgtttttgttattgttttgagcataaactttgattttgaactaatcaagtttaaatctcaactctaccacttaatcaaaccagctgactagtaagtttcaggaatagcagagtcagtagacagattatctgagttccactcagaaattta

SEQ ID NO: 794308 - DNA, 540 bp, Homo sapiens
tacaagctctgaaagcacagtgattgagctttcccactcccacctccttcaagatgggagatgttggttaactttttaacggcttccaacctgtttcctttctgtaaaattatagtaataatatccatctgaaagagcttctgcaaggattaaatgagatactccatgtaagttgctggacatagtaaccaatctataataagcattcaatgttagcaattctttctggtaattagcctcactatttgtagcatttgtttcaaattcatgacaaaattaaataccatctgcctagaaggaaataatatgatctttatagataaaagccatgcattttgcttagaaacaatgcatattttttaagaaatgatggtctaatcacktttgtgttttatagagctcaaaatgattagataacttgttatgataaaaatgcttgctgaccctgcctctcaagattaaggtgtaaagtctatatcagcagctacataacccatattgaagtaaaactactttcgacatgaattaattgacttcata

SEQ ID NO: 794309 - DNA, 561 bp, Homo sapiens
gggagctgagggggctggggattggaaaacacagttgtatagctaatgatctttactgtaatccttgcctcattcccctttccagcataaaataacatattgtttaatgaacataagaggatgagattttaacatggaattgaattatactgataacatcaactagaaaattttatatcctacgttttaaaacaaatggaaaatatactagtcgtcattgaagattgcagacaagtaataaaggtagataattattcccctgagagaamatttctagctatcagaagcagcctttggaagatagttggttcaagtcttattgtgaaatgaaatacaaacaaaatagcaataaatagtttattttggaatttttttactgctagcaataggatcttatgtttttattttttgtcaaattaaaatttgaacaatttccttttggagtacatactctctaaatataatgttacagggattgtaatttaaaaagaaaattgatgattattttagaacaccgatggaaagcctttacctactagactaattcctttgtagttcgag

SEQ ID NO: 794310 - DNA, 496 bp, Homo sapiens
tggatatgtgggaaaatttattctaaaaaatcagttctgagaaatattatagtgggtctactgattagaaagataaaatataaattctcaaggcctgtgctggggggttgagggcagaggagaagggacaagaagaaaactgaaaagaattagactgatgtcagactttccaaaaaaaaaaagaaaaaaatatacaaagcaagccagaaakgtagcagagttttattttttaaattttaataaaacaaatgtaagtgcagtgaggctaccaagattcatcatgaatcaatacaaacattggctgttattttcaacagatctccaaagaaagagcagcaaatgtggagcaaactcaaaacgaccctgagctccagtcatccatgtaaatggctacacaagcaacatgttagcacctcttctccccactaccccatgttgagctgagtccgctcagagacgtaagggggtaaggagaggataaagaggaatgttttcc

SEQ ID NO: 794311 - DNA, 621 bp, Homo sapiens
ctgactaaatttaagtgctcatttttggtctattcagggattaaatttcttcctgtttcagtcttaggagggtgtatgtgtcaggaatttatccatttcttctagatttttgagtttatatgcataaaggtgttcacagtagtctctgatgaaataagggacggatggaataaatttttacttctatgggtcagtagtaatatcccccttgtttcagattatgtttatttgaatcttctctcttttcttctttattagtctagctagtggtctatctattttattatttttttttttcaaaaasagctcctggatccgttcatcttttgaatggtgttttgtgcctcagtctccttcagttcaggactgatttgggttatttcttttcttctgctagctttgctcttaggtctctagttctattagttgtgaagttaggttgttagcttgagatctttctaactatttgatgtgggcatttagtgccatacatttccttcttaacactgccctagctgtgttagattctggtatgttgtatccttgttcatatcagcttcaaagaacttcttcatttctgtagaataggcctaatctttatcattcttcaacattgtattg

SEQ ID NO: 794312 - DNA, 621 bp, Homo sapiens
ctgactaaatttaagtgctcatttttggtctattcagggattaaatttcttcctgtttcagtcttaggagggtgtatgtgtcaggaatttatccatttcttctagatttttgagtttatatgcataaaggtgttcacagtagtctctgatgaaataagggacggatggaataaatttttacttctatgggtcagtagtaatatcccccttgtttcagattatgtttatttgaatcttctctcttttcttctttattagtctagctagtggtctatctattttattatttttttttttcaaaaagagctcctggatccgttcatcttttgaatggtgttttgtgcctcagtctccttcagttcaggactgatttgggttatttcttttcttctgctagctttgctcttargtctctagttctattagttgtgaagttaggttgttagcttgagatctttctaactatttgatgtgggcatttagtgccatacatttccttcttaacactgccctagctgtgttagattctggtatgttgtatccttgttcatatcagcttcaaagaacttcttcatttctgtagaataggcctaatctttatcattcttcaacattgtattg

SEQ ID NO: 794313 - DNA, 610 bp, Homo sapiens
ttatcaatatgagatcttaaaatcaaagttaaagtgaaaaacaaaattagaatattatctagtttttctcccacactttacagatgatataaccaaactacaaagaaaatatatgacttgtaaatatttcgatgagatacttcggaagagaagttttttggtgatgtgctattattttatatttcagtttattgggcaagttgttacaaaataaactagtttgctccatcattttccttgtactatatcatacataattactgacccttatgcaaatgtctacaaaaatcgtgtactgaaaaatgttgattttattttattgctttttatcaacacaaataggtactttatttctataaagaattttctaattttaagcttctaaatrctttctctgcttttctctgcttaaatgtatttctctttctaaatgttacttcaagaattgtggataagagtttattcaggattatttggctatattataaaatacatttgttttaaatatgcccagaaactgaaactagcctgagaaggaagatactgagtcagatggagccatttatatatggagatccaggatttataagatccataccattgaatttga

SEQ ID NO: 794314 - DNA, 610 bp, Homo sapiens
ttatcaatatgagatcttaaaatcaaagttaaagtgaaaaacaaaattagaatattatctagtttttctcccacactttacagatgatataaccaaactacaaagaaaatatatgacttgtaaatatttcgatgagatacttcggaagagaagttttttggtgatgtgctattattttatatttcagtttattgggcaagttgttacaaaataaactagtttgctccatcattttccttgtactatatcatacataattactgacccttatgcaaatgtctacaaaaatcgtgtactgaaaaatgttgattttattttattgctttttatcaacacaaataggtactttatttctataaagaattttctaattttaagcttctaaatgctttctctgcttttctctgcttaaatrtatttctctttctaaatgttacttcaagaattgtggataagagtttattcaggattatttggctatattataaaatacatttgttttaaatatgcccagaaactgaaactagcctgagaaggaagatactgagtcagatggagccatttatatatggagatccaggatttataagatccataccattgaatttga

SEQ ID NO: 794315 - DNA, 487 bp, Homo sapiens
tatttgtgtttggaaattatcttcctcttctattgcaaaaaaaaaattattcctgctagatattttccccatttcttcatttttctataggcaccagaagtctgttgagataaggctcatcaggttatctttgcaacttttttcactttaagctagtatgttaacattatcaaaatgtaggatttgcttttattagtgaatattkcatcactatattccatctaagcaaagatgaaagggatgactctgtgtgaatacttgtaggatgcagtggaagaaatattctgtgatcagtaaaaggtcttccattgataaaatatatattaagactttctatcatgattatgaacaactgatatgatcatcttttattttttaatattaatattctggaaagtctacatctcctgaggtgctaggggagtagtatggaatttttgttcattagaacaagcgtggttagtttgaaattagtttgctctttggg

SEQ ID NO: 794316 - DNA, 595 bp, Homo sapiens
gagtctaagtctccttttagatcttgctttataaatctaggttctcctgtgttgagtgctgtatatgtagggtagttaggtcttctcattgaattgaaccttttaccattatgtaatggccttctgtgtcttttttgatcttagttggtttaaagtctgttttgtctgaaattagggttgcaacccctgttttttttttctgttttcttcatttgcttggtagattttcctccatccctttattttgagtgtattggtgtcactgcatgtaagatgggtcttttgatgactgcatatcattgggtctttcgttttgttcagattgccgctctttgctgtttaaatagagcatttagctcatttacattcaaggttagtgttgatatgtgtggwtttaatcctgtgattgcatttttagctggttattatgcaagcttgtttgcgtagttgcttcatagtatcactggtctgtgtatttaactgttttttctattggctagttagtcgtttctttccatatttagtgctcatttcaagatcttttgtaaaatgggtctggttgtaatgagttccctaagaatttgcttatctgaaa

SEQ ID NO: 794317 - DNA, 607 bp, Homo sapiens
tgatgagattgagagcttaaaaggtgagaagaacctactggggtatggagggtgggcagagaagacagtgggggagaaataatgctcaggcattgtagatttgaaaactatgcagatgacgtgtactgtaaagaatgtttttagaaatttctatgtacattctgtacacagatctgggtccccatccttggatgtaaaagacaaataactaatcacagtcaggtgagatgtttcartagaacttttgactaatctgttaatagatcttttgactaatctacaacaatctgttgtaaggttgtaagtagcatatcttgaaggaatccctcatcttgagtcattgcctgactcgaaaaaaatgcccagttgttcctctccctctcatcccattcatttaatataattaagccacttaccatttaaaatggtagaccgaaggttaattatcttgaaatatgtatcaagagaatgaactttaatatttttaggccagtagttaggctccaggtgggctggaaatagaaaagaatacctgtcatctgggtttagaaagtattgttaccaatgggcatgtgtgacctgatcataaatatgtttagtctagaat

SEQ ID NO: 794318 - DNA, 600 bp, Homo sapiens
atatatatttgcattactcagtagtcctggaacaaagcaagactttttgggttacacttgagatggctcacatctttactttaaaaagagcctattttcttcattttctttcacaagagatttctagaaggctctcaggggcaggaaccgagttgtctctgaatgcagttggacaaatagtatggaaagaattcatcgatggctgagttttataaaggctgttttgggtaaacagccactatgggaagataaggttgtgcaaacagctcaagggagttaagactagaaacaattgataaagttaatttcagaaaatgtcaaggacagagaggaaagatggacaagggccacgtaaatgaagacccagaagaaaccactgcaatctcctggatggtttcagttcagttctcttctatagtcatgttcaggtcaatggraaataacttctccaaaggcccacaagaaggaagaggctgtggaagcactcacacttttggtttcacagagctaagggatcagaaacaccacgacagagctgaaagtcaatttctcctttatgcctgaaagcataaagacaacattgtaggaaaaagctgagtg

SEQ ID NO: 794319 - DNA, 631 bp, Homo sapiens
gaagtattgtagcctttataacaaactggcaaggagacattatcaaagtgaactgttaaaattacccaataaatagacctacaaggtcctcttgccccagcactttgcccatctgctaggtctccttcaggcacctgcctcatcctcttggctgtatcaggggtcctgagcctccttcarctgaaggggacctcctaccaccaattcagcagtagcagttctgaagcctgtcacaatctcagactgggcacggtaatttcaacaaggagcaagtaagagctcccagacctgggtaggaacagggctttgaatccagttaccttccagctgctagtgccctgaatttactgttagagctttctctaaggttaactctctgctcctttgcccatgctgaagcagtagtatacggtagggtgacgatgaccttccttaaaagatttctcagtgctcttggctatttatagttactgttactgccatctgtgaatccagcttctaaaaggtaaactggttcgtaccacaatgtcttcgtggtgttagtaaatatgagaaggaaaaatgcatcctggcatatttgcatgggaagccttaacaagaggccccttttcatctagtccagcagtctttc

SEQ ID NO: 794320 - DNA, 424 bp, Homo sapiens
ggcggcaggtcacaggcagaactgtgccatgtgtggaagtgcagaggcttcctcgtggacaattccccagccagaacggtcaaggggctggtccttctttcacgttgtggtctgcctcgtccacaggtctgggctagcagcactcagaaggttragagcacacaaagtgagtggggaatgtctctcaggagtcactgcttgcctccacctctgctgttcctgggagtaggtgtgtcatttcagccagggtggtccacctcctgcccgctcagggcaccaggaggaaacagctttcctttcttccaaagggtgaggtggagcattagtgacacatcctgctcgtcatttctttctggaaagcaaggggaaaaggatggttaggagaaactataagcagagcaacgatttggtgaaggatcctgaa

SEQ ID NO: 794321 - DNA, 512 bp, Homo sapiens
aatgggattactttcttggtttctttttcaggttgttcactgttggcatacaaaaatgatactgatttttctatgttgattttgtattctgcaactttactgaatttcttcatcaattctaatagttttttggtggagtcattaggttttctaaatataagatcatagcatctgcacacaaggctagtttgacttcattkttttctgatttagatgccctttatttctttcccttgtctaattgttctggctaggacttccagtactctgttgagtaaaagtgatgaaagtaggcattcttgtcttgttccaaatcttagataaaaactttagtttttcctagttcgatatgattctagctatgggtatgttatatatggcttttatcatgttgaggtatgttccttctatactcaggttttgagagtttttatcatgaatcaatgttgaatttcattgaacgcttttctggcatcagttgaaatgatcatttggtttttgtccttcattct

SEQ ID NO: 794322 - DNA, 661 bp, Homo sapiens
aactggccattacttgaaatgttaaagacatatgtatggctaggttaagtcttcctttcttcactttagttcttttttctgtcttcttgatcaatccagcccaggatctttcctgctttcctagtggtcatcagagccagtggtcatcagagccagataccaaacttttttttttcggtccatgactattctcccttttaacctgcttccctgttgggaaggttgaatgtttggtgagagatgcagggattcaacttagcaggctcttaggacaaaaaytgtgttaaggagcatgagccatatacagtaccatgggagggtctccaacagctaaaggctcatcgcacaattgcaagctgttggctgtctctgagcagacaaaagccagcagacttctggaagctacacattacaaccctaaattttcctggcttggcaggctgcagttcagcactttgcctctctcactttcctgggaggcccacggggccaagtgaaccctgatagtgtccacacaacaccaaagggcctgctggaaacatgaaaatgaaggcagtccccatttggtgttttgtgatagcaattaccaaaaacaagtttcatagcaatttttgttaacttagtggtctcattagactttctgtatatggacttgaaattt

SEQ ID NO: 794323 - DNA, 630 bp, Homo sapiens
atgtgggcttggtttcctcagagttttcctcacttaactaagaataatttatttgacctccacttggggactcaatattttaaatatttgaaagagtctgtttcccacccccctgcccccagaactcaggttgactgctaaaaaattgccattttgcagattaaaaaaaaagtagccacccatcagcaattgcatatagtttcagcctactagcaactagagatggggatgcckaggtgaaggtgacaaattgtatataccttttgagtaatttgccacaacagtccctggtatctctcttagtaaattcagattatacgtgacttttaaaaggtatcacagtatttgattatatgtaactatttatagaaatacttggtggtattacatggtcagtatttctgcgtcacagtggtttctgcatccctgacatgggttccacactcacccagtctctggtaggtggtacatgcactgcttgcttttctactcagctctttaagtctcaatcatgacttccaaattagctcatgtagtgatcctggtttgagattctccatgaagagggaatgaaagacctaatgtttattgtgcacacctgctctgtattagactctgtgtcaaatgctt

SEQ ID NO: 794324 - DNA, 479 bp, Homo sapiens
aataaaaagtgggggagaaggccaggcgcagtggctcaaacctgtaatctcggcactttgagaggccgaggtgggcggatcacaaggtaaggagttcgagaccagcctggccaacaaggtgaaaccccatctctactaaaaacataaaaattagccagccgtggtggcgggcacctgtaatcccagctactcaggaggctgagccagaaaaatcccttgaacccaagagtaggaggttgcagtgatccgagatcgcaccactgcactccagcctgggcgaaagagcaaaactccatctcaaaataaataaataaataaataaaakttgggggagaaataagataacaaaagagttcaagtaaacagggagagataagtttccaattaaagagcttgttcactgatttttttaatgaatggtggctggtatgacaatgttagatttttcatcagctctacttaagtatattatgtaaaag

SEQ ID NO: 794325 - DNA, 530 bp, Homo sapiens
acaatcctaggtaagtagataaaagtgcagccccagaaagaatgaagaggaatcagagacaggaaaataaaaccctcagtttgtgtaactggcctggttgataaagaattggattacagtgggatgccatggctcatgcctgtcagctttgggaggccaaggcaggggaattgttaaaggccaggcgttagagaccagcytgggcaacacagtgagaaccccatccctaccaaaaaaaaaaaaaaaaaaaaaaaaggattggattaatcatcttttctaatctctgaattttgtttgtcatttctcatgccttagtgtagtggtctttgatataaaaataaaatcatgaaacagcaagtataattctaaaatgatctcaatatgattattttcatgagtggcttattccaaacaagcatttgatacttttagagaaaggtcaattaaatgaactaactggcggttcctttttatgaactaaacatttattttgtactgtatttgggtttgggtttgacattctgctaaca

SEQ ID NO: 794326 - DNA, 617 bp, Homo sapiens
aattattttgaagtctttgtcaggcagtttatgtatattcattactttaggaccagtcactgtcagtattttttctgtttagcaatgtcctgtttccctgatttttcttgatctttgtggttgcacattgatgtttgtacatttcaagaagtagatacttattccagttatagactggctttgccttggaatgctctgtggcagatgtgatgtgagggtgtgtcagaagctcaagaccactaaggcctgcctactgctaagggctgtgcaaagccaggggctcctgtagtcaasttgccagtggtgcaggccagagatcaagtttgtcatacaggcttgaagcctgggactgtgtggtgccatctgctgctggaataagtgtagagacagtttttcagtacatccttggaatatgggggaatgggggggtctgcccagtgctgagttttactatggtttgcttattgttgggatccaaagcaagatcttatactcactttcctctctttcccccaagcagacagtgtctctcttcatggtgtgcagactgggcttggggtagggaaaatctgggtaacataaaactgaccaacctaccctctttaatgtgtattttc

SEQ ID NO: 794327 - DNA, 617 bp, Homo sapiens
aattattttgaagtctttgtcaggcagtttatgtatattcattactttaggaccagtcactgtcagtattttttctgtttagcaatgtcctgtttccctgatttttcttgatctttgtggttgcacattgatgtttgtacatttcaagaagtagatacttattccagttatagactggctttgccttggaatgctctgtggcagatgtgatgtgagggtgtgtcagaagctcaagaccactaaggcctgcctactgctaagggctgtgcaaagccaggggctcctgtagtcaagytgccagtggtgcaggccagagatcaagtttgtcatacaggcttgaagcctgggactgtgtggtgccatctgctgctggaataagtgtagagacagtttttcagtacatccttggaatatgggggaatgggggggtctgcccagtgctgagttttactatggtttgcttattgttgggatccaaagcaagatcttatactcactttcctctctttcccccaagcagacagtgtctctcttcatggtgtgcagactgggcttggggtagggaaaatctgggtaacataaaactgaccaacctaccctctttaatgtgtattttc

SEQ ID NO: 794328 - DNA, 593 bp, Homo sapiens
agcaagtctaccagtgccacttttccaacagcatgtgctcacagataattcatgtatctgtgtcacatattggtaattctcatgatacttcaaactttctcatttttgtatttgttatggtgatctgtgatcaattatctataatgttgctattgtgatcgttttagggagtcattaattgtgcccatataacatggcaaacataatcaattaatgtcatgtgtgttctggytgctccaccaaacagccattccccaatctctcttcctctgctgggccactctattctctgagacaacaatattgaaatcaggccaaataataattctaagatagcctctaagaattcaagtgaaagaaaatgtctcacatctctcactttaaatcaaaacctagaaatgattaatcttagtgaggaaggaatgtagaaagccaaaaaaggcggaaaactgggcctcttgtgccaatcagccaactggtgaatggaaagaaaaagttcttgaaagaaaatcaatatgctattacaatgaacatatggataataagaaagcaaaaaaaaaaaaaaacctttttgctgacatgaagaaagtttt

SEQ ID NO: 794329 - DNA, 618 bp, Homo sapiens
tgttatttataatgacttacaaaaacgtttcacatttctaccagctttaaattcagttgaccatcagaacttcacttcctttctgaggttgtcctcactggctctaatgggaatgtgattgccattgcattgtgggagctcactacatccccaggtgcataacttacttatggaattctctgtttagagactgagcatttcattgattagactgtgaactacttatgagtagtaacagcatttccttaatctttgcaattcttagcatctaacgtacttcttgrtataaagcaggtttcaataaaagtttattgaatgagtaaatgaatgaattcatctaatatgactctcaaaattgatttttaaaattattcctccattgtgatgatgatatggtcatctgtactcatgccttttaatattgagaaagaaaaaagtgaaatcatagcacatgacttagtaaatacgaatttatgctatataactgagatttgcctttaaggttcatcagctctcacagatccaatatatggtcacatttagtgtacgaaatgtcaatttgatcctggaaattatttctgttgctgccatataattgattgttataaaattttctgg

SEQ ID NO: 794330 - DNA, 587 bp, Homo sapiens
ttcattagtagaagtgctgggttaaaaaagaagctgaaaccaacagcaaaattcatattgatgtgaaatatggatttgatataccagattcttaattacataaaatgacagtgtgctgaaatatttatatggtgaaaatsattagatacaatgtctaataggtaagataagtggtgcagtataacctttacttttagtcttgtttacagtaagataatttgttttaacacagaagatatataaaagaagtcagaaagactaagataatttctgtcactaggggcagaaagttatcaggaacatggcagagataaatctaggaatgcaaaaagaaaggttacgatggaaatggaaacaataagctttgagaagttcaggggcattttgaagacagtattaccagagctgaagagtaaatcaataaaataagtttaccattcatagactatggctgaaataattacccaatgttatgcttttgtaagaaagatgataagtccagagggaagaattgagataaaagaatcaataatgagcaaattaattgttacttacatggagtaaattaaaataggcactaaatataa

SEQ ID NO: 794331 - DNA, 587 bp, Homo sapiens
ttcattagtagaagtgctgggttaaaaaagaagctgaaaccaacagcaaaattcatattgatgtgaaatatggatttgatataccagattcttaattacataaaatgacagtgtgctgaaatatttatatggtgaaaatcattagatacaatgtctaataggtaagataagtggtgcagyataacctttacttttagtcttgtttacagtaagataatttgttttaacacagaagatatataaaagaagtcagaaagactaagataatttctgtcactaggggcagaaagttatcaggaacatggcagagataaatctaggaatgcaaaaagaaaggttacgatggaaatggaaacaataagctttgagaagttcaggggcattttgaagacagtattaccagagctgaagagtaaatcaataaaataagtttaccattcatagactatggctgaaataattacccaatgttatgcttttgtaagaaagatgataagtccagagggaagaattgagataaaagaatcaataatgagcaaattaattgttacttacatggagtaaattaaaataggcactaaatataa

SEQ ID NO: 794332 - DNA, 643 bp, Homo sapiens
catcattctttggcctatgagcacgttcagtatactagaaatcagaatagccatactatcatccaggttacatatacaattcttcttcaaaaggataacttgggaaaatttgtcacgtgacttgccaaaatctacacaaaacgtgtgtttaggatagcataattttcatttctcttattggaaccactagccaaagaataaaagtttgcttgctgtggatagcactttaaaaacctaggagagtgctaaatattcaatattttttaaaattgtagtagtactagtagtagtagtggtggtagcaggggtaagagtggtagcagcggtgatagyagcagtgcttgtactcatggcttacatttattgaatgttttgtcacacaaactttctacattgttctaggtactccatcttaattattttgcttaatcatttctacaaatctataattcatgttctattattttgctattttaaaaatgagaaaaattaggtaaggagagttaaatttgatccataacatataatatttggagtagactgttcttgaaggcaggaattctctccctagtgcctacttttgtgcttgttctgctgcttccttttatgctaaatcgtgtaattgttttttcaaattatgtta

SEQ ID NO: 794333 - DNA, 571 bp, Homo sapiens
cttagtcagggagatgtttaagtaaagagaaattggtagataaatagttatataatttacatatctacattacttattttgtaatccaggaggtcataaggacagtcttaaataaattacttagtatttccagggtccgtatgattgttaccaattcatagacattctttgtaccttcttactttttcctcttgagctaactcaaatttataaataaacgctacaaaccaaatacctggaaaatggagaaagaataattacatgatgattagtttgaggggcattaatytttagtcttagttgtggttgtgctaattactcttgttttattatactttaagttttagggtacatgtgcacaacgtgcaggtttgttacatatgtatacatgtgccacgatggtgtgctgcacccattaactcgtcatttaacattaggtatatctcctaatgctatccctccccgctcccccctttactgacctctctgctctgccattcaccccaccttccatcggtgtgctggaaaacaccatttagtgaatattaaaggtgcactgatactaacttgt

SEQ ID NO: 794334 - DNA, 639 bp, Homo sapiens
gactccttctcaaaaaaaaaaaaaaaaaaagttagcaataaactccaggaaacacataatgctattttaggctgtatggtgttattggacttccggaagacattgtttggatatttcgaataatataggccgttttctgcctgcttcctcacaagtgaggagacttgtggtctggttcttggacttccctagcagcatggcccccaaatgcccgtctccactcccacctcaaaagaagaaatcaagactacctcctgctctgagactggaggagacatcagtctctgtaggcttgccgaagaagggagaaaaagaacagcaagaagcaattgaacatattgatgaagtacaaaaagaaatagacttaatgaacaagctagtgaggagattttgaaagcagaacagaaataatacaaactcctgcaaccattttttcagaagacgtcagaattgattgccaagatcccaaattttcgggcaacatttgtcaaccatctccacstgtctgcactgcttggggaggaggaggaagaggcactgcattatttgatcagagttgaaatgacagaatttgaaaatattaaatcaggttatagaataggtttttattctgatgaaaatccttactttgaaaacaaa

SEQ ID NO: 794335 - DNA, 581 bp, Homo sapiens
aagtcttaattttggttacagaattaaatattaatattaacaatcaaggcaatgtaaaagtaaagtacagttgactgaagctgggacacagacgaaaagagagtgaatgaaaagaaggatactaatattcttattttacaaaataggaactcagaatacccagtgcctatctgaaaaagatactaaaatgattagcatagtattaagttagaaaggtaaacaagagaactgaaatatagctatattaggaagaggggagggaggtgragttgagctaaaccttaatatgttgtaaagtcaatagacctttgatggattagtgagtacaggacacctttcctagtagaggacaccattagagggaattcgtttgagggaaaacagcctgcaaattatttatttatttatttgagatggagtcttcctctgtcacccaagctggagtgcagtggcacgatctcagctcactgcaacctctgcctcccaggttcaaggaattctcctgcctcagctcccaagtagctgggattacaggcgcccaccaccatgcccaggtaatttttgtatttttagtagagaca

SEQ ID NO: 794336 - DNA, 618 bp, Homo sapiens
aaagaatatgggagaagaaatttataagtcaaaaagttataaataagaaaattaagatataaatatgggaagagaaaacctaatatgagcttgtggggttggatttgaattgaggtattggtataaacgtatggttttcaatatagttacataaagaaaatacatgtgagaacttacatgttacataaagaaaatacatgtgctgcacttaggccctcgaatcgagttctcctgcaggttgctgcagatttcggtgtatcctggggtgggagcctccagctttgcctgtggctgctgtcctttcagagctaacagatacctacttacagatagtattgtgaaattaaaagaatttcagcacaagaaggtggctgttgcatgtaatctttcctaaagaaacctattttaggaatttggaagagaaactgacaagctcatcttgaaggkggagttgataaccttactttatttttgtgggtcccaggaccatgtggagctggctacaaatgtcatttacaggtaccatgcagggaacagaaatatcactttgggggagtataggtttggaccacttttcatgagtctgttatgggttggatcttgaggggctcatgaaag

SEQ ID NO: 794337 - DNA, 601 bp, Homo sapiens
ttactttatttttgtgggtcccaggaccatgtggagctggctacaaatgtcatttacaggtaccatgcagggaacagaaatatcactttgggggagtataggtttggaccacttttcatgagtctgttatgggttggatcttgaggggctcatgaaagaccagcatttatgagattccttctcagattccacatcattcaatattttgatggatatgttatttatcaaaggcaaatataaaagtgctttggaagtattgatagagatgaaaaatcaagctgtgaaattcaccaaatatcctatgttcttagttttgcagtttgcaacaaactgaagagcgctgagtctttcaaaatctgttctgcattaacagaagaagccccactcaaaggagaggttccctccaggagagcatcccgyttctttgtggcgttagctctgaatcagaaccaagtggcaaaagctatgtccatttttttctcaaaccatgaatccagaaagcatagcctgcactaacttaactattataatccatatccagtcaaatatgttggaaaccctgatagagacactaaaaaaatgctgcagaaggaaatttatt

SEQ ID NO: 794338 - DNA, 522 bp, Homo sapiens
cataggtacaggaaggggatgttctcatgcagtcctcccaggaaagcaaattgatgcatttgctgtctttgaggagagcaatgtgagctaagccccgttctagtttccaggccctctgcacatttggctgctttgcctccttgttgacactcccctctcctcttaaaccttctttaggtaagagacttgccycagtcaactctggccgaggtggtctttgaggaggcgtcctcactggaggcttgaacaggtcctgaggtttgtctcacacagggtcaaagggcacggtcacaacggctggccaagcttccgggctctgctgctatgcatgtgttcccctcgtcctccccagctcaggctgttccaggaaccccatgttctctgtgagaatgtgggctgagctgtctgacctgtcatgttaaatgtcccttcggagatctctcctgggtacaggaaacagatgcctgttagaggaggaatatgaggtgggaggcagggttgggaagataaacccttgaccct

SEQ ID NO: 794339 - DNA, 522 bp, Homo sapiens
cataggtacaggaaggggatgttctcatgcagtcctcccaggaaagcaaattgatgcatttgctgtctttgaggagagcaatgtgagctaagccccgttctagtttccaggccctctgcacatttggctgctttgcctccttgttgacactcccctctcctcttaaaccttctttaggtaagagacttgccccagtcaactctggccgaggtggtctttgaggaggcgtcctcactggaggcttgaacaggtcctgaggtttgtctcacacagggtcaaagggcacrgtcacaacggctggccaagcttccgggctctgctgctatgcatgtgttcccctcgtcctccccagctcaggctgttccaggaaccccatgttctctgtgagaatgtgggctgagctgtctgacctgtcatgttaaatgtcccttcggagatctctcctgggtacaggaaacagatgcctgttagaggaggaatatgaggtgggaggcagggttgggaagataaacccttgaccct

SEQ ID NO: 794340 - DNA, 645 bp, Homo sapiens
caaaaattttgctagtgaatcactagaggtgatggtgaatggtgccacttccacttccaccccttgaatcctggacctgtaaatcctggctatgggagaaacagtaccatatatcggaagctgattcaaacatacagggccttctggagaactttgccccagccctgcaaagtattgtcacctagttggcattgtaattgtgacttcaaaaggacattccaccattctatcaatcaagatgcttaaggataatggggaacatggtaagaccagtgaaatccatgagcataagcccactgccacactgctttagccataaagtgattgccttggtcaaaggcaatgctgtgtggaataccatgacagtgaataaggcattctgtgagaccacagatggcagtcttggcagaagcattgcatgcagaataggcaaatccacatcgggagtaagtgtctatcccagtraggacaaacttttgccctttccatgatggaagaggttcaatataatcaacctgccaccaggtagctggctgatcaccccgaggaatggtgccatatcgagggctcagtgttggcctctgctgctagcaaattgggcactcagcagtgaccgtagctaggtgaaccttggtgagtggatgt

SEQ ID NO: 794341 - DNA, 589 bp, Homo sapiens
atgtaaaagaatgaaactggatccttttctctcaccttatacaaaaatcaactcaagatggatcgaagacaaatctaatacctgaaatcacaaaaattcaaggagataatctaggaaaaattcttctagacattgccttaggcaaagaattcatgactaagaccccaaaagcaaatgcaaccaaaataaaaataaataagtgggacctaattacaactaaaaatctcctgcatagcaaaagaaataatcatcagagtataacagacagagtaaacaaaaaaacctacagaatgggagaaaatatttgcaaataatacatctaataaaggacttatatccagaatctacaaggaactcaaacaaatcagcaagaaaaagtcttaataaaaagcgggcaaaggacatgaatagacatttctgaaaagaagatayacaaatggacaacaaacatattaaaaaatgctcgatgccactaatcattagggaaatgcaagttaacacaacagtgagatactaccttacctcatctagactggccattatcaaaaagtcaaaaagcaatagatgttggcatggatatagtgaaaag

SEQ ID NO: 794342 - DNA, 619 bp, Homo sapiens
aacgtccttgggtaacttatgaatttcctgggggtgctaccttcatgcatcctcacaggtcctttgagttcttcctgctgctccttgtccaggtgtcatgtccataactgtcctgtcagaggatatcttgagcctgttcccacaggagctgctgcttccggcatcacccatcgcctctgtttcaggtgacaggtccctgctgcttcccctggacttttatatctcaagaaaattacagctagagaagaggaataagctctagtgttctatatgatggtagratggctatagttaatacactatacactttcaaatagctattaaaaagtcaaaaaataacagatgctgaggaggttgcagagaaaaggagaacacttacgcactgttgatggaagtgtaaattagttcaaccattgtgagaagcagcgtggtgattcctcaaagagttaaaaacagaactgccattcaacccagcaatcccattactgagtatttacccagatgaatataaatcattctaccataaaaacacatgcagctaggcgcagtggttcatgtctgtaatcccagcactttgggaggtcaaggcgggcagatcacttgaggtctggagtttaag

SEQ ID NO: 794343 - DNA, 619 bp, Homo sapiens
aacgtccttgggtaacttatgaatttcctgggggtgctaccttcatgcatcctcacaggtcctttgagttcttcctgctgctccttgtccaggtgtcatgtccataactgtcctgtcagaggatatcttgagcctgttcccacaggagctgctgcttccggcatcacccatcgcctctgtttcaggtgacaggtccctgctgcttcccctggacttttatatctcaagaaaattacagctagagaagaggaataagctctagtgttctatatgatggtagaatggctatagttaatacactatacactttcaaatagctattaaaaagtcaaaaaataacagatgctgaggaggttgcagagaaaaggagaacacttacgcactgttgatggaagtgtaaattagttcaaccattgtgagaagcagcgtggtgwttcctcaaagagttaaaaacagaactgccattcaacccagcaatcccattactgagtatttacccagatgaatataaatcattctaccataaaaacacatgcagctaggcgcagtggttcatgtctgtaatcccagcactttgggaggtcaaggcgggcagatcacttgaggtctggagtttaag

SEQ ID NO: 794344 - DNA, 593 bp, Homo sapiens
ggtgtgagtggagtgggaaagaatggatgaaatgtgactggcgccagctgaaatactgttgcagcaatgtgatgactacatgaggatatagtgtatgattctctggacttttgtatatgattaaaattttccataacaaaatgtttctaaaagraaaaacagagtaacagtgtatatttcatacaggtgttatgggtattaaatgagatatgtaaaagtgcaatactgtctgggatacagaaggggttttgaaaagtttattttcccttttattttctcttttaaaatacacctcccccacaacacacagaaaagacacacacacacacacacacacacacaccaggagtcatccaaaaacagtctttgtgatgttctgcaagggttgaattgtcctagtaagggtttgtgaaagacttggatcttttttacattgaaatcaaaggctggtgattttagacacacttcagagtcctggagccttgggtactggaccttcctactttgggaaaataatcaactcctgagctctgtaaacaataaccagtatagaatagaaagcaggattctctgaagagaaaccagagtcccca

SEQ ID NO: 794345 - DNA, 593 bp, Homo sapiens
ggtgtgagtggagtgggaaagaatggatgaaatgtgactggcgccagctgaaatactgttgcagcaatgtgatgactacatgaggatatagtgtatgattctctggacttttgtatatgattaaaattttccataacaaaatgtttctaaaagaaaaaacagagtaacagtgtatatttcatayaggtgttatgggtattaaatgagatatgtaaaagtgcaatactgtctgggatacagaaggggttttgaaaagtttattttcccttttattttctcttttaaaatacacctcccccacaacacacagaaaagacacacacacacacacacacacacacaccaggagtcatccaaaaacagtctttgtgatgttctgcaagggttgaattgtcctagtaagggtttgtgaaagacttggatcttttttacattgaaatcaaaggctggtgattttagacacacttcagagtcctggagccttgggtactggaccttcctactttgggaaaataatcaactcctgagctctgtaaacaataaccagtatagaatagaaagcaggattctctgaagagaaaccagagtcccca

SEQ ID NO: 794346 - DNA, 617 bp, Homo sapiens
aaattaaagagatttttatggtcttaatacattcctacttacttctcatgagctcaaagttcatcatacagtcacacagagctgcaagggagtctaggaaaaacagtctcaaaaagtagaggtggacagcttctcagggatctcccaagttctgatgactctctcaactctctgcttctctctgggttccagactagattctctcagaaaaagtcttggaatataggatggaaaaaaaaaatccagctgctgtagctatagattcacagtctgagcttctcccaccaccctctcagtctttgctgatcaaattcaggggaaggttaactagcctgtyttgaaccatatgtctatctctgggataatctctgcacctgagaaaggctggcttctcagagcagatgattttgttgttgttgttgttaaactttaaaagatgaatcagatgttacaatgactcatttctgggcaggcaaactcagggaactaggaaattgatgatggagtcagagattgaggtgctgggtgtggatgtgatgaagtacagacagagaggccacatctttccatgtgtgaatttatgaaagatctcagacacttaggtaaggatcctgaac

SEQ ID NO: 794347 - DNA, 645 bp, Homo sapiens
agacaaaaacttgattttactgaattatataagtcagttgatggtgctatgttttcctggaatttgatataaaaattgatttagagcccactaaaaatgtaattatttatgtttgtcaaaatttgtgaaatatgcttagatgattatttaaagcccaaacctgaatgagagaaaatctaactaaacttaaattggttggatttacaaatggcttttttcccccattttcaccccaccaatgtcaacttcttcgtatcattacactataaaaattccagtataatttttgatatagcrtctctgttggctcccttaatctaaaaggttctcacaaagtttaagaacaaccttaaatattactggaacaaaaacagacatatagaccaatggaacagaatacaaagcccagaaaaaatccatgcatttatactcagctgatattcaacaaaggtgccaagaatccaagatgaggaaaggacagtctcttcaataaacgatactggggaaactgaatatccacttgcagaaaaatgaaattgcaacctatctcacccaatatacaaaaatcaactcaaagtaaatgcttaactgtgaaacatgaaattggaaaactactagaagaaaagataggtgaaaatcttcttg

SEQ ID NO: 794348 - DNA, 473 bp, Homo sapiens
gtgttaggcagagatttcaatgaagtcctctctgaagaggtgacatttgatctgagacctgaagcaccagaaagaggcagccaagccaggaagaggcaggaatgggaaggtctagggaaagactggtcctggcaggcggaactgcagtggcaaaggcccagcggtgatcaggagcttggcatttgcaaaaataaagagtgtgtgtgactggacagcgtgagcaagygggcagaggaggagatcgtgatagggtgtgcattggtcaggccacctaggtcctggagcccacagtgagaagcatgggcttgactctgagggcaaaggagagccacggatagtttgggtaaaggggaaagttggcatttaattttatagctttttgaagtttgttttgttttcttagaaacaaggtctcagtctgttacccaaactggagtgcagctcaaaatattttccaatttatcttgtgattt

SEQ ID NO: 794349 - DNA, 631 bp, Homo sapiens
ccttcccagcatgttattttttggctttttaatagtagccattctgactggcatgagatggtatctcattgtggttttgtttgcatttctttaatgatcagtgatgttgagtttttttttttcatatttttgttgactgcatgcatgtctcttttgggaagtgtctgttcagatcctctgcccactttttaatggggttgtgtttttcttgtaaatttaagttcctcatagactctgaaggagatattaccagtgaaggctgagaaacagcaaagatggcagccagctccttcctttggaagctccatcccagggggatactgacctgtatccagcccgcacatacctgcaagaggtggctggagacccctgttgsgcattctcacccagtcaggaggcatgggatcagggacccatccaaaaaagcagtctggctgctttggggtagagcaggtgtgctgcactgtgggggatccttcctcctccagaccacctgtattctccaaagccagcaggttggaatggctgagttgaccaaactgcagaggtggcagctgcccctcccaccaggagctccatttcagggagagatcaaagctctgtccatagaaccgctgctggagtggttaaa

SEQ ID NO: 794350 - DNA, 671 bp, Homo sapiens
ctggccaatgcacgacagacagccttttgtgggtgaatttcttttaaattcaactccactgggtaggcattcctcctcctaatcccatctatggcccacttcctggatctctccgtcaagtctttcctttcacccatcatgctagtctttcctgtccatgggacacaggcaagtagctgtgggcctaaggaacggctgcatccaatgaggtggtgtgcttgtgtttatgttttagcaccaacctcatacgttgacagagctctggagtgtgagggacaagtccatgttccattagctctgttcttttctgcccagggcttcactgctccttgtcagctgctatctcctccatgttgcaaayaggattttctcctcctttctgtcaatctggtaggctctcaaactcaggaaatctgagtcctttaagaagctgcttactaggaactaacagtgacaaatacactaacataggaagcagcagctctcttatgacctgctcctttttatatcactccgttagaaaaggaagcaatgttacctacaaaggctactaggagaagaattggaaatcctgttaaaaaccactctctatggccacgcaggcttcccagaataaactccacaaatgtccggccgtctgtctccttgttgtatgtttccactgtatgcat

SEQ ID NO: 794351 - DNA, 592 bp, Homo sapiens
actgttcatgttgtagctcctgcatctacaactcagcgggtgctcataattggctgttatgagttgttatgagtaaatgaacaaataatagttgaagtaaggggaacgggtcatcctttaagagtaaagtatttgctaagaacacaaagccaagggtcaggcctgggtgaatgccctcagtcgggagaggccaaaaaagccgggcgcagagtagggagggcatggcagggaatagggttagtaataggagaatttgagacaaaggcctgggtaggaattctaaaagtttatgrttattagaccatgaaagatgctttctgtttcagaaaaggtatatagttttaggcatttcttcattgaagcaaaacattgactaccaggtcccttttgctttggataaagaggttcctcccccgttcattcactcttgcattgtttctcacagggtcatcccacagaacctctgacttagaatcacttgggacattgctaagtctatagattcctgggccccattccagatttcctgaatcatactttgggggtacaacctaggaatgtaaatctttacaagctcctcagtagttttcat

SEQ ID NO: 794352 - DNA, 658 bp, Homo sapiens
tgggtaggaattctaaaagtttatggttattagaccatgaaagatgctttctgtttcagaaaaggtatatagttttaggcatttcttcattgaagcaaaacattgactaccaggtcccttttgctttggataaagaggttcctcccccgttcattcactcttgcattgtttctcacagggtcatcccacagaacctctgacttagaatcacttgggacattgctaagtctatagattcctgggccccattccagatttcctgaatcatactttgggggtacaacctaggaatgtaaatctttacaagctcctcagtagttttcatgcacactaaacttttagaatcagtgctatrtaacaaaagatcaaatgacggagaagaagagaatatggttaaaaatgaccagataatgtaaattaaaatccttaatacattcctgggaacacgctcagtgtttgtggaagtgtgaaagggaaagcaacactgaccagaaataaattctggaaagcaccctgaaaaaactgttttgaacaaacaggttaatttatctctggtttgcatccaaacccaatgacaccaagttggatggtaaccagaaagcgttatggaatctctttatggtgagtgatagtttagggaggtgaacattgctggttt

SEQ ID NO: 794353 - DNA, 559 bp, Homo sapiens
aaaactattttcccatgaataattctgaaactgaatttcacaaacctgaattcctcccatctccaatatatattatgacatcccctttcattgttgactccagcacagatttctgatgtcaattcattggagtcagtgcaaaggattgaaaggtaaatagtaagaaacaacataaatgyatacacgattttttttttttttggttcaaattggctatgattgcgctacaaattacaatgtgttgtccctaaaaattctcatgtaaatctgttatttggcacctggtacttgatttttctctagaaagaagtctctatgtgttggtaataaaaattgtttaggactctcaaaaaagtttaatgaatcaagatttaaatacaattctttattactgaacctgatcatcatgtgtggcagcaaatttaacttaaatttccttcaaattcatgtcccatttgtaggcacacattattcttgcccattttgatttcctaattatcaagtccctccaccaccttcatgctcttcatgagtcacagatatctttgcttctcctcaa

SEQ ID NO: 794354 - DNA, 583 bp, Homo sapiens
gaattgactgtctctggtctctgttctgttctgactcaatctctgtccctggccttaaaatatcagcacctacccaggaaaacaatattcaccaggagccattggatgagggacaaagatagagaacccatgtcttttccagacttcagtcttcaccttttacactctgcagtatcagtatactcagcacactgatataagaaaagccatcacgattattacaagctaattaggaatttgwcgtcactggacggtagtgaccaagagacccagaggagagttgtgatagcagaaataccttaatcagggataattacgtgagacaatttgtttgcccacaataattatggtgcatcaccttgaggatttcacaaatggaagaagcagcaggcctaatggaaatgctttgttctgtaagagatgtaacactttttttaaaaagcaatgagtaattttgttagctaattctttatgtttccgaagagctttagaaaagcactattgggagtgtcaaaaattgatggggagtcatcatgtgactgtgcatattacacggcaaacaccttggcattttgacagcttc

SEQ ID NO: 794355 - DNA, 615 bp, Homo sapiens
ctattacagtatgaaattctgccatttaatttcaagtaagaacccttatttccattctagtacctgctgtcttatgcatgtttaacacaacaacaacaataatataagtagttagcatatattaaagcattaacgaacaccaagcattgttaaatatattacatgtatttttgcttaattttcacaacattactaatggttaaatattattaccacattttgtaggkcaaaaaactgaggcttagaaacattgaaaaaaacttgctcaacgttgcaaaacaagaaatttgtgacactggaattgacatctacaagggactgatgtaactaattgctggatacatgtccctcaaagacacagaaacagatcttgtattctagtggatctccggcacccagtgagggcctgaaacagagtacatgtccaacaaataattattgaagtaaagattgacatttcaggagcagagattaatattcaaaaacaaagatgagaattttggcagaaaagtcaaaatgaggtaaaagtacatttccaccttaactttttttaatttgcttagctgacataaggaagagtttataatttgtttgttttttttaattttattatta

SEQ ID NO: 794356 - DNA, 615 bp, Homo sapiens
ctattacagtatgaaattctgccatttaatttcaagtaagaacccttatttccattctagtacctgctgtcttatgcatgtttaacacaacaacaacaataatataagtagttagcatatattaaagcattaacgaacaccaagcattgttaaatatattacatgtatttttgcttaattttcacaacattactaatggttaaatattattaccacattttgtagggmaaaaaactgaggcttagaaacattgaaaaaaacttgctcaacgttgcaaaacaagaaatttgtgacactggaattgacatctacaagggactgatgtaactaattgctggatacatgtccctcaaagacacagaaacagatcttgtattctagtggatctccggcacccagtgagggcctgaaacagagtacatgtccaacaaataattattgaagtaaagattgacatttcaggagcagagattaatattcaaaaacaaagatgagaattttggcagaaaagtcaaaatgaggtaaaagtacatttccaccttaactttttttaatttgcttagctgacataaggaagagtttataatttgtttgttttttttaattttattatta

SEQ ID NO: 794357 - DNA, 503 bp, Homo sapiens
tgtgtctatgtcgttttatttttgtgttcccacgagtcaaatggggtaaattcatatataagattctgaagagtttttgggaataaaggcacaaaatgaaggagggccctttttgaattttggaaaattctgttttattcagtcaaacagcaatcaagcaaactttacaaaaatttcartgatatactaatgacatgataattacatcttaaaattatacggtaatagttctgtatatatgatcaaatttaagtgtgagatttttaatgactaaaataatggcaaactgaatcaattgataaaatcaattaaaaaggttatttttattcaataaagtgataaccatccttaatatcaaacttccactcaaggttgaagaagaaataaagaagcatggaagtaatcctgtgggattaccagaaaacctgactaatggtgccagtgctggcaatggtgatgatggattaattccacaaaggaggagcagaaaacctgaaaatcag

SEQ ID NO: 794358 - DNA, 503 bp, Homo sapiens
tgtgtctatgtcgttttatttttgtgttcccacgagtcaaatggggtaaattcatatataagattctgaagagtttttgggaataaaggcacaaaatgaaggagggccctttttgaattttggaaaattctgttttattcagtcaaacagcaatcaagcaaactttacaaaaatttcaatgatatactaatgacatgataattacatcttaaaattatacggtaatagttctgtatatatgatcaaatttaagtgtgagatttttaatgactaaaataatggcaaactgartcaattgataaaatcaattaaaaaggttatttttattcaataaagtgataaccatccttaatatcaaacttccactcaaggttgaagaagaaataaagaagcatggaagtaatcctgtgggattaccagaaaacctgactaatggtgccagtgctggcaatggtgatgatggattaattccacaaaggaggagcagaaaacctgaaaatcag

SEQ ID NO: 794359 - DNA, 596 bp, Homo sapiens
agatcactcacctccttcattaagtatattcctaggtattttactgttttgcagccattgtaaaaagaattggattcttgatatgactctcagcttggttgtagttggtgtatagtggtactattcattggtatttgtatattttgtaacctctgagactttactaaattcatttatcaaatctaggagtgttttgtaggagtctgtagggttttctaggcataagatcatatcattggtgaagagagagtttgactttctcttttccaatttggatgccctttatttctcttgcccaattgctctgcctagggcttcccagttttcttcttaatatgcatgaaataaaagtaaaattgaaagcgattgttgatcagtttatttcacatttctctctcatacacarataaaatgaattcaaagttctatgttaaaaacacaatattagagcctgtcttgttccaaagggaatttctaagttgtctatagattacagaggaatcaagaatataagtggaaactgtttccaaaaaataaacataaaaagtttaggttaacacaggggtttccaatccccaggccacagaccagtacca

SEQ ID NO: 794360 - DNA, 600 bp, Homo sapiens
aacagtgagattctttctgaacaactctaacgctgacagtaaaattaacaacctaaaaattaagctccatcacacaggataaattctgagagaaaagatgaggcaggccaccatctttcctgtttgggcaacttagccattccagcgtgcgggctttggagagtacaaacccaccaggggcagaagagatcctgtggcatagcacagctgctttaccaaatcatggccagaatgcttctgtaagcaggcccctgatcctgttcctygtcactggacaggatctcccacctgaggcctccagctacacccaccagtgttccctggccaatggagatttgaaaccttcctgggacagagttcccagagagaggggtgggccatgacctttgttgtttgggcaactagcccttctggcctgtgggctttggagagcccaagctgaccaggggtggaagtggtacctcagcacagaacagccaccctgcgaaaacgtggccagattcttgtttaagccagtccccaaccacatttctaatcactggctggagcctttcaaccagggtctccagccaccttcactgctgttctctggctgacaga

SEQ ID NO: 794361 - DNA, 621 bp, Homo sapiens
aggtttcaggcctcctgagtgagagctcccagggggaggaccagactgtcatctttgctgtttggatgactcagccagttcagtcttagagtttcagagtgtctgaggagaccaggggctgaagtgaaccccccgcacagcatagccactctasaaaaacgtggccagacttcttttttaaacaagtccctattcctgttcctccttactaggcaagacttctcaacttgcttccagtcacatcctacaggtgtgttcagattggcaacaggttcatacctcagaggtacagagctcccagagggaagggcaggttatcgtctttgctttttcgcaggcttcactgctgataccttcagccactggaaaatacgaggcaattggcgactggagtggacccccagcataccacggcagccccacagaaaagtggccagactgttatgtgggtgcccatttccatatctcctcgatgggcaggtcttcctggcctgggtctccagccagccccccacttgagctttcaagccagtagcaactcagcaactccctggacagagcttccaggagcaacagaaatcctctctgccactgcctctgcagtggaactgcccttgctac

SEQ ID NO: 794362 - DNA, 610 bp, Homo sapiens
ttccccagggttatcaattattaatattcctttcgaaaaagaattcagcgatatttctcctactcacacatctgtctataggatctctgcaagaagaaaaatatggctgtattctgcccgaccctgcaggcagtcagatcttatggttgtcttcccttgttccctgaaaatctgttactctgttctttttcagtataagcagagatatcatgcacaaatcgggtgatgaaatccactgatttggtattgttcaaacacgcaattttacaatcagtttatataatagtggtcctgaggtgatgtacattctcagcttacaaagataamaggattaagagattaaagacaggcataagaaactataagagtattgattggggaagtgataaaagtccatgaaatcttcacaatttatgttcagagattgcagtaaagacaggtgtaagaaattataaaagtattaatttggggaactgataaatgtccatgaaatcttcacaatttatgttcttctgccttggctgcagctggtccctccattcggggtccctgacttcccacaacatctagctcatagatggcctccttctcactatgccctcacatcttc

SEQ ID NO: 794363 - DNA, 501 bp, Homo sapiens
ccccaaactgtgcagcatctggtcgttacccacgtctgaacctgcttctacattttcagctaccgttgtggcagcctggcaatgtggtaaaagaagaaaagtccattttcagggggaaaattcaagaagccttcagatatttgcatatagaagaagccaaatgctaatagtaaaaaaaaaaaagatgaagaaaccttgagggcatttcatagctccactytacagtacaaattttctgtagtattatttttaaaagaggtttaactggctcatgtttctgcaggctgtaaaggcagcaagtggcttctgcttctgggaggactcaggaagcctcccaatcataccaaaaggccaagtgacaatgagatgttccatatggcaggagtaagaagaagatacagagaagaaagaggtgccacacccggttatacaaccagatctcatgagaactcactatcagaagatcagcctcaggaagattaaccaatggtgaaggatccg

SEQ ID NO: 794364 - DNA, 400 bp, Homo sapiens
acaccatcacaggaacacacaaacacactgccacatggacactgccacacacagacacaccgccacactgtcacatggacacacctccacactgtcagacaccaccacacagacactgccatgtggacacaaggacacacagacattgtcacatggatacacacactgtcacacggagacatcaccatgcagawacatgaacacaccaccacatggacatagcaccacacagacactctgccacacggacacaccaccacacagacacaccaccacgctgccacacagagacaccaccacatcgttgccacattttcatgtgtcagctggcggtgtgggccccacgactctgagctctaatagataaattacttaggcatatagtgaaggcaaaattttt

SEQ ID NO: 794365 - DNA, 616 bp, Homo sapiens
ctcttggaaaattttgacctggacacccaggtttttccatatgtactctggagtctagaaaaaggatccccagcctccagttttgttctctgcacacctgctggcttaacactatgtggaagccaccaaagcctgcagcttgtgccccytgaagcagtgacccaagctgtacatgtgcatctttcagccatggctggagctggagcttcaggaatgcagccagcagtgtcctgaggatggacacaagagtggggccatggtgctggagaaggaaaccattcttttctcccaggcctcagggcctgtgatagcaagggctgctacaaaagtctctgaaatgccttcatggcctttttaacactgtattggctattagcactcaactccattttatgcaaatttctgaagacttcttgaactttctcactgacaatcagcttttctttttgaccacttggccaggctgcaaattttccaaacttttaaatatgtttcaccatgaggtcatttctttggtcacatataggaccacaggctgttcgacacagacaggacacctcttaagctttgctgcataaaatttccttccaacagatacaatctaaattatcaccct

SEQ ID NO: 794366 - DNA, 552 bp, Homo sapiens
gagaattttgcaaaagctctgaggatgcccttttttattctcccactgcaaaattgttttaaaaagcaaaaaatccagcaatgtccggggaaagtcaatactgagtgtcagcgcgggatgctgccgctgatacggtcccggcgtcctggccgaaagtggcctcctcggggaccgcatctccgcgcaccatggcagcaaacgccagcggtttgtgggcggatggtgtcccygtggccatccccgctcctgagtgcggaaggacagacaggagcggggacttctgggtgttcctggtgtcagccagcttgacgccgttgttcctcctggaaatccgggatttggagaagcacctggttcctgatggaggccgtgggcctcttggtccccgcttaccaggcagcggcgccagcctagttctcagccccgtccctgatgggcgccgccttccatcaggccaaagactttcctccaaactacccttcttggggcagggaagcagcatcctgggccttccctggggcctgtggtgctggcagcagctccacgttgagg

SEQ ID NO: 794367 - DNA, 607 bp, Homo sapiens
tttaaaacaagatcactttattaattataaagcttcaaaaatacttagtaaaaaaacttacagattaactacaagagacttttcaggagaaaaaagccatacaaaagcaaaaaaaaaaaaaaaatgagaggagagacagaaactatccttgaataacattttaaaggtaagattacttactaacattattttccaaaattacrttgtcaaattagcattgacttcctactaatatcctgaagccatctcactaaaaattatgctttcaaaacaaattattgagctgaattcattttctataagtgtatgtttggacttacttcgttaatttttttgacatggaattgttagctttcaatgctactgcaaaggcttccttgtattcttctaatttggttgtaacctcttcataagtagttttcattttggagaatttacattccacatctttaagtgtgagttccttcttatttagtgaagccgtattacccttgtttaactgctctaattgtttttcatattgtgtttatttctaaaacaaatgaaaagaatatatttttaaaacaattataacctaattattatatgtttgttgcctttcattttg

SEQ ID NO: 794368 - DNA, 581 bp, Homo sapiens
cagaggcgctcctcacttcccagatgggacagcctggcagaggtgctccccacatcccagacggggcggctgggcagaggcgctcctcacttcctaaacagggtggcggccgggcagaggtgctcctcacttcccagacagggcagccgggcagatgcgctcctcacttcccagacagggcagccgggcagaggtgctcctcacttcctaggtggggtggtggccaggcagaggcgctcctcacttcccacatggggcagctgggcagaggcactccccacatcccagacggggcggtcgggcagaggtgctcctcactttccatttggggcagccgggcagaggygctcctcacttcctcccagacgtggggcggccgggcagtggtgctcctcacctcccagatggggcagccgggcagaggcgctcctcacttcccagacgatgggaggccgggcagagtctctcctcacatcccagacagggcagccagacagaggcgctcctcacatcccagaggatgggcggtcaggcagagacgctcctcacttcctagacggggtggcggctgggcagaggtg

SEQ ID NO: 794369 - DNA, 437 bp, Homo sapiens
tcgtgctcctgtgcggagtcgcggatttcaccagaagtttgagtatcactactcctgagcagatgattgaaaaagccaaaggggaaactacctatctgccatgcaaattatgcttagtcctgaagaccagggaccactggacatygagtggctgatatcaccagctgataatcagaagatggatcaagtgatgattttatattctggaaacaaaatttatgatgattactatccagaactgaaaggccgagtacattttaagagaaatgatctcaaatctggtgatgcttcaataaatgtaacgaatttacagctgtcagatattggcacagatcagtgcaaagtgaaaaaagctcctggtgttgcaaataagattcagctggtagttcttgttaagccttcaggtacaagatgttatgttgatggatcagaagaaa

SEQ ID NO: 794370 - DNA, 437 bp, Homo sapiens
tcgtgctcctgtgcggagtcgcggatttcaccagaagtttgagtatcactactcctgagcagatgattgaaaaagccaaaggggaaactacctatctgccatgcaaattatgcttagtcctgaagaccagggaccactggacattgagtggctgatatcaccagctgataatcagaagrtggatcaagtgatgattttatattctggaaacaaaatttatgatgattactatccagaactgaaaggccgagtacattttaagagaaatgatctcaaatctggtgatgcttcaataaatgtaacgaatttacagctgtcagatattggcacagatcagtgcaaagtgaaaaaagctcctggtgttgcaaataagattcagctggtagttcttgttaagccttcaggtacaagatgttatgttgatggatcagaagaaa

SEQ ID NO: 794371 - DNA, 437 bp, Homo sapiens
tcgtgctcctgtgcggagtcgcggatttcaccagaagtttgagtatcactactcctgagcagatgattgaaaaagccaaaggggaaactacctatctgccatgcaaattatgcttagtcctgaagaccagggaccactggacattgagtggctgatatcaccagctgataatcagaagatggatcaagtgatgattttatattctggaaacaaaatttatgatgattactatccagaactgaaaggccgagtacattttaagagaaatgatctcaaatctggtgatgcwtcaataaatgtaacgaatttacagctgtcagatattggcacagatcagtgcaaagtgaaaaaagctcctggtgttgcaaataagattcagctggtagttcttgttaagccttcaggtacaagatgttatgttgatggatcagaagaaa

SEQ ID NO: 794372 - DNA, 567 bp, Homo sapiens
aatttccaatgtaattcttcagagatgttaaaaaaggttttaaaaatcgttctgcggatgttaaaaggatttttaaaacgcttttttcgttctgcaggcgaaggctgtggccgtgctcccgccggccagttcccagcagcagcgcattgcccctgctccacgccttcgctccaggcccgcaggggcgcagccccgcgggaatcagcactgagccggtcccgccgccgccccagtgtccgggctgcgactgcggggagccgatcgcccagcgattggaggwgggcgacgaggccttccgccagagcgagtaccagaaagcagccgggctcttccgctccacgctggcccggctggcgcagcccgaccgcggtcagtgcctgaggctggggaacgcgctggcccgcgccgaccgcctcccggtggccctgggcgcgttctgtgtcgccctgcggctcgaggcgctgcggccggaggagctgggagagctggcagagctggcgggcggcctggtgtgccccggcctgcgcgaacggccactgttcacggggaagccgggcggcgagcttg

SEQ ID NO: 794373 - DNA, 495 bp, Homo sapiens
ttaatcaaatttaactcttataagatacctaaggttacataatatatttgcttagagtgccgtaacaaagtaccacagactgggtggtttaaacggcagaaactcgttttctcacagttctgcaggctaggggttcgagatcaaggtgttggcagagttgattccattcagaggcttctcttcttgtgttgtagatggctgtgttctcacacgatcttccctctgtacatgtttgtatcctaacatcttcttaaaaggacaccattcatattggattagaacccatcctaatgacctcatgttaattcaattattctctttaaaaaccttacctccacataaagtyatattctgaggtgcaagaggcaaggacttcaacatatgaatcctggggggagacaattaagtccattgcacgtaggtggtgaattaagggtctgaggtttaaacaatgttttttttctgactcaaagaccagattttttcactggacga

SEQ ID NO: 794374 - DNA, 642 bp, Homo sapiens
ctaggaaagaagaaaagctcacatttgctaaatccagaatgacggagtggattcagaagtgctctctcaacaaagtggtttacactctggagctaatgcaaactctctttgtttcaatgtattgctcgcaaatattgattaatcatttttctttattagcttatgccctcttggtggtataatgcatttgactttccttctgtcttccaggagagtgggatattataaacctgagctgacacttcagcaaaagggttccagaggtttctagagatggggamacagatgattaatgtcagtctcctctaataaaaaataaacgttagagagagagggtgtgttttttcttacgtcctttaaaaccttgtgctatgagtatgcgacagtagtgaggcagaagacactatggtgaaatcattcagttcaggaggctcattcttctattaattccacagtgcttcctggacacagttttctgtgccttttaaagaagggccagaggcctattctaaaacctgtatggctgtcaaataaatatcactgtgccggcaaaagagagattctggttgaggcctttccctcttaactacctaaggactgtatatttttaggtacaaaggaaagaattaagctgccttttgt

SEQ ID NO: 794375 - DNA, 614 bp, Homo sapiens
tcaatctgatttagcagaatttctaacacttcttgctggccactgtggacgaactcatttatatctctaagcttttgctcctactgttttttattcaaggaatattggtcttcttttattccacctactcaaacccagcccattcttcgagggcaggattaagtctcacctcccttaggaaacccttttccgatgccatttagtgaacgttttagtgcatattgattgctgttattacatgctgtatctccaatggataaaaatcctacagtcgtgagacttgggcaaaaccatggcaaatgacagatcccacattactyttcaagttaaatgtcaaaaatcttacatctcacagttacacaaaaataaattagaacttaatcatgttgcaactaatgacaataatttgttgatgtttaaagaccataagggtttgcatcatgtaatttaacataaatacactaagtggcttctatggctcaacttagtactcagagtaagggctgtcggtatgaataaataagaatcaaccgtgagagaaatgtatactatattagtaccatggaccaaatcattccaaaccataagagctaaatagaatcctgttcaaatga

SEQ ID NO: 794376 - DNA, 506 bp, Homo sapiens
caaaagccaaaataaacccactaaactgtaggccagattctgtcacttctcaaacatctttcaacactagctaaaattattttaatggcctagaacgccttcagtgatccagctctttgcggcggctcttcccgctatgcactctgccccactgcttctcaaacacaccagagacagtcccatttcaaggcctttgcacttgctcttccctctgcccagagtacagtttccttcaccaatcccaagaccagctccttcactttcttccagtcctttttccaatgtcccattctcaccaaggcttctctagttcttcatatttyaaatccttcttttctgttaatttttttttcttcttggcacctatcattatctagcatactgtatatattacttatttatcctatttattgtctgtcatctccagcaaatatggtatcttttgttcaccttggtatcgccagtgtattgtccataataagcatttaatagacatttgttgcgtt

SEQ ID NO: 794377 - DNA, 630 bp, Homo sapiens
cctcaatcttttgctcttaattttgtgattttgcttgcctcaatatcaaatccaaattgtgattatcatcttcacatttctacaatattgttcttttctatatttctaaatgtcatttaaagttttgcaaatataaaaatgcttacactaaaaaagttagaaaacacaagcaccctctcccatccttctytattcctagacttcctatttcaactctttttctgatccttccaatatttaaaaaaaaaatgtttctagttggttagatttatttttctagataatatattttcttgatttatgcattaggcattatctatttattcctttttttatccttgaggattttgtactcttcttacttcccaactaccttataattattttgttaaatcattagtcactattaacattatcatggtataaataatattattcatggctgagttaaatattgtttaatgctttatgttcctcttttgcccatttttggaattaataactgtctttctttttatatgattggttctctatatattgttaatatttcaccaataaatactctgacaattatttcaagtgatttgtttcaaatatttaatttcaaacatcatacttgtcattgcaaat

SEQ ID NO: 794378 - DNA, 582 bp, Homo sapiens
attctcttccacattacacagtaaaataaatgaattcattttggccgactgctgttttgggttatttccccattttgctgttttgggttatttccccaatttccttagatgtgtacaaaaaaattagtgctgatgatatttttaatcttaaccctcatctgcttttttgatagatttttttcccagattttttctgttaacccaagcccacacagccagcaaaactcccaagaactcttgcaaccaatttttccttttcaattgtataaagctttgaaagttattgattctgcaaatgtgaaaaattaacttatcaaaaaatagcacacataaaatgggaactgrccaaagaaacacaaagaatattgttttaactggaagttctatcattaactgctacaactactgtattcctgatatggctttttgcaatatatttatcactatatgggaacgatttaatctgctccatagagagagcagtaggagctctcagtggcctcaaaatatgatggttcttaccaaaaacaacgaatctaaatttcttgcagatagtaggcctaacttttttttttctaaaag

SEQ ID NO: 794379 - DNA, 578 bp, Homo sapiens
ttgcttagcttcctcattgcttttagggaagacacagcaaaacagcataacctgtaagaccatatgtggtctgactccttcctcaggcttaccttatcccacatctccgtgttttctctcccagctattatgaattctcattgyccttattatcagttagttaactcttctcttccatcacatttgaactctatcatcactacccatgaaagcattttctgactcctcgcctattattggccttcacagaaccatgtaacaatcatagctcttatcaaagctggcatttcatgtttatttatgtgattaaatatatttttgtttctaattagactataaggttcacaataatctgtttctacccaacagtttatcctccttaactggcatgatgtaaatactcaaaacaaattgttgagtaaatgaataaatcagttcttgattttaacgtatcttgtgccctggataaaaaatcctttctatgagtgagacatgggcttccactggggttgggcttgaggtgagctgcaataaagccatatttctaatccaattattcatcactatggttgtattta

SEQ ID NO: 794380 - DNA, 570 bp, Homo sapiens
aaatggttatattaatattaaaatacagtgattccaaaaatgccacacgcaaactgaataagtatgtttctggatatttcttggcttcctatgtttcaacaaatttcctacagattttcaaagaagacatgacagtttatttttaaaattccagtagacatgtagcaaagaggatgattatgaaacttcaaaggtaataracagggtggttccaagatggccgaataggaacagctccagtctacagctcccagcatgagtgacacagaagacgggtgatttctgcatttccatctgaggtactgggttcatctcacaggggcttgtcagacagtgggtgcagcccactgagtgtgagccgaagcaggacaaggcatcgcctcacctgggaagcacaagggaccagggaatcctctttcctagccaagggaagctgcgacagatggcacctggaaaatcgggtcactcccaccctaatactgcacttttccaacagtcttagcaaacggcactccaggagattatatcccacacctggctcagaggatcccatgcccatggagcctcact

SEQ ID NO: 794381 - DNA, 570 bp, Homo sapiens
aaatggttatattaatattaaaatacagtgattccaaaaatgccacacgcaaactgaataagtatgtttctggatatttcttggcttcctatgtttcaacaaatttcctacagattttcaaagaagacatgacagtttatttttaaaattccagtagacatgtagcaaagaggatgattatgaaacttcaaaggtaatagacagggtggttccaagatggccgaataggaacagctccagtctacagctcccagcatgagtgacacagaagacgggtgatttctgcatttccatctgaggtactgggttcatctcacaggggcttgtcagacagtgggtgcagcccactgagtgtgagccgaagcaggacaaggcatcgcctcacctgggaagcacaagggaccagggaatcytctttcctagccaagggaagctgcgacagatggcacctggaaaatcgggtcactcccaccctaatactgcacttttccaacagtcttagcaaacggcactccaggagattatatcccacacctggctcagaggatcccatgcccatggagcctcact

SEQ ID NO: 794382 - DNA, 632 bp, Homo sapiens
ttatttaaattatcctgggcatagggattaagagtttacagtatgctaactttcaacagtgaacaatacagtaaagccaggaattattacacagccaggaattactattaccaccattattacagagccaagaatttaaacaagagtttaagtgttgcagaggcaggcacacaatgagggaattcctcaagaggtatgttgaagacattaagctcaaaaaactaaataaatgccttttgagacaccaataaactgtgttggttacagayttgagttacatgtatgtctctaattggtaccacctccctttataagaaatacagtctgctctacttagctttctcaactgtaaagtagcagtttcaatggcagaggaggcgaagtaagatggcagaatagaaagctccactgatcgtttctccacaataaggacaccaagttaacaactatctacacagaaaaacaacaccctcataagaatcaaaattcaggtgagcactcatagtacctggttttaacatcaaatcactaaaagaggcactgaagagatagaaaaaacagtcccgaatctccgacgccactcctcccctaccgtggcacctgcggcctggtgtggagagcatctctgggat

SEQ ID NO: 794383 - DNA, 571 bp, Homo sapiens
aaaacaatattattatatcaatttatactaaaaaatcattttaaaaaatttgacattccttcatgataaaaaaatacctaaaaaaactgagtctagaaggaacatacctcaacataataaaagccttatacaatagacccacagctagtatcatactgactggggaaaagatgaaagcctttcctctaagatctggaatataamctggctcaccagtgttattccacatagtactggaagtcctagctagagaaattagacaaggaaagatatacatggcatccaaattagaaatgaagaagtcaaattatacctgtttgcagatgatatgatatgatttggaaaaccctaaaaattcctcaggaaaactgttagaactaataaacaaatttagcaacgttgcaggatacaatttcaacataaaataccagtagcatttctatgagaacaggcaacaatataaaaaagaaattaaaaagtaatcctatttacactagccacacataaaattaaatcccaaagtgaaagatctctataataaaagctataagatattgctgaaatcaattga

SEQ ID NO: 794384 - DNA, 571 bp, Homo sapiens
aaaacaatattattatatcaatttatactaaaaaatcattttaaaaaatttgacattccttcatgataaaaaaatacctaaaaaaactgagtctagaaggaacatacctcaacataataaaagccttatacaatagacccacagctagtatcatactgactggggaaaagatgaaagcctttcctctaagatctggaatataacctggctcaccagtgttattccacatagtactggaagtcctagctagagaaattagacaaggaaagatatacatggcatccaaattagaaatgaagaagtcaaattatacctgtttgcagatgatatgatatgatttggaaaaccctaaaaattcctcaggaaaactgttagaactaataaacaaatttagcaamgttgcaggatacaatttcaacataaaataccagtagcatttctatgagaacaggcaacaatataaaaaagaaattaaaaagtaatcctatttacactagccacacataaaattaaatcccaaagtgaaagatctctataataaaagctataagatattgctgaaatcaattga

SEQ ID NO: 794385 - DNA, 526 bp, Homo sapiens
agaaaaccacagagtatctctcagaattcttcaagatcagcaaaattatttatttggatatcaatatactaataatgtgtctctaaatcagcatcaacaaacttggagaaaaattcacaatggcatccaaaattcttggatgcctaacaataaawttatcaaaaggtaagcaagatatcatagagaaaattacaaaatattattgaaggctatgaaagaattgaataaagagttatctatgtttgtggatgaaaagacctagcaccataatgaagtcaatttcccctaaaaatggtgtaaaattcaagttcatttcagtcaaaatcccatcaaaggtattcatataatttgacaatatgaacctaagtttatatagaaaaaagacgaagtccaaactttcaagaaggacaaatggggagcagggtattcttctgagtaagactcacttggcagcagaattattaatattttaataagtgcttaaaagaacaagtaaaacgaaaaggatagaaatgaaccaatggga

SEQ ID NO: 794386 - DNA, 567 bp, Homo sapiens
ccaatgatatccatagctagggagaagaggaagtgtccttatatcatctaattttttttcattttctttcgttacgttttccagtttattcagatgcctcgtttctatacatgttagaactatagagagagagaggttgatgttactttcctctcaaacaagattttcccttttctcttatgcaggtagactgagaacgaatcatctcagtacaactgggaatttagccacataggggttggattccaccgcaagtaaaaagttagtccttctctaaagtacagacatgccctgtgtttgttgcagacycctccctctagagggactttatcttttaagcatttcaagaaacaggagttccttctctgctttgcaccaccttagcactcatgtctggggctcctttagattcccctgccagtgtccaccgaaagctctgagggtttctgtttctcctagaggagttctttgcttaaatcaagcttaatctttactatgtgcacagatttggcaaatgctgccatgaagaaaactgttggtctcatctttcccaagaaatattccatc

SEQ ID NO: 794387 - DNA, 611 bp, Homo sapiens
gagtctgagtcaccattgtgccccaccctctgtggctgagctcctacagggtcgtgtccatcctggggtcatgttgctgctgtaccatgcccctcagagccagagttcccactgtgtcctgacataccagggggcttagcacaactgagctccatccttcgtagccctttctgtggcaatactctgccttcacagagactggagtcaccaccgtgctgcacttggctctcagggcctgagctacagctgtaccccacaattccatgggccttactgccactgtgccctggcctttggggcagagctgctgtggagccataccaaccctgaagcctaagtcactgttatgtccacaagtccctagggtctcactgctgctctaaggcctgggccaacacagtaatgtgtctccccaggtgcccaagtgctactaygctgctccctgccccttgggccagaatcacggttgtgccctgacatccatggaactagagttgctgctgtgccccaccctccaggacctgagtggccagaggacccctttacccctaggctgtgctgcttctgtgcctgtctctcagggttcaagccaccattatatcatatatccc

SEQ ID NO: 794388 - DNA, 711 bp, Homo sapiens
cacattcaaaaagaataaaattggatccttattttatatcatgcacaaaaatcaactcaaaatagattaaagacttaaacataagacatgaatttataaaactccaagaaggcaacatagggtaaaattttcataacatttgtcttggcaattaattcttggatatgacaccaaaagcacaagtaacaaaagcaaaaatagacaaatggatttacatcaaatgaaaaagccagaaactaaaaatcttctgcatagtgaaggaaataatcaaccgagtacaaaagcaacctacagaatgagagaaaatatttgtaaaccatatatctgacagggggttaatataaaaatatacaagaaactcaatagcagaaaataaaaataaaaataactatcttcaaagargagatacaaatgaccgacaggcatatgaaaagacattcttcactaatcattagagaaatgcaaatcaaaaccacactgaggtatcatctcacactcattatgatggtcattataaaaaattaaaaattaaaaaaataaagtgttggcaaggatgtggaaaaatttgaaccgtgtgcactactggtaagaatataaaatgatgttgccactataaaaaaaacagcatagagattgatagaaaaattaaaaataaaaactaccatttgatccagcaatcccacttctgggcatttatccaaaagagctgaa

SEQ ID NO: 794389 - DNA, 626 bp, Homo sapiens
acttaggttgtgagtacctcctctgtgccagtcatgtgttctctcatttcacgatagccctgtgaggtatatccgtctcatttttaaaatgagaaaatgatatttattaaaattaggtaacatcctcagtgtcacttgtagcatctgagcctttcctgccatcatggaaatggggatgctaacaaattggctcagaaggcccagctgaccattgggatggggaggagggggtcctacagggcacagactaggaacaaaggagcgcttcttatcagagacaagaggcactggggccagaaaagcagactaagcaagaagtgatacaatcaggtcaacgtctgggctgagagatataagatagatgccaaagccagaggagcagagtgtgaaacagggagataaaayggagcagagcctgctttgaaatgcagagatgcgattgaaagagggaggatgtacagcaacagaaaaggcagcaggtgattaataggcattttctggatgcaaaaattaataaataaaagaataacttataagggataaatgagagagtggcaacaaaaccatatttaaacatttgcaacctgggtaactggcaaattattagtatgatttaatagaattag

SEQ ID NO: 794390 - DNA, 658 bp, Homo sapiens
tatttagtgaggccacttcttttgtgtgctcccgtatgcatatataaataaactttagtttttatttctcctgctaatctgtcttttgtcagtttaatctgcaggcctccaagccaggaaccaaagtgagtacaagaakagttttccctccgcaacactttggcaatgaagatgggatggttgggactccccagtcactctgaaggctgcagctgagatctcaggatctcttgaccaagccagcaaaggtaaatttccttgctgatctctgctcagcatccagctgagtgcgtgcagtaagaacttgtctttgttcaaacaggaaaagttccctgatcctctcacagggcatgtgatgggggtgtggcttgcttcttcgtgccccactgctcaaacctctagggaaacttacagacgggcaggctgtggggctctgactcctcggcagtgtctaggggtggatgtttacagctcctgaagcctcagtgggcgtgtgtcagagggtgcttagaggtttgccgtctatccgtctacgggtggcttatgttaaccagctcaattagaccctctaccttgtcacaaggacagagggctgtttcctgagttcttgccttggtgtagtggaagaattggaccacacgtgggcttggagaatgag

SEQ ID NO: 794391 - DNA, 615 bp, Homo sapiens
ctcaggaatggcttggtgttgtcttcatggtagtgaatgagttctcactctacgagttcacgtgatgtactggctccctctttgccttccaccatgactgtaagcttcctgaggcctcaccacaagccaaacagatgcacgtgccatgcttgcacaacctacagaaacatgaaccaaataaaacccttttctttataaattacccagtctcaagtattcctttatagcaatgcagaatggcttaatatagtctccaatggtgtccatatcctaatctcaagaacctgtaactatgttaccttatttagcaagagggactttgcagattaagttaagaatgttggaatggggaactatgctggattatttgggtgggtccgagtaatcacacaggtcytcataagatggaggcaagaaggtcagagcgagagaagaaaatgtgaaattagaagtagcaaacagggagacaaggagaggaaaacacagatttgaagatgttatgctgttagctttgaagatgttatgctgttagctttgaagatgaaggaaggggccacaagccaaggaatactggtatcctgtagaagttgcaaaaagcaaggaaatagattctcc

SEQ ID NO: 794392 - DNA, 581 bp, Homo sapiens
ggcatcgcctgacaacttgttagaaatgcaaattcttgggcaaaaatgcaaatttttgtttcagactcactgaaacaaaaatcctgtgggtgatgtccagaaagctgtgttttaacgactctccaggtaatactaatactaaaatttgaggacccatgtccacctattttcactgatgctttatctgcgtgtttttaatctatattctagctccccagagaaatagctaacaacctcacatagatattatgcctaaccttacacttttactaaagttcactacagaaacccaatgaaaagagtgggctatatgtgatttagaattcaaaagccatagattccaaagcagtttgcccatttgctagagaggttacrttcagcaagttcttaaaagtctccaagtgtcagttttctcagctttcaatgagagtaatagtagtacttatagcaatgagctgttgggaggaaaaaatcagaataccgacgtaaagctctagtataacgtctcatatataatagcactcaggaaaggctggctctataaagaaactttctgaaaatttgaaaatatataaataaat

SEQ ID NO: 794393 - DNA, 645 bp, Homo sapiens
ttctttttaatttgataaactctaaattatctacttttgtttttgttacctgtgcttttggtgtcaaataaatcattgccaaatccaatgtcaggatgatttttcccaatgttttcttctaataacttatacttttatctctttgggactttgtcaattttgaattactttttgtatatgctgtaatgtaagggtccaactttattgttttgcatgtgtatattccatttgtccaacaccatttgttgaaaggctgtactttccccattgaatggtcttgacagatttgctgacatttgaccacataaatgaaggtttatttctgggctctccattctattgcattggtctacatgtctgtttctatgccagtatcacactgttttaattactgtgcgcttcgaactaagttttgaaattaakgacttttgcatattgtctcactccaaaaaaaaaaacaaccttaaaaatgttcttttttttgttttgttttgttttttgataagaaaattgaggctcagaagaataagtaacttgccaaggtcaaaactagaaaatggtaaattctggaatctagtccagggatatctagttccaaattttatgctttttatattaactatatcatcttgtgtaaacttgagg

SEQ ID NO: 794394 - DNA, 608 bp, Homo sapiens
atagtattctttgtctatatgtgtgtttgtatttaaggatatgtttatgtttttctctctctaaatgatagaattgtggatttaattttctactttctaattgctgtattttcaattgttttctgaaacagtatatgttgctttttaaatcaagggaaaatacagataatttaatgctttttagaatttcccattaaaataatttccattcaggaacaaactagagaacagtctgagaatgtgtgatggttgttgtcatcccagtactcctattcagatgacaggcctgattcattctcctgcaaagaacttctgtgtaycattgtctggcatgcgcttaaggagtcgtgattctctgcccatgttttcacaaaagtaattctccactcatactttctgaaaactctctaccttactatatgcaagttgggtggatattgtgtggcacatggaaaactctattgttttgcaaagaatatgggagaagatcatttaggaacaaaaatgctattaattattctgtcagatatacaggtgagatttatgtgagtttaatgttgtctttttctcagctgtgctatccctgacctagaattctagaaataata

SEQ ID NO: 794395 - DNA, 657 bp, Homo sapiens
agcactcaatatttcccatatttattaatactaagataatttcaactattaattaccttaacttaaattgcctaattaggagctacaatatgatggtttttgttttgttttgttttttgagacagagtcttgatctgtcacccaggctgaagtgcaatggctcgatctcggcttactgcaacctcagcctcccaggttcaagcaattctcctgcctcagcctcctgagtatttgggatggggttacaggctcgtgccactacgcccagctaatttttgtatttttagtagagayggggtttcatcatgttggccaggctggtctcgaactcctgacctcatgatcctcccccctcggcctcccaaaatgctgggattacaggcgtgagccactgcacctggcccagaatgttttcttttagttatggaagtgactgcacatcaattacctggaaaatttggtaaagtagaaatttttctaatcaactagtgctgtggttaacctaaaatacagtttatagaggaacaattataacgtgaaaattttcaaaaagtttgtgcctgtgtaagtccattttcacactgctataaagaatacctgagactgggtaattattgaagaaaaaaggaggcttaattgactcacagtttcacatgg

SEQ ID NO: 794396 - DNA, 501 bp, Homo sapiens
tattcgttgaaaatgaggatttatcttcactcaattttaacataaaatctaaagattacttagaattataaaacataatttaaataaaataaaaatatatataaaataaacattaaaatcaatataaaaggcaactaggaaagtttaacaatttctaacatttcaaagacttcttttttcccttattgttttttccttattgtttgtcaatttctaatttaaatacattaagaattagggccaggcatgctgactcatgcctgtaatcccagcactttgggaggccgtcacggccagatcacgaggtctagagatcgagaccaccccrgacaacatggttaaaccccgtctctactgaaaatataaaaaattagctgggcgtgatggcacacacctgtagtcccagctactcgagaggctgaggcaggaaaatcacttgaacctgggaggtggaggttgcaatgagctgagattgtgtcactgcactccagcctgggccac

SEQ ID NO: 794397 - DNA, 642 bp, Homo sapiens
accttaggtaaatttttttctttttctcacgtttttgttttttgtttttttttttacaatcagcacattatttttacatcagaagaacagagaaaggtatgtttttgattagctaaaaattttaacataaaattctaatattgtgtctataacatgttttayatggattagtatgaattgtgcaaattaccaatgaaggcagtggaagagggcctggggagaggagtgttttagccagagtttgcattctttttatttcctgcactctggatctattcaaatctcgtctcctgccgagggattcagtgcagaactaaaatatgatgacttacttggcaacagcaaaaaaaagagcatttactcaaatgcaataaagataagcaataagtttcagtgatgcatatagtatgttctctgctcgcctgcttgttctttcttctctcagcagaagttcaactgaaaataagctcaaacagcaatttgccaaattagctagtcacctcacttgtgaccaaatcacatcctacagagatgctgaaccccaagtttttgctctctggaatatacataatttgaagagtcttttcacttagtaaatgaaggggtaacctggtaagttcaagttactttgaaatgagatgt

SEQ ID NO: 794398 - DNA, 642 bp, Homo sapiens
accttaggtaaatttttttctttttctcacgtttttgttttttgtttttttttttacaatcagcacattatttttacatcagaagaacagagaaaggtatgtttttgattagctaaaaattttaacataaaattctaatattgtgtctataacatgttttacatggattagtatgaattgtgcaaattaccaatgaaggcagtggaagagggcctggggagaggagtgttttagccagagtttgcattctttttatttcctgcactctggatctattcaaatctcrtctcctgccgagggattcagtgcagaactaaaatatgatgacttacttggcaacagcaaaaaaaagagcatttactcaaatgcaataaagataagcaataagtttcagtgatgcatatagtatgttctctgctcgcctgcttgttctttcttctctcagcagaagttcaactgaaaataagctcaaacagcaatttgccaaattagctagtcacctcacttgtgaccaaatcacatcctacagagatgctgaaccccaagtttttgctctctggaatatacataatttgaagagtcttttcacttagtaaatgaaggggtaacctggtaagttcaagttactttgaaatgagatgt

SEQ ID NO: 794399 - DNA, 587 bp, Homo sapiens
agcaaaccacaagttgtttatatacgagaccagctcccagaacattcagttagttcatttcacttcagtgacaggagggaaacatgcatggggagcattttttatgataatcatagggctttttgcattggtcaaaggaatggaaaagtgtgtttccagtgttttttaattctaggcttagaaagtttttataagatataaattcatatttttggcatttaaaaaacagtttattagagttgccatattacaatgttctattttctgtggtaactgcactacacacaattttarcttctttaaaattaagagcttgtagcaagttgaatgtggcttaactttagaaaataaggtcccagagtccaggaagttcaataagcgcaaatgctctggacaggttaaaatcctacagcgatttactgttcattacacatgatcgtagccaaaaggctgagaaatgattattttagtgctcatttattgtagcctgagagctgtgttttagcagagacctatgcattcaaataacttaagatcaggtttgtggtacacgaactagtatacgatcaagtatgaaatcatatgaa

SEQ ID NO: 794400 - DNA, 602 bp, Homo sapiens
ctttttaaaacctgaataatattccagtgttgatactaagctcttaatcggcatgttatactctccagagaacttaggttctaatgacattcaaaaatagtgtgcttagttatcacgaagcaaacttagagtaagataatattcaktcttaaaaagtctgttgaaaggactatgaataggtttcctactctcattcctacgatgactcatccagggtcaagaactagagtttcacaagacagggacagagaccagaggtcaagtccaaggatgttgtaaaggcagggaggagcaggtgagtcctacatgtccaaacaggcccacaggtgcacagtccagggagtttaatttcaaaaatatgggtgaggacttacaggagaaatcacaagccagtctgagctacaatatttatgcatctaggcagagtccctgagcaacaaatgtggggtatcaaggttaataatgagcatgatggtgagccagagctctgcaatgtgatatgagccctcagaattccttcccaaatcctgtgatgacactaagacaagtcacatttaaagggagcagactacctgattgcagtggggaagtgaagggagcaa

SEQ ID NO: 794401 - DNA, 601 bp, Homo sapiens; identical to SEQ ID NO: 781980

SEQ ID NO: 794402 - DNA, 571 bp, Homo sapiens; identical to SEQ ID NO: 782228

SEQ ID NO: 794403 - DNA, 601 bp, Homo sapiens; identical to SEQ ID NO: 781981

SEQ ID NO: 794404 - DNA, 652 bp, Homo sapiens
tcatattattattattaaacgttattttttgtttatcaaagttgacattaactccttatgtccatttttaggataagaaaattagcactcctccacatttttctcctccttctgctccatacctttatggatctattaggtatggcattatttgaacttgattaagtttacactctttaaatttcagactaacacggctaattaaatatttaataatttacattctaaaattcagaaccaataaatattttcaatattacagttacagtaatttagaatcatcatggagctgagtrgaatgatgtaatgctacttcactaaccttggtccacttgacaaacgatgttctaagagtgaaggtcaagtgggcctttttctttacactccacaagtagctcaaaacattccacactgcagtctttgtcagatttggtccgtggcttcctgatacaggattttgctcttctttgagtttccagttttcttttttaatttccctattgacagaagaagcttaagccttttattcagtgccacaataatcccgtcttttaactctactatatgtcaaagttaatccatttcttctagagaacattgtagttagtatcctctatactcatgttccagttttgaccatttttttttttct

SEQ ID NO: 794405 - DNA, 623 bp, Homo sapiens
tgcatacttttttctgtagatataaaatctttaggtcacacttttaaatgaatttagctttgtttaaaagtcacatttttatttttaggaataagatcttgttatatcagtgccgtagtactcaagggtgtgtcgcactctgaatttgtttatttttcctctgaaaaaatcactgggggccactgatttcttcacaggtatggtttcttttctttcctttcgtttttttttttttttttttaattatactttaagttctaggctacatgtgcacaacgtataggtttgttacataggtatacatgtgccatggtggtttgctgcacccattaactcatcatttacattatgtattactcctaatgctgtccctcccccaggcccccagyccccgacaggccctggtgtgtgatgttccctgccctgtttccatgtgttctcattgttcaattcccacctatgagggagaacatgcagtgtttggttttctgtccttgtgatggtttgctgagaatgatggtttccagctttatccatgtccctgcaaaggacacaggtatggtttctatatatgatatggtttggctctgtgtccccacccaaatctcatcttgtagctccca

SEQ ID NO: 794406 - DNA, 650 bp, Homo sapiens; identical to SEQ ID NO: 781972

SEQ ID NO: 794407 - DNA, 599 bp, Homo sapiens
gtgctatgatatctacatgcagaagaatgaaattggactccttcttcacatcatatacaaaaatttactcaaaatgaaatgtagacctaaatgtaagaactaaactattaaactcttagaagaatatattgcagtaaatccttgtgacctctgttaggcaaaaccttcttagctatgacactgaaagcatgaataacaaaaaatagataaattggactgaagtcaaatttaaaatcttgtgtgtttcaatggataccatcaagaaaatgaaaagataacccatagaataggagaaaatatttgcaaatcatatatcaggtaagggacccatatctagactatataaaaaactcttacaactcaataataaaaaggcaaatacccagtttttaaaatgagcaaagtgtctgmatagacatttctccgaagaagatgtacatcaagcacatgaaaagatactccataggattagccattagggaagtgcaaatcaaaatcacagtgtgatgctacttcacactcaaggcaaatgactataatagaaaaaaaaaagatgaaaacaagtgttggtgagcatgtagagtcattggaacactcaa

SEQ ID NO: 794408 - DNA, 599 bp, Homo sapiens
gtgctatgatatctacatgcagaagaatgaaattggactccttcttcacatcatatacaaaaatttactcaaaatgaaatgtagacctaaatgtaagaactaaactattaaactcttagaagaatatattgcagtaaatccttgtgacctctgttaggcaaaaccttcttagctatgacactgaaagcatgaataacaaaaaatagataaattggactgaagtcaaatttaaaatcttgtgtgtttcaatggataccatcaagaaaatgaaaagataacccatagaataggagaaaatatttgcaaatcatatatcaggtaagggacccatatctagactatataaaaaactcttacaactcaataataaaaaggcaaatacccagtttttaaaatgagcaaagtgtctgaatagacatttctccgaagaagatgtacatcaagcacatgaaaagwtactccataggattagccattagggaagtgcaaatcaaaatcacagtgtgatgctacttcacactcaaggcaaatgactataatagaaaaaaaaaagatgaaaacaagtgttggtgagcatgtagagtcattggaacactcaa

SEQ ID NO: 794409 - DNA, 544 bp, Homo sapiens
atgataaaaagaaacttaagatgacaactatttcagcaaagaatgataagtgaagcaccagatgctacatattttcaactgcaaaaatatcatgggaagccagctgtatcttctaaaatttcatgatgtcattgtatggcttcaggatctatttagctgctttataatcttattagcttatctctgcttccagtcatgcactaggccttaattgcataggtttgtttataatattgttagtgttctggtrtcatatttcaagcaagaagcatcttgcttacaggctagtgcacaaaaacttgccaccctgagcaaaacctagtgatccattgcaaactgatatcactgtcccatttttctgaagaggtcatcgtttcctggcattgagctatcatgctagtgactcagagttttttattttattcaacttttcccaaaagttcgagtctaggatgatgatttcaaagtgtgatggaagcgaagtgtttcagttcagtgagtttcaatgtcacagtgaaatttaccacgttttccaggaatcagt

SEQ ID NO: 794410 - DNA, 645 bp, Homo sapiens
acaatagaatggatactaaaatctgtcatgtatttacttcaacaaaaccatcatatatacctattgttagtagaatgcagtttttgaaacccataatgtctgcatatggtgctacattcaagagacagacaaggcatacagggaaggtaagtctttctctgtccttcagttacccagttctcctttccagaaaattgctgttacctgtttcttatgtatcctactacagacaatgttagcatttgcaaacatgtgtacctctacaaacataaatgaatttttatatacatacctagtaacacattattaagcaccttactttttcacttattaacatatgtcagaaatctctaatggttaaattacaaacaaggatgttgaggaccaggtttctaatataaattctgacattttgaagagtsgtattgtaattgctatgatggtaggcataaaataagccaaaacacccccttggcccccggaataaacatatgaaaagaaatgtaaattcaaattcaaatgagaaaatcattgctacctatcaaataagcaaatgataacaacaatgaaatagttgttatttcaatataaaatcgataatgcctatggccaattgctgaagccagaaacctcagcatcatttct

SEQ ID NO: 794411 - DNA, 516 bp, Homo sapiens
ggccttttctttatctgaatgtgtctagatagagggccctgtgttttgctgaagactgtaattgttagtgtacttataataattctctagtcactcatcatcagcacctaaacagcttgccttggaaagttatgaaataccggagttaatgaccacgcttaaattttggccaagcaatctaaactyttatcctcaattttccacagcagttggatccattctagaggtaaataccttagagaagagaattgactaggagcaaaatacatgcaaatatatgttatataaagagcatgataattcctcgctttactattttttaaatggaaatatactttgtctcagatgtcacaaattagtgaaatactttgagagaaatataattttaaatatctctaaattcttatagataaatgtcctctaatttgtttctgaaatgccaaatctaacttaagcaatttatgaccattattttatcagtgcttaaatttaattttccttcttcatagttagtac

SEQ ID NO: 794412 - DNA, 516 bp, Homo sapiens
ggccttttctttatctgaatgtgtctagatagagggccctgtgttttgctgaagactgtaattgttagtgtacttataataattctctagtcactcatcatcagcacctaaacagcttgccttggaaagttatgaaataccggagttaatgaccacgcttaaattttggccaagcaatctaaactcttatcctcaattttccacagcagttggatcyattctagaggtaaataccttagagaagagaattgactaggagcaaaatacatgcaaatatatgttatataaagagcatgataattcctcgctttactattttttaaatggaaatatactttgtctcagatgtcacaaattagtgaaatactttgagagaaatataattttaaatatctctaaattcttatagataaatgtcctctaatttgtttctgaaatgccaaatctaacttaagcaatttatgaccattattttatcagtgcttaaatttaattttccttcttcatagttagtac

SEQ ID NO: 794413 - DNA, 663 bp, Homo sapiens
aatgacaaattttttagttgtttgtcacatattacaaccattctatatgttattcattttccaaatataaaagagttaccattactagatggaaaattatattcagaaatgcagacacgtccttggtaggaaaaagatagaaacgcacaacgagcttcactcactaaaccaaatttcttaaatttcaaaaagacccattattcacaggtcaaatttgtcccttgatcagtatacagaaaacaataaggtttagtcataaacagtaaagcagcatgtctggaaggaaagagactagaaatgaaacaaaatgagatatgggccrtctaaggctaccccagtcctcactttcaccccccttcacctagacgagtacatgctgaacaagcaccaaaaacaaccaataaatgaaaggaaactcaaaggtcacttggggtcattattttcacatacctttgaataatgagagcatcacatgtcagccagaggagaacaaaatgtcacattctccagctaaaggttggccttggtcaaaggtcacagaagggaggccaggaaataacctaagaggttaggctgggtgcacaaagaaaggtcaccaaatgtcaatgaaagcatgcagctgtttggagatgaaacaactgaggcacccttttgtgctgacat

SEQ ID NO: 794414 - DNA, 579 bp, Homo sapiens
tgcctcagttgtcagtgcaggattcacttgtttttgttcttcttggtggaagcccctaaccacagttgtttctagttggccattttagtccctcctcatttttaaaaaggagttgtttgtcttttgttgttgagttaaaagagttctttataaattctgcctataggctcttattagatacatgatttgcgaatatctgctcccattttgtaggttgtattgtcactctttgtagtgtgctctgatgcataaagggattttcagttttgatgaagtctaatttatttattttttttgcttttgttgtttgtgctttcaatgtcrtatctaacaatgcattgttaagcctaagattatgacgattaaccttctaaggttttaagagttttgtagtttttattctatttaggtcattaatcagctttgagttaatatttatatatatgaaatcaaggaacagctttattctttggtatgtagatatctggttgtcccaacacagtttattgaagaaactatatttccccattaaatggttttgacacccttattgaaaagtaattgtgcatagatgtatat

SEQ ID NO: 794415 - DNA, 643 bp, Homo sapiens
gcaaggattttcattgtaatattcaaaagagatacatttccatcattagggtgaagtaggctatgttattttcattcattagaagaaaggcagagattcaatagaaataaaatcaaacccaacatccttactttgaaccgcagtcctatataatttggtccctgcatttctgaactcatctcttctctccttccccaccactcacctgcttcagaactcactggcatttgcacttgctcattcctctgctcrtttcatatctccagccattctcagggctgattccttctctccagcatctctggttaaatgttacccccagggagaaatttcctcatcaacctggcctcaaacctctctatattttctctcttcttattttctttgtctaatttaccttctcttgacattatattaaatattaagccacattttttattgtccatatctttcactagaatcaaaacttttatgggcaagcaatttatctattatttatcactaaatccccaatgcctagagtgatgtcttgtaaagaataaatgtatgtttgataaattcatttattctacaaaagtatatgatagaactgtgtattttaacatagaaaaatatctaagatctattggtgttgccaaaaaag

SEQ ID NO: 794416 - DNA, 567 bp, Homo sapiens
gaagaattgtccatttcagcagtcgcagcttgagtttcagcaagcctcatcaccatgggctaaggggctctggggttctaaattaactttttttttttttgagatggagttttttgctcttattgcccagcctggagtgcaatattgtgatcttggctcactgcaacctccacctcccgggttcaagagattctcccgcctcagcctcccaagtagctgggattacaggcaccgactaccacggccagctaattttttatgtttttagtagagacagggtttcaccatgttgtycaggctggtttcgaactcctgacctcaggtgatccacccacctcagtctctcaaagtgctgggattacaggtgtgagccaccgcacacagccctaaattaactctaaatcctgtctaggtcacaaggactgcaacttctaggcaggtcctactgctgtgctggcctaagagccagtggacttggaggggcacatgaccagtcagggtggcaaaggcagtactcgcatcacccctcccccaacctcaggcagcacagtttgcagctccaaaaga

SEQ ID NO: 794417 - DNA, 567 bp, Homo sapiens
gaagaattgtccatttcagcagtcgcagcttgagtttcagcaagcctcatcaccatgggctaaggggctctggggttctaaattaactttttttttttttgagatggagttttttgctcttattgcccagcctggagtgcaatattgtgatcttggctcactgcaacctccacctcccgggttcaagagattctcccgcctcagcctcccaagtagctgggattacaggcaccgactaccacggccagctaattttttatgtttttagtagagacagggtttcaccatgttgttcaggctggtttcgaactcctgacctcaggtgatccacccacctcagtctctcaaagtgctgggattacaggtgtgagccaccgcacacagccctaaattaactctaaatcctgtctaggtcacaaggactgcarcttctaggcaggtcctactgctgtgctggcctaagagccagtggacttggaggggcacatgaccagtcagggtggcaaaggcagtactcgcatcacccctcccccaacctcaggcagcacagtttgcagctccaaaaga

SEQ ID NO: 794418 - DNA, 567 bp, Homo sapiens
gaagaattgtccatttcagcagtcgcagcttgagtttcagcaagcctcatcaccatgggctaaggggctctggggttctaaattaactttttttttttttgagatggagttttttgctcttattgcccagcctggagtgcaatattgtgatcttggctcactgcaacctccacctcccgggttcaagagattctcccgcctcagcctcccaagtagctgggattacaggcaccgactaccacggccagctaattttttatgtttttagtagagacagggtttcaccatgttgttcaggctggtttcgaactcctgacctcaggtgatccacccacctcagtctctcaaagtgctgggattacaggtgtgagccaccgcacacagccctaaattaactctaaatcctgtctaggtcacaaggactgcaacktctaggcaggtcctactgctgtgctggcctaagagccagtggacttggaggggcacatgaccagtcagggtggcaaaggcagtactcgcatcacccctcccccaacctcaggcagcacagtttgcagctccaaaaga

SEQ ID NO: 794419 - DNA, 454 bp, Homo sapiens
gagagctttctcaatatgattaagaaacacgtcctcactggaactccttggatgaaaaagtagacaaaaatgtatattctcagtgaattgaaaagattttgccaggagaaagttaccctgctgtaaaagaggttccctttcttacttaggttttgagaaaggggcctgaagtttgtgctttacctctgtttacccaacatgatttcctttcagcagttataactcccttattaagagctttactgagatataattcttacacaatacaattcaatcatttaaartgtgcaatgcaaggattcatggtatattcacaattgtgtacaccgttactgtagctaattttagaatattttcatcaccgtaaaagaaaacctgtttagccatcattttcctacctctttatcccccaatccaaagtaaccacagatccactttctgtgcctatagattt

SEQ ID NO: 794420 - DNA, 553 bp, Homo sapiens
gaagagacattaacctctaattcaacagtagtttttgctccaataaaacaataatcttcatttttctctttttgttttttgtttgtttgtttgagacagagtcttactctgtcacccaggctggagtgcagtggcgtgatctcagctcactgcaacctctgcctctagggttcaagcgattgattctccttcctcagcctcctgagtagctggaaatacaggagtgtgccaccacgcctggctaatttttgtgtttttagtagagacagggtttcaccatgttggccaggctartcttgaactcctgacctcaggtgatccacctgcctcagcctttcaaagtgctgggattacaggcttgagccaccgcacccagcctcatcttcatcttagggtccaagagttcaaacaagtctgcaatgcatccaactgacgaaggtgaactttccagagaagaggcatttctttcttcctttcttttttttcttttttgagatggagccttgctctgtccccaggctggagtgcagtggcatgatctcggctcactgca

SEQ ID NO: 794421 - DNA, 529 bp, Homo sapiens
taagcaggaaagaagctgaagtgaggttaaagtacaggtttaaaaagtatgcacatatatattttgttaactgtcctcatttgttcagagccaaacaggctgttagggagaaaactacaaaagaagggaaacacaaaagcacttatcttcaacagaaaataagtcaatccctgakaattatttcgtgatttacacagaacaatgcaggcatatagatacatgttccctttaatgtcgggtcttcgcaaaagctatgtgtttatactgccacaaaagtgacggtagccatgccacattaatcacgttttgtttaccagctaaatcctaatggcctttgagaaatggctcagtaagagcaggctctccttagggccacctctaatcaagtgattagactgattgggaaaatggcatgacccatcaaataaacccttggtatcacgtgtttgttttttaatcactcattgccaacacgagattattatttttcaattgtacatttttccctatgattatgtctgtcaaggac

SEQ ID NO: 794422 - DNA, 529 bp, Homo sapiens
taagcaggaaagaagctgaagtgaggttaaagtacaggtttaaaaagtatgcacatatatattttgttaactgtcctcatttgttcagagccaaacaggctgttagggagaaaactacaaaagaagggaaacacaaaagcacttatcttcaacagaaaataagtcaatccctgataattatttcgtgatttacacagaacaatgcaggcatatagatacatgttccctttaatgtcgggtcttcgcaaaagctrtgtgtttatactgccacaaaagtgacggtagccatgccacattaatcacgttttgtttaccagctaaatcctaatggcctttgagaaatggctcagtaagagcaggctctccttagggccacctctaatcaagtgattagactgattgggaaaatggcatgacccatcaaataaacccttggtatcacgtgtttgttttttaatcactcattgccaacacgagattattatttttcaattgtacatttttccctatgattatgtctgtcaaggac

SEQ ID NO: 794423 - DNA, 632 bp, Homo sapiens
tctgtgtatgtacccaaaagaactgatagcatgaatggatatttgcacgttcatgttcatagcagcactattcacaacagccaaaacgtgaaagcaatctaagtgcccattgatagattactggatagacaaaatgtggtatwtacatacaatgaaatagtatccagccttaaaaaggaaggaagttctggcatatgctataacatggatgaaccttggagacattatgctgagtgaataaatcatcataaaagtataaatactgtatgattccacttacatgagggacctagagtagtcaaattcatagagaaaaagtagaaaggtggtttccagaaactatggggagggttgaatggagagttactatttaatggatacagagtttcagttttgtaagattaaaaaaaaattctgaagatgggtggtggtaatagttgcacaaaattttaaaggtatccctgctactcaggaggctgaggtgggaggatcccttgagcccgggaattggaggctgcagtgagctgtgatggcaccactgcacttcagcctgggcaacagagtgagatcctgtttctaaaacagaaatatatatatattaaatgtactaatgccactatgcacttaaaaat

SEQ ID NO: 794424 - DNA, 618 bp, Homo sapiens
agttgccttttggcccaccatgcccccccatcttgtactcatataaaccccagatcccaggttccagaagcacacaaggcagagacgaacagaagagtagaagaatggcagaacagcacagcagagagaagagaaggaacatccaaatgccaagaagagtttggctgggggcggtcaaagagagattggctgctggatagccaaactccagaagatcatcttcccactccattccctttccagctccccatccatcscactgagagctacctccaccactcaataaaacccctgcatttatccttcaagtccgtgtatgacctgattcttactgaacatcagacaaggacctgggtaccaagagggcactgagttggttaacacttaagccatctgcagatggcaaagctaaaggagtgcactgtaacacatgccatgccaactttggcttcaggagttggagacacccacccctagatgctactgtgggattggagccccaaagtgcttgcccaagctcctgcacctacccatctgcatgctcccccttctgtaaagggtttgagtgcatagcagctgaacacacaagccacacccctgttgcacatcctgcaaagg

SEQ ID NO: 794425 - DNA, 633 bp, Homo sapiens
cataagtgcatgggagtcacataaggtataaaactcaagggctagaaggttgaagattaaatgtcctctttataggaaagaggaaagtagtagatataggcaattgtagtagaagagaaaatgatttctagaggagattaatgggtctgaagaacaaacagttgcctgggataattttcctccaggctctgggtacatggttacaatttacagaaaggtaaggggcaggactgcactgtgaacagaggttgtcttattrtggagataaagtccctcaggtaacagttctcataggaatagataaaaagcctgtttgggtgggtgtggtcatggtcttagtttccttttccatgattaatattccctggttagtgaggggaacaggggatcgaaggcaattgtgttttttggaagaacttcccttagtcagataagaaaacttcagagagagctcctgcctgtgcttggagggagaaattaagggagggccagagaaacttcaattctggggcagcttctaagtccttccaacttcctttaatacaaagtgctcagcatgcaaaagtgccgtaccttggggtatcattttctgctgactagcccaaaagaatgaagcttaaaaaaaaaagagaa

SEQ ID NO: 794426 - DNA, 557 bp, Homo sapiens
ctatttctccacatcctctccagcatctgttgttacctgactttttaatgattgccattctaactggtgtgagatggtatctcattgtggttttgatttgcatttctctgacgacctgtgatgatgagcattttttcatgtgtctgttggctgcataaatgtcttcttttgagatgtgtctgttgatatcctttgcccacttttttgatggggtkgtttgattttttcttgtaaatttgtttaagttctttgtggattctggatattagccctttgccaagtgggtagactgcaaaaattttctcccattctgtaggtttcctgttcactctgatgatagtttcttttgctgtgcagaaggtctttagtttaattagattttacttgtctattttggcttttgttgccattgcttttggtgtttcagtcatgaagtctttgaccatgcctatgtcctgaatggtattgcttaggttttcttctagggtttttatggttttaggtcttacatttaggtctttaatccatcttgaattaatttttctataaggtataag

SEQ ID NO: 794427 - DNA, 651 bp, Homo sapiens
gcagatattagtaagcatttattttatttattttgtagtctgttaattccttatagaaggaaaccaggatgtttatctttaaaacctttgggcatagcacagtgcgtgatatgctatagtggaaattgcttagtaaatgattataggatgcataagtatctaacagaccatgagatataagaaaccctctcagggaggttctgagtcccctcttttactagcaaaatgcttgaactattcagatgaaaactattatatgatagcaatttatcatttcagaaaatttggaaagtactactttgagtagtccaactatccagtgaaagcatagcatcatttggcttagaaaaaatgttttcaaaggtgtctgattccatctttccctaattgtgatttaaaacacaaaatttatcccaaaagtaatgatgaccattttgaatgtcaraagaaatttctatcagaaaaagccttacactttaactttctttcaactttgagtgcaaattataagtaaaatgaactccagtcagatcttcatttaacttaagagtatgtttagaggtagctattattagtgctataattgatttttctcccttttgaatatatctggagcatataattggatggatcaatacttttagttatgga

SEQ ID NO: 794428 - DNA, 488 bp, Homo sapiens
tgagcatgatgattgggtgttgacacaaatatgtgaaatgtgccagcctcaaaccttcttatgacatcagatcagcacatgactctgctgggaagtcattaatccattatacattaagtatctggaacttttctggttaaaacaaatatatacctatatctctaagagatattattcttgatgtaggtcaattttataggtcctgaagagsaagtagtgtaccgatgttcaaaatgatgtctggtcagtgatggttgtccaaacacacacacacacacacacacacacacacacacacacacacacacacacacacacgggggaggggggagagagagagtcactgtgttacccaggctggaatggagtgtctattcacagatgtgatcacaagtccctgcagcctttgacccctagactcaagtgatccttttgccacagcctcctgagtagctgggactacaggcacacaccaccatccctggctc

SEQ ID NO: 794429 - DNA, 551 bp, Homo sapiens
gtcacgtacgccattagacctgtgctggagagtaaattctacttctctgtagtgggaccagactcctagacaggtaacaaagacaagactcaaactgaagacactttgtattcagtagactgatgagccaaaactctgttcagccgacagcacattacaagaaaaaagggaaagacagatttctaatatgacttttctagaaaatatgattttatatttttatttatatatttcatataagtatacataatatataaatatttagatatattttatatattatataatatataaatatttagatatatttttatataytatataatgtatacttatatattatcaacatacagtatcttcctctttcttgttctttgcctgtataatgtgtcaaaggcctcaaattcttttctttaatactaccccattcattgatacttgcattatcaattacaatttgtcttgtttaaagcatctacattactgatttatcaactttgaaaattgtatagctttaattccacagatttgcataaagttagttatgaccg

SEQ ID NO: 794430 - DNA, 551 bp, Homo sapiens
gtcacgtacgccattagacctgtgctggagagtaaattctacttctctgtagtgggaccagactcctagacaggtaacaaagacaagactcaaactgaagacactttgtattcagtagactgatgagccaaaactctgttcagccgacagcacattacaagaaaaaagggaaagacagatttctaatatgacttttctagaaaatatgattttatatttttatttatatatttcatataagtatacataatatataaatatttagatatattttatatattatataatatataaatatttagatatatttttatatactatataatgtatacttrtatattatcaacatacagtatcttcctctttcttgttctttgcctgtataatgtgtcaaaggcctcaaattcttttctttaatactaccccattcattgatacttgcattatcaattacaatttgtcttgtttaaagcatctacattactgatttatcaactttgaaaattgtatagctttaattccacagatttgcataaagttagttatgaccg

SEQ ID NO: 794431 - DNA, 551 bp, Homo sapiens
gtcacgtacgccattagacctgtgctggagagtaaattctacttctctgtagtgggaccagactcctagacaggtaacaaagacaagactcaaactgaagacactttgtattcagtagactgatgagccaaaactctgttcagccgacagcacattacaagaaaaaagggaaagacagatttctaatatgacttttctagaaaatatgattttatatttttatttatatatttcatataagtatacataatatataaatatttagatatattttatatattatataatatataaatatttagatatatttttatatactatataatgtatacttatatattatcaacatacagtatcttcctctttcttgttctttgcctgtrtaatgtgtcaaaggcctcaaattcttttctttaatactaccccattcattgatacttgcattatcaattacaatttgtcttgtttaaagcatctacattactgatttatcaactttgaaaattgtatagctttaattccacagatttgcataaagttagttatgaccg

SEQ ID NO: 794432 - DNA, 552 bp, Homo sapiens
gatgtaatcatatgaagatatatggccaaattaaaagtatatgtacttccttaattatttcaaattaccccatattttatttgttataaaatataatttgagtctactatttttagatagctgaatgaaataacttttctataatgaaaataatacagttaaaagtttgcatgtagaaaacaaggaagtttagtatttttgttttgtttttagtttattttttaaattatattttaaaaacataaaatttaacatcttaacttttttttttttttttttttttttttttttctgagacagggtctcattctgtcgccaggttggacaaatgtgttgagcatatttacatttttgttacacagattttcaragctttttatcttgcacatttgaaagtccatacccacaattacataaaatatcttaaagttatagcattctactttaaaccaaaaacatcctacctttaatcacgtaaaataactctactcctttatggtctaaccctccacactttatgttattgatgtcacaagttatgtctttatatgc

SEQ ID NO: 794433 - DNA, 611 bp, Homo sapiens
ttatagagtaagttgggagcacagctggtgcaagaatctgggtctgctgtttgccagagctttcttctatctgacagaacatattgcctaaagctgagaatcccacagtgtccttgattacgtattctcaaattatagctcactttagagattcctattaaaaatggagtatggcagcaggcctggaaatcatttaggaaaccccaggtttcaagcgggtgggagatttaagaagcagggctggaaggatgaaatatctaaaacatgggtggggatggatgtctaaatggctgtctactggatctttctgtggagagggcatcatgctaggtgytctgctggttaatcagaaagatgcagaaggtattccctaggagtttatttacttacttgacaagggtcttcttgtgaaagcctcatttcttgcgaaagccttcttgtaagttgctggagaaggcagatgaagaataggaagatgtatagctgttttagaagcccaagggcagcttgaaatgaactccctcataaagtagaggggagagctctcttgggaagaattcagtaggctccctcttgtctcacttggattttttaaagatgtagtctagtag

SEQ ID NO: 794434 - DNA, 518 bp, Homo sapiens
ttaaatctatgaaagaagatcatacacttttctaaagattttgtgctgaattgatccttctttgtctgaaaatattagatatcccagtgtcagaattatcatggggtgtaaagacttcagcacatatctcttataaagattatgtctgggctaatatccctcctacctcattctttcccctcacactgtgacctctgcatctttaacaaagaaaagacaataaaagacaattttagagctttggaacggcctgaagtttgctttatcaaggacaatactggcaactttccaraaacctggaggccatggctcatctgcaaatcatgtacatatatttgcatgaattttattttgattagtagcctcaacccatgatggtacttaggaagaatgaagcattttacatatatgaataaatgaagacaatttagtagtcttaatgctcatggctgtattttccctatttcttaagtctaattctcctcatccatccccttcttgttattccttctctttaa

SEQ ID NO: 794435 - DNA, 589 bp, Homo sapiens
agcatttctacacataaacgataaactagttgaaaaaaatcaagaaggcaattctatttgtaatagctacaaaaaaggaaaacctaagaataaatttaaccaaggaggtaaaagatcactacaaagaaagctacaaaacaccgatgaaagaaattgaagmagacacacagatggaaggccttcctatgtttatggattggaaaaactaatattgttaaaatgaccatactacccaagtaaatatacagattcaaagcaatctctatcaaaataccattgtcatttttcagagaaataaataaaaccatcctaaagattgtgtgggactaagaaagatctgaaatggccaaagccgtcctgagcaaaaagaacaaaactggaagcaccacactacccgacttcaaaatatattacaaggatatagtaactgaagaacctggtattggtatgaaaacagaacatagaacaatgaaatggaatagagaacctagaaataaatccacgtatttacagccaactagtcttcaacaaaagtaccaagaacatgaatcgaagaaaggacaccctgttaaatatatcatgcagggaa

SEQ ID NO: 794436 - DNA, 562 bp, Homo sapiens
cgcctgctacagcatggccttttaaagcctataaactctccttacaattcccacattttacctgtcctaaaaccagacaagccttacaagttagttcaggatctatgccttatcaacccaattgttttgcctatccaccccatggtgccaaacccatatactctcctatcctcaatacctccctccacaatccattattctgttctggatctcaaacatgctttctttactattcctttgcacccttcatcccagcctctctttgctttcacctggactgaccctgacattcatcaagctcagcaaattacctaggctgtactgcagcaaagcttcacagacagcccccattacttcagtcaagcccaaatttcttcctcatatattacctatctcagcataattctcatgaaaacacatgtsctctctctcctgatcgtgtctggctaatctcccaaaccccaatcccttgtacaaaacaacaactcctttccttcctaggcatggttggatacttttgcctttggatacctggttttgccatcctaacaaaaccattata

SEQ ID NO: 794437 - DNA, 491 bp, Homo sapiens
ttaagtgagattgctttcttgatttccttatcagattgtttgctattgctgtatataaatgctactgatttttatatgttgattttgagtgctgcaactttataaattaacttattagttctaacttttttttgacagagtatttaagtttttctaagtataagatcatgttgcctgtgaacaaggctaatttgatttcttcctttccaatctggatgccctgtacgtcttttagttgtctgattgctctggccaggacttccagtcttatattggataatacrttgaaaagtggtgaaagggcacaacctggtcttgttcctgcttttacagaaaaggctttcaatttttccttactcagtatgatgttagtagtgggtttgtcatgcatggcctttattattttgagatatattcgttctacacccagtttgttgagggtatttattatgaatttgagttttactgaacactttttaaacatctattga

SEQ ID NO: 794438 - DNA, 613 bp, Homo sapiens
agaatgtagaaagcacaaacatcaaggctagagaaataatttactaggtttcaagggttactagtacaaataatgagaataattaaaaagtaaaacaagagctgcctcctctatttaaaaagtagctgaaaaactacactaacttgaatgtggtctaggatccaaagcagaagtcttaggagtagagtctaacattatataatactcatgttaaaggaggcaaaactgcctacctagggaccaataacaattcatctacatttcctagataygtttttttgactcatcagcatcatattcttttatgaataataagttcaactaatttgttatcaattctttccactattggaaaagtctgttggatatattaatgttggaatgacaagcagcttgtgctcttctctgggcatctaaaaatatcgccagatgcattgtgagcaatttaaaagccataattagcttacttccaatgataaatgaataacagctccacgtacccttaagagtctccaatgttgttcattagaaatatgtgaagagccacatacgtaattttaaatttcttggtagctacattttaaaaagtaaaacaaacaggtaagatttattt

SEQ ID NO: 794439 - DNA, 613 bp, Homo sapiens
agaatgtagaaagcacaaacatcaaggctagagaaataatttactaggtttcaagggttactagtacaaataatgagaataattaaaaagtaaaacaagagctgcctcctctatttaaaaagtagctgaaaaactacactaacttgaatgtggtctaggatccaaagcagaagtcttaggagtagagtctaacattatataatactcatgttaaaggaggcaaaactgcctacctagggaccaataacaattcatctacatttcctagatacgtttttttgactcatcagcatcatattcttttatgaataataagttcaactaatttgttatcaattctttccactattggaaaagtctgttggatatattaatgttggratgacaagcagcttgtgctcttctctgggcatctaaaaatatcgccagatgcattgtgagcaatttaaaagccataattagcttacttccaatgataaatgaataacagctccacgtacccttaagagtctccaatgttgttcattagaaatatgtgaagagccacatacgtaattttaaatttcttggtagctacattttaaaaagtaaaacaaacaggtaagatttattt

SEQ ID NO: 794440 - DNA, 613 bp, Homo sapiens
agaatgtagaaagcacaaacatcaaggctagagaaataatttactaggtttcaagggttactagtacaaataatgagaataattaaaaagtaaaacaagagctgcctcctctatttaaaaagtagctgaaaaactacactaacttgaatgtggtctaggatccaaagcagaagtcttaggagtagagtctaacattatataatactcatgttaaaggaggcaaaactgcctacctagggaccaataacaattcatctacatttcctagatacgtttttttgactcatcagcatcatattcttttatgaataataagttcaactaatttgttatcaattctttccactattggaaaagtctgttggatatattaatgttggawtgacaagcagcttgtgctcttctctgggcatctaaaaatatcgccagatgcattgtgagcaatttaaaagccataattagcttacttccaatgataaatgaataacagctccacgtacccttaagagtctccaatgttgttcattagaaatatgtgaagagccacatacgtaattttaaatttcttggtagctacattttaaaaagtaaaacaaacaggtaagatttattt

SEQ ID NO: 794441 - DNA, 645 bp, Homo sapiens; identical to SEQ ID NO: 782040

SEQ ID NO: 794442 - DNA, 645 bp, Homo sapiens; identical to SEQ ID NO: 782041

SEQ ID NO: 794443 - DNA, 575 bp, Homo sapiens
tgacttctacatgctagaagccagtagccctccccacctctagttgagacaacgaaaaatgcctccagatattgcccatgctctctgggaggaaaaaatgttgttggctgagaaacactctcttggatggatgagattttttttgtaatggcattaaaattacctgggatgtcttttaaaaaagactctactcccaattttctgattcagtggatattctttgaagcttcctaatttgttttcattaagtcccttgtataattctgacacatacccaagtttggaaatcattatatcatacaaaggctaaattacccagcagtcaagatggagcctgtcacttasacaaatgataaaagggaaaaagctagaagcacttggaaccaggcttggagagacaacctctgttgaggtcacccacaaaggagcacagcaaattgtctaagtcatggtgtccaaaggaaaaaggtgctctcaggatagtacttgtagctgagtagtactctaaaacactgagagttattacaatagctattcaatctttctgaacacaattggacaagcatcaatattat

SEQ ID NO: 794444 - DNA, 571 bp, Homo sapiens; identical to SEQ ID NO: 782043

SEQ ID NO: 794445 - DNA, 591 bp, Homo sapiens
aacaaacagagcctcaactaaactttctactgcaaactgattagtatatgaaaatattttaatatcggtgagaaaaaaagaagtgagaaattatcaacggacttttttgatattaaataatctggatatattgtctttggaagaacttatgtgccagttatttattgtcacaacaatactgcagtgataacaccatagaacaaacaaccacaaaagtgtatgtataattaacaataattagtcattgtgcatgtgtctgtaatcaagtgggggtcagttaaggggatsccctgacattgtttatgcttgcttagatacctggagctcagagggctgttgagggaggtaggctggcttctgccagagtgaccagggcaactggacaactgtaatgtgacacaggcccagtgacccaggctaactgcggagacacaagaaagaatacattgaaatatgtcagaccccttaaggtctaggttcatactaggcaccttctcttaaaaatcaccctatagatcaaagcaatgtgtatgtccaagtttaggatgaagaggtgagtgaatatgccccatctcttttttggaaaggatt

SEQ ID NO: 794446 - DNA, 593 bp, Homo sapiens
atgagtaatatgaaagggactggaactgcatccatacactgatagtacacaaaatgaagcacaatgcgcaccacagagtcaaaacattgtcatggtgcctgtgatagttagggacaaatatctcagcatatattgagaaaaacaacctcattaaacaacagccttcatggcgttagactggaaacacaaatagagaactcaggcaagagatgtcraggaagatgtgagctgagttttgatctgtcttatctcagaaaaaaaaagtagataatatgaatttttgcaaaaatatagggaaagaagaccacaaagaaaaattgttgctataaaaaatatagtgagatggagaatagaaaactaaaatatgaaagaaaaagacaaaaataacttaaaatgttagctatttaaattaggtagtataggcataattggagtccctgttgaaggaagcgaaataagaaaaccaaataatggaaaactatatagaaaggtataatttttaaaaaattcatggacaatcacaaatgaacaaatatggtacgattacacttatgtggaataaaagaatcaaattcatagaaagtaaaatggtg

SEQ ID NO: 794447 - DNA, 595 bp, Homo sapiens
ctcttacatgtaaatctatggtttattttgaaccacttcttttatatgatgtaagattggggttcaacttctttcttttacttgtggatatctagttgttctagtctttggtgttggaattctggtaatacaggccttagagagtaagttgggaagtgtttcctcttcatctttttttgcaagagtttgtgaagaattggtcttacttctttaaatgtttgacagaattcaccagtagaaccatcaaaggctgtgcttttctttgtaaaaaattttttgattactaatttaatccttacttgttggaggttgattcagatgttttattttttcttgagtcagttttggtacatttttgtgtctttctagaatattgtccatttcatttaattcattaatatatrattgtgaattatattctttaattctccttatttttgtaaggtaactagtaatgttccgtctttcattactggtttagtaatttgagtcttctctttcttgattaatctagctaaagttttgccattttcttgatcttttttttttatcttgatctatttatctatctttatgccaagaccacagtatcttg

SEQ ID NO: 794448 - DNA, 653 bp, Homo sapiens
ctatctttatgccaagaccacagtatcttgagcactgtaactttgtagtaagttttgaagtcaggaaatgtcagtctttggaaccacatgattcaaaatacaacttctttttaaaaattgtttctattgtttttctattcttcatttatttctgctgtaatctttactttcttttgcttatttttgtttatttccactgatttatctaattttttaaacggataagtttaggtttttgattttaggttttcttttaaaatasgattaaaatatgatcattttttagatatcagtttctctctaagcaccacattagctgtattccataaattttgctagattagtttttattttcacccatctcaaagtttttctgaattttcttgtgattgattctttggctggtttgttatttgggagtgtgttaattttcacataaatgtaaattttccaaatttccttctgttattgatctctagctattaaatccagttattttatggtgttgttcgattctcgcatttcagttttgaattttgtactagttgtgcccattattgaaaatgaggcattggattttgcattttctttaattgtctatgtctctcttcaatcctatcagttttaatttcttgcattttggggcttttttg

SEQ ID NO: 794449 - DNA, 642 bp, Homo sapiens
gatagggactttccatgtctttcctaggcaggggcacagccttacatattttcatgaccatttaaattcctaagaatatgtcagagtttttcaaattcccctatgagcatctcatcccacagcttttccttttatttttttttcttttgagcctcttatttgctccagttattatccctgctttaagcaggtgttgtgttagacagttgccactgttttacttttctgacaaaccttaggaaaatgttattcacagtgagtgagctctgaaccaggttaaataaagacaagtcctgtgagtggaggtttccggagagcagccagacaggtccaataatgatatttctctgggaataagacttttgggtttaaaacagttctaaacctcttttgccccartcagtggctgctaggctagagttcttatatctaactttattgtacacctatttattttttcagggtcacttcagaggtagagagatagctatgggattaattcacattgaaatacaacaaagacagctttccttacccagattcagccattttttttttaatggaataaacattcttcaaattggtactattttggttacttacagagttttgaaaaagttgattctgacaatttttactagt

SEQ ID NO: 794450 - DNA, 613 bp, Homo sapiens
atctctattttgaactgtaacagcaagaatatcatgcatatcaacacagagatccttcatgtgcctgagatattctaataagctcttataacatggtatgttatacactatatctcaaacaactcttactattgctataaaattttcaacatggaactttgattaagataaartgaagagataataatgtttctaaatcttaggaaattttttcctgttactgaggtgggggacttttcaaaaatgtatttctgtcttttgctggaaatatttatttcagtttcctacagcattgctatagcattgctgtaggaaattaacagtaattggtgactggcagttcaactgacagaaacacattattttgcggggaggcggaggaaaagcattcgcaaactcaatatgaatccatttcggaaagtagagttgtttagagaaatacaaatatcttcactcagtttttgcccacttactgaaaacacagtgtgaaactaaaattgaaaaagcaatgttcttctgaacatctttccattaaatattgcatcatataaaaataggattttatggttattattacacatattttcttccctttcatatgcagaatctaaaa

SEQ ID NO: 794451 - DNA, 673 bp, Homo sapiens
aaaaagaatggaaaacaaatatgaaaccttggttgatgcgtgtgctttatgcagtagtatgagtcagcaattctcaaactcctttttgtgttccaggctttccagacttcagcaaatacatcaatagcttgtggataataggaacaatgttttttgttattggaatcaagatgtaaaaatacagaagacaaggttaggatttatcctstagtattctattggagttggagtcattgttttgagtatatatttgtaggtatataatagagctttgttcactgtatagttttaggaacaggacacaacatcagtagccataagcacacaagatcatgtttaccaaaatacagaaataactgaaattagttaaatagaaataaggtttcttacagaaaagttgacttcaggactaggatagaaaacacacaagattaacctggaacatcttattttgacagaaaataaaagaagttctcaaagagtaggactatattaaggctgataaaggagcaagcttgagggtttttttttttcaaatagaagaattttcctacctaataactgacctgtattcaaaaatattaaaaacaagaaatacagaaaggggctactctacactaaaggagatgaaaaaagtgtagcatccagatgcaatacactatcctgaattggt

SEQ ID NO: 794452 - DNA, 673 bp, Homo sapiens
aaaaagaatggaaaacaaatatgaaaccttggttgatgcgtgtgctttatgcagtagtatgagtcagcaattctcaaactcctttttgtgttccaggctttccagacttcagcaaatacatcaatagcttgtggataataggaacaatgttttttgttattggaatcaagatgtaaaaatacagaagacaaggttaggatttatcctgtagtattctattggagttggagtcattgttttgagtatatatttgtaggtatataatagagctttgttcactgtatagttttaggaacaggacacaacatcagtagccataagcacacaagatcatgtttaccaaaatacagaaatarctgaaattagttaaatagaaataaggtttcttacagaaaagttgacttcaggactaggatagaaaacacacaagattaacctggaacatcttattttgacagaaaataaaagaagttctcaaagagtaggactatattaaggctgataaaggagcaagcttgagggtttttttttttcaaatagaagaattttcctacctaataactgacctgtattcaaaaatattaaaaacaagaaatacagaaaggggctactctacactaaaggagatgaaaaaagtgtagcatccagatgcaatacactatcctgaattggt

SEQ ID NO: 794453 - DNA, 642 bp, Homo sapiens
agtacgtaagtgttaaatatttgcttagaaataaaaagacataataaaagtatccattactcataatgttattgaggtgtggaaggggagctggaatgaaaactcagcagggcagggggagaaagtgaactataagtaagcacacaggtgcctctgaatgtgggcaacaaacagaaaacagtagccaatatgagtggtgctagcctgcttggtttggaatattgtctctgtggtattctcggcttcctatatggatatttgttgctctagaattacagttaataagtgtgaccaaattgaaacaaacaataaactgaggcctgcgtattaacttttcttctatccagatggggacagaggtgctaaaatcatctcagagatgagatgttctcgttccaaagcatcaaaacaggtcctaataracacagttataatctttctttgacactgtagagtccaaatgcagaggctaaagtcataaaagtattttcctaaaaataagacataccacaatctgcttcatctgagccatcctcacagtgcagatgaccgtcacagagattcaccagtggaacacactctccatttttacattgaaaatggtctgccttgcatggctctatggggaaagaatgtttattg

SEQ ID NO: 794454 - DNA, 627 bp, Homo sapiens
atgtgctgatctgatatagagatagcagaaactggagagatagtagaacttcctgagatcctagaaatccctctcaagaaggaaataggctgatgcaaattgtttcatgatttgtaaatacatatgtaaaattagctgaacctagtagataaatattattaaaagcttaaactgatgcatggcctaaattcagtcagattttatcaattttagaaagtaatattattttctaaaattcaacatcacaggaaagataggaaaataaaaatgttacttttaaaacattaaagttacacttattttagaaaaagtttatatgctaagttaaatgaagatatctraaagaactaatatgattttgaaaattgagcagagtgactattttcctccccaacatatgacttagaacagtaccacagccaatgtatgtttctcgaatacttttgcagtatgaaaagaaagtagttataatacctaacatttatatagcacttcctatgtgtcagccatttttcagagtttttttctaaacatagcaatcaatttaatgtttattacatgcctttaatggcaggtcctattgtcctcaacctcactttccagataagggaattgggacagaaatag

SEQ ID NO: 794455 - DNA, 551 bp, Homo sapiens
agagagaggaaatgagggctgaatttcattattttatcaggaactcattcccacaataactaacctgctccgtaaataatggcattaatttatttataatggaggagccctatgacctaataacttctyaaggcctcacctcccaatactgttacataggcaattaaattttggcatgaaattttttttgtgcggggcgggtggcattcaaaccacagccccagcccatggaattattattcaagcaagccatttctgtcttcccagcaagaacgcagggtacctcacccttttgatactataaagcctgcaacccggcgcggtggctcacgcctgtaatcccagcattttgggaggccgaggcgggcggatcatctgaggtcaggagtttgagaccagcctggccaacgtggtgaaatcccgtctctactaaaaaatacaaaaattagctggacttggtggcaggcgccttaattccagctacttggaaggcagaaaaaaaaatactacaaagtctgctttccatagccctaggctgttcactctattca

SEQ ID NO: 794456 - DNA, 692 bp, Homo sapiens
tagccctaggctgttcactctattcatgaatgaccttgcgtggcatgtgacgttctgttcctctggactgtaagtatttgtgactaataaatgattgtcaatatcgtaagtccagtttcagttattgtatgtctggtcatcccattaccctaaagtgggaatcrctccctcatcagtgggtgaataggaggtgattaaaacagaccctcccctgccactcccacccaccatgtgcttggccctacaccagtatattgctactcaatgtcttcggacattctgatatgtcactgctgaccttgtgcttagaaatatgtcttcttgtatctgtgctctgagggtaagacatggcattcagaaaatagcataaatcatctggttccatatgctcaaatatattttaactgtgacaatctatttgactatctatagaaaagataactaccttagttctaagacaatagtaggttaaaattttaagatttaaaaaattttcgtggtgagaatgttatactatcaaacaagtcattgacagaagtctggatcatgtgaaacacataaatggcctgctttgcacataaataaacctctgaagaagtttaggacgtttgaactggtagaagaaaggtagaaaaaagaaagtgaatagtgttctgaataaataacaatagctggtatttactaagcactta

SEQ ID NO: 794457 - DNA, 444 bp, Homo sapiens
gtgtcacagaacagtgactacaacttctgctgtaattgatgggaacgaattcttctgggatgtgttaatacagctgcaggcagtaaggcaagcagcgaatggaaactaaatgggttcaggagctctagagacaatgatgttgctggaggcggagaggtaggcagccactaataactacagctaaacagtgggacraaatcatgcactaggtttgtttcaccaatcagtatatatcatatgcatttggcagttcggagtaattctttctttcccaaaccaattagcccttcactgtggtgctaactagtgcatatgtagctgctagttagaataatcactagcattaggagatatacgtaatgtaaatgacgagttaatgggtgcagcacaccaacatggcacatgtatacatatgtaacaaacctgcacgttgtggacatgtac

SEQ ID NO: 794458 - DNA, 581 bp, Homo sapiens
tctttatatgttttcttccccagctacatgaaaagctattacacagctattattttgacttatacttgttttgctgctttttttttttttttttttgagacggtgtctcgctctgtcgctcaggctggagtgcagtggcrtgatcttagctcactcttgttttgcattttttatgtgactagcacacaatgcttacaactctagccacttaattcattttgcttcaaagtgtgaatgaatacaatttattaccatgtaaactggctaaataatcactcataatttttgtcctcataagggacaaacagctataatataaagttacgatatttcccatatgtccttgaagtgaaggtggccatgtgactcaacttggcccaaaggagcaatatggagagatagtggaaataatatgtcccgcctcaaggcaaggctcacataaacgtatgcatgattttcaaactcttttccttcctagcaagcttgatgttaatgataatgataaatttttggaagccatacattaaagatgaagaaaaatatggaaatagctcaagttacctccccaacattaaaacaaa

SEQ ID NO: 794459 - DNA, 567 bp, Homo sapiens
ttggaaaaactgcaacctggatttagttgcaaccgcagggaggaactgctgctgccagggtgaagaaacactgctatagtggaagctgcgggagcgagagaatgtaagcaagcctagaggaagaaaacaggaaggaggaagtcacttcctcccccagcctcagtctctcagtaccactttatcctggcagagtagaaagtggtttttcagatgctagtcctagcatcacaaagcaaagrtgaagttagagtggagagagaatagcttcataaatagcctactttttcactcctctaactccattcatttttacctctaatttttccttcttactttctatcatttcttttttcttctttttgaggtttttttttttcttagacggaatcttgctctgtcgcccaggctggagtgcaatggcgcagtctaggctcactgctacctcttcctactgggttcaagtgattctcctgcctcagcctcctgagtagctgggactacaggtacgtgccaccacacctggctaattatttttagtagagatggggtttcaccgtgttggccagg

SEQ ID NO: 794460 - DNA, 643 bp, Homo sapiens
cctgacatggctggagaccctgggatcctttctcctggcatggtagactaaaccacttgttggctctgttccccaccctgtgccgcctggagcaggggaagcagatggtttcaatacaggcagaaacagctgttcctcatatggggtgagctgaatcttgattgttttaggttctgctctttacattgacccctcaatggtcctagttctgaagtatataagcgggccctttaaaagactttcctaaggcctgaatgtcaaatgaatcataatctaggtagcaagattgctcctaaatggacatcacagtggctgaaaacaatcaagggatggctgatttagtagggccatgctcaartagggcaagtctctccccaaggtaaccagagacatcctcaatgcatcagcaatcttggaagctgtactcatctgaaagttcaggctttgttggacaacactcctgtccactggcacactcacacactcactgccatacaaccctttctcagactgagtccattagtagtatctacctgccgtaagcccctagaatcaaagatgctatgaggaaggcttggacccaaagacagcattggagacttggtcttaggtgagcaagggtttaatctgactaggacagcca

SEQ ID NO: 794461 - DNA, 600 bp, Homo sapiens
cccttcaacatcatgatgccttaaatttttcttagagagcaaactgaatgcagtaggcatgacaggaaaattgctaaactatactttactagacttaaaatttctcctcattgaaaacctaaattggtaagccacagactaaaagatattcacaaaatatacatctaaaaagaagacttatatccaaaatctctgaagaattttaactcaataataaaaatatttaaaaatccagtgaaaagtggataaaataatctaataaacatttgcaaaggacacmaataaatggcagagaataacaacaaaagcaaaacaaattaaaaaatgcagcatcactagttatcacaaaactgcaaattaaaaccataatgagataccattacacacctagtagaatggctaaaatttagaagtctaacagtatcagctgttagcacagattttaagcaatgagtctcttaaatattgcttgtagaaatgttaaatagtccagccatttcaaaaaagagtttttcaatttctttaaaagttatgcctaccttatgacccagcaattttactccaaaacaattaaatcctatgtttataaatgattgtata

SEQ ID NO: 794462 - DNA, 573 bp, Homo sapiens
atagtctgctgacaacaggcaattaaagttcaaggatatttgagagaggaagcccattttaaatatggaagagaaagttgagtgatagaagggttagataaattgagtccagcagtacaacctcaagaataagttctgaaaggaaatccttgtaaactgtttggttttcttttatagaatcacctaagttggtcaccatagagatgacacaagcaaagacagtmctctcttcctctaagcttgcaaatgcctttgtaagaatggacaccagcaaattccacccccaaaaagagagatataatagaaacagagcaatattgtcaaacaccaggacttctgatctatgtcccagcagtagtggtaaaaatgaatcaagacaacaaatgtaattttttttctttcttcctataatataattgtagataaacatgagaagtcatatattattaggtcagggttaagtaaaaatgatgcagcattcattttcattcaatttaattcaacaaatacttagtaaaagtcatgtggtagatactctaccaatattgtggatacacaaaaggagttaataca

SEQ ID NO: 794463 - DNA, 674 bp, Homo sapiens
atagaagtttaacggactcacagttccatgtggctggggaagcctcacaatcatgatcgaaggcaaaaggcacatcttacatggcaacaggcaagagagaatgagagccaagtgaaaggagaaaccccttataaaaccttcagacctcatgagacttattcactaccacaagaacagtatgtgagaaacagtcccatgatccagttatctcccactgggtccctcccaccacacaagggaattatgggaactgcaattcaagatgaaatgtgggtggaagcacaacggaactatatcattgatcaaagcattattgttttctctgataarctgatctagaaagtgctgcttgtgatcagctttggtgaccatgatcagtgaaatggttaaggaaatctacagattttgtaggtttgtgccttgacagacgaccggtatctgtttctcttttcatgatgaagtatctaacaaagctctgtccaaaattttgaatttctcgttaaatgcatcatgattatagaacagaggttacaatcaattattcagtcacacaatcactctcatcagtcattaaggtgcatacctggtgttccagttattcagtgtggtataacaaactacctggaacttaatggcttgaaatagtcaccattacattatgattgtccattctc

SEQ ID NO: 794464 - DNA, 639 bp, Homo sapiens; identical to SEQ ID NO: 782283

SEQ ID NO: 794465 - DNA, 562 bp, Homo sapiens
atcagcactctgtaaaatggaccaatcagtgctctgtaaaatggaccaatgagcagaacatgggcggagccaaataagggaataaaagctggccacctgagctagcagcggcaagccagtggcgttcaatgttgtggaagctttgttgttttgctcttcacaataaatcttgctgctgctcactgtttgggtytgcactaccgttatgagctgtaacactcactgcaaaggtctgcagctttactcctgaagccaacgagaccacaaccccaccggaaggattaaacaactccagatgtgctacctttaagagctgtaacagtcactgcgaaggtccgcaaggtctgtggcttcacttcttaagtcagcgagctcacgagcccatgggaaagaagtaagaactccagatgggctacttttaagaagtgtaacactcactgtgaaggtcggaggcttcaatcctgaagtcaagcgagaccacgaacccacgggaaggaaaaaactgtggacacgtgaacattggaaggaacaaactccgggcccaccatctttaggaactgta

SEQ ID NO: 794466 - DNA, 562 bp, Homo sapiens
atcagcactctgtaaaatggaccaatcagtgctctgtaaaatggaccaatgagcagaacatgggcggagccaaataagggaataaaagctggccacctgagctagcagcggcaagccagtggcgttcaatgttgtggaagctttgttgttttgctcttcacaataaatcttgctgctgctcactgtttgggtttgcactaccgttatgagctgtaacactcactgcaaaggtctgcagctttactcctgaagccaacgagaccacaaccccaccggaaggattaaacaactccagatgtgctacctttaagagctgtaacagtcactgcgmaggtccgcaaggtctgtggcttcacttcttaagtcagcgagctcacgagcccatgggaaagaagtaagaactccagatgggctacttttaagaagtgtaacactcactgtgaaggtcggaggcttcaatcctgaagtcaagcgagaccacgaacccacgggaaggaaaaaactgtggacacgtgaacattggaaggaacaaactccgggcccaccatctttaggaactgta

SEQ ID NO: 794467 - DNA, 562 bp, Homo sapiens
atcagcactctgtaaaatggaccaatcagtgctctgtaaaatggaccaatgagcagaacatgggcggagccaaataagggaataaaagctggccacctgagctagcagcggcaagccagtggcgttcaatgttgtggaagctttgttgttttgctcttcacaataaatcttgctgctgctcactgtttgggtttgcactaccgttatgagctgtaacactcactgcaaaggtctgcagctttactcctgaagccaacgagaccacaaccccaccggaaggattaaacaactccagatgtgctacctttaagagctgtaacagtcactgcgaaggtccgcaaggtctgtggcttcacttcttaagtcagcgagctcaygagcccatgggaaagaagtaagaactccagatgggctacttttaagaagtgtaacactcactgtgaaggtcggaggcttcaatcctgaagtcaagcgagaccacgaacccacgggaaggaaaaaactgtggacacgtgaacattggaaggaacaaactccgggcccaccatctttaggaactgta

SEQ ID NO: 794468 - DNA, 538 bp, Homo sapiens
aattatatataattttatttaaacactcaaaaatcaaagaaatgtaaaaagtagaaatcaaagaccttaatcaatactgatcctatttgctgcctcatacataagcattaatatttttttccttccttcccaataattttccatgtggtctatagtttgtaaaaaataatatcctaggatacacacacactcacacacacagatatttctatgtactacatatatacatatataaattttagcaaatttatgtcacatagaaatgcagctgcaataatgttccatttcagcacataaatctcttcctcattcttttcataaatgagtagtattccatagtgttagatataataawgtatttctctgcttctttattgttacactttagaagaaactttcaatatttttataatggactgttctgttttgaatatccatatatataaattttgtaaatatacagtaagatactagatgtagaatggaaggccaaaactgaaaaattctggcaaattgcccacagaagtctattccaatt

SEQ ID NO: 794469 - DNA, 539 bp, Homo sapiens
agaactgcaagtaaattaaacctctttcctttgcaaattaccctacatagcagtatgagaatgaattaatacactaaattggtacaggaaacagtgggttgttgctataaggctacccaaaaatgtggaaacaactttggaactgggtaataagcagatgttggaacagtttgtagagctcagaagaagacaggaaaatgtggaaaagtttggaacttcctagagactttttaaatggctttgaacgaaatgctgatagtgatagggacmatgaagtccaggctgaggttgtctcagataaaaatgagaaacttgctgggaactgtaaaggtcactcttgtaatgctttagcaaagagactggaagatttctgctcctgccctagagatctgtggaactttgaacttgagagagatagttcagggaatctggcagaagaaacttctaagcagcaaagcattcaagacgtgacagagtataaaagtttagaaaatttgcagccagtctatgcagtgggaaagaaagctcattttctctgg

SEQ ID NO: 794470 - DNA, 647 bp, Homo sapiens
gttaacaacatcaaatcaatatcaataattaaataattatttaatgaacaaatggcccattggtggttctgttattaatggcacaaaataactcttacatgtcagaagggatgttcttaaactgtcagtacttctaagcacttaaatgaacacctttaaaaataatcatagctaagtgtattgcatggaaattatttttaagagattgaaaatgataactggaatatttaatgcagaggagggtaaataagaaactttttttctcattttgtgggttgctccagtcgtaagaaaactgtttttttgagcaggtgcctccagttgttagtctgcaggaggttattcaaaactggggcacactgggttagtttccatggaagcagaaattaacccccaggaacctcatacgtttttarcaccatccggaggacatctggtatagcacccatcagaaacaacaactgaggcaaattcccactataaaatacaagtagaaggaagagcagtcaccttcataatcatttcttacactactataaatcttcctttgaaatgatgtatgttttatcagaatattcagagtaaattgctataatttaattttttgaagtattcttttcccaaatcataaattatcttaatgtaaa

SEQ ID NO: 794471 - DNA, 512 bp, Homo sapiens
ctgtagttgttcattcacttattcacattatatactcaattaaaaattattcacaaagcatcctcttccacagcatctctatagtgtttctaatttgatttccacaagaagcccaaattctcattctctgtacttccggtgcactcccctttcagttttccctatctctgttaccagcatcttcatgagttactcatcctaaaattgtaagtttttctcttttctgctcagtgtarattgaatcaatgttgatagatccagtctccatttcagggaatgtcgttcatcattgtcctcactagtgaaaaggaaaaagaaagaatgtatttgctctatagaaatgatttacttaccataaattaattaaatcactaagccacaaacaagctgaatcatgaggtgttaccaaaaatgtgtaaaatttgagttcaaaatttatacttgaataattagaaattgtctaaaagtttcattaggcatttcaaatatcttagatcttagagcctttatgt

SEQ ID NO: 794472 - DNA, 512 bp, Homo sapiens
ctgtagttgttcattcacttattcacattatatactcaattaaaaattattcacaaagcatcctcttccacagcatctctatagtgtttctaatttgatttccacaagaagcccaaattctcattctctgtacttccggtgcactcccctttcagttttccctatctctgttaccagcatcttcatgagttactcatcctaaaattgtaagtttttctcttttctgctcagtgtaaattgaatcaatgttgatagatccagtctccatttcagggaatktcgttcatcattgtcctcactagtgaaaaggaaaaagaaagaatgtatttgctctatagaaatgatttacttaccataaattaattaaatcactaagccacaaacaagctgaatcatgaggtgttaccaaaaatgtgtaaaatttgagttcaaaatttatacttgaataattagaaattgtctaaaagtttcattaggcatttcaaatatcttagatcttagagcctttatgt

SEQ ID NO: 794473 - DNA, 600 bp, Homo sapiens
gctgagagttttaatcataaagggatgttggattttgtcaaatgcttttactgcatctattgagatgatcacgtgattcttgttttaaattctgtttatgtagtgtatcatatttattgactcctgtatgttaaaccatccctgcaccccggtataaaacgcacttgatcatggtgtattctctttttgatatgttgttggattcagtcggccagtattttgttaaggattttagcaactatgttcaccaaggatattggtctgcagttttcttttttgaagattcattttggagctgatttccagttttattatactgtggtctgagagagtgcttgatataatttcaattgtcttaaatttattgaggcttatttttatggcctatcatatggtcartcttggagaaagttccatgcactgttggatagaatgtgtgttctgtggttgttggatgaaacgttgtgtatatatctgttaagtccatttgttccaaggtatagtttaaatccattgtttctttgttgactttctgtcttgatgacctgtctagtgctgtcagtggagtattgacatcccccactattactgtgctgctgt

SEQ ID NO: 794474 - DNA, 654 bp, Homo sapiens
gatcctatgtatttaaatttattttcaccaattttatttctcttcctcatatcccagagttaactaattttctaaacttggtgttcagtactaccatttttgttatttcacacactacataaatatctaatacaaaaacactatcttgtattgcactgacaaaatatatacgtatttttagaaacttcttgtttttcatctttatttgtaataattgattcatgttgattcataaagctttgctcaggtatggttaaacaactgctaaattccagtattctattgtatgaaaacgccaaaatttgtctatctaatttttgactgatggtcatttctaattttgcctcatagcaaaaagtgctacagtgaaaatatttgctttatatacaagtctttatataaaagtgcagtggattcactaggctacatacctacacacacatacacatgtaattttttactttttgggttagtggattkttccctagatttgtgttgccaaactgctttctcttatgttgatactgatttatattcccatcagatatgggaatttatttcttttttcttttctacatctgtatcttcacctggtacagttacctttttaaattttgagggaaatggtttatcacgtgtgcttattggattttt

SEQ ID NO: 794475 - DNA, 623 bp, Homo sapiens
taaaagtttgatctatttaaaaatgctaagatcttgattattggctctctaaatcctgcagttcaggacattttgaacaagctgcagaattctaaaagacagaatacgtattgagaagaatataaaatagccaaaagccaatggsttatccttatgccagtcatagtataaagtattcaaaaacacttgtttaatttatgttccagctaatatttgacagttattacatagaaacacataataatatgatttattttatatgtgaaaagataactttacaactttatgaacagcaggtaaattgaggaaagatgctactagcagtaaatatgctcacagtcagactgaaacctgagtctcctttgaaaattgattatgggctgggttcagtggctcacacctgtaatcccagcactttgggaaggtgaggtgggcaaatcacttgagcccaggagtttgagaccagcctgggcaacacagggagacccccttctataaaaaataaaaagagaagaaaagaaaaaagaaaattaattatggatagatatcaaattggaaattaccattgattaaatggattgttactgttgttgtcattgttttctcaattaattgcattaata

SEQ ID NO: 794476 - DNA, 591 bp, Homo sapiens
ggtatggagcttccatgccctccctgggcttgccaccctctaggaacctccacatgttcatctatctggaggctccctgaaccccatccttttggggttttatggaggcttcattacatagtcacaattgacaaccgtgtagaaatgtgactggacaaataacacataatctaaacccaatgaggcttgtctcttcagacttttcttggcctctttgtgtagcattctttcttctagggtaggagcagggaccttcttyggaatgagaactttttttttttcttttttttgagacagagtctttctttgttgccaggctggagtgcagtggcacgatcttggctcactgcaacctctgcctcctggattcaagcgattctcctggattcaagcgattctcttgcctcagcctcccgagtagccgagactacaggcacacacacaccaccacacccaggtaattttcgtattttttagtagacatggggtttcaccatgttagccaggatggtctcgatctcttgacctcaagtgatccgcccgccttggcctcccaaaatgctgggattacaggtgtgagccaccatgccc

SEQ ID NO: 794477 - DNA, 606 bp, Homo sapiens
cttgagagaaattattatgtcttgagggcaagaaagggaactaattaagtttgcattttaaaaattgttaagaatagatgtaggatgggatagagggtaccttagagatgcaaggattgtggaggaatactttcatatgttttatgatgaattgaaagaagataatattctacttcctgtgcaagtcatatatatgtttgacacattctaaagcagacctaacttagggatcatttagatttgagtggtaagagatagaaagtaatgaggataattctcatgtttctcacttacctaagttttattctatttaaacaaagtagaaattagtcatagcaggaacactctgagtgttcataattttttaaatgagtgaactcagcagctttgataatataattagacatawgtaacaatacccatctacctgggttggctttataaaatgtagatatcaatacttggaaaacaagttatcctttcatgtttattcattaacaatagtatgtccttcatcttaagtagtcatacatcttgctctttcttgattggaaccttaaagctaaaaatgacatatggacctctttgtatccatataattaacaa

SEQ ID NO: 794478 - DNA, 611 bp, Homo sapiens
acatcctcagtgggataaaaactgtaagtggaggtacttgtagtgatttctatcaactaatcttatttgtctaattgtgccactttttactaagctctttcaatccaagtactttattctcatgacctgaataagagctctgtgaaataaatactatcaatattttwttttacaatgaagaccctgaggcacagaaccccaataacataacgcacatagcactttccatttcaggaattagaggaagacctaatgtctatattgccagaagtttttatcaaattgagatgggaggagaatttcgacaccacttttgataagacaaccacactttctgaatcattgaactataaccagatttcctgcttgccttagccagtatcaaggatttacccatgaaagcagttttagaagccatatcttttgaacgttcacagatttatcgccgtctgtttcacctgagtagcacctctgaatgactttataaatgacattgatagatgacatgccatagggcggatggattgtcaagtacctttattgcaagagcattctactcaactttctaaggcagtgacacatattaatatatctggaaatgtgccagacaa

SEQ ID NO: 794479 - DNA, 630 bp, Homo sapiens
cttgctcatgatattttgttttattgtgtactcagttgtcttagaaggatatgcccattttacaaaaagaatatttacaggactctttaaggactagatgaggttgccctcctcaagatgatttggctttgcttctaggtacactaagagtctgagaattcttcaattcaagttcatagtttgaggacactgaaaacactaatctcaggatgtgaatgcaaaacttcagggactgttttctacctttctttgtctcctaagctcatatatgccctaagcgtgtaactctttaatgacccagcttaatratgggagggtctttactacatttcccaccttgatgggttcaagaccttgattcttcaaggccacaaatatgaagcccaaatctacttagatcgttcaatgcctttgggacaaaagtgggtttatttctacgtgcctgctcacatatctggacacctgcttcccctacaattttgtcccagttgctcctcattggctaatctaatcttcaatacttttagagacatttaaaaaaaatacatgttctgtactattaatggcttttacaaaaggatgtgctcaataactagccaatattaaagtaacttgttaaaacatggtgtc

SEQ ID NO: 794480 - DNA, 622 bp, Homo sapiens
ctgagtagctgggattacaggtgcccatcaccatgcccagctaattttagtatttttagtagagatggggtttcaccatgttagttagatttgtcttgaactcctgacctcaggtgatgcacccaactcggcctcccaaagtgctgggattacaggcatgagccaccgcataatattgttaactacagtcaccatgctgtactttagacccccagaatgcatacatcttaagactggaaatttgtattctttgaccaatatctcctcatttctctacmccccagcccatggaaaccatcattctactcttgaagcactgtatattaaatgtcacctgaggcctgtttccagttatctccgagcttcaatttacttgtctttgaatttatgttaatgttccccttctctctctgggttgatgtgagaagggaaatgaaatcacatacatgaaagctcctagcacaatgtctgttctataataaatgtaaaattaatatttgtttttctggttggaaggttataattttttaaattatagatgtttcttcagaaggaatagaagaaaaaatgttaggtctttgcatgtcttaatctacaaactgtcaccccaagacagctttgt

SEQ ID NO: 794481 - DNA, 443 bp, Homo sapiens
tagagatcactaacaacagccaaactgttttggctgtttatactaacaagatttgtcaatagtctgtagacagttttatatgtgatgctatttgatatggtttggctgtgtccccacccaaatctcacattgaactataataatccctatgtgtcaagggtggrgccaggtggagataattgaatcatggggggtggtttcccccatactgttcttgtggtactgaataagtctcatggtatctgatggttttataagtgggtgttcccctgcacaagctctcttgcctgctgccatgtaagacgtgactttgctctcatttaccttccaccatgattgagaggcctagccaaccatgtggaactgtgagacaattaaacttcatttctttataaattacccactctcagataggtcattattagcaatgtaagaacagagta

SEQ ID NO: 794482 - DNA, 452 bp, Homo sapiens
tttttacaaaatatttttttcagattgttgaaagaacataaaatgtagtggtttatttatttagtggtaacagtaattaacactaatattattaactaacttataaactgtccatttaaaaacatgcttatacatttattatgtgtcttttttaatgactagatcagccagactcctaataraaaattatgacattctcaaactggataattggagttcaataaaacacctatttctaaaagtatggataaagctaaaaatggtagctcaaataatagtaaaatacctctttcttgcaacctctgataggcaattgctcctctggtttggaaactgtcccttccagaactcatgctgaaatgcagttgctattgtgacagtatcaagaggtggagtctttaaaaggtggcaggccatgagggcttcacccttacatgtggaatgggtgcctt

SEQ ID NO: 794483 - DNA, 609 bp, Homo sapiens
taacaagaggtcccagcttctattaagatcctggaagggctatagccaaaacaaaccaaatcgtcttttctaaaactaaaacccaacttcagatcagctcagtcacagactgcttaaggctaatcttcacctactttaattctctgccaaaaagaaaaagtaaattcttgctggggggaaaatacattagcaagatccccaaataatccctaaaatatttcatttcaattatctgacattcaataaaaagttaccagacatacaaggaaaactgaccaaatgactaaattgagagaaaaatcagaatgaatgaagtccagaaagaagaactactagaaatagaccttacagtaattacaatacatctatttagtaaaacagatgayaagatgtagaatttcatttcccaaacactggaatgtataataaacatttagttctagacaatggtaataaactaattgtaggactagccctagaaaaccatcctgaaaaatacaattactgaaaataacatatcaataggtgagtttaacaacagaccatctatgatagagaattaatgagctaggtgataggtaaaaataaaaagaagcaaaaaagtaattt

SEQ ID NO: 794484 - DNA, 634 bp, Homo sapiens
cctctacatgaacaaccataatctgtaagtgttgagtcttaaagtagagcaatttaaaaatgcgttattttggcaggcaaataaaaaacttttaaacatttttctctatatttcctaaaaaaaattatcttaactttctaatgggctatggagataataacaagaggtcccagcttctattaagatcctggaagggctatagccaaaacaaaccaaatcgtcttttctaaaactaaaacccaacttcagatcagctcagtcacagactgcttaaggctaatcttcacctactttaattctctgccaaaaagaaaaagtaaattcttgctggggggaaaatacattagcaagatccccaaataatccctaaaatatttcatttcaattatctgacattcaataaaaagttaccagacatacaaggaaaactgaccaaatgactaaattgagagaaaaatcagaatgaatgaagtccagaaagaagaactactagaaatagaccttacagtaattacaatacatctatttagtaaaacagatgataagatgtagaatttcatttcccaaacactggaatgtataataaasatttagttctagacaatggtaataaactaattgtaggactagccct

SEQ ID NO: 794485 - DNA, 518 bp, Homo sapiens
cactggctacattccaaccagagaaataatttaattattaaatcaaaaaatctttattgagtgtttactacatgccagacactgctctaagcactgaaaataagacagtgatcaaggcaaacaaaaatctctaccttcatggagcttacatactagtgataggggcagaccacaggggcaaaaaaataaaatyactaagataaataacatgtcaaataagaataaattcttagggggaaatttaatcaggaaaaggatctccttaaaccatcatttggaaagggcaaggggtgcaatggggaggaagaaagtggaagaaagtgtgaaaaaatttaaattgggttgccaaaaaaggtgtcagccccagagagtccagatatgtctttggtgtttttgcataattgcataaagtagagggtgggaggtggtgaggtttaaaagtagccaggtgtagagtcaactctaacaggtggtgagctggttctccacctgactccattttcatctcttcaccaatg

SEQ ID NO: 794486 - DNA, 522 bp, Homo sapiens
tcccaaaatgaaattctaatttgtctttttaatctaaaattgactttggaattcacagttggaccactggaaagattaaaaggatgtatctctcattaggcttattagatatggtggtttgtattaaaagcattatcaaataaaaaaagcaatactaaataktatttaaattatatttatatggctatgttattgatgtgaaagtactaaagattatataaaatttataaaggtctactggtcctgttttgatgtatcattcatgattctggttgttgtcttaaaattttgtatgcaatagaagctcctgaattttcctgtttattgcagaattctcattatattgtaactatggctttactaagaaaaatcatctatagtggtgattcatttctaaaggcaattgcaatcagattcataaaaaagtctctaacaagtactcataaatatgtttctaataactttaagaaaagtggactaaataaaaatttccaaaactaataaaaaaagatggattaataa

SEQ ID NO: 794487 - DNA, 522 bp, Homo sapiens
tcccaaaatgaaattctaatttgtctttttaatctaaaattgactttggaattcacagttggaccactggaaagattaaaaggatgtatctctcattaggcttattagatatggtggtttgtattaaaagcattatcaaataaaaaaagcaatactaaatattatttaaattatatttatatggctatgttattgatgtgaaagtactaaagattatataaaatttataaaggtctactggtcctgttttgatgtatcattcrtgattctggttgttgtcttaaaattttgtatgcaatagaagctcctgaattttcctgtttattgcagaattctcattatattgtaactatggctttactaagaaaaatcatctatagtggtgattcatttctaaaggcaattgcaatcagattcataaaaaagtctctaacaagtactcataaatatgtttctaataactttaagaaaagtggactaaataaaaatttccaaaactaataaaaaaagatggattaataa

SEQ ID NO: 794488 - DNA, 612 bp, Homo sapiens
cctgttaactgttacgtgaacaacagagaaactttagttttgtttaaattataaaaatattggggtttatggaagctagagttaccctgaataattcactatactttattcataatgtgatttatccttttaaagaaactttttattcatttattcacaagcaaatttcaccaaaatttttctataaaaggccagctagtaaatattttagatattgtaagtcatatagtctccgttgtcaccactccactctgtcattgtaatatgaagcaagccatagatgacacataaaacaatggtcatggctatktttcaataaaactttatttaccaaaagaagagggaggtaggctggatttggcccataggtatattttgctaactcctttgatagatgataggtaagtaaaactagaaccatacctttatgatattggctggggtcactcccacaactgcattcaacagagtatttgatggtgtctgaaattttaagatagtttcattcttacatctggtgctttatccactgtaactgaaacatctgggggctctctgagctcaaacttcttcacatggtgctggatcccaagagtcaaccatgggagctgc

SEQ ID NO: 794489 - DNA, 630 bp, Homo sapiens
ttctgttgtttaagccacccagtttgtggcattttgttacagcagcactggaatcctaatggatgctgtattagataaatattttaggcttaggtaggtattttttgatcacttctatgcaatggcttgactattgttctatttgtccctaaatctggttcttcagcctccccartgattctgtgagctagtgatcatcctttaacagcctttttatgattaagtcacccaggatagtctctgctgcttacatcttcacaggaagaagagaactgtagacatgcagcagccatcttgtggatatgagggaagagccaaatagactacaaatcggttaacacagagaactaaaattgtggagctactgaatgaaccagctatggaattgtctgtgtgtgggcattcagatggacataccggataaaattctggactggtaagagtgtggggaaattgccagtcttaagcagtgctgatggaggtgtgaattggtaaaacaatttgaaaagtaagttgctagtttttataaaatttttaaaaataaatgtattctctgacccagtattatcttttctgggaatctattttacacattaaaaaagcactagattgtcatatactatatatata

SEQ ID NO: 794490 - DNA, 630 bp, Homo sapiens
ttctgttgtttaagccacccagtttgtggcattttgttacagcagcactggaatcctaatggatgctgtattagataaatattttaggcttaggtaggtattttttgatcacttctatgcaatggcttgactattgttctatttgtccctaaatctggttcttcagcctccccagtgattctgtgagctagtgatcatcctttaacagcctttttatgattaagtcacccaggatagtctctgctgcttacatcttcacaggaagaagagaactgtagacatgcagcagccatcttgtggatatgagggaagagccaaatagactacaaatcggttaamacagagaactaaaattgtggagctactgaatgaaccagctatggaattgtctgtgtgtgggcattcagatggacataccggataaaattctggactggtaagagtgtggggaaattgccagtcttaagcagtgctgatggaggtgtgaattggtaaaacaatttgaaaagtaagttgctagtttttataaaatttttaaaaataaatgtattctctgacccagtattatcttttctgggaatctattttacacattaaaaaagcactagattgtcatatactatatatata

SEQ ID NO: 794491 - DNA, 644 bp, Homo sapiens
cactaatcatcagagaagtacaaatcaaaaccacaatgagataccatctcacaccaatcagaatagctattattaaaaaataaaaaataaagaacagatgctggcgaggctacagagggaagcaaatgcttgtacactgtttcttccagccactgtagaaaccagtctggagatttctcaaagaacttgaaacagaactaccattggaaccagcaaccccattactaggtatatatgcggaagaaaacaaatcattctaccaaaaagacacaggaactcacgtatttatttcagcactattcacaatagtaaagacatgtaattaacccaagtatgcctcaacagtgggttggataaagaaaatatggtatatatataccatggaatcctgtgcagccataaaaagaacaaatcacgaggtcaggagatcaagaccaycctggctaacacggtgaaaccctgtctctactaaaaatacaaaaaaatagccaggcgaggtggcgggcgcctgtagtcccagctacttgggaagctgaggcaggagaatggcgtgaaccccgggggacggagcctgcagtgagccaagattgcgccactgcactccagcctgggcgacagcgagactctgtctcaaaaaaaaaaaa

SEQ ID NO: 794492 - DNA, 641 bp, Homo sapiens
ctatgggtaagattgataagaaaaagaggaagcatttatgtttatctgtagcacacaaagtcaagctgttgaagaaactggacaccagtgtaagcgtgaaacatcttacagaagaacatggtgttggaatgaccaccatacacaaactgaagaaacagaaagatgaaccattgaagttctatgctgatagtaatgaacacaaattaatgaaaaataaaaaaaaactgaataaagctaaaaattaatatcttgatcatgtgttgaaagagtgatccatcaacactgcagtgaacacatgccacttaatggtatactgatcatgaaacaagcaaagttctatcatggtgaactgaaatttggaaggaattaaaaatacatgcaacaagctggctgcagaaatttaagaaaagacacagcattaaattgttaaagatttgtggtgataaagcatctgccaatyatgaagcagcagggaaatttattaactgatgagtttgccaaagtcatcactgatgaaaatctggcaccagaacaagtgctgataaaacatcaatgcttgggcgttattggtccaaaaagacacttgctacagctgacgagacagcccctccaggaattaaggatgccaaggacagaataac

SEQ ID NO: 794493 - DNA, 689 bp, Homo sapiens
ttcctttccaatttggacgctcattatttctttatcttgtctgattgctctagctacaacttccagtactatgctgaataacagcagtgaaactgggcatccttgtcatgttctcaatcttagagaaaaggttttcagtttttccccattcagtatgatactagctgtggatctgtcatatatggcttttattatgttgagatatgtcctttctatactgtttttttagggtttttattatgaagggatgttgaattatatcaaatgcttctccagcattagttgaaattatcatattgtttwtgtcttattctgttgatatatcaaattggttgatttgcatatattggaccatccttgcacctctgagataaatcccacttggccatgataaatcatctttttgatgtgttattgagttcagtttgctagtgttttgtgaagcatttgtgaatcaagattcatcagggatattggcctgtagttttgtttttttttttaaatgggtctgtctggttttggtatcaaagtaattctgggctcataaaatgagtttgaaaatattccctcttcttctgttattctaaatagtttgagtaggattggtattctttaaatgttaggtaaaattcagcaatgaagtcattatatctcaggcttgtctttcctgggagatgttttattatcat

SEQ ID NO: 794494 - DNA, 666 bp, Homo sapiens
tttgctagtgttttgtgaagcatttgtgaatcaagattcatcagggatattggcctgtagttttgtttttttttttaaatgggtctgtctggttttggtatcaaagtaattctgggctcataaaatgagtttgaaaatattccctcttcttctgttattctaaatagtttgagtagkattggtattctttaaatgttaggtaaaattcagcaatgaagtcattatatctcaggcttgtctttcctgggagatgttttattatcattttgatctcatcacttattattggtctgttcagattgtaaatttcttcacggttcaatgttggtagactgtatgtgtctaaaaatttatccattccttctagatattccaatttatgggtatatagtgctcaaagcagcctctaataatcctttaaatttctgtactattggttgtaatgtctcctttttcatctctaattttatttgggtcttctctctttatcttagtctggctaaaggtttgtcaattttgtttaacttttcagaaaaccaactttgattcattttattaatcttttgtattgttttcttcatttcttcattttaatttcatttatttatgttctgatctttactgtttcttttctactactaatgttgggtttggtcagctatggct

SEQ ID NO: 794495 - DNA, 559 bp, Homo sapiens
tcctttgagtagatactcagtagtgggattgctggattgaatggtagatctacttataactctttaaggaatctccatgctgttttccataaaggttgtactaatttacactcccaccagcagtttgtaagtattcgctttttcccacatccatggcaacatccattgctttttgactgtttaataatcgccttacttgcaggaataaggtggtatctcactgtagttttaatttgcatttccctaatgattagtgatgttgagcttttttttcatatgtttgttggtaatttgtgtatcttctttcaakaaatgtctattcatttcctatgctcacttttcaaaggaattatttgatttttttcttggtgtttgagttccttacagattctggatactagttctttgtcagatgcatagattgcaaatattttctcgtattctgtgggttatctgtttactctggtgagtatttcttctgctgtgcagaagatttttcatttaattatctctcatttatttctttttgtttttgttgcatttactttggggggtttag

SEQ ID NO: 794496 - DNA, 604 bp, Homo sapiens
aaaatttattgagttcttgattttattcccagctgggttgttgttgatatatagcagtgttactaatttgtgtacgttgattgtgtaacctgagactttattaaatttgtttttcaaatctaagaatcttttggaggagtctttagaattttctagatgtactacactcatatcgtctataaatggcagtagtttgactttctctttttcaatttggatgccccatatttttttcttgyttaattgctctttttagtacttccagaactatgttgaatagaaatggtaaaagtgggtatttttgtcttttctggtctcagagaccagaatttctcagagaaaatgctttcaacttttcccattcagtatgatgttgactgtgggtttgtcatatatggattttattattttaagataggttctttctatgtctagtttgtcgagagtttttttttttcataaaggagagctaaaatttgtcagtcacttctgcatccattgagatgatcatatggtttttgtttttaattctgatgatgtgatgtatcacattttttaacttgcatatattaaaccacctctgcatcccttggacataacccac

SEQ ID NO: 794497 - DNA, 585 bp, Homo sapiens
gtggagagaagatgctagatacgcagttggatgaatataccttgaaaagttttgaggagattcagaaacagcaatttagaacaaatttcaaaccataggatggaatgagaactctgagggagagtatacaaaactgggagagaagaaatcccagcattcccccagggcatgtcaccctttcragatcacacaaaaaaggaataggaaactgtgaaagaggagaagaatagataagtaaagcagaaggaaattcagaaaagtgtagaatcaggcaagccaggagaggaagatgtttcaacaaaggggccattctattcagtgctgagataataaagtatctataataattcaaaaggtgagtccattgaatttgaaagcatagaagttatggatgaccttgataagaagaatttttgtgaaaggatgagaactggaggccaaataagattttgtatcattttcctacatagcaacatagcctaggcatgcccccccccatattaaatgtcagcaaaggaatgacttaaaatactgtatttattttctttatacaattatgtttaaatgtttttcatgcataatttt

SEQ ID NO: 794498 - DNA, 648 bp, Homo sapiens
tgtgatttctactaattatcccatgaggttttgctaaaaaagcatctgttttctagccctgcaccttgtatcctaaccaaaatataattgtccatgattaaagcacggttgtctgccttcctgaatcttgggcatcggaagtcagctttctgctgctaaatctccttttgggacagctctctaraagaactctgtagaaaagtttgtgttgcagagttttgcatggagttaactagcagacattaaaaacacaggataaactctgttgagtcaggcacttttgactttctgataatttttcaatctttcccctgaaaatcaggagatctggaaggttttctttcatatggaaaatactaaagtgcttaaaagaaacagaacacatttgcatatgtaacacaattccttatttgaaccagatttatttaataatcacaatctaattttagatagtttctgttttccagaaaatgcaagctagagatcattagagcaattagtacaagataaactttagaatattgcatttggccagaccagatgtaaaatcattagggaataaacataaccatgcttcatagaagcccactattcagacattagatgagttttagatccgatgacataatgacaggcctcatttaaaaa

SEQ ID NO: 794499 - DNA, 520 bp, Homo sapiens
atcatggaggttataaggcagtaaaacaacatattcaaagtgcttaaagcaaaagaatgtcaaccaagaattgaatatccagcaaaactaaccttcaaaaattaaagagagattaagatatccccaggccaaaaaaaaaaaaaaagaaaaaaagaaaaaaaaggaaatttgtaactaacagacctatactaccataaatactgaagcaactccttcagaatcaaatgaaaagaagttagacagtaattcaaatccacatgaacatttttcaggcctggaaataggcacctgaaraggctttacctggcaggcctcatggggaaatctactctccccacaccaaacttgacatacagaccgtgcattgaagtctctggcaaaagttgcagccaagaactcaggcctctctggctggtcatgctcttatgtgcattttattcatagccaaaggacctctattaggaagtctccttattgggaagcctcagctgagagattcctcaagcacctctatattttt

SEQ ID NO: 794500 - DNA, 628 bp, Homo sapiens
gaggatgggctctggtggagactgggcggtggtaggtgggtcccttgtgagcatggagaaggccctgaagttgctggaagcacagagcactgagaaggaaggagcctttgctggcagaattggatgggcatttttkactgcgcttggagtacacacccagtccctgagggatgccacagacgtaagggctttgcagacataggcgaggcacctggaggcctggctacacagttcagaaaaagaattagaagctgccatgaatggggacctccaggcaccccctggaagcctggctacagagcttgaaaaaggaattagaggctgctgtgaatgcaggcctggaggccattggtgggaccgaggggtctgtgcagtaaagaaggggaagatgcccatgggaaaataggggaccccaaccagtaacacactcaaagatgtggatagatttgattttggccagggttgagaaacagaaaattgataagcagcccaatgaagtactcttaactttgtggagacagttgcctctggaacagcaattccagaaaatgcccaagaggaagaaggggagaaggacattgctgcgtgatctggtcccacctggggtgttccagctcaaagactatgt

SEQ ID NO: 794501 - DNA, 628 bp, Homo sapiens
gaggatgggctctggtggagactgggcggtggtaggtgggtcccttgtgagcatggagaaggccctgaagttgctggaagcacagagcactgagaaggaaggagcctttgctggcagaattggatgggcatttttgactgcgcttggagtacacacccagtccctgagggatgccacagacgtaagggctttgcagrcataggcgaggcacctggaggcctggctacacagttcagaaaaagaattagaagctgccatgaatggggacctccaggcaccccctggaagcctggctacagagcttgaaaaaggaattagaggctgctgtgaatgcaggcctggaggccattggtgggaccgaggggtctgtgcagtaaagaaggggaagatgcccatgggaaaataggggaccccaaccagtaacacactcaaagatgtggatagatttgattttggccagggttgagaaacagaaaattgataagcagcccaatgaagtactcttaactttgtggagacagttgcctctggaacagcaattccagaaaatgcccaagaggaagaaggggagaaggacattgctgcgtgatctggtcccacctggggtgttccagctcaaagactatgt

SEQ ID NO: 794502 - DNA, 621 bp, Homo sapiens
ctattcaacccaactggaaggctcatccttctaatacttttatgactaatgtcttcttttcattccgatctttttttaaaaggaaacaacctcacagggacctccctcaagcacccatattaaaatcgcttctcagtcaattgcgtatcacttctgcacaacatttcttaacatccgacaagtttcttgtttgtttacagtctcagctgcccacaagaataaataaatgaaagcattgctgcttccacagaaatcttggacccctgatacaagcactgatttgtgtttagttcattggactataaagagttttgaaatctcaattgtcacctggactaggtctaatgcatgcactagcaacaaaaycagatattattgagaaattatgtaagcctaaatgatcatgaaaaatgtatctggctctatgattagcaaaagaaaaaactgtaaactatctttttatcccttgaagtcattagctttaagtcaaaaagactaatgaaataaaacaacttcaaacgctaacctatatgcaaactgtgtttaccaactggaattattgttgaccaatggtatttgaaagtcactaacaaaaatgatgtgacaattgtcaaatgagca

SEQ ID NO: 794503 - DNA, 468 bp, Homo sapiens
gggatttaattgaagttgacacagaatgactttaaaaccttccaagccaatggctaatgatgaaaatacatatgaaaattaatttgggggatcctgtgcagaggaaaacaaaatagttctattcaaccctcaaaggaaatgtccagaagtgaagatgaagttatctttcagagttccaatactcctaccccactacctgtttaaaatggacttttatgttacataatcctgaaaatgttaggagtcaaaattcctctagataaatgyggtacacatataccatggaatactatgcagccataaaaagaaaacaaaattgtatcctttgcaccaacgtgcataggaaatcttatcctttgcaccaacatggataggacatcttatcctttgcaacaaggtgctttcagaagcaggatgagcactgcaattgaaggctaagaggaaatggctcttggccaatttaactga

SEQ ID NO: 794504 - DNA, 521 bp, Homo sapiens
aagactgtccataatcaaaaaatgaaaaaacagtagatgttggcatggatgcggtgagcagtgaacacttctacactgctggtgggaatgcaaactagtacagccactagagaaaacagtgtggagattccttaaagaactgaaagtagaactaccatttgatccaggaatcctaccactgggtatctacccagagaaaaataagtcattattggaaaaagatacttgcacgtgcatgtttatagcagcaaaatttacaactccaaaatcakggaaccaacccaaatgcccatcaatcaatgagtggataaagaaactatggtatgtatatatatatgtatactatttcaaactagactataaggccatagtcaccaaaatagcgtggcactggtataaaaaataggcacatagaccaatggaacatagtattccatcatatatgtatatatgtgtatatatgtaaatatacatatatgtatacatatatactccatcatatatacacatatatacgtata

SEQ ID NO: 794505 - DNA, 606 bp, Homo sapiens
gtgttcactacttctcactcactggatccaatcagtataatgtcatcaatgtaatagaccagtgttatatcttatggaagggaaaagtgatcaaggtctctccaaataagacaatgacacaaagtcagagagctaatacaccctgatgtaggacagtaaaggtatactgctagccttgccagctgaagggaaattgcttctggttggccttatggacaggaatggagaaaaagttatttgccaagtacctggtacataccaggtaccaggagatgtgttaatttgctcaagcaatgaaaccacatctggtacagcagctgcacttgtagtcacctcttagttaagcttacgataatccactatcattgtccaagatccatctgtcttctgtacagtccaaacgggaragttgaaaggggatgtggtggcgatcaccatccctgcatctttcaagtacttgatggtggcactaatctctgcaatccctccagggatgagatattgtttttgatttactatttttctaggtagaggcagctctaatgacttccatttgaccttttccaccataatagccctcaccctatcagtcagggagccaatgtg

SEQ ID NO: 794506 - DNA, 502 bp, Homo sapiens
gaagctcaggttgcacggtaacttggtgactcattaagtatcagtctctactaaggcccagtagcaggccaagagctgtttctcaaaaagagactagttatttgttggtaatggcacggctttgctctaaaatcctaaaccaagattcacctatagggacctgccagaagcttcaaacagcatccctatctgccactgccactgaaacaccactggatctgctggatcatatgacccaagtggcasagcagcttgcacagcagcctggacctgttgcagactcttttcttgttctgggccctactcaaaactagcagctttttgagtcaattggtaaacaggctggtataacataatgaaattggaaaatgttgcctccaaaacccaaagaggcccactaagtattgtgcctctttcttggttttaagagcagcaagatgcaagtacttatccttcaccgtagaagaaatatcctaacatgccccatgtcactggatcccta

SEQ ID NO: 794507 - DNA, 502 bp, Homo sapiens
gaagctcaggttgcacggtaacttggtgactcattaagtatcagtctctactaaggcccagtagcaggccaagagctgtttctcaaaaagagactagttatttgttggtaatggcacggctttgctctaaaatcctaaaccaagattcacctatagggacctgccagaagcttcaaacagcatccctatctgccactgccactgaaacaccactggatctgctggatcatatgacccaagtggcagagcagcttgcacagcagcctggacctgttgcagactcttttcttgttctgggccctactcaaaactagcagctttttgagtcaattggtaaacaggctggtrtaacataatgaaattggaaaatgttgcctccaaaacccaaagaggcccactaagtattgtgcctctttcttggttttaagagcagcaagatgcaagtacttatccttcaccgtagaagaaatatcctaacatgccccatgtcactggatcccta

SEQ ID NO: 794508 - DNA, 603 bp, Homo sapiens
gcactttgggagattgagatgggcgaggctagaggcaagcagttcaagaccagcctggccaacatggcgaaaccctgtctctactaaaactgcaaaaatgagctgggtgtggtagtgcatgcctgcaatcccaactacttgggaggctgaggtaggaggattacttgagcccaggagacaaaagggttcagtgagctgagatggtgccactgcactctagcctgggagatagagcaagactttgtctccaaaaaaagaaaagaaaaagaaaaacagaaaatttgcacaaactttataatttcaataagtaaataagtggcataaatgattattagtggaaggatttctctttaaattacttggatcatccctcccccmacccatcaccagttttttactttattttgtaggggctgccacactcatctaggggctgcatctactaattgatgtaagtattgaccacttgcggtgttttaatgaaatagtaacctctgaaaagtttccccacttcctgacaaatccgtgtacacttatcattgtggtataagtgtaccacatgcaccagaatctggtgcatgtgtttatctcaaatccaggact

SEQ ID NO: 794509 - DNA, 603 bp, Homo sapiens
gcactttgggagattgagatgggcgaggctagaggcaagcagttcaagaccagcctggccaacatggcgaaaccctgtctctactaaaactgcaaaaatgagctgggtgtggtagtgcatgcctgcaatcccaactacttgggaggctgaggtaggaggattacttgagcccaggagacaaaagggttcagtgagctgagatggtgccactgcactctagcctgggagatagagcaagactttgtctccaaaaaaagaaaagaaaaagaaaaacagaaaatttgcacaaactttataatttcaataagtaaataagtggcataaatgattattagtggaaggatttctctttaaattacttggatcatccctcccccaacccatcaccagttttttactttattttgtaggggctgccacrctcatctaggggctgcatctactaattgatgtaagtattgaccacttgcggtgttttaatgaaatagtaacctctgaaaagtttccccacttcctgacaaatccgtgtacacttatcattgtggtataagtgtaccacatgcaccagaatctggtgcatgtgtttatctcaaatccaggact

SEQ ID NO: 794510 - DNA, 541 bp, Homo sapiens
caaagagctactatctcatagctttcagactgcagaacttaaaaattctgataagactacgtgttggtgacaagataggaaaaccagaattctcttaaactgcagctgggagagcaaacttgcatatcactttggagggcaatttgaagacatctaaagtgacagagtatacacatcctactacctggaaatccatttttatttattttatatatatatatatatatatatawaatttttttttttttttttttttttttttcagactgagtcttgattgctctgttgcccaagctgcagtgcagtgccacgatctgggctcactgcaacctccctaagtagctgggattacaggtgcacaccaccatgcctggctaattttttttttacttctactagagacggggtttcaccatgttggccaggctggtctcaaactcctgacctcaggtgatcctcccacctcggcctcctaaagtgctgggattacaggcgtgagccaccgtgccgggctgaaattccatttttagacatatgtcta

SEQ ID NO: 794511 - DNA, 541 bp, Homo sapiens
caaagagctactatctcatagctttcagactgcagaacttaaaaattctgataagactacgtgttggtgacaagataggaaaaccagaattctcttaaactgcagctgggagagcaaacttgcatatcactttggagggcaatttgaagacatctaaagtgacagagtatacacatcctactacctggaaatccatttttatttattttatatatatatatatatatatataaawtttttttttttttttttttttttttttcagactgagtcttgattgctctgttgcccaagctgcagtgcagtgccacgatctgggctcactgcaacctccctaagtagctgggattacaggtgcacaccaccatgcctggctaattttttttttacttctactagagacggggtttcaccatgttggccaggctggtctcaaactcctgacctcaggtgatcctcccacctcggcctcctaaagtgctgggattacaggcgtgagccaccgtgccgggctgaaattccatttttagacatatgtcta

SEQ ID NO: 794512 - DNA, 541 bp, Homo sapiens
caaagagctactatctcatagctttcagactgcagaacttaaaaattctgataagactacgtgttggtgacaagataggaaaaccagaattctcttaaactgcagctgggagagcaaacttgcatatcactttggagggcaatttgaagacatctaaagtgacagagtatacacatcctactacctggaaatccatttttatttattttatatatatatatatatatatataaaatttttttttttttttttttttttttttcaractgagtcttgattgctctgttgcccaagctgcagtgcagtgccacgatctgggctcactgcaacctccctaagtagctgggattacaggtgcacaccaccatgcctggctaattttttttttacttctactagagacggggtttcaccatgttggccaggctggtctcaaactcctgacctcaggtgatcctcccacctcggcctcctaaagtgctgggattacaggcgtgagccaccgtgccgggctgaaattccatttttagacatatgtcta

SEQ ID NO: 794513 - DNA, 551 bp, Homo sapiens
ttaactgaccttaaaatagggagcttatcctgtattctcatatgggaccaatgtgatcacatgagcccttcaaagcagcagaggaaagcagaagagttgcaatagaaggagaactctgagagattcaaaacgaaaaagggactccgtttactgctgctgtttgaagatgaagggggcaatgtaggggtggccttaagaagctgagtrtattagttcatttacacacggctaataaagacatacccaaaactgggtaatttataaaggaaagaggtttagtggattcacagttcctcatggctggggaggactgacaatcatggcagaaggcaaaggagaagcaaaggcacatcttacacagcggcaggcaagagagtttgtgtaggggaactcccatttataaaaccatcagatctagaaagacttattcactaccatgagaacagtatgagggaaactgcccccatgattcaattatctccacctggccctgctcttgacacatggggattattacaattcaaggtgagattcaggtaggggcacagcca

SEQ ID NO: 794514 - DNA, 551 bp, Homo sapiens
ttaactgaccttaaaatagggagcttatcctgtattctcatatgggaccaatgtgatcacatgagcccttcaaagcagcagaggaaagcagaagagttgcaatagaaggagaactctgagagattcaaaacgaaaaagggactccgtttactgctgctgtttgaagatgaagggggcaatgtaggggtggccttaagaagctgagtatattagttcatttacacacggctaataaagacatacccaaaactgggtaatttataaaggaaagaggtttagtggattcacagttcctcatggctggggaggactgacaatcatggcagaaggcaaaggagaagcaaaggcacatcttacacagcggcaggcaagagagtttgtrtaggggaactcccatttataaaaccatcagatctagaaagacttattcactaccatgagaacagtatgagggaaactgcccccatgattcaattatctccacctggccctgctcttgacacatggggattattacaattcaaggtgagattcaggtaggggcacagcca

SEQ ID NO: 794515 - DNA, 540 bp, Homo sapiens
gcttgaatttttaagttagggatagaagttctgatgccctcttcttttcattaagccaaggtgcttcgagaacaatatgacttttttttttttttaaccaaattgagcaatagcttcaatccctccttaaagtcctcctatctaatctgagatgacagtgacaggtgtctctgtggtacacactgaactaacagagtctgataagtccagaaactgatgtcacctccacaaataaacaatttcgtagcttcagttgtgtaccataatatcctgttatccragcagcctctccgaaaacttcttttagattttgcatcaatatattgcttgacatctgggaaatgaaaatgatagaaaatgaagaagtctagccttccaggattctgctacactggtctttaacatccatctggaaatgtggttagggtatattctcatagaaagcaccagacgtagctgacattttctctcatacacacattgaaaagtattgtatactgcaatttttctttgattgctgtgtccacacagaaaacatat

SEQ ID NO: 794516 - DNA, 620 bp, Homo sapiens
aataagatctctctaactgtggtcttctacccccatattacattacactgaaggaaacgatacaaatagaaccaataaatcaaaggcagaaccacattctagcctataatacatattgatttgttcttcagatcatctatttataagattgtttttgtagcttgatgtgccaaggtttaaytatgaattgctaatggatgagcataaatatgtctatataaataggtcctggacaggaaacaatagacattttgacagttttcattggatgtctgtataattacttatcaaatacatgacactaatttagaaacatatccgctgagtcttctgggttccagtaaagaagaaattattattgactttctccaatgcaagatcagactagataatttagactattctttcaaattgtaaaaatctatgattttgtgattttttatctctgacaatcaaaattaatgacagatagcttcaggagttttacatgaggttagatatggagccagggaaatagccattgttatccccattaccaccacctcccagactgtgatttgaaagtaaagtccacctaaatcatttatatgacacaagtaatttgaagagaaaaatagaac

SEQ ID NO: 794517 - DNA, 480 bp, Homo sapiens
tcttattagctgtgtgactttttcctttaaatggagcactttcagtttctatttcctcatttttaaaacataaattactgtatctctgagctacctttttcttcaattatttattcagtaagtatttattgtgagcctattctattctaaacagcatggaagatccaaaaatcagtaacagcccaaaggaactttgtttatatgcgtatcagtgatgtaccttatcttccagttttggacactttctaacrtctggttttgctcagtggacaccaaagtgggtatccaaggcaggccattgggtgcaggaagaaaatactagaacttttatccttatttactccttgtctttttttcaggataactgcattttgatagtttcaaacttagagaaaaattgcaaaagtagtatagagaactcccaaccgggcgtggtggttcacgcctgtaatcccagcactttgggaggctgaggcggga

SEQ ID NO: 794518 - DNA, 550 bp, Homo sapiens
tccctgcctatacttgttttctttagaaaaatgtaacttttaaacataatttgacttgaaacggtttctttccaggatttatcattttttataggtgattccagttcaaactatttattacattaatatgttgacaaattgtcgttgctgaacaaattttttaygtgcaatcatacggaacattttatatttaaggatgtttatatatcaagtatataatcattggcagaaactgggcagggcgcggtggctcacgcctgtaattccagcactttgagaggctgaggcaggtggatcatctgaggtcaagacttcaagaccagcctggccaacatagtgaatccctgtctctactaaaaatacaaaaaatagcgagcgtggtagcacgcacctgtaatctcagctactcgggagaatgaggtgggagaatcgcttgaaccccaggcggcggaggttgcagtaagccaagattgcgccactgcactccagcctgggtgacagatccagattctgtctccagaaaaaaaaaaagagaaagaaacctaagaaa

SEQ ID NO: 794519 - DNA, 644 bp, Homo sapiens
tggggatgagcatgtaattacgattaactttccctacttcgttgtctctttgtggtaaaagactgtcacaagtgctattcaaactataggtatttttttttagatttctaaaaagtatattttgtctctgagggcctcctgtctttggactagtttgtctttttccagaccccagaaaggctgggccaccttttcttctttgagcaggttggcaacagtggtcacaaatagcagaggagctgagattctagagagctatcctaccactgcttctcagatgccagtgtggaaacagcctcttcttttttgttgaattagcttggaacagctctctaatctctgaagagtgaggaaaaactgtgtttttaagtttcaaggctaaggcactgtgttctcttttctccctgttcctgctgctgttctcccccaactcacatgaacrcatacttaactttcagtgtatgtggacagtagggttgctaaattcatgtcaatatttgtggcattcctacatgttaggcatttggtttacatttaacttatgaaacaaatgtttaggcttttataagccaggaacttttccagatattggcaataatgaacttttcagaagttacagtctaatagacaggcaaactattccc

SEQ ID NO: 794520 - DNA, 633 bp, Homo sapiens
ttgaaacaataagaactcattgatactcattagagtggaggatatgggatggatttcctggaagaggctaggctcaattgtgtacctgtggtccatttcaattcaggtgggcagctctgctaattgagcctggactccctcacatgtctgggggttggctggctatgggttgtgctgcctcagtcacactcacatgcactcatcctccagcatgctagcccaggcttctcacaaagactggcaggcttcccttaggaagcagccaactggccaggcatgacttctactgcaaactggccggacatgacttgtattgcaaactggccaggcattwcttctactgcgttctactgggcaatgcaagacacagggaattcaataggaatcaaaggggaaagattcaaggaaaagtaggctctactttttgatggaaaaagacaagaagtcacaatgtaaagggtctgggacacgggaagcgcagagaatcgggaacattttagttatcaattgaccacaacatatattcgttcattttaacctcacagcaaacctctaatctagataacatcatcgtatagccatcccttggtatccgtggggtaattgcttccaggatccctctcagaaacccaa

SEQ ID NO: 794521 - DNA, 646 bp, Homo sapiens
ccctcttaactgagagggagcattctatttaataagcacttctactgcactccctgaccgctagccactgtcctaagtcctttaagcatactagctcgtcttatcttcttgagaacactttgaggtagacagatgaggaaacaaaggaacagagaggttgaatattttaagtcacacatctctttttcttagagatgaagtctcactctgttgcccaggctggagtgcastggcataatcttggctcaccgtcacctccatctcctgggttcaagaaattctccagcatcagcctcccgagtagctgggactacaggtgcgccccaccatgcctggctaatttttgtatttttagtagagaagaggtttcaccatgatgaccaggctggtctcgaactcctgacctcaagtgatctgcctgtctcagcctcccaaagtgctgggattataggcgtgagccactgcgcctggcctaaagtcacacacctcttaagggaagtagctagagtacaaatccagccagtctagcttcagagtcaatgctccctgtgtctatgtataggcatagatttttcaatatcatatgtgtgtgtgtacatacaacctatatgtgtaaacacaaacctgcagactgtgtgtatgtgta

SEQ ID NO: 794522 - DNA, 646 bp, Homo sapiens
ccctcttaactgagagggagcattctatttaataagcacttctactgcactccctgaccgctagccactgtcctaagtcctttaagcatactagctcgtcttatcttcttgagaacactttgaggtagacagatgaggaaacaaaggaacagagaggttgaatattttaagtcacacatctctttttcttagagatgaagtctcactctgttgcccaggctggagtgcactggcataatcttggctcaccgtcacctccatctcctgggttcaagaaattctccagcatcagcctcccgagtagctgggactacaggtgcgccccaccatgcctggctaatttttgtatttttagtagagaagaggtttcaccatgatgaccaggctggtctcgaactcctgacctcaagtgatctgccygtctcagcctcccaaagtgctgggattataggcgtgagccactgcgcctggcctaaagtcacacacctcttaagggaagtagctagagtacaaatccagccagtctagcttcagagtcaatgctccctgtgtctatgtataggcatagatttttcaatatcatatgtgtgtgtgtacatacaacctatatgtgtaaacacaaacctgcagactgtgtgtatgtgta

SEQ ID NO: 794523 - DNA, 651 bp, Homo sapiens
ctccagtattacctctgcaaatcattcctacccagatgggttggcttaaccaaaaccattctgatcaaggagttccaggaatctctccggagaggtcttttctgcagcctggtccaatgcacaggttacaataaagtggatgactatatggttctctggctttttcaaaatgacacatttgtttttaaaaaccaccatcttaacgaagcatatgggcaacgatgtcatgacacccttaaccccacccgaaggagggagactgaaatcaatgcagaaatgaaaaacagtatggtttggaaagtaggaggatgttccagacgcagtggataacaaagtttatttctggcaaggaaagagaaaatgatcaaagggatctggaagaagtttgtttggccaaggaaaaggcatagacgggagtaacaggcagacaatcgagcttggcaagagggtgggtgttgatacagcatgcctttaaggacagctccaaggctctagtgtgcgttytatatactatttccactattataatgacccctggagtcactgtattgcctaaggagactcgttaaatcgcagtctgtggctggaggggtaacaaatggaatcttccctcactcctgtgataccagtctccttggtctctcaccagac

SEQ ID NO: 794524 - DNA, 603 bp, Homo sapiens
ggctggagtgcagtggcgcaatctcggctcactgcaagctccgcctcccgggttcacgccattctcctgccccagcctctcgagtagctgggactacaggcgcctgccaccacgcccgactaattttttgtatttttagtagagacgggatttcaccgtgttagccaggatggtctcgatctcctgacctcatgatctgyccgcctcggcctcccaaagtgctggggtaacaggcgtgagtcacggcgcccggccggcaatggtttctttatgtggcctttcttgccaatagtctggaagcggcactctatgtcagaggtagaaaggaagcaggcatctgtccatcaaaaggagaaactgggggcagacacttgatgacctacaggaatttaaggaaaagcataacactcatgcgtatattctaatcaagcaaaagatgaaaggccttatggcaaaaaggatagaaaatttcaaaataatagaaaatttggttggtgtgaggtcttgtttagtgagcgtcatttataacgttcattaaacattaggaaacaaaaccaacacactacacagtcgtccacagaaaacagtctgggcagaacacgg

SEQ ID NO: 794525 - DNA, 583 bp, Homo sapiens
agtccatgttccttctctgaacaatccaagaccttttatttcaactcatgcatggctccaccttaaggtctccctcaaccactccagcccccatttatttccaccttcaaccaagtcctgcggccggtttgcagatacaagtggactcactccttacccactatcatcccttctagtgacctttatctgcaawtttggtgaaaactatgttttccattctcattagcagctcaggttctctctggtcagtagctatgttctaggcagtcacccaggggagacttggaagggagctccctaggagcacccaagaaacacacacagctgtggcaggcatgaggtttctcctgtaatagttccatgctgtgggtgggtgttcctcctgctgtgttgcacacaagcatagctctctgaacctctttgaatttccacacactacctgacaccctacagcttacagactttcaatgaactagactgaattctgttgtccagaactaagaactccgaggcatacgctataatgctcctgctaattttggtactccgtcgaataccaccttacattatacctttttcattt

SEQ ID NO: 794526 - DNA, 536 bp, Homo sapiens
aatactttgtttcaattgctgccaaagcctggggcaaaatgctataatctatttccagttgtagcttttcagctggctcagcctattttttaaaaaatttattaacatgcccaagtgacagtatcacttattaaccttattgatctgggaaaaattttgttaactataaaacatattcattatttggggttagtactagtgacttcttgacagcaaaacatccaagtcttagaaggtgaaaactgatttataaatacatagcaaacatgctaattaaaatacatcagtgatgtatgtctrtagattaaataatcagatgatattaagtgaaacggagaaaggcacgttgccactgtatttgaggtagactactgacacatctgattacaacatattttcaatttagagtgtgagagagacattctaccattgttagtcacatcacatctggtcgatccagtcctatatttttctgaatgtgccacatttgcaaagaaagatcttaaggaaaaggcagcatatggtttgctaactac

SEQ ID NO: 794527 - DNA, 550 bp, Homo sapiens
ggccatgtatgatttatctcagcaatacaggattaggttaacattagaaaaatctccaaatataattcacagcccattacaggagaaaagctatatgatcaccacaatagatgcaaaaaaagcacaaaggcaaaattcaacgtcttgcatggtaacaaaacaagtatcctaaacaagttaagaatggaaagaattcacttaatatgatggatggaatctatccaaattatacaaaatagtcaagaattagaagcattctcctaaaggcaacaaagcaagtcaggaacaaaacgagaatgcctactctagcttcttctatttaacattgtaccagaaggtcaagatgagaagatcacttgagctcatcggttcaagaccagactgggtaatatagggagacttcatctctattwaaaaaaataaaactaaatgacattgttccagagatcctagccagcatgacatggcatggcaaaaaaataattgatataatcatcagaaaggaagaaataaaattgtcattatttgtaggctatatgattatttactt

SEQ ID NO: 794528 - DNA, 588 bp, Homo sapiens
ccaggttaaaaaataagtcaagccaaggtaagaggcattttttaaaaaattattttataagttaaacagtaaaattgacttttttcccttttggtgtagagttctatatattttaacacagctgtaggttggtataaccaccaccacaatcaggatacagaacagttccatcaccctaaaaaaattccctatgactcttcctttatagttccactctttcccctgccccagctccaaaaaccattgatctgttctctaratctattctgatattttcaaaataggtcagataaattgaattatacagtatacagccttttgaacctgcctttttccattcagcataatgcctttgaaaatcatccaagttatcacatgtatcatctgttcttgtttattgctgaatagtattccatggtatggatataccagtttgtttaatcattcaattgttgaaggacatctggtttatttctagatcttggtaattttaaacacaacagctataaacatttatgtatcagttgttgtgtcatcataagttttcgttactccaggataaaccccaagagtgggattgctattaaa

SEQ ID NO: 794529 - DNA, 624 bp, Homo sapiens
ggtcagagtaagtgcttagcaaatgttaactattttattattagtaataataactagttattattgttaatattttaccatctagataggtatcaatactttaccatctagattgttggtcaatattttaccatctagatagatgtgatctattgtttatcatcatatcatgaatatatttatattttaacagcaaatgagacactggggctcactgactttaccattctcatctaacagatggaagggaaaggtgatctctacagcagctaccagcagasccagggctaggactcagctgctccaattccctaattcctaacttgtccttggcactaggaagtttctctcttgagtcctgagaatcagagaattgatgttcaccttatcaaataagatcttttaagattataaactcagcaagagaggagactgtttcatagttagagtcccaatttcctcttcattctcttctgcatttgggggagtggaatgctttgagatatccctctaaagcttcaagatactctcctgggaatgcaagagcttgcccagggtcatttgatgtcaatgacacaccaataaaaatgatgctaaaaatagcattagttaacattttccaga

SEQ ID NO: 794530 - DNA, 623 bp, Homo sapiens
gccatgcccggctaatttttgtatttttagtagagacggggtttcactatgttggccaggtttgtctcgaactcctgacctcatgatctgcccgcctcggccacccaaagtgccgggattacaggggcctaatattgaagttttctataattattctcttacccctaactcgcgaagatattctacattttttctattacctttatagtactatattttatatttaggtttttaatttatctggagctcagccttgtatatggtagtgaacacaactgggatgcagttttatttacattcatatggagaggaagttttcttagtagaaataaaggaaaaaatagtgataccaccaaatggggaggggagaggtaggcaaggggaataacaastaccggcagaggcatattatttaaagatagggagttaaccaccagaagtaactaataacagcaaaaacagaagcggttaaaggcaaaggcctccagggatggaggaaggtcggaagttagggaaaggggaaggcagaggctggaacatccttgtttctcttgtattacctcagtaattttttattattcttacttaagttaaacttttaaaaaatcacacttgttatgaat

SEQ ID NO: 794531 - DNA, 632 bp, Homo sapiens
taatttcctctaagaatgaaaaaattatttactatggaaatttcaaaagaattcactgcattaggtcaaaagagaagatgctcaagggtattaatttattagagaccaaaatgtatttgacatgtatatagcatctgatactgattttctcagtcttttaataaagatagacatctatatgtcttaagatgataaagaccactattgttcactattagccagtggtctttaatgctaaaacaccagagatatccatattaatatctgaaaaatacatgataccttctataatcactatttttaaaaattgttctaaatgttctggcattgcaaaaatacgctttagwggcgagtcacagtccataaatatggtggaaaaagaggcaagttattagaaaaagaaaattacaaaacttaactgagggatgaaaaagaaccgcatgaaagaagtgacaaattatattttagaaaagaaatataaatattaaaattcttcccccaaataattaataggcataattaattttgtttaaatccagtaagatttttggaaacatggtaattaaacgctaaagtacatctgggagaatggaatacttaataattgaccattcagttagaaaagcaagaga

SEQ ID NO: 794532 - DNA, 637 bp, Homo sapiens
gccagctcccaggataggaacaattataaaatgggacttgggaaaacctttcttggtgaagccacgtggcaagtgttttaagggctacataaatgcaatcagcaaagacgcaccatctgagttcccacaccagctctgagatggggcatgaatatagacctgtgrgtcattgagcccttgctacaaaaaaaaaaaaaaaaagagagagagcgagctctggaaaagccatgtagcccactaggaagctgaaatgcctgaagtatagctaaaatgcagtattcctggtgtgcttatggtaggtatggttctgttatacaggaaaaagtataattttaaggaaaagatgaaaggaaagcaaagaacatgatctgcaagggctagaagtcttctgaataaataaggactttagaaacagccaatgggataaaatattcagaatgtagaaaataatagtcatgaccaaattatttcaggataatccctgaaaaaaggatgtattttcaattgtatttttctatacacattttaataaaagttgaatcataaagcttatccaactctactcctgcttttgattttgcatgtgactacaaatttcttactcactccattaaaatgactgcaaaatattccagca

SEQ ID NO: 794533 - DNA, 612 bp, Homo sapiens
gcagaagtgggatcctgatgaaaagaatgagttcagtctaatttcctctgcttgtctcacatgctcacttctgccttctgccatgggcccaccttggccagatgcaagtgccaagcacttggacttcccggcctccagaactgtgagctaaatcaatctctcttttttgaaataaattatcttgtctgtggcattctgttatagcagcagaagatggactaaggcactgatgaaggacagattaacaagaggaaagcagacagaagtttactaatgtgtgcatcttaacyatgcatgaggagcactcagggatgagtaactcacaggggtggatagaacttgggtttacatagaattttaacaaaagaacagtcaattttgtagagaagtgacaagacaagagaaaagggctttgagtttcaagggggaggacacattgtgggaagacaaatatatggaaaacctaatggtagataagggctagttaataaggtttgttgattcccctggtgccgtcacaggctgataagggtctagagctgtctctgatgattaacacttgcccttcttggtagagaaaggagggggatacctttacaaatttatgttccg

SEQ ID NO: 794534 - DNA, 612 bp, Homo sapiens
gcagaagtgggatcctgatgaaaagaatgagttcagtctaatttcctctgcttgtctcacatgctcacttctgccttctgccatgggcccaccttggccagatgcaagtgccaagcacttggacttcccggcctccagaactgtgagctaaatcaatctctcttttttgaaataaattatcttgtctgtggcattctgttatagcagcagaagatggactaaggcactgatgaaggacagattaacaagaggaaagcagacagaagtttactaatgtgtgcatcttaaccatgcatgaggagcactcagggatgagtaactcasaggggtggatagaacttgggtttacatagaattttaacaaaagaacagtcaattttgtagagaagtgacaagacaagagaaaagggctttgagtttcaagggggaggacacattgtgggaagacaaatatatggaaaacctaatggtagataagggctagttaataaggtttgttgattcccctggtgccgtcacaggctgataagggtctagagctgtctctgatgattaacacttgcccttcttggtagagaaaggagggggatacctttacaaatttatgttccg

SEQ ID NO: 794535 - DNA, 612 bp, Homo sapiens
gcagaagtgggatcctgatgaaaagaatgagttcagtctaatttcctctgcttgtctcacatgctcacttctgccttctgccatgggcccaccttggccagatgcaagtgccaagcacttggacttcccggcctccagaactgtgagctaaatcaatctctcttttttgaaataaattatcttgtctgtggcattctgttatagcagcagaagatggactaaggcactgatgaaggacagattaacaagaggaaagcagacagaagtttactaatgtgtgcatcttaaccatgcatgaggagcactcagggatgagtaactcacaggggtggatagaacttgggttyacatagaattttaacaaaagaacagtcaattttgtagagaagtgacaagacaagagaaaagggctttgagtttcaagggggaggacacattgtgggaagacaaatatatggaaaacctaatggtagataagggctagttaataaggtttgttgattcccctggtgccgtcacaggctgataagggtctagagctgtctctgatgattaacacttgcccttcttggtagagaaaggagggggatacctttacaaatttatgttccg

SEQ ID NO: 794536 - DNA, 612 bp, Homo sapiens
gcagaagtgggatcctgatgaaaagaatgagttcagtctaatttcctctgcttgtctcacatgctcacttctgccttctgccatgggcccaccttggccagatgcaagtgccaagcacttggacttcccggcctccagaactgtgagctaaatcaatctctcttttttgaaataaattatcttgtctgtggcattctgttatagcagcagaagatggactaaggcactgatgaaggacagattaacaagaggaaagcagacagaagtttactaatgtgtgcatcttaaccatgcatgaggagcactcagggatgagtaactcacaggggtggatagaacttgggtttacatagaattttaacaaaagaacagtcaattttgtagagaagtgacaagacaagagaaaagggctttgagtttcaagggggaggacacattgtgggaagacaaatatatggaaaamctaatggtagataagggctagttaataaggtttgttgattcccctggtgccgtcacaggctgataagggtctagagctgtctctgatgattaacacttgcccttcttggtagagaaaggagggggatacctttacaaatttatgttccg

SEQ ID NO: 794537 - DNA, 520 bp, Homo sapiens
aagaacacacatgcacacacacaacccacttgcacatacatgtgtgcagtcacacttccagagacacacatagacatacatatgtatacacacatgtgcgtgtgtgcacacaggtattcacatgcacacacacacgcacacttatacactaacacacatgtgcatatgtgcacgcatgcacacacacacacacaccccactccttttgcttgcttcaccttttctgtctctgctcctcctggtggtcatcacctcccatgccctgtctcctgtatcaatgccccaggactacctactataacaaagtgtcacaaagtgggtggtttaaagcaacagaaatgtatcctttcacagttctggaggctagaaatccaagatcatggwgtctataaggttggttccttttaagtgcagtgaggaaagagctggctccagccctctctcccattggctggtagatgatcatcttctccctgtgtctcttcatgtcactttccctccttgcccctctctgtgtcca

SEQ ID NO: 794538 - DNA, 611 bp, Homo sapiens
tgccctaatctctgaggcctgtgaatatgctgtgttacatggtcagagagactttgcagatgtaattaaatttagggactttataatagtgagattgtcctggattctctgggtgggccaaattaatttcatgaggccttcacagtagggsactctcaggctgggagcagaagaggggtgcagcaggaagagaagtcagtggagtctgatcctgagatggatggcatgcacgctcactggccctgagatgcaggggccacatgtgaggaccagagggagatctctaggggctctgacggctcctcccagctgacagccagcaaggaaacagggacctcagccccacaaccatggaaactactagcagtatagatgaacctggctgctgatttttcccaggcctcttagtaagaacccagctggttgacatcttggtttcaggcttacagaacccaaagcagagaaagcagttgagctgtcccagacttccgacctacagaactgtcaggcaataaaccgttattggtttcagcccctagctttgtgactgtttgtcatggcagcaacagaaaactaaacgaagccatttcagtgagagcaggaaaagtgct

SEQ ID NO: 794539 - DNA, 633 bp, Homo sapiens
gaaagcttcaacgataaactagatcaagcagaaaaaggatttcagaacttgaagagaggtcttttgaaataaaccagtcagataaaaataagaaaaaagaataaaaatgaacaaggctaggccaggtgcggtggctcatgcctgtaatcccagcactttgggaggccggggcgggtggatcacgaggtcaagagttcaagatcagcctggtcaagatggtgaracaccatctctactaaaaatatgaaaaaaattagctgggcatagtggtgggcgtctttaatcccagctactcgggaggctgaggcagagaattgcttgtgaacctgggaggcagaggttgcagtgagctgagatcgcaccactgcactccagcctcggcgacagagcaaaactctatcttaaaaaaaatgaacaaagcttacatgacatataggacactataaagtgacaaaatattctaatttttggtgtcccagaaggtaaagagaaaactaaaagaatagaaaacttatttaacaaaataagagctgaaaaatttcccaagtttagcaagagatgtatacatctggatacaggaatctcagtgacccccaaacaaataaaatgcaaaaaaaggtcttttctatgtca

SEQ ID NO: 794540 - DNA, 558 bp, Homo sapiens
aatccaaagttcttatgctggatcactcaaagggataaaaatacatttctactcattcttttcttccctaaaggcaatgtcttgtttatccttccttgtctctaaatagataatttaatcaaaatgaactagccagatgatctacaataatcaacattagctgtgaaaattgtttatggaactactcgctacccagcacagatgtattcacatttccttcatagtgcctggattctactagacatcacagaagcacaktccctacaaattagtgattatatatattcattgttttttttttgttttgttttgttttttttgccaaatgctttctagattgttgccctatttgttgtttaagaaatgctgacccttttcacaagacagtgctgaaagcgaagaaagaagttcctgcccctcctaaagccaaagccaaagcaaaggctttaaaggccaagaaggcagtgttgaaaggtgttcacaaccacaaaaaaaagaagatccacacgtcccccaccttccggcggcccaagacactgcaactccggaggcagccca

SEQ ID NO: 794541 - DNA, 636 bp, Homo sapiens
ccttcagtttcttgccgcgaaaatggtctttgtattgcactttgtggctgacagacaccgtccgttacctctcagcattgtttcaatacacacacattaacacacactcgcgcacacacacacgtacacactcgcacacactcccacatgtacacatatacacgcacacccacacatgtacacagtcacacacaaactcactaacacaaacatgtatacattcactaacacacacaaactcacgaacacgtgctaacatgtacacactaatacactcatacatacacacgaacacattcacacacacatgcacattcactaacatgtacacactcacacattcacacatgcacacctactaacacatgtatatrctaacacactacatgtacattcactaacacacacgtgtacacacacgcactcagtaacacacatgcacactaacacacatgcacactaacacatacatgcacattcactaacacactcacactgtagcaggacaagctgcagacaaaacctctcagacactgagttaaagaaggaagggctttattcggccgggagcttcggcaagactcacgtctccaacaacagagctccccgagtgagcaattcctgtcccttttaatg

SEQ ID NO: 794542 - DNA, 636 bp, Homo sapiens
ccttcagtttcttgccgcgaaaatggtctttgtattgcactttgtggctgacagacaccgtccgttacctctcagcattgtttcaatacacacacattaacacacactcgcgcacacacacacgtacacactcgcacacactcccacatgtacacatatacacgcacacccacacatgtacacagtcacacacaaactcactaacacaaacatgtatacattcactaacacacacaaactcacgaacacgtgctaacatgtacacactaatacactcatacatacacacgaacacattcacacacacatgcacattcactaacatgtacacactcacacattcacacatgcacacctactaacacatgtatatactaacacactacatgtacattcactaacacacacgtgtacacacaygcactcagtaacacacatgcacactaacacacatgcacactaacacatacatgcacattcactaacacactcacactgtagcaggacaagctgcagacaaaacctctcagacactgagttaaagaaggaagggctttattcggccgggagcttcggcaagactcacgtctccaacaacagagctccccgagtgagcaattcctgtcccttttaatg

SEQ ID NO: 794543 - DNA, 667 bp, Homo sapiens
taatcataaggatccatatgaaagggagggattattcagcctggtccaatatcatcataagcgtccatatgaaagggagggatgagagtggagtcagaaaaaagagaggtcgccgtggaagcagaggttggaacaattcactgtgaagacagaggaaggggccaaagccgaggaatgtggyggcctctggaagctggaaagggcaaggaagattctcctcagagcttccagaaagacaacagccctgccgacgcctttgattatagcacagtgaagactcatttcagacttctgaactccagaactgcaaggtcacagttgtgttgtcttaagccactgaatgtccggtaatgagttacagaagcaacaggaagccaatacagctctttaatactcccccaaattaccaccctgttgccccaacaaacattcgcttctctttcttcatcttcccaatgttgtttatctgggtcttcaggaagtcaatactatgattatgtaaatattttccactgagccacatcaagaaataagattgcatttctgtctcgtacatgtgtatgttttcaagcttataattactttggattttccccgatgcacctctggctaattttcaacagccacaatttacttgtaaaacgctttctcaattctattttccgca

SEQ ID NO: 794544 - DNA, 667 bp, Homo sapiens
taatcataaggatccatatgaaagggagggattattcagcctggtccaatatcatcataagcgtccatatgaaagggagggatgagagtggagtcagaaaaaagagaggtcgccgtggaagcagaggttggaacaattcactgtgaagacagaggaaggggccaaagccgaggaatgtggcggcctctggaagctggaaagggcaaggaagattctcctcagagcttccagaaagacaacagccctgccgacgcctttgattatagcacagtgaagactcatttcagacttctgaactccagaactgcaaggtcacagttgtgttgtcttaagccactgaatgtccggtaatgagttacagaagcaacaggaagccaatacagctctttaatactcccccaaattaccaccctgttgccccaacaaacattcgcttctctttcttcatcttcccaatgttgtttatctgggtcttcagraagtcaatactatgattatgtaaatattttccactgagccacatcaagaaataagattgcatttctgtctcgtacatgtgtatgttttcaagcttataattactttggattttccccgatgcacctctggctaattttcaacagccacaatttacttgtaaaacgctttctcaattctattttccgca

SEQ ID NO: 794545 - DNA, 476 bp, Homo sapiens
catgggcccatactgtggtttccctttcatatagagatggggctggaagggccattattgaatatctggtcaagttccctcacttgatggatgaacgctgagatctggaaggagtcaaccaactcatcacccaagrttcccccaacaagctagcagcaaagcttggatgagaacccagatttctaagttcaaagtcttcctcacatcttcctttatttaaataattttgactgtactacatcaacccataacacaagctatataaaaacagcaatttgtttttctaagactatacctagtgtctgtaatagcatcaagcaattgagatgttccatttgttgaataaatggatcgtaagacaataagtagtaggtggtttgattacatcctgcaaagaagttttgatgctcttcctacttttcactccctcttaagtcttcattcaagacaaagaagctcattggatgcccaatatc

SEQ ID NO: 794546 - DNA, 663 bp, Homo sapiens
gacttgttcagttttaaaattaatttggccaatactaccatgactttagtctctatctttaggaagtaccaataaattatatagctttcccttcattgtaggatcacagaaaatcctctactgaagagcacatacgtaggatctgtgactctgaacactaattcaaagtccatccctccttgacctaccagcaaatgcactaagaaaaaaaagtctgccctcctctataggagatagcagcagaacataggtttgaagcagtcacactgtgccagaaattagtttcttcataactcaaagaagaaagggaaggcatcatactaaacctctactgagcctcgggtgccccaaactaacagacatattgcattttacatgaatggattcattaccactatcatgaccaaagagcagttacaaggcatcctcctggggtaccagtacaaaacaaacagagaataygcccctaccctagggcagcttgctgaagactcttctaaggtctggccagttctaaatcactgctcatcacaaaacaacgacatggagcttgacacaagtaaagaaaacaaaggaaaacaggctaccaattaactaccatataaccagctaaaatagaataattacaaagtgaatagggacacagaagaggaagaatataaa

SEQ ID NO: 794547 - DNA, 533 bp, Homo sapiens
gatgggtggtggtgaacagcagaaaggggttatagtacgtgaatctgcattgttctagctgttccccatgccactcatcctaaggtgagccggacattgattagccattgagccaggctaatgctggcagcagatccagtgatggtaacctgcctatcaatagatccttccactgggttcacaattttgatctacgctgcagacatctgatagatctcatttattctggtgccttgacacctgattatgcagccagtatcatttggaatggtgtttatgagaagtggtctgagcagatgcatccaaacctgcactgaaccccagcgttgctatctmctgtaggaaaactagattgttgcattgtcaactggtgcagcttggtcaactctagaagtggtccctccaggtcacagttgaggcacatggacgaagtggtgtggagaaagcaagctcacactgtcgctgcctgtgctgtacctgtcctgatcacctgcaaagatcaccggagaattggacagcttggaccagtatgg

SEQ ID NO: 794548 - DNA, 571 bp, Homo sapiens
ttaaaaaagtcaataacctttgttatttgtaaagtcacctacctactcttgttaaaaaacttttgttaaccaccccctcaccccaaatcaatacttgcagcccttccatggtcatgtgcatgcatctacagagcaggaaaaaatgttgagttgcatcacatgtacactccaagctgaggtcactctgtcttcttgtttcagctctaatgccgtaaacaactgtttttccggtctacttagtgccacatattttacacctttgtgctttttactgatgattttgttgtttaaaatggcccccacgcatcttgttcaagtgctatctaatgttgctcaattcaaggctgtgatgtgccacayagagaacgtatgtgttggagggctttgttcaggtacaaattacagtgctactgggtagtgagttcgatgtgaatttaacatacattaaggcatgtctaaacagaaatacacatgtaacaaagtcacgtattttcagttgatgaaaatgttgtgatcagaggtttgtaggaacccaatcctgtacttcccctatgtgaaaacggtttcatac

SEQ ID NO: 794549 - DNA, 588 bp, Homo sapiens
tattataataatttgatccacactatactcaaaaataaccgtctcaaaaattaaataaaaattttttaaaaaaccttgcaaagtagttatagaagcttattgaacagtaaaaccatctgtccacatagacatttgggatttaattgcactgcattaatctatcatacaagaacaaagcattcgtcaagttacagacgtatacagaagagatgatgacaatcaaattcaaactgccagactagaaagcttcgctttgagaagaatggatctccaagcattgcttagggtttaaaatgacastatacatttatgtttgttactaagctgattataacaatgcagctattaatttaaatgagttaaaaccttaccttaaccaaacccttcaagcttctggtagaaagtataggcttaaaagcttccactgtgattaggtctaatttcatcacatcagtataacacaagtacagaattgctgggattttccatacttgacagtagcttagaactatgaatacacaagaaaaaaaaacgatgtaagttttctattatgttacttttaaattaaacacctttaaataataaagg

SEQ ID NO: 794550 - DNA, 588 bp, Homo sapiens
tattataataatttgatccacactatactcaaaaataaccgtctcaaaaattaaataaaaattttttaaaaaaccttgcaaagtagttatagaagcttattgaacagtaaaaccatctgtccacatagacatttgggatttaattgcactgcattaatctatcatacaagaacaaagcattcgtcaagttacagacgtatacagaagagatgatgacaatcaaattcaaactgccagactagaaagcttcgctttgagaagaatggatctccaagcattgcttagggtttaaaatgacagtatacatttatgtttgttactaagctgattataacaatgcagctattaatttaaatgagttaaaaccttaccttaaccaaacccttcaagcttctggtagaaagtataggcttaaaagcttccactgtgattaggtctaatttcatcacatcagtataacacaagtacagaattgcygggattttccatacttgacagtagcttagaactatgaatacacaagaaaaaaaaacgatgtaagttttctattatgttacttttaaattaaacacctttaaataataaagg

SEQ ID NO: 794551 - DNA, 361 bp, Homo sapiens
caggatggagaccagagtgggggtggaggtgggacttcaagtttaaagttgcctggaagatgagaaaccagttgaggaggctaagatggagagtagggaaggcaggaggagaccaggagcgtgtggcgtcatggaagcccaggaggagctyggctctttacagaagagggtgatgttagttgtgacaaatgcggctgagagattgagtcaggtgaggccataaaagtgaccactggctttgatgacatggaggtcattagaggccatgacagaagtagtttctgaggagaggtggaagcagatgtatgtggtctagacagagtggtctaaggagggctggtagtgagaacgagggactatg

SEQ ID NO: 794552 - DNA, 584 bp, Homo sapiens
aacatcacagagtgtgcttacacaaaccttacagtacaccctactacacatctaggttatatggtatagcctattactcctaggctacaaacctgtatgacatgctactgttctgaatcctgcaggcagttgtcacacaatggtaagtctgtgtctgtgtatccaaacagaaaaggtaatgcactgcactaggacttgaggacagctatgattacttcactaagcaatrgaaatttttaaccttcattataatcttatgagaccaccactgttatgcagcacatgactgtactttaaagcagtaactttttcatcctcagcaccattcacaaattcaacacattctcaataacatcccatgatcttgacactataatattaacatgaatacaactaaactgtttaccatagcactagcatatgcaaagtaatcacttaacactcagcctctctgaaactccccgtaactccccaagctccaatcacacaattacttttcatcttagttttagctgtcttctgctctacagtattttatcaatccccatgtaccaggggtacaatcttaattcaacaagttattt

SEQ ID NO: 794553 - DNA, 640 bp, Homo sapiens
tctaaatctctagtaacggccagtgttacacatttgggtgctcagcaaagaaataacatagtatttcacttctcaccagataatgtagaaccatttgttataggtctatttcttttcctcctttctgatgattctgctgaatctgaagagtcaccagaagtaacacctgaagagataccagcacttgtcttgtgggttccaagataagctgtcctacttgaggtagactgggtaggagaacctaccaactcaggaattatttttgtctgagattttaacctcttcggcttgaggtttctggccaaacatatgaacaaaggaaacagtatttaacaaaatacaaagataattggttcacagagaatgactaaatagaaktatatcatatttcttaaactgagagtaattttatcatcaaaacattaaaatattcactattaacattttattctggcactgattagtagtagtatttcctaactctaaatttaacgtactgttattcaaatttggagtaatgaatcaatgttccaagtaagagttacagaaaattatttgaataccttacattctttggattaaatgctaagaggaaccaacatttacgtaatataggtattcattcatactaccaatgtaa

SEQ ID NO: 794554 - DNA, 640 bp, Homo sapiens
tctaaatctctagtaacggccagtgttacacatttgggtgctcagcaaagaaataacatagtatttcacttctcaccagataatgtagaaccatttgttataggtctatttcttttcctcctttctgatgattctgctgaatctgaagagtcaccagaagtaacacctgaagagataccagcacttgtcttgtgggttccaagataagctgtcctacttgaggtagactgggtaggagaacctaccaactcaggaattatttttgtctgagattttaacctcttcggcttgaggtttctggccaaacatatgaacaaaggaaacagtatttaacaaaatacaaagataattggttcacagagaatgactaaatagaagtatatcatatttcttaaactgagagtaattttatcatcaaaacattaaaatattcactattaacattttattctggcactgattagtagtagtatttcctaactctaaatttaacgyactgttattcaaatttggagtaatgaatcaatgttccaagtaagagttacagaaaattatttgaataccttacattctttggattaaatgctaagaggaaccaacatttacgtaatataggtattcattcatactaccaatgtaa

SEQ ID NO: 794555 - DNA, 600 bp, Homo sapiens
gatgacatctaagactttcacagctagagggacttatggcttcaaagcttctaggacaggctcactctcttgttagggctaatgcagctggtaactttcaactgaagccactgttcatttttaccttttcaaaaatctcaggccccttaagaattatgttaaatctgctctgcctgagcataagaaatggaacaacaaagcctaggtgacagcacatctatttacagcatcatttacagcatggtttaccagatattgtaagcccactgttcagacctactgagcagaaaaagaagactcctttccaaatattactgcttgtggacaatagacctagycatccaagacctctgatgggcacatcaaaggagattaatgttgttttcatgcctgctaacaccacatccattctgcagcccatggatcaaggagtaaatccaacaatcaagactgtaattttaccatagagaaacctgcaaacaccaccaccttaggaagtgatcaaagcacgtatcaccagtagtgggacaaaacaaatcatgtgctttctgatgtgatgcactgagaagaacagtatattttctgtcatattactgccaa

SEQ ID NO: 794556 - DNA, 600 bp, Homo sapiens
gatgacatctaagactttcacagctagagggacttatggcttcaaagcttctaggacaggctcactctcttgttagggctaatgcagctggtaactttcaactgaagccactgttcatttttaccttttcaaaaatctcaggccccttaagaattatgttaaatctgctctgcctgagcataagaaatggaacaacaaagcctaggtgacagcacatctatttacagcatcatttacagcatggtttaccagatattgtaagcccactgttcagacctactgagcagaaaaagaagactcctttccaaatattactgcttgtggacaatagacctagccatccaagacctctgatgggcacatcaaaggagattaatgttgttttcatgcctgctaacaccacatccattctgcagcccatggatcaaggagtaaatccaacaatcargactgtaattttaccatagagaaacctgcaaacaccaccaccttaggaagtgatcaaagcacgtatcaccagtagtgggacaaaacaaatcatgtgctttctgatgtgatgcactgagaagaacagtatattttctgtcatattactgccaa

SEQ ID NO: 794557 - DNA, 526 bp, Homo sapiens
ccagtcataaatcatcaaaaaatatcaacattaaaacaaaaatcaaggaactagactagattcaggttactaaacagacacaacaaaatgtaacacgtgatccaggattttattttgctatgaaaattatcaggaccattgactggtaaaatttgagtaagatctgcagatctgataatgacattatattgttgtttaytgcctcattttttgtttttttgacacagtgtctcactgtgtcacccaggctagagttacactggcgcaaccaaggctcattgcagcctcaacctcctaggctcaagtgattatcctgcctcagattccagagaagctgggactacaggtgtgtcaccacacccagctaattttttttttctcatttttttgtggaggagggcttgccccgtattgcccaggctggtctcgaactcctgggctcaagccatcctcccacctcagtctcccaaagtgctgagaattacaggcatgagacactgcacccagcctgattttgataattata

SEQ ID NO: 794558 - DNA, 518 bp, Homo sapiens
cctttctcagctttccctctgcacaccgtgctgtttctggaacccacaggcccttccggattccctgcctctgcctgccagcctccctggccaggtctccctgaatatccacaggcaggacctctgttctctcccctgccccgttaaagaaaagccagagctggaggtagkaggtgaagacagtttctattcaggaactattgcagtaggggaaagagacctcagtatagagccgggcttaattctgaatacagcatggacaagtggggaggtgcagcccagaaacagggtggaaggctcagtgggtggaaagttactaagaggagaccccaggggcgagggggattctggctaaacccaccttgctggaggcagaccagggtgaccagacatcaagggtgggggacgaggaaccgatcagatagtgacgttggggatctggaggcagagtccaaggtggccagacactgagggtagaagacaaggaactgatcagatagtgatggtgtgggatcctg

SEQ ID NO: 794559 - DNA, 680 bp, Homo sapiens
aatacccatcatatgggttagggatcccccaatgacctcactgaaacttartgtggagcctgtctccaaataaggtcacattctgaggtattggtggtgaggactttaacatgggagttttttgggaggaggccctcacccacagtagtagaacttgtgactttgtcaccaaaagaaatcacttattttcacatcgcaccgtagtagcagtggacatctccaaataccggcgaagctagtcctgcctgcaaagttaaggcagttttttttatcagatctagagctggaaatcattgttaaatgaggcgatgaggaagtgtgtatattattctggctcacttttaaaaatattttgatccatttatttcaacataattgatttcccctgtgattctgtatgttttgtattatacatgtaaaaacgttattcagaggagttcacaggcttcacccgactgtgttgaaaggacccatgatgtaaggatgtttgttgtggggggtgcttgtggctccttaactggctctggaaagagcctacttcccatagtgaaccctgtgaggtccaattctgttcctccccctggagctccaagagaaggtcattgtccttgtagcagcaggtgcccccccaagctgggttctcactgcaggtgccagcgggctctcagtaggtatgacct

SEQ ID NO: 794560 - DNA, 625 bp, Homo sapiens
tcttccgttgccatcttggttttggtgggtttggccagcttctttactgcaacctcttttatcagcaaggttgttatgacctatatcttctgctgacctcctatgtcatcctgtgactaagaatggcttaacctccggggaatgcagcccagtaggtctcatccttattttacccagcttctattcaagatggaggtgctctgcttcaaactcctctgacaaaaccatcagaaaccagagagaaggcagacgcctcaaggtgacgctggccaagacccagacaggcatcatgtgtcccagtggagactggctcgtgatgacacctgagccacagacgatccctctcacacytagatgctatctaaggccgatggcaaccggatgccaccctgagcatgaggtaggaggcaattaacccctggttggctgaattgacccagagaacggagttgaccttcagttatcaatgttgaacattcttctaagaagacgtgaggagagcttgagatagaaattaaattcagacatactcagcatgtaaaaataagggatgttccatctgttgcccacccgaggataatggattgacacttcagggactttagcaatatgccaggcactgtgc

SEQ ID NO: 794561 - DNA, 604 bp, Homo sapiens
gtcatttctggtattttgcaattacaagcaatgttgcaatgaataatgttgtgtatgttcatatttatggaggtgtagcttttgggtaaattctcagaagtaggattgctaggtcaaaagctacgtgtgtatgtagttttgtcacggattgccaaatttccctccagcaaggttgtacaatttgcatgcttaccagcaacacatgagagttcccgtttccccacagcctggccaacagggtgtcatcatactgtttagtttatgccaacctggaaagtaagtaaataagaaatggtatctcagcatagttttgattctatcttattataagtgaggttgaactactgttccatctttttgtatgattgagaacaatttttatawgtttttataacttgtcattctatatcttttgctcattattttctctctcagatttttgggctttttactccttctaattttaagaattcttttgatgttaggaccgatggccccctttatctgcgttttgagtcataggaagtatttccttatatggaagtttttttctggtgcttatatcttatatggtttcatttatttgtctttctaggttttattc

SEQ ID NO: 794562 - DNA, 601 bp, Homo sapiens
aaacagcccggaaatgagttgagcaacagccaaggatgtgggtgctggaggaccctgggtttagttgggaaaaggtagacataagtctgagagctgaggtgaggagctggaacctggccacctgcgtgtctggcctctgtccctgggtccctctcaggtggagacgacagccatgcatcctccgggcagcagatgaaagcttgagagcagaagagagacaccagaaggttggcaatggaggtaatgagcccaggtcctgcaaagagagtgatgtcttcaagatcaagtgacacaaaaccagtgcccctctcctatccggctgagccaaggcgtcccaggaaagtcagaaacttaccagcactttcagttcygtgaaactgagtgaagtggccccttggaaggttgatagtggtggagagagggacacagtgctcccgctgtccctgactaaccagaaccgagggctcttggcaccagactttacaggctatggtgttcaccacagggcaagagtagagtgagccagcaagctagaggggtctttgagggaagtggatgcaatagaaaccctccaggcaagtccctgcaagtgagggctgtg

SEQ ID NO: 794563 - DNA, 514 bp, Homo sapiens
ggtttccacagtggctacaccattttacagtctcacaagcaatggtgggaactctgatttctctacatcctacatcctcaccaatacttgttaatttctgggttttctttttggataatagctatcttaatgggtgtgaagtggtatattatcttagtcatcttgagctgttataacaaatatattatagaaagagtgayttaaacaacaaacatttattgctttggttctggaggctgggaagtccaagatcaaggtgctagcatgtttggtgtctggtaaagacactcttcctggtttacagatggctcacttctctgtgtattctcacaaagcaaagaggagagagagagagagagagagagagagagagagagaaagagagagagaaagagagagagagcgagagagcgagctcatgcgtctatcctcatcaggacactagtcctattcatgagggctccaccctcatgacctaatcaccttccaaagttaccatctcttattatacact

SEQ ID NO: 794564 - DNA, 555 bp, Homo sapiens
agacaaacggaagtttattaacatgcatgcctcctgtgtatgtgatagatacccagagagatgagtcagtctcaaggaggagactttgaattcaggcttaaatatttaataccatcttcagctgtcacaaagaaaggtgttgctggcaggtgtggggaggtaaccaggaaaagcagtcaaaaagggtaaggtttgttrtgcagatttgagtcatccttgtcttcctggtacagagggggaggcaccctcataaatggagggctcctttacagaagtaaatttcccttacaaaagggtaactgcctctgtgttctcagggcttcttctgtgtcagcagtttctcaaaataatccttatgcccaaaaggcatattttggtgggggcaggttgtggtctcctacactggtcatgccaaagcactggcaaacattatagtgtagcagttatgagcatggattttaggatctgacaagcttcaattttgatttctggctctgttacttcctagcatggtgatctttgacaagttatggcaagtcatacaacttttgtaat

SEQ ID NO: 794565 - DNA, 555 bp, Homo sapiens
agacaaacggaagtttattaacatgcatgcctcctgtgtatgtgatagatacccagagagatgagtcagtctcaaggaggagactttgaattcaggcttaaatatttaataccatcttcagctgtcacaaagaaaggtgttgctggcaggtgtggggaggtaaccaggaaaagcagtcaaaaagggtaaggtttgttgtgcagattygagtcatccttgtcttcctggtacagagggggaggcaccctcataaatggagggctcctttacagaagtaaatttcccttacaaaagggtaactgcctctgtgttctcagggcttcttctgtgtcagcagtttctcaaaataatccttatgcccaaaaggcatattttggtgggggcaggttgtggtctcctacactggtcatgccaaagcactggcaaacattatagtgtagcagttatgagcatggattttaggatctgacaagcttcaattttgatttctggctctgttacttcctagcatggtgatctttgacaagttatggcaagtcatacaacttttgtaat

SEQ ID NO: 794566 - DNA, 555 bp, Homo sapiens
agacaaacggaagtttattaacatgcatgcctcctgtgtatgtgatagatacccagagagatgagtcagtctcaaggaggagactttgaattcaggcttaaatatttaataccatcttcagctgtcacaaagaaaggtgttgctggcaggtgtggggaggtaaccaggaaaagcagtcaaaaagggtaaggtttgttgtgcagatttgagtcatccttgtcttcctggtacagagggggaggcaccctcataaatggagggctcctttacagaagtaaatttcccttacaaaagggtaactgcctctgtgttctcagggcttcttctgtgtcagcagtttctcaarataatccttatgcccaaaaggcatattttggtgggggcaggttgtggtctcctacactggtcatgccaaagcactggcaaacattatagtgtagcagttatgagcatggattttaggatctgacaagcttcaattttgatttctggctctgttacttcctagcatggtgatctttgacaagttatggcaagtcatacaacttttgtaat

SEQ ID NO: 794567 - DNA, 525 bp, Homo sapiens
atgccaaagcactggcaaacattatagtgtagcagttatgagcatggattttaggatctgacaagcttcaattttgatttctggctctgttacttcctagcatggtgatctttgacaagttatggcaagtcatacaacttttgtaatgcctcagttttctcacctgtaaaatgaatatgataatrtctacttcataattattagagattgttagcagcagtgaatccttatgggtctgcagcaaactcaattcttgcttcctcagaagaaagaatttgacggaaggacataaggcagagggagagaccgaggcaagtcttagagtaggagtgaaagcttatgaaaaatttttaggggaagaatgaaaggaagtgaagtgtccttggaagagggccaagtgggagagacaagagcactgtttgacttttgacttggggtttcacatgctggcttgcttctggtgtcttgcttctcttctttccttattcttcccttggggtgggctgtccacctgtgctgtgacct

SEQ ID NO: 794568 - DNA, 620 bp, Homo sapiens
atctctagggcaggggcaaaatgatgccagtctgtttgctaaaacataacaagagtcacctttactccagtttccaacaagttcctcatctccatctgagaccacctcagcctggagaccactttattgtccatatcactatcagcattttgggcaaagccattcaacaagtctctagaaagttccaaactttcccaaatgttcctgtcttcttctgagccctccaaactgttccartctctgcctgttacccagttccaaagttgcttccacaatttcgagtatcttttcagcaatgcccaactcccggtaccaacttactgtattagttcattttaacactgctgagaaagacatacctgaaactgggaacaaaaagagtttatttggacttaaagttccacatggctggggaggcctcagaatcatggcgggagacgaaaggcacttcttacatggcggtggcaagggaaaaatgaggaagaagcaaaagcggaaacccctgataaactcatcagatcttgtgagacttactcactatcatgaaaatagcacgggaaagaccggcccccacaattcaactacctccctctgggtccctcccacaacatgtgggaatt

SEQ ID NO: 794569 - DNA, 469 bp, Homo sapiens
tggggaagcaccagggttggtcagctggtagagggagggggtatctgtgggaagaaaggcatgagacagggcaggaggggagtctgagagcccaggaaaggaggcggttgtgttatgaattggttagtttacatttgaaaagctcactctcaggcaagctgtttgctactgctactgaaacaccaggggtttggtctaggtcctgctgctcatcacacagaaaatgatgaccaagatgatgattgtttccaagraaaaaggctttaatagggtgctgcagcccaggagatgggagctcagtctcaaacccatctccctgactgactaaaaccaggggtttgtgtggcagggaagaaatgtaataatgtgtaagaaaacgggaactagggaggggcaaggaagtaatcatgatgaatgagaggtccggtttctggaacggtgatctggtaagtttcagttctttgatact

SEQ ID NO: 794570 - DNA, 572 bp, Homo sapiens
taattccatgttggaatgtgaaaggctaacactgggaaggtgcaatgactttgtttttaaacgggagatttcctcactgcaagtttctagttaattcgactttgaatctaatctatcattctgtgtcgctggagaggtgcrttaagatggcagccaaagagatagattttaagatctcctaaatcatcagaatactcaatcttggtaaatattctctggggcattgattttaagacacatttcatcccttacttgcacaattccacggaagacttcattagattttttttgtccttgatgagaatgtaaatgagttatgttggagctctacacaaccaggtatgaatgataattgggtttcttcaccgaaatgctaggaaagaggccctcaaaaagacagaaaaacattatgatggggaagaggctaaatgtcttccaggcactatcgacttgataagtggagcttaaataagtgaagcttgttatttaaatgctaatgagtcttttccagaaaattacccagtcccttacataagttttgaaaattctcatttttattcttctttaagttt

SEQ ID NO: 794571 - DNA, 572 bp, Homo sapiens
taattccatgttggaatgtgaaaggctaacactgggaaggtgcaatgactttgtttttaaacgggagatttcctcactgcaagtttctagttaattcgactttgaatctaatctatcattctgtgtcgctggagaggtgcgttaagatggcagccaaagagatagattttaagatctcctaaatcatcagaatactcaatcttggtaaatattctctggggcattgattttaagacacatttcatcccttacttgcacaattccayggaagacttcattagattttttttgtccttgatgagaatgtaaatgagttatgttggagctctacacaaccaggtatgaatgataattgggtttcttcaccgaaatgctaggaaagaggccctcaaaaagacagaaaaacattatgatggggaagaggctaaatgtcttccaggcactatcgacttgataagtggagcttaaataagtgaagcttgttatttaaatgctaatgagtcttttccagaaaattacccagtcccttacataagttttgaaaattctcatttttattcttctttaagttt

SEQ ID NO: 794572 - DNA, 607 bp, Homo sapiens
gccactttgcacttgaccaatctttaagtgctgctatgcctggaccaaatgtgacttcagccaggagaacccaggccttagaatttaggagccattaggtcaagatgtctccagtggtgggtggggcagcagaagggtgatggttgatggagcaggtgttctgcccacctggtctcttaccactgccttcccggcaggaggcagctgggctatgtgctgagagtcaggcagtttatccagaccacaagaaagggttgtcctgggactcatgccagcaaacaccttccaaaacaaacatagccaggtttgaaaagaggcagcctcggagccygcctcagggtgtttccatgggcactcaaaagcttggataacttctggttgagggtttcttggaagcagcctgttggtgtggaagcaggtggcctgctgctgtgctagctgtcattggagacagacagcatggcggtgagtgtggccaggtggggaacctggttctgcgcctgtctctgtgaccttggaaagctacacagacctctctacatcttggttacaaaagcaagacttctttcatatgttggttgaaaggttaaattaagtaatgcacacg

SEQ ID NO: 794573 - DNA, 646 bp, Homo sapiens
tcccacaacacatgggaattatgggagctatataattaaagatgagatttggctggggacatggagccaagccatatcagagtgttatgagataatagaaaggaatgaagtactgataaatgctataacttggataaatcttgaaaacattatgctaagtgaaaggagccaattataagaaaccacacatttgtgattctcttcatttaaaatgttcagaataggcagatcgatggcaacatagattagtggttgtcaggggcagggtaggggaaggggaaaattgggaatgactgctaaygggcgtgcagtttcttttcagggtgatgaaaatgttctaaaattagatagtggtaagggttgcataactctgtgaatatactaagagccactgaattgttgaagttaaaagtgaatgacatctcaataaagctgtcataaaaatttccaggaaaacataattcataagaagaaatcaatcaatcaaaattcacccataattggcacagacattagatttatgcaaacaagggcaataaagtagttataattgtattatagtggtattataactgtatatgttcaaaaatttaagtagatatgatacaaaaagacctaaattaaactcgaaatgaaactataatgc

SEQ ID NO: 794574 - DNA, 618 bp, Homo sapiens
acacttaaatgtcactgtctgacagctttgaagagagtagtggttcccctagcatgcagctggagatctgagaacagacagactgcctcctcaagtgggtccctgacccccgagtagcctaactgggaggcacccaccagtggggcagactgacacctcacacggccaggtactcctctgagacaaaatttccacaggaaagatcaggcagcaacatttgctgttcaccaatatccactgttctgcagcctccgctgctgatacccaggcaaacagggtctggagaggacctccagcaaactccaacagaccttcayctgagggtcctgactgttagaaggaaaactaacaaacagaaaggacatccacaccaaaaccccatctgtacgtcaccatcatcaaagaccaaaggtagataaaaccacaaagatggggaaaaaacagagcagaagaactggaaactctaaaaatcagaatgcctctcctcctccaaagaaacgtagctcctcaccagcaacagaacaaagctggatggaagatgattttgatgagttgagagaagaaggcttcagatgatcaaacgactcagagctaaaggaggaagtttgaacccatggc

SEQ ID NO: 794575 - DNA, 561 bp, Homo sapiens
gtggcacaatcatacagaggagtttctgtagcctgaaactcctctccctttctgcctcagcctcctgggtagctgggactacagacacaagccatcacacccagcacaaacatacttttaatggaatcactaggtcataggtcttttgacaaattagggtgaggaaaacccgtcattgaagacattacacatgtctagtgtaggtacaattaagatccaatctaggacaggacagaggttgagaacagagctgagtaactgtgagattcagtttgtatgacttggcaggacatggcasgacttggcaggatgtagaaaggaaaggcttaaagggcacccaacatttcatgtttgcatctgagggatgagaaggaggaagatgttgataataataacaagagccatttggaaggaagaggtggtggagagttcagtttggtatccgaccctgttgttttgaagtgccaactaaatttctgaaagaaagctggttgacacacttgtctgacattcaggaaggacgccaaggctgtaagtacagattcagagcttattttcagg

SEQ ID NO: 794576 - DNA, 524 bp, Homo sapiens
tttcccccttttaagttccccgtgtggttgacagggaacatttatgatttctaaatggtcaagtaaaatttattcttattattcttattccttttttttttttttttttttttttttttgagacagagtctcgctctgtcgcccgggctggagtacagtggtgccacctcggctcactgcaagctccgcctcctgggttcacgtcattctcctgcctcagcctcccgagtagctgggactacagactacaggcgcccgccaccacgcccggstaatttttttttgtatttttagtagagacggggtttcactgtgttagccaggatggtctcagtctcctgacctcgtgatctgcccgtctcagcctcccaaagtggtgggattacaggctcgagccaccacgcccggctaaaatatattatttttaagacaaatggtattagattcctaagaagaagctaagctaagagtttttacctctcagatcattagaacaagtatctgcctagggaaaaagtaaagtt

SEQ ID NO: 794577 - DNA, 584 bp, Homo sapiens
ttttcccttttatcttatgcaacttgagtcatggtcaaaatatatgaaatagtgatttataaatttggaaaacatgcagggaagcctgaaataaggaaagcgaacaaagtgaaatctctgcttttccagagatgacccaaccagcctgatggtctcttctctgagttgagagcacagtttcaacgctgaagaggccacagagctagaatgtaggaaaaagtactagaggaatcctagtgagaggtggacagatcmtgagttttacagagggcccacccctgtcttttattgagttattctgataatgcatgtgggaagattagccaaggctacggcaagaacaagaatcactggagctcatacagaggtgggaatagtttgtatccctgcaagtcagtgaaagtatgtctgaatatttgagaaatcaagtagaaaccacagaattgtattaatattaccttagtaagggagccaatcagttctagactggaaccatgcaaacaagaactgtgcaaacaaggcttaaagcaaggcttgatggaatcatattgaggccaagtaactcaactgcatcccagtaaact

SEQ ID NO: 794578 - DNA, 613 bp, Homo sapiens
ggggctactttcctttctcaactttgaaatattctaaaacatgttcaagagaggattcataactaaaactggagactcaggatactagattgtggccaatctatcatttttcccactgtttgccattccctgagggtatgaggtgtacacttgtcagggctgttgactttrgagtccgacatgtaactggcagccaaggtcgtgatagcagaatgtctggaacagaggttttaaatgtttttgtgtggcttggcttgtctctgacactgctgtgatctgcctgagaagagaaaaccccacatacttactagcataagggagaggagaatcaagtagggccaatctggaccaatctggtacctggaggcaagtccaacctaaaccggttgagcatagccaatatccagccacctggagcacccatgagcaagagagagagatgcttttagattcaggggctatttgttacactgcattattgcagtaatggctgactaatacatattctatttttaaaaactggggcatagcataaaatatttacaaaatgaataagaactgatacaattatctgggcctgatcctcttatctggtagatgagaacactgaggc

SEQ ID NO: 794579 - DNA, 612 bp, Homo sapiens
tttttatatgcttgttggccacatatatgtcttcttttgagaagtgtctgttcacgtcctttgcccactttttaatggggtggtttgtttttttcttgtaaatttgcttaagttcctgattattagacctttaccagatgcatagttttcaaatattttctcccattctgtaggttgtttactctgttgatcatttcttttgctatgcagaagctctgaagtttaattagcttccacttgtcaaattttgcttgtgttgcaattgcttttggtatctttttcatgaaatctttgccattcctgtgtccaggatggtattgcctaggttgtcttccagggtttttayggttttgggttttacgtctttaatctttcttgagttgatttttgtacatgttgtaagaaaggggtccagcttcaatcttctgcatatggtcagccagttatcctagcaccatttcttgaatagggagtcttttccccactgcttgtttttgtcagctttatcaatgctaagatgattgtagatgtgtgaccttatttctgggctctctattgtgttccattggacgatgagcctgtttttgtaccattaccatggtattttggttg

SEQ ID NO: 794580 - DNA, 537 bp, Homo sapiens
agatcccatccaggatcccattctacattctgccatcatgtcttcttaagctcctctgtagcagtttctcagactttctgtgttcttgatgactgtcagtcttgaggaatgctggtcaggaattatgtagaatacctctcagttggggcttgtctgttgtttttctcatttttaggctgaggttatgagagttttgaaggggcaaactacggaggtaaagtaccattctcatcacatcatatcaagggtaaatgctatcaacagggcttatcagtgtcgctgttgaccttggccacctggctaaggtggtgcctgccaggtttctccactggaaagcttctctttccatgtcgtcmtttctggaaggaagtcgctctgcaaagcccacacataaggagtgagagttatgcttcatcttcttgaggtggtatatctacataaattacttggaattctttcgtcaggaaaatttggctattgttaccatttattcaatcatttatatcagtgtgggcttattttacacttatcacttat

SEQ ID NO: 794581 - DNA, 537 bp, Homo sapiens
agatcccatccaggatcccattctacattctgccatcatgtcttcttaagctcctctgtagcagtttctcagactttctgtgttcttgatgactgtcagtcttgaggaatgctggtcaggaattatgtagaatacctctcagttggggcttgtctgttgtttttctcatttttaggctgaggttatgagagttttgaaggggcaaactacggaggtaaagtaccattctcatcacatcatatcaagggtaaatgctatcaacagggcttatcagtgtcgctgttgaccttggccacctggctaaggtggtgcctgccaggtttctccactggaaagcttctctttccatgtcgtccyttctggaaggaagtcgctctgcaaagcccacacataaggagtgagagttatgcttcatcttcttgaggtggtatatctacataaattacttggaattctttcgtcaggaaaatttggctattgttaccatttattcaatcatttatatcagtgtgggcttattttacacttatcacttat

SEQ ID NO: 794582 - DNA, 602 bp, Homo sapiens
ggcaaaagtagctatagttctatgagaacatcatagaacttagtctttcttaggtgaatctcagagataaaataacatactggaagaagaaataaaccacagctctatttgtcttaatctttgatttgtaataaacagaaacaatcaagggagattcttttttctgtatttgccctgctgtgtacgtcaggtgttgactacccatgtgtaatcctaaactttcaaatggaatttccctggtaacgagatggtaacataactgctaacagacccctgcatatcagtgaaccatgcataactttaacaaatgcaatgcaaagggtggtggtctgcatggattatttctatcaaaaatgaatttatgcattcaccattagaagcagatgcaagactatagcttaaaagcaaattagarttcaagctggatttgcaaacattccagtttaacatttggatagcaaaggaactcagagtttataaaatttaaatataagatagacagtcacaattctgtgcaagcagtcagggttaattcagatcgtttcctctgctcttgcattccctgatttcaagcacggcgaggctggggctgtaattacgga

SEQ ID NO: 794583 - DNA, 609 bp, Homo sapiens
ctcctctctcctttgtccccaacatgcactgatcaggaagatgaaaccaagtgaaagccacttcctgtgtgggtcttaaaattcaataaaaataatatctcagaaaaaagccagaacacactttctgttcagatggaaaaatgcatgtttccctccccaccttcacctacaagctgagttcatgttatttcaacagcacatcatggacccagatgcaaatggacagtatctgaaatgcagtcccgagcaggagaaatgtagtttcatcagcgagtcatttttaaggcttgatttctatttgtatttaaacatactatcaaaaaataaatacttgcatattttgtggaatgtctgttgaaaatatgtgcccaaagtgtctaacttgggacaaatstgacctcagtccctggaaggctaccttcgatttatgcctcttgatatggcttggctgtgtcctcaccaacatctcatcttgtagttcccataatccccacatgttgtgggaggagccaggtgggaggtaattgaatcatgggggcagttacccccatgctattctcgtgatagtgagtgagtcctcatgataactgatggttttataaggggctt

SEQ ID NO: 794584 - DNA, 609 bp, Homo sapiens
ctcctctctcctttgtccccaacatgcactgatcaggaagatgaaaccaagtgaaagccacttcctgtgtgggtcttaaaattcaataaaaataatatctcagaaaaaagccagaacacactttctgttcagatggaaaaatgcatgtttccctccccaccttcacctacaagctgagttcatgttatttcaacagcacatcatggacccagatgcaaatggacagtatctgaaatgcagtcccgagcaggagaaatgtagtttcatcagcgagtcatttttaaggcttgatttctatttgtatttaaacatactatcaaaaaataaatacttgcatattttgtggaatgtctgttgaaaatatgtgcccaaagtgtctaacttgggacaaatctgacctcagtccctggaaggctaccttcgatttatgcctcttgatatggcttggctgtgtcctcaccaamatctcatcttgtagttcccataatccccacatgttgtgggaggagccaggtgggaggtaattgaatcatgggggcagttacccccatgctattctcgtgatagtgagtgagtcctcatgataactgatggttttataaggggctt

SEQ ID NO: 794585 - DNA, 580 bp, Homo sapiens
aaaaagcagcatcgtcttagatccagaatttaagatagaagtcactatgaatatatttttcccaccaccaaaaaggtgtaaaatttataaactgatcaataactatgcaacaagtgtatattttaaatacatgaaattacttttccagtttcaccatttttcttgaaaagaaagtaatcatccatatccttactagcaagaaaagctttgtttttaaaaatctcaatacaaaactaaaaacacttaaatattttgataaaacaagagagaaacattcatcttatgtcaacaagtcaaagccagtaaaaaaagcacaagaaattcaggaaaatacacatgttcaggaccatmaactaagcatgtgcagagtcctatcaaagtcatgcatcaggcctcgcggagcccagaggttctgcatgttttgcatctgaaatggacttcaggctttcatggaaaaggtttactggagaaccctgggaggcacggccagcaataggatgttcaggttttctctacttagcgatggaattgtgtcgaattcagtaaaagaggaaatgcttgagacttcgattgccgtatt

SEQ ID NO: 794586 - DNA, 599 bp, Homo sapiens
ggctgctattgctgctatttttatgtcagagatgagaaaccatataaactttgaactctgtcgtgaggaacagagctgggatttggtgctaggttgtcagttaagcagtgactgtgtttgggctcagaaccctttaagaatgagaagaaagtgctgcactctgtcatgaacaaaaaggacacacacagttctgtttccagctccttaaaggtccaaatccccacttaaaacacctttgatctaaacattgctgcagattatttaaaattctcataataagatgtgcttgggctaggtatgccgtgtagtccttggagctcatctaaagccttataaactgaatcgtgttcctttgtaatcacttaacatttagatagattgaggttcagtaatcagatcyttaagtcacagccacacaaaaacaagacaactctgctaacatgtctttggttataacatttatttcctgtttctttttttgttgtgttctataaaatcttaatgacctactttcatatacttcttccagaattaaaactatgatcaaaaattgaaaaaaccaaaccagaaaacatgatttttagagtggcttcctccaa

SEQ ID NO: 794587 - DNA, 595 bp, Homo sapiens
cagtacccacctacattccagacacactgtgctaagagatttgaaatgtcattgcatcctttagccctcaaagaacaaccaccagcaccttatagggtagagattagtcctattttaagaaggaggacagatattaactaatgtatgaaagatcacaaaggccacatggctagaaagtgacagagtcatgattcaaacccaaatctgttgcattctgcactattttttatttacagcatttctgataccaaatgggcagacttttttctcacaccaaccaattctctctggaagagcaaatgcatatcctacatttcagatcagttctgacactcactacccagaggtagtgcagacttccccacccccagcttaagggctccattccccgagattgccctcacttctgatgccaggtgcaagtagctsatccccaggctacccacacttcagtccaacttgaatacaaagtcaaggggaacctatgaatctcccctttcagttttcataatttgctagaactgctcacaaaactcaggaaatcactttacttagtattatcagtttcaaataaaggatgtaactcagaaatagc

SEQ ID NO: 794588 - DNA, 621 bp, Homo sapiens
ctgctgattcttcagtcatttacttcgagataaaaaaaaacaacaatgcatccagggctgtgagggtcccactacttgcgcttaggaagagaacagctgagaacggtaagcagtggtccttacactaccttctctcagcatccatatgaccaaacgaaataaaacaaagttccctgataygtacatttgtgaccctgagttgaatcagttatgtctgtgttttaataggctgccaaccacactgagatactcaggcagcatgaaagggtatggaagacctaggttctaggcctgtctcataaggtgttacattttgggacaagtcatacttcagctcactcaccttcatatttaacaaagaaatttaatctgttatattgacgtttggaaaccccagctaagctaacagggagaagggctgtggtgaaatggtggtgatgaacaaacctcttagaggtacatcatgcaagacgagataaataatactgttaactaccagtatctaagctgagaaaatgtgctggctaagtcaacaggttgctgtatcctttacacactgacataaatgctgaaatgaatgaaataatgaaaagctaagcaaagagtcttgctttatggagg

SEQ ID NO: 794589 - DNA, 592 bp, Homo sapiens
cctatttatgatggatccacccccatgacgcaatacctcctactaggccccacctccaacatcaggggtcaaatctcaacatgaggtttgaagggaataaatatccatatcatagcactattcattaaatggaggtggatcatcacaaagttctycatcctcatcatcttctcattgagtaggctgaggaagaggaggggttggtcttgctgtctctggggtggcagaggtgggagaggtggagaaggtggaaggggaggcaggagaggcaggcacacccagtgtaagttttactgaaaaatatccacatgtaagtggacctgcacggttcaaacccatgttgttgaagggtcaactgtatatcaatatttactgctatggtgtggatgtggtttgtccctgccaaaacccatactaaaattttatccccagtgtggcagtgttgggaggtggggccaagtggaagtttttctggttacggggtaaaatacttcatgaatagattaatgccctccctcaggtgtgcattccccttctctcgggaattaattcctgagagagtatgttgttaaaaagagtctggcttatttgg

SEQ ID NO: 794590 - DNA, 592 bp, Homo sapiens
cctatttatgatggatccacccccatgacgcaatacctcctactaggccccacctccaacatcaggggtcaaatctcaacatgaggtttgaagggaataaatatccatatcatagcactattcattaaatggaggtggatcatcacaaagttctccatcctcatcatcttctcattgagtaggctgaggaagaggaggggttggtcttgctgtctctggggtggcagaggtgggagaggtggagaaggtggaaggggaggcaggagaggcaggcacacccagtgtaagttttactgaaaaatatccacatrtaagtggacctgcacggttcaaacccatgttgttgaagggtcaactgtatatcaatatttactgctatggtgtggatgtggtttgtccctgccaaaacccatactaaaattttatccccagtgtggcagtgttgggaggtggggccaagtggaagtttttctggttacggggtaaaatacttcatgaatagattaatgccctccctcaggtgtgcattccccttctctcgggaattaattcctgagagagtatgttgttaaaaagagtctggcttatttgg

SEQ ID NO: 794591 - DNA, 592 bp, Homo sapiens
cctatttatgatggatccacccccatgacgcaatacctcctactaggccccacctccaacatcaggggtcaaatctcaacatgaggtttgaagggaataaatatccatatcatagcactattcattaaatggaggtggatcatcacaaagttctccatcctcatcatcttctcattgagtaggctgaggaagaggaggggttggtcttgctgtctctggggtggcagaggtgggagaggtggagaaggtggaaggggaggcaggagaggcaggcacacccagtgtaagttttactgaaaaatatccacatgtaagtggacctgcacggttcaaacccatgttgttgaagggtcaactgtatatcaatatttactgctatggtgtggatgtggtttgtccctgccaaaacccatactaaaattttatccccartgtggcagtgttgggaggtggggccaagtggaagtttttctggttacggggtaaaatacttcatgaatagattaatgccctccctcaggtgtgcattccccttctctcgggaattaattcctgagagagtatgttgttaaaaagagtctggcttatttgg

SEQ ID NO: 794592 - DNA, 495 bp, Homo sapiens
ctcaccagaagctaagcagatgctggcgctctgctacttgcacagcctgcagaactgtgagccaaataaactcttttcctgataaattatctagccttaggtattccgttatagcaatataaatggactaagacactcagctatcacaaatatgacttggcttgggcactcaggatcttgagaaaaggctgttgatcaagtcatagaggggcttcctcagttctctgcccctgacaacttacttagccttgggtcccaagtgctgtaagtttatcctaggtggaatggagatccttgaarctatgtcacctaacaatgatttcaggcagggctatgtccactgcccttggaaaaatggaaccttgagtctaaacttttccatagaacacacttcaccttccaacctaaaacaatggaagttttccagttggaaattatcccagaggctgatgtacagatttccctttcagtatcttttctgccactaatggatta

SEQ ID NO: 794593 - DNA, 621 bp, Homo sapiens
aataggagagaagctagaagtttatcagaaagaaccatggggagaatcagttaagaagagtcatctggagtcagagaaagcctcaaaaactacctctgcaaaagggcctgattttaattggattagaaggtggggcaatgtatgccccagggcagtgcaaaaaacaatagtgcaatcagctagcaataagtggargataatagttgagtgtgatctcaacaccgtgaaaacagcccaaagcttaatggggagatcacacgaagagattggtcacagaaagcctggctaaaactgttgtcatgcatgtccaagtcagtaccctgtgaggagcaatatcaaaggtgacacactgcagaggaaacagacttcactaaactggtccagccaagtcactagtcactaaacagataaaaaaacaaataacaccaacaagcctcaggggagggaggttggtgtcgaaagctgctacaatatattatctaagatgtccatgttttagtgagagagagagagagagctagagatggagagaaagagagagaaagagagaaagaaagaaagaaaaagaaagatcattcaaaaacaaaaataggaaagagtgacacatacacagaaaataaa

SEQ ID NO: 794594 - DNA, 621 bp, Homo sapiens
aataggagagaagctagaagtttatcagaaagaaccatggggagaatcagttaagaagagtcatctggagtcagagaaagcctcaaaaactacctctgcaaaagggcctgattttaattggattagaaggtggggcaatgtatgccccagggcagtgcaaaaaacaatagtgcaatcagctagcaataagtggaagataatagttgagtgtgatctcaacaccgtgaaaacagcccaaagcttaatggggagatcacacgaagagattggtcacagaaagcctggctaaaactgttgtcatgcatgtccaagtcagtaccctgtgaggagcaatatcaaaggtgacacactgcagaggaaacagacttcactaaactggtccagccaagtcactagtcactaaacagataaaaaaacaaataacaccaacaagcctcaggggagggaggttggtrtcgaaagctgctacaatatattatctaagatgtccatgttttagtgagagagagagagagagctagagatggagagaaagagagagaaagagagaaagaaagaaagaaaaagaaagatcattcaaaaacaaaaataggaaagagtgacacatacacagaaaataaa

SEQ ID NO: 794595 - DNA, 585 bp, Homo sapiens
caggggagggaggttggtgtcgaaagctgctacaatatattatctaagatgtccatgttttagtgagagagagagagagagctagagatggagagaaagagagagaaagagagaaagaaagaaagaaaaagaaagatcattcaaaaacaaaaataggaaagagtgacacatacacagaaaataaaaaatacaaaccaggcaacagaaagtacctttaagagactcaaattktggacttagatgaaaacatcaaagattctcttataaatatttccaaagagctaaagaagccatgctttaaaacagtaaaggtctatatgtttacaatgtctcatcacatagagaatatcgacagagatataaattgctgaaacaaaccaaatgaaatttctagagttgaaaattacactaaccaaaatgaaaaattaactagaggggctcaaaagtcaatatgagctagtagaagaaagaatcagcaaacttgaagataggtggatagagatgatgcaattggaagaacagaaaaaaagaataaagaaaaattcacagtcttagcaaatgtggggaaccatcaaacacttcaag

SEQ ID NO: 794596 - DNA, 618 bp, Homo sapiens
atatttaatagtgaaagactgaatattttcccctcaagatcaagaacacagtaaggatgtctgctcttaccacttctagtcaaaattgtaaaaaagaaaaaaaattatccaggtaattgggcaagaaaagaaataaaagacattcagatkgaaaaggaagaagtaaaactatttattggcaaatgaaatgatcttgtatatagaaaacactgaggaatccactaaaaactattaaaactaacaatttgagcaagattgcaggatacaagatcaatttacaaatttcagctgtatttctatacagtttcaattaacaacctaaaaatcaaatctagaaatcaattccatttacaatagcattaaaaaaatagaatgtttagaaatatgtttaacgaaagaaacataaaacatgtattcagaaaactataacacatcactgggaaaagtaaaaaagacctaaatgaaacacctcattaacgtagatcagaagacaatattattacaatgtcaatactccccaaattgatttagaaagtcactgcaattcctattaaaatattcgatggcttttttacacaaattgacaagtacatcctaaaattcatgtggaaatgcaat

SEQ ID NO: 794597 - DNA, 618 bp, Homo sapiens
atatttaatagtgaaagactgaatattttcccctcaagatcaagaacacagtaaggatgtctgctcttaccacttctagtcaaaattgtaaaaaagaaaaaaaattatccaggtaattgggcaagaaaagaaataaaagacattcagattgaaaaggaagaagtaaaactatttattggcaaatgaaatgatcttgtatayagaaaacactgaggaatccactaaaaactattaaaactaacaatttgagcaagattgcaggatacaagatcaatttacaaatttcagctgtatttctatacagtttcaattaacaacctaaaaatcaaatctagaaatcaattccatttacaatagcattaaaaaaatagaatgtttagaaatatgtttaacgaaagaaacataaaacatgtattcagaaaactataacacatcactgggaaaagtaaaaaagacctaaatgaaacacctcattaacgtagatcagaagacaatattattacaatgtcaatactccccaaattgatttagaaagtcactgcaattcctattaaaatattcgatggcttttttacacaaattgacaagtacatcctaaaattcatgtggaaatgcaat

SEQ ID NO: 794598 - DNA, 564 bp, Homo sapiens
agccaccagccttcaagaagagataaggcaaggctgttctcatttcatgggacgttgttactgttctactgttcatctctataaagtatagatacatgaaagtattttttttcaaacgcaaataaaagttcttctcttaaatgaaaataacctaaaaacagcaataaagcctaaaagaaatgtgctgccctcaaattcttcctgacgttataccacggatctgattctccagggctggaatccagtgtttccacccaggaggggcaagttccttcacttccctgggtgttgatggtctcacttataggttggggatagcacccacaatccacagttccttaagaattttttgagactgagtgatttgtggctggtaamcagtaatgaggatgatagtgattacctagctttaaacagatttcccaaggagataagtttctaccaaggttctttgccttgtcagaaagctccaaaggctgaatggcgggcgtcccagctcccagatccccatcctgataaaaccctggtgtgcccaccccgagtttcccaagtgactccaaagag

SEQ ID NO: 794599 - DNA, 564 bp, Homo sapiens
agccaccagccttcaagaagagataaggcaaggctgttctcatttcatgggacgttgttactgttctactgttcatctctataaagtatagatacatgaaagtattttttttcaaacgcaaataaaagttcttctcttaaatgaaaataacctaaaaacagcaataaagcctaaaagaaatgtgctgccctcaaattcttcctgacgttataccacggatctgattctccagggctggaatccagtgtttccacccaggaggggcaagttccttcacttccctgggtgttgatggtctcacttataggttggggatagcacccacaatccacagttccttaagaattttttgagactgagtgatttgtggctggtaaacagtaatgaggatgatagtgattacctagctttaaacagatttcccaagsagataagtttctaccaaggttctttgccttgtcagaaagctccaaaggctgaatggcgggcgtcccagctcccagatccccatcctgataaaaccctggtgtgcccaccccgagtttcccaagtgactccaaagag

SEQ ID NO: 794600 - DNA, 629 bp, Homo sapiens
ttgagccagctaagtggctgtggaaggtcaatctgcaggccaaggctggatagtcaccttctgtgggggacactgtggtggaattattgaggttctctaattaattctcccacaactgccccaggtttacctttcctgacccccaaccccacttctggcctctgcactggtgagatcttagggctttctctgagagggcgctggaaagtccagagaagcacatgcaaagccgagcctaagagcatttcacggctgccgggggtctcttctcccaccttttacatcacagcatcagcatcgtaaggtgaactgcagcaccgccctcttctcttggggttcctgttgtcggctaagggccctgccaggccagatgccccgaagcacttgatctcattaaactgatcgaatttwaacaggaccagccaggggttccgaaactctgctgagcacaagaatctcccggggagggtgtgaacatgcagatgcccagctgcgccctgcagtctgacttgcattttctcttgccctttcttccttattttcccccttccctccctccttcactgttttacttttttcctctgatcaactcataaatctgcccaaaggacaatctccaaatggtccct

SEQ ID NO: 794601 - DNA, 638 bp, Homo sapiens
gatgaggtatggtggtaccatcaaagacctggcaagaatcagatagcacccacaaagagttcgtgaagagagttcaatgaaaggcccatgtcttgaaatacaggtacaagacagcttgcacagtacccagggaccaaagtgggaagccatctctgtccctggacataattcatctctccctttccccctcaaatctccctcccctgcctctcaytggggaagctgtgagaggctagagggtaagtggcctcaggatgtgttcatcaaggtcagcctcctggctcagcagaggcagagacacccccaccagggctcaactgcacgtaaccagctctgtgagtaagcggggctctctcattctccccagtggggctcaaagtggcaagtcccacatctgagtatccattattcttatttcttgattaaattgtgatgaagcaaggtatcacagggaacgcaacctgcttatctttcttaccaaatgaaatagctttactagctgggaggaaaagaacatgagtttttcagcaataacagtaaactcagccctttgaggattcttataaggtgggagctccctccaagccatgctaagcgtggggaatcctcagtgtcctgggctctgggtttccacacct

SEQ ID NO: 794602 - DNA, 638 bp, Homo sapiens
gatgaggtatggtggtaccatcaaagacctggcaagaatcagatagcacccacaaagagttcgtgaagagagttcaatgaaaggcccatgtcttgaaatacaggtacaagacagcttgcacagtacccagggaccaaagtgggaagccatctctgtccctggacataattcatctctccctttccccctcaaatctccctcccctgcctctcactggggaagctgtgagaggctagagggtaagtggcctcaggatgtgttcatcaaggtcagcctcctggctcagcagaggcagagacacccccaccagggctcaactgcacgtaaccagctctgtgagtaagcggggctctctcattctccccagtggggctcaaagtggcaagtcccacatctgagtatccattattcttatttcttgattaaattgtgakgaagcaaggtatcacagggaacgcaacctgcttatctttcttaccaaatgaaatagctttactagctgggaggaaaagaacatgagtttttcagcaataacagtaaactcagccctttgaggattcttataaggtgggagctccctccaagccatgctaagcgtggggaatcctcagtgtcctgggctctgggtttccacacct

SEQ ID NO: 794603 - DNA, 617 bp, Homo sapiens
agaatgttggaaaatgatggaaggaacataaagttggatcgggaaagttgtgttaataggggctcattaagcagggattctgcatttaatgttgcagctcagggagtttaaacaggcaataattgtttggttggttggctgaaacatggaccaaaagatggtgtgccctgaatgagttggagacgtctgatctcccttgggctaatatagaggcagggactcaaaggcttaggcagactggaatcctagagtgggtttgtcacttraaacccactcacccacactggtggatccagaaaacagatgtttcaccaactccttgagaaacaggtttgtatggaagtcccagcatccctgaagagctctatgattgctgttccctgtatgccagatcctaccgtgggaaccacgattactcaattggaaaacttaaatgcaatggggataattggatcctggggtggcagaggtcaagtggcagcactcaatccccaaaggcaaggagggtgcagttactgtaatggacagcagaggcaattcagcaatcagaggtctgactcatgttggcctatgacattggagttaatcatggtgttcctagaaatgaaataaatggg

SEQ ID NO: 794604 - DNA, 617 bp, Homo sapiens
agaatgttggaaaatgatggaaggaacataaagttggatcgggaaagttgtgttaataggggctcattaagcagggattctgcatttaatgttgcagctcagggagtttaaacaggcaataattgtttggttggttggctgaaacatggaccaaaagatggtgtgccctgaatgagttggagacgtctgatctcccttgggctaatatagaggcagggactcaaaggcttaggcagactggaatcctagagtgggtttgtcacttaaaacccactcacccacactggtggatccagaaaacagatgtttcaccaactccttgagaaacaggtttgtatggaagycccagcatccctgaagagctctatgattgctgttccctgtatgccagatcctaccgtgggaaccacgattactcaattggaaaacttaaatgcaatggggataattggatcctggggtggcagaggtcaagtggcagcactcaatccccaaaggcaaggagggtgcagttactgtaatggacagcagaggcaattcagcaatcagaggtctgactcatgttggcctatgacattggagttaatcatggtgttcctagaaatgaaataaatggg

SEQ ID NO: 794605 - DNA, 617 bp, Homo sapiens
agaatgttggaaaatgatggaaggaacataaagttggatcgggaaagttgtgttaataggggctcattaagcagggattctgcatttaatgttgcagctcagggagtttaaacaggcaataattgtttggttggttggctgaaacatggaccaaaagatggtgtgccctgaatgagttggagacgtctgatctcccttgggctaatatagaggcagggactcaaaggcttaggcagactggaatcctagagtgggtttgtcacttaaaacccactcacccacactggtggatccagaaaacagatgtttcaccaactccttgagaaacaggtttgtatggaagtcccagcrtccctgaagagctctatgattgctgttccctgtatgccagatcctaccgtgggaaccacgattactcaattggaaaacttaaatgcaatggggataattggatcctggggtggcagaggtcaagtggcagcactcaatccccaaaggcaaggagggtgcagttactgtaatggacagcagaggcaattcagcaatcagaggtctgactcatgttggcctatgacattggagttaatcatggtgttcctagaaatgaaataaatggg

SEQ ID NO: 794606 - DNA, 585 bp, Homo sapiens
ggcaaggagggtgcagttactgtaatggacagcagaggcaattcagcaatcagaggtctgactcatgttggcctatgacattggagttaatcatggtgttcctagaaatgaaataaatgggaagtctactacattcttacttggtctgtataagcagaaaactttcagggcaggtgaataaaagtctaactcaaatcataaaaacagaatcatgagccctcaaccaatttctggacttgagccagtttatagatgcagagccccttgcgtgaaagggagaccaggtctccctgaagaaggacactggtacactactgaaaatgtataccgttaaagtttctctgatgcttccccaaagggacctctggcatttagccagaatgactgtgcattgtgggaaaggaaataatcagatttttcaaggacctactggacactgcytctgaacctaaaacatcactggggccattcaattagggtagggtttattgagatcaagtcattaatggagttttggctcagttctgacttacggtatgtccaggaggtctccagacccacatgtggtcatttcccccatgctgg

SEQ ID NO: 794607 - DNA, 628 bp, Homo sapiens
agaatatctatttgattatttttttcctataaaataggagctagatcatctcctgagagggtacagggagatttttgagacacttgaggagggtgggtatcaccttaaattatttcaagttattaattagatttggctacttagtaatagaaccaatgttttcttcctttgaaaattgtgttaaccagcaacacattttaaccaagaatagtttatttaagaaacgcaaagtwggttttcaaaattagaaaatctgtaaatgtaattcacaacattaattaatcaaaaaatttaaaaagaatgattatcttcacatatgccgcaaaaacattaataacaatgagaacaatctccaataacacaggattaggtagctacttccttaacatgataaaatgtatccttcttaacccataaaccaagcattctaatcaaaagtcaagaacaaagtatctacattttgaacttacagttccacttctggggatttatcctacagccttgcatgacaatatgctctattttatcaatctttaagatgtgttttggatattgggatgagtaatggatgtgacatgatttaattggtggcattttttttttcctttttagtgacccataaaataaa

SEQ ID NO: 794608 - DNA, 628 bp, Homo sapiens
agaatatctatttgattatttttttcctataaaataggagctagatcatctcctgagagggtacagggagatttttgagacacttgaggagggtgggtatcaccttaaattatttcaagttattaattagatttggctacttagtaatagaaccaatgttttcttcctttgaaaattgtgttaaccagcaacacattttaaccaagaatagtttatttaagaaacgcaaagttggttttcaaaattagaaaatctgtaaatgtaattcacaacattaattaatcaaaaaatttaaaaagaatgattatcttcacatatgcygcaaaaacattaataacaatgagaacaatctccaataacacaggattaggtagctacttccttaacatgataaaatgtatccttcttaacccataaaccaagcattctaatcaaaagtcaagaacaaagtatctacattttgaacttacagttccacttctggggatttatcctacagccttgcatgacaatatgctctattttatcaatctttaagatgtgttttggatattgggatgagtaatggatgtgacatgatttaattggtggcattttttttttcctttttagtgacccataaaataaa

SEQ ID NO: 794609 - DNA, 563 bp, Homo sapiens
aatcaggcccatggttctccatgctgagtgagcagcagactctctggagagttccttaaaattgtgctagctctgtcctgctctgccctgaggccgggggaggtgcccaagacttcctgcttctaacaggttcctcctggttgaggctaatgttgccagtccagggacctccctttgcaaaccgcttctcaaggtctttgggaaatctgaaatccttgcatgcctgcttgctgggagccgkcccttgcagtaagaggcactggcagtgctggggaataatcctgtgtgcttcatcctaaattcctgctattggcaaacatgctgcagccacgctgcctgctgtgtggctgcagcaagcaaatgcagcaagctgcttaacctttctgtgtctcagcctttcttgctctaaagtgggttgttaaatgactaaatgtgttaatatttataaagcccttagattggtgcctggcacttagtaagcaccatatatacttttgtgatgagaaataaaatactaatctgggcaactcacttaatctccatgaggctgggtttgttttcct

SEQ ID NO: 794610 - DNA, 563 bp, Homo sapiens
aatcaggcccatggttctccatgctgagtgagcagcagactctctggagagttccttaaaattgtgctagctctgtcctgctctgccctgaggccgggggaggtgcccaagacttcctgcttctaacaggttcctcctggttgaggctaatgttgccagtccagggacctccctttgcaaaccgcttctcaaggtctttgggaaatctgaaatccttgcatgcctgcttgctgggagccgtcccttgcagtaagaggcactggcagtgctggggaataatcctgtgtgcttcatcctaaattcctgctattggcaaacatgctgcagccackctgcctgctgtgtggctgcagcaagcaaatgcagcaagctgcttaacctttctgtgtctcagcctttcttgctctaaagtgggttgttaaatgactaaatgtgttaatatttataaagcccttagattggtgcctggcacttagtaagcaccatatatacttttgtgatgagaaataaaatactaatctgggcaactcacttaatctccatgaggctgggtttgttttcct

SEQ ID NO: 794611 - DNA, 614 bp, Homo sapiens
aatgaaaatgagtatatggctttttagtctcgagaaacctcacccaacaggttacaacaaacatgcaccaatcatttatttactcttcaattacagataaaaatacaagaaccaggtcatgttgtagctttgggactttttctaggattaaaactaaagttcacaccttcctgggtataaggaaaggaaagtgactaatgtacaggtgggaaggatcaccatttaaaatgtatcaaaaacgtttaagccttttagccacatcttaacagaccttgcctatgtctgctttgtgaagagagaggatcctcaggcttgacaacacaataaatcccgcattcttgtctcataagcaggacagaactcagtaccatsctaagattgctttcaaagagtcctgcctaaccaaacacatcctcatgcctctggtttctcggctctcctatctccccagttacaggtttggttgaagtttcaggaagtgaaaattcgatcccattggcagctctcccagctcagaagccctctgaaaggagtgaagaatcaatactcaaaacccacacttgctattcattcacgatccctaacaaggaagccagggaaggaaggaacaccgg

SEQ ID NO: 794612 - DNA, 546 bp, Homo sapiens
cataactggtctacacagtccccatacagggttcctaacctgtggtgagtaaagcatgtcactttctaacaggtccaggaactccatgctattgggacctcaagaagagagttgtttacccagcttacaagtatttgakggtacaatctcagctttagaaaggcctatctgacattccttgtgaaacagagttccatcaaagcccatgtaaatctaaaaggcccacgttaaaataattatgcttgctgctctttatgcaaataatcaggccaagtataagactaaagtctgttttgcaaacaactcagtcctatcatgatttgtttttaaaaatgaggactggagagagacattatgtttcaaaacttatcatacgtttgtcattaaactctagactcattcgttgtttttgcgttttgcctacattttagactaaccctgcttattcctgtgaaccaaccagccatctccaactgcagctcagaaggaacaaaaggggatgggtaatgtaaaaatctggatccatatttaattctgagcaatgat

SEQ ID NO: 794613 - DNA, 546 bp, Homo sapiens
cataactggtctacacagtccccatacagggttcctaacctgtggtgagtaaagcatgtcactttctaacaggtccaggaactccatgctattgggacctcaagaagagagttgtttacccagcttacaagtatttgagggtacaatctcagctttagaaaggcctatctgasattccttgtgaaacagagttccatcaaagcccatgtaaatctaaaaggcccacgttaaaataattatgcttgctgctctttatgcaaataatcaggccaagtataagactaaagtctgttttgcaaacaactcagtcctatcatgatttgtttttaaaaatgaggactggagagagacattatgtttcaaaacttatcatacgtttgtcattaaactctagactcattcgttgtttttgcgttttgcctacattttagactaaccctgcttattcctgtgaaccaaccagccatctccaactgcagctcagaaggaacaaaaggggatgggtaatgtaaaaatctggatccatatttaattctgagcaatgat

SEQ ID NO: 794614 - DNA, 614 bp, Homo sapiens
ctgaaccggtctgtgtaaaatatatgttcacatggctatgataaaggcaactggaattatgtaaatatctacaaaaagaaaggcaccaggatttctcttggtagcttactctaataataagtaaattatcatcagtacaacctggaatgtaggtcaatgtgtctaaatcaaatccctttccaccaaatatcatcattaaaaagatacacaaggtctgataaagagaaataaattttcaattcacagcatttaatcagtcctcttttacatawaattgggaggaattctcagatggctccatatatactcagatatgcagtaatccatctagatagactcaactgtaaaattataaagccattaaagttataataatagaaatagcaattttaaaatacatttatttaactcacctgagttaataagctctgaatttcatgaaaattcacaaatgtgaatggcgatcacttaccttcaaacagtcttgtctttcatacctggtcctatgtgtttccactcatccattgtttcagtggtgaacgttcagtggtgaacgctctactatccaggaactgaaccacaacttctcattcaaggagagtggaagaaactag

SEQ ID NO: 794615 - DNA, 544 bp, Homo sapiens
ggtcctgacaggaattgggccttctgaaagtcctggaagtcctacctactttgctgtgagtggtgataacctgtatacgtatgcaaaaatgcactgaatatatgtacgcacacacgtgtgcattatgtaggctataagccgcggtccatgtaggcacacacgtgtgcattatgtaggctataaactgcggtccatgcaggcacacatgtgtgcattatgtaggctataaagtccatgcagagagagacttcagatgtgtgcacttcatgagaagctacatgccattaaaaacacctccagaacaggtgytccaaagggcaaggctccccaggtccaggagctgtgtcttcagagtggtcattaagagaagttccatggaagggatgagttcacaaacacacatgcatcacacacagtacacacatcacacatgaaggtgcacacacaccaccaccaccccctgccagacatcccacactacaaccaccaccaccacacaaacttttgaattctctagggcctcaacaccagcaacaagttgttt

SEQ ID NO: 794616 - DNA, 625 bp, Homo sapiens
tctgacagtttgtcttgctagaggcacgtctgggggtgatccaggcccttgctgcaatcactgagatggatctcgagcaggggcacgtgtcctaggaccctggctcagggcctattgcccactgcatggtgatataccagcacactgaaagagagggagttgccacagagaaagtccaagacgcgtgggcagccaagcgaggagatgggaggaaacctcaaacccacctcccgaggggcttggggatggtgtttttcaggkgtctgggcaggtgatggggtctgaggcgtggggatcgctgattggtgagtatgagtggtgaagtcacgggataggggatgaagaaaccacattcctgagctgagtcggttccttggtggggccttcagaccagttggcgtcagctgttctgctggaattcagggtgtgggaaacaccttaagcaattcttggcttaaaaggtccaggctcagagattccacctgtaggaacaacggggagcaggtgatccgtgtgcctcgtgactcttgttaagttagcagctgcagtgagttgggtggtggtgcctgccacaccctggtcagtgcctaactccaattctgcccaaagcctgcgttggaattct

SEQ ID NO: 794617 - DNA, 625 bp, Homo sapiens
tctgacagtttgtcttgctagaggcacgtctgggggtgatccaggcccttgctgcaatcactgagatggatctcgagcaggggcacgtgtcctaggaccctggctcagggcctattgcccactgcatggtgatataccagcacactgaaagagagggagttgccacagagaaagtccaagacgcgtgggcagccaagcgaggagatgggaggaaacctcaaacccacctcccgaggggcttggggatggtgtttttcaggggtctgggcaggtgatggggtctgagrcgtggggatcgctgattggtgagtatgagtggtgaagtcacgggataggggatgaagaaaccacattcctgagctgagtcggttccttggtggggccttcagaccagttggcgtcagctgttctgctggaattcagggtgtgggaaacaccttaagcaattcttggcttaaaaggtccaggctcagagattccacctgtaggaacaacggggagcaggtgatccgtgtgcctcgtgactcttgttaagttagcagctgcagtgagttgggtggtggtgcctgccacaccctggtcagtgcctaactccaattctgcccaaagcctgcgttggaattct

SEQ ID NO: 794618 - DNA, 603 bp, Homo sapiens
agtgagaatcaaggcttgttgatggcgtgcacggaaaagccggtctcatgctgattttccttagggtccatcagaacacgtgccccgtgaaccgtgtcaccccacggcccaactctggtgagcctggttctgtgtctgctgacctggtgagggctggggaccaggtgagttgcctgcggcacaggcgtgctgtgtagctgccatgtgtggcttcctccactgaggctggtttaccgcgtctgttcccggggcccctttgttagagcgcaagagcccaggcagcaccgtggcagctgggaaggctgtggttctggcgrggcggttgccttgcccagtgtacctggaattgcagctccagagcacgggccctggctcctgcgcggcagcgtctcaccttcccttttcttgtcagggtttttaggcagcctgtacctgcgtgcacccatccctctctctgtgcggggccattcagctcatgctgcaggtttttgccgggccggccggcgttccagggaccagagccacccccagagctctgtgatgagtcagctcagggcaggtttctagtcactccccaagggcagggctgaggcggggtcttcc

SEQ ID NO: 794619 - DNA, 605 bp, Homo sapiens
gacatggaggtacactgccgtaaagtcctgccacttacagatgaagtggcgtcatattacccggaggtatcctttgttacagtaaaggtatgtattgtaactcttaggccaaataagtttgaaaggacgtattaggctattatcrccttgctataaggaaatacctgagactgggtaatttataaagaaaggaggtttaattggctcacagttctgcaagctgtacaggaagcataatactggcatctgctcagcttctggggaggcagaattgtgaggaaacttacaagcactgtggaaggtgaagggggagcaggcacatcacgtggccagagcaggagcaggagagaaagacggggctgggggaggggccacacgcctttaaacaaccaggtctcccaagaactcactcactgtcgcaaggacagcaccaaggggatgacgcttaaccattcatgagaaatccacccccgtgatccaatcacctcccaccaggccccacctccaacactggagattacaattcaacatgagatttgggcggggacacaaatccaaactatatcaagatgtatacaaaaagtagatataaaagggaataacta

SEQ ID NO: 794620 - DNA, 598 bp, Homo sapiens
caagacaatgtcagcatggggttctgtccttggtcactgctcagaggtggagcttgaccctgggatgtcgggaagacgctctgggaaaagctgtggctgaagctgctgagtccaaagggggtgtctccttcccagtagtttcagacgaggatctctcagccaggactcttctggagcctggaaaccaagccacaggacgaagggctgcgggaagaaggaggctgagcctggggaacctggtggctgccttcgggtgtcagaagggctttcccccagcacgcgtttccccagaggctggattggggccactgaggcggtgtgacagggaggtagatttcagctcagcaggaggaagggtcccctgaaagccagggctcccagtgacacactgggcgcctggtgattactcagcttctgggtgctgagggctctgaamggcaggcacacttgtcccactgtatcataacagaaaaaaccggaacggcccatgtgcccattagctggtggatggataaacacagcgtgacagagcggtacagcggaatccacaccagcactgagggcggcattgcttacgcacacggcaacaggaacgcat

SEQ ID NO: 794621 - DNA, 591 bp, Homo sapiens
taatcaacttaattcatcatattaatgtaatgaagcagaaaaatcatactatcatctcaataaatgcagaagaaagaatgtgataaaactcagcatgcattcaggaaaagaaactcttagcaaagtggagatagaagtgagcttccttgatctcatcgggggcatctatatttaaaaatcctaccacagatctcacacttattagtgaaatattgaaagcgtcccccctgaggtcaggaaaaaaataaggatgctcaccactaacacttcttttcagcagcrgctggtgaggtaagccaagaagaaagcaataaaggataaaatgatcagaaaggaaaaaatgaaaaagtcattattcacaaacaaaatgatacgtatataagaaacccaatagaatctacagataactattgaaattattaagtgaatctggaaagactgctggtacaaggtcaatacacaaagatcaactgcattctaaataaaccagaaaccagtggtcagaaaataaaaatagggaacattttaaatgatcatccaatgcaccaaatgtctgcgaataaatctaatggactatgtatgtaatatcta

SEQ ID NO: 794622 - DNA, 588 bp, Homo sapiens
ttcctttaccccagaaatgcagaaatacatggttttggatgtttgacctcattggttggtgggcatgaggaggtggtctgctttggtgccagtgaccgtctgtgagtcacagagtgagtgaatgctgagccgctgtgatgggaaagctctctgctgagttggttcagtctgggtcacagagtgagtgaatgctgggcygctgtgatgggaaagctgtctgctgaattggttcagcagtgcacctgcttcctcacggggcattagccggtcagggcgatgtctctggatcactcaacttgtccctgacagagcaaggaataagaaacccagttagattgtctgtatcatcagatgccatttacatcccagtcaaattagcagccagatcactgatttcttataggtatacatcttttgacttcagcataatctcttcccctttttctgcatccttgggttttaaaggatgtttactatgtaaatgtttaacatgtttactatttaaacttaatagttgaggtagcttttaaaatttgtgtccattaaacccaaggactcttgcagaagtcgtatggtttttcttctttc

SEQ ID NO: 794623 - DNA, 630 bp, Homo sapiens
aggccagtattacattgtcatgattactatagttttattataagttttgaggtcaggtagagttagtcttccaactttgtactttttcaaagttgtcttggctgcttaggtcctttttgtatttccatagcaattttatagtccactcatcagttctacatccttattgcactggttaggacctccagtacaatgttgagtagaagtgatgacagcagacatccttctcttacatgtcatcttgggggaacacattcagtctttcaccattaggtatgatgttggctgtaggattttttattgytgttttttgttttagagacaaggtctcactctttcacccaggctggagtgcagtaacgtgatcatagctcattgtaacctgaaactcctgggcccaagtgatcctcctgtctcagcctcctgagtagctgggactacaggtgcatgccaccatgcctggttcatttttaaattttttatagagacaatgtcttcctatgttgcccagattggtcttgaactcctggcctcaagcaacccgcctgcctcagtctcccaaagtgctgagattataggaatgatccaccatatctggctgctgtaggttttttacagatgtctttatca

SEQ ID NO: 794624 - DNA, 628 bp, Homo sapiens
ttgtattatgttacactacttgagatcgtattgtaatccctcggaaacacgctctatgtttttcctcttatctctttggttttccatttggatgatttctatagagctattttcaaattcatggatttctttggctaagtcaagtttactgacaagcttctcaaagccatttttcatctcttttactgtgttttcatttttagcattttcattttgttctttctcacagtttctatctcttttcaagacagcatattattttaagcaaagaaatggaaataagctaagtctcatgaatggtggaagaattgacaaataagctaagtctcattaattttagggagacttagctagtttcattcaatcatttatgtaaatgtgttcatcctggcatagaaagagctagaacagaaattgagctttaaaagcaagtttcaaaaccatggatattatctcaygtatgctttgtttttaaaattccacaaagcaacataatatttctagagtaacaaatatctacaaaatgcattttgtaaaacagcctggaaggaaaacccacagaagatgataagggttcggtttggcaggaggcagggttgggactccagctttactggtcacatgtgga

SEQ ID NO: 794625 - DNA, 628 bp, Homo sapiens
ttgtattatgttacactacttgagatcgtattgtaatccctcggaaacacgctctatgtttttcctcttatctctttggttttccatttggatgatttctatagagctattttcaaattcatggatttctttggctaagtcaagtttactgacaagcttctcaaagccatttttcatctcttttactgtgttttcatttttagcattttcattttgttctttctcacagtttctatctcttttcaagacagcatattattttaagcaaagaaatggaaataagctaagtctcatgaatggtggaagaattgacaaataagctaagtctcattaattttagggagacttagctagtttcattcaatcatttatgtaaatgtgttcatcctggcatagaaagagctagaacagaaattgagctttaaaagcaagtttcaaaaccatggatattatctcatrtatgctttgtttttaaaattccacaaagcaacataatatttctagagtaacaaatatctacaaaatgcattttgtaaaacagcctggaaggaaaacccacagaagatgataagggttcggtttggcaggaggcagggttgggactccagctttactggtcacatgtgga

SEQ ID NO: 794626 - DNA, 630 bp, Homo sapiens
gtgagtgtctctcaaggggcggactgggtggctgggagaccaggacctgggaatggcctggccacagcctggggtcctgcagctcctcccagaggccacttataagcagccctgccatgtggccacacagcactggtcatgccatacccatgcacagtcatacatgtccacacacgcacacgtgtgcccaaacatgcatgcacatatatggccgtactcatacatgtgtgcacayatacacatgcatctatgcacatacatgcccatacacacgcgcacacatacacgcacacacacatccacacgtgctcatgtgtgtacacatgcccatacactccacataggtgcacatatacacatgtattcatgcatatacgagcctgtccacgtgcacacccatacaggtatatacatacactcatacatgtgcacgtatccacatgtgtatccacatacatgactatgagccctccctggcccattccatgatgggcatacacactgcacatgtatactcatgcacacatacatatacacatgcatacacaccaatacacatatatgcacacatgtgcacccatatacacacatacaacaggcccctgtggattctcagcagggcatccatgg

SEQ ID NO: 794627 - DNA, 470 bp, Homo sapiens
atacccatgcacagtcatacatgtccacacacgcacacgtgtgcccaaacatgcatgcacatatatggccgtactcatacatgtgtgcacatatacacatgcatctatgcacatacmtgcccatacacacgcgcacacatacacgcacacacacatccacacgtgctcatgtgtgtacacatgcccatacactccacataggtgcacatatacacatgtattcatgcatatacgagcctgtccacgtgcacacccatacaggtatatacatacactcatacatgtgcacgtatccacatgtgtatccacatacatgactatgagccctccctggcccattccatgatgggcatacacactgcacatgtatactcatgcacacatacatatacacatgcatacacaccaatacacatatatgcacacatgtgcacccatatacacacatacaacaggcccctgtggattct

SEQ ID NO: 794628 - DNA, 470 bp, Homo sapiens
atacccatgcacagtcatacatgtccacacacgcacacgtgtgcccaaacatgcatgcacatatatggccgtactcatacatgtgtgcacatatacacatgcatctatgcacatacatgcccatacacacgcgcacacatacacgcacacacacatccacacgtgctcatgtgtgtacacatgcccatacactccacataggtgcacatatacacatgtattcatgcatatacgrgcctgtccacgtgcacacccatacaggtatatacatacactcatacatgtgcacgtatccacatgtgtatccacatacatgactatgagccctccctggcccattccatgatgggcatacacactgcacatgtatactcatgcacacatacatatacacatgcatacacaccaatacacatatatgcacacatgtgcacccatatacacacatacaacaggcccctgtggattct

SEQ ID NO: 794629 - DNA, 564 bp, Homo sapiens
aaaataccgcttttctgatgagtgagtttttggaacacccccctgctccctgctttaattttgccctggagaggagcacctcattctactctgggctgtgcatctttggaaggaatgctgagacccccggttcccactgtccccgtgggccataccccgtgagccagcgggaccagctccgaaggcagaaggtcagsccggggtcagcttcagccttggcgggggcagccgctcagcagagggtggcccagggaggccaggctggctaagggcagggccaggaccacccagaatgggaggcccacagcccaccaaggggttgccccgtgggaagacatggggaatgggtctggccctctcagcacgctgtggagtgtggcagagggcgggggtcgtgtcctggaaggaggaggctgagcctccagagagcagcgtcgggctggaagattaggggaatgctgtgtgtacaaggcccagccatgacaagcagtgactgtggttttagccaagagtgggcagtgagggaggggacacacgtggcggatagggtggggggtggccccc

SEQ ID NO: 794630 - DNA, 507 bp, Homo sapiens
agggtgagggcggtgggtgtccacggtgttggtggggtctgctggggtcctcttgattacctcctcactgaagggaggtgttttcctgggttctagctgaccctggttaggggatggggtgccaggggcccggcatttccttctgttctttttgtgactgtcatgaatttctgggcttgccagggttgctgtcgctcctctgatgtgttctggagctctctgtggggactttcattaacatttcatggctcatggccgggtgcrgtgactcatgcctgtaatcccagcacttttggaggctgaggcaggcagatcacctgaggtcaggagtttgagaccagccgggccaacatggtgaaaccccgtccctactaacaaaaaaaaaaaaacaaaaaaactagccaggcatggtggcaggcgcctgtaatcccagctacttgggaggctgaggcatgagaatcacttgaacctgggaggtacagactacagtaagctgagattacacca

SEQ ID NO: 794631 - DNA, 507 bp, Homo sapiens
agggtgagggcggtgggtgtccacggtgttggtggggtctgctggggtcctcttgattacctcctcactgaagggaggtgttttcctgggttctagctgaccctggttaggggatggggtgccaggggcccggcatttccttctgttctttttgtgactgtcatgaatttctgggcttgccagggttgctgtcgctcctctgatgtgttctggagctctctgtggggactttcattaacatttcatggctcatggccgggtgcggtgactcatgcctgtaatcccagcactttyggaggctgaggcaggcagatcacctgaggtcaggagtttgagaccagccgggccaacatggtgaaaccccgtccctactaacaaaaaaaaaaaaacaaaaaaactagccaggcatggtggcaggcgcctgtaatcccagctacttgggaggctgaggcatgagaatcacttgaacctgggaggtacagactacagtaagctgagattacacca

SEQ ID NO: 794632 - DNA, 480 bp, Homo sapiens
ggttgccctggcccagtctgctggcgtcctcgtaagaagagcagatgagggcacggacacacacagagggacggccctgtgaggacacagggagaagatggtgtctgcaagccaaggagagaccccaggcaccagccctgcccctccttgatctcagaccccaggctccgggactgtgagaaggaagtgcctgttcragccaccagttctgcgcattcttaaggcagcccaaacaaactaataaaatccctagtgcgttgtaccaggcggatgtaagcctgagacgacacctgacaaagacattatgataaaacacaattggggaacgtcccgcacatcaacacagacacaaaacactcaaccagatgttagcaatcacggccagcaagggaagtaaatggtacaccacgaccaaacgtgcttccgccgggaatgcaagagccgtttactgtttgagcatcaatcagtgtcattcacaga

SEQ ID NO: 794633 - DNA, 690 bp, Homo sapiens
tcagttacaaggcacagggtgaagtccttgtccttgggatcccatggtcagcccctgggcgtggcttttgagcccagtgggtccagaggggactcagtgaggtcttgtcttgcagagtgtgtgtggcagtgaggggaagaggttcatctgctgcagggcctgggaactcctgacacttggtgtggccttgaccaccgggagcaaacgcagtgcacacggcaaccggctctgacaaggcagatgctcctgcccagggcaggtcggaccctggctgagggagacacaaacctgaacgggctctgacaaggcagatgctcctccccagggggtttcagactctggctgagggagacacaaacctgggagtggaggggagtttagcactggatggcccacatgcagctaggatggccgcagtacccaggctggagcgagcggcttctggggcccaggagaggccctcgagcccgctgtcytcccggctgtcatctcctggcagggatctgctggggaaatagaatctgacgcaacgtattttccaacccagaaaacctcttcagaaaggtggaagagaaaaagcaattctattactgagtaagcgttaaagccagaatgcgaggtgcggctggggcagcccactgaaggcatcgcagagacagaaacctcactccttacagccgagtgaacact

SEQ ID NO: 794634 - DNA, 658 bp, Homo sapiens
tcttaactacagaaaaattccaatggataaatgtaaaaggaataagggaaatagaaaatcattgttatgacattacagtaataattgctgctgtcaccactgataaatgctaaaattagtggacagaattttaaggaaaaacaggatatttacgtaactcaacatagcagttattgcagtggctgtagcatgcgtcctcaccctcatttatctccctgtttctaggagacggagcttaatgtcactccccttgagtgtggactgaatttagtgactcaatttccaagaattgagcaagaaaagggaaaaataataactttatgttggagaaatgcacagagttcaccttgcccaagtgatcaaaggtgacttcacagtggtaagtcaggacaataccctgcaccctgacgtgatgtcgtgaaagggcactsgcgtacgtggtattctctccacaagtccataacccacggcaattgtgagtaagcctcagacaaacccccaccgcgggtcactctccgacattgctggcaatcctcttcaagagtgtgcaggttatgaaaggccaggacacactgagaaagggtcccagatgtgaggagacgaaggagatttgacaggagaagcatgatgggatcctggaacagagcaagaacgttag

SEQ ID NO: 794635 - DNA, 516 bp, Homo sapiens
attacctagaaggttgccgggttggcctagttcagcccgaataaggaggcttaaagctggaggtggcctggagatgatggcttagagatggcctggacaggcctagagatgatagcctggaggtggcctggaggtggctcgtcccctgttgctgcatcctcatggcagccaggggtcttttggaargcctggccagccactgctgagccacttcccccagcttcatcccctgtgactctgacaagcccccaccagccacagggatgagcagaccctgcccagggacaccatccagctgcccatgtggccctgagtgctggcttacctgcctgcctatgtctctgggggtccctgttgggagccccggctccccagcaagattggtcctctcctgggtgggggcttccgcagcagctggagagaagggggagcattccccattaattgaacctgggctgagtttctgtgggagctttgccctgggaacccatggtggccataaaacaccaaactcag

SEQ ID NO: 794636 - DNA, 585 bp, Homo sapiens
tgacttgtggtcgctgatgtcctaatattgacccatctttatatttctgaatgtgatgggattctgagcctctgtatttctaggggagactagtctctgtgtgatgtatgacgaatcagaaaattcattccttatctgatcacatcatctaggatctcaagaagtrtcaaatgtttattcttatgaaattttatcagtttttctatgatctgtaagaataactttgaatggtgggttgtgtgtgtgtgtgtgtgttttgatacagggtcttgctctgttgcccaggttggagtacagtggcccaatctcggctcactgcaacctctgcctcccaggttcaagcgattctcccgcctcagcctcccgagtagctgggattacaggcacgtgccactacacctggcttatgtttgtattttaagtagagatggggtttcaccacgttggccaggctggtctcgaactcctggactcgagtaatccgcccatctcggcctcccaaagtgctgggattacaggcgtgagccactgccccccagcccactttgaatgtttctgaccactaaacagtaagggttttgtgtg

SEQ ID NO: 794637 - DNA, 591 bp, Homo sapiens
cccaagttgctgcaccagtcagtgtacattcccacaaacagtgcatgagagttcctgttgcttgtgaaataaatggtcagcattcagtgttgtcagcttttaaaattttctcctttctagtgggcatgtaatggtrtcacattatagttttaatttgcattttcctggtgacatgtgatacggaaccttcctcccatgcttgtttcccatctgtatgtcttctttggcaaagtgtctgttcatacattttgcccattaaaattaaaacattttatattgtttgttttcttattgttgatttgtgagggtttgttatatgctatgaataccagtcatttatcagatatgtatttttcaaatgttttctcctaaagtatgccttgaatttttattttcttaatgtctttaaagaaacggaattgtttaatctcggtaaagtaaaatttgtcattttttgtcttttatggttgtatttcctgtgtcctaagaattctgcacattcccaaggtcacaaagattatctcctgttttctcctagaaattatatagttttaggtctttaaattaggtctctgatctattccccatccc

SEQ ID NO: 794638 - DNA, 627 bp, Homo sapiens
tcaggaaacttagaatcatgacagaagccaaaggggaagcaagcaccttcttcacaaggcggcaggagagagaagtgtgggcgaaggaggaacttgccagacaaaaccatcagatctcgtgagaactcgctatcatgagaacggtatggtggaaactgcccccatgatccaatcacctcccgccaggtccctcaacacgtggggattgtgggaattacaattcaagatgagatttgggtggagacacagccaaaccatatcagcagccagcgaggctctctgtgggcagctgtgggcacacccaagggaaggagtgggcacccccatccagcagacggagacacggcctcaggccatgggcaggcaggagatacccccacctcgcggttattaaataactatgttacatagtaactgtggggcagtagggctttcattcatcaatatgtagcatttttatgttcacagttttggactttgcttgcrggttacttaatgccatcagatggaaagctgagagaaagcctgtggccccccaggcatctctgtaaagaaggcaatgccaagctgagggttgcttcccaggcctcacaacagcacaaccttagaacctaaaaaatccagcat

SEQ ID NO: 794639 - DNA, 622 bp, Homo sapiens
aaaaagctggacaaaaaaaggcgcaagccagatggtgctgaagaggccacaggaggctggcagccagggggtctggcacctcactcggaggcgcagtgggcccgtccggaattagtggccatacggcaagtgccgagtggacatcaaaccgtcacttcagactcctgcgcttcactgcctgtcggttatgcctgggttttgaaatcaagtcacagaacacctggaatgtggtgtttacgcagaacaaagcgggtgcctcggaggagagagccyagggacaggggcacctcccggtgtgggtgcccagggttgcagggtggcttcctctgtctgcgcggttttcagagccccagggtcctgcctgcccggctgcctggaggcggcccacatcctgctctgcgccgccgaatctcagcctgaacagcttcgctggtgtttgtgttgacttatttgttctttttttttttttttttttttaaataaaggattccgatgctgttacagtcaataaaagccacaggtctgggtgacctacaaatgtgtgtgtctgactttctgcagtttaaatcgccactgagccttaaggcgtctggcccgcgcattgaggaatccacgtgggtct

SEQ ID NO: 794640 - DNA, 611 bp, Homo sapiens
gacaggcagaagtgaatacctggcctgagcttctcctggggcccttgtggaagcaacatgagatgactgatgtgcaaacacattcaagagtgaagctctctgggtagagaagacattattatttcatcctgaagtactttcggaaggtaaatgatttatttagcacactaarttcatcctccgaggccatgtgtttctactataaggtacccaaaccagccttggaaacttacagcattgagagaggagaggtccagtgagcatgtctctctatgagttttacttagttgggtgctcttctatagagttctgagctctatttataattatccttaagcaaaaaagaaacaatccaaaatggtgacacagagagtccaatttacagttatctgtggtataacccagttaataatcaccataatacttagggtgctagactgctggtttgagtttttatggaattttgaagataatgagattttgtaatggaaccatgtttctcagtaatgtctttcactgaattatcttgacttgagtcaagacaagactcaagagtgactttattttaaatgtaaatccaccatgtaacttctgactaaccctgagccgat

SEQ ID NO: 794641 - DNA, 545 bp, Homo sapiens
gctataaagaaatacctggggttgggtaatttataaagaaaagaggtttatttggctcacggttttgtaggctacacaagcatggccccagtgtctgcttctggggaagccttgggaagtgatagtcattgcagaaagtggccatggaagcaggcacatcccatggcaagarcaggagcaagggacagagtgggcagaggagccaggctcctttaaacaaccagctctcatgggaactgagtgagaacgtgctcattgccaagaagatggctctaggctattcatgagacatccaccccgtgatccaatacctccccccggggcccacctgcaacactgtgaaacacattttcacatgagatttggaggagacaaaacctccaaaccatatcaagtggcacactcacaagaaaacgtgtcagtggccaagacgatttgcaatgaggactggatgaggctgggacccaactctctgtctctgacattcctgctcatctcatggacagaggcactgattgttctagaccatctttccaagggtgttg

SEQ ID NO: 794642 - DNA, 545 bp, Homo sapiens
gctataaagaaatacctggggttgggtaatttataaagaaaagaggtttatttggctcacggttttgtaggctacacaagcatggccccagtgtctgcttctggggaagccttgggaagtgatagtcattgcagaaagtggccatggaagcaggcacatcccatggcaagaacaggagcaagggacagagtgggcagaggagccaggctcctttaaacaaccagctctcatgggaactgagtgagaacgtgctcattgccaagaagatggctctaggctattcatgagacatccaccccgtgatccaataccyccccccggggcccacctgcaacactgtgaaacacattttcacatgagatttggaggagacaaaacctccaaaccatatcaagtggcacactcacaagaaaacgtgtcagtggccaagacgatttgcaatgaggactggatgaggctgggacccaactctctgtctctgacattcctgctcatctcatggacagaggcactgattgttctagaccatctttccaagggtgttg

SEQ ID NO: 794643 - DNA, 370 bp, Homo sapiens
tctagaccatctttccaagggtgttgttttgtgacagccttgataatatgtccttccagatcaaagggcaggttgcttacaccctaatcctgaaggtaaagacgttttctccctccaaagcaaagagcaggcatgcttactgtccattataaaagattcacgttccctgagctcagggttcctctcctgcartgcagtccacggtgtgtgcagatgccactgggcccactctgtgtcactgtttgggaaacggggctcggaaactggtgtgaaaagtatgctgatactctgttagaaaaaaatgccaacattctggctactgatattgctgtgagtaataaagtacttcatccttgaaaaaccaaaaggc

SEQ ID NO: 794644 - DNA, 641 bp, Homo sapiens
agatgtggcaaaattcggaacttcctagagatttgttaaatttttgtgaccaaaatgctgatagtgatacagacagtgaagtccaggctgagaaggtctcagatggagatgaggaactcgctgggaactggagcaaaggccacttttgctatgctttaacaaagaaactggcagcattgtgcccctgccctagagatctgtggaattttgaacttgagggagatgattttgggtatctggtggaagaaayttctaagcagcaaagcattcaagatgtggcctgggtgcttctaactgtctatgctcagatgtgtgagcaaagaaatgacctaaaacttgaatttatatttaaaagggaagcagaacataaaagtttggaaaatttgcagcctggccctgtggtaggaaagaaaagcctattttcagggctggaatgcaagcaagctgcagaaatttgcataagtaaagagaagccaagtactaatatccaagacagtggggagaaggtctccaaggcatttcagagacctttgcagcagcccctcccatcacaggcctggaggcctaggtgggaagaatggtttcatgggccaagtccaaggccccaacaccatgggacactgctccctgcatccctgcca

SEQ ID NO: 794645 - DNA, 611 bp, Homo sapiens
aaaaagaaccttgattcttgcctaacactgtattcaaaattaacctgaatataaaagctaagtccatgaaacttttagaagaaaacaaaggagaaaatctttctgaccttggggcttgctagattcttagatacatcaacaaatagataaaaataaaaataaagcaatacatcaacaaaagaaaaactaatttacatctcatcaaagttttaaaattctgttctttgcaagacaccatttacaaaatgaaaaggcaaatagaatggaaatttttttcctacatatatctgaaaaaaggactatttcagaatatacaaagamcttttgcagctcaataataaggaaacaacaactcaataaaaaataccaaaatatttctacagatacatcacagaagacatacaaatggctaataagcatatgaaaaagatgctcatcatcattagtcttcaggaaaatgaaagctaaaagcacaaggagatattaatatctatcattagtctttaggaaaataaaaactaaagttgtaaagagataccggtatacatctaatagaatggctaaaatgtaatgaaaataagtagtgatacaaatagtggtaaactggatcc

SEQ ID NO: 794646 - DNA, 550 bp, Homo sapiens
tagcccataaaggaacacaagtaatcttttgggggtgatggaaatgccctgtcttaggatcatacacaactgttaaaactcatcaaattgtacactttaatagaatataatttttaaggtaaatcattccccaataaatttgatgagaacaaatatgattaatatgtttaaaaacaggaaaagaggaacaaatggataaaaagatgaagaatttcaatgctgacagaaaactgtcaatctagaattctatactcagtgaaaatatttttcaaaaatgaagggcaacataaatatgttctcagacaaagattgagacagtctgtcayagacagacctgcactataagaatacttttagcaagttctttaggttgaaaggaaatattcccaaatggaagcatagaagaaatgaagaacacaagaaagggtaaatatatgaacaaatattttaagatacttactgcttaaaacagaaataatgtcatattgaatctataacatgtaaaaatatatgactctgtcagtgcaggaggggataaagggagttaaac

SEQ ID NO: 794647 - DNA, 612 bp, Homo sapiens
tattaattggtaaaaagaacaacatgagtatgagtttgtacctgaaatcattgtcattttggcattagaaataaaatttcaataacaaggtggcaaggcaataattggttagaaaattatccttcataggctaagaagctaatataaaacaaaataaaagcctttattttagatctctcagacrtttaataatttatccatttttaaaatctaatctgctttgggcaactttggcctccttgcctctctgtctgcagctttaatcccattaaatctacttttagactaagggctaaataatgtatctcaaatgcaagtctgtttcattcatcgcctgattgaaaatccttcaatagctccatttcttcctaaaacctaaattccaaatattttgcatgacacacaggaccatgatttagctctatatgtcttttaaatcccatgtccatgtatttccttttgtgggaccttcatgttctgctctttacatgcactctgatttctcacacctccagtccttttaatgtgaaccgttccttctcccttaaatgtcttctgctctgtcaaaacttcccttcctaattcatgtctctggaaaccttcccttcaaaa

SEQ ID NO: 794648 - DNA, 612 bp, Homo sapiens
tattaattggtaaaaagaacaacatgagtatgagtttgtacctgaaatcattgtcattttggcattagaaataaaatttcaataacaaggtggcaaggcaataattggttagaaaattatccttcataggctaagaagctaatataaaacaaaataaaagcctttattttagatctctcagacgtttaataatttatccatttttaaaatctaatctgstttgggcaactttggcctccttgcctctctgtctgcagctttaatcccattaaatctacttttagactaagggctaaataatgtatctcaaatgcaagtctgtttcattcatcgcctgattgaaaatccttcaatagctccatttcttcctaaaacctaaattccaaatattttgcatgacacacaggaccatgatttagctctatatgtcttttaaatcccatgtccatgtatttccttttgtgggaccttcatgttctgctctttacatgcactctgatttctcacacctccagtccttttaatgtgaaccgttccttctcccttaaatgtcttctgctctgtcaaaacttcccttcctaattcatgtctctggaaaccttcccttcaaaa

SEQ ID NO: 794649 - DNA, 568 bp, Homo sapiens
ttttctcctattaatctgccttttgtcggttgattttcggcaaacttttcagaggctgaagtcgaaattttcccttggcccctacacagccatgcaaagagcatgtttcaaaaggagggcaaggtctattgtgtctagagctgcctagaagtcctttggatttaggaacacacaggtcatttcattgaatgaagcaatgaatgaattcattgatgaaataactttargatcatctagataatgaaagagaaaaaatattttaataaatattttatcagagcctgtaatattatcatacgtattgtatttctcataaaatagaattatactatgctgtgtttttcagcttcactatccttggaatccttgttttccttttgcatcttacaggataagatgttttgtaaaatcctagtttgggaagtgtttagctacaagtattatttgcgcaacaattcttggttctgtcgtttctcatttcccaggaaggctttccaatctactttccctgtctcatgttagactacggtgttgaaattgtgtggcagtttagaggcgggtctctgaa

SEQ ID NO: 794650 - DNA, 616 bp, Homo sapiens
ccctatgatgcacagagaggccaagaagaatctgaacacatagacctgcctgggtttgcccacttagtctgttagtattagatcataactttttgttcaatcacatttctacctggttgtctgtgcttcaattgtgcctttctaatgaagtctccataaaagaggcaggaggacagagtacgaggagcttccagacagctgaacatatggaggttcctggagagtggcatacygggggagggcatggaaactccacacccttttctatacctcaccctatgcatctcttcatctttatcctttataatatcctttataaccaattggtaaatgaaagtgtttccctgagttctgtaaaccactttagcaaactaatgaaacccaaggaggaaattgtgataaccctgatttatagctagttggtcagaagcacagatcaaaaacaacctggggtttatgattggcatcagaagtggggggctgtcttgtaaaactgaggcctcaaattgtgggatctgatgctatctccaggtagatagtgtcagtattgaactgaaggacacccagctggtgtctgctgcagaactgattgctttcttgctgtgtgggggaaaaa

SEQ ID NO: 794651 - DNA, 594 bp, Homo sapiens
cctatgcatctcttcatctttatcctttataatatcctttataaccaattggtaaatgaaagtgtttccctgagttctgtaaaccactttagcaaactaatgaaacccaaggaggaaattgtgataaccctgatttatagctagttggtcagaagcacagatcaaaaacaacctggggtttatgattggcatcagaagtggggggctgtcttgtaaaactgaggcctcaaattgtgggatctgatgctatctccaggtagayagtgtcagtattgaactgaaggacacccagctggtgtctgctgcagaactgattgctttcttgctgtgtgggggaaaaaacttcatacattgtattatgagaacagaagaaatgcagtttgtgcttttacttcacagtaatattgttcaagtcttctgtttccttgttgatgttcagtctagttgctttatctgttattgaaaagtgggttatttttatctccaactgtgattgttgaattgcctgtttctctattcaattccatcaatcagtttttacttcacgcatttttgggctttgttgttaggtgctatctttgtgctgctgtaaca

SEQ ID NO: 794652 - DNA, 594 bp, Homo sapiens
cctatgcatctcttcatctttatcctttataatatcctttataaccaattggtaaatgaaagtgtttccctgagttctgtaaaccactttagcaaactaatgaaacccaaggaggaaattgtgataaccctgatttatagctagttggtcagaagcacagatcaaaaacaacctggggtttatgattggcatcagaagtggggggctgtcttgtaaaactgaggcctcaaattgtgggatctgatgctatctccaggtagatagtgtcagtattgaactgaaggacacccagctggtgtctgctgcmgaactgattgctttcttgctgtgtgggggaaaaaacttcatacattgtattatgagaacagaagaaatgcagtttgtgcttttacttcacagtaatattgttcaagtcttctgtttccttgttgatgttcagtctagttgctttatctgttattgaaaagtgggttatttttatctccaactgtgattgttgaattgcctgtttctctattcaattccatcaatcagtttttacttcacgcatttttgggctttgttgttaggtgctatctttgtgctgctgtaaca

SEQ ID NO: 794653 - DNA, 612 bp, Homo sapiens
gtgggggaaaaaacttcatacattgtattatgagaacagaagaaatgcagtttgtgcttttacttcacagtaatattgttcaagtcttctgtttccttgttgatgttcagtctagttgctttatctgttattgaaaagtgggttatttttatctccaactgtgattgttgaattgcctgtttctctattcaattccatcaatcagtttttacttcacgcatttttgggctttgttgttaggtgctatctttgtgctgctgtaacaaagtaccacacactggataatctataaataatagaaatttatttcttacagtcctggaagctgggaaatctaagatcaaggtgctgaaaggctgcatgtctggtgaggsctgctttctgcttccatgatagcgccatattgctgcatcctctggagggaatgaatgctgtgtcctcaacattgctctcattatcttggatcccttttataatggtgctaatcccacttgtgacggttgaggtgacttaatcacctcccaaaggttacagctgttaatactgttgaattggaggttaagtttcaacatgaattttgaaggggacaccaccattcaaaccttagcaggt

SEQ ID NO: 794654 - DNA, 612 bp, Homo sapiens
gtgggggaaaaaacttcatacattgtattatgagaacagaagaaatgcagtttgtgcttttacttcacagtaatattgttcaagtcttctgtttccttgttgatgttcagtctagttgctttatctgttattgaaaagtgggttatttttatctccaactgtgattgttgaattgcctgtttctctattcaattccatcaatcagtttttacttcacgcatttttgggctttgttgttaggtgctatctttgtgctgctgtaacaaagtaccacacactggataatctataaataatagaaatttatttcttacagtcctggaagctgggaaatctaagatcaaggtgctgaaaggctgcatgtctggtgagggctgctttctgcttccatgatagcgccatattgctgcatcctctggagggaatgaatgctgtgtcctcaacattgctctcwttatcttggatcccttttataatggtgctaatcccacttgtgacggttgaggtgacttaatcacctcccaaaggttacagctgttaatactgttgaattggaggttaagtttcaacatgaattttgaaggggacaccaccattcaaaccttagcaggt

SEQ ID NO: 794655 - DNA, 616 bp, Homo sapiens
aacttcactacctgcaccagttttaaaacctttccctaggaacttttgagaagcacagtcattggcaaacagcaaacttcacatggtaaaatttcacattttatttcttccgtagcccactggtaggggccaagaggctcattaaaaggcaagtctaacaaccacatgaagcacccragagctcactgatatggggccagtgctgtttccctcaatcacgctccaggccccatccttaacctctgccaagtccaggaagcaaggggtatagaccagacaagagtgggcctgcaacatttcttttcaagtctcaaacaagttctggatatttattaacgatctccacccttccccacctggaggatatgcaccacaaaggcaccaccaaggctggttaagtctgcctgctcggtgggcacctgcccaaggggtgggcaggagcatgaaagaccgtcagctccagacaggggccggctcctcccacagccccaggacttggctgcggggctcctgactagtgtgtgggtggtggagggatcacgagtctgtgtggccaggtcaccagagctgaaggagctgagaaagtctttccaccacctttctggtcgatcactca

SEQ ID NO: 794656 - DNA, 617 bp, Homo sapiens
ggccaaatggggaggattgcttgagaccaggagtgagagaccagccagggcaacaaagaaagaccctgtctctccaaaaaaaataaaataaataaataaataagaagaaagaaaaaaattaggtgggtgtggttgtgtgcctgtagtcctagctacttgggaggctgaggcaggaggattacttgagcccaggagttggaggctgcagtgaaytctgatcataccactgcactccagcactctcacaacagtgtgagactctgtccctaatgataacaataataataatatttgaagagataatagccaagaaatttccaaaactaatgaaagacatcaatcacagattgagaaaagtctatacatattcaaagcaacattaaccaaaagaaaactatgcttaggcaaagcatgtaaaactgttaaaaaccaaaggaaaacaggaaaatcttggaaatcaccataggaaaaaaaattacttcaaaagagcaataattagactggcatctcacttttcagtgaaatggaataaaaaatgacaatggaattaagttaaatgactaaaagttaatatttatcatcttaaaattttttcaattctaagatattttgtgaat

SEQ ID NO: 794657 - DNA, 475 bp, Homo sapiens
aaccccaagacacataatcatcagattctgtgaggtcaaatgaaggaaaaaatgttaagggcaaccagagagaaaggccaggtcacctacaaagggaagccyatcaaactaacagcagacctctcagcagaaaccctagaagccagaagagattggaggccaatattcaacattcttaaagaaaagaatttccaacccagaatttcattaccagccaaattaagcttcataagcaaaggagaaataagatccttttcagacaaacaaacactgaggaaattcatcaccacaaggtctgccttgcaagagctcctgaaagaagcactaaatatggaaaggaaaaactatattatccattacaaaaatacactaaagtacacagaccagtgacactatgaagcaaccacataaacaagtctgcaaaataactggctagcatcatgatgacgggatcaaattcacacataacaatatt

SEQ ID NO: 794658 - DNA, 633 bp, Homo sapiens
ctcacaagattaatgtacatataaacaaatctatgtactatataagtagtacattctacatcagtagaaatacagtaaataatctggatgggtaaattgggtgttaaagaatatctttaattctacaactgtcactgatcttaggtaggtttagttcttttcctggccaaaaaaaaaaaaaaaaaaaagattggatcttctgtcttaaataaattcagggacatgagttctgttgtataaattcattttagcttctgttgcaatctttctgattctgccgcttcctattttcatttctatcactttgtttgaaggtatgtttatatctataccaggcaaagtctgatgatgtatgttagaatacaggttattctattgcctttcctaccaaaatgtkccatttccccaatgaacaaataaaaaaccagactccacaactcttactaagtttgttttatttttaagtcattaatcagaaaccgaaaaggaatttaccagaaatctccacaaattttcagttgtaaaagaaatgaaaatataaaagttaacttgctctgcagtctaagtaaacattaatgaaaagatcatatatctagttcatgtcctcacatatctagaatcactcatttctgt

SEQ ID NO: 794659 - DNA, 619 bp, Homo sapiens
cctatattacaaatgaatgccagggctaatgtttaaaattcatgaaaatctctttaaacaacatcatttttatatttattaaagcaagttccttacagaatactttattgactaaacttaattatatgttcttagcagtaatcgatcgtgtttttcctttcacatatagtagttttttaaaccstcattcatttacatagaaccttcacattagacttataggatgagcctacaaaggcttgaaagttgttagttgctagctagttaaacctcttcaaagagtcccagcaaagaggctggagccactgcatgtgtactttgcatgatagaaactgttaacatttatttattaaataaaaacttattgaaaaagaagactggacatgggtaaggtctattgcctgaacttcaagagcgaccagcactttacccccaagcatgagcttgtggtagaacagcagtacaataacataagctctaagagaaatgccagatttctttaagggaatgcagcaatacatgctttaatttccagagtgagtctccagaggcagcaagcttcttagagaagcctcacaaaccaacagcttctgagctgtagagtagcagctctctccac

SEQ ID NO: 794660 - DNA, 619 bp, Homo sapiens
cctatattacaaatgaatgccagggctaatgtttaaaattcatgaaaatctctttaaacaacatcatttttatatttattaaagcaagttccttacagaatactttattgactaaacttaattatatgttcttagcagtaatcgatcgtgtttttcctttcacatatagtagttttttaaaccgtcattcatttacatagaaccttcacattagacttataggatgagcctacaaaggcttgaaagttgttagttgctagctagttaaacctcttcaaagagtcccagcaaagaggctggagccactgcatgtgtactttgcatgatagaaactgttaacatttatttattaaataaaaacttattgaaaaagaagactggacatgggtaaggtctattgcctgaacttcaagagcgaccagcactttacccscaagcatgagcttgtggtagaacagcagtacaataacataagctctaagagaaatgccagatttctttaagggaatgcagcaatacatgctttaatttccagagtgagtctccagaggcagcaagcttcttagagaagcctcacaaaccaacagcttctgagctgtagagtagcagctctctccac

SEQ ID NO: 794661 - DNA, 612 bp, Homo sapiens
tttatcattatgacaggatgatgtcaggtcagcatcattgggcaggaacggcatatctagagtccactctcttctgaaaaagtcatcgggtcctttgtcactaagagcaggccattttagtagtttggagagctaccatgtgatacagaaagaaggggcatgtactcccaatagatctcagaagcagtgtgactattttagaaagagatacagctaaacatataaaataatgcaattacactgctatatcaattcctaartcttcaagcaattaaccaaattatctaaaaggatcacaaacaaatgatatatccaagcttaggatagacaatattttgtataaaaggtatttgaaagcaaaatgggcatctgtctcactattttgaaatgtttgaaaagaaacatggattgatgaaaataagaagtttgggttctagacactcactctacaaccccccctccccgccacacacacgcaaatgatagaccacaagtaggcctctcttaaagtctgtgactttgtacctttaagaagaataggcaggagtccacgctgagaaacatcaagtgttttgagattcgcctggggatcctgcagtgcttcacagctgt

SEQ ID NO: 794662 - DNA, 487 bp, Homo sapiens
catttgtacactgttggtaggaatttgtaaattggcacaaccatcatgataaccagtattgtgtttcctcaaaaaattaaaaaatagaactacaatatgatctagcaattccacttctgaatatacatccaaaggaaatgaaatcaatatctcaaagagatatctgcactcctatgtctcatgttcactataccattattcacaatcktcaagtgtgcttatgtgtgtgtgtgtgtatctgtgtatatgcacacataattcaataatattaagccttaaaaaaagaagatctggccatttgcgacaacatggatgaacttggggacattatgctaaatgaaaaacaagatagaggaagacaaatactgaatgatctcacctatatgtggaatctaaaaaaattgaattcatagaaatagagaggaaaacagtggttgtcagagcctggggagtgagtggggaaaatgaggagatgtggatcaaaatg

SEQ ID NO: 794663 - DNA, 607 bp, Homo sapiens
ttcttttgatatatatttcttttgatataaatcccagaagtgggattgctagatcatatgggagttgtatttttaattttttgaggaatatccatgccattttccataatggctatccaaatttacctacccaccatgggtataaaagtgttccttttactgcatatccttgccaacacttgctatgttttgtctttttgataatagccattctaacaggtgtgaggtgatctctctcattgtggcttcaatttgcaattcttggatgatagtgattttgagcatttttttcatatacctgttagctatttatatgtcttcattttagaaatttctattcatgtcctttgcccatttattcgtttgttttttcacttgagttatttgagttccgtttatattttggatatgaatcccttatcagatgtatggttytgcaaatcttctttccaatttcataggttgtctctttacctggttgactgtttcctttgttgtgaagaggctttttaagcttgatacaatcccatttgtctatttttgcttttgtggcctatgcttctggggacatatccaaaaaaccattgcccagccaaatgtcaaggag

SEQ ID NO: 794664 - DNA, 639 bp, Homo sapiens
taagaaaggaagatgtgaattacttgtttgctgatgatatcattttatacgcagaaaaccaaaattcatcaccaaacaactattaggactgataaactaattcagtaaagtttcaggatacaatatcaacttacaaaaatccgtagcatttctatacattaacaacaaactatctggaaaaagaaattaagaaaataaccccattttgatactacttacgatagtgtcaaacaccacttaggaatacatttaatgaaggtgaaaaatctataaacaggaaactataaaacatgaataaaagaaattgaagattacacaaataaatggaaatatacattgtatctatgaattgataaaattaatattgttcaaatgtcccatacyaccaaaattaaatcacagaatcaatgtaatcattattaaaattccaatgtcattcttcaaataaattttttaaaaaccctaaaatttatatggaaccacaaaggaccctgaatagccaaagaaatcttgagcaaagagaacaaagctgaaggtaccacactaatagatttcaaaatatattacaaagccataataatcaaaacagcattatgctgacattaaaataaacaggttgaccattgggataagaaaaag

SEQ ID NO: 794665 - DNA, 620 bp, Homo sapiens
agaagacagctgagggtttgaggagaccaaagcagcaaaagtcataggacagagtatgggaaagaaaagagataaatagaaaattcagaaatctgcagcgggtgcttcacacatattcagtaatagactaataagtaccatgtgtgaggaaactaaccctagctaggaagagaaacatcagaaaggattagaggaaagagtgttatatggctatggtggatatggaataattcattcctcaaccagctactcagaaaattataatttgtagtgcatctaataaagtacttttagctctgtctaaatactgctcttgtttcaataaaggtgtttttagatctagaaaggctggaggcttcatcatcagcagacctctctgtaagtaatgttaaagtaagactttcaggcagggggcaaatgaatcaagatgaaaatatggatctaaaaaaattaaaaggataaaaagaaaaaagatayggtaactgcatgggcagtgtctcttttccaattaatttttaaaataaactaaacaaaaataacaatgtgatgtgaccttataacacatttaagtaaaatatataacaatagcataaagtttgagagaagagaatttgatgtgt

SEQ ID NO: 794666 - DNA, 556 bp, Homo sapiens
aatagagaagtttcagtgagaaatgttagcttgtaagtctcctctgctttgaaagattgttttctgttttcactcattgtaatttatgttaccttagggatcttattttttaaaagaagttttaaaaacctcttactgtgtcttaaagtgttttcttaaggtataaagtaaatttctgttttgattttttttattggaaagttcatacagattgaccctgggactaagtcattaagaaaaaaaaaatatatttattcatgatctttaaaatacttgccgttatatgagtcagttaacaaaatcactcatccctctccaaaatgttatttcacattttacttagcccactttaaatgatggtagaaaaatcacttcattattggcattttgacataatgaacttcatgcattttcattaatttggtctactaattttgaacatgattaktaagagtacacagaaggttcatcaaaagctttatgatccagtgatgcttcccaagtagccttctacttataatgaaaatgataacattactgggtcaagtgcatagat

SEQ ID NO: 794667 - DNA, 610 bp, Homo sapiens
acagacaggcgattaatatgtattttgttatgtgtattatatactgtattcttacaataacgttaaagaaaaaatactaagaaaatcataacagaaagtatatttactattcattaagtggaagtggaccatgggaaaggtcttaatccttgtcttgtgttgaatatactgaggagaaggaagaggaagggttggtcttgctgtctcaggagtagcggaggcagaagaaaatctgcatatgtcattcargggtcagctgtactttccttgatagtttcacttattctaaaagattaatcctactttagaattatagaattggtatttgtaccccattcttgctaattatcttatagttttgtgtgtgtgtgtgtgtgtgtatatatatatatatttttttttccttctatttagtttaaagttcctgctgcaacaagtgcaattattaccaatggtaagaattcactataaaattatgtattacctcaaatttatagaaatggtgtaaaaggaaccaaattaattaaaattaaatacaaaaagccccaagtatatgtatatcaacataaatgatatacttactggtaaacactaagtcagggttattgtt

SEQ ID NO: 794668 - DNA, 610 bp, Homo sapiens
acagacaggcgattaatatgtattttgttatgtgtattatatactgtattcttacaataacgttaaagaaaaaatactaagaaaatcataacagaaagtatatttactattcattaagtggaagtggaccatgggaaaggtcttaatccttgtcttgtgttgaatatactgaggagaaggaagaggaagggttggtcttgctgtctcaggagtagcggaggcagaagaaaatctgcatatgtcattcaagggtcagctgtactttccttgatagtttcacttattctaaaagattaatcctactttagaattatagaattggtatttgtaccccattcttgctaattatcttatagttttgtgtgtgtgtgtgtgtgtrtatatatatatatatttttttttccttctatttagtttaaagttcctgctgcaacaagtgcaattattaccaatggtaagaattcactataaaattatgtattacctcaaatttatagaaatggtgtaaaaggaaccaaattaattaaaattaaatacaaaaagccccaagtatatgtatatcaacataaatgatatacttactggtaaacactaagtcagggttattgtt

SEQ ID NO: 794669 - DNA, 599 bp, Homo sapiens
actaactgcagacttctcagcagaaatttgacaagccagaagagattggaggacaatattcaacattcttaaataaaagaatttccaaaccggaattttatatgtggccaaattaagcttcataagtgaagaagaaataagatccttttcagacaagcaaatgctaagggaattcatcaccacctgccttgcaagagttcctgaaggtagcactaagcatgaaaggaaaaactgataccagycactgcaaaaacacactgaagtacacagaccagtgacactatgaagcaatcacataaacaagtctacaaaataaccaactagcatcatgataacagaatcaaattcacacttaacaatactaacctttaagaaacccatctcatgtgcaaagacacatataggctcaaaattaaagggatggaggaaaatttaccaagcaaatggaaaacagaaaaaagcaggagttgcaatactggtttctaacaaaacagactttaaaccaacaaaggtcaaaaaacacaaaggacattacttaatggtaaaaggttcaattcaacaagaagagcgaactatcttaaatatacatgcacccaata

SEQ ID NO: 794670 - DNA, 667 bp, Homo sapiens
ttactctaatattgatcacataattaggagtaaaatactcatcggcaaatgcaaaagaactgaaatcataacaaatagtctcttggattgcagcatcatcaaattgaaacccaagattgagaaattcagtcaaaaccatacaactacatggaaatggaataacctgcccctgaatgactcttgggtaaataatgaaattatttgaaactaataggaagaaagagacagtataccagaatctctgggacacagctaaagcagtgttaagagggaaatttatagcactaaatgcccacaccaaatagctagaaagatctcgagttaacagcctaacatcacaacaaaaaaaaaactagagagctaagagaaaacaaaccccagagctagcagaagacaagaaataaccaagattagaatgaaactgaaggagatagaaaaaagaaaaacccttaaaaaaatcaactaattcaggagcacrttttttgaacacattaataaaatagagtgctagctagattaataaagaagaacagagagaagattcaaataaacactattagatatgataagggggatatcaccattgaccccacagaaatacaaacaaccatcagggactactataaacacctctatgctcataaaatagaaaatctagaagaaatgg

SEQ ID NO: 794671 - DNA, 644 bp, Homo sapiens
tgttgcaaattgcaagaaattagtatttcctggtgaagacttggaggcatggaatgatgcaataaggttcaataggctgtatgaaagtgactgatcatggagagcaaaaacctcttctcaactcaggaactaatacttcatctggcatgtgctataaagtcattgaatgcttttaaacagaaaactggcatggttggatgtgcattttargtaaattaatctgctggcaatgtgaaagcctaaatatgaaatgctaaatagcaagattttttttattctaaaagaggctacaaaaactagagtgatcatttctttttcaaattgtttgaatctgtgtggtttaactttcaaaaactcactaatgccaactgaataacattcaaaggaagattctagccctctcatacaaagtgccccttctctttcccaggataatttgctgtgcagtttctcaaaccagtgtctaaggacctcaagactccaccttctccaaaaaatgccccctttttttgtctattggaatcctattcatctgcctttccctcctttagattttccttatccttcagagtcaattacttcttcccctagtcccacagaactgtttaagtctctgttgcacatttagttcatcctaccttata

SEQ ID NO: 794672 - DNA, 622 bp, Homo sapiens
actactgggtatatatcttataaaagtgtgttcacatgtgcaccaaaagacattaaagaatgcttttagtggcattatttacaacagcaacaaaccggaataacctaaatatgaatctgcagtaaaatggcaaaaatactatgatacatgtattcaatagagtattatgtagcagtaaaaaatacactgcaatggtttgctatgccacaatgaatctcacaacataatggcaagtgaaagaaacctgagaaagaagacattctgtacaatttttttatataaaactcaaaaccaggcaactcgaatctctgttgttttggtttaataagttgttaatgttgggaaagactgcaartataataactgaaagagggcagaagtggagttaagaagtacagttaagatgtatacacttctatttgtatgtttaaatatatatatataaacagtaaaaataagtatattcctatgttagtaattctaatttgacaggatttgaaaatcagaaataatagtttaattttcactaaatgctttttgacatttattttctatatacagtatattatattttctttatcactaaaaacatttggaatcttgtaaaaatttcaattctaca

SEQ ID NO: 794673 - DNA, 627 bp, Homo sapiens
ggcatattttaatatcttatcttgaaatcataagatgtatttgttcaaccaaatcttacagtaaagcagtataaaaaatataaattctacagtgtgatagaaatgcaaactatttgacgttcaatttaatcattttttcaggaacctaaatattatttattaattattactttaactatttaagattagttacaatgaaaagaatattgccttagagatcttccattaattattcagttcccagcctctgattcctttataaacttctaaattcttcagagataaatgtacttggctcaaatttaatcatgttacaatrcaggttctgtatcaacttagtttttgtagacactatatggtataagaagacaatgtttaattttatgtcaatatcttgcataaacttgttcaattaattcattcaataaacagtcattgagttcgtatcatgtcccaggcactgttaaaaacattcatcttatgtggtgaaaaagtatgtatggaagtacctgcttttatatgaaaagtactgatgttttttctaaaacttgaagtatagtctctgatttgcctatctaaagagtgaaaaatttcatttttactttctgcagaaattcagtttcttgt

SEQ ID NO: 794674 - DNA, 587 bp, Homo sapiens
ttttcataattacgattcagtaaggagtctgtgggaaaagggctagttgtcaatagacatgataaaaggtttgagaactgaattctggaatcctcaaatatttagaatgtggaatgatgaggagaagcccagcaaaataaatccaaagattgaaaaccaccttactttttaaaagtgtctggtatctggttctagttgtgatcagatgcattttccctcgattaccactgtgaaccagcttgccaaaatgaatttgatcatggattatgtattacttactttttataagtaattattgtgatttaaatcataagatcacataagaattgtaaacaatgccaccacaaattttcaaaattatatgtagaataattttgctacaagttgtttttagyagttctgcttttcaacatttgaagctatccagatttagagacctaagaagtatagtcagatatttcaagaagtatagattttaatattagattcgttctgcatggccaaaagaagagaattattttttccagttgtgtttagaaccttcatcagttagctactgtgaaagaatggcaggtgtcaggcaaggg

SEQ ID NO: 794675 - DNA, 556 bp, Homo sapiens
gtggaggaattttcaaagaaataaagaaaaaaaagacataaaactgggcctttgaaaaagtttataaagggcattttttttttggaagaatttaagattggctttagaactctaacttgagttcatattatgatgcatgtacaaattcatgcatatatatttgaaaaataattcgattctctggagtaagctttgytcccttttatatgtatccagaaagctggcaaaagctcatgtatgttatttcaggtcaattaatcacaattattggactgcattaatcatttataaaagactaaattgcttaaaattcaactgctatattttcaacacttcccctcagatattctaagtttttgtatagctcctgaggtcagacggaaattacaaagtcacatctattttaatggcattcttatcaaaaaccacttaatgtggtatatgcactttcactgaactcaaaggcataagccattcagaaaccaagcagctctgggtggcacaaaaacaataaaacaattctacacattcaaatagcttaaaatgaaatagaaga

SEQ ID NO: 794676 - DNA, 622 bp, Homo sapiens
attctcaaaataatataaaaatttcccttgaacataaaagatcctcaactttagtcataataaagaaaataaatataattaaactacacaaagatttttcacctattagattggcaaaaatttgaaagcttcacaatatcctctaactagcaggctataaagaaacgggcactcacacactgctcagagtaatgcaaaatggtacaatctctatgaaggggaattyagcagcgtctaacaagattacatatacatttatccttcaacccagaaatccaaatttgaggactttattcccaaattaaacctcctgcaatataaaaatacatacacaaggttattcatagccacattatttgtactgtaattgcaaaatattggaagctacctaaatgtccaaacacagaagactggtaacgaaactgcatcatattcacactatgtgaacagcactatacagctataacattatgaggaagagctctggaatctgataaagagtaattaatttctagagtatattttaagtgaaaaaaagcaaagtgcaacagaatttaaacagtatgccaccttctgtttttgaaaaaaaggtaaataagaaaacatacatgtatactgtctt

SEQ ID NO: 794677 - DNA, 622 bp, Homo sapiens
attctcaaaataatataaaaatttcccttgaacataaaagatcctcaactttagtcataataaagaaaataaatataattaaactacacaaagatttttcacctattagattggcaaaaatttgaaagcttcacaatatcctctaactagcaggctataaagaaacgggcactcacacactgctcagagtaatgcaaaatggtacaatctctatgaaggggaattcagcagcgtctaacaagattacatatacatttatccttcaacccagaaatccaaatttgaggactttattcccaaattaaacctcctgcaatataaaaatacatacacaaggttattcatagccacattatttgtactgtaattgcaaaatattggaagctacctaaatgtccaaacacagaagactggtaacsaaactgcatcatattcacactatgtgaacagcactatacagctataacattatgaggaagagctctggaatctgataaagagtaattaatttctagagtatattttaagtgaaaaaaagcaaagtgcaacagaatttaaacagtatgccaccttctgtttttgaaaaaaaggtaaataagaaaacatacatgtatactgtctt

SEQ ID NO: 794678 - DNA, 663 bp, Homo sapiens
ctgccttgtttctgagaaccaggatcccaagagctatgttacattgtgtgtttgtaaaaacaacttttaaaagttgttttccttatttaaaaaagcaatacttatttactgtggaataattagataatataaataagcaaaatgaagaaaagcaaaatacttccataattccagaccccagagacaagcactcttaacgtatcactgagtatctttccagaccgtttttgcgcgcgtatatacttggaatgaacacatacaaatacaaactatcttgcaatctgctttttccacttagcaccaacacaaacatcttactatgtcaaccaacctttatctatagtctgattttaagtggttcttctcagtgttatctcctaatagggagttagatgaggccagatgcaaagcgtgtaaggtsggggagggagttgtttggggtctgaaccaaggaagaaaaccctggaattggccaaacacagatgaagcaggagcagagacatggtcttggcaaggggcccccaagtgtaaatctagtccagatggggcgggaggggcatagctaatcctactcaattccaagctggtggcaggagccaagaggcaatctgtcagtgaccaatcctgggataagacttcagacgagcagagcatggtatatgg

SEQ ID NO: 794679 - DNA, 558 bp, Homo sapiens
gttaacctccactggaaagtttcccaccaaagagacactgaacacaaagcaggcaaaatccgccagcctgcatcatcgataagtccacccagaattatcagcctgatggaccccacacatcatcgcatctgacgaggggacccactttacagtgaaggacgtcgagcgtgggcccatcgacaggatccaatggtcacatcacatatcaaaccacccaacgcgggtccatcccaatgaacgctgggccagccttttcaaggcacactgaagcacaagcttgccagacactctgaaaggatggtsatactccacaacacagtacacttatacatcagaggcctctagatggcagtgggatcccaaggaggaggacatgtgggcttaggcgcctagggctggaggcaagaaaagccctacttaatgatcaccaccaacagcccaggggaactttgtgcttcccattctgcaccagtggacactgcagggctgggggtctgaaatggggcacacacttagcaggaacaaggcaaagatcccactgaactgcaagttctggat

SEQ ID NO: 794680 - DNA, 558 bp, Homo sapiens
gttaacctccactggaaagtttcccaccaaagagacactgaacacaaagcaggcaaaatccgccagcctgcatcatcgataagtccacccagaattatcagcctgatggaccccacacatcatcgcatctgacgaggggacccactttacagtgaaggacgtcgagcgtgggcccatcgacaggatccaatggtcacatcacatatcaaaccacccaacgcgggtccatcccaatgaacgctgggccagccttttcaaggcacactgaagcacaagcttgccagacactctgaaaggatggtcatactccacaacacagtacacttatacatcagaggcctctagatggcagtgggatcccaaggakgaggacatgtgggcttaggcgcctagggctggaggcaagaaaagccctacttaatgatcaccaccaacagcccaggggaactttgtgcttcccattctgcaccagtggacactgcagggctgggggtctgaaatggggcacacacttagcaggaacaaggcaaagatcccactgaactgcaagttctggat

SEQ ID NO: 794681 - DNA, 520 bp, Homo sapiens
tgaaggcaatcagccaccatttacccaagaccatctgagaataagacctaaaaagacttgaaaacaattgatttcaatggtaggtacacactggtatcccctgttctgtatatatctacagatacttagatatatacaaaacaggatatatatatatatatagagagagagagagagagagagaaacagagagagagagagagagagagagagagacctaggccccaactcaagccaattacatcagtgtatatgacaggtggcccatgcagtcgtattttaaaaattccccagaatattctaatgtgcctctgcagttgagaactaattaggtaaatgcaaacaacaacaaacaccaaaaaayctcttcagaaactatgcctgcttcttcatctttgtctcttctttaaacaccttgaaaggccttattccctcccagcccctcctgcccctaggttttcctagatgcttccgtattttctgctatgcacaactggggctcataggaaatgtaggcact

SEQ ID NO: 794682 - DNA, 520 bp, Homo sapiens
tgaaggcaatcagccaccatttacccaagaccatctgagaataagacctaaaaagacttgaaaacaattgatttcaatggtaggtacacactggtatcccctgttctgtatatatctacagatacttagatatatacaaaacaggatatatatatatatatagagagagagagagagagagagaaacagagagagagagagagagagagagagagacctaggccccaactcaagccaattacatcagtgtatatgacaggtggcccatgcagtcgtattttaaaaattccccagaatattctaatgtgcctctgcagttgagaactaattaggtaaatgcaaacaacaacaaacaccaaaaaacstcttcagaaactatgcctgcttcttcatctttgtctcttctttaaacaccttgaaaggccttattccctcccagcccctcctgcccctaggttttcctagatgcttccgtattttctgctatgcacaactggggctcataggaaatgtaggcact

SEQ ID NO: 794683 - DNA, 651 bp, Homo sapiens
attacaggagaaggagtgtggagaccttgctctgtatggtagaagtcaaagacagctaccgtcaattctttcccttcctcaacacacattgcttctcaagaggtgaggaatagctcccttcccctagaatctggctgccttgcaacttgctcaatccatagaatatgacataaattccattctgggaattctactattggatttttttttttttgagatggagtctccctctattgccagtcttgagtgcagtggtgcaatctcagctcactgcaacccccgcctcccaggttctagagattctcctgtctcagcctcccaagtagttgggactaccgtcacacaccaccatgcccagctaatttttgtatttttttttttttaytggagacgggtttcactatgttggccaggatggtctcgatctcatgaccttgtgatctgcctgccttggcctcccaaagtgctgggattacatgcgtgagccatcgcacctggcccgatttttttttttttttttttaaagaaactgaagcctctacttcggtctcttggtagccttgctcctgggaagctctttcttgaatctagtcaccattccattccaccaggccacatatgtcttctccaggcaacagccaacatcaattg

SEQ ID NO: 794684 - DNA, 570 bp, Homo sapiens
gaagcctaacactatgatatgcatatattttttaaatactatagaaggagccaatggcagtgatccagaaaatatatccttttcagttgagatagaagagcaaaagaaatctctattcctattgcagagaaaaaatagtaaatatatttgctcataacaacataactaaactgtttgtggcttaataaataaaaatatagttatttaaaggtggttcaaggtttcgtatataatcttacattccccaaatgtgaatttgcacagtaatgaattaaaaataaaacaaagcaatattacttgtcaattcaatcaaataactttgtaatttagcagaaaataaattgyaccagtttggtttaaagccctaactacacatctatagtttccttaaattaattaaaagaagtcatgcaattttcacagaatatcacatgcatgttatccattttaatttctcttaaaaatgggttagttgccattatcaaactttagacaagaaatcaaacagataaagtaacaatgaaagcaacttagacattagctgaagggtttattcttaattgctgagta

SEQ ID NO: 794685 - DNA, 615 bp, Homo sapiens
gagaggcttagttatccacctatggccatctggagccagatgcccacctgaggtctggtgtacacctaaggcctgatatctacctggggcttgggtgttcatgtggggcctgatgtctacctaagaccatgtgttcacctggagcctgggtgaccatctgggttatgatgttcagctggggcccagagttcagctggggactgggtcaaccttctgcttgttgcayacctggggactaggtacccacctgggctccggtgttcactggagcctgatgtctacctggggccttgtatttacctaggaccaatgcatccacctggggtctgagtgccctcatggagcctggagttttcctggggcctggggtctgccttaggcttaagtgtacatctgtggcctcatgtccaccttgggatggatgtccacctggggatggatattcagtagggatctgagtgtccacttggtttgtgatgtctacctggggcctggtgttcatctgaggtttgatttccacctgggacctggacatttgcctgaaacctgatgtacagctggtgcctgaagttcatctatgcctggtgtccccctggggccaggtagtcaacacgg

SEQ ID NO: 794686 - DNA, 615 bp, Homo sapiens
gagaggcttagttatccacctatggccatctggagccagatgcccacctgaggtctggtgtacacctaaggcctgatatctacctggggcttgggtgttcatgtggggcctgatgtctacctaagaccatgtgttcacctggagcctgggtgaccatctgggttatgatgttcagctggggcccagagttcagctggggactgggtcaaccttctgcttgttgcatacctggrgactaggtacccacctgggctccggtgttcactggagcctgatgtctacctggggccttgtatttacctaggaccaatgcatccacctggggtctgagtgccctcatggagcctggagttttcctggggcctggggtctgccttaggcttaagtgtacatctgtggcctcatgtccaccttgggatggatgtccacctggggatggatattcagtagggatctgagtgtccacttggtttgtgatgtctacctggggcctggtgttcatctgaggtttgatttccacctgggacctggacatttgcctgaaacctgatgtacagctggtgcctgaagttcatctatgcctggtgtccccctggggccaggtagtcaacacgg

SEQ ID NO: 794687 - DNA, 615 bp, Homo sapiens
gagaggcttagttatccacctatggccatctggagccagatgcccacctgaggtctggtgtacacctaaggcctgatatctacctggggcttgggtgttcatgtggggcctgatgtctacctaagaccatgtgttcacctggagcctgggtgaccatctgggttatgatgttcagctggggcccagagttcagctggggactgggtcaaccttctgcttgttgcatacctgggsactaggtacccacctgggctccggtgttcactggagcctgatgtctacctggggccttgtatttacctaggaccaatgcatccacctggggtctgagtgccctcatggagcctggagttttcctggggcctggggtctgccttaggcttaagtgtacatctgtggcctcatgtccaccttgggatggatgtccacctggggatggatattcagtagggatctgagtgtccacttggtttgtgatgtctacctggggcctggtgttcatctgaggtttgatttccacctgggacctggacatttgcctgaaacctgatgtacagctggtgcctgaagttcatctatgcctggtgtccccctggggccaggtagtcaacacgg

SEQ ID NO: 794688 - DNA, 646 bp, Homo sapiens
ctaaacaaacaaataccagctataaagatattcttggtagcactttgaggggccaaggtgagcagattgcctgagctcaggagttagagaccaccctgggcccagtctttactaaaatacaaaaaattagccagccatggcgacaggtgggcctgtcatcccagctactcaggaggctgaagaaggagaatcgcttgaaaccgggaggcagaggttgcagtgagcygagattgcaacactgcactccagcctgggtgatgaagttgagactcttgtctaaaaaaaaaaaaaattctccagacacttagggaaatttaagtattaactggatattaggtggcattatgtttttttttcttttttgagacagagtcttgctctgtctcccaggctggagtacagtggctcaatcttggcacactgcaagttccaccttccaggttcacaccattctcctgcctcagcctcccgagtagctgggactacaggtgcccaccactaggcctggctgatttttttatttttgtatttttagtggagacggggtttcaccgtgctagccagcatggtttcgacctcctgacctcgtgatccactcacctcagcctcccaaagtgctgggattacagacgtgagccaccgcacc

SEQ ID NO: 794689 - DNA, 618 bp, Homo sapiens
agtagagcaacttcttacacctctagcagagaaatgataaggcttctgagaccatcatgaggaagggatggagcccagaaatgtctttctacagtgcaccctagttccacccactggacccccgcagtggatcagcatactcctcagagagctattgctggtgcccatctggcatgctgattaaaaagcaatacgtacgccatgatgtctttggaaccattgtctgatgtggaggggaactgtgtcaataaatcatgataacagttaattcaagtaataaatacttttatggttgaatattatattatttgtttttaagtctggctgatatctattataatgagattttcctttactattccatttcattataattgacagtatttgtgtgaaatattgagggagctctgatagccacattcaaaaatatagtcaaggtctgtcatggggcatcccatctaagacagagccctcrgggacaagccacaagggcgcatactgaaacagaaccctggggaacgcctgagctaatatcaaatcataagacaagaagcaaacttatgttcaataaaatttgatgggggcatcttgagagacaatggtaaggtcttgaggttg

SEQ ID NO: 794690 - DNA, 522 bp, Homo sapiens
ctccaacaggaagagtcctagggaattggagacgtcgcgaaggaatgttgtaaggagaattcaagcctaaaacggtgataaatcacagtatctgcaatatctttttgaaactcatgggctttggcctccatgttctagccttggcaggacagaagggtggtaagagcagtatctggtagggggtcaagagtctggctcatggtggaggccaagcagaagagtgacctcatggggaccgcgcctgggtttgtgtgcccactggagagstcgttcctattgcagggccataatgtaaagcagagggtgcttcttttcagaaagctcacctatagctccttcaggcctgtactcttaggagggaaaaaggaagggagtacaggttctggaatttaaagaaacaaaaaggattattctgaaacataaagactttagaggacatgtgggttcatattttatgtctttttatttctttattccctttgctttccaggcttcaaccatatatctggccctcacgtccaa

SEQ ID NO: 794691 - DNA, 605 bp, Homo sapiens
cagcctctcaactgagcatatccagctccaggcctcaaggcatctcagtgaaatgttaacccagacacatcccctctctcagaataggcttgacagagactggtcactgcgtcctccctcccccagcccagggacttggcggtcgcttgctcactgggtcccctgaacaaggaaggcaatgttccctcaattcacagaacctttctattcccagccgtgcccagccagcatcctcactgcttcagatgtgccaygggctgtgggctggcagcttgaaaacgtgccttgggattatcaagcccaaatatgagcgttgctttttgaaaggagaacaacaatatttttttccctctaactccagatacatagtaattctagaagaaaagtgtaatattcagaggccaagccaccttgttctcaggatgggcaggagctgagtggggctgagtccctggggaagctattgccacaccagccctctcaagaggagcagatcacagctaacagggcagaagaagcagaggacctagacccccagaagtggggaggggtcttgggagaaggaacttaatgatagctggagctccctcttaaaaatggggctt

SEQ ID NO: 794692 - DNA, 640 bp, Homo sapiens
tgtttgattggtcatactatataaataagtgtcttttgcttttgcagttcatttcataccacatttttttgcatttttgtgctttttgttggttattttgctgtttagaatggctcccaagtgtagtaatgaagaactgtctaatgttcctgcattggggaaggctgtgatgtggctgatggagaatggatgtgagttagaggagcttggttcaagcgtgagtgacagccctgctggccgtgagctcastgtttatgaatcagcgaatacataataaatatggtgtcgtgaaacagaaacacacataaagcaagtttattacttaccagttaatgaaaaaatcttgtgactggaggttcacaggaagatacccttctatttttcctggaagcagttatttagtattcactaatttagcattcatggcaactttatagaggataactagtgtgaagaatgagaatcaactataaactggtcaagccaggtagaagcaaggaatcctgatgcgcagagagggctagggtctagatgtttacattcacagatggctggaggtgagagccttggaggcaggggagccacggcatggacagaaacttcctgatcaccttcctgttcacacgctgccccactgggc

SEQ ID NO: 794693 - DNA, 641 bp, Homo sapiens
caaagaaaaaaggtcatgtctaagttaataaatgatgagtggagattataaatacatggaagaggttaaaaaaaaaaaaggaaacatccacaagggtggaaagtgattggccctagtgagtgggatcaaggcctggggagtgttggcctgggggttgctgggttttgtcatatgctttctttctctttgattttatttaaacacacacgtattacttgggtacaattaagtatttaaaaccaacatcatagcatacctcagaaagcaaatagagagggagagagggagaraggaagagagtcagaggaagagacagagacagagggagagccatgagaaaaacaactgtggctgaggatgtgtgcgtgtagaggacatcgctgagtgaaggggttcagccacatgggcctggacgcaatacagcatctccagcgtgtgaagcccagatccagccctaggacccgttgactctgatagacaccaaaaggggaaccaaccagacctttaagctttggatcctggactgctgggaaaatactggtgtctgggttattttttcctgttttgttttgttttcctagacataatacctctcatgagctactagtgaaaataaaaaataattgccatcatatcacatg

SEQ ID NO: 794694 - DNA, 557 bp, Homo sapiens
tcccgatgtcagcgagcaagagctgggaaaggaagagatgaatgggaacagacataggagtttgcctgtgaggacaattacctgagttgtgagcagtgacgaccgaatgaaaggaaacccactgtaattaaatagggtggcagtacgaggagctgggccaacagtttcacacatcagctttgatagcttatttaggaggggagggaatgttcaagggggaacaatcagggctyattgcataaatgaatgaatgaaagttcctagtagcctggtcatcactcaaggagtggctgcacgctctggaatgtcaacactataatgcctcaatttgcctagaagaaaatttaaataaatagattttctatacaatcttttctcctctattgttcctttctgaaatttggtagtttaaaatgtacatctacgttatggctgtgtttgtactgaacatctgaaccagacttagtccagccaaactgttcactcttgctctcgtcacgatcaataccagtcaaatcaatcttgcagcaatctgcaccaatcacaggaatgaccaa

SEQ ID NO: 794695 - DNA, 561 bp, Homo sapiens
atttttgtgtttccagtgctcgcgtcacattcgaaaaggaggctcaggctgaccaaggttgaagacagatggctagagtcacacattattcttttgtttcactacttttcacactgcccaccacctattttttttcaatctctttatattgtttaattgatttgaatttcctttctccaccaatctttccatttttcttagtttcastgaattggcaaactcttaagagtttgcaagtttggaatttcatttgtccaaatgagctactctttgggagaaatgaaggccaagttaggtgatgcagaaacaagcagtttttcattagtgatattagtccctttcctgcatctgccctgcccccacaccacggattatctcttatatcaggcattttcacaactgattatatggtctgtacaatgaattcaaactgtgcaacaggttgtcacagacaccaaaacaatgttttggtttgttttgatgcagttgttttgcttatgcaattgccttcaggcctaacacttcagagcactctatttacactaatgtttacataagtca

SEQ ID NO: 794696 - DNA, 642 bp, Homo sapiens
gatgaaaacatattcatcctcctggaatgtaatggagtctaccacataacatattcattaggatatatcctatatatatgatacatcctatatacatccttatattttataattacatgaggatatagtgtcaaataaaatcacttaacttttatttcctaatatgatatgcttgaattaacaggtttactcyattatctagtcattagttagaattagcaatattgaaatcaaaacaaaaacattgcataatatttttgaattatgttctccaactgtccatataagtaaaaaaaagttttcatgaagtggaatagacatcacattcaaaaataaaaatattttctgccttctgcttatctgcatcaaaaatacatttaatagtttatataggaaactagtacatgttataaatcatgctgtaatgattttattacatatagaaatggatttaagaatatgtgttcaaatatttcaaagtgaaaaatgatttttttaatatagaaatgtatttttccacagtcacctgttgccatcattaatgtttctattcctttacatgaacaataaagatcaaaaacaaattatgagagaaaatgcagaataatgctatccaatttctagaaaataatgaaaaagagc

SEQ ID NO: 794697 - DNA, 563 bp, Homo sapiens
ataaaatgggttatatccaagagatgttacgtattcaaactttccatatgatagacttgttattagtttgtgttagtttgcttacatttaaacaaaaccattttaaacatgcagtagattatagccaatggtagttattattttggaattgataagttatttatgtctggcattcttcctactgattattcagagagacaggcggyttataaatatctcatcactccaccgtcacagaaatttcgtcgacagtgctcatgcacagctattagcaatatgaatctaaccattacaagaaggaggaaaatcgaacatgtggcattaatacgcagtcctggttcctaaccatctgataggcagatggtgtgaagcggattctccagctgaaatgaaggggcacatcatttaaaaccttgtttgcattctaactgatatcagtgccatattcatatacatgatacatcatggcagtatttgaacaatctagtttgtttcagtcataaatgtttacagccttgtttttttaatcttataagcatgttcagaagagtgtatttttaatt

SEQ ID NO: 794698 - DNA, 565 bp, Homo sapiens
cgctgggaagtcctctcaaaggtcaagtggttctccatgagcagcaggtaatgcacaccaggctacaattatgtgaggaatgacttacatgaaaggcaagagtgattagaaacctataactgaaaagatgtgctttcatgatgatcaaggagaggagctggagggatgggtcaggagttgcattttatcagtactacaaaggcaggctaatatcttcttttctctagagacttcaacatgacctatacctctagaaacaggtaagtcagggtttttcaacctcgacactattgacatctgaggtcagatgattctttgttaygaagcttacactcattttggggagatagacaagtaaaccaacaaatgaacatgccagtttcaggtaatgataattgttacatatagaaacagagtaatgtccaagggagtgatgtagatggggtaggaggaattgaggtgaatggtattaaaaagagtgctgagatatttccttttaggagacgacattttatctgagacccgaatgacgttttttggtagagacagtcatgtaaatacacca

SEQ ID NO: 794699 - DNA, 545 bp, Homo sapiens
actttccctcaaacaaatggaatctctctctccatgctcagctgtctggagttgggagagggatggccatcaccactgggattgtgctgggtcagacttgaaaccagcacaatacagggtcttgcccaaggcttgtggtgagtattgtctggctaccacttatgtttattcatggcccaactattctttagtcaggttgtgattcatcctgctaggcctgggaatctcccttcagggcagtgggttcccttctggcccagggtgggtgtcaaaatgtcatccaggagctaagtcctggaattggggactttagcaatttgyttagtgctttattttactttggctgagctggtacccaaattgtaagacaaagtcctctttgctctcccctctcctttccttcagtggaaggaatctctgccagagctgcaagctgtgctgcctggagttgaggaagggacagtgcaagcactgccttggctgtccgcactggtgtctgactgggtcacatgcactccaactctaccgactcagcatagcaccag

SEQ ID NO: 794700 - DNA, 641 bp, Homo sapiens; identical to SEQ ID NO: 792922

SEQ ID NO: 794701 - DNA, 597 bp, Homo sapiens
gacttttctattgctaaatccagtggttgattcttagtcctcatcgtactgaatctaccagcagtatttaatatagtatatagttgatacagttagtcactctcttctccttgatgcattttccttcacttgacttacaatacttcttcaagtatgttcttggtttcttaccttaataactattcctgctcagccttatttgttggagcttgttagaatgtcccaaggctcaggccctggttctcttacctatctatactcattcctttaataaaatcagaatgtgtcatrttttagactaccaattatatgcctgttattgccaaatattcatctccaacccagaccttcctcctgaacttcacactcatatccagcttccagttcaatagctcctgtatctcgaatttaacatgtccatgatgaacttttttttcttaaacctgattaatttatagtcttttgtaaatctctgttaatgacaactccaaattcattttttgtttctctctttctcttatgctcttttccaaatatcctgcaatcttattggctataccctcgaaatatattcagaattatcttactttccccatc

SEQ ID NO: 794702 - DNA, 614 bp, Homo sapiens
caagtagagcaacttcttacacctctagcagagaaatgataaggcttctgagaccatcatgaggaagggatggagcccagaaatgtctttctacagtgcaccctagttccacccactggacccccgcagtggatcagcatactcctcagagagctattgctggtgcccatctggcatgctgattaaaaagcaatacgtacgccatgatgtctttggaaccattgtctgatgtggaggggaactgtgtcaataaatcatgataacagttaattcaagtaataaatacttttatggttgaatattatattatttgtttttaagtctggctgatatctattataatgagattttcctttactattccatttcattataattgacagtatttgtgtgaaatattgagggagctctgatagccacattcaaaaatatagtcaaggtctgtcatggggcatcccatctaagacagagccctcrgggacaagccacaagggcgcatactgaaacagaaccctggggaacgcctgagctaatatcaaatcataagacaagaagcaaacttatgttcaataaaatttgatgggggcatcttgagagacaatggtaaggtcttg

SEQ ID NO: 794703 - DNA, 507 bp, Homo sapiens
ctccaacaggaagagtcctagggaattggagacgtcgcgaaggaatgttgtaaggagaattcaagcctaaaacggtgataaatcacagtatctgcaatatctttttgaaactcatgggctttggcctccatgttctagccttggcaggacagaagggtggtaagagcagtatctggtagggggtcaagagtctggctcatggtggaggccaagcagaagagtgacctcatggggaccgcgcctgggtttgtgtgcccactggagagstcgttcctattgcagggccataatgtaaagcagagggtgcttcttttcagaaagctcacctatagctccttcaggcctgtactcttaggagggaaaaaggaagggagtacaggttctggaatttaaagaaacaaaaaggattattctgaaacataaagactttagaggacatgtgggttcatattttatgtctttttatttctttattccctttgctttccaggcttcaaccatatatct

SEQ ID NO: 794704 - DNA, 602 bp, Homo sapiens
cagcctctcaactgagcatatccagctccaggcctcaaggcatctcagtgaaatgttaacccagacacatcccctctctcagaataggcttgacagagactggtcactgcgtcctccctcccccagcccagggacttggcggtcgcttgctcactgggtcccctgaacaaggaaggcaatgttccctcaattcacagaacctttctattcccagccgtgcccagccagcatcctcactgcttcagatgtgccaygggctgtgggctggcagcttgaaaacgtgccttgggattatcaagcccaaatatgagcgttgctttttgaaaggagaacaacaatatttttttccctctaactccagatacatagtaattctagaagaaaagtgtaatattcagaggccaagccaccttgttctcaggatgggcaggagctgagtggggctgagtccctggggaagctattgccacaccagccctctcaagaggagcagatcacagctaacagggcagaagaagcagaggacctagacccccagaagtggggaggggtcttgggagaaggaacttaatgatagctggagctccctcttaaaaatgggg

SEQ ID NO: 794705 - DNA, 637 bp, Homo sapiens
tgtttgattggtcatactatataaataagtgtcttttgcttttgcagttcatttcataccacatttttttgcatttttgtgctttttgttggttattttgctgtttagaatggctcccaagtgtagtaatgaagaactgtctaatgttcctgcattggggaaggctgtgatgtggctgatggagaatggatgtgagttagaggagcttggttcaagcgtgagtgacagccctgctggccgtgagctcastgtttatgaatcagcgaatacataataaatatggtgtcgtgaaacagaaacacacataaagcaagtttattacttaccagttaatgaaaaaatcttgtgactggaggttcacaggaagatacccttctatttttcctggaagcagttatttagtattcactaatttagcattcatggcaactttatagaggataactagtgtgaagaatgagaatcaactataaactggtcaagccaggtagaagcaaggaatcctgatgcgcagagagggctagggtctagatgtttacattcacagatggctggaggtgagagccttggaggcaggggagccacggcatggacagaaacttcctgatcaccttcctgttcacacgctgccccactg

SEQ ID NO: 794706 - DNA, 538 bp, Homo sapiens
gtcacattcgaaaaggaggctcaggctgaccaaggttgaagacagatggctagagtcacacattattcttttgtttcactacttttcacactgcccaccacctattttttttcaatctctttatattgtttaattgatttgaatttcctttctccaccaatctttccatttttcttagtttcastgaattggcaaactcttaagagtttgcaagtttggaatttcatttgtccaaatgagctactctttgggagaaatgaaggccaagttaggtgatgcagaaacaagcagtttttcattagtgatattagtccctttcctgcatctgccctgcccccacaccacggattatctcttatatcaggcattttcacaactgattatatggtctgtacaatgaattcaaactgtgcaacaggttctcacagacaccaaaacaatgttttggtttgttttgatgcagttgttttgcttatgcaattgccttcaggcctaacacttcagagcactctatttacactaatgtttacataagtca

SEQ ID NO: 794707 - DNA, 567 bp, Homo sapiens
acacgaaacagggaagcagggcagactaatctgtttgtgaggtttgtgcttgcatgtgtcgatgtgcgctatgggatcttaacattgattgctatttatttttatgtgtattggtttgtctgcaaaggataatatatcaagttgatatctgacagcttccttccaactgagaccttgcagcatgaatccagcccagcccactttccctcccagctagactccagctgttactcctctgccactgaaaattggcagcaccctcctccccacagcagaytttgtgtgtgtgattgattgggattttatttgtgatttttcctgttcttaacttttccaagagatacacgattcccagatgactctgcactggcttgcaaaattcagaaagtagcctctgcaggagaactctgcccctttgcttttgtttgcttgttcacttactctaaagaaaatgaacttctggtcaataatcacttgctccaaaaagggcacagccactaaagtacaccaaaaaatctaaaagacattaaaaatatttcagggccagagaaaaactacctttttcaa

SEQ ID NO: 794708 - DNA, 529 bp, Homo sapiens
cccctcacttctaacaccacccaccttggtcccaaagggtgactcattcatctttgatcaagccaccatgcttctacgtgaaatgccttattctcattttccatcaggcaaactccttatttttaaaagttccactgaagtattgctcctgcaaagctgtccccagccaagaattaactgcttcctcctctctcccacattttcccactttaaatagctatagatcattcatcactatttggtttgcattatgtaaatgcctgcctctgtcactggatgtgaacatctctagggcaaaggtcagtaatactagtaactatcaccctcastaagtgattgctgaagtcatttcagaaaacatttttaaatccctagctgataaattgaagataagtatctttaatcatttctgtctcttcatccattgaagaaagtggcagtgaaaataacttagatctccaagtcccaacattataagaattggagagctcaaaggaatctttggaaactaggtccaatatacattttg

SEQ ID NO: 794709 - DNA, 529 bp, Homo sapiens
cccctcacttctaacaccacccaccttggtcccaaagggtgactcattcatctttgatcaagccaccatgcttctacgtgaaatgccttattctcattttccatcaggcaaactccttatttttaaaagttccactgaagtattgctcctgcaaagctgtccccagccaagaattaactgcttcctcctctctcccacattttcccactttaaatagctatagatcattcatcactatttggtttgcattatgtaaatgcctgcctctgtcactggatgtgaacatctctagggcaaaggtcagtaatactagtaactatcaccctcactaagtgattgctgaagtcatttcaraaaacatttttaaatccctagctgataaattgaagataagtatctttaatcatttctgtctcttcatccattgaagaaagtggcagtgaaaataacttagatctccaagtcccaacattataagaattggagagctcaaaggaatctttggaaactaggtccaatatacattttg

SEQ ID NO: 794710 - DNA, 636 bp, Homo sapiens
tcttttgactgaattaattggtcccttttctgttactttggattttttaagtatttattgcttacttactatgtgctaggcactgtgctggcctctaggtgtggtccctgccctcaggaaacttacagacaatacaaaatattaaaaaaaaaaaaaaaacagggggctatggtagaaaataatgaaggaggaaraaatctgctgaagtggtcaggtcagctaaaatctgaaagataagaaagaaccagccgtgtgatgagcaagaggaatgagcataccaagcagaaggcagagcatgtgcaagggcctgagctagacagctctttgtgtatttaccgtttaagaagaaggtggagcctggcatggtggttcatgcctgtactcccagcttctcaggaggctgcagcaggatgatcctttgagtccaggagttcaagcctagtctgggcaacatagtgagaccccatctaagaaggtgggtttgtgagaaaacagtgagcaagatggaggggagcatgagataaatttgcagagatgaacacaggccagactgcaaaggaggtttcagaacttgttagagtttgggtgtattttaagtacattagaagctcctgaaaggttttaagccagagaata

SEQ ID NO: 794711 - DNA, 636 bp, Homo sapiens
tcttttgactgaattaattggtcccttttctgttactttggattttttaagtatttattgcttacttactatgtgctaggcactgtgctggcctctaggtgtggtccctgccctcaggaaacttacagacaatacaaaatattaaaaaaaaaaaaaaaacagggggctatggtagaaaataatgaaggaggaagaaatctgctgaagtggtcaggtcagctaaaatctgaaagataagaaagaaccagccgtgtgatgagcaaraggaatgagcataccaagcagaaggcagagcatgtgcaagggcctgagctagacagctctttgtgtatttaccgtttaagaagaaggtggagcctggcatggtggttcatgcctgtactcccagcttctcaggaggctgcagcaggatgatcctttgagtccaggagttcaagcctagtctgggcaacatagtgagaccccatctaagaaggtgggtttgtgagaaaacagtgagcaagatggaggggagcatgagataaatttgcagagatgaacacaggccagactgcaaaggaggtttcagaacttgttagagtttgggtgtattttaagtacattagaagctcctgaaaggttttaagccagagaata

SEQ ID NO: 794712 - DNA, 636 bp, Homo sapiens
tcttttgactgaattaattggtcccttttctgttactttggattttttaagtatttattgcttacttactatgtgctaggcactgtgctggcctctaggtgtggtccctgccctcaggaaacttacagacaatacaaaatattaaaaaaaaaaaaaaaacagggggctatggtagaaaataatgaaggaggaagaaatctgctgaagtggtcaggtcagctaaaatctgaaagataagaaagaaccagccgtgtgatgagcaagaggaatgagcataccaagcagaaggcagagcatgtgcaagggcctgagctagacagctctttgtgtatttaccgtttaaraagaaggtggagcctggcatggtggttcatgcctgtactcccagcttctcaggaggctgcagcaggatgatcctttgagtccaggagttcaagcctagtctgggcaacatagtgagaccccatctaagaaggtgggtttgtgagaaaacagtgagcaagatggaggggagcatgagataaatttgcagagatgaacacaggccagactgcaaaggaggtttcagaacttgttagagtttgggtgtattttaagtacattagaagctcctgaaaggttttaagccagagaata

SEQ ID NO: 794713 - DNA, 636 bp, Homo sapiens
tcttttgactgaattaattggtcccttttctgttactttggattttttaagtatttattgcttacttactatgtgctaggcactgtgctggcctctaggtgtggtccctgccctcaggaaacttacagacaatacaaaatattaaaaaaaaaaaaaaaacagggggctatggtagaaaataatgaaggaggaagaaatctgctgaagtggtcaggtcagctaaaatctgaaagataagaaagaaccagccgtgtgatgagcaagaggaatgagcataccaagcagaaggcagagcatgtgcaagggcctgagctagacagctctttgtgtatttaccgtttaagaaraaggtggagcctggcatggtggttcatgcctgtactcccagcttctcaggaggctgcagcaggatgatcctttgagtccaggagttcaagcctagtctgggcaacatagtgagaccccatctaagaaggtgggtttgtgagaaaacagtgagcaagatggaggggagcatgagataaatttgcagagatgaacacaggccagactgcaaaggaggtttcagaacttgttagagtttgggtgtattttaagtacattagaagctcctgaaaggttttaagccagagaata

SEQ ID NO: 794714 - DNA, 592 bp, Homo sapiens
aatataaaaaatgaaaaatagatgtaacattgatgctaactcggtttcattctagcattattaatccacagatacaagaactaactttaaaaacttccatctctttaagagacttatttccaattaattttactttttatatttaataaataccccaacctgtaatgataatctgtacaaaaaaagttaatactttgaaacttatggtgagagaaatatgctaagataaattcaacttcaacataaatagctgcagtatttagactcttaaatgtatttgatkcgtttaataggaatgcaataaaataaaattattttaaaagaggaatgcaatagctatattttgaaatgctcatatttacaatacatagtaagttacactgccagggactgaatgcttgtgtcaccccaaaatttatatgttgtgctcctaattcccaatttgatggtatttggatgtggggcctttgggaggtaattaggtttagaagaagttttgagggtgggacactcatgataggattagtctccttataagaagaggaggaccagagccctttccttctactgtgtgaggatatggcaagtaagt

SEQ ID NO: 794715 - DNA, 592 bp, Homo sapiens
aatataaaaaatgaaaaatagatgtaacattgatgctaactcggtttcattctagcattattaatccacagatacaagaactaactttaaaaacttccatctctttaagagacttatttccaattaattttactttttatatttaataaataccccaacctgtaatgataatctgtacaaaaaaagttaatactttgaaacttatggtgagagaaatatgctaagataaattcaacttcaacataaatagctgcagtatttagactcttaaatgtatttgatgygtttaataggaatgcaataaaataaaattattttaaaagaggaatgcaatagctatattttgaaatgctcatatttacaatacatagtaagttacactgccagggactgaatgcttgtgtcaccccaaaatttatatgttgtgctcctaattcccaatttgatggtatttggatgtggggcctttgggaggtaattaggtttagaagaagttttgagggtgggacactcatgataggattagtctccttataagaagaggaggaccagagccctttccttctactgtgtgaggatatggcaagtaagt

SEQ ID NO: 794716 - DNA, 540 bp, Homo sapiens
aaagggccactccagactcctgaaactctatgcctgttagagatcttaagataaagctgaccaaggaaattttccccagaagcagacggcattcaagatgtgaacagctttcccaagattgtatatcaaagctgctttgttgtcatgaaagccttaccttttttttatttacttttcctttattttttgttgtttgagtctgatataatttggcgctttgtccccacccaaatctcatcttgatagactgtggacttttaagttaatgttgaaatgagttaagactttgggggactgtttggaaggcatatttggttttgaaatgtgaggacatgagatttggcaggggctaggcgtgsaataatatggtttggttctgtgtccccaccctaatctcatcttgaattgtgctctcatgattcctatgtgttatgggagagacccagcaggagataattgaatcctggggctgatttccctcatactgctctcacgccagtgagtaaatctcatgagctctgacggttttatcaggagttt

SEQ ID NO: 794717 - DNA, 601 bp, Homo sapiens
taaatatatactaatcaataaacactaattttaaaaaaacaaagaaaacacttgctatatcataggtggaccttgcaattattaacactgatccatattttcacagctagctgaatcagcacaacttagtaacctttatgtttgtaagagattaatttgatatagatatagcttargtatccagaaatttccttttgaagattaaaccctagcctcatagtgagaattcctcttggggctaggactaatctattaaattattgcctattctaagccttttttcacttatttttataatgtttacattttaagaattgtgatagctggctttaatcagggagcattaatcgaggtaccaaatgagactactttatattcagatacaatgaatgttcctgaatgaacaagatgggggtagccttttctgtacctccccttcattatttttctagaaaaccttaaagctgttcagtaaatttaactgcagtcactgactgtgatagaaagtaatttgaattaaatgtatattcaaaactatttaacccagaaggtagcagacaagggtatttaaaataaagcttctggcagaacatgtgatgtc

SEQ ID NO: 794718 - DNA, 602 bp, Homo sapiens
taatatacaaaagtcatttagtttcctctattctagaaataaacaagtaaaatttaaattaaaaacacaatgtaatttacaatagcatgcaaaaaataaaatacttggatataattaagaaaattcgtataagaattatatgacaaaaactacaaaactgtgattaaagaatcaaaaaactaaataaaggcatattgtgtgtctgtggatacaaagactcaataatgtcaagatattctttgcaacttgatctatagattcaatgaaaagaaaatcaaaattccagtaagttatttttcacatatttacaaactaatttcatattatatatggaaaaaaatgaccragaatagccaacacaatattaaggaaaacaataagctgtggaacgaacattactcaacttcaaaattactataaaggtacaataatcgagcaagtgtagtatgggtgaagaataaaccaataggtcaatggaacaggatagaaagccccaaaatggacccacttgaatacagtcaactgatctttaacaaaagaacaaaggccacacaatgaagaaaagatagtcttttcaacaaatgatactgaaacaactggac

SEQ ID NO: 794719 - DNA, 602 bp, Homo sapiens
taatatacaaaagtcatttagtttcctctattctagaaataaacaagtaaaatttaaattaaaaacacaatgtaatttacaatagcatgcaaaaaataaaatacttggatataattaagaaaattcgtataagaattatatgacaaaaactacaaaactgtgattaaagaatcaaaaaactaaataaaggcatattgtgtgtctgtggatacaaagactcaataatgtcaagatattctttgcaacttgatctatagattcaatgaaaagaaaatcaaaattccagtaagttatttttcacatatttacaaactaatttcatattatatatggaaaaaaatgaccgagaatagccaacacaatattaaggaaaacaataagctgtrgaacgaacattactcaacttcaaaattactataaaggtacaataatcgagcaagtgtagtatgggtgaagaataaaccaataggtcaatggaacaggatagaaagccccaaaatggacccacttgaatacagtcaactgatctttaacaaaagaacaaaggccacacaatgaagaaaagatagtcttttcaacaaatgatactgaaacaactggac

SEQ ID NO: 794720 - DNA, 579 bp, Homo sapiens
atgaaagttacaatgaatttaaatattgtgtatctttcttgtttctcatttctatagtcatggaacaaacaaatgttagtaagtaaataaataaatgaatatgctgcttctctgaaattcttaatggcatctcaagcaatgtaagagcagacaacattactttgagacatctcataaggaaatggtcaaacaaaattccttttacccaactcrgagttctttctgggaccaatactttgggtatttcaaaagttaacattcttaattttaggtatttcctttctttattattgtattatattttgtgtaatttaattgtataaatgagaatcactgaggcattaagagatttcttctggtgttttaagttggtccaacaaattctgagaataagaatgaattatgtagagaccattttgtatgaatatttgaaatttttatacttgtctgctgtcttttttcagcaacatgaaagttttgggccagtagatgtataagaaaaagaaattgctgtaatatctggtctagaagggattataaatatatatttaagccaaaagtaattttttcaaacacctt

SEQ ID NO: 794721 - DNA, 565 bp, Homo sapiens
tggagattaaataggcagacaacctccctgggctgtgagagaaggctagactgtgtgcttattggtattttcacaggtagtttcaagttgactttggaaaaaaaaaatggctgtctatttcaggtttcatattaagcaaaggattgctctgaaaaacatttagtccctacccttaccaaaaccaaacaaacaaaaaagaaaaagaaaataaaagattaaaactgtttattttgctgttttcagtagaaaacacagataaatagccataaaagtatagctacaattcttagcaccaactatayatcagcataatctggggagtattttattaaaagtatgaattccaaggcaccaattctggctgatgctgaagtacatccttgagtagcaaccattgaattgtaaaatgaggaacagaaaactaaagcttgccaataagtacaattgccatgactacagaatttattgcaggatgctatgtaattgtaataatgagtttttaaaaagtagaaaagacactgacaataaagattctagttaaaaataaatatataatttcaaaaat

SEQ ID NO: 794722 - DNA, 595 bp, Homo sapiens
aaaactttcttcatgtcagcaaaaaggtttttttttttttttgctttcttattatccatatgttcattgtaatagcatattgattttctttcaagaactttttctttccattcaccagttggctgattggcacaagaggcccagttttccgccttttttggctttctacattccttcctcactaagattaatcatttctaggttttgatttaaagtgagagatgtgagacattttctttcacttgaattcttagaggctatcttagaattattatttggcctgatttcaatattgttgtctcagagaatagagtggcccagcagaggaagagagattggggaatggctgtttggtggagcarccagaacacacatgacattaattgattatgtttgccatgttatatgggcacaattaatgactccctaaaacgatcacaatagcaacattatagataattgatcacagatcaccataacaaatacaaaaatgagaaagtttgaagtatcatgagaattaccaatatgtgacacagatacatgaattatctgtgagcacatgctgttggaaaagtggcactggtagacttgcttg

SEQ ID NO: 794723 - DNA, 696 bp, Homo sapiens
gtcttgatctcctgacctcgtgatctgcccgcctcggcctcccaaaatgctgggattacaggagtgagccatcgcgcctggccagaaaattttataacaatcaattatatggcagcaacagaaataatttccaggatcaaattgacatttcgtacactaaatgtgaccatatattggatctgtgagagctgatgaaccttaaaggcaaatctcagttatatagcataaattcgtatttactaagtcatgtgctatgatttcacttttttctttctcaatattaaaaggcatgagtacagatgaccatatcatcatcacaatggaggaataattttaaaaatcaattttgagagtcatattagatgaattcattcatttactcattcaataaacttttattgaaacctgctttataycaagaagtacgttagatgctaagaattgcaaagattaaggaaatgctgttactactcataagtagttcacagtctaatcaatgaaatgctcagtctctaaacagagaattccataagtaagttatgcacctggggatgtagtgagctcccacaatgcaatggcaatcacattcccattagagccagtgaggacaacctcagaaaggaagtgaagttctgatggtcaactgaatttaaagctggtagaaatgtgaaacgtttttgtaagtcattataaata

SEQ ID NO: 794724 - DNA, 594 bp, Homo sapiens
tttatacctgaggacactgaagcatagagaagacagagcgcttgatgaaggaaacacatctttaaaaaggtgagtcaaaagttttgattaatgtttattcaatatcaagcctccaccatatttgcttgaagtttgaaaagtacttggccacaagcctaggtttacagttaaggtcttttgattctgatacttgggaatgtgaaggaggtgccaatctttctctcagattggcctgatctgctgtgctttgggccctgttgtcctaggggtctttggaaccaatgtactgactcagcggaaagattactcagctgcaggagttccgatattctgagactttaaatctttctggaattcctggcatataacagggctacaaagggcwcacaagacaaaacatggtgatgttaaaaaggaggcaagaacggctctattctgacacgtgaagagactttggggaagagcaaatgtaacagggcaacccttactctcatgcaacctactcttattaagactttatcttagatggagtaagaggaaggagaagaaaaagaaggaagaaggaggaagaagaagaaataccttgtgattacg

SEQ ID NO: 794725 - DNA, 601 bp, Homo sapiens
catgcctgtaatcccagctacttgggaggctgaggcaggagaatggcttgaacctgggaggcagaggttgtagtgaaccaagatcatgccactgtagtggcagactccagtggcagacagtgcagactccagcctcggtgacagagtgaggctccatttcaaaaaaaaaaaagaaagagaggaaggaaggaaagaaggaagggaaagaaagaaagagagagagagagagagagaragaaagaaagaaagagaaaaagaaagaaagaaagaaagacagaaagaaagagaaagaaaagaagagagaaaaagagagagagggagggaggaaggaaggaaagagaaagcaaattatcaaagctaaaagaaaaagtatgtaaagtcagtgaaaagaaaggcatggctacaggttaccaagagcttagggagagacaagtttatagatggggtctatgggaagactgttaacattccttgatcataaaaatagaaggaggcaaaatccagttggcactggaagaaatggaacagaggagacaactcacacttaactgcacatattgcactctcagtagttacagcaataaggtatccttccaatggt

SEQ ID NO: 794726 - DNA, 584 bp, Homo sapiens
ctcatgttgacagaatttgccgtaacgaaatgagtccgtgctccgtgtcatctattaccgaatttcagtaaggtctctggcacccacgacgcccaggagggtaagcctctccttggtttcctatttctgtctcctgattgccagcacatctaggattttttgaaactctaattggttgtcttgatttacgcagagttcccagcgatgccaacggaagaagkcctgtagttgctgaagccagagtcaccagtgtggatctccacttcttcccacctcctcaagcccctcccatacctgtgtttagaaacttcacaggaagcagagttggcaagcatacctgagctgattgctctcgcctctctcaccatcttgagtacatcatcgtcaccctccagagccctcctaaacaaggtttggcaacagcaaaaacaaacactattttacaacatctttggatgcacttccaaaacgcaaaagcaattaatcagtcatctccctgagactctcctcaaggtggctgctgcctttgacatggagcttggctttgatgggagccgaagaagcaagtgaagacagcccaaaaa

SEQ ID NO: 794727 - DNA, 532 bp, Homo sapiens
acatgagacaaagtatgtgaaaaataacttgtgaaattgttaattgttaagggtattgttatcatcagtttcttttcaacagtacagttctggaaattcgaaaaacaaaacaaaacaaaacaaaacaaacaaacaaacaaaaatgctgtttcatttgtttcatttctgttctcaagatcttgatttcttgaaactgttcccacgtgcagtgaaacgcccttcctggaatttagagttttgactgtaatttttgtctcaaatgagtggatccaaatacaaacgtagctctggtttgtcgtggttgtgatctgcagggtttgccagtttcatctaggtagtatgacacaggaaatcactgagatrgtccactgccaaaatccatggccccagtgaccccacttcatcattttgtattaaaacaaacaaacaaaacttaaactgtgaaagttctgtctctcaaggagagtatcaagaacatggtcacaggaaccagtgtgatgaagaaatcctgaaaattacagctggaaggagc

SEQ ID NO: 794728 - DNA, 569 bp, Homo sapiens
agagatgtcattgaggtgactttgaatgtagggatggaggaagcctggggaatccaatttgatgggtgaaggtggataccgatcagatataggtagggatctgatgggccttacagaaaaagctgagttggtcaggatgatgagagctctcattgatggagttttcatatgtgacaggtgtgttttgmatgtagctcccatgctcaatcctcacaataatggaggcttaaacaccttggccaaggcgtcagcagccaggaagtggtggaagccagaatccaaacccaggcatgtggggtttcaaagcctcactgttaaccaccacaaaattgctgccaccgagtgagctgtgcagatgttgggtttcgggggcttaatgtacacacgagtgattcccaatagtccattgggttgagagtccaaattcagaatgaaagaagaggcagccagatggatttgcatgctttccaacaattacaaatgtagaagtggtacccagtaggaagagatcttagagaaggcctgaggatttggcaataaaaaatctgttcactcattcttctgctgaa

SEQ ID NO: 794729 - DNA, 565 bp, Homo sapiens
gaaaattgaagaagcgtttcccctctgcccaatgacatagatctttctttggaatcttggctaggttgaatccactatgagttcaaatttttattaggttcctatggtatacaataataatttttaaaatgtggcctttgggccaggcacggtggctcatgcctgtaatcccaacactttgggaggccraggtgggtggatcatgaggtgaggtgtttgagaccagcttggccgacatggcgaaaccacatctctactaaaaaaaaaatacaaaaattagccgggaatggtgacacacgcctgtaatcccagctactcaggaggctgaggcagagaattgcttgaacccggaaagtggaggtttcagtgagccgagatcacactatcacactgcactccagcctgagtgacagaacgagactctgtctcagaaaaaaaaaaaaaaaaaaaagtgatatttgtccctagttcctgatcctgagcttttaaaacacttgcaatctcctgagtgaaaacagtgtcttttgtcagctaatgagatgactcctgacagtggacaaagcct

SEQ ID NO: 794730 - DNA, 565 bp, Homo sapiens
gaaaattgaagaagcgtttcccctctgcccaatgacatagatctttctttggaatcttggctaggttgaatccactatgagttcaaatttttattaggttcctatggtatacaataataatttttaaaatgtggcctttgggccaggcacggtggctcatgcctgtaatcccaacactttgggaggccgaggtgggtggatcatgaggtgaggtgtttgagaccagcytggccgacatggcgaaaccacatctctactaaaaaaaaaatacaaaaattagccgggaatggtgacacacgcctgtaatcccagctactcaggaggctgaggcagagaattgcttgaacccggaaagtggaggtttcagtgagccgagatcacactatcacactgcactccagcctgagtgacagaacgagactctgtctcagaaaaaaaaaaaaaaaaaaaagtgatatttgtccctagttcctgatcctgagcttttaaaacacttgcaatctcctgagtgaaaacagtgtcttttgtcagctaatgagatgactcctgacagtggacaaagcct

SEQ ID NO: 794731 - DNA, 565 bp, Homo sapiens
gaaaattgaagaagcgtttcccctctgcccaatgacatagatctttctttggaatcttggctaggttgaatccactatgagttcaaatttttattaggttcctatggtatacaataataatttttaaaatgtggcctttgggccaggcacggtggctcatgcctgtaatcccaacactttgggaggccgaggtgggtggatcatgaggtgaggtgtttgagaccagcttggccgacatggcgaaaccacrtctctactaaaaaaaaaatacaaaaattagccgggaatggtgacacacgcctgtaatcccagctactcaggaggctgaggcagagaattgcttgaacccggaaagtggaggtttcagtgagccgagatcacactatcacactgcactccagcctgagtgacagaacgagactctgtctcagaaaaaaaaaaaaaaaaaaaagtgatatttgtccctagttcctgatcctgagcttttaaaacacttgcaatctcctgagtgaaaacagtgtcttttgtcagctaatgagatgactcctgacagtggacaaagcct

SEQ ID NO: 794732 - DNA, 565 bp, Homo sapiens
gaaaattgaagaagcgtttcccctctgcccaatgacatagatctttctttggaatcttggctaggttgaatccactatgagttcaaatttttattaggttcctatggtatacaataataatttttaaaatgtggcctttgggccaggcacggtggctcatgcctgtaatcccaacactttgggaggccgaggtgggtggatcatgaggtgaggtgtttgagaccagcttggccgacatggcgaaaccacatctctactaaaaaraaaatacaaaaattagccgggaatggtgacacacgcctgtaatcccagctactcaggaggctgaggcagagaattgcttgaacccggaaagtggaggtttcagtgagccgagatcacactatcacactgcactccagcctgagtgacagaacgagactctgtctcagaaaaaaaaaaaaaaaaaaaagtgatatttgtccctagttcctgatcctgagcttttaaaacacttgcaatctcctgagtgaaaacagtgtcttttgtcagctaatgagatgactcctgacagtggacaaagcct

SEQ ID NO: 794733 - DNA, 675 bp, Homo sapiens
cctgatcctgagcttttaaaacacttgcaatctcctgagtgaaaacagtgtcttttgtcagctaatgagatgactcctgacagtggacaaagccttagatagcttcaggttaggggtaggtggccaaaagaccaaggcacaattagagagtaagaacttttagctccatcttctgccctyccaaggagagaagctggagatggagtttaatcacgaatggccaatgattgaatcaatcatgtctatgtattgtgatcttcctaaaaccccctaaaggagaaggttccaggagcctccgatcagtgaccacatcactgtgcggggagagtgggcagcaggtgaaaacacggaaggtctgtgcacacactcacctccacgataccttgtcctgtgcttctcttccatctggctctttctgccttgtatccttcataataaagactgtaccaacaggagcttctccttgagtatttcccaaatcacttaggctgtggatcaatgaattctcttaagcactcaaagaccgagcctaaataggagcttagcaggaatctgtgttaatcattaaagtggtgttctgagttctgtgagtcattctagtgaattatcaaacctgaagaggaggagtcttgggaacccttgaatttgtacttggttgagcagaaatgtgaatca

SEQ ID NO: 794734 - DNA, 594 bp, Homo sapiens
tagatagcttcaggttaggggtaggtggccaaaagaccaaggcacaattagagagtaagaacttttagctccatcttctgccctcccaaggagagaagctggagatggagtttaatcacgaatggccaatgattgaatcaatcatgtctatgtattgtgatcttcctaaaaccccctaaaggagaaggttccaggagcctccgatcagtgaccacatcactgtgcggggagagtgggcagcaggtgaaaacacggaaggtctgtgcacacactcacctscacgataccttgtcctgtgcttctcttccatctggctctttctgccttgtatccttcataataaagactgtaccaacaggagcttctccttgagtatttcccaaatcacttaggctgtggatcaatgaattctcttaagcactcaaagaccgagcctaaataggagcttagcaggaatctgtgttaatcattaaagtggtgttctgagttctgtgagtcattctagtgaattatcaaacctgaagaggaggagtcttgggaacccttgaatttgtacttggttgagcagaaatgtgaatcatctggggatcccac

SEQ ID NO: 794735 - DNA, 594 bp, Homo sapiens
tagatagcttcaggttaggggtaggtggccaaaagaccaaggcacaattagagagtaagaacttttagctccatcttctgccctcccaaggagagaagctggagatggagtttaatcacgaatggccaatgattgaatcaatcatgtctatgtattgtgatcttcctaaaaccccctaaaggagaaggttccaggagcctccgatcagtgaccacatcactgtgcggggagagtgggcagcaggtgaaaacacggaaggtctgtgcacacactcacctccacgataccttgtcctgtgcttctcttccatctggctctttctgccttgtatccttcataataaaractgtaccaacaggagcttctccttgagtatttcccaaatcacttaggctgtggatcaatgaattctcttaagcactcaaagaccgagcctaaataggagcttagcaggaatctgtgttaatcattaaagtggtgttctgagttctgtgagtcattctagtgaattatcaaacctgaagaggaggagtcttgggaacccttgaatttgtacttggttgagcagaaatgtgaatcatctggggatcccac

SEQ ID NO: 794736 - DNA, 609 bp, Homo sapiens
aagtaaaaaaaatacatatttatcttctaaacaccaaaaattaagtatttaagtgataaaaactaaagattcaaaaactaaaataattatatactctaagaaaaaaatacagaaaaatgtgacaaagaactaaatgtaaaatagaaagggaaaaacataactgaaaaattaatcaaaggtttaaatagcaaattcaagtcagatgaaaagtgttggtgaatttgagaacagacattatatgacttgtgtaatccacacaacaaccagcatttattgagtcttcaggctagaagargaggtcgtcatatccccaaaattgatggagaaaataagaattccaccaagaattctacaagtgtcattcaagggtaaaggtgtaataagggcattataagatgaataaaaacttaccaggaacagaaacttcccgaaaaaaataactgaaagttttatgtcagaaagaaagaaacacatacacacatccagaaacaatgtggtaccaacattttgaacaataatgctcgaagtaagggtcttttcttgttccagaaaaaaagagttattacttcctttttgattatgttaaatcaaatatgaaaggtaacattt

SEQ ID NO: 794737 - DNA, 601 bp, Homo sapiens
tttttctacagctaaagagggaaatacacacacacattatacacaatagcagcgaatgaaccttcgccaggctcacacacatttatacagcaacagcagacatagtgacaccagactgcaagtagagagagtgagtctgtcaatatttaccgagacaaaaatggtaacgcrtcctgtttttccttccttccttcaacaaacacgtgtggaagccgtgtctctgccctgtgtgccagggcctgggtctaggcaccggagagagagagagccatgaatcagatgcaggacctgcctggaggttgctctgggttcctctgagagatggacagaatgacatagcagagtgtcccacgtgctttggccaaacaccaggtgctgtgggaacttgaaagggtatcagcaccatccccagccttgaggctgtcaggaaaaacttctgagctgtgcttcccaatgaaattctgatggacatgtagcaaggtggggtatggtttgcctgttgctaacttcaagtcacaaggcaatttggattctatgctttagtgacctttaagtggactgcagtgaagtaggaagtaagtgtccagtgcatttctcttgg

SEQ ID NO: 794738 - DNA, 655 bp, Homo sapiens
aataatttggcaaattgtgtttgtattcaagtgttttttgaaaggtagaacttaggaataatggaattggatatttgatgaaggaaatttcttttttttcccaatttttattttaagttcaggggtgcatgtggaggatgttcaggtttgttatgtagataaatgtgtgctatggtgatttgctgtgcagatcacgaaggatgaaatttctaaacaaagtattgaagaaattgcctggtttcttctgacaatttacagtaaaaatatgagaagaaagaaatgatttaaatgaattgttaatcaaaatggaagcagaacttaaagatttgaaaaattttcagactgtattggaaaaatgagaaagtctattcaggagagaactttctggggtagccaaggtacctgtgataaggagattagtcagttatctccttatcttcttgattcagaagctattgttgaaggctrtggaagaaagaccctgaaggaagttcagaaaccatcaaggctgccctctatcacaggcccagaatgtaaaggccctggaggcagaacagttttaaagaaggggctgctggtatctgtggggtctcagggtgcactgccctgcactgttcctcagccacctgaggtgcaactctgatggatccctgtg

SEQ ID NO: 794739 - DNA, 549 bp, Homo sapiens
cacttttgtgaaaatgagcacagtgaatctcccactgcacaattgacagtatttgttgctagtgacaaaatttgaaattttagtaaaaaatacaactttttgaaaacattaccttttaccatgagcctgactgctttccaataattatagacttgatgagatagtgggcgatttgcttttagatattgtataatgaaatgtgttgacatttgaaagttccacartaactcaactgagcaatatttttcaactaatcaatgcatgatgttataaggttgtgcatggggaatatatctattcaaagtgcaagaaagttagtgtaaaatgagacaaaattttcatcaatatagtttcagattctgcatggcaaccaatgtgtaagaaactactacttgttgagtttagtgcagtagaaaggaaaaatgtctagaattatcttaaaagggcactaaaatactccttcttttcctgcctccatatctgtgtaaggccagattttcatcatatacttcaaccaaaacagtatatcccaacagcctgcatgcagaa

SEQ ID NO: 794740 - DNA, 607 bp, Homo sapiens
acttttttgtatttttggtagagacagggtttcactgtgttagacaggatggtctcaatctcctcacctcgtgatccacccgtctcggcctcccaaagtgctgggattacaggcatgaaccaccacacccggctggagcacagtctgttttgaagtaaaaatgttgactattatttttaaaaactcrtaagaacagaacaaagagaaatgaaatagctgagctgatttactgaatgtcgaactgccccaagagcagggtgatatattccccactctggcttacatggcttaaaattgctgaaaagctgtttaaatgatcaacttccacccgccttggttcaggtcctctgaggccaccaacttggctgttaaattcattatgaactaactgtgaactgtaggttaattcatgttgagcaacaatggagaaacacattaaaaaatgtgtctgtcataaagctagagtctgttcagaacaaacatatccataaaatgttgatctgttagtattttgttgttcaaaagtcaatctaagaaagtagcactggacttgaattcaaaagactttacttaattgtagtcattggctttggggccaattgctttg

SEQ ID NO: 794741 - DNA, 517 bp, Homo sapiens
gacatgatcttaatgtatagaatatctaaggaatcaactaaaaagcttagaactgattaacaaattcaggatggttgcaagatataagatcaacatacaaaaatctggtgaatttctacacactagcaatgaacaaaccaaaaatgaagttaaggaaatcccacttaaaatagcatcaaaaagaataaaatacttaggaaaaattgaacagtagtagtacaaagcttacactctgaaaactacaaaacattgttaaaagagaaaamtatctaaataaataaacatccagtgttcataaatcaaaataatattgttaagatggcaatactctccaaatatatctacagattcaacacagtccttttcagaattccagttggcttctttgtggaaattgacaagttgattttctaaaatttatatggaatttcaagagaccctgaatagccagaacaatcttgaaaaagaaaattggccgactcatacttccaagtttcaaaacttacgtgaaacaata

SEQ ID NO: 794742 - DNA, 630 bp, Homo sapiens
ttctgttgccatcaaaatgaattctaaatattcctgcttctttgcttcccatgttctacactgaaaggcccaggaagaagatagctaaacttaggttgcccgccacaaactttagttattaaagaaaagcagggggtggctggaaagatggccaaataggaacagctccagtctgtagctcccagcaagatcaacacagaaggtgggtgattactgcatttccaactgaggtacccggctcatctcattgggactggttagacagtgtgtgcagcccatggaaggcaagcagaagcaggtggggcactgcctcaccagggaagcgcaggggtcagggaactccctcccctagccaagggaagccttgagggaccgtgccttgaggaacactgcattccagcccagatacaggcctytctcacagtctttgcaaccttcagaccagcagattcccttgggtgcctacaccaccagggccctgggtttcaaacacaaaactgggaggccgtttgggcagacacctagctagctgcaggagttattttttcataccccagtggtgcctggaatgagagcgacacagaaccgttcacttccctgaaaacggggctgaagccagggagccaagtg

SEQ ID NO: 794743 - DNA, 624 bp, Homo sapiens
aggcaagccaggcagtattctttatatagcaagttttagggtaaaacatgtgcatttgatcatgtcttcacactttcttgccaagacttgtgactactgaggaggttagataagcatctttatgaggggttagctatgctacaggcattgtttaaaggacttactgcagaaccccttggtatacgggaatcaaacatcggacatcgcgggggttttgcttcaagatagcgtcactcttgccatgcaacaggctgttttcctacagaatcttaaatctgaaaattcaaaatctgaaactttttgagtgccggcatgatgctcaacagaaacgctcattggagcattttggatttttgattctcagagttgggatgcccaaccagtaaacataaagctaattttccaaaatttgaagaaatctgaaatccaaaacacttcagttctgaagcgttttacataagggatactcaacctgcaatgytaattattataattctgcagaaaggtcgaatggtgtaaaatcaggtagcactgaatacaaattttagatctgccacttactggtggtgaaagttcaggtacgttacttaaattttctaaaattctgttttcccatctgcagaa

SEQ ID NO: 794744 - DNA, 551 bp, Homo sapiens
ctttatagcagtatgaaaacgaactaatataaagagtatgttccagagtgaagggaggaggtgtaggttctattgctagctttgctacaaatgaccaagacaaaggtcagtaaactttttctgtgaaggactagatagtaaatatttcaggctttgcagaccatatggtgcctcttgcaactactcaagtctgctgctgtagtatgaaagccaccgtggacaatatgtaaatgaatgggcatgactgcattccaataaaattttctttatggacattgagatttgaattttttacatgtcagaaaatattattcgtttttcccaatcattaaaacatataaaaaccactcttaastcacagatgatacacagagagacagtggccagatttagcctcttggtgatagatcagccaaacactgatcaagatgatacctcaataccaccataaggtggtcaggttcactactgaagaagtgatttagatagtgcaaggtgtgaattgtgagagcaccttaagtactggagttccaagagaaagcatcagcagg

SEQ ID NO: 794745 - DNA, 548 bp, Homo sapiens
atgaaaggaagcccagggaacctcaggtggcttactggggagaggagaagcaagtgggctggatccttaggctgatggggataaaggaaagaccatggggaagggattgtgtggaccaagcaaggaaaacaatcatggtaattgcaactgcttctaataccagagatcacacacctatcctaggtcatgcgctrggctagttgtttgatacatttatctcagctatttatgacatacagaacacagataagaaagtgagggtacaagactggtaactaactttcccagggtcacacagtcaacgttataagtggtagtcagacttggagttctgaagaacaatattgaatattattgtgtgttttaggaacccagcacatttcctagcacatagcaggtccgcagtaaacacttgctgaattttgccagagaaaagagaataacctactattcaaaaacatctacagggcttctgaggccctgaacaaagtctctattgaatgggggtccttcagtctttatgactcaaaattcactgttgttacttt

SEQ ID NO: 794746 - DNA, 560 bp, Homo sapiens
tcctctcccaagtgctgtctctgtgctcggctcatggcatcatgctatctcttagaaacatgtcgaggtaggttcactgactgtccctaaactggccctgtctaactctccagccttcttgtatccaacaactcctgcaatattctcaactctggccactggagactatccacagcatgyccaaagcccgttctacttgcatgctgacgtgaggctgcaggggacgcttcgagcctcagaatccagccctgcatgtccctctctcacagcacagaccatgccccttcggtgtcttgtagttttcttttttccctcattggactgggaccctcctgagggctgaggcatctcttattcacctctgttttcttagtgtctgcccagacgggattttgacatggagtagacgctcagtagctcaatagagctttttgtatacatgaaagatttatcacggtgcctccagaaagaatgatggaacttgcataaactgacacgattattattggaattcatttattagaaaaaaaacttcagatattttattatcccaaacactg

SEQ ID NO: 794747 - DNA, 585 bp, Homo sapiens
gaaacttaaagtagttttttttttttctaatttggtgaaaaaagtcaatggcagcttgatgggaatatcactgaatctataaattacttggggcagtatggccattttcacgatattgattcttcctatccttgagcatggaatgtttttccatttgtttgtgtcctctcttatttcctcgagcagtggtttgtagttctccttgaagaggtcctccacatcccctgtaagtagtattcctaggtattttattctctttgtagcaattgtgaacagattctggagaagatgtagataaataggaacacttttacactgttggtgggagtgtaaattagtttaaccattctggaagacagtgtggtgattcctcaaggatctagaactagaaataccatttggccccagcaacgctattatgagtatatacacaaaggtttacagatmattctactataaagacacacacacatatatgtttatagcagcactattcacaatagcaaagacttggaaccaacccaaatgtgcatccatgatagactggaaaaagaaaatgtggcacatatacaccacggaatacta

SEQ ID NO: 794748 - DNA, 633 bp, Homo sapiens
aaggagaaaaccagagaagggaatgccagattctgagtataaactatgcccaagacattagctgactgctgagccacacaggctcaccttcccttaaatcctctcaccagagaggcacagactttctattgaagttttaacttcatgccaacattatgattgccctgagggtaaaactcagcagtctgaatttgactcccttttttttctgctcttytacactctccagagccctcaaagaatagttgttttttgagggggatttttggtctggactttatagttgttacctgtcagagagtcaggctattagataaaaaacttacttcactatactggaaacagaactctttcagaatatgtgcttgttacatgcaatagaaagttcataaaaatacacatggtatttgtccaaagtgaggaaaggaatattttagtttagggaatcactacttactcacaactttttgttaatgatggctgtggaagtataaaacattgcaagtataatagcatttttttctatattaatggcttacacacatttctaataacatacacagtttttgtaactcttttttttctgtttgttctggtttaacccactgaaatgctatgtctatctgttaaata

SEQ ID NO: 794749 - DNA, 553 bp, Homo sapiens
cttcagatactaactgggactgacaccattggcactcttgattctcaggctttggggtttagactggaactatacctatctttcctgggcctccagcttgcagatggtagatcctgggacttctcagactccataatcaacctcacaataaatctctttcttatctctacatatatcttcttggttctgtttctctrgagaaccctgactaatacagaaggaaaggagtacctaaaacctttcttgtaaaccccaggattctgtggctctaaggaatgggggcagtgggtgtttaatgaaggtattaagcaggagtgacattatcatgttagtgcaatatctttcttttgcaaaggaagaaactggagcccagatgaattccaaaccatcggcaaaaaatgtgtgagcattggagaggccaatattaattagattaatgagtaggtaccatcaccttttcatggttatctgccagactctgaatgtaaacacacacacacaaacacatatacatatttgggacactactccctgccccttctaagctcactat

SEQ ID NO: 794750 - DNA, 599 bp, Homo sapiens
tggcatatctttttaaattcatgcattctcctcccaatctttcagcctcccaaataataagtaaccaaataataagattgtctcccagggtgagatttcatctgagggatgaagtgtacacacctagggctttgatttaattctcttggactaagctgattaagtcctgagcagtttagactcttttataattttattagatgagatcattagatttcagagatgaaatgaatggaagcctgactggagactaaaatagccaaatccagccgcatcaagggttccttggggctagctttcaggattcaaacactcaacagtacatacaaagcatgactctctgaacaatagggataaaatttcaatattaagataacttttatgatgccaggaaatacagtgacaygcttttctcttgaagcagcatgcttttgctttaatgaaaccatagattatcgattctcagactcagggaatactgtcctaatggatatggtctcgagttatattactactacagccattaactcgtgcaactaaaagcaaatgacttcacctccctgggttttatctccctccaacctttctcccagaattta

SEQ ID NO: 794751 - DNA, 645 bp, Homo sapiens
ctcattcataaattagctaggcctttggtcagtttttgtgtttcttttttctggtaataactcagcgaagtctggatccaagccactctcatgagtgctgccctttaaacaaattgtttgaagtccagctttcactttttggggataaacaaaaataatgcttaatattgtagaatcattgtttgtttttattttacacaattaatggtctttttactagaacgacaaatgtattgcataaaacaatatttaagtaaataaakgtagaaaaggtatggagaagcagaaagtaagaagaaaagaggcacagaggagaaggcagagaaaggggaaaataggaagagggaaaggaaaagggaaaaggagagggaaataatgaaaaagaaagggagaggttgggaagccgaggcaggcagatcataaggtcaggagttcgagaccaacctggccaatatgataaaaccctgtctctactaaaaatacaaaaattagctgggcgtggtggtgtgtgcctgtagtcccagctactgaggaggctgaggcagaagaatctcctgaaccacgccactgcactccagcctgggcgacagagagagactccgtctcaaaaaaagaaagaaagaaagaagagagagagagagagag

SEQ ID NO: 794752 - DNA, 605 bp, Homo sapiens
aggcaggcagatcataaggtcaggagttcgagaccarcctggccaatatgataaaaccctgtctctactaaaaatacaaaaattagctgggcgtggtggtgtgtgcctgtagtcccagctactgaggaggctgaggcagaagaatctcctgaaccacgccactgcactccagcctgggcgacagagagagactccgtctcaaaaaaagaaagaaagaaagaagagagagagagagagagagagagaaagggcaaggaagggagaaggggagaaaagattggttttggaagcctttacaaagggcaggaaaaaaattgactggactaaaaaaaaaacaaacatgactggactaaacatcatcactggatctcattggtgagtacataataaaaattactgagagtttgtccaaattcttcaagcttccacacaaagttttcaaacacatatccaaacccagcaagccatatcagaatggcccagtaaaggttattcttaatataacccacatggcagctgggatctccctgccccttgagatggaggtaagtttgccttgcatccttattctatgtctcgtagaggtccaaatctcccccgccctg

SEQ ID NO: 794753 - DNA, 607 bp, Homo sapiens
ctgatatctgttagcctcaaaagattcaggatccctgaattcttgcttccaccctgttacatacccctcccaacacacacagactactagttacccctaaacatccattctgtcctttttctacgtaatatgatccctgctctttacctgggcacattgccacccaattgaaagactaccttcaccaagccataaagtagttggcagtgaccatgtaactaagtttggccatagagttccatgtgacttctgggaagtttccaaaaagggagggtcatgctcttggtccctacatctgtctagctgcctagagcaaaaatatgaggctggagttcaagaagacatctcagagccccagggagggcagaggggagagctgggagggacctgggtctctgatgacttagtagggctsccagagcagctcttctctggctgcttccacacttctttcatttgagatagacacaatctcctgtcctgttcaagccactattactctcatttttttctgttctatgctgccaattgatagtgcctgcaaattaccctggtcctaaaataaattatgtatcatgatgcgttcatgtgataagtctcagcactt

SEQ ID NO: 794754 - DNA, 421 bp, Homo sapiens
ggcccttaccagatatgttatcatatgctgactttaacctctctggatctcaaatccttcaagatgaaggtggtaacagtatccactttatatggtttttgaggagactaaaatatggcaatccatgtaaagcccttagcacagcgtcagcacagcactgaattaaatactggcaattgttatgagttttgttttgtatttataagaagtttttggtttcctartgcacataaaagtgatgtttatactatattgtcgtctattaagtgagcaaaaacgtatgtctaaaaagcaacatatacaacttaattttaaattactttgttgctaaaagatgctaacagttatctgagccttcagtgaatcataatctttttactgacagagggttttgcttcagtgttgatagctgctgactgat

SEQ ID NO: 794755 - DNA, 421 bp, Homo sapiens
ggcccttaccagatatgttatcatatgctgactttaacctctctggatctcaaatccttcaagatgaaggtggtaacagtatccactttatatggtttttgaggagactaaaatatggcaatccatgtaaagcccttagcacagcgtcagcacagcactgaattaaatactggcaattgttatgagttttgttttgtatttataagaagtttttggtttcctagtgcacataaaagtgatgtttatactatattgtcgtctattaagtgarcaaaaacgtatgtctaaaaagcaacatatacaacttaattttaaattactttgttgctaaaagatgctaacagttatctgagccttcagtgaatcataatctttttactgacagagggttttgcttcagtgttgatagctgctgactgat

SEQ ID NO: 794756 - DNA, 612 bp, Homo sapiens
ccccttctacttaaccatgtctgcctcctctagccaggcctctcaaactcctttgtgagtgattcccctccatttctcagattgctttatatacccaagtgtttatatctgcaagggacggagaactatttccttatctgccaaagtgcatctccaccatattttcattttcttcaaggagttttgagatgtgaaccctagactaggatttggaaaacctggtttctagtatctactgaaggaaatcacttaacctctgtttcatttccaaacagggaataaagatccccattggaattatgtgaatgaaaatataaatgcayatatgcaaattcaaacaatttcaaaaccattagttgaatcatagtatgagttaatcttatggccaatcaaaatttacctgcaaatggccaaatccattatattcaaatttaaaaaaccttttagtgctactcaaaacatttaagagtattgtcctaaaaagaaaaaggctgtaataggtctttgaagtaagaactggttctgctgcctttctcccccattccacccccttcaaagccatcaaagcaatgttcttaaagtgtgaatgtcttacaagaagcctctaatgga

SEQ ID NO: 794757 - DNA, 616 bp, Homo sapiens
ctagctggtctgaagttagtgaccaaaaccattgagatgccctcctgagtgccttcaggggaattttgtgtagtccacataactttgcattctaaatcacaccgtcctaaacatatcctccacatttgatgaaaacccttctatccatatttacatgacacagtaagactcagacaactgaaactcaattttatttatctaggttagtaaaaagaatcagcaagattgatggcaygctttaaaaggcacactccagtggcagtgggtttatggataataggatgagtctgggctgttaggaggattttacgatgctccaggcaagaggtaacaagaacctgaattaaagcggtgagacttaaaagaagcacagatatgggaggcatgttgaagataggatcaaaagggtttggcaagtgattgaaagtatggagagagggaggcagaaatgctaaagtggctttccaaaggcatgaggctgagttcacaggaggatgacaataacattacacagggaaggagaacccagaaagaccagtgattctggggctcagggaaaggcgataacttatttagaaaataaaaagaatatgcttagcttctatttgctgaagta

SEQ ID NO: 794758 - DNA, 560 bp, Homo sapiens
ttttgtgcattgatattttgctgaacacattcagatttatacatatttaaacatgaaaagctttttattttggtagtatagattttacttatttctttcccatcaaaaagaaaatgatcctctattagaattcagattttttcaagaccattctgaaatcaaacatgattatggtgaggaaagcattctttcaattctttgtctaaaaaagcatgtctgtaccrtactattctgattgttcttttgaaaagacatattattataagcaatcaaaacaaaatttgtcttgtataacataaaaggaaatcaacaaatatctactgagtgtctacagtgtaccaggacctgagtagtcactgtgaggacaattgagaagtgcagtatgtgatccctgccctataattgctgacaacctaacaggggagatgaaacacagggatgggggagcccttggacactgacatctatagcgcacctgctgtggcctaggaattgtgctaggtacttccacataacttatctcatgcattgctgagctcaacatcatcccctaaagtctt

SEQ ID NO: 794759 - DNA, 560 bp, Homo sapiens
ttttgtgcattgatattttgctgaacacattcagatttatacatatttaaacatgaaaagctttttattttggtagtatagattttacttatttctttcccatcaaaaagaaaatgatcctctattagaattcagattttttcaagaccattctgaaatcaaacatgattatggtgaggaaagcattctttcaattctttgtctaaaaaagcatgtctgtaccgtactattctgattgttcttttgaaaagacatattattataagcaatcaaaacaaaatttgtcttgtataacataaaaggaaatcaacaaatatctactgagtgtctacagtgtaccaggacytgagtagtcactgtgaggacaattgagaagtgcagtatgtgatccctgccctataattgctgacaacctaacaggggagatgaaacacagggatgggggagcccttggacactgacatctatagcgcacctgctgtggcctaggaattgtgctaggtacttccacataacttatctcatgcattgctgagctcaacatcatcccctaaagtctt

SEQ ID NO: 794760 - DNA, 575 bp, Homo sapiens
aaaacctccggcaacgcagcccacgatgatcactttgcaaagcctggagaccttgggagtcgctcttcgccggggagctgcggcgggggagagaggtgtgtgggaggaaggtggaggctgggcggactggggcttgtggagcttagaaatctccaactttgcctaacacagttaacatgttcgtgcctccagagacgttggcaaggaggatgggggtgagaactgttgggttttcctytccgtaacaacagtgaaatagccatcctgcattcagcacctaaccggtacattaccctgcgctcctgacaggttggtgcaggcagttcaggacaaagaaggtatacacgggacaccagagcccagctttcagggtggcgggctgctcagcgtgtgggtggcctggtggccacaaggccccagataagcccaaacagagaccaagtaaatggccagagccagcagcaaggcgtcttgaatgcctggtgctcagagccagtgaccagcctgccccagaggcaggaaggggcggcacttattgaataaagcaccagggtgtcttgtgttctttcagtaac

SEQ ID NO: 794761 - DNA, 616 bp, Homo sapiens
aaaaatgcaaaaattaactgggcagggtggtgcatgcttgtaatcccaactacttgggtggctgaggcatgagaattgcttgaacccaggaggtggaagttgcagtgagccgagatcacaccactgcactccagcctgggtgatggagtgagactccatctcaaaatttaaaaaaaaaagaaaagaaaaagaaacaagtagaatatattttaaaaggcccaaattgagcttttaagagttaaaaaataaaatgtgtaagataaaaaatacactagattagataagattaacagcagattaaatgggattaacggaagattaaacactgcaaaaggaaagattagtgaatataaaggtatggcaattgaaactmtgcaaaatgtaacagtggaaaattgctggggaaaaaatgaacagaggataattgagttgtgggacaacatcaagtggcctaacacatgtgtaactgagtcctagggagcggggagacagaaatggaacagaaaaaaaaaattgaagacttcataaccaaatttgcttccaaattcgatgaaaatgataaatctacagatccaagagtcccagtgaaccctaagcagaaaaaaagaaacaggaa

SEQ ID NO: 794762 - DNA, 574 bp, Homo sapiens
cccaggctcaagggatcctcccacctcagccttctgagtagctgggactataggcgtgcgccatcacgcttagctaatttttgtattttttttttttttttagagacagggtttcgccatattgctcagactggtcttgaactcctgggctcaagcgatctgcctgccttggctttccaaagtgctgggattacagttgtgagccatcgtgcctggccrgagttgtccttttccgttggtgggtatattaatacagaggttacaatcattggctacaggtgacaacatatagactaacatgttctatgtacaagacaatcagtaaaacttcatgattcagaaacaaatcagtgtccttattagtgccagtggcttacgtattaattggtacgtcaacagttggaaggactcaagttaaaattcttcactcaggaacagagtgtaagcggtgaatcgttaagaacttccctggcagttaatttagaagcctgccaaatgtgacctgtaggttatcaaacatttatctgacaaataacttatatccagaatagacgaagaacacttacaactggat

SEQ ID NO: 794763 - DNA, 581 bp, Homo sapiens
gttgatatccaacaaccctgaaaaaccttacacatgtgcattaggctacatttacaggaagattatcagaacgttatttacaaaaggggaaactggaaaaaattaaatgttcatcaatatgagaatgggataaatacatttttgtatattccaagttgtgttcctgtactgaacttaaaatccagccattgcagctctacatatcattattacatatcattatcattgtttcccctgtatacagtgcatattcatgggtgtgtgtgtgtgtgtgtgtgtgtgtgtgtgtgcatgagggaagaaaatatacccaattaggttcaccagtttatgtttaccagtttgggagagaagagagaagaaacaattggagcasacacaataaacaaagaccaatttaaatttacatgtaaaaatattttatcttaacaatttcagaagtgaaggaaaaacctgtgaatttgctaatagatgctatatatttatttctagtcaaaagtttaagaaaactgctcatgattttatagaattttgtggcaagtcaggtaaataaatacttgctatatttatttataatgtta

SEQ ID NO: 794764 - DNA, 581 bp, Homo sapiens
gttgatatccaacaaccctgaaaaaccttacacatgtgcattaggctacatttacaggaagattatcagaacgttatttacaaaaggggaaactggaaaaaattaaatgttcatcaatatgagaatgggataaatacatttttgtatattccaagttgtgttcctgtactgaacttaaaatccagccattgcagctctacatatcattattacatatcattatcattgtttcccctgtatacagtgcatattcatgggtgtgtgtgtgtgtgtgtgtgtgtgtgtgtgtgcatgagggaagaaaatatacccaattaggttcaccagtttatgtttaccagtttgggagagaagagagaagaaacaattggagcagacacaataaacaaagaccaatttaaatttacatgtaaaaatattttatcttaacaatttcagaagtgaargaaaaacctgtgaatttgctaatagatgctatatatttatttctagtcaaaagtttaagaaaactgctcatgattttatagaattttgtggcaagtcaggtaaataaatacttgctatatttatttataatgtta

SEQ ID NO: 794765 - DNA, 628 bp, Homo sapiens
gatgagctttggtaactttaccagataccataaaccattaccataaaccacttttagactattctcatcaccccggtaaaatcctccatgtttactgacaattaatccctatttccaaccttaaccccagacaatcaataatctactttctacccctatggatttgccttttctgaatatttcacataaatggaatcatataatatgtggtcctttgtgtctggcttcttttacttaccataatgtgtttgaggttcattcatgtctttgtacatataagtagttggttccttttcattgctgaatatgtccattgtgggatattccattgcacagatatactatgtttatgtttttccacttaatagttgatgatcatttgggttttctcacatagtacttcaatatccatttattcctataggattttatacccacttctttaaggcatgctacatattatcttacagttgtaaayagagaaggaagtacatttgattcacctttttatgctggggcctacacctatatctggaaaattgtaggtatttaatgagcctcagttgcagttgtgtgctgcttacatgaccctgcctgttactgctgctacaaactcaggaatcgtggt

SEQ ID NO: 794766 - DNA, 506 bp, Homo sapiens
acaaatcccgagacctatcaacccaatgaatttgggggaagaatacattatcaaataattagcctttatatactgagattcatttacatactgaactcacattatatctgaaaaagtttttattttacaaaaacagatttttcttggttyttctgaaattttattttagtaaaaagtaagtttcacgtagactggcggtccccaagcctgatggatcatccaaaagcgctgggatagcttttgtaaaactacaaattttgtcatatttcctcagagatccttatttagtaggtttgggtggcccccagcggtttctcatggtgagccagattgggatttagctttataaaccaagagtacttgcccaagactggagtcaaagactggatttatatctggattatttacaaactaactggttgtcattattttcttctggaaaaagattgcttctgaggtatttttgcttgaattgtgttaactctctgatcaggtaaagcttcatg

SEQ ID NO: 794767 - DNA, 631 bp, Homo sapiens
tctctgtgcaaaacctactaagatgcacaatagatttgagcaaagtatagattaaatgcagactttgaactgtgtgtagaaacttaaattggatttctttatgatttaagacatgttaggtcattcataattcatcacaagcacatcttcagttaatgtagtaaaaccagcccctcccagccttttctataacgcrccagaaagatgtgtttcatgtttgctaagtggaggagcagcagtagtaaagaggaactatgtatgggtttgtgtgtgtacatttacacacacatgcctatgtggacagataagcaaataagcacagggccatgacctccaaaccctctccaaatcaagatgagctgaaatgaatcagaatcaagggaatgcataatcttatattaatctcagtaaatattcaaacctagagaggcaagcaatactttgccttcttaggacaaggaatggagtgtttttgggtggatcatagctctgagcctggaattaacgaggcttactccgcagacaggaaatccaaatgtcagaaagggaagtgggtttaccctggtacaccttgacatgaacagacatgtcaccacaaaggactctcaaaggaccctgtctacatttctta

SEQ ID NO: 794768 - DNA, 631 bp, Homo sapiens
tctctgtgcaaaacctactaagatgcacaatagatttgagcaaagtatagattaaatgcagactttgaactgtgtgtagaaacttaaattggatttctttatgatttaagacatgttaggtcattcataattcatcacaagcacatcttcagttaatgtagtaaaaccagcccctcccagccttttctataacgcaccagaaagatgtgtttcatgtttgctaagtggaggagcagcagyagtaaagaggaactatgtatgggtttgtgtgtgtacatttacacacacatgcctatgtggacagataagcaaataagcacagggccatgacctccaaaccctctccaaatcaagatgagctgaaatgaatcagaatcaagggaatgcataatcttatattaatctcagtaaatattcaaacctagagaggcaagcaatactttgccttcttaggacaaggaatggagtgtttttgggtggatcatagctctgagcctggaattaacgaggcttactccgcagacaggaaatccaaatgtcagaaagggaagtgggtttaccctggtacaccttgacatgaacagacatgtcaccacaaaggactctcaaaggaccctgtctacatttctta

SEQ ID NO: 794769 - DNA, 604 bp, Homo sapiens
agccttgcagttggaagctcagctctgcctcccaatagctctgggactcaacttaaacttccaaatctcaaaaaagaagacagtaaaagcacccacttctaagggttgtcaagaagaagaatgagaaacacattgttagtgactgaattttgtcctacttccaaaattaatatgttgaagctctggcccccggtgtgattgtatttggagataaagccaataagaaagtaataaaggctaaggaaggtcataaatgtgagaccttaatctgataggactggtggtcttccaagaaaagaaagagacagcagaaagcctgctcactctctctcgctctctctctctctctttctccctccagaaccayatagaggaaggacccggtaacacagcagaaaggtgtcagtctacatgccaataagagaggcctcaccagaaatataatttgctggcatcttgatctcatactgctagcctccagaactgtaaaaaaataactacctgttgtttaagctacctggtggtattttgttacagcagcctgagctgactgatatacacctcaagtgagagttttcatgggcttctagactggaagcttgct

SEQ ID NO: 794770 - DNA, 618 bp, Homo sapiens
acaaaataaaatttaaaatatattctttgtgttattaaagaacttaccatgagataaaacacaatgagaaattcaaaggccgatttttgcatgaagtctgtgatcagaggggcaaggcagttatgagcattaaatttatttattgtatcacatagacatttacctatatagcaaagattgtgaccagagccactgatggtgggaagtcttgttatagatctcatttcagatgaagtgagtcagaggagacaaagtctctcagatggagaccattatatttggtgctgayatctgcttgccttctggggagaactcagggagcttttactcatggtggaaggcaaagcaggagcaggcacttcatgtggcaagagagcaagctgcggggggaggagtcacaccctttgaaacaactagatctcaccagaacttactactacaaggatagcaacaagccatgagggatctgccccgatttcccaaacacctcctaccaggccccatgtccaacattgaggattacatttcaacatgagattcggtgggaacacagatccaaaccatattaccaatctatttatttttatgtaaatattatttttaagtattgttaacaaa

SEQ ID NO: 794771 - DNA, 618 bp, Homo sapiens
acaaaataaaatttaaaatatattctttgtgttattaaagaacttaccatgagataaaacacaatgagaaattcaaaggccgatttttgcatgaagtctgtgatcagaggggcaaggcagttatgagcattaaatttatttattgtatcacatagacatttacctatatagcaaagattgtgaccagagccactgatggtgggaagtcttgttatagatctcatttcagatgaagtgagtcagaggagacaaagtctctcagatggagaccattatatttggtgctgatatctgcttgycttctggggagaactcagggagcttttactcatggtggaaggcaaagcaggagcaggcacttcatgtggcaagagagcaagctgcggggggaggagtcacaccctttgaaacaactagatctcaccagaacttactactacaaggatagcaacaagccatgagggatctgccccgatttcccaaacacctcctaccaggccccatgtccaacattgaggattacatttcaacatgagattcggtgggaacacagatccaaaccatattaccaatctatttatttttatgtaaatattatttttaagtattgttaacaaa

SEQ ID NO: 794772 - DNA, 636 bp, Homo sapiens
tccctcgggtgttctgaattataattatgtaaacaaatgtcattatattttaggagatcaaagatatttagagaaatgcattattagtgacttaaaaatataaaaataatagctactgtgatttaggattaaaaaattaaaaaatgaaaactcttaagttttgaaagtattgagaataatggaaattcattctagagtttatrttataacaagaggaaaagaaaaagtggtatgaccttgaaacaagaaaattattggtgagacaggaaaaataatgaaatagaagagcagccagcatgtctcaggctcaatgtgaaatctagatgttgtaaattgtttcagtctgatgtataaactagcacaagagattcttgtaataaatatataagaaatcttaagtgtaaactgtcaaatagtctgttaggagtcaattaaaataggtttaataattactaaaataggtttaataattattaaaataggtttaataataggtttaataataattaattgaaaatattatttttccatataaataatttttattatggaagttcatatccaatgtggataattatgtgcttaactggatttcctttttaaaaaagaatacagaagtaatattatttctgcttg

SEQ ID NO: 794773 - DNA, 494 bp, Homo sapiens
ttggatgagctgaggagtccccaaagtgtacattatttttattttttcagctttatatcctagtggcaagttatggagaagagaaaaattcttaattagtgtgtgttacaataataagttgcagtttactaaatattttcatgttattttttcatgaaatcgtcacagaaatattgtatattagtgtcatcacgaatattattttgttacttaaactgaggaatcattgatgccgttgttattaataatgttctcttcgaagactagaagtgwttttttttttttcagtgttaagtgcttctatataagagggcatgtatgatttatttggaaaatttaggctcctaggagtcttgctgtaaagcagtagtatacgatattttctatttcagttgcttccccaagagtcttataaattccattatctgatcattcagccatatggacaaatcaatttcctcccagagatgtggaatttgagggaaaaataaaaa

SEQ ID NO: 794774 - DNA, 619 bp, Homo sapiens
accttgactatctgggacgcctaggattacagtatatatacaatatgttaagttcttatttaattcccaactgtgggaaaagacaagtgtcttaagtcatcatgcttataatccaaggctgttttcctgattttaagccctgagtttctttatagattcatagtacttgaagaaaggggtgtgcaggtatttttyagaaaagttcttacaataacattacaaatacatactgtgaatcatttcattattttctcaaataatcctatgatcattctctcagtatttgagtatatgatataaataaatacataataaatgtcattccaaagtgacaaaataagtatcatcacattgactgcataggtaaataaaataaagactattgggttagaaggtcttggaagtccctagatttccccctttatcaaggtaataaatgagaaagcaatactacattcctgagggaatggcaaatcttagtgtaattgtcaaaggcttgaaagattcagatatgattatatgtatcatattaccatttaattctccagtttgctgattacagaagacaaatgagacatggaaaatgatgatggattatttcaaacctaatttggtggtg

SEQ ID NO: 794775 - DNA, 592 bp, Homo sapiens
tattttctaatcaaactggattttggccaaacttatatttgtaattattaaaaaacaacattgttacataaaatttattagcctatataaaccaaataaacaacctcttaaataaacagcatgtgttaggccagcattaaaaactttcatctgaaaaaaaaatcacttaatgatcagtaaaagaatattaaatttattatttgttacagaaaataaagggccagatgtcagtaacagcaatgagctccctaaagtggaaaaacaaaattaattcatgccagtaatatagtggagrggcttacgctatataaggaataaatactcaagaaaacaaaggcatgggtagaacacatattcaatttaatttaatttttttcttctactagtttgagaagtgagaaacccttattggataaattgcctcgtgtttctgacaaagttgctctaaataaaccctttttgattgccattttaaaaattgaagtattaatatatttaaaggctgaaatgcaagatgatcttaaagttttcctgctcaaaaaatcataccacttcaatagctaaacaagaagcatctcatcagaaaccaacc

SEQ ID NO: 794776 - DNA, 592 bp, Homo sapiens
tattttctaatcaaactggattttggccaaacttatatttgtaattattaaaaaacaacattgttacataaaatttattagcctatataaaccaaataaacaacctcttaaataaacagcatgtgttaggccagcattaaaaactttcatctgaaaaaaaaatcacttaatgatcagtaaaagaatattaaatttattatttgttacagaaaataaagggccagatgtcagtaacagcaatgagctccctaaagtggaaaaacaaaattaattcatgccagtaatatagtggaggggcttacrctatataaggaataaatactcaagaaaacaaaggcatgggtagaacacatattcaatttaatttaatttttttcttctactagtttgagaagtgagaaacccttattggataaattgcctcgtgtttctgacaaagttgctctaaataaaccctttttgattgccattttaaaaattgaagtattaatatatttaaaggctgaaatgcaagatgatcttaaagttttcctgctcaaaaaatcataccacttcaatagctaaacaagaagcatctcatcagaaaccaacc

SEQ ID NO: 794777 - DNA, 659 bp, Homo sapiens
atgaatccaaaaattagtatttaaatatagtttttatttattgagagaggccaggacattagctgttcaggttgaagagataaacacattgagaaagtcagaccatcattgactttctgaattatttaagaggttgaactttatccattatggaagaggactttagaaggattttaatcaggataattaggtgagcagggctgtactttagaaaaaggcaaatatcctttgcaaagcttctgtctatatgaacaatttgattgaacagaatttctggtaagacatagttatttaaaataaaggagcraaaatagatacttatgattgtgaggggaggcctcataatcatggtggaaggcaaggaggagcaagtcacatcttacatggatggcagcaggcaaagagacagcttgttcagggaaactccccttttaaaaaccatcagatctcatgagacttattcacgatcacaagaacagcacaggaaagtcccaaccccatgactcaattatttcccaccaggtcccttccacaacacatgtgaattatgggagctacatgatgagatttgggtggggacacagagacaaaccatatcaaacaccatggttttggggacacgtttaactgaacaatacaggtcttctcatcactgcagt

SEQ ID NO: 794778 - DNA, 659 bp, Homo sapiens
atgaatccaaaaattagtatttaaatatagtttttatttattgagagaggccaggacattagctgttcaggttgaagagataaacacattgagaaagtcagaccatcattgactttctgaattatttaagaggttgaactttatccattatggaagaggactttagaaggattttaatcaggataattaggtgagcagggctgtactttagaaaaaggcaaatatcctttgcaaagcttctgtctatatgaacaatttgattgaacagaatttctggtaagacatagttatttaaaataaaggagcgaaaatagatacttatgattgtgaggggaggcctcataatcatggtggaaggcaaggaggagcaagtcacatcttacatggatggcagcaggcaaagagacagcttgttcagggaaactccccttttaaaaaccatcagatctcatgagacttattcacgatcacaagaacagcacaggaaagtcccaaccccatgactcaattatytcccaccaggtcccttccacaacacatgtgaattatgggagctacatgatgagatttgggtggggacacagagacaaaccatatcaaacaccatggttttggggacacgtttaactgaacaatacaggtcttctcatcactgcagt

SEQ ID NO: 794779 - DNA, 659 bp, Homo sapiens
atgaatccaaaaattagtatttaaatatagtttttatttattgagagaggccaggacattagctgttcaggttgaagagataaacacattgagaaagtcagaccatcattgactttctgaattatttaagaggttgaactttatccattatggaagaggactttagaaggattttaatcaggataattaggtgagcagggctgtactttagaaaaaggcaaatatcctttgcaaagcttctgtctatatgaacaatttgattgaacagaatttctggtaagacatagttatttaaaataaaggagcgaaaatagatacttatgattgtgaggggaggcctcataatcatggtggaaggcaaggaggagcaagtcacatcttacatggatggcagcaggcaaagagacagcttgttcagggaaactccccttttaaaaaccatcagatctcatgagacttattcacgatcacaagaacagcacaggaaagtcccaaccccatgactcaattatttcccacyaggtcccttccacaacacatgtgaattatgggagctacatgatgagatttgggtggggacacagagacaaaccatatcaaacaccatggttttggggacacgtttaactgaacaatacaggtcttctcatcactgcagt

SEQ ID NO: 794780 - DNA, 581 bp, Homo sapiens
ccagctgtgcttggcatgtaagagaggaatatagcaagaggctaaaaataattgtgagtaaataatcgacttaataaaattgtcctcgtgtgtactgtggttatttgaagctgtagatcagtggtattcaaccacagtggcatgaaaaatcacttggggagataaaaaatgctgtttcctggttatcacattgagagaatctgatttaatatgtttggagttcagaatggtcataggaattttaaaagctctccagggaattctgatgtgcagccaaggttgagcctagattcaraacttctcctgtatttggctatattaatgctgattgcagcatctccatgctgtcttgttttctaaatggatagattccaaggtaaacaaactgtgaaacagtaatatgtatttgagtttggacaatggggcacaccgtattgttatagcaaatgcagtcattgcaacaccactgtagcagtggtggacatgtaggtacctatgtctgctccaaaccaaaaaacacctctagaaatttagagatattcctttatatatatactgtgacccagtgttataaacagaat

SEQ ID NO: 794781 - DNA, 628 bp, Homo sapiens
tgagggctacaccctcaagaagaataagagtttgatatcgcaagttcgagtttgacctcttgcttgctctcaccctctcttgtccttctgcattctatcacctgccatgggatgatgcagcaagcaggcccttgcaagatatgagcccactgaccttagatgtctcaccttccaaaactataaaacacaaatctccattctttataaatttctcagtctggtattctcttataggcagcataaaatggaccaaagcaatgagagcacataggttgagattaaaaatacatatatattatttattataacttcagtaaaataacatttagaagtgtattttctgattgayatttaccatctatgttttacatgattgatgggaatccagggaccagaatacatttatcattaaaccctatttaaaaatctgtctttattcttcagtaattcagaaggctttcgcaaacttgcgggttggcaaggttttctagaatgattcctcagtcaaagtagaggtgagaaggactgctgatgaaagtgcagacttagggtaccaatttttctctgtcctttcatggagccagaatagtactgcagacacccaacaaacatgttttgatggctcttt

SEQ ID NO: 794782 - DNA, 605 bp, Homo sapiens
aaaactagtctggaaaactgtcccaatcaaaaagggcctaaggagacatgacagctaaatggaacatgatatcctagacaggataacttaacagaaaaaaggacatagtaaaaactggggaaatatgaataaattatacattttgagttaattacgtatcagaattggtcctttagttgtgacaaatatgccatagtaatgtaagattttaacaacaggcaaaaactgtgtacctatgggaactctttgtattatcttctcaactattctgtcaatctaaaaaattcraatataaaacatttagcccctctcccctcaaaaagaagttgaagtattttttttgtgaaaatatttttaaatgaagtcaaatattctttcattttccatatgactgttagtagctcagccatgattctctttgctgtgtatggaagttatagactttgaaggaaaatataatgtaaattagcgtatttgaaaattgcatatttgtcaacaggggtctgaaaaatatgtattcataaaaataaatacatttattttagatcatttacattcagctatttctctggcttttgtttttacattacctatgtatattgatt

SEQ ID NO: 794783 - DNA, 605 bp, Homo sapiens
aaaactagtctggaaaactgtcccaatcaaaaagggcctaaggagacatgacagctaaatggaacatgatatcctagacaggataacttaacagaaaaaaggacatagtaaaaactggggaaatatgaataaattatacattttgagttaattacgtatcagaattggtcctttagttgtgacaaatatgccatagtaatgtaagattttaacaacaggcaaaaactgtgtacctatgggaactctttgtattatcttctcaactattctgtcaatctaaaaaattcgaatataaaacatttagcccctctcccctcaaaaagaagttgaagtattttttttgtgaaaatatttttaaatgaartcaaatattctttcattttccatatgactgttagtagctcagccatgattctctttgctgtgtatggaagttatagactttgaaggaaaatataatgtaaattagcgtatttgaaaattgcatatttgtcaacaggggtctgaaaaatatgtattcataaaaataaatacatttattttagatcatttacattcagctatttctctggcttttgtttttacattacctatgtatattgatt

SEQ ID NO: 794784 - DNA, 605 bp, Homo sapiens
aaaactagtctggaaaactgtcccaatcaaaaagggcctaaggagacatgacagctaaatggaacatgatatcctagacaggataacttaacagaaaaaaggacatagtaaaaactggggaaatatgaataaattatacattttgagttaattacgtatcagaattggtcctttagttgtgacaaatatgccatagtaatgtaagattttaacaacaggcaaaaactgtgtacctatgggaactctttgtattatcttctcaactattctgtcaatctaaaaaattcgaatataaaacatttagcccctctcccctcaaaaagaagttgaagtattttttttgtgaaaatatttttaaatgaagtcaaatattctttcattttccatatgmctgttagtagctcagccatgattctctttgctgtgtatggaagttatagactttgaaggaaaatataatgtaaattagcgtatttgaaaattgcatatttgtcaacaggggtctgaaaaatatgtattcataaaaataaatacatttattttagatcatttacattcagctatttctctggcttttgtttttacattacctatgtatattgatt

SEQ ID NO: 794785 - DNA, 590 bp, Homo sapiens
aaaagagtaaactaaaatggtttattatctcatctagagaattccagttaactgagtggacttgagggatgatgtcctcttttctgtaagttgtataggggaagtacaatttacttaaaatactgatatccctcagtaaaaattttttaaggttttattagctactgttttggcttctaaatcttagtaagactgtcatatattaacgtgcaatgaaagcaagaagtgtattctgcaaagcataggagacttatatagasttgggcatgcttgtttctatttttacctttgtaaaggtaaaaaatagactccgtgactcctgcttttttctgttgtaacaaaattcagctttctctacatagtggctccaaacaaaatcctagaaatgactaaatactacagaaaatatgtcagattttgtttatctaatgcttataaatatataatatagttacaactgaatgtagtcacattgatgttataccatttgtcattattataaaataagtattcataaactgtgtgcctactacatccagaggttgtcctaggcactgctaagatgttgtacaaaatagcctcagctactc

SEQ ID NO: 794786 - DNA, 590 bp, Homo sapiens
aaaagagtaaactaaaatggtttattatctcatctagagaattccagttaactgagtggacttgagggatgatgtcctcttttctgtaagttgtataggggaagtacaatttacttaaaatactgatatccctcagtaaaaattttttaaggttttattagctactgttttggcttctaaatcttagtaagactgtcatatattaacgtgcaatgaaagcaagaagtgtattctgcaaagcataggagacttatatagagttgggcatgcttgtttctatttttacctttgtaaaggtaaaaaatagactccgtgactcctgcttttttctgttgtaacaaaattcagctttctctacatagtggctccaaacaaaatcctagaaatgactaaatactacagaaaatatgtcakattttgtttatctaatgcttataaatatataatatagttacaactgaatgtagtcacattgatgttataccatttgtcattattataaaataagtattcataaactgtgtgcctactacatccagaggttgtcctaggcactgctaagatgttgtacaaaatagcctcagctactc

SEQ ID NO: 794787 - DNA, 610 bp, Homo sapiens
aatgtgatcaaacattaacattaatatcattcaatagtgactttggacttttggctgtttgcttccgagaaatgtgagttgtttgactcagtttagtcagggtttggagacaaaaaatatcttatagtgtaaaatagatgctttcttatctggagtaaaatctagttctacttcactggtggtggaataaaacatgtaaatatcatctggaaggccaagcctattaagatcaggagtggaggggtaccacgttatcaccaatataattaggagagagagctatataatgaataaaatcattttataagtctattttcattcaacattagtaagaataaatacttatacaataatataaacatggaaaatactaaagaaatgacatattttaccaatttaacwaagaccacaacacacaaaaggagacaaacaataaatcaggtagttacaatttagtttaatgacagggcaaaattatcgagacatctataggaatagcaagtaattcaaacacaactaaaggagggcatgtcaaagaaaaatgctgacaggtgctcttcgagctgaatgttaaaggacaataaaaattaggtgttcaaattagtggtag

SEQ ID NO: 794788 - DNA, 589 bp, Homo sapiens
taagtctgcagatagtagttttcacagaatcattctgtgcagggaaagcaaatccataccaacaataagtgtctattttagttaagacgaaaacactgccccttccatgatggtagacatccaatgtaatcaatgtgctaccaggtagctggctgatcactcctggggaagggtatcattgtatcatttcaggacttgatgttggtctatgctgctggaagawtgggtactcagcagtggctatggtcacgttggcctcggtgaggggaactccatgttgctgagcttatggattgccaccatgcctgccaccattttattggctgcagaatatagcagcacaaaatatcttattttaattatattctatatataagaaaaagtatcaaattttatgtctttattttatcaccacttgcaacattatgaagtgtaccaatgcccaattttattttttatgatattttcaaagtactatttggaaatgttcctctcatttgtataaatctcactctggtttatgaggagagagttggtgtcttaattcaacatggtatattcaaagttattttaataacaagaagtaaaa

SEQ ID NO: 794789 - DNA, 623 bp, Homo sapiens
gatgtccatcagtggggcacttccacaataaaccacagtttatccaaacagttgaatactctgcagctttagaaaagaatgaggatgctgtctttgtgcccatacagactgatgtacaaatacacttggaggctgggcatggtggctcacgcctttaatcccagcacttygagaggccaaggcaggaggattgctttgctcctgaagccaggagtttgagaccagcctggacaacatagcgacaccctgtatttacaaaaaatataaatttttaatcagctgggtgtggcgacactcacctgaagcaccagctatactcaggaggctgaggtgggaggattgcttcggcctgggaggtcaaggctgcagtgagccgtgattgcaccactgcactccaacctgagtgatggagcgagaccctgtctcaaaaaaaaaaaaaagatatggaatgagaaagcagaggtgagacagtgcatagtatgctccctttggtatgaaaaagaagagtggataaatgcgtattcatatttgccttgtacatgcacaaagacactctggagagagaaatgagaaactagtacagtgactcaggacagaggatccggaatggagtagaagaatgt

SEQ ID NO: 794790 - DNA, 577 bp, Homo sapiens
gtgatacataaactattcttatcgtaagtagaaagaccaaataatgaactagttaaaaacaagaactacaacaatgtttcaaggcatagacagtacaataagttataaatagaaacaacaaaaattaaaaagtggggggatgcaattaatggatagagtttttattagttttctttttgyttgtttgtttgcttatgctaacagtgttaggttgttatcagctgaaaataatgggttatcagatagtatttgcaagcctcatggtaacctcaaacaaaaaaggatacaacaaatacacaaaaaataaaaagcaagaaactaaatcatatctccagagaaaattactttcactaaagaaagacaagaaggaaagaaagaaggacagaagaccacaaaacaaccagaaaacaaataacaaaatggcaggagtaagtcttacttatcagtaataacagggaatataaatggactaaactctccaatcagaagacacagaatagctaaataaataaaaaaatgagactcattgatgtgttgcctacaagaaacacactttacctataaaggcacacataga

SEQ ID NO: 794791 - DNA, 597 bp, Homo sapiens
ctcaatcagcactgtctgtaccatggtcaagagatgagtacatgactcaggtcagaccttatttcccaccccataagccacaatgattagacaagaaataggcacagaaccctaactagatagggcagaagccttccataggattttatttgctggccctgaaatgcaggtagccttctatggctgttaaacacaatccagtggcacatggggtgatatgaggatggagccatccatggcaaaactccaccctttcctgtgacatggattatgtgcatctgccatgaaaaggaagcatacacaagaaatgagcmaagagttcctggagaactgaagcaagtatcacctccagatcagttgtacttttatttgcttacactattctgaggtgggtctctgtctcttggatccaaaagagttcaaattaataatcatttgacaaaaaattacctccacattcctaatgaagttgtctttgaagataatgtcttgtgatcccctggttgaagttaattactgcttgtgagcccccattacaacgtgtcctttccccattgcttgttgtatcagctttgctgaagatctattggctgtagg

SEQ ID NO: 794792 - DNA, 534 bp, Homo sapiens
atccctctaccccttgctcatatgcacacacacacacacagaaagagagaaaatggaggtatagctttcaagttgtcttgtttgtgtggctatgaactccaaagttttggcaaatacatctaaattacatatataatagctttttttttttttcaccagagagatccttcctgaagaaggctaaagtgttccttgtagcccaggattgatcactccttgtaattgaaacctctcaaaatagtgtaacgtggctctccacttgcatgattcctttaaggagatgttgaaagccatgtaggaaatggaccgtgcttagtcagttccagtactgtgtttggatgtaaccaatggttggtaatttaataaatgaaacrgatggatggatggatggattaattagtggatgaataaaagaagggatgagtgagtggatggtgggtgggtggatggatgaattagtggatggatagatgaatacatagatggatgcgtggatgagtggatggtaggtggatggatagatggatggatgga

SEQ ID NO: 794793 - DNA, 623 bp, Homo sapiens
tatatggactgatttttcaaaaattaacaagctatatcaaacatgtgttaaatttataaaaccgtgctaagcaccatgagaaaaaaagttgatcccttattctaaaggcacttagttggaatggcaaagcagaaatgcaagcataaatgagcgactgtgaaaatctgaagcaggatattagkaggggtgctcttttgttacttggggtgatgggtcaacagcagaatgagtagtatgtctgtgagctcctcaggaccttcacttctttctttatctctgcagcccccatgcttatagtctatgatacacagtgggatatcagtaagtgtgtctttggtggatggatgagtaggtggatagatgaatgaatgaatgaatgaatgaatgaaagttcaatttgttttttttcatgaccagcagtagactcacagattgtgggtcagcaacaggaacaaggcagagtagagatattataattgtctctaccccaatatgtctggggtcacagctggtacagttgactgagggctggctcaatggctggacctacctggaggctcattcattcacatgtctggtgtttgatattgtctgtaggctgtcaacaatgggaacacccacgt

SEQ ID NO: 794794 - DNA, 600 bp, Homo sapiens
cattggaaagaacccaaccccaggtttagggttaggacaatgacacaatcctgcacatttgtatttaaggctggccatgtgatctaagccacactgatgagaattggccctgggagttttagaagttttgctggaaagaggttgcctttatctgccactatctttgccatgatgatgtaaagcctaagacagaaaccagcacgctgcaaattggagccaagcagggagaattagatagattcttataagttttatttgtttgactagcctgaagctagcatagctctggacttcttagtcacctgagacaatcattaaacttctgccacttgcaaccaaaagattccaggttaatgtatgcctgtaagagagaaggaaatttagtagtcaatgatatagatgaggagaaagtcaagagtgttagcggaagtgacsaacggcaggagtggctgagaggcttggcttttcaacagttgtttgggaagtcattctgagtttaaaaggtgtcttcctaaaagccagacattaaatatttctaagaaagccagagatcggcatcagaatcatattaaaacctcaatatattgaatggattttcaa

SEQ ID NO: 794795 - DNA, 631 bp, Homo sapiens
atgctgatttttgaatttatttatttatttttttaagaaagacatttttacagagagaaacatatactgctgagattgtgcccacaaagccagccggtggaacccagtctaccaggcactctgaacacaagttcacctggcacccattctctactcacctatggctgcctttattctgtgacaactttccttagacagaaaggatctgttggacaattttctctcaattctattctatattgcatcaagttgtgctttgcctcccacrtctgcctctctgtaacccatccttcaaaagtccactgaacacctccttgaggtcttcttgttcttcagtctaatgccctgtccttcaaggcttattgcttccaaggaaatgtcccctcctcagactcaagggctgcattttactgtattttgtgacatcatcttcatctttctcatgttttctttctccttaattacctgggggacagagtctgcccctcagggccaaccagagtgtctggctgacatagaggcttaatacccaataactgactacttaattgataacatcctcgcttcttagatttttaaaattataacattgttttataaaagacacatgttctcaaaatacgaaaatgtg

SEQ ID NO: 794796 - DNA, 622 bp, Homo sapiens
atgtttcaaatgaaaacctgtgtgtttcatttctaagaaattttcttgcattatgtcttgaaattttttctctttttttttccccctctgttctcttttcctggaactgatatgggtcaaacatttggtttgttagatttatccattgatttttattaccccattttctatattcttgacttttttgttcattttccaaggagattttcctaacttcatctcttaattctcctattataatttttttttctgttttacttgttasaaaccaagagttatttattgaactctgaatattcttttattgcactctaacatttcttgaatgtaatattctttcttatttccctaaggatagggaaataattataattatttgcagttttcttctggccagtacagtctctatctcccttaattttgtttgtttgtttgttttagcgactattttatgctcggagctttattaaatgtctgaagatacttggtgtcaattcttattagggagtgaggaagtaaatatctaaatagaattttgttcacgggtggggcttatctactgctgagcctcatggttgcttaaatggaagaccctgaagtatcagtgcctgtagtcttctct

SEQ ID NO: 794797 - DNA, 649 bp, Homo sapiens
attaagggttttgcaaaaatcagtttaggaagaaaaagggatggaacagagccttctgtaatattttaaatcaaaggggttggctataaaatatggagaccaaaataactgctgagaacacaatgctttcacataaaataaaaacttgggaagaagactccagataagaaagactaacagttggcacttacatttcagtgttatttaccagcaggaaaagacgattttgactgattgagttgaatgtgctgagttgatggtgagttcaatatggctgyaaagctcggtactgtcctggtcattgtgccttccgggagagggagaacgactgtgagttcctgagcccaaaggtgatcttttcttgctttgtagttctgaggagactgcacctggacaagttgtagaaatttgggctgtgcggtatgagatgcatgtatgcagactaaaaggcattcagccaacggatctaaaaataattaaaagaagagtgagattacctttcatggatggacacaaagaccaaatatatgtatttaccctaaatgacaacagaaggaaaccagaaagataattgaaggattgtgaagatcaaagggctagaggatttgctctttctgacacaagggtctagaattgcaaaaaaaaaaaa

SEQ ID NO: 794798 - DNA, 530 bp, Homo sapiens
gactccagataagaaagactaacagttggcacttacatttcagtgttatttaccagcaggaaaagacgattttgactgattgagttgaatgtgctgagttgatggtgagttcaatatggctgtaaagctcggtactgtcctggtcattgtgccttccgggagagggagaacgactgtgagttcytgagcccaaaggtgatcttttcttgctttgtagttctgaggagactgcacctggacaagttgtagaaatttgggctgtgcggtatgagatgcatgtatgcagactaaaaggcattcagccaacggatctaaaaataattaaaagaagagtgagattacctttcatggatggacacaaagaccaaatatatgtatttaccctaaatgacaacagaaggaaaccagaaagataattgaaggattgtgaagatcaaagggctagaggatttgctctttctgacacaagggtctagaattgcaaaaaaaaaaaaaaaaaaacagaacaaatgtatgatgctaacatgtag

SEQ ID NO: 794799 - DNA, 576 bp, Homo sapiens
aaacttgaggtggacaaaaaaaaaagcacaactctaagactccgatcccctggcaaatcagtgggaatgcaggtccccgaggtttcggggaaggatcgcgccgaggcttcaatccagatacacaccctgacaatgggatctcaataaggaactaccyaggaagccgtcgccgcagcaagtgcccaggtgatccttatcgtgggcaagtttggaaccgcagtaccccgagaatcccgcgctgggcgctcaggcgagagggctccgggctcccgtccacgcccacccggggcgttctaggagggctgcgcgctgggagcgggaagggcccctggaaggcggctgcagcgagttccggggctgagaggtcgctgccacccaggaagccccgactgtgccccacgcagggcctcggcagggcggcaggctagggcgggttcggaggtgacagcgcccggcttcctgcgccaaaagtgaggcaactccggaaacttcctggagccggcgcgcgtttcctgcaagcaccgcccccgccgcccgcacgctctagcagcccgcgggcgcactgacctgagatgg

SEQ ID NO: 794800 - DNA, 584 bp, Homo sapiens
tctgtaaaaaaggaggaccccagacataagtataaatgcatgccaaccatgtaaagtgtctgtgtgagcactgaaaaaagtttaaaagataaacaatttaaagttcctttttttttcttttccagcaagtggcttgagctacttttaaattgattgccagtcattcacttaatgagtaatttatgtccaagttaccaaaagttacctacagtttaaatcgctatcaaaataaaaacgaagtccaaaaggaaaccattttaccctttcaaataaaatagaagttcaacattcttcttaatatcacgctagttgtagaaacagcatctctccccgataaaacatggcccagctgtgtgattacttactggaattgagcaggatcatggccttgacacagagatattctttgtgttgsagttttaactctcgaaaccttgaagtagttgccaggagcatgtcaaagatttccagaattccttctacgcatttcccctcatccctacaaaagttcgtttggaaatttaaggaacatagcttcaggaaaccatcaaaaaaacaataaggaatgttttatttttaatctc

SEQ ID NO: 794801 - DNA, 628 bp, Homo sapiens
ggatccacctaggaatctctagagagtttctaatacagtatatctaggggtggaccaaggaatctgcactaataacaatccccttcactcccccaaacaaccctatgatttttttataaatggccctcaggatatactttgagaaacactcccctggttaacgtagagccttgaaactcagtgtggttcctgagtcagcagcatcaatatcaacatcccctgagagttttgttaggcctgtagaatgttagcacccactccaggcctgtcaatcagaatctgcattcatagggcaccttcaactttaaaaagtgctggtctagaggaggcatcttcttccctttttgcatccttgaacatatcagttttccccacagcattctcctcgtaaatagcccaggattgcttaggtcaacggttctcaaggtggtccccagatctactgggtcagaaactcttgkgggaggacccagcaatgtgtgttctagcaagccctccagtccaggtgattctgatgaatgctcaagtgtgagaaccacgggcacaataaatactattggtccgcatttaaaaatgaagttcaccaggatactcagtatattctggtgtgaataaccaataggccaat

SEQ ID NO: 794802 - DNA, 486 bp, Homo sapiens
cactttgccacagcaatgtgaaacttgatatactgtggtatcaagggcattcagtcacaggaatatgttcttgcaaacaggtcttaagggcagtgggctagtatggtttccctaaacagacactgtgtgtatgtgcacatgcaaatgcttttgtgtgtgtgtatatacatatgcagataaatgcacacagcctattcaaaatcattttggtaataactttgattctgggagttgggtgctaggtaaagctaagtgtaatttttgctccaatgccacatccttttattcaaaycatagttttcttggaagtttccaaaaccgctaatgcaaatgacatattcatctgtagaaatttcccttttaggaggatggcaatatgccaacaaaggtgaaatataaagcatatttttaaaaagagctttaactagtcctgcattttatagatctgctttgtgacccttattttatcatgtccatttgctgctt

SEQ ID NO: 794803 - DNA, 617 bp, Homo sapiens
ttaaaattggtcctttcttggttgatttggggtgtggggggagggaatgaaaaatgtgttgctcattcattatatgtacatggcaacatctgttccctgctaatgtttcagctgcggttctgccattagagtatgttaagtaaccatagaaatgaactttctggttgaaattactaaggtaaaggtaaaaataggtaggcacgttacttgggctaatgttcagctgggatgcaccagctgctgaaacactacacgttttcatgttgttcggtaaatagttatcatcctgacacctccaagtgcaatctgccccggctgccccagctcctcccttgggaccctctagattttactataatccagccactaaagggataatgcctggtacagcaagggctccaggaccctgctggagcattargttcaatattttgaatggcacccctgtaaattgccacactttctggaaaggagacttccaataaaagactggaatgtttctacccctcaatattgagcagtatagaattatccattcaagttcctaacaggaaagggatgcccactgaaattaagataatttgatcagagtctatttataagggaactatttacaa

SEQ ID NO: 794804 - DNA, 644 bp, Homo sapiens
tttgccattgtaggaggggctagatgcaacaaattatccttcaccttacatggtgaaggataccccacactattggacccatagaaatttcagtgaggtggaaggtccctgaatttttgtcagatttatttccaccttctgacactcaaatgtcttaccaataagtctagagtagttgctacttcttgctcartagctccagtgagcataatatcatcaatgtaatgaactagtgtgatatgttttggaagggaaagataatcacattacccatgtactaaattatgacatagacctggagaattgatatatccctgaggtaggacagtgaaggtatattgtttaccattccagctgaaagcaaactgcttctagttgtccttattgacgggaatagaggaaaaggcacctgccagctcaatagctgcataccaggtaccagtggatgtattaatttgctcaaacaatgaaactacatctggaacagcagctgcaattagaatcaccgtctggttaagattacggtaattgagtgtcattatccaagatccatctgatgtctgtacagtcaaataggaaagttgagtggggatgtggtagaaatcattactctgcatctttaaagtccttgatggttgtaagat

SEQ ID NO: 794805 - DNA, 644 bp, Homo sapiens
tttgccattgtaggaggggctagatgcaacaaattatccttcaccttacatggtgaaggataccccacactattggacccatagaaatttcagtgaggtggaaggtccctgaatttttgtcagatttatttccaccttctgacactcaaatgtcttaccaataagtctagagtagttgctacttcttgctcagtagctccagtgagcataatatcatcaatgtaatgaactagtgtgatatgttttggaagggaaagataatcacattacccatgtactaaattatgacatagacctggagaattgatatatccctgaggtaggacagtgaaggtatattgtttaccattccagctgaaagcaaactgcttctagttgtccttattgacgggaatagaggaaaaggcayctgccagctcaatagctgcataccaggtaccagtggatgtattaatttgctcaaacaatgaaactacatctggaacagcagctgcaattagaatcaccgtctggttaagattacggtaattgagtgtcattatccaagatccatctgatgtctgtacagtcaaataggaaagttgagtggggatgtggtagaaatcattactctgcatctttaaagtccttgatggttgtaagat

SEQ ID NO: 794806 - DNA, 614 bp, Homo sapiens
aagttccataggccatcttcactctttttcattctgttttctcctgagtcatttcaaaaaaatctatctttaagtttacagattctttctcctctgcttgatctagtttgctgctgaagctctctattattttttatctcactgattaaattcttcagctctaagatttctgtttggttcttttgtatgatattggtattgtttggatgtgtatccttgcccaaatctcttaatacccaatattggargtagttcctggttggaggtgtttggatcatgaagacagatttctcataaatggtttagcaccatcccccttggtactgtcttcatgatagtgagtgagttctcctgagatttggtcatttaacagtgtgtagcacctctgccctcattcccttgcctctgctttcaccatatgatgtgtctgttcccccttctgcaatgattgtaagcttcctgaggtctccccagaagcagatgctgctgtgtttcctgtacagcctgcagaaccatgaaccagttaagcctcttttatttataagttacccagtcttggatatttctttatagtaatgcaagaacagatgaatacagatatctatctcttagtt

SEQ ID NO: 794807 - DNA, 629 bp, Homo sapiens
gtgtgtttttgttgtaggaggtatcaatctttcacttacatgtttagtactctcttaaggacagcttgtaagactggtctgctgataatgaattcctattgtgtttgcttgtctgagaaggatcgtatttctccttctcttatgaagcttaatttggtggaatatgaaattcttggttgaaattgcttttctttgaagatgctgaaaacaggtccccaatctcttctctgtgtaaggtttctgctgagagatctgctgctagcctgatggggttctctaggtaagtaatctgacctttttctcaggctgcctttaaggtttttttttttgtgtgttcacctggtgaatctcatgacctatgccttagtgatggttgttttgtatattatctcayaggggttctctgcatttcttgaatttgcatatcaacctctctagcaagattggtaaatttttcatggactttatcttcaaaaatgttttccaaattgcctactctctctcttcttcctctcaagaatgtcagtgagtcatagatttgtgcactttacataatctcatatttctcagaggttttgttcattttttaaaattcttttttctttatttttgtctgactgagttgaatc

SEQ ID NO: 794808 - DNA, 603 bp, Homo sapiens
tttgtctagtcttcctcacagtaggaaatcttagctgaggggatctcttcatattgggtctggaagactcacaggcagccacagcagcactgcaatccagggttaggtgctccgagtgactgtggagctgggttcttggtctcaaggtcttgtgaaaccactgtatcacctgggacttgccrtgaaggttcactctccaaggcacgagccgatgcatttctttcactaagccaaggtctgttgctctgagccacattccagcagcttgggcccagaagcctgagatgtagctgtagttctgaaatggggagccagggcatagcactgacacagctctggggaagaaggggtatactctggaggcttgggccctgaagagcagggaacagtttcaatttggaacctggaaccaacaaggcacaggggcaactcgggatctgagaaatgaggtactatgtagtggtgattctgggccctgggatggtgggacatagcagtagcccaggctctgtgagaccaggtacagcagcagcagggacccaggaattgcaagatgttgctgtatcttgggccccagagggaggggagcactacagcaatgac

SEQ ID NO: 794809 - DNA, 603 bp, Homo sapiens
tttgtctagtcttcctcacagtaggaaatcttagctgaggggatctcttcatattgggtctggaagactcacaggcagccacagcagcactgcaatccagggttaggtgctccgagtgactgtggagctgggttcttggtctcaaggtcttgtgaaaccactgtatcacctgggacttgccgtgaaggttcactctccaaggcacgagccgatgcatttctttcactaagccaaggtctgttgctctgagccacattccagcagcttgggcccagaagcctgagatgtagctgtagttctgamatggggagccagggcatagcactgacacagctctggggaagaaggggtatactctggaggcttgggccctgaagagcagggaacagtttcaatttggaacctggaaccaacaaggcacaggggcaactcgggatctgagaaatgaggtactatgtagtggtgattctgggccctgggatggtgggacatagcagtagcccaggctctgtgagaccaggtacagcagcagcagggacccaggaattgcaagatgttgctgtatcttgggccccagagggaggggagcactacagcaatgac

SEQ ID NO: 794810 - DNA, 505 bp, Homo sapiens
aagaaaggatacctcagagtagggatccacaggctataggtggatttaactattttatgaattgcaattggttaaggaagaaaagctttgcttaaaaatttggggtcagtaagaagatgcgttaggtctggctyctgggtgtagcctcctccaggcccctcaagaagaacccagttttccatcatctgaagtctctgtgccagcaggccacatctttcatgtggtgggggtccaggtttctgaaaaacaactcaaggacatgttaagatgctatttttagtttctatagggaaccaaatattttgcgactaactttcttggcgattgttttaagctactactaccttcttatttctcaggttgctcacttacttctcaaggataaggtgccttgaatttcccatgaaggaactcaagattttcctttatttccaagcttggtggggcgtgcccagcaggcccctaagaggagtctctgttccatctcactgcctcatagacatct

SEQ ID NO: 794811 - DNA, 635 bp, Homo sapiens
aaaacatgcagaaaacatatagaaaaagagcaaaagtaagttcttccttaactgcctcaaaattaaatggattaaaatctccaatcaaaaggcagagtttgaaagaatagatattttaaaaatgatccaactatatgctgtctccaaatgacccactttagatccaaacagacacaaataaatttaaagtgaaacgatagaaaaatatatgccatgcaaacagtaaccaaaagacagctggagcagctataggtatcaggcaaaatagacatcagtcaaaaactgtcaaaaaagacacagaagggcatwacatattgattaaagggttaactcatcaaaaagatttaacatttataaacagatatgtaccaaacaacagagtcccaaaatatatgaagctaacaccgactaaagtaaagggagaaatagataattctataataacagctggaaacttgaatatacaactttcaataatggataaaacatctggacaaaagatcagcaagaaaatagagagtattaacaattgtataaacaactagaaacagacatatatagaatatcatatgcaacaacagcaaaatacacattcttctcaagtgcacatagaaaattctctaggatggaccatg

SEQ ID NO: 794812 - DNA, 600 bp, Homo sapiens
aaacatatagaaaaagagcaaaagtaagttcttccttaactgcctcaaaattaaatggattaaaatctccaatcaaaaggcagagtttgaaagaatagatattttaaaaatgatccaactatatgctgtctccaaatgacccactttagatccaaacagacacaaataaatttaaagtgaaacgatagaaaaatatatgccatgcaaacagtaaccaaaagacagctggagcagctataggtatcaggcaaaatagacatcagtcaaaaactgtcaaaaaagacacagaagggcattacrtattgattaaagggttaactcatcaaaaagatttaacatttataaacagatatgtaccaaacaacagagtcccaaaatatatgaagctaacaccgactaaagtaaagggagaaatagataattctataataacagctggaaacttgaatatacaactttcaataatggataaaacatctggacaaaagatcagcaagaaaatagagagtattaacaattgtataaacaactagaaacagacatatatagaatatcatatgcaacaacagcaaaatacacattcttctcaagtgcacatag

SEQ ID NO: 794813 - DNA, 633 bp, Homo sapiens
tggcaattttttttttttttgagacggagtctcgctgtcgcccaagctggagtgcagtggcgccatcttggctcactgcaagctctgcctcccgggtacacgccattctctgcctcagcctccctagtagctgggactacaggcacccaccacctcgcccggctaattttttgtwtttttagtagagacggggtttcactgtgttagccaggaggcaatttttttttattactgattcaatctcactgcttgttattgatctgttcacggtttctatttcttcccagtttaacctagagggttgttatatttacaggaatttatccatctcctctagattttctagtttgtgcatgtaagggtgttcatagtagccttaaatgctgttttgtatttctttttttttttttgaaatggagttttgctgttgttgcccaggctggagtgcaatggtgccatctcggctcactgcaacctctgcctcgcgggttcaagccattttcttgcctcagcctcccaagtagctgggattacaggcacgtgctacaacgccaggctaattttttgtatttttagtagagacagggtttctccatgttggtcaggctggtctcgaactcctgacctcaggtg

SEQ ID NO: 794814 - DNA, 659 bp, Homo sapiens
cagtgcccgtggatccaagaaagccctgcttgtcagatgggaataccatctgtacagatgatgccccgcacatgcaagagcctggcatttttgggccagggctaaccagggtaaagtctgaatcaccccatgtggaatccrtctcctacggggtgtggactgtggggcatgaattccaattgcgctttccttacataactttgctcttcagatccctggttccgaatgtggggtgtatgcagtatggcccactggaagtacatgaaaatgctagaaggtgaatctacatgtattttttgatctaatgaaaacaagcaggaaaataagttgtactgacaggtaatgtgcagactgatactgctgtcttgactcagactgtgttgggcaattgtctttccctgtgaattccgtgaagaaatgaacccatccagacccatcccatggcaataggattgatggtgccaacctcccatgtttgttttatgccccctgtgttgtgacgtggggcagttaacctatttctggcttaaacagtgtcaaaaataaacaaagccaggcactagttaaagtggtaagaagagacttcaatcagcactttgatttgtgcagcagtgactaggcattttaaaggaagaataagggaatgaggagaggtgtga

SEQ ID NO: 794815 - DNA, 659 bp, Homo sapiens
cagtgcccgtggatccaagaaagccctgcttgtcagatgggaataccatctgtacagatgatgccccgcacatgcaagagcctggcatttttgggccagggctaaccagggtaaagtctgaatcaccccatgtggaatccgtctcctacggggtgtggactgtggggcatgaattccaattgcgctttccttacataactttgctcttcagatccctggttccgaatgtggggtgtatgcagtatggcccactggaagtacatgaaaatgctagaaggtgaatctacatgtattttttgatctaatgaaaacaagcaggaaaataagttgtactgacaggtaatgtgcagactgatactgstgtcttgactcagactgtgttgggcaattgtctttccctgtgaattccgtgaagaaatgaacccatccagacccatcccatggcaataggattgatggtgccaacctcccatgtttgttttatgccccctgtgttgtgacgtggggcagttaacctatttctggcttaaacagtgtcaaaaataaacaaagccaggcactagttaaagtggtaagaagagacttcaatcagcactttgatttgtgcagcagtgactaggcattttaaaggaagaataagggaatgaggagaggtgtga

SEQ ID NO: 794816 - DNA, 645 bp, Homo sapiens
tccaaccaggaaaaacggagggatttccagagaaggtcctcaatgagctgagttttgcagggtaagtcttatcttgaatggataagaagactgtcaaagggaacagcatgtgcaaactcgaaaaaggagcaagtcaggccataagcattctcaattcttttgcctccatcatagtcacctagtctggagtggccttttagcagaatagttggcccaggggcaagtgatatgacatagcagggctgttcaggaaaccataagtagttctagaaaaggagtctagccacacrgtcctaacccatccctgcaccttcaattttgattcatctacctcccctgcatctgtgtctctacctacccacaattcctccttggctgaatttatccaccaccattcatatctacccgtggtttagaaaaggactaataaagaaccagggctcacaatgtgggactggagaaattgagaaaagctttacattctattttttctgactaaactaagataaaaagtctttcccagcaagatactattattattcttggacagttctctatttttaagatttgggccagattatgcttcttgctttggagttaggtcagcaaagatcattctccttcccagcccactttattttaaaa

SEQ ID NO: 794817 - DNA, 645 bp, Homo sapiens
tccaaccaggaaaaacggagggatttccagagaaggtcctcaatgagctgagttttgcagggtaagtcttatcttgaatggataagaagactgtcaaagggaacagcatgtgcaaactcgaaaaaggagcaagtcaggccataagcattctcaattcttttgcctccatcatagtcacctagtctggagtggccttttagcagaatagttggcccaggggcaagtgatatgacatagcagggctgttcaggaaaccataagtagttctagaaaaggagtctagccacacagtyctaacccatccctgcaccttcaattttgattcatctacctcccctgcatctgtgtctctacctacccacaattcctccttggctgaatttatccaccaccattcatatctacccgtggtttagaaaaggactaataaagaaccagggctcacaatgtgggactggagaaattgagaaaagctttacattctattttttctgactaaactaagataaaaagtctttcccagcaagatactattattattcttggacagttctctatttttaagatttgggccagattatgcttcttgctttggagttaggtcagcaaagatcattctccttcccagcccactttattttaaaa

SEQ ID NO: 794818 - DNA, 514 bp, Homo sapiens
gtcccagaatccgcataaaatacacagtcgcataggtgctactaatgcaataagttctctcagtgccctccctctgtgggtcatctgtaagaccaggtaagccctagccttcagttaatatgtcctaattctcctctttgaataatctgggcccattggaaagaatcacacaattgtacagcatccttagtctcagcatcttgtagaatcatctcttaagcctttgcccagtcttgcatctaaaatgtacctcgacatcagttatatatccrtaagtaactgttgctacctgttgggcacaagcttgattagcatgataattctatttatgttccattttgaaaggttctttgccatcagcatccacatgagtgtcatatatttgtcccctccaagcagcaagcatgctgctattgtccttgttcccttataagggattctttaatagtccagtcactcaattgaaattctgctgaccaagtggctaggctgttagcaatggtttgagtcagtg

SEQ ID NO: 794819 - DNA, 632 bp, Homo sapiens
gcattatggaaaactctgaatttttatccacttagtaagaagtgcctgtggtctggagctccctaaagtgatagctgtcatttggagtgaaggcagtgttgttggggaatgtgcctttaaacttgtggaatgtgcagcaactctaggtggttaacatgaagaatcacattgcaatattgtaactttaaaatctgtaattagttaagtatcaaataataaagtcaaactcttcattataaatatgaatattcaawtgacccaccactgtttattgaaaagattgtcatttgcacatgacagagcaatgtgacctttgccataatttaggtcatcatacatatatgatctgtttctacacaaccaggtgtttcatatttgtatctcttttcctataccgcaaacaatcttaattaccatagctttgtatgatacctgttagtctaagtcaccatattctttatttcttccaaatttgactttgctaagctggtaatttgtatttcaatatgtttttaaatcagtttatcattatccccaaaaataagactgggataatggttaagggttcattgaatctgtagattagtttaaggctaacttatatgctacagtactgatacctccttcagtga

SEQ ID NO: 794820 - DNA, 632 bp, Homo sapiens
gcattatggaaaactctgaatttttatccacttagtaagaagtgcctgtggtctggagctccctaaagtgatagctgtcatttggagtgaaggcagtgttgttggggaatgtgcctttaaacttgtggaatgtgcagcaactctaggtggttaacatgaagaatcacattgcaatattgtaactttaaaatctgtaattagttaagtatcaaataataaagtcaaactcttcattataaatatgaatattcaaatgacccaccactgtttattgaaaagattgtcatttgcacatgacagagcaatgtgacctttgccataatttargtcatcatacatatatgatctgtttctacacaaccaggtgtttcatatttgtatctcttttcctataccgcaaacaatcttaattaccatagctttgtatgatacctgttagtctaagtcaccatattctttatttcttccaaatttgactttgctaagctggtaatttgtatttcaatatgtttttaaatcagtttatcattatccccaaaaataagactgggataatggttaagggttcattgaatctgtagattagtttaaggctaacttatatgctacagtactgatacctccttcagtga

SEQ ID NO: 794821 - DNA, 632 bp, Homo sapiens
gcattatggaaaactctgaatttttatccacttagtaagaagtgcctgtggtctggagctccctaaagtgatagctgtcatttggagtgaaggcagtgttgttggggaatgtgcctttaaacttgtggaatgtgcagcaactctaggtggttaacatgaagaatcacattgcaatattgtaactttaaaatctgtaattagttaagtatcaaataataaagtcaaactcttcattataaatatgaatattcaaatgacccaccactgtttattgaaaagattgtcatttgcacatgacagagcaatgtgacctttgccataatttaggtcatcatacatatatgatctgtttctacacaaccaggtgtytcatatttgtatctcttttcctataccgcaaacaatcttaattaccatagctttgtatgatacctgttagtctaagtcaccatattctttatttcttccaaatttgactttgctaagctggtaatttgtatttcaatatgtttttaaatcagtttatcattatccccaaaaataagactgggataatggttaagggttcattgaatctgtagattagtttaaggctaacttatatgctacagtactgatacctccttcagtga

SEQ ID NO: 794822 - DNA, 575 bp, Homo sapiens
ttagaaaatacagatgcatggaccctactcccagaaattcatattcaaatggtctggtttacagctcaggtattgttttttgtttgtcttttgtaatgctccccagcagattctgacatgcaagaaggtcatttctgaagtcgctttttaattctaaattcagatgacatagaatttgagaaccaaaaagccttgtgtttggttaattttcactgccaggggggccacccagtccacctacacatatctctagccttcacagatgcacacatgtgcacacacatgtatctgcacacagtggggctgtgctcatagagagctggaagtttctgtgatgccacattacaagacaacttccaatggcaatacctgcatgctatccttattctstcttcatctaagggttgaacaaacaaagtggagacaagggagtccctcatgggtaaactcttgattgaccttttgagaagatacagtacatttccctcctagtacccaccaagagttcattgatttagtaaaacactctatgtgtcatctatgaggctgtctctttctcagatgactagaaattt

SEQ ID NO: 794823 - DNA, 693 bp, Homo sapiens
tgattcagggtgggattgctgtcagcagtgggttagggctgcaggatggtgagaatggggagcagagtttatgggatggatgactccacagctggtgggccgtgctcacgagtggacaagttcattgagtccccctgcacaaagagtcccctacatctgtgaggggctgcaccagccccagagaaactgcacgcccaagaggagcatggctagcaaatagaaagcaccattataggtccagaggctgcagaagaaagggcaacgttttacatgctagtactttaacagcactttccccctgcatttggaacagggggacttgcattttcattgtgcactggaccttgcaaatgatggaaccagctctgctcagtgggtgtctcagtcccattatgctgctataacagaacatcataaactgggtgccttattgtcttagtccattctatgctgctataaaagaataccagagactgagkagtttataatgaacagaaatttattggctcagggttctggagctaggaatccaagattgagggtctggcatctggtgagggccttcttatcacatcataacatggtggaaggcatcacctggaagaaaggcaaaagaaagagcatgagagacagaaaaggagccaaacttgtcattttataagaaactcacttccacagtgacaaacccactcc

SEQ ID NO: 794824 - DNA, 568 bp, Homo sapiens
agaacagtagcacctcagggtatctaagcttatataggttgccaagaaggcatattccagtacattaaattctatgcatatgcatttgcaactagatcattaaaatgcaagttttgattggatatgccttctcctctttatcattttatgattgatttgatatgatgtcctggacataggggatatagttaaatgtttcttaaataaaggaagggcatttttattcagtaaacagctaaggggatactcaaaaatgcatatttaatggaagacatatctttactcagaagattctgttaattagatgatatactatagrgggccaagggatacagaagttgtgatcaaactaggagaaagaaacccctgatgctcaaaaagcagttttatctttgatagtttatcgtgaatttattttcgtctaggtgtgacagcatgacattttgtcaatgttgtatacattttattgcaattttgttgaatcttaacagcacaggtattactgatattgagccgctaaggcctcagggctatacagaaatgctgggtttgtgcttgaattggacag

SEQ ID NO: 794825 - DNA, 619 bp, Homo sapiens
atatttaatggaagacatatctttactcagaagattctgttaattagatgatatactatagggggccaagggatacagaagttgtgatcaaactaggagaaagaaacccctgatgctcaaaaagcagttttatctttgatagtttatcgtgaatttattttcgtctaggtgtgacagcatgacattttgtcaatgttgtatacattttattgcaattttgttgawtcttaacagcacaggtattactgatattgagccgctaaggcctcagggctatacagaaatgctgggtttgtgcttgaattggacagatccagtgaaaactaatcaaatacctactatgtgccaagcattgtgtcagatgctctcacatgcattatcttggaagaaagtacatgatagtgaattggagcacagtcctgaagccacactgcccagatctggccattggttccgtcactcgctaactatgagaccttgagcaagaaacttaacctctctatgcctcagtctctgtatctgtaagatgatgaagagtaatagttcctacattagaggattgttgtgaggattaaatgctagaatatattttaagccctcaacacagtgcctagcacat

SEQ ID NO: 794826 - DNA, 636 bp, Homo sapiens
gcactgtgagtcacttaaacctctttcgtttaaaataacccagtctcaggcagttctttatatcagtgagggaacagacactgctgtaatatatgcattaagatattatttatcttttttttcttagagacagaatctcactctgctacccaggctggagtgcwgtgggcacaaccatacctcactgcagcctcaaactccttggctcaagtgatcctctctccttagcctcccaagtaggtgggacaggaggcgcatgcaccagcacacctggctaatttttaatttttttgcagagacagaggtctcactttgttgcccaggctggcctagaacttctggcttcaagcaatcctcccaccttggcctctcaaagtattgggattacaggcacaagtccctgagcctgtcctgtttatcttaattagagttttcggtgcccccttaagtgatgctcctgggatgagtgtgcccttctctcctcatcctaatctggctctgagtttgtggatcattttcagatggccacatacctgaaaccctgggttactacagcaggtctggggtaatgatttggggagatgggtaatgttctttatactatatcagcttaggcttgtagagtgctttgggttt

SEQ ID NO: 794827 - DNA, 636 bp, Homo sapiens
gcactgtgagtcacttaaacctctttcgtttaaaataacccagtctcaggcagttctttatatcagtgagggaacagacactgctgtaatatatgcattaagatattatttatcttttttttcttagagacagaatctcactctgctacccaggctggagtgctgtgggcacaaccatacctcactgcagcctcaaactccttggctcaagtgatcctctctccttagcctcccaagtaggtgggacaggaggcgcatgcaccagcacacctggckaatttttaatttttttgcagagacagaggtctcactttgttgcccaggctggcctagaacttctggcttcaagcaatcctcccaccttggcctctcaaagtattgggattacaggcacaagtccctgagcctgtcctgtttatcttaattagagttttcggtgcccccttaagtgatgctcctgggatgagtgtgcccttctctcctcatcctaatctggctctgagtttgtggatcattttcagatggccacatacctgaaaccctgggttactacagcaggtctggggtaatgatttggggagatgggtaatgttctttatactatatcagcttaggcttgtagagtgctttgggttt

SEQ ID NO: 794828 - DNA, 577 bp, Homo sapiens
cctttccttgagtgggggagagttggcttctgtaagccaaggtggtggggacgaggagagtgggcaggtctggtcctggggacattgtcagtccatgtcagcatcctctaagagctgaatgcagcctcaggcctcagtctgcacagatagctaccactctccagggttcctcagccaagctctctctcccctgctttcagagccagcttgggttatggccatgggacccctgagaggctggataaaccctgatgcgactcagggcctgagcagccatttctgtccggggatcttgttaccgcccagagctgggccgaggagtgggagacccaggattcctctgttgattgatttccccagaacttttttccccctaccggaggctttggcccagagagagcaacacatgggacctccttggttgaatccycaaaatctatgaatactcctgacttcttttctggctgtctatccactgtcaattacaaggacagatgagggactaaatgtttggttagttcacaacattatcccactgcaccctgaataagttactcttccacttcagcccccgatg

SEQ ID NO: 794829 - DNA, 671 bp, Homo sapiens
gccatgtatgaagaactgctggtatcagttttaaaaaatgcagttatctttgaccagtgtttaggaatcatacatacattatcccactataaccttcatgaccaccctatgagaaagttgctatatagttgctattttrtagattaaaaaactaaaatactgagacccagaaaagttaagaatttgttccaggccacacattaataaataacagaacttgaattcaaccataggtctgtgtgaccccaaagccacgccctttctccttcttccatactgccctgtcttcgtctgtgtccagaaagggactttctccacctttggccaagttacaactgtgaagccatccctgcagtgtgactttcttctctctgactgcaaacttactgatgcctctaagtctctcatttttcggtcatctgaacaccacgaaaagaacctaacttggacatttttatgatttattttcagaggtttataaattgtcaaagttttctcagaaatatttttcataaagtcaaagaattaagggaaaaaacaagaacttgttcaggtcatcccttgagcagacacacacctgaacctcaccaaacttctggaaatttcttccacttaaaacatgcttttgcttggtggctttcaaccttggctgacattaaaactatctggga

SEQ ID NO: 794830 - DNA, 624 bp, Homo sapiens
cgtgggaacttcacacattccacccagagtgccccctcagcaatctggaatgatggactaaccattagctgagggaggagggggcaggacaggatgatgcaaaaggccaagctagccgactgccaaatgaaattgtagtcacttgacagggcaatggcatgagcaaaggtctcctgtctcccrgaactgttgccaagcattgtgacacacgggcctaatcgcatctgagtgcggtgctgcagaggagcggcccacgcggctggcagggcttcagtcactgcctgcttgcctgaggaagcccatgcatcacgatgggggccaacagggctccccagttacacacggggagtgaggaccaaagcgggagagcaagtgcctgctggtccccttggaaacaacacaagaaaataaacacttgtgggtagaagtaggtgtccaggcctagtcaaggttgccagggaattttgtgctaatgggggttctgtttacccctaaggcagcagcttgggctgtgagcagagcaaggctgttaggaatctgggttcaaatctcagctgaccctccaagctgtgagttccgggctgcagaggctaaagatctccagctgtccttttgagctttgtg

SEQ ID NO: 794831 - DNA, 620 bp, Homo sapiens
ccaacataaaacaaaataatctgattagatgatttttttctgttatcttcaaataagcaccttattatcaaatagttcagtatcagaacaagattcctaattccaaaggagttttatttacataatattatattgtgagatacatattagaagaatctgacactatgttccattccagtttctcttttgcaattgagtgacttgttttgatctaaaatgtataaattctcatgcctgtaattccagcactttaggaggccaaggcaggtggatcatttgaggtcaggagttcaagaccaccctggccaacatgatgaaaccccacctctactaaagatacaaaaaattagccaggcatggtggtgcatgcctgtaatcccagatacttaggaggctacagcaggagaaytgcttgaacctgggaggcaaaggttgcagtgagccaagattgcactgctgcactccagtctgggtgacagagcgagactctctctaaataaataaataaatagtataaatttatctcattcttattaatggtgcccatgaaatgtaagtattagttccttttcagatagtactttataattatactactgccagattaaaagacctatttt

SEQ ID NO: 794832 - DNA, 609 bp, Homo sapiens
atcattatttctaattcttacaaggaccttgcaaggtaaatattattatccctatttttttcagaggttcagagagggtaggtaaattaccagagttattcgctagtaaacaaccagagacaggggctcaagatggtcaactggatacagccaggaagagtttctcccattaagagacaagaccatcaagaagattggaacactctgagcagatcttcagaagaaaggcattgagagtgaatggaggtaggatgtggagcctgggctagagggaggattctgggaagcctgaacggggttgctgagcaccaggactcacttcaggccctgagtagctcctggggaagaggtgagttaaataggagtgcaatggcccattcttactatggacctacctgtaggacaccccacaacccccatagacatttgagctagtaggcagagctgtttggggagttggcagggwcaggactcttgcctgtgcaaagcccaaagggtttggtgcaggaacggttgcagtgaagtatggccaggacatccattccctaaggctcgccaagcacctctaggtagcgctggcctttgttgactgttgaacctgaacagaac

SEQ ID NO: 794833 - DNA, 472 bp, Homo sapiens
ttgaagactggttatttcagtgaacccagtcagacaaaaataaagaaaaaagaatttaaaaaatgaacaaaatctgcagaaaatataggattatgtaaagacaccaaacctacagctctctggcattcctgaaagagaggaagagagaggaagtaacttggaaaacatatttgatgatattgtctatgaaaatttccccaacctcactagagcggtcaacatttaaatttgggaaattcagagaacccctgcaagatagtatataagacaaccatccccaagacacatagtcatcagattctccaaggtctrtatgaaagaaaaaatattaaaggcagctagagagaaggggcagttcaccaacaaagggaacctcatcaggctaactgtggacctttcagcagaaaccctacaagccagaagagattacgggcttgtattcaacatccttaaagaaaagaaattctaacca

SEQ ID NO: 794834 - DNA, 554 bp, Homo sapiens
atcaaaaaaataggccggacacagtggctcacgcttgtaatcccagtactttgggaagccaaggcaggtggatcacttgaggccaggagctcaagacccacctggccaacatggtaaaaccccatctctactaaaaattcaaaaattaaccaggcatgttggtgcatgcttgtaatcccagctactcataggaggctgagatatgataatcacttgaacccaggaggtggaggttgcagtgagccgagattgtgccactgcactccagcctgggtgatagartgagactgtctcaaaaagcaaaggaaaagagaagaaacaaaacagctaatgtacaacttgagggctatagtttattgtattgtacttggaattttggctaaaagagtacattttaagcgctcttgccacgcacacaaagggtaactaggtaagattattgatacgttaatttgtttgactatagtaaccatttcactacatatatatatagcaaaacatcacgttattcacattaaaatatatgcaataataaaataaaaagacaattcaca

SEQ ID NO: 794835 - DNA, 603 bp, Homo sapiens
aagattgatgtcttatcatcctttagaaagttaaaaacagaattagtgtgcctttggcaaaaaaagaaaacaatatatatcttacatcaagaacacaggcaaaaaaaaaaaaccaaacaaacaaacacttttttgagtattcttttaaataaaagaggaaaaaaaagtatattaagtaatagaaaccccttgtttgtggtgatggtttcacaggtgtctgtatttgcccaaactygccaaattgtgtgcattaaatacatgcagattttgtatatcattcatacctcagcaaaggtgttcaaaaagtattagacaagtattatcacttctattttgacgagacatggccttctggctctagtcatttacttgtttatttttctttccagcttttaggtttgaagtacctgtgcagtattgttacatgggtaaattgtatatagcaggggtttggtacacagattattttgtcacccagataaagagcacaagtattcaagaggcagtttttcaatattcacccttttcccaccttctatcctcaagtaggccctggccccagtgtctgttctttttctcttctttgtgtccctgttactcaat

SEQ ID NO: 794836 - DNA, 603 bp, Homo sapiens
aagattgatgtcttatcatcctttagaaagttaaaaacagaattagtgtgcctttggcaaaaaaagaaaacaatatatatcttacatcaagaacacaggcaaaaaaaaaaaaccaaacaaacaaacacttttttgagtattcttttaaataaaagaggaaaaaaaagtatattaagtaatagaaaccccttgtttgtggtgatggtttcacaggtgtctgtatttgcccaaacttgccaaattgtgtgcattaaatacatgcagattttgtatatcattcatacctcagcaaaggtgttcaaaaagtattagacaagtattatcacttctattttgacgagacatggccttctggctctagtcatttacttgtttatttttctttccagcttttaggtttgaagtacctgtgcagtattgttacatgggtaaattgtatatagcaggggtttggtacayagattattttgtcacccagataaagagcacaagtattcaagaggcagtttttcaatattcacccttttcccaccttctatcctcaagtaggccctggccccagtgtctgttctttttctcttctttgtgtccctgttactcaat

SEQ ID NO: 794837 - DNA, 524 bp, Homo sapiens
tggaaatttgtgtgtcttttgtgttaggaactttcatctggaaaaaggatgggatggaggctgcccagcgaaaagggtggagtagatgatttctatgtagacctccagctccacttaccactcactacttgacttgtgccttttctaacatgctcgtgacgccaaaggctgacctatggagactacatggggactactcagcaggctcytttatcctcggacttctaggtggtttagattaatggtgaacacaagaaggagggctgaggacaagagcagagtggagcagaggatttcactccccaggtccccccttaaaggttgcctctatctaaagccagcactcccatggtgggtgcctcttgtataagcaggtgctccagctctgtatctgctccttgctgctccccaacctcaggcccaagtgggtaacatctccccagctgaacctatctttatgagttttccgcaccctgaatcatgccattgtaaatggcccattattaaattttccttaacccttg

SEQ ID NO: 794838 - DNA, 632 bp, Homo sapiens
caaagatgagatgtaatctcgtatcatgggtaggatcctggaacagagaaaggacaagagggaaaaactactgaaatctgaataacatatggatttagttaatagtaaagtactgatatttgttgctagttgtaacaacaatgtacccagtaatggagttgataacaatcagagaaactgaagaggggcatccaggaactttctgtactatctttraacttttctataaatctaatgctattctaaaacaaaaaagttatttaaatttacaataataaaaaggggtggtcctgagcagaaggtatacaacatctatgcttgcaaggaagatttttagaatgtggtatacaattaaagttcttgagttctttccaggttatagtagaaagagaattttgagggaagctgattattaaataatgaaattctccaaggcaaaaagcacttgccttatgctaaaaaatgtgaacagaaatacccaataccaaaagaatctgaaattcagcccctctgttagaatttgttatataggcttggataccagtaagctgaggtcatttttttagtgggtagaagggactgtgggactgtgcagagtaaattctatgtgagcctctgatgaaacatggcag

SEQ ID NO: 794839 - DNA, 632 bp, Homo sapiens
caaagatgagatgtaatctcgtatcatgggtaggatcctggaacagagaaaggacaagagggaaaaactactgaaatctgaataacatatggatttagttaatagtaaagtactgatatttgttgctagttgtaacaacaatgtacccagtaatggagttgataacaatcagagaaactgaagaggggcatccaggaactttctgtactatctttgaacttttctataaatctaatgctattctaaaacaaaaaagttatttaaatttacaataataaaaaggggtggtcctgagcagraggtatacaacatctatgcttgcaaggaagatttttagaatgtggtatacaattaaagttcttgagttctttccaggttatagtagaaagagaattttgagggaagctgattattaaataatgaaattctccaaggcaaaaagcacttgccttatgctaaaaaatgtgaacagaaatacccaataccaaaagaatctgaaattcagcccctctgttagaatttgttatataggcttggataccagtaagctgaggtcatttttttagtgggtagaagggactgtgggactgtgcagagtaaattctatgtgagcctctgatgaaacatggcag

SEQ ID NO: 794840 - DNA, 500 bp, Homo sapiens
cgggtaaatcagggatttcttcctggtttggatccattgctggtgaactagtgtgatttttttggtggtgttcaagagccttgttttgtcatattacccgggttggttttctggttccttctcatttgggtaggctctgtcagagggaaggtctagggctaaaggctgttgttcagattcttttgtcccacrgttgttcccttgatatagtactctcccccttttcctatggatgtggcttcctgtgagctgaactgcagtgattgttatctatcttctgggtctggccacccagagagtctacccagctccgggctagtacaggggcttgtctgcacagagtcctgtgatatgaactgtctatgagtctctcagccgaggataccagtgcctgttctggtggaggtggtggagggtgcaatggactctgtgagggtccttagctttggtggtttaatgctctatttttgttctggttggcctcctgtcaggaggtggtg

SEQ ID NO: 794841 - DNA, 500 bp, Homo sapiens
cgggtaaatcagggatttcttcctggtttggatccattgctggtgaactagtgtgatttttttggtggtgttcaagagccttgttttgtcatattacccgggttggttttctggttccttctcatttgggtaggctctgtcagagggaaggtctagggctaaaggctgttgttcagattcttttgtcccacagttgttcccttgatayagtactctcccccttttcctatggatgtggcttcctgtgagctgaactgcagtgattgttatctatcttctgggtctggccacccagagagtctacccagctccgggctagtacaggggcttgtctgcacagagtcctgtgatatgaactgtctatgagtctctcagccgaggataccagtgcctgttctggtggaggtggtggagggtgcaatggactctgtgagggtccttagctttggtggtttaatgctctatttttgttctggttggcctcctgtcaggaggtggtg

SEQ ID NO: 794842 - DNA, 638 bp, Homo sapiens
  misc_feature 399: n = A,T,C or G
gcagggcgtcttcctgtttttggaggacagaacccttttatctggaagagggctcggtacttgtggctgtttgctttttcttgttgatccaggacatggatataaatggaaggccagctaggtctcattttgaggaagtatatcactctgtaaggagaattctgagccagcaccaaggcttgttgagatcaagagcccagatcagttggtgatgtcttctgtggggctagagagcagtgcaggacaccacacacacctgtgcttctcactgtaggaggtgtgcatatgttctcatttttcctgcttaacacacagagaagcagaggcaattcaacactggcatccttcacttcaaccgaagttaaattaaagacctctgagcttgctgtgtgcagagtncttgagagagggattttggcatagagtcagggrtaaggaattggaaagaagctaaaacttgttttggcttttgtggtgccaaaatctgcctaggagcaataagcaaagagttctttattaaaaagcaaatactcaatttaatactcttatgcctataataccatgttttcataatatctttaaatgaccatggtatcttaactgtaaatatctttccaactttagttctcagatcaagc

SEQ ID NO: 794843 - DNA, 451 bp, Homo sapiens
tttccctgcacagagcaagtccacaaagactggcagtggtggctgtttttcaaatgcccaatttccaacaaatgtttacaaggcatacaaaaagagagaaaacacagccaattgaaaggaacaaagcaaatctccagagactgatcctaaagaaacatgagcctctggcctactttaaaaagattttsgaacaaccatcttaaatatgtgcaatgagctgaagtagaacacagaagattaagcaaaatcaggaaaacgatatataaacagaattcaaaaaggtagaaattaaaaaaaaacagtaattctggagctgatagatacaataactgaattggaaaatctgctagaagagtttgacagcagacaaacaggcagaagtaataagtgaacttgaaaacaggtcatttgaaattattaagttggggaagcaaaaagaaaaaataataaa

SEQ ID NO: 794844 - DNA, 534 bp, Homo sapiens
tgcagcaaaaaatactgagccaaaaagaaagctctatgaaatgaaaatagtactgtgaagaactcttcaaagaaggcatcacttcagatagatttatactggctctaaacccccaacttcccaattacgtcatcataaaaatctgcacaccaaacagcagcacctcagaatcttcacgtttctctttcttttaaattcaagcatgaatgactcattattgggtgagcctatatacagaaatccttcacaatacygggtaattgtaacagatatattaaaggtataggtaacagatagatatgttaaagaaaaccaaaaaattctagcaaaaactttttctaaagaaccgtaactccaattacaacacagcagtagcagctgaagagtgatgacaaataaaatccctgaataataaacgccgaggtaggctctaaaagaattgctaattatttgagccaaagaatacacaaatttcacaaagaacagtacatttgatcaattgtccagtttatcaattgggatgttcaatattaa

SEQ ID NO: 794845 - DNA, 534 bp, Homo sapiens
tgcagcaaaaaatactgagccaaaaagaaagctctatgaaatgaaaatagtactgtgaagaactcttcaaagaaggcatcacttcagatagatttatactggctctaaacccccaacttcccaattacgtcatcataaaaatctgcacaccaaacagcagcacctcagaatcttcacgtttctctttcttttaaattcaagcatgaatgactcattattgggtgagcctatatacagaaatccttcacaatactgggtaattgtaacagatatattaaaggtataggtaacagatagatatgttaaagawaaccaaaaaattctagcaaaaactttttctaaagaaccgtaactccaattacaacacagcagtagcagctgaagagtgatgacaaataaaatccctgaataataaacgccgaggtaggctctaaaagaattgctaattatttgagccaaagaatacacaaatttcacaaagaacagtacatttgatcaattgtccagtttatcaattgggatgttcaatattaa

SEQ ID NO: 794846 - DNA, 592 bp, Homo sapiens
atacaatttggctaatgtccttcttctgctaaaatctctgttgtctgcccctctttcagagttaaggtcgtagtctgttaaatgacctctaaggtctgacatcatctggccctcgttactttctctcctaccgccttcaccctcgcttctctggtccagccacactggctcattggtgtttcccatccaccaggcacactcctgcctcagagcccttgcattagctgtttccaaggwctggagagctcttcctccagatacacccaagacaaattccttcagcctcctttaaatcttagctgaactgtcactttgttaatgaggctggccctctccatcttattaaactaggactcccactactcccaacacctcttcccattgttgtttcccatggcacctgtcacctaacaaatgctggaacttaattatttattacatttatcatttagtatctgtctgccctgactataaagtatacttctcaggggcaggggtctttgtttttctcaatgaaacatcctaagaaactaatgtaatgtctgacacataataaatactcaatatttattgaataaacaaaaaatgaatt

SEQ ID NO: 794847 - DNA, 561 bp, Homo sapiens
ttttgatacaggcatgcaatgcttaataatcgcaacacagagaatggggtatcctcaagcatttatcctttgtgttacaaataatccaataatacttttttagttatttaaaaatatagttattattgactatagttaccttgttgtgctarcaaatactaggtattattcattgtttttaactatttttttttttacccattaaccatcctgaccatcccccaacaccctcccactatttttcccagctactggtaaacatccttctattctctattttcatgaactcagttgttttggttttcagatcccacaaataagtaagaacctgcaatgtttgtttttctgtgtctggcttatttcacttagcataatgatctccagttccatccatgttgttgctaatgacaacaacattcttattcttttttatggctgggtagtactccactgtgtataagtaccacattttctatatccactcatctgttgatggacacttaagttgcttccaaattttggctatgtgaacagtgctgcaacaaacatggaagtgcagat

SEQ ID NO: 794848 - DNA, 599 bp, Homo sapiens
aggcaagttttagaacaggagtgaaagtttattaaaaagctttagagcagaaggctgggtgcagtggctcatgcctccgaaagtgcctgtaattgcagcactttgggaggccgaggtgggccgatcacttgaggtcaggagttcaagaccagcctggccgacactggtcacagccagtgccagggaaaggcagtctctcaatagatagaaaaaacctgaagccaatagatagatgaaactctgtctctactaaaaatacaaaaattagccagttgtgcacctgtagtcccggctgttcaggaggctgaggcaggaacattgcttaaacccgggaggtggagattgcrgtgagctgagatcacgccactgcactgcagcctgggtgacagagtgagactccgtctcaaaaaagaaaacataaataaataaaactttagagcaggaatgaaaggaagtgaagtacacttggaagggggccaagagagtgacttgagaaatcaagtgcctggtttgacattttgacttggggttttataagttggcatgcttcgggattcttgccgtcttccctggttcttccctcggggtgggctgtctgc

SEQ ID NO: 794849 - DNA, 593 bp, Homo sapiens
tgaggggacacactctttgtccttctcttcttcctactgcctgaaatgtgggcatgatagctggaatgccagcagttatcttggactcatgaagaaaccttgaggaaggaagccacacactggggatagcagaacagaagtgtgactacttggtccctgatggcagtgaagttgtcctggactaacaccagacatattttatatgggagggaaatacaattcttattaaattacatgatatttgggttttagaataaatgctgctaaatctaattttagtgaayccatcttgcaggggtctgtcccgcagaccttgacccaacgacggatgaataacgtacactgacacaggtattttgcctgtcagtccggctgagggtctgggccacttacagacaccaaggagggtgctgtagagttgcagcctcggccctgactcctggccctgccggcatttattcagcacacattaaatgacaaaggctttgagtcaacaccattagagggtaattaacctagttgcccccacctagagccatcctgatctcaatcctgatcaaaggttagttttaggaccacatgagtaaacaagt

SEQ ID NO: 794850 - DNA, 620 bp, Homo sapiens
tacacagaataattactgggagaacttgttaaaaatgcaggttcctggtcctccctcagagattctcattctatagatgcagatgagacccaggacccttcatttttaacaatttcccacaaagattctatcacaaagaccccttgagctaccatttgagaaacactgttgtaggatatgattcattttgcaggtgagcaaagaaggcacctaaagaccaggctcgcccaccctggaacacggcttcgacaagactaaaggtgggctgtttggatgggcacctgcagagtcctggaaagcattttgctacatagattcctaattacaggattttaactataaataaataactcttgagtttttccaagtcataacgccaaaagggatacagaatcaatttgaaaagaatggttttatctggaaggaattgttaatacctayatttgcagatgcttggaatatgcacttgaggtattccttacctaaggggactctggcaggcacggctctgcggtcgatccagaaggacacccaggacagcatgaccatcagggtagcggggaaataagtttggagcaagaagaagaagatgtggcgacgcaacgtgaaattaatgtaga

SEQ ID NO: 794851 - DNA, 587 bp, Homo sapiens
tacagagtggtatagtggacactggagactcagaagtggggaaggtgggaggagagtgagggatgaaaaactacccattgggtacaatgtacaccactcaggtgacagatgtactaaaatcctagacttcagctgggcgcagtggttcatgcctgtaatcccagcacttcgggaggctgaggtgggcsaatcatttgaggtcaagagttcaagaccagcctggccaacatggtgaaaccccatctctactaaaaatacaaaaattagccagccgtggtggtgggtgcctgtaatcccagctactcgggaggctgaggcaggagaattgcttgaacccaggaggcagaggttgcagtgagcccagacctggccatctggccattgcactctagcctgggcaacagagtgagactccgtctcaaaaaaaaaaaaaaaaaaaattcctagacttcaccactatacaattcatggatgtaatcaaaacccacttgtgtccctactttttttttttaaggcaagaaatgaagcaagttaacctcagctatttagcgcaggcaagctcccaggagaaaggtcacagagcatgc

SEQ ID NO: 794852 - DNA, 613 bp, Homo sapiens
atttatttttaaagttttttgtagagataggctctccctgtgttgcccaggctggtctcaaactcctgggctcaagtgatcctcgtgctttggcctcccaaagttctgggattgcaggtgtgagccaccttgcctggcctaaatctatattttaaataatcttttagtaatttyttatattttggctgacttgtaaggtctgatttggttgtcataatttctaccgtagatgttgctaagaataaaagaaatgtcatctctgccattttatgattggcttttgctaatattggtttgagggaatattgccaatttttatttaatcaaaactgaatctgtaaatccacttaactgggcacataaaagctgcttccgtatctttatatactgaaattaataaatgaggactgttgtcaacccttcctcattgcaaatcttctacatttccctcagagtacttttctacctctcacaccaggcagtgatgtcagtgtcagtttgcatattgaatattagtaaagcttaatttcttttttttggagactgaatcctagagcagtgttcctcagagtgtggtttttgggtcacctatgtcagaattactttgaggtgc

SEQ ID NO: 794853 - DNA, 629 bp, Homo sapiens
tagtcagtgggtgacggatcctgccaggactgggtctttcccttcaaggcagtagtttcccttcggtcccagagtgtgtctagacatgttgtctgggaactagggcttgaaatagggcctcatgactctgaccagtgccctatcctacwgtggctgagctggtatacaagatgaaagacaaagtcatccttttcttccctctcctcttgtcaaacagaaggaaaagttctcttctggagctgtgagctgcactgcctggggttgggggaggggtggcataagcactcctttagctgccctggctgatgtctcattggggcatgtgctctccaagtccactagttccgagcccagcacagcactagggcttgaagtccttgcagcctagactgtcattcaagttgatttagggctccagagcacttcagcctgtagtgtgaggctcgccagaactcaagttccaaccaccgggatgggtgatttcccctctggccagggctggtctgaatgctgcctctgtgggtgagtgtcagctgaattcagtctggtttttctttctgttgtgacagggcatcactgagttcaatgcaaaatctcacaatgctgggctttctgtctcccaagcacac

SEQ ID NO: 794854 - DNA, 629 bp, Homo sapiens
tagtcagtgggtgacggatcctgccaggactgggtctttcccttcaaggcagtagtttcccttcggtcccagagtgtgtctagacatgttgtctgggaactagggcttgaaatagggcctcatgactctgaccagtgccctatcctacagtggctgagctggtatacaagatgaaagrcaaagtcatccttttcttccctctcctcttgtcaaacagaaggaaaagttctcttctggagctgtgagctgcactgcctggggttgggggaggggtggcataagcactcctttagctgccctggctgatgtctcattggggcatgtgctctccaagtccactagttccgagcccagcacagcactagggcttgaagtccttgcagcctagactgtcattcaagttgatttagggctccagagcacttcagcctgtagtgtgaggctcgccagaactcaagttccaaccaccgggatgggtgatttcccctctggccagggctggtctgaatgctgcctctgtgggtgagtgtcagctgaattcagtctggtttttctttctgttgtgacagggcatcactgagttcaatgcaaaatctcacaatgctgggctttctgtctcccaagcacac

SEQ ID NO: 794855 - DNA, 725 bp, Homo sapiens
atattcacactctattttatgcaatttttgtttattcagcagttgcttattgaacacttgcagagtggcaggcatggttgtagacaccatggatatggcagaacaaacaaaaatatttgccttcatggaccttaccttctattattagtgaaaaaataataattgagacacatacagagataaatgaagaatctggatatgaagatatgagaagaatcaaattagggtgactgggtggctacttcagattatgaaacaaggaaaggtctccctaaggagacagcctctggggagaggatactagtgcagagtcccaaggtgaaaatgaactaggcattttgaaggaaaaggaggaaggtagtgcaatgggtgtatggtgaatgagagggagggtagtacacaaagaggtcagagagagaagtatagaccagaccagatagcagcttgaggtctatgagaaattttcatctttctctaagtgcattargagctctttggagggttttgggttggaaagttataggaatctgtggctggaaaacaacataataattatctagcccactttattcctacctttgtattttaaaaaatgaagagaataaagcgcagggatatcaagagatacaagcactaattctaagtttttacacatggcattatgtcccacagtggggtacccacatggttgataaaggatcccagtaccaaggaaagatcgccag

SEQ ID NO: 794856 - DNA, 598 bp, Homo sapiens
ttttttaatggctgagtagtactccattgtgtatatgtagcacattttttatccatatgtgtgttggttgcttccaaactttggctattgtgaagagtgctgcaacaaacgtgggagtgcagatatatccttgatacactgatttcccttctttcaggtatatacccagcagtgagattactggatcatatgataactctaatattaattttttatgaattgccttcaaacttttctccacaacagttatattaactgacwttcccaccaacagtgtatgagggttcccttttcttcatatcctcgctggcattttttattgtgtgtttttggaaaaaaaacacattttaactagggtgagatgatatctcattgtagttttgatttgtttttctctgatgatcaatgatattaagcaccattttatatacctgtttgtcacatgtatgtcttcttttgagaaatgtctattcagatatttgacccatttttaaccatgttattagattttttcctatagagttgtttgagctacttatatattctggttagtaatcccttgtcagatggggagtctgcaaatattttctcccaccct

SEQ ID NO: 794857 - DNA, 629 bp, Homo sapiens
acaggagtaagcctttacttatcaataataacattgaatgtcagtggactaaacccttcaattaaaagacacagactggctcaatgaataaaaaaaaagacccattaatctgtagccaccaagaaacacacttcatctgtaaagacataaagagamtgaaaataaaggaataaaaatgatattccatgccaatggaaaccaaaatataacaaaagtcacaataattatatcagaaaaaatagattttaagacacaaattacaagaagagacaatgaaggccactatgtaatgatgaaggggtgtatacggcaacaggacataacaattttaaatacatatgcatccaacactggagcacccacacatatgaagaaaatattattacacctaaaaagagagatagaccccaatacaataacacctggagattttaacactccacttttaactttgatcagatattccaggcagaaaatcaaccaaaaaaagtcagaattaatctgcactatagattaatatgatctcataaatatttaaagcattttatctaacagctgaagaatacacattttttttcttcagcacatagagtattctgaaggatagaccatatgttaggtcacaaaat

SEQ ID NO: 794858 - DNA, 528 bp, Homo sapiens
ctggtgtggttttgatctgtgccccacccaaatctcatgctgaattgtaatccccagtgctggaggttgggcctagtgggatgtgattggatcttgggagtggatccttcatgaatgttttagcaccatccgtttggtgctgttctcatgaccgtgagtgagttctcacaagatctggtggyttaaaagtgtgcagcatctcccccatctctttctttctcctactctggccatgtgaggtgctggcttccccttcaccttcttccatgattgtaagtttcctgaggcttccctagaagctgagaaaatgctagcatcatgtatcctgcatgcctgcaggaccatgagccaattaaacctcttttctttttaaattacccaggctcaggtatttctttatagcagggcaagaatgaaccaatatgccttcctacaccgagagtggagctacacacagttctctgcatgggcagaacagagtggctgatggaccccctggggtatgagatcaggttctccaggatgctt

SEQ ID NO: 794859 - DNA, 610 bp, Homo sapiens
gatattttaaaaggtgtttctatattacacaattttacactgttaacacaagaccactagatttgtagtccaaagctctgggccacaatttagtcttctctcttagtgtctgttgtgtggccttagacataaactctaaaaagttaaaattaaaatataaatggccttatgtgccagtgaagctgagaatatgtcagatgtgaatggactctgaaggtgctttatgaatttccaaaccatcttgggcagttctgggtgaaggggaatcaccagagcatagatcattcyttactgttcaaactgaaaaacgtgtaactttgggaaaaatatgtatttattataaatcatccatttcattgggtggtttcaaatttagaagccaatatatgcttgtcataagaagaccaatgaatgcaaatgtatataaccccaaagctctcttttcctaccctattctgtctctggtctcccagctagtgaagtcaacagattagtgtggatccttccatcactttctcctatctcattcatgcataatcaaataaaaggaacatacataaggttcaatcttttctgaatacaatcctagtatgcatgttactctgtatac

SEQ ID NO: 794860 - DNA, 613 bp, Homo sapiens
ataaactctaaaaagttaaaattaaaatataaatggccttatgtgccagtgaagctgagaatatgtcagatgtgaatggactctgaaggtgctttatgaatttccaaaccatcttgggcagttctgggtgaaggggaatcaccagagcatagatcattctttactgttcaaactgaaaaacgtgtaactttgggaaaaatatgtatttattataaatcatccatttcattgggtggtttcaaatttagaarccaatatatgcttgtcataagaagaccaatgaatgcaaatgtatataaccccaaagctctcttttcctaccctattctgtctctggtctcccagctagtgaagtcaacagattagtgtggatccttccatcactttctcctatctcattcatgcataatcaaataaaaggaacatacataaggttcaatcttttctgaatacaatcctagtatgcatgttactctgtatactatgtacttaaatatatacacatacatacagataagaggtttattaagttcataatctaatgtgggatcatattttatgtacttatctgaatctggcttttctcactcaacattactttagaaaattcttt

SEQ ID NO: 794861 - DNA, 646 bp, Homo sapiens
ccaatcatatggtttgcactaacacacaagggatgtgggaaagactgatgggtgatgggtgatgggcatgggggtgtgtggctttccccagggctctgtgaggctggatctgaggtagcatgctctccatgtcctgggctgtacttagagacagagggcatgggtaactagctgggtgcatctggagaagagaggaaacagtgtcattgtcttaaccaaacattccacatggctgcctgtcaccaggctgtatctggaagacaggtaaacacacaatacccagtgtgtcacttgttgtaatagacaaatacgcaagggatcatggaagcacagtgcagaatttacactagggccctagacagatgtctgtggattgactattgaatgaagcctctgtgcttttgwtacaaacaggagagcctctgcctgtctctggaggagtcaggaagtcttccagaatagttggaattgagtgagtcagagtgtgaagaagaaggaaaaagcattttacgcacagggagctgtggccataggtagagagataagagtatgtgtacctgacaaaggccaaaatgttgatgtggttgaaggagaagacaaatgagactgagaggaagcaggaaatagagcaagagaagcagacatg

SEQ ID NO: 794862 - DNA, 646 bp, Homo sapiens
ccaatcatatggtttgcactaacacacaagggatgtgggaaagactgatgggtgatgggtgatgggcatgggggtgtgtggctttccccagggctctgtgaggctggatctgaggtagcatgctctccatgtcctgggctgtacttagagacagagggcatgggtaactagctgggtgcatctggagaagagaggaaacagtgtcattgtcttaaccaaacattccacatggctgcctgtcaccaggctgtatctggaagacaggtaaacacacaatacccagtgtgtcacttgttgtaatagacaaatacgcaagggatcatggaagcacagtgcagaatttacactagggccctagacagatgtctgtggattgactattgaatgaagcctctgtgcttttgttacaaacaggagagcctctgcctktctctggaggagtcaggaagtcttccagaatagttggaattgagtgagtcagagtgtgaagaagaaggaaaaagcattttacgcacagggagctgtggccataggtagagagataagagtatgtgtacctgacaaaggccaaaatgttgatgtggttgaaggagaagacaaatgagactgagaggaagcaggaaatagagcaagagaagcagacatg

SEQ ID NO: 794863 - DNA, 537 bp, Homo sapiens
tgtcctgtaacttcactaaattcatttatcagttctaagggtttttggtggagcctaaaggtttttgtaaatataagattgtgtcatctgcaaacaaggataatccgactttctcctttccaatttggatgccctttatttatttctcttgccaaattactctggctaggacttctagtactatgttaaataaaagcagtgaaagtgggaatccttgtcttggtccagatcttagtggaagtgctttcagttttttgccattcagtgtattarccgtaggcttgtcctatatggtctttattgtgttgagatgttccttctatatgctgtttgttgacagcttttatcataaagcaatgttgcattttatttaaatttttagcatctaatgaaatgatcataaggtttttttatccctgattctatttatgtgatgaagtgttctttttagttctctcagcttgatgacattgcagttgactaaaaaaaaaatagagagaaaaaaagaagaaagtctagaagcccaactaattattt

SEQ ID NO: 794864 - DNA, 537 bp, Homo sapiens
tgtcctgtaacttcactaaattcatttatcagttctaagggtttttggtggagcctaaaggtttttgtaaatataagattgtgtcatctgcaaacaaggataatccgactttctcctttccaatttggatgccctttatttatttctcttgccaaattactctggctaggacttctagtactatgttaaataaaagcagtgaaagtgggaatccttgtcttggtccagatcttagtggaagtgctttcagttttttgccattcagtgtattagccgtargcttgtcctatatggtctttattgtgttgagatgttccttctatatgctgtttgttgacagcttttatcataaagcaatgttgcattttatttaaatttttagcatctaatgaaatgatcataaggtttttttatccctgattctatttatgtgatgaagtgttctttttagttctctcagcttgatgacattgcagttgactaaaaaaaaaatagagagaaaaaaagaagaaagtctagaagcccaactaattattt

SEQ ID NO: 794865 - DNA, 618 bp, Homo sapiens
tttaagaagagaataaatctaaaaatgcttttaaaaatttgttgtacttcttcccaaattagaaaatgtttatttaaatgactaaaaattgaatgtgcacaaagcagcatgtcatctttgtgcattgatccaataagactctgcaccatactataatttggcaggcagtatttaatcttcagtccagctattcctctgtggccacaatattccaagtatttttacagtttccatctttttccagaccaatgccaaagcttgtgttcttgagtggtgggccactcccaatcttcaatggctctctktttggtattgtgcaaatacatgaatcaccagggaagacagactgagacttgagtagggaatcagaggctgctcttttttaagatgtggcaaacctagcaaaggaatcccaggaaatcaaagtctagaatatcataaaatcacagctggagaaaatttaatcatcacctagttaaattctattacaggcacacttcatattattgcacttcactttattgtgctttgcagatattgtgttttttttctcctacaaaccttcaatttgtaggaaccctgcattgaacgagtttattggtgtcacttttttaacag

SEQ ID NO: 794866 - DNA, 618 bp, Homo sapiens
tttaagaagagaataaatctaaaaatgcttttaaaaatttgttgtacttcttcccaaattagaaaatgtttatttaaatgactaaaaattgaatgtgcacaaagcagcatgtcatctttgtgcattgatccaataagactctgcaccatactataatttggcaggcagtatttaatcttcagtccagctattcctctgtggccacaatattccaagtatttttacagtttccatctttttccagaccaatgccaaagcttgtgttcttgagtggtgggccactcccaatcttcaatggctctctgtttggtatwgtgcaaatacatgaatcaccagggaagacagactgagacttgagtagggaatcagaggctgctcttttttaagatgtggcaaacctagcaaaggaatcccaggaaatcaaagtctagaatatcataaaatcacagctggagaaaatttaatcatcacctagttaaattctattacaggcacacttcatattattgcacttcactttattgtgctttgcagatattgtgttttttttctcctacaaaccttcaatttgtaggaaccctgcattgaacgagtttattggtgtcacttttttaacag

SEQ ID NO: 794867 - DNA, 575 bp, Homo sapiens
gcttagtttgaaaggcatgtcaaaagttgagacagtctggaagctaggctgagagaagtaaagatgcttcagataaaaaccttgaagctagcagaggttgtttcatgaggttgaaggaaagaagtcatctccacaaaaatgcaaagtgaatcagcaagtgctaataaaaaagctgtagtaagttatccaaagatctacctaagataatgaatgcaagtggatacactaaacaacaacttttcaatgtagacaaagcagctttatactagaagaagatgccatgtaagctagagaggagaagtcaatgtcctgcttcaaaggacaggcggactctcttataaggagcagatatgtctggtgccacattgatcattcccaaaatcctagggcccttaagaattatgctaaatctattccacctgtgctaaayaaatgaaacaacaaagcctggataagagcacatctgtttacagtacactttactgaatattttaagtcagctgttgagacctatcacttagaaaaagagtcctttcaaaatattactgctcacttgttaaagcagactaaatatg

SEQ ID NO: 794868 - DNA, 658 bp, Homo sapiens
ttgtgagcactatattgaaacagtaaataatcaatgtaaagagaaggtgaactaggatagtgtgaaataggggccctgaatataaacaaaatggttaaagaaccaaaggatagttagatgagaaaataaaacttggtgcagtgtagggctgggcataaagtttgtcttcagatacataaaggaatgtgatacagaagagtgagtctattgctgcaaagaacagaagtaggaaccaagggtaaaagttaccaagggactgcttcgggtttactataaataggaattatttattataaataagaatttagatggaaaacctcaagcatttgatgaaaaatggtcagatgtactatagagacatcctcacactgggtaaaaataaatgagctctaggtgacaacattcatttcatgtatatcatatatgaatataaagatacaaaaataattcattataagcctgtaagtctattatttcatgatagatgacacagaagttcctgatacttgtaagaaagaamaataattgatggcaattgtggaatctctgtgtcttagtctgttttgtgctcaccataacggaatacctaagactggatagcttataataaacacaaatttatttctcacagttctggaggatgggaagtccaagatca

SEQ ID NO: 794869 - DNA, 590 bp, Homo sapiens
atatttaaatctgcaatccattgagtttgaattttgtatatggtttagggaccaatatatatttttttcaatgttacccggagttatttaccaaaaagactataggttcacccattgaactgttgtgtcatctttgttatgaatagatgacggtatatagtttctattctattgccttagtttatttaactatgctttcagtaatacagttaattakcacgatttttaacagactgtcttatctggcaatgcaaattcttgagcatagtttttcttctttaaatttccttcaactattatttgtcttattgattttttgaatctatgcacatagtataattctccatttatttataccctatttaattcttctcagctatgtattttagttcccactagagacattatatgcatacttcaatagctttattgctattgttgtgcttttgtatatttagttttccatttgtaacgttggtatacagatatactattaatatttaacattgatttcaaatcctagattttactcacttcacttattaacttcaacaggttttcaatacatatttttactatatttgaaagca

SEQ ID NO: 794870 - DNA, 590 bp, Homo sapiens
atatttaaatctgcaatccattgagtttgaattttgtatatggtttagggaccaatatatatttttttcaatgttacccggagttatttaccaaaaagactataggttcacccattgaactgttgtgtcatctttgttatgaatagatgacggtatatagtttctattctattgccttagtttatttaactatgctttcagtaatacagttaattagcacgatttttaamagactgtcttatctggcaatgcaaattcttgagcatagtttttcttctttaaatttccttcaactattatttgtcttattgattttttgaatctatgcacatagtataattctccatttatttataccctatttaattcttctcagctatgtattttagttcccactagagacattatatgcatacttcaatagctttattgctattgttgtgcttttgtatatttagttttccatttgtaacgttggtatacagatatactattaatatttaacattgatttcaaatcctagattttactcacttcacttattaacttcaacaggttttcaatacatatttttactatatttgaaagca

SEQ ID NO: 794871 - DNA, 590 bp, Homo sapiens
atatttaaatctgcaatccattgagtttgaattttgtatatggtttagggaccaatatatatttttttcaatgttacccggagttatttaccaaaaagactataggttcacccattgaactgttgtgtcatctttgttatgaatagatgacggtatatagtttctattctattgccttagtttatttaactatgctttcagtaatacagttaattagcacgatttttaacagaytgtcttatctggcaatgcaaattcttgagcatagtttttcttctttaaatttccttcaactattatttgtcttattgattttttgaatctatgcacatagtataattctccatttatttataccctatttaattcttctcagctatgtattttagttcccactagagacattatatgcatacttcaatagctttattgctattgttgtgcttttgtatatttagttttccatttgtaacgttggtatacagatatactattaatatttaacattgatttcaaatcctagattttactcacttcacttattaacttcaacaggttttcaatacatatttttactatatttgaaagca

SEQ ID NO: 794872 - DNA, 631 bp, Homo sapiens
aaataacatatatatgtatatatataaatgcacatatactgcaaagaaaatgtaaatatagaagcatatatgtatatataaatgcttatataaataaatccagaatcattgttttcctgttaattttaaagtagagacagcttttaggtatttctcgttctgggttatgggctaggaaaaggcacagtggctcacccctgtaattccaaccccttagaaggtgaagcaggagaatggcttgaacccaggagttcaasaacagcctaggcaacaatgtgagatcccgtgtctacaaaaaacaaacaaaaaaattagccaggcatgatggcacacacctgcagtcccagcgacaggtgggaggattgcttgagcctgggagatcagggctgcagtgaactttatatatatgtatataaaactatatatatctataaatatatattacatagaaagataactaaaatgtagcaataagtgcattatattacattatatacattatatatacacatgtatgtatataaaatatactatttgcatatgttacatgcatatacattatatgtgtatacatgtgtatacattatatgtttatacattatatatatgcatatataaatatatatgcatt

SEQ ID NO: 794873 - DNA, 631 bp, Homo sapiens
aaataacatatatatgtatatatataaatgcacatatactgcaaagaaaatgtaaatatagaagcatatatgtatatataaatgcttatataaataaatccagaatcattgttttcctgttaattttaaagtagagacagcttttaggtatttctcgttctgggttatgggctaggaaaaggcacagtggctcacccctgtaattccaaccccttagaaggtgaagcaggagaatggcttgaacccaggagttcaacaacagcytaggcaacaatgtgagatcccgtgtctacaaaaaacaaacaaaaaaattagccaggcatgatggcacacacctgcagtcccagcgacaggtgggaggattgcttgagcctgggagatcagggctgcagtgaactttatatatatgtatataaaactatatatatctataaatatatattacatagaaagataactaaaatgtagcaataagtgcattatattacattatatacattatatatacacatgtatgtatataaaatatactatttgcatatgttacatgcatatacattatatgtgtatacatgtgtatacattatatgtttatacattatatatatgcatatataaatatatatgcatt

SEQ ID NO: 794874 - DNA, 631 bp, Homo sapiens
aaataacatatatatgtatatatataaatgcacatatactgcaaagaaaatgtaaatatagaagcatatatgtatatataaatgcttatataaataaatccagaatcattgttttcctgttaattttaaagtagagacagcttttaggtatttctcgttctgggttatgggctaggaaaaggcacagtggctcacccctgtaattccaaccccttagaaggtgaagcaggagaatggcttgaacccaggagttcaacaacagcctaggcaacaatgtgagatcccgtgtctacaaaaaacaaacaaaaaaattagccaggcatgatggcacacacctgcagtcccagcgacaggtgggaggattgcttgagcctgggagatcagggctgcagtgaactttatatatatgtatatawaactatatatatctataaatatatattacatagaaagataactaaaatgtagcaataagtgcattatattacattatatacattatatatacacatgtatgtatataaaatatactatttgcatatgttacatgcatatacattatatgtgtatacatgtgtatacattatatgtttatacattatatatatgcatatataaatatatatgcatt

SEQ ID NO: 794875 - DNA, 605 bp, Homo sapiens
tgatactgacaagctgagcacagatcagtggatttagctagggaggccttgaagattataaggcattttgctcagtctatatataacgtttacctctgacagcatggctattttgtgtctgaaccaattaggcaataaaagagaggaccggaaaaagtctgattgtcatccccagggtgatttatcttgtttatttgttcttccttctctgctgaagtcattctttcctgagtatttacacrgaacacaaatatttggatagtctgcacccattctgaatggtatgtgcccattcctctttactagatcgtctttttaccaagtattctctctaagtcattgcccatcaattagatctacacctctggccatctttccttccaggtaaaatgtgcaaccagatatactgaccaaacttctgtcttctgagagggataagctggtgcccatcattatggagccatgcacaggcctggctcagagttcacatatgctgataaagaatatctggcagttcaggagaatttgcagaccagctgctgccctacaccaacaaggatggctagcagatcagtgataatgtgtaagtcaaaggcacttggcat

SEQ ID NO: 794876 - DNA, 602 bp, Homo sapiens
ttccaaatgacaggatttcattaatttttatggtggaatagtactccattgtgtataggtaccactttttttttttgagacagagtctcactctgtcgcccaggctggagtgcagttgcactatctcggctcactgcaagctccgccccccgggttcacgccattcttctgcctcagcctcccgagtagagtagctgggactacaggggcccgccaccacggccggctaatttttttataattttagtagagacggggtttcaccrcgttagtcaggatggcctcgatctcctgacctcgtgatcctcccgcctgggcctgccaaagtgctgggattacaggcgtgagccattgcgcctggccccacattttctttatccattcatctgttgatggtcacttaggttgcttccatatcttgggtactgtgtacagcactgcaagaaacatgagaatacagatatctctttaatatacttatttcccttattttgggtatataccctgcagaaggattgctggatcttatggtagctctatcttaagttttttgagaaacctccaaactgttctctatagtatagtaattaccatatggtgta

SEQ ID NO: 794877 - DNA, 602 bp, Homo sapiens
ttccaaatgacaggatttcattaatttttatggtggaatagtactccattgtgtataggtaccactttttttttttgagacagagtctcactctgtcgcccaggctggagtgcagttgcactatctcggctcactgcaagctccgccccccgggttcacgccattcttctgcctcagcctcccgagtagagtagctgggactacaggggcccgccaccacggccggctaatttttttataattttagtagagacggggtttcaccacgttagtcaggatggcctcgatctcctgacctcgtgatcctcccgcctgggcctgccaaagtgctgggattacaggcgtgagccaytgcgcctggccccacattttctttatccattcatctgttgatggtcacttaggttgcttccatatcttgggtactgtgtacagcactgcaagaaacatgagaatacagatatctctttaatatacttatttcccttattttgggtatataccctgcagaaggattgctggatcttatggtagctctatcttaagttttttgagaaacctccaaactgttctctatagtatagtaattaccatatggtgta

SEQ ID NO: 794878 - DNA, 627 bp, Homo sapiens
tgcatcaaatgcctattttgtccctggtgttacactaggcttttttttttttttttcgttatagccacattaacccggtctgatatacttaggtgtctcaatggtctcattccacttgacactttgaataaatattcttttccccattttacaggtaaggaagctgaatctcagagaagtgagttgcctaaaatcacatagccagtaaacagtggtgcaaggattcagttccaggtatgttaatgaatagagtcaagagtctttctctgacattcaggactctagccagctccccagggactccaattgaagactgagtctcagtcaggggctcatggtcccaaatatcctttagaagcagcaagtctggaacaggccacggcaggcccagcagctgcaggggtgtcacacactgctgtactgcctggcccaragcctcatttttctgtgtcccaggcctgaaaagctgggcctgttttcagggttggactaactttttccccacagagtatggatagtccacagtggagccaaatggaggctgctcccaccccttgaaagagaggagaaagggggaaggggtgcagaacagccttccagaagggatagctttgccgagtttcagcc

SEQ ID NO: 794879 - DNA, 624 bp, Homo sapiens
ctaccaaagggaatgttctactctgtgacttgaatgcaaacatcccaaagaattttctgagaatgcttctgtctagattttacctgaagacaatcccgtttcccacgaaatcctcaaagctatgcaaatatcctcttgcagattctacaaaaagagtgtttcraaactgctctatgaaaagaaaggttcaactctgtcagtagacggcacacatcacaaacaagtttctgagaatgcttgtgtctacttgttatgggaagatatttcctttttcaacataggcctgaaagcgctccaaatgtccacttccagatactacaaaaggagtgattccaacctgctctatgatagggaatgttcttctctgtgtcctgaatacaaacatcacaaagatgtttctcagaacgctgcagtctgcaatttgtatgaattcccgcttccaacgaaatcctcaaaactagccaaatatccacttgcagattccacaaaaagagcgtttcaaaacttctctatgaaaagaaaggttctactcctttagttgaggacacacatcacgagtaagtttctgagaatgcttctgtctagtttttatgggaagatatttcctttttcaccttaggccgg

SEQ ID NO: 794880 - DNA, 409 bp, Homo sapiens
gtagaatccgcaagaggatatttgcatagctttgaggatttcgtgggaaacgggattgtcttcaggtaaaatctagacagaagcattctcagaaacttctttgggatgtttgcattcaagtcacagagtagaacattccctttggtagagcaggtttgaaacmctctttttgtagtatctggaagtggacatttggagcgctttcaggcccatgttggaaagggaaatatcttcccgtaacaactaggcagaagcattctcagaaacttatttgagatgtgtggactcaactaagagaattgaaccaccgttttgaaggagcagttttgaaacactctttttctggaatctgcaagagtatatttgcctagccttgaggatttcgttggaaacgggattgtcttcagat

SEQ ID NO: 794881 - DNA, 616 bp, Homo sapiens
actctgtctcttaatttttttttaaggtgtctagttgggcaacttgaggtccttcatcttaccatccggtctgtctctctcatgaggctcccttaaacaaattagagccaatcactacattgagtcctggttattttcctcagtagtgcaaggaagagctctctgggagtctagatgtgatctcagcagagaaaaattcagaagtcgctgcaggctgagatcagtggggatgaggcatcatctccctagggaaagaggagaaraaaccctccttccttctccccgctcctcacccaaccctccccttcctgagtgagacagaacagagtgcggagaagctcagtggtatggaatgactgcatgtagagaaggggaggaggagagataagagggctccaaggctgccttccagctctgttgttcatggttctagacagtttcctcccaggtcctcagtctgcagggtggatgctatttatgctcacctattctttgctggtcggggggtggggttaggatttctgtcagtccaagtaggttttaccaatggcagtaataccacaaggattctaatttattctactgtcccctgcatccaatagggagaacagcaaag

SEQ ID NO: 794882 - DNA, 577 bp, Homo sapiens
acacttattcaaatacattcaggaaactgcttgccatactctattaacttctctcctttatctcttcctgagttccttaaaactgaagaattgttaaggttagatccctttattcttactacttatgtataaaattatgccttccacccccttttccttccctttcttccaaattaacaagcagaacagacttctcttcaaacactttctcctgaggtacaactgcttaggttgcctttcttcttttgtttttcattttctcagccattttaactgttttgcctccactagacgcatacataagcatacaaacacgctttctgatcattctttcyggaataactttaaaacatattgtacatagtcaaagaaggatgaccttgaatttctacatattttgcacaggtcaaaattagaaatccagtctgaccaaggcacgttactatccaaggctagactgaacaggataggtggccagcagtgtggttcatatggctacaactgcccctgcctcctttttaaggcatgtagggtaggaaataaatccattttcagatacagacactctgaaattctc

SEQ ID NO: 794883 - DNA, 586 bp, Homo sapiens
attctactcactctgtgcagactccaaaaccctgagccacactgtactgccgtctacatggagacatcttcctcactccactcagactggcacttgtgccgggcagctgtcctctgcagatgccctcttcttgcatatattttaaatgtagacccaacatgagtccctggtggattctgtgctgctataacaaaatattgagactggataayttataatgaaaaagaaacatattggctcacagttctggtggctgagaagtccaagatcaggtgctagcatctggtgggagagagagagagagggagagagagacaaagagaccatgcctgaaagcccctttattaaggcactaaacccactcaggagggtggagccccatgggccaaatacttaaccaaagatcccacctcccaacactgtctcaatggcataaatttcaacgtaagttttgatggggacaaatgttcaaacccatggcagcacatgaataaaacagaatagaaaagccaaaaattttaaaaaataagaaaacccaaaaataaacttaatgacatctggaagtctaataagtggtaaatatgcc

SEQ ID NO: 794884 - DNA, 562 bp, Homo sapiens
gtctttctctctttccacacttaacttcctgaggacaggtgtcatgtcgccgtgttcttttgtatttttacatgtgtgcacatgtgtgtgtttcactatgacatctcttacagggtctggcacatagtgtgtatgaaacttgtgtttgttgaatgaatgaatgaataaatgaacctcctactgatgaccacatcttccctttgcaaatgaaggtatctgcagtgcgtttgggtgatatgtgtgatagtttctgcctttagagtaattttacattttttcactcagcttcattatgcatgaagagtaatatcttagagtactatctggcacctactaattgctgattaaamctgactaggcctatgcctaatccaactttgattgcttagaaatccatctgttttcctctacttcaagtttattgattgactgattcaacaagcatttactgatcaccatatgagttcccccaaattaggcaaggcaattgcgatggctcacagtctgctgggggagaaacagtcagctttaaactaataaataatcacaggttaggatccag

SEQ ID NO: 794885 - DNA, 562 bp, Homo sapiens
gtctttctctctttccacacttaacttcctgaggacaggtgtcatgtcgccgtgttcttttgtatttttacatgtgtgcacatgtgtgtgtttcactatgacatctcttacagggtctggcacatagtgtgtatgaaacttgtgtttgttgaatgaatgaatgaataaatgaacctcctactgatgaccacatcttccctttgcaaatgaaggtatctgcagtgcgtttgggtgatatgtgtgatagtttctgcctttagagtaattttacattttttcactcagcttcattatgcatgaagagtaatatcttagagtactatctggcacctactaattgctgattaaaactgwctaggcctatgcctaatccaactttgattgcttagaaatccatctgttttcctctacttcaagtttattgattgactgattcaacaagcatttactgatcaccatatgagttcccccaaattaggcaaggcaattgcgatggctcacagtctgctgggggagaaacagtcagctttaaactaataaataatcacaggttaggatccag

SEQ ID NO: 794886 - DNA, 637 bp, Homo sapiens
gtttataaattggcaacatgcgggatccgtgtggtgatgtaaatattctatattttcactgcattaatgtcaatatcctggttgtgatagttttgcaggatgttactattgaaagaaattaagtaaagagtacacaagatttatctgtatcatttcttacaactgtatacaaatctaaacttatttcaaaattaaaactttaaaaatatttaatggtaatagaaacaggatacatgtagacacaataaagggcataaatggacatcatttatttygattttcaaattgcctttttttttttttttccgagactagagtgtcactctgttgcccaggctggagtgcagtggtggcgtgatctcggctcactgcaatctccacctcctgggttcaagcgattctcctgcctcagcctcccgagtagctgggattgcaggcgtataccaccacacctggctagtttttgtatttttagtagagacaggttttgccatgttgaccaggctgatctcgaactcttgacctcaagtgatccacccgcctcggcctccaaaagtgttgagattacaggcatgagccactgggctgggccctcaaattgcctttgacaaggccaatgtgaaacttcactgatcaa

SEQ ID NO: 794887 - DNA, 599 bp, Homo sapiens
tttaaattacttggctgtgtccactagaaatacctagaaacattggttgatccagtactcaatcacacaatgtgctattgtgaatccttacagttcagatggtctccatgtcatttctcttcacaaaaatttgcaagatgtcccggagggaatacttgattccaaatttagcaccaggaaaagacagcaacaacaacaacaacaacaaaacactgtttgcaaccatgtgttaacaatccacgaatgccaattttatgtaacatgttatcaattgtttgcattattatgaaaaaatgtatargctatttgcatagtctctaatacttgtgttcatctgtcaactcaaatcctgtcagtactggtcatctatatcttatgaatagggtcaaaggcttttaaagttggagggcccttaggtaatattatttaacacattaagaaagactcaaagaatgtaaagagcttgtctgatatcacaaaaataattaagctcacctgcttcacaattcgttaacttcatacaaatgtccttttagcaataaaaaaagagttactaaacactatgcttcctacaaaaatcaaactgccatcagcaaatg

SEQ ID NO: 794888 - DNA, 617 bp, Homo sapiens
ttcttgatgctctccctcccaccacccccaactccaacaagccccagtgtgtgttgttccccactgtgtccgtgtgttctcatcatttagctcccacttacaagtgagaacatgcagtgtttggtttctgttcctgcattagtttgctgaggataatcactggaaatacttgctctgtatttagakttcataaaatttgcaacttataaaaagcagattcgtatacctaagttattccaaatgtaagttttctattaacttatcagtttttaaatttatattaaattaaaaatcaggttcttaatagccacaggtgaccagcagtttctgtataagacagtacaactgttagaagtgattgctttaaatgaggcactcgcttcaggcactaagttttgaggggtggggtgccagaagctcagtgatcaaggtagacaatatttcaatgcaatatgtttttaaaaattcaaaatcaggccaagcatagtggctcatgcctgtaatcccagcattttgggaggccacgatgggcggaacaatatttaaggtttagaaaaatatttgtgcccaggtgttggagaccagcctgggcaacatggcaaaaccccgcctctaca

SEQ ID NO: 794889 - DNA, 617 bp, Homo sapiens
ttcttgatgctctccctcccaccacccccaactccaacaagccccagtgtgtgttgttccccactgtgtccgtgtgttctcatcatttagctcccacttacaagtgagaacatgcagtgtttggtttctgttcctgcattagtttgctgaggataatcactggaaatacttgctctgtatttagagttcataaaatttgcaacttataaaaagcagattcgtatacctaagttattccaaatgtaagttttctattaacttatcagtttttaaatttatattaaattaaaaatcaggttyttaatagccacaggtgaccagcagtttctgtataagacagtacaactgttagaagtgattgctttaaatgaggcactcgcttcaggcactaagttttgaggggtggggtgccagaagctcagtgatcaaggtagacaatatttcaatgcaatatgtttttaaaaattcaaaatcaggccaagcatagtggctcatgcctgtaatcccagcattttgggaggccacgatgggcggaacaatatttaaggtttagaaaaatatttgtgcccaggtgttggagaccagcctgggcaacatggcaaaaccccgcctctaca

SEQ ID NO: 794890 - DNA, 582 bp, Homo sapiens
accattcagtatgatattcatttaatcctcttgtttttgtgtggtgctctgccttcccttgctacttccgctgtatctgctatctccaagaacagtatgtagcatttccacagactaaataccagttttcttccagggaggggaaggctaattgtctgaggggtgggaacttcwacaaactttccatcagtcctatttttagcttcattcccacacttgctgtctttagaaatcttctgttccttcattcctgagtctttctgggattctgcagtttggcttccttcttaccgtctcccttccatgttggattaggtttcagtgttctctgttttgctaaatcagatcccatctgttcattcactttccggcttccaaaatgtgtttgacatcttttgtttgctattatgttctctcctgttctctttatccttgtggtttatttcctttgattcctttaccaccagcaatgttttaggaggagagataaacatgcgtgctcaatctgctgtacaaaattggaagctgaatgtaccacagcttacccaactgattccctgctaatggaaacatattccaatg

SEQ ID NO: 794891 - DNA, 582 bp, Homo sapiens
accattcagtatgatattcatttaatcctcttgtttttgtgtggtgctctgccttcccttgctacttccgctgtatctgctatctccaagaacagtatgtagcatttccacagactaaataccagttttcttccagggaggggaaggctaattgtctgaggggtgggaacttctacaaactttccatcagtcctatttttagcttcattcccacacttgctgtctttagaaatcttctgttccttcattcctgagtctttctgggattctscagtttggcttccttcttaccgtctcccttccatgttggattaggtttcagtgttctctgttttgctaaatcagatcccatctgttcattcactttccggcttccaaaatgtgtttgacatcttttgtttgctattatgttctctcctgttctctttatccttgtggtttatttcctttgattcctttaccaccagcaatgttttaggaggagagataaacatgcgtgctcaatctgctgtacaaaattggaagctgaatgtaccacagcttacccaactgattccctgctaatggaaacatattccaatg

SEQ ID NO: 794892 - DNA, 523 bp, Homo sapiens
agctgtcatttatagaggcttttaatagttcagggattggacatagcatttgtgtacaacttaggaaaaatcattaaaaaggaaagaacgtagacacagatatttagtatacagatatttgtctgtaaagaatttcggtggaagttcaaaataaagaatcaactaaatactgcaaagaagtgaaaattagtttaaatgttcaagaaacatggcatttcttggattkatagttctccctcttattttcattttgccagtcttcctcactccatttaactcttttgtgttgtctgcatagcataagggaaaattgacttggaaagatgaagacactgggtctgttttccttttgatactccaagaaaagaaatatgtgtgtacttttagtgatgattaagctatatatttactaattttctaatcatgttactatttgatctagtaactggtatatgtaataacttagttaagcatttttttgtacctactatatgctcctgtatagctactgtagtgaacagtc

SEQ ID NO: 794893 - DNA, 523 bp, Homo sapiens
agctgtcatttatagaggcttttaatagttcagggattggacatagcatttgtgtacaacttaggaaaaatcattaaaaaggaaagaacgtagacacagatatttagtatacagatatttgtctgtaaagaatttcggtggaagttcaaaataaagaatcaactaaatactgcaaagaagtgaaaattagtttaaatgttcaagaaacatggcatttcttggatttatagttctccctcttattttcattttgccagtcttcctcactscatttaactcttttgtgttgtctgcatagcataagggaaaattgacttggaaagatgaagacactgggtctgttttccttttgatactccaagaaaagaaatatgtgtgtacttttagtgatgattaagctatatatttactaattttctaatcatgttactatttgatctagtaactggtatatgtaataacttagttaagcatttttttgtacctactatatgctcctgtatagctactgtagtgaacagtc

SEQ ID NO: 794894 - DNA, 534 bp, Homo sapiens
tagccttgtagtatggtttgaagtcaggtagcaggatgcctccagctttattcttttgggttaggattgtcttggctatgcaggctcttttatggttccatatgcaatttaaagtagttttttccaattctgtgaagaaagtcagtggtagcttgatggggatagcattgactctataaattactttgggctgtatggccattttcacgatattgatycttcctatccatgagcatggaatgttctttcatttgtttgtgtcctcttttatttcattgagcagtttgtagttctccttgaagaggtccttcacaccccttgttagttggattcctaggtattttattctctttgtagcaattgtgaatgggagttcactcacgaattggctctctgtctgttatcggtgtataggaatgcttgtgatttttgcacactgattttgtatcctgagactttgctgaagttgcttatcagcttaaggagatttggggctgagatgatggggttttctaaatatacaattatgtcatc

SEQ ID NO: 794895 - DNA, 616 bp, Homo sapiens
gagatttgagtggggacacagagccaaaccatatcaactctccagtccctaaaataaagtaagtaactaacatgatcatcttaatccaatacattaaaaagctcttccctctcattaccacaggatttagaggttatggaatatttacaagatgtacaatgaaaatatagagataatgttttttatttgggggatctgtttattttattgaagcccccaaatcgagatagaaattcaaaatttcaaaacctaagtcatactgactaatgaaaagacaggaaaagcataaagaataataaatagaaaaatgaactgaaactaaaatgctattagaaaaattttccgtaagaaagacactgaactattttcaaagtgacatatcagaaaaagaaacttgcaaatagctaaagctagtgaggcagtcccaaaaaccaataaggaraaaaatcatcctaaaaatgatggatgatttagtcagggcaactaaaattaaaccagaaagagagaacacacacaggtagtgaaatatgtcagaccacattctgtagaactagaaaaaaatgggagtattgaattctttaataataaatggaatcctccaagtattaaaagaaac

SEQ ID NO: 794896 - DNA, 616 bp, Homo sapiens
gagatttgagtggggacacagagccaaaccatatcaactctccagtccctaaaataaagtaagtaactaacatgatcatcttaatccaatacattaaaaagctcttccctctcattaccacaggatttagaggttatggaatatttacaagatgtacaatgaaaatatagagataatgttttttatttgggggatctgtttattttattgaagcccccaaatcgagatagaaattcaaaatttcaaaacctaagtcatactgactaatgaaaagacaggaaaagcataaagaataataaatagaaaaatgaactgaaactaaaatgctattagaaaaattttccgtaagaaagacactgaactattttcaaagtgacatatcagaaaaagaaacttgcaaatagctaaagctagtgaggcagtcccaaaaaccaataaggagaaaaatcatcctaaaaatgatggatgatttartcagggcaactaaaattaaaccagaaagagagaacacacacaggtagtgaaatatgtcagaccacattctgtagaactagaaaaaaatgggagtattgaattctttaataataaatggaatcctccaagtattaaaagaaac

SEQ ID NO: 794897 - DNA, 558 bp, Homo sapiens
agttgttcattttaattaaactatcattccccatttgtttcctaggaaacaattagatgtatggttagtctgatgatgtgataagaaaacctccccagctctccatctggaaatttcatttcaactaaaaaaggtcacagtcaaatagtcactattaacaatttgttatgatggctgggcgcggtggctcatgtctgtaatcccagcactttgggaggccaaaatgggtggatcacttgaggtcaggagttggagaccagcttggccaacatggtgaaaccccatctctactaaaaatacacaaattarccgggtgtggtggcgcgcctgtagttgcagctatttgggagactgaggcaggaaaatcacttgaacccgggaggtggaggttgcagtgagccaagatcgtgccactgcactccagcctgggcaacaaagtgagactctgtcttaaaaaaaaaaaaaagaaaaagaaaaagaaaattgttatgaagccctgtggtacttgttctggccattggatgttgtagaaaagaaattacgtagtctcccagttgt

SEQ ID NO: 794898 - DNA, 636 bp, Homo sapiens
aacataggaaaggtacagtaaaagtatagtatataagaaatagtacacctatatagggcagtgaccatgaaaggaggttgcggaattggaagttgcactgggtgagtccatgagtgggtggtgagcaatggcctaagacattaatgtacactactgtagcccttataaacactgtwtacccagactacgttattcaaaaatatttttctttcctcattaataaattaaccttagctcactgtaatgatttactatataaatgtttgatttctaaatttttgtctcctttgcaataacacttagctttaaaacacaaatacattgtacgactgtccaaaaatgttttcttttattatatccttattctacaagctttttttttctttttaaaatttttcatttttaaattttttacttttgaattgcttttgttgaaaattaagacacaaacacacatattgatctaggccaatacagggtcagaatcaccaatttcactgtcttccacctccacatcctgtcccacctggaaggtccttgggggtaataatatgtatagaagtgtcatctcctgcataaacagtgccttctcctggaatactccctgaaatatatgcctgaggctgttttatagtt

SEQ ID NO: 794899 - DNA, 641 bp, Homo sapiens
ctttctgtttattaaaaaaacaacagaaatatttccgtacaagctggtaaatagccatgccctgagctccctagattccccagcttccctggccaccttgactcagagaaaccttgattttcaggatccaagtttatatctggccccrcaggtggtctgtcaacctgtttcaacactgtagatgacagcagttgtgactgcctgaccaagttttgaagattaggaatagcacttctgcttctaataaaaagggggttcatctttatagtgccatccagtcttccctcactttgggaataacttagattccatgagaagagctagaagcactgttagaagacaaagctgcacagcacaatacaggcttgggggtcagcctgaaatgtattttaatttaacttgccagttggatgagtttctgcagttgtcttctccaaacattgctatcatattttgtctttgaacttcagtagcttaatctgtgaatcagagtagtaattggaatgcaagcaagaggaatagaagtgactgatatttgaaaaacattttttaaggatgcaatgaaaaataatttactgcagttcacagagtcaaaggaggaattgagcaatggagcattgttgggaagagtaaaaaccaca

SEQ ID NO: 794900 - DNA, 453 bp, Homo sapiens
cccagggagaatcactcactcacattagattttctttttaaatcttgccagtggtcattaattatgtacaatcatttgtgacatttaaaactgttaatttcctttgtgatttaggctgtggggattttatttttcaaggaaacagtttctcaaaacccatactgtaaatgattttaaaaatacctcaatgaatagtaactatttcttcttmttattattattaatctatttgagtacctaggccaggaactatgtatacatcaaccctagttgacaaatttgtagttaagtcattcaaaagacaggaacactcagaaaggtaaagtgatattccccaactagaaaatggttgagggaaggtttatttccaaatctgcctaattcccaaatcattgttctttccaccagctaatgctgcctccttagagagaaccatattgagatgctgccata

SEQ ID NO: 794901 - DNA, 572 bp, Homo sapiens
gatttaaacacttcacaacacatatatcaaaaaattacattgttcatacatatatatgatttatatttgtcaattataccttaacaaaactgaacaataattttaaaaatttcgtaccctatgaacaatatctctccacttcctccacccttcagcccctgacaaccactgttctactctctgcttctatgagttttacttttttagattccatacataagcgagattatatagtatttttctttctctgtctggtttatttcgcttagcataatatcctccaggtttatccatgatgtaacaaatggcagaatgtccttatttttatggctgataaatattccatgatacatgtggcatccattaatrgacacttcgattatgtgtagccgttgactattctgaataatgatgcaatcaacatgtggtgcagatatctcttctatatactgatttcaagttatcaagatatagccccagaagtatatattgctggaaaatataatcattctatttttaattttttgaggaacctctatactattttccataatggctgtgccaacttacat

SEQ ID NO: 794902 - DNA, 569 bp, Homo sapiens
ttaaaaaaaatgcagagatggggtctcactatgttggtgaggctggtctcaaactactgggctcaaggcatcttcctgcctcagcctcccaaagtgctggaattacaggcatttgacatcatgtccagatgattgttttcttttctatgcagaakatttttttttttttaatttgatgtagtcccacttgtttatttttgcttttattgtctatgcttttggtgtcatatccaaaaagtgattgccaagaccaatatcatggagttttcccctattttcttctaggaattttatggcttctggtcttacatttaaatctttaatctatgtcgagttagttttttaatatggtatataagaagtgtgcaatttcattcttttacacatggatatccagttttcccatcgccctttattgaagagactatcttttccccattgtgtattcttggcagtcttgtcaaagtgtaattaatcatatatgaatgggttcatttctgggctctctattcctgtccatgaatatatgtgtctgtttgtgccagtaccgtgatgttttgattacaata

SEQ ID NO: 794903 - DNA, 569 bp, Homo sapiens
ttaaaaaaaatgcagagatggggtctcactatgttggtgaggctggtctcaaactactgggctcaaggcatcttcctgcctcagcctcccaaagtgctggaattacaggcatttgacatcatgtccagatgattgttttcttttctatgcagaagwtttttttttttttaatttgatgtagtcccacttgtttatttttgcttttattgtctatgcttttggtgtcatatccaaaaagtgattgccaagaccaatatcatggagttttcccctattttcttctaggaattttatggcttctggtcttacatttaaatctttaatctatgtcgagttagttttttaatatggtatataagaagtgtgcaatttcattcttttacacatggatatccagttttcccatcgccctttattgaagagactatcttttccccattgtgtattcttggcagtcttgtcaaagtgtaattaatcatatatgaatgggttcatttctgggctctctattcctgtccatgaatatatgtgtctgtttgtgccagtaccgtgatgttttgattacaata

SEQ ID NO: 794904 - DNA, 645 bp, Homo sapiens
gtcatacaactgccatctatttgctgaaccctgatcacagaaacactgtgccacttgtgattcaagtcaagatccactttccttggtgaccaagaagcagaaagacgttaactaattttcctttttcagtgtcagtatttgccatacctgctctagaatggtgaaaatccattggttgagaatgcttctctttcttcccacttgatttaggaaaaataagagggtccactaaatcgtgtttgtttgtttgtttccttttccctatgattttttttaaaaaatggttgaattgtttaagttgccttcattaagagaaaaatggttcttggaaaagcatttatcatcagtcattatgttgggacaataggcataaactaggattttcccaggcaccccagaacatgtggctrtgctgtatgtaagtatcatcagtgtatatttatagcattgcagcaaactctgattccgtaaaagcaattctatggtgagcaggtaggagggatagattggacaagtttgtttctcagatggtctgactcaatggaaggatagattttagagaacccagtgtcatcaagaggtagcatattctccaagcagtcctccactagtactttctttctgatgaattttgaaacctgagct

SEQ ID NO: 794905 - DNA, 367 bp, Homo sapiens
gttcatttctgttttgttaggttttgttttgttttctctaggattcaagtctccccctgttctatgtgtggaacactttctcttggctgcctggcaactcttcaacaaggccccatacactctgacatcaaggagggtattatcccagagctttctcycaagatactcaaacctggtggtttgcaggcatgaggtggccaccaccaaactttagtcagtcaatagccagcaggctctgcatgggcatcagcccttggacacaaaagtgactaaaaggagctgctaaatgccccagtagggcttctgagaagaaagggcagcagagtaccaggaggagaagcctaaagaacaaaatgcatttgctgat

SEQ ID NO: 794906 - DNA, 621 bp, Homo sapiens
ttgtccatctcacttttttagttagtatatttagatcatttagagcccgttggtttacaaacaaatttatgggtttgtattcctgagctctccctaaaatctcccaggtattttccagttccctagtgctttctttttctgtcctctggccagaaagctggagcattggttactctatgctgccatatactacccatgacygtgtcaacattaggggtagcgaagatcatagtaattgaagcttcaggtttctggcctgtgggaagacaaagaggaaaaaatatataattggagttttctccactctcttgggacaacagatcctctggttagagtggaagattttcctccctcaaagtttatatgctcctggatggatgtacaatcattttggaggtcaatatgcaacacaatatctaacatacttgaagatgggcagccctgtaatcctgttcctcatcatacaccctaaagaaacacttcaatgtgtataccagagacaaaaattactttatcattttatagtagcaaaaaattaaaattaagctaaattatcatcaacagaggagtgaacagtttgcttcctcactttattcatgtctctgacctaaaatgcagcct

SEQ ID NO: 794907 - DNA, 621 bp, Homo sapiens
ttgtccatctcacttttttagttagtatatttagatcatttagagcccgttggtttacaaacaaatttatgggtttgtattcctgagctctccctaaaatctcccaggtattttccagttccctagtgctttctttttctgtcctctggccagaaagctggagcattggttactctatgctgccatatactacccatgaccgtgtcaacattaggggtagcgaagatcatagtaattgaagcttcaggtttctggcctgtgggaagacaaagaggaaaaaatrtataattggagttttctccactctcttgggacaacagatcctctggttagagtggaagattttcctccctcaaagtttatatgctcctggatggatgtacaatcattttggaggtcaatatgcaacacaatatctaacatacttgaagatgggcagccctgtaatcctgttcctcatcatacaccctaaagaaacacttcaatgtgtataccagagacaaaaattactttatcattttatagtagcaaaaaattaaaattaagctaaattatcatcaacagaggagtgaacagtttgcttcctcactttattcatgtctctgacctaaaatgcagcct

SEQ ID NO: 794908 - DNA, 646 bp, Homo sapiens
agaagtgttttacttccaattatgtgattgattttagataagtgccatgtggtcctgagaagaatgtatattctgttgtttttgggtggagagttctgtggatatctatcaggtccacttgatccagagctccagagctgtgttcaagcggtgaatattcttgttaatatttttttcttgttgatctttctaatattgacagtggagtgttaaagtctcccactattattttgttagagtctaagtctctttgtaggtctctaagaacttgttttaataaatctgggtgcttctgtattgggtgcatatacatttaggataggtactcttcttgttgaattcatctctttaccattaagtaatgcccttctttgtcttttttgatctttgttggcttaaagtgtgttttgtcaaaaactaggattgcaacctctgctctttttctgctttccatgtgcttggtaaattttccttcatccctttattktaagcctatgtgtgtcttgcgcatgagatgggtctcttgaatacagcataccaacgggtcttgactatccagcttgtgattctgtgtcttttaattggggcattttgcccatttacatgtaagattaatattgttatgtgtgaattttatcctgtcatc

SEQ ID NO: 794909 - DNA, 634 bp, Homo sapiens
aaaagtgtgaggcccctctctctagcagaaaaatagactaaatctatttctttatcttttaacatcctgtttaagggaaatgccaaaacaaatgggaaaaaatacacacacacaaatatatatgaacatgttttgcctcatgagtaatcaaaatgtgtacatatgtatgtttatgtatgtgtgtttatatttaaaatcgtgttctgccttatgagtaaacaaaaagtatacaaattaaaaactataatgaaacgtaattttttaacctatcaatttggcattyttttttgaatgactaaattctaatcagggattaaaatgactggtacaagtgaaaactttcacatcctgttcgcatagtaagtggcaatatgtatcaagtgttttttaaagcatgttttctaactcaataaatttcatctaggagtctggcttaaagaaataatccaggatgcagacgatggtttatttgcaatatgtttatttaagcattagttatgatagtggaaaactggaaataacctaaatcaacactaacaggaaatggctgaataaattctaatagatcaaaacagtggaatttaatgcagtcattttaaaatgtgggtttaaagcaaatttttctatctgggat

SEQ ID NO: 794910 - DNA, 582 bp, Homo sapiens
aactctcactagtgagtggttctcaaagtcaagacttcagagcagctgcaccagcatcacctcgagattttttgaaatgcaaattcccgggccccactccagacctagggagtcaggaacttggcggggccaggggggtggaagggcctgcaatctttgtctgaaccagctcacagggtggttctgatgcctgccttccactccaagtctgcttgtcacgaacgcctgtctcagctcagggacatccccggcttaggaagtatgctcaggtgtgtgcagggccagtcagaaattgtttccagaaacagcctttcataagtgatagacttggtgaataaataccccagctgtctccccgccttgctgggtgaactctggggtgtcagctctgtctctcggggttccccrgtgggattcagctccagttgtgcacatgacggtaacttacttgataatgcacgccttccccgtcagcttccttctctccctacttccgggatcttcactcaaataaactacataacctcaagtcctctctcagggtctccttctggaggaaccccaactaagaggaagtagaaa

SEQ ID NO: 794911 - DNA, 596 bp, Homo sapiens
caaggtttcacagcagcttaattaaaatatgcttcttccctaggctagggcagaaatgcacactcagctctgtgtggcctgtggtcagcaggcatcacccccagtgcccaaaagtaaggagagtgggggtcaggttaaggggtgaaagagggagaggtgacagggggttggaaggtggaagataggaagggtgggggtgagaggtgaaggtggagggtgagaggcagcagggcagggaggtggggtgccagttgtggggcaggctcctttgtgccacattgtgggtgtgggggcctctgtggtctgtggacaacagcaggtctgacttgycatattcatccttccctctgggcctccttcaggtccccaggtggttggtgggaaggtgagggctcctcctctggctgtgacgtacgtccatgtcaaagcaggacaaaacagggacagtttctggtgccaggatctagggggacactaaactatcaccagcaacagaatgagacagataaatcatccttaccgaagctcttgcaggggctggcacaaaaccgccctcatgtgcagtaggagatgcatgcccatgaggagagcaaaat

SEQ ID NO: 794912 - DNA, 506 bp, Homo sapiens
cagcctttattgtgttgaggtgtgttctttctatacctaacgtaagagtttttatcatgagggggttttgaaatttaaaaaaattttttttagagatagggtctgactttgttgcccacgctgaagtgcagtgatacaagcatagtttactgcaaccttgaactcctgggctcaagcaatctttccggcctggtctccctacaggtgtttgccaccatgcccggcttttgtattttttgtagagatggcggtctcgctttgttgcccaggctggtcgccaactcctgggcatgatcatcctcctgccttggcttcccaaagtkttgggattctaggcatgagccacagtacttagcctcctgtccttataaaaattgttttctggttgattcgtgtctcctttttttcttcccgtcttattgtttgtcattgcagtttgatggttttctatagtgataaggtttgatttttttctctttgtcctttgtgtatttgttctaccagtg

SEQ ID NO: 794913 - DNA, 581 bp, Homo sapiens
aggcaattagtccagaaaaagaaatagaaagcatccagaaaaaaagaagtaaaactatgtctaaagccaacggtttgagaccagcttaggcaacatggtgagaccccatctctacaaaagattaaaaaattagctgggtgtggtggctcatggctgtagtctcagctactcaggagactgaggtgggaagattgcttgagcccaagaggtcaaggctacagtgagccatgatcatgctactgcactcccgcctgggcaacggagtgagaccctgtttcaaaaagaaaaaaaaaaaaatcayagaattgaaagtccagaaataacctttcaaatttatagtaaactgatttttaataggatgccaaaataaatgaatgaagaaaaagtagtctttttaacaaatgctcctgggacaaataaatatccagatgaaaaggaatgaagttagacctctaccatgcataaaaattaactcaatataggtcataaacctaaatgtaagtgctaaagctactaaactcttttttttttttttttttgagatggagtctcactcttgtcacccaggctaaagtgcaatg

SEQ ID NO: 794914 - DNA, 507 bp, Homo sapiens
tagtccaaagcaacaaagctggtggcgtcataacgctggggttgggaaaggatttgtgggcaaagctggactttctggcttggaaaagtcaatgatgttcctaaacctttggtttatattctagtaacaacagtattttcctcatttatgcattgagggtgatgatgcctatgttttggggttattgtaaagatcacacatataagccattaataccttgcttgtcacgtggtaagtcctacagaaatggtagctcctgatgctgttctttcctttactctcccttgttggccacaggtctggaattatgtgtcagctattttctggagaarggggatttccgagggatgggggaggacagatagcagcagaagctgtctaaatggcttcatctcgatagtcccttctctgctttgcctctcgctttatcagaaagtgtcctggcatgaagcagagcaggcctgacagccatcctgccaccagcttatagtgtggctttttgttata

SEQ ID NO: 794915 - DNA, 533 bp, Homo sapiens
ttgaagagaagtctgttctgcttgttaatttggaagaaagggaaggaaaagggggtggaaggcataattttatacataagtagtaagaataaagggatctaaccttaacaagtcttcagttttaaggaactcaggaagagataaaggagagaagttaatagagtatggcaagcagtttcctgaatgtatttgaataagtgtaaaagtaaggccatgaaaaggccgtttcatgtcagatagactgtgttgttctgtgacagattmaataaatatgagcgtcatccacttaacccttggaattaactctacatcttctagaactgattaagatttttttttttttgcatatactcaataaagatgatgtcctcctgctgctgctttaatgataaagggaaagtttcatttttttttttttttactagattcacttaagaagatttgaatctgatagtctcattctgatagtctcaactattacagttgctctaattaactgttagtttaaccctctacagttagttgatacaatg

SEQ ID NO: 794916 - DNA, 533 bp, Homo sapiens
ttgaagagaagtctgttctgcttgttaatttggaagaaagggaaggaaaagggggtggaaggcataattttatacataagtagtaagaataaagggatctaaccttaacaagtcttcagttttaaggaactcaggaagagataaaggagagaagttaatagagtatggcaagcagtttcctgaatgtatttgaataagtgtaaaagtaaggccatgaaaaggccgtttcatgtcagatagactgtgttgttctgtgacagattaaataaatatgagcgtcatccacttaacccttggaattaactctacatcttctagaactgattaagatttttttttttttkcatatactcaataaagatgatgtcctcctgctgctgctttaatgataaagggaaagtttcatttttttttttttttactagattcacttaagaagatttgaatctgatagtctcattctgatagtctcaactattacagttgctctaattaactgttagtttaaccctctacagttagttgatacaatg

SEQ ID NO: 794917 - DNA, 600 bp, Homo sapiens
accatgtaatttatcttgcaaacggatgcacttttgataatgagagagagcactattaataattacatttggtctttggtgtgacctcttaagaaaaaacaaaaatatataaagagaaaaataaaagaaataaaactacttttaaaaattacattctgacatgagcacagcatgactatttggagaactgcccttagcaaactgggatgtgtgactccagctagaattcaacaagasatcaggtcatttaggggaaatggaaccaaattgtagaagtttgaaaatggtcttgccttctgatcagtagtgaataaatacataaataaaataaaataaaataaaaatggtcaaaccccatgagcttttgtatgttctcctctttacttgacctcacagtggcttttggtacaatcattttcaatgtactcttttcttgtcttcagtgaccccatattatcctagttttcctctccttaccccagcatttctcagcttgctccacctatctatatctgtcttcccctattcaatctcagatggtttagttctccagggatccattctggaccctcttctcttttgtctctataatctttacct

SEQ ID NO: 794918 - DNA, 563 bp, Homo sapiens
caaggaaggcacagtcttccccaggaagcagagctggcccttcctgccagccagggctgtttgctgtcttccctctggtggccccacctggctgtgagtacacttgggactccactgccaggagggagagggacacgaacaaggcactcctggagggccactgaagaggaagtcagcatccagctctgcaagagcaggacaaggcctgtttgagacaagatcagggttggggcatggaaagctaagtgttctgcccatcaccgagcgctggatgctgtccgcagcttgggagtgtcctgtyctcacagccggtgggctctgttggtctgcaaaggacagcatcttccctgggaggtgaacactgtactcctgatattgtcagcaggggtgaagggtggacatcagctcccttttgcgtttgggaagtcacctgctgtacgttcacaatggtgagaaagaaaagaattattttccttcctggattttccatatttaatcactccacagaccccagggtatgctctggctctgcagaggatgaggaggtagtttaagtctctcct

SEQ ID NO: 794919 - DNA, 654 bp, Homo sapiens
ttgcaggatacgcaagggtgttttcactttatcatcactggaaatgacactgacatcactttcttagttcatttattcagaacacagttaataaacgggtcccctgcattttcaaggccttgagttaggggctttcaaggccattggtatgaatcagaaattagagtgcctccaccttgttttgtgaatttcagagcaagatttagccacttatgcccacagtgagaagagaattctgaaaattcagatgttcaagaaaatacatgtaagcaataaataaataaacaaataaataaataaactgtgacactccttagaatcaggcaacaatcaactgcacaattacttatagtgaagattcacacttcaggggacaccagaaaaagtagtttctggccaggcatggtgtctcactcctgtaatcccagcactttgggaggctgaggagggtggatcatgaggtcaagagatcgagaccttcctggccaacatggtgaaamcccatctctactaaaaatataaaaattagccgggcatggtggctcctgcctgtagtcccaactactcgggaggctgaggcaggagaatcgcttgaacctgggaggtgagcaaagatcgtgccactgcactccagcctggtgacagagtgagact

SEQ ID NO: 794920 - DNA, 542 bp, Homo sapiens
aggaccgaattactggtgcagaaggtcactaaatgctagcacttgctcagtgggcttggaacaagatccttgttctcattgcttcgctgcacttctagcagagtgtgggggagggaggcctggagactggctctcaccagggaagagagcgatgtcgcttgtacaagccacaggataaacacttaaaacagcaaaggggacacggcaaacacatgcatgagcaatgtggagtcccagactgacgttcgcacctaacgctctggagaaattggccaagattggcccaaccaactgaaaatattattgctgtaattctttcaaggtcgcttgtcagactgggttatctacctcccaagagcttgctgcacaaawcggcctttccagagagacagaactcagggctgtgtctgggggaccctctcaggcctggttgccattttgctcacgctcttccctgccaagagcatctgattcaggccatctggggtctgtagtggacaagggacgagcctggatcctgtgccagtggtcacgcagcctga

SEQ ID NO: 794921 - DNA, 647 bp, Homo sapiens
gctggccatgagtttttctattccagacaagttggaagatcaagggtgaaatgggtcatttttaatatcaaacctgttgccctgctttgttttcaaatcacaccactcttcaccctctggccccactaggccttagtgcaaattagtaaaaacctcccccttgaggggcagatacagggccctgccactgtgtccatcttggtgagacaccaaaggctgggttttagttcccacttgccttataaacacagttgtgcctgtactcccactttgatcccccctgcccacaggtgcccaaaatacacacacacatacacacacacacacacacaacccttgaaatgactggagtagcactagatgattcttccagtgctaaacaatttattatttacccacctcttccyttcctcctctctttcctcttcttgtcctcttcctcttcctttctctctccattctctctctcttctgcaataatacagtgagtgtttgtgtaagtttcaaatccagcaacctgaagattcgcctccaatggcacagggctggaccgcactcagaggtggctgccacccaatcgtcactcagcgttttatcgctgggctattctgttcgagtgctaagcaattgttcacagaaataagata

SEQ ID NO: 794922 - DNA, 614 bp, Homo sapiens
gttagcagataactttgtcttgaatgtaagccatgtgtacaacagaatgtaaggatccaggcaattcgtttaactgagtattgacttttttcaattatgatgaattatgataaagtgattaaaaacacactacctcggtcttcacataatatatgttttcatttgtaatatgatttcctactttgataacttcaaacctaatttttttatgtttttcatatggatggtttatggttattaggtaaaaatatttatttagattatgaaataaaagagcctaaattaataaagttggaaacttttgcatacttttcttaaacaactgaaaaaraagcaatttagttactacaggcaacatggtgtccatgattagtacaaaatttaattattcacaaagtgccaggcacatgggatatacaatacgacgtgtctttaaatttcacttatttcattttccattatctttaggtttatattatttcacagataataactacacatttcataactaaatctgaaatctatacaaatgcacattatgagtgtttttggagatatggacccccaaacagatggtgagatgctgaaaatttagactaccatataaaaattac

SEQ ID NO: 794923 - DNA, 588 bp, Homo sapiens
ttcatatatgtgtccttctaaaattcacaagatgaaattccaactacccatgtgacattaggaagtggtacctttgagaggtaattgggtcatgagggctctgcctttatgagagaaactccagaaaattcactagttctctttttgccatgtaaggatatgagaagayggcaattggcaatctgaagcattccatcaccaggatcctatcgtcctgtcactggatctctgtcttctagcctctggaactgtgttaaatttttgttgtttataagccatccaggctatggtacttgttatagtagcccacagatacaaagatactttccctttcctgtgagggtttttcaaagatttagtatccgcatgatatgttctaacacctatcaagcaattatttgactacatttttattattgtatctttgaacaagaaattaattaaacaatctctttcctgaactttctctcaacctccttctttattttttggcttgcttttatactgatatcagccaagaaaatattcccttttcttttaagaatccttccctagcccatcttgttttgaaagatgcttttcctatat

SEQ ID NO: 794924 - DNA, 588 bp, Homo sapiens
ttcatatatgtgtccttctaaaattcacaagatgaaattccaactacccatgtgacattaggaagtggtacctttgagaggtaattgggtcatgagggctctgcctttatgagagaaactccagaaaattcactagttctctttttgccatgtaaggatatgagaagacggcaattggcaatctgaagcattccatcaccaggatcctatcgtcctgtcactggatctctgtcttctagcctctggaactgtgttaaatttttgttgtttataagccatccaggctatggtacttgttatagtagcccacagatacaaagatactttccctttcctgtgagggtttttcaaagatttagtatcygcatgatatgttctaacacctatcaagcaattatttgactacatttttattattgtatctttgaacaagaaattaattaaacaatctctttcctgaactttctctcaacctccttctttattttttggcttgcttttatactgatatcagccaagaaaatattcccttttcttttaagaatccttccctagcccatcttgttttgaaagatgcttttcctatat

SEQ ID NO: 794925 - DNA, 496 bp, Homo sapiens
acaggctgtctgtggctgcttttgtgatacgatgcaggagttgagaagttggacagagaccatatagtttaaaatatttaccaccctagcctttgcagaaagttcgcccaccccttagagtacagaaaaagaaagatttcagagatgtcagtttgggaaggtccttgaaaagtcacttggcaaagaaaagttgtgagaagaaggttgatgttttgtcaaaraaatgcaacgatgacagatgccaacctgccttttcttccagcggcagaggacctcaggccgtggtgtgcatgcccgtgtatcggtgtgggtatgtgcacctgcacacatgtgtgcttacacgcagctcaaaacggtgccaccctgtccagagttattttggccatcatggttcaaatcaacagacttttctggaaagcttctgcacacatgccatgctcagaacaggaggtgcaaagatgggaaaggattctgcctgatatgcaaatagtgaccg

SEQ ID NO: 794926 - DNA, 646 bp, Homo sapiens
aaacaagtcctttgtctgactggcggccggttggggtgttggcaattggctcccaacatctgggaatcatttccacggctttgcctaggttgaaaactcagttcatgtcttgatgtgaatgtctgaaggcaaagcaatttcaacaagcctcaagaatcccagggattcttgtaagatactctcagggttaaggattctagttcttattgcacattttgcattttttgttttaattgatgctgtggtgggggcgggggyggggggcagtggttaggagagaaggatattgaataagcaaacagaaagctggagaagcccaggcttgaattctcagccagacactgacattctgacttgaggcaagtaacttaaccttgctaagcttccgttgcttctgttcaatggagatcatcatatctgctttataggattatggagaggattaaatgaaaatgtgatagtccttggtaaacttcatccaaatcctacagataatgtgaagatggcacgtgctataaaaaggatggagttctgtcctcaatgaattctcaacgttcccttttgagtagatgacttttcgttgagacctttacaggctgtttaggtggccctttgttatctgtctaacgactgtccaggccttctg

SEQ ID NO: 794927 - DNA, 586 bp, Homo sapiens
ggtaagtgaaaccataggaatggagtaatctggcaaatttgcccaaaaagaaaaaccccagaaacaacaatctgtacaaagtgggtagaaaaacaaccaccagctaagaatagttagaaaaagttcacaaatgtaaaaggaaaaacaggaggggctggtatcagggagaaaaagagcaagagaaatcctccggaagactatggattacagttaaatgaatttgggagaactcagtcagataaggtttgaaacaggtaatgaggaaggcattgtggttccagtgtggctgggctggggcagaaacctgaagactgcatgctaagaacaggagggcctgtcagctggcagagactgcaagtgcggcccawctgaaggagtctggtcatgggggaggccagagacatgggggcagccagatgtggaggcacctaagccctcctccgtttgttctgagagtctgttataggaagaaacataccctatttatctatgcattctgaagggctgcacacagcaggtacccaataaacactgtctgtgaatgaagactgccttggttggtcattgaatgtgaagaataatagaa

SEQ ID NO: 794928 - DNA, 584 bp, Homo sapiens
gacaggacttgatttcccacctcctgaggctagactgccccagctgagccatcaaatcaaacacaggaggtgttgaagagagaaagcttgaaattgggatatcgggagagatgcaagaagtggctggacgtataaatagtggctagactgcagtgtttttgcatgcacagctgtggttgtgtgaaatgtgaaaatgaagccatttatatatatattttaaaaagattatggcagagggtagggtggaagtasggaagatatgtacagaaagaaatgataaactaagagtgttcagctccatgagtgcagaaatgtgtggtttctagcctattgtatctctagtgcctggaacacttgtccttcatggattctgctattctctgttaaatgctgactaaataaacgtcttccaatgaaaattaaaaaaaagagagagagagggagagataaaccatcaaagaaggagagcacagaacatcccagcatacacacaacacaaagggatggagacaacttgaattttaaaaactaatagaggacttaagattcaactgaagaaactttttaggaactaaaaaatatct

SEQ ID NO: 794929 - DNA, 614 bp, Homo sapiens
tgctcatcactagacagagaacccccagcttgggcccacagcacagaccctccatcctgggatgattgcactgagcaatttctgacctccatttctctggagtggacccccaggagacaagcagaagacctttggacacaaccactactaaggtcccttcctctgctgcctccaagttggggaaggaacatgaacactgagatcaccccagagcagcagtgcgggcagccaaggaatgccaagccgtaatctacagccagcactcaatggggagaagaacccacactttgagaacattgagagggaccatggctgtaacatgtgaaaacatcyagaaaagaagtctattgggtgcactcaatctacactgtaggtaaaggaatgacaacatgcagagatgagaaagaaccaacacaagaactccagtagctcaaatgactagagtgttatatgtcctcctaagaaccaaaccagttctccaacaagagtttttaaccaggctgagtgggctggaattacagaaatagaattcagaatatggatagggatgaagcccattgagattagaggatggcaaaacccaatccaaggaaagtaataatcacaataaaatg

SEQ ID NO: 794930 - DNA, 404 bp, Homo sapiens
aaatggtgaaagcctccacatagtgtcttacaccttctgtttttttctacttaatgtatcttgaagatcctttcatagcagtacacatcaaaatgccttattctttttaaatacagtcatgtgttgcttaacgacagggatacattctgagaaatgggttgttaggcaattttgtcatttttaggaatgccrtaaagtgtatgacacaaacccggacggtacagcctactacacacctaggccatttgctacagcctattgcttttaggctataaacctgtactgcatgctactctactgaatactgcaggtaattccagcataaaggtatgcatttgtgtatctaaacatagaaagggacagtaaaactacggtattataatctcatgggatcactgttgtac

SEQ ID NO: 794931 - DNA, 612 bp, Homo sapiens
agtgtcttacaccttctgtttttttctacttaatgtatcttgaagatcctttcatagcagtacacatcaaaatgccttattctttttaaatacagtcatgtgttgcttaacgacagggatacattctgagaaatgggttgttaggcaattttgtcatttttaggaatgccataaagtgtatgacacaaacccggacggtacagcctactacacacctaggccatttgctacagcctattgcttttaggctataaacctgtactgcatgctactctactgaatactgcaggtaattccagcataaaggtatgcatttgtgtatctaaacatagaaagggacrgtaaaactacggtattataatctcatgggatcactgttgtacatgcagttctttgttgcctgaagtgttgctatgcaacacatgactatggttgcatattatcattgcctgatatatcatcatgtatttaatcaaaattctgttaattaacatttaaattacttcctcttcttcagcattataattctacagtaactaaccttgaaaatatctttttgtacatgtgtaactatatttatatgataaatctctagaaattaaattacttcgt

SEQ ID NO: 794932 - DNA, 623 bp, Homo sapiens
acatggaccccttgaacctaaaagttagaaaaaagggcaaaaataataacaagcacattacaaaataatatgggcagatgatcagtaaacaccagaaagggtactcaaaatcttttttatcttatttttttgagacagtttctccctctgtcatccaagctgcagtacagtggcaccatcttggctcatggcaacctctgcttcctgggctcaagcaatccttctaccttaacctcccaagtagctgggactacaggcgcataccaccacacttggctaagttttttgtgtttttgtagagactaggtttcactatgttgcttaggctggtcttgaactcctgggcttaaatgatccacctgccttggcctcccaaagtgctgagattatagacataagccacygtgcccagcctctgaaaatctttaaatatcagaaaaatacaaatttataccataatgagatagaatagtgcatacctactggaataagcaataaaaagtctgattataccaaatatgggaactgatgtggaataagtagaactctcatatcttgaaaatgtgattgtaaggtggaaacagtttggcagtttcttaaaaatttaagtgcatatctatact

SEQ ID NO: 794933 - DNA, 616 bp, Homo sapiens
aaaacttggaaaccaatggaatagtccttttctaaagcaaagacctccagctcaaaaagtaccaggaatctaaggaaacctgttgacacagtatggtcattgacaggtaactgccacaagagggcaaaattctcaggaaaaggaatgatgttgatccaagtctgaaatctcacttttgccttytccacttagaatatcctttttcttttagatattgtcttgatttttcaatttaataagagctaacttataagagtgtggttatttctttggcctgaaatctctcccaccctttcctccctccctccccctgttaactcacattcatattcagttgtcacctaagatattatttccttagagaacctcacctccctggactaggtttgttccctgtgcactcactcccagagcatcttgcccttagccatcaaaatactttacactcttgaagtttctaacttctagattttaagcttcatataagggcaagggaccatgttgatcttttttgcagttcaaacctagaggccagcccagtgtttgagtcacagtgggtattcaataaacctttggtcaatgaataaattaatggtagattttagggggaaaacat

SEQ ID NO: 794934 - DNA, 570 bp, Homo sapiens
caataacttgagggcacatggaagtggatcttttcccagttgagcttctgataagattgtagccctggccagtacttgaattgcaatctgttgacagaaactgtgacaggactgatgatgcacagaaacagataataaacgtgtggtgttttaagccattaagtctgtggtactyagcaaagctgtctaagatatgttacgtaaaaaataagttatgaaacagtacgtatgatatgatcttattttaaagtaaacttatatttaaataaatgttcatagaaaaatgtcttggacaatgtaaaccactaggtgtattcctcatacttttctgcctttcttgaaacttatcttcaatgaacatgtatattataaagatagatgtattttcatttttaaagaaaaaacaatatccaaaaccttgggaagagagtttatctgtgatgtgtaatttttgtgtcataatgatgctacagttttaagcccttagaaatttagaaaactaaagaatttatgtataactaaataatttatgtataaataatacagtgatttttttttccactgcgggat

SEQ ID NO: 794935 - DNA, 583 bp, Homo sapiens
ggcggctaaacactgggtttttcaagttgttttgattattctaggttacctgctttcctatataaattttagaatcatcttgtcaatcttgtcaatacatacaaaaaatccttctaaaagatttactgagattgttttgaatctgtagatcaatttggggagaattgatatcttaaaaatattgagtctttgaccatgaacatgtgtctctccatttatttaggtcttctttagttccttttatcactattttgtagtttcracgtatatctcctgcatatacttaattggctttacatcttaatattttatatgttattggtaccttataaattgtacttaaacatttttaaattcagttttttggctaatgaatacaaatgcaattgatttttgtgaccttatgtcttgtgatcttcctaaactcagttattagttttggtagtttgttgttgaatctatagaattttctgcataaaaataaaacatgtaatcttcaaattaaagaattttacttcttccatttaaataagatcactttctatatcttatttttattggctagaatggctaggatctctaa

SEQ ID NO: 794936 - DNA, 547 bp, Homo sapiens
agtgatcagatatcacctggggatggtagacaataagaaaaccaattagataccaatggtggtcagatatgaagatggaggaagactccatctcaaaaaaaaaaaaaaagatcacatatctcaatgtaaaaatatgaaatttaatgagaaattcttcaggtcctaggacttgatgaataattattagacatgacaccagaaaagcacaatcaattctaagaatttattaattsgatgttatcaaaatttaaaacttttgccctgcataagagcctgttaataaaaagacagggtaaaaactggaagaaaagtgcaaaccacacctgataaaccatatctgacaaggagctcatatctagaatattgtttaaagttttcaaaagtcaacaacgacaacaagaaaaaacaagccaattagaaaatgggctaaaggcatgaaccgatatttcactgaacaggatagattgatggaaaatgagaaaataaaaaaacttttatcagaggaatgccagtccttttaaattatcaagcccagagagacattaaa

SEQ ID NO: 794937 - DNA, 547 bp, Homo sapiens
agtgatcagatatcacctggggatggtagacaataagaaaaccaattagataccaatggtggtcagatatgaagatggaggaagactccatctcaaaaaaaaaaaaaaagatcacatatctcaatgtaaaaatatgaaatttaatgagaaattcttcaggtcctaggacttgatgaataattattagacatgacaccagaaaagcacaatcaattctaagaatttattaattggatgttatcaaaatttaaaacttttgccctgcataagagcctgttaataaaaagacagggtaaaaactggaagaaaagtgcaaaccacacctgataaaccrtatctgacaaggagctcatatctagaatattgtttaaagttttcaaaagtcaacaacgacaacaagaaaaaacaagccaattagaaaatgggctaaaggcatgaaccgatatttcactgaacaggatagattgatggaaaatgagaaaataaaaaaacttttatcagaggaatgccagtccttttaaattatcaagcccagagagacattaaa

SEQ ID NO: 794938 - DNA, 475 bp, Homo sapiens
ggaggaagggtcacccttgttacaccttagcaaagaacgtagctgcactgtgcccatgtccaaagactttgtgaaagtctgaacttaagagtgatgatatgaaaaactacaaaacaacattgaaacaaattaagatctwaataagtagaaagacatcctgtcttcatgggattagtattttcatcttaagattgtgtacagattcactacaatcctcacaaaatttagttggctgtttttgttggaaacgttgagaagctaatccaaaaatttatatcaaaattttgaagtcttccaaggacaaaaaaattttttttaaatccaaggaactcagaatagctaaaacaatcttgaaaaagggagacaaagttaaaggatttacatttcttgatttcaaaacttactacaaagctacagtaattaagatcaggtagtactggcataaggatagacatgtagatctatatccatatga

SEQ ID NO: 794939 - DNA, 357 bp, Homo sapiens
gtgacttcttcatgtaacactaaaaacataggcaacaaatgtaataatagccagggtaattaggcaagagaaagaaagggtatcaaaattggaaagcagaaagtcaaattgtccctatttgcagatggcatgatcttatatatggaaaaacctaaaggttctaccaaaaaactcttagaactgatamatttagttaagttttaggatacaaaatcaacatataagtatcagtagtgttcctatatttgaacaataaactagctgaaaaagaaaggcaatcacatttacaatagctacaaaaaataaaaaataataaaatacctaggtataaatccaaccagggaggtgaaagacctc

SEQ ID NO: 794940 - DNA, 549 bp, Homo sapiens
ctagagattgccttctccctgtggaattttaccccctgctcctctggtctccctcccaatggattcctgtggtgccaggcaggaatggcctgctaggggacaagcaaggtcccagggcctttctgctgcttcctctaaccktgtatttcactcagctctccaaattgactcagctccaggtagttggaaacttctgcaaacagaccttcaggttctccagttggggatgtgtgttcaggagaggagggtctccttttcccacttctgcagtcggggcactcacagtatttggagtgtctcccaggtcctgcaggagcagtccacttctttcagagggtctgtgggttctcttgggattgctggtttgttcttgcagttgaactggagctaaaattcacaatgtgagcttccgcaagctgctctgtctggagctgcaatctagtcctgcctcccatctgccatgatgatcgccctaaattatacacatttttaattttaacaacatcattaagcttctatgaaatatctccccaaatgtctttttaaatg

SEQ ID NO: 794941 - DNA, 549 bp, Homo sapiens
ctagagattgccttctccctgtggaattttaccccctgctcctctggtctccctcccaatggattcctgtggtgccaggcaggaatggcctgctaggggacaagcaaggtcccagggcctttctgctgcttcctctaaccttgtatttcactcagctctccaaattgactcagctccaggtagttggaaacttctgcaaacagaccttcaggttctccagttggggatgtgtgttcaggagaggagggtctccttttcccacttctgcagtcrgggcactcacagtatttggagtgtctcccaggtcctgcaggagcagtccacttctttcagagggtctgtgggttctcttgggattgctggtttgttcttgcagttgaactggagctaaaattcacaatgtgagcttccgcaagctgctctgtctggagctgcaatctagtcctgcctcccatctgccatgatgatcgccctaaattatacacatttttaattttaacaacatcattaagcttctatgaaatatctccccaaatgtctttttaaatg

SEQ ID NO: 794942 - DNA, 549 bp, Homo sapiens
ctagagattgccttctccctgtggaattttaccccctgctcctctggtctccctcccaatggattcctgtggtgccaggcaggaatggcctgctaggggacaagcaaggtcccagggcctttctgctgcttcctctaaccttgtatttcactcagctctccaaattgactcagctccaggtagttggaaacttctgcaaacagaccttcaggttctccagttggggatgtgtgttcaggagaggagggtctccttttcccacttctgcagtcggggcactcacagtatttggagtgtctcccaggtcctgcaggagcagtccacttcyttcagagggtctgtgggttctcttgggattgctggtttgttcttgcagttgaactggagctaaaattcacaatgtgagcttccgcaagctgctctgtctggagctgcaatctagtcctgcctcccatctgccatgatgatcgccctaaattatacacatttttaattttaacaacatcattaagcttctatgaaatatctccccaaatgtctttttaaatg

SEQ ID NO: 794943 - DNA, 648 bp, Homo sapiens
cttgaataaaccccacctgagcatggtgtattatccttttgatgtgctgttggattcagtttgctaacatttaattgaggatttttgcatctatgtacatcaggagtattggcctgtagttttcttcaatgtgtccttatcttgttttagtatgaggattattctggcctcatataacgagttagaaagaattcccttctcttcagttttctaggctagtttcaagaagattggtaccagttcttctttgtacatttggtggaatttagctgtgattccatccagtcctgagctttcctctgttgggacactttgtattgctgattcaattttgcacctcactattagtctgttcaggttttatatttcctcctgattaaatcttcgtaggttatatgttttcaggaatttatttcctctaggttttccagtttgtcagtgtatagttgttcataatattatccgatgatcttctgtatttctgtggtatcagttgaatgtttccattttcatttctgattttgtttatttggatcttctctcttcttgcatagcctrtctagtggtttatcagttttgtttatcttttcaaataacaaatttttccttttgttgatcctttctattttttaagtctctattatattt

SEQ ID NO: 794944 - DNA, 577 bp, Homo sapiens
caaagtaaagagaatgggagaaaatattttcaaaatacccatctgacaagagattaataaccagaatatataaggagctcaaacaactctataggaaataatttaataatccaatcgaaagatgggcaaaatatctggatagacatttctcaaaagaagacagacaaatggcaaacaggtatatttaaaggtgctcaacatcatggatcatcagagaaatgtaaatcraaactacaatgagatatcatctcatctcagttgaaatgacttatgttcaaaggcaggcaataacaaatgctagtgaggatgtggagaaaaggggactctagtacactgttggtgggaatgtaaattagtacaaccactatgggaaacatttagaagttcctcaaaaaaactaaaaatagagctactgtatgatccagcaatcctactcttagatatatacccaaaagaaaagaaatcagtatattgaatagttatctgcactcccatgtttattgcagcacaattcacaatagccaagatttgtaaccaacctaagtgcccatcaacagacaatggataaataaaatgt

SEQ ID NO: 794945 - DNA, 577 bp, Homo sapiens
caaagtaaagagaatgggagaaaatattttcaaaatacccatctgacaagagattaataaccagaatatataaggagctcaaacaactctataggaaataatttaataatccaatcgaaagatgggcaaaatatctggatagacatttctcaaaagaagacagacaaatggcaaacaggtatatttaaaggtgctcaacatcatggatcatcagagaaatgtaaatcgaaactacaatgagatatcatctcatctcagttgaaatgacttatgttcaaaggcaggcaataacaaatgctagtgaggatgtggagaaaaggggactctagtacactgttggtgggaatgtaamttagtacaaccactatgggaaacatttagaagttcctcaaaaaaactaaaaatagagctactgtatgatccagcaatcctactcttagatatatacccaaaagaaaagaaatcagtatattgaatagttatctgcactcccatgtttattgcagcacaattcacaatagccaagatttgtaaccaacctaagtgcccatcaacagacaatggataaataaaatgt

SEQ ID NO: 794946 - DNA, 548 bp, Homo sapiens
ttgaaaaaagctttgtctccttcatcacgagcaatcttcctccagcagtcaagtgtgcctgtgtacatgatgtcagttgctttgagttctgactgcatcatcatgcagcggcaaacagtgtcaaatggataggaagtcaacccagcaaatggaagtgatggactgtgccatcatccagctgatgacgatgcgagtgttcttgggatctggaagcattccctttacagtgccatagatactgaagtagacagcttggtagatgacaataccctgcacaggcacgttaaagccttggtacaggcccttaatcccatccgatttgtagatcttaaccaggcagtcatcgagatctctgaatcccctttcgcctccaggtctacccacatcggctgctagaaaggtaygggcaaaaccaaaagggtacacaaaacataaggatgtggccccagcggcactgcccgatgccagattccctgcaaagtcatgccaaaactgggtcttcttgtccacaccacccaggaagatctgcttgtttttatctttgaagg

SEQ ID NO: 794947 - DNA, 541 bp, Homo sapiens
ataaatgtcgctaaattaaaaggaaacaagcctgggcaatgtggcaagaccccacctctacaaaaaataacaaaaattagccaggcatagtggcacgtgcctgtagtcccagctacttgggaggctcaggcaggaggattgyttaagccagggaggtcaaggctgcagtgacctgtgattgtgtcactgcactccagcctaggtgacagagtgagactctgtctcaaaaaaaaaaaaaaaaaaaaaaagaaccaatctcttggtcttttggagggttgtttttcaaggcaatgaggttgaagaccctaacttatacacacacagactttttttttttttaatggtaaatcatgactagaaaaaaatgctttacaatcatggttaagtatgacgttagggtataaaacagaatgcaagttttctgcccacatgatagattaaaagtaatggcaaagccgggtgcggtggctcacgcctgtaatcccagcactttgggaggccgaggcgggcagatcatgaggttaggaaatcaagatcagcc

SEQ ID NO: 794948 - DNA, 511 bp, Homo sapiens
tcactcagataagcctgatgcatgttcaagtttgaaaaacgctgacttagagcaatattagcccaaaagaacccaatgttagaagttctcttttcttgctgctggctaggaggaggtgagttcccccgaaggtcatatgccaaaggcttccttcaktgtgggaccacctctatagcttgcagcagggacaccagctgccctggtacttcaatattgttcttcggttgactcaagagttgacaggaggaggagagaatgtggagggacgcaccaggtgtgagggaccttcacagcccatccatcattttaagctcaggcagctgacttggaaaaacctatcagaatcacaaacaaggccagccaggaggctgagatctggtggggcaggaagagaataaagtatcctactttaagtgagtgagtatctccaatcaacctggaggtcttggcagatagaggcaggtgcttgctgcattgaacctgaagccttgtacctaattttcagagtcca

SEQ ID NO: 794949 - DNA, 585 bp, Homo sapiens
aatactttagtcatttctcgtgcttttctgtcctggtggggaaagcctcaacccatcctgaaaaggtgcagataagcactagcctataccgatagcccctggcacggggcagttcagtaaagtctataagcaagttttcacaaggcatggctcctacttcctgaattcttgggggccgagtggrcccctgtcgcgggttgttctgagcataggttaagcattgttcacaaacggctcgagtgatggcagagagccacagcacatagaaatggcattttagtagcgtttctagtgccgtttttcctacatgagttccttgatgaatttgcttcacaaacttaggagctaacatctccggaatagctaaactcctatcagagaatttctaccactttcctttaatatattttccagctcgcagggcaaaccaggctctttcatttggagtataacttgggatctcttggagaggaggttctgggaggagaggcatagctaagacttcctcggctttctctttaaaatgcagcataatcattgctgcccgttttgcctctctgtccgcctttctgtttcctttggctt

SEQ ID NO: 794950 - DNA, 585 bp, Homo sapiens
aatactttagtcatttctcgtgcttttctgtcctggtggggaaagcctcaacccatcctgaaaaggtgcagataagcactagcctataccgatagcccctggcacggggcagttcagtaaagtctataagcaagttttcacaaggcatggctcctacttcctgaattcttgggggccgagtggacccctgtcgcgggttgttctgagcataggttaagcattgttcacaaacggctcgagtgatggcagagagccacagcacatagaaatggcattttagtagcgtttctagtgccgtttttcctacatgagttccttgatgaatttgcttcacaaacttaggagctaacatctccggaatagctaawctcctatcagagaatttctaccactttcctttaatatattttccagctcgcagggcaaaccaggctctttcatttggagtataacttgggatctcttggagaggaggttctgggaggagaggcatagctaagacttcctcggctttctctttaaaatgcagcataatcattgctgcccgttttgcctctctgtccgcctttctgtttcctttggctt

SEQ ID NO: 794951 - DNA, 588 bp, Homo sapiens; identical to SEQ ID NO: 788665

SEQ ID NO: 794952 - DNA, 579 bp, Homo sapiens
acattattttgatgagaatttcagctgaaggatgaacagaatggttgtccagtaataataaaagcttgcagttgtcatctagtctggcttccctgcagtgaacatgagccactggtacaaaatgtctgtgaaaccaaacagaaaagatgttcttggaagtatatgcctttttgttagcataatacaataatgaactggtatgaaattcactcttkgaaaacagggaggatctaagttttcgcccgacacagcaagtttacacttcggtgtgcctgttgcattagcacactccagcacagtcattctatctttggtatcattagttcacgtcggggctgtctcatcagatatagtctatgtctttttggggcagttacaacaacagagtgatgtttcattcacatcatatacttgttctggcatcatttacatcagtgataatcttggcaaacccatcaatgaatttgtccactttgtgatcagcagttgctttatcacaagtctttacagatttaatgctacgtcttttcttaaatttctgcaaccagcctgttgaatagtcaccgttcccttcaattt

SEQ ID NO: 794953 - DNA, 669 bp, Homo sapiens
ttcaatatttgttaattaattaacaaattaatgaggttgtacattgtacaacctcaagtattggtgaggttatacaatgatgggaatatacatttgctgctggtggtagtgttaattggaacacctgctttggaaaacactggcatcacatggtaaggttaaatatatacaaaacttatgatccattgattccattctcggccatagatgccctagatgggcatcaagataaaatgtacaagactgttcacaccagcattgtttataacagcctaaataccccagrtaacattcagtagtagaatagatgaacagattgtgttagacccattcaatagaatactacttagcaatgaaaattaatgaactatgggtttacccaaccacacagataaaattcacaaataaaaggctgagtgaaagaagccagacacgaatacatagtgccaggcctctgagcccaagctaagcccgatggcattccaccacaaaagaaattaaaatggcctgttcctgccttaactgatgacattatcttgtgaaattccttctcctggctcatcctggctcaacagctcccccactgagcaccttgtgacccccactcctgctcgacagagaacaaccccccgctttgactgtaattttcctgtacctacccaaatccta

SEQ ID NO: 794954 - DNA, 529 bp, Homo sapiens
gttttaatttttttgttgttttgttttttgtttttgtttcgagacggagccttgctctttgcccaggctggagtgcagtgacgcgatctcggctcactgcaacttctgcctcccgggtttaagcgattcttctgcctcagcttccagagtagctgggattacagacatgcaccacsatgatcagctaacttttgtatttttagtagagatggggtttcaccatgttgtccaggctggtctcaaactcctgacctcagatgatccacctgcctcaacctcccaaggtgctgggattacaggcgtgagagactgtgtccagcctaaaataattttttttttttaaaaaagaaagaaaactcacctatacagtggagctgcatatatgtaggatttgtttctaaagtcaactcacaaaatattttaaatctattaaacattgaacacaccagaatttgaaattcattttgcagaataaacgaaggaatttaagaataacccatatgcagttgtctagtcgttccaactattc

SEQ ID NO: 794955 - DNA, 543 bp, Homo sapiens
atttataaaatttttattttagatatttagcatctgtgtttttctacatatattatattatgtgtgttctaatatcctcaaaatctacatctcttatcacaacatattattatttatactatttgatatttttaactttaatttcactctgatattgatttcacaattatytttcgtattcacatatcttttaatttcttcatttatatattttaaaacattgtcaattatgtctgatgtagcacttaactatcttcttttgctatattatttaggatagctaacactgtatttccatctattatacataggtaaaagtaggggacaatttcttacataattttgtcttccagagctacaagatatgtctatatgcctcctcttatttttaagaacttgcccccttctgtcaaacttaaattgtcctctgccttaaaattacagtcaacataaaatataccgaaatacatgactagatccttatggtagtgactcagttctttcaactcaccagttaatttgagatggaatccaagcattccc

SEQ ID NO: 794956 - DNA, 452 bp, Homo sapiens
aattgttttctccattcacgttttatgttgtaattgatttatttgcatttgtcattttactatttgcttctattatgtcacggcttttttcgttcctccatttcttcttcactgatttttttgcctgagtattttatgacgacatattttatttctttaattttttwaactatatttttagttattttattagtagttattatagggcttaacatataaagcagttcttcagaattagctaaagatttatactaactcaattccacaaaagacatagatgttttactttatatatctctattttcttttctccccttttttgaaaactttgtcatacatattacatatatgcatcataatccccaaaatttaatgttgtagttattactttatataattttaggaattttaaagacactgagagatggaagaacaaacatactattagattt

SEQ ID NO: 794957 - DNA, 452 bp, Homo sapiens
aattgttttctccattcacgttttatgttgtaattgatttatttgcatttgtcattttactatttgcttctattatgtcacggcttttttcgttcctccatttcttcttcactgatttttttgcctgagtattttatgacgacatattttatttctttaatttttttaactatatttttagttattttattagtagttattatagggcttaacatataaagcagttcttcagaattagctaaagatttatactaactcaattccacaaaagacatagatgttttactttatatatctctattttcttttcyccccttttttgaaaactttgtcatacatattacatatatgcatcataatccccaaaatttaatgttgtagttattactttatataattttaggaattttaaagacactgagagatggaagaacaaacatactattagattt

SEQ ID NO: 794958 - DNA, 529 bp, Homo sapiens
tgaagaacagactttcattctgaagaaattcccgaacaatttcttataaggttgtcttcttgccactaattatctcagtttttatctgggaatatctttatttcccattcatttttgaaagacaatttttgctggtgtaatattattggttgatttttatgtttgctttattttctcttagtcctctgttcaattattttctcacttgctcaggtctccattgcttgcgatgatattaatgaaacagctgctgatcttattgaagttaccttgtgcgtaagtcattttttcttgttgttttcaagaatttctccttgtttttttgacattattttatgtgatgtctttgggtgttgatctcttttgtgttgatcytactgctagtttattgtgcttcttgaatgtgtagattgatttttttcatacagtttagaagttttcagttataattttcttattttttttctatttctttctcctcttcttctgctatgcctattacacatatattgatgtggttaaagtgtta

SEQ ID NO: 794959 - DNA, 576 bp, Homo sapiens
atgtcagtataccttcttgcagagggcatggtagccaatttgatgaaagaaattcatgcccaggaggtctagcaaataggccaagtgggattgactaggtatttgaggaggttgacagtgatgaaataaagttaagtagaccccgaaattcagcaaccatttcttaaataactgtgaatgcagtaaaggaatgttataatattgatggtcagtaagcagagtatgggtataaagaagttatataattatgagaccaccgatgttaactccattataaatgaaatttaaagtagggaagtaagtgaagtgtcatttaaatccrgtaaagacagggagttaagtcccccagagtgattatagtccatgtgcttccaagataatgcaggtaacactgaaataactaaagtgaatactcaaaaagcaagttgttattaatatgacacacattattatcaaagcagttgagagtggacaagattgacttctcagtaaagttttctctgcctagtttaagtatataagtaagctatatttggtttaaaaaaccagaattttttccatatttatactaaacta

SEQ ID NO: 794960 - DNA, 465 bp, Homo sapiens
gaggagatgccacacacttgaaacaaccaggtctcataagaacgccatcaaaggaaaagcactaaagtgggaaatttgcccccatgatccagtcacttctcaccatgccctacttccaacactgaggattaaaatttgatatgagattcaggtggggacacaaatccaaaccgtattaactacccttatattcctagggtaaaactatttcgtggtgtataatgatactaatatggtgctrgatttgatttgctattattttcctgagtttattttacatctatagtcacaaatgaccatttcctatagttttcttttcttgtagtacctttgtctggtttttatatcaaggtaatgctggcttcattacatgagttagtcagtgttcccttcttttcaattatttggaagagtttgacaggagttcacttcaattcttcatcaaatatttgaaaaaatttacca

SEQ ID NO: 794961 - DNA, 614 bp, Homo sapiens
ctctgtagctcaatcttgcgtgtccctgaattctaatgagtttaagcaacttttcatgtatgtatcgatatatttttacctatagtttctactgaaccatttgtctttttattcatttgtaagtcctttatatcttctagatatgtaaagtcaggggtttatattgcaaatatcttctcctggtttgaggcttgtctttttgctctccttatggtatattttggtgaatagaagttcttaatgttttcatggagttgaatttatcaataatttgtttgtggtttatgtggttggtggcttgtttaaaaaatcctttttctcctagattcttagaatagtgtcctatgtcatctaaagtgttactgcacccttttgggtctgtggtaaagcaggctaactgtccaccaagtccttgtgcttattctcttcagaagatagaattgtcagraagaagctgctcagtcagtgattggttaacccttgtttgcatctagatgggatcatgtgactagttcttgttaatggaatatgagtagacgtgatgtcatgctcatataagaagtgataaattatctccttccccatccacaaaaatgcaattactctgggatcct

SEQ ID NO: 794962 - DNA, 653 bp, Homo sapiens
caggcacgcatttgtcttttaatacaacattttagctttggacagtgaggaaataaattgggcaaagatgggttgctgggtgccagggttcatccagttctaatggtgacaccactctctggggacttggccaggaccccagccccaggtgctcagcagagctagtgacacgtgggaatggagagagtcacagagggtactctatggcctggccagcccctgagaagaccccacctgagagggagccatgcaccaaatgcaagcaacctgctccagggaggcacctgcccctggctggcagccagagtgcctgaggccacctgcagaggggctggtatggctgcctcgagagtaagacaggcatcctcaggcaggacgcccaggactctggctaccactctagaycttctggcttttttagggacaattgattccccaggaaactgtgtaagcttagaccagcaattctccaggtggggccctgggtgggcagcaccagcctcccctgggagctggtgagagaagctggagagtcccctgcataagaagacctgggcatgggcccagccctgtgctctccatctcttgaacagagatcaagcaggcattgggacgggggggtcctgggaatttaacattcactgtagtgcagt

SEQ ID NO: 794963 - DNA, 634 bp, Homo sapiens
aaataaaaagttattttcagtaattaaaaaaaaaaaaaagaaactcagcctggctatcagagcttgcagtgtaaccagtgtgcttattgtaaagaaataggacattggaagaacaaatgccctcagctaaaaggaaaacaaggtgactcagagcagcaggccccagacaaggaggayggggccctgctcaacctggcagaagggttactggaatgagggggactgggctcaagggcccccaaaaagcctgtggtcaggatgaaagtcgggggtaaagacattgattttcttttagataccggtgctgaacattctgtagtaaccaccccggtcgcccccttatccaaaaagactcaacataattggagccatgggggtttcagcaaagcaagctttctgcttgccccggacttgtactgtaggaggacataaagtgattcatcagtttttgtacatgcctgactgtcccttgcccttgttgggaagggacttgcttagcaagctgagagccactgtctcttttacagagcatggctctttgctgctaaagttacccagaacgggagttattatgacccttacggtcccccgagaggaggaatggagacttttcttaatgagccaggccaagtgg

SEQ ID NO: 794964 - DNA, 634 bp, Homo sapiens
aaataaaaagttattttcagtaattaaaaaaaaaaaaaagaaactcagcctggctatcagagcttgcagtgtaaccagtgtgcttattgtaaagaaataggacattggaagaacaaatgccctcagctaaaaggaaaacaaggtgactcagagcagcaggccccagacaaggaggacggggccctgctcaacctggcagaagggttactggaatgagggggactgggctcaagggcccccaaaaagcctgtggtcaggatgaaagtygggggtaaagacattgattttcttttagataccggtgctgaacattctgtagtaaccaccccggtcgcccccttatccaaaaagactcaacataattggagccatgggggtttcagcaaagcaagctttctgcttgccccggacttgtactgtaggaggacataaagtgattcatcagtttttgtacatgcctgactgtcccttgcccttgttgggaagggacttgcttagcaagctgagagccactgtctcttttacagagcatggctctttgctgctaaagttacccagaacgggagttattatgacccttacggtcccccgagaggaggaatggagacttttcttaatgagccaggccaagtgg

SEQ ID NO: 794965 - DNA, 634 bp, Homo sapiens
aaataaaaagttattttcagtaattaaaaaaaaaaaaaagaaactcagcctggctatcagagcttgcagtgtaaccagtgtgcttattgtaaagaaataggacattggaagaacaaatgccctcagctaaaaggaaaacaaggtgactcagagcagcaggccccagacaaggaggacggggccctgctcaacctggcagaagggttactggaatgagggggactgggctcaagggcccccaaaaagcctgtggtcaggatgaaagtcgggggtaaagacattgattttcttttagataccggtgctgaacattctgtagtaaccaccccggtcgcccccttatccaaaaagactcaacataattggagccatgggggtttcagcaaagcaagctttctgcttgccccggacttgtactgtrggaggacataaagtgattcatcagtttttgtacatgcctgactgtcccttgcccttgttgggaagggacttgcttagcaagctgagagccactgtctcttttacagagcatggctctttgctgctaaagttacccagaacgggagttattatgacccttacggtcccccgagaggaggaatggagacttttcttaatgagccaggccaagtgg

SEQ ID NO: 794966 - DNA, 634 bp, Homo sapiens
aaataaaaagttattttcagtaattaaaaaaaaaaaaaagaaactcagcctggctatcagagcttgcagtgtaaccagtgtgcttattgtaaagaaataggacattggaagaacaaatgccctcagctaaaaggaaaacaaggtgactcagagcagcaggccccagacaaggaggacggggccctgctcaacctggcagaagggttactggaatgagggggactgggctcaagggcccccaaaaagcctgtggtcaggatgaaagtcgggggtaaagacattgattttcttttagataccggtgctgaacattctgtagtaaccaccccggtcgcccccttatccaaaaagactcaacataattggagccatgggggtttcagcaaagcaagctttctgcttgccccggacttgtactgtaggaggacataaagtgattcatcagtttttgtacatgcctgactgtcccttgccctygttgggaagggacttgcttagcaagctgagagccactgtctcttttacagagcatggctctttgctgctaaagttacccagaacgggagttattatgacccttacggtcccccgagaggaggaatggagacttttcttaatgagccaggccaagtgg

SEQ ID NO: 794967 - DNA, 582 bp, Homo sapiens
acttaccaagttatccataaaaaccctagcctctgagttctcagggagtctgattcaagtgatgactccagtcctccctctcagaggccctgcatcaactaaactctttctctactgcaataccatggcctcagtgaattggttttgtctgtgctgtagccaggaagaacacattgggtgattacagaaccaacagtgtaaacacaggaatgtggaggaycatggggtttgaagccatcaactgcaaagacacacctgagtcaagctcaaataatcctgcatggctgtggatggacactcaaaacaaaatcagatggctaaatctaggtgtgccggggctgcctctgtaggtgagagttcgccgattaactgttctgtagaaaatacttttttaaaagataatacatgtctgttaatttgaagcttatatataatatacaaactgacaaccaaaatgagtgattgcagcataagtctcaaaccactaaggctttttgagccagctggaggatgtgcccaggagaaagtcaagtcacggaggcatctgtggctgttttatccaaagaagttcttagaggggtt

SEQ ID NO: 794968 - DNA, 605 bp, Homo sapiens
tacatttatcttgttttttttgagacatagtcttggtctattgcccaggctggagtgcaatggtgctatcctggctcatgcaacctctgccttccacattcaagtgattctcaagtctcagcctccctagtagctgggactagaggcacaccccaccatgcctggctaattttttttcagtataaatggggtttcaccacattggccaggctggtcttgaagtcctgacctcgtcatccacctgcctcgtcctcccaaagtgctgggattacaggcatgagccatgacacctggccctatcttctagcactatttggattatgagcttctggaagtcagggaggatatctgtayagagcctaggccagcactgtatcctcaacgaccaacctaccagccagggcagggaggtgggagaaggtgcacagagcaaatatgtggtctcatgcagagatgcacatctctacctccttattacccaggagacagcttattctgctttggcagatttacgggatttgttgaccaagattcgtgacctgaagggtcacttatcctgattcccgtagagtttatatattccttaacaatggaaaagagcaagg

SEQ ID NO: 794969 - DNA, 599 bp, Homo sapiens
aagcttagaagtgtataaaacaaagtgttaacggtatctccagctgtgcttttccaatataaggttttttgtttgtttgtttactattttttatttttgagaacagggtctcaccgtattgcccaggcaggtctcgaacacctgggctcaagctatcctcctgcctctgcctccctaagagctaggattacaggcgtgaaccaccgcacttggccaattttttgtatttctaaaatctgcatactgaatatctgcaattttataatagagaaaactaattttaaaattctgagacctaatatagagtgcttatgtgcctattttctgcacagcaaatgtaacctaaggacatgcaacttatttctgggcagagattcagccaatcgccaaggggagattagtaagaactgggtactgtcctgaatcccttcagatttccaaaatgaaaagaaagagggcrtctgcacacaactcctttagtaagaaaataaggcaagatgcaaaaattcttcaggaggggactctaaaaaggacaatgcaattctattgatacaggtacctggagtagaggctggatccatgttactaataaagacaca

SEQ ID NO: 794970 - DNA, 657 bp, Homo sapiens
attgaagtagatgatggaaaatacaggttttaggttgtcctcacaggctccagtgtagatatgttaccccctactccacatccaatttccctttctgactactggctctgctgactttacactctcactatattcataagcaacagccttatataaactgtttcctggatcttgttaggaagaaaacatttttccttcaattctcctaggttttccagctgggaccctgcraattagactgacagaagacatattaacaagtgaaaaacagttcattagtgcaagcagcacacatcatgcaggagaaatctcagatgaataactcaaagagatggttagaagttggctttatatagcatcttagcaaagaacagtaaatttgtaaagaagtggcaagggaaagaaaaagagttttagggttccaatggcagcaaactcttagaaggtaaatatatgggtaacatcaaaaagtgggcaaaggatatgagcagacacttctcgaaagaagacatttatgcagccaaaagacacatgaaaaaatgctcatcatcactggccaccagagaaatgcaaattaaaaccacaatgagataccagttagatcacaccagttagaatggcgatcattaaaaagtcaggaaacaacaggtgctggag

SEQ ID NO: 794971 - DNA, 614 bp, Homo sapiens
gtatgttgaccctgatggatgatagatgacattcctttgttcgtttgtaaatagaaacctatgaaatcaagtgaacttgcagataaaattcagatggctgatttacttgtacatgcaaagaattagctttgttggcaggattcacccgttggaatttgttagttatgtttctcaaataatggatcctaggtttctggggcactgtggatttaccacgtgagttatgacaagaggtagaggtctttgtgacttctttgataccacctatcttgtagattgtcataataaacttctgattctcacctctgattagactatttttaagattataccgaagtgttatatataaccaattgaaaaggaaattacttcttagatttataagggttcagaatccagtgaaactctttatgattgaacaaaaatgcattaaaatgaattgctaaaaggagacaygaagaaacgtcataaaacataaaatgttagacttgagagatactttcaaggtaaaatagtctagcgatttccaacctgaggttctaaggtttctataggttttctaagccttatattaaggcatttggaactgtttcaaattggaagtcctagtttct

SEQ ID NO: 794972 - DNA, 596 bp, Homo sapiens
tttttttttttttgagagagatcctcacgctgtcacccaggctggagtgcagtggcacgatctcagctcactacaacctttgcctcccaggttcaagggattctcgtgcctcagcctcccaagtggctgggattacaggtgcccgccaccctgcccggctaatttttgtatttttagcagagacggggtttcgccatgttgatcaggctggtctygaactcctgacctcaggtgatccacccacttcagcctcccaaagtgctgggattacaagcgtgagccactgcgccaggcctatttttgtatttttagtagagacagggtttcaccatgtgggccaggctggtctagaactcctgggctcaggcaatccgcccacctcagcttctcaaagtgctgggattacaggtgtgagccactgcacctggcctgaactattttagaaatgagactttgttgtgctttggtaacctcccgatggcttgtttcattgaagactgaatgaccaaacgtgtgatgctctccagctccactgtacacacctggggaaggaagccttgtgcttggatgacccatactaggggacaggaccagca

SEQ ID NO: 794973 - DNA, 535 bp, Homo sapiens
tgaagtcacagtgttgaacagtccctttcatagagcaggtttgaaacactctttttgtagtatctggaagtggacatttggagagatctcaggaatacggtgataaaggaaatatcttccaataaaagctagatagaagcaatgtcagaaactttttcatgatgtayctactcagctaacagagttgaacctttcttttgagagagcagttttgaaacactctttttgtggaatctgcaagtggatatttgtctagctttgaggatttcgttggaaacgggattacatataaaaagcagacagcagcattcccagaaacttctttgtgatgtttgcattcaagtcacagagttgaacattccctttcatagagcaggtttgaaacactctttttgtagtatctggatgtggacatttggagcgctttcaggccaatggggaaaaaggaaatatcttcccctgaaaactagacagaagaattctcagaatcttatttgtgatgtgcgccctcaactaacagtgttgaagctttctt

SEQ ID NO: 794974 - DNA, 504 bp, Homo sapiens
aacattccctttcatagagcaggtttgaaacactctttttgtagtatctggatgtggacatttggagcgctttcaggccaatggggaaaaaggaaatatcttcccctgaaaactagacagaagaattctcagaatcttatttgtgatgtgcgccctcaactaacagtgttgaagctttcttttgatagagcagttttgaaacactctttttgtaaaatctgcaagaggatatttggatagctttgaggatttctttggaaacgggattgtcttcatataaactctagacmgaagcattctcagaagcttcattgggatgtttcaattgaagtcacagtgttgaacagtccctttcatagagcaggtttgaaacactctttttgtagtatctggatgtggacatttggagcgctttcaggcctatggtgaaaaaggaaatatcttcccctgaaaactagacagaagcattctcagaaacttatttgtgatgtgcgccctcaacta

SEQ ID NO: 794975 - DNA, 644 bp, Homo sapiens
cccagtaacttctttgtgatgtttgcattcaagtcacagagttgaacattccctttcatagagcaggtttgaaacactctttttgtagtatctggatgtggacatttggagcgctttcaggcctatggtgaaaaaggaaatatcttcccctgaaaactagacagaagcattctcagaaacttatttgtgatgtgcgccctcaactaacagtgttgaacctttcttttgatagagcagttttgaaacactctttttgtaatatctgcaagaggatatttggatagctttgaggatttcgttggaaacgggattacatataaaaagcagacagcagcattcccagaatcttgtttgtgatgtttgcattcaagtcagagttgaacattccctttcagagagcaggtttgaaacactctttttatagtatctggatgtggacatttggagcgctttcaggcctatggtgaaaaaggaaatatcttctcctgwaaactagacagaagcattctcagaatcttatttgtgatgtgcgccctcaactaacagtgttgaagctttcttttgatagagcagttttgaaacactcttttcgtaaaatctgcaagaggatattttgatagctttgaggattcgtggaaacgggt

SEQ ID NO: 794976 - DNA, 636 bp, Homo sapiens
tcctgaaaactagacagaagcattctcagaatcttatttgtgatgtgcgccctcaactaacagtgttgaagctttcttttgatagagcagttttgaaacactcttttcgtaaaatctgcaagaggatattttgatagctttgaggattcgtggaaacgggttgtcttcatataaaaagcagacagaagcattctcagaagcttcattgggatgtttcaattgaagtcacagtgttgaacagtccctttcatagagcaggtttgaaacactctttttgtagtatctggatgtggacatttggagcgctttcaggcctatggtttaaaaggaaatatcttcccctgaaaactagacagaagcattctcagaaacttatttgtgatgtgcgccctcaactaacagtgttgaagcattcttttgatagagcagttttgaaaaactctttttgtggaatctgcaagtrgatatttgtctagctttgaggatttcgttggtaacgggattacatataaaaagcagacagcagcattcccagaatcttgtttgtgatgtttgcattcaagtcacagagttgaacattccctttcatagagcaggtttgaaacactctttttgtagtatctggatgtggacatt

SEQ ID NO: 794977 - DNA, 433 bp, Homo sapiens
gttttgaaacactctttttgtggaatctgcaagtggatatttgtctagcttgaggatttcgtggaaacgggattacatataaaaagcagacagcagcattcccagtaacttctttgtgatgtttgcattcaagtcagagagttgaacattccctttcatagagcaggtttgaaacactctttttgaagtatctggatgtggacatttggagcgctttcaggcctatggtgaaaaaggaaatatcttcccctgaaaactagacagaagcattctcagaaacttatttgtgatgtgckccctcaactaacagtgttgaacctttcttttgatagagcagttttgaaacactctttttgtaaaatctgcaagaggatatttggatagctttgaggatttcgttggaaacgggattgtcttcatataaactctagac

SEQ ID NO: 794978 - DNA, 513 bp, Homo sapiens
aaacgggattacatataaaaagcagacagcagcattcccagtaacttcttgtgatgttgcattcaagtcacagagttgaacattccctttcatagagcaggtttgaaacactctttttgaagtatctggatgtggacatttggagcgctttcaggcctatggtgaaaaaggaaatatcttcccctgaaaactakacagaagcattctcagaaacttatttgtgatgtgcgccctcaactaacagtgttgaacctttcttttgatagagcagttttgaaacactctttttgtaatatctgcaagaggatatttggatagctttgaggatttcgttggaaacgggattgtcttcatataaactctagacagaagcattctcagaagcttcattgggatgtttcaattgaagtcacagtgttgaacagtccctttcatagagcaggtttgaaacactctttttgtagtatctggaagtgacatttggagcgctctcagactccggtgataaaggaa

SEQ ID NO: 794979 - DNA, 568 bp, Homo sapiens
tgtagaaaactcatgacttaatgagggagtgtcattatacagtgctcagcctggtacttggccatattaaagcctaagttccatagctaatatctatccacaagacaatagaaatactgtcagttctcccgggaatttctcatgcccaccttctcatctttttgagggggtctcattttggccagaagagggcagtgttgcacatatggtctcccctgtaacagcagcttccccgggagcccagagtttctcattaaatgacaggtattattggaacattccacttggctcctttttcttaactgtaggcctaaaaaggccagggcagcaasgatgcaaaaaccattgtgaaccaggccttcaggagcttgtgacttgtgaatgtcaaggcccttgagtcacattctcctagtgccaccaggtacttggcgtgtggtgtgaatagctacggcgtgccatggagactggggagggggacacattacatacacagggagacccggtggaaagcatcgtgaaaggggaccacagagggcttccaagatggccaggcggagatggggagaac

SEQ ID NO: 794980 - DNA, 612 bp, Homo sapiens
ggtttcaccatcttggccaggatggtcttgaactcctgacctcatgatccacccacctaggcctcccaaagtgctgggattacaggcatgagccatctgctgaactttcaattaatccttcagtctggtgatcccagttgcccagacccttacctccagktgaagtcaaccaggtgcctccaaagcttgctctttcctcccctgggtatgtgtcagagggacagacacctttttcaatggtgatcctgtgacggagacctgagcgtctttggagagatgctggaacaggagaacgatgcttcacaattgctgctccagggatggaactgtggtccaagaacagatacttcacactccaccctaccccaccaggggcttctgtgtgcaaaatcacttcctacagggaggcaatgtgggcaggctgggaggtcggttgacttggatgattgttacgacttagccaatggtattaaatatacacgtctaacaggagtcccagaagaaggttactgagatgatcagacctgtcttgttgaagagacaactctggaggctaagtgcagccctgccaagagaataagaaaatggatcactgatcatgagctggtattg

SEQ ID NO: 794981 - DNA, 612 bp, Homo sapiens
ggtttcaccatcttggccaggatggtcttgaactcctgacctcatgatccacccacctaggcctcccaaagtgctgggattacaggcatgagccatctgctgaactttcaattaatccttcagtctggtgatcccagttgcccagacccttacctccaggtgaagtcaaccaggtgcctccaaagcttgctctttcctcccctgggtatgtgtcagagggacagacacctttttcaatggtgatcctgtgacggagacctgagcrtctttggagagatgctggaacaggagaacgatgcttcacaattgctgctccagggatggaactgtggtccaagaacagatacttcacactccaccctaccccaccaggggcttctgtgtgcaaaatcacttcctacagggaggcaatgtgggcaggctgggaggtcggttgacttggatgattgttacgacttagccaatggtattaaatatacacgtctaacaggagtcccagaagaaggttactgagatgatcagacctgtcttgttgaagagacaactctggaggctaagtgcagccctgccaagagaataagaaaatggatcactgatcatgagctggtattg

SEQ ID NO: 794982 - DNA, 623 bp, Homo sapiens
tcagcccagctcctcccaacacccatccacacacagaaacaacactgaggtacaagagagtataaaactttatttcctaaaattcaaagaaaaagggaaaatcagactcagatttaaccagtcagatttctaaattaattttttaaaacaagcactagcaactgccctgatggacaccttactttagaagccaccacactgtgctttaaatatgtactgacaaaaaatttctaatagtcttaaataaaatgaagttcactatcactgatagsaatttaaagtagaccgacacttgatacaattaaagctgacttgatcaaatatgaaagggtaaacttcaattcaaagcaggaaattaagaatatatccacatacaaatcggtaggaaggccaagctgacaaatttcacgcaccgtaattctatttcataatacggtatctaaaatttgcttcaaaataatagtggaaggggggataacaggggaaacaagagtggctatgattgatgactgtcatagctgggtgagaatacatgaggatttattataccagtatactctggggtacatttgaaaattcttataagattttttaaaagtcaaattcaatattgtatctactct

SEQ ID NO: 794983 - DNA, 629 bp, Homo sapiens
agccagggagcccttgatttgaagatggatcccctgaggccctttccttcatctagcaacagagatctaggaacaaaggcagaggtccaaagtctggctgtctgaggtggactcattctggtagggaaggagggctttcctccatctctgcttcctcctgctttgaagtgccaattttcagcttcagctcaggcttgaggcaggtgctgtacaacttgttttaataagcatattgtttgtctgaccccgctctccagcctcctcacctgcccctatcccagctcactgctcagtggcactggccacctcacggcctctgcattggctgttccctcaggctggaatgcttttccctgatttccacacgggtcacaccctcacctcccagctccctgctcacatgtcacctcttggtgagggaataycaccatccacactcctgatccccattctctatttcccccccagacctcatcaccatctgacactttctcccttcttttttttaagacagggtctcactctgttgcctggagtgcagtggtgcaatcatagctcactgcggccttgaattcctgggcaaagtgattttcccacctcagcctcccaagtagctgggaccaaggtgt

SEQ ID NO: 794984 - DNA, 490 bp, Homo sapiens
agctgttttgagctgatgcaagttatttaacctatgtgtctccatttctccatcagtaggggggggggcattgctacaagttgttatgaagcttaaataagatcatagacataaaaagcctcagctgtccagtgcctggcacagaataagcagtcaacaaatgtcaggtctgattaccattattattttccagatactaagagttcaaacattttgctcttttccctaacaactaagggagtaaaaggatgaggctttaaaagcttcattaaaattccaacttcaatataagtctatgtggaccctttcctggaaacacagcaaggaaaaacagctggtccttcttttaagtgargagtttgccccttgtggaccacaagaccaaacaacacacactggacctctgtcctacagtgtaaaaatagcgttagaacatggactcgcggtgcttcccaactctatgggaagattttctaaccctgaagttcaa

SEQ ID NO: 794985 - DNA, 591 bp, Homo sapiens
cccctaaagctctgacaccgccttctctccgtgtgctccccccaccacctccaccctgatgtgcttcagtgtgcatgtctgtgaacagccctcctgccctgccaactcccctggctaaagtctccccagcagatttagcacccagggattgagctcacatttcaggctagagaggataacccttgggccacccacatctctcacccctgatgcttcttacttcgcctgagccatcagaactcctccttaccctccttcagcccctctcatcttccttcagcccagccaggcctgcaccaccaactgtgtggcctccacctatgcaacatcgcctctggctccccttcccttcttcctagcggggagtgygaggggcccaaattgtggggataccatggcccatggcttctaaagggtttagctttactttcaggtagagatggctgagtgaggagggagaagaggctagagagagggaggcttgggcaggggaaacagctgcccaccaggttttcctggacagcagtgcccacctgcctactagcactgaacctgcctggaccctgagtctgtgctccttgggggcctggc

SEQ ID NO: 794986 - DNA, 614 bp, Homo sapiens
tcaaataaaacgaatctgatacatatttaatgatatacataattgttattatgctgcatgataattagctatcaatggtaagcagttcacagaaatgactgtaattagtatttcttatacacagtcaacccaagtttggggtttttctctcgtctcacttttttattctgtaatcagcatcagagttctctgttcttctacactatgtatcattccaggataatccgtgtccttctctcacacacaccagcttagggatattgatgcttgaaaacatcaaggcccaggatattctcttcagaagctaaccaatccggagagtgctgtgttactgcattccctgctacctccaggagacctttcagatactgctttcttggccaggtgtggtggctcatgcctgtaatcccagcactttgggaggccgacgggggcggatcccttgagktcaggagctccaggccagcctggccaacatggtagaaccccatctctatcaaaaaatacaaaaattagccgggtgtggtggtgtgtgcctgtatagtcccagctacttggaacgctgaggtgggagaattgcttgaaccctggaggtggaggttgcagtgagtgga

SEQ ID NO: 794987 - DNA, 587 bp, Homo sapiens
tttcctatgctttaatagatggatccgacaagctttttaaaaagtgttttggtcaacacgtcctttcacaacctgaagcaattgccactaattatttcaacaaatatccctgggcaaaactgtgtttatactgaaagagctytaacacaggtcacatacagacaagtattgggagtaggattttccaaggaaatgccagacaggccaaataatgacaggtgagaatggagctttgtaggaattccaaccccaaatacattctccagtggctgctagactactggtttcaagataattacaaggctattggttttcaaggctaccacagatgggaagaggaagatggggatagggtaagttgaaacatcacaaaacttaatgtttttactgagaatgtcatttttctttctttttttttaaattatactctaagttctagggtacatgtgtacaacgtgcaggtttgttacatatgtatacatgtgccatgttggtgtgctacacccattaactcctcatttactttaggtatatctcctaatgctatccctccacccaccccacgacaggccctggtgtgtgatgtt

SEQ ID NO: 794988 - DNA, 601 bp, Homo sapiens
aaactttcagacaacttggatgagagtgtggaaattcaactgttagttggctggtaaatcaacttgcattacctgtaaacttaggttaccgaggagtttaaatatactatcttgtctaacctatcaggccaaggatgcatcttttctacattttcttgcaggtgattcttcttacyttttttttttttttttttttttttttggagacagagtctccctttgtcacccaggctagagggcagtggcttgatgtcggctcactgcaacctccaccttgcctcctgggtcccaattcaagcaattctcctgcctcagcctccggagtagctgggattacaggcacatgccaccatgcccagctaatttttgtatttttagtagaggcgaggtttcaccatgttggccaggctggttttgaactcctgacctcgtgatccacctgcctcggcctcccaaagtgctgggattacaagcatgagccaccacgcccagcctcttcttacttttaatagtgcctagagtaggaagctcagttccttataattatttataaaggagatcttagattgagaatgaaagctatgtttatgctgggatccag

SEQ ID NO: 794989 - DNA, 575 bp, Homo sapiens
tcatgaatctctactctgtacccatggcatttctatttacaaataggtacatatttggatttatattccagatcttcagcttctgaatcctataacctgggaaactattgaacttacctgttttttttctcacctgcccagtgatggcacagagaggattaagtgacactgtccatataaagtacctggaacacacactagtgcaatattatttgccttccttttttcttcttttgagattttaaaaacaacaacataacaacatttaccaytataaccatttccaaatgtgtagttcagtagtattagagcattttcactttttcatctagtaaaacggaaactgtaaacccactcaacatgaatgccttgttccctcctccctgcagttcctggtaaccaccgttctctttgcttccataaatctgactactcttgatacctcactgaatggtatcttatagtgtttattcttttgtgactggcctatttcatttagcataatattctcaaggttcatccacgtcataatatgtgactggatttccttccctcttaagactgaataatatgcc

SEQ ID NO: 794990 - DNA, 575 bp, Homo sapiens
tcatgaatctctactctgtacccatggcatttctatttacaaataggtacatatttggatttatattccagatcttcagcttctgaatcctataacctgggaaactattgaacttacctgttttttttctcacctgcccagtgatggcacagagaggattaagtgacactgtccatataaagtacctggaacacacactagtgcaatattatttgccttccttttttcttcttttgagattttaaaaacaacaacataacaacatttaccattataaccatttccaaatgtgtagttcagtagtattagagcattttcactttttcatctagtaaaacggaaactgtaaacccactcaacatgaatgccttgttccctcctccctgcagttcctsgtaaccaccgttctctttgcttccataaatctgactactcttgatacctcactgaatggtatcttatagtgtttattcttttgtgactggcctatttcatttagcataatattctcaaggttcatccacgtcataatatgtgactggatttccttccctcttaagactgaataatatgcc

SEQ ID NO: 794991 - DNA, 474 bp, Homo sapiens
aataaatacatcggggagaagggacaggcgttttttatggaagaattacagagtacacatagacattcctcagggtggagattagctgctgtcttcttgactgctggctccctgggcactcgctcccgcagaaccgcgtgtggaaagggaaggcagtgggtttgcagtggagagatgtggccggcaccacggagccaacgggatcaaggttaacatcgctggtgaggaggcctgtccctgtcctgtatcccccatatgacgggacaagaaagygcctcaccagggagctgtcctccgcaaacccacagccccagcctaatcatgagaaaacagcaaacaaaccaaaattaaggaacagtctacagactacggtgctcttcaaaagagtccaggtcatgaaaaacaaggaaaatgaaaagctgtcacagagcagccagaagatccgatgactgagtccaacagggaatccaggac

SEQ ID NO: 794992 - DNA, 525 bp, Homo sapiens
gcccagacggtgtgggaaggaacaggttggcttatgctggcacagccgaggagaaaatcaagctgatgatgtgttttgagaactggagaggattatggagaggactacaaggcgagtaggagttctgtgcttacagcgtgataccaccaggggtctggggttggtgggctgtgtgcgctgtgtccggcgttcccaaggtaaggacccacggacctctgtagcaagatctcccaatgttctcaagcagccacgatttgtcaacgcacccacctgtggcgaccgccctcagagtcccagactgtgggtctgcaccccggacacgggaccagggcccttctcaggaaaatgggctgtgtgtgggcactamaggcaagactctgtttttccaaggaatccccaatatcctgtgtttttcttacccagtgtgttcagttaatgaatgatattgagctgtgtatttccagtggcccgaaagccatgatcagtatctactcaagtgggcaacatgagctctgtgtggataaa

SEQ ID NO: 794993 - DNA, 634 bp, Homo sapiens
attgacacatatttcaaaattatgtaaaacacctataattctaatatgacttagtataagttatcagtaataattataattattatgttaaatgactgtgtgccacagaggtaacaaatttccttgccaattgtgtctttaactgtggctgccctaaaatgttttgtcatccacaggcaattgttgtctcatttaggtcctctttttttcttttttyttttttttggagatggagtttcactcttgtactcttgtcgcccaggctggagtgcaatgacacgatcttggctgactgcaacctctgcctcccgggttcaagcaattctcctgcctcagcctcctgagcagatgggattacaggtgtgtgccaccatgctcggctaatttttgtattattagtagagacggggtttcaccatggtggctaggctggtctcgaactcctcacctcaggtgatccactcacctcggtcccccaaagtgctgggattacaggtgtgagccactgtgcctggccagtcctctttaaaggatggttttataatcagctataaaatttaacaggggctcttcagtgcagatttctgattaataacctggagattgtgacgttagaatagagaaaaaaactttc

SEQ ID NO: 794994 - DNA, 604 bp, Homo sapiens
atgttttcaaatagccaggtactttgaaaagctctgtcttcattgttctcctcttgacggagatgttaatggaagctgaccttgattggcactcagtgagaaatcaatgagatatttttttcaaggtgtttgaaaaggtgtaagaaaggtttggcaaatgtttttaactcaggcccagattttaaaaccgggttgttactgttttattattagagaataatcatttttgtagtattrtattttacagatattttgaatgaaacaggaagcctgtgttccattttgaatgtcctagatgggtgaaatatgtcaattactctattctatatgtgtttattaaagagagcatttaacattcatgtttatttaaaagtccaaatggacctagtctttcctctttagtctcctggtttcgtcctcattctttcttagttttcactttctaataatacagaatataaattgtagcttattcttgctgaaacctatactgcaccagtggtcagtttgcttatattcattacaacaagtcaccatcctaatgaagcctcaattttcaggactgatagggactgggagaggatttataaccaatttctttgta

SEQ ID NO: 794995 - DNA, 604 bp, Homo sapiens
atgttttcaaatagccaggtactttgaaaagctctgtcttcattgttctcctcttgacggagatgttaatggaagctgaccttgattggcactcagtgagaaatcaatgagatatttttttcaaggtgtttgaaaaggtgtaagaaaggtttggcaaatgtttttaactcaggcccagattttaaaaccgggttgttactgttttattattagagaataatcatttttgtagtattatattttacagatattttgaatgaaacaggaagcctgtgttccattttgaatgtcctagatgggtgaaatatgtcaattactctattctatatgtgtttattaaagagagmatttaacattcatgtttatttaaaagtccaaatggacctagtctttcctctttagtctcctggtttcgtcctcattctttcttagttttcactttctaataatacagaatataaattgtagcttattcttgctgaaacctatactgcaccagtggtcagtttgcttatattcattacaacaagtcaccatcctaatgaagcctcaattttcaggactgatagggactgggagaggatttataaccaatttctttgta

SEQ ID NO: 794996 - DNA, 604 bp, Homo sapiens
atgttttcaaatagccaggtactttgaaaagctctgtcttcattgttctcctcttgacggagatgttaatggaagctgaccttgattggcactcagtgagaaatcaatgagatatttttttcaaggtgtttgaaaaggtgtaagaaaggtttggcaaatgtttttaactcaggcccagattttaaaaccgggttgttactgttttattattagagaataatcatttttgtagtattatattttacagatattttgaatgaaacaggaagcctgtgttccattttgaatgtcctagatgggtgaaatatgtcaattactctattctatatgtgtttattaaagagagcatttaacattcatgtttatttaaaagtccaaatggacctagtctttcctctttagtctcctggtttcgtcctcattctttcttagttttcactttcwaataatacagaatataaattgtagcttattcttgctgaaacctatactgcaccagtggtcagtttgcttatattcattacaacaagtcaccatcctaatgaagcctcaattttcaggactgatagggactgggagaggatttataaccaatttctttgta

SEQ ID NO: 794997 - DNA, 611 bp, Homo sapiens
tgagatggcttttattacattgaggtatgtccctcgtgtgctgattttgctgagagttttaatcataaagggatgctgaattttgttgaatgctttttctgtgtctattgagatgatcatgtaatttttgtttttaattctgtttatgtggtgtatcacatttattgacttgcatatgttaaaccattcctgcatccctggtttgaaacccacttgatcatggtggattgtattttggatacgttattggatttgattggctagtattttgttaagaattttttgcatctatattcattagcgatattggtcttttatttatatatwtatttatttattttggttatgtactttcctggagggtgatactggcttcattggataatttaggaaggatctcctctttctgtatcttgtagaatagtgtgagtaggattggtaccaattcttctttgaatatctggtagaattcagctgtgaatccatctggtcctggactttttttcattggtaatttttaaattaccatttcaatctcactgcttgttattggtctactcatggtatctaattcttcctgatttaagctagcagggttgtatcttccggag

SEQ ID NO: 794998 - DNA, 632 bp, Homo sapiens
gatccccaacctttttggcaccagggaccagttttgtggaagacaattcttccacagaccgggatcagtggatggtttcaggataattcaagtgcattgcatttattgtgcactttatttctattattattgcattgtaatatataatgaaatattaataattatacaactcactataatgcattatagaatcagtgagagtcctgagcttgttttcctgcaactacatggtcccatctggggtgatgggagacagcaacagatcatcaggcattagattctcataaggagcacgagacctagatccctcacatgcgcagttcgcaatagggtttgtgctctcgtgagactctaaggctgctgctgatctgacaggaggaagagctcaggcggtaatgctcactgcctgaccactcagcatmccctgttcagcctggttcctaacaggtcacagaccactactggtctatgatccagggtttagggacccctgctataatggaggtcacagaaaaaatggagacttgcttccctttctttcccaggttacagaatcttcacaagtgctagtagaagcaagcataggattcagtaagcaaatttctaaaagaatatgaaatgtaaaaagggtg

SEQ ID NO: 794999 - DNA, 632 bp, Homo sapiens
gatccccaacctttttggcaccagggaccagttttgtggaagacaattcttccacagaccgggatcagtggatggtttcaggataattcaagtgcattgcatttattgtgcactttatttctattattattgcattgtaatatataatgaaatattaataattatacaactcactataatgcattatagaatcagtgagagtcctgagcttgttttcctgcaactacatggtcccatctggggtgatgggagacagcaacagatcatcaggcattagattctcataaggagcacgagacctagatccctcacatgcgcagttcgcaatagggtttgtgctctcgtgagactctaaggctgctgctgatctgacaggaggaagagctcaggcggtaatgctcactgcctgaccactcagcataccctgttcagcctggttcctaacaggtcacagaccactactggtctatgatccagggtttrgggacccctgctataatggaggtcacagaaaaaatggagacttgcttccctttctttcccaggttacagaatcttcacaagtgctagtagaagcaagcataggattcagtaagcaaatttctaaaagaatatgaaatgtaaaaagggtg

SEQ ID NO: 795000 - DNA, 639 bp, Homo sapiens; identical to SEQ ID NO: 746504

SEQ ID NO: 795001 - DNA, 598 bp, Homo sapiens
tttcaccacgttggccaggctggtctccaacgcctgacctcaagtgatccacccacctcagtctcccaaagggctgggattacaggtgtgagccaccacacctggcctaacacttttaatattacttatttatctctaggattctaaaatttcatggtgatgggtctaggttaggatttattttccgttttytgtgttggtgaattttgcattgaagaattggtgggcccttccattttataatagaaactcatgtttaacagttttaggaaaaatgttactttattaatttgacagccttccctcctccatgttttttattatagttattttgtccctcctcaatgtaacacattactaattttctaataattattctctcatatttgctgtcttctaacccttctaatgcatttctcagtgtagctatttaattttcaattttcaataattttttctgttatacgggagttttatttcatgagtggaatattttcttacctctccgagaacattaacttttctttttctccttgtcttgatagacatttcaaaatttccttgttctgttttttgccttttcattttcaaggaatta

SEQ ID NO: 795002 - DNA, 598 bp, Homo sapiens
tttcaccacgttggccaggctggtctccaacgcctgacctcaagtgatccacccacctcagtctcccaaagggctgggattacaggtgtgagccaccacacctggcctaacacttttaatattacttatttatctctaggattctaaaatttcatggtgatgggtctaggttaggatttattttccgttttttgtgttggtgaattttgcattgaagaattggtgggcccttccattttataatagaaactcatgtttaacagttttaggaaaaatgttactttattaatttgacagccttccctcctccatgttttttattatagttattttgtccctcctcmatgtaacacattactaattttctaataattattctctcatatttgctgtcttctaacccttctaatgcatttctcagtgtagctatttaattttcaattttcaataattttttctgttatacgggagttttatttcatgagtggaatattttcttacctctccgagaacattaacttttctttttctccttgtcttgatagacatttcaaaatttccttgttctgttttttgccttttcattttcaaggaatta

SEQ ID NO: 795003 - DNA, 636 bp, Homo sapiens
gaaaataatgttttaagagatttccagtaccatccaaaatcttgtagttaccaactgcaagcctaacaaaagacctttagatggtttgtggggggaaattattaaacattgttgagagacagtaaaaaatatctcaataaatggttagaaagctgtaggagacctgaaagtgtaaatcccagtcaaccatagttctgttgggtaagagaatgctgacaagcgcatagcaaaggccaagctgcccttgaggaatgcagtgtgggggcctttgctgtaccagacagcagggtgtcctctaaagcagcagtgctccagatacctggacccaaaggcaggaagagatgaacagatcaaaatatttgaatactgagctcaaaacagctttgatggmatcagattcctcctccctttctttattttttaccctggtgctaggaggtggtgtagaggaagggtgatcttttcacaaatggtgctaagacgattaacagtttacaaaaataaaataaaattgggtgtctacctccccatacaagaaatcaactcaatgtatgggtagtatagctcttaccagataatatagataatatagattatctggtgacctgtgggtaatagaagatgttttgaacagaa

SEQ ID NO: 795004 - DNA, 594 bp, Homo sapiens
cagatgctctccaggctgcaccactgcctcccagcacaagaaacatagtttttccatccattctgcatggtgccatgggctgtcccaggcagggccaccatgacagatcctccagggcagggactggagtcctgacgcctgcacagctcccctcatagatgtgccggggtctccccatgggactgtgcagggtgcgtcctcaccccagggccccagagtctgaagctcctgctcctgccagtcaggagggtcagctctggcctcttggaggagggcctgggcctcccatgtcttcctggggccatgtcaggaggactgtcagctgggcgccttctgatggtctggggacggagtcctcactcttctrtggtgtcactgtgcaagtgctttgtctgactttcaatagcactgtctttcttttacaccttcattttaggatctctttttacatctaaatactacagcagtgagctctagcatactagagcgttagcatgttagaaatatcttccttttctgtgtagcttgccttttcattctcttatggtgtcttccaaagaatcaaaatttttaattttaatgtattcaaatata

SEQ ID NO: 795005 - DNA, 643 bp, Homo sapiens
tgaagcttcaggattcagtaatagcaaacagctgatgaaagacataaatccacagactcaagatgctctacaatcccaacacggatgaagacaaaggaaaccacacctaggttcatcaaagaaaaaaatgccatgaaacaaattcaaaaagaaaatcttaaaagcaacaggatgaaaaaagatacrtgacccttaaaatgtccacaataaatcttacagttgatatttcaaaggaaatatggacgccagaagacaatggaatgacctctttaaaatgttagggagtggaggaatagctgataaactgtaatgttatacccagataaaacagtcctcagaatcaaagggagaacaaatatattttcgtatgagaaaaaaagatagaatatgtataaccagcagagctgctaacataaatactgaagacagaattcttcaagaagaaaaaaataataataatcccagaatactgggtccaaattctgactacaactttctgactttgtgaactgtggtaagttacttccttgtgtgttatcttaaaatgggaataatcaaagttactcctcacagaatagttttgaattttaagcaagcagaaagacaagaagcatttcacaaaatctaggccttcagcacaaaa

SEQ ID NO: 795006 - DNA, 404 bp, Homo sapiens
tgattactgagacagaagggatccaaggcatgtagtgtcagcttccctctgcttgaagtgattctatctgtaaagtcacatttgctgccttaaaaaaaaaaagctttaattttttgttacttaattcataaatcataaaatgccccttgaaagtatacaattcagtggtttttttagtacattcaaaaggttatmcagccatcacactaattccagagcatttgcattaccctcaaaagaaaccccatacctatcagcaggcttcattccacttaatggcaaccgtgaatctactttctgtctcagaattttcctcttttcgacatctcatataaacagagtcacacaatatgtggctcttaaaatgtctagcttctttcacttagtgtaatgttttcaaggtt

SEQ ID NO: 795007 - DNA, 585 bp, Homo sapiens
catgtctcttaatctaaatatgaactagttcatcggcttcttcactcttcattttattgacgatttttgaaacgtataggccaggctgggcacagtggctcacgcctgtaatcccagcatcccagcactttgggaggccaaggtgggaggattccttaagcccaggagtttgagactggcttgggcaacmtaatgagatcccatctctccaaaaaaaaaaaaaaaaaaaaaaaaaaaaaaaaaaaaattagctgggcttaggggtgctgtgtgcccatagtcccagctactctggaggctgaggttggaggatcacttgagcccaggaggttggggctgcatattgctccactgcactccagcctgggtgacagagtgagactctgtcttaaaaaaaaaaaaaagaaaaagaaagaaaagaaaaaaagaagaaaagaaaagaaagtataggcaagttgtggcatctctcagttcgggtttgttcaaatttagttcttcatgactgtttcaggttaagcatttttggcagggttaccatggaagtgatactgtgtcctcctcagtgcatcctgggaggaggcacct

SEQ ID NO: 795008 - DNA, 497 bp, Homo sapiens
acttacctctcatgtctcttaatctaaatatgaactagttcatcggcttcttcactcttcattttattgacgatttttgaaacgtataggccaggctgggcacagtggctcacgcctgtaatcccagcatcccagcactttgggaggccaaggtgggaggattccttaagcccaggagtttgagactggcttgggcaacataatgagatcccatctctcmaaaaaaaaaaaaaaaaaaaaaaaaaaaaaaaaaaaaattagctgggcttaggggtgctgtgtgcccatagtcccagctactctggaggctgaggttggaggatcacttgagcccaggaggttggggctgcatattgctccactgcactccagcctgggtgacagagtgagactctgtcttaaaaaaaaaaaaaagaaaaagaaagaaaagaaaaaaagaagaaaagaaaagaaagtataggcaagttgtggcatctctcagttcgggtttgttcaaa

SEQ ID NO: 795009 - DNA, 640 bp, Homo sapiens
attctgtcaaccttcacttgaaaaatgcaaaaagcaagatgcttctggaatgagaggctcccgaggaccgggacttcttgagagaacagcagattgacactccccatttccctctgactctatgctctgaactcattgagcagattggtgagtgaaatcatggacatggtttcaatgatcattttctctctttttaattcagaacaaatttaattgagtttatataagatatataaattaaatatccatattatggggcttgtctgtatcctcatgatcgcccttctcttgttcttttcctacgtccacctcctctgggccttcagaactcaaccccatgtcatcagtccacccagctgctccacggaacgtgtcttcctccttctcatctggttgttggtgacaacctktttttctccctgacttgtggtggtctcatccctccctggtggctgtaagcccagggagatggactttgagcaagtggctgtcaactccatggataggtggaagtgatgaggacacccaagtgagccaaccctgagtcatttatactgatgggcatcatggaggatggaaaaattaacagccacacagagcctcagaggtgtagagacacatatgctgggatccacatgtt

SEQ ID NO: 795010 - DNA, 603 bp, Homo sapiens
ctggcagtgatattgctaggtaattactaataaaaaaatttatatatttatatatttctgagtactgaaaaattatttttaagtaataattgacaccctcactatatacacgtgtgtgtgtgtgtgtgtgtgtaagtgtttttaagacttgctcagcaggatgcaactatgttagactttagtatttggtaatwtaaggacagagtcgtgtcttaagttttactttacccataaataattgaaattgactgactcttttgttatagatttaatattgttcctcttcagtgaattatctgctcattgcttttgtttaatttgtatatgattggttgtttattcttgagtttgtggattaatgtgctagataacaagtttatcgtattattgttttcatatcaatacactttgttgcttgaatttaacaatgacaaataatttttttaatttcgatgtcaaaagtagcaatatatatatcccctattatttgtatttgacataaataaacataaataaaaaggatatccttttcccactagaaaaatcccacctatctattttaacaggcctcagttctcttttaaactcccaggcatttagtct

SEQ ID NO: 795011 - DNA, 614 bp, Homo sapiens
actgaaggaagtacaagcattgagaacatcaatttgaaatgtaaatatctttctttgaaatgccttcttctcctgacagacacaaacttcaaacaaagctttatgcatgtactgcagtgggaggatattttaaatactaccaagtcatgactgttactagtttaattgcagtttccaaatcacacaattctgaaggtgaccaagggaaaacaactgatacatgtgaggagaaaaactacagggtaatggtttccatacaatggccaaaaaataaaagaacttgttctggtctaatagttttctgcaaatatagaatattgtgaggttctaggttctattaagaacttttcattgcttcttattatgtatttaacacttgaatcctttagcagaaaacctaaataaataaattcttctagttcccgtgatataagaacaaaagctgtgtcaaaatagtgaattaaagtgagtaggactakcccaaatattaccttaattttttactaacttagaaattcttgaaacagaggcaaattttgttttgatgttgtccctcattgtaggtttacctcacacatttcctctctgttaatcctgggtacccaacatactga

SEQ ID NO: 795012 - DNA, 625 bp, Homo sapiens
  misc_feature 596, 597, 598, 599, 600, 601, 602, 603, 604, 605, 606, 607,608, 609, 610, 611, 612, 613, 614, 615, 616, 617, 618, 619,620, 621, 622, 623, 624, 625: n = A,T,C or G
tttcctctctgttaatcctgggtacccaacatactgataatgatgtttctattaacaaggcaaaatgaatgacattagactactgtcattgattgacagcctagcagatcttgctataactcttttccccttcatctttgggacaatcaattgaattctacattattctacccattttatagcttaaaaaattagggttgagggaaattaaaaaaagttcccatagccaaataagactaaatagcttatcaattaactctaaatttttctgcctctggaatctgttttttaacaaaaatatgcttatttatgcatttattcagctaacttttaattaatgattaatacctggattggcctgtgctatgygtgatcaattcgatagtgagcaaaataggccccaaggagccttaaagccagattgaattcattatcttccccatcagcatttttattttcacaagatttcttaagctacaattctaatccaatatattgcatctgaagaacaaaattttagactctgtgggatgtaacagaaatgtttgtgaatattttgattattgtttgtttgttgggtataaattcaaatcagnnnnnnnnnnnnnnnnnnnnnnnnnnnnnn

SEQ ID NO: 795013 - DNA, 625 bp, Homo sapiens
  misc_feature 596, 597, 598, 599, 600, 601, 602, 603, 604, 605, 606, 607,608, 609, 610, 611, 612, 613, 614, 615, 616, 617, 618, 619,620, 621, 622, 623, 624, 625: n = A,T,C or G
tttcctctctgttaatcctgggtacccaacatactgataatgatgtttctattaacaaggcaaaatgaatgacattagactactgtcattgattgacagcctagcagatcttgctataactcttttccccttcatctttgggacaatcaattgaattctacattattctacccattttatagcttaaaaaattagggttgagggaaattaaaaaaagttcccatagccaaataagactaaatagcttatcaattaactctaaatttttctgcctctggaatctgttttttaacaaaaatatgcttatttatgcatttattcagctaacttttaattaatgattaatacctggattggcctgtgctatgcgtgatcaattcgatagtgagcaaaataggccccaaggagccttaaagccagattgaattmattatcttccccatcagcatttttattttcacaagatttcttaagctacaattctaatccaatatattgcatctgaagaacaaaattttagactctgtgggatgtaacagaaatgtttgtgaatattttgattattgtttgtttgttgggtataaattcaaatcagnnnnnnnnnnnnnnnnnnnnnnnnnnnnnn

SEQ ID NO: 795014 - DNA, 592 bp, Homo sapiens
caatatcattttacaagattagctttaccctaataccaaaagcagacaaagatacaacacaaaaagaaaggtacagagcagtacctttgctgataagcatagatacaaaaattatcaataaaatactagcaaacagaatccaacagtacaccaacaagactatacaccataaccaagtgggacttattccaggaatacaagtatggctcaacacatgtaaatcaataaacacaatacatcataccaacagaataaaggacaagaaccagatgatcatctcaacagacatataaaaagcccttgataaaatacaataaccctttatgctaaaaatgctcaacaagttaggtatagaaggaargtatctcatcacattaaagatgatatatgacaaacccatagctaacaccattccaaatgtggaaaagctgacaattttttctcttagagctgaaacaagaaaaggatgctcattctcaacactcttacttaaaataacattggaagccctagacagagcaataaggcaagagaaaaaaagaaaggacattcagactggcaagaaggaagtcaaattgcccgtttgcgaaca

SEQ ID NO: 795015 - DNA, 664 bp, Homo sapiens
ctattttttctgctatccattcactgtgagacttgagaaataaattcatttatttttactgcaaatcatttttaattgcttatttttagcagagtggtctgaggctgtcaccgtttacatgtaattcaactttaattctgcaagtatttgatgtctaggatgcgtgaaatccttttctataacattattcttaccatcagaattgtgtatatgttaataaattagtcatgcaaggaataattttattactttataatgtaaatattatacttaattattataattaaaatttgtatgagaaactgatrtctagagaacataaattacaagaattttgttgggatttgctcacaatcatttcaattacctctgttataggttatggtatgtatatagcagtgctgaaggaagtatttgttaaattaatgaaaattgaatgagatggtaaagccaatgctccgtaccaaggttgtctgatgttaaagcctgaacataataaactttctcatttagtacattatctgttttccatcaaatatcaatctaagatgtactcagctctgctatttagcagcttcattgtatattagcagtgttattaaagtttactaaagaaagacactttcatgttatctttttaaaaaaattaacctttggattttat

SEQ ID NO: 795016 - DNA, 598 bp, Homo sapiens
tttacatttgctgaggagtgctttacttccaactatgtggtcagttttggaataggtgtggtgtggtgctgaaaagaatgtatattctgttgatttgggctggagagctctgtagatgtctattagttccgcttggtgcagagctgagttcaattcctggatatccttgttaactttctgtatcgttgatctgtctaatgttgacagtggggtgttaaagtctcccattattattgtgtgggagtctaagtctctttgyaggtcactaaggacttgctttatgaatctgggtgttcctgtattgggtgcatatatatttaggatagttagctcttcttgttgcattgatccctctaccattatgtaatggccttctttgtctctgttgatctttgttggtttaaagtctgttttatcagagactaggattgcaacccctgcctttttttgttttccatttgcttgggagtagatcttactccatccctttattttgagcctatgtgtgtctctgcacgtgagatgggtttcctgaatacagcatactgatgggtcttgactctttatccaatttgccagtctgtcttttaattggagc

SEQ ID NO: 795017 - DNA, 589 bp, Homo sapiens
tttactatttttggtgttttagagtgaagaacagaaacaatatggcaatcaccaattttgactggcaacatcacagatcaaattgcttctctgctcaaaagcctccactttctttctatctatcttgcaatataatataacaccataatataataaaacaacacgttcttattgtggtctacaaagccctacaggatctcactgctacccaatattctgacttcaccagctgccatttttttctttctccctataatctagccagtaacattagcctccttactcttttctaaacatgctgggacactcttatctgagggccttcgaacttactcttctctctggatctccctgtccccagatacttactaggttatctccctcacttactcagttctctgctcatgtatcactttacaaagagtctttccccagccacgctttstaaactggtttccttcttacccccatcactctctattcccataaccagctttacttttttatagtacttaccatcttttgctatatgtttgtttatcatttgtctcccccagccagaatatatagacttcatgagcttggattt

SEQ ID NO: 795018 - DNA, 634 bp, Homo sapiens
ataggtagatactctaagaataaatatggaggaaaacaaggtagatgaagaatatataacagttgaatgtaaaaagaaaaagacagggtttttgaagttttatgatatcaaatatagcaaagaaaatacagcctctgacagaagagcttggaaaaagaaagacaggataaaataaagatgataaaaacaaataggaggaaaaattgaaaagtaagccagcagggctcaggagaagaacagagggagagtgggaaactctgtagaaataaaagccgcactggaggtggcagaatcgaggtagctagttascaacatgcaacaatagaaaacagtagagcaacagctgcaaagtcctccaggaaagaaagagtaatgctaaactattcttttcaatttgtcatgcaaatataggccacaaaatcactttaaaaataactaataaactgtttttaaaaactgtttaataaattgtttaaaaaaataattgtttaaaagctaataaattcagttaacagaagtttaaatatactatcaaaggtgtaaaggtgaacaccttacctaagaatttaaaatattaacaaaattaatgagaaatagaaaaggggtaaattgtaaatgttcacatctccatttt

SEQ ID NO: 795019 - DNA, 591 bp, Homo sapiens
catacctagtagttacaaccctaatcagccaacaaatggagacctagttcaccctagaaggtctactatatggttttaaaagtattgcatttccacttgaaaattactttgttataaaagaaggtaacacaatagtgctgctattcaactacagtgtagattacataagtwtttggggattcatgtgcaatgtggaccacttgtgcagcacctaacctatcagtaattatcatcagttacaaactcttataattcaattaattcactcctaagttggagactgctaatatatacatctagttcagtcatatactaattcaaagttactaaaatgtttgatcaaggttcaagaccagaaaaacaatctcaaccactgggataactcaaattttaaaatcattcacaaaatatagcttgtgatttaaatgatgtcctaagcattagtattatggtgcactgatacattcaattaaaaacaaaaacctgaagacaacacaagaaatcaagaagtgtttggtttaaaaaaaaaaaagacataatgccatcttaacttttcccatcaaaatactgaatataaaaacatgacacaga

SEQ ID NO: 795020 - DNA, 609 bp, Homo sapiens
acatttttatttcattttttaatatcaaaaagtcctttcctatacactctttcctctagtactgccgtttatttacatttcaaaatacatttatatcaagcattaccagccaagaactaagtataaacttcaagatccatctgatcgactcattctttgggcctttttaacatgtgtcttttctacygtctcctaagtttccactttgaaattcgttgaaaaataaattagcgcaaactgattctgcactaggtatgtatggacatacacaaaaggtttaccatgtaaatctaacacaggtacacgtccgttgaatgtattaagtcaatctgtgttttacaaataagcaacgtttcatggacatttctcaaaggggatctgggagagaggagctagaagcaggcacgttagtgcccaacatgggaggaaacaatggaagaggtgataatgcttacgtgcctaaatatcaccggatctcaacctcaccaatatcctacccatatgacgctatgcagcacctccccctccccaaataaaatcaaccccagagggcagaaatcatgacttaaaaacgacggcatttgaaagcactagaaggcctgttatatt

SEQ ID NO: 795021 - DNA, 622 bp, Homo sapiens
aaaatagagatagttgctaatgttacatggcttaagtgtttttattattttacacccttaggtaatttttattttgcagcctgtttctttgtaaaaaggagatagagacactaactcgcgagctgtgaataatgtatccgtataagaggatttatcacagatcatagtaggtgcttaaaaatattgtgttattggccgggcgcggtggctgactcctgtgatcccaacactttgggaggctgaagcaggcggatcatgaggtcaagagatcaagaccattctggccaacatggtgaaactccctgtctactaaaawtacaaaaattagctaggcatggtggcgcgtgcctatagtcctagctactcgggaggctgaggcaggagaatcgcttgaacccgggaggcagaggttgcagtgagctaagattgtgccactgcactccagcctggagacagagtgagactctgcacccccccaaaaaaattgtgttattaaaatacaaatggcagcttccactccactgtaattgtcaattacaagcttaactacaactcactgaggtatgaagtgaatgagttatagaccacataagcaaagtactacaggaacaatgaataagaa

SEQ ID NO: 795022 - DNA, 591 bp, Homo sapiens
ttggcatgggtgtagaatggcctcctggtattacttcccctcccatcctcttctggtgtggtgcctgttcccggctagggggtgttctgtaagtgtgtcactgccatgtactaaccctggtcttttccctctctgccagtacacttctaagttactgtcttgcaaggtgacttccgaggtacttttcaatttgtttgtcttggtcttactgaatgcatgatccaggtgcatgctgttgtggtttgccatttcctgatgagttaaacgaaaatggcaagaaaaatgacttgtctccatatgtatttttttgtgcctgttctgaawtatgggactgcctcgaaatgttggagtccatgcaacagtgatatacaatggtgtggtttgctgtgctgtgctgtgggggcgagtgggagggtactggggaagaccttgcctgctcacgaatcttgaagacgtttggaccagaggacacaagtgatgggctattttggtttttaaagtttctttaggcattaatagcaagtatacttggcctggttggaaaacagtgcagctcatgcagattgagctatggattttcacccattcttt

SEQ ID NO: 795023 - DNA, 605 bp, Homo sapiens
gtataatcccagcactttgggaggctgaggctggtggattgcttgagctcaggagatgaagaccagcgtgggcaagatggtgaagctccatctctataaaaaatataaaaataggctgggcgcagtggctcatgcctgtaatcccagcactttgggaggccgaggtgggcggatcacctgaggtcaggaattcaagaccagcctgaccgatatgatgaaactctgtctctactaaaaatacataaattagctgggcgtggtggcatgcacctgtaatcccggctactcgggaagctgagacaggagaatcgcttgaacccaggagacagaggttgcagtgagctgagatcacgctattgcactccagcctgggcaacaagagcgaaactgtctcaaaaaaaaaaaaaaaaatatatatatatatatgtaaattagctgggcttggtggcatgaacctataatcygagctacttaggaggctgaggcaggaggatcgcttcagtccaggaagtggaggttgctgtgagcctagattgagccactgcactttagtctggttgacaaagtgagactctgtctcagaaaataaataaataaataaataa

SEQ ID NO: 795024 - DNA, 620 bp, Homo sapiens
cttcgcacactgaagtccatgcaaatccatgtaagagtggcttggaaaacatcacattagccttagtctcttagttttctaggcccatctgattaagattaagaatggagttaagaaagggactcaggcactctgacagctctgggatcacctgcgagagcaggcagacgaccccgctggcctactgttgagcagctttgagtaggagctagcagctcacaggggcagtgatgtgtttattgctcagtgtgatgataactttaattgggaatatcagataaatattcaatatatggtatttttatgaacattaataaagattcagtatatttttggaaaatttccctaaaaacagaaaaaaaataaaaaggttatatgcataagtgactcagcaccaattatctggaacatttttttcacccagcaggctttycttgagtaccctctagtgttaggcattgctctgagggctgctcacatatgagtgtgtactccttccaccatggataagtatgattttaccatatttggaacttagcagattggctcagttcatttcagatttcaattcaccgtttaattcatccccagcacatgcctagtgctgtcataaaccaaag

SEQ ID NO: 795025 - DNA, 620 bp, Homo sapiens
gggtttcaccatgttagccaggatggtcttgaactcttggcttcaagaatccacccatctcggcctcccaaagtgctgggattacaggcgtgagccaccactcccagcctccaaagtaattttttttaagtgaactgactttttttttatcacagtcatgcagagagaaggttgaggccataagaaatggattctgttctttgttcccaggctcaggagccactcctgcacctttgatccaaaaggcggctcctccattaagaaggatcaccatctttgacacctcacaaagtgtcacaggggacaatgaggaaaggaggtgacatctacctgacatctggcagtgaagtcagccaaaactggatgactgtgatctcagtcaatctgtcctcacactgccactgacttgtgccctggatargtcactaactgacttctgtgagtctcagtggctcgtctgtaaaatggataaaatgatgattaccttgcagaatcccagggagaaataaacgaaatcatacatgtcatgacgcttgtaggtgttcgatggtccctttccaagtgaggttgggatatggagagaaggagagagacaaatacatagagaaccaaatggagaa

SEQ ID NO: 795026 - DNA, 608 bp, Homo sapiens
ccttctagtcctcagaatggagagaaaataaatgtatgttatttcagccacccagcctatgatattttgttacagttgcctgagtaaacccattttaatacgggtttaaaatgtgtgttcatccatttgctaatgaaaggtgaatggaaaaggaaagatggaagatataggagaggtgcaataactggtggaacaacgtaccagaggagacttgaggtgatggtrtccagaacacaggcaactttcactgaatagagcaattgttccagaattttctagatagggactttgagaacttcatgagcattctgacttctggcacgtacagtattttaagaaacgtttcaaagttgtacccgttcccctttagctcagaggaaatgatccctcttccaaaagtaagccctacctatgcctagggtttcaaaacttcccacaacctggagatctcttggactggtttcttcctcacctttctgcagtaactctccttgacctctatctcctgatatggtttcactgtgtccccacccaaatctcatcttgaactgtagctccataattcccacatgctgtgggagggacctggtagaagataattgaatcat

SEQ ID NO: 795027 - DNA, 596 bp, Homo sapiens
gtaacaatactgggcgacatggctggcacctggccctgaaccagtgaccaactgggcatacgtgactgctaagattcccaatgtgagatagtgcttctcagcctcccttgcagctctatgtggcccccagtggactcttgccaatggaatgtctgtgtgtcttctggtctgtcctgaacagacctgagcactctcctctacgctctcttttcccttctgsaagagctgggtcatgctcgtgcctacagccagctctgaccaggcagatgaggacaatgtcctgggggaagatggagcaagacagaagatgtctaggtccacagaggcctgtggcaaagctggccagccaacgcggactgctcacttcaggactggaaacatctcttctttaaagccacactccattgtggcagttggagggggtctctttatcatagcagtttcaaccttcagtcttaatgaagaatcacacacaaaatccaagtccccattgtccatcctgagacctaaagaattacatggagatctgacaacaaagataaaaaagatatgactgtttggcttttttttcctaggttatctgagctttcaatgag

SEQ ID NO: 795028 - DNA, 547 bp, Homo sapiens
ctcgcagagccttacatttgttggtctagaagctgcaagcatttcatgctcaatgtatattttatgctcaggtaaatcctctggaaacataacggtccatttacaatagctacattcccagtgagagacttcagcttgtgagaaccatgtgtggttgttaagttttgatgtggcattgaaagaaaacattgtgaattttattttagaacccagaagactaagctatgttggctctcagcagatactgcagctgctggaaagaaagagaaggtgctgctcggagaatgtgagygtgtgccctcccccagctgtcctggtgaagggggagtgatgccccccatgcagacatagggctgtggggagcccagggctgcgaggatcccagcaggcagcatgtgtggccagggagggtgtggtggggtccagtgggagctgacacagaagcaaggcggaacccacatggctcaacttaacaggtcttactgatttttcgctattaccaaaaagtttgagaaaaaaaataaatggcatgttgagtggccgtttg

SEQ ID NO: 795029 - DNA, 547 bp, Homo sapiens
ctcgcagagccttacatttgttggtctagaagctgcaagcatttcatgctcaatgtatattttatgctcaggtaaatcctctggaaacataacggtccatttacaatagctacattcccagtgagagacttcagcttgtgagaaccatgtgtggttgttaagttttgatgtggcattgaaagaaaacattgtgaattttattttagaacccagaagactaagctatgttggctctcagcagatactgcagctgctggaaagaaagagaaggtgctgctcggagaatgtgagcgtgtgccctcccccagctgtcctggtgaagggggagtgatgccccccatgcagasatagggctgtggggagcccagggctgcgaggatcccagcaggcagcatgtgtggccagggagggtgtggtggggtccagtgggagctgacacagaagcaaggcggaacccacatggctcaacttaacaggtcttactgatttttcgctattaccaaaaagtttgagaaaaaaaataaatggcatgttgagtggccgtttg

SEQ ID NO: 795030 - DNA, 580 bp, Homo sapiens
cagtgcccacactgcagggaaaggggcccctggctacgtggaggatcacagtcaacaaaggccttaaaaacacgcagacccactgacagccattctgctccttagacagttttaaggaaaagaatcatggctaagcccaaagacataaagtaattaactgttaataacaacagcaacaacataatggaaacaatctgaacatcccataaagacaccaatacrttacgctgtgtatataaatctatacaatggtaggcaagcattagaaatgttactgtggaaaaatagctaatgatatgagaaatgtttactatatattgttttataaagagatataatgtagaaaaatacacatttaaattcacaaaaatgttaaccatagttgtatctgtagacagtaaacttctgaacagagagtgtcttatgccttcatgggatccctagtatctagcacaatgcccagcccagagcaggtactcaatgaacatttattaaaagaatgaatgaatgaatgagagaattagtttctccatgttgtcaggcagggtatttctactttcttcttcatgcttttctttat

SEQ ID NO: 795031 - DNA, 580 bp, Homo sapiens
cagtgcccacactgcagggaaaggggcccctggctacgtggaggatcacagtcaacaaaggccttaaaaacacgcagacccactgacagccattctgctccttagacagttttaaggaaaagaatcatggctaagcccaaagacataaagtaattaactgttaataacaacagcaacaacataatggaaacaatctgaacatcccataaagacaccaatacgttacgctgtgtatataaatctatacaatggtaggcaagcattagaaatgttactgtggaaaaatagctaatgatatgagaaatgtttactatatattgttttataaagagatayaatgtagaaaaatacacatttaaattcacaaaaatgttaaccatagttgtatctgtagacagtaaacttctgaacagagagtgtcttatgccttcatgggatccctagtatctagcacaatgcccagcccagagcaggtactcaatgaacatttattaaaagaatgaatgaatgaatgagagaattagtttctccatgttgtcaggcagggtatttctactttcttcttcatgcttttctttat

SEQ ID NO: 795032 - DNA, 580 bp, Homo sapiens
cagtgcccacactgcagggaaaggggcccctggctacgtggaggatcacagtcaacaaaggccttaaaaacacgcagacccactgacagccattctgctccttagacagttttaaggaaaagaatcatggctaagcccaaagacataaagtaattaactgttaataacaacagcaacaacataatggaaacaatctgaacatcccataaagacaccaatacgttacgctgtgtatataaatctatacaatggtaggcaagcattagaaatgttactgtggaaaaatagctaatgatatgagaaatgtttactatatattgttttataaagagatatamtgtagaaaaatacacatttaaattcacaaaaatgttaaccatagttgtatctgtagacagtaaacttctgaacagagagtgtcttatgccttcatgggatccctagtatctagcacaatgcccagcccagagcaggtactcaatgaacatttattaaaagaatgaatgaatgaatgagagaattagtttctccatgttgtcaggcagggtatttctactttcttcttcatgcttttctttat

SEQ ID NO: 795033 - DNA, 580 bp, Homo sapiens
cagtgcccacactgcagggaaaggggcccctggctacgtggaggatcacagtcaacaaaggccttaaaaacacgcagacccactgacagccattctgctccttagacagttttaaggaaaagaatcatggctaagcccaaagacataaagtaattaactgttaataacaacagcaacaacataatggaaacaatctgaacatcccataaagacaccaatacgttacgctgtgtatataaatctatacaatggtaggcaagcattagaaatgttactgtggaaaaatagctaatgatatgagaaatgtttactatatattgttttataaagagatataatgtagaaaaatacacatttaaattcacaaaaatgttaaccatagttgtatctgtagacagtaaacttctgaacasagagtgtcttatgccttcatgggatccctagtatctagcacaatgcccagcccagagcaggtactcaatgaacatttattaaaagaatgaatgaatgaatgagagaattagtttctccatgttgtcaggcagggtatttctactttcttcttcatgcttttctttat

SEQ ID NO: 795034 - DNA, 590 bp, Homo sapiens
gcaggtatactacctgtacctggccaacatggtgagacactgtctctattagaaaacaaaaattagctgggcatggtgacatacgcctggagtcccagttactcaggaggctgaggctcaacagtcgcctgaacctgggagacggaggtcacagggagccgagatcgtgcctttgcacttcagcctgggcgatagatcgtgcctttgcacctcaacctgtgccttcttccaaaagagggcacakgtgcagtgacatcgtttctctctgttttgacatcgacaccttcaggagttggctgcactgtacctatctggactcagccagccaccagccgcagcagatggaactcatcgctttccatccctcctctctgcccttccacaggatgagctctcggatgacgcattccttcccaatttcttctcctagaacatttcaactcattcttcaatatccagctcaaatatgactttcttggcaatgctccctcttcttcccaacagtagaattaatcagtcgcctccccgtgtacccaccacatttttgtattcagctcttttgcagaactcgtaatgctggacttcacatc

SEQ ID NO: 795035 - DNA, 614 bp, Homo sapiens
aaagtgatggtggttaagagtgaagatttcagcaaaacataaagcacaggacctgtaaccaccaactttggagactgcagaaaactcatttgcacacgggacctaagaatatttcaggaaaacagtgttgatgtagttsaagagccactagaaaacagctgctactctttttggataaagctccttgctacagccattcaggatgttgccatcaccaggctgtattaccacaacatgcttgaaaagcatctggcagactcggctgggctgggaccagctgggacctgttgctaggagcaaaacaaacaggcccactggttactgtctgttcagtttcaggtgcgactggaggtgccactgacaatctctctgaggcctagagtgctgagatactgttcttgttactcctccgtttcctcttctgttacctatcaatccctgtcacctgcttcccgttcacccaaccttcacgcaggagctattcaattccctggagaattaccagtttcatactttaatgttgcccaatagaaatgtcatatggccaaatatatcactgaaattttccagcagccacattaaaaaggtaaacagcaacaggtgaaattaattgt

SEQ ID NO: 795036 - DNA, 646 bp, Homo sapiens
aatgagctaaatgcccactggggagggtataactcagaaagggccatgatctggagaagaggacacttgctgggaaggtgtcccagacggtcaaagttggacccttttcctccatagaatgtgcaggacagagcagaaatccactggggaagagacgagggagcagagyagcttccctgcttccttccacccagagcatgtgctgtgagagcagtgggtgcccaggccagcaaaggagaggctttgggagggtctggggagagtggacagctccttcaaagaccagagagagggtctcaggctagcattttgggaaggaaaattggggcagagaatggaggtccccggctctcaggccaacaagattccaaattccatcagaaggatgagcagtgctcacaggggagctgaaggctgaggactctggggctgaggaggctccaggcccacagttacagcaggaaggcttggaagtcaggtgcacaaagtttgacatataggagaataagctctcctgatctggttttgtattctgtttccctgctgatgaactgtgtgatcttaagcaacttacttaaactctctgagcttcagcattgtcatttgtgggatggacattttctgtctgctttgtggatggggtgat

SEQ ID NO: 795037 - DNA, 585 bp, Homo sapiens
aatgttattttgctcttgctttgaaattacgtaaatagaatggttagattatttatgatgatttaaagacccactatttttcttcctgtcctcaaaactcatgctgttaatttcagtgaattgataagacaattttctgaaataattgtaaaatgaaagattatttgccatttttaaggagagtataaayaaattcagagaaacagttctaatttaggggtagaatcaacaataagaaaataaaaaacccaattttaaggtgggcaaaataaataaacaggcatcttaccaaagaagatacaaaaagatgctccacatcatgtgtcatgagggaactgcaaattaaaatagcaatgagatatccctacctacctattagaatgaccaaaatccaaagtactgacaacaccaagtgctggcaaggatgtgcagcaatagtagctgtcattcatagctgatgggaatgcaaaacggtacagccactttgaaagacagtttggtagtttcttacaaaactaaacatgcagttacgatatgatctagcaatgctccttagtatttaccaaaattaattgaaaacttaat

SEQ ID NO: 795038 - DNA, 599 bp, Homo sapiens
aaacactttcagaaagtagaaaaggagtgatagtctgtgtgctgtgactcaagcctgtattcccagcactttgggaggctgaggcaggaggatcatttgagcccaggagtttcggaccagcctgggaaacatagtgataccttgtctctactatgcagtttcctagggagacaggatccaatatgtgtatatatatgtgtgtgtgtgaatatatatatatataattagctgggtatggtggcacatgcctataatcccagctgcctgggaggctggagggggaggactgcttgagcccaggaggtytaggcagcagtaagccatgatcgtgccactgcactccagcctaggtgacagagtgagatgctgtttatttaaaaaaaaaaaaaaaaaaaggaagaaagaaaaggagggatggctttccaaattattccatgaggccagcattattctgataccaaaatctaacaaagatattatgagaaaagataattgcagattaatatcttttatgaaaacagttacaaaatatttgaaaatatggcactattgaatccagcaatactaaaaagggtaatgcattaggaccaataaagggc

SEQ ID NO: 795039 - DNA, 669 bp, Homo sapiens
ttaaattagtaatcaaaactgttcctatgaagagaactctaggtccagatggcttcactggtgaatctctcaaacactgaagaaataaagtcatacaaacactttcagaaagtagaaaaggagtgatagtctgtgtgctgtgactcaagcctgtattcccagcactttgggaggctgaggcaggaggatcatttgagcccaggagtttcggaccagcctgggaaacatagtgataccttgtctctactatgcagtttcctagggagacaggatccaatatgtgtatatatatgtgtgtgtgtgaatatatatatatataattagctgggtatggtggcacatgcctataatcccagctgcctgggaggctggagggggaggactgcttgagcccaggaggtctaggcagcagtaagccatgatcgtgccactgcactccagcctaggtgacagagtgagatgcygtttatttaaaaaaaaaaaaaaaaaaaggaagaaagaaaaggagggatggctttccaaattattccatgaggccagcattattctgataccaaaatctaacaaagatattatgagaaaagataattgcagattaatatcttttatgaaaacagttacaaaatatttgaaaatatggcactattgaatccagcaatactaaaaagg

SEQ ID NO: 795040 - DNA, 669 bp, Homo sapiens
ttaaattagtaatcaaaactgttcctatgaagagaactctaggtccagatggcttcactggtgaatctctcaaacactgaagaaataaagtcatacaaacactttcagaaagtagaaaaggagtgatagtctgtgtgctgtgactcaagcctgtattcccagcactttgggaggctgaggcaggaggatcatttgagcccaggagtttcggaccagcctgggaaacatagtgataccttgtctctactatgcagtttcctagggagacaggatccaatatgtgtatatatatgtgtgtgtgtgaatatatatatatataattagctgggtatggtggcacatgcctataatcccagctgcctgggaggctggagggggaggactgcttgagcccaggaggtctaggcagcagtaagccatgatcgtgccactgcactccagcctaggtgacagagtgagatgctgtttatttaaaaaaaaaaaaaaaaaaaggaagaaagaaaaggagggatggctttccarattattccatgaggccagcattattctgataccaaaatctaacaaagatattatgagaaaagataattgcagattaatatcttttatgaaaacagttacaaaatatttgaaaatatggcactattgaatccagcaatactaaaaagg

SEQ ID NO: 795041 - DNA, 669 bp, Homo sapiens
ttaaattagtaatcaaaactgttcctatgaagagaactctaggtccagatggcttcactggtgaatctctcaaacactgaagaaataaagtcatacaaacactttcagaaagtagaaaaggagtgatagtctgtgtgctgtgactcaagcctgtattcccagcactttgggaggctgaggcaggaggatcatttgagcccaggagtttcggaccagcctgggaaacatagtgataccttgtctctactatgcagtttcctagggagacaggatccaatatgtgtatatatatgtgtgtgtgtgaatatatatatatataattagctgggtatggtggcacatgcctataatcccagctgcctgggaggctggagggggaggactgcttgagcccaggaggtctaggcagcagtaagccatgatcgtgccactgcactccagcctaggtgacagagtgagatgctgtttatttaaaaaaaaaaaaaaaaaaaggaagaaagaaaaggagggatggctttccaaattattcmatgaggccagcattattctgataccaaaatctaacaaagatattatgagaaaagataattgcagattaatatcttttatgaaaacagttacaaaatatttgaaaatatggcactattgaatccagcaatactaaaaagg

SEQ ID NO: 795042 - DNA, 561 bp, Homo sapiens
atttgcttaaaagattaaagttcatgtatgttttctcttatgtaaaacttaattgaaagctttcaagtattgagtaaaactcacagcccattttcacatttttttttagcttgattggacaatattgttgacgtctattgaatattgcaggaaygactattaagaatatctgtgttagtgacctgagggaacagtccacacagtcactgtctaatcatttagaaatttaaattagtttagaaattattctaatttttgaagccatttttgtccgtattccattcttctgtcttcaatgccttgtcggtgaaaaaaaaataaagagaaaagaaaaaaagacacactggtaactaggaattacatttatccatcatccacaagagagccctgtctatgtgcaaatgagttttacgtgaagcctcatgggtgcctgaaattattcctcttacaaacactctcttgttctgcttcattctcacatttccagatcagtgtcactttattctgcttaaaccatcaaacagataatagcatacaattagtcaccttattataggagca

SEQ ID NO: 795043 - DNA, 615 bp, Homo sapiens
tcttttttatggctgcatagtattccaaggtgtatatgtaccaaatttgatttatccagtccaccactgatagacatctaagttgattctatgtctttgctattgtgaatagtgctgcaataaacatatgagtgcatgtgtttttaaaaaatttttttctgtgatctgggtttacttctgttatcatttgattttatcttgcagagattccrtagatatttcttgtactttagatctgtttgcaatacattatctcagctttgtctgaaaaacgtatttatttttgcctttacatttgaaaacattttttctggatgaaaattctagattgaactttcttcctccagcactatattaattcatttcattgtctcctggtttgcattgtttctgataagaagagaaatgactaatgcttcttattattgttcccagtttataatatgcctttacctactttggctgcttttaaaattttctcattaccattttttttagttaaaaataaactttttattatagaaacatttgaatatattcaaaaaaataaagacaccagtataatgaactcccacttacctatcacccagcagtaataattactgctattatata

SEQ ID NO: 795044 - DNA, 647 bp, Homo sapiens
aagttaaaaacagggtcatttattttagatgttctttagtgtggatcaaagtatgcaaaagaaggattcaactttgaagttaagttttctgctttaattcacatactcataaagcttttcactttcagttttgccttaataaatttaccatttatatattaagtgatactatgcaagcactctgctaattgctgcaagcatataacagtagataaatataagtttattttctctaagaattcacagtccagcaagaaggtggggaagagagatccaatgaccagtacaaatagtttctgaagatatatagtgtacattatgccacatcgacagggatactgtactcctcatagatatcataagtttgtatatatattaaaacaattttgggcagaagacaacaaattatcttattctcatgactctagcgggtttgtttgcyttttccttcttttcaaatataggtattgaagggcagcaattagcaagggtacagaaccactagcaggaaactttcttaatatagtcaaagatggcttatgaagattaattaaatatggccctaattaagtctggccttatcttttcatgctcacaaacttgattaaataaacaaaatctctagtattcctttaacggtcaactga

SEQ ID NO: 795045 - DNA, 580 bp, Homo sapiens
tgaaagactaatatccagaatctacaaggaacttgaaaacattaacaagaaagaaacaaataacgtcattaaaaagtgggcaaaggatatgaacagacatttctcaaaaggagacacataaatggccaaaaaacatatgaaaaagattcctagtatcactaatcatcagataaatgcaacttaaaactacagtgattctgggcgtggttactcatgcctgcaatctcggcactttgggaggcagaagtgggaggatcgtttgagtccaggagttcgagaccagcctgagcaacatgaagaaaccctgtctctacaaaaaaatacaaaaatcagctgggcatggtggcacatgcttgcarttgcagctacttgggaggctgaggtgggaggattgcctgagtccggaggtgaagattacagtgagttgagatgccaccatttcactccaacttgggcagcagaatgagacccagtctcaaacaagaacaaaaaacgagataccaccttacaccaatcagaatggctatttaaaagtaaaaaaaaaataacagatattagtgaggatgtggaggaaagggaa

SEQ ID NO: 795046 - DNA, 580 bp, Homo sapiens
tgaaagactaatatccagaatctacaaggaacttgaaaacattaacaagaaagaaacaaataacgtcattaaaaagtgggcaaaggatatgaacagacatttctcaaaaggagacacataaatggccaaaaaacatatgaaaaagattcctagtatcactaatcatcagataaatgcaacttaaaactacagtgattctgggcgtggttactcatgcctgcaatctcggcactttgggaggcagaagtgggaggatcgtttgagtccaggagttcgagaccagcctgagcaacatgaagaaaccctgtctctacaaaaaaatacaaaaatcagctgggcatggtggcacatgcttgcaattgcagctacttgggaggctgaggtgggaggattgcytgagtccggaggtgaagattacagtgagttgagatgccaccatttcactccaacttgggcagcagaatgagacccagtctcaaacaagaacaaaaaacgagataccaccttacaccaatcagaatggctatttaaaagtaaaaaaaaaataacagatattagtgaggatgtggaggaaagggaa

SEQ ID NO: 795047 - DNA, 528 bp, Homo sapiens
acagactagctattatcaaaaaaagaatgataacaagtatttgtaagaatgtggaaaaaatggaacccttgtatgctgttggtgagaatataaattagtgcggccattttggaaaatagtatgggagtttctcaaaaaactaaaaaaaaattaccctatgatctagcaattccacttctggatacatatatatgtgtgtgtgtgtrtatatatatatatatatatatatatatatatatgaaatttcacagtaaaattgaaatcagtatgttgaagagatatctgccctcccatgatcattgcagtattattcacaatagccaagatgtggaatcaacctaagtatccatcaaaggataaagaaaatgtgatatatctacacaatagaatacagtgtttaaaaaggagtaaattctgtcatttgtgacaacgtggatggaactagaggacattatgctaagtaaaataagccatgtacagaaagacaaatactttatgatctcaattatatgtggaatctaagtgaat

SEQ ID NO: 795048 - DNA, 628 bp, Homo sapiens
ctttattatgttcttaaaataaggtaaattcagaatacaataataatacttctcttacctaaccaaagggtgtacattagctagactgaatattagagaagtcagaagcttagatcagagatgctaactcccccagttttttggtcacagagttctgtatragccagtggttatcaatcaggaatgattttgctccccttccctaggacacattgattgtcatagttgaagaagtggcactggcatttaatggattgaaaccaatgttgctgctgaacatcctacactgtaatgatcctacagtgcacagacatttctccacaacaaagaactgtcttgtcccaaatgtcagttgtgctgaggttgtaaaaccctggtaaaagcctgtatttgctaagggccttattctttcattctgtccactgctgccaacttacttggagagaaaacaagttgatgttttgaaagttaggtagaaatcactgaaatcataataccagatcccatcatagagagaattctattacataatatacttctaattaagacttgtacttgatggaacttgtgaatgtctgtgttaacctttacctttcgtgattccatcgatgattaagaaagattcttg

SEQ ID NO: 795049 - DNA, 624 bp, Homo sapiens
gccaccatgtctggccacacatttcctaatttctctaaacctttcttcatttacaacacagcaagaatgatacccaccagggtgggtgccacggggcggggggcgggggtggagcaataagcagaagtgacgtgtgccccttgaaaggaayggtcctagcctctccttcacctcctgctttctgttggcaagatgtggaggtgatggcacaacatcttcagccatggggacaaaagtgacatcccaagggagtaaccagcaagaagaaaacgaacaggccttgaactctttactcttgaatttttacacgagacataaaagtatattttaaagagtctgttgagtgattatacacaagctgaaacgataccctaactaatagcacgggcaatgggctcccctccctcaaagagtatgtttttgctgtcaggacattttctgagaagataccgccgccctcatctccaattggccagggatattagaggatcctataccagggtcttctgaggaaatgctgtctgcctgaactcttcctcagtgcctttgttgggctttacatcttgctggtccctgcggttgactgttaacaaagattgttcaacagctctttccaaagaaaga

SEQ ID NO: 795050 - DNA, 624 bp, Homo sapiens
gccaccatgtctggccacacatttcctaatttctctaaacctttcttcatttacaacacagcaagaatgatacccaccagggtgggtgccacggggcggggggcgggggtggagcaataagcagaagtgacgtgtgccccttgaaaggaacggtcctagcctctccttcacctcctgctttctgttggcaagatgtggaggtgatggcacaacatcttcagccatggggacaaaagtgacatcccaagggagtaaccagcaagaagaaaacgaacaggccttgaactctttactcttgaatttttacacgagacataaaagtatattttaaagagtctgttgagtgattatacacaagctgaaacgataccctaactaatagcacgggcaatgggctcccctccctcaaagagtatgtttttgctgtcaggacattttctgagargataccgccgccctcatctccaattggccagggatattagaggatcctataccagggtcttctgaggaaatgctgtctgcctgaactcttcctcagtgcctttgttgggctttacatcttgctggtccctgcggttgactgttaacaaagattgttcaacagctctttccaaagaaaga

SEQ ID NO: 795051 - DNA, 400 bp, Homo sapiens
cttctgaggaaatgctgtctgcctgaactcttcctcagtgcctttgttgggctttacatcttgctggtccctgcggttgactgttaacaaagattgttcaacagctctttccaaagaaagagcaggttcacagggagttctggacagaccacataagagggtgttgtcctgttasagtcccacgcagagggtggggcctcccctgcccctgccacccagcacgtacagagtatgtccctttcccactcccagcacatacagagtatgtccctgcagcctctgggttttcattaccgcacttacatttgctgaaattaatctcatgcctaactctcccactaagttgtgagttttttcaaagataaaaacagtgtctcacgccagtatacaatgcttagca

SEQ ID NO: 795052 - DNA, 657 bp, Homo sapiens
aaatcacactagctcaccagcaatggatccaaactaagaagaaatccctgacttacttgaaaaagaattcactaggttggttattaagctaaggcaccagagaaaggtgaagcccaatgtaaggatatatatatatataaaaaagatacaagaagtaargggagaaatattcaatgaactagatagcataaataaaaaacaatcaaaactttaggaaataatggacatacttatagaaatataaaatgctctggaaagtcttagcatagaattgaacaagtagaagaaggaaattcagagcctgaagacaaggtcttcttattaaccaaatccacttaagacagagaaaaaagattaggagaatatgaagaaagccttcaagaaatctggaattatgttaaatgaccaaacctaagaataacggccattcctgaggaagaagagaaatctaaacgtatgctaacataattgggggaataatttagaaaaacttccccagctttgctagagacctagatccaaatacaagaagcacaaagaacatctgggaaattcatcgcaaaaagatcatcatctaggcacattgtcgtcaggttatctaaagttaagatgaaagaaagagctgtgaaacaaaagcaccaggtaacctgtaaagga

SEQ ID NO: 795053 - DNA, 525 bp, Homo sapiens
acaccccccaaaaaatcacactagctcaccagcaatggatccaaactaagaagaaatccctgacttacttgaaaaagaattcactaggttggttattaagctaaggcaccagagaaaggtgaagcccaatgtaaggatatatatatatataaaaaagatacaagaagtaaagggagaaatattcaatgaactagatagcataaataaaaaacaatcaaaactttaggaaataatggacatacttayagaaatataaaatgctctggaaagtcttagcatagaattgaacaagtagaagaaggaaattcagagcctgaagacaaggtcttcttattaaccaaatccacttaagacagagaaaaaagattaggagaatatgaagaaagccttcaagaaatctggaattatgttaaatgaccaaacctaagaataacggccattcctgaggaagaagagaaatctaaacgtatgctaacataattgggggaataatttagaaaaacttccccagctttgctagagacc

SEQ ID NO: 795054 - DNA, 525 bp, Homo sapiens
acaccccccaaaaaatcacactagctcaccagcaatggatccaaactaagaagaaatccctgacttacttgaaaaagaattcactaggttggttattaagctaaggcaccagagaaaggtgaagcccaatgtaaggatatatatatatataaaaaagatacaagaagtaaagggagaaatattcaatgaactagatagcataaataaaaaacaatcaaaactttaggaaataatggacatacttatagaaatataaaatgctctggaaagtcttagcatagaattgaacaagtagaagaaggaaattcagagcctgaagacaaggtcttcttattaaccaaatccacttaagacagagaaaaaagattaggagaatatgaagaaasccttcaagaaatctggaattatgttaaatgaccaaacctaagaataacggccattcctgaggaagaagagaaatctaaacgtatgctaacataattgggggaataatttagaaaaacttccccagctttgctagagacc

SEQ ID NO: 795055 - DNA, 627 bp, Homo sapiens
gtaaggatatatatatatataaaaaagatacaagaagtaaagggagaaatattcaatgaactagatagcataaataaaaaacaatcaaaactttaggaaataatggacatacttatagaaatataaaatgctctggaaagtcttagcatagaattgaacaagtagaagaaggaaattcagagcctgaagacaaggtcttcttattaaccaaatccacttaagacagagaaaaaagattaggagaatatgaagaaagccttcaagaaatctggaattatgttaaatgaccaaacctaagaataacggccattcctgaggaagaagagaaatctaaacgtatgctaacataattgggggaataatttagaaaaacttccccagctttgctagagacctagatccaaatacaagaagcacaaagaacatctgggaaattcatcrcaaaaagatcatcatctaggcacattgtcgtcaggttatctaaagttaagatgaaagaaagagctgtgaaacaaaagcaccaggtaacctgtaaaggaaaacttaccagattaacagcacatttctcagcagaaaccctgcaagccagaagggattggaaccctatcttcagcctcctcaaacaaa

SEQ ID NO: 795056 - DNA, 639 bp, Homo sapiens
cttctatggctgtcccgatttgcgcatttcctggggtactatgaacgtgagtggggtatttgttctggcattaaaagaaaacaagcaagcaaacaaaaacacagcctccgatgccaaacatgttcccccttcttcacttccttggarctggaagtattattcctaagtctagtgcaaaatgcttctactctctgtgtcttcctgatagggatgtttaatgtaagtaggatattaatttcagaacattgatttcttatctgtgtgtctgacgtgccatctttaatgttaaaattaaggtgttaaaattaagcctagttatatagacgaaataaaatgctaagtcactacactacatcgtttattttctattacatctcattcttccctttctaaatggaactttttaaaacctacgttattttccctcaaacaatttattttcacaattcatatttattatagatagcagaagtaatccattttaatatggcctttaaaaattccaaatatttgaggttgaaaatgtcctggcttttaaaataggaaatttactatttatgagacttctaaaagaaaagaataggagggcatgtaaatatattctccatttatttttcatcacccctcaacaagctggaa

SEQ ID NO: 795057 - DNA, 428 bp, Homo sapiens
taaacaggctgtgagtccaccgcggatcctaaaaaccagggagggaagaggggctggcacttactccccgcatcgcggggggtgtctcaaccccttgcgatgggggtcctaagagccagggggggaagaggggctggctattacaccccgcatcaaggggggtcccgtcgatgggggtcctaagagctagtggggkaagagggcctggctcttattccccgactcgcgagggatgcctcccccctctgctatgggggtcccaagagccacaggggaagaggggctgcctctcagtccccgcctcgcggggggtgcctcctcctcctgcgatgggggtcctaagagccagggggggaaaggagctggctcgcagtccctgtctcgcggggggtgcctccccccactgcgatgggggtcctaagagccgg

SEQ ID NO: 795058 - DNA, 428 bp, Homo sapiens
taaacaggctgtgagtccaccgcggatcctaaaaaccagggagggaagaggggctggcacttactccccgcatcgcggggggtgtctcaaccccttgcgatgggggtcctaagagccagggggggaagaggggctggctattacaccccgcatcaaggggggtcccgtcgatgggggtcctaagagctagtgggggaagagggcctggctcttattccccgactcgcgagggatgcctcccccctctgctatgggggtcccaagagccacrggggaagaggggctgcctctcagtccccgcctcgcggggggtgcctcctcctcctgcgatgggggtcctaagagccagggggggaaaggagctggctcgcagtccctgtctcgcggggggtgcctccccccactgcgatgggggtcctaagagccgg

SEQ ID NO: 795059 - DNA, 597 bp, Homo sapiens
ttccccttcagaggacttgattttttgatttatgggactctgtgagtactttgagtttgtggtccctgtggaagcctgggaactgagtctttctcttaagccccgagctgtctggaaaggtacagtctcattcatctgccttccagcatcactagctccagggctcctccctggaatggaggcctctgtcaccctgcctgggtggtcctgctatcaggacactgtaccaggctccggtgagggtctcagccccataaccaccgagtcactgtctcaggctcttggttccttccaggctgtggtgaggtccctctgttttggtttggctgaggtggttgaaatgaacaggactgctctgaccagctcacagaaggggaagtggatggcacgagcacaggtagggcagccagggagcagagattctctcaacacccccaaatctccaaatcaggktgccttgggatgcaaatggcaaaaatcccaagctaacctcgagcaaaagaaggaagaggaggaggtattggcttagctggcttcaggtactgctggatccagcactccatcttgcttccctcatctgcctcctccctgctcatt

SEQ ID NO: 795060 - DNA, 461 bp, Homo sapiens
ttcaagcccggatatctctgaatctaagggttgccccaatgtgggaaaggaatggcactgtgcagagatgagtgagaagacagtgctcccaagtgactcaggaagctgagttcgcgcctggcccttggcctctctctatgtccccagggcccagctcagtcccagctacctggcagaaagagatgagggatgttgatttcacgttttggttttatgatgttgagtttggaggtggtacaggtacagtgtcctgaggccatggaactatgatagcctgctgtctcctaaagggaactgggatcgagttccaatggtctstaagctcaggaggtggttcagaatcagaggaggttgcccactgctgctggggagtggagtctggtgggagagggacatggggacaactgtagagggctcagcatccagcccaccattcctgcccggaggatcctcaacataga

SEQ ID NO: 795061 - DNA, 611 bp, Homo sapiens
tttaccctcatcatattttctctgaatcacaccttgggttagttattgcttctctttagtctcctctaatctggaccaccacacctggctattttttgtttgtttgttttgagatggagtttcgttcttgtcgcccaggctggagtgtaatggcgcagtcttggctcactgtaacctccgcctcccaggttcaagcgattctcctgcctcagcctcccaagtagctgcgattacaggcacccaccaccatgcctggctaatttttttgtatttttagtagagatggggtttcaccatgttggccaggctgatcttgaactcctaacytcaggtgattctgcctgcctcagccccccaaagggctgcaattacaggagtgagccactgtgccttggccaacgcccagctaatttttgtattttttgtagagacaaggtttcaccatgttgcccaggctggtcttgaactcctaagctcaagcgatccacctgccttggcctcccaaagtgctaggattacaggtgtgagccactgcacccaggctttgataggactcttgacaaaggttggccaggttagtcagatgccaagaggagggattttcaataagc

SEQ ID NO: 795062 - DNA, 611 bp, Homo sapiens
tttaccctcatcatattttctctgaatcacaccttgggttagttattgcttctctttagtctcctctaatctggaccaccacacctggctattttttgtttgtttgttttgagatggagtttcgttcttgtcgcccaggctggagtgtaatggcgcagtcttggctcactgtaacctccgcctcccaggttcaagcgattctcctgcctcagcctcccaagtagctgcgattacaggcacccaccaccatgcctggctaatttttttgtatttttagtagagatggggtttcaccatgttggccaggctgatcttgaactcctaacctcaggtgattctgcctgcctcagccccccaaagggctgcaattacaggagtgagccactgtgccttggccaacgcccagctaatttttgtattttttgtagagacaaggtttcaccatgttgcccaggctggtcttgaactcctragctcaagcgatccacctgccttggcctcccaaagtgctaggattacaggtgtgagccactgcacccaggctttgataggactcttgacaaaggttggccaggttagtcagatgccaagaggagggattttcaataagc

SEQ ID NO: 795063 - DNA, 651 bp, Homo sapiens
atgacagcaggatccagggggcaggggcaggccggggaggtcccacctgagctatcccaggcaggtggaggaggcaaccagatgccaacggggccactcccctgcctccctcccaagctttgaccaagactgtgagagacaattgccatgaacacccagtgaagtcattggctgtgaagggaggtggccttctcaaagccagggcctgaccttagaaaggtctgcctgcccacggatatcgcaaggtgaatctmaggacctggaggtgggcagagctgggctccaccatttctgagctgtgtggctttgggcaaagctttcattctctgggctacagtctcctcacctatgaaatgaggatagtatcagtatccatctcacagtgttgttctgaacactgcataagacaaggcaagttcagagttgagctcattgccaggcatggagcaggcacgcagcacacaggagccgtaacaaaaaggagccattttcaccctcattacacaacctgagagggagtgagctccccaatccttgaggtatgtaagggagaggagggactggaaaggctagggccaagccccaaatgaaagattgtgtcttggcagaaacagaagaagagacaaggcagaaaagggcataatgatttca

SEQ ID NO: 795064 - DNA, 556 bp, Homo sapiens
accaatttcttggaagttgaaaaagtattaaacttactcaagaataatagataactagaacagtcctatatcaaatcgaaaaattgaattaatagtttaaagtatcccttaaaataaaacctacagcccaaatgattttaccggtaaattgtcgtaacatttaaggaataaataataccaattctacacaatttcttccagaatatagaaaaagagaaaatactccccaactcattttttgaggccagcattattctaatgtcaaagtaagacaaagacattacaagaaaaaaaaaaactacagaccaatatttgtaatacacagagacgcaaaaattctcaaaaatattgacaattttaatccagcaatatgttaaaaagttaacatgctgtgattcagtggggctcagcaaggakggtttaatatttgaaaagccaatcaatatgatttaccatgttcacacattaaagaagaaaaaacatagaatcattgcaatagttgcagaaaaagtattttgtaaacttcattattgattcatgataagatctttcagta

SEQ ID NO: 795065 - DNA, 510 bp, Homo sapiens
caataaaaagaaagatggaaaaatatcctgtcataaaaattaaaacttcttacatgacagacaaagccaaaagccaatagcaaactaagaataacgcactttcaacatatgacaaaatgttaatttccttaatatttaaatcctctcacaaacacatttgcaaaggaccaagaacccagtagaaaccacaggcaaagcgcatgcgtgaagacttagcaggaaaaggaatgcaaagggcgattcgatgccaggagaaaaaaatwattattatgacagaaatataaatttgcaatactatgtggtggttaaacatgctcataaaatgttatgggaaatgttgatttgagtctttagaatatgattcaataatatctattagcaataaaaatgaatataacttttgtttgaccactttttttttttttttgagacagggtctccctctattgcccaggctggagtacagtggcacgatcacagctcactgcagccttgacctcccaggctcag

SEQ ID NO: 795066 - DNA, 569 bp, Homo sapiens
tttaaatcaataaagtaataaactttatcatgttatcagcccatccgcacataggcacagcttaatttagtctttcttttttttgagatggagtctagctctgttgcccaggctggagtgcagtggcatgatcttggctcactgcaaactctgcctcccaattcaagcgattctcctgtctcagcctctgagtagctggggttacaggcatgcaccaccatgcctgtctaatttttgtatttttagtagagacggrgttttgccatgttggccagcctggtctcaaactcctgacctcaggtgatccgcccacctcagcctccaaaagtgttgggattataggcatgagccaccgtgcctggccctagtgtttacaaagataagacccctatataagaaaaactgaaaacacaggcggtgcattccttggcttgctttctgtggacagacgcccccactctgtaaaggagcagctttcaataaactctcttctcactacactctgcgactaggcttgcgtttcctcctgcacatgagccaaggatcctctcttagagactggatggaga

SEQ ID NO: 795067 - DNA, 432 bp, Homo sapiens
caggctggagtgcagtggcatgatcttggctcactgcaaactctgcctcccaattcaagcgattctcctgtctcagcctctgagtagctggggttacaggcatgcaccaccatgcctgtctaatttttgtatttttagtagagacggggttttgccatgttggccagcctggtctcaaactcctgacctcaggtgatccgcccacctcagcctccaaaagtgttgggattataggcatgagccaccgtgcctggccctagtgtttacaaagataagacccctatataagaaaaactgaaaacacaggcggtgyattccttggcttgctttctgtggacagacgcccccactctgtaaaggagcagctttcaataaactctcttctcactacactctgcgactaggcttgcgtttcctcctgcacatgagcca

SEQ ID NO: 795068 - DNA, 530 bp, Homo sapiens
ctgagatgccatacttaaacaaaaacctcacacttaggatgtcccaaattgaatacattgacctttccaattgtcttctgatctcagtgtttacagaataacatttctggcctgttgcagttgccagtgttcagattctcaatgttctctacacctcttccctctacctcaccccgcacattcaatagaatgccagtcctctcgatgacagtgccctgataagtacgaatccacacccccataagcatccccataaaccagcttcaggctgttatttttccttttgctgcaaaggcctctgctggtccctggcttttggtgtcttcccacctctgatccacacatgtgcttctggarggatattagtcaagcacaactgtgttctgtccaccgctgacaagataaaggtcccactctcctggcaaatgagcccttggaggatctaacccatctatatagcctcactcctggcaggcggtacctctcaccatttctcaggcataccttgcatttcctgcattcacactgtt

SEQ ID NO: 795069 - DNA, 627 bp, Homo sapiens
aaggacatttagattgcttccaatgtttgtctattaagaataaagcagctatgaatattcatggataggtttttgtgtgaacgtgagttttcattattctgggataaatgtgcaggtttataattgctgggccatatgaaagttgatgtttaatgtttttctaaaaccaccaaactgttttccagagtggctgcagcattttgcactcccaccagcaatgtatgagtgacctggtttctctgtatcttcctcggmatttggtgttgtcataaatttttatttatatcattcacattaggtgtgtagcaatatctcactgtggtttgaatttgcatttccctagtggcgaatgatgcggaacaacttttcacttgcttatttgccatccgtatttcctccctggtgaaatatctgtttatgttgtttgcccactttctaattatactgcttgctttgttgttattgagttttcagaattttgtatacattctagatactagtctcttgtgagagatgtgatttgtaaatatattctctcagtctgtatcttgtgtttcttttttttttttttccattttcttaccggggattttcacagagtaaaagtttttaattttggtgaagttc

SEQ ID NO: 795070 - DNA, 627 bp, Homo sapiens
aaggacatttagattgcttccaatgtttgtctattaagaataaagcagctatgaatattcatggataggtttttgtgtgaacgtgagttttcattattctgggataaatgtgcaggtttataattgctgggccatatgaaagttgatgtttaatgtttttctaaaaccaccaaactgttttccagagtggctgcagcattttgcactcccaccagcaatgtatgagtgacctggtttctctgtatcttcctcggcatttggtgttgtcataaatttttatttatatcattcacattaggtgtgtagcaatatctcactgtggtttgaatttgcatttccctagtggcgaatgatgcggaacaacttttcacttgcttatttgccatccgtatttcctccytggtgaaatatctgtttatgttgtttgcccactttctaattatactgcttgctttgttgttattgagttttcagaattttgtatacattctagatactagtctcttgtgagagatgtgatttgtaaatatattctctcagtctgtatcttgtgtttcttttttttttttttccattttcttaccggggattttcacagagtaaaagtttttaattttggtgaagttc

SEQ ID NO: 795071 - DNA, 559 bp, Homo sapiens
ccatctgtggggcacaaacagctccttcttggaggtggtggttctcggacaaaacatagtatctccagagtgtagtacacaatagagtgtgggaaggtacttttaaatacttccattttggcttttccactgtcaatttctgccccatttataacacttataaagatggataacttagattctgaagaaaggttattttttcttcacttttctccttcaaatgggagataaagtagtttaggggaggcatgttaaagaaggctatcaagacctgtcccccacactctctgtgtcctataaaccagcagagcgctgcatggaaaaagtcttctgtcttctmtgtagctggaataaaaggaaagggaaggaaaacaccccaactgccaatcccactgcagtcatgaaacttgagaagtctctgttgtctgttctcaggaaatggtgtgggttctttttggagtggttatgttcaggaaacccagagctgagatggagaggacttcaggaagtttatgcagtgtatccttcacttgcgcaggaggataatgtataagaacaa

SEQ ID NO: 795072 - DNA, 580 bp, Homo sapiens
aaccaatgggaaacctctggagggtatttaaacaccagagaattctgtaatcggggccttgaacccctgtgctcaggcccgctcccactctgtggagtatactttcattttcaataaatctctgcttttgtggcttcattctttccttgctttgcttgtgcattttgtccaattttttgttcaaaaacgctgagaacctggacaccttcaactggtaacaacaggattgagaaaatagtcacccgttttctatagggcttaatttccttgggtggcccccaytgacaaaggctggatcataaacacaatttctcctctcccacttgtcctattccagccaaaaaggaaagtaatagcatgaagttttgtgataaagtctggaggaggggcatgtgctccctcagcatggatgaagcagctagcttggtcagagaggctaagacagttaagggaagtcttcctaagggagaaacatttacgctcctgtctggtggaagaattagagctagtcagaggaggggaaaagaaatttccaggtggagggaacagtgtgataacatgagtgaaggccttgaaggag

SEQ ID NO: 795073 - DNA, 448 bp, Homo sapiens
ccgtttaaagatttataaagggatcgtcagtttcttttttctttttttttttttgagacggaatctcgctgtctcccaggctggagtgcagtggcacgatctcggctcactgcaagatctgcctcccgggttcatgccattctcctgcctcagcctcctgagtagctgggactacaggtgcccgccacyatgcccggctaattttttgtatttttagtggggacggggtttcaccgtgttagccaggatggtcttgatctcctgaccttgtgatccacccacctcggcctcccagaatgctgggattacaggcttgagccaccgcgaccagcctaattgtcattttcaatgcatgttttctggttgtataaaagctctcccatgcaagagggctgttgttgtaacagtagattattatggtacagtgtattttccccaggtaaagaaa

SEQ ID NO: 795074 - DNA, 570 bp, Homo sapiens
tgcagacagaaggttacatgtccaatgttcaaatatgcttacagatttatgaatacaagacaagcagccccaagagaaaaatcagtgaaggatatgaagaacagtgcatgggagagcaagcctcaatgatcaagatgagaagatgctcaaaagggaaatkcagtccacaaaagcaaagagatgaccctccctatctgccacactggccaaaaataaagaggtcgaaatatttgtagcattatgtctagagcaaaacgtgatataaagtgaaaagtggtatgaatgaaggtcagtcgttgatttaaaatttgacacatccatatcctatatgtttatgctgcgatcagaaaagtatgaatttgagctggttaacgtggaaagattcccacaatatattgcgtaaataatgtctaatgtaatcctatttttgtataaaaaggtcgaggtgggtgtgaattcgtgcttattcacttctgaagccagaatatctgggtttggtcctgtacgtagctcttattggctgtgggactttgggaacttaatgtaacctctctgtgttgctgatcttta

SEQ ID NO: 795075 - DNA, 615 bp, Homo sapiens
cagcatatttcaatctccttctacaaaaagagaacacaaaaaactagcttggattttaaataaggcagaaacccagaggccacattctgtccttgatgcttagctttgcaccattccctggagaaagctcttatgtcttttaggttctgttgggatgcttctttacacatgcttacatggccttgttcccagtctttgccccttcaaaaaatgagctggctgttcattaagagtcatgcagctgagctcatacccatgaatttttcagggtatattactgagtgtcctttaatccctaagacttgtagatcttggagggctggatctctgaacagagaggcccaggttcccatccctgtagcatcagcaatgacagctgcttcccatttgctgcttagattcagytgaaactcatcggaaatcagatctgatggtggcctcagttctgatgactacactaacttcatccgatcagatttccagtgagtcaggctggttgctgagccctttgtcctgttgtttcctttagactagcttgggttggtggtgcttcatgaataatccatgcacattaaccagctgcatgcataaaggcatttccactgtgtctttgcc

SEQ ID NO: 795076 - DNA, 643 bp, Homo sapiens
attaaaaaaaaaaaaaggaaataaccaaaggaaaagaaaaggctcttattttcataacacaaaatactcacttctaaatacctggataaaaaaaagaaaccttaatgataatgacaaaatctatatgcaaaatgtttcaacccaagaaagtaaaacaacaaataatcaccaccaacaacaaatagcccaaagtaaatccaaagaaaataataaagataaaagcaaaaatgaatgaaacaggcaaacttcttagaattgaaatttgatcctttaaaaaaactatctctgataaggttgattagagagaacaaataaacaacacagaaaaggggaaataattcagatataatattttcaaaaatataagaatagtagagctatctctaagctcacgattttggaaccttagttattaaaggaaagaggtatgactgacccgctgctgtctcctccacatycccttcaccgacttgttttttctggacttttcatctcagctcagaatgaccttattttttttcttttcttagctttacttccatgaaactgttggagggaacatgtgagtagagttgccaaacgcagtaaataaaaatacagaatgctcagttaaatttgaatttcagataggaagcaagtaatt

SEQ ID NO: 795077 - DNA, 538 bp, Homo sapiens
tgatcttggactcctaacctctagagctataagaaaaaaaattctattgtttaagttacccggttgacagtattttgttatggcagcctgacctgactagacatagggtgactgcatttccatttctgattcactgcttctaatctcctgtgaactgcttgattaaattttgcttaaaataaacatttggatatgctccatgggtgctgtttcrtttactttgactgtttaggtgtcttcattgtctactttcaaactccaagttaaattctggcatttggaagttcagtatttacatttgttttctaggctgctaataactaaaagctgtttgggaaagtgaacaatgcagaccatgatttctgttttttgtttttaacttaaggaaaaagggaaaagccttcaattgttcctcacatctgagttaggagaagaatcttgaagccctctcaaattcagacagaaaagagttccctttgagaaatcataattatattctgactgttaacatttttggtgcgaatggttgaaagatggg

SEQ ID NO: 795078 - DNA, 440 bp, Homo sapiens
gctctgaaattaaatgaataaaaaaggattctgccaaataatcattaaaaagatgaaagagaaggcatgcaggttgcccgcataaggataacacttaagtgaggcctgaatttgtctgagctgcacatgatgtttcaaagccatggcaagctgtgaacagcctgagggttgtgaacrtccgggtgtcatgacacttttctacattagtgacccatcaccgggtggcgcctccatccttgggcaggacctgttgaggtcctcagcactcacactgtctttaaaggctgcacaaaaaccacaagacgagccagcatggaggaaaacaactcattaggcattttcctgtctggggtacagatgtgtttggatttcaatgaaggagctgaaacttcaacagctgagctagagacagctgttccagaaacccagagggagaccta

SEQ ID NO: 795079 - DNA, 651 bp, Homo sapiens
tagcaaaacacccttgtgaaaggatcagcatttcatgaatccctcaaggatctcaatatacaatccaagatatcacaatgagaatcaagagcaggagaaaaacattttgattaccaatttaaaagaaggtgtgaaagaaaacactaagatcaagaatacatatacgaaacttacacggtgtagcggagggatacaaaatrtatggcactgatactctggtgcccactcttatgcccacagctaagccccaatcaaccccagagccagatgcagcctcagaatctatcttaacacatttcttcaaaaagccactccagataattggccctagaagcaagatagaattctttgctcctgccactgaaaactgaattatttcaagccatgatggctctcatatatattggagcctggctacactgagctacttagtcatctttaaatgtactgtgaaacttcaagccctgtgcctttgttttttctgtgtcctacctggaaatatcttttctctacttctctactggtggaaatcttattttttgtggctccatgcaacaatttcctcttttgtgaagtgtgcctcattcattgcctctaaccataatgaattgtttgtagttgtttatttattccacgagtttcagtgagagg

SEQ ID NO: 795080 - DNA, 651 bp, Homo sapiens
tagcaaaacacccttgtgaaaggatcagcatttcatgaatccctcaaggatctcaatatacaatccaagatatcacaatgagaatcaagagcaggagaaaaacattttgattaccaatttaaaagaaggtgtgaaagaaaacactaagatcaagaatacatatacgaaacttacacggtgtagcggagggatacaaaatgtatggcactgatactctggtgcccactcttatgcccacagctaagccccaatcaaccccagagccwgatgcagcctcagaatctatcttaacacatttcttcaaaaagccactccagataattggccctagaagcaagatagaattctttgctcctgccactgaaaactgaattatttcaagccatgatggctctcatatatattggagcctggctacactgagctacttagtcatctttaaatgtactgtgaaacttcaagccctgtgcctttgttttttctgtgtcctacctggaaatatcttttctctacttctctactggtggaaatcttattttttgtggctccatgcaacaatttcctcttttgtgaagtgtgcctcattcattgcctctaaccataatgaattgtttgtagttgtttatttattccacgagtttcagtgagagg

SEQ ID NO: 795081 - DNA, 617 bp, Homo sapiens
tataatacattcccatgggaatgctctcattcccatgctgatcatgctataatacatttaaaccttataaccaaaaaggatcatcctttctccctcacccttccctttttccaggattcctagaataactgagtcaataaatggaataattgagtcaagaaaataaaagaatatatcaggaagcgtaaatgtactataagtatatgtgtgtatgcatgtgcacatgagcacacatgggcatatgtcaatctttttggaagaatctacatatataatgaataatatattattwaaacaaaaatggtgggagggttggtgggagatagaggacaaagtatgtaaaatgaaacataaaaaggatagccatccagggtttgtcaactatgaaggaagaaaatcatacctgcaagatggctgccgccaaaattaaccaactacccagacaaatataagcaactcatgcacttaggcctaaaacagccaacgcagtgtgacaatgatcagatagggaacaagacagtctgaagagtaaaactgtggacattatttaacccttaaaatctgctccaggcttcaggtcactgacaataatcatgatttatagaatgatagatgtc

SEQ ID NO: 795082 - DNA, 572 bp, Homo sapiens
atgatctttttgtgatggatttcccaggtgttctttgagcttcttgtatgtggatgtctagatctctaataaggtcagggaaattttcctcaattattctttcaaataagttttccaaacatttagatttctattcttcctcagaaacaacaattattcttaggtttggccacttaacataatcccatttttttggaggctttgctcattttttaaaaaattcctayttctttgtctttgtctaattgggttaatgtgaaagccttgtttttgagcggtgaagttctttcttctacttggtctagtctttgttgaaacctttgagtgcattttgtatttctctaagtgtgatttttatttccagaagttgtgattgtattttctttatgatatctatttctctggagaattttccatccatatcctgtattttttaaaagtttctttacattgtttttcacctttctctggtgcctccttgagtagcttaataatcaatcttctgcattctttatctggcaattcagagatttcttcttggtttggatccatggctggggagctagtgtgat

SEQ ID NO: 795083 - DNA, 625 bp, Homo sapiens
tcgcatttttaaaagtagtgctttttctctttatgaacatattagagctcactggggggaacccaaacacgtccatcccctcacttcccgtcacttcctggacgtcctccattcgtttcatccaggaagtgaagcctctccaaatcccccacccagagaaaagttgtggaagccttgaggccctccctccccggcctgcagattgtgttacacagtcagagcrctgtgcttgtgtggatgggatttttcatgctggcctgagtctgcttgtttcactcagcaatatgctgtccatggatgcagatgtgcgtttggcctttccttcaccattacgattgtcaaaatgttgtgccgaagcctctgtgcctcgggacaggtcctctcccccaccgcagcaggaggacccagccaggccggcagagcagacaggagcctccacatgagtgcttcaaccccaccaagcctaggaggtggggctgccgggggctctgccgagttgacagcatcgaggacatccgctaagcaagaaagctctcgggagccttcgatggtgggagggagatcggagcccaggaactggagacggcccagctgccgtaacttcttgcctcaatcaatagctatt

SEQ ID NO: 795084 - DNA, 512 bp, Homo sapiens
aaattagggaaaaaattaaataagattagtgacagctactaaaaggataaaaaagtaagatacagacatgtgagacaaagaagatccaatgcctgcgttacaggagtccataagaaagaaaaacgagacaatggagcggacacattttaaagatctaattaaagaacgatttaaaaaaagaatctttggagacaatcaggcaaaatgatggagtcctttttttttttttttttttaaatggcgcaatctcggctcactacaacctccgcctcacagattsaagcaattctctggcctcagcctcccgagtagctgggattacaggcatgtgccaccacaccaggctaatttttatatttttagtatagacagggtttcaccatgttggccaggctggtctcgaactcctgacctcaggttatccacccacctcagcctcccaaagtgctggcattacaggcgtgagccaccatgcccggcccaagtctcttaatataaaaaagaaaaaatag

SEQ ID NO: 795085 - DNA, 558 bp, Homo sapiens
ccaaatccaggcagagaagtagctgtgaccccgagacctgccctggccctccgccctggggattcgaggccccctctgctgaccaggaaccgggatctcccagtatgaaggagggagtgtggggtgggggtatcccagcggggctggcatcagggccgtgtgtggggtggaccyggggccagattccccgtgcagtactgaagcatgtgattccccctgctgagagtgctggcagccgacggtggctctcagaccaaccctctccagaactgcctttggctggagagaatagcctggctcaagttgactcatgactgaaggatgtgtggcttgggaaggtcttgggcccctcaccctgacgcggggtagctctgcgcacttgggagatgagctgagtactctctttcgactgcaccagagctcagcttctcccccacccagaccagcttcctgtgctccctcacaggggtctgtttgagagggctcctgggagacccccggcacacccgtctctctctctccagcatggcttcaggggaactgaccctcgacacggga

SEQ ID NO: 795086 - DNA, 543 bp, Homo sapiens
gcattgtaggaaaagcagggaaccacgtgaggcaacatctggcttcattactccttcattacaaacattgcagagctcatgtcctattgggcttcaggaaaggctccaaacgaaggggcatttgaagtggcctggaagaatggagatgttaccaggtgaggccagaaagagcaggcacaccaggtggtggaggtaaactcagcaaaagcctgggaccccccacacacagaggatgatcaaggatgaggaagaggtctaggcaggttaagsctgggagttgagaaatagaataagctgggacagagaagatggttggagtaatgctgtgagggaggaccctgaccagggacagtttggagccacggcatttcattccaaaagcaaagcagagaagttcaagattacgtgaaagcagcaattccacctgaccagttctttattcagccttgagaatctagggtaagaacagatggatagaaatcgtatcatgagaacatcctgtttaaaaagatcagaagacagccgggtgcagtggctcacacc

SEQ ID NO: 795087 - DNA, 619 bp, Homo sapiens
tcacgccctgtataattttatatggttcctacagccctgacatgccctgagcaacaatcgacattgattcactgacttataaaagtgtattatctgttctctgtgtctacgtagagttctctgagagttgcccaggcagtgactcaggactccagagagaggtgcacagagcggtcacacaccagggagggagcgatttgcaactcagaatacttcttagcagaaagcacatttgggcttgatctgctccttgatttctgtgggagtgacttcgtgacagtttcaagctgaatcctacatttgcttcttaagtcaactgaaattccattcgagttagatccattctgtgtccactttaaaagccaagctgtttartgggggattgttatgacacagcaagcttgacaaaaaatacacctggtcttagaagcaatctttgcatagctctgaatgcacagaagaaaatcgtgcttgggtaaaggcaaggatttcactaggcataactcaccatgaggcatagatccttgagcaaaagtccagcagtatgtatgtatgcatgctgagcatgatgctaccagcttagcagcaaatgttggtgaaggaaaataaaacaatgcat

SEQ ID NO: 795088 - DNA, 592 bp, Homo sapiens
aagaatagtaagtggaagaagtcagcaagatatctaaagaatgctcatttatttaagttagcttaattacctccattaaacttaattgtcataattgttgcttcactgtcattattgtttttcctttataggaaaggcattgtgagctttgtgcagctgtttacatggtgtttgatcctatttattttctcattgcttacttcctgctcttcagggattgcatagtttgctcaggaccctgccctgtctccaggctctttgaggatgggacaagtaattgtgcccatcctcagcctatgatggcatgacgaaattaaccctgcagacacagtaaatcatgtaaatacacaaatattccccggaaatgttctcattactgctagaagyagctaacatttattgagaccgtaagtcaggtactttacctattgcctctgatttaatcttctcagtgactcttaagtggtagaaattattatcatgattttgcagatgaggaaactgaggcacaataaaacaaagggccaaggtcacagagttaggaagtggcagtgctaggataaaaacctaggtgtattttaagcttggagac

SEQ ID NO: 795089 - DNA, 624 bp, Homo sapiens
tggccaaatggagtgggtacttatgagttcggtcagtgcctgagggagcactcacttccttgcctggtcatattttcattggtgcaggctccgtctgcttggcagccactgtttgggccacagcctgtccgcagggtcctgctcctctctaatttgttcagacattgtggtgtgtctggccatatcatttgtcataggtgtaaaaacaatcacaaccaaagcytaaagctgttgggatgagcagctgcctgggaatcacgctccttcctgctctttccaaaaagccaggtgccgccggccagcatcccgctccctttgacccgcagtctgtgcgggaagtaggcccggagtggtgccagcaggaggtggccttagaaaggcggagacccaaggagcagagtgagtcggcgtccagctccacctgaaagcgccatcttgtcgccacttccctcaggagcaggtgagctcttccccaggacccgcttcgcggcttcctttttcccccagtaccactgggcagaggccgcggcctctctggccctgcaggggacagggcccagggaggggagacgcagcctacgggcctgaggcgggcagacggcctgcggcctccgggcgctgcct

SEQ ID NO: 795090 - DNA, 624 bp, Homo sapiens
tggccaaatggagtgggtacttatgagttcggtcagtgcctgagggagcactcacttccttgcctggtcatattttcattggtgcaggctccgtctgcttggcagccactgtttgggccacagcctgtccgcagggtcctgctcctctctaatttgttcagacattgtggtgtgtctggccatatcatttgtcataggtgtaaaaacaatcacaaccaaagcttaaagctgttgggatgagcagctgcctgggaatcacgctccttcctgctctttccaaaaagccaggtgccgccggccagcatcccgctccctttgacccgcagtctgtgcgggaagtaggcccggagtggtgccagcaggaggtggccttagaaaggcggagacccaaggagcagagtgagtcggcgtccagctccacctgaaagcgccatcttgtcgccacttccctcargagcaggtgagctcttccccaggacccgcttcgcggcttcctttttcccccagtaccactgggcagaggccgcggcctctctggccctgcaggggacagggcccagggaggggagacgcagcctacgggcctgaggcgggcagacggcctgcggcctccgggcgctgcct

SEQ ID NO: 795091 - DNA, 666 bp, Homo sapiens
tgtagtgaatgtgaaagaatctatcagttggccaggtgtggtggctcacgcttgcaatcccagcactttgggaggccgaggcgggcagatctcgaggtcagtagatcgagaccatcgtgaaaccccgtctctactaaataatgcaaaacattagccgggcgyggtggcgggcgcctgtagtcccagctgctcgggaggctgaggcaggagaatggcgtgaacccgggaggcggagcttgccatgagccgaggtcacgccactgcactccagcctgggcgacagagcaagactccgtctcaaggggaaaaaaaaaagcaaaagaatctatcagtcatctgtttattgatctatcgatctattagctatctatccagctacacatcaatctatctatattggtttaggacaaagcaaattttcgtgaagtataaaaatggctgtctttgaaatagcagtaatgtgaaggtaaatcataaactttataaattaaatgtatttcttctcaccctaaggatctcatataatgagaatatcattaaaagttgatgacaagaaaagagcatagataagagttcattatttctcaaaaggatgttttttcatactgacattttgttaggaaattgatctttagcaactcaatccatgtagttaagtgtaaattt

SEQ ID NO: 795092 - DNA, 568 bp, Homo sapiens
ttatattacatcacatcacaacaacttgaaggagtataagtgctttgattttagaaagatctcgctttaaaacattcattttgctgattatcagctttctactttggatgcactaaactcttagcactagttttctcatctgagaaaatggacacttcaaagcttcattttggcaatgctataatgagtaaatgacaatattcagaaggactactcagagcaaataataccaaatggtattattactgttatcattatcaccattttctatgggataaaayaggctactaaattcctacgcaattaaaatggaaaaagtctaaagaatactaatattgttctagtggaagatctcagtaagaaagaatagacacaaaatacattattctcaagccgcaaaatttccagctgacatggttccttttggaaaatgggacactaagtgatagggtttggctctgtgtccccacccaaatctcatcttgaattgtactctcataattcccacatgttgtgggagagacccagtgaaagataattgaatcatgggggcagtttcccccattct

SEQ ID NO: 795093 - DNA, 620 bp, Homo sapiens
aaaatagaagataaatggcctgttcctaaatccttcatctcatttagctactgattgtaccaataagctagaatgatgagattgatatttactataagaaacataaagtagcaatataagtataatatgcattttaaaaattcatgtgtgttatatgcatatcttagtagtttatatgcttatcttagtagtttgtatgtgatgtatttctacatatgtacatttaaatgtatttttagtttaaggttttgctcttctccatgaattattttctttcatttaaacaaatccacattaaatawcttgtccagatttttgtacagaatgtctcctgaaccatatctgtaatcacagtctgcaggccaaaagtccataacccatgtgaaccttgctcattagaaagtgttgcccacagttactgctcttgaccctagcactgaagttttgtctccaactgtctgcagacacagttctttgagtttctgcatgacatctgcagtccgcactgatcgcgggagcctacccgactcctttgctctaagctctgtgaatgtgccaggaataacctccaaggagtgattccctttactctacataaattagacaaaatatagaggaat

SEQ ID NO: 795094 - DNA, 519 bp, Homo sapiens
tcacgccattttattttttcaccaagcattttaagtaactgtacgatgtcttttgtcttcaactagaggcaacatagcagggtgattaagaagacacaaatcctgcatccagagtgtctaagttcaaattccagctctaccactctctagctgtgctatcttgagcaatcacttactctctctcctttctccccacacactcacacacactttcaattctccctcagttttyttattgataaaatggggatgaaaatactaccaacttcatggtgtcactgtgaaaactaaacaaaatgaagttcacaaagcagttagaagagcctgacacataataaatgataagtaagctatagtttatagatgaaaacaattacatagagaacaatatttgtgtaaaatacaaatgaagtgcagtatttccctttatttgtgctggttagacatttgaatctttactgagttttggaattgcacattgtattccacaccaagtgagaaaaatgtaaatttgaaggg

SEQ ID NO: 795095 - DNA, 618 bp, Homo sapiens
gtatatgactaacaatttgaaatacagactgatgaccaagttgtgccattctacgtctgtccttattgacacttgtttgtatttatggtctgtgcattaagttatgctgcacagaatttcttacacagagaacttgggaataaaggaggttttagtaagaaaattatgctacagaccaaaagtgaaggcctaatagtaaaatgccaatgaaaatttcagtgtggcttaaayggaaaacaaaagaaagatgaaagaattgagtgacaaaggacccataattgtataaattccccctatttattttgtgattagcaatttagttttggcaaattatgcaattacattaattttgttggtggaaatttagctgctttgccattaggtttatatttaatacataattttactttagatttaaagttatttgtgaactgggagtttatgtacagatttatattcttacatgtttctgaaataatatgctaaattaagctaatatagagataggagtagatctgtgaatactagttttctttgtaacgagtttatactttaattaaatatgcaaacaagcttagagcgaggaacaacagatttccaatgaaaaagtatagtttc

SEQ ID NO: 795096 - DNA, 576 bp, Homo sapiens
tcctcacttcctacattgttctccagtttataaccagttttctctttaccattgcaacccttattttcaaagtcctctgaaatttgtgtgacttggtttcaagacactttttagaacatttggaatatgtgttctcaatggtggaacatctcctggtctagccctttctctgttctgatccatgacagcttaaactgtcattggatcattttgccaaacctgcttgaaagtagaaatgcttttctctgttcaaatactttttcagtaacttctgaaatatttaaatttactactaaaacaattagcctggagtattttgtgtttgtgtcatcatctctgaaggggaaaaaggagacagctatggaccatttcttaaaacctgacttcaagtttcacgataaatattcccatatctcttgaatctayaaatcatttttttaattaaaaaaaggcttttagtgatattacagtgccaaaggtcaatttccataattacatttacttttaaaaataatgccagttcatttacattcaaatactgtacttatttgcatcattacatttgccactcatgat

SEQ ID NO: 795097 - DNA, 560 bp, Homo sapiens
ggtcttatcacaaattcttctagttaataagtttattacactgagcaatacattcttagaaggcaataatgttaaatttttgccttgttaaaattgaagtgaaaattctagcctaattcatcggctaaatgaaactaataatccctgtctacctcatactataattgccaaactgcattaatttaagggttgtgraagtgtttcaaagcagtaagccattgtaagaagataatgttggtattatttaatgttgtcctgtgaaaccactgcagatgttctttaaacaagaatctcagttatcttccatggcttattttaataagcacatcaatcaaatatgtattgaaaactttctatgtgtgaaagtcagtataaaatattttggggacataaagataaacaatggacatttcctgcacttgaggcatatttaatgtacttgaagagtgcaatgaacaattcacaagtcattcttatatctcaagtttttctcccaaagtaatccatacaccttgttgagagatatagcaaacaagatatgcttattggagcagaagtca

SEQ ID NO: 795098 - DNA, 621 bp, Homo sapiens
aaagatgtatgactccccaaggagagctattctcctaaaacatttaatacaacagaaattttaaagatctggagaaagaagagtaaaattttacattttaaatgaatgttggcttttaggaaatgctgactctaaaataaattcctaggcaaggcatgcaattttaatttctgccttgatctctagaaaaagtattcagcaaagattaacaaagttaactgtgctttcttttctctacaagatgatttaaaaattcagttctatgtaatgcatctactccttttttaccacasgaaaacatcttttagagatacatgtcgggcaataactttgggcccccatgctattgtgtgacgcttgctattatgctatttttgtatccactctagaaacactgcctctgataccaatgatagaatgggggattttagagtgccctagtttcagttcagatgttcggttttgtacttgtactttttaaaatatgacttctcagcagtatgttacaatcaacagaagggactctatgtgtcccctcactaagaaataacaagtaccacttctccatcacccgaaatgtaataatatctctgctctgttacaattatttttgacagaata

SEQ ID NO: 795099 - DNA, 564 bp, Homo sapiens
ggcagcagcagagcattaggctacacattgggcccttctgattgtggggctctgtgtgactgcacaagacaaaccctcataaagccagctctgggtggcggagccctggactgcctgcctactggatgttaaatgagattgaaataaattttgacctagtttaagctgttgtattttgaggtcccttttatacactttgcatcctgacttatgaaaacacttttagttctcaaaacgtactgccaattgcataacaaagagactatgtccctatgtttagttaacacccccatgagcagtatatgaccacaaatgtttccctctgctcttgctattgtctctattttgatatttcaacagcaygcccaattcaaaatgccccaaaccaaactcatctctcctccaatatcaaacacagacacaatatcaaacacagcaactaatatttatttagcttttaacatgtaccaagcgttttgcaggcttatttcatttattaggtatcatcattcattgtggccattttccagatgaggaaatggaagcttatgtaacttactgaag

SEQ ID NO: 795100 - DNA, 664 bp, Homo sapiens
tttacagaggcctcctacaaggctctttgtaaaggctctttacaaacttttttattttattttatttttttactttattttttgagacacagtctcagtctgtcgccgaggctggagtgcagtgatgcaatctcagctcactgcaaccttcacttcccaagttccagcaattctcatgcctcagcctcccgagtagctgggattacaggcacataccaccatgcccagctaatttttgtatttttagtagagctggggtttcaccattttggccaggctggtctcaaactcctgacctgargtgatctgcccgcctcagcctcccaaagtgctgggattacaggcgtgagccactgcgctcagcccaaacctttgatcctacaagatttaggttcttggtgcatctcttgttactgagttccttcagttttccactgatcaggactattggatatgtgtgtactcacatggacttgttaatgaacttctaggttctagatatagtcctccttgatttgattgtatagcagcaactaatttcccattggtattgtaatcaattacttaaggctatatagtggtgcctttcttttcttgttccagtttccagctcaataggctgtgaattccctggtggaagtacttcttctttggatatgagagt

SEQ ID NO: 795101 - DNA, 579 bp, Homo sapiens
catgccgtcccaacactgggatatgtatgtaaaggattcaaggacccaggcttctgccatctggtggctgtacctcctctagatccaccagggctctccattcagctggcagatggggaaagagaaagtcgagatggcacatctgttctcaactaccttgtcccaggtgtgacacctgtcactttgctgacaagccctagtcacatgactccacctggagaaggcaaactaggaaatgaggtctttctgtgtgcccaaggggagaccatggatatgagagcactggctgagtctgctccacagcagcctcgtatggttcctgggcaatcctccctttgcaataactcacaaactayacagttttcctccaaatgtgtgtaaaccttatgatgcgtctgaggcaacagatttactttctgtactgcagacaccatttagttttgcattgaccttactagcaattattattttatactggctttgcccttttcattctgttttttggcactagtctgttttccatcagaatattagacctgcttacttctaaaatatttttgtgagtttgaacacatggat

SEQ ID NO: 795102 - DNA, 533 bp, Homo sapiens
cctggaagatgatatagctgtttaaagtttattctaaatgcaatgagaagccagctcctagcaagataataaattgcttttccagaacgttaactgtccattatttagttcctttgcattctccataggctggtcttataaaggttctgtgacagtagggaatccattaaagatctattacataagggaatgtgggacatgcaaaagcagaagacaaatgtagaaaccctctgcttcacttggcatttctgtccttcatctttctgatattttaaagctactgtgttcctacatacatatgctatctgttccttcattctttttgataaattcatcatttgcctttacattttcrtcgtttttacccccaaatggttaatgtaggtgttttttttttttttggaatcattttattctttcgtatttctgtgtcagtcgctaggagaaagaccaggaaaatctgttaaactctaaaccaaaaattcccattcactgcagagtgatgattcgcaacactgctgcaattcaggtag

SEQ ID NO: 795103 - DNA, 443 bp, Homo sapiens
gcgcagcctaacccgcgcttggcttcggaagccgcgaccagggttgtcccctctccccccagctttggctgccgccgccgcgtaccgggcggcccgccaagcccccagagcccctgcgctctccctccaaagcaggagtgcggtggacatrggatgaggtcgactttcactggccagtcccaggtgcctacgccccgcgctgggggacaggagccgggaggcaccccaggaagggtcctctgcccgccggcccccgcgaagaggaagggactccgcggaagggggcggggaggaggagtggtctggccgctccggccgggatttgcctggacttgaagacgctcaggagcccaaagctcggagagcctccagaaggcttctccctcattggccaggagtccgagggagccgaggaaggatccgcggcctggggggggcggtga

SEQ ID NO: 795104 - DNA, 635 bp, Homo sapiens
aagaacagaggcagattcattaaaaatacagtattatacaaaacaaattacccaccaaagatcaacatttgacttatggcagactacttctcaataataagaggactcaagagaataatagaagatagaaaagatgctgtcatctaagaataccctatccagcaaactatcattgaatcaaatttcaaacataatcttcacagaacttaaagtttaaattgaaaactcacaagtaggaatacatagcaaaacmaaatagcatttttagaaaagagtaactggtactggataaatcttaaaacacatttattttgagtgaacaaagctggttgcaagtgttttaacacttgaaaagtcataattgttcacatattaatgtatgtgaatttaaacaatgtgtgcaacctgctagaaaatcaaacatagctaaacgattccccgtctgaccacagaaaataatttttttaagaaaaagaaatgggagggagaattataattaactccttaatcaatctgtaattcaagtaactaataaatgtttgcttcttttgtgctgcttacacaaggcctttaaactattgaacatataaatatgttagctctaattatatatggtaattaacatctaattttcc

SEQ ID NO: 795105 - DNA, 635 bp, Homo sapiens
aagaacagaggcagattcattaaaaatacagtattatacaaaacaaattacccaccaaagatcaacatttgacttatggcagactacttctcaataataagaggactcaagagaataatagaagatagaaaagatgctgtcatctaagaataccctatccagcaaactatcattgaatcaaatttcaaacataatcttcacagaacttaaagtttaaattgaaaactcacaagtaggaatacatagcaaaacaaaatagcatttttagaaaagartaactggtactggataaatcttaaaacacatttattttgagtgaacaaagctggttgcaagtgttttaacacttgaaaagtcataattgttcacatattaatgtatgtgaatttaaacaatgtgtgcaacctgctagaaaatcaaacatagctaaacgattccccgtctgaccacagaaaataatttttttaagaaaaagaaatgggagggagaattataattaactccttaatcaatctgtaattcaagtaactaataaatgtttgcttcttttgtgctgcttacacaaggcctttaaactattgaacatataaatatgttagctctaattatatatggtaattaacatctaattttcc

SEQ ID NO: 795106 - DNA, 535 bp, Homo sapiens
taataagaagacctaactatactaaatatatatatacacccaacacaggcgcactcagattcataaagaaagttcttacagaccattaaagagacttagactcaaacacaataataatgggatacttcaacatacyactaacagtattagacagatcatcaaggcagaaaattaacaaagatattcaggacctgaactcagtactggatcaaatggacctgatagacatctacaggattttccatccaaaaacaacaagctatacattcttctcatcactacatggttcatactctaaaatcaaccacataatcagatataaaataatcatcagtgaatgcaaaagttatcataccaaacactcttacagacaacagcagaataaaattagaaatcaagactaagaaaattgctcaaaaccagacacttacattgaaattaaataacctgctctcgaatgacttttgggtaaataatgaaattaaggcagagagcaagaagttctttgaaactgatgaaaacaaagatagaacat

SEQ ID NO: 795107 - DNA, 570 bp, Homo sapiens
gcacagaaggaacatatgtttcatttctgctatatattttattatcattattatgctttaagttctgggatacatgtgcagaacatgcaggtttgttacataggtatacatgtgccatggtggtttgctgcagccatcatctcctcrcctatattaggtacttctcctaatgctatccctcccctactcccccacccactggcaggccccagtgtgtgatgttcccctccctgtgcccatatgttgtcatttttcaactcccacttatgaatgagaccatgcggtgtttggttttctgttcttgtgttagtttgctgagaatgatggtttccagcttcatccatgtccctgcaaaagacatgaactcatttttttttttatggctgcagagtattccatggtttaaaaaacaaacaatcccatcaaaaagtgggtgaaggatatgaacagatatttctcaaaagaagacatttatgcagcctacaaacttatgaaaaaaagatcatcatcactggtgattagagaaatgcaaatcaaaaccacaatgagataccatctcatgccagttag

SEQ ID NO: 795108 - DNA, 631 bp, Homo sapiens
caaaaaactttattttaaaatttctttacctgtcaggcaaatcacaaagataacaatagccagtcttcagagtatatcaggaaaaagcttctaatgggaattggaggcatggtgaaatacacgtggttgtattatagacacttctggcctgatctagctgaggtcagtgatggccacaaggacttgagatcacggaagtgggtgacgagcagcactttggttgtcctttgagaacagacattgctacttgaaaactcaaatctttgtccttgggaaaaaaaccaaaaaaacaaaaaacaaagaactctcaatggtggagtgaacrtagcccttcatttcagtgttggaagcaaagcccttgccctgtatcttatactttctgatgataatgatcacactgtttactggtcacaaatagtaaattgtaggctttgaatgatgtttttcaaatgtgtattaaaaatgtcctctctaatctttcttagaatcctcttgggcaaaacttctgaggaaggccttaaacaaacaaaaaaaagtcaacattaaaaacagcgacactccctggtcaaacttccttatggctctgtggacatgtatgaagaaattagcacgtgtgctgttcttgcaggat

SEQ ID NO: 795109 - DNA, 632 bp, Homo sapiens
gttctcacttaatgtcattgctttatgacaagcatttaaatactgatgagacctggtctgaaaactgaaggatgttaggagtttaatttcccagagaaaggagcaggcccatccttgggaaagaagggtggattgaggtyatgcctcactattgcgcattttgtgcttctcagtgcctagatatctctgtgcgtatttctgcattctgcgtaactgcagttcaaatgaagtgagttgtctaaaccagcggtgccaagaggagatttgggtcccagtgttcctgctgccgttggagaccttgtgtgggttcctgtggtctgcagcccgggcctggttctggtgactcctcacgtcgctcacgggccctcccttcagtgtggcagccttggagtgcttctgcccctcaggtctttgctgagagaaacgtgtgtttatttcagtgatgagaagacttggaacttgggtctgagtaatgcgaagctttcatattatgatgggatgatccaactgaactacagaggcggcacaccctataacaatgaaagacacacaccgagagctacgctcatcacctttctctgtgatcgagacgcgggagtgggcttccctgaatatcaggtaggaatgtttgt

SEQ ID NO: 795110 - DNA, 489 bp, Homo sapiens
tagtatctggaattggatatatggagcgctttgagtcctatggtgaaaaaggtaatatcttcacataaaaagtagacagaagcattctcagaaacctctttgtgatgtgtgcattcaactcacacagtggaacctttcttttcatagagcagattggaaacactctttttgtagaattttcaagtggatatttggacagcttagaggccttcacaggaaacgggaataccttcacataaaaacaagacagaaacattctgggaaacatctttgtgatrcgtgtcctcaactcacagagttgaacatttctttttcatagagcagctttgaaaccctctctttataggatctgcaagggaatatttggacaactttgaggctttcgttggaaacgagaatattttcacataaaaactagtcaaaagcattctcaaaaacttatttgtgatgtgtgcacacaactcacagggttgaacattccttttcata

SEQ ID NO: 795111 - DNA, 628 bp, Homo sapiens
catgggaaacaataaaatcattacagtataatgatttttggagataaccagagttgatgtagtgatgcagaggctgaatgtttacaagagaaggtgcagtactactatgccatgtcccagtgagacatgagtcttttcaccccttccttttagccttggtcgtgatttacaaagataaacacttgagcactcaagatacttaacatttgttaatacatgtaaatggttaattctacactgacaggcacatattaaactggttctgttcmtaataatgaagttatctctttgttattttagcacagccctcatgcttgccatatgccatggatcatcagagatagttggcatggttcttcagcaaaatgttgacatctgtgctgaagatacgtgtggaatgattgcaacgttatgctgttgcttgtgggtttaatctgtaagtgtttacatttaaagactaggtgagattttatagtttgtttcaggtagtttttgaatgacagtgagttagttcacttcatcagccagaaaccaggcaaaaagctatactagttagaaggagtaatggctccaggattctttattttagggctttagggatgctaatgttgtctacttgatttgaagt

SEQ ID NO: 795112 - DNA, 660 bp, Homo sapiens
caagctaatttaaagtttttttgaaaatttaaaaggacaagaagaaccaagaaagtcctgaagaagaacagagctcaagaatgtataccatcagatgtctccaactttattacaattaaaataagatggtattagcaggacatacaaatagagaaacaaaaaacaaactcatacttacaccatcacctgatttatgacaagggtgaaactgcagtgcagtgaggaaataataatcttctcaataaatggtggtagataatttrgatatcaatatgggagaataaaagactttaacccttgtcttgtgtcacaaacaaaagtcaatcgtaggtgggttataaagctcaatctgaaatgttaaaaattttaaaaaaaagcttctgtaacatagaagaatatctttatgacaatggggtagacaaaaatttcttaagcaagactaaataagcgttaactacacagaaaaagtctgataaattgaactacattaaaattaagaaattggtattaacgaagtcaccattaagagaaagaaaagacaagttaaattgggagaagatatctgcaatgtttaggtccaatcaaaaacctatatccagaatatataaaaatttcctacaaatcttcatgtattctggatataaatttatgattggacat

SEQ ID NO: 795113 - DNA, 600 bp, Homo sapiens
gggtccctatatgagggacaaacactcggaacacagcttcagtgttttgcaatcctatgtgagggacaaacattcagaccctcgtagaagtgttctggaatcctatgtgagggacaaactttccgacaattataacagtgttctgcaatcctactttaaggacaaatatgcagaccctcgtagcagtgttctggaatcctatgtgagggacacacattcagacaatcgtagcagttttctggaatcctatgtgagggacaaacattcagaccccaacacaagtgttctgcaatcctacgttaaggacaaatattcagaccctcgtagcagtgttctggaatcctatgtgagggacacacattcagacaatcstagcagttttctggaatcctatgtaagggaaaaacattgaatcaacagcgggagtgttctggaatcctatgttatggacaaacattcagacgctcattgcagtgttctggaattgtacgtgagggaggaacactcagaacccagcagcagttttctggaatcctatatgatggacatacatgtagaccccagcagcagtgttctggaatcccatgtgagggacaaata

SEQ ID NO: 795114 - DNA, 639 bp, Homo sapiens
tcaagcacaaactttcagaccctcatagcagtgttctggaatcctatgtgagggacaatcatccaggccatagcaggagtgttctggaatcccctgtgaggaataaacgttcagacagtcgtagcagtgttctggaatgctatgtgagggacaaacattcagacaatcgtagcagtgttccgtaatcctatgtgagggacaaacattcaaacaacagcgggattgttcaggaatcctatgttatgracaaacattctagaccctcatcgcagtgttctggaattctatgtgagcgagaaacactcagaacccaaaagcagtgttctggaatcctatgtgagggacaaacattacgaccccagcgacagtgttctggaatcctatgtgagggccaatcattcagacactcgtgccagtgttctggaattctgcgtgagggacaaacattctgactcctgtagcagtgttctgtagtactgtgtgagggaaaaacattgagaccacagcaggagtgttctggaattccctgtgaggaacagacattcagaccctcttaggagggttctggaatccggtgtgatggacaaaaatctagaccctagcagcagtgttctgggatcctatgtgagggtcaaacat

SEQ ID NO: 795115 - DNA, 578 bp, Homo sapiens
caccaccatgcccagctaatttttgtatttttagtggaaatggggattcaccatattggccaggctggtctcaaattcctgaccttgtgatccacctgcctctgcctcccaaagtgttgggattacaggcgtgagccatcacacctggtcaacggtgacttttaatgcacagaacttttacttttgatgaaactaatttttttgttatttttttcattccctgtacctttgatatcatatctaagaaatcattgttaaatctaacataaagaatattttctcctatgtttttttttctaagagtttaagggttgtagttgttacttttaagtctttgatctattttagcttatttttgtayactatgtaagttaagggcccaaactttatattttgcctgtggatatccagtttacccagtactatttgttgttattaatcaattttgcttcttttttttttttttttttttttttgagatggagtttcactctgtcgcccaggctggagtgcagtggcgcaatctgggatcactgcaagctccgcctcctgggttcacgccattctcctacctcagc

SEQ ID NO: 795116 - DNA, 550 bp, Homo sapiens
tttgattgagcagtttgcaaaacaagctttttgtacaatctgcaagtggacatatggagcgcttcgtggcctatggtagaaaaggaaataacttcacataaaatctagacagaagaaatctgagaaacttctttgtgatgtgtrcattcatctcacagagttaaacctttctactgattgaggaattttgaaactctcttcttgtagaatctgcaagtggacatttggaggaatttgacgcctatgttggaaaaggaaatatcttcacaaaaaaaaaacgagatagaagcattctcagaaacttctttgtgatgcttgcattcatgtcccagagttgaaactttctttggtggacaagttttgaaatactctttttgtagaatctgcaagtggacatttcgagtgccttgaggcctatggtggaaaatgaaatatcttcacataaaaaccagacagaagaattctgagaaacttctttgtgatgtgtgtgttcatctcacagagttgaacctttcttctaattgagcagtttggaaacactctttttgta

SEQ ID NO: 795117 - DNA, 621 bp, Homo sapiens
ttccagatgttaaggaacagaatcaggatttgaatccaggcctgacccaagtcttgagctgttaacaaaagagaaggccattaaaaaacgagttgagttgtgttatttattatagaaaataaccaaactcccttttaaatcattcaaactaaaacatattatgtaatctttgaactcttagttatgaatcctgaaactgagttcytgaactatggtccaacttattgaaattattttttcaagataccttttcttaaatgcttatatttctaattacagatccattcctccttcttccctttctgttgaacataatgggaaatgcaattattcttttcccttgttctaatggtaaaaaagtaaataaatgaggaaagctctgtccccctcttcattatcagccaaaaaacacatttgaaaatttccagccactttcttttatgtctgatatttcaaaaaataaaagttttagtgaaaacaaagtcaaatttaacccattttgagaaactgatgtttttaaagtatgaggttctaagcaaaatgatgctgaattatatatttatggggattaacttgttttcgtgtatagtacaactttcctgagtaaacaatttccttttg

SEQ ID NO: 795118 - DNA, 578 bp, Homo sapiens
acctgagggatcctgtcgtcttcagtactatttctcagggctgagaagagttcctggctcataggaagtgtgagagaaatgtgtatcagttgacatcccttcagaaacagaaaggacacttaaactggacaattaaagaagatttaatacggggccattttccaaggtgtggacagagtttaggcaaagygacaaaaggtcaggtggtcctgtaggctggtaacagccagaagcacttccaccccttggtgaaggggtgagggaggaaatcatggagaaggccggaactgggaggaaaagctgataagagaaacacatgactggagctgtggcctgcagtagaggaaaaaaccaacctgcagtgggagccaatccagcagagaaagtgagaggaaaatgtcctgacctcactgtcatcttgccttccaatttcctgccctcccctcattgccctaacctagctggaagccaagacagcaagggagcacatgaatttggtctacagtccatgaagattgccttggcggggacacggcagcttggagaaggatggaaacagatgtggggaggcacgtgga

SEQ ID NO: 795119 - DNA, 602 bp, Homo sapiens
  misc_feature 350: n = A,T,C or G
agtttagaaaccaggagaaacaaactagaaaccacaggatccaacccatggtataaaaatcttagtggaagaaccactctggcaaatctctgcttacttttggcttcaagggctcatctttttttctctcactcagagaatataaaaatctgcagaatacaacatgctaaccttaacctccaaggtagaaacctagtggcaacccttgcaatttttcagtggaaacttgctgttttaaatggaaagctagagaagataaaaccactcaaatcttcctcaatgaccctgatatcgtatatttcttttcttttcttttttttttttttgagacagagtcttgctctgtcacncaggctggagtgcagyggcgcgatcttggctcactgcaacctctgcctcctgggttcaagcaattctcctgccttagcctccagagtagctgggattataggcgcgtgccaccatgctcggctaatttttgtatttttagtagagacggggttccacaccatgttggccaggttggtctcgaactcctgacctcgtgatccacccaccttggcctcccaaagtgctgggattacaggcgtgagccaccgcac

SEQ ID NO: 795120 - DNA, 599 bp, Homo sapiens
ttttctttatctgtttaggtgtgagcattatagttgtttcataaaaaggattaggaagttttcctttattctgaatgctttggagcaatttatatagcattggaactagctggtatttaaaggtttggtagaattctcttgtgaaatcatctgtgcctagtgatgtttttgtagggggagtttcttaataactttttctatttcttagatggaaatttatctgatttgtaaccctaatgagatcaatatgtatttttctagaaaattatctactttaactaggtttttgaatgtatttgcatggaagtctgcaaattagactcttatgattttaagaatttgttctctttcaatgmtgttttcctcttttcatatcttattttatatatgtgtacattttcccctttttgggtcaagttagctaatggtttacttattttgttaactttttcacaaaatcaggattttgatcttttaaaatctacttaatacctatacagcaatataggcatatcgacttttttcccttctcctacagtatttgtactttatcacaatacacaatagctgtattttagtctttcacctcagttccaatc

SEQ ID NO: 795121 - DNA, 600 bp, Homo sapiens
attagaccactgaactgcacggtcacccacatggacagttacatgtgactaatgaaaatacagccttctttttgtcctacatgtatatgagaaacagaaactcgaacaggaggctcctgaaagtagatgtcagagatgacactggctgctgtggaggaagtggaggatgctggatacacctaaaaaaagtcatctccattccttgtgtttaggatttataatgttaagaatcatgttgctatttcagcctacttttaggttatgaaatcaaatggatttttttctcatttgctagataacaccaagttcttctaagtcaaattttcacaagcaagtcygctttcaaaaatgccccttaagagaagaaataacaaataagtatctatatgtactagaagcaaaaaactagaaaatcatattttaaagttacttttaaaataacattaaaacttatatatgtatgaataagtttaacaaaaggtgtgtaagaccactatattgctaattacaaaatatttctcagggaaactaaagaagacaaatgaagatgtatcacacaatcttgtatttaaaaattcaatattattatcactactatca

SEQ ID NO: 795122 - DNA, 636 bp, Homo sapiens
acctcctcctggatactttaaatcatctctacattacttgtaatacctaatacagtggaaatgctatgtaaatagttgctatattgtattttttatttgtattatttttattgttgtaatgctagtttttattatttcccaaatattttttatctgaggttgggtgaatcccctatgtggaactcatagggatagggagggtcgactgtgtttgacaaacaattattggacaaagccttgtgctaggaatcaaaagtatcaactgggcagtcagattgcatagaatctgccagaatttaaaaaaaaatttagtaaaatatacataccgtaacatttgccattttaacaatttttaagtgwgtgattaagtggcattaattacatttacaatgttgtgcaatcatcaccatcatctatttccaaaacttttgcatcaccccaaacaaaaactctgtaaccattaagcaaaacctcctccccctaacccttggtaaactctaatctactttttgtctttatgaatttgcctattctagatattttaagtggaatcatacaatatttgttcttttctgtctggtttatttcacttagcataatgttttcaaggtttattcacgttgttgcttgtatcag

SEQ ID NO: 795123 - DNA, 634 bp, Homo sapiens
ataatccaattattattaataatccagttgacatgatcaaaagacaacctcaggtcacacacctatcaatcaagactgctttgctttcaactgcacagaaaaagtatatatgactgctttgcatgtccagtcagataatgaaggcacactgtcagactgtctcagcacatatatctaaggcactcaatacttctatttatgctctgctgtattattccatgacattgtggaaaattctggttggatattttctcattcaaaacttagataatagtgtagacacagttttccactacttttggtccccgagttaagaatgtcttggaacctgaggccaggagttcaagaccagcctggmcaacatgatgaaaccccttctctaccaaaaatacaaaagttagccaggcatggtggtgcctgcctataatcccagcttcttgggagactgtggcacaagaatttattgaacctgggaagcagaggttgcagtgagtcaagataatgccactgcactccagcctgggtgacatggcgagaatctatctaaaaaaatttttttttgcaaacacaatataaaaaagataaccagtatagggtttagtggcatattcaccctcattcatgttggaagtga

SEQ ID NO: 795124 - DNA, 579 bp, Homo sapiens
ccaagaatttcatatcctgccaaactaagcttcataagtaaaggagaaataaaatattttccagagaagcaagtgctaagggaatttgttaccaatagactagccttacaagagatccttacaagaaattcttaagggagttttaaatattgaaatgaatgttttctgcttccagaaaaacacatttaagtacatacccacagaccctgtatagcaaccatgcaatataaactacaaagaaaccaaccaacagcttcacaatggtgaatagtaatattcaatattaacctcgaatgtcagtggtctaaaccattgacatccagatacaggaaatccagagaacactttgaaatactatacaaaatgagcatcaccaaggcatgtagtcaacagactgtccaargtcaaccagaaagaacaaaattcttaaaaacagctagaaaaaaaaaaaaaagaaagatcagatcacatacaaagagaatgccgtcaggctaccacagacttttcaacagaaaccttaacaggcaaagagctgtaagttggattaaaaaacaaaactcattcatctctggtcttcaa

SEQ ID NO: 795125 - DNA, 558 bp, Homo sapiens
cataactatagctaccagttatctgggtgtgtcacaagacatccttttctctcccttgttgggtgaggactcagttccacagtttccccttagcatttggcttatgacaagcagtccatacaacccccactccgagatacatctttgtcccagactcaattccaagcttagggtcaaagccctaggaaagaaaactggaggccgggcgcrgtggctcacgcctgtaatcccagcactttgggaggccgaggcgggcggatcacgagatcaggagatcgagaccatcccggctaaaacggtgaaaccccgtctctactgaaaatacaaaaaattagccgggcgtagtggcgggcgcctgtagtcccagctacttgggaggctgaggcaggagaatggcgtgaacccgggaggcggagcttgcagtgagccgagatcccgccactgcactccagcctgggcgacagagcgagactccgtctcaaaaaaaaaaaaaaaaaaaaaaaaaaaaggaaactggatctgagggatccagaggcagatgataatggaagttaaaag

SEQ ID NO: 795126 - DNA, 652 bp, Homo sapiens
tcgattatactaaactggctttcttaatttagattaataataactcttaaaatcaatggctatgtgtattagtttgctgtggttgctataacaccataccacaaactgagtggttgggttgaggttacagacatttattatctcacagttctagggactagaaatctgaaatcaaaatgtcagcagggttgctttcttatgtgggctacgaggaaaagatctgttccaggtttctctctttggcttgcagatgactgtcttctgttatctgtttacatcagatgactgtcttctgttatctgtttacatcatcttccctctgtgaatttcctctgtgtccaaatgttctctttttatcaggatgctggtcatattggtttagggcacagactactcatctaatgttaacttgaccacctctataaagactttgtctccaaataagatcatattctgatgtactgggagttaggactcttaatatyttgtgagctgggagagaaagtgggtgggacacaatacatccatgacatcgtaggtactctaaatctgttcttttataaaattattttggaaagtatagttccatttacttattcatatgaatttgagaatcaacttgtctatttttatgaagaatcctattgtgact

SEQ ID NO: 795127 - DNA, 480 bp, Homo sapiens
gggaagatcttctggggcaaagcaaagatgatctgaatgacagcactgaccactggcaacctgcagagctgcccgaccaagaaattgtgagatggaagcaatgcctgcagataagaaggggaagatgaaaagccggagcaggcaaagacagtaatggaacaggccacgaatgctggagtgaggcaaatgacctccctgtcccacacccctccaagcatcctgcatctgctggagagcaatagaaaccacgtgcaggatggagayttggcaatggaggggaacagggaagtaggatatggtggtcccatagcatccgggctacaagttcctccgaagaatgtggatggtgacggtgacttaggtgcatccttcaaatgtcctgaaggaaagattgaagcaacaaataagcaattgtgggaagaattccaaaggagtaaagaacgcacagcacaaatccaaagtccgattggcgagaggcct

SEQ ID NO: 795128 - DNA, 519 bp, Homo sapiens
taaaatacttctggtcctaagcatttcagataagggacactccacctgtattccaaacacacaaacacacaagccagaggtactgaactcccgtgatgtccaaatgagcaaatctgaaccgtaactgctcaggtttgctggcttgatattgttttcccgttaatggattgcatagaatttcacrgtgaagaatgaagtgtctggccgggcacggtggctcacacctataatcccagcactttgggaagccaaggtgggcggatcatgaggtcaggagatcgagaccatcctggctaacacggtgaaaccccatctctactaaaaatacaaaaaattagcagggagtggtggcggttgcctgtagtcccagctactcgggaggctgaggtgggagaatggtgtgaacctgggaggcggagcttgcagtgaggcgagatcatgccactgcactccagcctgggcgacagagcaagactctgtctcaaaaaacaaacaaacaaaaaaagaacgaagtgtccg

SEQ ID NO: 795129 - DNA, 592 bp, Homo sapiens
aggtggaaagctcatctgtttcctaaatacccctctttgtttgactcttgttgtgaggccaagcctcatttgctttattttccccataaacttttaattttagaattgttttagatttacagaaaagttgtaaacatggtaccaagcatctccacataccccggccagtgttcctgaatgtgcacatcttacatctccgtggcaggagccagtgtccattcccaccaaggaggctgcaggcttgctggggccacagtcctccctgcagcatccttcccctgaagggaccaccccrgaggccatgggctggtcctcacgtctcctcagcccctctggttgtggtggtggtttctgactcccctttgtcctatggccctggcacacatgagcagcactgctgagatttgaatatccctttatgatttgtgttcctttgaggggccgcttctccccagatgccttcacacacctctgggtggctccccaacttgagtgtggacatcccaacagctccggggccatacttggcctggttaggtggcagactgctgtgaccctccgagggatccaacatcactcagcagacatgtgg

SEQ ID NO: 795130 - DNA, 592 bp, Homo sapiens
aggtggaaagctcatctgtttcctaaatacccctctttgtttgactcttgttgtgaggccaagcctcatttgctttattttccccataaacttttaattttagaattgttttagatttacagaaaagttgtaaacatggtaccaagcatctccacataccccggccagtgttcctgaatgtgcacatcttacatctccgtggcaggagccagtgtccattcccaccaaggaggctgcaggcttgctggggccacagtcctccctgcagcatccttcccctgaagggaccaccccagaggccatgggctggtcctcacgtctcctcagcccctctggttgtggtggtgktttctgactcccctttgtcctatggccctggcacacatgagcagcactgctgagatttgaatatccctttatgatttgtgttcctttgaggggccgcttctccccagatgccttcacacacctctgggtggctccccaacttgagtgtggacatcccaacagctccggggccatacttggcctggttaggtggcagactgctgtgaccctccgagggatccaacatcactcagcagacatgtgg

SEQ ID NO: 795131 - DNA, 596 bp, Homo sapiens
aattaaacaatacaatcatctcaatagatgcagaaaaaacatttacacaaaatccagcaccaaataatgataagacttctcagcaaatgagggatacaaggaaactttttcaaaccaacaaggggaatctgtaaaacttacagataacgtcatcctttgtggtatcatattgaacacttttcccctaagatcaggagcaaggcaaggattcccactttcaccacttctactcaacatcatactgaaaatcctaaccatttgcaataataagaaaaaagatgtcagtggcatacaaatcagaaaggaagaagcaaaactgtgyatatgaaaacgacataattctttacaaaaaaaatcatggaaaatctaaaaagctacacaagagataataagtacatttaccaaagttgcagaatacaaggttttgtttaaaaaattaactgtaaccactgcacatctattagaatggccaaaatccagagcataaataccaccaaatgttgtcaaggatgtggagtaatgggagctctcattcacttctgatggaaataaaatggtacagccattttggaggataatttggtggtttcttgcaa

SEQ ID NO: 795132 - DNA, 602 bp, Homo sapiens
gactgtttctgctgcattggagagaagaagtgaagaactggagcaggcacaggtagggtgcccatgtgagttagagaaaacctgacctgaaggccacttgtgattcaaaacccagtgaatatgaggaattaagaaatgagctagggaagaactgaagacaaatgtgactgatgtgactgatttctgagtcactcctctggtccatgtggtgggtaggtccacactgtttgtgggtggaagccccaggccagaccccgaaggtttgagacacaagtgagagcactgtcagtgcactgaaatcagagacaagatcccatcaaatcaggctcagctgggtcacagtgcacagtggggctgcagaggcaaggcacacaagtgttcaagtgattaatctcttgtctccattactctaaatgagctaaacaaatcccttgctgggcctgtcgcackgatgttctgcatgcaaattgttcctaatgagcagggcacagggctggtcccctggttggtaaatccattcatttcacaacacattgtctggttcacatatttctgtgacacaatccattggcagatgagctgttaaatgaaacactggccac

SEQ ID NO: 795133 - DNA, 633 bp, Homo sapiens
cctatacccattaaggctgatcaaacaatatcttatccaaaaggggctggaatttctcatgataataaggacactaaaagaagggcaatcattctagatttcaagctcttctctcatcaattaaatgtgtgacttgtagcaaatcaattgccctttctgagcttgttcacacacttgtgaaatgacggtgttatgtcacagaaccactaaggttccttttagcgttaacatgttatatgcctctaacatgagtccagcactccttctcgaaggaatttggcaaagaaggagaaagagaaatgtttttacaagcaaaataaacatcaggagyctctggaattgtcacatgatcaaatctttatgatggacagtagagaaacccgttctggaatattaagagtaagatctaataacagtgattattgtagattatttatcctcacctatttgatgaatatattcaagactttgcttcctgacaagctctgcactgaactctctggatactgcaatgaacaagacagaaacaatttctgttctcatagaacttacatttgtgcatgtgtgttggggaagtgggaatagacattgatcaattaaataaacaagcaaggtgacttgcgatagtatatt

SEQ ID NO: 795134 - DNA, 619 bp, Homo sapiens
agaatacaatggaaagtcagcatcagaggagagaggacaagctgggttttttattagaagatcaagaaggttatcaaagcttggtgcctaactgtttccccaagtcctcttcacctactgatttctattgactcctggcctcctttttagaaatccagcctcagaccccaccaattctggaagatttatgtggcaattttatttaaggcttgtaccagtgaaggtagttattgttatcattattcacatctaatagatggaaaagccaaagcttagagaaaagaaaaattttccaaagttatcacagctaataggaaagtctgacttcagatcctgcttatttccttgtataacaaattaaggaaasgtgaaaactaccaagagcatagccagcttcagagcttatgcatctttcccattgcccttctaatgctgtcaaaaccttccctatttgcaaagctcattctaaccctttgtcccatttgaggttcacaactctgaggaggaaagcattgcccctgtcccctgcccccacccatcagtcacacagtggtaggcattgacaagtatcattgcagatacatgaaaaccctaatccaagtccttccatattaggttc

SEQ ID NO: 795135 - DNA, 609 bp, Homo sapiens
tttaaagatgtttaagttcaacacacattcaatgactattttacaagacaggaaatataaaaacaaacgaagttagatgctagacttatgttgtcaaatatggtagccgcaagtctcacgtggttattgagagcttgaaagatagccagcgtgataaggaacttgatgtttactttttttttattttaaatacagttgcccctcagtatctgaaggggattccaccccgaggatagcaaagtcctcggatgctcaagtcacttatacrgaaaggtgtagtatttacatagaacctacacacatcctccagtacactttaaatcacctctagattacttatacttgatacaatacaaaggctatggaaatagtcattgtactgtattatgtttgtatttttattgctgcatttttatattttattattttttcaaatattttgatctgaatatttttaaagttaaaagctgataattcagttaatggaacaattttaagtatgtttggaaatcctgcgtatatgaatctacattttcaattgtataagctttataaaatctaaattctgatcaagttatttgatggaaattcaagaagaagaagaattaa

SEQ ID NO: 795136 - DNA, 635 bp, Homo sapiens
ttttgcattcatatgtgtgcccatgcctgtgcatgcatgctcgtatgtttctgtgtgcacgtttgcatgcatgtgcacacgtatgtgcctgtgtgcaggtttgtgtgcgtgtgtatgatccacagctcctgggattgacgggcagggaagattatagccatgtgggctcgtggccccggggcatggcacgtacaggcgttgggagagccatggggcagcggcaggtaggagccggcccgccaggaccgggtgcggaaattcttcttgcacttgccgcagtcggggccggtggtgttgtgctcgcactcgcactgcaggctgccctcgcgcatggagcacaggttggcrtgcaggttgcacttgcacctggggagacaccgagagggcagagatgtcagagagcttgtgggcagcctggcctggcctctggggaaaggagcgcctcccaggaggggcccaggagggtgttgggctgcccaggaagaaaccctggaggccaccagcccaacctttaggccagaaactccttgattccccttcctgcagagagatcaacgccgtgttccaaaggccacacctgcagtcactgcgcggctctcctctctgctctgatgctggtttcaaggattcctcac

SEQ ID NO: 795137 - DNA, 637 bp, Homo sapiens
atcatggaatactatacagccataaaaataaacaagatcatgtcctctgcagcaatgtagatggagctagaggccattatcttaagtgagctaatgtaggaacagaaaaccaaatgtcacatgttctcatttataaatggcagctagacattgagtacacagggatacaaagaaaggaacaacagacaccagggcctacttgagggtggagagtgggaggagggtgaggatcaaaagactacctgttgggtactatccttattacccgggcaatgaaataatctgtacgccaaattcccacagcaygccatttacctatataataaacctacacatgtacacctgagcctgaaataaaaattaaaaaaaaacacagaaacctatataattgcctctaagtgttcaagtgaaaggaagagttgcacatcttcctcttaaatcaaaagttaaaaatgattaagcttggtgaagaagccatgatgaaagccaagataagtgaaaagctagacccctttcaccaaaaagttagccaagttgtgaatgcaaataaaaagtccctgaaaggaattaaaagtgctactccacagtgaatacacaaatgataagaaagtgaaacagccttattgctgttaaggag

SEQ ID NO: 795138 - DNA, 658 bp, Homo sapiens
taataaagttcaacttacccattttttcttttgttgtttatgccactggtgtcatatctaagaacccattgccaaattcaaggttatgaagatttatccctatgttttcttctgtttcatagttttaggcattacacttacgtcattgatccattttgagtgaattgttgtatacactatgaggtaaagatccaacttcatcttttgcgtatgaatattcagttgtctaagcaccatttataaaaagactattgtttcttcattgaatrgtattttagtccatttgcattgctataatggactacctgaggctgggtgatttataaagaatagaagtttatttgggtcacagttttgcaggctgtacaagaagcatgttactagcatttgcttctggtgagggctttagggaatttccactcatgctgggaagcaactaagggaagaaggtaaaaaacaggagggagaggtggagcaagatggcagaatagagggctccaccgatccctgcttcccttgcacaaggaaattctgcagctgaaaaatgcaactggtacactgaagaatgtatcatagccttttaattgttgaattgatcaagtggaagaaagaattagtaagcttgaagacgagctatttgaaaatacacagtcagagg

SEQ ID NO: 795139 - DNA, 617 bp, Homo sapiens
tcttctccgaaaactggtcaagttctttctccatttttctttgaggcattagtgtttcttttactgttttgtgtcatttatttatgtggcaaagcagaagccatttagcatcacccttaaattattctcccagtttctcccttttcttttaattttatttataatgtatttaaacatgcactattgtatttaaaaatattatgatatttttattgttatgtagttatatcaatcagccatttctgttgctggttctttcattgctttaatatttagaaaatcattttctgcccaragattaaataaatatgcacttatactttcttatagtttcaaaaattacaaatattcctttgagacttaaaaaatggcatgactaaatggagacacttaacatgcttctgtaagagaaaagtaagtatttgtcatttctcttcaaagtacagttttgtataatcctgaggatttgtgggctaatctagaaaaaaataggaaaattcataaagcaagttcttagagacctacagagagacttagactcccacacaataatagtgggagactttaacaatgcactgtcaatattagacagatcaacaagacagaaaattaacaag

SEQ ID NO: 795140 - DNA, 640 bp, Homo sapiens
tgtctaatattaaaatatagtaaaataagtagaaagtaatgagattttgatatgtatttttaaataattaaatattttttccaagatggtgggttgggggcattgtagtatgcctcttttacttgtaaagataaaatagtgtgtagagcttcatgctgtgaacttttttccaagaagcaacatgggaacttaacagaaaaactgcaataaaccacagacgctttaaaagaaggagcagcctaaactgtgaaacacaaggaaaactccccacaagagactgtgaacttactcacacgtccagcacattgctattacaaccagcctctgagaaagccatcacacaaatgttctctataactagaaaactcaaacagagtctttgctgctgaaagkaccaagagccaaaactagttaacaataaactacaaacatgaaagtcacatcctcaggagaaaaaaagagaaaaagcaaacaaacaaacaaacaaaaaaaccccagttaaataaaaaataaatcaaaaacaaataggaaaaaaatagtctacccaaataaaaagaaaccagaaaaataattctggcagtatgaaaaaacgagggttctataaaacccccagaataatacagtaactctccagtagtgg

SEQ ID NO: 795141 - DNA, 584 bp, Homo sapiens
tcctccaaggtgcaccacaatgggccacaaaacaaatctcaataattttttaaaaattgaaattatatcaagtatctttgcacaccacagtgttataaaactaaaaatcaatttcaaaagcaaccctcaaaactatacaaatacatggaaattaaacaatcctctcctgactgacttttttgggttaacagtgaaatcaagatggaaactaaaaataattttgaaatgaataataactgtaacataagttatcaaaacctctgagatacagcaaaagcagtgataagtggacagcttacagcactaaatgcctacaccaaaaagtctgaaattagcaatctgatgtcacacctcaaagtactagagaaacaagaacaaactagcagaagaaaacaaacaacaaagatcagaggaaagctgaatgaaattgaaacagaaraaaagaagacatcaatgaaacaaaaagttgattatttgaaaagataaatagaattgatccagcactagatagtttaacgaagaagagagaggattcatataagctcaattagaaatgaaaatggggacatcacaactgacaccac

SEQ ID NO: 795142 - DNA, 584 bp, Homo sapiens
gttccagcctcattatgatactgaaattattttacccagttcttccccattggtttttattccatagtctgaagcatagaatgactagtcactgaatcagattagaaaacataatgaacactgcaggagcactgttgtaccaagaagcctgacggtcaaagaagaactgcacttgatcttacgcacaattaagcacagcaccagacgttaagtacyccagggtaggtcttccatgtttcacaatttagttcaagtctgagaaatcagtctggtattcaactacctataagtatgtatatattatacttttatgtatttatttgtagatacatacatgtatgtatgtacacatatatacatatatatcatacttttatgtaatacatatgtatttatcatactattttatgtttcatgatgtaaactctgttatatcttagaaataagactattggtaacataataacatattcatttaaaaatattttagtcacagattcttattcattgctgtcttgattagcataatactaagactgccatgtaatatgttgattaaataaaattcatattaataaactgta

SEQ ID NO: 795143 - DNA, 586 bp, Homo sapiens; identical to SEQ ID NO: 748369

SEQ ID NO: 795144 - DNA, 586 bp, Homo sapiens; identical to SEQ ID NO: 748370

SEQ ID NO: 795145 - DNA, 612 bp, Homo sapiens
atttttttctcccctcttcaatcattaggcattgaatgttctataatatcttatcatcaatagattacacataatacttttctatagctaatttcctatcttctatatgttttcaaacatatttggcatattcgtaaattttcctatcctccacattggaaaatataccaggagcacaatgctacattactcgctttcaagctctcaatataaaatcaaagatgtatgaagtaaactaaaaatcactacacaatatatatgcaattactgtatgttagacaatatggtcagagcaaacatatatgcacgggagctctgaagaattggkagactagttcttctatagctacaaatattcaaattttttattgggaagaagtgacaagttttactatgtagttcaaaagagcaaaatacattctgggagatagaagagtgtgaataaagataaagtttagggcgctttgctgtggctcacgcatgcagttctagcactttgggaggcagaggcaggcagatttcttgagcttatgacagttcgagaccagcctgggaacacagtgaaatcctgtctctacaaaaaaatacaaaaattagcccagcatggtgatg

SEQ ID NO: 795146 - DNA, 448 bp, Homo sapiens
taactctggaaaataattttatgaaatataaaaggtatcagactcccctactagcacagagcggtttttaataccttttaaaaattatcataaccttgattttagtataaactaatttggaaaattttccctttgttggtcattaawtgtttttatgtaactgatacatcatggcatttagtgatatacttgaccaaattaaagttgtaaaatgtgtttaaataatatccaaggagttgttttagacagtaacagtgtgactcgagttaatgttttccctataatactattttttacttgtctatttagtctgtaaataataaggtccttcctttttccttttcttgtatcctcttattcaagaaatgctgggttaataacagtgaggagtaatacagataatccagaatttctgtagaaggagggattggaggagataattggaata

SEQ ID NO: 795147 - DNA, 624 bp, Homo sapiens
tctttctaagagtttaccactctggatccttaatgccacagatataggagggaatgtagtttgccaccactttagttagtattgtgaaacataatctggtacaaaatgtatgtttcaggttttcttcatatgaaggaaaaaacaaacaacaacaaacaacaacaatgaaactctttaagagttccaatttccttatattaatcatccttaagctttatataatctgcattaatttatacttctttatatagcagttcagaactagtaaggatatagaaaacacacagtaacacgaaatttaatgtaaagctttaatagctatgataaaacgaaacctatagcatataaggaagctaaacatggaagagtacccaagagaagataaactcaaaagaggttgagwcctagctggagaagatatcattcagttgtctataatattcacctgcttggcgaggctggagctagtctgttgctattgagaaagcagtaggccaccttcttttctggagtacaggtaagaaaacaagaaataggctgggcatggtggctcacgcctgtaatcccagcactttgggaggctgagatgggtagatcatgaggtcaggagttcaagaccagcct

SEQ ID NO: 795148 - DNA, 589 bp, Homo sapiens
tccaactgagttatattagtcagatcaaaaagagcaaacatagttttatcaatgaatatattccttctgaggctagaaacatgtttgtttgttccttcacaaaatatgtattttatgatgtaatacggacatggcccttaayagcagaatcggaaattgagttatgtactctactactactcccgaggtaatatgttgagtatatcaaatttaacattaccaaaaacaaaagtttaaatgtactgtgactattctattgtttaagctccctttttctcagatctatattcaggtaacttttttattatttgtgtctacatgtttctgctaaatttagtaaaagtttacaactgaacacagcacatagtgcatgttaatctttcattcagcatttgataaagttaataaaataaacagttgccattacactgcaaagttgattactagggagtaattaattaactactaacactctacaaaagccctcaggagagttggcaaatttgcagatttctgagtgcttcagcaatgcttaacttcaaagagatattaaaatgctgcaacccctgatttcattctgactgtcctt

SEQ ID NO: 795149 - DNA, 529 bp, Homo sapiens
ttatggcttaagacctcaaaagtaaaagcaacgatagcaaagatagacatgaaattacgtcaagctaaaaaagcttttgcagagcaaagaagacaagagtaaagagacatcctgcagaatgggagaaaatatttacaaaccattcatttgacaaggggttaatatcgagaatatttacaaggaacttaaacacatccacatcaaaaataacaaataatctcattaaaaagtggacaaagtatctgaatagacattcttagaataagacatacaaaaggaaaaaaaagtttatgaaaaaatgctgaacatcactaataaaggaaatgcmaatcaaaaccacagcaaataacaaataacaaatgctcatggatttgaagtcatattattactaaaatgtctttactaccatagcaatctacagcttcaatgtaattcttatcaaaatatcaatgacatttttcacagaaatagaaagaaaccctgaaatttgtgtaaattctcaaaagaccccaaatggctagagcaaaat

SEQ ID NO: 795150 - DNA, 630 bp, Homo sapiens
tgaacgttatgagcactggaatacttgtgtcagttttccttgccaagttccatggggcaatgcattagaaaaagatggatggctgcatatgaagtaagttgaacttaaggaaataaaatcttatatactggcaataaatatgcctgtacattgctagtgaaggagatactatctctatcttccaagactttaaataaaccttcccttttttcacagaaaattgtcctatctctatcttccaagttagttcaatgtgcacatatctttagctagttaatgcctctgtttgcaagatgtgcaaatgagatggactgccatgaggaattgtctcaccaaaaagagttctcatagatgagaaaaggggctggccttcgaaaccttttaataacyaatcattagatacacactgccctttcagctgattgaaatatccgagagatactcgactgtgagtcattgacagctaacagttctcttggctaggggaatagtaatttggtctgggagctgggagtcttgtgtattatcctacagcatggactacatgatgagaacatgtcattctacaaactattatcattttgccttatcttgttaattcattaaccaaagaccacacagatatgtatc

SEQ ID NO: 795151 - DNA, 630 bp, Homo sapiens
tgaacgttatgagcactggaatacttgtgtcagttttccttgccaagttccatggggcaatgcattagaaaaagatggatggctgcatatgaagtaagttgaacttaaggaaataaaatcttatatactggcaataaatatgcctgtacattgctagtgaaggagatactatctctatcttccaagactttaaataaaccttcccttttttcacagaaaattgtcctatctctatcttccaagttagttcaatgtgcacatatctttagctagttaatgcctctgtttgcaagatgtgcaaatgagatggactgccatgaggaattgtctcaccaaaaagagttctcatagatgagaaaaggggctggccttcgaaaccttttaataaccaatcattagatacacactgccctttcagctgattgaaatatccgagagatactcgactgtgagtcattgacagctaasagttctcttggctaggggaatagtaatttggtctgggagctgggagtcttgtgtattatcctacagcatggactacatgatgagaacatgtcattctacaaactattatcattttgccttatcttgttaattcattaaccaaagaccacacagatatgtatc

SEQ ID NO: 795152 - DNA, 632 bp, Homo sapiens
cgttccttaggaaactgcatatcttttaaagcacatgactgttgtggagaatggggaaaagagagctttcattgagctctttttctcattgggaatgctctgtgaatgctgagattggagtgaggcctgttaataaaaatacttgaagcagactttttacagatgagaaatgtaattgttgcacccattctgttaggttgtttcatgcatactttgtgctaaaataactcagtctgcctttttctcccccaagtatcccacccccatctttctctgaagccttgctactggtgtgccttttccagagcrttctgggtcagggccattctcggtgcctcctgcactgcctttgtttggttgctcccatggcgttcccggtgagactgcgggtgccgtgcggtggttgaagagagtgtcattcctgtcgaatgaggaagctgcactaaggcgtggtgcagctgtagcaggtagagctctggactaggagccagaggcctctggtgggcagttggcctggggcaggtctcctgtctgccttcccacaaccacgacctgggagctgcaccgcctttcctgggagtcccacagggctgttgaggagataagaaaggacagtgtgagacagtgcactg

SEQ ID NO: 795153 - DNA, 671 bp, Homo sapiens
ggcagtggctgatctgagggaccccactgtggacacggagctcgagctacagtgacacctctgcgtgcaggctgctgggctgtcggtcacttgtcaccatggccatacccatcgatgcaatcagttctcgtgacgatggcgcatttgttccgtgaatttccctgaagagcagtgcaggtgtgatgcctgcaggacctggtgcacctggagtcaccttgtcttgtttgttttaagatggtgttgagatggcatctcgctctgtcacccaggctggagtgcagtggtgtgatcttggctcactgtaacctctgcctcctgggcttaagtgatcctcccacctcagcctcccraggagctgggactacagctgtgtgccatcatgcctggctaatttttcctattttttggtagagacggggttttgccatgtttcccaggctggtcttgaacgccggatctcaagtgatctacccacctcggccctccaaagtgctgggattacaggcaggacccattgtgcctggcccttttttctttttctttttgaaacagggtctcactctctgttgcataggctagagtgcgatggcgagatcacagctcaccacagcctcaacctcagggctcaggcgattctcctgcctcagcctcccaagtagctgggactacag

SEQ ID NO: 795154 - DNA, 606 bp, Homo sapiens
gttaaggacgtttcctgtttgccaaaatgttttaaaataataaatttacatttatgttttaaaaatatattttcagctgggcacagtggcttatgcctgtaatcccaccactttgggaggccaaggcgggcggattgcttcagtccaggagttccagaccagcctgagcaacatggcaaaaccagtctctacaaaaaatacaaaaattagccaggtgtgatggtgcacacatgtagccccagcgtcttgggaggctgaggtgggagcatcacttgaacccagaaggtcgaggctgcagtgagccctgacctgatcatgccattgcactacttcagcctgggctggaatgagaccccgtcttaaaaaaaaaaaaaaaaaaaaaaagattataccttctttcaaaaataatcttttgttttttaaatagttttggaastcattcatggaggtgagtgatggagtcacttgaccgagccaggtaaacttcattgacagagaagtgcggtttgtgggcagcttagcccagcatgtcttttcttgacttgtagacgtgagtctcaagcaacaatagaactttaattttgctcagtctctgtttatgtagat

SEQ ID NO: 795155 - DNA, 599 bp, Homo sapiens
gcatctaagagaatctcactctgagcttgctggcagatgtgcttccatttatgaaacctgctgatgaagaaatacaacagaatagagccaagttagagggaaactgaaccccgagaacatcatttgagcctctgcaacaaccttgagtcccaaatgcagccctcatcccagatttgtcattcacagagtcaatacttattttcacttttgttgtttaaagcagttgaattaggccaggcccggtggctcacgcctgtaatcccagcactttgggaggccgaggtgggtggawcacgaggtcaagagatcaagaccatcctggccaccatggtgaaaccctgtctctactaaaaatacaaaaattagcccggcatggtggtgcacacctgtagtcccagtacttgggaggctgaggcaggagaattgcttgaacccaggaggtggaggttgcagtgggctgagatcacactactgcactccagcctggtgacagagcaagacttcatcaaaaaaacagaaaaacaaaacaaaacaaaacaaaaagcagttgaattgtgttttttttttttcacttgcattcaaataataaaaaatgtctt

SEQ ID NO: 795156 - DNA, 456 bp, Homo sapiens
ttcagaatcactcatccaaatcaatataaataaattgctaagaccttttctaaccttttaaacattcatctttcttcatgagaacagcaataaatgtcctttgtttctggagtctgccaatcacctatttcttctttagtgtgggtaatttaaaaaattgttttcataaggctaaaagacattatgttatacaatgtctctatttttttttttaatggcaaggcagacttcattcaagggtggcrcattgtggtaggtataggaaccattgcaatgagtgttgcagcaggggagggagattggagtcaactcactactgtgtctttacaattttattttttctttcagagacagggacttgctctgttgcctaggctggagtacagtggcgtaatcatggttcattgcagcctcgaaatcctgggctcaagcaattctctgacctcagcctcccaa

SEQ ID NO: 795157 - DNA, 610 bp, Homo sapiens
atcttgactcccatgaagctgggaattacaagtaccctgctggaatgctgctgcagaaatatatctgcactaccatattttctagtgaaattcagccaaaagcagcaggaaaattatctctgcctcacttccactttccaaaccttgcacaagtgcatccaagtggggataagtaggtgatcagaaccctagctgcaagagattccaggaaatgtagtttttttatttctagactctctatgtggggagrcacactggaagggagtgaaagagaatgttgaggttaatcacctgtatttgcttcctattgctgctggaataaattggaacaaactcagtggcttaaaacaatacacatttgttatctttcatttctggaggtcagaagtctgatggaggttttacaaggctaaaatcaaagtgtcagccaaggtgtgctccttttggaggctctaggggagaatccatccatcccctgcctttcccagcattagaagactttcccacattccttgctcatggccacattgctctgacttccgcttctgtcatcacatcaccttctatgactctaaccttcacatctccgtcttataaggactcttgtgat

SEQ ID NO: 795158 - DNA, 610 bp, Homo sapiens
atcttgactcccatgaagctgggaattacaagtaccctgctggaatgctgctgcagaaatatatctgcactaccatattttctagtgaaattcagccaaaagcagcaggaaaattatctctgcctcacttccactttccaaaccttgcacaagtgcatccaagtggggataagtaggtgatcagaaccctagctgcaagagattccaggaaatgtagtttttttatttctagactctctatgtggggagacacactggaagggagtgaaagagaatgttgaggttaatcacctgtatttgcttcctattgctgctggaataaattggaacaaactcagtggcttaaaacaatacacatttgttatctttcatttctggaggtcagaagtctgatggaggttttacaaggctaaaatcaaagtgtcagccaagrtgtgctccttttggaggctctaggggagaatccatccatcccctgcctttcccagcattagaagactttcccacattccttgctcatggccacattgctctgacttccgcttctgtcatcacatcaccttctatgactctaaccttcacatctccgtcttataaggactcttgtgat

SEQ ID NO: 795159 - DNA, 540 bp, Homo sapiens
atcaactcttctgtctttcaatgaacaggttttatcaattatctgctttttctttcgtatatactgcatacgaatctgtaaatgtatatctctctatatttaatagattcacagaaagtttgaaaaaaatataaagggagatcctgtgtacccttcacccagttttctcttatggtaatatggtgcataactatagtgcagaatgaaaaccaggaaactgacattggtgcaatcctcagagcttcttaagattttaccagttttacatgcacccatttgtgtgtgtatgtatatatatctagatttatataatttatgtaacactcaagaatgttaataatatagtatataacctttygaaactggctttttcattcatcctaattcctgtgaaacccattccagttttctgtatcaagaatttgttccttttgattgctgactagtgctccgcagcacagatgtgccacagtttgtttaggttgtttagctatttactcattgaaaaacatctgattttttcccactttttggctgtta

SEQ ID NO: 795160 - DNA, 547 bp, Homo sapiens
attaattacagaaagtagcacatgggaaatgccagctgagtggtacagctaatgcgtctcatgagatgaaatcatagtcttgtgatgactggggaagtttgcccaggcgagttagaatttaagtgagagagccttacatattattagtatttaattacgatcgaaggagaacagataaaaaaaagtagaagcataagcaaggaatgaaaatggggggcatagagtattttgtagagctgcgttgtccaatatggtagccactagtcacatatggctayagagcacttcaactgtggctagtaagaattgagatgtacaattgtgaagattcagtatgaaaaataatatgaaatatctcattcatattagtcattattatctattaaaatgagaatgttttagctatattgggtaaatataacaatattattaacactaacttcacatatttattgttacattttataatatgactactagaaaatttaaattatatacacggttcatatttgcgacttgcattatatttctattggacagtgtcaag

SEQ ID NO: 795161 - DNA, 547 bp, Homo sapiens
attaattacagaaagtagcacatgggaaatgccagctgagtggtacagctaatgcgtctcatgagatgaaatcatagtcttgtgatgactggggaagtttgcccaggcgagttagaatttaagtgagagagccttacatattattagtatttaattacgatcgaaggagaacagataaaaaaaagtagaagcataagcaaggaatgaaaatggggggcatagagtattttgtagagctgcgttgtccaatatggtagccactagtcacatatggctacagagcacttcaactgkggctagtaagaattgagatgtacaattgtgaagattcagtatgaaaaataatatgaaatatctcattcatattagtcattattatctattaaaatgagaatgttttagctatattgggtaaatataacaatattattaacactaacttcacatatttattgttacattttataatatgactactagaaaatttaaattatatacacggttcatatttgcgacttgcattatatttctattggacagtgtcaag

SEQ ID NO: 795162 - DNA, 590 bp, Homo sapiens
aattgcaataatggccactgaagacctaataacgctgacatattcactactcaatctgtggaaatactagaatgattataaatatataatatctaacaagccattacccatgtggtacaatctcagaatgatgttctgattaaagacacacagctcacaataaaaagcaattcaataatcttcaaccatcaaaaaataataaatcctgtcatttgcaccaatatagatggaactggaggtcattatgttaattgaaataagccaggcatagacagacaaatattgcgtgttctcacttatatgtgggggctaaaaaagtgtaccttatagaggtagagaatagaatgattgctaccagaggctgagaagggtatggagggccagggagatgaaragaggtaggttaatgggtacaaacatacaacataggaattccagtgttcaatagcacagtaaggtgactgtagttaacaacaatatattgtatatttcaaaatagctagaagggaatatttaaaatgttcccaatgcaaaggaataaatgttcaatgtgatgaatatcataaatacctgaatttgatcattacaca

SEQ ID NO: 795163 - DNA, 551 bp, Homo sapiens
gttatatctattaagtttctcctccttttaaaaaaatgccagttatatatctaataaatttataaattttcatgtagagcttctctcattccattcttctggtcttgaacaggtttttctacccccatgtctcctatgtttcctttacttgctcwtatgtcttttacttgcttcaactatggaaggagggcagatttggggagatttgaaaattacaccaatcactgccatttttccccaaatgttgcagaatatctgcaaagttccctttagcttaattttgagcagtaggatataagtagaacaactaagagtatttttagttgcatataagatgaaatccaaattctttagcatgatcctccacagttcagcacaggcttgtgctacctttccaaatttatctcccaatattacccaacataaattcttcactcttctttattcatgctttttcccttgccttccctcactgtgtcactcattacaaaaacaaacaacaccccccctccaaccgtaattgtaattgtcttaatttctgctcaccatct

SEQ ID NO: 795164 - DNA, 655 bp, Homo sapiens
tttcctaaaacacatagatacacaacttttataaagaatattagcagattcatatccacttccagaattatatatattttatgatactttgagttaaatacccttatttactgcttacgctcgactataaagttaattttaaakttgaaaggagcgtcaaaaaacatataggtcagagagaagctaaagctcactgaggtttgattacataacaaatcagtggtgtgtctgggatcagaaccctggactgctggactaactcaaccgaccctctgaaaggtctgactttccttttctaaaaatgtttaaaccaatcgtttatagcccattgcattatatttatttccttccccattaaccctcacccataatttaaaaaaaaaaaaaaaaagagtccaaaatacacattagggaactatggattctaacaccttctctctgaacatccattttacatacttttcattcataatgttccttaatgtatctctattggacaggggaccctcccctcaaactgttaactcacaccaaacatggtgactgaggggaaagatttaagttctgagaattaagatttggcctcttctgttctctcactccttagttagacccaaaggaatgcaggttgttgggcagattgcccctatttgta

SEQ ID NO: 795165 - DNA, 573 bp, Homo sapiens
gttaggttgttaaaaaaacctcatagaaaaagatgagagcctagatgaaggtaatggcaagaaaaaaaagaaaagatacagactcattcattagaggcaatcaaaaggactcagtgaccagttggtaactgttagggccaggaggggtgaatgagtgagasaaacagaggtcaactctcccagtgattttaatctgggaaactagaactatcaggacatcatttagccaaaagaacagcagaaagataaatatatggttttagaggaaagagaaatatggttatattccttttggacatactgagtttgaaatgccctctagaaaacaggaaataattgaattttaatttcatgaaggtaggaagttttgtgttgctgttgtttcctttttctctcagggctatatccccagcaccagaagtaatggctgtgagataaattaaaaatcctagtggaatcaataacattcctgcaagctccaagatgaaatagtgtacatatagagaggagcatattatctaaaaaaataaaatttgccatgatcctttcttattcagctccatactaaaccaa

SEQ ID NO: 795166 - DNA, 621 bp, Homo sapiens
gttccatatccaggggagagggagggagaaggagaaagtcactcttccctgctcttcatttctcttgggtgagacattacttcctattaaaagaaaaaaaaattcactatcatttggaaactgaaatttctctggacattactattataatcattagatgtgactctaagtcggaggttggcaaactaaggcccagaggccaaatttggcccactgcctgttttggttaataaagtctggttggaagacagccatgcttatttggctgctttcacagcgcagagttgagtagttgcaacagagactcacaggtcccacaaagcctaaaatattcagtatctgtccttccagaagtttactgaccctgtgctatgtatacaatcaggttttaagtgtcagccataaatttggatatcaaaygaggctgaaccattcccagcctaaagactatttaaactaaaatgtggttatgttctgagacctatttgaggtatgaaaccatagagattttgctttagagagactgagttgcgttaatggaatattcatgtaatttttagagctgggcagttggcataaattccattgcaatgctccacaatttggataatccctcagctt

SEQ ID NO: 795167 - DNA, 624 bp, Homo sapiens
aaagctgcaatcaacagaagagtggacaagtatattctagaatattcaaacagaaaatgaaaaagaactactactacacatacaatacaaatgaatctcacagacacaaagacaagacaaagaagtcaggcacaaagcatatatgctcagactgtatttacataaaattcaaatagtaatacttatctccgagataaagtcaaaatagtgattcctaaaggggaggattaggactgactgaaaggtgaaacaaattatgagtgctgatcattttccatatcttgatttcggtgagggttacatgtatatttaatttgttaaaaaaatccttgggcacactttttccctttaatgtatgttatttctcaakttttcaaagtttgcaaaataagacatataatcaaagcaaaaactctggggcattccagtgaatgatgtaaaaacacgcctcttaaagaaggcaagtagtagcgacagcctgtatacataaagctacaccttgtctatccgcaactatgaatttaaagttcattcaccagacattcaccttaaaatgaatgcagagcacaggaactaaataactgaagacaaagttggtctaccactgtgatgtgtggccctcca

SEQ ID NO: 795168 - DNA, 520 bp, Homo sapiens
acataaaattaaccactttacagtgtgcaattcaatagtgattaatatattcacaatgctgtgaaaccatcatgtttatctactttcaaaacgtttgcatcaccccaaaaggaaacctcatactcatgaagtagtctcttctcctcttcttcccccagcccccgacaaccactaacctgctctctgtgtgaatttacctcttctagatatttcatgtgaatggaatcatacactgcgtggctctttgtgtctgtcttctttcacttagcataatgttttcaaagttccatgttgtagcacatcgtatggwtgtaccgtattctgtttatccattcatcagttggagttgggttgtttccaccttttggctactgtgaataatgctgctatgtacattcacatataccttttgtatgaatacttgttttcaattatttcaggtgtatacatagaggtggaattgctgggtcatgtgggagttctgcacttacctttttgaaaaaccaccaaactgttgcac

SEQ ID NO: 795169 - DNA, 592 bp, Homo sapiens
tcattcccattttacagaaggaaatcaaggggagttacatcccctcatgccctgcctccagcctcccaatctctggctgaagctatcagcccatcctccctccccaagttccaactgccccagcaggttccaaagtatccccagcaggatgctaccatcctgcctccctttgggggttaaatgggatgtggcctgagaaagtgctttgtgcrtggtgaagtgatgtgcagcaataaggcagtctgagttttgacttctggggaacactgagacctgcctgggggcccttctctactggatggccacctttgcctttatccaaaagaatgagtttaatggctgtagggacctgctagaagaatttaggggatagtgggaccagaatggacttagtgaagaggaaacttgccttgggttaggcagggtgagggaactgaaccatccttttagaactgtgcagaaacagtgaggagggctggcaggtgggcctggcagaagaggatttgatgtgtgtctaaaaacctgggctactaccatttgattgatggacctgctcccaagcaggggtaaaatggtgtcatcacctactctc

SEQ ID NO: 795170 - DNA, 493 bp, Homo sapiens
tccccatgagagtggtctgagacctttgttaaactaaagcagcctctctgtccaatcacaacactgagtgaattataatacccaccatcattctccagctttaaataaagtaagaaaaataacagagtatcttatcatagaagtgacttttaagtaatcatttcstcaagattcttttggtaaatacaggatttaattttcctacagtcacttctgtaggaaaattaaagtagtttatggaaaagaaaatgtgagaggtttattaaattagggaaaaccatggccaatagagcaaaaaagtgacggggtgaggatggtatttaaccaactagccctactgaaaaatactaagatggcatacagttctctatctttccataagtggtgattttaaaataatatttggaagcttgcacctcactcccaaagatgcagctgctgtgctgtttttcttggcatgtttaaggatcctccatgggtactgaagaaacct

SEQ ID NO: 795171 - DNA, 551 bp, Homo sapiens
agttatttctgaagatgaagttgtttctttagattagaatatttggaaaaggcttagagaaggaaagaatgagatattcaaatttaaatattatatggaaagtcaaagagaaatagagagatcattcaagaaaaaygcaagacccatttatcagagagtgaataaaccatacagactcaactgtttacttaacaattttgtgtgtatatatatatatatatttttttcttttatttttacagtggagcaaccatagctcactggagccttgaccttccaggctcaaggaaccctctcaccacagcctcctgaatagctgaaactgcaggtacatgccacctcacccggctaatttttaaaattcttttgtagagacaaggtctcactatgttgcccaagctggccttgaactcctgggctcaaacgaccctcccaccttgggctcccgaagtgctgggattacaggcatgagccatcactctcagccttcaagaattatacaaatgccagcttccttccagtaatgagctaagtgaaaaaatgagggcagt

SEQ ID NO: 795172 - DNA, 301 bp, Homo sapiens
gacggagtttcactcttgtcgcccagggtggagtacgatggcggctctcggctcaccgcaccctccgcctcccaggttcaagtgattctcctgcctcagccttcccgagtagctggaatgacagagatgagccatcgtgcccggctaatttttctatttttastacagatggggtttctccatcttggtcaggctggtcttcaacttccgaccgttggagaatcttaactttcttggtggtggttgttttcctttttctttttttttcttttcttttctttccttctcctcccccccccac

SEQ ID NO: 795173 - DNA, 629 bp, Homo sapiens
gagaatcatgatgttattataagatgagttgtgcgcggtgatggccgcctgtagtcgcggctactcgggaggctgagacgaggagaagatcacttgaggccccacaggtcgaggcttcggtcggccgtgacccactgtatcctgggcagtcaccggtcaaggagatatgccccttccccrtttgcttttcttttcttcccttctcttttcttctttttgcttctcttttctttctttctttctttctttctttctttctttctttctttctttttctctcttcccctctttctttcctgccttcctgcctttcttcttttcttctttcctcccttcctcccttccttctttcctcccgcctcagcctcccaaagtgctgggatgactggcgtgaggcaccatgcctgcttggcccaaagagaccctcttggaaagtgagacgcagagagcgccttccagtgatctcattgactgatttagagacggcatctcgctccgtcaccccggcagtggtgccgtcgtaactcactccctgcagcgtggacgctcctggactcgagcgatccttccacctcagcctgcagagtacagagcctgggaccgcgggcacgcgccactgtgcccacacc

SEQ ID NO: 795174 - DNA, 622 bp, Homo sapiens
gggcttctccatgtcgatcgggctggtttcgaactcccgacctcaggtgatccgccctccccggcctccggaagtgctgggatgacaggcgtgagccaccgcgcccggccttcatttttaaatgttttcccacagacggggtctcatcatttctttgcaaccctcctgcccggcgtctcaaagtgctggcgtgacgggcgtgagccactgcgcctggactccggggaatgattcacgaccaccatcgctctactgatcctttctttctttctttcyttctttctttctttctttctttctttctttctttcatttattgatgaattatcttatgatttatttgtgtacttattttcagacggagtctcgctctgggcggggcggggcgaggcgaggcgaggcacagcgcatcgctttggaagccgcggcaacgcctttcaaagccccattcgtatgcacagagccttattcccttcctggagttggagctgatgccttccgtagccttgggcttctctccattcggaagctttgacaggcgcaaccccacccagaggctggctgcggctgaggattagggggtgtgttggggctgaaaactgggtcccctatttttgatacc

SEQ ID NO: 795175 - DNA, 496 bp, Homo sapiens
catcgcttgctcgccctctgagatcccccgcctccaccgccttgcaggctcatctcttactttcatttcttcctttcttgcgtttgaggagggggtgcgggaatgagggtgtgtgtggggagggggtgcggggtggggacggaggggagcgtcctaagggtcgatttagtgtcatgcctctttcaccaccaccaccaccgaagatgacagcaaggatcggctaaataccgcgtgttctcatctagaagtgggaacttacaaatgacagttcttgcatgggcagaacgagggggaccggggacgcggaagyctgcttgagggaggaggggtggaaggagagacagcttcaggaaaaaacaaaacacgaatactgtcggacacagcactgactacccgggtgatgaaatcatctgcacactgaacacccccgtcacaagtttacctatgtcacaatcttgcacatgtatgcttgaacgacaaataaaagttagggggg

SEQ ID NO: 795176 - DNA, 644 bp, Homo sapiens
agagaggagagagagagagagagagagacagagagagacagagagagagagagagagagaggagggagagagaaaacgaaacaccacctccttgacctgagtcagggggtttctggccttttgggagaacgttgagcgacaatgcagtatttgggcccgttcttttttyttcttcttcttcttttctttcttttttttttttggactgagtctctctcgctctgtcacccaggctgcggtgcggtggcgctctctcggctcactgaaacctctgcttcccgggttccagtgattcttcttcggtagctgggattacaggcgcacaccatgacggccggctcatattcctattttcagtagagacggggtttctccacgttggccacgctggtctcgaactcctgacctcaaatgatccgccttcctgggcctcccaaagtgctggaaacgacaggcctgagccgccgggatttcagcctttaaaagcgcgggccctgccacctttcgctgcggcccttacgctcagaatgacgtgtcctctctgccataggttgactccttgagtcccctaggccattgcactgtagcctgggcagcaagagccaaactccgtccccccacctccccgtgcacataataactaa

SEQ ID NO: 795177 - DNA, 637 bp, Homo sapiens
gaaaataaagctttgtgatgtcaaatggctgctcagaaaaacacaagtaagaaagagaatcttccacggtgggggttgcatgaaattccctttaagctacctgaggctctatgtctgtccctgacttagggggaagggcatggggaaggctcactttctttctgttttagagacagggcacaggataagataccctaagacaacccttttgacttaaagcaactgaactgggtcttttaaaaccttaaagggagtgttgagaaataactacagcaacccyacacctgacaaaggtgtcagtgcttggggactccaaggtgagagaaacccctcacagggccaaggaattgagcggattaactgagggaacagaaaactcaaataagtataaatcaactgaaaggtaactcaaatatatcagttgaaaaattgaaatagaaacatgtttttttgccacatagatagcagattgacaaaaaaattaaaagaatgttgacaaccaagaggttctggatacataaaagcagataaattcagaaactactatttacagtacggctttcacaacccttttggaatatattccggcttctcctattaaacctttacactttcctactgtttcactgagtaatca

SEQ ID NO: 795178 - DNA, 425 bp, Homo sapiens
gctgaatttcagtggttgtcttatcttgtgaggatgaatagtcattgaaataatcttaatttcacaatgagtttaattataaatctatacttcctttgtgtgagagaaaatcttttgtgaacaaaatttaatttttggaaagmtttataagtccatattttttccttttaaaaactgcgattgtggtaaaaacacataatgtaaaatttaccattttaattctttttaagtgtatatttcattagcgttaagtacattcacatagttatgcaaaagatctgtagaacttctatgtcttgcaaaactaacattaaatgtcttttaagacaattgcccattttaccatctcttcagtccttgacaaacaccattctaactatttttttcctatgagtttgtctacttaagatacctgattatgaatg

SEQ ID NO: 795179 - DNA, 531 bp, Homo sapiens
tgtgtatgtgccacttgttattaatctcttcattggtcaagggacagctgggttgtttctgccttttggcttgtgttagtaatgctgcaataaatttgggtgtgcaaatatctcttccggatcatgtgttgtatattttaaatacatagccagaatggggtttgctggattgtataataatctcattttaaattttttgaagagctttcatactattttaaawataggtttgatgtgatagattattgtgacttttctttgtatttttatagaagagagttgtcgagtatccttttaaatgcctagtcatttctatgtcttctttggagaaagtcatttcaaacatgtgccattctaaatcaagttattaactttttttgttgttgagttttaggaatttatatattttgaaaattaacacctaccaaatatgtgattagaaaatatttttactcttttttgttttatgtatgtatgtatgcatatatataaccctatacaagacagggtcttgctatgttttcatggcta

SEQ ID NO: 795180 - DNA, 494 bp, Homo sapiens
gaccgccctcgtgtctgtggcggtgggatcccgcggccgtgttttcctggtggcccggccgtgcctgaggtttctccccgagccgccgcctctgcgggctcccgggtgcccttgccctcgcggtccccggccctcgcccgtctgtgccctcttccscgcccgccgcccgccgatcctcttcttccccccgagcggctcaccggcttcacgtccgttggtggccccgcctgggaccgaacccggcaccgcctcgtggggcgccgccgccggccactgatcggcccggcgtccgcgtcccccggcgcgcgccttggggaccgggtcggtggcgccccgcgtggggcccggtgggcttcccggagggttccgggggtcggcctgcggcgcgtgcgggggaggagacggttccgggggaccggccgcgactgcggcggcggtggtggggggagccgcggggatcgccgagggccggtcggccgccccgggtgccgcgc

SEQ ID NO: 795181 - DNA, 415 bp, Homo sapiens
gcggtgggatcccgcggccgtgttttcctggtggcccggccgtgcctgaggtttctccccgagccgccgcctctgcgggctcccgggtgcccttgccctcgcggtccccggccctcgcccgtctgtgccctcttccccgcccgccgcccgccgatcctcttcttccccccgagcggctcrccggcttcacgtccgttggtggccccgcctgggaccgaacccggcaccgcctcgtggggcgccgccgccggccactgatcggcccggcgtccgcgtcccccggcgcgcgccttggggaccgggtcggtggcgccccgcgtggggcccggtgggcttcccggagggttccgggggtcggcctgcggcgcgtgcgggggaggagacggttccgggggaccggccgcgactgcggcgg

SEQ ID NO: 795182 - DNA, 494 bp, Homo sapiens
gaccgccctcgtgtctgtggcggtgggatcccgcggccgtgttttcctggtggcccggccgtgcctgaggtttctccccgagccgccgcctctgcgggctcccgggtgcccttgccctcgcggtccccggccctcgcccgtctgtgccctcttccccgcccgccgcccgccgatcctcttcttccccccgagcggctcaccggcttcacgtccgttggtggccccgcctgggaccgaacccggcaccgcctcgtggggcgccgccgccggccactgatcggccyggcgtccgcgtcccccggcgcgcgccttggggaccgggtcggtggcgccccgcgtggggcccggtgggcttcccggagggttccgggggtcggcctgcggcgcgtgcgggggaggagacggttccgggggaccggccgcgactgcggcggcggtggtggggggagccgcggggatcgccgagggccggtcggccgccccgggtgccgcgc

SEQ ID NO: 795183 - DNA, 580 bp, Homo sapiens
gtctgtctgtctttgtctttccttctctctgtctctgtctctctcactgagtctgtcttctgacttagtctctctctctctctctctccctgtctgtctgtctctctctctctctccccctgtctgtttctctctctctctctctctctctctctctgtctttktctttctttctgtctctgtctctctctctctctctgtgtgtctgtcttctgtcttactgtctttctctgcctgtctgtctgtctgtctctctctgtctgtctctctctctctctcccccctgtcggctgtttctctgtctctgtctgtgtctctctttctgtctgtttctctctgtctgtctttctctctctgtctctttctctctgtctctctgtctgtctctgtctctctctctgtctctctctctctgtgggggtgtgtgtgtgtgtgtgtatgtgtgtgtgtgtgtgtgtgtgtgtgtgtctgccttctgtcttactctctttctctgcctgtctgtctgcctgtctgtttgtctctctctctctgcctgtctctctcccttcctgtctgtttctctctttctgtttctctc

SEQ ID NO: 795184 - DNA, 619 bp, Homo sapiens
acggccgggtactcctctgagacaaaatttccagaggaacaatcaggcagcaatatttgcttttcaccaatatccgctgttctgcagcctccactgctgatacccaggcaaacagggtctggagtggacctccagcaaactccaacagacctgcagctgagggttctgactgttagaaggaaaactaacaaacagaaagtacatccacaacaaaatcccatctgtacatcacaatcatcaaagaccaaaggagagaaaactacaaagatggggaaaaaacagagcagaaaaacggaaaattctaaaaatcagagtatctctccacctccaaaggaacacagctcctcaccagcaatggaacaaagctggacagagaatgactttgacgarttgagagaagaaggcttcagacgatcaaactactccgagctaaaggaggaagttcaaacccatggcaaagaagtgaaaaacctttaaaaaaattagatgaatagctaactagaataaccaatgcagagaagttcgtaaaggacctgatggagctgaaaaccaatgtacgagaagtacgtgatgaatgcacaagcctcagtagccaattcaatgaactggaagaaagggt

SEQ ID NO: 795185 - DNA, 616 bp, Homo sapiens
ttcaagcgataaatgtatatttgattgcctcctttggagaggctaattagaaactccaaagaatgcaaccatttgtctcttaactacctttgaccaggaagtcccctcctcactttcagtcttcccgcgtttgctaatttgtcccgcctttgcagaccgaaccaatgttcatcttgcatactttgattgatgtctcatgtctccctagaatgtataaaacgataatgttctctgtttaccttaggcacatgtcctcagaacctcctgaggctgtcacgggtatgcgtcctgaaccttggttacgtaaactttctaaattaactgagacctctctcaagttttcagggttcacaacggaaagtgcattgtagctccaccctagggcttaccattaagaaaaactatcctawatctctgcagatacagtcaaaccggttgtatgtaaactgtatgaaactaaatgcacttattacaagtaaatgaataaatgctgagaaaaaaaatcatgaaccgctcacctttcaaagaagcaataatactatgaattatgtgtaatttccagagtcagctagtttcaaaattgtccccactaaacttggaaaggttccagagtgag

SEQ ID NO: 795186 - DNA, 679 bp, Homo sapiens
acccgttattatgcccagctaatttttgtattttcatagagacagggtttaaccatgttggccacgctggactcgaactcctgccatcaggtgatccgtcagcctcagcctttcaatgtgccgggattacaggcgtgagccactgtggccagcgagttctcttttctttgtgaagggcaaggcaaagtggaatggattcatctaaaagcggagtgcatgccctggaaaacatcatggttagacccatgtgagacaggttagttttactgcgtgtgttctccatgtgttgttgcccatgtgttgctaccatggtaatcctgctgagtatgagaggaatcaaagtttcacacatttggtgtatgtgcttgactgaggaaccaatggggtgaagctaccatctgtgggattatgactgaacgcctctaaatcagaatcccgcccagaagaaaggatgcagcagcgctggcaagactcggttggcctcagatagccagtccccagcctttgccaccggccggasgctccgccccgctgtgcgccaagaccttgctccggtcttatcatcctaaaaaatggggtgcggccccccatcctaaaaaacggggtgcggccagaaaggcgtttgctccctggcccgtcacataacatgcttatggggaatctgatactaaactattgg

SEQ ID NO: 795187 - DNA, 644 bp, Homo sapiens
gtctcactgtgttgccagggctggtctcaaagtcctaggctctagcaattcttccaactcagcctcccaaagtgctgggattataggtgtgagccacaatgccctgccctcttttttatttccttcattttttctctttttttctttctctttctttctgtcttttctttttcttctctctttttcttcctcccttttttctctcatttctcattctttttttttctgtttctatgtcttttggttttctttttcatctttcttccctttacatctctgtctgtytattttctttttcttgatcttccttactctctctctcttttcttcatttctttctttccatccctctgtctgtctgtctttgtgtggattttggaaaattctccttattctgtatctccctgtgtatcacaagcctctgtgactttcactttgttgtttttcctccttgtcgcgtaaaaggcattcactgctcttttattttggtgctctgtggatgttcgaagggtggggaaaaagtggtccacgaatgtgattggtttcatgagagacacgagagacaaaagaacatatgatgattacttcgctaaatgccctgtttattctttcaactgcactcatacaagtaaggacgcagttgg

SEQ ID NO: 795188 - DNA, 594 bp, Homo sapiens
cacagccactttgctgcacccaacccggaccttccagcctccttggcactgtcaggggaaaactgtctactaaagcctcagtaatggtggactccactccctccaactgacctcaattggcccaggtcaacttcagactgctgtgctggcagcgagaatttcaggatgaggaacgcattagctgtttgtgattttcatgtctgttgcagggatttgacccattgttagtgctagatttggagtcttaaaaaacagatttatcttactgaactcaaagtacaacttgaagatgtactcagctgtttacttaaattrcagcaggagaaaatgtatctttgcagatctatttttatgtcacttgcttttagacacgagattgtctctggcacagtaattcaacttagtctatgtcaaaaacatagcctgaaaatgctcaaaaaaaattatgaatagcggattgtattctatgtgttttcaaatttcttctatgatgtaaaatatataacataatgttttaccttggatttctaacctcagccctcagccattttcccaattttttttttttttgttttgagacggagtcttgctctg

SEQ ID NO: 795189 - DNA, 594 bp, Homo sapiens
cacagccactttgctgcacccaacccggaccttccagcctccttggcactgtcaggggaaaactgtctactaaagcctcagtaatggtggactccactccctccaactgacctcaattggcccaggtcaacttcagactgctgtgctggcagcgagaatttcaggatgaggaacgcattagctgtttgtgattttcatgtctgttgcagggatttgacccattgttagtgctagatttggagtcttaaaaaacagatttatcttactgaactcaaagtacaacttgaagatgtactcagctgtttacttaaattgmagcaggagaaaatgtatctttgcagatctatttttatgtcacttgcttttagacacgagattgtctctggcacagtaattcaacttagtctatgtcaaaaacatagcctgaaaatgctcaaaaaaaattatgaatagcggattgtattctatgtgttttcaaatttcttctatgatgtaaaatatataacataatgttttaccttggatttctaacctcagccctcagccattttcccaattttttttttttttgttttgagacggagtcttgctctg

SEQ ID NO: 795190 - DNA, 643 bp, Homo sapiens
ggtctcactgacttcaagaatgaagccgcggaccctcacggtgagtgttacagttcttaaaggcagcgtgcctggagtttttcccttctaatgtcagcatgtgtttggagtttctttcttctggtgggttcgtggtctttctggctcaggagtgaagctgcagacctttgtggtgagtgttacagctcataaaggcagtgtggacccaaagagtgagcagcagcaggatttattgcaaagagcgaaagaacaaagcttccacagtgtggatggggacccgagagggttgccactgctggctcrggcagctgcttttattctcttatctggccccacccacatcctgctgattggtccattttacagagagccaattggtctgttttacagagagctgattggtcccttttcacagggtgctgattgatgcatttacaatccttgagctagacacaaagttcaccacgtctctactagattagctagatacagagtgttgattggtgtatttacaaaccctgagctagacacggggtgctgatttgtgtgtttataaaccttgagctagatacaaagtgtcgactggtgtatttacaatcccttatctagacataaagtttctccaagtccccaccagactcag

SEQ ID NO: 795191 - DNA, 532 bp, Homo sapiens
gcaatagggttttttgtttttgtttttgcttttgcttttgtgttttggttttggttttttttcttttgttttttccctgaagcaactcaactgtggcctcagacaactgggcactgagaacgcatgctcctcactagaatttcattactacattgcagagaaatgggataattacaaaggatttttttttttttttttgagatggagtcttcctctgtcatccaagatggagtgcagtggcatcatctcagctcacagcaaccttggtctctcaggttgaagcaattctcctgcctcagcctcccaaatagctgggactacaggcatgtgccaccttgcctggstaatttttatatttttagtacagactgggttccaccatgttggccagatggtctcgatttcctgacctcgttatccaccctccttggtcacctaaagtgctgggtgtgagctgctgtgcccagcccaaaggattcttaagggtgatatgggggatggaatggaaaaaataaacttagtctttgcactt

SEQ ID NO: 795192 - DNA, 586 bp, Homo sapiens
ggttaatgcatcaactgtacagtagtgttttgggctaccattgcctccatagttgactgaatactcctaataaacagagacaaaaggcaagggaggataaggcagatgcaaagaataagcaagaacctactaatgagggtttagaatttttcaaatgctgagaaccatcctccaaacaaggaatccggggactacctggatcaagtctgaagtggaacctgggccaacttgtgcattctagctgtaatttttatgaccactaatattgatttcttggctattgatttctaggcaacagatggttaaattaaattttctacatattcctccttctgaggataagagagaatttaaagccagcctattttgatatatagcatttcctttttgtgttgcttgtattrccaataaatctagtgccctcgatatttcattggttatgatttgaaggactgcctgcaacttcatgatgcggctgaggatatagattatggtgcagtaccctcatgacctgtcttgcacctaggtagctggcccatagcatgtcatgattctttcaggaggtcatttattatctttttagtct

SEQ ID NO: 795193 - DNA, 598 bp, Homo sapiens
atttcccttgctttagaggaattagaaagaaggatggcttgattgcttttaacagacacgcccctgcccattttgctggcagttgccaatatgtccatgctccacagatccaatataggccagagggtgcctttcaagcatttgaatcatctacctgatgccaagtgcagctkagagtaaggaatccagagaaagtgtttggatctggtaagtaggagtcattctgggcatttcttcatagagttttgtttttagtctcgtaataatactgttgccctaggcaggttgtttttcctactgcctctgtgaaagcctttccccatcgagtgatacagtactttccagttatggagatttttaacaatcaaacactggctgaggctgttggttcactggcagggttaagcaaagtgaagttatcttgtggcattaattcctttgcctcccattgccactcattctccatattagtttctctacatacatagcatgaagaaatttttaagctgccatctgtgttttcagctagttgagcaaataagtttttggttgatgggggaacctcgggcactggctgatcaaaatgcttacagaatga

SEQ ID NO: 795194 - DNA, 527 bp, Homo sapiens
tgccaatatgtccatgctccacagatccaatataggccagagggtgcctttcaagcatttgaatcatctacctgatgccaagtgcagcttagagtaaggaatccagagaaagtgtttggatctggtaagtaggagtcattctgggcatttcttmatagagttttgtttttagtctcgtaataatactgttgccctaggcaggttgtttttcctactgcctctgtgaaagcctttccccatcgagtgatacagtactttccagttatggagatttttaacaatcaaacactggctgaggctgttggttcactggcagggttaagcaaagtgaagttatcttgtggcattaattcctttgcctcccattgccactcattctccatattagtttctctacatacatagcatgaagaaatttttaagctgccatctgtgttttcagctagttgagcaaataagtttttggttgatgggggaacctcgggcactggctgatcaaaatgcttacagaatgacttggtattgag

SEQ ID NO: 795195 - DNA, 598 bp, Homo sapiens
atttcccttgctttagaggaattagaaagaaggatggcttgattgcttttaacagacacgcccctgcccattttgctggcagttgccaatatgtccatgctccacagatccaatataggccagagggtgcctttcaagcatttgaatcatctacctgatgccaagtgcagcttagagtaaggaatccagagaaagtgtttggatctggtaagtaggagtcattctgggcatttcttcatagagttttgtttttagtctcgtaataatactgttgccctaggmaggttgtttttcctactgcctctgtgaaagcctttccccatcgagtgatacagtactttccagttatggagatttttaacaatcaaacactggctgaggctgttggttcactggcagggttaagcaaagtgaagttatcttgtggcattaattcctttgcctcccattgccactcattctccatattagtttctctacatacatagcatgaagaaatttttaagctgccatctgtgttttcagctagttgagcaaataagtttttggttgatgggggaacctcgggcactggctgatcaaaatgcttacagaatga

SEQ ID NO: 795196 - DNA, 599 bp, Homo sapiens
gaggttcctcaaaaagctaaaaattgagctgccacagctacaatgcaacccaacaatcccagtgatgggcattgacacaaaagaaagaaaatcggcttgttgctgcactgtttacaatagctaagatttgaaagcaaacagtctacaaatgaatgaatgtataaaaaaagtagtacatatatacattggagtagtattcagccataaaaatgagattttgtcttttacgacaacatggataaaagagaagagtatgttaagtgaaataagccaggcayagaaagataaacactgtgcgttctcacttattcgtgggatggaagaattaatacaactgaattcacggacatagagagcagaaggatggttttcagaggctaagaaagacagtggaggctgggggaaaggtggggactgttaatgtgtacaaaaaaatagaataaataagacatattatttgatagcacaacgagatgactctggtcaataataatgtaattgtacattttaaactagctaagaaggaataatcagattttaacccaaagaataaatgcttgagtgggtgggtatcccattctctatgatgtgattattat

SEQ ID NO: 795197 - DNA, 557 bp, Homo sapiens
gagctgccacagctacaatgcaacccaacaatcccagtgatgggcattgacacaaaagaaagaaaatcggcttgttgctgcactgtttacaatagctaagatttgaaagcaaacagtctacaaatgaatgaatgtataaaaaaagtagtacatatatacattggagtagtattcagccataaaaatgagattttgtcttttacgacaacatggataaaagagaagagtatgttaagtgaaataagccaggcacagaaagataaacactgtgcgttctcacttattcgtgggatggaagaattaatacaactgaattcacggacatagagagcagaaggatggttttcagaggctaagaaagacagtggaggctgggggaaaggtgggsactgttaatgtgtacaaaaaaatagaataaataagacatattatttgatagcacaacgagatgactctggtcaataataatgtaattgtacattttaaactagctaagaaggaataatcagattttaacccaaagaataaatgcttgagtgggtgggtatcccattctc

SEQ ID NO: 795198 - DNA, 646 bp, Homo sapiens
agggatccagtttcagctttctacatacggctagccagttttcccagcaccatttattaactagggaatcatttccccatttcttgtgtttgtcaggtttgtcaaagatcagatggttgtagatatgtggcattatttctcagggctctgttctgttccattggtctatatctctgttttggtacaagtacaatgctgttttggtcactgtagccttgtagtatagtttgatgtcaggtagcgtgatggctccagctttgttcttttggtttaggattgacttggcaatgagggctcttttttagttccttatgaactttaaagtagtttttttctaattctgtgaagaaagtctttggtagcttgatggggatggcattgaatctataaattaccttgggcartatggccattttcacgatattgattattcctacccatgagcatggaatgttcttccatttgtttgtatcctcttttatttcattgagcagtggtttgtagttctccttgaagaggtccttcacgtccttgtaagttgggttcctaggtattttattctctttgaagcaattgtgaatgggagttcactcacgatttggctctctgtttgtctgttattggtgtataagaatgctaatgattt

SEQ ID NO: 795199 - DNA, 599 bp, Homo sapiens
aagaatttatagtcaataagcagaataaatcagtggataagaattattgaaaaacatttgataaaataccaaaggaggaagaggaactttttatagcagaagcctggttacaggttggctaaggacttaaatatcaaagaaagggaatcacgatattagtagacataagggatatgtggatttttactaaacagtattagcaggatttatgaaagtgagcctctcaaaccaggagcagggcaagaagtcaaggttggcttagtcaaaaagagggttcagttaagcttgactaacatttggtcataaaggkagtgcttacaagaacccagatttttttcccatctgatctgaaaataaataatcaccaaaaaaggctttgtttgaaaaatgagtgcccacttcacctgagaaaacctccatcttcttctgtttacctttgaatttagtgtagaaaaagagcacttgtcattgccacagttttaattttgctttcactcttaaaaacagagagtcagggctgggtgtggtggttcatgcctgtaatcccagcattttgggcatggtgatgcaagcacacctgtaatcccagctacttgaaa

SEQ ID NO: 795200 - DNA, 566 bp, Homo sapiens
tgcagtgggactaatgaaggaaacagctcaacccatgggaaaaagaagggcatggcaaacgcccacccgggagtaacacagaccaaagggaacctatcctgcccaaggaagtggtgagcaaatacgtgaccctgagaaaccacacttctcccatggatctttgcaactctcgggtcaggagattttctcgtaaacttattccaccagggcctttggtctgatacacagagctgcgtgttcccggcagaacaactgctcagacacaaacagaatcgcaggagctttacatackttggctctgagatctctggcaaaggtgactgcaactcagacaaggtgggaggttggatctccgtaaatgcccctagaaaggaagctgaatccatgggcctgagcagcatcagtgggccccacttccatgacgcctcacaggataagacctactggcttggaattccatccagcccccagcaacagcattgcaattacctgggatggaacaacgttcctggaggcaggggctggctgctatatttgctgtttggatgactcagccattccagcct

SEQ ID NO: 795201 - DNA, 662 bp, Homo sapiens
agacggcatttctccatgtgggtcaggctggtctcgaactggcgaccccagtggatctgcccgccccggcctcccaaagtgctggggtgacaggcgtgagccatcgtgactggccggctacgtttatttatttatttttttaattattttacttttttttagttttccattttaatctatttatttatttacatttatttatttatttatttatttacttatttatttattttcgagacagactctcgctctgctgcccaggctggagtgcagcggcgtgatctcggctcactgcaagctccgcctcccgggttcacgccattctcctgcctcagcctcccaagtagctgggactacaggcgcccgccaccgtgcccggctaactttttgtattttgagtagagatggggtttcactgtggtagccaggatggtctcgatctcctgaccccgtgatccgtccacctcggcctcccraagtgctgggatgacaggcgtgagccaccgcccccggcctatttatctatttattaactttgagtccaggttatgaaaccagttagtttttgtaattttttttttttttttttttttttttttttgagacgaggtttcaccgtgttgccaaggcttggaccgagggatccaccggccctcggcctc

SEQ ID NO: 795202 - DNA, 642 bp, Homo sapiens
agacggcatttctccatgtgggtcaggctggtctcgaactggcgaccccagtggatctgcccgccccggcctcccaaagtgctggggtgacaggcgtgagccatcgtgactggccggctacgtttatttatttatttttttaattattttacttttttttagttttccattttaatctatttatttatttacatttatttatttatttatttatttacttatttatttattttcgagacagactctcgctctgctgcccaggctggagtgcagcggcgtgatctcggctcactgcaagctccgcctcccgggttcacgccattctcctgcctcagcctcccaagtagctgggactacaggcgcccgccaccgtgcccggctaactttttgtattttgagtagagatggggtttcactgtggtagccaggatggtctcgatctcctgaccccgtgatccgtccacctcggcctcccaaagtgctgggatgacaggcgtgagccaccgcccccggcctatttatctakttattaactttgagtccaggttatgaaaccagttagtttttgtaattttttttttttttttttttttttttttttgagacgaggtttcaccgtgttgccaaggcttggaccgaggg

SEQ ID NO: 795203 - DNA, 578 bp, Homo sapiens
actggccggctacgtttatttatttatttttttaattattttacttttttttagttttccattttaatctatttatttatttacatttatttatttatttatttatttacttatttatttattttcgagacagactctcgctctgctgcccaggctggagtgcagcggcgtgatctcggctcactgcaagctccgcctcccgggttcacgccattctcctgcctcagcctcccaagtagctgggactacaggcgcccgccaccgtgcccggctaactttttgtattttgagtagagatggggtttcactgtggtagccaggatggtctcgatctcctgaccccgtgatccgtccacctcggcctcccaaagtgctgggatgacaggcgtgagccaccgcccccggcctatttatctatttattaactttgagtccaggttatgaaaccagktagtttttgtaattttttttttttttttttttttttttttttgagacgaggtttcaccgtgttgccaaggcttggaccgagggatccaccggccctcggcctcccaaaagtgcggggatgacaggcg

SEQ ID NO: 795204 - DNA, 538 bp, Homo sapiens
ctctgactggggtccgatgaatcacaggtgggcactatttttctatattcccaaccagtgataatccttgcgctctttatttctaattaaaagaaatccaaaatggagatagttatttgagaggtctctaaagacaactaggaggacatgaggagttgaattaatactyatacacacccaggtggaattttacctgttcgaactgggaaaattacagatgtcctaaaaaggcaactgcatttgacttggattgtttatactgagcctgatcacaaacctcctgaagagaaagctgtgctgaattaagctgatgattgcctagatacagtctaagctggcaatcaaacattgtccatcatagactgtgctaaaatctttcacttgtgtaaacttgcagtaaaactttataagtccctccctaacctcatctgaatggaacatgatatagcttcttgctaaatttgtgtctcccaaatagcaatttataaaaaatcatgattaaaatgccttttattttattttccacagggtctgtttt

SEQ ID NO: 795205 - DNA, 371 bp, Homo sapiens
cgaaccgcaaccggagcgtccccgtctcggtcggcacctccggggtcgaccagctgccgcccgcgagctctggacttagccggcgcctgcacgtgtcccgggtcgaccagcaggcggccgccggacgctgcggcgcaccgacgcgagggcgtcgactccggttcacgcgccsgcgacctccaccggcctcggcccgcggtggagctgggaccacgcggaactccctctcctacatttttttcagccccactgcgagtttgcgtccgcgggacttttaagagggagtcactgctgccgtcagccagtaatgcttcctccttttttgctttttggttttgccttgcgttttctttctttctttctttctttct

SEQ ID NO: 795206 - DNA, 531 bp, Homo sapiens
cttggaggagcacagctgcctctgttggggtgagcagagaatgggccccccctagtgggtgggcagctggtcagagagcctaggtggttctctcagtcccctttctccaaggctgcccagttatgtggtgaggtgagcattgtgggcagtgggaggctggaaggggtccttcctgcaggagacccctcttgcatgaggccaggggagtggaattcagctctagaactttggtcagcttgagtagagctccggcagttagaaagggagacttcaaaagttagaaaaaattagatttttgtcagtctgcttctggaaattgatactcagtagtagtttgccttctcrgggctttctctgggaactggcattagtctagactgaggttagtaaattttgtgtgtaaaaggccagatattttaggctttgtgtgcctcttaacaatttttgtcacatattctttgttttatctttacaacccttagaaaagatgtaaaagctgggtgcagactggcctgcaggctgttttttgct

SEQ ID NO: 795207 - DNA, 533 bp, Homo sapiens
ccatggaaggacaaaagtaataaccagagccaatatcaaatacaaatttcctttacgtaccccataagctaatggggtacataatattatctgcatttcaaaatttgaaaaaaaaattaggaacaggtcgagcgcggtggctcatgcctataatctcagcattttggaaggscaaggcaggcggatcacttgagaccaggagtttgaaaccagcctggccaacatggtgaaaccctatctctactaaaattgcaaaaacattagccgggtgtggtggcggacgcctgtaatcccagctacttgagaaagcgaagcacaagcatccactgaaccccagaggcagaggttgcagtgagctgagactgcagatgacagagtaagaccctgtctcccaaaaaaaaaaaaaaaagagtattgcatatacaaaattgttattaatgtgaattctcaaaaatatggcctatgtctatctacagagtaatgtgactttaataaaattattttggactctttttccaaacaataacaaacga

SEQ ID NO: 795208 - DNA, 533 bp, Homo sapiens
ccatggaaggacaaaagtaataaccagagccaatatcaaatacaaatttcctttacgtaccccataagctaatggggtacataatattatctgcatttcaaaatttgaaaaaaaaattaggaacaggtcgagcgcggtggctcatgcctataatctcagcattttggaagggcaaggcaggcggatcacttgagaccaggagtttgaaaccagcctggccaacatggtgaaaccctatctctactaaaattgcaaaaacattagccgggtgtggtggcggacgcctgtaatcccagctacttgagaaagcgaagcacaagmatccactgaaccccagaggcagaggttgcagtgagctgagactgcagatgacagagtaagaccctgtctcccaaaaaaaaaaaaaaaagagtattgcatatacaaaattgttattaatgtgaattctcaaaaatatggcctatgtctatctacagagtaatgtgactttaataaaattattttggactctttttccaaacaataacaaacga

SEQ ID NO: 795209 - DNA, 678 bp, Homo sapiens
attgaacttgaagacagatcaataaaccttattgatatgaagaacagagataaacaaaaagcaaaaaaagaataagtttcaataacccatgggacaatattgagttatctaacatatataacgtatatgtattaatagagctccagaagaagagaataggatagaataattattatttaaaaatttaataatcatgatacaagaaaagaataattgataaactagacttaattaaaattaaaaacttctgatttggaaaggcaatgtcaagagaaagagaagacaagccacagactgggagaaaatattttcaaaagacacatytgagaaaactgctaccaaaatatatgaagaacacttaaatctcagcaagaaaaaaagttaatatgccaaagatattaatggaacccatatcaaagaagataaatagatgtcaaataagcatgtgaaaaaattctccgtatcttatgtcatgaagaatatgaaaattaaaacaagataccaccaaagacctattagaatggcctgaatcccaaatactgacagtagcaaatgctgacgaggatacagagcaatgggaactcttattcattggtggtaagagtaacaaatgatacatccactttggaaaacagtttggcagtttcttacaaaatttaacatatactcttaccatga

SEQ ID NO: 795210 - DNA, 371 bp, Homo sapiens
ccctgttttttctcagattcaacaaaactgtggctttttgtttcactcaacttttattgctttgtttgtaaagatgggagtgatagtctctagtctttccatctttccacatcctagatagtaactagaactctgtgcttgatttaaaatatacctggatattcatgaactcttcagttgtttttttttttttaacattttaraacatgtttagaccttcaaaacaaaaatcatacatttcctgcataaattcctttttataaaacatttttcatgactttcacagacaatcttcaacatgccttacctttctgactatgttttataaccttccttactaaaggtgcattcttttttttttttttaagagc

SEQ ID NO: 795211 - DNA, 608 bp, Homo sapiens
cctatggttgagttttacaatttttttgtatactttggatcatagtccgttatgtaatatttcctttgcaaatattttccccaacctgttacttttaattctattgacaatgtcttttattattattattattattattattattattattattattattattatactttcagttctgggatacatgtgcagaacatgcaggtttgttaacatatgtatacactggctatggtggtttgctgcacccgtcaacctgtcatctatattaggtatttctcctaatgctatccctcctctrtcacccccacccccaacaggccctgttgtgtgatgttccccgccctgtgtccatgtgttctcattgatcccctcccacttatgagtgagaacatgtggtgtttgattttctgtttctgtgttagtttgctgagaaggatggtttccagcttcatccatgtccctgcaaagaacatgaactcatcctcttttatggttgcatagtatttcatggtgtatatgtgacacattttctttatccagtttatcaatgatgggcatctgggttggttctaaatctttgctattgtgattagtgttgcaataaacat

SEQ ID NO: 795212 - DNA, 558 bp, Homo sapiens
tagaccttcaaaacaaaaatcatacatttcctgcataaattcctttttataaaacatttttcatgactttcacagacaatcttcaacatgccttacctttctgactatgttttataaccttccttactaaaggtgcattcttttttttttttttaagagctggagtaatctcggcactttgggaggccgaggtgggtggatcacctgaagtcaggmgtttgagaccagccttacctacatggtgaaactccgtctctactaaaaatataaaaattagctgggcgtggttgtgggtatctgtaatcctagctacatgggaggctgaggcaggagaatcccttgaacccaggaggcagaggttgcagtcagccaagatgaagcccctgccctccagactaggtgacagagcaagactccgtctcaaaaaaaaaaaaaaaagagatggagtgtaaacggagtataaactccttttccttaagtatgaactttctttcatgatttccttatatcagatgaaatatggcaaagtgacattatttgactttacatgctaggtca

SEQ ID NO: 795213 - DNA, 638 bp, Homo sapiens
tcttttcttagaaggtagaagatagcaccatgccgattcgtcgaactgtgaattctacccgggaaactcctcccaaaagcaagcttgctgaaggggaggaagaaaagccaggtaaagtaaaatggtgacacagcttaaaacatcaaaagttatactgcaatttggagtgtcccataaattcctttgaacttaattgtttttttttttttttcatggctaagtgttttggggaaacatttagagagaatcagtagctattggtatgtcattgccagaccatgagggcaaagtaaggtttcatcttctctataaaggtttttggaaggtgaaaatgttatgttggaattaaaaacaaaaatgtttggggatgacaggaatggccagagagtagcattctggacataaagtgtcatggggatcartgcagtgtgggagaatggaaaacgtgggcctttagaatagacagtggaaggttcatccagaaatcatctggaggccttcagagaagcaaatggtgatctgttgatctataacaggtattggtagagagaagattggccagtcagtggtgggagcataacaaatggaaagaaacatagacccatcaacatggagtactaatgctcctttatggcatg

SEQ ID NO: 795214 - DNA, 514 bp, Homo sapiens
gtcctgagagtggcacagtgggttctgcagctgatcagggttgtccccatccgccattccccgtgcactgccacaaatggtcgccaggtaattctcacctgcagcctggatgccgggatgaattcagagtccagtctcaacttggccrataaaggctcagtctcaacctccctatctcaaaaatggggttatcagctacctcctgggtcaggctggagattcagtgagataaggatgccaagggcttcacatatgacttggtccataacaattgctcaataaagagggaagctgtgattgttacaaccacttcctggcccagtgcacagggtcagcagatccatgggaaatgctcaactaagggttagaaggcaaaaatggtgagagaaaagcatggacagaattttctctgttctaagtttttttcccaccaccttttcagaacccagagccttctctgctgatctgcacgggtcaggccgggctccaaagacttcccgtgtctctgccacct

SEQ ID NO: 795215 - DNA, 557 bp, Homo sapiens
tccagctaatttttttgcatttttagtagagacagggtttctccatgttggtcaggctggtcttgaactcctggcctcaggtgatccgcctgccttggcctcccaaagtgctgggattacaggcgtgagccactgctcctggcctrtgtcttcacctcttgttcctgcttcccttggtatgctaactgaaggctttctccacatggccggaaggatggctgctggccattggtgatccaaaaggaagagaggcctggtctgttaaagcaactgtccccagtctttttggcaccagggaccagtttcgtggaagacaatttttccacaggtcaggacggggtggggggtctgatagtttcgggatgattcaagtgcattacatttaatgtggacttcatttctattagtattacattgtaatatataatgaaataattatataactcaccatcatgtagaatcagtgggagccgtgagcatgttttcctgcaactagacggtcccatgtgggggtaatgggagacagtgacagatcttcaggcattagattctcataa

SEQ ID NO: 795216 - DNA, 557 bp, Homo sapiens
tccagctaatttttttgcatttttagtagagacagggtttctccatgttggtcaggctggtcttgaactcctggcctcaggtgatccgcctgccttggcctcccaaagtgctgggattacaggcgtgagccactgctcctggcctgtgtcttcacctcttgttcctgcttcccttggtatgcwaactgaaggctttctccacatggccggaaggatggctgctggccattggtgatccaaaaggaagagaggcctggtctgttaaagcaactgtccccagtctttttggcaccagggaccagtttcgtggaagacaatttttccacaggtcaggacggggtggggggtctgatagtttcgggatgattcaagtgcattacatttaatgtggacttcatttctattagtattacattgtaatatataatgaaataattatataactcaccatcatgtagaatcagtgggagccgtgagcatgttttcctgcaactagacggtcccatgtgggggtaatgggagacagtgacagatcttcaggcattagattctcataa

SEQ ID NO: 795217 - DNA, 518 bp, Homo sapiens
cctgttttttgaggggtaatcttcagcagaaaactaaaagcgccttacctgactgactttcaggcatacgcagaagctcctatattctctacctctgcctctcatgctacattcaaaaagccatctatctactctcctttggagaggccaggcagtcttggacattccaaaagcagcctattggcacagtgcagtggtttgcaatcttggccgattttgcccctcagagcaatgtctggagacatttcttcgccgtcacataacagggaagtggccactggcattaatgggcagaggcccggggtgctgttaaacaccctacagtacacaggacagcctcactataaaattatccagtctgaaacgtcamgaatgcacctgttgagaaactcttgtaaagctgacagaacacgggctttgaaatcgagaccacctggagttaaaactaggcaaatcccttcacccttctgaacccacttccccatctataacagggatccggtttttcccgggtatag

SEQ ID NO: 795218 - DNA, 456 bp, Homo sapiens
cagcctcaaactcgtgagctcaagggatcttcctgcctcagcccctggaatagctggactacaggcaggtgtcaccatgcacctaagcacacatttttaaatgtgactctgtcttatgtttttttcctatcattgactaaccccacattagatayatagcagtactgtattattagaaaattaattttaagtcagtaccttattacaggcttgaaactgacaaacttcattacttggggagaggagtgggttcttttacaggatttcaaaattgccttcagccacggagactcccttaagtgaaaatttctgtcagtaacagacagtttatcttagaattcagttaatggagtatgtattgagtatctactataaatgaaccacgatgttgagcacttcaggaggtattaatgaattgaacagagtccctatgtaagacatgtatggcctgttgct

SEQ ID NO: 795219 - DNA, 581 bp, Homo sapiens
aaaagctgagagagtttgttatgactataccacctctaaaagaaatgatagagggagtcccagaggctgaaatgaaaggacactgaatagtagctcaaagccatataaagaaataaagttcctggtcaggcrcggtggctcatgcctgtaatcccagcactttgggaggccaagacgggcagatcacgcggtcaggagatcgagtccatcctggctaatatggtgaaaccccgtctctactaaaaatacaaaaaattagccaggcatggtggcgggcacctgtagtcccagctactcgagaggctgagggaggagaatagcgtgaacccaggaggccgagcttgcaatgagtcaagatcgttccactgcactccatcctgggtgacagagcgagactctgtctcaaaataaataaataaataaagatcttagagaaagtaagtgcaagagcaattacaaaagctagttatttaactccactttttgttttctacatgatttagaagactaatacatttaaaaagtaattattagcctaaaagatagtattatggtcaccttgatttgtaacttcacattgt

SEQ ID NO: 795220 - DNA, 581 bp, Homo sapiens
aaaagctgagagagtttgttatgactataccacctctaaaagaaatgatagagggagtcccagaggctgaaatgaaaggacactgaatagtagctcaaagccatataaagaaataaagttcctggtcaggcacggtggctcatgcctgtaatcccagcactttgggaggccaagacgggcagatcacgcggtcaggagatcgagwccatcctggctaatatggtgaaaccccgtctctactaaaaatacaaaaaattagccaggcatggtggcgggcacctgtagtcccagctactcgagaggctgagggaggagaatagcgtgaacccaggaggccgagcttgcaatgagtcaagatcgttccactgcactccatcctgggtgacagagcgagactctgtctcaaaataaataaataaataaagatcttagagaaagtaagtgcaagagcaattacaaaagctagttatttaactccactttttgttttctacatgatttagaagactaatacatttaaaaagtaattattagcctaaaagatagtattatggtcaccttgatttgtaacttcacattgt

SEQ ID NO: 795221 - DNA, 581 bp, Homo sapiens
aaaagctgagagagtttgttatgactataccacctctaaaagaaatgatagagggagtcccagaggctgaaatgaaaggacactgaatagtagctcaaagccatataaagaaataaagttcctggtcaggcacggtggctcatgcctgtaatcccagcactttgggaggccaagacgggcagatcacgcggtcaggagatcgagtccatcctggctaatatggtgaaaccccgtctctactaaaaatacaaaaaattagccaggcatggtggcgggcacctgtagtcccagctactcgagaggctgagggaggagaatagcgtgaacccaggaggccgagcttgcaatgagtcaagatcgtkccactgcactccatcctgggtgacagagcgagactctgtctcaaaataaataaataaataaagatcttagagaaagtaagtgcaagagcaattacaaaagctagttatttaactccactttttgttttctacatgatttagaagactaatacatttaaaaagtaattattagcctaaaagatagtattatggtcaccttgatttgtaacttcacattgt

SEQ ID NO: 795222 - DNA, 798 bp, Homo sapiens
gaggtcatggtggctggtgctcgcataagccttagaaaggtatcttttctcaccaaaatcagagcggaaaacatcactatccaaaggacactggatagagtacacaaatgatcttgcctggggagatgggagttactagtcctaaattgataattgtttctatcctgcctacaaaattttaaaagcaagaggcaaaaagattaaactatttccgagtaacttaacatatgatatttccattgctcaaactagtggtatagagaagttcttaaaattaggcagagaaaaaaatgacatgctacatatagtgccacaaagatacagataacaaaggtacagataatccacagataacagtggatttcttatagaaatcgwcaaatgtgccaaaacaaaaaagcaacatctttaaagcactgaaagaaaaaaaatctatcacaacttagaattctttgtctagcaaaatactttcaaaacaaaggcaaaataaagatatgcaagaggcagaactcatcatcagcagatatttactataacaaatattgaaagaaatcttttgggcagaaagagatgatgctggttggatatatggattgacaaaatttaatagagaacatccagaaaggataactacatggatggtaaataaaaaagatgtttattcttattagtacaattagttttcttttttttttttacattttattttaagaggtcatggattcattttcctgtaataaatattacaaatggatcctgtgtattctttaaccagttccttcttacagtaacatcttg

SEQ ID NO: 795223 - DNA, 593 bp, Homo sapiens
cctctcgcccccctggctcttaggatccgcggtggtctcacagcctgtttaccatattgtgagtaatatcatctccccctctggagattatgaactggttcacagaggggtgtacaccgtcggtgtacagagaatgtacacccgtcagtattggagtaatatcatcctcttcctccctgaatattaagaacagtatcacaggtgtgtttctactccctgcggtatcgcgtgtcatatccccctctcccacgttgcaattagaaacaatatcagtgggagcgtgtccaccttctgtcgtagtgaacgtaatatcatcctcttccctccagaatcatgggaacaatatccctgggggggtgtccactttctgtcatatatgtagtcatatcaccccctccgccttggaatattattaaggaccatctcacacgcgggtgtacacttcctgcgatkttgggagtaacatcaacctctcggcctctgaatattaggaagaatatcacagggtgggtgttcacctcctgctctatgatggggagtcacatctgtctgttatggggagtaatatcatcctctccttttcaggatattaa

SEQ ID NO: 795224 - DNA, 581 bp, Homo sapiens
gggtaaagacccatggcaacctccctgggcaagatgcaatgagagttgtgacttccccagagtcagaaggccaggtctgaagcaagctccaggagaggcttaagtcagttgaaagcttgaagcaattggtgattcagctaggcagttcaggcttccccagtcagctcttctcctagggctcgtcctttggggtcttaaaggagctaggccttttaaagtaggatctgatccccagtaaagagaaatgcatccattytatctggaagcctttagtgcctgggtcatatggcaatttcaacacaagaagactagagaaaaggatgcactaaatccattacaagctgtgtcaatatcctctggtatgtctcaccaggttctttttcctctagggccaaactttctaggattataccaaagatacctataattaagcattgacaggtcatcaatgtcaacttgtaagcctcagatggcgacttgatggagaatgtcactgagcaatgtcactcattgtatgttgtgagagtggaagagaattccaattgtaattcactcaatgaatatgtactgagttctagggt

SEQ ID NO: 795225 - DNA, 576 bp, Homo sapiens
tggcatggactcagctcactgcaacctccacctcctggggtcaagcaattctcgtggctcagcctcccaagtagctaagacgacaggcaagcaccaccatgcccagcaattttttgtatttttagtagaaacaggatttctccatgttggctaggctggtctggaactcctggcctcaagtgacctgcttgcctcagcctcccaaagtgctggaaytacaggcgtgagctactgcacctgaccaatatcaatgtacttttgtttgtacctcttctctacacttcacatgatttaaaacgacaactatataaaacaataattatgaaggtattgaagaacgtacgatgtataaaaatgtactctgtttgacaatagtagcacaaaagaaggggaagaaatagaggtgtatacaagaaaagtttttgtatactttgaaaattaagtaggtattaatcagaactagattttttaaacttttatttttgactgacacatagtaattatacatacttgtggggtacaatgtgatgttatgatacatgcatacattgtgtaatgattgaatcagagcgatta

SEQ ID NO: 795226 - DNA, 576 bp, Homo sapiens
tggcatggactcagctcactgcaacctccacctcctggggtcaagcaattctcgtggctcagcctcccaagtagctaagacgacaggcaagcaccaccatgcccagcaattttttgtatttttagtagaaacaggatttctccatgttggctaggctggtctggaactcctggcctcaagtgacctgcttgcctcagcctcccaaagtgctggaactacaggcgtgagctactgcacctgaccaatatcaatgtacttttgtttgtacctcttctctacacttcacatgatttaaaacgrcaactatataaaacaataattatgaaggtattgaagaacgtacgatgtataaaaatgtactctgtttgacaatagtagcacaaaagaaggggaagaaatagaggtgtatacaagaaaagtttttgtatactttgaaaattaagtaggtattaatcagaactagattttttaaacttttatttttgactgacacatagtaattatacatacttgtggggtacaatgtgatgttatgatacatgcatacattgtgtaatgattgaatcagagcgatta

SEQ ID NO: 795227 - DNA, 633 bp, Homo sapiens
tagagacagggttttaccgtgttagccaggatggtcccgatctcctgaccttgtgatccgcccacctcagcctcccaaagtgctgggattacaggtgtgagtcacagtgcctggcagatattcttttatagcaacgtgaatggactaaragacattctagatagaagtttggggcagaggtgtgtatgcacctttcctagttggtgggacaaaatgatttgcttcagctacaattttagtagctgaaaacttaacagaaaacaggggtcaaggtaaagggttaatgggaatcattctctgccagcagctgtagggaaggagagatagagatggcaaaggaaggattaagcaaagtgtgccaagggagtatctgattatagtgaaggaagtaaaaaactataggaggtaaagaagaaactagaaaaactggcagaaaggcttgaaaccatcaggaaggaagcgaagactacgcagggcctaggggactatctcatttgataaagcactttctagtatgcatggcactcatctcagaggaacgtaatctgatttggcaaagaaaaatacctctttgaatctctggagaggaaactagctagaaacaagaaggctgctggggcgatgacagtagcc

SEQ ID NO: 795228 - DNA, 545 bp, Homo sapiens
ttgttagtataaatatatatttgccataggatttctgctaacaatagtaggaagcagagttaaaatattttttcttcaccatgaatgactatcctgtcactgatacttacttatataaaatttctacaatgtatattctagaaatcaaatttggtagaaattcctagatattttcaataaaaatatagaaaatatgtagtaaaagctaaaattttttattagaaagggatacttagtgtttgctactaatcaatggctactagttatttttaaactaggatgttaaaggatattaaacctttaatgtgtactcttaaarcacactgtagcctccttattatcatactaattgaatgttagtaaaattacatcttgaaatacctgtctgccctggatggaaagatctgtgattttggtgccaacgcctcttttgctccttgcccggattcattaatagcatagtaattttaaagagtgtgccacttaatatctgtcttttgaataaatgaatgaatacatgagtgaatgagttattctaaaattaa

SEQ ID NO: 795229 - DNA, 605 bp, Homo sapiens
aatttgttttattttgtttagtttttgagacagagtcttgctctgttgcccaggctggagtgcagtggcacgatcttggaccactgcaacctctgcctcccaggttcaagcgattctcctgcctcagcctctggagtagctgggattacaggcacgcgccaccacgcccggctgattttttttgtattttttttttagtagggactgggttttactacgttggccaggctggtttcaaactcctgacctcaggggatccacacccctcggcctcccacaatgctgggattacaggcatgaatcaccgcgcccggcctctacttagtatttgaaaatgtgcttgccttatacttcaagcagtccactcttgcaaaaacaccattgagaaacacttgagtacatgcagtaataaacagktttttaaaaagtgaataggatcattatttgtaacagtaaatattccaacccaaatgccaatcaacagcagaatggacacatatttgtaatacattaatatactgggaaactacgcagctgggaaaatgaatcaattacagtaactagcaagttagaggaatttcacatacttaattctgagttaaaga

SEQ ID NO: 795230 - DNA, 617 bp, Homo sapiens
ggctttaatgggaatattttgaatgtttcaccattaaccaagatgttggctgtaggtgtctcttagatgtttaagttgagttagttcccatcttttcagagtttgataaatgttgtattatgaacttttgtattttgtattttattaggtaggctgttgttggctggttttcactcctttgtaaacgtccaaataaaatacagataactttttacatcaaagatttttctcttgtgtactcaatccttctaaataaacctttctcttcagacttattttatagaacagttctttcactaaactttcacaaatcgcaaatacaaaatgtgtttactaaaagcagaaaggaaggtagaaaaatggctccagtctctgttctccattcatatcgcatctttccccatagtcacacaagtctacaccaacaaacgtgtacattragagcatcgtttgtggctcgcttttacaaacacctggcgtgccatgcgccaggggtcctgctgaagtgactataaggtccaggcaggcaacacaggtgtggtcaggaccagagcctctgtggagtccgtgcgtctccaaactaggaacaggcgacttcgtattgaagcatggcatgg

SEQ ID NO: 795231 - DNA, 575 bp, Homo sapiens
ggcttcattctcatgaatagcttaatgtcactataacaaggaattatgggttgggtgcggtggctcatgcctataatcccagcactttgagaggccgaggcaggtgggtcatctgagttcaggagttcgagaccagcctggccaacagggtgaaacccagtctctactaaaaatacggaaaattagctggccatgccaggcacggtggctcacacctgtaatcccagcactttgggaggccaaggtgggtggatcacttgaggtcaggagttagagaccagcctggccaacagggtgaaacccagtctctactaaaaatacgggaaattagctggccatgccaggcacggtggctcacacctgtaatcccagcactttgggaggccaaggtgggtggatcacttgaggtcaggagttcgagaccagcytggccaaaaaattagctggacatggtggtgggcacccataatcccagctactctggaggctgaggcaggaaaatcacttgaacccgggaggctgaggttgcagtgtgtcaagatcacaccattgtactccagcctgggcaacaagag

SEQ ID NO: 795232 - DNA, 576 bp, Homo sapiens
agaatgcttgcatcgatttttacttccacaagtagtgcacagttactcatatttgctattattgaattttgattttttacaaattttgtgatattttactgcttttaaatttgcccatatctaactaccatgtgtatttacctttaattatttgcattaaagttttattttgagaaatggccattcatatcccttgtatgtgttcrttattttcctgaaattttttgttgtcttgcagtatttccttgcattttctatttattccttttatatgttgaaaatgcaaataaagcattttattacacattgcttatcatgtccagaatatactcctaaataacctgccatataaagaataagaaaatgtaacaaaatctcaagagaaaaaaaatcaacagaaattaaaccttgatattatacagaaaatggattatcagataaatattataaaatgaatattattataactatgatctgtgaaattaagataagcacatttggaatgaatagaaaaaaaggttttcaacaaataacatatattaaaagtgtaccatatggaaattatccaatggaaaa

SEQ ID NO: 795233 - DNA, 624 bp, Homo sapiens
acaaacatatggaaaacatgctcaacatcactaatgatcggggaaatgcaaatcaaaaccacaatgcgataccgtcttcctccaacaagaatggccataaacaaaaaaataaaaaaataacagatgttggccaggaggcaatgaaaagggaacacttctacactgctggtggggatgtaaactagtacaaccactatggaatacagggtggagattccttaaagaactaaaagtagaactaccatttgatctggcaatcccactactgggtatctactcagaggaaaagaagtcattatatgagaaaagatacttgcacatgcatgtttatagcagcacaattcaaaaatatgaaaccagcctaaatgccaatcaatcaatgagtgactaaagaaactatggtatatacataagacagaatactactcagccataraaaggaatgaattaatggcattcacagcaacctggatggaattgaaaaccattattctaagtgaagtaactcaggaatggaaaaccaaacatcgtatgttctcactcataagtgggagctaagctatgaggatgcaaaggtaaagaatgatacaatggatgttggtgactccaggggaaaggatgaga

SEQ ID NO: 795234 - DNA, 623 bp, Homo sapiens
tcattcacagcatggagaggggaagttgaagggttaggaaacgccagtcataaaaggatttcagaatttcagtccataaggaagtggttttgtgcattgtctgttcttgtgtgcaaggtgaagtctggagaacagaaacgtgcagtaacaagggctcctttgtccatatcacctctctagatatcaagtttcagacatgttgcattttaattgaaaggttgatataattttttgaaaaagaaaacttgtggtgtttgaagtgacaaagactgctgtgacaaaaaagcagggaaagggaatttttttwaaaaaagcaaacaacaacaacaaaaacccacaaaaaagcaaacagcaaacaaacaaaaaacaggggaagaagtcgaaacaccctgggttgtgactacttccaggaaggggctacaagaggcagttggaaattctatttgctttgcaactgtgagttttccagcctgctccctttctaaagtatattactctgcttttggttcatgaagttatccatttctgttttctggaacagctatgtattttctttatctatcatctatctatctatttaccatctatcttttctacctttcgctatcaagagcttgggtcaa

SEQ ID NO: 795235 - DNA, 623 bp, Homo sapiens
tcattcacagcatggagaggggaagttgaagggttaggaaacgccagtcataaaaggatttcagaatttcagtccataaggaagtggttttgtgcattgtctgttcttgtgtgcaaggtgaagtctggagaacagaaacgtgcagtaacaagggctcctttgtccatatcacctctctagatatcaagtttcagacatgttgcattttaattgaaaggttgatataattttttgaaaaagaaaacttgtggtgtttgaagtgacaaagactgctgtgacaaaaaagcagggaaagggaattttttttaaaaaagcaaacaacaacaacaaaaacccacaaaaaagcaaacagcaaacaaacaaaaaamaggggaagaagtcgaaacaccctgggttgtgactacttccaggaaggggctacaagaggcagttggaaattctatttgctttgcaactgtgagttttccagcctgctccctttctaaagtatattactctgcttttggttcatgaagttatccatttctgttttctggaacagctatgtattttctttatctatcatctatctatctatttaccatctatcttttctacctttcgctatcaagagcttgggtcaa

SEQ ID NO: 795236 - DNA, 588 bp, Homo sapiens
taatatattctgttgtcatcgcatacaaaataataacatatagagtatgaatcaataatttttcaaatacaaagctattacaattaggaatacaaagaaatcataattaggaatacttctacaatattaacacacaatagtggtaacacttgcaaaatgatggtggtggttttttktttttttttccccgacagagtcttgctcttgttgcccaggctggagtgcaatggcgtgattttggctcactgtaaactccacctcctgggttcaagcgattctcctgcctcagcctccctagtagctggtattacaggtgcctgccaccacacccagctaatttttgtatttttagtagagatgggggtttcaccatgttggccagcctggtcccgaactcctgaccttaggtgatccaccagcatcggcctcccaaagtgctgggattacaggtgtgagccactgcgtccagccagtggtgggtctcatatctcaatgtggacttttactaactcccgatgcctcattttcctcatcagttgaaaggaatgaatgaaagatttgtgtttttcatattaccaggtagatgat

SEQ ID NO: 795237 - DNA, 583 bp, Homo sapiens
ttccaggggaatccgggccattgcaaatcctttctctagtcacaagatgctgttgctgaacaggatctcaaaaatccaagaggcccacaggggcactgtaacttatcgctggtcacccagccagtgggtggtaaggtggaattcagaatcccagtcctcctgacttcttttccctatgccrtacaatctgagttctccaatatgtttgtttatttgtgttctgtctgcttctgctaaccagaaaaaaaaaaaaaattagccaaggaatgccaatacccattgtaacagatggaacctcccaggaggcggtttgcaaatggagacagcaaactggcgaccccaggaggtgattttttatgaacagcattagggatccagtggcactggtaaaaggaacaaaaagtatgcctcacaattgtaggcagcacttttatgctaatgtcccccccccaagtgttaaacgtttgctttcctttattagctaatatcacaagttactcaagagagaagaggggccagatgtttcattattattaattataaagatataagtaatgataataactgctgtctttggtgtcag

SEQ ID NO: 795238 - DNA, 613 bp, Homo sapiens
ggctttaatgggaatattttgaatgtttcaccattaaccaagatgttggctgtaggtgtctcttagatgtttaagttgagttagttcccatcttttcagagtttgataaatgttgtattatgaacttttgtattttgtattttattaggtaggctgttgttggctggttttcactcctttgtaaacgtccaaataaaatacagataactttttacatcaaagatttttctcttgtgtactcaatccttctaaataaacctttctcttcagacttattttatagaacagttctttcactaaactttcacaaatcgccaatacaaaatgtgtttactaaaagcagaaaggaaggtagaaaaatggctccagtctctgttctccattcatatcgcatctttccccatagtcacacaagtctacaccaacaaacgtgtacattaagagcatcgtttgtggctcgctttyacaaacacctggcgtgccatgcgccaggggtcctgctgaagtgactataaggtccaggcaggcaacacaggtgtggtcaggaccagagcctctgtggagtccgtgcgtctccaaactaggaacaggcgacttcgtattgaagcatggc

SEQ ID NO: 795239 - DNA, 568 bp, Homo sapiens
cgtgccatgcgccaggggtcctgctgaagtgactataaggtccaggcaggcaacacaggtgtggtcaggaccagagcctctgtggagtccgtgcgtctccaaactaggaacaggcgacttcgtattgaagcatggcatggagcacaatgagcactgtgcagtgggagctgcttcttggcttgccattggggtctgtcatccataagccagaaagcccccttgcagtcatcctacgcacatgtgccactatcttcytgctgtatgtctgtctggaaagatgcacagcttttacattatgcaggtggtggtctgctgatacgctacttccaggatatttctaccaccagaatgcttcactaaacattggtacgtggagtaagacagggtctcattccgtcatccaggctggagtgcagtggtgcaatcacagctcagcgcagcctgcgcctcctcagctcgggtgatcctccaacatcaggttgccaagtagctcagactgcaggcaggcaccaagagcccttggtaattcctcctggtttatttattcgttcatttatttatttattta

SEQ ID NO: 795240 - DNA, 568 bp, Homo sapiens
cgtgccatgcgccaggggtcctgctgaagtgactataaggtccaggcaggcaacacaggtgtggtcaggaccagagcctctgtggagtccgtgcgtctccaaactaggaacaggcgacttcgtattgaagcatggcatggagcacaatgagcactgtgcagtgggagctgcttcttggcttgccattggggtctgtcatccataagccagaaagcccccttgcagtcatcctacgcacatgtgccactatcttcctgctgtatrtctgtctggaaagatgcacagcttttacattatgcaggtggtggtctgctgatacgctacttccaggatatttctaccaccagaatgcttcactaaacattggtacgtggagtaagacagggtctcattccgtcatccaggctggagtgcagtggtgcaatcacagctcagcgcagcctgcgcctcctcagctcgggtgatcctccaacatcaggttgccaagtagctcagactgcaggcaggcaccaagagcccttggtaattcctcctggtttatttattcgttcatttatttatttattta

SEQ ID NO: 795241 - DNA, 570 bp, Homo sapiens
cgtgccatgcgccaggggtcctgctgaagtgactataaggtccaggcaggcaacacaggtgtggtcaggaccagagcctctgtggagtccgtgcgtctccaaactaggaacaggcgacttcgtattgaagcatggcatggagcacaatgagcactgtgcagtgggagctgcttcttggcttgccattggggtctgtcatccataagccagaaagcccccttgcagtcatcctacgcacatgtgccactatcttcytgctgtatgtctgtctggaaagatgcacagcttttacattatgcaggtggtggtctgctgatacgctacttccaggatatttctaccaccagaatgcttcactaaacattggtacgtggagtaagacagggtctcattccgtcatccaggctggagtgcagtggtgcaatcacagctcagcgcagcctgcgcctcctcagctcgggtgatcctccaacatcaggttgccaagtagctcagactgcaggcaggcaccaagagcccttggtaattcctcctggtttatttattcgttcatttatttatttatttatt

SEQ ID NO: 795242 - DNA, 570 bp, Homo sapiens
cgtgccatgcgccaggggtcctgctgaagtgactataaggtccaggcaggcaacacaggtgtggtcaggaccagagcctctgtggagtccgtgcgtctccaaactaggaacaggcgacttcgtattgaagcatggcatggagcacaatgagcactgtgcagtgggagctgcttcttggcttgccattggggtctgtcatccataagccagaaagcccccttgcagtcatcctacgcacatgtgccactatcttcctgctgtatrtctgtctggaaagatgcacagcttttacattatgcaggtggtggtctgctgatacgctacttccaggatatttctaccaccagaatgcttcactaaacattggtacgtggagtaagacagggtctcattccgtcatccaggctggagtgcagtggtgcaatcacagctcagcgcagcctgcgcctcctcagctcgggtgatcctccaacatcaggttgccaagtagctcagactgcaggcaggcaccaagagcccttggtaattcctcctggtttatttattcgttcatttatttatttatttatt

SEQ ID NO: 795243 - DNA, 545 bp, Homo sapiens
gagcctcacggccgctgcagcacttggtgtccttggtgtttggaaattttttttttttttcagctgctctcataggtggcctctcatggtgcttttaatttgcatttccctaatgttgctgaagaacatttcatgggctagttagtacacggtctttggtgaagctcccattaagtcttttatcctttttttttttttttttttttttttttgagatggagttttgctcttgtcgcccaggctggagtgcagtggtgcgatctcggctcactgtaacctcygcctcccaggttgaagcgattctcctgcctcagcctcctgagtagctgggattacaggcatgcaccaccaccctggctaattttttttttttttttttaaatagagacagggtttctccatgttgcccaggctggtctcgaactcctgacctcaggtgatccgcctgcctcggcctcccaaagtgctgggattataggcgtgaaccactgcacccatccttttatcctttttttaaaacagctttattgagatatcatttacat

SEQ ID NO: 795244 - DNA, 545 bp, Homo sapiens
gagcctcacggccgctgcagcacttggtgtccttggtgtttggaaattttttttttttttcagctgctctcataggtggcctctcatggtgcttttaatttgcatttccctaatgttgctgaagaacatttcatgggctagttagtacacggtctttggtgaagctcccattaagtcttttatcctttttttttttttttttttttttttttgagatggagttttgctcttgtcgcccaggctggagtgcagtggtgcgatctcggctcactgtaacctctgcctcccaggttgaagcgattctcctgcctcagcctcctgagtagctgggattacaggcrtgcaccaccaccctggctaattttttttttttttttttaaatagagacagggtttctccatgttgcccaggctggtctcgaactcctgacctcaggtgatccgcctgcctcggcctcccaaagtgctgggattataggcgtgaaccactgcacccatccttttatcctttttttaaaacagctttattgagatatcatttacat

SEQ ID NO: 795245 - DNA, 628 bp, Homo sapiens
accgtccccgtcaatctcatccctgccaatgatcacatcctagcagcaaccgggcctgaaccggcctgctatagcttgcgcacaatgcatcttccgtccgcttagcttttctgcccccatttcctacagccggggaggctcgggtgcagtgtctctcctcgctcctgcttcctgacccagagcccagacctgggacttcccaaaagcccccagacacaccaagggcaccgccgaacccctcagagccaagggagaggagagctagcgttccctgagctcaccttgcctggtggcacrggtcccctctgtctgcggccactgtcatgggagaagccaggctcagccactggcaagagcaggcagccagcaagaggtggatgtgggtccaagcccaggccacacggctcccagcaagagccatggccaggggccagtcggcagcccctctgcccggcaaggatgtgggccagcgtcgtctgcacttcagaggagacgagaaccaggaggcggcccccgagggcatcccgcgggtcctcacggaggctgcgttctcccaccttggccaggatgccccgggaacaccatgcagcgtctctgaggcttcctgtgcagaggggctcacagagcc

SEQ ID NO: 795246 - DNA, 372 bp, Homo sapiens
acatgctgtactctcatgagtggctccaggagcttcagcatgtcacgcttaccagagctgccagagcccagagctaacgcggccactcctgaccccccagagctaacgcagccgctcctgaccctccagcgctaacgcggcccgctcctgaccccccggagctaacgyggccgctcctgaccccccggagctaacgcggcccgctcctgaccctccagaccacagccacgtggccctgctctcatctctgaggccctccagggcgtctctctcgatgctgaatagacaggactggtcgggtgacccacgtttccccaactcttcacacctcctcacagcacagcgcttccatctggaggcctcctatctccg

SEQ ID NO: 795247 - DNA, 584 bp, Homo sapiens
aaaaggcacaagacagatatctatacacagcttgtcctcgtggtgactcagcaggcaataaaacctgtcactagagatggagccctccatacccagctaattgagtttccagggaatgaatgggcctcatcctcatttgcaggagctgcaagacccttctagggagcggatggctggagccagcatttaattaggcacaggcagcccgccctccatgccaccaacacccagagctccrcctggccctgctacaaccagtcagcagggccttggtgtcccccgcagcccagtcttcctcaatagccacagcctcactaaaaacaggcaggcggaagacaggaatgcatggagtggcaagacagaagcagctctcgcctctcgccctggcgatctgcttgtccctgtttgtccccagcaactggccattccttctccccacccacagccggaggacacttttaaaaattgtaaacctgaccacatcacttccggctgaaaacctcctacggctgcccactgctttttggataaactggcatctcctcgccagggctgccaagaccttgtttggcctgggtgtgctc

SEQ ID NO: 795248 - DNA, 581 bp, Homo sapiens
tcagccagctgacacttatggaaaatagaaagaacctatgttgaaatattgggggcgggttcctccaataagtcccatgagccacttttcaaatgctcaatatctatatgtggctggtgacaactctagttctatcagttttcaggaaatacaggggctaaaaaagcacattaataccaccaaaaraaagcaatcaacaatatccacaatgtggaaaactacagggaaagctacaaagtttcttcaacaaattgcaagaaaaaagaaaaaggagagaagctggtgtaggcaaagctagagggtgtggtggcctctcattctgtggccaagaaccccttgacactcattgaggggttattcctgcagagtcagggggctgccaccaagatgtgaggagagaaaaaagggaggtacaggccaaaaggcaggagggtgagggagaatggggagtaaaggggatgggatcatgtccaatcatgtgtatttgtacaatagcattctacacagaatgaaaaaaggggtggaccaacatgcatgaatcccaagcacattgtgttgagcaaaagaagccagatactgca

SEQ ID NO: 795249 - DNA, 581 bp, Homo sapiens
tcagccagctgacacttatggaaaatagaaagaacctatgttgaaatattgggggcgggttcctccaataagtcccatgagccacttttcaaatgctcaatatctatatgtggctggtgacaactctagttctatcagttttcaggaaatacaggggctaaaaaagcacattaataccaccaaaagaaagcaatcaacaatatccacaatgtggaaaactacagggaaagctacaaagtttcttcaacaaattgcaagaaaaaaraaaaaggagagaagctggtgtaggcaaagctagagggtgtggtggcctctcattctgtggccaagaaccccttgacactcattgaggggttattcctgcagagtcagggggctgccaccaagatgtgaggagagaaaaaagggaggtacaggccaaaaggcaggagggtgagggagaatggggagtaaaggggatgggatcatgtccaatcatgtgtatttgtacaatagcattctacacagaatgaaaaaaggggtggaccaacatgcatgaatcccaagcacattgtgttgagcaaaagaagccagatactgca

SEQ ID NO: 795250 - DNA, 581 bp, Homo sapiens
tcagccagctgacacttatggaaaatagaaagaacctatgttgaaatattgggggcgggttcctccaataagtcccatgagccacttttcaaatgctcaatatctatatgtggctggtgacaactctagttctatcagttttcaggaaatacaggggctaaaaaagcacattaataccaccaaaagaaagcaatcaacaatatccacaatgtggaaaactacagggaaagctacaaagtttcttcaacaaattgcaagaaaaaagaaaaaggagagaagctggtgtaggcaaagctagagggtgtggtggcctctcattctgtggccaaraaccccttgacactcattgaggggttattcctgcagagtcagggggctgccaccaagatgtgaggagagaaaaaagggaggtacaggccaaaaggcaggagggtgagggagaatggggagtaaaggggatgggatcatgtccaatcatgtgtatttgtacaatagcattctacacagaatgaaaaaaggggtggaccaacatgcatgaatcccaagcacattgtgttgagcaaaagaagccagatactgca

SEQ ID NO: 795251 - DNA, 581 bp, Homo sapiens
tcagccagctgacacttatggaaaatagaaagaacctatgttgaaatattgggggcgggttcctccaataagtcccatgagccacttttcaaatgctcaatatctatatgtggctggtgacaactctagttctatcagttttcaggaaatacaggggctaaaaaagcacattaataccaccaaaagaaagcaatcaacaatatccacaatgtggaaaactacagggaaagctacaaagtttcttcaacaaattgcaagaaaaaagaaaaaggagagaagctggtgtaggcaaagctagagggtgtggtggcctctcattctgtggccaagaaccccttgacactcattgaggggttattcctgcaragtcagggggctgccaccaagatgtgaggagagaaaaaagggaggtacaggccaaaaggcaggagggtgagggagaatggggagtaaaggggatgggatcatgtccaatcatgtgtatttgtacaatagcattctacacagaatgaaaaaaggggtggaccaacatgcatgaatcccaagcacattgtgttgagcaaaagaagccagatactgca

SEQ ID NO: 795252 - DNA, 621 bp, Homo sapiens
cctagaacaaaatgggcttaacggatatttacagaacattctacccaacaactgcataatatacattctattcatcagcacataaaacattttccaagatagactatatgatagaccacaaagcaactttcaacaaatttaagaaaattgaaattatatcaagtactgtctcagaccacagtggaataatattggaaatcaactccaaaaggaaccttcaaaaccatgcaaatacatggaaattaaataacctgcttctgaatgatcattgggtcaacaaggaaatcaaaatggaaatttaaaaattctttgaactgaatgataatagtgacacaacmtattaaaacctctgggatatagcaaaggcggtggtaagaggaaacttcacagccttaaatgcctacatcaaagagtctgaaggagcacaaatagacaatttaatcacacctcaaggaactagagaaacaagaacaaaccaaacccaaacccagcagaagaaaagaaataaccaagatcagagcagaactgaatgaaatggaaacaaacaaaaatacaaaagataaatgaaacaaaaagctgattctttgaaaagataaataaaattgatagaccattagcaag

SEQ ID NO: 795253 - DNA, 621 bp, Homo sapiens
cctagaacaaaatgggcttaacggatatttacagaacattctacccaacaactgcataatatacattctattcatcagcacataaaacattttccaagatagactatatgatagaccacaaagcaactttcaacaaatttaagaaaattgaaattatatcaagtactgtctcagaccacagtggaataatattggaaatcaactccaaaaggaaccttcaaaaccatgcaaatacatggaaattaaataacctgcttctgaatgatcattgggtcaacaaggaaatcaaaatggaaatttaaaaattctttgaactgaatgataatagtgacacaacctattaaaacctctgggatayagcaaaggcggtggtaagaggaaacttcacagccttaaatgcctacatcaaagagtctgaaggagcacaaatagacaatttaatcacacctcaaggaactagagaaacaagaacaaaccaaacccaaacccagcagaagaaaagaaataaccaagatcagagcagaactgaatgaaatggaaacaaacaaaaatacaaaagataaatgaaacaaaaagctgattctttgaaaagataaataaaattgatagaccattagcaag

SEQ ID NO: 795254 - DNA, 616 bp, Homo sapiens
ggatggcagggcctgcagaagagcagagacagctggttaaggcaccttcctctctacctttgggctgggaacagccccagttggcttcccccggggagccaggactggagcagagtagggcagaggtttagaattctatgagggtttcttgctggttcctgacctgttgggtgtctgagctctctccacaacgtcagggactgtgcctgccttatgtgccatccctgggccaggctgaatgtgtaatccatgcttattggatgaatcaatgagctgatcaccrctttttacatcccagggctgtctctgtagggtagaggtaataatgtggctgtagtgcctgactggagaccctggtcattgggcctcctgtgacatctgaaaaagagaatgaggcctaaaagcatccagctctgggctgggcacctgcatgccctggtctgaattcattcagtcattcaggctatacctacagagaccctgacatatagctggggtccagccctctagaggccttcaacccagggtgagacaagatcttctctgtgcgatgtcacatcacagcaaaggacaatgaaaccttgtcaggccatgtcagattagaagtatgagaaaa

SEQ ID NO: 795255 - DNA, 590 bp, Homo sapiens
aaatatagagtcagtatataaaaatcaattacatttctctataccagcagagttttaaaaaatgatttttttaaagtatcatttatgaaatcatcaaaagtacctagaaataagtacatagaaataggtctatgaaactatctgaagtcctccatgtagaaaactatgaaacattattgagagaaattaaagcagacctaaataaatggagaaatatatcatgttcatgtattggaatattcactatttgacatgattaggctttctgtccccacctaaatctcatctttaattgtaatcctcattatccccatcatccccacttgtcagaccaggtggaggtaactgaatcatggggggtggttttccccatgctgttctcgtgatagtragtgagttctctcaagatctgatggttttataaggggctcttccccactttgctcagcacttctccgtcctgctgccttgtgaagaaggtgccttgcttctccttcaccttctgccctgactgtaagtttcctgaggcttcccaagccgtgctgaactgtgagtcaattaaacctctttcctttataaattacccagtc

SEQ ID NO: 795256 - DNA, 631 bp, Homo sapiens
gctgcttccagggaatgagacaccttctatatcacctgcacagagtcacctttgtgctgtctgtgcagcctcctttctcacagagacctgcccatgaggtgctgagtgaaatggggacacccaggagcacctgcagggaaggyttcttggctctaagccatcttcaaatgctcccatagggttcaggttataaagatcattgacagcacaagcagtgggaatccccgtcctgcgatcatcccatcttgcctggctggccagaactctgggtgtcttatttatggactcatggaggcagggagccctggtacctcactatgtgctctcctccccccgtttcatccaagtgacatctgggcatccaggaaagccctgcaggagattacaggtgcccagaggaccaactgccatggggaggaggcttggaaggaaggaggagtggcccccacctatactgtggtggctgagatcttgacttctatggaaggtgatgcctctttccttagcagcttccccaaagtcagagccctccccagggtcagaagcttacccaggcaggggcagggagcagtcctgaccctctacgctctggagggccccacagaagggcccagcagatgcagtggtcaca

SEQ ID NO: 795257 - DNA, 631 bp, Homo sapiens
gctgcttccagggaatgagacaccttctatatcacctgcacagagtcacctttgtgctgtctgtgcagcctcctttctcacagagacctgcccatgaggtgctgagtgaaatggggacacccaggagcacctgcagggaaggtttcttggctctaagccatcttcaaatgctcccatagggttcaggttataaagatcattgacagcacaagcagtgggaatccccgtcctgcgatcatcccatcttgcctggctggccagaactctgggtgtcttatttatggactcatggaggcagggagccctggtacctcactatgtgctctcctccccccgtttcatccaagtgacatctgggcatccaggaaagccctgcaggagatyacaggtgcccagaggaccaactgccatggggaggaggcttggaaggaaggaggagtggcccccacctatactgtggtggctgagatcttgacttctatggaaggtgatgcctctttccttagcagcttccccaaagtcagagccctccccagggtcagaagcttacccaggcaggggcagggagcagtcctgaccctctacgctctggagggccccacagaagggcccagcagatgcagtggtcaca

SEQ ID NO: 795258 - DNA, 569 bp, Homo sapiens
tgaaaagtcaatagaattatcatttgattggctgcataataatgcaaatatgtaaattaatgcacagtgtgccaccatttaagtgttttcctctatttacagacatttggttgcttcctctttgttattacaaatmttctgtatttacatctttgtatataagaagagttgttcacatacataattaatcaggttagactcctggaagtgttctggatcaaatggcacaagaacattgaaagctccagatatatgcgggcaaatttctttccagaatgttacgtcaacccaacttataccccaccagccaggttaaacttcatttttatgtagcctaaacttttaaagggcttacttaatttcatccagactccaaatccataagctgctggtaatttgtatccaggcttctttacatggtcatgctaataaaatagcttaggtaaacatgggcacaccagggggtgaatctagtgaggtgcctagggtgcaaaactgaaggaggtgcttacatgccccagagagtgactggctctttacattttactccctatgcaccttacctgcct

SEQ ID NO: 795259 - DNA, 617 bp, Homo sapiens
aactcatgatgatcgaataaaaggacaattcgaagagatgtgggcagagttcagtgatccagtcaggcacgttgatgcccccaaggactaggaataggaggaagccaggactacccctcgactagaaggggaaatattaactattattggagcttattgaagatactgtgattatcagcaatcacagagtaacacaggcattgctagtcctggcatcaaagccgggagagaatgaggagtaaataccctgacctctttcttcctcctcctcctctctcatctcctgtcggtgcccatttggctgaaatcatgagccaaagaacgaggatgctcaagtgatgcagttcacctggcagtgtgttactctccgtaatgagggttttatggtggatcaaagttaaartgtacacatccttaagagccttctaaaagaatggcgtccatttcacgcccgggtagaccagtgggggagatattttagctcagacctcttcaaattaggccttcttagtaatgaaccctccagtttctactgtaggtacttggaaaatgctcaacaagaggctaaatgaatgcattgaatcttcgtagttttttcttcttcttttacattttat

SEQ ID NO: 795260 - DNA, 430 bp, Homo sapiens
tccaggtggcaccttaaacccaggttcgcctcgctccagtaaccagtctgtctctgcaccgccagtcccgaatgggggaggtcctgaagggattatcccggcagtgtgggaaggctggctaggggttcgtgcccargggacctacagaatattcttcctacagtgctactgaacagccactctgatttggcatctcctttggtcaaattacagagcatagtttccaggatggggatggttgtcctgcctcccctttgtctcagcctgttctcagggctatttctcccttcaggcaatcatgatgcttcctgttggttaaggtaaggacaaatctcctgacagggaacctaagaaggtagggaatctgattgatcacctcaatttcactttttccagtgtagaagtcatgagttggggggagattttccat

SEQ ID NO: 795261 - DNA, 430 bp, Homo sapiens
tccaggtggcaccttaaacccaggttcgcctcgctccagtaaccagtctgtctctgcaccgccagtcccgaatgggggaggtcctgaagggattatcccggcagtgtgggaaggctggctaggggttcgtgcccaagggacctacagaatattcttcctacagtgctactgaacagccactctgatttggcatctcctttggtcaarttacagagcatagtttccaggatggggatggttgtcctgcctcccctttgtctcagcctgttctcagggctatttctcccttcaggcaatcatgatgcttcctgttggttaaggtaaggacaaatctcctgacagggaacctaagaaggtagggaatctgattgatcacctcaatttcactttttccagtgtagaagtcatgagttggggggagattttccat

SEQ ID NO: 795262 - DNA, 489 bp, Homo sapiens
gtttaacaactggctcacaagcttcctgaaaacctagcaatcagctcccaaaagcctgtagaagtccagtccagtgcaccactggatgtgagtgcaggaagggagtagaaaatcttttgtatgttcagaataaaaatcctcagtragcctcaaccaccaggaaaacaccccctttccctccctgtgcctaaaagcagatgagttgatttctcattgcaaataaagtgatgagtttgtttgatttaaatgaaaaaaaaaagagagatctaagtttctgaagaccaccgctttgaatttattttaaggaaaacatgtcaactctgtcagccactggccagctcctaaaatacatccaatttaccatctcctcacttcattcattcattgattacttcaacagattcttattaacagcatcctgggtgccacggtggcctgtggagttgtacgaatgaaagccatgccagattctagatcaagctctgggga

SEQ ID NO: 795263 - DNA, 487 bp, Homo sapiens
agaatgcaaccattccaccctcaaagcagtgggaaaaaatgaggcaaatatttgaaaaattccatttcaagaatgttcttttccttgaaatttccatttaaattaaaagtgatttttctttttttaccatgaattattcatataatttccacaacttttgcgtagcaaatattgcatggttgaaggaaaaggagtccattcagcacgagcgaacaaatgttaatcgtgtcctgctgtgaaattccccactggataggaggcttttcactatgaagaatgatctgtatgtgtttggcttttgatgcggaagcctctttcccagtrtaaattctgaaataaaatcactcaatgccagcaagtgcttgcctattaacacagtaagacctttcagtgtttttccattactttgatctccaaggaattatccactaacaacacatatgcccactagtagatactattatcaatataaaaatatcaacatcgt

SEQ ID NO: 795264 - DNA, 592 bp, Homo sapiens
ctgcactccagcctgggagagcaagaacctgcccattaaaaaaccaaacaaaaatgggcaggtgtggtgtctcatacctgaaatcccaacactttgggaggccaagacaggaggattgcttgagcccaggagtttgaggccagcctggaagctacagcgagcccctgtctctattatgtaaaaaaataaaaatttttttaaaaaagaggttttcttatgtgtacctgaagcaaagtagtaagtatatcttttcttctccacgttgtacaagagatgactrtaaacacaaaattaaaactcatcttaggatcatggtccatccacgaagctactttaaactctgatgattccaagcaaggaagcaatatttgcttattcaaaaagtactgaatattcagagtaagcaatatgctagatactgtaacaatttaaaaataccaacacacatgtgtattaaaaagacactggcaggccgggtgcggtggctcatgcctgtaatcccagcactttaggaggccgaggcaggtgcatcacttgaggtcaggagttcgagaccagcctggccaacatggtgaaatgccgtctctactaa

SEQ ID NO: 795265 - DNA, 549 bp, Homo sapiens
aaagaacaatggtaccatttttcagctttgaagaactttttcatgcccacttcaagcacttcttacacttctggccctctctgctcagataccaacctcactggagggactggctttaagcttcatggagggccccacccttcctgttcactcagtgggaccattcatgaraggaaataatgacattacattatgcaatcttccctatatgtaacctctcctaatagagcctttttgatggaatttttaggatccacggccaccaggattaagctacatactctaagctaaggaccacactggactggagcaaatataacagatctcagcacggattgccttggtaccagagtccctaacaagcccacatgctgccagtcacactgtccacacagaatcttgggggatctggaacactccatcctggctttaagttaccaccactaccaaactattgcccttttctattaaggcttaaattgccaatatagcaatacagaagaacctatactcacaagcattcacttctgtttaaagggatgtttacaa

SEQ ID NO: 795266 - DNA, 575 bp, Homo sapiens
attctggaagaaataaaaacattttccctatgaagaaagagttgttagcattgtattcctataaaaaggagagcatagtattatttactataatttattaattatatttattattaataaatatattagcaaacaaaaaggggtgttctagagcattactttacagccctttaaaatactgaattataggggcgttgattcctatttctgtatcataagcctctcgtgttttacttgtaatttctttataggaaaagtcactattttgccagtctttaaattctagtaattcagttcacttagattgaacaaacttttgatgagcatctctgtgacaggacctttgccaaggacckgagggatgcaaaggtgagtaagacagcaaaatgacccccaggaaattcacaggagagtctgcatccatatcagaatctttcacaattggcctgtggggctttagcatcttctcatttctacatgaagttattaggctgtgtttcaaggtagccaggagtcatttggctcctttttattttccttttttcctttgtcgcccaggctggagtgcagtggag

SEQ ID NO: 795267 - DNA, 647 bp, Homo sapiens
cctatttatgaggaaacatcagataaccccaaactgagggcttgtataccttgaatgtcgaggtcatgaaagacaaagaaagattgaggaattataaggtgataaagagacatgacgactaaatgcaatatataattctggatcagaaaaaaaagacattttcttccttttgctatcaaggacattagtggaataattagtgamatttgactaaattccgtagattagataatagtcacataaatagtaagttcttgattttgataattaaactgtgcttgtaaaagaatgcgcttgcccttgttttctaattaataaacttttagttttagtttcacagtgcaattgagcagataggacacatacccctgtcctcacatatgtacagcctcccccactattgacatcttgcaccacagtggtacatttcttacaaacaatgaacctgcattgacatatcattgtcacccaaagctcatagtttacattagggttcactctcggtgttgtacattctatgagttttgacaaatgtgtaatgacatgtattcaccatcataggccctaaaaatcctgtatactctgcctatttttgccttcttcctcccaacccctggtaaccactcatctttttactgtctctatag

SEQ ID NO: 795268 - DNA, 635 bp, Homo sapiens
agatgtaatcacttctcttgtataaatacctaggattgaaattacttggtcatatatttttaaccttttaatatacagccatcatttttccaaatgctgaacttttscctcacatcctgtaccattttgccttcccatcagcagtgtatgacattttcagatgccctatatcatcactaaaaaatgatattcataggcctcttaactttcatctagtgagtgtctaatgctatctcattttgattttaatttgtatttgtttgatgtctagtcatctttttatgtgcttattgcctattcttatgtattattccttttgtaaagtgctcaaatctttcatccactttttaggtatattttctacttattatcgagttgtaagagttctttttataaaaaggatacaaactctttgtacatagagttttgaatccgtaatgaagttaatttgggcattgttttatattttgtgcttttagggttctgtctaacaaaacctttgcataacctaaagaaacaaatgtttttacctattttttctataagattattttaaaattattgccaatatatacaactaagtttgtattgaccttatatcctgatttcttgcaaaatctcttattagttttagt

SEQ ID NO: 795269 - DNA, 635 bp, Homo sapiens
agatgtaatcacttctcttgtataaatacctaggattgaaattacttggtcatatatttttaaccttttaatatacagccatcatttttccaaatgctgaacttttccctcacatcctgtaccattttgccttcccatcagcagtgtatgacattttmagatgccctatatcatcactaaaaaatgatattcataggcctcttaactttcatctagtgagtgtctaatgctatctcattttgattttaatttgtatttgtttgatgtctagtcatctttttatgtgcttattgcctattcttatgtattattccttttgtaaagtgctcaaatctttcatccactttttaggtatattttctacttattatcgagttgtaagagttctttttataaaaaggatacaaactctttgtacatagagttttgaatccgtaatgaagttaatttgggcattgttttatattttgtgcttttagggttctgtctaacaaaacctttgcataacctaaagaaacaaatgtttttacctattttttctataagattattttaaaattattgccaatatatacaactaagtttgtattgaccttatatcctgatttcttgcaaaatctcttattagttttagt

SEQ ID NO: 795270 - DNA, 535 bp, Homo sapiens
ccatccatattcccgcaaaggatgtgatctcattattttttatgtctgcatagtattccatggtatatatgtactatattttctttatctagtctaccattgatggacatttatattgattccatgtctttgctattgtgaatagtgctgtgataaacgtgcaagtgtcttcttggttgaatactgtattttcctttgggtatacagccagtaatgcaatttctggttgaatggtatttctggtttcaggtctttgaggaatcaccacactgtcttccacaatggttgaactaatttacactcccaccatcagtattcctttttctctgyaacctcaccatcatctgttattttttgactttttaatagtggccattctgactggtgtgagatgatatctcattgcggttttgatttgcatttctctaatgatcagtgatgttatgctttttttttccatatgatttttggctgcgtggtatgtcttttttgaaaaatgacttcatgttctttgtccactttttaatggtttttt

SEQ ID NO: 795271 - DNA, 535 bp, Homo sapiens
ccatccatattcccgcaaaggatgtgatctcattattttttatgtctgcatagtattccatggtatatatgtactatattttctttatctagtctaccattgatggacatttatattgattccatgtctttgctattgtgaatagtgctgtgataaacgtgcaagtgtcttcttggttgaatactgtattttcctttgggtatacagccagtaatgcaatttctggttgaatggtatttctggtttcaggtctttgaggaatcaccacactgtcttccacaatggttgaactaatttacactcccaccatcagtattcctttttctctgtaacctcaccatcatctgttattttttgactttttaatagtggccattctgactggtgtgagatgatatctcattgcggttttgatttgcatttctctaatgatcagtgatgttatgctttttttttccatatgatttttggctgcrtggtatgtcttttttgaaaaatgacttcatgttctttgtccactttttaatggtttttt

SEQ ID NO: 795272 - DNA, 555 bp, Homo sapiens
tatgttcaaatgaaaaatttgtaaaaaagaattacctagctctattagtcataaaatcaacatagaccaatgaacctcaggtactaaccctcacttatctgattcactgggacaccaaaaaggtccttttccagaaggacaatattgtaagtgtgagcatgttgaaactctgtattacaataaatctttaaatgcaaacgttttctacctgaaagaaggcctgtgtttgccttcccttcatctcaaatttaattgtatgccaagagcattytgttccattgagttaaccttgtacaagagaataatatttcagcatttttatccatgtattttcttttactactataaaattttcctctttgccttgcagctctttcattagaaacaaacaggttaaaatgttttgctccagtggaaataatacagaaaataatcttagtgtttgtttcaaattattggctctgagttccaaaatatgccttcaatgtttacaacacaaacaatagccctgaaaaaaaaattaagagtgataagaatttatgtaactaaagatcc

SEQ ID NO: 795273 - DNA, 555 bp, Homo sapiens
tatgttcaaatgaaaaatttgtaaaaaagaattacctagctctattagtcataaaatcaacatagaccaatgaacctcaggtactaaccctcacttatctgattcactgggacaccaaaaaggtccttttccagaaggacaatattgtaagtgtgagcatgttgaaactctgtattacaataaatctttaaatgcaaacgttttctacctgaaagaaggcctgtgtttgccttcccttcatctcaaatttaattgtatgccaagagcattctgttccattgagttaaccttgtacaagagaataatatttcagcatttttatccatgtattttcttttactactataaaattttcctctttgccttgcagctctttcattaraaacaaacaggttaaaatgttttgctccagtggaaataatacagaaaataatcttagtgtttgtttcaaattattggctctgagttccaaaatatgccttcaatgtttacaacacaaacaatagccctgaaaaaaaaattaagagtgataagaatttatgtaactaaagatcc

SEQ ID NO: 795274 - DNA, 650 bp, Homo sapiens
tgaggaagacagatctaaatgtccttgggaaaaagcctttctaaaaagcaaccaaagactctatactgacaatacacatttccaaggcgatcctaagaaatccatttgtgtaatcagctgataatttctttctttctccaaagtggctctgagctcaattcagactgaaaaactcaatagagagtcctagagcctgtaatcaatgytttttgctgggggaccctgggcactctttctgtcattcagaagcattcatttaaccttgatatcatgggaggtggggtgacaggaagggcttctctctactttctccctgcttggtagcaaatctgtgtgaagacacatttcatttcatatcagctggcctgtcctaacaggccccgcataggcagggacggaagtgtcacagcttggcagcccttctcagagcgtggactcgcctctaatcaagctctccattgcatttaaaagaatgagaagctcatccttcctgtcaataatgtgtggctgtggtctggaatcttactggccttaggtcttcgtgggcattctgatctgtgtctgagagttgccctggagtgccaccgaatgagattgtcagctggtttgggcactggggtgtggaatgatgtatatagtgacatcttgta

SEQ ID NO: 795275 - DNA, 580 bp, Homo sapiens
acatatttcgtgaatattgtgattttttaaagagctctgttgtgttttattgtatagatgttttgtaatttattgaatccatgtcttattaatggatgtttgggttatttttagtttttcgttattaaaaataaggctgcaatatatatcctttaactgcatccttacagacttccttaggacaaattcttaagagagtaatttctgagaaataaataaatagtctttaaaacttctaaagcatattgctaatctgccctctacttaatcttttaaatcattgccgagggaagtgggaactcattgtttttttaattcgtattttcttgactaagttttttttttttatttctaccccctagttgttttaatactgtatttactgaaaagccaattccatgcaggctgagattttcatctgttttgtttcttctctrtctcctattccaagaagagtggttttgacatatagaaggagctcaaatgtttattgaatgttgaatgaattacctttcctgtcttttgctcattttttccataaagagtgcctgctttttaatcactgattttaaaaaacttt

SEQ ID NO: 795276 - DNA, 575 bp, Homo sapiens
tatttgctctggatctcttctccacctgaagatttctatgtgccatttcttgcaagtttccttccttttggcctggtgcaaactcaagggccaaaactgcctggctttgtattccagctgtaccttttactaggaaacctcaggaaagtcagatttatctgttcctcagatgtctcatctataaaacggagatgctaacactagtacaggcatgcctcattttgttgtgcttcactttattatacttcasagatgttacatttttttttacaaattgaagatttgaggctaccctgtaccaagcaattctatcagtgccatttttttcaaacagcatgtgttcacttcatgtctctgtgccacattttggtgcttctcacaatatttcaaactttattattatgtctgctagtgtgatcagcggtctttgatgttactattgtaattgtttgggagtaccacaaaccacaaccatagcaagatagtgcataaaggtcaactctgtgagctttaattcaagaaggaaaatgggaatccaccagaaccgtgaaggacaccccaaatcccagggagga

SEQ ID NO: 795277 - DNA, 575 bp, Homo sapiens
tatttgctctggatctcttctccacctgaagatttctatgtgccatttcttgcaagtttccttccttttggcctggtgcaaactcaagggccaaaactgcctggctttgtattccagctgtaccttttactaggaaacctcaggaaagtcagatttatctgttcctcagatgtctcatctataaaacggagatgctaacactagtacaggcatgcctcattttgttgtgcttcactttattatacttcacagatgttacattttttttyacaaattgaagatttgaggctaccctgtaccaagcaattctatcagtgccatttttttcaaacagcatgtgttcacttcatgtctctgtgccacattttggtgcttctcacaatatttcaaactttattattatgtctgctagtgtgatcagcggtctttgatgttactattgtaattgtttgggagtaccacaaaccacaaccatagcaagatagtgcataaaggtcaactctgtgagctttaattcaagaaggaaaatgggaatccaccagaaccgtgaaggacaccccaaatcccagggagga

SEQ ID NO: 795278 - DNA, 600 bp, Homo sapiens
gatctcaaactcctgacctcaggtgattcgcccacctcggcctcccaaagtgctgggattacaggcgtgagccactgtgataggccgctaagtacatttctatcatatgtatttgtataattgaccgtgacattttgtggatttgtttgaatttttccaactttttattaaggaaaatctgatatgtaaagagaagttaatatatataatataatrgtaataataaactgtatatgccttctacctacattcaaaatcattaacattttgccatatttgctttatagatatatgtatatatgaatatctatataagtttacacatttatttacttgcagaactatttgaaaataagttttagataagacctttcactcctaagtgaaggcattcctaaagaataaaggcattttctttcataaccatgatacccttattatatgcaagcaaattaacaaaaattctataataattcaaatttctgccattgtcacaaaactatttgtagtaagcagaataatgcttcccctgtacccaaaggtagccatgtcttaatcctctgaacctctgactatcttatcttacatggcaaaggggaa

SEQ ID NO: 795279 - DNA, 534 bp, Homo sapiens
taccattcagtcctgtttgccttttctctattttatctccattctaaagaatttttctgagcctagggaatataatctaatgtattcattcattttcaaatattagaatatgaatatattaatatttaaaggcaatgtttctcaaagagtggatcatgaactacccagactcactgactcaggtgattttgacacccagttctattggagaagcactgctttaagaatatattttattaaacagaaatgcaagaataattttctattatctattattataaaaaatgaatgaaacattactrtagtgtaataaaaatagtgcttggaataaaaaaaatcccattttttttcctcactgactaaatgtgtgatattctcaggttagtctcttaatctcttaaaaatctccatttgcccatcttaaaatggataaataataataatgaaacctgctcaagctcacagagtggttttgagcatcaagagagacagattgttggtgaaagtagctacaactgtgaaataagatacctc

SEQ ID NO: 795280 - DNA, 453 bp, Homo sapiens
ggtaatttgttaaggcagtaaaatgaatattctccatcttccttcctaccactgaagccttagtggaaataaattgaagttgaaataaaagcattttaagtctgagtaaaatgttttatgtacttgacacatttttcttcctttagttgcttsagtttgattgaagaaagttttggaactaacatatgcaaactgtgagagtctatcctgttgttaatgaatgtccatcattgttttagcaaacattcaaaggcaaattcaataactgttaagagagattaatagaagcttttatatgcttagtaaaaatggaaccctagtctcataaacacaatgtacttctctgtgtatctaataggaattggcagaaatgagagagaattaggcttactgacagccttagtgagactgaagtattaaaaagaaaacatcacagccatttacttatcaaca

SEQ ID NO: 795281 - DNA, 627 bp, Homo sapiens
ctatacaaaccttaacaaatttaaaagaatggatactatacaaagcatgttatcagaccacaatggaattaaactagaggtcaataaaaattatcaggaaaattcaaaaatatttggctgttatacaacatacttctccataacataggtattgaagaggaaatcttaagagaatttttgacagattttgaactaaataaaaatgaaaatacaacttatcaaaatttgtgggatgcagcaaaagcagtgattagrgggaaatttatagtattcattgcatatattaaaaaagaagaaagatctaaaatcaataaactcccacattagaaaatgagacaaaaagaacaatctaaacctaaaacaagcaataataagaattatagcagtagccaataaaatttaaaatgtgaaatcactagaaaatacatcaatgaaaccaaatttggtgggtttttatttgttttgttcttctttttaaatcaatcaaatagacaaaattccagctaggctatccagtaaaaacttggagaagaaataaataaattattaataccagaaatgaaagaatggttatcactactggtcatatgaacagtaaaaagattataaaggaatattatggaaaac

SEQ ID NO: 795282 - DNA, 605 bp, Homo sapiens
tttaaaaatagcatcccattattgtttcattgatgtaaaatgttatattattctccaagaacagtaatcacattttttgaaattttcttataggccctttctttcttccaagtaccttttgccttttttttgtttgtttagtttggggtctctcattttagaaaagttttccttaactattagccatccctggctatctctttttggctaagaatctgtcackacgaagctgaatggatgatctatgtacattggacagggatggtttgattagttagaaaccaataattttcttggcgaattgcttgcaaatatccgtgggttttctgttaagtcaggatgtcagccatctgaaaacccagcggcataggaacagaagtggggatctcaccgtttacaaggtaggcttttatttaattactgtgttttttagcacagcattccactatctcctttgcctcatgtgcttaactctgggagctctcaggttcatattcccagtaaacctctcacctcctctaagcatgatgtagggaaggcatcaggcaccaccctcttcttatatagattttcgactaatcattccccacctcaatgtcttctaa

SEQ ID NO: 795283 - DNA, 605 bp, Homo sapiens
tttaaaaatagcatcccattattgtttcattgatgtaaaatgttatattattctccaagaacagtaatcacattttttgaaattttcttataggccctttctttcttccaagtaccttttgccttttttttgtttgtttagtttggggtctctcattttagaaaagttttccttaactattagccatccctggctatctctttttggctaagaatctgtcactacgaagctgaatggatgatctatgtacattggacagggatggtttgattagttagaaaccaataattttcttggcgaattgcttgcaaatatccgtgggttttctgttaagtcaggatgtcagcmatctgaaaacccagcggcataggaacagaagtggggatctcaccgtttacaaggtaggcttttatttaattactgtgttttttagcacagcattccactatctcctttgcctcatgtgcttaactctgggagctctcaggttcatattcccagtaaacctctcacctcctctaagcatgatgtagggaaggcatcaggcaccaccctcttcttatatagattttcgactaatcattccccacctcaatgtcttctaa

SEQ ID NO: 795284 - DNA, 653 bp, Homo sapiens
ctgctcccttcaaagtgtctgtggatcctctcggctttcctggtacgttcctgcagcagttcttggagcaaaagttcatgatgtgattctccacatagtgctctgtctctccaagtggaagctgcaatttggtcctgcctcctattcaccattatcctaacctctctgatatgaagcttatttttgctggatacagaattcttagctgacagctattttgtttcaggaggctaaagatggaatccctatcccttctggcttgcrgggtttctgctgagaaatctgctgttaatcttataggttttcctttgtaggtaatctgatgcttttgtttcacagctcttaagattctttcccttgtcttgactttaaataacctgatgactatgtgcctaggtgatgatctttttgtgatggatttcccaggtgttctttgagcttcttgtatgtggatgtctagatctctaataaggtcagggaaattttcctcaattattctttcaaataagttttccaaacatttagatttctattcttcctcagaaacaacaattattcttaggtttggccacttaacataatcccatttttttggaggctttgctcattttttaaaaaattcctatttctttgtctttgtctaattgggttaa

SEQ ID NO: 795285 - DNA, 569 bp, Homo sapiens
atctttttgtgatggatttcccaggtgttctttgagcttcttgtatgtggatgtctagatctctaataaggtcagggaaattttcctcaattattctttcaaataagttttccaaacatttagatttctattcttcctcagaaacaacaattattcttaggtttggccacttaacataatcccatttttttggaggctttgctcattttttaaaaaattcctayttctttgtctttgtctaattgggttaatgtgaaagccttgtttttgagcggtgaagttctttcttctacttggtctagtctttgttgaaacctttgagtgcattttgtatttctctaagtgtgatttttatttccagaagttgtgattgtattttctttatgatatctatttctctggagaattttccatccatatcctgtattttttaaaagtttctttacattgtttttcacctttctctggtgcctccttgagtagcttaataatcaatcttctgcattctttatctggcaattcagagatttcttcttggtttggatccatggctggggagctagtgtgat

SEQ ID NO: 795286 - DNA, 443 bp, Homo sapiens
gctctgaaattaaatgaataaaaaaggattctgccaaataatcattaaaaagatgaaagagaaggcatgcaggttgcccgcataaggataacacttaagtgaggcctgaatttgtctgagctgcacatgatgtttcaaagccatggcaagctgtgaacagcctgagggttgtgaacrtccgggtgtcatgacacttttctacattagtgacccatcaccgggtggcgcctccatccttgggcaggacctgttgaggtcctcagcactcacactgtctttaaaggctgcacaaaaaccacaagacgagccagcatggaggaaaacaactcattaggcattttcctgtctggggtacagatgtgtttggatttcaatgaaggagctgaaacttcaacagctgagctagagacagctgttccagaaacccagagggagacctaaag

SEQ ID NO: 795287 - DNA, 633 bp, Homo sapiens
tttacaatgggattatctcactaatcctcctaacctgctgggactgcaggaaaaacacaggtgctatattactctgcctgatagatagccaaatgggaatcctacaacataaagcaggagttcccctaaagactactctagtgcctaacaagatctcaaggtaggggtataatccagtctatggcaacaattggattactcagctctgctgagccagagagaggacctgatttgaaatcataytattattattattactatttttggagatggagtcttgctctgttgcccaggctggaatgcagcggcacaatctcggctaactgcaacctccatctcctgggttgaagtgattcttcctggctcagcctcctgagtcactgggactacaggcacccaccaccatgcccagctaagttttgtatgaaatcatattacttatggcatttacacattgatattttgggattagctatctacattattatcatcgatgtggctagtaaaacaaacaattataacaaccttatactttgtctttgtatagtgttttaaaaacttctcacttgatagcagcatagaagtctgagtttagaaagaaaatgcatcctattctttcatcaagccttaagt

SEQ ID NO: 795288 - DNA, 456 bp, Homo sapiens
ccaaaactggccataaaaaaattctctgcagcactgtgacatgttcatgatggccatgatgcccacactggaaggttgtgggtttaccggaataagggcaaggaacacctggcccacccagggcggaaaaccgcttaaaggcgttcttaaaccacaaacaatagcatgagtgatctgygccttaaggacacgctcctgctgcagataactagtcaaacccatccctttattttggcccatccctttatttcccataaggaatacttttagttaatctataatctatagaaacaatgcttatcactggcttgctgtcagtaagtacgtgggtaaatctctgttccaggctctcagttctgaaggctgtgagacctctgatttcccactccacacctctatatttctgtatattaaatgtatatttgatttaaagataattttgtctaatatgaatat

SEQ ID NO: 795289 - DNA, 632 bp, Homo sapiens
atactactactttcttttctattctttcctacttgcatataatactttccattttaggtcactcttttcagactaatgagcatcctttaaaatgtcctttagtgaatatctatcagtgacaaactttcaaatttttgttagaattaagtttaaaaggtttctaaaccttttgttagaattaagttgaaaaggtttaaaaccttttcaggaggtgaattagaaaccttttcaacttaattctaacaaaacagtttcawaccatacaggaggcaattttaacagtacttagaaatttatagccttgtatgcttgtattagagaagaagataggttaaaaattaatgagcaaagcatccatttcaaaacttcaaaaagaaaaactgtaaaataaacccaaagaaatagaagaaatgaaatcataaagataagaacagaatttaattaaatagaaacaaaaacaaagaagatgaaaaaaccaaatgttgttttattttaaagctaatgtaattaacaaatctctggcaagggcaatctggaaaacaagagataaggcacaaataaccaatattaggaatgagagaggtcaccaccagagatgctacagttattaaaaacataagttattctgaaca

SEQ ID NO: 795290 - DNA, 632 bp, Homo sapiens
atactactactttcttttctattctttcctacttgcatataatactttccattttaggtcactcttttcagactaatgagcatcctttaaaatgtcctttagtgaatatctatcagtgacaaactttcaaatttttgttagaattaagtttaaaaggtttctaaaccttttgttagaattaagttgaaaaggtttaaaaccttttcaggaggtgaattagaaaccttttcaacttaattctaacaaaacagtttcataccatacaggaggcaattttaacagtacttagaaatttatagccttgtatgcttgtattagagaagaagataggttaaaaattaatgagcaaagcatccatttcaaaacttcaaaaagaaaaactgtaaaataaacccaaagaaatagaagaaatgaaatcataaagataagaacagaatttaattaaatagaaacaaaaacaaagaagatgaaaaaaccmaatgttgttttattttaaagctaatgtaattaacaaatctctggcaagggcaatctggaaaacaagagataaggcacaaataaccaatattaggaatgagagaggtcaccaccagagatgctacagttattaaaaacataagttattctgaaca

SEQ ID NO: 795291 - DNA, 624 bp, Homo sapiens
cacagaagcttggatatacattccttataatatttcttcttctaaaatatttggttgttttatgcagttatcaaattgggggtctacaaaagcatgaatagtttattgtgactggtgattgtatgttgtagacaactgcttattttaaatactacagaatgagaatatttgatgtatattgtgtaatatctgattagaaaatcatctaccacccctatagattgttattcccttaaagcaatttataaggttggtatgatattacaaaagatttatttactttatgttctgtgccttctagtataacatagcattaatgaatttcattctatagcccatttctagattatggttgccagaaaaaataatgcacaatacgctatacatgatataggctcaagaacagtaycttaatgacatataaatataatggtacttgatttatatttttatatcaaagaaaacatgttaaagttataatatggggggaaaaaacctgtcataaaaatataaccttttcctaaataatttataatagaaacaaaaaggaattcttaaagaaaactttcagatattttgctcaaaatagatataatattttaagaaattacatgactatataat

SEQ ID NO: 795292 - DNA, 561 bp, Homo sapiens
tataccttcacatagaaaccagacagaagcattttcagaaacttctttgcgatgtttgcattcaactcacagtgttaacctttattttcatagaacagttttgaaacactgtttttgtagcatctgcaagtggtcatttggagagctttgaggcctatggtggaaaaggaaatatctccacataaaaactggacagaagcattctcagaatctcctctgtgatgtttgcattcaactcacagagttgaacataccttttcatagagcagttttgaaacactcttttcgtagaatccacaagtggatatttggactgatttgaggcctttgttggaaacgggaataccttcacataaaatctagaaagaakaattctcagaaacttctttgtgatatgtgcattcaactcagagagttgaacttttcttttgatagagcagttttgaaacagactttttgtagaatctgcaagtggacatttgggaagctttgaggcctatggtggaaaatgatataccttcacataaaaagaagacagaagcattttcagaaacttctttg

SEQ ID NO: 795293 - DNA, 561 bp, Homo sapiens
tataccttcacatagaaaccagacagaagcattttcagaaacttctttgcgatgtttgcattcaactcacagtgttaacctttattttcatagaacagttttgaaacactgtttttgtagcatctgcaagtggtcatttggagagctttgaggcctatggtggaaaaggaaatatctccacataaaaactggacagaagcattctcagaatctcctctgtgatgtttgcattcaactcacagagttgaacataccttttcatagagcagttttgaaacactcttttcgtagaatccacaagtggatatttggactgatttgaggcctttgttggaaacgggaataccttcacataaaatctagaaagaagaattctcagaaacttctttgtgatatgtgcattcaactcagagagttgaacttttsttttgatagagcagttttgaaacagactttttgtagaatctgcaagtggacatttgggaagctttgaggcctatggtggaaaatgatataccttcacataaaaagaagacagaagcattttcagaaacttctttg

SEQ ID NO: 795294 - DNA, 632 bp, Homo sapiens
aaaactgccacagggctggaggtgagacatgctggaggcaatactgctctttaaggcattgaggtgtttatgtatatgcacatcgaaagcacagcacttttttcttaccttgttatgatgcagagacatttgctcacatgttttcctgctgaccctctctccactgttaccctattgtcctgccacatccacctctctgagaaatgcccgataatcatcaataaatactaaggaaactcagagagtggtgccggcgctggtcctccctatgctgagcgctggtcccctgggcccactttttctctttactttgtctctgcgtctcttttcacaagtctctcgttccacctgatgagaaacgcccacaggtgtggagggacaggccacsccttcaatatggtgttcctattatcatctgtcacttcccagagagggcaaacattcaactttgccagctgataagaggccccactgcatgttgttctggtgaagctcgggtgttttgagagtggggtatgtacgtaagacaggactcgaagggcaggaataagatgatgaccggtcactagataaccctggaaaactagaagaaattaataacatgttgcacacctcactagaactggaaggag

SEQ ID NO: 795295 - DNA, 472 bp, Homo sapiens
aaaaggagtgttttggggctagtccatcatttgaagacaggagctcattgtattgaatcaggacagagtcatctgctcccacacccaatatgaagttaatacccctacctgctacttcaagagtcacctgaggctcttccatctctcgatagctaatagtccaatggaggtggaggtaggaagtatcaggccctgccacttttgagtctgctgrgctctgatgatggctcccttggaagcacagtacatttccttcggcagtggctgaccttcctacagaaggcaaattgatttatatcaaaggcacagtggcccagaggcacagactgggactttcaccttctcacttcctctgtgagggccaggggttaaggggttgcctctgaagtggtggagagcacaaggctgcagctagaagctgggcctcttgggagatttgctttattttacgttttctctgcccaattcctgt

SEQ ID NO: 795296 - DNA, 472 bp, Homo sapiens
aaaaggagtgttttggggctagtccatcatttgaagacaggagctcattgtattgaatcaggacagagtcatctgctcccacacccaatatgaagttaatacccctacctgctacttcaagagtcacctgaggctcttccatctctcgatagctaatagtccaatggaggtggaggtaggaagtatcaggccctgccacttttgagtctgctgagctctgatgatggctcccttggaagcacagtrcatttccttcggcagtggctgaccttcctacagaaggcaaattgatttatatcaaaggcacagtggcccagaggcacagactgggactttcaccttctcacttcctctgtgagggccaggggttaaggggttgcctctgaagtggtggagagcacaaggctgcagctagaagctgggcctcttgggagatttgctttattttacgttttctctgcccaattcctgt

SEQ ID NO: 795297 - DNA, 490 bp, Homo sapiens
ggcctggcgggatcctcccccgactcggaagggggaggcgcgggccacacagtaggtgacgagccgccctccatccccaccgctgaggccaggggaaccctcgctctccccacctcaccccgtcgagggggaagcrgaggagggtcccctgcaagcgagtcactatagcagcgctaccataacgcagagagaggcggcaggcaggggaatccggtaccccaaaggcacacctgtcggatcgctagagaaggctttctcaccgagggtgggtcacactccccacccgccaatcacccctcgtcgggcccgcagaggcactcagggacacctggggaagtgagggggcccgaggtaccaggaaaaatctgcgtgcggcaactttgagccttcgcggtctgggcggggggcctggccactgtacgtgggtgcaatcccccaagtgcccccccgtccacctgcctcctttctcccaggcaaagcacctccaagt

SEQ ID NO: 795298 - DNA, 490 bp, Homo sapiens
ggcctggcgggatcctcccccgactcggaagggggaggcgcgggccacacagtaggtgacgagccgccctccatccccaccgctgaggccaggggaaccctcgctctccccacctcaccccgtcgagggggaagcggaggagggtcccctgcaagcgagtcactatrgcagcgctaccataacgcagagagaggcggcaggcaggggaatccggtaccccaaaggcacacctgtcggatcgctagagaaggctttctcaccgagggtgggtcacactccccacccgccaatcacccctcgtcgggcccgcagaggcactcagggacacctggggaagtgagggggcccgaggtaccaggaaaaatctgcgtgcggcaactttgagccttcgcggtctgggcggggggcctggccactgtacgtgggtgcaatcccccaagtgcccccccgtccacctgcctcctttctcccaggcaaagcacctccaagt

SEQ ID NO: 795299 - DNA, 490 bp, Homo sapiens
ggcctggcgggatcctcccccgactcggaagggggaggcgcgggccacacagtaggtgacgagccgccctccatccccaccgctgaggccaggggaaccctcgctctccccacctcaccccgtcgagggggaagcggaggagggtcccctgcaagcgagtcactatagcagckctaccataacgcagagagaggcggcaggcaggggaatccggtaccccaaaggcacacctgtcggatcgctagagaaggctttctcaccgagggtgggtcacactccccacccgccaatcacccctcgtcgggcccgcagaggcactcagggacacctggggaagtgagggggcccgaggtaccaggaaaaatctgcgtgcggcaactttgagccttcgcggtctgggcggggggcctggccactgtacgtgggtgcaatcccccaagtgcccccccgtccacctgcctcctttctcccaggcaaagcacctccaagt

SEQ ID NO: 795300 - DNA, 596 bp, Homo sapiens
tgtcatccctgcactttgggaggtgagggaaggtggatccctcaatccaagccttggcaacatggtgaaacctcgtctctaaaaaaatacaaaaactaactggtttcataacctggactcaaaattaataaatagataaataggctgggtgcggtggctcacgccagtaatcccagcactttgggaggccgaggtgggcagatcacgggggtcaggagatcragaccatcctggctaccacagtgaaaccccgtctctactcaaaatacaaaaaattagccagacactgtgatgggtgcctatagtcccagctatttgggaggctgagacaggagaatggcgtgaacccgggaggcagagcttgcagtgagccatcacgccactgcactccagtctgggcaacagagcgagactccgtctcaaaaaataataataataataaatagatggaaatagaaaattaaaaaaaaaaacgtagctggccgggcgcaattgctcacgcctgtcatcccagcactttgggaggccaaggtgggcagatcacctgaggtggccagttcgagacccacctgacccacatagagaaataccgtctc

SEQ ID NO: 795301 - DNA, 640 bp, Homo sapiens
ggtaaactcatttaagctgaggttctcacttagttgacattgttttttggatgtctcaagccatctcaaattagatggagctaatactaaaacttgggttcttctctccaagctagccctcttccagtttccccatcctagtgattggaatcacccttcatccagttatgcaagtcagaaccttaggtgtcaccctagatccactgctgtctcacttcccatatctgattatcatcacatcctggcctatgtaccttctaaatagctcttgactctgtcctcatctctccacttccactgccaccaatttagtcaaagctaccatttaacctctgccctggaccattggagcagccaagtacctgatctttctgatttcatttcttgtaactkccaatttgttctccagagtgcagagtaatctttttgacacacagatcaatatgtcactccctacttaacatcccacaatggcttctcattgcccttggaataaagtcaaagccccctaacatggcttttatggtgtggcatagtccatcctatttcagtgcctggtatacatatcatgttctcttccaccacaggaacttggaacgtgtggtttcctctgcttggaacattctcctctcctcttcac

SEQ ID NO: 795302 - DNA, 646 bp, Homo sapiens
ctaggtatattatacatctgtatggtcattttgtttaagtctacttctcaaactggactctaattccatgagggcagaaaacaagactctttttcttaccatagttttctcagcaatcacacagggtctatcatacaaaagatattcagtgagaactcattgaatgcacttgtagctttgagtgtttgcttgctctgagctcgggtgtttgagtcatctgcacactgacaaaggcctgacagtactacacagtagatggtttatttggtgtgaatcagagaaaggttcaacaaactggcaccataattgttttctttcccttattcttctcctgctaaatctctgttttcttaaacctctactstcaggacaaggtcaaactacgcctctgttttacttacatatttattttctcaaaccacgaatcatgtatttccaaccaagcccaaagcaacaaaatacaaagcacattctcagctcatgttggaccaaagggtttcagccaaggtccggtaatatagtccaccaatctctgggaatttttcaaagatgcaaatgtcactgacacacaacaatgcatctgcagcaggctggacagaggagaataggtggcgttaccatgactgattgacttggatggaccaca

SEQ ID NO: 795303 - DNA, 646 bp, Homo sapiens
ctaggtatattatacatctgtatggtcattttgtttaagtctacttctcaaactggactctaattccatgagggcagaaaacaagactctttttcttaccatagttttctcagcaatcacacagggtctatcatacaaaagatattcagtgagaactcattgaatgcacttgtagctttgagtgtttgcttgctctgagctcgggtgtttgagtcatctgcacactgacaaaggcctgacagtactacacagtagatggtttatttggtgtgaatcagagaaaggttcaacaaactggcaccataattgttttctttcccttattcttctcctgctaaatctctgttttcttaaacctctactctcaggacaaggtcaaactacgcctctgttttacttacatatttattttctcaaaccacgaatcatrtatttccaaccaagcccaaagcaacaaaatacaaagcacattctcagctcatgttggaccaaagggtttcagccaaggtccggtaatatagtccaccaatctctgggaatttttcaaagatgcaaatgtcactgacacacaacaatgcatctgcagcaggctggacagaggagaataggtggcgttaccatgactgattgacttggatggaccaca

SEQ ID NO: 795304 - DNA, 585 bp, Homo sapiens
aagccaacgttatttgacaatgtctatcattctcttttcagatcctctttttgaagtaaaaatagtgaaatagctttctttttaataatgcacttaattttttttttttttttgagacaggstctctcacttggttacccagactggagtgaagtggtgggaacacggctcactgtagcctcaacctcctgggtgcaagtgatcttcctgccttagccccccaagtagctgggatgacaggggctccaccatgcctggctaatttttctatattttggagagacaaggtttcaccatgtttcgcaggctgaaatacactttttcaaaataaaaaattatgctatttccatgaataaagagatttcacagaatggctaaaacatctagcaattaaaataatactatttctccacaacgttcaatttaaataacccgtcaaactcctttcagtgaacttaaattattcacaaacaaggaatttttaaaaccacatttattgaaggaaaccataaataagaagctcaatttcgttgtgtatccaatgcatttaatgaatctacaaagtgtagatagctatttcacttg

SEQ ID NO: 795305 - DNA, 510 bp, Homo sapiens
cctgaatgattttattggtaattttattttattacttgaggcttctatcatgaaatttctgctgaaaatgaccatttccatggctgtgaaagaaaatgccaacttttttctctgatggacagattataatgagttcaatatggcaactcttaaacttttaaatattttacagggaatttctaagcatactacatatattcattattgcttttagcacacttatttcagcataaaatgacatgtgctcatgagtgggtttatttatttatttataaccagactttttaggtatataacccctttatcccacygttttaaaaatacatttggtaaaattttatgtgtctactttataaatgcatttgatgataaaaacaaaacataaaaagatatttgaggccttctagacttttatttagaaaactgtacatttaaactaggcatgaggttttttacaagtatagtgggtggcaaaattattaggtcaatttatctgttctacacatttag

SEQ ID NO: 795306 - DNA, 606 bp, Homo sapiens
acacagaagaagagattacagaagaagagattccagaaagggaaactgacttgcacagaggcatagagcaaaatgagcagcagggctgggccttgattgccatcctccagctcccagtccaaagccctgcccactgccccccacttgcttcttggcctttgcatccctcttccatgtcccctcttcacttcttcttaattccctgcctgctggctccagtctctcttcctcccttatttctcacaccagagccagatctagattggccaggagcagtggctcacacctgtaatcccagcactttgtgaggccgaggcggacagatcacctgagatcaggagttcgagaccagcctggycaatatggtgaaaccctgtgtctactaaaagtacaaaaattagctgggcatggtggcatgtgcctgtaatcccagctactagggagggtgaggcaggagaatcgcttgaacctgaggtggaggttgcagtgagccaagatcatgccactgcactccagcctgggtgacatagcaagactctgtctcaaaaaaaaaagaaaaagaaaatcgaatggagcctgaagcttgtacaattttaggatcccttg

SEQ ID NO: 795307 - DNA, 594 bp, Homo sapiens
taagagggagtgactcaaccagataagtaccttatttgtaaaatcacactaagccagcacaaacctcttttgtttaaatctccacatgtcaaagcattgtgtaagtgcattttggtttctagtgacattgtcctgtctggaaggccacccctgacccattctgcccatgttgatatttaaacaaacatgtgtttgtactccaacaatagatttaagagcatcaccttttcctaacctgtctgtaatctgtttataagggtcgaagcagctcaggctgctgtgtgtatgtgtgtgtgtgtgtgtgtgtgtgtgtgtgtgtgtgtgtgtgtgtgtgtgtgtgtgtttaaatctctaatctccatcttgtctctattcactattccctacctyttccacacccaatatcccccagtagaaaagattcccagggattctcatgagccagcctctgttttcagcagaccctttttaaaagtctgaaatatgaaagatcttctagatgtctctattagttggaaaagggaggaagcctgaccgattaagaggcctgatgttgccagccagtttatgttgaggaaatggggaagaagggac

SEQ ID NO: 795308 - DNA, 612 bp, Homo sapiens
cttccccaagtcaaatttccaaatgttcattgagcttttagccttgagttggaggaccctcagccacactggggtgaccatttatgggaccttgaggaacagccaggtaaagactgacagggaaagctgggggttgacttcattcagccacccagaacctggcagaaatgccagatgaaaggcaagattctcagagaggcaggaagatgcttttcccaacctcaagggagccaatattgatgaaaacgtgagtctacctcaaacacgatgtgcttttaagaaactgtatttttgctaatacataactcaaataatgagaggcttggacatttttaggagtttgtatagatgcatatggtttttaccttcataaattcattcaaacattaaacattaatgttcagccctgagctgttcaattcacaagagggacaaaagacacagyctttgctcttaaaagatttaggatctgtatgggaaggtgagtttcctgtgttacgtctttctagccccacatgtccagccagcatgccctgtatctttcaaccatattgtacttgttaaaaattccttaactgcatcatgttctctctcattgccaagatgttgcca

SEQ ID NO: 795309 - DNA, 635 bp, Homo sapiens
gattttccaagttatgtctgtcttctgcctgtttttaactttagacctttggcatgatggggagggggcacaactatttggagtgtattactatgaaaatttaaggtcaggtatgttcaatgcctgacacaactgctgtcaatccttgatggcaacaaaccccaccccacatcatcccccaacccccactggccattgctgtttaggtaaatggttggaatagcttcatcattctcaattcttgctgtgcatcagaattatctgtgaagccatggacaactatttttacaaagctcgacaagtgattctgatccacagctagggttggaatcattatttatatttgtcaccttataaatcttaaaactgtttgttctactgaaagatcatacatatagtatttgtaacgcatatrctttcataagaataagggaaaataatctcattttattatacatgtatttcctgaaaagtcagttgtaattctgatgatttttactgtaaaatttcatgtaaaaatgaatgtactttgttgtggaaaactgctaaaacccaaagaaatcacttgaattttagcaaaccttaaacaaacaagaaaaccaacccctgatgagaaaggatactattttggcatc

SEQ ID NO: 795310 - DNA, 486 bp, Homo sapiens
aatgaaataaagtgagaagacaagattagagaaaaaggagtgaaaagaaataaacaaagcctccaagaaatatgggactatgtgaaaagatcaaatatacgttgattggtataccagaaagtgatagggagaatggaaccaagttagaaaacactcttcaggatattgtccaggagaacttccccaacctagcarggtgggcaacattcaatttcaggaaacacagagaacacacaaagatactccttgagaagagcaaccccaagacacataattgtcagattcaccaatgttgaaatgaaggaaaagatgttaagggcagccagaaagaaagggcaggttacctacaaaggcaagcccatcagactaacagtggatcgctcaacaaaaaccttacaagccagaagaaagtgggggccaatattcaacatttttaaagaaaagaattttcaacccagaatctcatatccagccaaactaagcttc

SEQ ID NO: 795311 - DNA, 486 bp, Homo sapiens
aatgaaataaagtgagaagacaagattagagaaaaaggagtgaaaagaaataaacaaagcctccaagaaatatgggactatgtgaaaagatcaaatatacgttgattggtataccagaaagtgatagggagaatggaaccaagttagaaaacactcttcaggatattgtccaggagaacttccccaacctagcaaggtgggcaacattcaatttcaggaaacacagagaacacacaaagatactccttgagaagagcaaccccaagacacataattgtcagattcaccaatgttgaaatgaaggaaaagatgttaagggcagccagaragaaagggcaggttacctacaaaggcaagcccatcagactaacagtggatcgctcaacaaaaaccttacaagccagaagaaagtgggggccaatattcaacatttttaaagaaaagaattttcaacccagaatctcatatccagccaaactaagcttc

SEQ ID NO: 795312 - DNA, 519 bp, Homo sapiens
atgcagtgtgataggagtccaactttattctttggcacatagatatccagttgtcccagggccatttgttgaagacactattctttttccactgattgtcttgggcatccttgtcagaccaaagccaattggccatagatgtatggatttatttctggactctcaactctattctgttgatctatatgtttagctctatgccaggagcacaatgattattttcggagatggggtcttgctctgtcccgcaggctggagtgcagtggcatgatcatagctcactgcatcactgcagccttgaactcctggactcaactgatccttccayctcaccctactacatagctaagcctacaggcatgtgccaccatgcctagccaatttttaaagttttttttttgtagagatgggatctcactttattgcctaggctggttttaaactgatttcaagcagtcctcctgactcagacccctaatgtggtgggattacaagcatgggtcactcacctggcccaca

SEQ ID NO: 795313 - DNA, 496 bp, Homo sapiens
gatcatgtgttgtttttcttcatttcattaatgtggtatattacattggtttacttcatatgctaaacagacttggcatttatattatgacacactggtcatggtgtatgatcctttttatatatgactggattcagtttgttagtttcagttgaagatttttgtgtctatattgatagaatgatttggaaactgttccttcctcttctatttttttttttyggatgagtttgagaaagattgttaattcttctttaaatgtttggtagaattcaccaatgggcctagactttactttgtgtaaagtattttcgttacagattcaacctctttatttgttatagatgtattcagattttctttataaatcagtttcagtagtttgtgtctttctaggaatttgtccattttatctaggttgtctattttgttggcatacagttgttcatagtattcccttattatccttttaatttccgtaaggctgagagtgatg

SEQ ID NO: 795314 - DNA, 477 bp, Homo sapiens
gttgcttgccattgaaaaactctaagattctgagtatgatatgttttaaatatgcttcattgtcttaaaaagttagcatttagtacattatatatgtacatatatatccattctatctatatctattatatctctatgtctatatctatatcatctatacctatatctatatgagacagtacgagtgacctctctcttttttatccagatgccttttgcctggtattccccttaaatgcgtatcttcttacaaaagtcaaatttgtttaaaattatccccctgaaggaatttttttttttgagaaagtrggcataaaccttgaaatgacaactgtttgtttttattcttattaattctgaaagttgaaactaaggattttaaggatatcagtacccaaaggctaaactaccacacacacacacacacacacaccccgctcccctccccaaccaaataccactcaccttgcaggacca

SEQ ID NO: 795315 - DNA, 574 bp, Homo sapiens
tccaattactggctgataattcacccctaacctggatcagatattatgctctttttcaaggattttgatacataatgtcaaactgatctccaaactaaaattcccaaaaccatagcaggaagttacctatttcccaaagtcctagccaaaactgtgtattattattctattttatttttccccaccacgttggagaattttattgttttaattttttwaatttgttaccaggaaggttaaaactttttatgtttattggccatttttattttttctgctgtgaatttgcaatttagatccattgttaacatatggagacatcttttccttatttgtttgcaagaactctttatatattaaacatgttaccttttaaaatttttatcatttgcctttctgcttgataaattccaaaatatatcagaatatattttttaccattcagaaattttgaatctgtgtgtatgtgtgtgtgtgtgttttaagcccttgagtctagcaatatttttcactatgactttgtcctgagatccccagttataaagtttttctctattttcccccaaatcataac

SEQ ID NO: 795316 - DNA, 574 bp, Homo sapiens
tccaattactggctgataattcacccctaacctggatcagatattatgctctttttcaaggattttgatacataatgtcaaactgatctccaaactaaaattcccaaaaccatagcaggaagttacctatttcccaaagtcctagccaaaactgtgtattattattctattttatttttccccaccacgttggagaattttattgttttaatttttttaatttgttaccaggaaggttaaaactttttatgtttattggccatttttattttttctgctgtgaatttgcaatttagatccattgttaacatatggagacatcttttcyttatttgtttgcaagaactctttatatattaaacatgttaccttttaaaatttttatcatttgcctttctgcttgataaattccaaaatatatcagaatatattttttaccattcagaaattttgaatctgtgtgtatgtgtgtgtgtgtgttttaagcccttgagtctagcaatatttttcactatgactttgtcctgagatccccagttataaagtttttctctattttcccccaaatcataac

SEQ ID NO: 795317 - DNA, 436 bp, Homo sapiens
caaatttgttgcaaggcacggcccaagcattttccagctcgcttctctaaattaatctgaaatgagtacattgctgcttttccagctgcttgggtatattccatggcctcttagtggcttagaaataaagagagttgcttcctccagctttaccaaataagcatggcagagctcatcttgcctgtatacactggtcagctatagcagyggagggggatgttgagaaggctattagggcaatgaccaccctaatagggaaggttaggatggattagctctgtgtcctgagcactggagggtggagtgggccttaagcaatgcatctgtaccatgagcaaggcattggaggaaggcagagaagacgaagctggaaggcaccatccaacccatagagtcatcccccttcctttacagtggggaaactgagacccagaga

SEQ ID NO: 795318 - DNA, 608 bp, Homo sapiens
aagctttatcttgcactacatagagagatcatattttatttgcattctacagactagcaaaatccagcatgaatatattatattcaaggacacaatttatgtaatcacaccacttaagaagcagtttaaaatagcaaataaaatcaaactgtagcactcagcatccttatcaaatgaaaatcacatacaaagacccgctttcttcttttcaacttcagctgcagggaccagaaataaatagctccatcttctctgatcatgattaaggtgtcgtcaggcatagagagaatgcgcagcacgggacccccatatgacagcctccgcagcgcagcaggcagcaggaaggaaacctctttctgtcgggccaaagcattagctcgctccaaatactctagctgcagataygtgcggaagccaccctggaggataaaggacaattcatgaaatgtcctctatctttctggctttcaaaaattctccttaccatctgggcatggataatgcctttcttggacataacatcattattagcacataaacgcggctgccaaaatcttggggggtaataactggggtgtgcctgttgagctgagcccagaagtctgtta

SEQ ID NO: 795319 - DNA, 608 bp, Homo sapiens
aagctttatcttgcactacatagagagatcatattttatttgcattctacagactagcaaaatccagcatgaatatattatattcaaggacacaatttatgtaatcacaccacttaagaagcagtttaaaatagcaaataaaatcaaactgtagcactcagcatccttatcaaatgaaaatcacatacaaagacccgctttcttcttttcaacttcagctgcagggaccagaaataaatagctccatcttctctgatcatgattaaggtgtcgtcaggcatagagagaatgcgcagcacgggacccccatatgacagcctccgcagcgcagcaggcagcaggaaggaaacctctttctgtcgggccaaagcattagctcgctccaaatactctagctgcagatacgtgcggaagccaccctggaggataaaggacaattcatgaaaygtcctctatctttctggctttcaaaaattctccttaccatctgggcatggataatgcctttcttggacataacatcattattagcacataaacgcggctgccaaaatcttggggggtaataactggggtgtgcctgttgagctgagcccagaagtctgtta

SEQ ID NO: 795320 - DNA, 565 bp, Homo sapiens
gccagtatggagcacacctagtcacagctagttattgacccctgacgttcaccccaccgcttctcagggtacccaggttttactaagttacctggtgtgctgcaccaaagccttcctctctgccccactcccccccttccaccagcctccaatccactcctagaccacagtgcatttgagggaaattcaatccatatgtttccttttctttctagagaatgcatccagcattgtttaaagagggaggcaacagccaagaagagctatgtgaggcctctcttggccctccagttcttcattagggagcaaagaaaggaggactttgccaagagcaaacctgaaacattcctttgggttcagttcaatcgcctgcaagtcacgtttccacacaaacatgtccccaggactsaggatgcaaggcactgttcaaggcgtctcttggatgaagacatggcaaaagctaccaccaccatgcagctctgtgatgtatgtgaagagaatccgtttacaggagatgattgtaaattattaccctctaaaactgacatatgcctctctgagaata

SEQ ID NO: 795321 - DNA, 609 bp, Homo sapiens
ttactcataagtgggagatgaacaaggaaaacacatggacatagggagggaaacatcacacactggggtctgtctgggggtggggggctaggaaaaggataacattaggagaaatacctaatataggtgacaggttgatgggtgcagcaaaccaccatggcacgtgtatacctatgtaacaaaactgcatgttctgcacatgtaccccagaacttaaagtatcaaaaaaaawttttttttttttttttttttttgccagagtctcgctctgttgcccaggctggagtgcagtggcatgtctcagctcaccgcaacctcagtgggaggcagaggctcgagaattgcttgaacacgggaggcagaaattacaggcgtccaccatcacacccagctaatttttgtgtttttagtagagatcgtgtttcaccaggttgaccaggctggtcttgaactcttgacctcaagcaatctgcctgccttggcctcccaaagtgctaggattacaggcatgagccaccccgcccggcctaaattctttaaaattaacaagcgatatcaaaatatatcaacagagataagtgaccaaaatataatgatgaatgcaaaagg

SEQ ID NO: 795322 - DNA, 577 bp, Homo sapiens
tatataataatagattaaaaatatggagccttggctaattgccaggcaccgggcaagacaactttacatacagcatcttatttagtcctcacaatagtcagaggcaagtactattactacctctatttagcagctaaaaaacctgaggctcctggaaagtaacttgcccaagttcacagcactagaaagtagcagaggcagaattctagccaggccctgtgatctcacagtccacatacrtaaccacactgtgtatcagggatatcttgccaaatgagacatatttaatcacatctgtttctcaaagaaaaagctgttgttgtcttctattctccaaaatgtttcatgagttttgttaaccagagtgaaaggaccaatctacaattcactaaaaaagtcacattcttctaacaagcttaaatacgttctctcctacctacttgctgagccagaaatcctcagcaattataaaggggtagctatgtccctttatctgtggtggacaaagcacttgaccaaagttaggaggcttgactcttggcgtaggccttgatgatactactaacttactgagtga

SEQ ID NO: 795323 - DNA, 651 bp, Homo sapiens
agcgctggaaaataaactatatctgtaggtgtgtggtgtgaatttgaggatgtggtaaactggaaaagataaaagtggtctacttattgcttttcactttgcagagcatataatatgatttcccatggtacatatcctccattcattccctcagacctgactcagagtctcttaaaaccacccattcccctaagtgtctaccttgagcccactgccttcctgatttgcatcctaaagacagttgcccataatttaactaaccacattgttcctctccaaggaattccacatccagtggaacattgctccagtcgtaaggtaacgggacgccagagactatcttcctgtyagaatcttgagtcacccagggcacacgtgtcaacagggtttaaagctttgtttgtttgcctccccagacagacgttgaaacagaatctcccaccaccaaactgcctagacaaccaagcaactcagtaaccacttactaaagctaacagtcttttggcattcagtttcccaccagatgaattatagcatagtgtacagtgaattcattcagatcactgaatgttaaatgtggaggcccttagtaattacctagacaccattgtagcaggaagggaacaaaatgcaaagaatgaatgcaagcaa

SEQ ID NO: 795324 - DNA, 647 bp, Homo sapiens
ttatttgaaattccgaaatcaggatacaaaatcctcctgatgttaggacacatatgggaagagctagccagggactacttcataaagaaggtgactcccatgtaactgcacaaagattgagcagaggtttgaaatgagattagagtcaggccatgatagtcaacctacctcatcttctaccctcaataatggtagacactaataacaacccacattactgtcccaacgacacgtgaaggatttctacttccattctctttcggtcagctttttgtttgtttgtttgtttttgaggcagagtctcactctgtcgcccaggcttgagtgcagtggctctatcttggctcattgcaagctccgcctcccaggttcaggccattctcctgcttcagcctcccaastagctgggactataggcgcccgccgcggcactcggctaattttttgtatttttaggagagacggggtttcaccgtcttagccaggatgatctcgatctcctgacctcatgatccgcccgccttggcctcccaaagtgctgggattacaggcctgagccactgcgcccggctcagtcagcttcttaacatccacttaaaggcaatgctctaaaagcccaacgatagtgtaactccaaagtcaggtga

SEQ ID NO: 795325 - DNA, 476 bp, Homo sapiens
gagggaggggagatgtggagaggcagtctaatgaccacttactaagggagttttaaataccaagacagatatgatggtccatcaaaacatttcgaagtagctttgattagaaccacacattcaattatgcacttcttattcaggtggtcccccacaatgaggccaccagggctactacgacccagagagtggcttcatcagccaagagctataccattccatgccataaccctgctatgacccctggctgaaaagatcaaggtggtgatacagtcaacaacacaacagtgcaccagaccacaacctcaattttccctaaagatttgcccttcttgtctatrtcatggtgtgaccttcgaataagctagcaatgctatggactgtggtcttgaggggcttcagattgataaggactattgcatctcttcacacaattggagaataaacagtcttgatgctcatgctatactcactta

SEQ ID NO: 795326 - DNA, 617 bp, Homo sapiens
attatattgtctttttctgttttcctagtgttttctttttatttattttatttttttatttttttcaaagatggaatcttgctctgtcacccaggctggagtgcaatggtgcgatctcgactcaccgcaacctctacctcctgggttcaagcgattcttctgcctcagcctcccgagcagttgagactacaggcgtgtgccgccatgcactagtaatttttgtatttttagtagagacagggtttcaccatgttagccaggatggtctcaatctcctgacctcgtgatccgcccgcctcggcctcccaaggtgctgagattacaggtgtgagycactgtgcctggccatttgtttgtttctttttgagacaggttctcactctgtcacccaggctggagtgtggtggcatgatcatggctcactgcagcctccatctaccgggcttaggcgatcctcctgcttcagtatcacaaggagctgggccacaggcatatgccaccatgctcggctagttaaaaaaaaattatttgtagagatgaggtctcactatgttgccccggctggtctcaaactcctgggctcaagtgatcctcctgccttggcctcccaactgctg

SEQ ID NO: 795327 - DNA, 643 bp, Homo sapiens
atacttcagaaaatttgctttgacatttctagacaaacatgaatccatctgcagcattctccaaccaaattgttcttattattatttcttatttgttctttaaggaccaagttaaatatacaacaaggataaacatgtttctagattttawaaaggtactgtgaaaaagctattttaattcattcttcccaccaacattggtccaggtaaaagaaatttccaactgcattgtgctactgatacttggcttttagagttcatgatgattctatagtccagacactcaagataaccaccagcaaaaatcccaattagtctcttaattcctgtgttgggtgcagttactaaagaaatctccaactgcaggggctaagttttataagaaagaatatatgatactactacatttttgtttctagggctatatgtatatccctatatatagagatgcatatataaatatgtatgcacttatgatagtttatagtggtgcataaactatttatcaagataaggaaagaaggaaggacataagaaagggaagaaaagaaagaaaataatttaaaaacaataaaaaaaggagggaggggcaggttaaggaataattgaggcaaagagaaaaaaaagatagaaaaatataatg

SEQ ID NO: 795328 - DNA, 559 bp, Homo sapiens
ccacattttgcttatccattcatctgttggtggacacatgggttgttcaaacattttatctattgtaaatgatgctgctatgaacatgggtatacaaatattcttcaagatcttgcttctcattattttgtggtatgtacccagaagggatattgctggataactggtaaatctatctttaagtctttgaagaatcaccgcattgttttccacagtggctgtgccattttaaatcccattaacagtgtacaaagtttcaaatttcttcaagttcttgccaaaacttgttatttttttattaaaaatattkatttcaatagctttaggggtacaagtggattttggttacatggatgaattgtataatggtgaagtctgggattttagtgtacccattacctgagtagtgttatttgtacccaacaagtagtttttcatctctcagcccacttctccctcccctcttctgattctccagtgttcactacattatactactttgtctgcctttgcatactcatagcttagctcccacttgtaagtgaaaaaaaaaaaaaaa

SEQ ID NO: 795329 - DNA, 597 bp, Homo sapiens
tctcattgtggtttgaatttgcatttctctaatgatttatgattttgagcatcttttcatgcttaatgattaattggccatctgtatatgttcttttaaaatatctattcaaatcctttgcccatttgtgaatagggttgtttatctgaaagcccaagccagggcaattaggcaaaaacataaaataaaaattaaaaaacatgcaaattgaaaagggagacgtaaaattattcctgtttgcagatgataggatcttacatgcagaaaactctaaagtttcttcccaaatctgayagaactagtaaatgaattcagcaaaatagcaagacacaaaatcagaacacaaaaataagttgcatttctatagtactaattataaatctgaaaataaaattaagaaaatagctccttggatttttaagagtttttattaaatatatttggtagcaaaaaagaggcaatagcaatgacataaaatatgcatttaaaatttagattttcattaagaaatctaaatttcataataaaattttaactcaccttaaatgataagttcactttacccttgagcaatataggtttaaattgccttggtct

SEQ ID NO: 795330 - DNA, 597 bp, Homo sapiens
gggcttagcatataggaagcatttaataaatgcaaatgatcagaggctgcagcctcttgattataagggaactttcttgattacaaggaaatttttgattgcaaaaggaaatgtctgtgctgtttcaacatttaacataatctttaatatggtttgaggtagcctttatatcaagttaaaaactgtctttgaaaatgtggaatgaatattkttgatttcaacaaatgtgtttttagtaccaatcaaaatattcatacacatttttcctcctttgatctataacatgatcaattactgaagtcattttctaattttgatcagtccagagtaagtccagagtaacatttccagagtaaatccctcataattaaagcatattattattttactaaactgcagaattaatatgtcatatatttttttctcctttgtagtcttttatgttacttttatagttcgtgttgttttactgtcagatttaggctaacttaaggaaatgaatagggatgtttccatcattttttccgatcagcaaatagtataaaagctatttgatcttccagctttgcttagttttgaaaacttcttgaatttttg

SEQ ID NO: 795331 - DNA, 656 bp, Homo sapiens
actctagaagtaatatttcttactgtaaaacttatttctccttcaggcataagcactaagtctcttcttaattacaaggtcaattttagaaagcagcaggtgacattttcttattgataattagcaatgccatttatagtgaatagaggaacattccttcatggttatatagtttttaatttaaacttgctggctcactaaaagacttgcttcatctatggttataaaacttttaatttaaacttgctggctcactataaagattcgcttcatctattgtacaaacacatttttttcatatatcacttcccatctaccatatgcataccattgtttgtaagaaagacaataaggcagatcaaggggattaatttacagctattgctggggaggggccagggatttctgtatagatacaggtcacagggctgaactatagtaccatttgttctctataaaagtaatatgacccatattcaaagakaataggcataaattctgctaaagttcagaaaatttttaccatcactcctttctttctctgtgtcaaacccataggtttgcacaaagtaagatagccctgtatcataacatttatggagaactgacttggaatacctttttctgtattcatcattcttttgtggccatgtcga

SEQ ID NO: 795332 - DNA, 628 bp, Homo sapiens
attgattagtaagttttcccctgcacagagccagtgtgcaaaaactgagggatgtggcctcttttttaaatgaccaaatttcaacaaaaatatcataaagcattcaaagagatagggtaatacggtccatcaaaaggaacaaagttaactttcagaaactgtctctaaagaaacacacacatcagcctcactagataagactttaaaataattgtcttaaatatgctctaagagcaaaagaagaatgtggagaaaattcaaggaagtagagaaacaatatatgaacataattaaaatatygataaatatagaaatcataaaaaagaaccaaacataaattatggagtggaaaaatacaatatctgaattgaaaattcactagagttgttcaacagcaaccttgaacaagcaaagaaaagaatcagtgaacctgaaggaaagtcacctaaaactattaagtctgaagagtaaaaagaaaaaaaaaaagagtaaagaaaagtgaacagagcagaacctaagggacttacagtaaaccaatcaacagactgctgtacacattataagaatccaaaaagataaaagagagataaagtgatacagagattatttgaagaaataatggctgaaa

SEQ ID NO: 795333 - DNA, 638 bp, Homo sapiens
cttatgattttctttgcacatatgttcaaatgctatcttcaataatttctttgaaaggaaacacttaagtgccttcataatataaagcatcttaattctgattatgtttgaaagccagttattcagagaaatttattctttttcaagagcagatgggaacaggctcaaggaatccatggcagaagacacaaacatggaagtaaaatgacaattgtttaggtaaatttytgataggaataaagagaaaaataaattgtagattgaagtgtttgtttgttggaagggaaaacaaggttaaaaattaaagggggaaactattgccaggaggaagaattcagtaactttaatatccttcagttaatgtcttactggaataacttaccacctcaccttgcaactggcttctcagatttcagtctctttcttgtgcagtctactcctaaaatgctttcaggctttctatccaattttcttactttattttactttcaattttttttgttagtatcctatctgtccttttaggccctgattcccttctataacatataactttatagagggttaattgactttcctgaagaaacaaaaggcattgcgacttctctatttctatggctccaaccacctcttgcccc

SEQ ID NO: 795334 - DNA, 638 bp, Homo sapiens
cttatgattttctttgcacatatgttcaaatgctatcttcaataatttctttgaaaggaaacacttaagtgccttcataatataaagcatcttaattctgattatgtttgaaagccagttattcagagaaatttattctttttcaagagcagatgggaacaggctcaaggaatccatggcagaagacacaaacatggaagtaaaatgacaattgtttaggtaaatttctgataggaataaagagaaaaataaattgtagattgaagtgtttgtttgttggaagggaaaacaaggttaaaaattaaagggggaaactattgccaggaggaagaattcagtaactttaatatccttcagttaatgtcttactggaataacttaccacctcaccttgcaactggcttctcagatttcagtctctttcttgtgcagtctactcctaaaatgctttcaggctttctatccaattttyttactttattttactttcaattttttttgttagtatcctatctgtccttttaggccctgattcccttctataacatataactttatagagggttaattgactttcctgaagaaacaaaaggcattgcgacttctctatttctatggctccaaccacctcttgcccc

SEQ ID NO: 795335 - DNA, 596 bp, Homo sapiens
agacactttcttttaatttttatgtatttatttcaacactttattttttgagcttgctatttactgaattctgcgcccctagtgttcatctattgaagccataacccccaatgcgatagtgtttggagatgaggtctttaagtggtaatcaggtcatgagaatggcaccctcatgatggaattagtaactttataagaacgaacaggagagaatgctctctctctcttctcatccacacagagataaggcaatgtgaatacacagtgagatggtactgcctacaagtcaagataagagacctcagaatgaaatctatcttgctgacactttratcttgaattcctcagcctctaaaattgtgagaaataaatttctgttgtttaagccactcagtctatggattttgttatgacagcccaagctaagacaaagagcagttttaggtttacaggaaaattaagcgtaaagtacagagagctcccatatgtcacccatcctctctccacaagttttcctcattattaacatcacacattagtgtggtacatttgttatcattgatgagccaatattgatacattatattagatggtca

SEQ ID NO: 795336 - DNA, 656 bp, Homo sapiens
ccattcacatgcagtctgcagctcttcaacacctaaaatcttcatacaggatattatcattcagttctatgggccacatggtacatttcaataaaaaacactaaagcatggtggtcaaaaatacttgctctgtttttagacagttgacataactctttaacttgctgtgtgctctttggaaagttacttgtccccatgattcattttcttaatctgtaaaatggggatagtaataaatagtgtttacctccctggattattgtgaggattaaatgaaatactaccacaaaagttcttgatacattgagatcactaaataaattttatcattttttcatacctgcttccaaacaggatttgtagagatttatttcatataacaaatatataacagttaaaacaatgtggacaaaaagaacaaggatcctrtagtaaaaggtggtaagtgtggaagtgaagtcttttactgtgctaagcccaatccagagctaagtcccctgagtccatgtccccacttaaaattttttcatgtatagctcctcatctgtaggaagaagaatattcaccctacaatgcatgcaaggacctccatgggtgacttctgcccacgtgggttgctagcagcactcactctttcatttctaaaattgaaacac

SEQ ID NO: 795337 - DNA, 629 bp, Homo sapiens
ctgttgtttacttttataaagaaactaatcctatttgatcagggccccaccattatgacctcacttaaccttaatgattatcttagaggcctcatttctaaatacatccacactgagggttagggtctcaacatataaattttggtggggggacacaaacattcagtctctaatactgaagaacaggtagtgggggagatttcaaagttattatctgcatgagttactgagcataactctgggatgtgggagtatagggaaacaattcctaagaagagagagaattgaagcatgtttgcttcgtggtcgatggatgaaatccaaccaatgcagagaatatactcatagaatattatctctttctcaaatacttcytagtcatgattcacgagttaatgtttgaaactttaggataaaggactaagaaaagtgaataagaacatcaaatgtcttatagttggacttccctgggagaaaatgatagtgtaagatatgaatagcctcaacattcgtgacttctagtctgaaagacaactgcgctagacctttgtccaaagattaaaaagtgttttggggcagggcgcggtggatcacgcctgtaataccagcactttgggaggccgaggcgg

SEQ ID NO: 795338 - DNA, 597 bp, Homo sapiens
taaaactttgtacagtggcccccacaactctctagtgggattaagctatgtttctgtaagtgatagcttcattgatgcacctgttttattgtctgtcttccccttcccttctcatttttttactctcctacctgtgttttctagaatcatctttcaaataaaacaattaaacttgaatgctttttttgctggatcagtttattgggaarcacacaaaggcaggagttatcctaggacatggaactcaggatggatttctgtaattgaataacttgctgacaaaatggcaatgtgaattccactgctggtggtaagtggggcaatgataacctctagcatgtttttgcatcacaattaaaaagactactcattctgacaaacggagccttactattgttttgtattcaattttatcttgacatctattgggtcaagtctgccttacacctgtgtttcttaaggagctagcacaccttcataattttaccatcactccaaaaatgtcaaaggcatatcttttttaccacccatcctatatacaatggtactattctgatgggtcatttcagcttccatgtgtcatctattacctgcttc

SEQ ID NO: 795339 - DNA, 610 bp, Homo sapiens
taatttattttctgtgatactgcttcttctcacccttcagggcttctgaatatttcattcattgcatttctctttccttctacaacaatttctcttcctggcataaccacatgctaataagcacaggtttgcacataaaactggagaagagagaggcattgttttttgaaggtatatttaatgccatgtcttgtgaaatggtttctagagcacatctgtcttcttttccctcctttgtggtcattcttgttcattcaccctgtttctgcaccctggcttattacttatagatactgagtatagaagtctagtggtaatggtattagttttagaatcctgacaactatttgctagtatcataaccttggttaaattacytaatcatactgagcatctctttattcatgtgtaaaatgagctaatgcttattattcagcactgatatgaaattaagcaactatgtagagattagtatattggaaacagtagacactatgtgagttaccatgttattctttctctactacttaatagacttaccaaaacaactttaaaatgtatattgagtgcatacatcggcttacaactaagttggattactttaggaata

SEQ ID NO: 795340 - DNA, 637 bp, Homo sapiens
actgaccttcctcagactgagggccggtgggggcttataaacaatacgagtaaagtgttagccaaaacagaagaaaaaggggtgcccaaacaagccaccttgaaatttgatgcctgtgctgtcattaatagtaataagttaggaataggatgtggttctcttaattaagaaagaggctatatggcagaaaataagtacatttgtcatgaattaggactgtgtggaaataaatggggatactggtcttgtgtcatttaggctacttggacaaaaaatgaaaagaatcctgtccaccttcagaaagggaaaagtggcccttcctgtaccagtggtcagtgtaaccccttagaactagtaataaccaacccccttaatcctcgctggaagaaagggggaacatgtaaccctagaaattgatggggctagactggatcctcaagtaaatattgtggtttaaggagcagtttataaacgttctcctgagccagtatttcaaamcttctatgatgaactgaatgcgccagtaccagaaattccaggaaaaacaagaaatttgtttttgcaattagctgagcatgtagcccagtctctcaatgtcactttatgttatgtatgtggaggaactgtaatgggagat

SEQ ID NO: 795341 - DNA, 684 bp, Homo sapiens
ctggcataaatacagaagcctttaaaatccacttttacctcttaacgagcatcgttgcttgattgggtagagatagtctgaactaatagggacaaacgcaatatagacaaagtgtctttacctcaccaggaggaatgcccacgcaaatcctgtcaacagcaggcttccgcttccttctatatatctgcaacaaacaaaatgtaaacattcataagcctcagtgactcacagctctcccaagcaactgtggaaggcaggactataaaccacatacactgcaacataagacttgtcaataaccctaagccataggcatatttgatgtgccaagagccttggtctgcgtttgtggcgactggcttctgaatgattctgaagctcaaaataaaagtgaacttactttttaacctgtctttttagaaccgtatcattcattatyatctacataatttttcatctattcaacatatatatgtattgcaggtattttaaaaattaaattccacagagtagaaatttgtaataaaaatattgcaaatactgtacagattccaaaaaagtaaaatttggagatgctggcatctagagggctgatatagaccctcttgaacacaggcaatatatcagctttttggactatgaaactcaaactcaaaatcaaccatttattctctctacctcagt

SEQ ID NO: 795342 - DNA, 647 bp, Homo sapiens
ttttatctaaagtgatagatagactgtaatacaataataggtggtgacattaacaccccactctcagcattggactgatcatctagacagaaaaacaataaacattagatttaaactatagaccaaatggatctcacatacatttatataaatttttattcaacaactgaagaatacatgctattttcatcaacacatggaacattctccatgakatatcatattaggccacaaaacaagtctcaacaaaattaaaacgattaaaatatttcaactattgtttgtgaccacagtggaataaaactataattcagtaacaagaggaacattagaaactgtacatatacatggaaattaaacaacatgctcttgaatgaccaataggtcaatgaagaaattaagaaggaaatttgaaaatttcttgaaacaagtgaaaatggaaacacagtataccaaaaacaatgggatacagcaaaagaggtaaatttataacaataaatgcctacatcaaaaaaaatagaaagacttcaattaacctaatgaaacatctgaaggaactagaaaggcaagaacaaatcaaacacaaaaaatagtatagggaaagaaataataaatgtcagagtagaaatggacaaaattggcactaa

SEQ ID NO: 795343 - DNA, 624 bp, Homo sapiens
cgcacaagtcaaactgacaaaacaaaatatttgacattactaccaaatgttaaaaggttgtttcacaatgaacactcttataggccatgaattagaatgaaaattattgcaaccacctccagcaattctagtaaatcttaagataacgccaattttaggtagacatactaaaaaaaatctcagatgtatatatggagacatgttcaagactgtactgaaacattatygcaaaattaaagaattagacaaaatctaaatttctttgtcaagagaatggatacattttggtatagtaatacaatggaatgtagcaatagttacagtacataaactggtaaaatatatttcaaatattaaaaataatgttgagcacataatagcttttgcaggatacatacagcatgctatcatcacttattagtttaaaaatgtgacaaatggcactataaagtaattgcaggtctaatcatataaagtattaaagcatgaatagtatccgaaaaacactaagcaaaggatagtaatgaccactgggaagggacagaaggaaacaggggacgaaataagagcgtacacagatgcatttatttctgcgatatttaattgcttaacaaaaataaaaca

SEQ ID NO: 795344 - DNA, 637 bp, Homo sapiens
catctaactcttttgttactttccataaatactgaaaagttcaatgagtatggttcaaatgccattcacaatttttacctcccaaaacaataagtgtagaacaacttaggtttttcattttgtttcatcatttattaaacatttacttctttttgtaagtmttgatatggattattctttaataattgttctattttagaagacatgagagatttaccagtataatctgaaaggaaatagtgtaaactgttattgtaattcattttatttccattttttgcaccaaatgttcttatcatctggtttattagcattacatggtttttttcctaataaaaatctttcacattcatgtcttacatagatcatgaaagaattgctttgggaaacgaagaagggttatttgttgtacatgtcaccaaagatggtaagagaaaactttttttttttggagtaattttaaatcgtgttaaaaaaatttaaactgtagattctaaattctacaaagagcaggatttgctcttatttatcctgcgactaaaattttccagacctaatttgacgtttataaattaaaagattatttttaaatttctataatccccctgaggtttaaaacttcaaatatgtattgtct

SEQ ID NO: 795345 - DNA, 601 bp, Homo sapiens
tttaaaacttcaaatatgtattgtctttcttgtatcattttatttaacagttctgtacgaactcagattgcatttctttttttttttttggagacagagtttcactcttgctgcccaggctggagtgcagtggcaygaactcggctcattgcagcctccgcctcctgggttcaagagattctcctgcctcagcctcccagtagctgggattacaggcatgcaccaccacgcccggctaattttgtatttttagtagagatgaggtttctccatgttggccaggttggtctcgaactcccaacctcaggtgatccacccgccttggcctcccaaagtgctgagattataagcatgagccactgcgcccagcccagattgcatttctaaagatggaacatgaaaaaaaatatatacaacttgattttcacattgttctattagtaccagaagaggcaacagctattaaaatgtgtttgtttggaggtttttcttctagggaaaaactaaatgctgggtgaaataaagagaaaccaatataacttggtattcataaatacagtattctaagttttatctttatgtcaacttagatcatgggaaa

SEQ ID NO: 795346 - DNA, 601 bp, Homo sapiens
tttaaaacttcaaatatgtattgtctttcttgtatcattttatttaacagttctgtacgaactcagattgcatttctttttttttttttggagacagagtttcactcttgctgcccaggctggagtgcagtggcacgawctcggctcattgcagcctccgcctcctgggttcaagagattctcctgcctcagcctcccagtagctgggattacaggcatgcaccaccacgcccggctaattttgtatttttagtagagatgaggtttctccatgttggccaggttggtctcgaactcccaacctcaggtgatccacccgccttggcctcccaaagtgctgagattataagcatgagccactgcgcccagcccagattgcatttctaaagatggaacatgaaaaaaaatatatacaacttgattttcacattgttctattagtaccagaagaggcaacagctattaaaatgtgtttgtttggaggtttttcttctagggaaaaactaaatgctgggtgaaataaagagaaaccaatataacttggtattcataaatacagtattctaagttttatctttatgtcaacttagatcatgggaaa

SEQ ID NO: 795347 - DNA, 601 bp, Homo sapiens
tttaaaacttcaaatatgtattgtctttcttgtatcattttatttaacagttctgtacgaactcagattgcatttctttttttttttttggagacagagtttcactcttgctgcccaggctggagtgcagtggcacgaactcggctcattgcagcctccgcctcctgggttcaagagattctcctgcctcagcctcccartagctgggattacaggcatgcaccaccacgcccggctaattttgtatttttagtagagatgaggtttctccatgttggccaggttggtctcgaactcccaacctcaggtgatccacccgccttggcctcccaaagtgctgagattataagcatgagccactgcgcccagcccagattgcatttctaaagatggaacatgaaaaaaaatatatacaacttgattttcacattgttctattagtaccagaagaggcaacagctattaaaatgtgtttgtttggaggtttttcttctagggaaaaactaaatgctgggtgaaataaagagaaaccaatataacttggtattcataaatacagtattctaagttttatctttatgtcaacttagatcatgggaaa

SEQ ID NO: 795348 - DNA, 601 bp, Homo sapiens
tttaaaacttcaaatatgtattgtctttcttgtatcattttatttaacagttctgtacgaactcagattgcatttctttttttttttttggagacagagtttcactcttgctgcccaggctggagtgcagtggcacgaactcggctcattgcagcctccgcctcctgggttcaagagattctcctgcctcagcctcccagtagctgggattacaggcatgcaccaccacgcccggctaattttgtatttttagtagagaygaggtttctccatgttggccaggttggtctcgaactcccaacctcaggtgatccacccgccttggcctcccaaagtgctgagattataagcatgagccactgcgcccagcccagattgcatttctaaagatggaacatgaaaaaaaatatatacaacttgattttcacattgttctattagtaccagaagaggcaacagctattaaaatgtgtttgtttggaggtttttcttctagggaaaaactaaatgctgggtgaaataaagagaaaccaatataacttggtattcataaatacagtattctaagttttatctttatgtcaacttagatcatgggaaa

SEQ ID NO: 795349 - DNA, 539 bp, Homo sapiens
ttgccttgcagactttctggggccttggacacctagaacattttttgtgaatcttgaaataagaaaaaaattttggagggaaatagctgttataaggtctctccttaattctatgtctttattctatgagatatgaataaactataattaaccataatctattgacttattattacatatgattattttaaacgtagatataataggcttggttatctgctttcctggcctccttcaatttttctttggttaagtatctcacaaaaaaagtcagccactgaraagtaatagtgcctgtgaagatgcttgaagaattacaaattactcagctgttaaatagaagcatctcagtggtatagtgtagaacctcagtgttccctgggacatcagtgtatttcagtaggacacatgcagttaccattcttaacaatggcctctgttgtaacagtagcataagattttatgttatataccatgtttttagacaagaaaatatgcagtattttaataaatttaaaattaactatgaaatgtcatat

SEQ ID NO: 795350 - DNA, 614 bp, Homo sapiens
aaattaaatattttctatttctgaataaccaccttttacctcattcagcaaagaaaatcacttttaaatttgtccatatccatattctctttcatttttattgttggagaaaaactagttaggagaataagacttgacagaggagccaagaggtgtgtgttaaaagcctcaagaaaagagttactaatttgtgtagttgcaaattaaattgatagtgtatttttcctttctccaatatcccactgtcataataccacattttcataggaycagcaaacatgctggtaaatgttttaacaaccagctctgggactagagaaagccctgctttttaggttcactgatttcatgatataaccttccattagtccatatactgacaaaatggcttaaggcagtattttctaattttaatgcgagaaagtagaagacagtatgcccaacttctgtcagcatgtgtttaaacagctcaaagagcagacctgctgtaaaatttcaaccagtgctattgcaaacagcaaatacttggcctttcccatttttaaagagtttttgaaataatcaaacccagataatacaaagccgttatatcagctattcacatatacacagca

SEQ ID NO: 795351 - DNA, 591 bp, Homo sapiens
acctttttggcaccagggaccagttttgtggaagacaatttttccacagcccaggagtccgggagatggtttcgggatgaaactgttctacctcagatcatcaggcattagtcagattctcataagaggcatgcaacctagatccctcgcatgagcagttcacaatagggttcacggtcccatgagaatctaatgccaccgctgatctgacaggaggtggagctcaggcgctaatgctcactcacctgccattcacctcctgctgtgcggcccagtctgctggtaccagtttgtcgcccgagaattggggatctctgctctaagtamcatccccagacaagtgacatgagcatcccctaggaacttagatatggagaatctcaagccccagtcaagacctaatgaagcagaatctatacagtatcctcaagtcattcatttgtacattaatgtgtgggaaccagtgcacaaagtgttgtatattgttgagactgatgctttcaataaatgaagcagtgttaatatgttagtcctattgggaagagcaattcacttgtgtagatgaatcctggagtctaaaaattacttaaa

SEQ ID NO: 795352 - DNA, 591 bp, Homo sapiens
acctttttggcaccagggaccagttttgtggaagacaatttttccacagcccaggagtccgggagatggtttcgggatgaaactgttctacctcagatcatcaggcattagtcagattctcataagaggcatgcaacctagatccctcgcatgagcagttcacaatagggttcacggtcccatgagaatctaatgccaccgctgatctgacaggaggtggagctcaggcgctaatgctcactcacctgccattcacctcctgctgtgcggcccagtctgctggtaccagtttgtcgcccgagaattggggatctctgctctaagtaacatccccagacaagtgacatgagcatcccctaggaacttagatatggagaatctcaagccccartcaagacctaatgaagcagaatctatacagtatcctcaagtcattcatttgtacattaatgtgtgggaaccagtgcacaaagtgttgtatattgttgagactgatgctttcaataaatgaagcagtgttaatatgttagtcctattgggaagagcaattcacttgtgtagatgaatcctggagtctaaaaattacttaaa

SEQ ID NO: 795353 - DNA, 678 bp, Homo sapiens
gggtttcttcttggttcatatatcccagaattagaactaaagaagatggtaacccataaatgacaacagctgtaaagagaaaaagccccaacaaaagcctgctctttctagccaaaggattaggaaaggggtagaccagaaagacagacaactcayagaaagtaacaattctacttgagataaacatcacagaaaaaaaaaaactggccccatgtcaccaatgtcaacaatggacaagtgcagggggagctagatttccaacctcatgaggctataatgagatgctcaaacacatctgcaagagtggtgtcagaaaaatgctgggtgtggttactcatcccaaaaatcccagcactttggaaagctgaggagggcgaatcacttgaggacaggagtttgagaccagcccaggcaacacagcgagaccccgtctctactaaaaatacaaaaaattagctgggtgtggtcccagctactcaggaggatgaggcacaagaattgcttgaacctgggagatggtagttgcagtgagctgagatcgcgtcactgcactccagcctggggaacagagtgagactctgtctacaaattaaaaaaaaaaaaaaaaaaaagagtgatgtcagaaaaagacaggacattaaccctcactggctgacaacaagcctctcctcacacatt

SEQ ID NO: 795354 - DNA, 493 bp, Homo sapiens
ggagctagatttccaacctcatgaggctataatgagatgctcaaacacatctgcaagagtggtgtcagaaaaatgctgggtgtggttactcatcccaaaaatcccagcactttggaaagctgaggagggcgaatcacttgaggacaggagtttgagaccagcccaggcaacacagcgagaccccgtctctactaaaaatacaaaaaattagctgggtgtggtcccagctactcaggaggatgaggcacaagaattgcttgaacctgggagatggtagttgcagtgagctgagatcgcgtcactgyactccagcctggggaacagagtgagactctgtctacaaattaaaaaaaaaaaaaaaaaaaagagtgatgtcagaaaaagacaggacattaaccctcactggctgacaacaagcctctcctcacacattgtcagtagaaaccacacggggaacctggacttctacctccaacctgggttgggtttcgga

SEQ ID NO: 795355 - DNA, 493 bp, Homo sapiens
ggagctagatttccaacctcatgaggctataatgagatgctcaaacacatctgcaagagtggtgtcagaaaaatgctgggtgtggttactcatcccaaaaatcccagcactttggaaagctgaggagggcgaatcacttgaggacaggagtttgagaccagcccaggcaacacagcgagaccccgtctctactaaaaatacaaaaaattagctgggtgtggtcccagctactcaggaggatgaggcacaagaattgcttgaacctgggagatggtagttgcagtgagctgagatcgcgtcactgcactccagcctggggaacagagtgagactctgtctmcaaattaaaaaaaaaaaaaaaaaaaagagtgatgtcagaaaaagacaggacattaaccctcactggctgacaacaagcctctcctcacacattgtcagtagaaaccacacggggaacctggacttctacctccaacctgggttgggtttcgga

SEQ ID NO: 795356 - DNA, 646 bp, Homo sapiens
tataacatatttataatacatgtaacaaatgtgttatttatatataacatttcaatatatataacaatatattatatattataaatatgtaaaatatattttataatgtcatatatatcctaatataacatataaaatatattttgtataaaatctatgatatmttttatttatgacaatatataaaattatatttttatgttcttgctattcttttcctatttgtgtcatttctaccaacctgttgttttccattttatttaaatgttatgttttattctataaatgtgtgttaattttcttaacgttacccattttgatcttttataatttctccttttatttttaattctcttagttgtgatagttttccttatttcttgtgatttaattttaatctacttagaattaattatggagtaaagcatagttttcttcatatcatttattaaagaaagactcccattggatatgcttattttgtgacccaccagtgtaatggactgaattatacccccacaaatttagatgttgaagccctaaccttcaatgtgactatttggagatagggcctctggggaggtaactaaggttaaataaggtcatgagagtagggctctaatctgctaggactggagcccagaaa

SEQ ID NO: 795357 - DNA, 647 bp, Homo sapiens
atgcccaaggatcccagcctttctagtccccaggtgtcaggccgataagtgatccaggcttcagatgacttcagcctctagcctttgagccacatcagctgatgctgagtggagcagaatgagatttccccatcaaacctgtccaactggcaatttgtgagctatatttgtcagctcaggcrgccataacaaaataccatagatcgggtggtttaaacaacagaaatttattttctcacagttttggaagttggaagtctgagagccgggtgccagcatgattggctattggtgagggctctcttcctggtttgcagacagcttcatctctccgtgtcctcacatggcaagaggacagagtgaactctctggtgtttcctctcataaggagactagtcctatcacatcagggctccaccttctgacttcttttaaacttaattactttcttatttcaaatacagtcacattggggattagggcttcaacatataaggggacttaatttagtccatagaatgaagaaaataaatactattattggaagttacctaagttttggggtggtttgttctgcaccaaaaatatggggaatcatgatacgctactgtttatatgatcatattactgtttttttaatatataaa

SEQ ID NO: 795358 - DNA, 643 bp, Homo sapiens
aactgagctgctcatcatgaacagggtggtgttgtttgatccacaaagccataaagttatatgcacacagcagagctatcatcaaatgtaagtggcatatacaagatgaaacttgggcaggtcctgaaggaaaagcaagttgcaagaggaagcagtctaaatgatcatacttttatgatccctacttctttttttttttttttttttttttttgaggcaggggcttgttctgtcacccaggctggagtgcaggttcagtggcatgatcatggctcactgcagccttgacttctcgggctcaagcaatcctcccacctcagcttcctgagtagctgggactataggcacgcacgaccatgcccaactaattttttgtgtattttgtaraaatcaggttgtgccacattgcccaggctggtctcaaacgcctgtgcttgagtgatccacccacctcaccctcccaaagtgttggacctactcttgattcattgcctcttccttaacacagacctttgacctcatggggagttcttcatgaccagttaatagatggtttacagagagtttgcatgatatgccagcaatatccagaagtggatgactacagcattacagcccctcttgggtttgcccctaaaggaca

SEQ ID NO: 795359 - DNA, 479 bp, Homo sapiens
tttgacccactggctactatgttaatttccacatctttgtgaatttcccaaatttgcttccgttattgatttctgattccattccattgtggccagagaagatactttgtatgatttcagatattttaaaattgatggagacatatttgatgggctaatgcacagtctatcctagataatgttctatgtgtacttgaaaagaatgtatagtctcctgttgttgagtggagtgttctacagatgtctgttaggtctagtyggtttctagtgttgcccaaatctaccttctctttctttaatgatcttctgtttagttgttgaatccattattaagtcaggtattgaagtctccaattattattgctgaattctctatttctccctccaattctgcctttttctgtttcatgtattttggagctttgttcttaggtgcatatgtgtttataattgctaaatcttcttgatggattaatgct

SEQ ID NO: 795360 - DNA, 509 bp, Homo sapiens
aggctgacggtataatgctgcttaaggtggaagctgagaactagggtcgcctgagtgcctgaccaggatgggcagcccagtgggggatctgaatgctgaggacagcagaaaggaaacactagcctagagagggtgaggaagggctactaaaggccagccccctaattcagatcgccagtaaccaaccccaaatgttaagtgagctttgacttccaaatgtaactgrcacaacaaacttgtgattcttgtttcacatttccatataggactcgatatctgcaaaaccattttctctcacagcttccctgggacataaacctgattaactcattttactgatgaggaaactgaaggctgggaggaaagcaggtgacaaactcaaggtaactgcagcagatcgactgtgagccaaatatttacatacgatggacactctgagcagcgcatctgtgtgacttgctctgagagagatacaggagaacgatgagacaccgacagtgaattacaga

SEQ ID NO: 795361 - DNA, 583 bp, Homo sapiens
atacaggccaggtgcggtggctcatgcctgtaattccagaactttgggaggccaaggctggcagatcacttgaggtcgggagctcgagactagcctggccaacatggtgaaaccccatctctactaaaaatacaaaaattagctgggcgtggtgacatgtgcctgtaatcctagctacttgggaggctgagttaggagaaccacttgaacccgggaggcagaggttgcagtgagccaagatcacaccactgcactccagcataggcgacagagcgagactctgtctaaaaaaagtaacatgtaacaaaacatacccagtaaatgacatggaaaaactactgggaataaggaataatactggcagyatatgacaaagagcatcttcttaaatatgtaaaccagtaagaaaatgaaaaatatatcataaaaaagatatatgcacctgttagatgaacattctatttcttctttatttgtattttcagcatttcattataataaacttactttgtagtaagaaaaaaacccgttatagcaaagatgtgaaaatatttgatggcgtggaaaaatgttcacgttttta

SEQ ID NO: 795362 - DNA, 530 bp, Homo sapiens
aaatgaaggaggtcagagtgtggactttagttggtcagactgcaccaacagtgtccatccattgtgacaaatgggctacactgacataagctgttacccctggagtgtgctaagttggtcatgtggctggatgtgatttaagatgataaatggawtagaataaacagatgggggcctggtgcagggctcacgcctgtaatcccagcaatttgggaggctgaggcaggtagatcacctgaggtcaggagttcaagaccagcctgaccaatatggtgaaagctgtctgtactaaaaatacaaaaattagccgggtgtggtggtgtgcacctgtagtcccagctacttgggaggctgagacaggacaattgcttgaaaccaggaggcagaggttgcagtgagccaagatcttgccactggaccccagcctgggtgacagagtgagactttgtctcagaaaagaaaaaaaaaagaatggacagatgggttataaaaactctgaattacctttgcagtttttctgaaaatctaaa

SEQ ID NO: 795363 - DNA, 517 bp, Homo sapiens
gtatagctaggtgtagtgatgcatgcctgtggtcccagctactcgggaggctgaggtagaatctcatgagcctgggcagtcaagactccactgagctgtgatcacactactgccctccagcctgggcaacagggtaggaccctttctcaaaaaaaaaaaaraaaaaaaaaattagtggttgtcctaaggtttgcaatatgctccattaacttacagggtgaacaatgaagtattgttttctcattttgtataaaatataacaaccttataatagtgttcttcatttcctcctcccataatttataatttatgctttagttgtcatacattttacttcttgtatattttacttcctcatatgtcgtaaatccacagtactgttttgaaatatatttttttgaaatatattttccctagctcccagattcacaggtatttttttctttgacattttaaagaagtaattctgatgtcctgtggtttgcattatttctgatgaaaagtctgacctattttt

SEQ ID NO: 795364 - DNA, 517 bp, Homo sapiens
gtatagctaggtgtagtgatgcatgcctgtggtcccagctactcgggaggctgaggtagaatctcatgagcctgggcagtcaagactccactgagctgtgatcacactactgccctccagcctgggcaacagggtaggaccctttctcaaaaaaaaaaaagraaaaaaaaattagtggttgtcctaaggtttgcaatatgctccattaacttacagggtgaacaatgaagtattgttttctcattttgtataaaatataacaaccttataatagtgttcttcatttcctcctcccataatttataatttatgctttagttgtcatacattttacttcttgtatattttacttcctcatatgtcgtaaatccacagtactgttttgaaatatatttttttgaaatatattttccctagctcccagattcacaggtatttttttctttgacattttaaagaagtaattctgatgtcctgtggtttgcattatttctgatgaaaagtctgacctattttt

SEQ ID NO: 795365 - DNA, 560 bp, Homo sapiens
ttaaaatggccatactacaaaaagcaatctgtagatttaatgtaattcctatgaaaatatcaatgccacttttacagaattagaaaaaaaacaattctaaaatttatatggaaacaaaaaagatcccaaatagccaaagcaatcctaagtaaaaagaacgatgctgggggcatcacattacctgacctcaaattatactgcaagactatagtgaccaaaacagcatggcaccatagtatgaaacagcagtatgaaaatagagacatatatcaataagcagaatagaaaamccagaaataaagccacatacttatagccaacttgtgacaatgtcaacaaaagcatacactggtgaaagaacactcttttcaataaatggtgctgggaaaattggattgccatatgcagaagaataaaactggattgctatcactcaccatatatgaaaatcaactcaagatggattaagactcaaatataagatccaaaactaaaaacaacactgcaagaaaacctagggaaactcttctggacattggtctaggcaaagaccaataaaa

SEQ ID NO: 795366 - DNA, 560 bp, Homo sapiens
ttaaaatggccatactacaaaaagcaatctgtagatttaatgtaattcctatgaaaatatcaatgccacttttacagaattagaaaaaaaacaattctaaaatttatatggaaacaaaaaagatcccaaatagccaaagcaatcctaagtaaaaagaacgatgctgggggcatcacattacctgacctcaaattatactgcaagactatagtgaccaaaacagcatggcaccatagtatgaaacagcagtatgaaaatagagacatatatcaataagcagaatagaaaaaccagaaataaagccacatacttatagccaacttgtgacaatgtcaacaaaagcayacactggtgaaagaacactcttttcaataaatggtgctgggaaaattggattgccatatgcagaagaataaaactggattgctatcactcaccatatatgaaaatcaactcaagatggattaagactcaaatataagatccaaaactaaaaacaacactgcaagaaaacctagggaaactcttctggacattggtctaggcaaagaccaataaaa

SEQ ID NO: 795367 - DNA, 514 bp, Homo sapiens
aatgagacatcctaggagagtgtcccagagcagcttagtctatgttagctgctggtgacaaacgaccctgtttgcccttgagcacaccggccctgggctgagtgtgcttgctgctggcactgcccctggctcttcctgcatgccagggtctaagcctgagccgcatgcttgatttccacaggctcatattgaaccttcactgcatctgtgaggcaggtacagctgacactcttactggtgactcacagaggatcaaaggtctgagtgacttcagatgacgtgcaccaccctcctggkccatggagatccacgtggctaggatggcttccagctagacctacagctcaggtatggtgacagaaaacaaaggcttctctccacctctatgctatttccttgtttaacctgccctgcaaaggagctcatagtggagtccctgtggcttagcgggaggggagggcaagtatcagaggcacccggtgggacacaggaacctaggaccccaatgcctagg

SEQ ID NO: 795368 - DNA, 508 bp, Homo sapiens
tactatactattatggcacatgagacagagacccaggttcaacctcccttctgtcacttatcatgtatctatctggccttggtcaaaccacttacttcttcagagacactggtttccttatctacaacaataaggagtttaagcttcaggttcccttctagctgtgatcttakgtgaccccctctcctccgactcaatccctaaccactggcaaccactaatctgttctccgttcccaaaaggttacataaaggggatcatgcagtatgtagttttttgggattggtttctggcactcggcataattccctggagattgatccaagttgctggatgtactcagcatttgttccgttttaccgctgagtgatattccacggtatggctgtatcgcaagcagaaccattcatcagttgaaggacacgtgggctgttttcagtttgggactattatgaataaagctgctatgtgaacaggctcttgtgtgaacattttcctttcttgggga

SEQ ID NO: 795369 - DNA, 563 bp, Homo sapiens
tccgtatgccttggtgtaccagaagaatcggatcacacatgacctcggagaatgagcgcaagcttttgagtggaagtagctctcagcagatgggggagccagaagggagatggttttcccctggagtcgggtctcttggtggcctgggctctcctctgaccgccccagccaaactctgcatcgttccaccagttgatggcctgccagtctgccagtgcctgtcagcatgctccagccaatatgctcctctcaatgtccagccagttgtatgttcttccactgatgtgctcctctcgacatccggccgcttgtgstcactgcctgctagtgtcttggggtttttataggcacaggatgggacgtggtgggccaatggttttggaaaacgcaacatttgggcacaaaggcaggagtgcctatccacacctaggtctgtgggcacaggcccgagggtagagccctagagccagggacctgcctttatctagccagtatttccctgtcccgccccctcccatatcctagctactctattcaaaagtggtcactttcctccaacacta

SEQ ID NO: 795370 - DNA, 624 bp, Homo sapiens
attaccattactttcagaatgaatgaataaatattttcaagttcctcagttttaatttataatgtggtaaatatcaatatatataatcacaaaagctctctggagtgtaaaaagaaccagtgcttctcaaacttcaccaaacatcagaatcacytggattaaagatgctgtgtgcacttcaccagcagactgactggtagaaggtatgagggcaaggggtaataatctggcatttctaacaagctccagggtgatgccgatgctgccagtcagcagatctcactttgaatacaactgttctggactgatatttatcaaactgtgtaaagaaactgtttagtagttcatgaagccagtttaatgtgtcatgtgcaggaagacaaattatcatagcactttaaacacagtattttacatgaaaatgttgtgtgtgtttatatgtgcatactatgtcaggatgtaaaatgtatttctcatggtggttcacaatcaaagtcctttacaagtcagttctttagacacatatgcaccgtatataccatcagcaagggaggaggcaatgcattaggggaacccattcactgcaagatgctcaatcagtatttcatctggtctaaccaacta

SEQ ID NO: 795371 - DNA, 599 bp, Homo sapiens
agtgtcgtgtcaaaattcacatccactcacaacctgtgactgtgaccttacttgaaaacaggatcttggcagaggaaatcacgtatgatgaggccgtactaaatgggaagggtcctgaatccaatgtgactagtgtccctacagaaaacgggaaccctgggcacagagatgcacagagagaaggcaatatgacaactgaggcagggattagagttatgctgccaaagccaaggaacaccaaggactgtcggcaacaccagaaccaggagagaggcatggagtggattctccctccaaccccycaggaaggaacccactcggctggaacctgcatgatagactctggcctcctgaagtgtacgagaacaaatttctgttgtgttaagctatagttaatgatcatttgttatggtagtcctagcaaactaacacaaattccataaaactggaaataaactatctacagaaatctaacagataaagaaatagtggcattttcttagaaaatgtatcatacaggagttccatgaaatagcacaaatctcacaaatgccatgctgaaaaaagaagccaggcacaaaagaacgaatactatacga

SEQ ID NO: 795372 - DNA, 586 bp, Homo sapiens
acgctgtataataaagaatcttatgtggttttctcacctacaatttcttgaattaaaatttcatagaatatactaatgggaaaggaaaaataaaaagaagggaaaagaaaagtatttcttagaaaatgtcttattcctaatccagcggtactaatcaraaatctctcatgaatcaaggagatgtgatggggaatggggatcttctttaaataaccaattgcaaaacacctataattaactacaaggcctttgtttcctcaaggaaaggtccaaggtaaaaagaaaacaaaagatatttcaggaagttgaacagtcctctagatggatagaataggccctgatatgggtaataggacctcagaagagaaaagacaccccactccgagaaagaactaggacagaaaggaaggaaatccccagatgaaagttgctcatgagaattacatagatagtacgcattgctttgtttcgtttctttgtgctcctctaatgtaaagtagttcacttgccttttgaaccccctcagcctccccagaagggaaagtgtgggtttgtgtttgttgttttgtgctgatggcggggggag

SEQ ID NO: 795373 - DNA, 655 bp, Homo sapiens
aagaccagcctggccaacttggcagaaccccgtctctagtaaaaatacaaaaattagccaggcgtggtggtgggtgcccatagtcccagctactcaggaggctgaggcaggagaatcgcttgaacccaggaggtgaaggttgcagtgagctgagatcgcgccaccacactccagcatgggtgacagtgtaagactctgtctcaaaaaaaaaaagaaaaaaagccatgtgttataaatcacattatcaatccattagtcatatgaaatttactaaatcatagataaacaatattgaaagaccgttttatgtaatttctaatactgtgtgcggaggttatatgctttcattgcaccctgttcaaatacttctccagagaatttaccgtcactgtaaaattaaagtattaattgtgtaattamctgtgaaatgttgggttatcctataagattattaggcacatgaggacactgatgatctttatcgtgtttgtaggcatattgctggtgcttatcagtgtctgacacatgctagatgattaataaatgtttgttggatgaatgaatgagtgagcaagtgatactatccctgatttcaagtagttactaatatacttggtgtgaaaacatatgaaaagataagtataatattaatata

SEQ ID NO: 795374 - DNA, 647 bp, Homo sapiens
gaaattacctgtaatattttttacaacttttctgtgagtctgaaatcatttcaaaatttaaagttaagaaaaatacgtcagggtacggtggctcacccctataatcccagaactctgggagaaaaacccaggtggatatcttgagcccaggagtttgagagcagactggrcaacatggcaaaactttgtctctatttaaaaaaaaaaaaaatacaaaaaaatcagccaggcatggtgacgcatgcctgtagtcccgctaattgggaggctgaggtgggagaatcacctgaacccaggaagtcgaggctgcagtgaggcaagatggagccactgcactccagtctgggaaatgggagtgagaccctgcctcaaaaaaataaaaaataaaaaagttaataaaaataaaaatagtgtccctagaaagacttgtttttcatattataaaacattattaaaaataaagacatctgacttgaccaacattcttgtcagaatcctcccactatgttaaataaaaatagttatacaatagcagatagtttgtgcgatatgtttcctctgacctaaacttttaaatattttactgtgatatttacctaataatttctaaaactttcaggatcagtaactgaataacaggcaagtca

SEQ ID NO: 795375 - DNA, 620 bp, Homo sapiens
catggggttggagctctggggggcgtaggtctgtgtgcattctttttgtgccacagatatgggtggttgctcagggtggaggagaattcctttttctttatgcttagtttttctcctgtgacagtgttggtgcaagggtgggccttgctgattctgtgcttgccaaggctctgactgcaatggyggtttgtggagagagggtggtggtttgtatatttgctgtagcagtggaagggcagggtgcatgcatagaggtgcactgacaaaccaaggaaagcaaacatgcccacgtacacacttgtcatcaaagtgatgtgcggggttgctgttggcccacgggaagctgcattgtgaggaggtagcagaaagtctcttgtgtggccatgggggcagcactgttggagctctccattggtcagaaacgtttcaccagcacagaagccatgatgcaggtccctagggcactcaaggcttctttgaacaagtgtgactaggctggggccaactggagaggccaggaaattaaggggtgctcatgtcagaccagccccatgtggtggacaagaacaccctgcagagttaaggttcaatagttcctctagggctaacgtctcctatgg

SEQ ID NO: 795376 - DNA, 482 bp, Homo sapiens
tccaactttcccagcaccacttatttaagagggtgtcctttccccagtgtaaattcttattatccttgctggagatcattttagctttatttgttggttctctattctgttccatttgtctgtgtgtctgttttatactartactattctgttttgaataatgtagcctggaaatgtattttgaagtcagacaatgtgatgcctccagctttttttttttcttagaattgctttggtttaagatagccataattaatattcaaagggctctaatggaaaaagaagaaaatatgcaagactgtctgagtaatgtaagtagagagatgaaaactctgtcacagaatcaaaaggaaatgctataaattaaaacctctccagcagaaatgacatatgccttagatgagctcatcgatggactggaaacagctgagaaaaaaaatcagtgagcttaaataaatgtcaaaagaaattaccaaaactta

SEQ ID NO: 795377 - DNA, 587 bp, Homo sapiens
ctccgacagtcttggcaaacaaattaggctgcttgctttccattaagagagtgtggattccgaggggtgctcgttggctgcctttgctgttatgcacttctttagtgagggaatggcttgggaagccattaaccagattgaaatatacaaggagctctctaattgctttactgagcaggctctgtagatatttaaaatcctgcctacaaagaagaataaaacagccttgcagagcatggaggctgcagcaagcgaacacacwtggacaaagatgcccagagatggaaggctgtttcttctgcttacttgtattgttttttttttccctttggagtgagttaatttattattttaaagcatgcctactaacatctggcacttttagaaacatgccattctattacagtgtcttcctccaaagaaaaataatttcagtgatgccaagatcaagccggtgaattcttagcagagcttggtacttgctaggtgctcaataagtggtaggcaggctgagctgaatgatgagtcttttcaggagaaattctcaatgggtgaaaccctagaaagagagtaggagaggggacttg

SEQ ID NO: 795378 - DNA, 617 bp, Homo sapiens
atgctggaaaagctgaggccgaagctttagaaatgtttcctactttcagagttgggattgaattaaaggacaaagtgggagagaaatatgagcctaaaccacagaatcacagatcttttgccaggctcctggaataggggggcatcttttggakccataattaagtcactaccacaagattattgtcaattgttagtatttcatacattacagatgtttctaagtgattggtttcatggaaggggattgtggcagacgttgtttaaaaatatgacctctcacttgttccatttctgattttccacatagaacagatgatcttgattgtgtcatggtcaacccagaattatgacagtctgggaagattaggaggagaataaactgctacttaaaccttttctcagcagcattggaaagcatgtgtttccagcaataactcctgggaactatttggtcagtatatgcttcagctgtaattaaaagggcatttccttggttttaatttcttttaattaattaaaaaatatgccgtctgtgtagggggagttatagtcccttcctagatgtggaaaaatgtgatttctgagaccaaaaagcagtatttccaaaagagtgtt

SEQ ID NO: 795379 - DNA, 625 bp, Homo sapiens
gaaccctttctgatctgtaacaatctcagcaaatcagatttattggtcatagtatgagaaacactacccttaaaagttacaccaggaaaccttggttcacctctctccaactcatagtccctgtacccagcttctagagccatcaccgaactggagattggggacccccatcagaacagtgcaaggagaaacatgtgcctagtatcaaaagctgaagattagaggcttttttccacgttcacattgttctaacattgtatgttatcatatcagttagcttggctcctggggacttgcctgggaacctagcattgtttccataccatgacactttagytccaaccaggcaacctagaaatagtttagaatgtaattcacaagttggggacctgtactttagcttcaaagtaatgctgttgatttgtgagcagataacctagaaatatatacatcaaaatgtttattttactcttcaaataagcaattttcaaaaaagaattgtgtattttatagggtggaagtatagcatcactaagttgtattcattctagggcgtatgtttttaaaaaaaaactagtgtcattactttgcacaggcatgccttgtgtaaatataggaaatctaa

SEQ ID NO: 795380 - DNA, 527 bp, Homo sapiens
aactaaaagcatgggtagactaaacacatgaacacagagagcctcctcccatcaatcagctttgatttttatgaagccatagttaccatgaggtgcatctgaacactcccagagcctgcttgccatggggaaagggcctgtgatttcatagcccatttctgtcccaaccttagttgatgactttgggaataggttgagcttttcagttgaagatcctgaaatcacaaatgacttgaacccaaatgctccctgtttgcatgggctcaccaccatgccttttgtataaatgggmtatcatgtttaggtagcaactacataatcctaaaaggaactcctattttctggaagccttttctggatcccccaacctaccttgacccagaacacccccctttggtgctgccatagcctcccacatatacgtccagctgtgccacgttctgattgttgcgtgtctgcatatgagctccccaaggtcagagaccatgccttctatctgcattcccagcatctaggtctgaagaaac

SEQ ID NO: 795381 - DNA, 581 bp, Homo sapiens
gtacttttgtggtaccgacaataaccagtgccagctgattcctggttcgaaggagtatgtgtcctttggggaatgaccacaaaactttcaacttgaggttgggggcaagaaggggctttggagagataaggtgataataaatttagttaattagaattctttctggaactcattttgatgctcttatctgccagctcagcgtgcgttatggatgttaactcctttatcctcataacttttctctgaattcattatagaacagagacatgatagtatttcaaaagacaaagtatttcagagagaaaaaagaacaattgtggtgaatrggtgaaaatctctcagattcattgttcttatggaagtggtggtgccttgatgagacaatgttgagaaaaaaaaatcagacacctatcaaggttttcattaaaatattacttggcatttgatgtattatgaatataataataataataacatgtctccttagtgccatgtattgaaacaagcatttcaaatcctcatagcagtgcaaggtaggttctatcatctcattttacaaatgagaaaaaccaggctccggg

SEQ ID NO: 795382 - DNA, 598 bp, Homo sapiens
caagcaaatcggtacctatttctccattttcaccattatatttcaccactaaaataattaattttttagagggacctcaacctcttaatttgactcacattcaaatctgtacaaatcacttaatcataggcagaagttaaagtgtaaaagcatgagtcgtctacaataaaasggtccatctactggttctgattccagcagcaactctaacaggcatacaaaaatgacccatgcccaccacacaggaggaaaacatagttgcctgcaactatgaagaggttaaccctgaggtccatctgtccaagatctctcccagacagccacagagcctcaaatccaaactattgggttgacttttttgggtgaaggaattgctgccaggaagccccagtttaagcggcccaggtatgtttgggtttgcagatctgcactttcaaccagccctttattgtattacctggttcataatttctgcaaattgtggaagtttactcagctccacaagattcagccaagtcatgtcaaggatccagcgatagggtttgggaggacaggctttcaggtccagagctgctccccctggggaagagcgtcagac

SEQ ID NO: 795383 - DNA, 625 bp, Homo sapiens
gaaaggaacacagattttgattccaggaagcaggatgctgtggtaacaaatgcctacagatgtggaaggtattctggaattgcataatggggagaggctggaggaattttgaaactgcctaaaagagattgttggtgggaacctggaggttaaggtgcttctggtgaggcctcagacaggaatgtggaagataatactggaaactgaaggaaacgtggccctcgttataaggtggcagggaacttggctagaacttggaaatcatctggtccagcccccttacttgacaaatgagggaatgaaaatcagagaaagggaaagggagactgatttactgagagtctacatggggtccagcaccacacctaaatgatcacatttaaatcttcacaactaccttttttaaaattttatttatttatttatttgagacagagtctcgctctgtcacccaggctggagtgcagtggcgggatctcagttcacygcaacctccgcctcctgtattcaagcaatcttcccacctcagcctcccaagtagctgggacattacagcctgccaccaccccaggctaagttttgtatttttagtagagacgggtttcaccatattggccaggctggt

SEQ ID NO: 795384 - DNA, 601 bp, Homo sapiens
gacttattagtgaaatgtgaatgttttcccatttttgaaaaagaggatcagaatttataccattagttttacctatgtgtttgatttaatttttaaattttaatgttcaattagatgggtggccaaatgaaaaataactccaattactaaagctgctcaaattgactctatggaaacactcctatttatatgcactgagcaactgcaatttagttgttctttaaaatgtgagttttgaaaattgccctaatgctgagatttgcttcatgtttatatttcttactaccaattttcatctaaagcatttactttttaagttggttcactaaagtcataaactgattagctcatcttgggaaaaaaagcccaaaatcttagtgggtgccttttctttcacaaatgaagtcatttcatcttcttgctatttttttaaattacyttggaatactatcaggatagactcaaacaactagaacctaagaactcatttggaagatcaaagcaaggggttttgctggacttatttggaatattgaatttcttcagtttaattaacatttttgaaaccatgggatgagtcctatgcaatacaataaaaaat

SEQ ID NO: 795385 - DNA, 643 bp, Homo sapiens
acattagctgaactaaccttacagagctgttccgtatatgtcggatctctctattgtagcttgcgttgttgataatggtttgaaatgccacaataggatccataagttgaccccagaccttagatccaaggcgatccagaatcaccataaaacagtgtaacgctggccagaaaggatccacactatcatctgaaatacaatggcacaatcgttgaattactaaacagttagaaaaacatactacaatatattgagaattaagcatattctttatctggtgagtagcaacccaactaaaagccaaggagcaaataatttaaagcagtgccgccrccagtcctcagacacacagagggtttcaaaagcagccacattttcaagattttttgcaagcaatactatgatacgtctgtaaaaaaaaaaaaaaatttagtggcaaacaaattacttaatgggcaagaaaacagtctaggtaagcacaatcttttcacaccctgtttgccataccagaaacaaccttttctaattcagctcctcaacccctgccaaaactttgtagtcccatcctccaataactaacagaaaagaagaggaaaaaaataaaggaaagagaaagaaacttggtatttacagatctacatga

SEQ ID NO: 795386 - DNA, 624 bp, Homo sapiens
aaactgctataattcagatgatctgattgaaaatacaggaaatctaaaagaatctttagaaaatgtatgggaattaataattaggtaaagttactagatacaaaaacagaaaataaacattttaaagtaaatctctactaaatgtctatgctgccataacaaatatcacaaactcagtggcttaaagcaacagaagtttagtatcttacagctgtgcagctgagaagttctagatagctctcacagagctacagtcaagatgccaacagggctgcattcttttctaaggctctaggagagaatgttctctgctcatggcttggtagaattcagttccctstgattgcaggactgttttcttgctctctgtgaactgaaggctgttcccagcttctagaggccactgcatttcttggcttgtggctccttccagcttcagagccagcaaggccattgaatccttctcaggtggcacctcttaggcccattcttctgcctgtctttcacttttaagggttcatggaagtagactgggcccacctggataacccaggctagtctccctatcttaatctctctgattagcaaccttcattccatctacaacccttatttccttttgtg

SEQ ID NO: 795387 - DNA, 589 bp, Homo sapiens
gttgagcaccttctcatgagcttgttggcaatttggatattcatttttcggaaatgcctgttcaagttttgactcattttttaatgggccgtatttctggatatatagtttttggagaaaagacctttgttgatttgtaataagttctccctgctgggcatcacctgaattcctaacccacaaaatcaacaactatttgtgataacacagcttgggaactgctgagtgggagaaccttctggtgaagcagctcacagtagagcttgsgtcctagagatctaagctgtgatggagtcagtcagtgtggaagacagaaggatcctggttctctgtgatgggaattccaccacctctgggcatctaagatgtactcactgagacctagctctgcctaaccatggaaagcactgaataatactgaatacataaaaataaatgaagatctaggcccagaaagaggcatcctttctatagagcactttatgtggcttcctgctctaaggcagtcagaaaagagatcaagaagttggaaacagggccaggcgtggtggctcacacctgcaatcccagcaatttgggatgccaaggt

SEQ ID NO: 795388 - DNA, 589 bp, Homo sapiens
gttgagcaccttctcatgagcttgttggcaatttggatattcatttttcggaaatgcctgttcaagttttgactcattttttaatgggccgtatttctggatatatagtttttggagaaaagacctttgttgatttgtaataagttctccctgctgggcatcacctgaattcctaacccacaaaatcaacaactatttgtgataacacagcttgggaactgctgagtgggagaaccttctggtgaagcagctcacagtagagcttgggtcctagagatctaagctgtgatggagtcagtcagtgtggaagacagaaggatcctggttctctgtgatgggaattccaccacctctgggcatctaagaygtactcactgagacctagctctgcctaaccatggaaagcactgaataatactgaatacataaaaataaatgaagatctaggcccagaaagaggcatcctttctatagagcactttatgtggcttcctgctctaaggcagtcagaaaagagatcaagaagttggaaacagggccaggcgtggtggctcacacctgcaatcccagcaatttgggatgccaaggt

SEQ ID NO: 795389 - DNA, 613 bp, Homo sapiens
atctaatctgaattgtgagaattatttacacttctacttagctagcactctgttatctggacttctatggaacatgctattttgtgctaccggacttaaaccctttttatggatatgcatttttgtggggctaataaaaaagaaaccccaaagcctagtcttacagataatattttaaaaatctttttgtctttacagcttctcggtttaagtctcctagaaacctcaaaacatctgacccaaccatgtcaagcttccgagtgacttgggagcctgcccctggggaagtgaagggttataaagtcacattccaccctacgggggatgacagaagactgggggagttagtggttggaccctatgacaacacagttgttttggaggaacttaggtaggaattaactacgtttgtatcaaaggatgaaattaatttgtttamaaggttgaatagcttttgtaaattagtaggctttacacaaatatcacttatatgtctgtttgccagcaaagtatttaaaatcagctaaagctgttttcttatgcttggtgctgctggagttgaagttaggattcaggggtcagcaacagaatttaggcctgagcaggatttttt

SEQ ID NO: 795390 - DNA, 685 bp, Homo sapiens
aagataatttttggctcacaaaaacctttttttagtttacatattttatcagtccatctcattcttgtctgctatgaccattaaatattgcagaagaatgcaatatctaatgatttgactacattacaattttattaaagttattagtacttcatagttagacagctatacattctcatttatttatttcagcctttgaatttgtgagcccatcaaattttcaacaatggcttaattcaagtctccagrttctatgaaagagggcaggaaatcgagtcaaagataaaggaaagattggccactgaaataatctttggaggaactgctgactcttaagactgttaattgaggttaataaatcagatggacatattttcagagtcttatactccacatcactgagctagaccatagtactgagacaggcaacactgaggatccagggagtggtagaggtgtgacaaggaagtacccttgccaacaatttgcttcttactgtcttgtctcatgattgccatgtcagggatggagtgtctcaccagagctgaggcagacattgtgttgctggtggatggatcatggagcatcggccgggcaaattttagaaccgtgaggagtttcatttctcgtattgtggaagtctttgacattggccccaaaagagtacaaattggtaggttctgac

SEQ ID NO: 795391 - DNA, 445 bp, Homo sapiens
ggtagatatctcctgtggtttgaatgtgtcccctccaaaattcagctgttaccaatatggtgataccaagaagcagacctttgagaagagattaggccatgagaattccttcctcctggaagggattaaaactcttgaaaaggaggcttcactcarcgattggccccttggccttgttcctcctgccctgcaaggacacagcgttcctcctctccggagaatgcacccctccccaacaccaaattccagcaccttgatcatggattcgcagcctccagagctgtgagaaatacattatcattctttgtaaatggcctagtctgaggtgttctgtgatagcaaccacaagctgagggagataataccctttcacatgctaagggagattctttccgctcataatttgcagagttcttatgatgaaagttgaatgctaatgatttat

SEQ ID NO: 795392 - DNA, 537 bp, Homo sapiens
tgagagctccatggctccacccaccacctgatcctccctatacaatcacagctgatgcactcttgaaagcaccacctcctggctggaggccaacaaacaaaaccagctcacttaacaaaaatacaaccaaagaccctcacagagtccacctcagtctcctgctccctccaccagagcaggtgctggtatccacagctgagagacctgaagatggagcacatcacaggactctgtagacaccccacagtaccagcccagagtccagtagctcagctgggtggctagatccagaagacaaataacaatcactgcagttygactctcaggaagtcccatcactaaggggaaaggggagagcagcacatcaagggagcacccccatgggacaaaagaatctgaacagcagcccttgagtcccagatcttctctttgaacctatcagattaacagcagatttctcagcagaaatcctacaaactacaaggaattggagttctatctttagcctccttaaacaaaacaattatcagccaagaa

SEQ ID NO: 795393 - DNA, 537 bp, Homo sapiens
tgagagctccatggctccacccaccacctgatcctccctatacaatcacagctgatgcactcttgaaagcaccacctcctggctggaggccaacaaacaaaaccagctcacttaacaaaaatacaaccaaagaccctcacagagtccacctcagtctcctgctccctccaccagagcaggtgctggtatccacagctgagagacctgaagatggagcacatcacaggactctgtagacaccccacagtaccagcccagagtccagtagctcagctgggtggctagatccagaagacaaataacaatcactgcagttcgactctcaggaagtcccatcactaaggggaaaggggagagcascacatcaagggagcacccccatgggacaaaagaatctgaacagcagcccttgagtcccagatcttctctttgaacctatcagattaacagcagatttctcagcagaaatcctacaaactacaaggaattggagttctatctttagcctccttaaacaaaacaattatcagccaagaa

SEQ ID NO: 795394 - DNA, 623 bp, Homo sapiens
cccaataaatttgcaaaaaacatttagaactattaaatgagtttagaaatgccacagaatacaaagtaaacatacaaaaatcaattttatttctgtatactggaaaatgaatttaataacactataagtaaaaatacaaaaccatttgcaattgaggaaataaactcaaaagatattttaaatctaaaaagtatgtargactaatgctgaaaattatgaagtactggtaaaaaatcaaagaagatgtaaataaatagagatacatactatcttcatggattagaacatagatgtcaaatctttccaaatcaatacacaagattaatgcgattcttatgaaatctcaacaagcttttgcatatatagggttattctagaatgtatacagaaaggcaaagtaattagaatatcaaaaacaattttgaaaaagaagaaaaatgtgggaggaattagcctactctcttttaaaacttattacaaagctacagtaatcaagactatgtagtactggtgaaggcataggcatgtagatcagtagaacaaaatagacaacccataaataggtccacacacacatgtccaactgattttttgataaatgtctaaaagcaatataaagaaaa

SEQ ID NO: 795395 - DNA, 495 bp, Homo sapiens
attttatgtagatgtagttaatattccttttcataagagaaaactgagactcagagaaactaaatgacttcttaaaatcatacaacttcaataaagcatttttttaaacaagttcttcaaatttcaagattattttgtccttcctggtacaacaaaactgcattgcaaacaaggaaaattcaaactcttaagtttaatattcaaggattttaacattttgaattgaagccaccttaccaaatttgttactactatttcccttcaaatactccaaaatttagtaacttaattttgaaaaattacttatacagatatctctctccttctgagtyttttccctgtattttctctataactgtaataattctcccttctatctatgtcttagttctacctttttttatttaaagctcagctaaaaaactatcaccctgaagataacttttttcatattgtaacaaatattcagtttgacataccataatactttaaaca

SEQ ID NO: 795396 - DNA, 564 bp, Homo sapiens
ctgttgatgtaacagattaattgatgtccaaatgttgaatcagctctgcctacctgggattgatcatggtgtgtaattctttttagacattatttgacttgatttgctgctattttgttgagaattccttgcttctatatacatgagagatgttggtctatagttttttyattcttgtaatgtctttgattttggtattatggcaattctagtctcctaagatgagttagaaagtattccctttgcttctaccttctgaaaaagattgtgcagaatataatttcttccttaaatgtttgataaaattcacccatgaatccgtatgggtctggagctttatgttctgtgagattatgaaatattgattcaatctctttaataaacatgggcctatttggattgtctatgtcttcatgtgtgaattacggcagattgtgtctggcaaggaattggcctatttcatcaaggttatcgaattagttggcatagagttgttcatagaatgcctttattatccttttaatatccatgagatcagaagtgatgtgactctttatttttgat

SEQ ID NO: 795397 - DNA, 620 bp, Homo sapiens
catatctatggtaaactaaggaactgtcatcttttggtaattatttttgtaaagcagcattgtacattaaaaaaacaaaagcctttagctatatggcctaaggcaaatttacttaacctctatgaacctcatttgtctgatatgtaagaaggtaaaaataataacacaagaacgacagcaactatagtgacaacaaccacaactctcagaggagttttggaaattaaatatgaaggaagtggaaaaatattttaagtttaaactcagtatgtaaagggaaaatcacacatgaccaaatttagattgaaatttcttaaatcatccatcacattgattttgttctttcctgccacacagtgataaagataatatgatgagttcaatgatagttawcctgtagacaatgacttttttattaaaaaactctattttcccccaaatattctgatatttgcatattgttgggagataattctccataattttcaaatttctgcacattttgaatccaattctgttttggaccatctgttcaaggatgttaaataaaaacagcctagaaatacagaaacagtgtatccctccaagccagggttcagaattatttcttgaacagaata

SEQ ID NO: 795398 - DNA, 620 bp, Homo sapiens
ggacagattctttcctaggacctccagaacacacacctttatgttagcctggttagacccatgtcacacatctaacctacagaactgtaagatgatgaatttctgttgttttaagccactaagttcgggagaatttggaagctaattcaccaataggatactaataaaattacctttcctatttgatttataatcactagttctgagatctcttggtaccaatttttaattacatattcattgatctaacttatgtcagcttgaaaatggaataactgaatttgaaaacagaacaagtggctttatttattaaattaaacataaagttatttggttaaattrtagataatatagcattttcccaatggttcttggatattgaaaagagcattgtgctcgaaataaactaatgattattggtacaaataaaatagcttcaaggatttcataataaaattagggagactatatgtaacacaacattatgaaatggaaacatgttatctgaaagttttcattttaatttaaagcaatgattgtaaaaacttaaagacagaaagtgtataaatttggtctttaggtctttttgcctatgattagaagtcattagtgttatggga

SEQ ID NO: 795399 - DNA, 467 bp, Homo sapiens
attagtggtgataacatgtatagctatttgtcttcaaccttaatttaggttataaacacccctttatatttttaagactgatccatgttgagtgttgctgaattattaatgcgcaccttttgtgcattaatgcttcagattctttgaggcacaacttgttcctggactcttatcccccattccagctgagccaccctggttgtgactgacactgagtatgcctgttcatttgcccagaagctgcctatagaccaaattcagttacacagaagtgtggtggggttacttaccggtcagacaaattctgrgcagtgaaagagtgcacaggggaggtggttataaagtaaactcctttttaatgtcttcatctaatggatttttccaaggatagtggcagtctttgtaaaggaaatagaatttggtaacagatgaactaatatcttctttcaactctttaccacatttta

SEQ ID NO: 795400 - DNA, 635 bp, Homo sapiens
tagttctgaatcattgtgttaaaattatgatttgttttagtatagtgcttcaggaaataataacaacacttttagtatttcaaataatacttttaaataaaaaatcttaggaaggttgaaatttctgaagttggcatatagtgttcctcatgctaatatgcttcttgaaaggttagaaacatttagaggtgccagtagttgttcagggcacaaagataccataaatctttctcagacacatatatatatgtgtgtgtgtgtgtatgtgtgtgtgtgtgtgtgtgtgtrtatatatatatatataacacattaatttttcagtattttaggaaagatttaagagtataatatatatactcttaaaatctgataaactccaaatgaaatttatatactggtgggagctgagctcatttctcagctcagcatttctcaatgctttctactgtgctaaaagtagagaaaatgttaacgaacaactaaagaataaacaacactgccttatattaaaggtacagatcagcaaacagaaatgatgcctgttatataaggaatttagcctccagtccaggcaaggcttcacagggtcacaggttgagacaaggttacaaacttccagaatcccttttgtaaca

SEQ ID NO: 795401 - DNA, 635 bp, Homo sapiens
taaaagttttaaaatttaggatacttatctctggggaaggacgggtgggtggaagtagaaaacaaaagggattcaaactttatccaaaacagcttattcctataaaaatatttaagactttaagcaaataggctattttaataggctcttaatttaacagccatccattcyggaggcaagcatatgtttcaaaattctctacatgttcttatatttttaaaattcctcaatttcaaaaattaaacaggaaaacactatgctacaatattaataatgatattgagaaaaactgaagatttttgtttttcaaggcttatcgaagtttcagatatgaacatttattacttgtatttggtacttactcattacaaacttggaaatggatttcttaaagtaagcaaaagcatctaacatcataattaccaataataataggacctcatatttctgaatttgattttcaaccattttttgaaatgtgaatctacataccctcgattccaatccaatgaagaccctttgtgcacccgttctacatagacacctatttctgatgctggcatatacaaatagtagcagtttaatagactatattgcacattaaatatggttaagattcttttataaacaaaata

SEQ ID NO: 795402 - DNA, 635 bp, Homo sapiens
taaaagttttaaaatttaggatacttatctctggggaaggacgggtgggtggaagtagaaaacaaaagggattcaaactttatccaaaacagcttattcctataaaaatatttaagactttaagcaaataggctattttaataggctcttaatttaacagccatccattctggaggcaagcatatgkttcaaaattctctacatgttcttatatttttaaaattcctcaatttcaaaaattaaacaggaaaacactatgctacaatattaataatgatattgagaaaaactgaagatttttgtttttcaaggcttatcgaagtttcagatatgaacatttattacttgtatttggtacttactcattacaaacttggaaatggatttcttaaagtaagcaaaagcatctaacatcataattaccaataataataggacctcatatttctgaatttgattttcaaccattttttgaaatgtgaatctacataccctcgattccaatccaatgaagaccctttgtgcacccgttctacatagacacctatttctgatgctggcatatacaaatagtagcagtttaatagactatattgcacattaaatatggttaagattcttttataaacaaaata

SEQ ID NO: 795403 - DNA, 617 bp, Homo sapiens
ggaatactttctaatccattctataaagacagcattaccctgataccaaagccagacaaagatactagaagaaaagaaatctgtagtccaatatatctgaaaaatattaatgcaaaacccaaaagcacaagcaaacctaaatcaatagcccattacatggtttatatatcatttactcttggaatttattcctagaataagaggatttattcctggaataaaaggattttttgctggactcaagaaatatgatttaatatatagagagcaattaaggtaacataccccattaacagaatgaaggaaaaaaatcatcttgatcattttttacatgatcacatgatcatctcaaagcacagaaaggatttgaaaaaattcaacacgttttcataataaaaagttagcaaactaggaacagaaggaaactacctcaacataataaaggtcatccataaaaaccccacagctgacatcatactcratggtgaaatactgaaagcttttcctctgggctcaggattaaggtgaggatgccaacctaaactacttctattcaagagagtgctaaaaaattctagacagaccaattaggcaagaaagagaaataaaaggcaccc

SEQ ID NO: 795404 - DNA, 646 bp, Homo sapiens
gggaattagagagactctggccttttcctatatggtacatggggtggacattgtttttaatacttattatacttaacatgtaaaagggagagacccacactcttttttgttgacctttacctcatagtgactctatctactaacaaatattgtccagggccctaaatcttactctcctagattttcttttcttagaaaatcaaagcatgcactgagagtcttgaggcagaggaatggctagaatttggtttaagagacagaaggaaagaaaaccatgctacgcattcccttgttttttttcaaatccagctttagatatggttcaatttaaagagaaaaggcttaattcttttcatttctcccaaattatgtctgctgcttgtttactcttttctactgtttcttgtaaagtttttcattctgtgataaagattaaagatctrtgcgatttcttgttgtaagcatatgactaagaattgattttttttagcatagtttaagtacttttcttcttggtaagtatgctataatcttggaagttacagggtaccagaaaaagtaggtgatatttctctgagggaagaaaagggcagcttttatcttggtttggacttgctctgtcagtatatgcttaggaagaatttat

SEQ ID NO: 795405 - DNA, 552 bp, Homo sapiens
agaatttagtagtatggcttattatgtgcatgggttttggagtcaggcataattgggttcttagctctactccttagtagctgtgtgaccattagcaggttacctaatcttggactctgtttctttatttgtaaaatgaggattacagtatctcataaatgagataagtacgaataatgctgcaggaacaaagttttgggagagaacctagtaaatacctttttcactttttttttttttttttggttcatgtactctgaatcttgtaatgcattttaratacatttgagggtctgaagtctgaggaagtgagattttttataaagcttattgtcatcagcgatcactagtatcgttgttgtaataatgataagagagtcctttgaactggatgattagttgttgaaggttaggtaatttgttactggttataaaacagtgaggttcctgctgcagagttgaacaggcaacatcctacctgaagcaggcaggattatgtatttaaggaggttaaaggaatatcagatagtaggatcaggaaaaactgaagta

SEQ ID NO: 795406 - DNA, 620 bp, Homo sapiens
acaaaattttggggtcacccattagcaaagattaaaaagaaatttaatatccagtttgggcaagtatgtggaaaaacagtcttgtacactgctagtggaaatataaataaataaactgtgtgtggaactaatgggtaaaactttattaaaatattcatacccattgactcaacaattccccttggctgtgcatggcagctcacgcctgtaatcccagtactttgggaggctgagggaggaggaytgtttgagcccaggagtttgagaccagcctgggcaacatagggagatctgcctctccaaaaattaaaaaattaaaaaataggtggttgcagtggcacatgcctgtggtcctagttacttgggaggctgaggtggattgcaacagagcaagaccctgtctaaaaaacaaagaaacaaacaaaacaaaataaaacaaaaatccttataggagagacacatataagtatgaaaatatatgtatacaaggatattctctgcagaatggtttatggtcaagaaaaattgaaaaacaaccaaaataagcatatgacatttaagttcatccatacagtgaaatgctatacataagctagaaataattaataaaatcatatgtt

SEQ ID NO: 795407 - DNA, 633 bp, Homo sapiens
ttaatttcaccacaattgcttctctatgtattttatactatataaaattatatgtatataattattttatttaatatatgtatatatacattttatgtaataattatatatatttatatgttttattatataaaaatttatattttataaaattatataaatataatttatatataaatttaaacatatttatattttataaaattatatattatataattatatattatatawtataaattatatattatataatatataattatataatatataattatataatataaattatataattatatatttatatatttaataatatataattataaaatatatattatataattatatatttatatatttaataatatataattatataatatataactttataaaatagaaacatgtctaatacatatagacatataatttctactgaatcatttgtacataatgtgcagatatcatgattcttcacctctacatacttcagcatatatcttgtaagaacagtgccattctcctacatgccataatcactctcacataatttcacatcactataatattacctagtgtaaaatccctattttaaattccaccaattgtcccaataacttcctc

SEQ ID NO: 795408 - DNA, 633 bp, Homo sapiens
ttaatttcaccacaattgcttctctatgtattttatactatataaaattatatgtatataattattttatttaatatatgtatatatacattttatgtaataattatatatatttatatgttttattatataaaaatttatattttataaaattatataaatataatttatatataaatttaaacatatttatattttataaaattatatattatataattatatattatatattataaawtatatattatataatatataattatataatatataattatataatataaattatataattatatatttatatatttaataatatataattataaaatatatattatataattatatatttatatatttaataatatataattatataatatataactttataaaatagaaacatgtctaatacatatagacatataatttctactgaatcatttgtacataatgtgcagatatcatgattcttcacctctacatacttcagcatatatcttgtaagaacagtgccattctcctacatgccataatcactctcacataatttcacatcactataatattacctagtgtaaaatccctattttaaattccaccaattgtcccaataacttcctc

SEQ ID NO: 795409 - DNA, 607 bp, Homo sapiens
gagagagagaacgaaaatgaggagtacctccttcatgcgccgagttgcccactcactcccttactgctcctaggccctctggaagctcaggctgagtccgcagatgaccagggtgcagtgcattgagtcccagaagcaggcatctgcactctgtgtcagtgaccatttgcccagtgcattccacattcccgtctcagtccttctctcctgcccagtcaataattttccctgcgaactaggtcagtccctcatattatgaagtaagccctccctcattctggcctctagggtgacttcctgcrtcatgtttcttcatcctccaggccagggaatgactctgtccatctggaaggctgtgctgcctttcccgcccctcctagagcacagtgtgacagctcactgctgctggattaaaagccctcaggacccagagggcaaaggaaggagagtctctggaagccagaacagctggagctgaagaagggatttaagttagactttaggaaggactttctgggcaattgtaccctaaaatagacaggagaggctgggtatgaggaaaagaaggtggcaggtggatcaaagtcaggagaaggcccactcatca

SEQ ID NO: 795410 - DNA, 635 bp, Homo sapiens
tcgtgcctttaatcccagcattttggaagactgaagcaggaggatcaactgagcccaggagttcaagaccagcctgggaaacatagggagactcatctctacaaaaaaatttaaaaataggccaggtgcagtggttcacacgtgtaatctcagcatttggggaggccgagktgtatggatcacctgaggtcaagagttcgagactaggcttgccaacatggtgaaaccccgtctctactaaaaatacaaaattagccaggcatggtggcgcacgcctgtaatcccagctacttgggaggctgaggcaaaagaatcccttagaacctgggaggtggaggttacagtgagccaagatagcaccactgcactccagcctgggtgacagagtgagactctgtctcaaaaaaaaataaaaaaataaaaaaataaaaattaattgggtgtggtggcatgcacctgtggtcccggctatttgggaagctgaagtggaggattgcttgcacctgggggttcaaggctacagtgaaatgtgattgtgccactgtactccagcctgagtgacagagagagatcctgtctcaaaaaaataaagaaataaagaaaaagttaatatgcaatgattatttcttttcccc

SEQ ID NO: 795411 - DNA, 635 bp, Homo sapiens
tcgtgcctttaatcccagcattttggaagactgaagcaggaggatcaactgagcccaggagttcaagaccagcctgggaaacatagggagactcatctctacaaaaaaatttaaaaataggccaggtgcagtggttcacacgtgtaatctcagcatttggggaggccgaggygtatggatcacctgaggtcaagagttcgagactaggcttgccaacatggtgaaaccccgtctctactaaaaatacaaaattagccaggcatggtggcgcacgcctgtaatcccagctacttgggaggctgaggcaaaagaatcccttagaacctgggaggtggaggttacagtgagccaagatagcaccactgcactccagcctgggtgacagagtgagactctgtctcaaaaaaaaataaaaaaataaaaaaataaaaattaattgggtgtggtggcatgcacctgtggtcccggctatttgggaagctgaagtggaggattgcttgcacctgggggttcaaggctacagtgaaatgtgattgtgccactgtactccagcctgagtgacagagagagatcctgtctcaaaaaaataaagaaataaagaaaaagttaatatgcaatgattatttcttttcccc

SEQ ID NO: 795412 - DNA, 635 bp, Homo sapiens
tcgtgcctttaatcccagcattttggaagactgaagcaggaggatcaactgagcccaggagttcaagaccagcctgggaaacatagggagactcatctctacaaaaaaatttaaaaataggccaggtgcagtggttcacacgtgtaatctcagcatttggggaggccgaggtgtatggatcacctgaggtcaagagttcgagactaggcttgccaacrtggtgaaaccccgtctctactaaaaatacaaaattagccaggcatggtggcgcacgcctgtaatcccagctacttgggaggctgaggcaaaagaatcccttagaacctgggaggtggaggttacagtgagccaagatagcaccactgcactccagcctgggtgacagagtgagactctgtctcaaaaaaaaataaaaaaataaaaaaataaaaattaattgggtgtggtggcatgcacctgtggtcccggctatttgggaagctgaagtggaggattgcttgcacctgggggttcaaggctacagtgaaatgtgattgtgccactgtactccagcctgagtgacagagagagatcctgtctcaaaaaaataaagaaataaagaaaaagttaatatgcaatgattatttcttttcccc

SEQ ID NO: 795413 - DNA, 612 bp, Homo sapiens
ctcagtgccagcccctgagctaggtactttataaatattatctaatttaatcctcactgcaagcatgtaaggtaggcattattatgagtacataatatgagtatagcagtttcccctcatccaaagggggtacgttcctagaccccagtggatgcctgaaatcatgtatagtacagaaccctatatatacaattttcccctatacacacatacctgtgataaagtatcatttataaattaggaacagtaagagattaacaataataactaataataaaacagaacatagtaatatgccagcatcactactcttgcactttgaggccattattaaataaaataagagttactcaawcacaagcactgtgataccaagatgagtatacactgtgaggatctatctgataacccagatggctatgaagtgactaataggctctagaaattgtagacagcttagatacgcaggacaaaggaaggatgcaggtcccaggcagaactaagcaggaaggcgtgagatttcaccatactacttgggacagcatgtaattttaaacctagaagttgtttatttctggaatcttccatttaatatttttggaccacagttga

SEQ ID NO: 795414 - DNA, 517 bp, Homo sapiens
ccggctgaagccatggcagaagaacatggattgtgaagatttcatggacatttattagttccccaaattaatacttttataatttcctatgcctgtctttactgcaatctctgaacataaaactgtaaagatttcatggacacttatcacttccccaatcaatacccttgtgatttcctaggcctgtctttactttaatctcctaatcctgtcagctgaggaggatgtatgttgcctcasgaccctgtgataattgtcttaactgcacaaattgtagagcatgtgtgtttgagcaatatgaaatctgggcaccttgaaaaaagaacaggataacagcaatgtttgggaaacaagagataaccttaaactctgactgccggtgagctgggcagaacagagccatatttctcttctttcaaaagcaaatgggagaaatatcgctgaattctttttctcagcaagaaacatccctgggaaagagaatacgtgcctgggggtaggtctatacacggccccc

SEQ ID NO: 795415 - DNA, 442 bp, Homo sapiens
ttcaaaatatgtttatccctaagcattgaagaatcaattatgtatagaccaatagtctacagttttttattggttggatttaagaaatacttatgatcacagatatataaaaatatgtatattacatatatttaggtaattcaattaactggcatatttcaatatcaggtttaatacatattgaaagtcccccaattttttratattgtggtgagttaatagcatggtgaaaaactaatgcaataaattacttaaatcaaatctattttgtgttcagatattcaggaaataaacagaatattgacacggttgtgtgccactgaagtacagagatttgtttggagaaatacatcattagacaatttcgccattgtgcaaatataacagactatacttacacagatctagaccttagagtctgctacacacctaggctatatgg

SEQ ID NO: 795416 - DNA, 401 bp, Homo sapiens
ctcctgtgataacaatgccttcctctggaagaactcacttaggtggctttatggttaacttaaaaaaaatcagtagaaggagtgcactctaaaataacaataaaaaacatagtatggtaaacacccagtaacaaagttgtttattatcattatcaaatattatgtactgtacatacttgcatgtgctagacttttatatgactggcaatctgatatttttgtttataycagcatcaccacaaacatgtaatatgttggactatgatgttatgatggctatgatgtcactaaattataggaatttttcagctccattataatcttatgggaccaatgtcatatatacagttagtcattcaccaaaacatcattacaaggcacatgactgtatttgatgacat

SEQ ID NO: 795417 - DNA, 591 bp, Homo sapiens
aaatgctcccaaagtaaacatttatttcttaggggtgtagagctcaaaaaatattttaaataatcatttaattaaacaaatgcttgtaattgtctttatgaatgagaaaaaattgatattttcagaaaatattagacaagtctctaacgtatttttaatattaacggattaatattaaaatgttaatattaatagattaccctcttgttaataaattattaattcatttggtaaataaatacttcatattttttgaaatcctatttcttagtaattacatttaatatattatttcttgctataatttgacrctttaacttattaaaggcataagaacatagagtctggtttaataacattgtttcaagatgttctaaacagaacaaatgttaccaggaaacacagctaaatattgattctatacagttttaggaaaaaaagatgttttctttttttttttttgagacggagtctcgccctgtcacccaggctgtagtgcaatggcgcgatcttggctcactgcatcctccacctcccgggttcaagcaattctcctgcctcagcctcccaagtagctggaattacaggcat

SEQ ID NO: 795418 - DNA, 549 bp, Homo sapiens
aaaatcttagaaaaaaaattacccaaaaaagtaattgtgatggccaaaggcagtggtccccaaacttatgtgctcatcagaatcatctggagagctccttaaaacatagaatctgggaccctactctcagggtttcttattcactagaggtctgagttggggacctgagaatttggggaccacactttggagaccactgcacttgaggcttgggaaatcagtaagcataagttcttaaaagttttttccttgtctccttcgggagtgtcgcattgcatttctccttaatcttatataatgtaattggtatttcttttaaatatcttccttcttctctaataaattargtgacattgaaggaaatacctatattcttgacaaattaattagatgaaataaaaaaattataagggaagagtagagttcttatatcaaaaccacatatggcaaaccaatatgtaaacttctcaaaatgagcccaaatgtatgattatgtactgacaataacattcctgaatgtatggatttatataaagaatttcagataca

SEQ ID NO: 795419 - DNA, 504 bp, Homo sapiens
aatatgtatcaatttgactgctatgtaacatttcatgataccataatcaatcaacgagaattgatggatacttacattttaccattgagttggcattgagaaaaaaaaaatctcattctaaatttacatcaaggggatggaactggaggccattatgttgagtgaaataagccaggcacagaaagataaacttcacatattctcaatcatttgtgggagctaaaarttaaaacaattgaattcatggagatggagagtagaaggatggttaccagaggctgggtagagtagtgggaagagggtaatggggataattaataggtataaaatatagttagacagaatgagtaaaatctagtattagatagcacaacaggatgactacagtcaacaataatttattgtacattttaaagtaactaaaagtataattggaatgcttataacataaagaaatgataagtgcttgagttgatgggtacctcatttaccctgatgtgatta

SEQ ID NO: 795420 - DNA, 577 bp, Homo sapiens
ttccccctggaaagacagcaggtactgtagcctcgcctgctggccaggggcgccggctcagaggacctgccctgacctgcacgtgctgaccagacagcccagcgtaaggacccgtgatcccacgccaccgccctgggtttaccacggtcaccgccacctctctcacagggcccccgggggacccagccgcgcccggcctggtgtctgcaccgagggaccgcgtctcacgcccggcggctcctgcaggggaagccgtggtcagcgactcaccacgaggacagggcagggcggctgagtgcggaagagaagcatgaagctgggggcgggggtgggggaggaggaacaaaagttgcatctagacagaggtgaacgaaacaaaaccaaaacccgaacgtgttcygtcgcaggatgggcgccgcccgtcccgggcccttagcccgacatctcttctcgctgctccttgttcctgcgcacctcggccgcgtgcagctcctgcaggacagggggcgggagggcctgagggcgggggtggcttggggcgactccgggaacccccaggcgcgcaggccgtggcgcc

SEQ ID NO: 795421 - DNA, 495 bp, Homo sapiens
aaaaaaaaaaccctacaagatttgttttgaactctaattagagcaagcctcagagaatacgttttgcatatgctttttaaaaaccaaaacgacttttaacttagttattaggcaaataactggttcatcctaactttcaaatgtactaagctttcctttgcaacactctttgtccattccaaaattcttgaaascttacctgtgaagcccgtatgtgaacattaaaaaggaaaacaaaacttcagtgactaaaaggaaggtgaggcagagtaaatcactctcaaaacattcattttctactgccttctctttatgtagatatcttttatctctatatttgcggaattttcattacataaccccctcattcttaaaagagagctagtcaatcttttaacattctttggtccaagtataactaccacctatttttaatctcaaatctcaaattgttgaaacttctctgtaaactatctagtatccaaagtatttaga

SEQ ID NO: 795422 - DNA, 585 bp, Homo sapiens
gtagcaagggctagaatcaaaagggatcagagaggctggggagcagagcagttgtgtagaacattacgggtgttcacagtcgagcacataaaagaattttggtttttacatgggaggaaatgaaggttcattggagagttttgatttctgttttaaaagggtcacttctggaatttgggttgagaatagattctagactataaaagagcaaaagcagagacagccagtgggagatgatgatggcttggaccagagagatggtagtggaggtggtacatgttggattctrgatgtttttttgaaggtatagccagtgggatttcctgacatatgcgatgtgggtataggataatgagctgtcggccgggtgcagtgctcacacctgtaatcccagcactttgggaggccaaggcgggtggatcacctgaggtcaggagttcgagaccagcctgaccaacatggagaaccccatccctactaaaagcacaaaattagccaggtatggtggcgcatgcctgtaatcccagctacttggaagactgaggcaggagaatcacttgaacccgggaggcagaggttgcgtga

SEQ ID NO: 795423 - DNA, 585 bp, Homo sapiens
gtagcaagggctagaatcaaaagggatcagagaggctggggagcagagcagttgtgtagaacattacgggtgttcacagtcgagcacataaaagaattttggtttttacatgggaggaaatgaaggttcattggagagttttgatttctgttttaaaagggtcacttctggaatttgggttgagaatagattctagactataaaagagcaaaagcagagacagccagtgggagatgatgatggcttggaccagagagatggtagtggaggtggtacatgttggattctggatgtttttttgaaggtatagccagtgggatttcctgacatatgcgatgtgggtataggataatgagctgtcggccgggtgcrgtgctcacacctgtaatcccagcactttgggaggccaaggcgggtggatcacctgaggtcaggagttcgagaccagcctgaccaacatggagaaccccatccctactaaaagcacaaaattagccaggtatggtggcgcatgcctgtaatcccagctacttggaagactgaggcaggagaatcacttgaacccgggaggcagaggttgcgtga

SEQ ID NO: 795424 - DNA, 527 bp, Homo sapiens
catgagccccagagatggaggcataaaagaagtcagcggagccaggagcggtggctcacacctgtaatcctagcaggcattagctaggatttgggaggctaaggcaggaggatcaattgagcccaggagtttagaccagcccrggcaacatagcaagatctcatctctacaaaaaacacaaaaatgacggccaggcgcggtggcttatgcctgtaatctcagcactttgggaggccgaggcgggggatcacctgaggttgggagtttgcaaccagcctgaccaacatggagaaaccctgtctctacctaaaaatacaagattagccgggcctaatggtgcatgcctgtaatcccagctacttgggggctgaggcaggagaattgcttgaacctgggaggtggaggttgtggtgagccgagatcacgccattgcactccagcttgagcaacaaaaacaaaaacataaaaattagctttgtgtggtggtgcacacatgtagtcctggatcctcctggctcaggcaggag

SEQ ID NO: 795425 - DNA, 592 bp, Homo sapiens
aaggctgtaaaccactgctttaagaagacaaatttcctgattcttaggtcagtcttctgggatcctggctgggatcacaatttactgcaagagctaataaccagaattaaaatagtcttgaaaaatcactctccaatatgacagtgaaaatgtgattatattccgtcactagagggcgaaatttcttaattttcaacatttaataactatcatagactcaaggttcagaattcactgaggtttgtctcttaaaacaaaacaaaaataagtaatgaagttctaaagaaggtatactaaagcttgactttcatgctatcagctcctacctatttatgaagtgagactttaagacgcaattgagagcactgtrtcctttcattgccacataccctcttcccaaagggtttgtattttatagggtgtattgtttttacaaagtaaatggctttgctgtgtagtctatgttacaaaacagaaggtagggcatcttgaaacagaaattttgcattactaaccagctcccagaggggtcaactctgaggctgctggtagagaactatactttgagcagcaggaggtgaagaacctaggg

SEQ ID NO: 795426 - DNA, 523 bp, Homo sapiens
tgttgttgttgttgttgttgttgttgttgttgttgtttttgagacagagtctcagtctgtcaccaggctggagtgcagtggcacgatctgggctcactgcagtctctgcctccctgggttcaagcgattctcctgcctcagcctcccacctagttttttaagtaacaatgttagtttggtttacgcttctgttttaataaaagtgtattgtgtayatatgcatttgtatatatgccatatacccatatctagtgtatatatgtgtatttatacatatatacactagatagaaaatagaaactacacataccgtttgcaccttattttttttaagttcatatatcctggagatcacttcctagtatgtttctcatttcttttttataggagcacaatattctattatgtacctgtattatgttatcttaagggtttctgttatggacgtttgattgtttttagacctgttacaaatagtgcagctataaatagccttgtgtatcttttcatcaggattttattt

SEQ ID NO: 795427 - DNA, 566 bp, Homo sapiens
acagaacacaaggtgggttgatttctttctctttttttctttttgagacggagtcttgctctgtcgcccaggctggagtgcagtggcacgatctcggctcactgcaagctccacctcccgggctcacgccattctcctgcctcagcctcccgagtagctgggactacaggtgcccaccacaatgcccagctaattttttttgtatttttagtagagacagggttccaccatgttagccaggatggtctcgatctcctgaccttgtgatccacctgcctcggcctcccaaagtgytgggattacaggcgtgagccagcgcgcccggccaacgtgggttgatttctttgccacatctgtgctgccccacggagatttggatcctcccctgtcacatttagccagacaccataataaaatcaaatacttattatttttctaaatgattttaaaaattaaaaacataaattgaatatatttttcttttttgaggtagcttggggtcctaaccattatttccaatggaattactatggaaaaatatgtttaagtgctaaaaagttgtaagc

SEQ ID NO: 795428 - DNA, 604 bp, Homo sapiens
acaaaaagatcagatcacagtcacacaactgacatcatcacaaaattcagagctgagaaggaccttcacagtttaattattttataaatgaaactgaggcccatgtgactgccttactcaaaaacttttggtggttttccactatctatggaaataaaagccagtccccttatratagcactcaatactgctcatgatttagctccatcttatcttcccagtcttaactactagcacacctgaaaatcctatactgcaaaaggctattcgtcattccctggacattctggcctctgtgctgctttttctgtgcctttgtatatagtgttccctccatgcaggtggccttccctcagcctccactctgcaaaaaaaaaaaagcctactctcatccaaggcccaggtaaatactttaccttccatgaagcaagaatggctcccattcaactttgcaagctaagttggctgccagtccccatattgccacagctctctgtttaaaccagatgttctcaatgatgggcaatttccaccctgccccacacatctggtaatgtctggagacacttttgattgtcacaactggaagggggagggttgttac

SEQ ID NO: 795429 - DNA, 599 bp, Homo sapiens
aatggtaattatttattatcatcacagtggtattacagcacaatattacagtggtaatatcactatagaatagccatagaataaaataatctatgagctcatacgaatataaataaataaaagagaagggatagctctctcttatagcagaaatgataacatcagaatatcatctttgtgcaaccatgatttagacargaattatcaatggatgctaaaactagtggatagaagtttgataaagaagaggatatgtacatagattcagagcacccccatgaaaataacttattgattacaaagggaaaattagtaactccatggtgagttcctctgatgaacacaaccataaccatttaatcacagttaacaataccaataaagggatgcactgacctcactgccttgaaaaggactccatatcatttctatggtacacctgccaaaactataaccttaatctaattatgaggtagcatcaaacaaaccaaactgaagggcattctacataacaactggcctgtaatctaaaaacaaacaaaaaagcaagttcatgaaagataagggaaggctgagaacctgatctagatgaaagaaga

SEQ ID NO: 795430 - DNA, 599 bp, Homo sapiens
aatggtaattatttattatcatcacagtggtattacagcacaatattacagtggtaatatcactatagaatagccatagaataaaataatctatgagctcatacgaatataaataaataaaagagaagggatagctctctcttatagcagaaatgataacatcagaatatcatctttgtgcaaccatgatttagacaggaattatcaatggatgctaaaactagtggatagaagtttgataaagaagaggatatgtacatagattcagagcacccccatgaaaataacttattgattacaaagggaaaattagtaactccatggtgagttcctctgatgaacacaaccataaccatttaatcacagttaacaataccaataaagggatgcactgacctcactgccttgaaaakgactccatatcatttctatggtacacctgccaaaactataaccttaatctaattatgaggtagcatcaaacaaaccaaactgaagggcattctacataacaactggcctgtaatctaaaaacaaacaaaaaagcaagttcatgaaagataagggaaggctgagaacctgatctagatgaaagaaga

SEQ ID NO: 795431 - DNA, 635 bp, Homo sapiens
agaaacaagaacaaaccaaatgcaaacccagcagaagaaaggaaatatccaatactgacactgctgaaatacaaaagatcattcaaggctactatgaacacctttatgcacataaactagaaaatgtagaaaagatggataaatacctggaaaaatataacccctagcttaagtcaggaataattaggtaccctgaacagatcagttacaagcagtgagattgaaacggtaatttaaaaattaccracaacaaaaaagtctaggaccagaagggattcacagcagaattctatcaggcattcagagaagaattggtaccaatccttttgacgctattccacaagatagagaaagagagaaccctccctaattcattctatgaagccagcatcaccctaatactaaaaccaggaaaggatgtaaccaaaaaagaaaacaacagcccaatatccctgatgaacatagatgctaaaatcattaacaaaatactagctaattgaatccaacaacatatcaaaaagataatacaccacgagcaagtgggtttcataccagggatgcagagatggtttaacatacacaagtcaataaatgtgatataccacataaacagaattaaaaacaaaccacatgat

SEQ ID NO: 795432 - DNA, 635 bp, Homo sapiens
agaaacaagaacaaaccaaatgcaaacccagcagaagaaaggaaatatccaatactgacactgctgaaatacaaaagatcattcaaggctactatgaacacctttatgcacataaactagaaaatgtagaaaagatggataaatacctggaaaaatataacccctagcttaagtcaggaataattaggtaccctgaacagatcagttacaagcagtgagattgaaacggtaatttaaaaattaccgacaacaaaaaagtctaggaccagaagggattcacagcagaattctatcaggcattcagagaagaattggtaccaatccttttgacgctattccacaagatagagaaagagagaaccctccctaattcattctatgaagccagcatcaccstaatactaaaaccaggaaaggatgtaaccaaaaaagaaaacaacagcccaatatccctgatgaacatagatgctaaaatcattaacaaaatactagctaattgaatccaacaacatatcaaaaagataatacaccacgagcaagtgggtttcataccagggatgcagagatggtttaacatacacaagtcaataaatgtgatataccacataaacagaattaaaaacaaaccacatgat

SEQ ID NO: 795433 - DNA, 483 bp, Homo sapiens
gaggttacgcatttttcctctgattaatagtcatctctctatcttactctgtagaatgtctgttgaaattgtttgactctgagcaagtaacttcccatctttccaggacttcactttcctcatggttaaatgaaagtcatgaactttcatatctagtgccttccaattcttatattcctaaattccaggtagtsgtgtaactattattaaacaccaaaggtaattactggggctcagaacacaatacccccaattatggtggcttggtatgctgaatatttttcacttgcagaagacaggagggcctcagaaggaaggttactctgacttcctgtcttctacccttctttctccccaaagcaagatataaaatctagaaaggtcgcctctctgacctactacctctgaaagtaggtcatggggccctcatgtgatctatcacctggaagaaagaaatgctactgaacaaacaggcttgctggg

SEQ ID NO: 795434 - DNA, 557 bp, Homo sapiens
attccttcctcactaagcttaatcatttctagcttttgatttaaaatgaaacaggtgtgagccttcctttcacttgaacacttagaggacactgtagagttaactggcctcatttcaacattgttgtgtctcaaggagtaggraggccagacgagagggagagttggaagaacggctggacagaggagtagtgagaacacatatatttataaattaagtacatcaccttatgcaggcatggttcatggtgccccaaaacaattacaatagcagtaacgtaaagaccactggacagggcggggaggggccacgatggccaaatagaaacagcggcagtctgcagctcccagcgagaccaacgcagaaggtgggtgatttctgcatttccaactgaggtacacagttcatctcactgggactggttaggcactgggtgcaacccacggagagcaagcagaagcagggtggggcgtcacttcaccctggaagtgcaaggagctagggcaactccctcccccagccagccaggggaagtggggagggactgtgctacccgc

SEQ ID NO: 795435 - DNA, 552 bp, Homo sapiens
ctcaaaatatataatacaaaccaaaaagaaataaaagtaaagccacagagatccacaaatttaaatggggatgttaacacacccctttcagtggaaggtaggcaaagcagaaaaaagaaaatcagtaagtttatagaggatttgaaagtcacaatgaacagatctgacttatttaacatgtagaacactgtacccaacaattgctggatatatattctttgcaagagcacataaaacattttttaaagtagactatatgrtggattataaaataagtctcaacaaatttcagaggactggaatcatacataatataatctatgaccagagtagaattgagctagaaatcaataacagaaggttagtaagaaattattttgtaattatttggaaattaagaaaagaaatttttaataaaagcatggtaaacaagaaattataatgaaaattagaaaatattttgaactaaataataatatatatataatatataccaaaatttgcaaataaagttagtgcctagacagaaatgtgtagccttacatgcacatg

SEQ ID NO: 795436 - DNA, 543 bp, Homo sapiens
aacaagaaaactataggcttatatctctaattaacatagatacaaatatcccaaataaaatatcaacaaaccaaatccagtgataaagaaaaggtgggtgtatcacagctccacagtgttaattttaggttcaagtttggtataaatttgaaaattagtcagtataattgaccacattgatagtagaaaggaaaaaccctgaaagcattgtagcagaarcagaaaatgactttaataaaattcagcattcattcatgacaaaaatttagcaaattagcactaggaagaacctttcttaatttgacaaagcacgcacatacacaccagcaaagattacatttactgatgaaatactgaaacatgccccctgaaattgggaaagaagacaaaagtgtctgctagtatcactataatcacaacactgtactagacatgctaagtattgtaataagacaagaaaaataaaggtttaagtgttaaaagggaaaaactgaaacttattacttttagttgacgtgattatgtatgtggaaaatattacag

SEQ ID NO: 795437 - DNA, 543 bp, Homo sapiens
aacaagaaaactataggcttatatctctaattaacatagatacaaatatcccaaataaaatatcaacaaaccaaatccagtgataaagaaaaggtgggtgtatcacagctccacagtgttaattttaggttcaagtttggtataaatttgaaaattagtcagtataattgaccacattgatagtagaaaggaaaaaccctgaaagcattgtagcagaagcagaaaatgactttaataaaattcagcattcattcatgacaaaaatttagcaaattagcactaggaagaacctttcttaatttgacaaagcacrcacatacacaccagcaaagattacatttactgatgaaatactgaaacatgccccctgaaattgggaaagaagacaaaagtgtctgctagtatcactataatcacaacactgtactagacatgctaagtattgtaataagacaagaaaaataaaggtttaagtgttaaaagggaaaaactgaaacttattacttttagttgacgtgattatgtatgtggaaaatattacag

SEQ ID NO: 795438 - DNA, 543 bp, Homo sapiens
aacaagaaaactataggcttatatctctaattaacatagatacaaatatcccaaataaaatatcaacaaaccaaatccagtgataaagaaaaggtgggtgtatcacagctccacagtgttaattttaggttcaagtttggtataaatttgaaaattagtcagtataattgaccacattgatagtagaaaggaaaaaccctgaaagcattgtagcagaagcagaaaatgactttaataaaattcagcattcattcatgacaaaaatttagcaaattagcactaggaagaacctttcttaatttgacaaagcacgcacatacacaccagcaaagattacatttactgatgaaatactgaaacatgccccctgaaattgggaaagaagacaaaagtgtctgctagtatcmctataatcacaacactgtactagacatgctaagtattgtaataagacaagaaaaataaaggtttaagtgttaaaagggaaaaactgaaacttattacttttagttgacgtgattatgtatgtggaaaatattacag

SEQ ID NO: 795439 - DNA, 661 bp, Homo sapiens
gcagagtcctttttaccctgtaatgtgacatatgcacaggttccagggattagaatgtgggtatttgtgaggcagctagccgccagcctgccacagctagtttcctctgaaccaagccaatctggactccaaagctagagcatgaactccaacagcttccatttttaggaagcaggacaagtgctaagacccagaatccatattcaaactcatgccatttaagaggcgctcgcagctgagctctcactaatgaggytgaggtgtgatggggagggtcgtctggaccaggtcagtggacagctcaatggggccatgaaagagagggcctagaggcattgacctgatgtgtcactgatgggcacttgtcagcgcaacatgtagctgatgagttgcaggagaagctcagccctcgcaggccggggatgacctgcatcctgcctctttctcaacagcatgcctgcttttcctcagctccagagtgacccatgccacctccctgggtctcagtttctcctggcagaggagaggcaagcacagctttcaaccccgccatagaggcatccggcggcaatgaggaggactgcttgccgggctgcgtgcagagcatcatacttaggatcaaattattgcccccaaagagtcgtttttcttcacccctggt

SEQ ID NO: 795440 - DNA, 661 bp, Homo sapiens
gcagagtcctttttaccctgtaatgtgacatatgcacaggttccagggattagaatgtgggtatttgtgaggcagctagccgccagcctgccacagctagtttcctctgaaccaagccaatctggactccaaagctagagcatgaactccaacagcttccatttttaggaagcaggacaagtgctaagacccagaatccatattcaaactcatgccatttaagaggcgctcgcagctgagctctcactaatgaggttgaggtgtgatggggagggtcgtctggaccaggtcagtggacagctcaatggggccatgaaagagakggcctagaggcattgacctgatgtgtcactgatgggcacttgtcagcgcaacatgtagctgatgagttgcaggagaagctcagccctcgcaggccggggatgacctgcatcctgcctctttctcaacagcatgcctgcttttcctcagctccagagtgacccatgccacctccctgggtctcagtttctcctggcagaggagaggcaagcacagctttcaaccccgccatagaggcatccggcggcaatgaggaggactgcttgccgggctgcgtgcagagcatcatacttaggatcaaattattgcccccaaagagtcgtttttcttcacccctggt

SEQ ID NO: 795441 - DNA, 593 bp, Homo sapiens
acatgtagctgatgagttgcaggagaagctcagccctcgcaggccggggatgacctgcatcctgcctctttctcaacagcatgcctgcttttcctcagctccagagtgacccatgccacctccctgggtctcagtttctcctggcagaggagaggcaagcacagctttcaaccccgccatagaggcatccggcggcaatgaggaggactgcttgccgggctgcgtgcagagcatcatacttaggatcaaattattgcccccaaagagtcgtttttcttcacccctggtggcatgcttcttggaagcggggagygaaggggttcctgcagtgactaacaaaatagattatggagacagccacttatcttatttgtcatctcgccaaagaaaggctgctctgatgttccaaaaaacaaactcatcatctttatcagatgagaagattcaggaaccacaacagaggctaagagtgtaaatcctttgtcttctcttctgtcgttaatactacggcaggcaaagagagcaaagagaaaccaacccttgagaaatttgaacctgggatgttggaattggaggcatcaatttccctacat

SEQ ID NO: 795442 - DNA, 550 bp, Homo sapiens
tgagttgcaggagaagctcagccctcgcaggccggggatgacctgcatcctgcctctttctcaacagcatgcctgcttttcctcagctccagagtgacccatgccacctccctgggtctcagtttctcctggcagaggagaggcaagcacagctttcaaccccgccatagaggcatccggcggcaatgaggaggactgcttgccgggctgcgtgcagagcatcatacttaggatcaaattattgcccccaaagagtcgtttttcttcacccctggtggcatgcttcttggaagcggggagcgaaggggttcctgcagtgactaacaaaatagattatggagacagccacttatcttatttgtcatctcgccaaagaaaggctgctctgatgttccaaaaaacaaactmatcatctttatcagatgagaagattcaggaaccacaacagaggctaagagtgtaaatcctttgtcttctcttctgtcgttaatactacggcaggcaaagagagcaaagagaaaccaacccttgagaaatttgaacctgggat

SEQ ID NO: 795443 - DNA, 592 bp, Homo sapiens
ggcgtgatctgttccaccttctgtaagtttctcagaagtgaggactctactctcagaaacagcgtcctccctgccacagccatcaatgtgcatgtggtcgacacacgcattcacacacactcacggctcattaaaatgcgttgtgaacttggcgtaatccccaggatgtttcttcattagctattttggatggcctctaccgcacacacatttcaagagccacgttcctttaattctcaaatcaatacactcttagcaattgcaagtggccagaaaggtcaccctcgaaccccttcggtcctagaagagtggcagaggagggataggaaaggacccgtgcaagatcacacagcgagaagatgaaagcagttcatcctcrgacctctctctgctccatcaaaagataaagagacatttgctaaatgtcattagtagttcctatatgtaagtggaagagcaaagacaaataagacacagttattatttttcaagagctcatagtctaagagtgagactcaaccttaaaaataggctacaacccaagacatcaaatttcaagtgggccagaaaaggcacaggggtggagcgggca

SEQ ID NO: 795444 - DNA, 622 bp, Homo sapiens
gatgaaaccgagtataaattatacgggttcaagcatgctgatggtccggggtgcgcagcgcccggctccccggggccggggtacttcctttctcttggctgtcaaacaggaagcctttaaaagttggccagagagttatggaattacctgtggaaacatattgtgagggtcaggccaagggccgatttgtcaggcggccagtgtcggaatccacacatccacaagcagcatttgttttcttaacacttttttttttttttcccccttccaggatatgtagcggcagaggccaaagtctataaatttctgactctgcgccctactcattgtccgagtttccgcgtttttcatgamcgctctcggccgccgggaattctctttgatgggatttcaggtttcagcagcaagtcctgtttacttttctcgattctagacccaaaggaaaatgatactttgctaattccctcctcggaaagccctcgtctcctggttcttgttccttgggattaaaagttgtgacttcaactttttcttccttggctctaagatgggaaaactgagaaaacagcgatggtcaaaactgcgctgatgatcaaagaaagcagacagaaatgaaccccgg

SEQ ID NO: 795445 - DNA, 602 bp, Homo sapiens
ctcttaccacccccacatgggaccatctagttgcaggaaaagcagctcaggactctcactgattctacattatggtaagttgtgtaattatttcattatatattacaatgtaataataataatagaaataaagcacacaataaatgtaatgcactcatatcatcccgaaaccaccccacccctggtctgtggtaaaattgtcttccatgaaaccagtccctggtgccaaaaaggttggagactgctgctctataggacctagtacagtgctggaacaagtgtttagtagagacttcctgaataaactgcttgggatacaacaggatatagagtcctctcatatttctactaattataaggctattgactggcaaatgaggaaactcatatgaagcagggaatctttagttattgctgatgatctasaaaccaggtgtcaaagagtaaaaagcctgagcaaacacaatcctgtccagccatcccagaaagctttatacttctagtccatttccccaggggttccaatttttgctgagactaatttattaaatgtatttgaggggtaaagcattaatgactgataatgtatttaatgagtgtcc

SEQ ID NO: 795446 - DNA, 578 bp, Homo sapiens
attgcagccaatgtttactaagtccaggataattcatgagaccaccacaaacatcatgaatgacagattctggttgtaaacaaggttcagggaacagaagcagttctaccatctaatatcaagctgaagctactagactaactcagggactaaatctatagacaaagaacaataaaatctttctgatgaggtcctcaaatgagattcctgtgctccacttcttagaccagtgattctcagttttacctacacattcgaatcatccagattccaccctagagattccaatttaattgatgaacttaggcattggtgttttaaaaaagtttccaaggggataccaatgtacagttagggttgaaaacttttgtcctagagtacaaggttctgctcaaagttctcattcatttgaggcawtgagaatagcttaggaccgtggttcccatcaacatcttcctgtgtggttttaaaaaatacagattcttgtattctacccccatacttccaaattagaatttttaggagttggtcccaggaatccacaattttacaagctcctcacataattcttatgaagc

SEQ ID NO: 795447 - DNA, 584 bp, Homo sapiens
atattttgatttttctacttttattcttacaaacaacactaaggtgaatgtttctatgtaagatctcttggtaatatcttattttttagaaaactgggagagcattactgagttaaagagagtgaccactttcaaaattcttggagcaatatatatttaaattgctgtacagggaaattttaccgatatataatcccatcagtagtatgtgaaggtacccgtctttttaaccttcaaaatatggaatataatacatttttaaaagatttgcgaatctgataagcaaaaataatgttttaatttgcatatttaatactagtgaggtccatatgttaatcatttgtgttwtccctatggtcatttttatcctttgctcatacatctactgacatctctatcttttgtttttttttaaactgatttaaataagctttttatttcctttgctttttcctgggacatatttgatatatgtacaaacatgtattctcttatatgtaaattatgaagtgtagtaaccaagtgaatacaagtgaaaagtaaatagagtgtcaaattaaattgaatattaaaaatactgttca

SEQ ID NO: 795448 - DNA, 600 bp, Homo sapiens
aagcaacagagtgagaccccatctcaaaaaaaaaaaaaaaaaaagaaaaaaagaatcaatagagatggccaggtgtggtggctcatgcctgtaatcccaacactttggaaggccaaggcaggtggatcacttgagacaggagttcragaccagcctggccaacatggtgaaaccctgtctccaccaaaaaaagaaaaaatacaaaaattatccggccatggtggtgcatgcctgtaatctcagctactcgggaggctgaggcaggagaatgacttgaatccaggaggcggaggttacagtaagccgagatggcgccactgcactccagcctggacagaagtgagactccgtctgaaaaaaaaaaaaaaagtaaggaagagaactgttttagcttgcaaagactggaaaggactctatgacaaggtgacatttgagtggaaacctgaaaaagaatgatgataaaccatgcaaatacctgagggaagaatactcaagacagagtgaggctcagagattttaaccttgcactatctactacccaactactatcaaaaaagaccagagaacaattatatttctgaaggattttttaaagaaatc

SEQ ID NO: 795449 - DNA, 609 bp, Homo sapiens
tgctgtgtccggctccttaagctcagcatgacgttaccgagactcatccacgaggctgtgtgtgtctgtggattattccttttcaatgctaagttcacagataggaacaggctctacatggatatccctcaggtaatttatccactttcctacagatggacatacaagcaattcccaattgcagcaattataaataaagcaagcaaagctgctgtgaacactcttgaatacgtttttgtggacgtaggttttaatttctcctggataaatgccctagagtggaattgttgggtagyggggtaggagaacacttagttttataagcagctgctagaccttttgcaaagaggttacaacattttaacacccaccaatgtatacgagaggcgaggctgcggcagtctctgcgacacttggtggtgtctgatctgagctgccctgggatatatgcagatgtctttcactgtggttttaacctgtacttccctaatgactgatgatgccgagcactttctcatgagctcaggggccaatctgtgtattatgtgtctttgcgatgaaaatgtgagatattttgtccagttatttactgggttgttggtcctttta

SEQ ID NO: 795450 - DNA, 589 bp, Homo sapiens
aatattataaatgaaatgtctagaggattctgatataaatcccccaaccccattgaatgaactgagatatgagtaacttgaaaaaggaaagtgcttgaatgaatcattgttgaaactttaaaaactctctcctagcccaagatgttgttcatagtataaacagcaagaaagtactcatgacaattgctaggtaggaaactgcatattcaaatatgaaacaatgaactaagacacaatctgaacctyaggttctttggcccatgaaattcaccaatatgccagagtatagctggtcagccaagctcaggagctgagagtggtgtgcttcgctgttactgggctggcctggccaggcagtccacggggccagcccgtgcaggcaaagcccgggcaaaccaggagagctcggggcgcctaggggctctgcgggcatgccctgctgaaaccaggcttttggatgctggggctgcgagcccccaacctggagcagctctcaacagcattctggattatctgacattcttgttctgctgaggggctggaggtgatgcaggtattcaaatgagccaggacgggtgacgggagccca

SEQ ID NO: 795451 - DNA, 607 bp, Homo sapiens
ggtaatgagttttaagatatgatgctaaaaacatgatccacaaaaaaaaataagtggtaagtgggacttcattaaaattagaatcttctgggctgggtgcggtggctcacgcctgtaatcccagcattttgggaggccaaggtgggcagatcacaaggtcaggagattgagatcttcctggccaacatggcaaaagcccgtctctactaaaaatacaaaaattacctgggcgtggtgacacgcgcctgtagtcccaactactcaggaggctgaggcaggagaatcgcttgaatccaggaggcggaggttgcagtgagccaagatcgcgccactgtactccagcctggcaacacagcgagactccatctcaaaaaaaaaaaaaaaaaaaaaaattagaatcttctyatctgtgaaagatactgttaagacgatgaaaagataagtcacagactaggagaaaatatttgcaaaacactattggtaaaggacgtgtatccaaaatatgcaaagaactctttaaaaattcacaataaaaaaaaaacagcccaattaaattgacaaaccatctgaacagacacctcaccaaagaagatatacagcttaaaag

SEQ ID NO: 795452 - DNA, 643 bp, Homo sapiens
ggtatcagggtaatacttgccttacacaaagagtggggaagggctttctcttctatttttccggaagacagtgtgtaaaattgctattaattcttctttaaatgtttggtagaattctccagtgaaactctctgggcctggaaactttctcacaggtgtttcagctataaattaaattactttaatgcttatgtgactrttcaggtgatctattttatcttggttgcattttgatagtttgtgcttttcaaggaattagtctgattttctatattcttgaatttatgggcataaacttgttcgtagtagtcccttactttctctttaatgactacaacagatacggtgatattccattttgttctgacattggagattcgtatattctctctactgttatcaaccttcttaggggtttttcaattacctattattttttgttaatgatccggcttttgtttcattgattttctctattgttttcctgtattaatttctttgatttttgctcttattatttcctctctttctgcttgtttggatttaatttaggttttctttttctaccttgttgaggtaagaacttaagatcactaatttgagatcttttctcttttaaacataagcaattactgcttaaatt

SEQ ID NO: 795453 - DNA, 643 bp, Homo sapiens
ggtatcagggtaatacttgccttacacaaagagtggggaagggctttctcttctatttttccggaagacagtgtgtaaaattgctattaattcttctttaaatgtttggtagaattctccagtgaaactctctgggcctggaaactttctcacaggtgtttcagctataaattaaattactttaatgcttatgtgactgttcaggtgatctattttatcttggttgcattttgatagtttgtgcttttcaaggaattagtctgattttctatattcttgaatttatgggcataaacttgttcrtagtagtcccttactttctctttaatgactacaacagatacggtgatattccattttgttctgacattggagattcgtatattctctctactgttatcaaccttcttaggggtttttcaattacctattattttttgttaatgatccggcttttgtttcattgattttctctattgttttcctgtattaatttctttgatttttgctcttattatttcctctctttctgcttgtttggatttaatttaggttttctttttctaccttgttgaggtaagaacttaagatcactaatttgagatcttttctcttttaaacataagcaattactgcttaaatt

SEQ ID NO: 795454 - DNA, 600 bp, Homo sapiens
ttcaattacctattattttttgttaatgatccggcttttgtttcattgattttctctattgttttcctgtattaatttctttgatttttgctcttattatttcctctctttctgcttgtttggatttaatttaggttttctttttctaccttgttgaggtaagaacttaagatcactaatttgagatcttttctcttttaaacataagcaattastgcttaaatttccttctcagtactgccttatctgtattccacgaaatttaactcatgatattttcatttttctttcttcttctctgtattttaaatttttatttgaaagtttttattgcctcatggattatttagaattgtgatgtttaatatacaagtttgggaatatttttattgaatttctattaccgatttcttagttgatattctgtgatcagagaacatactctaactgtgaatgtatctttttctcttttcagctctatcagttttgcttcagtgttttgatgctctgctgtttggtgcatgcacagttaggtcttctttgtgtattaatccttttatcattaagtgatgttcctttgtccctaatgttttcctgtgc

SEQ ID NO: 795455 - DNA, 600 bp, Homo sapiens
ttcaattacctattattttttgttaatgatccggcttttgtttcattgattttctctattgttttcctgtattaatttctttgatttttgctcttattatttcctctctttctgcttgtttggatttaatttaggttttctttttctaccttgttgaggtaagaacttaagatcactaatttgagatcttttctcttttaaacataagcaattactgcttaaatttccttctcagtactgccttakctgtattccacgaaatttaactcatgatattttcatttttctttcttcttctctgtattttaaatttttatttgaaagtttttattgcctcatggattatttagaattgtgatgtttaatatacaagtttgggaatatttttattgaatttctattaccgatttcttagttgatattctgtgatcagagaacatactctaactgtgaatgtatctttttctcttttcagctctatcagttttgcttcagtgttttgatgctctgctgtttggtgcatgcacagttaggtcttctttgtgtattaatccttttatcattaagtgatgttcctttgtccctaatgttttcctgtgc

SEQ ID NO: 795456 - DNA, 547 bp, Homo sapiens
tcttattttaatgtctctctgggcttgataatttaaaaggactggcattcctctgataaaagttattttattttctcattttccatcaatctatcctgttcagtgaaatatcggttcgtgcctttagcccattttctaattggcttgttttttcttgttgtcgttgttgacttttgaaaactttaaacaatattctagatatgagctccttgtcagatayggtttatcaggtgtggtttgcacttttcttccagtttttaccctgtctttattaacaggctcttatgcagggcaaaagttttaaattttgataacatccaattaataaattcttagaattgattgtgcttttctggttcatgtctaataattattcatcaagtcctaggacctgaagaatttctcattaaatttcatatttttacattgagatgtgatcttttttttttttttgagatggagtcttcctccatcttcatatctgaccaccattggtatctaattggttttcttattgtctaccatccccaggtgatatctgatcact

SEQ ID NO: 795457 - DNA, 643 bp, Homo sapiens
tgtgttaactcccgttttgactcaggaaaagtgtaatgttggttcgagcttgagaaggaatctggataccagtaactttacccagaacttgggaatcttccccctcagtacatttaattaatgaagtgttacaacgaattctcaaaagatcaagagatttgttttcactttaatcactgtgatcatgggcctaattacagtcactgcactggccaccactgccggagtggcattacaccaatctattcaaatggctaattttgttaatgattggtaaggcaattccacccaaatgtggaatcctcaacaaggcattgatcaaaaattagctaatgatttaagacagtctgttatttggcttggggaccagctaatgagtctcgaacatcacatgcaaatgcagttcgattgcaacacttctgatttctatagcacaccatattcctacaacgagactgatcatgggaaatggtcaaaggayaccttctgggtagggaagataatttatccttggacataactaaattaaagaaacaaatttttgaagcctctcaagctcatttatccattgtgcctggagctgaggcgttagatcaggtggcagaaagtctttctggactaaactccacaacttggattaagt

SEQ ID NO: 795458 - DNA, 499 bp, Homo sapiens
tcggggggtgggaggggagagtttccgcttctggcaatatagctgggtaggtaactaaaaattattctgctataaaaccctggctatacaacaatcacttttaattacaaagctgaacttgcaagaaagcaaggaggatcacctgggaccaaaaacgacagygggaactagaaaccacagtagtaaatgagatcaggcctttccagttgacctagaaagtggggtagtttgttgatcttgggcccacctgaaacagggaattggaactgagaaccagtacaaagctggcgccctcagagggggagaacagattagaaaaaacattagcccactggcacatagtgacaataaaaactctgaagtgggaggaaaacagtatctcctctaataatgtgtgatcacagattatttcagatttgaattgtactactacatggtctgaggatccccaagccaaaaatttaacacaaaaagtagtcccaggctggcaataaacctg

SEQ ID NO: 795459 - DNA, 499 bp, Homo sapiens
tcggggggtgggaggggagagtttccgcttctggcaatatagctgggtaggtaactaaaaattattctgctataaaaccctggctatacaacaatcacttttaattacaaagctgaacttgcaagaaagcaaggaggatcacctgggaccaaaaacgacagcgggaactagaaaccacagtagtaaatgagatcaggcctttccagttgwcctagaaagtggggtagtttgttgatcttgggcccacctgaaacagggaattggaactgagaaccagtacaaagctggcgccctcagagggggagaacagattagaaaaaacattagcccactggcacatagtgacaataaaaactctgaagtgggaggaaaacagtatctcctctaataatgtgtgatcacagattatttcagatttgaattgtactactacatggtctgaggatccccaagccaaaaatttaacacaaaaagtagtcccaggctggcaataaacctg

SEQ ID NO: 795460 - DNA, 634 bp, Homo sapiens
gcacacccgtaagtacttagaagttaataaaaatatacacaatcctggatcttaaagggattagcacttagtgagctaatagagacatttacactcaatgctgtaaacaaatttttattttcttccacatccctttaattcactttttaaaaaagcaaatacaaaattgatttctaaatcctttcagtgaagcataattgatatgaaaggcattattttggggctcaaatggaagttctatacatcacctataccaactactagttttggtcttgggcaaattagttactatagaattaatataaatcgttaattaaaccatgtacataaaattgttggcacatagyagatactccataaatatgttcattttcctctaatgataattagaggaatactaaataagatccaacaccctatgcaagttatttcccataataaacttccattctcgaggtggaagagaagaaattaatttccaaaattctctctatagaacatgtagatagtaagtcaattcaacactccctttataatatttcttcacacataaatttttttcccttagactgaaggtaaatgtcatctactaatctctttgaattgaagttaactctttaaaataaattatatt

SEQ ID NO: 795461 - DNA, 633 bp, Homo sapiens
ttaccaaaggtatctgaaaccgtattaacattggtatgttcccaactttgatatgttcccaactatgcacagtgtattttttaaaagggactcttggatgaatttctagcttctccaaaaaaatgaaaacaactgaactttacattaagttatgtaagtctcagagactgtgctaaattcttcaaatacattattttatttaatcctcaaaacaaccatctgaggtgaatattatttccatctccatttaatgggtgaagatattaggcactaagcagtaaattaatttttctaagactagaatgtgtacaaagctataatttgaaccaaagtagtctgattttccagaactttgctcttcctctttgcctaagaattcaaaattagagtgctcttctgacaacaattatttacatctggaacattaagaactrtgaggcttaccaggacctccttttaacccatggatatgacaaagcttgcttaccctaaagatttaattgtagatctctgtgctagttatttatttgccttacttcctccatttctcttgttcttttattctcattaagcatttgtattatcttgctatattttatgcattctctgttagctgtcttacatcccttctgt

SEQ ID NO: 795462 - DNA, 603 bp, Homo sapiens
accctccagttttaaaactagtcacccaaactttcagagaattattcccaaatgagcatcgtggctgtgtctttaagaggccattcaatgttccactagattggcaaattctggttgattcagtatgtggtagtatttgtctctaggcagtgactcccatcttcatatcttcattatcacacatctttcattataaaagctcccctggtccagtataatatctgtaatatcccatgctgataatctagatattccctgattcttccatgctgttgcttgccaaaatgctgtcagcagggaaggcaaactcataaaaaattatgtatctattccagtgaggatgaatagtytctcctccaacttaccaaaaactgattcactggtcttcaattgatggtgccaaaagtaggacttggcatcagtccttgctgttgatagcccatgcaaggaactgatacacggcccctactgatacatgtaggggccatccctccatcccagacaccatgattattccattcattttttcaccaaggttgccaaaggtggagactggcttgttttctccaccacgcatgtcttatgatatgtttccaaatacta

SEQ ID NO: 795463 - DNA, 438 bp, Homo sapiens
tcaacctaggattgaaagtctagctactgcaataaagcaagaaaaataaattaactccctacagattgacgaggcagaaataaagctgactctacttgcagatgacatgattttccatatagaaaatcccaaggaaactaaaaaaaaattaagttcaaaaaagagcttataagattagtatgaaacaatcatatttcatattctaacaagaaacatgtaaacaaaaatgtaaagcacaacagcacttayaatcaatcaagaaactaactaaatgcctaagcatacttataaaacatataatctctggatgctaagaattacaaaatgctgaggcaagaaatcaaagatccaaataaatggaaagatatctcatgttcatggattggaagactcaaaacagtgaaacaccaattttcccttcattgagctattatgttt

SEQ ID NO: 795464 - DNA, 637 bp, Homo sapiens
acatttaatgttctaatcagtagaacattgccagctttctcatgaactaatggagcaagaactcaccccttactggagggaaggcaccaagccatccaggggggacccacccttatgacccagacacctcccattagcccctgccttaaacattggggatcatatttcaatatgagatttgaaggagacaaatatcaaaactattagtaggtaaatgagtcttgttacattctgaggaaagaatattcaagacaaaagaactagaagttcaaaggccttggggcaggagtttgtaaacttgaaagtaaatcaaggcagctaatgtggatggytggaaaatacagcaaaaagaaattgtggtaggaggtgaggtctgagatttagaaacatgataaaaattttgatttaaagtgtaattaagagccattggaaagctttgagcatggcagttaaatgatttgattgttaaagagtaactgcctgctttttgcaaaatagactgaagttgactcatggaattggaagtaggcaggccactggggtttattacaataatctaggtagagattacattgtcttagatcaggacggccaagtggaagtgacaagaagtgattagaattaggaagtattttga

SEQ ID NO: 795465 - DNA, 637 bp, Homo sapiens
acatttaatgttctaatcagtagaacattgccagctttctcatgaactaatggagcaagaactcaccccttactggagggaaggcaccaagccatccaggggggacccacccttatgacccagacacctcccattagcccctgccttaaacattggggatcatatttcaatatgagatttgaaggagacaaatatcaaaactattagtaggtaaatgagtcttgttacattctgaggaaagaatattcaagacaaaagaactagaagttcaaaggccttggggcaggagtttgtaaacttgaaagtaaatcaaggcagctaatgtggatggctggaaaatacagcaaaaagaaattgtggtagkaggtgaggtctgagatttagaaacatgataaaaattttgatttaaagtgtaattaagagccattggaaagctttgagcatggcagttaaatgatttgattgttaaagagtaactgcctgctttttgcaaaatagactgaagttgactcatggaattggaagtaggcaggccactggggtttattacaataatctaggtagagattacattgtcttagatcaggacggccaagtggaagtgacaagaagtgattagaattaggaagtattttga

SEQ ID NO: 795466 - DNA, 637 bp, Homo sapiens
acatttaatgttctaatcagtagaacattgccagctttctcatgaactaatggagcaagaactcaccccttactggagggaaggcaccaagccatccaggggggacccacccttatgacccagacacctcccattagcccctgccttaaacattggggatcatatttcaatatgagatttgaaggagacaaatatcaaaactattagtaggtaaatgagtcttgttacattctgaggaaagaatattcaagacaaaagaactagaagttcaaaggccttggggcaggagtttgtaaacttgaaagtaaatcaaggcagctaatgtggatggctggaaaatacagcaaaaagaaattgtggtaggaggtgaggtctgagatttagaaacatgataaaaattttgatttaaagtgtaattaagagccattggaaagctttgagcatggcagttaaatgatttgattgttaaagagtaactgcctgctttktgcaaaatagactgaagttgactcatggaattggaagtaggcaggccactggggtttattacaataatctaggtagagattacattgtcttagatcaggacggccaagtggaagtgacaagaagtgattagaattaggaagtattttga

SEQ ID NO: 795467 - DNA, 476 bp, Homo sapiens
tttttttttgagacagagtttccctcttgttgcccaggctggagtgcgatggcgcgatctcagctcacagcaacctccgcctcccgggttcaagtgattctccttccctagcctcccgagtatctgcgattacaggcatgygccaccacgcctggctaatttttgtatttttagtagagacggggtttcttcatgttggtcaggctggtctcgaactcccaacctcgggtggtccgcccacctcagcctcccgaagtgctgggatcacaggcgtgagccactgcacccggctttgcgaagaatttttgaccatcctctgactctctccagaatcgtttccttgactaatagtcaaaattggaatttttatagccctgtaaacccacagattagcttatagggagatttggtaaactgagattttggggaggggaagggatgctggcagagaagaaactttgtttacaattttatta

SEQ ID NO: 795468 - DNA, 584 bp, Homo sapiens
ttttccataataaactgtggcttttttccttggattgcttcctttctgattctggctgtgaaaccctgggaggatgcccacgaaatgctttcttgggtcctgtgcctttgcgttgctttgactggattgcatctgatttcattaagaccatctatgatgctgcgtgtgcagccaatgccctatgctaagtgctgcttttagaaatacagtgggatatgaggaaaatgtagatgcagtgctgtttcatccctggcaggtaatgatttccgctagggcattgtcggccctggagcccatcgattcttgaaacatatagtcataaatgagattttctcaaaacctgcataataackcaggcaaaacacattgaaattttacattctgaatataaattctgaaaatgaatatgtctacttgcttttacaatgagaaaccatatatagtccggagagttttcagttttgatatctgtgtgtgtgtgtgtgtgtgtgtgtgtatgtgtgtgtgtaaatgatcatcacatagatatctctggctagaagaaactttgtcatatttgttctaagattaaatgtttgtcccat

SEQ ID NO: 795469 - DNA, 520 bp, Homo sapiens
tagggtgatgcatgtgttacaattgatgaaccaacattgatacactattattaactgaaatccatactttagggttcagtctgtgttatagaattttatgggtgttgacaaatttataatgtcatgtatccactattgcagtatcagacaaaatattatggctgccttcaaagtcccytatgctccacctatccatccctccttccttctccaccaggatgctttctttaatattttgtggtacacagggtatttatatccatattcctaactggaaatgttctctaattttactttaccattctacgatttgttttgttatcaatggtatgctagcttctcaaatcgaggagtctttttctaatttattaaaagatgaaaatttactatttcttgaacactgttatttgggtataagatcacatggctctgatgtgtatcttgtggctctatttttaacaactaactctattttaaattattattgtgatatgggttggatttgtgtccctgcccaaat

SEQ ID NO: 795470 - DNA, 520 bp, Homo sapiens
tagggtgatgcatgtgttacaattgatgaaccaacattgatacactattattaactgaaatccatactttagggttcagtctgtgttatagaattttatgggtgttgacaaatttataatgtcatgtatccactattgcagtatcagacaaaatattatggctgccttcaaagtcccttatgctccacctatccayccctccttccttctccaccaggatgctttctttaatattttgtggtacacagggtatttatatccatattcctaactggaaatgttctctaattttactttaccattctacgatttgttttgttatcaatggtatgctagcttctcaaatcgaggagtctttttctaatttattaaaagatgaaaatttactatttcttgaacactgttatttgggtataagatcacatggctctgatgtgtatcttgtggctctatttttaacaactaactctattttaaattattattgtgatatgggttggatttgtgtccctgcccaaat

SEQ ID NO: 795471 - DNA, 520 bp, Homo sapiens
tagggtgatgcatgtgttacaattgatgaaccaacattgatacactattattaactgaaatccatactttagggttcagtctgtgttatagaattttatgggtgttgacaaatttataatgtcatgtatccactattgcagtatcagacaaaatattatggctgccttcaaagtcccttatgctccacctatccatccctccttccttctccaccaggatgctttctttaatattttgtggtacacagggtatttatatccatattcctaactggaaatgttctctaattttactttaccattctaygatttgttttgttatcaatggtatgctagcttctcaaatcgaggagtctttttctaatttattaaaagatgaaaatttactatttcttgaacactgttatttgggtataagatcacatggctctgatgtgtatcttgtggctctatttttaacaactaactctattttaaattattattgtgatatgggttggatttgtgtccctgcccaaat

SEQ ID NO: 795472 - DNA, 529 bp, Homo sapiens
atccttatatcctgttgagttcaattcatgaaataaaaagtaaccagtatagtttagccatttttattctactttatatgtaacttgatatttatcacatatattatttctttgtatttttatatgatctgtctaaaatgtacaaaaaatttccatgttactaatttttcagatattactgttaagtggtagcatgctgccatgacatagctgaatttccacactgccctaactctgcttatctttaaaaaacaygacacttgctctaggaagttccctttgtaaccagacccactgacacttgttagaaccaggatagctaaagcctcaggcttcattataatctcatttccatgctaaatggcactcctggccaggcatggttgtacatccctgtaatccgagccctttgggaggccaatgtaggaggattgcttgagcacaagaatttgagaccagcctggtcaacagaataagacctggtctccacaaaaaaaaaaaaaaaaaaaaaaaaattttaaattaccca

SEQ ID NO: 795473 - DNA, 529 bp, Homo sapiens
atccttatatcctgttgagttcaattcatgaaataaaaagtaaccagtatagtttagccatttttattctactttatatgtaacttgatatttatcacatatattatttctttgtatttttatatgatctgtctaaaatgtacaaaaaatttccatgttactaatttttcagatattactgttaagtggtagcatgctgccatgacatagctgaatttccacactgccctaactctgcttatctttaaaaaacatgacacttgctctaggaagttccctttgtaaccagacccactgacacttgttagaaccaggatagctaaagcctcaggcttcattataatctcatttccatgctaaatggcactcctggccaggcayggttgtacatccctgtaatccgagccctttgggaggccaatgtaggaggattgcttgagcacaagaatttgagaccagcctggtcaacagaataagacctggtctccacaaaaaaaaaaaaaaaaaaaaaaaaattttaaattaccca

SEQ ID NO: 795474 - DNA, 574 bp, Homo sapiens
ttgtatggtttctgtcttcagtcataggaaccattctttgctctaggagtagcaatgagatccaaatccaggaaatatggcaatatcttcgatttacatcattagccctcagtattttttttttttttttgagactagaagcagaaggctgcttcatgcctggctgcctatcaaaagaagcaattttcataaatctrtagctctgaacaatgaaagcagagctttcacctctgctgaatcagtgtctggagcatcagggacaggggaaaagttctaacattagcttttttcttctacctgctgctaatcagagtgcaagcgagaagttgtattcttctcagggccagtaaagcagggaaagaaatcactagtgctcctccccagtctgaggatcaaataaacagccttttttatcatccagctgctaggggtatggcttgagctacagacagctcattagaaagaaccacaaagttagaaatttggcctttggggggaaaatgtcactcttcaaattccctgtcttgtgttctttaactaagtacatatcctttttaggggccagatgggatgg

SEQ ID NO: 795475 - DNA, 562 bp, Homo sapiens
ttgtatggtttctgtcttcagtcataggaaccattctttgctctaggagtagcaatgagatccaaatccaggaaatatggcaatatcttcgatttacatcattagccctcagtattttttttttttttttgagactagaagcagaaggctgcttcatgcctggctgcctatcaaaagaagcaattttcataaatctatagctctgaacaatgaaagcagagctttcacctctgctgaatcagtgtctggagcatcagggacaggggaaaagttctaacattagcttttttcttctacctgctgctaatcagagtgcaagcragaagttgtattcttctcagggccagtaaagcagggaaagaaatcactagtgctcctccccagtctgaggatcaaataaacagccttttttatcatccagctgctaggggtatggcttgagctacagacagctcattagaaagaaccacaaagttagaaatttggcctttggggggaaaatgtcactcttcaaattccctgtcttgtgttctttaactaagtacatatcctttttaggggc

SEQ ID NO: 795476 - DNA, 562 bp, Homo sapiens
ttgtatggtttctgtcttcagtcataggaaccattctttgctctaggagtagcaatgagatccaaatccaggaaatatggcaatatcttcgatttacatcattagccctcagtattttttttttttttttgagactagaagcagaaggctgcttcatgcctggctgcctatcaaaagaagcaattttcataaatctatagctctgaacaatgaaagcagagctttcacctctgctgaatcagtgtctggagcatcagggacaggggaaaagttctaacattagcttttttcttctacctgctgctaatcagagtgcaagcgwgaagttgtattcttctcagggccagtaaagcagggaaagaaatcactagtgctcctccccagtctgaggatcaaataaacagccttttttatcatccagctgctaggggtatggcttgagctacagacagctcattagaaagaaccacaaagttagaaatttggcctttggggggaaaatgtcactcttcaaattccctgtcttgtgttctttaactaagtacatatcctttttaggggc

SEQ ID NO: 795477 - DNA, 562 bp, Homo sapiens
ttgtatggtttctgtcttcagtcataggaaccattctttgctctaggagtagcaatgagatccaaatccaggaaatatggcaatatcttcgatttacatcattagccctcagtattttttttttttttttgagactagaagcagaaggctgcttcatgcctggctgcctatcaaaagaagcaattttcataaatctatagctctgaacaatgaaagcagagctttcacctctgctgaatcagtgtctggagcatcagggacaggggaaaagttctaacattagcttttttcttctacctgctgctaatcagagtgcaagcgagaagttgtattcttctcagggccagtaaagcagggaaagaaatcactagtgctcctccccagtctgargatcaaataaacagccttttttatcatccagctgctaggggtatggcttgagctacagacagctcattagaaagaaccacaaagttagaaatttggcctttggggggaaaatgtcactcttcaaattccctgtcttgtgttctttaactaagtacatatcctttttaggggc

SEQ ID NO: 795478 - DNA, 644 bp, Homo sapiens
aggaaccattctttgctctaggagtagcaatgagatccaaatccaggaaatatggcaatatcttcgatttacatcattagccctcagtattttttttttttttttgagactagaagcagaaggctgcttcatgcctggctgcctatcaaaagaagcaattttcataaatctatagctctgaacaatgaaagcagagctttcacctctgctgaatcagtgtctggagcatcagggacaggggaaaagttctaacattagcttttttcttctacctgctgctaatcagagtgcaagcgagaagttgtattcttctcagggccagtaaagcagggaaagaaatcactagtgctcctccccagtctgaggatcaaataaacagccttttttatcatccagctgctaggggtatggcttgagctacagacagctcattagaaagaaccacaaagttagaaatttggcctttggggggaaaatgtcaytcttcaaattccctgtcttgtgttctttaactaagtacatatcctttttaggggccagatgggatggggagacctgttttgaaccttaagacaataataagagcttagatatttactgaaggaatgaaatggtttgtctgaaagttgcccagtttcacaact

SEQ ID NO: 795479 - DNA, 601 bp, Homo sapiens
aaaccaaagagaacgatgcttgccacgtggtaaaagctgactttagttgacatctcttccttcattctttttcagctcacacattcctccccattctctgaattcccacaaagactgttattgctggggctcataaaattataccccaaagtatgatgctttggcatccagagtgctttgaactataggagattgaaggccccagaagccaagtttccctctgaccttctcctgccttcctgtctyccaccccctgcttttcccctgaagtgagtcctggaagccagaattcttcttgcccaaagcaagccgtgacaccctggaaatatcactctaaccttccttgcctttccgtgtggcagctggccatgaagaaattctctgacctaccttgtttgatagcagatcacaagaccctggttccagagcggtcctgctttacaccgagggaaaggaatgtcatacagaaaggccaagaagaatctgaagagatgtccaatcaccttttcacgtggctgcccattcttcattgaacctaagcattaaaatagacagtttcccctgggtctttgggtcttcatttctgaagactccatgtcat

SEQ ID NO: 795480 - DNA, 601 bp, Homo sapiens
aaaccaaagagaacgatgcttgccacgtggtaaaagctgactttagttgacatctcttccttcattctttttcagctcacacattcctccccattctctgaattcccacaaagactgttattgctggggctcataaaattataccccaaagtatgatgctttggcatccagagtgctttgaactataggagattgaaggccccagaagccaagtttccctctgaccttctcctgccttcctgtcttccaccccctgcttttcccctgaagtgagtcctggaarccagaattcttcttgcccaaagcaagccgtgacaccctggaaatatcactctaaccttccttgcctttccgtgtggcagctggccatgaagaaattctctgacctaccttgtttgatagcagatcacaagaccctggttccagagcggtcctgctttacaccgagggaaaggaatgtcatacagaaaggccaagaagaatctgaagagatgtccaatcaccttttcacgtggctgcccattcttcattgaacctaagcattaaaatagacagtttcccctgggtctttgggtcttcatttctgaagactccatgtcat

SEQ ID NO: 795481 - DNA, 607 bp, Homo sapiens
aaatgtatcatgcattacttttgctaacctgtcttttgttataggagtgtcgcctgtgacctttatgatgggtaaggaaagatttcacatcttttctacccctacattatcatactgtgaaattttattatatgctgtcttgccctcatagaaagagaattttggagtttgaaagaatcctgctaatcatgaaatctggtcctttatttaacagaaaaattcccagagacatgaaatgattagtactgtttcacagagaagcagagggagagccagaccctcagtcagtccaggctctgctgtctttggaggtggggtttcaggtctccccagcagggttgtgaggtcccaragaacgggaggcaggccttgggccatagtctcctgcatccctccagagcctgcagcaggagctgggcccaaggatgctgctgagtgagtccacatgactgacatacactgctctggaagcaccattccggcagactagccctcttcttcccatataatccaggaaggttgttatagatagtccagatttttctagataatcttgtaacatattcacattcaacatacatacaaaaattcacacttggtatgggta

SEQ ID NO: 795482 - DNA, 618 bp, Homo sapiens
tttaacaggaaataaataacagaaatagtttaccacaagtaataccctatagtgacatttgttgttgtacagtctctattatctcttagaaccaaaaataaccagatattgtgacctaaaatctaatctttcaagatgcttcaataaaagaattagcaatggtcaagtaaatgtagtaactgctgcatttctacattatttttggagattttaaatgtttaccaggttaagggttcaaagaagacttytgtttcaaattagcgtttaccagatgtaattgactgtggacacgtttttacataaaatttattagcacacacatggtagaattagttcagaagaaaagcacatctgtcagtaaatgttcagtacaagcaggccaaatatgaaatatctcattttatatccaaacctctagaatcagttaaaatctggaacttgctcatttagttgctttaataacctttctaaagatctacatttttttttagaattgcatctatcacctggtgacttttgaaatcattttatacattttatattttaaaaatatgagaccatttattgtttttacctacagaccatgacattcaatgttgcctatggctgatcacccac

SEQ ID NO: 795483 - DNA, 618 bp, Homo sapiens
tttaacaggaaataaataacagaaatagtttaccacaagtaataccctatagtgacatttgttgttgtacagtctctattatctcttagaaccaaaaataaccagatattgtgacctaaaatctaatctttcaagatgcttcaataaaagaattagcaatggtcaagtaaatgtagtaactgctgcatttctacattatttttggagattttaaatgtttaccaggttaagggttcaaagaagacttctgtttcaaattagcgtttaccagatgtaattgactgtggacacgtttttacataaaatttattagcacacacatggtagaattagttcagaagaaaagcacatctgtcagtaaatgttcagtacaagcaggccaaatatgaaatatctcattttatatccaaacctctagaatcagttaaaatctggaacttgctcatttagtygctttaataacctttctaaagatctacatttttttttagaattgcatctatcacctggtgacttttgaaatcattttatacattttatattttaaaaatatgagaccatttattgtttttacctacagaccatgacattcaatgttgcctatggctgatcacccac

SEQ ID NO: 795484 - DNA, 517 bp, Homo sapiens
atttcccactgaagtgtctgtaaagactgtaagaggtgcctacttcttcaaatatgaatacaccaaggcaaagccacaaggaacataaataatccgggaaacatgacatcacaaaaagaatgtaatacccataaccaatctaaagaaatggagatctatgaacttcctgaagaagaattcaaactaattggcttgaagaagctcaatgaactacacaagaagacacagccaaccaaacaaaatcaggaaaacaatgtgtgaataaaatgaaaagtktgacagagagaaaacataaaaaataaccaaacagaaattctgaaactgaagaacataatgactgaactgaaaaatttcagagatcttcaacagcaaacttgataaagcagcagaaagaggcagtgacctcaaacactgcttatttgaaattaaccagtcagaggaacaaaagaaaaaaagaatgaaaagagtgaagaagaccgacaggatttatgggccaccatcaagcaaacctaatatg

SEQ ID NO: 795485 - DNA, 549 bp, Homo sapiens
gaaatagaaagaggaaaaaggcttctttaagaaaataacagaaaatttcccaaatctggagaagtatatgaaaatccagaccaatgagttcaaagaatttcaaatagattaaacataaagagatcatcaccaagacactgtataatcaagttgaaaacttttcctttaacatcaggaacaagacaaggatgcccactcttaccgcttttattcaacatacaartgggtgtcctagtcaacaagaaaaagaaataaaaggtatccagcttggaaagaaagaagttaaattgtctctctttgcagatgacatgatctaatatataaaaatccctaacacatacttagaaataaatttaataaataaatttaaaaattaaaaaagtaaatttaatcaataaggtaaaaggtatgtacactgaaaactataaatattgatggaagaaataagacccaaataaatgaaacaatatcctgtgataatggattgaaagaattaatattgtcaaaatgttcatactactccccatgatctacagattcaatgaaata

SEQ ID NO: 795486 - DNA, 513 bp, Homo sapiens
tttctcttacatttctatttttctatgatgtttccagttcaaggatctttacataatttattttttccaagaaagaactttgacatgatggacaaagattctccctatgaccagatgttggtcaggctactctaagctctctgctcaaccagcctgacctttggtctttcatcgtccagcttagcaagaatcctgccaatttgsttttaacccaaatctcccaccctcaatatctgatcactctcaatatctaatcacctttctcatccctctcaccaccccgcaggtgatgtctgacaacactggcctggcatcaccaggaaacctggtgagtcagtttagcaagaattactctcccattttgtagttttccactcagacaccccaccccagccactctgctccttggctacgaatccacacttctccttgttgtatttgaagttgagctcagtctctttccccaactgcaaagctccattccagtaattcctatacctattgccatagtcc

SEQ ID NO: 795487 - DNA, 513 bp, Homo sapiens
tttctcttacatttctatttttctatgatgtttccagttcaaggatctttacataatttattttttccaagaaagaactttgacatgatggacaaagattctccctatgaccagatgttggtcaggctactctaagctctctgctcaaccagcctgacctttggtctttcatcgtccagcttagcaagaatcctgccaatttggttttaacccaaatctcccaccctcaatatctgatcactctcaatatctaatcacctttctcatccctctcaccaccccrcaggtgatgtctgacaacactggcctggcatcaccaggaaacctggtgagtcagtttagcaagaattactctcccattttgtagttttccactcagacaccccaccccagccactctgctccttggctacgaatccacacttctccttgttgtatttgaagttgagctcagtctctttccccaactgcaaagctccattccagtaattcctatacctattgccatagtcc

SEQ ID NO: 795488 - DNA, 523 bp, Homo sapiens
gaggttaagtgtggaggtatttttccaggaacgcccttgcacatctcacaggtagcacttagtcatgattatatgtacactcaggcaagagtacagtttgcaccttgattgtcactcactgtgaaattattattcaagtaagacaaggagcttctttcagcatgatgaatgcttccagagtttgtgacatgacacttatttgggaaaaagctctttctcctacttacctaaaacctttcccaatatgagagatttgacrgcgttgaattctgtccctgaggacaagatgacttgtttctttgtgctctggttaacctattagatgtcccatgagaagcaaacatcaacagaaagtacaattttaatgataaggaagcaaaggaagatgaggaaaggaaagatgaaaataaatcacttttaagtaccattacaaaagctcaagaagccaccttcaaataattaatcatttagaaagagaagctattttataagcaattcctatgatgccatcagctaccactct

SEQ ID NO: 795489 - DNA, 641 bp, Homo sapiens
catcagcaggggcaggctgcatcttctgaggaagctgatcaacttgaagagacgctcctttaacatttctctctgccctcacgtggtgccactgattgtcattaaagggagtgggtgactgcaccgtgacctcacaaggtccattccccacatcgaaggaaaaggtcacttctgtgggagctagaaatattagatatgaatattgctcaagcaaattcacagaaaattgagtcttgtgcagacacaggaaaacatgaaggcacgctcaggatggaaggagataatgacggcgatgcagaaaaaygggactgtgagttggggtgggggcagaataaatctgtatcctggaggaaaacagaacggattttaacatatttatcctcagagttcacaattcaaccttgttaagtcctaaatagtagagatatgtacccatagctggactacccatagctatgtacctatagctagaataccaaatagtatttgtttttgaggtttcagtaattttatttacaaacggctcaaagtctcatctaattctataaacactgaatgtaaattttgacagtcataaattaagctttgggtacataaaaaacaatatgtctggtcaaatatttttggaattcagtaaacaa

SEQ ID NO: 795490 - DNA, 641 bp, Homo sapiens
catcagcaggggcaggctgcatcttctgaggaagctgatcaacttgaagagacgctcctttaacatttctctctgccctcacgtggtgccactgattgtcattaaagggagtgggtgactgcaccgtgacctcacaaggtccattccccacatcgaaggaaaaggtcacttctgtgggagctagaaatattagatatgaatattgctcaagcaaattcacagaaaattgagtcttgtgcagacacaggaaaacatgaaggcacgctcaggatggaaggagataatgacggcgatgcagaaaaacgggacwgtgagttggggtgggggcagaataaatctgtatcctggaggaaaacagaacggattttaacatatttatcctcagagttcacaattcaaccttgttaagtcctaaatagtagagatatgtacccatagctggactacccatagctatgtacctatagctagaataccaaatagtatttgtttttgaggtttcagtaattttatttacaaacggctcaaagtctcatctaattctataaacactgaatgtaaattttgacagtcataaattaagctttgggtacataaaaaacaatatgtctggtcaaatatttttggaattcagtaaacaa

SEQ ID NO: 795491 - DNA, 641 bp, Homo sapiens
catcagcaggggcaggctgcatcttctgaggaagctgatcaacttgaagagacgctcctttaacatttctctctgccctcacgtggtgccactgattgtcattaaagggagtgggtgactgcaccgtgacctcacaaggtccattccccacatcgaaggaaaaggtcacttctgtgggagctagaaatattagatatgaatattgctcaagcaaattcacagaaaattgagtcttgtgcagacacaggaaaacatgaaggcacgctcaggatggaaggagataatgacggcgatgcagaaaaacgggactgtgagttggggtgggggcagaataaatctgtatcctggaggaaaacagaacggattttaacatatttatcctcagagttcacaattcaaccttgttaagtcctaaatagtagagatatgtacccatagctggactacccatagctatgtaccyatagctagaataccaaatagtatttgtttttgaggtttcagtaattttatttacaaacggctcaaagtctcatctaattctataaacactgaatgtaaattttgacagtcataaattaagctttgggtacataaaaaacaatatgtctggtcaaatatttttggaattcagtaaacaa

SEQ ID NO: 795492 - DNA, 585 bp, Homo sapiens
agaggtaacagataaatcggaaatatctggaaatggagaacacagctgataacaaattactgacattgggagaagcttagaataatcatattgaatgcataggagaaggacaaagagattaaagccattggaagaaacagaaaaaatgtatggggggcaaaggaaacaagtcaacagtccyagatgcagagaatccaacaaatgaaacaaagtattcaaagcataataaaaaccattttttcttaaaagagaacagaatatttcggtcaaaataagcatatttcattttagaaaaaattaacagaataattaatgccaaggcatattctggataagtttttgaaattgaaggataacatatctgtcaagagctgtgaggagtctgagatttcaccctacttgcaagctaacaatttagcttgccacagattaatggatgctgatagaaaacacaaaatttccgggtcagagttaaagaactttactgctcacagcacagcatgcagcatgagtgtcagaatatttgcattggttccccctatctccaaatttcacagggcaacacaatccatcagcccaggtgga

SEQ ID NO: 795493 - DNA, 464 bp, Homo sapiens
ctaacctgaccaaaaaagagaaaacagactgaatataaaaagaactgagccatagggtcctatcagacaatatcatccgaatctcaaaaagagagaagaaagtgtgctgaaagagtactgaaaaaatactggctgtaaacttccyacatgtggtgaaagacacaaacccagagatttaggaagtaaagtttaagtccaaaaaaggataaacccaaaaatatcgacaccaagatccatcataattgaactttttggaaacaaaacaaaacagaaatcttgaaagcagcctgagagaataacacattacctgcctgtaaaagaaccctaatttgaatgatagtagattactcatctgaaattacagaaccagaaggaatggcatatttttttcagggctgatagaaaagaattgtcaactataaattatatatccagagaaactatccttcaagaataaaatggaa

SEQ ID NO: 795494 - DNA, 464 bp, Homo sapiens
ctaacctgaccaaaaaagagaaaacagactgaatataaaaagaactgagccatagggtcctatcagacaatatcatccgaatctcaaaaagagagaagaaagtgtgctgaaagagtactgaaaaaatactggctgtaaacttcccacatgtggtgaaagayacaaacccagagatttaggaagtaaagtttaagtccaaaaaaggataaacccaaaaatatcgacaccaagatccatcataattgaactttttggaaacaaaacaaaacagaaatcttgaaagcagcctgagagaataacacattacctgcctgtaaaagaaccctaatttgaatgatagtagattactcatctgaaattacagaaccagaaggaatggcatatttttttcagggctgatagaaaagaattgtcaactataaattatatatccagagaaactatccttcaagaataaaatggaa

SEQ ID NO: 795495 - DNA, 464 bp, Homo sapiens
ctaacctgaccaaaaaagagaaaacagactgaatataaaaagaactgagccatagggtcctatcagacaatatcatccgaatctcaaaaagagagaagaaagtgtgctgaaagagtactgaaaaaatactggctgtaaacttcccacatgtggtgaaagacacaaacccasagatttaggaagtaaagtttaagtccaaaaaaggataaacccaaaaatatcgacaccaagatccatcataattgaactttttggaaacaaaacaaaacagaaatcttgaaagcagcctgagagaataacacattacctgcctgtaaaagaaccctaatttgaatgatagtagattactcatctgaaattacagaaccagaaggaatggcatatttttttcagggctgatagaaaagaattgtcaactataaattatatatccagagaaactatccttcaagaataaaatggaa

SEQ ID NO: 795496 - DNA, 589 bp, Homo sapiens
acaacaatgagataccacctcatatctgttaggatggccagtataagagaaaataaatggctgggtgtggtgcctcatgcctgtaatcccagtactttgggaagcgcaggtgggtagattacctgaggtcaggagttcaagacaagcctggccaacacggtgaaacctcatctctactaaaaatgcaaaaaaattagctgggcacggtggtgggcgcctattatcccagctactcgggaggctgaggcagggaatcatttgaacccaggaggcagaggttgcaatgagccgagttcaagccactgcactccagcctgggcaacacgagcgacactccctctcaacaacaacaacaacaacaaaaataaaaayaaaaataaataaacccaaaagataacaagagttggcaaggatgtcgagaaaaagaaacacttgtacatgttgatgggaatgtaaattagtgcagtcactctggaaaacagtatgagggatcctccaaaaattaaaaatagaacttctatatgatccagtcccacttctgaatatgtatcctgtgaaccccaaatatctgagacaggtctcagtcaat

SEQ ID NO: 795497 - DNA, 629 bp, Homo sapiens
ggatagatatatactgtaaataataatcttcttgaaaaacactcattgtgtttatcttactgtcctccattataggatatctatgagaacaagcatgagcaaatatctttattcctgtagtgtttgctcactgaacatagttgtacacttagagagtaaatatttcttccaagtattgtaatagcttttaaaatagatttaaatgaagtttcagaaactatctgattatttaatacaaataaacttaacagataaaccatgaaaagatatactcatcaaaataagtgaatatagaagagtactctctagttttgggattacaaagatcaaactgagtgatgactcaagtggtcacacattgtcacaggttttggtgkgagtggctatttttttttttacttttaagttgaggggtacaagtgcaggtttgttacataggtaaacttgtgtaatgggggttgttgtacagattatttaatcacgcaagtattaagcctagtactcattcgttatttttcctgatcctctccttactcccaccctccaccctctgatatgccccagtatgtgttgttcccctctatgtgttctaatgatttagtttccacatataagtgagaacatgcagg

SEQ ID NO: 795498 - DNA, 658 bp, Homo sapiens
agcaaaatgtggtaaatccttacaaggaaatagtatttgaccataaaagtaatgaaatactgattcatgttacaatatgaaagccagttacaaaagactacatattgtacaagtgcatttatatgaaatgttcagaataggcaagtctatggagacaaagtagattagtggctacatgtggaggggaaggatgggggtattgggggcgacrggtaaaggatatgggatataaccattctaaaattgattgtggtggtagatgcacaactctgaatgtactaaaaatcattgaattgtacacattatatgggtgaattatatttcaataaagctattaccaaatttttctaatcttagagaatgtaaaaaataaggatatttaaatccttaacacagtacctagcaaatagtatgtccttagtagctattatttgataaatatcattttgaattttgctcagtaacacagattgaactagcagtagtgtgtaagatggtttggtaatggaaaatccagttaggacactattgtcatggttcagacgagataatgtaggtgtcagctaagattatatcagtaggtatggagagcaagaggtaatttttaactacaagtaaagtaaatagtgacattttgcaggtagaacatgaaagtaaa

SEQ ID NO: 795499 - DNA, 600 bp, Homo sapiens
ccctccagctgaagtgacttccaaggtatgaaacagccagcaccctccccatctcctcctttatttttttccccttttcggcaaccgggcattaaaaactaggacattcaaggtgaaagttagagagtgactgcatatgtctagggaaaggtgcagactcagaaacaccctgagaagaccttaagatcatacytcaggacaatctttacacagagacagcctgcaacaatcaaatcaagaacaaaataatatcaacaatcaccaaagactgggtaaggggttaatcttatttccagaattactacattattagatttgaatgtcgagttttcaacaataaaaataatcacaattttctgtgttaatagtacattaacacataaaaatatggcccattcaaaaaaaggtctcagaaatcatacctaaaaaagatttgatagcaaatctacaagataaagactttgaagtaactcttaaagatgctcagagaattaaaggaagatgtggagaaagtctcaaaaatgatgcacaaacaaaatgaaattatcaataaagagatagacaacctataaagaaaacaaaaaaaaaatctggagctaa

SEQ ID NO: 795500 - DNA, 433 bp, Homo sapiens
attaagtatacaacgttgcaatctcaaaaaatatatggtaacttgtaacttacaatattaaaatgcttctgaagggcaacaacttaaatatttccaaatagaaaatgaagagaaagaaggaaaaattaactaaaataattttacagttattttttcaagtcattaataatcagtttgcataaactatggcaacaatgagaaaaatctagtttaatcaattttgaaaattagagtctctctcgtttctttgtttygttttgtttttacaataaacttttttctcaaacttgtttgccatgttaaaataactggtgatttggagttcattttgtcgtgaaaatcattgcaccgagaagaaagagtgtctggcttgtcagagtataaataatgcagtaatctggaactgccccccacccctttgcgtctaagatga

SEQ ID NO: 795501 - DNA, 433 bp, Homo sapiens
attaagtatacaacgttgcaatctcaaaaaatatatggtaacttgtaacttacaatattaaaatgcttctgaagggcaacaacttaaatatttccaaatagaaaatgaagagaaagaaggaaaaattaactaaaataattttacagttattttttcaagtcattaataatcagtttgcataaactatggcaacaatgagaaaaatctagtttaatcaattttgaaaattagagtctctctcgtttctttgtttcgttttgtttttacaataaacttttttctsaaacttgtttgccatgttaaaataactggtgatttggagttcattttgtcgtgaaaatcattgcaccgagaagaaagagtgtctggcttgtcagagtataaataatgcagtaatctggaactgccccccacccctttgcgtctaagatga

SEQ ID NO: 795502 - DNA, 647 bp, Homo sapiens
agtgtcacaaacatgttttgtgaatgtagcctcacataaatgagtgtaatttatagcttcacttacagaattgattatagtaggcaaaactaaccttttgtagaaagaatcaaaacaattgtagcctgtgttgaaattttgactggaaagtgccaagagaaaatatatttctaatagatattctgcatgttttatgtgcactaactaatggatagataagtagatagatgattgatagatagaagatagatacatagctagayagatagataaatgatagatagatagatagatagatagatagatagatagatagatagatagatagatttttttcccctacaaagccattaaaaagtattgaacacaaggaagtctgcaatagagcaagctggatgtagtggaagaaaggattggtaacttgaaaataatctaatagaaattattcaaaatgatcatagactaaatacagaaaataaaataaaatagtgttatgtggaataatagctaacagaataaactttgtgtatttggattttcagaataataggtggacaaagagggagaaaaatatacatatagatagaaaatgtcagaatttgtttttttcaaaactgacgaaagaacatctatacacaagcccacaa

SEQ ID NO: 795503 - DNA, 581 bp, Homo sapiens
tatacatcacttttttcttgatataatcatctgtagacagacacttaggttatatcccaatttttgctgttaaataatgccgcaataaatatgagaatgcagatatcactttagggccctgattttaattcttttgcatatatactaagaagtgggattgctagatcataarattgttctaattttaattttttgagaaagttctgtaatgttttctatagcaggtgcaccatttttctttcccagcaacagtgtacaccgattccaatttctccgcatccttgccagcatatgctattttttcttttattttgttgatttgttaattttttgtttttgtttttataataggcattctaacaggtgtgaggtgatgtctcattgtgattttgatttgcatttccctgatgattagttatgttgagcgtctcttcatataccatttgtatgttttgtaagttttctttggtaaaatccctgttcaagtcgtttgcccatgttacttgtttccttgtttgtttgctttttcaattaagtcataggagttccatatatatttttgaaactaaattattatcata

SEQ ID NO: 795504 - DNA, 581 bp, Homo sapiens
tatacatcacttttttcttgatataatcatctgtagacagacacttaggttatatcccaatttttgctgttaaataatgccgcaataaatatgagaatgcagatatcactttagggccctgattttaattcttttgcatatatactaagaagtgggattgctagatcataagattgttctaattttaattttttgagaaagttcygtaatgttttctatagcaggtgcaccatttttctttcccagcaacagtgtacaccgattccaatttctccgcatccttgccagcatatgctattttttcttttattttgttgatttgttaattttttgtttttgtttttataataggcattctaacaggtgtgaggtgatgtctcattgtgattttgatttgcatttccctgatgattagttatgttgagcgtctcttcatataccatttgtatgttttgtaagttttctttggtaaaatccctgttcaagtcgtttgcccatgttacttgtttccttgtttgtttgctttttcaattaagtcataggagttccatatatatttttgaaactaaattattatcata

SEQ ID NO: 795505 - DNA, 581 bp, Homo sapiens
tatacatcacttttttcttgatataatcatctgtagacagacacttaggttatatcccaatttttgctgttaaataatgccgcaataaatatgagaatgcagatatcactttagggccctgattttaattcttttgcatatatactaagaagtgggattgctagatcataagattgttctaattttaattttttgagaaagttctgtaatgttttctatagcaggtgcaccattttyctttcccagcaacagtgtacaccgattccaatttctccgcatccttgccagcatatgctattttttcttttattttgttgatttgttaattttttgtttttgtttttataataggcattctaacaggtgtgaggtgatgtctcattgtgattttgatttgcatttccctgatgattagttatgttgagcgtctcttcatataccatttgtatgttttgtaagttttctttggtaaaatccctgttcaagtcgtttgcccatgttacttgtttccttgtttgtttgctttttcaattaagtcataggagttccatatatatttttgaaactaaattattatcata

SEQ ID NO: 795506 - DNA, 601 bp, Homo sapiens
tcaaagttaatatcaccaaaaacgggattaatattgtgtgcctccttaagaaaacaccataagaacaaaataatctcttatgcagcattcctgccaaaactgcatagccaatctaatctaaccaatttaatctaatcatgaattgagtcttgcggaaagaacagataatcccaaagcgaggggctagcctgaactattgaagtatgttcacatcacgaaaagaagaaagggtgaggaactactccggattaaaggagacgagagacacatgacaactaaatgtaacgtggagactggatcccggaccaggatcaggatccagaataaactgtcataaaagacattattgaattaattataaaaattcaaatataggctgtatattagataatagtatattagacaacaccwtttctgattgtgataacaataccatggttatgcacgagaatttccttggtctgaggaaccacaccctgaattatctagggagaaaggaacatcatagcatcaatccactctcatagagctcagaaagataataatagagcgcgtgtgtgtacagacagggaaagataaaacaaatgtggcaaatgctaac

SEQ ID NO: 795507 - DNA, 516 bp, Homo sapiens; identical to SEQ ID NO: 738050

SEQ ID NO: 795508 - DNA, 645 bp, Homo sapiens
ttattttttaaatgttcttcagaaaacatattttgccttataatttataattaatttgattacttaaaaatgtatttattaaatcatcatttcattccaaataaagacatatttactttagtaaaagagagggtttgtaagtatattaaaatattttaaattatcacaatagtacctttattttcctataattcatttataataaagaaaaaagcatatgtaatattaacaaaataataaatcgaacaatgagaacacgtggacacaggaaggggaacatcacacactggggcctgttgtggggtggggggaggggggagggawagcattaggagatatacctaatgttaaataacgagttaatgggtgcagcacaccaacatgaaacatgtatacatatgtaactaacctgcacgttgtgcacatgtaccctaaaacttaaagcataataaaaaacaaaaaacaaaataataagttttgataatcaaatttaaataattttggaaaaaatattaaatattctgaatgtagtattctttttaatctcttttcttgattttgattaaatacttgactttgggtaatttaactaagccccaatttctttatgtgttaaatagatatccaaaatacagcagacatata

SEQ ID NO: 795509 - DNA, 613 bp, Homo sapiens
acatttacttgtggtgttcctttagattccttttatctagaactgttcctctgccattttttcatctataaatttatgttggtgaagaatccatactagttgttctgcagaattcctccttttggacttatattatttcccctttattagattatggtgaagtttttttyttttttcttttttgcaaggacaccgtataggtgatcttgtaccctgctccatcatgatcaagaggctcatgatgtcagtgtgtcccatttttggtggctttgagtgtcatacaatgttttaggcagtatctgacagatttcttcatttaatttttttataattaaagaagaatttgttggatgatagatggctttgctttcaaatatgacaacatggttaatagataaaaaagactattatattttatttatgactttcactgaaagtaagacagtaaagaaatctaaagcatgcctccaagcataaaagtgagctgatgaaggaaaaagaagagcagatacactgcagaaaacaggttggaaaatacagtgattagagtaatatgaaaatatgtttattatatattaaaatatagatttgaatgattttaagactgattaca

SEQ ID NO: 795510 - DNA, 613 bp, Homo sapiens
acatttacttgtggtgttcctttagattccttttatctagaactgttcctctgccattttttcatctataaatttatgttggtgaagaatccatactagttgttctgcagaattcctccttttggacttatattatttcccctttattagattatggtgaagtttttttcttttttcttttttgcaaggacaccgtataggtgatcttgtaccctgctccatcatgatcaagaggctcatgatgtcagtgtgtcccatttttggtggctttgagtgtcatacaatgttttaggcagtatctgacagatttcttcatttaatttttttataattaaagaagaatttgttggatgatagatgsctttgctttcaaatatgacaacatggttaatagataaaaaagactattatattttatttatgactttcactgaaagtaagacagtaaagaaatctaaagcatgcctccaagcataaaagtgagctgatgaaggaaaaagaagagcagatacactgcagaaaacaggttggaaaatacagtgattagagtaatatgaaaatatgtttattatatattaaaatatagatttgaatgattttaagactgattaca

SEQ ID NO: 795511 - DNA, 640 bp, Homo sapiens
cacagtatcctgcacaattttaatatgcaaagagtttttatgaaccagtaattatgaaccaattatcaaataataattcatagaaaaagaaattaaaaagtatatactatgaaagaatattcaggctgtgtgtggtgactcatgtctgtaatattagaactttgggaggttgaggcagaaggatgcttaagtccagaaatttgagaccaacctgggcagcatagtgagaccctgtctctacaaaaaaatttgaaaaactagccaggcatggtggtgtgtgcctgtwgtcccagctactctggaagtagcaggaccgcttgagtccaggagttggaggccacagtgggcttatggcgccacttcactctggcctgagcaacagagcgggactctgtctgtattaaaagaaaaaagaagaagaaaaaagaatatcatctttactagcaatcaggcaataactgcatagtttttagaagaaaatcagattggctagaataaaaaaaaattaatttcaaaattggcagaaagcagaaagtgtaagcttatacagatttttttctctttttgtggagggcaacttgttattgtgaatcaatacttaaaattatttgacccaacagttctttatctagtaacctgt

SEQ ID NO: 795512 - DNA, 640 bp, Homo sapiens
cacagtatcctgcacaattttaatatgcaaagagtttttatgaaccagtaattatgaaccaattatcaaataataattcatagaaaaagaaattaaaaagtatatactatgaaagaatattcaggctgtgtgtggtgactcatgtctgtaatattagaactttgggaggttgaggcagaaggatgcttaagtccagaaatttgagaccaacctgggcagcatagtgagaccctgtctctacaaaaaaatttgaaaaactagccaggcatggtggtgtgtgcctgttgtcccagctactctggaagtagcmggaccgcttgagtccaggagttggaggccacagtgggcttatggcgccacttcactctggcctgagcaacagagcgggactctgtctgtattaaaagaaaaaagaagaagaaaaaagaatatcatctttactagcaatcaggcaataactgcatagtttttagaagaaaatcagattggctagaataaaaaaaaattaatttcaaaattggcagaaagcagaaagtgtaagcttatacagatttttttctctttttgtggagggcaacttgttattgtgaatcaatacttaaaattatttgacccaacagttctttatctagtaacctgt

SEQ ID NO: 795513 - DNA, 601 bp, Homo sapiens
gaggtctctaactctaatccatgaccacatggctcattctcattgcttctccttgattatctgtaaactctgacttcacaataagaaagctgctgccacaatccaccatccatgggcctaattgttcaatttcagcatacatgaatagccctatcagaatagttaaccagtatcccctctaaagggtttatcaactagaagctaaatgattagtgacatatgggatgatgattctaatgtatacatatatctataaatatgtctatgtgtaattacttgtacctgtattaaagtaaacatgaatttatatggaggtctctaactgtaatccatgaccacgtgggtcattctcattgcctctccttcattatctgtaaactctgacatcacaataagaaagctgctctcacaatccaccattcatttacttaattgttcgatttcagcacacatgaatagccytatcagaacagttaaccaatatcccctctaaaggggttatcaactagagtgcaatgtttacagatggttccttttggctttagctagtcttaaggatttcactcataactagggttacctaggtcattaccattttccc

SEQ ID NO: 795514 - DNA, 535 bp, Homo sapiens
gcaaatgtaaaagaagagaaattataacaaactgtctctcagaccacagtgcaatcaaactagaactcaggattaagaaactcactcaaaaccactcaactacatggacactgaacaccctgctcctaaatgactactgggtacataacaaaatgaaggcagaaataaagatgttctttgaaaccaatgagaacaaagacacaacataccagaatctctgggacacatttaaagcagtgtgtatagggaaatttatagcaytaaatgcccacaagagaaagcaggaaagatctaaaactgacaccataacatcacaattaaaagaactagaaaagcaagagctaacacattcaaaagctagcagaaggcaagaaatagctaagatcagagcagaactgaaggaaataaagacgcaaaaaaaccttcaaaaaaatcaatgaatccaggagctggtgttttgaaaggatcaacaaaattgatagacctctagcaagactaataaagaaaaagagaaaaatcaaatagacgcaataaa

SEQ ID NO: 795515 - DNA, 535 bp, Homo sapiens
gcaaatgtaaaagaagagaaattataacaaactgtctctcagaccacagtgcaatcaaactagaactcaggattaagaaactcactcaaaaccactcaactacatggacactgaacaccctgctcctaaatgactactgggtacataacaaaatgaaggcagaaataaagatgttctttgaaaccaatgagaacaaagacacaacataccagaatctctgggacacatttaaagcagtgtgtatagggaaatttatagcattaaatgcccacaagagaaagcaggaaagatctaaaactgacaccataacatcacaattaaaagaactagaaaagcaagagctaacacattcaaaagctagcagaagscaagaaatagctaagatcagagcagaactgaaggaaataaagacgcaaaaaaaccttcaaaaaaatcaatgaatccaggagctggtgttttgaaaggatcaacaaaattgatagacctctagcaagactaataaagaaaaagagaaaaatcaaatagacgcaataaa

SEQ ID NO: 795516 - DNA, 535 bp, Homo sapiens
gcaaatgtaaaagaagagaaattataacaaactgtctctcagaccacagtgcaatcaaactagaactcaggattaagaaactcactcaaaaccactcaactacatggacactgaacaccctgctcctaaatgactactgggtacataacaaaatgaaggcagaaataaagatgttctttgaaaccaatgagaacaaagacacaacataccagaatctctgggacacatttaaagcagtgtgtatagggaaatttatagcattaaatgcccacaagagaaagcaggaaagatctaaaactgacaccataacatcacaattaaaagaactagaaaagcaagagctaacacattcaaaagctagcagaaggyaagaaatagctaagatcagagcagaactgaaggaaataaagacgcaaaaaaaccttcaaaaaaatcaatgaatccaggagctggtgttttgaaaggatcaacaaaattgatagacctctagcaagactaataaagaaaaagagaaaaatcaaatagacgcaataaa

SEQ ID NO: 795517 - DNA, 563 bp, Homo sapiens
ctcccatagtccttgttacagtcttctgttataatgttagggtgttttaggcctcagaagcaaaagtttctctctgaccttctctggccctatttctgactctcattctccctcaaggccatccctagaaactagagtctttcttccccagattgaatcatakaaaccagaactctgtttcctgaaagccagccataagcccccacctttctgtccataaagaaattatctgaactaccttgtttgatagtaagtcataaggcctgcattctagagagggtcctgtcccataccctggaggaagaaatgctacacatagaggccaagaatctaaatatagaggtctttctgggttttcccactcagactgttactattagatcatatcctttttgtccaatcacatttctacatggtttttcatgcttcaatcatgtctatccaatgaagtctccataaaaggacaaagaagactgagtttggggagcttccagatagctgaacacctggaggttcctggagggtggcacaccaaacgagtgcatggaagctgtatgcccctt

SEQ ID NO: 795518 - DNA, 552 bp, Homo sapiens
ctgtatgccccttccccaacaccttgcctctgagcagcttactgaactcaagtgtttccttgaggaaatttctaggggtcctgtggtttcagtgcttcagaactcaagtatttccttgagttctgtgagctcctctagcaaaataatcaaaccccaaaaagaggttgtgggaactccaacttgargccagttgatcagaagttccagaggcctgggcttataactggtgtctgaaggaagaacagtcttagagactgagccctcaacttgtggtttctgaggttatctctaggtagaaagcatcaaaattaattgaattggaggacacctagttggtacagaattgcttgcttgctttttggtggggagaaatccccacacatttagtcacggatcttctgtggtgattgttgctgcgatgtgagagcagaggaaaaaacagtttgtgggttttttattttttatttcctaacagaggtctttggaggtaaggtgattaatggaattttagctcaggttcatttcacagtgggttcagtgggtccctgagac

SEQ ID NO: 795519 - DNA, 601 bp, Homo sapiens
aagggtgatcgtgagtggtgtcacacttccacaccttgattcctggacccgtgaatcctggctatgggagaaacagtaccatatattgggcattgattcagaggatacacagccttttggagaactttgccctagccctgcaaagtattgtcacctagttggccttgtaattgtgacttcaaaaggctttcccaccattctatcaatccagctgcttcaggatgatggggaacatggtaggattagtgacttccatgagcatgagaccactgctgcacttctttagccaaaaagtgagtgcsttggtcagaggcaatgctatgtggaataccatgatggtggataaggcattccatgagtccacggatggtagtctcagcagaagcattgcatgcaagataggaaatcctatatccagagtaagtgtctatgtcagtgaggacaaacctttgtcctttccatgatgtaagaggtccaatataatcaacctgccaccaggtagctggctgatcaccccaaggaatggtgccatatcgagggctcggtgttggtctctgctgctggcaaattgggcactcaatagtggccatagccagggcag

SEQ ID NO: 795520 - DNA, 597 bp, Homo sapiens
aggaagagaaaagtgcaaggctgataaaaagtgtcagtgctgaaaaccttgtaagcaggaatgaaaaagagttgtaaataacagagcctaaatgagtaagtctttgtcagtttcccatcccacagctgcttaagggaaactagtctttcctaataagagaagaaatacaatttctccatccatggattmttccacatcctgagtttgcctgggtcaaggactctcaataaacatgatcttatgactaactttacactgatacagaatgacagtacaggaaaggaaggccagtgctatggtgcaagcaataatttcttatcacagttttcggaaaagattatttgttgccaatttaatttcccttaagcagaatctctgcatcaggggaccagtctgagacaggacttttgaaataagcaaagtttaccctcagcactccttcctgccatttctctgctcctttccctttttcaggtggccatggctctgagaccacctcctggctgagaagttgccacactctaacattgcctcctgtgccacactccatcttctgtttcattttctcccacctcaactgcctcatgctattgacac

SEQ ID NO: 795521 - DNA, 519 bp, Homo sapiens
gggtgtcctcttttcaggggaagaacgaagtacgattcggagggctgctatggtggtttgggaatgtgagcacccttctggtcaaaatgttcctcctgcagaccataaatttcccacccgagacccccagtgggacaataacaatgcaaatcactgggaaaacgtgaaggacctaaggaagatgataataaaaggaattcgagaatcagtaccccgaactcaaratctttctaaagcatttgatattcaacaggaaaaagatgagggacctgctagattcttaaacagattgagggagcaaatgagacaatatgcaggccttgatttggaaaacccccttggacgaggaatgttaaaacctcactttgttactaaaagttggccaaacatttcaagaaaattacgaaagatagaaagttgggaggaccagcctctgagtgaactgctcagggaggctcaaaaagtatatgtgagaagagatgaggaaaacaaaaacaaaaacaaaagacaaaactcatg

SEQ ID NO: 795522 - DNA, 609 bp, Homo sapiens
ctgtctctgatttcttttagcagtgttttgtagttctccttgtattgctctttcacctcctgggttagatgcatacctagatatttcattatttttgtgtggttatggtgaacgggattgtgttcttgatttggctctcggctagaattttattggtgtacagaaatactactgatttttgtacattgattttatatcctaaaactttactgaagtcatttatcagttctagtactcttttggcagagtctttagtgttttctaagtatagaatcaaataatcagcaaacasagatcgttttacttcttttccaatttggatgccttttatttctttctcttggttgattgctctggctaggacttctagcactatgttgaataggagtgggcatccttgtcttgtaccagttcacaagtggaatggttccagctattgcctgttcagtatgatgtgggtttgttatagatggctcttattattttgaggtaaattccttcaatacctagcctactgagggtttttatcatgaaaagatgttggattttgatatggtttgtctgtgtttctacacaaatctcattttgaattgtagctcccataatccc

SEQ ID NO: 795523 - DNA, 551 bp, Homo sapiens
tccaaagaagatatacaaatggctaacaagcacatgaaaacatgttcagtgtcatcagtcattggggaaatgccaatcaaaaccacagtgaaatgctacttttcacccactaggatgcatgtaatttttttttaaaaaaaaaggaaaaataactattgttgagtatgtggagaatatgaaacagcttttacaaaaatgtccacttaaaagtaattttttaaaattgaggtaaaattcacatgatataaaattaaccaatttaaaatgtacaattcagtagcatttagtacattcacaatattgtgtaacattacctgtgtctagttccaaacagtttcatcacyccaaaaggaaatcttgtatgcataaagcatccattccccattttcccttacctctagcccctggcaaccatcaatttgctttttatttctgtggactgtcttttctggatatttcatataaatggaatcatacattatgtgatattttgtgtctggcttctttcacttagcataatgtttttattcatgttgtagcaagtatcagta

SEQ ID NO: 795524 - DNA, 586 bp, Homo sapiens
tgtgagcgacatagaagacggtgatttctgcacttccacctgaggtactgggttcatatcactggggctagttggacagtaggtgcaggacagtgggtgcagcccatggattgtgaactgaagcagggtgaggcatcgcctcacccaggaagcacaagcggctggggaattccctttcctagctaagggaagccataacagacggcacctggaaaatcgggtcactctcatcctaatactgcrcttttccaatggtcttagcaaatggcacaccaggagattatatcctgtgccttgctcagagggtcccatgcccacggagccttgctcactgctagcacagcagtctgagatcaaactgcaagatggcagtgaggctgggggaggggcgcccgccattgctgaggcttgagtaggtaaacaaagtggccaagtagctctaactgggtggagcccaccgcagctcaaggaggcctgcctgcctctgtagactccacctctgggggaagggcatagctgaagaaaaggcagcagaaacttctgcagacttaaacattcctgtctgacagctttgaagagagtagtg

SEQ ID NO: 795525 - DNA, 586 bp, Homo sapiens
tgtgagcgacatagaagacggtgatttctgcacttccacctgaggtactgggttcatatcactggggctagttggacagtaggtgcaggacagtgggtgcagcccatggattgtgaactgaagcagggtgaggcatcgcctcacccaggaagcacaagcggctggggaattccctttcctagctaagggaagccataacagacggcacctggaaaatcgggtcactctcatcctaatactgcacttttccaatggtcttagcaaatggcacaccaggagattatatcctgtgccttgctcagagggtcccatgcccacggagccttgctcactgctagcacagcagtctgagatcraactgcaagatggcagtgaggctgggggaggggcgcccgccattgctgaggcttgagtaggtaaacaaagtggccaagtagctctaactgggtggagcccaccgcagctcaaggaggcctgcctgcctctgtagactccacctctgggggaagggcatagctgaagaaaaggcagcagaaacttctgcagacttaaacattcctgtctgacagctttgaagagagtagtg

SEQ ID NO: 795526 - DNA, 617 bp, Homo sapiens
ggtaaaagaagaaattttccctagattttcatttatttttgacaggttcacaaacaattgcttactatcatacatttccatttttgcaattagggaaaccatcataatttgcatcacatatgtaaaagtataaagaatcatgagacttcctgatgtggacaacaaaatgaaacagatgatttgcttttcattaataagtattttaatttaaaaaatagttaaaacagtataaarctgaatttatattttaagagtcactcttatcatataccccaatctacctgtcctgcttcccaacacaaaattatcaatttcttaaatattcttccagaaaaaaatgtatgcatatgcatgcaaacagctgcatatgtattctatatagactactgtctcccttttttcctacttatctcagaggtcttttcatatagatttgttccaggtggctgcacagcattctactgtgctcttgtttttatagctacagctatagcctaaatcgttaatccctgagttaggatgatcagagctgataacatcttccctgagagtgaccaaccattataattactattttaacatttatcttaaattccttctcatctaactaaaattac

SEQ ID NO: 795527 - DNA, 617 bp, Homo sapiens
ggtaaaagaagaaattttccctagattttcatttatttttgacaggttcacaaacaattgcttactatcatacatttccatttttgcaattagggaaaccatcataatttgcatcacatatgtaaaagtataaagaatcatgagacttcctgatgtggacaacaaaatgaaacagatgatttgcttttcattaataagtattttaatttaaaaaatagttaaaacagtataaagctgaatttatattttaagagtcactcttatcatataccccaatctacctgtcctgcttcccaacacaaaattatcaatttcttaaatattcttccagaaaaaaatgtatgcatatgcatgcaaayagctgcatatgtattctatatagactactgtctcccttttttcctacttatctcagaggtcttttcatatagatttgttccaggtggctgcacagcattctactgtgctcttgtttttatagctacagctatagcctaaatcgttaatccctgagttaggatgatcagagctgataacatcttccctgagagtgaccaaccattataattactattttaacatttatcttaaattccttctcatctaactaaaattac

SEQ ID NO: 795528 - DNA, 545 bp, Homo sapiens
ttcgccttctctagatattttacatcaatgcaatcatataatgatgtggtcttttgtgactggcttctcctttgaacatcagagtttcaaggttcatcatccatgttatagcatgtatcaatacttcatttctctttattgctgaatagtattccattgtatgaatatatcacattttatttatccatcatcaattgatagacattgggttgttttcactttttggctcttaggaataaagggactgtaacctagtcttgtaacaagtagcagagagccaatcacagaagctgartttcagccaatcacaggcagccaactgtttaaaccacgttccaataaggcaaatgcagagctgtaaccaatccacctttttccttacctcacttctgttttccatatatcatttctttttctgtgcataaatgtcatgtgactatgtggcagccccagagcctgatttgttaattgttctttgctcaattaaactctaagtttaatttgtctaaagtttttcttttaacaggacattcatgtacacattg

SEQ ID NO: 795529 - DNA, 634 bp, Homo sapiens
tataacaatctgactttaaggaggccctccttggagatcaagagttcatattcctaagtctgagagaggggaatttagtgaggatctgagcagggtgattttaaagttgttcaactatgaatacagcagatgccagaatgaccagatggatgccaaaccagcacacaccagcagcatatcagagccggagcccaaccaaaacaggtactggtttttgactagggaattcttaagtgagtagtttataataaaagttatttttccctattttattattattattattattattattwttttttttttttagatagtcttgctctgtcacccaggctggaatgcaatggcacgatctcagctcaccacaacctctgcctcccaggttcaggtgattctcctgcctcagccttccaagtagctgggattacaggtgcacgctaccatgcccggctaatttttgtatttttagtacagacagggtttcaccacgttagtcaggctggtcttgaactcctgacctcaggtgatccacctgcctcagcctttcaaatttctgggattataggcgtgagctacagcgtccgtcctctccagcttcttgactgtggtctgataggtgtacctgttccgtaat

SEQ ID NO: 795530 - DNA, 483 bp, Homo sapiens
ttttgaagtgaacatccacatagttatatatatctattatacatacatacatacatatatacacatacccctcacaaagaattaccgcaagagtgattccacagtagtgttgtagtagtaagtagttttggagagagtgatagcagccctagtactaaaatctttaatctatgagtgaggggttgaattcttcawattaggctgcacagggacatcagtggtttaatatgttaactcttgcaaatatcacatttcattaaacagatgcttttacgttttatgttgttaaagtgagatttctaattgcttctctctgacctctcaaattacgatggtaactgcattcttttacagaagatgcccatctgtctgtattataatccagacacatgccaggttttccattttaaatgacagtgctttaaatcttggcatagactactctgtcctacctccaatgtgtattccgagtacatacatcga

SEQ ID NO: 795531 - DNA, 483 bp, Homo sapiens
ttttgaagtgaacatccacatagttatatatatctattatacatacatacatacatatatacacatacccctcacaaagaattaccgcaagagtgattccacagtagtgttgtagtagtaagtagttttggagagagtgatagcagccctagtactaaaatctttaatctatgagtgaggggttgaattcttcatattaggctgcacagggacatcagtggtttaatatgttaactcttgcaaatatcacatttcattaaacagatgcttttacgttttatgttgytaaagtgagatttctaattgcttctctctgacctctcaaattacgatggtaactgcattcttttacagaagatgcccatctgtctgtattataatccagacacatgccaggttttccattttaaatgacagtgctttaaatcttggcatagactactctgtcctacctccaatgtgtattccgagtacatacatcga

SEQ ID NO: 795532 - DNA, 521 bp, Homo sapiens
cgttaggcacaagtcccagtgaaggagtagacacctagtacaattatttatactgtattttaacatcatcaggaatacaaagcatatcaattcaggtctgaatataaaaatccttattctgagggagttagcctatatctctmgccataattaattgatagaaaatctttttttattaaggagtaaaagaggtaaaacagagaacataaaagaagttctatcaactaggaaaccatttgtaccaaattctggtctttgagaattcctggatgtttcttaaattatcaactgaggaaaaagataagtgtcctataaccattaggtctacattatttaagaagatctatgtaccttcattctccgaatctgacttttgtgtttcatcctgagtatcactcaattcaacaagggaacagagtctggcttctgaatccatgaacgacttctacatcttaaaaaaaaatcagaaagttaacttatttgttagtgttttctaatctgccctcaaattagtttcccca

SEQ ID NO: 795533 - DNA, 521 bp, Homo sapiens
cgttaggcacaagtcccagtgaaggagtagacacctagtacaattatttatactgtattttaacatcatcaggaatacaaagcatatcaattcaggtctgaatataaaaatccttattctgagggagttagcctatatctctagcyataattaattgatagaaaatctttttttattaaggagtaaaagaggtaaaacagagaacataaaagaagttctatcaactaggaaaccatttgtaccaaattctggtctttgagaattcctggatgtttcttaaattatcaactgaggaaaaagataagtgtcctataaccattaggtctacattatttaagaagatctatgtaccttcattctccgaatctgacttttgtgtttcatcctgagtatcactcaattcaacaagggaacagagtctggcttctgaatccatgaacgacttctacatcttaaaaaaaaatcagaaagttaacttatttgttagtgttttctaatctgccctcaaattagtttcccca

SEQ ID NO: 795534 - DNA, 521 bp, Homo sapiens
cgttaggcacaagtcccagtgaaggagtagacacctagtacaattatttatactgtattttaacatcatcaggaatacaaagcatatcaattcaggtctgaatataaaaatccttattctgagggagttagcctatatctctagccataattaattgatagaaaatctttttttattaaggagtaaaagaggtaaaacagagaacataaaagaagttctaycaactaggaaaccatttgtaccaaattctggtctttgagaattcctggatgtttcttaaattatcaactgaggaaaaagataagtgtcctataaccattaggtctacattatttaagaagatctatgtaccttcattctccgaatctgacttttgtgtttcatcctgagtatcactcaattcaacaagggaacagagtctggcttctgaatccatgaacgacttctacatcttaaaaaaaaatcagaaagttaacttatttgttagtgttttctaatctgccctcaaattagtttcccca

SEQ ID NO: 795535 - DNA, 521 bp, Homo sapiens
cgttaggcacaagtcccagtgaaggagtagacacctagtacaattatttatactgtattttaacatcatcaggaatacaaagcatatcaattcaggtctgaatataaaaatccttattctgagggagttagcctatatctctagccataattaattgatagaaaatctttttttattaaggagtaaaagaggtaaaacagagaacataaaagaagttctatcaactaggaaascatttgtaccaaattctggtctttgagaattcctggatgtttcttaaattatcaactgaggaaaaagataagtgtcctataaccattaggtctacattatttaagaagatctatgtaccttcattctccgaatctgacttttgtgtttcatcctgagtatcactcaattcaacaagggaacagagtctggcttctgaatccatgaacgacttctacatcttaaaaaaaaatcagaaagttaacttatttgttagtgttttctaatctgccctcaaattagtttcccca

SEQ ID NO: 795536 - DNA, 594 bp, Homo sapiens
tggagtgttcagcttttacattcaatgtaactatgaatgtggttgggcttaagtctaccattgctatttgttttctgtttgtctcatgtgttccttgttcttctcttttttattttttcctgtcttcttttgagttaatcagtttttgtttttagaattccatttgtcacctccacttcatgtatatgtatagttgacccttgaacaatgcgggtttgggctgcatgggtccacttatatgtggatttttaaaaataaatttgttggaaaaatttttggagatttgcaacaatttgaaaaaacttgtagacaaactatatagcctagaaataccaaaaaaattcaraaaaagtgtctcacaaatgcacactagtctatgtgttaatcaactatttatgttaatggtaaggcttccagtcaacagtaggctattagtagttgagttttgggggagtcaaaagttatgtgcagattttttactgcacaggggttggcacccctaatttttgaattgttcaagggtcatctataaatatatatttttatttttataataattgctttagagattatggtatgcatctttaacttatg

SEQ ID NO: 795537 - DNA, 599 bp, Homo sapiens
  misc_feature 538, 568: n = A,T,C or G
cactcattggttgatgggcatttggactggttccatatttttgcaattatgaattgtgctgctataaacatgcaagtgtaatgtgttaagtgtctttttcatataataacttattttcctctggtagatatccagtagtgagactgctggatcaaacggtatatctacttttagttatttaaggaatctccatactcttttccatagtgattatactaggttacattgccaacaacagtgtaaaagtgttccctttttaccacatccatgccaacatctattattttttgattttttaaattacagccattcttgcaggagtaaggtgatattacattgtggttttgatytgcatttccctgataattagcaatattgagcatttttccatgtttgtcacttgtatatcttcttttgagaattgtctattcatgtccttcgcccattttttgatgcaattatttgtttttttcttactgatttgattgagttctttgtagattctagatattagtcttttgttggaggtatagattgngaagaatttcttccgctctgggttgtctgntcactctgctgattatttttttttttttttt

SEQ ID NO: 795538 - DNA, 599 bp, Homo sapiens
  misc_feature 538, 568: n = A,T,C or G
cactcattggttgatgggcatttggactggttccatatttttgcaattatgaattgtgctgctataaacatgcaagtgtaatgtgttaagtgtctttttcatataataacttattttcctctggtagatatccagtagtgagactgctggatcaaacggtatatctacttttagttatttaaggaatctccatactcttttccatagtgattatactaggttacattgccaacaacagtgtaaaagtgttccctttttaccacatccatgccaacatctattattttttgattttttaaattacagccattcttgcaggagtaaggtgatattacattgtggttttgatctgcatttccctgataattagcratattgagcatttttccatgtttgtcacttgtatatcttcttttgagaattgtctattcatgtccttcgcccattttttgatgcaattatttgtttttttcttactgatttgattgagttctttgtagattctagatattagtcttttgttggaggtatagattgngaagaatttcttccgctctgggttgtctgntcactctgctgattatttttttttttttttt

SEQ ID NO: 795539 - DNA, 590 bp, Homo sapiens
gccaccacacctggctaatttttgtatttttttgtagagacagggtttcaccatgttgcccaggctggtcttgaactcttgggctcaagagatctgcctgctttggcctcccaaagtgctagaattacaggcgtgagccaccatgcctrtcctattcttggatgtcttcttcccctaaaaaccatatttagtagaatcttcctggagatcctgccagaggagggaatttcctagcagctaggaaagtaagatggctttagtcattcaaatagcagcctacaggaggcagcaaatcttgcatctttatagcccctgtcctggcattcctgcatggttgaagaaattgtttttgtttttgtttttttaagaagaaactatatatggtagcttatggtcttattagataattcagtacagtttatctcttctggataaaattcagactgatgttttgagctcctttatcttatggaatacaattattgaatgttttcatcttttatcaaagagttacaaaaataatacatgcttctttgtaaaatatcaagcagaatagaagtatatacacttcactatcactcttgataaac

SEQ ID NO: 795540 - DNA, 608 bp, Homo sapiens
tgtcataacacatcaaccatgagcatcatatatatacaacatgtatttttcttccacttatttttggttctgaatctgctgtgatgtgaaagtgtaataattttagtcaatcaaaatagtatttcaaattaaacagctccacaacaaggcatcaaacataaaatttacagtatacatccaacataaaaggttaggatatccccgattttctcctcttgttttcatattcagttaagacattgcatttggactcaggagcccttggcttgaaggctagcttgaacagtttaactgtgcatctttgagtaaattaataataccaagtttctgaatctttgttttctcatctgtgtgatttgaggataatttttgggggattttttgacattaattagcaaaacacaagaaaaagtktagtacaagataaggcatacagtaggtggtaaatgtttatggttttcaattagggtttattattattacttctatgatgatgatgattactatgattctactggctgagagaaaaaggtagcctaaacaagcaaaatccccttgaaattccccccaacacttcccaggccatcctgaatatcccagcaaacaga

SEQ ID NO: 795541 - DNA, 635 bp, Homo sapiens
ctgggattacaggcatgagccaccgcgcccggccaggtgggacagttttaggtgacatcaataagtgaaatgcaagtgttgattggtggggtccgggaggctgttattgactttgtgaagttggcatgcttggtgggctgtccataaagatttgtatcttactcaagacaatagtgggatttgagattcatagaccctgagccaggtgacaatagcctgtgatcaatagtattttcaggggataagagccgttttttatatgcctaatgaggtccatgatttttgacttccccatgctttaatttagtcagctgaactaacccgttgcagtactcagtaaatgttgaatatttatgatgagaaaactaggrgaatattaccggaagtctccttatggataaaatacagtagctactaatatttacttatactctctttccaatcatatgttaagaaatataaaaaacaagtgaatcacttctactatgcattatttagaaactttaaggaaggtaggattataaatatcaatatctatattcagatattatattgcataggtcggtatgtaatgcagaggaaaagctgggagaagcaccaacataagccaatttctatctgatgtactttctgta

SEQ ID NO: 795542 - DNA, 441 bp, Homo sapiens
ccttaaacctgtgaggtgtttgtttcctggggccasggcttgctggggcgttcagcagcctgcacaccagctgctgctctgctccccagtgtacatcttgtaacaacgcagctcctttgctggttgttgaataggtagaggggcagctgtgaagggcagaagaaagccgattatttcactttctttcttttcggaattctgctttgtgatcttgttccctcttagaatgtttcccgagaagcccgttctatttagctcttctcttgctagggagcattttctgacagttttccaaaatgtgtatattccaggcagttagttggaggtttcgcacatattctagttaggaaagctcagcctggcttttgtggcccagaagcccagaatttcagcaactcacaaagaactcaaatatccttatgtgtgatatttgaaggatag

SEQ ID NO: 795543 - DNA, 441 bp, Homo sapiens
ccttaaacctgtgaggtgtttgtttcctggggccagggcttgctggggcgttcagcagcctgcacaccagctgctgctctgctccccagtgtrcatcttgtaacaacgcagctcctttgctggttgttgaataggtagaggggcagctgtgaagggcagaagaaagccgattatttcactttctttcttttcggaattctgctttgtgatcttgttccctcttagaatgtttcccgagaagcccgttctatttagctcttctcttgctagggagcattttctgacagttttccaaaatgtgtatattccaggcagttagttggaggtttcgcacatattctagttaggaaagctcagcctggcttttgtggcccagaagcccagaatttcagcaactcacaaagaactcaaatatccttatgtgtgatatttgaaggatag

SEQ ID NO: 795544 - DNA, 441 bp, Homo sapiens
ccttaaacctgtgaggtgtttgtttcctggggccagggcttgctggggcgttcagcagcctgcacaccagctgctgctctgctccccagtgtacatcttgtaacaacgcagctcctttgctggttgttgaataggtagaggggcagctgtgaagggcagaagaaagcygattatttcactttctttcttttcggaattctgctttgtgatcttgttccctcttagaatgtttcccgagaagcccgttctatttagctcttctcttgctagggagcattttctgacagttttccaaaatgtgtatattccaggcagttagttggaggtttcgcacatattctagttaggaaagctcagcctggcttttgtggcccagaagcccagaatttcagcaactcacaaagaactcaaatatccttatgtgtgatatttgaaggatag

SEQ ID NO: 795545 - DNA, 520 bp, Homo sapiens
tagaagcctcctagttaatagtatttttgttgcagtagcctgaaaggactatgataacagtattgaaacttcttattcgtgaacatacgcaatcatggcatctgtgaacaaagacagttttgtttcttccttccctatctgtatacacttttttcctttcttatctttttatattatctaggacttctagyatgatgttgaaaagtagtggtgagatagattttcctttccttgtccctgatcttagtgggaaagcttggagtttctcaccattatgtaatgtaagctataaagttcttttttaaaaatagattcccttcctcccttcctcccgacagcctcgttggagtgcagtggtgcaatcgcagctcactgcaacctctgcctctggggttcaaatgattcttgtgcctcagcctcccaagtagctgggattacaggtacgtaccaccacacctggcgaatttttgtatttgtagtagaaactgggttttgccatgttgaccaggctggtctgaaa

SEQ ID NO: 795546 - DNA, 622 bp, Homo sapiens
aagcccaatgatattgatatttatattaaatgtatatcatcaaaacattctaattaaaagagattatcagattagatagaaaatgccaaccatatgtattcaataggaaaaccacttaatccttatggtagtatgttgtaatttttactttaaagtcatatatcttttaaagaaaaagaaaaaaattctctatctatstatgtatctatctagatatctatatagatagatagatagataagctaaagtttctaattttaatgaagtccaatatgtcaccttttcacctttttcttttatggttagtgtgtcctgtgttctgttgaagaaacatttgtctatctccgagtggcacccatcttttagggggaagccatagtttctgattttaactccggccttgtcactataccatgacgaaattctgcatatggtagtgctatgctcactgtcaagtgccatcacattacttgacttcaaattgtactacaaagctatagcaacaaaaacagcatggtacttatctaaaaatagatacattgatcaatggaacagaacagagaacccagaaataaagccacatacctactgatctttgacaaagttgacaaaaatatacaac

SEQ ID NO: 795547 - DNA, 622 bp, Homo sapiens
aagcccaatgatattgatatttatattaaatgtatatcatcaaaacattctaattaaaagagattatcagattagatagaaaatgccaaccatatgtattcaataggaaaaccacttaatccttatggtagtatgttgtaatttttactttaaagtcatatatcttttaaagaaaaagaaaaaaattctctatctatctatgtatctatctagatatctatatagatagatagatagataagctaaagtttctaattttaatgaagtccaatatgtcaccttttcacctttttcttttatggttastgtgtcctgtgttctgttgaagaaacatttgtctatctccgagtggcacccatcttttagggggaagccatagtttctgattttaactccggccttgtcactataccatgacgaaattctgcatatggtagtgctatgctcactgtcaagtgccatcacattacttgacttcaaattgtactacaaagctatagcaacaaaaacagcatggtacttatctaaaaatagatacattgatcaatggaacagaacagagaacccagaaataaagccacatacctactgatctttgacaaagttgacaaaaatatacaac

SEQ ID NO: 795548 - DNA, 622 bp, Homo sapiens
aagcccaatgatattgatatttatattaaatgtatatcatcaaaacattctaattaaaagagattatcagattagatagaaaatgccaaccatatgtattcaataggaaaaccacttaatccttatggtagtatgttgtaatttttactttaaagtcatatatcttttaaagaaaaagaaaaaaattctctatctatctatgtatctatctagatatctatatagatagatagatagataagctaaagtttctaattttaatgaagtccaatatgtcaccttttcacctttttcttttatggttagtgtgtcctgtgttctgttgaagaaacatttgtctatctccgagtggcacccatcttttagggggaagccataktttctgattttaactccggccttgtcactataccatgacgaaattctgcatatggtagtgctatgctcactgtcaagtgccatcacattacttgacttcaaattgtactacaaagctatagcaacaaaaacagcatggtacttatctaaaaatagatacattgatcaatggaacagaacagagaacccagaaataaagccacatacctactgatctttgacaaagttgacaaaaatatacaac

SEQ ID NO: 795549 - DNA, 573 bp, Homo sapiens
ttttgtagtgttatttcttaaaaagactttcctttctggccagatatggtggctcacacgtgtaatcccagcatttttgaaggttgaggtgggaggattgcttgaagccatgagtttgagatcagcctgggcaacagagcaagatctcatatctacaaaaataaaaaataaaatagccaggcatggtggcatgcatctgtattccyagctactcaggaagctgaggtgggagaattgcttgagctgaggagttcgaagctgcagtaagctgtgattgacactgcactccagtctgggtgacagtgagaccctgtctctacaaaaatataaataagtaaacaaaaataaaaataaatactttcttttccctataacattacctggggacctttatcaaaaatcagttgaccgtatatgcacatctccatttctcttttctattctgctccaccagaatagatacagtatgtacagctgtactatattataccagtacggctgtcttggttactgtagcttttattttttgtttgtttgttgggacagagtcttgctttgtcgcccggctggagt

SEQ ID NO: 795550 - DNA, 573 bp, Homo sapiens
ttttgtagtgttatttcttaaaaagactttcctttctggccagatatggtggctcacacgtgtaatcccagcatttttgaaggttgaggtgggaggattgcttgaagccatgagtttgagatcagcctgggcaacagagcaagatctcatatctacaaaaataaaaaataaaatagccaggcatggtggcatgcatctgtattcctagctactcaggaagctgaggtgggakaattgcttgagctgaggagttcgaagctgcagtaagctgtgattgacactgcactccagtctgggtgacagtgagaccctgtctctacaaaaatataaataagtaaacaaaaataaaaataaatactttcttttccctataacattacctggggacctttatcaaaaatcagttgaccgtatatgcacatctccatttctcttttctattctgctccaccagaatagatacagtatgtacagctgtactatattataccagtacggctgtcttggttactgtagcttttattttttgtttgtttgttgggacagagtcttgctttgtcgcccggctggagt

SEQ ID NO: 795551 - DNA, 573 bp, Homo sapiens
ttttgtagtgttatttcttaaaaagactttcctttctggccagatatggtggctcacacgtgtaatcccagcatttttgaaggttgaggtgggaggattgcttgaagccatgagtttgagatcagcctgggcaacagagcaagatctcatatctacaaaaataaaaaataaaatagccaggcatggtggcatgcatctgtattcctagctactcaggaagctgaggtgggagaattgcttgagctgaggagttcgaagctgcagtaagctgtgattgmcactgcactccagtctgggtgacagtgagaccctgtctctacaaaaatataaataagtaaacaaaaataaaaataaatactttcttttccctataacattacctggggacctttatcaaaaatcagttgaccgtatatgcacatctccatttctcttttctattctgctccaccagaatagatacagtatgtacagctgtactatattataccagtacggctgtcttggttactgtagcttttattttttgtttgtttgttgggacagagtcttgctttgtcgcccggctggagt

SEQ ID NO: 795552 - DNA, 603 bp, Homo sapiens
atctccaggttattaatcagaaatctgcactgaagagcccctgttaaattttatagctgattataaaaccatcctttaaagaggactggccaggcacagtggctcacacctgtaatcccagcactttgggggaccgaggtgagtggatcacctgaggtgaggagttcgagaccagcctagccaccatggtgaaaccccgtctctactaataatacaaaaattagccgagcatggtggcacacacctgtaatcccatctgctcaggaggctgaggcaggagaattgcttgaacccgggaggcagaggttgcagtcagccaagatcgtgtcattgcactccagcctgggcgacaagagtacaagagtgaaactccatctccaaaaaaaaraaaaaagaaaaaaagaggaccaaaatgagacaacaattgcctgtggatgacaaaacattttagggcagccacagttaaagacacaattggcaaggaaatttgttacctctgtggcacacagtcatttaacataataattataattattactgataacttatactaagtcatattagaattataggtgttttacataattttgaaatatgtgtcaa

SEQ ID NO: 795553 - DNA, 487 bp, Homo sapiens
ttttctgtgccaggatcctgtcctggattccctgttggactcagtcatcggatcttctggctgctctgtgacagcttttcattttccttgtttttcatgacctggactcttttgaagagcaccgtagtctgtagactgttccttaattttggtttgtttgctgttttctcatgattaggctggggctgtgggtttgcggaggacagctccctggtgaggcgctttcttgtcccgtcatatgggggatacaggacagggacaggcctcctcaccagcgatgttaaccttgatcccgttggctccgtggtgccggccacatctcyccactgcaaacccactgccttccctttccacacgcggttctgcgggagcgagtgcccagggagccagcagtcaagaagacagcagctaatctccaccctgaggaatgtctatgtgtactctgtaattcttccataaaaaacgcctgtcccttctccccgatgta

SEQ ID NO: 795554 - DNA, 588 bp, Homo sapiens
gttaatgaaagccagaattgtaagagaaagcttgatggcgaagataaacatacacacacagggatataaaggaaaatttccaggagaaaaacaatgatgaaacattacaaaaacctacataagaaatattaaagtactctaaagcttaaaatatacattattttttctaatttttaaaattgcacagctcagccactatatgtacagttaatgtagtaagttaaaacagacttttatacatgatatgtagtaagaatggcctaccatggcaattcaggagacatattaaaagtttaaaaaaggctgggcatggtggctcatgcctgtaatcccagcactttgggaggccgaggtgggtggatcacgaggtcaggagttcaagaccagcctggtcaatatgatgaaaccccgtctctactaaaactacaaaaattagccrggcgtggtggcgtgtgcctgtagtcccagctactgaggaggctgaggcaggagaatcgtttgaacccaggaggcggaggttgcagtgagctgagatcatgccactgctccagcctgggcaacagagcaagactctatctcaaaaataaa

SEQ ID NO: 795555 - DNA, 616 bp, Homo sapiens
tgaagaaaccttccatctcccaatggaaaagtgatgtgttcctagaggaaaaaatttgatggtagaaaacgggcaaatgtgtttatctgagatatgaagttaactgagtgcagtgacttacgcctgtatcccagcactttggaaggctgaggtgggcagatcacttgaggtcaagagttcgagaccagcctggccaacatggcgaaaccttgtttctactaaaattcaaaaatyagtcgggtgcagtgacatgcacctgtaatcccagctgctcatgaggctgaggcaagagaattacttgaacccaggaggtggaggttgcagtgagccgagattgcgccactgcacttcagcctgggactctgtctcaaaagcaaaaaacaaaaacaaaaaaacaaaacagatatgaagttaatgtatttggaattcctttttaacctcaaattgtcatactcattcctttttgtcatgtaaacaactgctgatatctcacaaagagttttcactctgactggacctcatctgttctgattctgcaagtggatctgtaatgtactcaaaatacttttgtttcatggtgtatgcgtaatgtgaatcagtttaacttgctttctgc

SEQ ID NO: 795556 - DNA, 627 bp, Homo sapiens
tgatttgcatttttaataattcaactaattttcacagaattaaattaatatttattttaagttaaacttgaatgtgctttacaaagaatggcaatagacagctttttttaatttaaaaggaaaaaatgttatatctggaagaatgcaagcattaaaccataaaactatagtctaacaaatttaattgagttatatggtaaaaattctcatagggaaagttatttcatcattataatcttacatttatttattaaaactttcccatrtataagaaatagtggtttaaaatggtgatacatgggtaaataaaatgtatatattccttttccttatttttctaacattaaatatgaataatagttattaaataaatatgtcaaggaactagcagaagagatgagactggaggaatagatggaaggcagatcatgaaaaaccttgaaagccatgttaagtgttatatccttgtctctgaataagtaaattgttttttaatttttatcatatacaatatttaaaattaaaaaaatttagttatgagtacataatagttgtatatatttatgggatacatgtgatgttttgatatagtcaaactgtgtaatgatcaaatcaggataagtgggg

SEQ ID NO: 795557 - DNA, 595 bp, Homo sapiens
tctgggaatactaaagggcagagagcagagaaaaggggactggaggatagaagcaaaaattttaagtggtaaaatattaaggcctccatttaaaattttcccattataagttgggatatagcattcaactttccatgatctccaaatttttcttaataaaacaatcaattaaagagcagtcaacataaytgttttctttttaagcaacaaacctttcattttttaattccctacccgtttcatatatgacttatgtgtactgaatggtattctattaaaaaaaataacacagtcagttaaaatttcattttgataatgaaaaaccatacttaaaaatctacttgcagggtgacaaagtgaatgttaataaaaggtaagttcctgctgtccttttaaagttaaaaataaggccaaactacaactttcgactgcaaagagtcattgtgtagtatataaaaagctcagcatggaaatagattcaacaaatgtacaaaaagagttttcatgcccaggaagaactgaaggcatcaaaaaaacatgccccaactacaaataacatagagcgctgttcaaaaagaccaacaaattcattctc

SEQ ID NO: 795558 - DNA, 471 bp, Homo sapiens
tgccaaaagaaaggtataaagtgcaattgcttcacggaagaaacggtatttaaattatgcttgaccgttctcatttaagagtgggagctaaaccttgggttcacacagacatgaaggtgggaacaacagacacaagggactccaaacagagggtgggaaggaggggcaagggctgaaaattttcctgttaggcactttgttcactacggggtgacagaatcaataaaaggccaaacctcagcactacacaatatacccttccaacagatctgcacatacacccctgaatctaaaataaaagggaattctttttaattataataaaataaataacrcttgacaacatagtcttacaataccatacatttcatagcaatgtgatttcaaaatgccattaagattaataaaaatgtaaaagttaccaagccaattaaattttattcattcattaatttattcacttggtaaaat

SEQ ID NO: 795559 - DNA, 589 bp, Homo sapiens
attgaaaagggagtaatggtctgcttagttgttttgatagtggaagtgaaggagagagtactgcagtatagggattggcttatatggctagaatttgttgaagtaaaagatgtgttagtgttccctttgacagaacatagggaacatgggcaagagaactctaggggaattgtttcaaatctcttaygatagggctgcttagaggagtgtacaggactctattgaaagaagcaggattcctaagggttgtggtctgttctgttagagagtatctcacctgcatcaagagtctaaagagaacttaatcttgcagacttgggctccttgctatggagcagtaggttaatccccttgggacctgttcgaggtgaagacaccctaactcagtgttgaaggagtgctgacattgctccctatggtgagcagattcagagatggaagtggtgtggagaagtcaagcctagcagcatcaattaaaggttgtaaggttaaggggacccctgagaattctgtcagttaactttgtggccctttgccacagagattctgaatttaaccttcctaatctcctcagtgtgggagtaagaca

SEQ ID NO: 795560 - DNA, 628 bp, Homo sapiens
tgagttgagacattatttattataaagccccgacagtttcaactctacttctttacctagctcagacactgtcatgtgagccttttggcagtgtctcttaagatagaatgccttttcattttaagaaaacattaaagaataaaatgcattcttgacttctgcaatgatggcagaagtcatagcaccagaagcctcttctaataatgcagcagcatcaacaaattaattcattctgcatctttgtgtgttataggaggaagaaaactccaataaagtctgtctcaacagaggtcacctcccacccatcagacacrgaaattccagtacctgctgggagttctggtggccatccttatccctagtctcttgtcattgttcaaggattagggaaaattcctctcaacctgctagatttcagcagcaataaacgggattgtttatagggtcagtgagcccaggatactaagggacagacatcagtcaaaagcattttccaaaaaaatcctttatattttaatcaaatcactataaagacatgatgtgtcctagtttctcagatgttcaacccaacagtctctttctttaacttctgggctgcctttcagaactgagcagagttgtatccaac

SEQ ID NO: 795561 - DNA, 628 bp, Homo sapiens
tgagttgagacattatttattataaagccccgacagtttcaactctacttctttacctagctcagacactgtcatgtgagccttttggcagtgtctcttaagatagaatgccttttcattttaagaaaacattaaagaataaaatgcattcttgacttctgcaatgatggcagaagtcatagcaccagaagcctcttctaataatgcagcagcatcaacaaattaattcattctgcatctttgtgtgttataggaggaagaaaactccaataaagtctgtctcaacagaggtcacctcccacccatcagacacggaaattccagtacctgctgggagttctggtggccatccttatccctagtctcttgtcattgttcaaggattagggaaaatwcctctcaacctgctagatttcagcagcaataaacgggattgtttatagggtcagtgagcccaggatactaagggacagacatcagtcaaaagcattttccaaaaaaatcctttatattttaatcaaatcactataaagacatgatgtgtcctagtttctcagatgttcaacccaacagtctctttctttaacttctgggctgcctttcagaactgagcagagttgtatccaac

SEQ ID NO: 795562 - DNA, 628 bp, Homo sapiens
tgagttgagacattatttattataaagccccgacagtttcaactctacttctttacctagctcagacactgtcatgtgagccttttggcagtgtctcttaagatagaatgccttttcattttaagaaaacattaaagaataaaatgcattcttgacttctgcaatgatggcagaagtcatagcaccagaagcctcttctaataatgcagcagcatcaacaaattaattcattctgcatctttgtgtgttataggaggaagaaaactccaataaagtctgtctcaacagaggtcacctcccacccatcagacacggaaattccagtacctgctgggagttctggtggccatccttatccctagtctcttgtcattgttcaaggattagggaaaattcctctcaacctgctagatttcagcagcaataaacgggattgtttatagggtcagtgagcccaggatactaagggacagrcatcagtcaaaagcattttccaaaaaaatcctttatattttaatcaaatcactataaagacatgatgtgtcctagtttctcagatgttcaacccaacagtctctttctttaacttctgggctgcctttcagaactgagcagagttgtatccaac

SEQ ID NO: 795563 - DNA, 540 bp, Homo sapiens
tagccttgtagtatggtttgaagtcaggtagcaggatgcctccagctttattcttttgggttaggattgtcttggctatgcaggctcttttatggttccatatgcaatttaaagtagttttttccaattctgtgaagaaagtcagtggtagcttgatggggatagcattgactctataaattactttgggctgtatggccattttcacgatattgatycttcctatccatgagcatggaatgttctttcatttgtttgtgtcctcttttatttcattgagcagtttgtagttctccttgaagaggtccttcacaccccttgttagttggattcctaggtattttattctctttgtagcaattgtgaatgggagttcactcacgaattggctctctgtctgttatcggtgtataggaatgcttgtgatttttgcacactgattttgtatcctgagactttgctgaagttgcttatcagcttaaggagatttggggctgagatgatggggttttctaaatatacaattatgtcatctgcaaa

SEQ ID NO: 795564 - DNA, 616 bp, Homo sapiens
tacatcactttctcatggactacattacattatgaaggagatggaagacaaagtctggggcctgcacgtggtacattgtatcatagaactcacataaaaccaggacccattcagaggttaaactggagaacaaactccttgcagacgtaaatgatggggctacacatgcctgtttttggctttggccctaagtaaagcagggaggaaaaaaagtcattgataatttctaatcttaagtggagaagcatgattgttttgggctgaaattctcactatccatgcggcaagaaaaaaaaaaaaaaacctcaagtaraaaatttcattttaagcaattctggcttggtagtgctcccatgcacctaacaaaagcaaataaaaacacccctcaaagggaaacactttttacatagttctcaaagaatttccaagtttgataaagttccaaggaatatcaggtcataatacaaaatcaaagaatacacacaaataaataagccacaatgtgcaaaagttgccagataataaacgataagccagagcaacaaaactgcagatattgtaattgaatagagaataaaaaagaatgtatttagtacactttgggaggccgaggcag

SEQ ID NO: 795565 - DNA, 609 bp, Homo sapiens
tttcctctcctacaatcataaatatgtaatcagcaactggatttcagatggcctaatcagagaaaaatccaaatagtccagaaaagcccaaaaagtatccatgacgattttataaattagggctccacagagcagtgatttgcaagratcccagaatctgagttctgtccacagagcctatgtctgctttcagttcagcacaacacaaactaaggctgaaaccacctaacaacaggcagccacaggtttcagtttagagtcagaacaggcaattagaatatgtgaattctggatttcaaaggagacagcttcttttcttcctgcagcaacaaaaccaagatactttagagtcagagagccatggtccaagtccaagggacaagaaatgctttcccaggccctttttattttgtcaggcttagagtcttaattgacccactcaaaaaatacgcgcatcaccctggaacatcatcagccttaaagattcagacatctgacatcacaagggctctctagcaactaaaaattgatttttcaaactcagtgtgtctccatctggagacaacgtctgagaaataaaaataaaatcctaagccccacaagcaactg

SEQ ID NO: 795566 - DNA, 614 bp, Homo sapiens; identical to SEQ ID NO: 793456

SEQ ID NO: 795567 - DNA, 634 bp, Homo sapiens
ttgagccaccgcacccggccaaaacaaaccatctttaagcattatattttagttatctattgctgcataatatattgcttcaagacttagtgacttgaaacaaccataagtatttctcatctcccatggtttctatgagtctggcattgagtggcagcttggttgggcagttctggcttggggtctgtcaaaagttgcattcaggtcagctgaggctgcagtatctgaagggttaatggaaatggaggatccacttctgaggtagctcactgccgaagctggcaaatttgtgttgacaagtgkagtcctctctgtgtaagcatctccacagggctgcctgagtgttctcataacatggtggctagcattatcccacggtgtgtgattcatgaagccaatgcagaagctataatttctttacgaactagctttggaagtcacatgctgttatttcctctgtattctgttggtcacacagagcagtcctggtacaacatggcacaacaaaagtacatgaacactaaaaggcaataacgattgggggccaactcagaggctgactactccacctactagcactctctttgttctcctgtgactttgaaaaggttgcccaccatggctccaatttctc

SEQ ID NO: 795568 - DNA, 630 bp, Homo sapiens
ctcagctattaaaaggcactggcgagatttttccatgagtcctagtttagtctagctgagccaataatttgtaattcagcctggttgggggtaaatattgcctccggcttcttcactgacaacagtccaaagtggattgggagtttgctgacaactgtggatctcaactgaaaagacatcaccaaacacccccgataacccagcctgacccctggcccctaatggttttattttgtttggttyggtttgctttgctttgctttgctttcatagcaccacagctaacacaaactgaaaggcaagagctgcattaatttcttaaaaagttggcgattcagggctagcagtgaaattttcattaaagtatgacttcttactctgattgaagggggaaaaaaacactggtcaatcctttgtaaatgaaaatcaagaattgctgggatatcaactggtttactccctccattcagagtggagcagcctgaagctccagaaggaagtgggtgctctgatgaacagcttctggcaggaaacctttgcctgggtcttggatggactgagtaccaccggcaaaccctcatctccctctggcacacacagtggaactcacaatggagaagcagctgaaga

SEQ ID NO: 795569 - DNA, 630 bp, Homo sapiens
ctcagctattaaaaggcactggcgagatttttccatgagtcctagtttagtctagctgagccaataatttgtaattcagcctggttgggggtaaatattgcctccggcttcttcactgacaacagtccaaagtggattgggagtttgctgacaactgtggatctcaactgaaaagacatcaccaaacacccccgataacccagcctgacccctggcccctaatggttttattttgtttggtttggtttgctttgctttgctttgctttcatagcaccacagctaacacaaactgaaaggcaagagctgcattaatttcttaaaaagttggcgattcagggctagcagtgaaattttcattaaagtatgacttcttactctgattgaagggggaaaaaaacactggtcaatcctttgtaaatgaaaatcaaraattgctgggatatcaactggtttactccctccattcagagtggagcagcctgaagctccagaaggaagtgggtgctctgatgaacagcttctggcaggaaacctttgcctgggtcttggatggactgagtaccaccggcaaaccctcatctccctctggcacacacagtggaactcacaatggagaagcagctgaaga

SEQ ID NO: 795570 - DNA, 596 bp, Homo sapiens
ccaactgatctttgacaaagcacacaaaaacataaagtgggcaaaggacacaccgggaaagccacatgtaaaagaataaaactggatccccatctctcaccttatacaaaaatctattcaaaagggatcaaagacttacatgtaaagacctgaaaccataaaaatgctgaagataacatcagaaaaactcttctggaattggtttaggaaaagaatttatgactaagaccccagaagcaaacgcaacaacagcaacaacaaaaaaagagacctaattaaactaaaaagcttctgtacagcaaragaaataatcagcagagtaaacagacaacttacaaagtgggagaaaatatttgcaaactatgcatctgacaaagcactagtatccagaatctacaagaaactcgaagaaatcagcaagaaaaaaataaaaataataattacatcaaaaagcgggcaaaggatatcaatagacaattctcaaaaaagatatacaaacagccaacaaacatatgaaaaaaaatgctcaacatcgctaatcattaggcaaacgcaaatgaaatccacaatgcaataccaccttactcctgcaagaa

SEQ ID NO: 795571 - DNA, 603 bp, Homo sapiens
actacataagcaacctcgtttcatccactggaatatctgccatgtcaaaggacttactgggacttattgagcacagagatgttctcaatgaatattcgctgaatgaataaacttagtaagtagtggtgaggctctgaacccagatccctatgaatccaaagcctatgttctttcsagcacacaacagacagtctatatttctgaagaaaataattgagtacgaacccaattacatttctttttgtcaattaacttacttcaaaattattatgtattaagataaacaatatggctcagatagtaagtaaattgaaaagcaccattgttgaaagaagaaacctacttacactcctgggttgagttaaggcaacaagatatataaccatccacatttatacataaaaataaaaaggatttttaaaaagattcccttaaatatcaagttgtgctaaagcagttaagccgggatttgatctacaaaattaaatatatatatatacactttatttttaaaagctcacctattattaaaaacatgtcttttgcaagtttaactgccttgaaatttccattaaaaagaaaattatgtgttaaacatgatgt

SEQ ID NO: 795572 - DNA, 615 bp, Homo sapiens
gttgatagtgggggaggctgtggagggagcaggcagtgggtgaatgggaaccctcagtactttctgttcaattttactgggaactcaaaactgctctaaataataaagtctattaagaaaaaaaaaaaaagatgcagctcaggtcctaccctcttctgatatgccaatccayagaaatctctgctttttcttaactctaaaagaatttgctgacatttgatccttaatcgtataatgctttaaactgtaagagaaatccccgtcttatctccccaactagaagctcccagggatgacattttatagcttttgacagaccccacaatgcctagtaaattacaaaaaagaaaaagagaaatgaaaaatttcaattaagcaaggattgttttacttcaggaaaatattgttactgtgcttgtttcattcccagagtcttgaaagcaacgcgcacacagctaatgctctgtcttcagggcccgtcttccttgttgtcccctgggttcacgtgttatttgaatactgtggttagagtcacgtcttctctctgttttacgatacaatcacactagtccaggacaccgccgtgtctcttagattatccccacagcctccatc

SEQ ID NO: 795573 - DNA, 640 bp, Homo sapiens
acagtttctacatcaaatgtaatgtaagaagattgcttggacttgcgaaaagaggaaaagaagatgcagtcgggctaggcgcagtggctcacgtctgtaatcccagcattttgagaggccgaggcgggcggatcacaaggtcaggagatcaagaccatactggccaacatggtgaaaccctgtctgtactaaaaatacaaaaattacccagacgtggtggtacgcacctgtagtcccagctactcgggaggctgaggcaggagaattgcttgaacccgggaggcggaggttgcagtgagctgagatcgtgccactgcatttcagcctggcgacacagtgagactccatctcaaaaacaaamaaaaaaagatgatgcagtcatgggtgtgggttaggtaagtgtgaaggagtcagtttttgctggtggcaggtaatggacttttacacgcttaatatcagaattagagtcacttcataattttcgttgagaattagccaatattgcttgctttttaagtttttatgtatcttaatatactccttaaaaatctctcaaacaatagtttcttggaagggtgtcattcctgactccctcctccactgccttcgtcagctgttataacagcgctgtggaatcatg

SEQ ID NO: 795574 - DNA, 629 bp, Homo sapiens
caaggggccccctagaaatagaaggtgtcttgctctttttatttgtaaaacatatacctatttgatataaaaaacttattacgttccagcttcattgctaaattttatactaaacctgctatctagtgtgtgtgtgtgtgtgtgtgtgtttgtgtgtatgtgtgtgtctgagagacaaatgtcttttacttgattaaactattgtccttttaaagagaattttgaagttttcgtatactgctgacttggaggcggcattaaaggcatatcttaaggtttaggaacctaggatattgaaatataactgaagattctcaagatacagtaaagtattgcgacacatggtgggaaaacagtatattaaaagagcttgtgggktttttttttgttttttttttttgagacagggtctcattctgtagcccaggctggagtgcagtgttagttatactcatggctcactgcaatcttgacctgctggactcaagtgatcctcctgcctcagcctcccaagtagctgggactacagatatgcaccaccacacctggctaatttttgtattttttgtagagacggggcttccccatggtgcccaggctggtctccaattcctgagctcaaatcagcc

SEQ ID NO: 795575 - DNA, 517 bp, Homo sapiens
acgtttcattaatagtgtacagttccaaaaatctttcataggtaagtttgtaattaataatctaccatacagtttaactataattggtgaaagtaattttatgacaaaggtataatctctcaaaataaaaagggcaaatagaacatataaatgtcttattaatctactattttaaaataacacttcaaaaaaacctctaaacatggccatattaaacatttcataaaattataaatttttaaactcttagcttcaaaaagatatctgtattggaaagagcctaaatgtgtagtaacactaaattggttgaatttgccaggcgcggtgactyatgcctgtaatcccagcattttgggaagctgaggtgagcggattgcttgaggtcaggagttccggaccagcctggccaacatagggaaaccctgtctctactaaaaatacaaaagttagctgggtgtggtggtgtgtgcctgtggtcccagctacttaggaggctgagacaggataatcacttgaa

SEQ ID NO: 795576 - DNA, 622 bp, Homo sapiens
caccattcttgccacctcagtccttaatgatgatccccaaagtcacaaagtcaggtagctttttagaaattatgaaatcagtataaattatttctaaagactcatggagactgacaattttctcacttaagctaagtaattatcacctaaatttgtgtttaccaaaaggaagtaacagataagttataaagtaaaaagtattttaaaaatccaagaaaggacagtaacagcrtaaaaaataaacctcagacgtggaatctccattaggaaaaaaaaaaaaagtagtgagcagataggaaagtgggcaatttgagtaaaggaagttcaaagagagatctgaaaatcaggatgacagttttatttagatttgctaaagataaaggcagcaaatcaaagtacaagtgataggtctggcactgtcctatttctagtacaagaaaagagtctggaggaagaatcatgcacttcccaaagtttcaacaatctgctgggggaagaggaaaaatagttttaatagatggaagaaaatgtaaagccagatgacaacttcagtggaaataatgactttgcctatgctccaaagataaagatattaagtcaaagaactttcctgccttttagg

SEQ ID NO: 795577 - DNA, 622 bp, Homo sapiens
caccattcttgccacctcagtccttaatgatgatccccaaagtcacaaagtcaggtagctttttagaaattatgaaatcagtataaattatttctaaagactcatggagactgacaattttctcacttaagctaagtaattatcacctaaatttgtgtttaccaaaaggaagtaacagataagttataaagtaaaaagtattttaaaaatccaagaaaggacagtaacagcgtaaaaaataaacctcagaygtggaatctccattaggaaaaaaaaaaaaagtagtgagcagataggaaagtgggcaatttgagtaaaggaagttcaaagagagatctgaaaatcaggatgacagttttatttagatttgctaaagataaaggcagcaaatcaaagtacaagtgataggtctggcactgtcctatttctagtacaagaaaagagtctggaggaagaatcatgcacttcccaaagtttcaacaatctgctgggggaagaggaaaaatagttttaatagatggaagaaaatgtaaagccagatgacaacttcagtggaaataatgactttgcctatgctccaaagataaagatattaagtcaaagaactttcctgccttttagg

SEQ ID NO: 795578 - DNA, 589 bp, Homo sapiens
aaaacaatatgtactttaaaatacctgcttatggcccatttcattgaaaatacctctttacaagggttcctaattaattttagagaaaaccaggcccacagtctgaaatacgaggacctctaaatgtgaagctaaagtattgctttcaggtaataattaatcttgttaaatttaaaaactgcttcacaatatttcagaaaattaaccctaaacaataatccagtctttctcttactaaaatagtcgatttcatcactatttgggaacaaagaaaagaaaaatataaaacaycgcacaaaattaatttatctatgtacagatttgttcttttggtcattaagcgtctccctttattatacagacaagataaattataagtaaaaaggaggaaaacaaacttcctttttataaatataaatttaaaagtttaatagtatgataaaaaaacttaaagagaaaaataaataaaataaaagtttaatagtaatataagattactatcacttgtttggagttcaattattttctgtcggtaaaattagtcgtacaagaaaaaaatgaatactcttaaaatttgctgcttttattg

SEQ ID NO: 795579 - DNA, 589 bp, Homo sapiens
aaaacaatatgtactttaaaatacctgcttatggcccatttcattgaaaatacctctttacaagggttcctaattaattttagagaaaaccaggcccacagtctgaaatacgaggacctctaaatgtgaagctaaagtattgctttcaggtaataattaatcttgttaaatttaaaaactgcttcacaatatttcagaaaattaaccctaaacaataatccagtctttctcttactaaaatagtcgatttcatcactatttgggaacaaagaaaagaaaaatataaaacaccgcacaaaattaatttatctatgtacagatttgttcttttggtcattaagcgtctccctttattatacagacaagataaattataagtaaaaaggaggaaaacaaacttcctttttataaatataaatttaaaagtttaatagtatrataaaaaaacttaaagagaaaaataaataaaataaaagtttaatagtaatataagattactatcacttgtttggagttcaattattttctgtcggtaaaattagtcgtacaagaaaaaaatgaatactcttaaaatttgctgcttttattg

SEQ ID NO: 795580 - DNA, 577 bp, Homo sapiens
ttgaccaatgggatctaattaaattaaagagcttctgcacagcaaaagaaactatcatcagagtgaacaggcaacctacagaatgggagaaaaattcttcagtctatctgtctggcaaagggctaatattcagaatctacaaggaacttaaatttacaagaaaaaaaaacaaccccataaaaaagtgggcaaaggatatgaacagacacttctcaaaagatgacatttatgcagccaacaaacatgaaaaaaaaagctcatcatcactggtcattagagaaatgcaaatcaaaaggacgagataccatctcatgccagttacaatggcaatcattaaaaacagatgctggagaggatgtggagaaataggaayattttcacactgttggtgggagtgtaaattagttcgacaattgtggaagacagtatggcaattcatcaaggatctagaaacagaaataccatttgacacagcaatcccattactgggtatatactcaaaggattataaatcattatactataaagacacatgcacatgtatttttttatttttgcggcactattcacaatagca

SEQ ID NO: 795581 - DNA, 634 bp, Homo sapiens
agatagaaaatgctgagtaagtctgtaggatatgatgaggtttctcttcagataacccgatcaatcttttattctttaattcatagtaccccccctgcctttttccctttttctttttttttctttttgcctttgttagatacmcaggcacgccacagtaccaggcattaccaataccagctcacgttcctctccttattcggaaagaggactaactttctagctcattacagacaccccttcccctttcttctctgctttcttttacatgcccaccttatctaaaaaaatcaaatgtttagccaaccgggattcatttagattgtacgacccaaccccagccaatggggaaagggtacaggggcaggacttgtgtcaggaataaaggctctcgtgcccctttgttcaggtgtgctctcatggcgactggccaaggaggcacccctctgcgcagaagtaaaattgctttgctaagactcctttgttcgagtgttcaatttccttaggattttgaatgttattcctaacaagtctgagtgtgggaatgagggaagaccctgggctgggttttgcacacattgggtttagaatgccttgggaatgttcaagtggaaaaggctgggaggcagtggga

SEQ ID NO: 795582 - DNA, 636 bp, Homo sapiens
tggagagttccttctcatccagtctgtcaactgaagaatcatgagtttcataaatttgaaaaagagagctttttttatacatataaaggcttgcagcctgcagggtggcctttctaacagtctgggaaagtgtatcccccagccagaagccagaaacacacttcatgggaagggcaaggggaacaagaatttatgatgaacagggtggccaaatatacatattcaataagctagaggaggcccggatgcagtggctcaygcctctaatcccaacactttgggaggccaaggcgggtggatcacctgaggtcaggagtttgagatgaccagcctggcccacatggtgaaaccccatctctactataaatataaaaattagccaggcatggtggtgggcacctataatcccagctacttgggaggctgaggcagaagaatcacttgaacccaggagacggagtttgcagtgagccaagattgctccactgcgctccagcctgggcgtcagagcaagactctgtctcaaaaataaaaataaaaataagctagaggaggagtcatgagtatttatgaaaggagaaacaagcacatgcacagagcttcgtgactctctatggaacccaggcacaaaaaatg

SEQ ID NO: 795583 - DNA, 636 bp, Homo sapiens
tggagagttccttctcatccagtctgtcaactgaagaatcatgagtttcataaatttgaaaaagagagctttttttatacatataaaggcttgcagcctgcagggtggcctttctaacagtctgggaaagtgtatcccccagccagaagccagaaacacacttcatgggaagggcaaggggaacaagaatttatgatgaacagggtggccaaatatacatattcaataagctagaggaggcccggatgcagtggctcacgcctctaatcccaacactttgggaggccaaggcgggtggatcacctgaggtcaggagtttgagatgaccagcctggccmacatggtgaaaccccatctctactataaatataaaaattagccaggcatggtggtgggcacctataatcccagctacttgggaggctgaggcagaagaatcacttgaacccaggagacggagtttgcagtgagccaagattgctccactgcgctccagcctgggcgtcagagcaagactctgtctcaaaaataaaaataaaaataagctagaggaggagtcatgagtatttatgaaaggagaaacaagcacatgcacagagcttcgtgactctctatggaacccaggcacaaaaaatg

SEQ ID NO: 795584 - DNA, 606 bp, Homo sapiens
aactacctattgggtaccatacttattacgtgggtgatgaaacaatctgtacctgagacctccatgacatgcaatttaggtatactgtaaacctgcacatgtacccctgaatctaaaaaaaaaaaaaagaaaactgagtcagagacaggtttgatgaattgtccagaggcataaagccaaaggcgagactcaaaaccagagtttagactctgtagtctaaactcctcatcatgaatctcatggctgccctcaatggctttggtatgcctcagtggctcctctgtcctktgttcgtttactgtgcccgcagaactgggagactcatttttggagttccagtgtcagctcaagcttgtgattttacaaaagcaagttaagcctccctggtgtcaaagctttggactcaaccttctgttgccttctagggatgtcacccaggtagactttgaggatcttgagacaaagtggaattcaatacaggatattttcagaatctctgttttgcccaagagataaagctcccaccaggctgcagatggtccctctgatttatttttcagtccatccctggacctctaggatagcttatgaaaaccctggtggttt

SEQ ID NO: 795585 - DNA, 588 bp, Homo sapiens
taaatagacctccatttctttatttatagcctatgtgtgtctttgcacgtgagatggatctcctgaatacagcacactgatgggtgttggctccttatccaatttgccagtctttgtgttttaattggggcatttagcccatttacatttaaagttaatattrttatgtgtgaatttgatcctgtcactatgatgctagctggttattttgcccactagttgatgcagtttctttatagtgccgaatgtctttactatttggtatgtttttgcagtggctggtacaactttttcctttccatatttagtgcttccttcaggagctcttgtaaggcaggcctagtggtgacaaaatccctcagcatttgcttgtctggattttatttctccttctcttatgaagcttagtttggctggatatgaaattgtgggttgaaattcttttccttaacaatgttgaatatgggctgcccctctcttctggcttgtagggtttctggagagagatccgctgttagtctgatgggctttcctttgtgtgtaacctgacctttctctctggctgcccttaacattttttccttcatt

SEQ ID NO: 795586 - DNA, 563 bp, Homo sapiens
agtcaggaagcattgctgatattgctgttgctgttgtttttcattaggatttattcagacaatgcaaactgagaatgaggcaatcctgatcaccactatccatactatctctgaaaggctgccatttttacttaaaggtcttcatgttgaactttctgacgaaaaaagaatgtacaagacaggtgacaaaaattacctaagaattcactagctcaaattctctctcaaagaagaatgagcaaatgaaatggaaaattgagaggcacatgaacagtggaataagtaatctgtggagctcttttatgattgctcttgtgtgagagctttataatatcagccaaaactattctgtctttctccctcccttcatctcctcactcattcatrtatgatctttccagaacaaagtctttcaaaatttaagtgtctaaaatagacactcaccctttcacaagacatgcctaagtttgtttaaatataagtggtcaacaaagtgccaaagatagaaattgtataatgggcaaagttttgtttcaacaggaaaaaaaatgcccttgagggaa

SEQ ID NO: 795587 - DNA, 625 bp, Homo sapiens
ttcccttgttcactaagctcttgagggacagtttgatgcggctgttattcttctctacgtcgtagccagcagcggccaatgccttcttgagcgcaaccaaagacatacctactcgttcctgtgacactgaaagggcctcggtgatcaacttggacacagagaggttcggcactttgcgacttgcacttatcaagccagccggcttcctccctcgcttcttggttggaagtttctccatagcggctasaccagcactggcagaagctgcaggcacggtttcagacataacaacagagaaacgcaagatgtaataaccagcgaaaagcatgaaacacccgggcggcctcggggccttatatagggtagggcgcgctgtgattggtgcatcacctaggcaccgcccccgccccttggaggaggagtatttgtgtttgttttacccggaaaagttgagtataacaaaacccctctttacagaatctcccagggtctagtgctgaataatctgcggaaattcatatttgacatgacttttctctttttaatgaaaaatgaccctggatgccaaaactattcgagaaagccctcgattttcaatcaaattcacggagaggaacaaaacttc

SEQ ID NO: 795588 - DNA, 493 bp, Homo sapiens
aattaactttatagatgaagaaactgaggcacaggaatgtcacatgacttgcccaaaggaaattcagtcttcctttttcaattcttttttctttttactttgctgcagggtctcgctgtgttgcccaggatgctcttgaactcccggactcaagcgatcctccttcttcagcctctcaaagtgctgggattacaggcatgagccactgygcccagtcaggaaattcagtcttctaaacattcattattgaaataatatttccataaacattttcttagataaactttggcatctctaacttctaagtagcaaagtcatggaaacagtcacagagaaaataactttattttaaaaataataaattcttatctccggtgataagaaaagtatacagcccattttttaaagtattaattttacattctaatttgttttttttaatgtttaccatatatttctctttctacatatgtgtgtgagtgaataaaataaa

SEQ ID NO: 795589 - DNA, 486 bp, Homo sapiens
agtatgcctgaattcttcccagagtggaagaatccattttaaatatatatatctacatgtacagatcctttaaatatttgttctgacattcattgtttttgagtcactgtcattgagaaaagtttagaaaggagatattaggagcaggaaatagaaagtaaataaaatatcaaaataaaaatggggttttataaatgatataataggcaaaataaaggaaaggcatcctagacctctggttaaaatgaagatggcacttggcgagatgtgttccagggtagttcacatgatgtatgttttcagagaattrtcatattgcatatgctgctatattttttattttcatgaattaaaaggcatgttgagatttcagagttttacttatgatctcagactctgcattttttctctgtaatgtttgacatttcttcctagctaagtctctagttataaggtctgtgttgtggcatgtggacagtgagtgga

SEQ ID NO: 795590 - DNA, 560 bp, Homo sapiens
ttcactctaaatttggccgtagcacactagagacaaagaaacacaaacacaacccagaaataagtttcaggcccatccctccccttcccacccaagtcaccaccattgcaggaaacttcttctcccttgccctacccctctcaccagttccacacaccagcccacagtccaggcccgctggagactatcagcatcctgtttccttggctccaccagctcccggaatgctactaccaccgtcaaaccccggttatacttgcctccaayggcattgtactccaggacctggagggcaaggaaagaggtacagggtatcagggtccatacagcagctactgtgagttttctccttgctctctcccatttccaaccaccacctaactttatcctccccaaccccaactcctcttcaaggagcctctggaattgctactgtctttactccttccccaaatttctggagcaaagctagaagaggtcccagtacccaggcacattctttctgcatggtctaccctagtaaatttattttttgtttttatttatttatttatttattt

SEQ ID NO: 795591 - DNA, 609 bp, Homo sapiens
gaacgaatttaatttttacagggagggcatggtatcctcatgtaccagattaagagggtgagactcagaaacataagtatcttgtacttgtcacagtgcctctgccactagcacatatttggcacacagaacatttgatgtatgactgaatgaatgatgttactgaaggtcactcagctatcaagtgttggagctggaactcagccccaaagcctgagttcttaacctctgtgcttcatgccacrtaggtagcccagctgtgtgcatccctcctggccatgggatgattgtcatgtgcagtccagaccgtcttaacagtctctgttgttcaaacattagctcatctcttatctcatgtgttctctcctagtggccttgttcccagtgtaccagatgacctggatggcatcaaccccaatgctgggttgggaaatggtcgtaagtacacaaaaccaggcattctcttgagtaaagaacaaggaaagtagacattggactgtgagcatcttgagctttcatatctctggggcccagaggcttccctgaactggcacaccgtaggtgctcagtattttttgtatgattgatttgctttccacctcctttcat

SEQ ID NO: 795592 - DNA, 634 bp, Homo sapiens
gtgatgatggcatcctatgtataggatccatctgtgtgaggctgtgatttctattgtaaattacagaatcctttggcttgcagtatgcaaaaggagaggcataaagggctactaatatgctctcaaaaaatacattgggaggagggaaggcacacaatctagactgaacctctcaaaagaaccggtctactaagggagctgttgccagccaggcccctgaagcaccaggcctctgccatgatcaggaagcttatgggtccgtagctgccctgcccctgctggctattgccactatgcttgtcagaaggtcccctctccctgcacaaggccaacagctgacttttctcactcgctccttccaagactcacatcactgcatctgcttagcagtgcctaagtcacatgaggagctcgagctgcaagtgagtgtggagaatgagtttcccctactacagggcaggaagacgcacgagaagagggaatrgaattgggcaagccagtctgtagttctgcttcaccatcttgagatgaatctatggcattagatatagaaaagaagcatgggaaaattggaaagcactgtaagatataaacatgggaatttggcaatgttcatccaatgctatccaggaga

SEQ ID NO: 795593 - DNA, 655 bp, Homo sapiens
taaactaagctttataaaaattaaaagcttctgaccatcctggctaacatggtgaaaccctgtcactactaaaaacacaaaaaattagctgggcgtggtggcaggtgcctgtagtcccagctacttgggaggctaaggcaggagaatggcgtgaacctgggaggtggacctagcagtgaacgaagattgcgccactgccctccagyctgggtgacagagcaagactccatctcaaaaaaaaaaaaaaaaaaaagctgtccatccaaaaaccaccattaagaaactgaaaaggtaaaactcagactgggagaaaagactgataacaccatcaactcttggcaaggatgtaactggagaactaattcattcttgttgggaggataaaatagcacaaccactttagaaaatttttgacagtttcttatatagttaaacattcaactatcctttgacacagcaattccacatctacatatctaccctagatatttaccctaattttagaattgttgatttgccatttcaaaagcaatgatcttccagaacattagctttacaccattccatattttatatattttttaagctaccataatttatgaagattcaaaatgcaacttgccaagttttaaaaaagaaaaaaaagtatggaaac

SEQ ID NO: 795594 - DNA, 655 bp, Homo sapiens
taaactaagctttataaaaattaaaagcttctgaccatcctggctaacatggtgaaaccctgtcactactaaaaacacaaaaaattagctgggcgtggtggcaggtgcctgtagtcccagctacttgggaggctaaggcaggagaatggcgtgaacctgggaggtggacctagcagtgaacgaagattgcgccactgccctccagtctgggtgacagagcragactccatctcaaaaaaaaaaaaaaaaaaaagctgtccatccaaaaaccaccattaagaaactgaaaaggtaaaactcagactgggagaaaagactgataacaccatcaactcttggcaaggatgtaactggagaactaattcattcttgttgggaggataaaatagcacaaccactttagaaaatttttgacagtttcttatatagttaaacattcaactatcctttgacacagcaattccacatctacatatctaccctagatatttaccctaattttagaattgttgatttgccatttcaaaagcaatgatcttccagaacattagctttacaccattccatattttatatattttttaagctaccataatttatgaagattcaaaatgcaacttgccaagttttaaaaaagaaaaaaaagtatggaaac

SEQ ID NO: 795595 - DNA, 655 bp, Homo sapiens
taaactaagctttataaaaattaaaagcttctgaccatcctggctaacatggtgaaaccctgtcactactaaaaacacaaaaaattagctgggcgtggtggcaggtgcctgtagtcccagctacttgggaggctaaggcaggagaatggcgtgaacctgggaggtggacctagcagtgaacgaagattgcgccactgccctccagtctgggtgacagagcaagactccatctcaaaaaaaaaaaaaaaaaaaagctgtccatccaaaaaccaccattaagaaactgaaaaggtaaaactcagactgggagaaaagactgataacaccatcaactcttggcaaggatgtaactggagaactaattcattcttgttgggaggataaaatagcacaaccactttagaaaatttttgacagtttcttatatagttaaacattcamctatcctttgacacagcaattccacatctacatatctaccctagatatttaccctaattttagaattgttgatttgccatttcaaaagcaatgatcttccagaacattagctttacaccattccatattttatatattttttaagctaccataatttatgaagattcaaaatgcaacttgccaagttttaaaaaagaaaaaaaagtatggaaac

SEQ ID NO: 795596 - DNA, 570 bp, Homo sapiens
aattctgggggtgctgaattgtgtccccccagattcctatgttgaagagctgatccccactgcctcagagggactgatttagagaaggcattcaaagaggtaagtgaggtccaatgaagccatatgggtggaccctaaaccaatatggcaggtgtccatgtaaaaagagattgagacacaggcaacacagcctgaggacacagcaggaagggaggcatctgcaaggcagcagttctcagaagaaggcaaacctgctgacattccatcctggatttccagtcttcagagctgtgagaagataaaccactcaatctgtggcagcttgtgatggaagccmctagcactcttatacggtgaccttagcacgagcagtttcataggcttgatgaaagtgaaagccaaactgacctgaataaagagtgaaaggaaaatgagcaaaaggagatagtaaatgtggaaaatccttgagaaaaatttgccaagaaaggaggagatggcttgatagctagaaagacacacagagtcaaaatcaaggttcctccaagatagaagattttttaaatgaaaaat

SEQ ID NO: 795597 - DNA, 615 bp, Homo sapiens
gttatccacattttacataaaaagaaagaaaaggcagaaaagaagtgatttgcttgaagtgacacagaaatagctggtagaaccatgcactgtgtagatggcagggctactgacttctcatttcacaccagaaatgtagacagaattagatataatgacagttattatatttttaaacctttcaaataagaatatccttggaattcattaacaaagcacaaagcatgtgattagcatctgaaaatgttttattatacaatcactagacacaaaaagaggtttccattttcctgtgtatttgaaagagttcaacagccctaagtcacacagttggaggaaactcaaacaagggaaggttcgtttgaattgatgaaattarcaggatgaagtttacaatacaaagatttttgtttcaagactctgaggttttgtagggaggaaggggaaaggcagatgacaccaaataagactggtcggagaggggatgagaagcatcaattagaaagctcttcaaattcaaaaggaccgttcaaaccatcctaggactaggctccaatcgggaaagactttgaaggaaatgatctcctactcccacgagatggctaacgtgattta

SEQ ID NO: 795598 - DNA, 575 bp, Homo sapiens
gtagtatacgaatatataaatatatcactatttttgcaatctcctgttgatggacatttgtattgtttccagttattagctattatgaatcatgcaactatgtatattattatacaggtcttttgtggacacatctccattatttttgggtaaatatttaggaatggaatgttggtcagctgtaggctccattttacaagaaactgccaaactgtcttccattctacacttttgtttgcaatgtatgaaagttctggttgcttcctatcctaatcaacatttggtgtgggactacaggaacatgccactacacctgrttgattaaagaaaattttttgtagagacagggttttgctctattgcccaggctggtcttgaattcctggcctcaagtgatcctcccacctcagccactcaaagctctaggattacaggtgtgagtcgccacgaccggccaaaatttattaattggtagttggcaattgttgatggaaaagaaaaagcaggttacaagcaatgtactttttgatgtctttggtattatcacaggcaaataaattatatatgtatatata

SEQ ID NO: 795599 - DNA, 556 bp, Homo sapiens
atgtttgtccctcacatagcattccagaccactgctacaagggtctaaaggcttgttcctcacaaaggattccagagcacacctgctgtggtctgattgtttgttcctcacataggattcctgaacactgctgctagggtctgaatgttggccttcacataggaytccagaaccctgatacgattgtctgaatgtttgtccctcacacagcactacagaacactgctacgagggtctgaatgtttgttcctcacatgggattccagaacactgctatgattgtctgaatgtttgttcctcacataggtttccagaaaacttctgctatggtctgaaagtttatccctcacataggattccagaacactgctacgagggtctgaatgtttgtcccttcacataggattacagaacgctgctgctgttgtccaaacatctctctgtcacatagggttccagaacactgcaacatgtgtctgaatgttttccctcacataggattccagaacactctcattgttgtttgaatgtttgttcctcacataggattccagaa

SEQ ID NO: 795600 - DNA, 461 bp, Homo sapiens
gatggagttgttggaatgaaaaaaaagtcaaattttactttggatcaatcagagggaagaaagcagacagataggaaaagaaaggcaggcttagccaagttgaagaaagaggctgaactcaggaggtagtgggagaatagggtcatagtttgaagagagctgtgaggctgttaatctaggtgaggatcataatcccagaagacccagtsacaaacaccataaccctgaatgttgaaatcctgaaagatcaaaattcctaaggtctaaattcttttttttttaatagagacagagtgaattggttaattctcatgctcccaataaagacatacacgagcctgggtaatttataaaagaaagaggtttaattgactcacagttcagcatggctgggaaggcttcagaaaacttagaatcatggtgaatgcaaacaagaatcaaggcaccttcttcacaaggca

SEQ ID NO: 795601 - DNA, 611 bp, Homo sapiens
gattaaattatgattttaaaagaaatagttttaatttcttattagaatgctgccaccaaataaataaaatacgtactttaactatatgcaatattgtctatattatactgttgttaacagaaacattatcggggccaacttcatgaaaggagatatgtgatagaagatggagttgttggaatgaaaaaaaagtcaaattttactttggatcaatcagagggaagaaagcagacagataggaaaagaaaggcaggcttagccaagttgaagaaagaggctgaactcaggaggtagtgggagaatagggtcatagtttgaagagagctgtgaggctgttaatctaggtgaggatcataatcccagaagacccagtgacaaacaccataaccctgaatgttgaaatcctgaaagatcaaaattcctaargtctaaattcttttttttttaatagagacagagtgaattggttaattctcatgctcccaataaagacatacacgagcctgggtaatttataaaagaaagaggtttaattgactcacagttcagcatggctgggaaggcttcagaaaacttagaatcatggtgaatgcaaacaagaatcaaggcac

SEQ ID NO: 795602 - DNA, 611 bp, Homo sapiens
tgactgtgatggttttctcagaagagatcagtgtgtgggtctgagcagactaggtggggaagatctgctgtcactgttttgaatgtcttgaatatcacagaagaagttaaaatgaaagttaaaaatgaacaaaatcttgtctgccaaattatgtaatcatgtaccaagcacctctacacgtagcaccatgcttgccttcacaaaatgccttttgtcagataataaaaatagttcaacaaattcagtggccttctgagccagacaccttctggcacagagcttcctccagtgctacaagatatattaaatcatgaactattcttgattagggatttgactgtcaaaaaagataaacatatttgtttaacataacaaaactggtgcatgyttcactttggctgatgaacggcactttcaaaactgtccccagtgggttttttaaatcgactttatgcagtttatgcccccattggattacaaaattctgtaatttaaactgcacgtttatggtttaataactggaaaaagtgaagtactttataaaagcttatttgaagatttggatggctttgcagaagaaaatagatttcaattggatccccaaattataa

SEQ ID NO: 795603 - DNA, 614 bp, Homo sapiens
gcgaagacttaacagcaaggtactgtacatttctaaatgtttacttcttaattttgctggaagaaatatactactcaattgattatttttaaagcaaagtaaaacaatttattttgacaagcgacactgtattttcccagttttctggtggcaaagattaggcttaacatcactaatcatcagagaaatgcaaatcaaaaccaaaacgagataccatcctacaccagtcagaatagctactattaaaaaatcgaaaaacagcagatcttgggaggctgtggagaaaagggaacatttacacataattggtgcgaatgtaaattagttcaaccactgttgaaagcagtttggaaatttctcagagaatttaaaatagaaattcctttcaagccaacaactccattactggtatatgacccaaagaaagtcagttattctaccaaaaagasatatgcacttgcatgttcatcgcaacactattcacaatagcaaagacatggagtcagcctaggtgcccatcaacagtggattggatcaataaaatgtggtacatccacacagtattattaggccattcttgcattgctatgaagaaatacctgagactgggtaat

SEQ ID NO: 795604 - DNA, 594 bp, Homo sapiens
atctccaaatctcctacagtttatagtcttaagtgttaacaatttattcctctcactctagccagtttaatacataaatgctttttaccaactacaggcctgagatcactttcccattagacaccaactcttagaaacacacaattacagacttgaaccagtctcagcatcctttccagtaggtcaacacacaaaccataaaggaaggccaccttatgcgtcttgtaaatgccttggtaatgaatccagtcctcattcaatttgccagggcaaggaataaacaaccttgcgcttaagttcaggctgtggggagttcattatcgactaggaaataactacaatgcagttgcttcctttcatctcacattgattaagctgtatttgctaagagcgtcagtacccacatatcattactaaaaatccaactcattacaaactcacctaaatgtaaaygaaaaccacaaatcaggcatagttttattatatccaaaggagattgggtcattatgcaccattcattttcttcttattagtcaggtatatttttctttgcaatcaacagatagtatcaccagatgtctctttgtaaaaaag

SEQ ID NO: 795605 - DNA, 434 bp, Homo sapiens
aagtcagtgccagaagagctccagaatggtttctagtggtggtatcctaaacacacacacttccagggggcagttttgatgcagaaccctcatttggactttttcttttttttttttttttttttttaagcaaacctctctttgctttataccagattgcatagacagccttttaraaatcactcagaaaatgtgtcttcctccagtcactgtagttcaccataataatgtgaaatgtaggacctgtggattgactttatgagtccaggacctatgttagcactgcattcctttgagtctggtcatcttcaagccaaagccagtaacagtgcaggcttgctcacccacctgagcctgcagctggtcctgagctttctcccaacaatcccctcagatctgtgtctgaaaatgcatctgtaacagtgatggcattc

SEQ ID NO: 795606 - DNA, 563 bp, Homo sapiens
gtgtgcaattcaataattattactaaatttatggagttgtataacccaccccacaatctaattttagaacaccttaaaaaggaacttcatgcccacttattatcactcaggtttcagaaacctaggccccagtaacttctattttattttctgtccccacatacttgccttttctgggtatttaataaaaatgaaatcatacaatatgtggtcatttgtgactacctyccttcataccataaagtttttgaagtcaaaccatgctgtggcttacatcagtactctttgtttttattgccaaatagaacttcattatataacgaataaatagtatttcactaattgaaggacatttgggttgtttaccctttatgactgttataaataatgttctatcaactttcatgcaagtctcatctcttctgattagatatctcagactgaaattgctgggacatatggtaaatttacgtttagcaatttaagaaactgacaaactgttatctaaaatggatgtatatttacattcctataaaaatatgaggttacatttcccagcatgt

SEQ ID NO: 795607 - DNA, 411 bp, Homo sapiens
taattaaacactaaagtgtatattatttcccacataaaacatttttaaactaatctataatatacaagtagagcccaaacttgtaaatcatgtcactctgacactcctacatagtaaatccaactgttttattctaaattgtctttattttgaattctcacttaagatacagtcctagctttctttttcccttctgtgcccaasttcttgaaagagtagcacccaattactgtacaaattttcacttttaatttaaaataagaatattttatcttatcattgatgatgaaactctcaatcactaattaactaatgaattcctaaccactattttcaagaaagaattttatggctttgtttgaatgtttttccacatttaacgctgctcaccatacattctttcaaatttgc

SEQ ID NO: 795608 - DNA, 582 bp, Homo sapiens
taaaaaacagaaatagtattcaacccagcaatctcattactaagtatatgccaaaaggaaaatacattataccaaaaagacacatgcactcatatgttcattgcagtgctattcacaatagcaaaggcatggaataaatctaggtgcccatcaatggtagattggataacaaaaatatggtacttatacaccatacratactacacagttattaaaaaggaggagaaaattttctctacaacaacacggatacagctggaggtcattatcctaattaaaataactcagaaacagaaaatctgcaggttctgcaggttctcatttataagtgggagctaaacattgggtattcacaaacatagagatggcaacgatggacactggggactacttgaagggtgagttgagaagggagacaagggttgaaaaattaactgttgggtatgatcctcagtacctgggtgatgggatttttcatacattcataccccaaacttcagcatcatgcaatacaccagggtaacaaacttgcacatgtaccccctcaagctaatataaaagttgaaaaaaaaaagcaaaatg

SEQ ID NO: 795609 - DNA, 637 bp, Homo sapiens
taccacttatttaaaattaataatttgcttataacccaaatttaagaaacaagaaaaaaactttgctggaacttccacttttgttctttattctaggataaatgtacttcaatgtgactcctgtttttagaatgtggtatgcagttaatagtattgacttctgaatagtatatgaagaaggaagaataatatattatcacaaacaaaagcaacggatgagaagcgaggttatacataaagcagaagaaggttaagaaccatgaacttttctytggctatgagctgtggaaagtacttaactatgagtaaattcaaatttattagaggattggtaaatgcaatccacactatgatgtacccttcattgtgaatcctccaaaaatttaaaaattacagtactctagtataatgacatatgtgaaatgcttggtttaattttcaagtcaaagtttatataagtcaaaacagggtcaagctataaggtcaagcataatgtaatagctgacataggtgttataaaaaagcacaaagaagaaattgtattaaaatttaaaaaaactaaaagaaaaggaagttacaggagaatttaaataaaataatgttagtaaatataataggcacatggctaatatattta

SEQ ID NO: 795610 - DNA, 577 bp, Homo sapiens
acatgaagcaaaaggcatatcaccataggagagttactctaatctcatctgcaaattgcttctgtcatcatccagagatttatggaggccttcattactggagggaaaccatttttcctaagtggtcccatcaacaaggtcttgaatgtcctgtggaatgacagatgtgagaaggagaaaggacccttcttccttattcggaagtagctcagttcaagtcctgttggtgagaggcgctgctcgcacggcctgctcagaagttaccttaggtgtttaagattkggttcttctgctcaacagtacccgagagtgtcatttttggagggtgtgtgtgtgactttattaagacagcaaaaaggtcatttgtaaattggaatttcagtaggaaataaagcacttctgtttcttcataggtaatgtatatgtgataaatcataaattgtccataggtgtgactagagtttatctcaattacaatgttaattgccactcagtcttcaaaaggtcactggtaaaactcttaacctggagaggtaaagggagttagtgtctggatatgatcagtatcctctccttc

SEQ ID NO: 795611 - DNA, 619 bp, Homo sapiens
agtaaccatactttcagtacctacaccatcattctgtttttcactttcagtatagtattcaagaagttacataagctattcgacactttctaataaaataagttttgtgttagataattttgcccagctgtaggctaatgtaagtgttctgagcatgtttaaaataggccaggctaagttatgatgttcagtaggttagttggattaaatgcattatcaacttaggatattttcaacttatgatgggtttatgaggacataaccccattgcctaagtcamggaattcttgtatatgtgtgcgtaaaaattcagctacactaaatgcaatgtgatatgtttatttggatcctggaacggaacagggacattggtagaaaagctaatgaaatctgaataaagtctggagtatagttaatgttaacataccaatgttggtttttcagttatgacaaatgtaccatggtaatataagatgttaacattaggggaactctatattatgggaactctatactggctgcaacttttctgcaaacctaaaatacttctaaaataaaatgtttattaaaaatattcatccataaggatctgcagtgcagtgtgccgtaagagcaaaaa

SEQ ID NO: 795612 - DNA, 600 bp, Homo sapiens
agtagcacacatggaaagttacacggccacatgacttaactcctttatttttccttttagaacagatgcttcatacaaaaacagcaataaaactcctcgtaaccttcctcctcgccttcagtctttcccctgccaatctgccttcatggtgccccagagggagtgcccttaaagatgaatctgaccatgtcacttctgtggaagctcaatggctcccctggcaactggatggaggccaggctccttgccttggcacacatggcagcaataagacttggttcttgtccacatctctagccttatcccctgccctccctgcctccagactggctgttttttcaagcrggaaactgagcaggttcccatgctcctttacccttctgagcctttgctaaagatattccttctgcctgacatatccttacccccttctctgcttggtgaatccaaatagcatctcttctgtaacaccatctccgactgccttggatggaattggttctaggacattccatattgaattttccttgattacatctgacttccctaaagttggtgagcagacaagccaagttctgcacaccttgctctaccagaggt

SEQ ID NO: 795613 - DNA, 556 bp, Homo sapiens
tttgagtggctgtagtcctttctgattattatgcaaattgggcaggcatactgttacttcttggcccctccgctattccggatgatctctacatggacggacagacttattagtgtggcctggctcccagattcctgctgtgggaaccttgtttcacccacagactatcagacctgggaggggtcytagggaccatcctgtctagtgctcccttattttccagagagatcccagcaaggtccaggtggggaagagactcctgcaatgtgcctggagttagaagcagagccatcggtgggcacttccttccactccctaactctctaccagatgctgttagtattctttttacttttcttgaatttaggtttattaatattcccttgttgatgtcaacccctgatgggggttgattgagcccttcataggtgccaaacactaacaggaataaatggaaaccaggaggagtcaacacaactcctgagcccacagactgtatctaggaatattcaagacaatattaatatacctaaattcaagaaaagtagaaatattc

SEQ ID NO: 795614 - DNA, 556 bp, Homo sapiens
tttgagtggctgtagtcctttctgattattatgcaaattgggcaggcatactgttacttcttggcccctccgctattccggatgatctctacatggacggacagacttattagtgtggcctggctcccagattcctgctgtgggaaccttgtttcacccacagactatcagacctgggaggggtcctagggaccatcctgtctagtgctcccttattttccagagagatcccagcaaggtccaggtggggaagagactcctgcaatgtgcctggagttagaagcagagccatsggtgggcacttccttccactccctaactctctaccagatgctgttagtattctttttacttttcttgaatttaggtttattaatattcccttgttgatgtcaacccctgatgggggttgattgagcccttcataggtgccaaacactaacaggaataaatggaaaccaggaggagtcaacacaactcctgagcccacagactgtatctaggaatattcaagacaatattaatatacctaaattcaagaaaagtagaaatattc

SEQ ID NO: 795615 - DNA, 629 bp, Homo sapiens
gacaaattttccaagcccaaaaggcaaccccacatagaagaaaggtcatatcaagagccacttccccctcatttcagccggataaaatgagagtctgttctgttggcattccacatatagcatttccactgcagctgctgctgggaatttcccttctgaagaagaccgaattagaccctcrgccaggctagctggccatgaggcatctgaattccaaatgtcaaagatttccatccaagaggttccgatcttttgctcacattgctctgtttgcaaaggcataattaacaagccatggacttctcctttccaggaaatctattttcctggtctcatgaaagaaattccagttctgtaccaggcattctttcttcacatgtgacatccctgggactcagcatcttatctctgaaggcttccttaaccatcccacaactgcagcatcactgactcatccctcctctgcacccctcactcactctatatgaagtgcacccaaaacatattcttgcctgtatttacttagaccatttgcttccttattttgttatgggttcctttagggtaggagagtgtcatatccatctctatatcctcagattaggccaaggcctggcacagaagaggaa

SEQ ID NO: 795616 - DNA, 473 bp, Homo sapiens
cacggaggagcaacacccaaacctctaccaaactaggtctcagactctttccagagaagatggagtagaatttgtagtgtaaaatatctcagatatgtaagaagagtatattaaaagtttatgagcagtcacaaacagggcaattttctttccattcagtttaactaacaagacacttagggataraagtttccaagacggagccacaatttacctattccagcctctaaaactatcctatttccacaccaccctgctgtgggaaaattaacactggcatgtccacacgtatacatgccacctatagaaaacaaagcggctctcaataaagtcatgtctttgacatattcattgtccttctagattctagaaacgtattaacctggtttttttttttttttaaaaagccctaaactttattcttgaagtagagtttctaaaatgaaccctattttatctttgctaaaatggtt

SEQ ID NO: 795617 - DNA, 624 bp, Homo sapiens
atggggagcctatttttcttttattactggtaactggaaaagcctagcaactattttccattgacattccctccaggatggagagcttgtttttcctagatttttgtgtatttttaggcagtcatcttgggcagtctggctttgtatcaaaagtgttattaattgaagagtttctcctttgggctattgggtagaaaaatacagtctctgtatcttcatgtctattttgggggtcatggcttgttccagttccccatctttttgcaaagtggctgttctttcatcttatccctgtagtgtgcctggagaaagaaagaaacagaatcccagagctatgatcacccttctaaaagtcttacttggaagtggcaaaagtggcaactttgggcctctgaattccttttctagaayttatggaaaatagaaaaaatcgttgatggaaaagcagaaggttgattagtaggcaaagaaggatggtggtctccaccttcaggatgaccactgtatgcagcttttgggagattttaattatacttgacttgatctctgcctggagttctccattgcatagttctcctcttcttacaagcaaaacatgcttgcacttagtttgggttcaaaaaa

SEQ ID NO: 795618 - DNA, 570 bp, Homo sapiens
ttgtatggagtattttctagaaatattaacatctaacactggaaagataatataattgaataattaggaataaaggctctggggttaggctgcttgcgtctattagtttcctgtggctcctgtaacaaattatcacaaacttagtggctcaaaacaacacaacacacaattattctctcacggctctggaggtgagaagtttcaaatcatgatgttgtcagggctgcattccttctattggcttcatggcagaatcaatctstcttgccttttcggcttctagagaccatctgcattcattccttgactcaggtacccttgcttctatcactcaacttcttgcttctgacatcacttctcatattactgactctgactttcttgtttctcttataaggacccttgtgattacattggatccccctaaataatccaagatactcttcccatctcaggatccataatttagtcacatcagcaaagttactcttgccataaaagataacatattcatagattctggggactcagtcataggtatctttgggagcccattattctgtctaccaa

SEQ ID NO: 795619 - DNA, 570 bp, Homo sapiens
ttgtatggagtattttctagaaatattaacatctaacactggaaagataatataattgaataattaggaataaaggctctggggttaggctgcttgcgtctattagtttcctgtggctcctgtaacaaattatcacaaacttagtggctcaaaacaacacaacacacaattattctctcacggctctggaggtgagaagtttcaaatcatgatgttgtcagggctgcattccttctattggcttcatggcagaatcaatctgtcttgccttttcggcttctagagaccatctgcattcattccttgactcaggtacccttgcttctatcactcaacttcttgcttctgacatcacttctcatattactgactctgactttcttgtttctcttataaggacccttgtgattacattggatccmcctaaataatccaagatactcttcccatctcaggatccataatttagtcacatcagcaaagttactcttgccataaaagataacatattcatagattctggggactcagtcataggtatctttgggagcccattattctgtctaccaa

SEQ ID NO: 795620 - DNA, 570 bp, Homo sapiens
ttgtatggagtattttctagaaatattaacatctaacactggaaagataatataattgaataattaggaataaaggctctggggttaggctgcttgcgtctattagtttcctgtggctcctgtaacaaattatcacaaacttagtggctcaaaacaacacaacacacaattattctctcacggctctggaggtgagaagtttcaaatcatgatgttgtcagggctgcattccttctattggcttcatggcagaatcaatctgtcttgccttttcggcttctagagaccatctgcattcattccttgactcaggtacccttgcttctatcactcaacttcttgcttctgacatcacttctcatattactgactctgactttcttgtttctcttataaggacccttgtgattacattggatccccctaaataatcsaagatactcttcccatctcaggatccataatttagtcacatcagcaaagttactcttgccataaaagataacatattcatagattctggggactcagtcataggtatctttgggagcccattattctgtctaccaa

SEQ ID NO: 795621 - DNA, 576 bp, Homo sapiens
agcctgggcaatggcaggcacccctcccccagcctcgctgctgccttgcagtttgatctcagactgctgtgctagcaattagcgagactccatgggcataggaccctccgagccaggtgtggaatataatctcctggtgtgccatttttttaagcccgttggaaaagcgcagtattagggtgggagtgacccgattttccaggtgccatctgtcacccctttctttgactaggaaagggaactccctgaccccttgcacttcctgagtgaggcaatgcctcgccctgcttcgggtcatgcatggtgctctgcacccactgtcctgcacccactgttgkcactccttagtgagatgaacccggtacctcagttggaaatgcagaaatcatctgtcttctgcatcgctcacgctgggagctgtagaccggagctgttcctattcagctatcttggctctaccctccagactgacatcttaatattgagccttccagtttaggagcatggtgtattttttcctttacttaggtttttaatctcagcattgttttgtagttttcagtgtacaggttttgt

SEQ ID NO: 795622 - DNA, 592 bp, Homo sapiens
atatatatacacacacacatatatacacacatactatataatattaatatacgtatactttaatgaggacaactttagacttctacttccatttaggatgtagaaagtcataagagaatattgctccctccctaacagtggttacttttttacttttagagtgtaaatgtaaaactatgtaaatgaacaaaaatacagaaaatgatgaattccttttaggcagtgtattaatctgttctcacactgctataaagaactacctgagactgggtaatttacaaagaaaagaggtttaattgactcgcagttccacaggcttaacaggaagcatggctgggaggccttggaaggcatacagtcatggtggaaggtgaagaggaagcagggatcttcttcacactgtggcaggagagasagagggagagagagaagggggaagtgccacatacttccatgccatcagatcttgtgagaactcactcactatctcgagaacagcaaggggaaatccacccccataatccagtcacctgcctgacacatggggattacaatttgacaggagatttgggtggggacacagagtcaaacc

SEQ ID NO: 795623 - DNA, 634 bp, Homo sapiens
tacacataagaacaaaatgtgactaaaacagtaatcccaacctactgttgcttaggcaggtcatcaaagaactctgaggtcttctctccaaatctcgtacataaggtctcaggtaattgttgccatgtggcttcggtccaatcctccttatcaaggggaaataaatcttggggtatttccttgtatgggctatgatcarcaccacatatgagagaaacagctaagaatattgttctcctgctcctgagataaaaatgacaactcccagtggccgggtgcagtggctcacgcctgtaatcccagcactttgggaagccgaggtgggtggatcatttgaggccaggagtttgagaccagcctggcaatatagtgaaaccctgtctctactaaaaatacaaaaaattagtcaggtgcggtggcatctgtctgtagtcccagctactcaggaagctgagatatgagaattgcttgaaccttctaggctgaggttgcagcgagctgagatcatgccactgcactccagcctgggtgacagagtgagactcgatctaaaaaaaaaaaagtcaccttcctttccaggtattatttcccattttatgatctctttccatttattacctgtcttgatccagac

SEQ ID NO: 795624 - DNA, 634 bp, Homo sapiens
tacacataagaacaaaatgtgactaaaacagtaatcccaacctactgttgcttaggcaggtcatcaaagaactctgaggtcttctctccaaatctcgtacataaggtctcaggtaattgttgccatgtggcttcggtccaatcctccttatcaaggggaaataaatcttggggtatttccttgtatgggctatgatcaacaccacatatgagagaaacagctaagaatattgttctcctgctcctgagataaaaatgacaactcccagtggccgggtgcagtggctcacgcctgtaatcccagcactttgggargccgaggtgggtggatcatttgaggccaggagtttgagaccagcctggcaatatagtgaaaccctgtctctactaaaaatacaaaaaattagtcaggtgcggtggcatctgtctgtagtcccagctactcaggaagctgagatatgagaattgcttgaaccttctaggctgaggttgcagcgagctgagatcatgccactgcactccagcctgggtgacagagtgagactcgatctaaaaaaaaaaaagtcaccttcctttccaggtattatttcccattttatgatctctttccatttattacctgtcttgatccagac

SEQ ID NO: 795625 - DNA, 605 bp, Homo sapiens
aacacacacacgaaagaatacagtctttataaaagtagtttagaaaagtcactaatccaacatcagtgatcattagagaaatgcaaatcaaaaccacaatgagataccatctcatgccagtcagaatggtgattattaaaaagtcaagaaacaacagatgctgatgaggctgtggagaaataggaacactttacattgttgctgggaatgtaaattagttcaaccattgtggaagacagtgtggcaattcctcaaagacctagaaccagaaatatcatttggatcagcaatcccattactggatgtataaccaaaggaatataaattgttctgttataaagatacatgcgtgtgtatgttcattgcagcactactcacaatagcaaagacatgtaatcaacccaaatgctcatcagtgatagactcaataacaaaaatgtggtragtatacaccatgaaatactatgcagccataaaaaggaatgagatcatgtcctttgcagggacatgggtggagctggaagccaatcttcagcaaactaacacaggaacagaaaaccaaataccgcatgttcttacttataagtgggagctgaacaaagaga

SEQ ID NO: 795626 - DNA, 513 bp, Homo sapiens
catttagactatttacattcaacattagtattgagatgtgagatgctattctattcatcattctatttgttgcatgaaatccttgtttttgtttttcattgttttgttgtttaataggtcctgtgagatttatgctttaaggagattctattytggtgtatttttataatttgttttaagatttgagctacttttagtagttcttgtagtgttggcttggtagtggtgaattctcttagcatttgtttgtttgaaaaagactgtatttttccttcatttatgaatcttagtttcactggatacaaaattcttggctgataattgttttgtttatggaggctaaaaataggaccccaaactcttctagcttgtagggtttcttctgagaaatctgctctgttagtctgataggttttcctttatagattacatgatgcttttgcctcgcagctcttaagattctttccttcatcttgaccttagataacttcatgactatgtaccaaggcaatg

SEQ ID NO: 795627 - DNA, 589 bp, Homo sapiens
catattaactgaatgattagaaaatcagtactacttttctgtatttctaatgaactttaggcctattactgacattgtcaacaggtagcaatttaacataaaaagtgattattttttattctatattatagattcttcatgctctcaacttcccccaaatagaattattttcaagaaatataccttttgaatttttgttactataacagaaaaatcaagactaaaggcaatggaggacattttccatgtagtcccatttgtagcttagagtacaaataattatgatgaaagttagcttaaaatacaagtataatagttatgatggttatatgtctatatttatatctctatatatttgtgtgtatatccagttttcttattcaatgaagatagggattgttttgttgtgtattttatgtatttttactttttggtggtyattttaccttctaaaactgatggagaatcaataaagataagtagttaatcatttatgaaataaagaatatgttagagtaaattagggatgtcttggcagatataccatagaaggtacagttgtcatctgtttttagtgataaaaatgaaa

SEQ ID NO: 795628 - DNA, 615 bp, Homo sapiens
ttgcttatcagcttaataagcttttgggttgagactatggggttttctaaaaatatgatcatgtcatctgcaaacagggataattgacttcttctcttactatctgaaagttctttatttctttatcttgcctgattgccctggccagaacttccaatactatatttaataggagtagtgagagagggcaaccttgtcttgtgccagtttccaagggaatgcttccagcttttgcccattaagtatgatattagctgtgggyttatcatatatggtgcttattcttttgaggtatgtttcttcaatacctagtttattgagagtttttaacatgaatgaatggtgaattttattgaaagccttttctgtatcttttgagataatcatatggttttggcctttagttctgtttatgtgatgaataacatttattggtttgtgtaggttgaaccaaccttgtatcccggggatgaagtctacttgaccgtggtggatacgccttttgatctgctgctcaattcggtttgccagtattttgttgaggatttttgcatcaacattcatcaagaatattggcctgaagttttttgttgttgttgttgttgtatatctgcc

SEQ ID NO: 795629 - DNA, 645 bp, Homo sapiens
aaagcctccaggtagcaggcttcagaaagaatagattgtaaatgttttttatcagacttaaaaaggtaccaaactcagttaattctctcccggatcaggaagaagacctggaaataaaaggagattttctgtagaaggtagattttcccacaagagacagctttgcagggccatttcaaaatatgtttaagaaatwtagccaggcacgttagctcatgcctataatcctagcactttgggaggctgaagcaggtagatcacttgaggtcaggagtttgagaccaacctggccaacatggcaaaaccacgtctctacaaaaaatacaaaaaaataagccaggaatggtggcgggcacctgtaatcccagctattcaagaggctgaggcaggagaatcacttgaacctgggagacggaggttgtggtgactgagccaagatcatgccactgcactccagcctgggcaacagagggagacttcatctcaaagaaaaagaagaagaaggagagaaaagaaatatcttttgaggtaaaatatttttatttcttttagggcttgctgtctgtcatgttggtatcttaatggctaccaagagtctgtttcatcagtcgtaaggtctctgttttaatgttaaatgctggtcag

SEQ ID NO: 795630 - DNA, 508 bp, Homo sapiens
gttgatgggcttagaattttacttttgatttacatagttaatgaaccagaaaggaagatgaaatgtaataaaaatgtttgatccaaatggaagaaaagaagaaaaaagaacaaaaaatcaaaattatcgactcaaacctaactatataaataatcatattaaatgtaaatggtttaaacacctcaattaaaagtcaggaattgtcatataawttttttaggaagacccgattctatgctgcttacaagaaatacactttatatataaagaaacaaataggttaaaaaatacataccatgttaacagaaatcaacagaaagctgataaatctagccagattaatcaggcattagaagaaaaaaatgccagtagcaggaatgagaaaggtgacatgattttaggttttagatgttaaaagaatcataataaaatattatatataacttcatgtcaatgatttccacaattgtcataaaatagatgaactccttgaaatacacaaactacc

SEQ ID NO: 795631 - DNA, 508 bp, Homo sapiens
gttgatgggcttagaattttacttttgatttacatagttaatgaaccagaaaggaagatgaaatgtaataaaaatgtttgatccaaatggaagaaaagaagaaaaaagaacaaaaaatcaaaattatcgactcaaacctaactatataaataatcatattaaatgtaaatggtttaaacacctcaattaaaagtcaggaattgtcatataaattttttaggaagacccgattctatgctgcttacaagaaatacactttatatataaagaaacaaataggttaaaaaatacataccatgttaacagaaatcaacagaaagctgataaatctagccagaytaatcaggcattagaagaaaaaaatgccagtagcaggaatgagaaaggtgacatgattttaggttttagatgttaaaagaatcataataaaatattatatataacttcatgtcaatgatttccacaattgtcataaaatagatgaactccttgaaatacacaaactacc

SEQ ID NO: 795632 - DNA, 627 bp, Homo sapiens
ctttaaagtgtacaggtcagtgacttcaagcaaccacagatcaaaactattcagggaagaaatattgcactttcattcaacatgtatagacatttttttcctgtcactattccctgaacaatatagtataacaactatgtacatggcatttacattgtattaggtagcataattaatatggtgatgatttaaagtatrcaagaggatgtgcataggttatatgcaaatactatgccattttgtatcaaggacttgggcatttgtggattttggtatttaagagaatcctggaaccaattccccatggataccaggggatgactgtatatgcagacatcaccacagttaattttcatcacctcaaacatacctgtaccctttagttatcactgtcccatcccccctgccctctgcagccctaggtaaccacagtctacttctgtgtctataaatatgcctattttagacattttgtataaattggatcatatatgtggtcttttgtgattggtttattttgcctagcataatgtttacaactgatataaaatacatgtttcattctttttatggccaaataatgtcccgttgtatggatgtaccacctgtttgtccatttatcagtca

SEQ ID NO: 795633 - DNA, 627 bp, Homo sapiens
ctttaaagtgtacaggtcagtgacttcaagcaaccacagatcaaaactattcagggaagaaatattgcactttcattcaacatgtatagacatttttttcctgtcactattccctgaacaatatagtataacaactatgtacatggcatttacattgtattaggtagcataattaatatggtgatgatttaaagtatacaagaggatgtgcataggttatatgcaaatactatgccattttgtatcaaggacttgggcatttgtggattttggtatttaagagaatcctggaaccaattccccatggataccaggggatgactgtatatgcagacatcaccacagttaattttcatcacctcaaacatacstgtaccctttagttatcactgtcccatcccccctgccctctgcagccctaggtaaccacagtctacttctgtgtctataaatatgcctattttagacattttgtataaattggatcatatatgtggtcttttgtgattggtttattttgcctagcataatgtttacaactgatataaaatacatgtttcattctttttatggccaaataatgtcccgttgtatggatgtaccacctgtttgtccatttatcagtca

SEQ ID NO: 795634 - DNA, 563 bp, Homo sapiens
aggaaaatcgcttgaacccaggagggggaggttgcggtgagcccagatcttgccattgcactccagcctgggctacaagagcaaaactccatctcaaaaaaaaaaaaaaagaaactagaaaagaaaataaaaccaacagtaagcagaagaaaggaagtaaaaagcatcagtgtagaaatcaatgcaatagaamacaggaaaaatcatttacaggaaataaatgaaaccaaactctgtctctttgagaaggtccatagtattgataaacttctattcaggcttatcaggaaaaaaagagagaatacaaaaacaacctatcaggaataagagaagtaacataactacaccattcaacagatgctaaagagatacatagatggtaatatcaacaacattgtgccaacagatttgacaacttagatgaagtggacaaatgtctccaaagacacaattatctagtcttactcaaaaacaaacagacagaatagcccggtatctattaaagaaattgaagctgtaatttaaaacctttccacaaagactccaatgctaggtctaaatgg

SEQ ID NO: 795635 - DNA, 645 bp, Homo sapiens
agatcacatgctaggccaaaaaccaaacctcaaaaaaagtagaaaatgattgttctttgatcaaagtggaattaaattagaaattaaaaacagaaagaactttgggaaaagcagaacttataaaaattagctacatacttctaaataaccaatgagtcagagatgagatcatgatgaaaaataagcagaagaaaggatataataaacactgaaatagaaattaaagaaatagaaaaaatggtagagcaaatcaacaaaaccaagagttgggtctttaaaaagattaacaaaattaacaaactttagctacacttacagggagaaagaaagattcaacttactaaaattaagaatgaaagagggacattactattgaccttatagaaataaaaagaactattaaaggtactatgaaaaaaagaatgtcaacatattagataatgttgaygaaatgatatcatttctagaataatatctaccaatcatttaaagaagaattagtgccattcttcacaagctcttaaaaaattttaatatttattacagaattacttataatagccaaaaagtaaaaacaaccccaatgttaattaactgatgaatggataaatacaatatggtgtatcatatatcgtatatatgata

SEQ ID NO: 795636 - DNA, 624 bp, Homo sapiens
aaaataagaccaaatcaagaagcagcatattctggtataactttcaaattatcctttaaaaatagtcataagttcagaatctggtgtacaaattctatattatgtctccttacctttgaaatgcatttttttttttttgagagacaatctcgctctgtcgccaggctggagtgcgatggcaccatctcggctcacggcaacttccgcctcccgggttcaagcaattctcctgcctcagcctccggagtagctgggactactggaacgcgccaccacatccagctaatttttgtatttttagtagagacggggtttcatcatgttggccaggatggtctccatctcctgacctcttgatccgctcgccttggcctcccaaagtgctgggattaaaggcgtgagccaccgcgcctggcctaaaatgcgtttcttttccttgatataaatgtattatctgyactactatgaatactgaaatgccataattgaggctttttttttaactttgcaaatggaataaaggagagaaggaaggatgagagtctcctgagatatttagataaatgttagagaaaagaaaagattcaagttgatattctgataaacctgataaatcacatggac

SEQ ID NO: 795637 - DNA, 561 bp, Homo sapiens
taaaatgaacactgatgtacacattacctgcctaagaatcaaaaactacccatatttttagagtccttaacactgtcctgttaattagtcccatttcttgtctttataattttgccaaaataaatgcattagtaaaggacattgaacattattgttttacatgtttttcagtttaaacaaatgggatyacactgaatatatttttctgaaattgctttttggttcaatattaaatttgtaagattcattcttatgatattcttatctgtactttctgtgcattgatttagagtattccttcacaggataatactataatgagcattccattttattagattggggttattatccatttttttctgttacaaaaagtagatgtccttttcttgtatgagtctcctggacataagagttagattttctctaaggtataaacccaacattcaaatcattgtgtcaaaagatttgtacactaagttaaaatgaactgttttccgatttatgctcccattagaagttaaaggttctgatagatctatattctcaacaatacctaat

SEQ ID NO: 795638 - DNA, 472 bp, Homo sapiens
gtatccaaattctcctttattataagacaccagttagtctattggattaggacccaccctaatgacctcattttaacttgagaacctctgtaaatgtgctatttccaaataagatcatattattttgagatattggggattaggatttcaaayatatctttttagggggacacaattcacctccttcaaagcctgtcagtgactgctcactgtgcatctgctagttcgcacacagacagcagagtctgcaatcgtgttgactccttgtctcccagtgagaaacccatgtgacatttataaatatgaataatcagaagaaaaaactggtcaacaaccattgatgtgcggcaaagaaataaaaaatgtgataaccctggaagtgtattcaaatacaatgtaaatggaatcatagaattggctcaccacaggaaacgcagcaagaggaacttggcgcaacgcagtgttctgacat

SEQ ID NO: 795639 - DNA, 472 bp, Homo sapiens
gtatccaaattctcctttattataagacaccagttagtctattggattaggacccaccctaatgacctcattttaacttgagaacctctgtaaatgtgctatttccaaataagatcatattattttgagatattggggattaggatttcaaacatatctttttagggggacacaattcacytccttcaaagcctgtcagtgactgctcactgtgcatctgctagttcgcacacagacagcagagtctgcaatcgtgttgactccttgtctcccagtgagaaacccatgtgacatttataaatatgaataatcagaagaaaaaactggtcaacaaccattgatgtgcggcaaagaaataaaaaatgtgataaccctggaagtgtattcaaatacaatgtaaatggaatcatagaattggctcaccacaggaaacgcagcaagaggaacttggcgcaacgcagtgttctgacat

SEQ ID NO: 795640 - DNA, 472 bp, Homo sapiens
gtatccaaattctcctttattataagacaccagttagtctattggattaggacccaccctaatgacctcattttaacttgagaacctctgtaaatgtgctatttccaaataagatcatattattttgagatattggggattaggatttcaaacatatctttttagggggacacaattcacctccttcaaagcctgtcagtgactgctcactgtgcatctgctagttygcacacagacagcagagtctgcaatcgtgttgactccttgtctcccagtgagaaacccatgtgacatttataaatatgaataatcagaagaaaaaactggtcaacaaccattgatgtgcggcaaagaaataaaaaatgtgataaccctggaagtgtattcaaatacaatgtaaatggaatcatagaattggctcaccacaggaaacgcagcaagaggaacttggcgcaacgcagtgttctgacat

SEQ ID NO: 795641 - DNA, 472 bp, Homo sapiens
gtatccaaattctcctttattataagacaccagttagtctattggattaggacccaccctaatgacctcattttaacttgagaacctctgtaaatgtgctatttccaaataagatcatattattttgagatattggggattaggatttcaaacatatctttttagggggacacaattcacctccttcaaagcctgtcagtgactgctcactgtgcatctgctagttcgcacacagacagcaragtctgcaatcgtgttgactccttgtctcccagtgagaaacccatgtgacatttataaatatgaataatcagaagaaaaaactggtcaacaaccattgatgtgcggcaaagaaataaaaaatgtgataaccctggaagtgtattcaaatacaatgtaaatggaatcatagaattggctcaccacaggaaacgcagcaagaggaacttggcgcaacgcagtgttctgacat

SEQ ID NO: 795642 - DNA, 506 bp, Homo sapiens
ccactaaattgtccataattaggaagtctgacaatgccaatattggagagaatgtacatgaacaagaatttactgatttgggtgaatcatacaatttctttggaagacgttagtattgctgcacaatattacatattcacatatccgtttgcctataaagtgtacatggacacaaaaagataagtacaaaatatttatagcagcctgctaatttttttaaatagaaaaatccctaagaaccatctttcatgcgcatccatgtgaagasaccaccaaacaggctttgtgtgagcaacaaggctgtttatttcacctgggtgcaggtgggctgagtccaaaaagagtcagcgaagggagataggggtggggccgttttataggatttgggtaggtaaaggaaaattacagtcaaaggggggttgttctctggtgggcaggagtggcggggtcacaaggtgctcagtaggggagcttttgagccaggatgagccaagagaaggaatttc

SEQ ID NO: 795643 - DNA, 626 bp, Homo sapiens
atgacctatcagtaaatctcagtaagatccaattgaggagccatgccttagatagtaagattttgcaacctttgtttagaacgtttgcttaaaatgtttgttctttcttttattccccctttaatgaaagtcaactcacatctatttaaggaaaaagttgtaactctctgatatttcataaccaaacaggtttcattttcaattttaagaactctgctcccttaattataaatgttattggctcaagaagattttgcaacattagaagtcaaaacagcaaatgagagtccaaaataactgtttgagtgacagaacaataagacatttttaaaggcatggggattataagatatgttattataacatgatataatatgtaataatatggtattaatatattaattaatataattaatagatacgggaaaaagtcaaggagaaaatatatttaaatrtcaccattcttgaatgggaaaatttgaaaacaactttatatatttttttgccagggtatacttgctaaattttgaatatagattatttttcttcataataaaatgtgttactttcaaacaattaaatgttcaagtacaaggactggagtctggatttctattgagaacatg

SEQ ID NO: 795644 - DNA, 636 bp, Homo sapiens
gttctttacaccccatttttgacccacttttgacatttctcacaccccagatttgttgtcactagagtagctttatgcccacacttatacacataaggacttatggaagttttaacccttctctaccaagcttcaagtgtcacctaagctattagtgaattgacctacactcaattatagagatacatcatgttctgcatttacctgtattcaccttctaacacagagaaaatgtaaaggacacacagaaaggagttaccacagaaaaataaaacttagagactttttacagaaccaagagtatttgactttaattatatcaatgggtaaattataaatcttgttgctaattcattcctgttccctttatcctcagaatattaaaagggagtrtctgtatattcaacatagcaaatgtgttcatttctggaaggtttctcagacccaactggagttcaagacagaaataagtagatagcatcgcaggcctggatgcaatctcagttttaagacaagaacagaaaatgatttcaacttatattgccaactgtgatcattcaaacttttagttgctcttgctacatcccagctcattatgaaatagtatttatgaatactaatctatttactagatat

SEQ ID NO: 795645 - DNA, 646 bp, Homo sapiens
gttagcctgaaggagaagaagaatcattaccacaaccgacagacagagaaatacaagtggaggaggactctgaacaggagtagcctctctggcaagggacccagtcagcctaaggccgtcctgcacagagggagccaggagctggactaaccaagtaatttgtgggtgcaaaatgaaaatgaggggctccttgttaaaaactataaagaattttaagatggtaccagcagagaattaaaccaagcaaggagcccttctgagtgtgaggaggccytgaaagactgcacaattctaacaaacccatgaagccaggcttgggccagagaagaaaacaaacaaacaaacaaaaaccaaaaaataacacacccaaagcttcactttcttctctcagaatcctttctgttgttccaacttgctgaatggagtgaggatccaggaggcaagttaacccatttatgtaggcaggccaacatgctgagacagagtgggaagcggggatccagagggacagagatgacattcaatacatccagtcttttcaatcagcgaaagctgtttatcaaataccagtttaaaaaatttcacaatcccattgcaagtggtgaagaattgacttctgtagatctgcttgaaataaatggaaacg

SEQ ID NO: 795646 - DNA, 600 bp, Homo sapiens
ttctctgcgtccttcatggagatttcaaagctaatgcattggacgaaagagcgaaggaggagtggataaaaaggatgtgggcagaagggaaaaataaagacagaaaacttcaaatatccttcaacaggtgaatgggtaaaacaactgtgatgcctctacacataggctactataaaatgaatgaactactgataaattcaacagcttgagygaatctcaaaggcattatggtaggtgaaagaagccagacccaaaaggctacacactctatgatttcatttatatgactttctgaacaaggcaaaactataaggatggacggcagaatagtggtttccaaggctgattacttttgattacaaaagtagatttgggggatgatggagctgttctttactctgatggtggttaatactatacatttgtcaaaactcatggaactgtacactaaaaatttaaatcagctttattgtatgtgaataataataataatgctagaagtaaaggggagtagaaagggaagataaacgaaattaagacaaagaatttaaatctgctttggaaggaaatcatgcagtatctacatcatttaaagtgggc

SEQ ID NO: 795647 - DNA, 636 bp, Homo sapiens
ttttctctctcttttttccaaaaagaatgaaaaatatgttgtagacatcatgttacttcccctgtaatattttggcatgtttcttctaagaatgaggacatatataaacaataagtaaatgaatgtattatataaataatacattctcctataaataataaataaatacatttcacaataaatacataatcaggccattaaaatctctaagaaaattaatcaatgatagttgcataatataatctaatacccagtatcctcaatattctctaaaattttttcatcattgtttttcctttccagggtgaaatcaaaggccacatattgattttttttttttttggtccttctggtctcttctgcccagtgtccctctttccatcattctctstcaccatttacactcatcgtttccccctgtactcatcttgagggtttctgaattgttcttatacctcatgtttccattcacctatgagctattccctttgcctaaaatacttccttttcttctatgctcctggcttaaccatttcatcagttatcagctcaaatcttacttcttccaggaagcttttagtgaaatacctagattaggtcagatactacaactgtgtactcccatttccctcttta

SEQ ID NO: 795648 - DNA, 621 bp, Homo sapiens
caaatgtttcctgcttgggtctggctggccctttgagctaataaggttcccctctagctggaagagaagcctgaagcctccaagtgatattttaattcaattagtgtcttaccaatttgatgcagcaaccaaggacctatggtgtctgattaatatgctgatgctaagacacaagagtgaacagaatgccyatttggataaggcctggcagcaaagcgtggcattgctatggaaaccacagaaggacattaattagctatcaaataaaatcattggaaaattctggaccctggcacatctgcccccttcaaagagaagggcaagaagaggtcacactaacagcaaagctcccttcagtgattaaaatcaaagttacatgtagtccagagactacatgttgcaaagtggaagaaagatgggggagcaaaacgggtgaacacaataggaatgaggctttgggattattcaagtccaagaatataatttggaatgtggagtatcttgttgggttgtctgtattgataaaatgatccaaatgacaaatatgttatcctatactctgttatgtagaaagaaaatgataataatgatacggatccatccactagacggtgataaatg

SEQ ID NO: 795649 - DNA, 594 bp, Homo sapiens
  misc_feature 581: n = A,T,C or G
aaaactgtctactcccaggagagtatgtgaaataaaagttaaaaatgtgaaccatctcgaagcagagataatgaggaaatttcatcttgcaatgatatatttaagaagttattcaagaactgttccttggaaccaggtctctcttatgataaaaaaggagagcttaaagcaccatgtgaattatttaaaataaaagtgctgcatatcctgtaaactaagtgtttgggataatccaagatgggataccyttagagaagagataaatcagatgagatctctaaggtctgttttttttttttttctttccttctatctcaaatttctctctacctttgattcctcaaggtgaaattaactagactatttggtgatttggaaaatacaaacgcagccaaccacatgttgtgcaattcaagtgttccaaggatctttaggtctagaaaaacatttaaagtctatctagcagttgcttatcattttttattgaataaccgaagtcagagtggataggcgtcttgaccaaaatcgtggatgaattaatgacaggcacaagggtagaacactctgtctggtgagttccnccgtcctcttgtg

SEQ ID NO: 795650 - DNA, 631 bp, Homo sapiens
caggtactatgctgggtgataaaattgtttgtacaccaaatctcagtgacatgcaatttatccatgtaacaattctgcacaaatattccttgaacctaaaacaaagttgaaaaagaaaaaaaaaattaggtacaataatgaatatgtattaagaaagaaaaaataaatcatgataaactacaaaaaaacaagttgggacaccaagcgtttacatttgcatggcaagatagaaacatagacacaactttttgccattggtggtaagttccaagtggaaattcttaaactccttgccaaatttaatcttgaatggggtatgtaacctgaggtatggggcatagggcagtcattctttacatgagcgttctgagcayattggctacaactcaggctctttaggggccagtaaaaatattaatcaggatttatgtgtgtccacatgtgtaatatatcatttgaaaatctacagcccagttttacttttctattccttcttaacaatgcctattacaaagggctatacaaatttctcaggaaaaacaaactaaaaagctaatctattaatgcaccactctgattttccctatgttgtattatttaggctggttagaatcaagatgcgtaagatgtc

SEQ ID NO: 795651 - DNA, 611 bp, Homo sapiens
tcacatacatcattcccacttgatgataggatgcctctccaactatatactggagtgtcagactgcactctgctcatgagttccctggtcaaaagcactgctgtgtgcaatgccataatggtaacaaagtattctgtaaatctgcagattacagcctgtaatcaagcatttagtccctattagggctgagtagcaagccagcagctctttctcaaaagaatagttaactgcagaggatggcctagctttacttctaaaccttaaaagtcttcactgtgattttcgtagacaggagcaaaggctccacacaacttccctatctggcagtgaagctcccttttttcaayctacatgaaagaacacacctttccaagccatcttctttatgcaatactgttctgtagaactttattgctctcactgtggcacctacttccagtggggagctgtttcctactcctctgctatcacagaatggaaaagccacttgggaaaactgtgcagtagaatgaaacccagtgatcacactttgctagaatagacaggagaggaggaaacagggaaagagcttttcttaaaatagagtcttctggaatctgtaagtcctctga

SEQ ID NO: 795652 - DNA, 543 bp, Homo sapiens
agatgtatgcttatcacatttaaaaaaaactctcaaatgttttctatgtttgtattctcatcaatggtatatgagcatcctaaatttttgccagagcttggaagtggtatatgagcattgtaaatttttgccagagcttggtattgtcagtctttttaattttaacaagcctaacgtgtatcagtttctttgatggttttagtcataatttcctcaattactaatgatgttaagcatcttcatgcatttgctggttatttatacctcttgttttttggtgtgtctgttcaatctttaattgagtcggatgtcttcttatyaggttgtaagagttctttataaacttatgaaacaacttcctattttaggtatatattttgtgaatcttttctctctcagagtcctcgccatttacaccatggaaccactgatggttcttataacacattttggagagagactatgttgatggcaaagtaaaaaaagttaacagtacattattccaaaattaaatttcaaaagatgcattattcatttattagg

SEQ ID NO: 795653 - DNA, 543 bp, Homo sapiens
agatgtatgcttatcacatttaaaaaaaactctcaaatgttttctatgtttgtattctcatcaatggtatatgagcatcctaaatttttgccagagcttggaagtggtatatgagcattgtaaatttttgccagagcttggtattgtcagtctttttaattttaacaagcctaacgtgtatcagtttctttgatggttttagtcataatttcctcaattactaatgatgttaagcatcttcatgcatttgctggttatttatacctcttgttttttggtgtgtctgttcaatctttaattgagtcggatgtcttcttattaggttgtaagagtyctttataaacttatgaaacaacttcctattttaggtatatattttgtgaatcttttctctctcagagtcctcgccatttacaccatggaaccactgatggttcttataacacattttggagagagactatgttgatggcaaagtaaaaaaagttaacagtacattattccaaaattaaatttcaaaagatgcattattcatttattagg

SEQ ID NO: 795654 - DNA, 585 bp, Homo sapiens
aattgataagatgcacagaaacagaacttccagggaagcttcctggaaaatctttatgcttagacggaaactctgatatgaatgccaccacagtattcataggatcaggatggctgggcagccatctcccccaagacctgccaagaccgtgtcatttccttatgtgatgctgacagtcttagctctggcccttaatacccaacacaaggtggccatcctggacaaagcatgtgtctaggctcctgctggcccactcaccatcattccactatggccaagtaatcattcccaaaggacagatcctgccactgtcctatttaagaatcacatgctcattcccaggccccayctggcctttgaggctctccaacagtgcctgtggcaccacacaaccctccagactccccgaggatgctcaggccaatcctcccgtccccagtgtgcttagtcctagcttggacctttgaatgcttctgggccaataggtattcatctgttatttcaagaaacctttctgaggaaccatatccagctcatctttctcacactttgtatgtcctccttgcttgggtgccccatctggac

SEQ ID NO: 795655 - DNA, 585 bp, Homo sapiens
aattgataagatgcacagaaacagaacttccagggaagcttcctggaaaatctttatgcttagacggaaactctgatatgaatgccaccacagtattcataggatcaggatggctgggcagccatctcccccaagacctgccaagaccgtgtcatttccttatgtgatgctgacagtcttagctctggcccttaatacccaacacaaggtggccatcctggacaaagcatgtgtctaggctcctgctggcccactcaccatcattccactatggccaagtaatcattcccaaaggacagatcctgccactgtcctatttaagaatcacatgctcattcccaggccccatctggcctttgaggctctccaacagtgccygtggcaccacacaaccctccagactccccgaggatgctcaggccaatcctcccgtccccagtgtgcttagtcctagcttggacctttgaatgcttctgggccaataggtattcatctgttatttcaagaaacctttctgaggaaccatatccagctcatctttctcacactttgtatgtcctccttgcttgggtgccccatctggac

SEQ ID NO: 795656 - DNA, 575 bp, Homo sapiens
tgctggtgaactagtgtgattttttacgggtgttgaagagtcttgctttgtcatattaccagggttggttttctggttccttctcatttgagtaggctctgtcagagtgaaggtctagagctgaaggctgtagttcagattcttctgtcccatgggacattcctyaatgtagtactctcccctttttcctatggatgtggcttcctgtgagccgaactgcagtgattgttgtctctcttctgggtctagccacccagccagtctacctggttctgggctggtactgggggctgtctgcacagagtcctgtgatgtgaaccgtctatgggtctctcagtcatggatgccagcacctgttctggtggaggtggcagggggtgcaatggactccgtgagagttcttagctttggtggtttaatgctctatttttgtgctggttggcctcctgccaggaggtggcactttccagagagcatcagctgtagtagtgtggagcggggatcagcagtgggaggggccctagaactcccaagattatgtgttctttgtcttctgctacctgggtgggtagaga

SEQ ID NO: 795657 - DNA, 628 bp, Homo sapiens
cctactggtggtcagggtaaatggcattgagttgagatctgaaccaggaggaggaaagatctgggacagaacattctagaacaagggcagtaggcttcagtcctaaagttaatgtgtaaaggcattgtttagagcatacagtgtggccaaaatgctggccctgartgacgttatcaagagccttttccgaggctcagaatttcatatttctcttctgttctcttcaacctgactaggctgtaacggttgtcaaatcaaggcaaacttcaacaagacaagcctggcaacaaagacgtataaagcatagaacacatataacactgattcctggaggagctgggaaggacaccctttttctttccaaacatagagcctctcttgtcacagggagactgaggctatggtcactgcttgtggcctgctaggaagtcctagacaaagaatcggtttcaggtatattgcttaccttgggctctacagattctgtgtagtgaatggggtaaaacacgaaggtgcgtggatgagcttccctgctaaaaaggaccagccctccttgaaatggattcctttccattcccacactctgcaatattgtgattgagtcatgcagcaattaaagagaaaaatg

SEQ ID NO: 795658 - DNA, 512 bp, Homo sapiens
agaagcttctatccttctctttcctgcaaggatccacaatctcctctgggcacataacagatggcagcctgggtgggaaatggcactctggggatgctcactgtcctggggcagcagggcctcctttaggcagctctatgggagccatagaggaaggacgggaaggagatgcaggagaggaaagaaatgcaggcacctggtgcccactgacgctctaacaacaaactgcaggatcgtgcaagctcctttatggagcgcatgcagtgttcaraatcatagcttgttgtgtgtgtgtgtgtgtgtgtgtgtgtgtgtgtatgtataatcaccagctggtgagacctggggtatatttatttgtgctccaaattactacctttgtacctacaagcaaccaagcacaaaacagatacccactttggtagctaatagacaaggaagggacaacaaactccacaccaaaaagtcatctataattctaaacagatttattcacagcttggtacaaagaa

SEQ ID NO: 795659 - DNA, 506 bp, Homo sapiens
tggtaactccttatccaagaatctcactgaatatttcatatgctgcctcattaatgcctgtccctgcccattgatctctggcaactctagggtattgcttactcctattttacagatgcagaagatgagggagagaaaattaaatgccttcatggagaattaatcatgcaacagaaccaagagctctaagtgttctggcttccagttcttggccttgacagtgaaactgagctttttttttttctcctaggaacagctagaactttcactttatggggctgacaaagaaaatcaccatttgctgaaaaggtagtgaaatgcytacttcttagctctctggtcaaggcaagttacttgaaagtgcttaaaggaggttgatgtaagacagatccaaccgttttgtctcaattgcagtggtggctcagccacaactaaccaaaaaaagtgggggagcaaaatctaaacctatgactgaactgaattccctgtttctttgattgaattta

SEQ ID NO: 795660 - DNA, 634 bp, Homo sapiens
aacataagtgagaccatgtagtatttgtccttcagtgttgggctttttttgacttagcataaccgactccaggttcatccatgctatcaaaaagggcaggggctgggtgcagtggctcatgcctgtaatctcagcactttgggaggccgaggcaggcagatcatgaggtcaggagtttaagaccagcctggccaacatggtgaaacctcgtctctactaaaaatacamaaattagccaggtgtggtgggcgcctgtagtcccaacaactcgggaggctgagacaggagaattgcttgaacccaggaggtggaggttgcagtgagctgagatcgcgtcactgcactccagcctgggtgacagagcaaggctccatctcaaaaaaaaaaaaaaaaaaaaaaaagaaggcaggatttccttcttttcaaggctgagtagtatttcattatatgtatataccacattttctttattcatttgttgatggacattcaggttgcttccatgtcttggctgttgtgaataatgctgcagtgaacactggaatgcagatatctttttgatatcctgatattcagttcctctggaaaagagcaagaattaacagggaaaatatttcaagaacccaatgggcag

SEQ ID NO: 795661 - DNA, 634 bp, Homo sapiens
aacataagtgagaccatgtagtatttgtccttcagtgttgggctttttttgacttagcataaccgactccaggttcatccatgctatcaaaaagggcaggggctgggtgcagtggctcatgcctgtaatctcagcactttgggaggccgaggcaggcagatcatgaggtcaggagtttaagaccagcctggccaacatggtgaaacctcgtctctactaaaaatacaaaaattagccaggtgtggtgggcgcctgtagtcccaacaactcgggaggctgagacaggagaattgcttgaacccaggaggtggaggttgcagtgagctgagatcgcgtcactgcactccagcctgggtgacagagcaaggctccatctcaaaaaaaaaaaaaaaaaaaaaaaagaaggcaggatttccttcttttyaaggctgagtagtatttcattatatgtatataccacattttctttattcatttgttgatggacattcaggttgcttccatgtcttggctgttgtgaataatgctgcagtgaacactggaatgcagatatctttttgatatcctgatattcagttcctctggaaaagagcaagaattaacagggaaaatatttcaagaacccaatgggcag

SEQ ID NO: 795662 - DNA, 635 bp, Homo sapiens
tcctacaactaggcagtcccatcacgggggtgatgggagaccgttactgatcatcaggcattagattttcataaggagtacgcaacctagatccctcacatgtgcagttcacaatagggttcatgctcctatgagactctaatgccactgacaagaggcagagttcaggaggtaatggccacctaccccttacctcctgctgtgcagtccatggcctggagattgggaagccctgctactcctgtcacatggtaacgtgacactgcattctttctactacattctttctactcctagttatctataggagctatctatctcctatatatagataaccctccaccagctttatattcaaatcttcacaaagtctcttattaaagggaaaaatctctccattgctttattttgaataataaattactaacaggcttgagttcaaatcctggctccatatttatctgctgtycaagtcatttaatctccttgccttggtttcctcaactgtaaaaggaaaataactgatagcacctatgtcaaaattaagtgtggggttcaaatgaatcaaagcactctagttatatcactgtgccaggtaagtaaactgtgctcgctgctatcataaaaacagtgtc

SEQ ID NO: 795663 - DNA, 611 bp, Homo sapiens
gcacaccagcctgtgcaacagagtgagacttcatcttaaaaaaaaaaaaaaaaaaaaattttaggttttcaaagtataaagatgaataacatttttgaaaaaaaaattaccataattatagctgagactaattttttcagttttattttcttaaagcattttataagcatttatatgctttagagccactttttttcaaaccctgggccctgtgtaagtgagtcatatcatctaaggcacagctcatatgtcagcttttctaagtcttttctaactcccacaagtagcgttaatacctctgtcttttgtggcacttaccaggttggattttgaaatccttaaaatgtcagttttctccrcttatataaatttttccagggcagcagccctaatttattcatgtattcccaatgatcggcatatactaagcttagcgttctgtagatgcttgtggaatgatgaaaaccggtaaatgaaatgaaagttgtaataaagttcagattgtttaatagtttgcttgttttggaataagcaaatacattagctgcctttggcaatatttttattgtacagaaatttctgaagtgctaatcgtaatgtgaattggctta

SEQ ID NO: 795664 - DNA, 565 bp, Homo sapiens
agcaaagagactggtgacattttgcccctgccctagagatctgtggaactttgaacttaagagagattatttagggtatctggtggaagaaatttccaggcagcaaagcattcaagatgtgacctggattattctgaaagcattcagttgtatgtgttcacaaagaggtggtttaaaatttgaatttatgtttaaaagggaagcagagcattaaagtttggaaaattygcagcctgacaatgcaataaaaaagaaaaaccaattttctggggagaaattcaagctggctgcagaaatttgcatgagcaacaaggagccaaatgttaatcccaagacaatgggaaaaatgtctccagggtatgtgagagaccttcacagcaggtgcttcccgtcacaggcccagaggcctaggagggaaaaatggttttgtgggctgggcccagggtcccctgctctgtgcagcctctggacatgtgccctgcatcccagctgcttcagctccagctgtggtggctaaaaggggccaaggtacagctcaggccattgcttcagaggtgcaagcccc

SEQ ID NO: 795665 - DNA, 601 bp, Homo sapiens
accgtgcccagcctccagcagttttttttaataaagaaacttctaacaagatctaaataagtttcccttggaaagtatatggctatgattaattcttttgcttacaattatgatttctacacacctattatacatactcagaaattttgcaaaatgaaaaaaatctgacctagaaatggcttcaaatgtaatgatattaaaatttgaatatcaaattaaaagttattaaagttgacaaaatgctgactttgcatacttttaaacacttattaatttcagcatgcagtttcttgtattttgaagccgatacatttattcaggtcttaaacatctgagaagcttgtaggccctggcagagcccaagataccaaatggctaattggcctactcccactaaagggaagaccaccatcgctttcacctggaccattcctaaccrgcctgcctgcttccttgctcaatctaattgttctcttgcatcaaatgattttttttttaaaagataacgctgtgctcttgcgggcacataaacccacataaacccttcaatggtttcctagagcatatggaataaataaaaaccacattcttcaccatggcc

SEQ ID NO: 795666 - DNA, 621 bp, Homo sapiens
cacacctggctaattttttttgtatttttagtagagatggggttttgccatgttggccaggctggtcttgaactcctgacctcaggtgatccatctgccccagcctcccaaagtgctgggattacaggtgtgagccaccaggcccagccgaccatttgatatgtttataagtcattaaggttctaaccatttttcttcagtcttcttcctttctcttcttcaaattggataattcttttgatatcccttcaagttcagtgactttttctgccaactcaatttctaagcactattcaacaatgaaatacttttacctcttatttcattcctayagccctgtgttggggttgatagaggcttcagaaaaggtaacaggtttatcaaagttatatacctagtttgtggcagaactgaaattagaacctaacttgattgtttacaaactacagaccattttctttccataatgccatgatctttatcttctaataagttgctgtcagttaaaatgttcatactgtaactggtgtgagtggtggtcctggtagcggatgctacttaattaacaacattgtcaaattgcagaaaattgaagttcttctcatttaaaaaacggttttc

SEQ ID NO: 795667 - DNA, 658 bp, Homo sapiens
gtgaagtactgttgtacgtgagaccctttttctaggcgatatgcaaataaaaagtagtttaaaaatggttgcttactaatgtcttcttgactggtcttttgaaataagctttcttgcagggacattacattaaagataaaagctaagtgtgtctttttttttttttttttttttttttaacgaattcagttctttctgccgggctgcagtggctcaggcctgtaatcccagcactttgggaagccaaggctggtggatcacgaggtcaggagtttgagaacagcctggcaaagatggtgaaaccccttcactactaaaaatacaaaaaattagccgggcgtggtggcgagcacctgtagtyccagctactcaggaggttgaggcagaagaatggcttgaacccgggaggcggaggttgcagtgagccgagattgcaccactgcactccagcctgggcaacagaatgagactctgtttcaaaaaaaaaaaaaattctgtcttgtgcattagcagtatgattctggaataattcattttaacttggagtactgtaattgaaaagtctttaaaagaaaattaaaaaataaattttagtttggacaatagggtaagatttaaaaactctgctattgtcctatcccaaattgatggttaaaat

SEQ ID NO: 795668 - DNA, 519 bp, Homo sapiens
atgggtttgggcaggaggtatatggcaaatctctgtatcttctgttcaatattgctgtgaacctaaaacgcctctaacaaaataaagtgttaaaaaataaatggcagcttttatcttttctacccaggaataggaactgaaatatagatcaggacacagggaagagaattttattggaataagagggtagaagacagagcaagggtctagactatcaagcaactgacatataaataagatacacacatagaattagaaagatggtggtygaaatgaaaattaatagtcagattatgaaaatctttgggagctccatgtgaagtttagtttcgaattttagacaataaaaaacaaaggttccaagcagtcaagcaggctgggtgcagtggctcaagcctgtaatcccagcactttgggaggccgaggcaggcatatcatttgaggtcaggagttcaagactagcctggccaacatggtaaaaccctgtctctacaaaaaagtacaaaaataaaattagcc

SEQ ID NO: 795669 - DNA, 552 bp, Homo sapiens
ctgcaaaacagacatgcttcctgccatcaacacgttgatagacagaaggggaatacagaagagtaaacagataattccagtacaatatgacaaacgatgtaatagaagtgattccaatgggcacccagggaaagaaacttaatgcttatttctgaagaggacaagtgcaatattcactcagtttgaaactctccaaactacacataccaagagcaatrtgaacacccaaagccttgctactctaagtgtagtgcacaggccagcagcactgtatcacctggaagcatgttagaatgcagagcttcaagccccatttggctcatgtctgtaattccagcactttgggaggacgaggcaggtggattacttgaacccaggagttcaagactagcctgggcaacaaagtgggaccccatatctgcaaaagatacaaaaattagcctaacgtggtggtgcacacctgtagtcccagctactcaagagattgatgtgggaggatcacctgagcctgggaggttgatgctgcagtgaaccgtgatcatgtcactgcac

SEQ ID NO: 795670 - DNA, 515 bp, Homo sapiens
atcctattgtgaactgtccatgcaaaggatctaagttgtgtgctccttatgagaatctaataatgcctgatgatctgaggtgcaagagtttcatcctgaaaccatcccccgaccatgtctgtggaaaatctgtcttccacaaaaccagtccctggtgccaaaaaacgttggggaccactgctstagatgacctggccttgtcctacttctccaattaacatgtctctcctctctccccactgctcaccatgctcaaacattccatgctccttctcatcctgtgcaccagctattccccttgtctagaatgacccctgcccccaccctttggtcatcctatgcctagtccttattcaaatctcaacacaagccttcccttcccaaccctcccctctgttccttggtcaccctgaccattactgtgatttattttcttatattaggtatatttttagtgagtataagctccatgaaggtaagggcaatgcctatctggacggtcactgtatcccccc

SEQ ID NO: 795671 - DNA, 515 bp, Homo sapiens
atcctattgtgaactgtccatgcaaaggatctaagttgtgtgctccttatgagaatctaataatgcctgatgatctgaggtgcaagagtttcatcctgaaaccatcccccgaccatgtctgtggaaaatctgtcttccacaaaaccagtccctggtgccaaaaaacgttggggaccactgctctagatgacctggccttgtcctacttctccaattaacrtgtctctcctctctccccactgctcaccatgctcaaacattccatgctccttctcatcctgtgcaccagctattccccttgtctagaatgacccctgcccccaccctttggtcatcctatgcctagtccttattcaaatctcaacacaagccttcccttcccaaccctcccctctgttccttggtcaccctgaccattactgtgatttattttcttatattaggtatatttttagtgagtataagctccatgaaggtaagggcaatgcctatctggacggtcactgtatcccccc

SEQ ID NO: 795672 - DNA, 525 bp, Homo sapiens
aggccacatgtggcccaggatggctttgaatgcagcccaacacaaattcataaactttctaaaaatgttatgagatttttttttttttacattttttttttagctcatcagctattgttagtattagtgtacttcatgcgtggcccaagataattcttcttcttccaatgtgactcagggaagtcaaaagattggacaaccctgcactacagtgtaacactatggtctcattttgtgtgtgtgcaagtcactatttaaacaacagtcatatgaagactgaatttttaaaataattctatcaaaaacagtgtccattatgtggttctgtgctccttatagaaagacctacrtgagagctctttcatgagtacaattctagagagattgcatcctttctaacaaacttgcacacatccttttagaagctaatgacagctacatgaccctacacatttcccatcagcgctaagaagcatggagttaagttgcatgcattattaattaatagctttttatttaaagctc

SEQ ID NO: 795673 - DNA, 616 bp, Homo sapiens
gtggggatcctgccgacgcccagacatggcctttccaatcacacatttgacaagagggacataccactgggtgggtctgtggacctagtagactcattatgatctggacctgggccgggatgccttttcttagctatccctagtataattctattctaacaaggtggccatgtttgtgtccctgggtacagtatcaactcagactgtgtatttaacaatcctcaaaatgtctgggtatttctctttccccagtttatgrttacttgtataaatttgggatgtccctctggagaaagacagagggagtcattattatatatatttgttgtgatgatgttacagggtctttcctcatgggaacctaggccttccttcagacggaggctttcaggtctgcaaaatgtctcaggtccataaactgggcaagggatcataatttttttttttttttttttagtggggcagctgctttcagcctcctgatcattcatttttgatttttcagtttttggctccataaatgaaggactacctttgttggctgcccatctatctttccctgaggaacaccattctgttaaacgtcttcctagatctctgtggaccaggcccctga

SEQ ID NO: 795674 - DNA, 533 bp, Homo sapiens
tgtgaatgttgccttccatggcaaaagggagtttgaagatgtaatgagttaagaatcttgcggctgggtgcagtggctcactcttgtaatcctagcactatgggaggcggaggtgagtggatcacttgaggtcaggagttcgagaccagcctggccaaatggcgaaascccatctctactaaaaacacaaaaagaattatctgggtgtaatggcgcatgcctgtagtcccagctactccggaggctgaagcaggagaattgcttgaacccaggaggaggaggttgcagtgagctgagattgtgccattgcactccagcctaggcaacagagcgagactccatttcaaacaaaaaaagaatcttgagatggggatattatcctggatcatccaggtaggccccaggtaatcacaagggttcttataagaaggaggcaggaggtcagagtgagtagtaggagacacgggcatagaaccaggaagtttgagtgaggaaagaaaggggccatgagtcaaaaaatagaagtggcctct

SEQ ID NO: 795675 - DNA, 533 bp, Homo sapiens
tgtgaatgttgccttccatggcaaaagggagtttgaagatgtaatgagttaagaatcttgcggctgggtgcagtggctcactcttgtaatcctagcactatgggaggcggaggtgagtggatcacttgaggtcaggagttcgagaccagcctggccaaatggcgaaaccccatctctactaaaaacacaaaaagaattatctgggtgtaatggcgcatgcctgtagtcccagctactcmggaggctgaagcaggagaattgcttgaacccaggaggaggaggttgcagtgagctgagattgtgccattgcactccagcctaggcaacagagcgagactccatttcaaacaaaaaaagaatcttgagatggggatattatcctggatcatccaggtaggccccaggtaatcacaagggttcttataagaaggaggcaggaggtcagagtgagtagtaggagacacgggcatagaaccaggaagtttgagtgaggaaagaaaggggccatgagtcaaaaaatagaagtggcctct

SEQ ID NO: 795676 - DNA, 623 bp, Homo sapiens
gccaggtgagatgccccttccatgggctgagccagcaccctctgttggggaaggcccatggagaccctgtctcctacatctctgtagcttaatggtcaagggtctggcttgagccaggtgtctgacttcaagtatcccacttactagctgaaggaccttgggcaaacttttagcttcagtttcctcccccataaacgaggatgataatagtgtttacattatgctgttatggtgaaggtcagatgaattcattcattcaaagggctggaaagagtgctggcacyggtgaacacttgggagatgttagctgttccatgtactgcctcaggacccctgcacctgcacacactgagtgctcctacctgtttgctgaattttcccaatgggggaaataaaggcagtcacagcacagccttgggggtgggggctctggcttatgggttcccttctcgggcttcacatttatatagctaagaaggaccaggaccacacctgccctctctggtccctcctgaggaaatggtagggggatatcctcaaagcccccctcccaattttattcctataacagcctggcccagcccagccctgccatggaaggagccggcgatgtggtcacgaca

SEQ ID NO: 795677 - DNA, 622 bp, Homo sapiens
caccagctggagaataacggcatttttttcaaagccagggctatgcttggatgcaacagaaacgtggccggtcagccagccctggagctgtccaggtgttagatgctcacctgtgtgacaggctgaggagggattcaagcactagagggccscttctaacccagagagtctgcacttttgttctcactatcacagttatgtacattctaatgtgctgtcacagcctcatctgtttcctggagaatgtgacaagcactgttttatgaagaaagtaaacaaaagaatcccagccaaggtggtatcgcaaattaaattcacattttgaggtctcctcctccttgctgtaataaacacacagcaatgatagctgaaattcaaaaatagaaaatttaaagacatagcattactcaaaaataaaattctcaggggggaaaaaaccacaacatggtaagtggagatgaggctgcaggcttgatgggctctgagtgcaatacagacagaggtgcctggcattgagaattctctggggtaacagagactcatagcacgcccaagtaaaggcgggggccagagccacaatcaatgcaaaagagaactatagtcaagctcactatttgaagca

SEQ ID NO: 795678 - DNA, 576 bp, Homo sapiens
ctagtaactgcaatcaattggtatgacttggagtaccaggtatatcactcttggcaacacatctatttttagtaggacaaaactgatgtgaaaaactgaaaatctcttcaataagagcattgaaactaggaaaggggtttagtgagatttagtatatgtatttatttacttctctgtggtttttaaacttatcttacttcctctttttaaaactctgtcagatttatcactgatttcagaattamaatctttaccatagactacaaatccctgagtagttatgtgatttcctcccttctatcttcccagtccatctcataccatacatttattggtcttctatgtcctagacacaccagccttttaagaggactctttattaatcacaaagatgttgaacagatgattctgacagcctggaattttctctctccacttttctttttcttttacctaggttgaattcattgtttagatctcaactgaaatattccttctttgtggaagcttcaccacatgacccagattatgctaggtctcataacatgctggggccttctcaatattgtgattaac

SEQ ID NO: 795679 - DNA, 576 bp, Homo sapiens
ctagtaactgcaatcaattggtatgacttggagtaccaggtatatcactcttggcaacacatctatttttagtaggacaaaactgatgtgaaaaactgaaaatctcttcaataagagcattgaaactaggaaaggggtttagtgagatttagtatatgtatttatttacttctctgtggtttttaaacttatcttacttcctctttttaaaactctgtcagatttatcactgatttcagaattacaatctttaccatagactacaaatccctgagtagttatgtgatttcctcccttctatcttcccagtccatctcataccatacatttattggycttctatgtcctagacacaccagccttttaagaggactctttattaatcacaaagatgttgaacagatgattctgacagcctggaattttctctctccacttttctttttcttttacctaggttgaattcattgtttagatctcaactgaaatattccttctttgtggaagcttcaccacatgacccagattatgctaggtctcataacatgctggggccttctcaatattgtgattaac

SEQ ID NO: 795680 - DNA, 581 bp, Homo sapiens
gaatattttcatctattactttgttgaatagatggtctggccagttgttgttgcccatgcctgtaatccttgcattttgggtggccaaggtgggaggatcacttcgtcaaaagtttgatcccagcctgggcaacatagtgaaactttatgtctacaaaagctaaacaaaattagctggctgtgatcgtgtgtgcctgtagtcctatctattcaggtggctgaggtaggacgatcacttgagcacaggaagttgaggctgcagtgagctgagattgcaccattgcactccagcctgggtgacagagcaagactctgtcttaaaaaaaaaaaaaaaaaraaagaaagaaagaaagaaaaagagaaaagaaaagaaaagaaaatgtgtttaaatccttttgctctccttcaccttcagagatactggaaattcatatatttgttcacttaatggtgtcccctgtatcattttatcataaaggttttatttttaaattatttttgattaatatttaatctgactaggtcatttcaaaaatctgtctccaagttctgagcttctttcttttgttaatctagtttat

SEQ ID NO: 795681 - DNA, 541 bp, Homo sapiens
acccaatatatttgccaacaaatcaataacatgagtaaagccttctgcattgtgggcaatcaaatgctcactaacaggtaacactgcttaaattaatataatcctcaaagtgctctgtatgtttcagagctaataccactgaggcttaaaattcacacgtgataagctagaggatatttcttaataatggtttaaataaaaggaaattacatgaagattctgaattaaatgctcccacactgaatgggctcagtttaagttgttcttgtctctaatggcatattacttattgtctgtatttctttatacagcaaaaaaaagtmgcaagcacctaaaatattatgttgctatttcactaaaacttatgactactttttgaaactgttataaagattgtgttggatatcatgcctcattgaaatggcttccatctctcaccctttcagactcagaccaaaaatcaccacctctctgaagcctgcccagactccctgaggaaaatcaatagcttttttctttgtttctaactcctctcttgcag

SEQ ID NO: 795682 - DNA, 601 bp, Homo sapiens
atggcagtagagctttgtggtatttttacttgtcctctttggttccattgcggtcttgaagatggcagtccatgttcctagtgtgaaaccatgtttcctggttccagagagagtagaacaactataacatatataagaaagaaaaagaaactatgaagagagacatattctgatttctaaagttatcagattataatattaaaatgtctatttttcaacaaaaaatataaagcacacaaaaaataagaawatattgtctgttcatagcagaatttaatggaaactgtccctaaggaaatagaaaaactgaactttttagacttattcttaaatatgattaaaaaattgaagaaaatcatggataaagaactaaaggaaaccaggagaaatatgtcttaacaaataaagaatcatcaataaagagattaaaagtataaaaagaaaacaaatttcagcactgtgaaatgcaataactaaaatgaataattcacttgagggtttcaacagcatatttgatcaggcagaataaagatttagtaagctcgaggataggtcaattaaaattatatagtccgaggagcagaaaagaatgaacagagct

SEQ ID NO: 795683 - DNA, 382 bp, Homo sapiens
gtaagaaaaaacagaagatggataaaattagaaatgaaaaaggtgacattacaacagatactggagaaattcaaaagatcattacaggctactatgagcaactataagtcaataaattggaaaatctagtagaaatggataaattcctagatatagactacctaccaagattgaaycatgaagaaatccaaaaccttaacagacaaataacaagtaatgagatcaaagccttaataaaaagtctggctgggcgtggtggctcatgcctgtaatcccagcactttgggaggctgaggcgagtggatcacctgaggtcaggagttcaagaccagcctggctaacatggtgaaaccctgtctgtaccaaaaacacaaaaattagc

SEQ ID NO: 795684 - DNA, 538 bp, Homo sapiens
cttgaaggccgcggaggactttgacagacagagaggattgggagtcgcagagtgccaagagctctctactggggacacttttaattattctgatggaatttcttccttagggagggaacatccatggatttcaaagcaatgagcagctgaaatctgcatttcctccagctgtggctccgctggtgggcccagccctcattctctaacctgccagartcagtgattctctcaggagggcgtctgggtattgttttttctctttgtttggcacttaaaatttttttttttttttttttttgagacagggtgttaccctgtcacccaggctggagtacagtggtgcgatcttggctcactgcagccttgaccttctgggctcaatcaatgctgagtagctgggcatacaggcatgcaccaccacatctggctaattttttgatttttttttttttgtagagacaggggtctctctatgttgcccaggctggtctcgaactcctgagctcaagtgatactcctgcttcagcctcccaaaagt

SEQ ID NO: 795685 - DNA, 627 bp, Homo sapiens
taaaaacgaaagtcatgctgtgtgaagttctatgaacttctacaaggggcaaaactaatctatggttgcatgctacttaatctcaagtgcttcagaaaaaaaaaattatttttatttaaaaaaaatttagaagcatgagtctcactatgttgctcaggctagtctcaaagtcctggactcaagcaaccctcccacctcagcctccygcatagctgggattacaggtgcatgccatcactccaggttaaaaaaaatctatatacatagaaagaaagcaaatgccaaatcaaattagttaaatgttaatgagaggtggatctgggtgaagagtatctaggtggtctttgtagtattatttttcttgcaacttttctttaagtttgaaattatttccaaataaaagttattaaaataactatggtagaaaaatcagaaccatggtttcctgtggagggtgaaggcagagattgacttggtagaaaaatcagaaccatggtttcctgtggagggtgaaggcagagattgacttggaaggagcgtgggggtgctttctgggctattggaaatgttctgtatcttgataggggctaggattatatggtatgtgcatttatcagaccttataga

SEQ ID NO: 795686 - DNA, 627 bp, Homo sapiens
taaaaacgaaagtcatgctgtgtgaagttctatgaacttctacaaggggcaaaactaatctatggttgcatgctacttaatctcaagtgcttcagaaaaaaaaaattatttttatttaaaaaaaatttagaagcatgagtctcactatgttgctcaggctagtctcaaagtcctggactcaagcaaccctcccacctcagcctcctgcatagctgggattacaggtgcatgccatcactccaggttaaaaaaaatctatatacatagaaagaaagcaaatgccaaatcaaattagttaaatgttaatgagaggtggatctgggtgaagagtatctagrtggtctttgtagtattatttttcttgcaacttttctttaagtttgaaattatttccaaataaaagttattaaaataactatggtagaaaaatcagaaccatggtttcctgtggagggtgaaggcagagattgacttggtagaaaaatcagaaccatggtttcctgtggagggtgaaggcagagattgacttggaaggagcgtgggggtgctttctgggctattggaaatgttctgtatcttgataggggctaggattatatggtatgtgcatttatcagaccttataga

SEQ ID NO: 795687 - DNA, 630 bp, Homo sapiens
tgtttcacctttttgtcaattgtgtgtccactggagtagcactttcagtttccttccagaacttttcctttgcattcacagcttggctaaatggcgtaagaggcctagctttctgcctatctcagctttcaacatgccttccttatcactcaacttaatcatttctagctttgtatttcaggtgagagatgtgtgactctgtctttcacttgaacatttagaggccattgtagggttrttaattggcctaatttcaatattgttgtgtctcagggaatagagaggcatgaggagagagagaaagctagtcagtggagcagtcagaacacacacatttcctgattaagttcaccatctatttatttatttatttaagacaggtcttgctctgttgcccaggctagagtgcagtggtgcaatcatagctcactgcagtcttgaacttctggccccaagtgatcctcccacctaggctttctgagtagctgggactacaggttacaggttctcggtatgttaaccaggctggtctcaaactcctggcctcaagccatcctcctgccttggcctcttaaagtgttgggattacagacgtgagccattgcagctggccaagttcaccatctcacg

SEQ ID NO: 795688 - DNA, 557 bp, Homo sapiens
cactgcaatttctgaggctaggtcaaaggcctcagtacttctgaaattccccacgtaaaccactactgtatgatgcaacaattctcaaatttatgttccaggacctcttacagttcaagaccccaaagaagagtaaaaatagaaaaggaaaaaaaaagaaagtaatgaaacaggagtggcttgaacccaggaaagaaacaaaagaaagaaaaagtcatagtagagaaggaattaagaygtccaagggagaataatagattcaaatgaaaattttacaaagggcattgaggaaaagtagaaaaacaaccataagaaagtgaaatttaaaaagaagtataaagggtcaaagttgaagtgaataaaacaaattaggcaaagagggtcaaatatttatataattagaaatacatatacctccaagatacatatacatcaaactctggaagaagatattcaaaacactaaaacagaatatttaaaataatactctaaaaaaacttcctgaaaataaaagacctgaatctacacattttaagagccaactggggaaaactgac

SEQ ID NO: 795689 - DNA, 621 bp, Homo sapiens
ttctcaaaataatataaaaatttcccttgaacataaaagatcctcaactttagtcataataaagaaaataaatataattaaactacacaaagatttttcacctattagattggcaaaaatttgaaagcttcacaatatcctctaactagcaggctataaagaaacgggcactcacacactgctcagagtaatgcaaaatggtacaatctctatgaaggggaattyagcagcgtctaacaagattacatatacatttatccttcaacccagaaatccaaatttgaggactttattcccaaattaaacctcctgcaatataaaaatacatacacaaggttattcatagccacattatttgtactgtaattgcaaaatattggaagctacctaaatgtccaaacacagaagactggtaacgaaactgcatcatattcacactatgtgaacagcactatacagctataacattatgaggaagagctctggaatctgataaagagtaattaatttctagagtatattttaagtgaaaaaaagcaaagtgcaacagaatttaaacagtatgccaccttctgtttttgaaaaaaaggtaaataagaaaacatacatgtatactgtctt

SEQ ID NO: 795690 - DNA, 621 bp, Homo sapiens
ttctcaaaataatataaaaatttcccttgaacataaaagatcctcaactttagtcataataaagaaaataaatataattaaactacacaaagatttttcacctattagattggcaaaaatttgaaagcttcacaatatcctctaactagcaggctataaagaaacgggcactcacacactgctcagagtaatgcaaaatggtacaatctctatgaaggggaattcagcagcgtctaacaagattacatatacatttatccttcaacccagaaatccaaatttgaggactttattcccaaattaaacctcctgcaatataaaaatacatacacaaggttattcatagccacattatttgtactgtaattgcaaaatattggaagctacctaaatgtccaaacacagaagactggtaacsaaactgcatcatattcacactatgtgaacagcactatacagctataacattatgaggaagagctctggaatctgataaagagtaattaatttctagagtatattttaagtgaaaaaaagcaaagtgcaacagaatttaaacagtatgccaccttctgtttttgaaaaaaaggtaaataagaaaacatacatgtatactgtctt

SEQ ID NO: 795691 - DNA, 604 bp, Homo sapiens
gatggctatgcaggtgtttacagtgattttattcatatttgaggacattggacaggtatttggatgagttgggaacatattaattttcccaattaaaattatatatgataagctcctaccacctgaaaactgctattcaaagtattttttaaatttaattcagatgaggaatgcctgttatttctattctaagcaagcacatatacaatttatatagtagcctgtgctagtcaagttatctcaaaatcttgtgcatgacaaattttcacatctgccatctagtgtaattgatgtggccaccttttctgtcacccagtaggtttatarcctttcatggatttcttgacagttctctccattgctggtgccatttcctcctcctgtcttctgaaaggtcattgtcctctggtcttctctttcctctcttccctgaagacgatttttattctcattcatctaataaaagcctttggggagacaaagctgagttctttatctcaaaccctgttctctttcatatcctcctgtttcccattttcaactagttgcttttctacatttgtgtcccagtgctacttcaaatataacatagtagggaggaaat

SEQ ID NO: 795692 - DNA, 679 bp, Homo sapiens
ctgccttgtttctgagaaccaggatcccaagagctatgttacattgtgtgtttgtaaaaacaacttttaaaagttgttttccttatttaaaaaagcaatacttatttactgtggaataattagataatataaataagcaaaatgaagaaaagcaaaatacttccataattccagaccccagagacaagcactcttaacgtatcactgagtatctttccagaccgtttttgcgcgcgtatatacttggaatgaacacatacaaatacaaactatcttgcaatctgctttttccacttagcaccaacacaaacatcttactatgtcaaccaacctttatctatagtctgattttaagtggttcttctcagtgttatctcctaatagggagttagatgaggccagatgcaaagcgtgtaaggtsggggagggagttgtttggggtctgaaccaaggaagaaaaccctggaattggccaaacacagatgaagcaggagcagagacatggtcttggcaaggggcccccaagtgtaaatctagtccagatggggcgggaggggcatagctaatcctactcaattccaagctggtggcaggagccaagaggcaatctgtcagtgaccaatcctgggataagacttcagacgagcagagcatggtatatgggaggggtggacacaga

SEQ ID NO: 795693 - DNA, 605 bp, Homo sapiens
ctaataaaaatcttaccttgaagcccagagtgaagcacacagggtcggtctcctttaattgtggtgtacagttccttgcttgcgtgcgctccccgagccctcatggagtttatgaatcctatactttctaaaacatgtgttttggaaactayagaactaaatctgtgtttctcaaacttgcctggccacacgaatcacaagggatcttgttaaactgcagctcctgattcaatagatctcagagaggcctagggggtctgtgtttctcacaggctcccaggtgatgttgaggctgtggatccacacaacacatttcgaagagcaagggtgatgattttctaaggtctcttctaacagaaactcctccaggagccagtagaaaaaaaaatattgaacctcaggcttccttgtgtctctggcataccttcatgggaattgaaggtttgtttttgcacccaggtcaacctttcaatatttagcttcgacagtttgactgtccaagggaaggaatttttttctctctatttcattctttgaaatacaattttttctctattttccttattttgtgttgaatatttcttaacaagttaaaggttggattg

SEQ ID NO: 795694 - DNA, 605 bp, Homo sapiens
ctaataaaaatcttaccttgaagcccagagtgaagcacacagggtcggtctcctttaattgtggtgtacagttccttgcttgcgtgcgctccccgagccctcatggagtttatgaatcctatactttctaaaacatgtgttttggaaactatagaactaaatctgtgtttctcaaacttgcctggccacacgaatcacaagggatcttgttaaactgcagctcctgattcaatagatctcagagaggcctagggggtctgtgtttctcacaggctcccaggtgatgttgaggctgtggatccacacaacacatttcgaagagcaagggtgatgattttctaaggtctcttctaacagaaactcctccaggagccagtagaaaaaaaaatattgaacctcaggcttccttgtgtctctggcayaccttcatgggaattgaaggtttgtttttgcacccaggtcaacctttcaatatttagcttcgacagtttgactgtccaagggaaggaatttttttctctctatttcattctttgaaatacaattttttctctattttccttattttgtgttgaatatttcttaacaagttaaaggttggattg

SEQ ID NO: 795695 - DNA, 631 bp, Homo sapiens
aatggtataatactcaggggtttgataatatggtttgtgaattatttaggtcagttgttctttttcccttcctcttttcatttggataacttaacaatagctcaagaaaattgtgtaggagtgggaaataaaggaatccctcaaattttgcctgaaaccgactggtgtttaaaatagcatttttaacaaagttgaaggctgcttgggagagtcagcaaatttggttttagctcctggttgagttacatagaatggttcaggattgaccagaatcacatagttagtaaaagctggaatttttgcaaattctgctgccttcttggtgctatcttcttcctgctgcattttactgattcctgattctgcttctgttaagcactaaggcctwtggcaagtcaattcttatctcatattctccatgttcttatatataaaataagaaagaggatagatactgattctctacttagtaagaagctatggccttcagtcagccttaacaactaaacactacatcataataatttttaaaaggcgaatatttatttatcaatcacaccactttcgctttatgcatttaaatcatactgtgaatgattcaactaaaacatttctaataagatttgtataa

SEQ ID NO: 795696 - DNA, 598 bp, Homo sapiens
aatttatttatggttttacagaaaaatcaaataaggctgctgagtgttattttgaaaactacttttatgtttctgtatctaatttctctgttagcaaaatgaggaaaatttttctgacatctcaaagtagtttaagagagaattcataagtataaaatgttttaagcatatgcggactttatatggatagcctaagtcacagattctagcctctgaacttgtttatccacagactatttctgacaccaaatgtgtggtggatttttccacccccagccaattctccagttttccaaaccactgggtttcctaccatccactcaactccactaactacccagggtgagcacagacccaggggtgaagaattaagtttcmaaggaccaccccccatttcagataccaaaagcaagtcttgggccaaccacatttctggctaaccaggtaaaatttgcagaaccccacgacacacttttcaggctcattaatttgctagaacagctcacagatctcagcgaaaccattgactcactgtcaccagtttattgcaaaggatgtaactcaggaagaaccaaatggaagagaggcatagggcaag

SEQ ID NO: 795697 - DNA, 598 bp, Homo sapiens
aatttatttatggttttacagaaaaatcaaataaggctgctgagtgttattttgaaaactacttttatgtttctgtatctaatttctctgttagcaaaatgaggaaaatttttctgacatctcaaagtagtttaagagagaattcataagtataaaatgttttaagcatatgcggactttatatggatagcctaagtcacagattctagcctctgaacttgtttatccacagactatttctgacaccaaatgtgtggtggatttttccacccccagccaattctccagttttccaaaccactgggtttcctaccatccactcaactccactaactacccagggtgagcacagacccaggggtgaagaattaagtttcamaggaccaccccccatttcagataccaaaagcaagtcttgggccaaccacatttctggctaaccaggtaaaatttgcagaaccccacgacacacttttcaggctcattaatttgctagaacagctcacagatctcagcgaaaccattgactcactgtcaccagtttattgcaaaggatgtaactcaggaagaaccaaatggaagagaggcatagggcaag

SEQ ID NO: 795698 - DNA, 439 bp, Homo sapiens
aacaaatgtaaattttattcccccttcaaagttaagaaattagtgaattatggacaaaatgagtctagttaaaagaaaaccagttaaacaaacaaaataaaactatagacaarttaaagttttcagagtttaactgaccaaagaacaatttgagaatcggccagccccctgaactagaataggttcagagtgactcttgggttgtcacatggtcagataatatttatggacagaaaaaggaaagtgacgtacagaaaacaaaagtgaggtacagaaatagctggataggttacagctcagcatttgccttaatggaacacattttgaccagttggccatctgtgattggccgaaactttgtgactagtacaggagaacgttactggctgcttataaatcctatgcagttatataatcagaacctaactggttgtacttc

SEQ ID NO: 795699 - DNA, 504 bp, Homo sapiens
cacacctccatggtgcagttgttcaacaaatgtaaattttattcccccttcaaagttaagaaattagtgaattatggacaaaatgagtctagttaaaagaaaaccagttaaacaaacaaaataaaactatagacaagttaaagttttcagagtttaactgaccaaagaacaatttgagaatcggccagccccctgaactagaataggttcagagtgactcttgggttgtcacatggtcagataatatttatggacagaaaaaggaaagtgacgtacagaaaacaaaagtgaggtayagaaatagctggataggttacagctcagcatttgccttaatggaacacattttgaccagttggccatctgtgattggccgaaactttgtgactagtacaggagaacgttactggctgcttataaatcctatgcagttatataatcagaacctaactggttgtacttcactatgtatggaaaaagctttaggctgcacttaaaatatga

SEQ ID NO: 795700 - DNA, 526 bp, Homo sapiens
caagtattcacctcctttggggaaatatcaaggaatgcaattgctaaatcatctggtaagaatatgttcagttttttttgtttttttttttgagacggagtctcactctgtcgcccaggctggagtgcagtggcgcgatctcggctcactgcaagctccgccttcccgggttcacgccattctcctgcctcagcctccccagcagctgggaytacaggcacccaccaccacacccagctaatttttttgtatttttagtagagatggtgtttcaccatgttagccaggatggtctcgatctcctgacctcgtgatctgcccgcctccgcctcccaaagtgctgggattacaggcgtgagccaccgcgcctggcctagtttttttaaaactgccaaactctcttctaaagtggctgtactattttgcattgcccagaaatgaatgaaaattcctgttgcttcacatccttgccagtttttagtgttgtcagtgttttggatttaagccattctaataggtgtgtagt

SEQ ID NO: 795701 - DNA, 635 bp, Homo sapiens
ctttctacaagtcacctgtctcctctaggcctcagtttctttatctgtaatgttggactagattctgtctatggtcctctagagctccaaagtgaagataaaactcctgttccactcagggagtttgtatcttcaaagtgaaagcttcctgggggaaatgaagcttgccttcaccaacgttagaaattagtggttgaaaaatagtatttttcagtgtctgtgagtcttgaagttatgttttcacagggtgacaagaaaacaaattaatgaaaggcagacatcttcatgaatgagagtcagagaaaatatgaacataacatatgacccagcatatagtctgttctccctgaatgaataaaatgtaggagttattccctggtttacaaaccaaaatgttaatcagaagtcccatttgagaagtgaagtgggactttattttattktatttattcatttatttatttaagacagagtctcgctctgtccccaggctgagtgcagtggcgtgatctcggctcactgcaacctccacctcccgggttctaacaattctcctacttcagcctcccaaatagctgggattacaggcgtgccaccatgcccagctaatttttgtatttttagtagagatgggg

SEQ ID NO: 795702 - DNA, 634 bp, Homo sapiens
gcagacatcttcatgaatgagagtcagagaaaatatgaacataacatatgacccagcatatagtctgttctccctgaatgaataaaatgtaggagttattccctggtttacaaaccaaaatgttaatcagaagtcccatttgagaagtgaagtgggactttattttattttatttattcatttatttatttaagacagagtctcgctctgtccccaggctgagtgcagtggcgtgatctcggctcactgcaacctccacctcccgggttctaacaattctcctacttcagcctcccaaatagctgggattacaggcgtgccaccatgcccagctaatttttgtatttttagtagagatggggttttgccatcttggccaggctggtcttgaactcctgacctcaggtgatccacctgcctcrgcctcccaaagttctgggattacaagtgtgagccactgcatctggctggggctttaaagtatgtaagatatatagagagacgatgaagagggaggtacggagcgagagagagagtgtgtggctggaacttgaagttttttttttatttgaagttatatactttgggaataaacttaggttttcatactctgccgagcttaagcaagatggca

SEQ ID NO: 795703 - DNA, 634 bp, Homo sapiens
gcagacatcttcatgaatgagagtcagagaaaatatgaacataacatatgacccagcatatagtctgttctccctgaatgaataaaatgtaggagttattccctggtttacaaaccaaaatgttaatcagaagtcccatttgagaagtgaagtgggactttattttattttatttattcatttatttatttaagacagagtctcgctctgtccccaggctgagtgcagtggcgtgatctcggctcactgcaacctccacctcccgggttctaacaattctcctacttcagcctcccaaatagctgggattacaggcgtgccaccatgcccagctaatttttgtatttttagtagagatggggttttgccatcttggccaggctggtcttgaactcctgacctcaggtgatccacctgcctcggcctcccaaagtkctgggattacaagtgtgagccactgcatctggctggggctttaaagtatgtaagatatatagagagacgatgaagagggaggtacggagcgagagagagagtgtgtggctggaacttgaagttttttttttatttgaagttatatactttgggaataaacttaggttttcatactctgccgagcttaagcaagatggca

SEQ ID NO: 795704 - DNA, 634 bp, Homo sapiens
gcagacatcttcatgaatgagagtcagagaaaatatgaacataacatatgacccagcatatagtctgttctccctgaatgaataaaatgtaggagttattccctggtttacaaaccaaaatgttaatcagaagtcccatttgagaagtgaagtgggactttattttattttatttattcatttatttatttaagacagagtctcgctctgtccccaggctgagtgcagtggcgtgatctcggctcactgcaacctccacctcccgggttctaacaattctcctacttcagcctcccaaatagctgggattacaggcgtgccaccatgcccagctaatttttgtatttttagtagagatggggttttgccatcttggccaggctggtcttgaactcctgacctcaggtgatccacctgcctcggcctcccaaagttctgggattacaagtgtgagccactgcayctggctggggctttaaagtatgtaagatatatagagagacgatgaagagggaggtacggagcgagagagagagtgtgtggctggaacttgaagttttttttttatttgaagttatatactttgggaataaacttaggttttcatactctgccgagcttaagcaagatggca

SEQ ID NO: 795705 - DNA, 592 bp, Homo sapiens
taccagtgactcacaagtccagctgcttcaaaaaacatcctaattctctagccccatcacagttcaattcaatataatctgtggggaggggcctggcctcagtatttttaaagctttccaggttactttaatgagtaatcaagtcagggctgacaatcactaagccaaaataagcctactactatgcaaggtcttttcagagacagagaaggaaaaaaaaaaactacctaaagtaaattccatgatacagtatctataaacgagggaacctacaatctttggcaggaaaaamttcaattaaactcattttcttgctacgctgaccatttattttaccaaaataagtcataacataagatctattgctcagttcctgtgtagacagaacctaaaatctggggagaggcaagatcaactaatttgttttttttactcacttgacaagtattttgactaaagcacttaaggattgtggtgttgatttaaaaaaaaaatgtttaacaattttgtaaaagacatttttttgcagttttccaacaaaatcttgtaagcgaagcatgttttctttctccttatctcaacccaaatggta

SEQ ID NO: 795706 - DNA, 592 bp, Homo sapiens
taccagtgactcacaagtccagctgcttcaaaaaacatcctaattctctagccccatcacagttcaattcaatataatctgtggggaggggcctggcctcagtatttttaaagctttccaggttactttaatgagtaatcaagtcagggctgacaatcactaagccaaaataagcctactactatgcaaggtcttttcagagacagagaaggaaaaaaaaaaactacctaaagtaaattccatgatacagtatctataaacgagggaacctacaatctttggcaggaaaaacttcaattaaactcattttcttgctaygctgaccatttattttaccaaaataagtcataacataagatctattgctcagttcctgtgtagacagaacctaaaatctggggagaggcaagatcaactaatttgttttttttactcacttgacaagtattttgactaaagcacttaaggattgtggtgttgatttaaaaaaaaaatgtttaacaattttgtaaaagacatttttttgcagttttccaacaaaatcttgtaagcgaagcatgttttctttctccttatctcaacccaaatggta

SEQ ID NO: 795707 - DNA, 457 bp, Homo sapiens
tttagtttaactagataccatttgtcaaatctgctttcattgcaattgcttctggcatctttgtcatgaaatctttgccattcctatgtccaggatgatattccctatgttgtcttccaggatttttatagttttaggttttacatttaagtctttaatctagttcattgagagtttttaaaataaagggatgttaaattttatcaaaagtctttctttgtctattgagataatcgtggtttttgtytttagttttgtctatgtgacgaatcacattgattgatttgcaaatgttgaaccaactttgcatcccaggaataaagcctatttgatagtggtggattaaatttttgatgtgctgctggattcagtttgctagaattttgttgagaagttttgcttccatgttcatcaaggatattggcctgaagttttcttttatttttgtgtctctgag

SEQ ID NO: 795708 - DNA, 457 bp, Homo sapiens
tttagtttaactagataccatttgtcaaatctgctttcattgcaattgcttctggcatctttgtcatgaaatctttgccattcctatgtccaggatgatattccctatgttgtcttccaggatttttatagttttaggttttacatttaagtctttaatctagttcattgagagtttttaaaataaagggatgttaaattttatcaaaagtctttctttgtctattgagataatcgtggtttttgtttttagttttgtctatgtgacgaatcacattrattgatttgcaaatgttgaaccaactttgcatcccaggaataaagcctatttgatagtggtggattaaatttttgatgtgctgctggattcagtttgctagaattttgttgagaagttttgcttccatgttcatcaaggatattggcctgaagttttcttttatttttgtgtctctgag

SEQ ID NO: 795709 - DNA, 565 bp, Homo sapiens
tatttttatttctgtggggtaagtgctaatatcgtctttgtcatttctgattgtgttaattggatcttctctctttcttctttattattctggctagtggtctatctatcttattaactttttcaaaaaattagctcwggctttgttgatcttttgaatagtttttcatgtctcaattccttcagttcagctctgattttggttatttcttgtcttctcctagctttggggttagtttgctcttgcttctctagttcttttagtcatgatgttaggtcgttaatttaagatctttctaactttttgatgtggatttttagtgctataaatttccctcttaacactgccttagctgtgtcctagagattctggtatgttgtaactttgttttcagtagtttcaaaaaacttcttgatttctgccttaatttcattatttacctgaaactcattctggagcaggttgtttaagttccatgtaattgtatggtgttgagcaattttcttagacttgaattctgtttttactgcactgtggtgtgagagtgtggttggtataatttcag

SEQ ID NO: 795710 - DNA, 565 bp, Homo sapiens
tatttttatttctgtggggtaagtgctaatatcgtctttgtcatttctgattgtgttaattggatcttctctctttcttctttattattctggctagtggtctatctatcttattaactttttcaaaaaattagctctggctttgttgatcttttgaatagtttttcatgtctcaattccttcagttcagctctgattttggttatttcttgtcttctcctagctttggggttagtttgctcttgcttctctagttcttttagtcatgatrttaggtcgttaatttaagatctttctaactttttgatgtggatttttagtgctataaatttccctcttaacactgccttagctgtgtcctagagattctggtatgttgtaactttgttttcagtagtttcaaaaaacttcttgatttctgccttaatttcattatttacctgaaactcattctggagcaggttgtttaagttccatgtaattgtatggtgttgagcaattttcttagacttgaattctgtttttactgcactgtggtgtgagagtgtggttggtataatttcag

SEQ ID NO: 795711 - DNA, 616 bp, Homo sapiens
gtctgaaaaggatcttatttctccttcacttatgaagctcaggttggttagatttgaaatcttggtgggaattccatttatctaagaatgttgaatattggctcccaacctcttctggcttgtgaggtttctgctaataggtctgctgttagtctaatggacttccctttgtacctttgtaggttatctctcattactttttctctgcctttaagatttttttgcttcatttcaagcttggagaatctgatagtcatgtctcttggggatgattttcttgtgaaggattttgcagggttctctgcattttcagaatctgaatgttggtctctttagctaggttgggaaaggtctcatggatgaaatcctaaaatatgttttcaagtagtttccattctccycatctctttcagagacaccaatgagtcatagattcggtctctttacataattctatgtttctcagagatttcttactttcactctttcttctttcttcttgtctggctgtcttatttcagaaagccagtcttcaagctctgagattctttcctcagcttggtctatcctgctgttaatacttgccattgcattatgacattcttgtagcgtgttt

SEQ ID NO: 795712 - DNA, 522 bp, Homo sapiens; identical to SEQ ID NO: 765385

SEQ ID NO: 795713 - DNA, 589 bp, Homo sapiens
gaaaatacgaattatagaggaacggggaagaagggaggtatatatactctttgtactttctcttcaaattttttaaaatgtgaaactactctaaaaaatgtctattaaaaaattatgatcaatttcagtttatcctaggaaagcaaggataagttaataagtatacatatatacatatatataaatttaataatctatactaacaaatcattacagaaaatcacaygcattttagtagacaccaaactaacttgtaattcataaaagaatgtctgagtaacctgtggccgggagtggtggctcacgcctgtaatcccagcactttgggaggctgaggtgggcggatcacgaggtcaggagatcgagaccatcctggctaacacggtgaaaccccgtctctactaaaaatacaaaaaaattagcagggcatggtggtgggcacctgtaaccccagctactcgggagggtgaggcaggagaatggcatgaacctgggaggcagagcttgcagtgagctgagatggcatcactggactccagcctgggcaacagagcgagactccgttccgtctcaaaaaaaaaaaaaaagg

SEQ ID NO: 795714 - DNA, 574 bp, Homo sapiens
aaccccaaaacccttaacacagaccacaaagcccttgaaatcttctgtttgctaaaccttccttcttacaacctaaacttttggcatgcttagagctcccaaggtccctgtgctcatcagtcaactcctctgtaaagtgtcttcttattggctcttctattggaatttgcgctatctgccatacttctccagccaattagcctttttaacactgttgttataaaaactgtggaagaggaaattagtacagagaaaagcaacaggctagcaaaaatcaggkgctcggggaggaagtcaggggctcatctttctaaccccaattagaatcagcacatttaagaacacttgtgaatagaaactctagattgcagccattcattaaaaacccttcattttacatatggtaatctgagacttcataaatgacttgtaacttccaagattccaaatctaatcagtcccacataggacttttcacctccagtccggtgctcaggtgtttctgttctgcccatcacccattacagaggaagtacgttcatctggggatgcttttctccaggagagacttccc

SEQ ID NO: 795715 - DNA, 519 bp, Homo sapiens
catcacaagacccaatcagataacacttcattaccctattcctataaaacccaactcagcccccagctcagggagacagatttgagcattttctcctgtctcttgacagtcaaccagcaatacagcttctcttttctcaagcccgtgccatggtattggcttctatgcacatcgggtagcaagcccattgattgtttgattacaaatgaccctagggaagttatttaaactaattctgcttcagtctgttcatttataaaatgggaatattaggaactcacttcacaaagttgctgtgaggatttastgacttaatctatgcaaatcatttaagacaattcctgagattttatgattaccatataaatatatccaaagactattatttccaattatatttgttccaaagggtagatttcttcctcttatcttccacatttctattagatatttgccaaaaacggagacatattaatgttttattaatgcatgcatttatctatttactgaatgctattt

SEQ ID NO: 795716 - DNA, 498 bp, Homo sapiens
ctatcctggaaagtccctgataaaagcactgcgttttcttaatcagtttccttttctgcagaataaatttctgttatgcttcttaatcagcaaaatgacaaacaaattaagaaataacctcaaacttaacaaaacagaacaaagtcttccctgaaggtcttggagaaccacrtgagatcagatcacaacccaaggtctgccctgagaaatggggaaagccagggacctgccacacctcccttcctcttgtctaatcggagaagagaaactaaacttaattttcatgatcttactatgttagcctcatacgtaatcatcttctcttttgtctaaatggttccctattttcaccttatacttaactatcatatatagggcatatgaatacatttatctcagatcccattcagaagttgtaaaggaatacattattaataaatcaaatatttctacattacatggaagaaagtgtggaacagttaagaggatgggtactgg

SEQ ID NO: 795717 - DNA, 498 bp, Homo sapiens
ctatcctggaaagtccctgataaaagcactgcgttttcttaatcagtttccttttctgcagaataaatttctgttatgcttcttaatcagcaaaatgacaaacaaattaagaaataacctcaaacttaacaaaacagaacaaagtcttccctgaaggtcttggagaaccacatgagatcagatcacaacccaaggtctgccctgagaaatggggaaagccagggacctgccacacctcccttcctcttgtctaatcggagaagagaaactaaacttaattttcatgatcttactatgttagcctcatacgtaatcatcttctcttttgtytaaatggttccctattttcaccttatacttaactatcatatatagggcatatgaatacatttatctcagatcccattcagaagttgtaaaggaatacattattaataaatcaaatatttctacattacatggaagaaagtgtggaacagttaagaggatgggtactgg

SEQ ID NO: 795718 - DNA, 412 bp, Homo sapiens
aggcgcggtggctcacgcctctaatcccagcactttgagaggccaaggtgggcagatcacgaggtcaagagatggagaccatcctggccaacatggtgaaacctgtctctactaaaaatacaaaaattagctgggcatggtggcatgygcctgtagtcatactcgggaggctgaggcaggagaatatcttgaacccaggcagtggaggttgtggtgagccgagattgcaccactgcaccctagcctggtggcagagcgatactctgcctcaaaaaaaaaaaaaaaaaaaatcattgtatgaatattcaaaattatacatgattgtaattataattgagtcatgaaggctgaaaataaagataaatgaatcaagcttcatttaagtagcaaaatgaaagcctctccatcctcc

SEQ ID NO: 795719 - DNA, 616 bp, Homo sapiens
ctaagtatacactccaacgtttgcaaaattctgactacattatctactctacaatgcccagaagttagttcattaaaatctgaatttaaattctatgtccatttagaaactatttgtattgtattcttctgtaattggttaagcttcatgagtataaacrcaggaatatggatttttcaatgaacgttaaataatcttgttgattaaattaaagtcaaagtaatgtttgcttagaaattaaaggattatatttcattagtatttaatttacttagttttaattcctggcttgtcatgaagatggcaaaagctgatgtgttcccttgtttcctatactatactatggaacatggaatatgtgtgtgtgggggggtgtttgtgtgtgtgtgcacacaaacacaagatacgtatacacatttaagtttaaaaacaattcccttggataaatactaggtattcaaagaaaactcatttaaagtttaggcaaatctaagtgtactggatttttattgcgctttgctgagtatagtctagctgttgactgtatactgttttgttgtgtctgcaacagtttcatttgcatacacttcagtagttagtttcctagacaagtaat

SEQ ID NO: 795720 - DNA, 563 bp, Homo sapiens
atcttgtgagacttagaacagtatgggagcaactgcgcccatgattcaattatctcccaccagctccctctcacaacacgtgggaattatgggagctataattcaagatgagattagggtggggacacagcgaaaccataccaatggcagtgaggacagagaaacagagagctatgctggccagtgctgtccccagtgcatcttcaaaatccaggaaggtcacaactctgtgaggcagtgatctctctcactgaatactggttgtctggacattttgcacattcawtggagtctgattttaaaaagtcaaaagcttattgtctcaagttctgaaatgcttccttttttcacaggactaaacaatgataacattagtcatcttaaagcacattgtccacctattctccatatttcatgaaattataagatgctacaaattaactcattccagtttagcagtatttatcccccttgtcatttatatgaagaaaggtgtttttttatcttttacatagatgtgcatgctactcctattttttatctgatgatgagaccattacaat

SEQ ID NO: 795721 - DNA, 631 bp, Homo sapiens
gagttctgattctccacatcttcaccaacatatgttgccttttctttcttttctttttttttttttttgataattatcctaacaggtatgaggtgatatctcactgtggttttgattttcatttctctgaaaactagtgatgttgaacaatttttttcttattcatgttggctatttgtatgtcttctttggagaaattcaagtccttagcccgttttaaaattgggttatttgctattgagttgaaggaggtgcttatgtattttggagactaaccacttattaaatatatggtttgcaaatatttcctccaaatttctaggttgccttttcactctgtcaattgtgtcctttgctgtgcagaagctttttagtttaatgtagtcccactgttaattkttgcttctgttgcctgtgcttttggtgtcatattcatgaaatcattgccaagaataatgccatgaagcattttccgttttcttctagagttttatagtttcacgtcttaagtctttaatccattttaagttgattctttttatatgttataagagtacaattttattattctgcatgtgaatatcaagtttttccaacatcatttgttgaagagaccctccttttctcattg

SEQ ID NO: 795722 - DNA, 623 bp, Homo sapiens
tttccccttgttgcccaggctgcagcgcaatggctggagcacaatggcacgatctcggctcactgcaaccaccccctcccgggttcaagcaattctcctgcctcagcctcccaagtagctgggattacaggcatatgccaccacacccagctaatttttgtgtttttagtagagatggggtttcaccatgttgctcaggctsttctggaactcctgacctcaggtgatccacccggcttggcctcccaaagtgccgggattacaggcgtgagccaccatgcccaacatttttaaaattttcaatagttttgggggtacaggtttttggttacatggataagttctttagtggtgatctctgagattgtagcgcacctgtcacctgagcagtgtacactgtacccaatatgtagacttttatcccataccccgactcccaaccttcccctacaagttcccaatttccattatattattcttatgcctttgcgtcatcatagcctagctcccacttataagtgaggacataggatatttggttttctgttcctaagttactttgcttttattgaaaaatatgcatataaataaatggaccagagcagtttaaacccatgttgttc

SEQ ID NO: 795723 - DNA, 618 bp, Homo sapiens
tctattctaatcatgggcaggagtcatcattcctttgccctgatgcatttttttggctcaacacagcaaccctatttcttacttccgctgctggggtagctggctggtctgccttctgcttgctgcaattctcaggcaggattcagactcaagatattaaaattccccagttgcaggagtcccatttgaagctgagtggtcctgtggaagttgaggtgatgaaagcactcactccattcctccttctaggtagtggtgaatggctcttcgtacactggcaactctgtctacaaggtctttctcacaaattctctctggacattttatattctcggtgaggaggaagtactgaatattatcttgagcatctaragttttgcaagttctattgattgattagttcaacttacaacccatttttgaatcagacatccgtcattgtaggctaaaaatgagacaaacttttcacctgacagaaaataaaaacatatatggttttgcagaaaagaaaacaaaaaattaaagcataattttaggcaaaaatttatgaatcattacatatggcttttatttaacaaatttaacaaacactgttgctgcttttccaagaactttata

SEQ ID NO: 795724 - DNA, 651 bp, Homo sapiens
cagtgctactgctacctacaggatgtggtagctgcatcctcagaagactcaccagtgctctcaaggccatagcacttcatgttcacctccacatgacacataaccatctcccttctttgtgccttagtttacctttctataaaatgggcatagtaatagcatctacttcaaaatgttgccaagtggattaaatttggtattatgtaaagtccttggkggaatggctaataaaaattcatggttattaatagcatcgggtagttaattctcactcaagcaagtctccggctacatagatctctgagatgtttaaggaatagaatcagctatgtcacatagctggattcagaaattgtgaaatgcctcttcttagctttaatcttgctcccttcttaactgtatttcaaggccaccaaggtgacacatgcaagctgttgatagttaggttttgatgtacacatatacacacgctgaacattaaatagatattccctgcaaaacactaggtcccagaaaacagtctcctctgtatttgatgaaataatttcctttctaggatgatactttaaaagacctgaccttcactgacatcacccacatgccagatgagattagtgagccacatagcaaagtttctgatatgaaatagta

SEQ ID NO: 795725 - DNA, 495 bp, Homo sapiens
taatacctcaagttttgtttaagtaatgggaaaagtttttgtacatttgtttaatataaaaagcattgtcactaattttggtaatgggcaagccatgatctttgagcctctgaccttttaggattacatttcttttaagtcttctsttgattattaactttatttctgagcacatgctgagattgttagtaagagcatgctaaatctaacctctttttcttttttggtagtgtgataagattgtggtaccagggctgagccttaactgtaatgtatatgaatctaagcaagataatcatcaatctggcttggtatacatgacataggaagtcaggtcagatgatagttgcaattctagctggttaacaacttttcttaaaaggtgttcagtaatggattcatttttctagaaacattaaggtaggtttcttagaatatgacatatggctatgtttattttgttctagtcagtgcatttattgatgacttgtcaac

SEQ ID NO: 795726 - DNA, 601 bp, Homo sapiens
cgtatgtatcaagggcttagcgcactgcctggtacgcagaaaaagcccagtaaatggcaagtgctattataaccattatcatgaggttggaggatcgcttgagcctgggaggttgaggctgcagcgagcagtgatcgccccactgccctccagcctgggcaacagagtaaaaccctgaaaaaacaaaacaaacaaacaaaagcccrggggaaacaaatcaaatgtccccgtataaatgataaacaaaatgtggtatatacggaaccttattcagcctttaaaaagagtgaaattctgatgcaagttacaacatggacaaaccttgaagacactatgctaagtgaaaaaaaacatacacaaaagaacacatgttgtatgattccagttacatgaagtatctggaatagtcaaatattatacacaaagacagatgaatagaataatggttacctgaggctgcaggtagggcagaaatgaggagttagtgtttaacaggtgcagagttgaggatgatgaaaacgtctggatggatggtgaaaatggttgcacagccatgtgaatgcacttaatgccactgaactgtacacttaaaaatggttaa

SEQ ID NO: 795727 - DNA, 600 bp, Homo sapiens
ctggataccagactcaagagggacgcagcggccagctgtcttccgggtctcccaggctggcttcaggacccgagcctattctgtttttgtggctcctctaacttacctgtaaatcctttctgcattccctggatgccacctcttgttccctataaaaacctacaagtgtcctctgtccagtacagaaatccaaagcctctatatctgtgtctttgggaaaaatttcagcaactcctagcccagggatcatgagctcaaatgctacaagaatcaggcagtttatgggaatgagccaagtgggctccccaaagtacaaaacatacatggcacaacagccgggggccctgtctacagggaagcctgccgcgtacctgcagccaagctctgcagaacaagacrcaggcttgccatgaccacagtctctgccttttcaggagaaacaaggtatccaatgtgttagctcaaacgtttttttagtaacaccaagtgagccaaagaaaatacataatggaccagatacagctgccaagtaacccccacccacccctacatcaccaccccaccacacacacacaccagtccctgaaggcactgggtcat

SEQ ID NO: 795728 - DNA, 632 bp, Homo sapiens
catctcggctcactgcaacctccaccttctgggttcaagcgattctcctgcctcagcctcctgagtagctgggattacaggcacgcgccgccatgcccagctaatttttgtgtttttagtagagatggggtttcaccatgttggccaggctggtcttgaacttttgaccttgtgatcggcccgcctcggcctcccaaagtgctgggattacaggcatgaaccaccgcagctggccagtgttttttttttttttttttttttaaatgaaagaacaaaatcccagactgatgataagttgttaytgtgtttcacttctctaaagacaaggcgcctccttattgcctgtaccaggtggaccagtttctaccacccaaaccttggtgtgccatttttaaatggcctcattggctatgcagatactcaaatgagtcatatgttaatgaagaagtaaagtttgctggtaggatgaaagctccagtgactctttattcaccactgggtgttgttgaatgctggcgaaactggcccaggacatggctgggcacagaagctgcaggtcttgggctgctggtggctctctccacggagctaagcagccacctcatctccactcagcatggctgcagtgggtg

SEQ ID NO: 795729 - DNA, 632 bp, Homo sapiens
catctcggctcactgcaacctccaccttctgggttcaagcgattctcctgcctcagcctcctgagtagctgggattacaggcacgcgccgccatgcccagctaatttttgtgtttttagtagagatggggtttcaccatgttggccaggctggtcttgaacttttgaccttgtgatcggcccgcctcggcctcccaaagtgctgggattacaggcatgaaccaccgcagctggccagtgttttttttttttttttttttttaaatgaaagaacaaaatcccagactgatgataagttgttattgtgtttcacttctctaaagacaaggcgcctccttattgcctgtaccaggtggaccagtttctaccacccaaaccttggtgtgccatttttaaatggcctcattggctatgcagatactcaaatgagtcatatgttaatgaagaagtaaagtttgctggtaggatgaaagctccrgtgactctttattcaccactgggtgttgttgaatgctggcgaaactggcccaggacatggctgggcacagaagctgcaggtcttgggctgctggtggctctctccacggagctaagcagccacctcatctccactcagcatggctgcagtgggtg

SEQ ID NO: 795730 - DNA, 641 bp, Homo sapiens
atttaatgaaataatagatgaaaactttccatgtttagaaaagacttagacatccagatacagggggctcaaagatgctcaaacagatacaatgcaaaaaggtcttctccacagcatattatagtcaaactgtctaaagttaatgacaatgagaggattctaacaacagcacaagaaaagtttatagtcacctataaaggaacccctatctgactaacagcrgacttctcattagaaaccttacaggccagaaaagaatgggatggcatgtgaaaagtactgaatgaaaaaaggttgcacccaaggatactatatccagcaaaattactcttcataaataaagaaaaaataaagtatttctcagacaagcaaatgctgagagaatttatgaccactagaccggctggccctacaagaaaggcacaaagaagtcctaaacctggaagtgaagtgaaaggacaacatttaccaccatgaaaacacacgagaatataaaacccattggttaaccaaacacacaaatgaggaagagaaaggactcaagtgatactactacataaaattaccaaaccacaatgacaaacaagagaaaaagaaatgaacaaaggaaccagaaaacaactaactttatgacaaaaaca

SEQ ID NO: 795731 - DNA, 641 bp, Homo sapiens
atttaatgaaataatagatgaaaactttccatgtttagaaaagacttagacatccagatacagggggctcaaagatgctcaaacagatacaatgcaaaaaggtcttctccacagcatattatagtcaaactgtctaaagttaatgacaatgagaggattctaacaacagcacaagaaaagtttatagtcacctataaaggaacccctatctgactaacagcagacttctcattagaaaccttacaggccagaaaagaatgggatggcatgtgaaaagtactgaatgaaaaaagrttgcacccaaggatactatatccagcaaaattactcttcataaataaagaaaaaataaagtatttctcagacaagcaaatgctgagagaatttatgaccactagaccggctggccctacaagaaaggcacaaagaagtcctaaacctggaagtgaagtgaaaggacaacatttaccaccatgaaaacacacgagaatataaaacccattggttaaccaaacacacaaatgaggaagagaaaggactcaagtgatactactacataaaattaccaaaccacaatgacaaacaagagaaaaagaaatgaacaaaggaaccagaaaacaactaactttatgacaaaaaca

SEQ ID NO: 795732 - DNA, 641 bp, Homo sapiens
atttaatgaaataatagatgaaaactttccatgtttagaaaagacttagacatccagatacagggggctcaaagatgctcaaacagatacaatgcaaaaaggtcttctccacagcatattatagtcaaactgtctaaagttaatgacaatgagaggattctaacaacagcacaagaaaagtttatagtcacctataaaggaacccctatctgactaacagcagacttctcattagaaaccttacaggccagaaaagaatgggatggcatgtgaaaagtactgaatgaaaaaaggttgcacccaaggatactatatccagcaaaattactcttcataaataaagaaaaaataaagtatttctcagacaagcaaatgctgagagaatttatgaccactagaccggctggccctacaagaaaggcacaaagaagtcctaaacctggaagtgaagtgaaaggacaacayttaccaccatgaaaacacacgagaatataaaacccattggttaaccaaacacacaaatgaggaagagaaaggactcaagtgatactactacataaaattaccaaaccacaatgacaaacaagagaaaaagaaatgaacaaaggaaccagaaaacaactaactttatgacaaaaaca

SEQ ID NO: 795733 - DNA, 622 bp, Homo sapiens
ctggcctctgccccttcctctctttcgcaccactcttccaggtcattacaggactgccctgctgggtgaggcctgagtcttcccgaacacatgatgaccttatagctaagtccaccacattctgggtttaggacaagtcctcactccagttatgagccatgctctctatacttcagcattaaccacaatacattttggtcaccttattgtttgctgtttgrtcttatcctcaatttctttaaaacttggttgatgaaaagggtattatctattgaatatctctcctagttcataagcaagccattgttcccttcagcactttttttttttggccctcagggattctaaaacagctgtctggtgtctctgcttgagaagtcattgtcacagacttaacttttcctggaagggtacatttgcagctcaacaaacacatcccaagagctaagcatggccaatcccaagcttcccaaactaagtttagggccccatgccaggctttttggttatcttgcaactcagaagcaatatttccaatggccaaatatttctttggaaaaagacaaacatggccatgtggacccctgttgctttttgcccgatatcacagtcccatagtcaa

SEQ ID NO: 795734 - DNA, 615 bp, Homo sapiens
tgcttgacccagccagctactgagggaactgcagcatgacacgatgatgcgcagacttgccttgaaaggaggaatcttaggaaagtttccgagttactattaaggccacagcatttttctgtttaggagcagaaccatcagtcaaccatgagctctaagaaacacaacataacccagtgctaatagcagaatggtatattcttagccwcctcagaaaggcacagcatacataattcaaacagcaaatctgtggtggccatcagaactttggcagggttacgtaacatttgtcaaacaatgtggacttctagccatttcatacatttttaagatctggtcatatacattgggggtaaaaatgtacacacacacacacgcgcacacacacacatttttcaccaataaaacatatatgctatctagagcccatttactctatgtcagctttggcttcttggtgatcaaactgtggcaaagctaaattagatatacttatatatccattaatttggcttagaaagttaacacacaaaaagaaccaagtgtttaaaaaaaatctttggtggcatgttaaaggagtcacccttcagcatgaggtgagaaacacaattaaaa

SEQ ID NO: 795735 - DNA, 611 bp, Homo sapiens
ctcaggacctgaaaggatacagaatggagacaataacaaaatgatagtctttcccaattcctcccaaaaatcagttatcttgcttgtttggcccagagacaggtcctgggtgagaaggtggtaacctctgcctacttctcacatcctctaccagccattatcccaggacagccaccaggcaaggctggagagaagcccagggactcactatactcttctcacagttgaactgtaaaggtgacagcaaatgctctaggacctctggctagagcargagagatggcacaccagatggcacaccactaaacagcattctccaagagccagtgatcaaagttcatttgccccaaaccctctcaaatcactaaccattcaccctttgatttctcattctagcttgctcccgctctgcagtctgtccacaatctttctcaaagggggcaggacagggagcaccaatgtaaaatatcttccctttattgctcttctgtctgtaacataccccagcataagaaatatgctataaacatgaaggagggcatgggtgcaaaaaggatgtgttcataagtgctccagctcataagcccagttcaaaattgggtctagctaga

SEQ ID NO: 795736 - DNA, 624 bp, Homo sapiens
cattaaaataatgaagtgaaaatagtaaaattatcaaacttgtaggatacattgaaagtagcgtatacaagaaaattctaaatgttttttagaagacagcaaagggtgaaaattaatgagctacgaatgaagcttgagaaattgaaacaaatcacaatccaaataaagtagaaagatggataytctaaagaacaaaaactatgaaatggaaaacaaagccaaaagtttgtctttggaaaaaagaaaaaaaaagctagacccatggctggcaagattgattaaaagagagacgacacaaattattaatattagaaataacaaagggtattaataatccagatatagtagaaatgataaagatcatgaaaaatattgtgaatatttttatgtcaatacatttgaaactgtagatgaaatagaaaaatatggcttattaaaactgactcagttgggcaaggtggctcacacctgtaagcccagcacttcggaggctgaggtgggcagattgcttgagaccaggagttctagactagtctgggcaacatagtgaagctttgtctctgtttaaacaaacaaacaaacaaacaaacaaacaaacagaaacactgactcaagaagaaataa

SEQ ID NO: 795737 - DNA, 624 bp, Homo sapiens
cattaaaataatgaagtgaaaatagtaaaattatcaaacttgtaggatacattgaaagtagcgtatacaagaaaattctaaatgttttttagaagacagcaaagggtgaaaattaatgagctacgaatgaagcttgagaaattgaaacaaatcacaatccaaataaagtagaaagatggatattctaaagaacaaaaactatgaaatggaaaacaaagccaaaagtttgtctttggaaaaaagaaaaaaaaagctagacccatggctggcaagattgattaaaagagagaygacacaaattattaatattagaaataacaaagggtattaataatccagatatagtagaaatgataaagatcatgaaaaatattgtgaatatttttatgtcaatacatttgaaactgtagatgaaatagaaaaatatggcttattaaaactgactcagttgggcaaggtggctcacacctgtaagcccagcacttcggaggctgaggtgggcagattgcttgagaccaggagttctagactagtctgggcaacatagtgaagctttgtctctgtttaaacaaacaaacaaacaaacaaacaaacaaacagaaacactgactcaagaagaaataa

SEQ ID NO: 795738 - DNA, 419 bp, Homo sapiens
gatccagatccagagttaagaactactgtcctagcctttggttgaccttttttgtgatagcttctctgaggaaattcagtaggaaactcaattgcctagattgtccaggcaacttgcccaggatgtatcctagatgcatcttcataaaagatgaaaacaagcagatgatatttcataaatactttaaaatatgtggccgggttctccaagcyagagttcccttacatgtaaatgaggagaaaggtagctctttccatgtattatctcatttaatcctaacaagaatctccacaggataataataaatgagataatatgtgtaaagtgattggaacagtacctggtacatagtaagcccttgtttttattgacatgcagggtaattgctaagtgcagttcctaacaaatggaaagattgt

SEQ ID NO: 795739 - DNA, 419 bp, Homo sapiens
gatccagatccagagttaagaactactgtcctagcctttggttgaccttttttgtgatagcttctctgaggaaattcagtaggaaactcaattgcctagattgtccaggcaacttgcccaggatgtatcctagatgcatcttcataaaagatgaaaacaagcagatgatatttcataaatactttaaaatatgtggccgggttctccaagccagagttcccttacwtgtaaatgaggagaaaggtagctctttccatgtattatctcatttaatcctaacaagaatctccacaggataataataaatgagataatatgtgtaaagtgattggaacagtacctggtacatagtaagcccttgtttttattgacatgcagggtaattgctaagtgcagttcctaacaaatggaaagattgt

SEQ ID NO: 795740 - DNA, 419 bp, Homo sapiens
gatccagatccagagttaagaactactgtcctagcctttggttgaccttttttgtgatagcttctctgaggaaattcagtaggaaactcaattgcctagattgtccaggcaacttgcccaggatgtatcctagatgcatcttcataaaagatgaaaacaagcagatgatatttcataaatactttaaaatatgtggccgggttctccaagccagagttcccttacatgtaaatgaggagaaaggtagytctttccatgtattatctcatttaatcctaacaagaatctccacaggataataataaatgagataatatgtgtaaagtgattggaacagtacctggtacatagtaagcccttgtttttattgacatgcagggtaattgctaagtgcagttcctaacaaatggaaagattgt

SEQ ID NO: 795741 - DNA, 604 bp, Homo sapiens
ttgttttctgaagatccagatttccatctgttataatttgcctttatcctgaagaactttctctatttagcatttattgtagtctaggtctgctgaaaacaaatcttctttctcttttttttgtctgaaagtgtccttattttgctttcattctggaaggatagttgagctagatatagaaattgatggtgatagttttttttttctttttcagtctttaaagatgttgtttcagccatcctggaatcctttttttctgcctattctctactttccttcactctgtaaccaattgcctatgctgggaatctccttccttgaagcytcttcttttcagctctctgcctactttgtttagagactcattctctggttttatccaggagaaattgtaatatgggaatatactgaaaggggaaggggcacagctgaccctgtggttctgtaggcagaagagacaacaatgtcttcatttcagatgacatgcctgtatatccagaccatcaaagtaagcctactattagaattaaataagaaaattttattaaataggcagataaaagtgaatttacaaaattaatatctttgagctagtagtaaaaag

SEQ ID NO: 795742 - DNA, 575 bp, Homo sapiens
gtaatatctggacctcccatattttatttcaattctacttttaggctggaaatagtttttggtatttatgtatttcttgtagtcccatgtcagatgcaagcaatagaagcaaactcatgctaccaatgttttgttttcctgcttcttaacaaaagtcacaagttcattcggtccatttttcttgttgcaggcaaagcgttgttgcaggaaacatgctatgtatttcgggacttttaatagatcagcatcacgtttctggtcctaatagccacatccatcagcttaagctagattatgttgcaataatacacgtcctccaaaatcctagtgccttacaacatcaaatatttatttcttgctcatatacrtattggcagtgggtcagatttcactctgcatttttttgttgttgttctgcaatacgggctgaaggaacagcctctatcttagtcttgtggaacaaagcaatggcagaaccattcaactcccagaacactgatgggtcttaacacatctgttcaggcattgtataaattccatgggacaaagaaagccacgcagcaaaccctgccctc

SEQ ID NO: 795743 - DNA, 476 bp, Homo sapiens
tggtgaaggcccctgtatgcacaatggtttggggtgacctgaaacttctccaggaggctccagcctagaatggcttcccttgctccctggagactttccaactcttctgggaggtgagtggctgtccttctaagatcactgtgcttaccgagataagataatccctggtttatatgcttaagaggagataacttcagggtgtgtgtctgcccagatcccaaaagcctctgagaggaaaagcaggccctttcaaagcagtcacagggagactgaagtgcaaatgtggcccagcacttggctggaggaaggtggagccccscggtgttttattggcagagtcacaaagagtcctaagtcctctctttggtcgatttaaaaacctcaggaacagacaaaactcagagtgaaacacagaactgtatgttcaaacatgtctagggaaatttttctcacgggagacaattcatctcatcagc

SEQ ID NO: 795744 - DNA, 658 bp, Homo sapiens
acactattccacaaggtaaaaagggaatcctccctaaatcgttatatgaagccactatcaccctaatacccaaaccagcaaaggacataacaaagaaaaccacagaccaatatccctgatgaacatagatacaaaaatcctcaacaaaatactagcaaactgaatccaacagcatatcaaaaagataatctaccatgatcaaatgggtttcatgccagggatgcaggtatgacctacatacgtaggtcaataaatgtaatataccaygtaaatggaattaaaaacaaaaatcacatgatcatctcaatagacacagaaaaagcatttgacaaaattcagcatccctttgattaaaaccctcagcaaaatcagcataccagggacataccttaaggtaataaaagccgtctacaacaaacccacagccaacattatactgaatgggaaaaaggtgaaagcattctcgctgagaactggaacaagacaaggatgcccactttcaccacctctattcaacatagtattggaagtcctagacagagcagtcagacaagagaaagaaatcaagggcatccaaatcagtaaagaggaagtcaaactgtcactgtttgttgatgatatgatcgtatacctagaaaaccctaaagactcatccaga

SEQ ID NO: 795745 - DNA, 644 bp, Homo sapiens
agtgcacaggaaaacctggccctgtcctaagaaccgaggccacagaactctgaacttttcctgtaacaccccatctccaatatcgaggctccaagatttttaaacgcatttgcagaaattctacaaaggtaagagatttttgccaaagttaagcggaaaattctctgcctgccacatcctaaatcattaaaagtcttctaataaatctatccctttcagctttcgccacttcacccaagtcgtctctcaatcagagtttgtaacggggaacaaayttccaattattagagctgtttatttctgtagcgatggacccccaagcctttcataagcaaacctattgagcccaaaccatgcctttcatggatgacagcttcagaataagagcagtttgtctacattgcagggagaaaccagatgtttcccttgagtcgaaacaagcaaatgacaattcagtcaaactgcagaatagcctaccaaaaaaattttttttaataaattccagggcagtaatatgtgtgggcctattttttgaccctgaacacctccatctatacttgtatttttcattgttcatgcagggcactgattgcttttgtagatctctaacaacaatctccatgcactaaccctggttaatgtat

SEQ ID NO: 795746 - DNA, 611 bp, Homo sapiens
gatgtttaaaaatcaagagaaaaaatactaaaaatttttaaaaatgattaaaaactatgtgtatcttatttttttcctaaaaagaagaaacatgggccaggcgcagtggctcacgcctgtaatcccagcactttgggaggccaagatgggcggatcaagaggtcaagagatcaagaccatcctggccaacatggtgaaaccccgtctctactaaaaatacaaaaattagctgggcgtggtggcacgcacctgtagtcccagctacttgggaggctgaggccggagaatcgcttgaacccaggaggcagaggttgcagtgagccaagatcgcaccactgcactccagcctggcaacagatcaagactctgtctcaaaaaaaaaamaaaagggggggaagaagaaacgggctgggcacagtggctcacgcctataatcccaatactttgggaggccaaggcgagaggatcacttaaggtcaggagttcgagaccagcctggccaaaaatggtgaaacccccatctctactaaaaatacaaaaattaactgggcgtgatggcacacacctgtaatcccagttactcaggagactgaggcaggagaatcacttga

SEQ ID NO: 795747 - DNA, 621 bp, Homo sapiens
tgtaatcccagctacttgggaggctgaggcgggagaattgcttcaacccgggaggcggaggttgcggtgagccgagatcgcaccacttgcactccagcctgggtgacaaagcaagactccgtctccaaaataaataaaaataataataaaataataaagctcaccccgctgcccaaacagcacacagctctgtctgcagcctctgatcttgccatgagcttgtaggtcagagagcagacaccattcacctcccccaggcctggcacacaaacgtgctccgtcactaagcgtgggctgatgactcattctcctgggccctttcacatgccccagtgcccagcactcctccctcacctcatgcatttgtgtttacccaagacactcggtcataggttctaacayagacctaggccacagagcctggctggcaaccccacacagcacgagcccaaaaaattccagaaaacaggacagaatccagtggaaggcaatttcctagacaccaaaacaataagcaaaaacatgagtaagtgctgagtgtgtgccaagcgctgtggcaaagccctcaacgcgaatgacttgccttgctcctcccgactgtcctacatcaagggcttctat

SEQ ID NO: 795748 - DNA, 615 bp, Homo sapiens
tggtaaaagtctggaaggttatatgaagtcagtgaaaatttagttcttttgtattaacaagaagccctttgtgtggtattactgggtcaaaaagaggcagctaaattttaacagaaaaagaaaggagtgcttatcaagcaccatatatattgcagctactgtttggagtctgaagttatccagttctttgtcccttagattaccatgtgcatgattcacctctttattagtcattagacatgcatgttgtgtatrtgcatacacacgtgcatgtggagcagtggggggtggaggaaagagcaactaattaattagcaaagtgtgtgatgataaaataacaggtacatttttttttcctttaagaagtatgtttcactgcaaggactgaaaaaaaggggcacgtactcaatgaggacgacgtgggcaaatcttatcaggtctgcccacaggagcagatggcatcaatgactgaaaccacctgcctcaaaaattccctcctcattttttcagtgtgcttaatgaaatgacaaaaagagaaaattctgcaaaacaaaaaacacaaacaaagctcaggggttggagcttttaatttcaaggcaagtgtgggatgaaatg

SEQ ID NO: 795749 - DNA, 615 bp, Homo sapiens
tggtaaaagtctggaaggttatatgaagtcagtgaaaatttagttcttttgtattaacaagaagccctttgtgtggtattactgggtcaaaaagaggcagctaaattttaacagaaaaagaaaggagtgcttatcaagcaccatatatattgcagctactgtttggagtctgaagttatccagttctttgtcccttagattaccatgtgcatgattcacctctttattagtcattagacatgcatgttgtgtatgtgcatacacacgtgcatgtggagcagtgggrggtggaggaaagagcaactaattaattagcaaagtgtgtgatgataaaataacaggtacatttttttttcctttaagaagtatgtttcactgcaaggactgaaaaaaaggggcacgtactcaatgaggacgacgtgggcaaatcttatcaggtctgcccacaggagcagatggcatcaatgactgaaaccacctgcctcaaaaattccctcctcattttttcagtgtgcttaatgaaatgacaaaaagagaaaattctgcaaaacaaaaaacacaaacaaagctcaggggttggagcttttaatttcaaggcaagtgtgggatgaaatg

SEQ ID NO: 795750 - DNA, 631 bp, Homo sapiens
tttttcctttaagaagtatgtttcactgcaaggactgaaaaaaaggggcacgtactcaatgaggacgacgtgggcaaatcttatcaggtctgcccacaggagcagatggcatcaatgactgaaaccacctgcctcaaaaattccctcctcattttttcagtgtgcttaatgaaatgacaaaaagagaaaattctgcaaaacaaaaaacacaaacaaagctcaggggttggagcttttaatttcaaggcaagtgtgggatgaaatgagtgcctctgggagtctgctttgccactgagggatgaactggcttgggcagaaaattcctgaactcctgattgaattatttctactcaggaaaagagtagaagtcatamcaatgggtaaaaaccccaagcaaagtgaatcaattccctgcttattgcgtgatgaagagaagtccctgttctgaaggaagagaatctgaagaaggcagaacttcctcagcaaaccacggccaagcaaaatcagagcctaaccctccccagaacccggcctttgagcccacagacacatctgcagtgaaaatgaagtgtgctggctgatgcagaagaggcctgggcagggaccaagagctatgtggaattctaggttc

SEQ ID NO: 795751 - DNA, 613 bp, Homo sapiens
cgccaccatgcctggctaattttcgtatttttagtaaagacggggttggctaggctggtcttgaaccgctaacctcaagtgatctgcctgcctcagcctcctaaagtgctgggactacaggtgtgagccaccatgcccagcctggactctcttttctgtacctccaaccttcacttagtcaccaggtcctgttgattccacttcctatgtttctatctgagactatttatttatacttaaagtttatagatgattgtgctcaaaccagcttaactgaaagtatttaaggtttcatgtaacttgaccagaatgtatcacttgaagggaggttaatggttctcctgaaatacaggtacaggtatacttcactttatatagtggatgaaagaatgtaggtaaagtgagtttttgaaaacatgattatattttaactacccacctacagsaatctccctatttaaagaatattctatagaaattgcccttgtttagaaggcagttgtttttgaaatgagaattcttcacctcatacatgtttttgctagcaatatccagattttagttttccgggagtagaggtaatatttctttataaatactaaacctttttaaa

SEQ ID NO: 795752 - DNA, 600 bp, Homo sapiens
caaggccctggatggagcgtcttgtgacaggccatatctttccctcagcactgggaaatgcaagccgagatttccagttgaagcagctgcccttcttgatagaggatgacttatggcagggagggggctcaggaggagggtctcagggtccgatctgaaggagcaggtgtcccaggttaggctatccaggggccattcaagccacacttagggtgccctggactttggaatgtctactttggaattctgctgggcaagctgaagggaccctgctttaatctcaggatctcccttccaccycctgctaggcttgtggtgagtgaatgaatgacaatagggttgcctttgctaaatctggaaaaatccaggactattccaaagtagagtctcctgagagagtaaaggggacccaggattgaagttaggcagagattaacaaaggtgtagattagcccaaggacacatgacatgacttgagtattctttaaatcttgttccaaaaggggtttagtgtgtaatgtgttgggtacccattgttagcattcaaataaatgttgatatgctagtgtaaggaattattcaaaaattttccaaaatatg

SEQ ID NO: 795753 - DNA, 632 bp, Homo sapiens
ggatgtttttattaatgtatttttcttatctacttttctgaaggtgaaatgttactttccttgaacatgttcttctaaaattgccaagctttttatgggccaatcttatttttttctgaccgtctactcattagactctggttgttcttataactagataatgcacatgaactttgaattaacctgtccacaatatctagtgctgttctaattgaaataacttgcttctgtgtttcaggtgtctggagtagatttgcagaatgcctcacacagcgaagcagttgaggccattaagaatgcaggaaaccctgtggtgttcattgttcagagtttgtcatccactccacgagtaagttttagttcatattttcaaaaagtttaacaacactctgtatacctgcagaccaagctttggcctctaagtattttccacatattttcattgtagttcccaaactatayttaaagtatgagcttcataaaaatttagtcataaggttcccttttttcccctccagttttgatcttctggtcaaattggagtcattacagtgtgcattggtttaagttactgcttctggaatcaaacagacctgttttcaatttcttgattccttatttaccagctttgc

SEQ ID NO: 795754 - DNA, 616 bp, Homo sapiens
aggatgtatgaaaatgtctggatgtccaggcagaagtcaactcgggcagagccctcatggagaatctctaccagggcaatgtagaggaaaaatgcaggattgaagcccctaaatggagtccccatgggggcactgccttgtggagctatgagaagagggccacgatcttccagaccccagaatggtatctccactggcagcttgcatatgcagctggaaaagctgtaggcactcacctccagcttgtgaaagcagccatgggggctgtaccytgcagagccacagggacagagctgcccaaggccttgggagtccaccccttgaatcagcatttcttggatgtgagacatggagtcaagggagatcattttggagctttaagatttaatgattatggccaggcggttgctgacgcctataatcccagcactttgggaggctgaggcaggcaaatcacctgagggcagaagtttgagaccagcctgaccatcatggtgaaaccctgtctctactaaaaatacaaaaattagccaggtgtggtggtgtgcacttgaaatcccagctacgtgggaggccaagtcaggagaatcacttgaactgggaggtggaggttgca

SEQ ID NO: 795755 - DNA, 560 bp, Homo sapiens
atgggtttatgttgctttgatttcagtagttttatgtcactttaaagtattttaggtttgatatatataagtataggttaaacactcatcattttaattgatccaatgttgaacaaagagagggcattgttatttcaattaagaaaataatatatcaaaaattaagtagcagttaaagttactttcttgcagagactgcctcttttttgctgaatgyaatggggcaggaggtaagaaatatcactcctaagtttctatcatgtttacatatttagatatgtattttttaaacaatttacttttatctttttcttacatttatgatatgccaaactctattgttttttttttttttttgagacagagtctcgctctgttgcccaggctggagtgcagtggcactatcttggctcactgcaaacttctcctcccgggttcacagcattctcctgcctcagccttctgagtagctgggactacaggtgcctgccaccacgcccggctcattttttgtatttttagtagagacagggtttcaccatgttagccaggatggtctc

SEQ ID NO: 795756 - DNA, 560 bp, Homo sapiens
atgggtttatgttgctttgatttcagtagttttatgtcactttaaagtattttaggtttgatatatataagtataggttaaacactcatcattttaattgatccaatgttgaacaaagagagggcattgttatttcaattaagaaaataatatatcaaaaattaagtagcagttaaagttactttcttgcagagactgcctcttttttgctgaatgtaatggggcaggaggtaagaaatatcactcctaagtttctatcatgtttacatatttagatatgtattttttaaacaatttacttttatctttttcttacatttatgatatgccaaactctattkttttttttttttttttgagacagagtctcgctctgttgcccaggctggagtgcagtggcactatcttggctcactgcaaacttctcctcccgggttcacagcattctcctgcctcagccttctgagtagctgggactacaggtgcctgccaccacgcccggctcattttttgtatttttagtagagacagggtttcaccatgttagccaggatggtctc

SEQ ID NO: 795757 - DNA, 578 bp, Homo sapiens
gggagacaattcaactcataacagtgtgtgagatcagaaaattcctcctgctccccccgccaccccatttacaggtctcctatagagagaagcgttgactggggacactcgctgcttgcgttttgctggtagctgggctggaaggtccacaaaggttcacttcatgtgagtggcacctcagggctcttccacaggcccttctctccatgcagctctcttgggcttcctcacagcatggcggggtttttcacggtggctggcttccaagaggaagcacttcaagctgggtgagagcagatgcctcaaatctctgcagcytcagcctcggaagtcacacagcgtcgcttctgctgcatcctgttgatgaaagccagtcctggagtcagcccagatccaaggggaggaggaaaagactccaggtcttgctgagagtaatgactaagaatctgcagccatctccaatccaccacgcccatgcaagagacgggagtgatatttgcaaccaagatggtgaacggcagcagattggtcactgtttccagttattcaccatcccctcagtgagaggattatccatc

SEQ ID NO: 795758 - DNA, 601 bp, Homo sapiens
agaaaaggcacctggaggagtgcaggggactgtgtctgctctcagagcttggcttttaggcccagatggcctggttgtccttcccattaggaaacatccgtctgctcgcctggctaggcactgcagacctcattctcctcagagcaccttcccgccccaggggctgtcaagcctctaaagagatccagagaggccaggcrcagtggctcacacctataatcctatcgctttaggaggctgaggcaggtggatcacttgaggtcaggagttcaagaccagcctgggtaacacggtaaaaccctgtctctactaaaaatacaaaaaaaaaaagccaggcatggtggtgcatgcctgcaggcccagctactcgggaggctgagccagaaggatggcttgaacccgggaggaggaggttgcagtgagctgagatcacgccactgaactccaacctgggcgacagagtgagaccctgtctcaaaaaaaaaaaaaaaaaaaagagagatctagagagaactttctccatgtagcagcagaagccatggtgagaacaaagtcaatgaagaatgtcaggcttgggctgaggaggccccagagagagaga

SEQ ID NO: 795759 - DNA, 600 bp, Homo sapiens
tcctgctgtttctgctcaccccaacatgggcacatgcacacacatgcaaagacacagagaggcacaagcagaggtcggtgcagacatgcagctcatacacgcagctcatacacccagcccatgcagttgctactgcagcagtggagggacagaggctggccccaggaggaggcagaggaaggggaccccctgcccagccctgatgtcsccaggcctgcaggcgcctcatggtggggtggagttccaggctgggcaggctcccatggtcctgtggctccgtcttctgagtctcaggggcaagagacagccttgatggggccaaagcttccagaattctggcaggactccccagcatacctgaccagtgctggtccccgggcaaggacctggaagtgggcacagccctagggcagaggggttgggtcggggcaggggcagcagagacagccactcacaacaggatctgagggggccaggcagccacagggcctgcaccaggaccactgtgtgcacccttggaggtgactgagcctccatgcctgggtctagtgctgccatggacgtggggagcctcctcgccagagttcctgggccctctgt

SEQ ID NO: 795760 - DNA, 623 bp, Homo sapiens
gaggggactgtgagagaacggcaggtccccagtgctctctggctcacaggacagccctcccgcctccgcagccgccttgattccaccattccccagatggaaaaactgaggctgggaggcttgtttacagtgtcagggccccgagcttggcccctgggacagcccctcaccccacaaccgccactagctggcaaccaggtggaggaaagttctggtccacgcccagccttcccacctccctgatctctggcctcagtttccctggttgtaaagcaaggatccccacggcatggtgtacgctgcagtggcgggggagttrgggggctccatggagcttctcacaccccagtgttgatttaagattctctaagcgcagcagaagcgcggtgaggcgaatgtgagagggccgggactggagatgctggggatggggtgggcatacttaggagaaggggccccacaggtcccggagcggccaggtagctggggcaccacccaggccccctcaggcgcggaaaccttcctgctacctggtatcctgcctaccccccccagctcggccgccctggggcctctccggctccagctcttggctgggcctcggtgccagcacaagccctatc

SEQ ID NO: 795761 - DNA, 586 bp, Homo sapiens
ccagccgcctgtttacgaggccagccagccccccgtcacagccgtgcccacggggtgggggagggacgacagatggcggaggtgccattttaaccagagtctgcagccgttggggaaggagaggaagtagcccagggctggagggagctgggaccttctgttgttgctgcccctggggcacctccatcctaccccctcygcacgggcacctctcccgagctcaggtctgagtggcacagatccaacaacctcgtcactggggctgcctaatcttccatggactctgtgggtgccccttggatcagcgaagcatccggggtcccccgggggcaggggctataggggcaatctcttaaggctccactgtgaggagggccccatgacttctccagcccacagcaaggatcccccacccccactactgactatgaaatgcaggctgcagggagtcacagcaggagggaccgtgggcagacagggctgcaaagttcgggctgcctggaggctccagcaggggagctcaggacgggttgggagcaaagtctgggagagggagaggggctccccccaggcgttctgtgctttc

SEQ ID NO: 795762 - DNA, 535 bp, Homo sapiens
ccaatgcctgtacctcccattgtatctaggaagtaactaatttgcttttgattttataggctcacaggtggaagggacttgccttgtctcagatgagactttggatttcggacttttgagttaatgctgaaatgagttaagataggaattccactaaacctataaatcaatttggggataattgacatctttactatgttgaattttctaattcatgaatattgttaatgtttctaattatttagmtcttttaaaatttctttcatcagcattgtttaattttcagcatataggtccagtacatgttaagtttatacgtgagtgtgatttcattttccttggaatggttgtaaatgttgtgtttttaatttcagtatttacatattcattgtcagtatgtagaaattcagttgatatttgtatgttgattttgtagtctgtgacattgctgaactcattaattctatgaaattttttggagattctttggaattttctacatagaaaagcatgttggctggcagcagtgactcac

SEQ ID NO: 795763 - DNA, 587 bp, Homo sapiens
tctatcttcagaatcattctgtaaatctctacactgttctaacattaaaaggttattttttctaaaaatctcccaaccagttgctgaagacttataagacacagtttttaaaaagcaagcaaaatggaacctaagaactggtaagtctatgttccagatttttctacagtacgtaccatcattgtttgcagatctgatctaaagacttactctctttcttttctgtttatatggatttataataggtaattttgatgttaaaatatacaaggcccaaataaccaggtatccgtaatatcaaaaagttattttttaaaaaaacattagcaattaaactttgtttttgtacatcaacagatttcctggaaagacytagtcaatctgctgtaaaaaataagtcgtaagttagtagctaattttcagtcaagggagatctataaggctggaaaactttaataacatatagattgtagagtgattatatcccatcactgttcaatgccaatcacactaacagcatactataaaatatactatgccactagttttcaaagctatgggtaaagtaacatagataattttataat

SEQ ID NO: 795764 - DNA, 600 bp, Homo sapiens
  misc_feature 598, 599, 600: n = A,T,C or G
gtatgtatcaagggcttagcgcactgcctggtacgcagaaaaagcccagtaaatggcaagtgctattataaccattatcatgaggttggaggatcgcttgagcctgggaggttgaggctgcagcgagcagtgatcgccccactgccctccagcctgggcaacagagtaaaaccctgaaaaaacaaaacaaacaaacaaaagcccrggggaaacaaatcaaatgtccccgtataaatgataaacaaaatgtggtatatacggaaccttattcagcctttaaaaagagtgaaattctgatgcaagttacaacatggacaaaccttgaagacactatgctaagtgaaaaaaaacatacacaaaagaacacatgttgtatgattccagttacatgaagtatctggaatagtcaaatattatacacaaagacagatgaatagaataatggttacctgaggctgcaggtagggcagaaatgaggagttagtgtttaacaggtgcagagttgaggatgatgaaaacgtctggatggatggtgaaaatggttgcacagccatgtgaatgcacttaatgccactgaactgtacacttaaaaatggtnnn

SEQ ID NO: 795765 - DNA, 539 bp, Homo sapiens
acaaagcgatagataatatggcatgaagttgacagtagactgttgaagatctatcaggtggttaatggctaaatagaacccacaggagtggaggaggaagggagttaatttttctgaatgtcctgtaccatttactttcgtgtctagtaccagctagtaataaaattgtaggaaaagctcacaaagtgtgcttgcttaattaatgaaaaccatttttgtattaaaagaggccaggtgagtatcatggccttctttttaggccttattccctcccacccacccacccaccgacccccagctttttttttkttttgttttgttttttaagactaaggtaactagaggtgtgggtgagatgaaaatttggtaatagggccaaatgaaataagccaaactgttttgccacgaagacttccagtcttcaggttaattctggtatgttaaaggtggttttgcagagctcagttctgtgaatgaatcccttttcaacttcttgataaaggcgtgacttccaaacttttctgaggtacattgttaaa

SEQ ID NO: 795766 - DNA, 617 bp, Homo sapiens
ttctgctggaacagtacccagctctaattactggccgtagcagcatattgcttaagaattttgtagaacttatttctcatcagcagctgtccaaaggactgataaatagagacagatcccagtcctggatactttctgtaaatcctaatcggagactcacttctcagcaatggaggctgaaagtcttagtgagactcagtaaattccttcaggccttggcagatggatccagtaggttgagagaaagtgaaggacttcaggaacagaaagaaaatccccatgccactagcaactccatttttatcaactggaaggaacatgccaacgaccagcaacacatccaggtttatgaaaatgggggttcacagccaaatgtcagttcacagttcaggctacggtaagaaggatttcagttatgtccacacagttttsctgtattgaattataactgctaaccattgatgactgttggtgggaagacatgcagttgtctttcatagttttcatatagttactcatgatttgattttatttactgatgggaagagttatttgtatgttaatttatttatagcaaagcctttgagaaataaaacttgataatatcttttggcttt

SEQ ID NO: 795767 - DNA, 541 bp, Homo sapiens
cctgggtatggggataggctttgaggacccctggtaggatgtaaattacattttttacataattgtgggttatcccttagtgagaaaaaaaacctgtagatatggcacttcactccatttgccctctcgtttacaaaagagatctagctgtaggatggtattatagtttacacttccctcgggtggccatgtctctcctctggaaagaggatactgtggccaggtggtrctgcataaaaatataagtcacttcttcagcatttgagggtcaaattggtcccaattatccagaatacacctcaggagtggcttcacttttgaaggaatgtctcccatctgaaaggagaacataggagtgcccgcacctctagtcatcccctagtgagcactagccctagggcatccctgtaggggtgggttgcccctacacacctgtgggtgtttctcgtaaggtgggacgagagatttggaaaagaaaaagacacagagacaaagtatagagaaagaaataaggggacccggggaaccagcgttcagcata

SEQ ID NO: 795768 - DNA, 561 bp, Homo sapiens
gagagtatgtatctgttggcgtcttttgctcaatatggtttatgtaattcatatttttgcaaatatctataattcattttcatcactgcggaatagtccattgtatgaatacgccaccactgatctattctaaagaaagaataggctgggcgcggtggttcacgcctgtaatcccagcactttgggaggctgaggcgggcagatcacgaggtcaagagatcgagaccatcctggctaacacggtgaaaccccatctctactaaaaatacaaaaaaaaattagctgggcgtggtggcgggcgcctgtagtcccagctactcgggaggctgaggcaggcgaatggcgtgaacccgggaggcggagcttgcagtgagccgagatcacgccamtgcactccatcctgggcgacagagcgagactctgtctcaaaaaaaaaaaaaaaaaaaatatatatatatatatatatatatatactgctgataatagcttttgggattgtttccaatttttgggctattaggtgctatgattaacattcttgtgtgtatttagaaacaaggc

SEQ ID NO: 795769 - DNA, 574 bp, Homo sapiens
ataaataaaatatatgaattatcacaaaatgataagcataataaaaaccaaaaataaaaaagggtatgaggaactggtagtgtttctgtaaaggcacagattataattgtagtagagtggagaaggctgagtgaaatgagaggtggaattttaatgaagacctgagagatatgaagaaattagcagaaaaatatacgggtgaagagttctaggcagaaaaataatccagtatataaggacactaacacagaacacacaaagattgttcaaagaacagttaggaaaccwcagtggctcagtagaatatataaagggcagaaatgtaagatgaggtcaaaaagatgctaagaggttagactctataaggtcagagcatatgcaggcttttaatctgagtaaaatgaagaactagtgcagggttctaactgaagagtgacctgttgtactcagattttaatgggatacctcctgctgctctgcccagaatattcttttagaatcaaagagcaaaatcagagagatgtgtaggaagtaattagagtacactagtcaagagatgattacttgtactaga

SEQ ID NO: 795770 - DNA, 605 bp, Homo sapiens
attgaacatcttccctttgggaagactaaagctggcaccttaagcaaggcttgtttcatttggttaaaggcccttttagcctctggttcccaaattagagagtgagtcttagctgcctgagtttactttatttgttgatagaagggacgagctatctcaccatacccaggtatccataatctgcagaatcctgtaatgcccaagaattccctcagttgctagagggttttggggagggtgaaggargagatgagcttaatcctttctttgcctagttctctggtcccgtctgacaagattagaactgagtacttcactgaagtcttacagaggtcagccttagattttgagaccttatatcctctgttagccagaaaattaagaacagccttactgctctcctgagagatatactcagttggggcacaaaggacaatatcatttacatattgtaaaactttaacctgaagataaaggaattcagagagatcttttgacaatacctgcccaaacaggtgggggtgtcttagaatccttgaggtaacacaattcagcttagcttgatggttggttgaagggatcctcaaatgcaaacaaatcctggg

SEQ ID NO: 795771 - DNA, 605 bp, Homo sapiens
attgaacatcttccctttgggaagactaaagctggcaccttaagcaaggcttgtttcatttggttaaaggcccttttagcctctggttcccaaattagagagtgagtcttagctgcctgagtttactttatttgttgatagaagggacgagctatctcaccatacccaggtatccataatctgcagaatcctgtaatgcccaagaattccctcagttgctagagggttttggggagggtgaaggaggagatgagcttaatcctttctttgcctagttctctggtcccgtctgacaagattagaactgagtacttcactgaagtcttacagaggtcagccttagattttgagaccttatatcmtctgttagccagaaaattaagaacagccttactgctctcctgagagatatactcagttggggcacaaaggacaatatcatttacatattgtaaaactttaacctgaagataaaggaattcagagagatcttttgacaatacctgcccaaacaggtgggggtgtcttagaatccttgaggtaacacaattcagcttagcttgatggttggttgaagggatcctcaaatgcaaacaaatcctggg

SEQ ID NO: 795772 - DNA, 605 bp, Homo sapiens
attgaacatcttccctttgggaagactaaagctggcaccttaagcaaggcttgtttcatttggttaaaggcccttttagcctctggttcccaaattagagagtgagtcttagctgcctgagtttactttatttgttgatagaagggacgagctatctcaccatacccaggtatccataatctgcagaatcctgtaatgcccaagaattccctcagttgctagagggttttggggagggtgaaggaggagatgagcttaatcctttctttgcctagttctctggtcccgtctgacaagattagaactgagtacttcactgaagtcttacagaggtcagccttagattttgagaccttatatcctctrttagccagaaaattaagaacagccttactgctctcctgagagatatactcagttggggcacaaaggacaatatcatttacatattgtaaaactttaacctgaagataaaggaattcagagagatcttttgacaatacctgcccaaacaggtgggggtgtcttagaatccttgaggtaacacaattcagcttagcttgatggttggttgaagggatcctcaaatgcaaacaaatcctggg

SEQ ID NO: 795773 - DNA, 625 bp, Homo sapiens
tgctttcataatctttcatgtaattttgatgaaaagcctaacatatatcctatccttgctcctctatagatgtggttccctgtgtatccatcaacccccagcttcctttaggtttttgtctttatgttgattcattgtaacttaaattttatctcatgactagatttagtttttttggtgtttataytgttttgtattttctgagcttcttggatctgtggtttgatatctgtcattaattttggaaagttctcagtcatataactgataatgatattgcaaagatgacatttttatgtatatttcttctttttctgatatttcaattaggcgtgtgtcacattttttgaaatagacccacaatttttgggtgttccatttattttttgaagtttctattaatctgtcttcaaaaattcactgtttgtttcctcagccatgttccctctactaattaatccatcaatgacattattatgtttgaagatttttgattttcagcattttcttgtactccttagcatttttattctttagcttatatacccatttgtcactgcatataatctatttcttccattagagctcctaacataataatcataattattttacatttactgtt

SEQ ID NO: 795774 - DNA, 664 bp, Homo sapiens
tagcttattataggttacttagcttctctgtactttactttctgcaactataaaatgagtatagtaacagtactcaaaactgttactatacacattgagttaatacacattaatacataaacatgccatacaaagggtcagctatgttgttttgttatttttatcttagtatcattatttgttaccatgcaaatttcactatgaatctaataatacaattagaaaaatgaggcgtggaaaatatatcctagacttactrgcatcatatgtattttgttttattttcgagcaagctcttcttcctctcaaggagcatgtaatagagtaactaattagatcctgcctttatcattatcttacctatgattaataataccacagataagttatctttttccttagagattcttactaaagtggtcttatctttaaaagtttgcttttattgacttcaagatgtttgttttcagaggttttaaatttgatttattttatgtgaaactttagaattagggggaaaagattaagattaaaatgtgaatacacatatatgatagatccgtaaataatgataatatcaaagctatttcacaaagtcctttgcacttgctgcaggtggtccaaaaatttggctatactaagtatggacttttgtattttgttt

SEQ ID NO: 795775 - DNA, 632 bp, Homo sapiens
tgcttttataaaagggaggcagagggagattgactgcagaagaggaagcaggagatgtgacaatggaagccacaggttgaaatgttttgaggaaggggttgtgagccaaggaatacaggtgatttcaagaagctagaaaaggcaaagtagctgattctcctccaaagyctccagcaggaatgtggctctcctgatatctcgattttagtccagtgaaactgactctggacttctggcctctaggactgtaggaggataaatctgtgctgttttaagccactaaattgtaattcatcaaagcagcaataggaaagtagtgtggtcagtattttagagcaggagactttaatttagacagacgtgggttcaagaacagatctgctacatgctattaatttatttacttcataagttttagtttgtctataacatgggagaaataatagttcctacttaataaagttattttaggactaaaagaggtaatgaatgtaaaatgcctgctgtgttagtattctattggtgcgtaacaatgtcaccacaaactcagcaggttaaaacaacacaaagaaattatttcccattgggtgtaggttgggggtctgggtgcggcttaaccgactccttgcatc

SEQ ID NO: 795776 - DNA, 625 bp, Homo sapiens
agctcagagagaagagcaactctcacagacaagggatctggataacattagcagctgatttctcagcagaaaacttgaaggccagtaggcagtggattatgtatttaaaataatgaagaaacctgtcaattgagaaactgatagctggaaaacctgtccttcaaaaataagggagaaattaagacatttctagattttttttaaagctgaaaaaatccatttatctctaaatttgccatacaagaagcattaaagtccttcaggttgaaataaatgaactctaggcagtaactatataagtaaataaccaagctatatgaatatataaagctctctggtaaaggtaaatatataaacaagcataaaaacagtattattgtaattttggtttgtaactccgctttttattttctacakgatttaaaaggcaaatgcataaaatgtaattataaatatgttaggtggtgtacaatgaataaagatataatctgtgacatcaataacctaaaaagagtagagctatatagcagtagaattttggtatgtgattgaagttaagttgaaataaattcaaattagaatgttataactctaggatgttatatgtaattttcatagtaaacaa

SEQ ID NO: 795777 - DNA, 623 bp, Homo sapiens
gatattatttttagatatggaataatattggtgatttcaattttaataacattggattaagatgaaagaatgagaagataaaggtccctcagcaatataactcacaaacatgttcagaagcagtaagaagtcacattaattattttttgaaagtcaataatctacatttttaatttatgcatatagcatagctaatgtactattgctgggtccatttattcaaggaataattgccgctatgtgtcagacattgttctaggcctaggaatggacacttaagtgaacaaagcaaagattctggttcttgtagtttccattaaaagaccatttagtaaaatttttcttcccccaaattataaaatctgtaagatgatttaacaacatgtataaaagtcatcgtaggcygggcatggtggctcataccaggtgtagtgactcatagcgctctgtcactcatgctggagtgcagtggcacaatctctgttcactgcacctctgcctcctgggtataagcgactctcccgcctcagcctttcgagtagcagggactacaggtgcacaccatcatgcccagccaacttctgcattatcagtagggatggggtttcaccatgccagccggg

SEQ ID NO: 795778 - DNA, 630 bp, Homo sapiens
tagtcttgaaaattcatccttctgacgatgtctctttcttccaccttctgtagtaacaaattaccccaatgccactatggcctatacagtgcttcaaaccactactctgtgtgagcccctctcccaggatatcattaaaattgtgtgggaactgaactcaraaagtgttgagttagtataaggcagaagtatcatctgaacaattttgctagaatgaagaaaaactaggtttcaaagataacttctaggatttaacttggagtgattgatggatagacaaaaatgccattatctaatattttaagtacagccaagttttagatggtccaataatttaaaattcgcagaaattatcatggccagtgatcataaaataaatttccaaaagaaaagtaagaacaaaatttgtaacctaaaaagtgtgtaccatgttgacaatcagagtttgtgggaagggcattctagcaaaaagaaacagtattttgaacaataacaaacacaaacacacaatcacgaaaacaaacaagcaaaaaaacccatcatagatatctggaaaattcaaggaaacatgatctaactatgaaatgtaaaataattttatttcccatgagataggagattaagattaga

SEQ ID NO: 795779 - DNA, 630 bp, Homo sapiens
tagtcttgaaaattcatccttctgacgatgtctctttcttccaccttctgtagtaacaaattaccccaatgccactatggcctatacagtgcttcaaaccactactctgtgtgagcccctctcccaggatatcattaaaattgtgtgggaactgaactcagaaagtgttgakttagtataaggcagaagtatcatctgaacaattttgctagaatgaagaaaaactaggtttcaaagataacttctaggatttaacttggagtgattgatggatagacaaaaatgccattatctaatattttaagtacagccaagttttagatggtccaataatttaaaattcgcagaaattatcatggccagtgatcataaaataaatttccaaaagaaaagtaagaacaaaatttgtaacctaaaaagtgtgtaccatgttgacaatcagagtttgtgggaagggcattctagcaaaaagaaacagtattttgaacaataacaaacacaaacacacaatcacgaaaacaaacaagcaaaaaaacccatcatagatatctggaaaattcaaggaaacatgatctaactatgaaatgtaaaataattttatttcccatgagataggagattaagattaga

SEQ ID NO: 795780 - DNA, 489 bp, Homo sapiens
cccggactgtttttggttggcaagctattaattattgcctaaagttcagagcctattattggtctattcagagattcaacttcttcctggtttagtcttgggagtgtgtatgtgttgaggaatttatccattttttccagattttctagtttatttgtgtagaggtgtttatagtattctctgatggtagtttgtatttctgtgggatctgtgatgatawcccctttatcattttttattgcgtctatttgattcttctctcttttcttctttattagtcttgctagtggtctatgaattttgttgatcttttcataaaaccagctcctggattcattgatttttttgaagggttttttgtctctatctccttcagttctgctctgatcttagttatttcttgccttctgctagcttttgaaagtgtttgctcttgcttctctagttcttttaattgtgatgttagggtatcaattttagatcttcctg

SEQ ID NO: 795781 - DNA, 608 bp, Homo sapiens
tgtggttttatctacctttggtctctgatgatggtgacgtatagatggggttttgttgtggatgtcctttctgtttgttagttttccttctaacagtcaggccctcagctgcaggtctgttggagtttatcagaggtccaccccagaccctgtttgcctgggtatcagcagcggagtctgcagaacagcggatattggtgaacagcaaatgttgctgcctgatcattcctctggaacttttgtgtcagaggagtacccagycatgtgaggtgtcattctgcccctacttgggggtgcctcccagtaaggctactcaggggtcagggtccaacttgaggtggcagtctgtcctttctcagatctcaagctgcatgctgggagaaccactactctcttccaagctgtcagacagggacatttaactttacagaggtttctactgccttttgtttggctatgccctgcccccagaggtggagtctacagaggcaggcaggcgtccttgagctgcggtgggctccacccagtttgagcttcctggccactttgtttacctactcaagccttgccaatggcgggcacccgtcccccagccttgctgccacctt

SEQ ID NO: 795782 - DNA, 588 bp, Homo sapiens
ccagctccactaggcagtgccccagtggggactctgtgtggggaattcaaccccacatttcccttctgcactgccctagcagagtttctctgtgaggcttccacccctgcagcaaacgtctgcctggacatccagacattcctatgcatcctttgaaatctaggcagaagaggttcccaaacctcaattcttgacttctgtgtrcccacaagttcaacatcacatggaagatgccaaggcttgaggtgtgcaccctctgaaataatacatcttccttatatttatagctggtttcttctacaccttgtccacaatgtacaaatgcacaatttctgctctttaactgtttaccattagttcattacacgtgtggataactaaagtttatataaggaggaagctgaagaagacaattgaagatagtctttaggagattttttttttttggtataattcttctcctcctacctctcacaataatttaggtaaaagaggtttcttcccctttaatgccaagctatgctagtggggattcaaggtgataatttagagaacttttcaaatgtctctaaccttgaaagacatagt

SEQ ID NO: 795783 - DNA, 640 bp, Homo sapiens
tacagttattactggttactttcaatgatttcaaggagtcagttacaatttgtaagacttctttcttcctcccataccttcaaggatagtcttcccagaaattgatgaaatatattgattcattctgatgcaggatttttctccaccccttcgttggacttgtgatggagttgtcccgtttacttggcctgttgtgatttatcccttgtgggagggagccagtgagtgagagagggcaggaactagacagccgttttgggccccagcaggagcaagcctccggtgggccccatgtcagcacccaggttggggtgcctgtgacccctgaagccccactgggtgtgttacaatgctctcttacctctgccatccatggatagcggtgtgttatcagctcagtgggctccttgcctcgtcacaagaggcggctgccttccaccagcgagagcaaagggccartgtgacacccttttttgattacttgcactccgtgggtcctgagctcttgtcaggcatccaagaaaaatgaggtcacgcaacacttgaatgatggtgaaggcagagaattttattaagcgatggaaatggctctcagtggagcaggggtggctgctgaggggactggagggcaggtaatctt

SEQ ID NO: 795784 - DNA, 532 bp, Homo sapiens
caatacagatttttaaacgacacttaggagtcttggctactataaaacactacttcgtttttttccgtcttgcctcaatatcttgacaatttctaggataatattcttacttacctctttagtccacatgtctcaccacagggacagacgcactcttcacttggcatatcaagtgattactgaaatgtacattttttcagggtaactacattttagtggggattaccagagagaataagaatactaacrtttatcccctgcattttttgttagtcctataacaatatagacagttaggttgtattgttcctcttttgcaaagacaatcacaataaataattttcctgggatatagatattgaactgttagaacctatcttccccaaccccctcaactgatttaatttcatctgaactttagtaatgttatttttaaaatataaataatactaccagcctcacagggtgatttagaacattaaacattataagtgcaaagtttcagtcagatatttgattagtttcttcctct

SEQ ID NO: 795785 - DNA, 578 bp, Homo sapiens
ataggagcatttccaactcctgtgtataaggagagatacagaaaaatctttacaggtggactgaggaagtgaacctcaacagatttgcagtaaatataaggcagatttaaagtcctgaactcaagtccctaagccattcattgatttactcaaatatgtactaaacaaatatgtatcaataagtggctgtgctatttcagtggtaaacaacagtcaagatggctttcccgggctgggcacagtgtggcccatgcctgtagtcccagcactttgggaggccgaggcgggtggatcatytgaggtcaggagctcgagaccagcctgaccaacatggtgaaaccctgtctacgaaaaatacaaaattagccatgcgtggtggcgcatgcctgtaatcccagctactccggaggttgaggcaggagaatcgcttgaacctgggaggcggaggttgtggtgagtcgagatcgcgtcattgcactccagcttgggcaacaatagcgaaactccatctcaaaaaaaaaaaaaaaaaaaagatgcctgtccctggcgctcactgtctagtgcagaagacagacatg

SEQ ID NO: 795786 - DNA, 578 bp, Homo sapiens
ataggagcatttccaactcctgtgtataaggagagatacagaaaaatctttacaggtggactgaggaagtgaacctcaacagatttgcagtaaatataaggcagatttaaagtcctgaactcaagtccctaagccattcattgatttactcaaatatgtactaaacaaatatgtatcaataagtggctgtgctatttcagtggtaaacaacagtcaagatggctttcccgggctgggcacagtgtggcccatgcctgtagtcccagcactttgggaggccgaggcgggtggatcatctgaggtcaggagctcgagaccagcctgaccaacatggtgaaaccctgtytacgaaaaatacaaaattagccatgcgtggtggcgcatgcctgtaatcccagctactccggaggttgaggcaggagaatcgcttgaacctgggaggcggaggttgtggtgagtcgagatcgcgtcattgcactccagcttgggcaacaatagcgaaactccatctcaaaaaaaaaaaaaaaaaaaagatgcctgtccctggcgctcactgtctagtgcagaagacagacatg

SEQ ID NO: 795787 - DNA, 578 bp, Homo sapiens
ataggagcatttccaactcctgtgtataaggagagatacagaaaaatctttacaggtggactgaggaagtgaacctcaacagatttgcagtaaatataaggcagatttaaagtcctgaactcaagtccctaagccattcattgatttactcaaatatgtactaaacaaatatgtatcaataagtggctgtgctatttcagtggtaaacaacagtcaagatggctttcccgggctgggcacagtgtggcccatgcctgtagtcccagcactttgggaggccgaggcgggtggatcatctgaggtcaggagctcgagaccagcctgaccaacatggtgaaaccctgtctacgaaaaatacaaaattagccatgcgtggtggsgcatgcctgtaatcccagctactccggaggttgaggcaggagaatcgcttgaacctgggaggcggaggttgtggtgagtcgagatcgcgtcattgcactccagcttgggcaacaatagcgaaactccatctcaaaaaaaaaaaaaaaaaaaagatgcctgtccctggcgctcactgtctagtgcagaagacagacatg

SEQ ID NO: 795788 - DNA, 574 bp, Homo sapiens
ttgtgtagaaaacaaaatttagggttgcaaagttacaataatactagcttttagactaatcaatgtttttttaaatgtgttagtcactgaaatcatgttaaaaacaaaaaataggggctgggggtggtggctcttatgcctgtaatcctagcactttgggagtccgaggtgggtggattgcgtgagctcagaaatttgagaccagcctgggcaacatggcaaaaccccatctctactaaaaataaaaaaaattaactggtgtggtggcacgagcttgtagtttcagctactcaggaggctgaggcaggagaatcacttgaaccaggaggtggggattgcagtgaactgagatcgcaccattgcactccagcctgggcgacagaatgagtctccacacctccccsctgcccagaaaaaaaaaacccaacaaaaaatagagttataaaatgttacaatattgctaggttttagaattttccatgtattcactgtcttagtccatttgagcagctaaaacaaaatacctgagactaggtaatttctaacgaacagtaattttttttctttttttttt

SEQ ID NO: 795789 - DNA, 590 bp, Homo sapiens
gcttccttccttccttccctccttcatgttttccttatttacttttagatcaaatgtgtgtctagtgaaatgcaaatatattaaatgaaccactggctaagtactgccaatgtgcatatctgtgtgagccaaatctctatcaaggtatagaacatgcccattatctagaaagttccctcacacaccttccttgttaattccagccccactgcactgccccccgccccctggcaatgattgtcccagttatcctccatagattaattaagcctaatgtagagtwtcaagtaaatggaatcatacaatatgtagccttttgtgtaaggcatctttcactcagcattatgtttttgagactcattcatgttgtatatttacatctttttactactgagcagtaattgtgtctatttttaatcaagggatctgatgacctgacccccccaaacagctcattccattctttcacaacaaaaaaaagttcttcatccagtcaacccaacatggatctccctaaaacttgcaggttttgatgctggctcaactccttagtattaatgaaataaaagtacttttttcatgtgacatcc

SEQ ID NO: 795790 - DNA, 612 bp, Homo sapiens
acttcagaatgatggcagaagataggaacttggtagctgcgtcactgaatctactgataggtcactttcttgaggaagatttagctaaattcagttggcatactggaggcaggtaataaatatcatcacccaattcacatgtgggtgtgaatggaagtgaagaatctgatatttattacatgcctccggtaatgtctgactctgagggaggtacctatctaactagttacctaaatatatatatttcatatatttctgacttcaagtctacaagactttggaggcccattgtacatacaaggacacagaagcctgagaraagttaaataacttttccaaagtcacacaactggtaagtggccaagcctttgagattctgcgtttgatgtgctggctccttgtatcccctgacctttttcaaaattttcactccaagatgtcttcaagatatggcatacctttcacttaaccagcatttcatataccattcattttgcattttataaagtttgagtttatgtcgtttaattttctccaatatgaacttcacatcatttctgcatatttgtaaaacctgtcaaagtaatctgtaactaaacctatcccaaacaa

SEQ ID NO: 795791 - DNA, 663 bp, Homo sapiens
ggataaccatcagcgtggaaaccataactttgaatttcctgactcagccataaaacctgaaatcacatttcattaacactgattgcctactcagaggaaacatgaaaggggctatgaatctctgacggagatttaagagcaaggtttaacggttgatttcttcaattactccagaaacaaagtcttgttttcacgtatctgggaaggaccagctgacttctgagagggatgctttattctcggcagtaacaggcttctctgcatttggtacattatccaaagttgacccctaacaggtgtttaagtgaataggtatttgtttaaactcaactcttctagggcaaagaggcgtccaactgaagttcttcaagcaatgggaagtcatcttaaggaacagtgcttgcagcacagtggtyctggagtctcactcctgcccttgtggtgcctcctgctagtatctctcccagtccctgtgctgctgggacgaggaggaaggacacaagcttggtctgacagtcttccttcatggagccctcatggtcacaatgcctgcatttcacccttgactcagttcccaccactcattcattctcctgcaacttcccagcctcctgagaataaaaagttccctagctcatctcatactttctgccacataagata

SEQ ID NO: 795792 - DNA, 663 bp, Homo sapiens
ggataaccatcagcgtggaaaccataactttgaatttcctgactcagccataaaacctgaaatcacatttcattaacactgattgcctactcagaggaaacatgaaaggggctatgaatctctgacggagatttaagagcaaggtttaacggttgatttcttcaattactccagaaacaaagtcttgttttcacgtatctgggaaggaccagctgacttctgagagggatgctttattctcggcagtaacaggcttctctgcatttggtacattatccaaagttgacccctaacaggtgtttaagtgaataggtatttgtttaaactcaactcttctagggcaaagaggcgtccaactgaagttcttcaagcaatgggaagtcatcttaaggaacagtgcttgcagcacagtggtcctggagtctcactcctgcccttgtggtgcmtcctgctagtatctctcccagtccctgtgctgctgggacgaggaggaaggacacaagcttggtctgacagtcttccttcatggagccctcatggtcacaatgcctgcatttcacccttgactcagttcccaccactcattcattctcctgcaacttcccagcctcctgagaataaaaagttccctagctcatctcatactttctgccacataagata

SEQ ID NO: 795793 - DNA, 603 bp, Homo sapiens
ctcgttgcatcacccacggctggatccaagggcaattacgattcgggggagaagaagaatgtaggctacataaacgcaaactgaggcaatactgtcattattgctaatctataattactgtgtgtcttcccagtgaaatgtgagctgcatgtgggcagaaatttattcagggttttcaccacagtatccccagagcctaagtgcagtgtctgcacctgaccagatgataccaaatgacaaaattttaaaagcttttaacatgtacagttctggggcttattaaacgtagatgctcactggatttagcatcatacagcaagtacttcactgatgaygaaacacaactgacagataaacttcgctcttgggagccattattagtttcctggggctgccacaacaaaccaccacaaactaggtggcttaaagcaacagacatttatttcttgcggttctggagtctgcaagtctgaaaacaaggcattggcaggaccatgctccctccaaaggctccagggaagaatgcttctttgcctcttccagcttctggtggttgctggcaatccttggcattcttcggtttgtggcagcacaactccagtc

SEQ ID NO: 795794 - DNA, 638 bp, Homo sapiens
agaagtttgtccttattcttgtaattcaggtgctagtatcttatcaaaaggctgtttgagagtatacattgttttaactctgagatataatattttcattagaaaataaccaatggattgctctttgctaaacagcataaacttgagacagaaatataggaaatttgatgctgaaatacagcgcatatggggaagccactctacctggggtgggggaaggccctggttctctctccggtcttaacccatggtcattttgtgatctagaaggcaccagccttctcrggcatcaggctgcctgccagcttggaaagctgtacaaaaggaaggggggataagaaggtggtttctaagattcctttaatctctggaaagctgtgatttaactgtcttgaggtccaaaaagtgatggaggataaaagatgataatttgtacaacgaactgaaagccaagcccctagtaaggaaatgggagcgcatttgtctgtggccatgaatcacaggtgaggtggacacttctctaagctgttggccctgaaaaacaccagagatatttctggttttatttttcttttatccttccgcctgttcctcctgcacctttaaaaaaatcttccttgatttttctttattttcac

SEQ ID NO: 795795 - DNA, 529 bp, Homo sapiens
aaactcctagaataacacaacctccaagattgaaccagaaagaaattgaaaacctgaacagatcagtaacacattctgaaattgaatcagtaataagaaacctaccaacaaaaaaaaacaggtggattcacagccaaattcttcctgatgtacaaagaaaaactggtaccagtcctgctgaagctgttcccaaaaaatcaaagaggaaggactcctccctaactgactctacaaagccarcatcatcctaataccaaaacctggcagagaaacaatgggcaaaaaaaaacaaaacgaaacaaaacttcaagctgatatccctgatgaatatagatgcagaaatccttaacaaaatactagcaaaccaactctagaagcacatcaaaaagttagtttaccatgatgaaggaggccttattcctgggatgcaatgttggttcaacatatgcaaatcaataaatgtgattcaccacataaatagaactaaaatcaaaaaccatacgatcatctcaatagacacagaaaaaaa

SEQ ID NO: 795796 - DNA, 559 bp, Homo sapiens
attcatatggaaccaaaaaagagcccaaatagccaaagcaatcttaagcaaaaggaacaaagccaaaggcatcacattacccaacttgaaactacactacaaggctacagtaaccaaaacagcatggtactgatacaaaaagtgacacatagaccaatgaaacagaatacagaaccaataaataaagctgcacacctacaactatctgatctttgacaaagtcagtgaaaatcagaaaagggggaaagaatcccttttcaataaatggtactggcattactggctagccatacacaggagaatggaactggactcctacctatcaccatatacaaaaatcaactcgagatggattgaagacttaaatstaagacctcaaactgtaaaaatcctagaagaaaacctaggaaatactcttctcaacatgggacctggcaaataattcatggtcaagttctcaaaagcaattgtgacaaaaacagaaattgacaaataggacctaattaacctaaagagcttctgcacagtaggagaaactatcaacagagtaaacaaacta

SEQ ID NO: 795797 - DNA, 561 bp, Homo sapiens
aagggatactcttccctttaggctactgcagaaactgttaaagcacagctcctgtgtaaccagggtatccacatgccagatcgacttggcgggttttcatcagcctgctttcgtctaatcacttgaacctcctttctctctaatcatggatgtcactcaggaatcggtcctgcatgtgagactttgttggttgcaaatattctcagatgctcagaaagaggaaataaaatgttacagatgtctttgttcgtctgtagtgagctcagcgaggccatgaatttttaaatctagcacagggaaacgtgctacgaagagtctgtgatgcatgcattttcattcatgcattttaatctctatatgtttggaaaatacaaggatgataaatcagccagttctcatttatttaattatcaaactttttaaaamgcagcttcaaatgaaaaacactctgttaatactcttggcaaatgatacaacagggctgctgatcagaaactgctctgtgatcttagggggttatgagatctcatccatctcttaaatgctgttggtgctgatgtt

SEQ ID NO: 795798 - DNA, 574 bp, Homo sapiens
gtatttccttttaagcaagaacatttgcatgtataagcatgaaaaataatgaaaaactaacagttgttaattgggaggtaggattataactgattttatttttattatatctttctgtgtatgttactataaacacactttagactgggcttctgggcacttaggcagttgtgcttctcttggtgccttttccccatttttttttttttttttttgatttgcatgtatgacagttttcatgtcttacggggaaggctattgggaatcccactttgtagaagataggtatgctcctttctcttgcctgtccatcacagcttcaggcagcatttgtttctgtccctcttatgagagatctccttaacccatttatgcctgaggttgcaactttttgaattttgaaatcagaccttggtgatgaccttgagcagtargatataaataactcccacatgcttagcgttccaataatggaacactaggcataaatgagttccgtgcagctgggatgctttaccaagacctgagccacaagtgcatccacagcattggtgctgggagagaaaaaaaaact

SEQ ID NO: 795799 - DNA, 680 bp, Homo sapiens
cagataggcttctttcacttaagaatatgcatttaagggttcttcttttctttctgtggcttgagaactcatttttcattgctcagtaatattccattgacaactaatgatttgttatgttcttttgttttccttataatgacagactccatggatcaagaattttagagtagggaggggtggtagaggttatcaagtcagatcccctcattttgcagcaaaggaaatggagctccagagaagataagcctagctggtcacaggagagtgctcttttctgtggtcaatccaaaattattagtaaagttgagacttcaagatacctaaacacaaatccaactcacaacttatttaattggaaaattgttcattccatgtcctaaaccttagacccaagcaagaggggttccgcccagcccctcacttagaatcctccctttggcctttctcaaaccacactccttcctgtgaagccaagaggtcgtctctgttcctaaactactycccaggacctcggaattccatacctaaacagcctcaagcctgtgtagacatctccctaggttctgtccttgaaaggggcaggaggagactttcccgatatggccaattaactggtgcagaattttgagggatcctgaatttgtcacgatccttcttggtcattatgaagttatatt

SEQ ID NO: 795800 - DNA, 625 bp, Homo sapiens
aagtatttctgcagaacctagtagagtgcctcattgaagtctcagctttagccatcctccagttcaggggtaggaggctgccagccgaataagaactgtttttttctgctcatcctctttcctctctcagcttctacctggtaaggtctgaagcagaaactcaggagttagaatggaagagaacaagaacacagccagcaagagcatgacaacactgtctcctccagtagtgagcagctgccaatcacgagctctgagcagaggaaaggaagcaggagtcccagctttaaaattaaaatttatgtgatgaggctgggcatggtggctcacatctgtagtcccagcactttgggaggccgaggcgggcagatcccttgaggtcaggagttcaagaccagcttggccaacatggtgaaactccacctctactaaaaatacaaaaatttagstgagtgtggtcatgcacctgtgatcccagctactcaggaggctgaggcaggagaatcgctttaacctgggaggtggaggttgcagtgagccaagatcatgccactgcactgcagcctgggtgagggagtgagactgtctcaaaaaagaaaaaagttatgtgatgaataatatccca

SEQ ID NO: 795801 - DNA, 625 bp, Homo sapiens
aagtatttctgcagaacctagtagagtgcctcattgaagtctcagctttagccatcctccagttcaggggtaggaggctgccagccgaataagaactgtttttttctgctcatcctctttcctctctcagcttctacctggtaaggtctgaagcagaaactcaggagttagaatggaagagaacaagaacacagccagcaagagcatgacaacactgtctcctccagtagtgagcagctgccaatcacgagctctgagcagaggaaaggaagcaggagtcccagctttaaaattaaaatttatgtgatgaggctgggcatggtggctcacatctgtagtcccagcactttgggaggccgaggcgggcagatcccttgaggtcaggagttcaagaccagcttggccaacatggtgaaactccacctctactaaaaatacaaaaatttagctgagtgtggtcrtgcacctgtgatcccagctactcaggaggctgaggcaggagaatcgctttaacctgggaggtggaggttgcagtgagccaagatcatgccactgcactgcagcctgggtgagggagtgagactgtctcaaaaaagaaaaaagttatgtgatgaataatatccca

SEQ ID NO: 795802 - DNA, 651 bp, Homo sapiens
aatcctggtcaatgctctctctgtggccagcctctcgtgcacagggagctctcagccaaactctcagtctgtatcttccaaaaagaagcactgatctctctttttccaaaacctttaactataccctgaggtaaagttctcatttctattggcaaggttgagtctaggctaaagtgcaaagtggaggggaactgggagtggtgatgagaggaccggcatcgaagagactggcccccgcactgcrtcccctagaagggggacaggtaagccaggtgtggccctgaattaggaagtccacttaaaactttagtgaacaatcatcagatgctgattggtggatgtcgctgaaaccctgcactctggaatgaagcaagatctgatgctaagagttctgggttcaagtctccactggtcaaccctctagtgtaagctttatggtctccctgggcctcaggtctctcctctatttttttttttttttttgaaacagagtcttgctctgtcgcccaggctggagtgcagtagcgcgatctcagctcactgcgacctccgcctcccgagttcaagcgattctcctgcctcagcctcctgagtagctgggattacagacgcgtgccaccatgctcagctaattttttgtatttttagtag

SEQ ID NO: 795803 - DNA, 588 bp, Homo sapiens
aacctctgtattgttttccataatgacagcatccctttacatttccaacaacagtatacgagggttcctctttctccacatccttgccaacacttatcttttgtctttttgataatagccattttaacatgtgtgaggtgatgtatcactgtggttttagtttacatttcctaatgattaataatgctgaacatttttaatatactttttagccatttgaatgtcttcttttgagcaatttctattcagatcctatcccattttttaaattggcttttgttttgctattgcttgagcttcttatatacgttggatattaaccccatatcaratgtacattttgaaaatattttctcccatcctgtaggttgtctcttacctctgttgattgtctcctttgctgtgtagaaatttttcagtttgatgcaatccctttgcctatctgtttttttgtttttgtttttgttttttggctgtgcttttagagtaatatccccaaatcccttacccagactaatgaattaaggcaatttctcatgacttcttttagtagttttatacttttaggtcttatatttaagttcttaa

SEQ ID NO: 795804 - DNA, 616 bp, Homo sapiens
tgtggctttaaaaaatatttatacttgttattctttctgaaacacacctcttcgtagctgcaaactttttgccagtctcccttctacctatacttcagataacgtgccagtcactgttctaagcattctgcctatataaactgatgtaattctacagcaactatgcaaatgtactgtttttattgtctccattttacagatgaggaaactgagagtatagtttatacaattaccctaaaatcacaagtgtaataagaagtgttagagccatgattcagacccatgcagcctataaccaaattccatgttcttaaatactaacttattttagtccagtttctactcyggagtgcctctaaattatgttctcaataaattgttcctgtttaaatgaattaacccactctcatgtgccttcctctctcatatttcactgaaaattatttggatatagttagcaacaattcccaaatcacttcatctaaaaatattcttatatttcaacctctgcattacttgaataatcttcaggatttgaaactgtcatgtactactttctcccttaaattttctacctttctggtgcacctttgccagttagcttttcatgatcctc

SEQ ID NO: 795805 - DNA, 601 bp, Homo sapiens
taaattgatacttccatttgttttcacccttgtgctattggtgtcacatattttaaatttttacatgttatataccctataattcaacatcattatctttgctttggtagtcaactggttttgaatgagattattaaatgagaaaaaaattcaccctcatagttcccatttccagtattcttcattcctttctttaggttaatattttcatttgtattatttttcttctgcttgaagaacttcatctaacattccttatattgcaggtcttctatccataaattctctagacttttgttcatctaaaggtcttcattctaccttcctttttgaaatatattttcactacatataaaattcttggttgacaacttctttcttccagtattttaaagatgtgctgycttgtcttctgactttgcaagcttctgataagaagtctgctgtcatcatgatctttgctcctctgtatgtaatatgtctttttttccccctctacctgttttaaagcttttctctttatcactggtattaaacaacttgattatgctataacttgatggagttttccttgtttattcagctcggtgattgttgagct

SEQ ID NO: 795806 - DNA, 634 bp, Homo sapiens
atgtgtatatttatttgatgaaatgaaaatttaatttacataaaataaatataagtggttttagagatatttcaggatgtttaaaattatgaggtcaatgtgtaaacctttgctcatgttgacttttctttcccaaattggcttagcagcacaatttttgtttttgctctctcctctctaagctcaggaaccatagatgtcaaacatttgaattcctactgatgagcaaaactagatttcagaagagcatactagaagtagaaaagacatttcgktttttttttcctaggaagcaaatgagattttatatcacaagaacttttcctgtgtattttccttataggtaatggtgcctttattcagtcatgtgattcctaaacactgattgttcaacaatgtgacttccaaatccataatcttttattgaatccagtggttgtttcaataagaataaatagttatattcctcaaaagttaagaggcttaattagcaacaataggaagtattataatcctcctctcttctgtcagtttcatttaaacaatcaataggcaggtagaaggactaggggacaggaaggggaagggaagggctattactatttgttcagatagggagagagagaaagagtca

SEQ ID NO: 795807 - DNA, 634 bp, Homo sapiens
atgtgtatatttatttgatgaaatgaaaatttaatttacataaaataaatataagtggttttagagatatttcaggatgtttaaaattatgaggtcaatgtgtaaacctttgctcatgttgacttttctttcccaaattggcttagcagcacaatttttgtttttgctctctcctctctaagctcaggaaccatagatgtcaaacatttgaattcctactgatgagcaaaactagatttcagaagagcatactagaagtagaaaagacatttcgtttttttttycctaggaagcaaatgagattttatatcacaagaacttttcctgtgtattttccttataggtaatggtgcctttattcagtcatgtgattcctaaacactgattgttcaacaatgtgacttccaaatccataatcttttattgaatccagtggttgtttcaataagaataaatagttatattcctcaaaagttaagaggcttaattagcaacaataggaagtattataatcctcctctcttctgtcagtttcatttaaacaatcaataggcaggtagaaggactaggggacaggaaggggaagggaagggctattactatttgttcagatagggagagagagaaagagtca

SEQ ID NO: 795808 - DNA, 646 bp, Homo sapiens
atgttttatgaacattaatttattatttgtatataaacattttaagtaaatgcttattacattacataagcattaataacaactatgaattacgaaccacagtagttaaaagaatcagatctgcagaagaggttaaggtttgtatttcagtgatgccacatattgctttgtgactttgaacaagttgataattaacttgtctgcatcttagttttatcatctattggtataaaagtaatatattttaaaagtaggacttcaaatgctaatatgaatattaaatgacttactccatgcaagtgcagagaatgtgcaaaacacagagcttgtgcaaaataagtgttatctgttaatatcatttgcaactaattactatcttttgttattgatgttttagagaatgctttaataaagagtgatatattaaaaacaaaaactcatrcttaggaatacttagctatgattattatttatagtatatttgttgttattatttatctggagccaagttgaattcaaacttcatttacttagactgctttggttgaattcatccaatttggttgaataaaattatttggttaaaagtagtctccagcacattccaaagtgatagatagatagatagatagatagatagatagat

SEQ ID NO: 795809 - DNA, 624 bp, Homo sapiens
acagaacatacactgatttaagttctggttccagcatttaatgatcagatgattattggaaatttacttaaaatatattaagcatataataagtacagtaatgactaatccctattccagaaaatcattatatggcccaatttaggtggcagactaaaaagcatttgcatgtaagtctacatagtaaaataattattattgtaaactgatttgaataatgtcaaccacatatatttaagcctttaaatttatatatttcattctgaatcattcaattttcaaaaccagaatgtaaaggacagggatttgatatgggataatttctcataaagctaagtacttatctcttaaagaacaattttgcaacgtatcattagcatatcttgcataaaattgcttcatgctcctgtccactaataattatctctgattacagcaaccccgaagggaattatctaagcctaaattttcagaarctttacaaaaccagcatacttggtgatgtggtcccactcagggaaataaacttaaaaagagctcgatggaagaatataatttctcatttgaatagaggcaagtaggaaataaagccaagtgtggaactaaatgtatcattgccttcaa

SEQ ID NO: 795810 - DNA, 664 bp, Homo sapiens
ggcctcaagcccatcaatgatgtggtgttttttgcagactcaaggaggtacccccttggtggtcttcgagaagatccagaataatctctggattaccaggaagctgatccagagattaccattttctttttcccttacattttctttttccttactttttcccagacaaatgctgtctctctctctgtgctcatctacctagagctgggagtgttatgatgcaagctcttctgtagtcaccaccaccgggactgtgctrggtcagacttgaagccacagtagcactgggtcttgcccaaggcccttgccttcaggatggcaagttcccccaggccctttggcatgtccagagatgctgtctgggagcaaagacttagagccaaaagccttagcagtttacctgatgtattctactgcagctaagctggcacccacaccacaatacaaagtccttcctactcttctctctcctctccacaggcagagaggcctccccctgtggccaccaccaccactggtccatggtggtgactggtttttgccaggccaccatgatgttcgcttaaagcccaagggctcttctgtcagcttgtggtcaatgctgcaaggcctggaactcacctgtaagggtagtgggatcccttctggcccaggtaaggttcag

SEQ ID NO: 795811 - DNA, 574 bp, Homo sapiens
caacctaggaagtattagctgatgattgagctgatgacttcttggagaaacacagcatacgtgggaggagagcagcatggtgggtcaactgtactatactaggtagtatctgatgaagcaatgcagaaaataaagcaaggcaatatatgtgtatttatgtatattgctaattacatggatagtcccagactctactataactatatataaatgtccagctatagataggtatctttaaatgtaagtatctttatatacacagctatgtatgtctgaaggcaaattagtgagaatgtcctgtcttgcctcttcactcamactgagctctgctgaaatgattccagacaaatgtctaggttattcctaaagatctccagggaagtagatatgacagcctcttaatatttttaaatattaagtctatcagtcagtactaagggcacagccatcctcagctttaccatttacaactgtatgaacttaagcaggtcttttcacccttcccagcctgttttcttatctgttaaatgggaataaaaatagtgcttactttgtgcagttgttgagaggactg

SEQ ID NO: 795812 - DNA, 477 bp, Homo sapiens
tgagatatttctcagactgaatctctaaccaataaaaatgtcatttttaaaagttctaagaaccttctgtcaaattattttactatacatcagaagctatgtacttcaatatacactatatatataatatctatggaaatgtatakatatgctacattacatctatatataatgtatattataatgtataatgtaatatataaatgtgtatatatgtgctacattatactatacattatttatgatgtatgatatatgctacacatatttaataaaatcacctttcatatagaccaaatccctaatttagaaataaatatacaaaaataattacagacctggcactatgcccatggtcacttatagcatccctaggaaatcctcactggccatgactgtgttagtcactccatcccctggccatggctaattaattcagtaatagagacacttagactaggccagactctcttccct

SEQ ID NO: 795813 - DNA, 528 bp, Homo sapiens
taggttgagcagactaaatttctattgcttgtaaccaaaagaatcctaaaatagagtatatgtatttcaccaggaagggcacttattgtcctattctggagctgagtatacagaaggaaactctattaggaaatgtattcccagagttttcaaaaggagatagagaaaactgagagagttagtttaaggttttgagaaatyagaaagaaaagaaacacaagtgaaggagaataatgctgaaggaaaccaataggaaattgacaatactctggatttgaaaagcagtaggctttaaagatgatgtgggggttggaatcaacaggaagaaagaaaaataacgtaaatgagatgtatagttccaagaataagaaatttattctttttcttttgaaacaaccataggtacaggctaagagtttatatttttgtttctttagattttaaaaatttgagtagttgctctttacctcaaatgttctttttaaagcctttaatgtggcatcaaattgatttagtagaaaaagtttc

SEQ ID NO: 795814 - DNA, 583 bp, Homo sapiens
ctatttccaggagggaaggtcattggagtactaacttatttattttacatgactaaattttctgtatttatttgtgtaaataagttttttatattcatttgtgtgagaaaattttcatgatgtgtgtgtktgtgtgtgtgtgtgtgtgtgtgtgcctgtgtgtgtattaaccttcagtaacaatgtataagaaaagggatgctgccttttgggcatgctcaaaatcccacagttcttcacacaagaatgaaatgaacagcctttaaccttttctgttttttgagtgaaccatcctatttttttctaccttctgacagatgataagaaatcaggtgaaagctcaatcgttcctcatgttacaatcattctaacatctagtaagaatcattcttacatctagtaataaagggaatttttttttctaaaaggactatattttaaagaatgccaatcctcttccacagtccttctagtaagtttgtacatacactgttatctaatagtagtcaattaaggaataaatcaagttgactttgaaattatattttacattactctagtatctttattcatgctacatcaa

SEQ ID NO: 795815 - DNA, 583 bp, Homo sapiens
ctatttccaggagggaaggtcattggagtactaacttatttattttacatgactaaattttctgtatttatttgtgtaaataagttttttatattcatttgtgtgagaaaattttcatgatgtgtgtgtgtgtgtgtgtgtgtgtgtgtgtgtgcctgtgtgtgtattaaccttcagtaacaatgtataagaaaagggatgctgccttttgggcatgctcaaaatcccacagttcttcacacaagaatgaaatgaacagcctttaaccttttctgttttttgagtgaaccatccyatttttttctaccttctgacagatgataagaaatcaggtgaaagctcaatcgttcctcatgttacaatcattctaacatctagtaagaatcattcttacatctagtaataaagggaatttttttttctaaaaggactatattttaaagaatgccaatcctcttccacagtccttctagtaagtttgtacatacactgttatctaatagtagtcaattaaggaataaatcaagttgactttgaaattatattttacattactctagtatctttattcatgctacatcaa

SEQ ID NO: 795816 - DNA, 564 bp, Homo sapiens
agccaattaaacatcttttctttataaattacccagcctcaggtatttatttatagcaatgcaagaaggaaataatcaggaatgtttatacactgttgctgggaatgcaaactagttaagacattgtagaaagcagttttgagatttctcaaagaactcagaactaccattcaacctagcaattccactactaggtatatacgcagaggaaaataattcattctatcaaaaagacacatgtacttgtatgttcattgcagtgctattcacaatagcaaagacatggaatcgatctaggtgcccctcaacagtggactggataaaggaaatatgstacatataccatggaatactatgcaaccataaaaacaaatgaagtgcttttcagcaacatggatggagctggagaccattatcctaagtaaactaatgcaagaacagaaaatcaaacaccgcatgtactcagtttaagtgagagttaaatattgaatacacatagacataaacatgggaacaacagacattggagactactagacagggcagagatgatgcagggcaagg

SEQ ID NO: 795817 - DNA, 514 bp, Homo sapiens
ccagaataaattgtggccataatcatgacaataatgataatataaagaaatatttgtatgatgcctgctccccaaaatatcagtctttcctggacacacaaaaatgaacacgaatttacactgatgtagtaaatatgagagtggagagtcatacaaggtgttgtgggtgtgcagctggraaaaagggagagatggatttagtttggggaaggaaggctaaaagaagaatgcatgaagataattcataaattggtccttagggaatgggtacgaacgaacacaatgaataaaatttggtttcagggtgaagaaagacattatagaaggaggtaataatgcacaatggcaaggaggggagagtatatacaatatgaagagtgacctggaattcactatggcttggagagagttttacaattaaaataatgttgttttttataataatgaggaaactatagaggaaaatagattacgtttaccaaatacttactctgtgctgaacctttgacctgta

SEQ ID NO: 795818 - DNA, 553 bp, Homo sapiens
actaatggtgaggcccgaggatcctgcatttggcagaagctggagggctggtgtgggaaagcggtggggcaggagatggggagggactatgccgaggcctagagggctctagtccttccagaaaagagactctggctgggggaggaggaagtatctctaacaagaggcaagaacctcagcatcctctgaaacttcaacttttttctaagcaaatcctagaggagaaaatgtggtttactcagaagtacggatcatccaagagaaaaagaaacatgcaggtaagacccaaggatgtctctgttctggcccaccctcaacttagacagtatagctcagtttctacccactcagcagatctgagccagacaggcatagagccrcccctcccactgggtcatggggcttctttatgtgtgcctatgctgcttcaggtgaatccaagcctcccctgcactctcctttccctattctctgcagagggccccagtataacctgaataacaaaactatctttttgggcattcgcttaacctctcagaccttccatatccct

SEQ ID NO: 795819 - DNA, 578 bp, Homo sapiens
acacaagttcttcttatctcaggatccccataaatctcctctttgtaaataggactttggtcaccatcatacttgggatgaatatctcataatctcttaactgcattttacccatgaccttactaattttatcccatttgcttgaaacaactttttgttgccatcacttttcttcctggcctctgtggatttttcctgaaggcatcacagttgaaaggcttcacccttctgaggrtgtttgtggatgctgaccctgtgttctcattgagtttgctctgtggatcgaactcctgagcctccaactgcagatattatgacacgttaagtacaaggccacctttgactctttcatcgtcatgaaggtgcaattctttccctacctgtttgcaatttggagcacatctattcttttccctaaggcagtgactctcaaactctaggaagcaacaggatcacctgaaacgcccgttgaaccatagattgctgggccccacccatagagaagaagaaaacagagaggaggaggggataggaggagaggggagaagagaaaagaaatgactagagttattgcatgt

SEQ ID NO: 795820 - DNA, 578 bp, Homo sapiens
acacaagttcttcttatctcaggatccccataaatctcctctttgtaaataggactttggtcaccatcatacttgggatgaatatctcataatctcttaactgcattttacccatgaccttactaattttatcccatttgcttgaaacaactttttgttgccatcacttttcttcctggcctctgtggatttttcctgaaggcatcacagttgaaaggcttcacccttctgaggatgtttgtggatgctgaccctgtgttctcattgagtttgctctgtggatcgaactcctgagcctccaactgcasatattatgacacgttaagtacaaggccacctttgactctttcatcgtcatgaaggtgcaattctttccctacctgtttgcaatttggagcacatctattcttttccctaaggcagtgactctcaaactctaggaagcaacaggatcacctgaaacgcccgttgaaccatagattgctgggccccacccatagagaagaagaaaacagagaggaggaggggataggaggagaggggagaagagaaaagaaatgactagagttattgcatgt

SEQ ID NO: 795821 - DNA, 578 bp, Homo sapiens
acacaagttcttcttatctcaggatccccataaatctcctctttgtaaataggactttggtcaccatcatacttgggatgaatatctcataatctcttaactgcattttacccatgaccttactaattttatcccatttgcttgaaacaactttttgttgccatcacttttcttcctggcctctgtggatttttcctgaaggcatcacagttgaaaggcttcacccttctgaggatgtttgtggatgctgaccctgtgttctcattgagtttgctctgtggatcgaactcctgagcctccaactgcagatattatgacacgttaagtacaaggccacctttgactcyttcatcgtcatgaaggtgcaattctttccctacctgtttgcaatttggagcacatctattcttttccctaaggcagtgactctcaaactctaggaagcaacaggatcacctgaaacgcccgttgaaccatagattgctgggccccacccatagagaagaagaaaacagagaggaggaggggataggaggagaggggagaagagaaaagaaatgactagagttattgcatgt

SEQ ID NO: 795822 - DNA, 578 bp, Homo sapiens
acacaagttcttcttatctcaggatccccataaatctcctctttgtaaataggactttggtcaccatcatacttgggatgaatatctcataatctcttaactgcattttacccatgaccttactaattttatcccatttgcttgaaacaactttttgttgccatcacttttcttcctggcctctgtggatttttcctgaaggcatcacagttgaaaggcttcacccttctgaggatgtttgtggatgctgaccctgtgttctcattgagtttgctctgtggatcgaactcctgagcctccaactgcagatattatgacacgttaagtacaaggccacctttgactctttcatcgtcaygaaggtgcaattctttccctacctgtttgcaatttggagcacatctattcttttccctaaggcagtgactctcaaactctaggaagcaacaggatcacctgaaacgcccgttgaaccatagattgctgggccccacccatagagaagaagaaaacagagaggaggaggggataggaggagaggggagaagagaaaagaaatgactagagttattgcatgt

SEQ ID NO: 795823 - DNA, 725 bp, Homo sapiens
cccaagggtctcacagagccagctggctggcattttccaccacaagccactggagccttctccttctctggtcaaggggttcagctccattggacagtaattaagcttttctcttggtagaggaaccccttgcctaagaataagagattcttccccaggcatttttaaactattctcttttttaccctcttctctaccctgtcagcagttaagttttaagcaagatttttgtttttgttttttgggttttttttagaagacgttttactaggccaagccccacaactatcactgtttgtactctccataaagtttttcattgtgaaaaagaatctcgtagggactgggttttcttctgcctgtctgtgtgtgttattatgtgtaatgtctgtaaaaagagctctaattaatttggcctaaagaaagaccagtacttgaatcaagtatttttttaacrgaagttaaaaagctgcactacactcaaatcgtagcaaggataactatagccaccagttatctaggtgtgtcacaagccatctttttctcttccttgttggagaaggactcagttccagagtctcactttaacattcggcttatgagaaggagtccatgcaagcccctgagacatatttttgtcccaaactcaattccaggcttcgggtcaatgttctaagaaagagaactggatctaagggatccagaggcaggcaactacaaggcca

SEQ ID NO: 795824 - DNA, 598 bp, Homo sapiens
caaaacctggcagagacgcaacaaaaaaagaaaatttcaggccaatatccctgatgaacatcgatgcaaaaatcctcaataaagtactggcaagttgagtccagcagcacatcaaaaagcttatccaccacaatcaagttggcttcatccctcggatgcaagrctggttaagcatatgcaaatcaataaacgtaatccatcacctaacagaaccaatgacaaaaccacaggattatctcaatagatgcagaataagaccttcgataaaattcaacaccccttcatgctaaaaactctcaataaactaggtattgatagaatgtatctcaaaataataagagctatttaacacaaacccacagccaatatcgtcctgaacaggcaaaaactggaagcattctctttgaaaaccagcacaagacaaggatgtcctctctcgccactcctattcaacacagtattggaagttctggccagggcaatcaggcaagagaaagaaataaagggtattcaaatagagaggaagtaaaattgtctctctttgcagatgacatgattgcatatgtagaaaaccccattgtctcagcctaacatctcc

SEQ ID NO: 795825 - DNA, 598 bp, Homo sapiens
caaaacctggcagagacgcaacaaaaaaagaaaatttcaggccaatatccctgatgaacatcgatgcaaaaatcctcaataaagtactggcaagttgagtccagcagcacatcaaaaagcttatccaccacaatcaagttggcttcatccctcggatgcaagactggttaagcatatgcaaatcaataaacgtaatccatcacctaacagaaccaatgacaaaaccacaggattatctcaatagatgcagaataagaccttcgataaaattcaacaccccttcatgctaaaaactctcaataaactaggtattgatagaatgtatctcaaaataataagagctatttaacacaaacccacagccaatatcgtccygaacaggcaaaaactggaagcattctctttgaaaaccagcacaagacaaggatgtcctctctcgccactcctattcaacacagtattggaagttctggccagggcaatcaggcaagagaaagaaataaagggtattcaaatagagaggaagtaaaattgtctctctttgcagatgacatgattgcatatgtagaaaaccccattgtctcagcctaacatctcc

SEQ ID NO: 795826 - DNA, 590 bp, Homo sapiens
cccaggaatactcattcgtctactctgatgttgggatggaatggcctctgaaagacttcactaaaatgaccaggatccacagttaagagaagaccctgtagtatttgctgtgggcctgacctaatgcattccctagggtctgctttagagaagggggataaagagagagaaggactgttatgaaaaacagaagcacaaattttggtgaattgggatttgcagagatgaaaaagactgggtgacctggatctctgcttaatacatctacaaccattgtctcactggagactcacttgcatcagtttgtttaactgtgagtggctgcacaggcactgtgcaaacaatgaaaagccccttcacttctgcctgcacagcttacactgtcaggattcmgttgcagattaaagaacccatctggaatggtttacagagagaggaatttaaaagaggacatcagaagagctggagatgcaagctctaggctgcgcttccaaaagcaaatgataattatgttaatgtcattagtgacaaagatttgcaacattagagaaaagagacacaaatataaaattaaaaacttaagtaccaac

SEQ ID NO: 795827 - DNA, 608 bp, Homo sapiens
cactcccagatatatacccaacagaattatgtgcgcatatgccccaataaatgtatacaagaatgttcatagcagcactatttgttttagcaccaaaagtaggtaaagattctgtgttccctttgaagttctcctcttaatctctattcacccctgtaacccctgtatggttttcttgcctcagggtgcagkgggtcagatgtgacataatatacctaaggtgatgtgcatttgtagatataaaattaaatgcccccttaggaagaccaaggtatgggcccagagagaaagggtgagaaaatatttgaaagaaagaaactggcactcctcgtggcagctaatgtcttaggaacctctgttgaccagtataccaggatggaaacttgacttttagaaaatcataagagctatacattcacctggtaattttttaaaaaatcaaacggtacagaaatacataaaataaattgtgttcttcccacctattgctcctcaaacataatcaatatttttgtgtgtactttccaggaaaagaagaaagtatacttaaaagagttgatgtacacatatatcttattttttatatttacccaatgggataatactac

SEQ ID NO: 795828 - DNA, 597 bp, Homo sapiens
ccacttcttcacctactaaatgctgattctatatatacacctagatgtagtgacatctaaggatgcatctaagactacactaacctggccctgcccacacagttcacaggggctaatagcaaatgcagtcaagtaatagagaaaacatcaacctaagtttagaagtacctggtggctgcaggagcagatgaaaggcatgccaatctgagttggraagtgagaaaacaattcttggaatttgagatgatatcgggggaaattcacccccaatattttacataggttcttttctattttccctaagtgtcagctggtctcagaaataaagggacagagtacaaaagagaacaattttaaagctgggtgtccgggggcgacatcacatgtcggcaggttccatgatgccccttaagccataaaaccagcaagtttttattagtgattttcaaaagtggagggagtgtactaatagggtgtggctcacagagatcacatgcttcacaaagtaataaaatatcacaaggcaaatggaggcagggtgagctcacaggaccacaggaccggggcgaaattaaaattgctaatgaagcttcgggc

SEQ ID NO: 795829 - DNA, 597 bp, Homo sapiens
ccacttcttcacctactaaatgctgattctatatatacacctagatgtagtgacatctaaggatgcatctaagactacactaacctggccctgcccacacagttcacaggggctaatagcaaatgcagtcaagtaatagagaaaacatcaacctaagtttagaagtacctggtggctgcaggagcagatgaaaggcatgccaatctgagttggaaagtgagaaaacaattcttggaatttgagatgatatcgggggaaattcacccccaatattttacataggttcttttctattttccctaagtgtcagctggtctcagaaataaagggacagagtacaaaagagaacaattttaaagctgggtgtccgggggmgacatcacatgtcggcaggttccatgatgccccttaagccataaaaccagcaagtttttattagtgattttcaaaagtggagggagtgtactaatagggtgtggctcacagagatcacatgcttcacaaagtaataaaatatcacaaggcaaatggaggcagggtgagctcacaggaccacaggaccggggcgaaattaaaattgctaatgaagcttcgggc

SEQ ID NO: 795830 - DNA, 646 bp, Homo sapiens
actgatattagtttttatctggaggtcaatccttacgaatatgactcctcatttatgcaatggctattcagagccgagtagaggtaagtacctgatttgtctccttctgcagttttttggcacatgtaccaactatggtgtctctggatctccccacctcttatggtcttgggggctgggaaggttggatatttctggagatggtgagcaacaacacactgcacccccaatctcctgggaaagaagtgtcctcagaactgggcacactcatattttggcattatgttaagcccaacagactcctccaaaawctgaggtgacagttttctggtccttgaagtttctgaccacacagataaggctggcattgagctgcatcaactcaggcaggctcacagtcagggtccaggggttggcggctgatctcgatatcccactctgctccagcttcttggggaggcccttgctctcccaggtcacattcaaatcctttgcggtccctagggccttgccctccatggtgatgttgcaccagtctgctgtgatggttggtgactcagccagggttggggaaaaaagggaacaaaattattattgcatttgaagagtacgttctttgtctatgatctcaatagtttcagagcac

SEQ ID NO: 795831 - DNA, 646 bp, Homo sapiens
actgatattagtttttatctggaggtcaatccttacgaatatgactcctcatttatgcaatggctattcagagccgagtagaggtaagtacctgatttgtctccttctgcagttttttggcacatgtaccaactatggtgtctctggatctccccacctcttatggtcttgggggctgggaaggttggatatttctggagatggtgagcaacaacacactgcacccccaatctcctgggaaagaagtgtcctcagaactgggcacactcatattttggcattatgttaagcccaacagactcctccaaaatctraggtgacagttttctggtccttgaagtttctgaccacacagataaggctggcattgagctgcatcaactcaggcaggctcacagtcagggtccaggggttggcggctgatctcgatatcccactctgctccagcttcttggggaggcccttgctctcccaggtcacattcaaatcctttgcggtccctagggccttgccctccatggtgatgttgcaccagtctgctgtgatggttggtgactcagccagggttggggaaaaaagggaacaaaattattattgcatttgaagagtacgttctttgtctatgatctcaatagtttcagagcac

SEQ ID NO: 795832 - DNA, 474 bp, Homo sapiens
ttaagacatttctaattttactataccagtaagtttaaaaaattaaagtcacgtgaactgaatgatcacagcttttaccttttccttaaaattttttgatttaagtgtattgttcttaggcctattaattaaatcattttaagtagatattgcatacctaacacatatatagccacacagacaaccagaagaagattcggtagttataagatctttcttttgctaatttcccaattggattttggcctttgggtgaggccctttaagaacggggcsaggaaaacagtttttagggccaaacaagtacagctggaagacaaagacaaattttgagaggtacttatttacctttaattccaggggttccataaggaaaacagattttttcccaaatgggatttgtggtgacttttctgttttcccaagaagtcccaggccaccagaagtcattttagggttttttatacatgcaaa

SEQ ID NO: 795833 - DNA, 669 bp, Homo sapiens
tgtaaaacaatctggaacatttccaaaactgggaccttgttgtttaagggaattatttcagcacttgtcagttactctctaggaaatcagggtatttctacgattttgttttctaccgaatgacattcactccttcttttaaaatgtacattcatttgccccatgcctttatgttatcatctctctgcctaacagaacaggtgcaatcttaaatatttctgccactctcagtgtattagtccattctcacactgctacaaagatactatgagactgrgtgattcatgaagaaaagaggtttgattgactcacagttccgcatggctgggaaagtctcaggaaacttacaatcacagtggaaagcaaatgggaagcaaggtatgtcttacatagtggcaggagagagagaggaagtgaggaagttccacactttaaaaccatcagctcttgtgagaactcactcactatcatgagaacagtatgtgaaaactacccctatgatccaatcacctcccactaggtccctccctcaacacgtggggactacaattccagatgggatttgggtagggacacagaaccaaaccttatcactcagtaactgagtagccaacttagataccaatttagggctgctgggattttgacaggcactgcttagaggagacc

SEQ ID NO: 795834 - DNA, 622 bp, Homo sapiens
cagctggatcttccaaggagaagccccttttaattgatgatctctggccagcattcaggaatgggacttgccttctcggatgctggtctgctttcccatgaatgtgtttggttcagggtaaggttcagggtgacctatagagaggtggttattaagcatatgataggtgaccagatgatatattttgggagtataaaagctttgtcatcaggtataaggactcctttgggggtgatgaaaatgttttagaactaaatagagggtctggctggatcacacactgtgaatgtactaaaagacaccgaattgtacagtttaaaattattagagtatgtgaatttcacctcaaattaaaaaaaaaaccccacctttctcatcattgtaaacacagaattcaggaacatatctacatctgagaggcagggggtcagggcaggtgaggagcacagaggtctatgcaaattgttgttaaaagtctagttatsaggtgttcaaagtgtggttcccagaccagcagcattggcatcacctggaaatttattagaaaattcttgatccccaactcagatctattgaatcagagactctgcagatgggccttagtaatctgtgttttcacaag

SEQ ID NO: 795835 - DNA, 659 bp, Homo sapiens
tctggtataaccttgggtcatttcccaggggcagtaatgaaaggaacactagctttggaatctcctctgaggggctctcccttttgcaaagggctttatcaccaaatagaaggccaaactcagcaggaggacagacgcataaaagtgcacagataagtctggtggttttattgcttctttctacattttaaggctaaataaaaatgtattgcctatgtttctactccccctgccaccatgagtaattaaaaaggggtaaattaatagaatgttaatatcaaatgttggcattttaactcttctattgaaaaatcataaaacttactttggggaccccattccttgtgaacattggcttctggagggagawggaccttagaacctcagtgtgaaaatggacaggttataattgcatcacttaatgaggctacaaaggagtaaaatctcaggttggacacatatcaggtgtaatgttgcaaagacttgggtctctaagctggtactaaggaacatattatgaaagactaaatgagtacagaggtggaggaattatggcatgagaaagtggataatttcctacccccagttgttattattcattcattaatttatgcatgcgtgtattcattcactcttttatgcatccgttcaactattct

SEQ ID NO: 795836 - DNA, 582 bp, Homo sapiens
tgtgtatctgtggggtcagcgaaatatgacatttctcatttatgatcatgtttacttggactttattaataaagtgagttgtctattgattttatttattctttcaaataaacaaactttggttttgttaattgttggtatggattttcacatctcagtttcattctattaagctctgattctggttatttctcctcttctgctacctttgggtttggtttgctcttctttctctacttcccacaggtgtgctgttatgttgatattttaacctttattttaggttcaggtgtacatgtgcagatttgttgtacagattattctatcacccaggtattaaacctagtaccctataatttttttctgctcmtctctttcctcctaacctccaccctcagataagtctcagtgtctgttttttgtttttgtttttgttttgcctattggtgtccatgagttttcattattaaactctgacttataagtgtgaacatgtggtatttggttttctgttcctgcattagtttgctaagaataatggcaatcagctccatccatgtttctgcaaaggacatgatctct

SEQ ID NO: 795837 - DNA, 629 bp, Homo sapiens
cctagtaccctataatttttttctgctcatctctttcctcctaacctccaccctcagataagtctcagtgtctgttttttgtttttgtttttgttttgcctattggtgtccatgagttttcattattaaactctgacttataagtgtgaacatgtggtatttggttttctgttcctgcattagtttgctaagaataatggcaatcagctccatccatgtttctgcaaaggayatgatctcttttatggttgcatagtattccatggtatatatgtaccacattttctttagccagtctaaaattgatggacatttaagttgattccatgtctttactattgtgaataatgctacaataaacatatacacacatgtgttttcataacagaatgatttatattctttggggtatatatccagtaatgggattgctgggttgaatggtagttctgtttttagttctttgaggaatcaccacactgctttccacaatggatgaactaatttacactcccaacagtgtgtaaatgttacttttatgtgcaacctcatcaggatctcttgttttttagcttttaaatattagccattttgactggtgtgagatagtatctcattggagtttcaat

SEQ ID NO: 795838 - DNA, 654 bp, Homo sapiens
agctttctatcccatccactctgctccaaccacactaccctgctaatctaatggtgatgatgaacaaatctctcctacactcagagcatttgtatatttatttcctttattttaggagctcccttgtttttcaaatgtccatttccaactcatcgttcatatctcagcagaaatatcatttcatggatgcttccctaatgcaccaaaccaagcacagtttccctctgaaacctatttataacttctgatttataataattgtgaataagtatgtgtataatgtctagaataaagattatgtatttttataattttctctttatacttagcacggtactggataaatggaaagaactcaaaacatatatattgaatatamgaggattaaggtagaagggaaaagagagagactaccctgactcttggtaaggcaaaaattaaactggaattaacttgaacagggatggacactaatttaatgggtagaagtttgggccctaggcagaaaactgcaatttactttagtcagcattttccaagtacattcaaaaacaggttcattcgaggaagtgcttctcaaaaacatgatgcaatggtcaaataagtttgtctgcctcttagatagtgcctattagagtctcctattaggagctc

SEQ ID NO: 795839 - DNA, 598 bp, Homo sapiens
gtcttttgtattatgttttattttgctttcaatttaatttacttatgctctgatctttattatttccattctatgaatttttggtttgctcttgcttttctagttctttaaaatgcattattagatgatttatttgaagtttttccactttttatgtaggcacttataggtttaaactttcctcttattatctgatatggcttggttgtgtccccatccaaatctcaacttgaattgtatctcccagaattcccacatgttgagggagggactcaggcrgaggtaattgaatcatgggggccagtcttttccgtgctattcttgtgacagtgattaagtctcatgagatctgatgggcttatcagaggtttccacttttgcttctttggtcattttttcttgccgccaacgtaagaaatgcctttcacctcccgccatgattctgaggcctccccagccatgtggaactgtaagttcaattaaacctctttttgttaccagtttcgggtatgtcttcatcagcagtgtgaaaacagaccaatacagtaaattggtaccagtagagtggggcactgctgaaaagatacctcaaaatgtg

SEQ ID NO: 795840 - DNA, 598 bp, Homo sapiens
gtcttttgtattatgttttattttgctttcaatttaatttacttatgctctgatctttattatttccattctatgaatttttggtttgctcttgcttttctagttctttaaaatgcattattagatgatttatttgaagtttttccactttttatgtaggcacttataggtttaaactttcctcttattatctgatatggcttggttgtgtccccatccaaatctcaacttgaattgtatctcccagaattcccacatgttgagggagggactcaggcggaggtaattgaatcatgggggccagtcttttcygtgctattcttgtgacagtgattaagtctcatgagatctgatgggcttatcagaggtttccacttttgcttctttggtcattttttcttgccgccaacgtaagaaatgcctttcacctcccgccatgattctgaggcctccccagccatgtggaactgtaagttcaattaaacctctttttgttaccagtttcgggtatgtcttcatcagcagtgtgaaaacagaccaatacagtaaattggtaccagtagagtggggcactgctgaaaagatacctcaaaatgtg

SEQ ID NO: 795841 - DNA, 617 bp, Homo sapiens
tggttttgtctttagttctgtttatatgatgaatcacatttattgatttacatatgttgaaacaaccttgcatcccagggataatagcctacttgatcatggtggattagctttttgatgtgctgctggattcagtttgcaagtattttgttgaatatttttgtatcaatgtttatcaaggatattggcctgaagtgttctttttttgttgtgtttctgccagattttgctatcaggatgatggtggcctcatataatgagtttgggaggagtyctttctcctcaattttttggaataatttcagtagaattgatgccagctcttctttgtacatcttgtagaattaggctgtgaattggtctggtcctgggcttttcttggttgttaggttatttattactgattcaattttggagctcattactggtctgttcaggggttcaatttcttcctagttcagtcttggaagggtgtatgtattctggaatttatctatttcttctagattttctagtttgtgtgcatagaggttttcataatagtctgtgatgtgtatttgtatttatatggtatcattggtaatatcccctttgacatttctgattgtatttaattg

SEQ ID NO: 795842 - DNA, 562 bp, Homo sapiens
agacaggtacaatgcttgattctttccctttatcagtttttgagctaataaattctttccctgttattttataaaggtgacctattcttttaaatgccagtataatgcgtgaatttaagcatatttcatggaattcaatcatttgtaattgttattgtcaaagtccacatgttttggccaatgagggtctcttcaarttggctcttacatccttttaaaatgaccctagtattgtttagcagcttctatgctatctggaattaaaagacttttcaccctcactttatatatatatacatatatatatatgtatgtatatatacatatgtatatacatattttgccctaaatctggaatcagccatttcctcaaaatattctgttagagaaaaataatatttcaagactacaatctaggcactaggcttgttaattactactgagttgggattacaactaaatttattattcaacaaaactaggagattctaggggatatatataattgaaaccctgaatatgatagaaatatcaacatgaattattgagaatcaagacaatg

SEQ ID NO: 795843 - DNA, 615 bp, Homo sapiens
tattattttaaattacatacgaagatctaacatgtcacccacagaccatttcatccactgctctgtttggctgcagtctcttgtctctcccttcagcaatggtgaagcggataccctttcctcggggaagagaaatacatggtttgttgcccttgtcaataacaaaaatgatggaaaagctgttgctgttggcatctttcacgtgaatcgtgtcaaaagatccagggtgcctctctctattggtgatcacaccaattcttccccagttagcacctccagtcaccaaacacaggttaccagtgtcgaayttcaaagcagtgatgttgccagtctccaaatcaatctgaatggtgtcgttcactttaatgagggaatcagggtggcggatagtgtgagcatcgtgaatcaccaggtgaggggttccttttgtgcacacaaagatttttctcattttgcataacttgtacttgacttcctcaggtgtaacacgatgtacagcaaagcgacaattgatgccatagatcagacggaaaccctctcccgtcttgtcaatgctgatgacatccataaatccagtagggtaggttatatcagttcgaaccttgccatctacct

SEQ ID NO: 795844 - DNA, 615 bp, Homo sapiens
tattattttaaattacatacgaagatctaacatgtcacccacagaccatttcatccactgctctgtttggctgcagtctcttgtctctcccttcagcaatggtgaagcggataccctttcctcggggaagagaaatacatggtttgttgcccttgtcaataacaaaaatgatggaaaagctgttgctgttggcatctttcacgtgaatcgtgtcaaaagatccagggtgcctctctctattggtgatcacaccaattcttccccagttagcacctccagtcaccaaacacaggttaccagtgtcgaacttcaaagcagtgatgktgccagtctccaaatcaatctgaatggtgtcgttcactttaatgagggaatcagggtggcggatagtgtgagcatcgtgaatcaccaggtgaggggttccttttgtgcacacaaagatttttctcattttgcataacttgtacttgacttcctcaggtgtaacacgatgtacagcaaagcgacaattgatgccatagatcagacggaaaccctctcccgtcttgtcaatgctgatgacatccataaatccagtagggtaggttatatcagttcgaaccttgccatctacct

SEQ ID NO: 795845 - DNA, 601 bp, Homo sapiens
actatacatcatttcacttaagatagaagtttccaagaatctattgaagactttaagtagggaattaccataattataaaaatgcctctgggggatttaaatatatataaagtaagacagacaataataatagcatgtaagtcataatgggaaataaatgtagttaatgtgctggaaggtaaatatattgttcaggtggatagtaaaggatttgactaacattatattttcataaattttcaaataatttagacttctagggtaaccactataggggagcagaggagggtgataaaaatcatttttaaaaaatccattcaaaagaagtcaagagaaaatwaaaaaaatccaaaagaagagaagaaggaaaatgagacataggaatcttcactctacaacttcccaggtgattcattcgtataccaacccatcgtgatgaattcaagaaatgtgctacaattctgttgttactagtaatacccgtaactgtaatgctaatagtagctgtagctgtaataggtccattgtccaatgcacccagcaagtcaatacacagagacatcaggttgcagcagagaaaaaggtttaatggtaaggtcac

SEQ ID NO: 795846 - DNA, 601 bp, Homo sapiens
actatacatcatttcacttaagatagaagtttccaagaatctattgaagactttaagtagggaattaccataattataaaaatgcctctgggggatttaaatatatataaagtaagacagacaataataatagcatgtaagtcataatgggaaataaatgtagttaatgtgctggaaggtaaatatattgttcaggtggatagtaaaggatttgactaacattatattttcataaattttcaaataatttagacttctagggtaaccactataggggagcagaggagggtgataaaaatcatttttaaaaaatccattcaaaagaagtcaagagaaaattaaaaaaatccaaaagaagagaagaaggaaaatgagacataggaatcttcactctacaacttcccaggtgattcattcgtataccaacccatygtgatgaattcaagaaatgtgctacaattctgttgttactagtaatacccgtaactgtaatgctaatagtagctgtagctgtaataggtccattgtccaatgcacccagcaagtcaatacacagagacatcaggttgcagcagagaaaaaggtttaatggtaaggtcac

SEQ ID NO: 795847 - DNA, 602 bp, Homo sapiens
atattttggaataattatgagatgtgagtgcctaagcagagatgtacagcaaacattatcaggacagaaagcatgatgggagcacccgatgttacattcttcagttcatgctgtgaccaggcgacctcataaaaggaaaaatataatgtataagtacaaaccccattttttgttttggctcttttatatttgtattttttgagacagagtctagttttgtcacccaggctggatgcagtggaccgatctcggctcactacaacctctgcctcccaggctcaagcaatccacccacttcagccccctgagtagctggggttacaggcatgtgccaccacacctggctaatttttgtattttttttgtagagacaggctttcgccatgttgttcaggctggtctcgaactcctgagctcaagcgatctgcccayctcagcctcccaaattgctgggattataggtgtgagcaaccgcgcccagccaaaccccatattaagcaaaaacttgccaagagatcttttaaaaggcaaggaatgagtatggctactgtgtaattatctgaagggttttttttgtttgttttttggttttgtttgtttgt

SEQ ID NO: 795848 - DNA, 637 bp, Homo sapiens
atgctaaacaccttttcttctgcttattggcctgtggctatcctctttggtgaaggtcagggcacgcctctgcccctcccctcctctaaaaaaattgggcgtggctaacgcctgtaatcccaacactttgggaggctgaggtggrtggatcccgaggtcaggaggttcaggaggttgagaccatcctggctaacatggtgaaaccctatctctacaaaaaatacaaaaaattagccgggcgtggtggcacgagcctgtagtcccagctactggggaggctgaggcaggagaatcgcttgaatccaggagacagaggttgcagtgagccgagatcgcgccaccgcactcctgggtgacagagcaagacgctgtctcaaaaaagaaaaaaaaaaaaaaaaagaaaaagaaaaattggttgtccagtctttttcttatcaattactagggctctttgacacatgttttgcaatgtgttctcctggcccgtcacttaccttttcaccttcttaatggtgttttttgaggtacacacattttactaattaatttacaactgaaacttattctataaattattactctttcatggttattggtatttgcatcctgtttaaggaatctttgcctatgcttacac

SEQ ID NO: 795849 - DNA, 637 bp, Homo sapiens
atgctaaacaccttttcttctgcttattggcctgtggctatcctctttggtgaaggtcagggcacgcctctgcccctcccctcctctaaaaaaattgggcgtggctaacgcctgtaatcccaacactttgggaggctgaggtggatggatcccgagrtcaggaggttcaggaggttgagaccatcctggctaacatggtgaaaccctatctctacaaaaaatacaaaaaattagccgggcgtggtggcacgagcctgtagtcccagctactggggaggctgaggcaggagaatcgcttgaatccaggagacagaggttgcagtgagccgagatcgcgccaccgcactcctgggtgacagagcaagacgctgtctcaaaaaagaaaaaaaaaaaaaaaaagaaaaagaaaaattggttgtccagtctttttcttatcaattactagggctctttgacacatgttttgcaatgtgttctcctggcccgtcacttaccttttcaccttcttaatggtgttttttgaggtacacacattttactaattaatttacaactgaaacttattctataaattattactctttcatggttattggtatttgcatcctgtttaaggaatctttgcctatgcttacac

SEQ ID NO: 795850 - DNA, 283 bp, Homo sapiens
gagtggacattcattctgttgcctttccgctaaccaagaccagacaggatgtccagctgaggccacagcttcacacttgggatcagggctgttggagtgccctacatttgatggggggaacacagttcagagtggcggagccytgaagaaaagtaggatttggatggacacagaggaagtggagggtcttctagattgaggcagaagtcagaacaaaagccagcctccagagccaggagtgaggctgggctgtttgccagagagtgagagtttgcagtggtgg

SEQ ID NO: 795851 - DNA, 622 bp, Homo sapiens
actatattttatgtaagggaagataagttcaatgaacaaaaagaagacaaaatgttaaggaggccttctaaaaatacttaacaagaacaattctattgtgttggctttctatgacttctataattatacttgctacctcaatgcaagagataggaaagaaagaaaaagtagctctgactatgacagtagcccttagttgactaaaatgtggcagcagtcattcctgagaacttaagaatagcagtaacatcattatctgagatttgaattcacttcaggcacaatagaaaatatatttttttaattttctggacatcttaggaggatattttagatcagaaatcatgttgaggaattagacattaagccccaggacaaagccattcacatgtcaatctttgttgtcatctgtcctattgccaacacagrcctcaacattatcaagcggacagagggaaagaatgataatgtggaaatgatgactatattttctggaagtgttaaagattgcagagatctttcctggaattgctgaatggtttctatctccttaatgagcaacacctttttaggaaggcagtagttgatgtcatctggactgtcgagtcctattaaagatgag

SEQ ID NO: 795852 - DNA, 503 bp, Homo sapiens
gtgaggcatatgtcccaaagctgaccctagagcagccgcccttctcagggagatgaagatctgtgcctcctggtctcagcttgactctgagtttatcctgtagccttaagcaagctgtcaaacctctgtgtatacctccgcttcctctattgaaaaataacagttctggattttgttaatagtcctggaggagagttattaacatgaggtgtgatacacagaaataaatattaattaaagctgacaatgatgatggttttgcaaacataaaagtgctgtaggaaaaatcttgtctgattctactgaatgatttccataaagctaggctgggctcccagataatattatggaaggattacacaaaaygactgacattttcaatttattcttttagctcatactgctttatatttaggcagctgtctaaggagacaccatcaaaatgccattagtcaccatggggaaaaagtgttcataagtgaaggcatgccattaatctacag

SEQ ID NO: 795853 - DNA, 546 bp, Homo sapiens
catttaagccttacaacgatgttatgaggaaagtgtcatcatcatcatcaccatcatcatcatcatcatcatcatgtcatgattagagttgagcaaattgaggcttacagaggtaataacttaaccaaaatctcacaagctaattactgttgcttagtaaatttatttggctcacttctccttggtggttgtttgtagtaattacaaagatgtatggcaatatgttatttaggcagaagtgtactgtcatagtctaatatacccaatttttgtgcttatttaaattataatgagaatgcaagacttttattagattaattcacactcagatccaattaaatgtcatggacaccaggtaaagtttgagtattatcttgttkgagcttttggttgagagctggcactacatgttttattgctagtgcattcatctccacaacgtggagggtggctttgttcatagccccttaactaccgaatgcatggccactgctgtctttcaattatgttttgtgattctgcagtagagaaaactccagttatttt

SEQ ID NO: 795854 - DNA, 489 bp, Homo sapiens
ctctgttctgttttgattctactgccaacgctattggaaatatactgtgaagagggaagaaaattggatgaggagaagtcacaaaaagaaattttaggaagatattataataattcaagcaaaagttattcaagcaaaagcctggtggcttggaccagaataataacagtagatgagtgaccagtttctggagtgcacttttgctcatcaaaagagcacaacaaagcttcccatatactggctggtcacctgtatcttccatctctatcgtgtcaaaggtagcaaaaagccgtcaagttattaagtatagtaaamcattaaccaaaatcaattctatgcataccacaaaactgaacatattgagtcttctttgaatatgtttagttaacatttgtcacattgtactagggctcagaaagttcaaaaaattgtccatgtttacaagaacacaaaaaaaatagagaatatggagccacatgtaccaatcac

SEQ ID NO: 795855 - DNA, 626 bp, Homo sapiens
tgtctgtgctgatgctggtgtaaacagactgtgctgccaaggctataaaagtctagcacatacaattacttacagaacataatagatgataatgataagaagtgactatattagtggtttatatatttactactctattctttttttgtttatttatttatttatttatttatttattttcaggttggagttgcaatggygtgatttcagctcactacaacctccacctgctgggttcaagcaattcttctgcctcagcttcccgagtagctgggattacaggtgctcgccaccatgcctggctgatttttgtatttttagtagagatggggtttcaccatgttggccaggctggtcttgaactcctgccctcaagtgatccacccgccttggcctcccgaagtgctgggattacaggggtgagccaccacgcccagccctggttatcactttttgagaatgtactacttattaaaaaataaataaataaactgaacagtagagcaacttcaggcatgtccctcaggaggtatccagaaagaaggattgttatcataggagatgacagcttcatgcgtgttgttgctccaaagagcttccagtgggacaggatatgaaggtggaag

SEQ ID NO: 795856 - DNA, 665 bp, Homo sapiens
acatgtctgtgctgatgctggtgtaaacagactgtgctgccaaggctataaaagtctagcacatacaattacttacagaacataatagatgataatgataagaagtgactatattagtggtttatatatttactactctattctttttttgtttatttatttatttatttatttatttattttcaggttggagttgcaatggcgtgatttcrgctcactacaacctccacctgctgggttcaagcaattcttctgcctcagcttcccgagtagctgggattacaggtgctcgccaccatgcctggctgatttttgtatttttagtagagatggggtttcaccatgttggccaggctggtcttgaactcctgccctcaagtgatccacccgccttggcctcccgaagtgctgggattacaggggtgagccaccacgcccagccctggttatcactttttgagaatgtactacttattaaaaaataaataaataaactgaacagtagagcaacttcaggcatgtccctcaggaggtatccagaaagaaggattgttatcataggagatgacagcttcatgcgtgttgttgctccaaagagcttccagtgggacaggatatgaaggtggaagacaatgatgttgatgatcctgatcctgtataggccc

SEQ ID NO: 795857 - DNA, 630 bp, Homo sapiens
tgttggattgcagcatcacttttattaggttaccagttaagcaccaagtcgaataccatccccagactgctcaaaggacagggcagtgaccaacacatgctatgatcctccagagctcatgcatgggactgggggtccattataatggaaagaagagcttgcctttttcacaaagccaaccctcrtagctacactccactgccctcacagccgaacttcttcacacttgctatgtttattttttctacttagctcacactcaccaagtgagcgacacaggaccaagtcatggaaggctttgtaaacatggagacgtgtttttattacactccttaagatacactttttttattttaaaagacaccaaaatataccattttctttttttctggacagtagtgctacactgtctttatcccacccactctactttaaaaactgatgagagagaacataagcaaattttttatgagtacatcactttttattgaagtatatcatatttataagtctagaaggaataagtcatgtcttgataaattatcagaaatggatcacacacatgtaatcagcaccaagatcagaaatatcagactcccaaaagttgcccatataggtacatttgtcttt

SEQ ID NO: 795858 - DNA, 630 bp, Homo sapiens
tgttggattgcagcatcacttttattaggttaccagttaagcaccaagtcgaataccatccccagactgctcaaaggacagggcagtgaccaacacatgctatgatcctccagagctcatgcatgggactgggggtccattataatggaaagaagagcttgcctttttcacaaagccaaccctcgtagctacactccactgccctcacagccgaacttcttcacacttgctatgtttattttttctacttagctcacactcaccaagygagcgacacaggaccaagtcatggaaggctttgtaaacatggagacgtgtttttattacactccttaagatacactttttttattttaaaagacaccaaaatataccattttctttttttctggacagtagtgctacactgtctttatcccacccactctactttaaaaactgatgagagagaacataagcaaattttttatgagtacatcactttttattgaagtatatcatatttataagtctagaaggaataagtcatgtcttgataaattatcagaaatggatcacacacatgtaatcagcaccaagatcagaaatatcagactcccaaaagttgcccatataggtacatttgtcttt

SEQ ID NO: 795859 - DNA, 607 bp, Homo sapiens
ctgagttccctcctgagcactttactgacactgtgccaaggtcatgtgtgtaattccaaatcccacacacactctgggttctcatcccactcagtacatccgcattattcatgaagttgactacccccttctttttgtcastttttctctcttgaaatttgtggcttcttactttcttttttctattccctttccttttgattcccctagagattatgatttttttaaacctatgaattatcaatgccaagaacattgtgcagcatgtatggaataattaaccaatacatttaagtgcatagtttccagtgaatcatttgcaatagaatcaagatacacattgcagctcttgtcctgggtctctcctcagctcaaaggggcatccgtgcaagtgtctagggttccatccaggtttgacatcctattaattaccacgaagctttgttcttccctttcccctaaatgtattaatcaggtgttgcaatcagtggactttttaaatgaactttgattctgaaacttggtaatgtttattctaacaagcttgggtatagccaccagcaattctgttaaattatgaagtgagtatgtgatgtactaaaatagt

SEQ ID NO: 795860 - DNA, 632 bp, Homo sapiens
tagaatatcataactttcacacataatgtcttcctattgccaacaaaagacaataaacagatcctatttctaattgccaaaacctccaaacacaaggtaaccaacaaactatgtgaagtaaaacttgttttttcactggcagcagtagatgaggaagaaaaaaggagctaacatttctcgctttcagtactcatcaggcccgaccctgcttagtttccaagatcagatgagattaggtgtgttcacggtggtacggctgcaggctctgagcatcctgttgtaccagggattctcatgtatttatgaatcactgtactcctagcacctaaaacagtgcttatcagacacagcacccgtatctgttaagtgagctgactgaaccaatgtatyacctatctcatttactctttatggtcataaaagcaaggaatttgtaagttcattttacaaatgagaacataaaagtcaaaaataagttagatccttttataaaaccctatctcccacaaaaaagaatgaaaacaaaataacatacgtgattgtcttttgtagtctttataagctgttctatcattgatttcaactcattccccgacactgttgataccactacagaataaaacaacgctgcc

SEQ ID NO: 795861 - DNA, 616 bp, Homo sapiens
ctgggagcaccagctcctcacctagccaccatctggtcatcaggtatctcatgacattaccatttagaaggagagaatgacctggccatctgccttatctgaggtctattcacccaagtgatggagaatcccaaataaaaggtaagcaacacgtgtaggcagattgtgagaatctggacatcacgaacctaataatttgcctggccaggtgcagatcccagcactttgggaggccaaggtgggtggatcacctgaggtcaggagttcaagaccagcctgaccaacatggtgaaacccattctctactaaaatmcacacacacacacacacacacacacacacacacaaattagccaggtgtggtggtgggcacctgtaatcccagctactcaagaggcgaggctgggagaattgcttgaacccagtaggtggagggtgcagtgagccgagatcatgccactgcactccagcctgggtgacagagtgagactccatctcaaaaaaaaaaaaaaaaaaaacccactggatttattaaaataaaactccaatggcaagaagattcttatgactcatgggtaaggggaattttctcattccagtaaacgaatttctgaaa

SEQ ID NO: 795862 - DNA, 635 bp, Homo sapiens
gtgcaggtagactgtattacagggaggcacatggaattataaattcaacacaaacttcattaaggaaacagctgctctttatcaccaaaaagacaattatatactactttgatgattctgatttccaacttgccacactctgggtatctccttttcacatatcagtacatttaagacgatacatcttgtgaactaattccaggaataaggaattcagtagtagaccctaccaatcagttgcttgtatgacaggtaacactatttytagggagaaaagaatcaaaatctgtttgggggagctctggaaaacaaaggccgatgatataaacttgcgtgagtccttctgccatttgttcaccagcgaacattccacaattacaagctctgttattaacccttttaaataaatataggtacacatgcacaccaaagataaggggcattgtgagacaataatttagcattactagctgtgtgaatgattaggctggtcaagatgaaggcattaagtgtacaaattagaaatgtgcttagaaagctaatgtacaggaattcaatagcacgaagcacaaaggttcgagtgcctcagcaccattcttagcaccaagggaaattcccaatattaaaaaacaaaa

SEQ ID NO: 795863 - DNA, 623 bp, Homo sapiens
gtgcaggtagactgtattacagggaggcacatggaattataaattcaacacaaacttcattaaggaaacagctgctctttatcaccaaaaagacaattatatactactttgatgattctgatttccaacttgccacactctgggtatctccttttcacatatcagtacatttaagacgatacatcttgtgaactaattccaggaataaggaattcagtagtagaccctaccaatcagttgcttgtatgacaggtaacactatttctagggagaaaakaatcaaaatctgtttgggggagctctggaaaacaaaggccgatgatataaacttgcgtgagtccttctgccatttgttcaccagcgaacattccacaattacaagctctgttattaacccttttaaataaatataggtacacatgcacaccaaagataaggggcattgtgagacaataatttagcattactagctgtgtgaatgattaggctggtcaagatgaaggcattaagtgtacaaattagaaatgtgcttagaaagctaatgtacaggaattcaatagcacgaagcacaaaggttcgagtgcctcagcaccattcttagcaccaagggaaattcccaatat

SEQ ID NO: 795864 - DNA, 636 bp, Homo sapiens
gtgcaggtagactgtattacagggaggcacatggaattataaattcaacacaaacttcattaaggaaacagctgctctttatcaccaaaaagacaattatatactactttgatgattctgatttccaacttgccacactctgggtatctccttttcacatatcagtacatttaagacgatacatcttgtgaactaattccaggaataaggaattcagtagtagaccctaccaatcagttgcttgtatgacaggtaacactatttctagggagaaaagaatcaaaatctgtttgggggagctctggaaaacaaaggccgaygatataaacttgcgtgagtccttctgccatttgttcaccagcgaacattccacaattacaagctctgttattaacccttttaaataaatataggtacacatgcacaccaaagataaggggcattgtgagacaataatttagcattactagctgtgtgaatgattaggctggtcaagatgaaggcattaagtgtacaaattagaaatgtgcttagaaagctaatgtacaggaattcaatagcacgaagcacaaaggttcgagtgcctcagcaccattcttagcaccaagggaaattcccaatattaaaaaacaaaaa

SEQ ID NO: 795865 - DNA, 491 bp, Homo sapiens
aggcattgttataagttattaaccacatagcataaacggagcacttacaaagtgcttcactctgtgttgggacctggaaggcaaataaagaaatcatatttggttcctatccttaaggtgctcccagtctggtaaaacaggcgatgaccacagtgcttcrggaagtggaggagccctcagctggctaaccacagcccactgtcaaccagtaggggttaggaaggcatcctagacaaggactggtggtcgggcaacatagtttgaactgacactggagagacgtggaaagagcagcccacacagacaaaacagcctgaggagttcagagaagaggagtgggtcagagggattggtttgtctagtataggtggggaagtagcaagtggagtggttggcgggggccagatgggagggcctggaatgctgagctaaggatgcgggcattgtggagcctttggtttccaaatgggggtgacacagctcttttagaa

SEQ ID NO: 795866 - DNA, 637 bp, Homo sapiens
atctccagtgcctggtgctgaattcattaactctctccctcgaggatccttacgagcgctgcttcagccggctttctggccttcgagctttaagcatcacgaatgttctcttttacaatgaagacctggctgaagttgcctcattgccaagattagagagcttggatatttctaacacctcaatcacagacatcactgctctactggcctgcaaagaccgactcaagtctctaaccatgcaccacttgaaatgtttaaaaatgacaactacccagatactggatgtagttcgggaactcaaacatctgaatcatcttgatatctcagatgataaacagtttamatcagacatagctcttcgcttactagaacaaaaagacatcctacctaaccttgtttctctggatgtttctgggagaaagcacgtgacagataaagccgttgaagcctttatacaacaacgtccaagcatgcaatttgtaggtttgctggctactgatgctggttactctgaattcctcacaggcgaaggacatttgaaggttagactttaaaaatgtattattttgtcaggctgaccaatatcttagttgcataagactctattaaagatgaatgtctgtaatatatggaacat

SEQ ID NO: 795867 - DNA, 637 bp, Homo sapiens
atctccagtgcctggtgctgaattcattaactctctccctcgaggatccttacgagcgctgcttcagccggctttctggccttcgagctttaagcatcacgaatgttctcttttacaatgaagacctggctgaagttgcctcattgccaagattagagagcttggatatttctaacacctcaatcacagacatcactgctctactggcctgcaaagaccgactcaagtctctaaccatgcaccacttgaaatgtttaaaaatgacaactacccagatactggatgtagttcgggaactcaaacatctgaatcatcttgatatctcagatgataaacagtttacatcagacatmgctcttcgcttactagaacaaaaagacatcctacctaaccttgtttctctggatgtttctgggagaaagcacgtgacagataaagccgttgaagcctttatacaacaacgtccaagcatgcaatttgtaggtttgctggctactgatgctggttactctgaattcctcacaggcgaaggacatttgaaggttagactttaaaaatgtattattttgtcaggctgaccaatatcttagttgcataagactctattaaagatgaatgtctgtaatatatggaacat

SEQ ID NO: 795868 - DNA, 768 bp, Homo sapiens
ctggtggcctatgaagtaaccttgtcttctgtattttttgagatagagagcatgacaaaaacagtgggtgaagttttacctgtgacatagcatcaaataagacgagcctgcttggaagactctaacatagagtacacggtgggtagtgttctacacactggcctctaaagagtgactgacagacttggctctatcttttaaataaagtttagaccagcrcaattaaacaagagtaaatgaaaatatgaataattaattgacacagtcaaggtgcaccatcataatagaaaggtgattcaagttattcctgtgaagcaaaataagaaaataagtgtgggcttaaaaaaaagtcacagtgtatatactactaaaatttttttatttggacaaatggctttaatattttttaaaggtttttgtgtacgattggaagatttcttatctaaaaagacttaatatagggaattcaatcatagaaggcaaaagtcagttaatgggatatatacagctagtcaagaaatagaaaaacagatataaaatgaacaccctatttgcttcatggaagatgcagaaagattacataatagaagaaatggcagagaaaaggcaaagtggtagtgaatcccaggtgaatgatatggaatgggttaggtacaagtgtaattaattaagagggtttctcaggaagttttatattcatcacagatggtcaaggtgctaggacagacactgcttgaggatccatttaaatctgaatcataatctggc

SEQ ID NO: 795869 - DNA, 619 bp, Homo sapiens
atcaatgatacgaagagttggttttttgaaaagacaaaatcagtaaacctttagctagacaaagaaaaagatgactcaaataaataaaatccacattgaaaagaagacattacaacctataccacagaaatacaaaggataatgagaaaatattatgaaaaattrtatgccaacaaattggataacctagaagaaatggataaattcctagatgtatacaacctaccaagactgacttatgaagaaatagaaaatctgagcagattaatagtgagtgaggaaattgtatcaataatgaaaagtctctatcaaagaaaagcccaggactaaatgggggaaaagttgaaagcttttttttctaaggtctggaacaagacaaagatgcccactttcaccacttctgttcaacataatactagaagtgctagccagagaatttggcaagaaaaagaaataaaaggcatccaaattggaaaagaagtcatcaaattgtctcagtttgtagatgacatgatcctatatataaaaatacctttaaaagtttactaaaaaactgttaaaactaatacattcagtaaatttgcaggatacaaaatcagcatacaaaaatcagtatttc

SEQ ID NO: 795870 - DNA, 619 bp, Homo sapiens
atcaatgatacgaagagttggttttttgaaaagacaaaatcagtaaacctttagctagacaaagaaaaagatgactcaaataaataaaatccacattgaaaagaagacattacaacctataccacagaaatacaaaggataatgagaaaatattatgaaaaattatatgccaacaaattggataacctagaagaaatggataaattcctagatgtatacaacctaccaagactgacttatgaagaaatagaaaatctgagcagattaatagtgagtgaggaaattgtatcaataatgaaaagtytctatcaaagaaaagcccaggactaaatgggggaaaagttgaaagcttttttttctaaggtctggaacaagacaaagatgcccactttcaccacttctgttcaacataatactagaagtgctagccagagaatttggcaagaaaaagaaataaaaggcatccaaattggaaaagaagtcatcaaattgtctcagtttgtagatgacatgatcctatatataaaaatacctttaaaagtttactaaaaaactgttaaaactaatacattcagtaaatttgcaggatacaaaatcagcatacaaaaatcagtatttc

SEQ ID NO: 795871 - DNA, 629 bp, Homo sapiens
gtatacaccattgtgctaaaaagagctatgctggagattaaaattttcatcatcaagaaatcagttgtaattcatctttgagtgtgaatggaatatttgagggcagatgtagagagtgggaagagatggctgaggagagagcctggttgtatcaactaaaaaagaggaacctatgagataggctgagggcagaactctcaagaatgttggagaagaactgaaagagacattttagtagacgccaagcgaggatggagttttctaaacaggagtggctaacagcggatgccgtagatggactcatacaactcggagtaaaggaattcctggcttttgttaatgaggagggctttggtggccttgccagaagaatttaagcaaaacaatgggagaggggctggtctcagtggctcatgcttgtaatcccagcactttgggaggmaggaggaatcacttgagcccagaagtttgaaaccagcttgggcaacatagtgagaccccatctctacaaaaaataaaaaattattttaggcagatgtggtggtgcacgcctttagtcccagatcctccagaggctgaggtgggaggatcacttgagagtgcagacatggaggctgctgtgagccgtg

SEQ ID NO: 795872 - DNA, 610 bp, Homo sapiens
tatacgggggaaacatgtcctgaggtgtctcagagatgcaagacttcatgatcctggactggtatgtcaggaggatttggggaagagtttcactctttcatgtcttcaacagccatgcactaagtgtctacccagtgctgacactgttctctaaaggcaggacaaagcagttaacaacagaggaaaaaccactctgacctccctggcttgacattatagtaggggatgaatttttaaaaatacataactacatagagtttgattaaatatatttattttacatacwattatcttaatatatatttaaaatataagtttctataaatataaataaaatgaaagtatatatttgtgtacagaatatacaaatatttacatttccaatagttgaaaataaagcagtaaaggaaacaggaagagtttaaggaagtggagaaaaggtttcagttttacacagcatggatgtggaagagctgatcaagagggtgactttggagcattgactgaaagaatgcctacaaagagccacgatggtatcttgggtaaggatactgcagatggttggactagcaggtgcagaggccctgaggctgagcacagttggcgtgtt

SEQ ID NO: 795873 - DNA, 610 bp, Homo sapiens
tatacgggggaaacatgtcctgaggtgtctcagagatgcaagacttcatgatcctggactggtatgtcaggaggatttggggaagagtttcactctttcatgtcttcaacagccatgcactaagtgtctacccagtgctgacactgttctctaaaggcaggacaaagcagttaacaacagaggaaaaaccactctgacctccctggcttgacattatagtaggggatgaatttttaaaaatacataactacatagagtttgattaaatatatttattttacatacaattatcttaatatatatttaaaatataagtttctataaatataaataaaatgaaagtatatatttgtgtacakaatatacaaatatttacatttccaatagttgaaaataaagcagtaaaggaaacaggaagagtttaaggaagtggagaaaaggtttcagttttacacagcatggatgtggaagagctgatcaagagggtgactttggagcattgactgaaagaatgcctacaaagagccacgatggtatcttgggtaaggatactgcagatggttggactagcaggtgcagaggccctgaggctgagcacagttggcgtgtt

SEQ ID NO: 795874 - DNA, 645 bp, Homo sapiens
ttcaacaaatgtccttggagaaacaactatttgcactgggcaagctctaagtcaagtggaataaagacaagtcttaccgatggaattttccagaaaagggaacataatgacagttatctgggaactgggctttggaggaactccagctctgttctgcccactacaagggcttatgggtggctgattttcactatgattgagggkcctttggttttcaatatgctgtggaattagagagagggtgatgcagcaggagcaaattaaaacatcactagtttgctgttcttaccaacatttggacatttttatcaaataaacactccctggcttttgccagcctttagttaatttccagagctatgaaaaatttcatttgcatagttttttgccagtgttctcattaattctgtggagaagaggatttttggagattctttctctaccatttctactgatgtcactcagcaataaagattaaaaattgctgttttgtgggatggaacagagagcagactgcaaacagataaaaacattgtggagaaacattgatggtcccgttgaggttagagactctgagttagtggtgccaatctgttcggtgcatgtgttttctggcgaactcagcagagcaggtatagatgttga

SEQ ID NO: 795875 - DNA, 561 bp, Homo sapiens
ttatttgcaaatatcaacgtaattaaaaataaggataactacctgatcattctttcttccctgaaaataatctccaaatttttgtgtaatttatagctcatatttatctcttagattcatttagggaagattacaggcatgttttaaggaaacaatttatcggtaatctgttttttgaggaaatactaactctgagtaaaaatttgactttcctgtttgtttagtattgcagcactgagaactagtttctttctttctttctttttttaaacacagagtcttgctctgttgcccaggctagaatgtagtggcatggtatcggctcactgcatcctctgcttccygggctcaagcagttctcctgctcagcctcccaagtagctgggattacaggcatatgccaccaggccctgatgatttttgtattttttgtagagatgggatttcaccatgttggccagactggtctcgaattcctgacctcaagtgatttgcctgcctcagcctcccacagtgttgggataacaggtgtgagccaccgcaacccgccaagaactagtt

SEQ ID NO: 795876 - DNA, 618 bp, Homo sapiens
tttatgccaaacattccatcttaatatcatttatcattttctgacactgtatgatgtagacagtggtatacaatggtaactagttttttatttacctgttacctgtcttttgtattcaaagttgtgctccagaaagtcaggggttatttttgattttgttcacagctatattcccagtgtgtagaacagttsctggcacatggtaggtgttcattaaatatttgctgaatggagacacctgatactctatgaagacaatgtagaacagtaacttagaaaagggattgccaaactaaggcccaaatccagctcaccacctgtttttttttttttttttttttttttttgagacagggtctcgccttgctctgtcacctagtctagagtagtgtggagtgatcatagttcattgcagtcttcaactcctgggctcaggtgatcctcccatctcggcttcccaagtagttgggaccacaggcacatgccaccatgcccagctaatttttaattttttaaaatagctctttgaaaaacaaagctaactcctaagcagtgtgcccagagtcaacctaatttgttaattttttttttcttgtagaatcagggtctcgccatgtt

SEQ ID NO: 795877 - DNA, 618 bp, Homo sapiens
tttatgccaaacattccatcttaatatcatttatcattttctgacactgtatgatgtagacagtggtatacaatggtaactagttttttatttacctgttacctgtcttttgtattcaaagttgtgctccagaaagtcaggggttatttttgattttgttcacagctatattcccagtgtgtagaacagttcctggcacatggtaggtgttcattaaatatttgctgaatggagacacctgatactctatgaagacaatgtagaacagtaacttagaaaagggattgccaaactaaggcccaaatccagctcaccacctgtttttttttttttttttttttttttttgagacagggtctygccttgctctgtcacctagtctagagtagtgtggagtgatcatagttcattgcagtcttcaactcctgggctcaggtgatcctcccatctcggcttcccaagtagttgggaccacaggcacatgccaccatgcccagctaatttttaattttttaaaatagctctttgaaaaacaaagctaactcctaagcagtgtgcccagagtcaacctaatttgttaattttttttttcttgtagaatcagggtctcgccatgtt

SEQ ID NO: 795878 - DNA, 643 bp, Homo sapiens
aaaagactattagaactaataaactaattcagcaaagttgcaggaaactaaatcaacgtgcaaaaatcaatcgcatttctatacactcacaatgaactatgcaaaaaagaaatcagtaaaacaaacccagttagaatagctaaaaataatagtaataaaataattcagaataaattaagccaaggaggtgaaagatctgtacactgaagactataagacattgatgaaagaagttgaaaaagacacaaagacaatggaaagatagctcatgttcatggattagaagagttagtattgtaaacatttttatacttcccaaagcaatctatagattcaatgtaatccctmtcagaattccaataacattttccgcagagacagaaaagataatcctaaaattcatatggaaccacaaaagatcgctaatagccaaagcaatcttgagcaaaaagaacaaagctggaggcatcaacactacctgatttaaaaatctactacaaagctaatataatcaaaacagcatggtactagcataaaaacagccacatagaccaacaaaacagaatagaaagcccagaagtaaatccatgtatttacaatcagttgaccttcaacaaagatgccacgaacacatattgtggaa

SEQ ID NO: 795879 - DNA, 619 bp, Homo sapiens
agaaatgaaactcctcacggttctaaaatttgcccggccgatgctccatgatccatccaccagcaacacaatgtctgcctcagctctggtgagacactccatccctgacatggcaatcatgagacaagacagtaagaagcaaattgttggcaagggtacttccttgtcacacctctaccactccctggatcctcagtgttgcctgtctcagtactatggtctagctcagtgatgtggagtataagactctgaaaatatgtccatctgatttattaacctcaattaacagtcttaagagtcagcagttcctccaaagattatttcagtggccaatctttcctttatctttgactcgatttcctgccctctttcatagaayctggagacttgaattaagccattgttgaaaatttgatgggctcacaaattcaaaggctgaaataaataaatgagaatgtatagctgtctaactatgaagtactaataactttaataaaattgtaatgtagtcaaatcattagatattgcattcttctgcaatatttaatggtcatagcagacaagaatgagatggactgataaaatatgtaaactaaaaaaaggtttttgtgagccaaaa

SEQ ID NO: 795880 - DNA, 614 bp, Homo sapiens
aaaaaaatcctgctcaggcctaaattctgttgctgacccctgaatcctaacttcaactccagcagcaccaagcataagaaaacagctttagctgattttaaatactttgctggcaaacagacatataagtgatatttgtgtaaagcctactaatttacaaaagctattcaaccttktaaacaaattaatttcatcctttgatacaaacgtagttaattcctacctaagttcctccaaaacaactgtgttgtcatagggtccaaccactaactcccccagtcttctgtcatcccccgtagggtggaatgtgactttataacccttcacttccccaggggcaggctcccaagtcactcggaagcttgacatggttgggtcagatgttttgaggtttctaggagacttaaaccgagaagctgtaaagacaaaaagatttttaaaatattatctgtaagactaggctttggggtttcttttttattagccccacaaaaatgcatatccataaaaagggtttaagtccggtagcacaaaatagcatgttccatagaagtccagataacagagtgctagctaagtagaagtgtaaataattctcacaattcagattagat

SEQ ID NO: 795881 - DNA, 617 bp, Homo sapiens
aatagattgcaaggagtatgctgtattaggaaggaagtttgtacactttcgtggcttatgggtatcttagtataaccttttctggttgagtgaactgtgtcatttcaaaagcctgaagacattgtgatgactgctgcctccataatggctacattctaggggctttgccctgaatcgcatatattaactcaaaaaacaaacagtacccagtttttattgggaaaattacagtaccrgaagttatgtttctcagtcattgagaccttatgaagccttaataatatttagaagattctggttccttgtcttccttttttgagtcagcagttggtcacagttcagaaatgaattacaaattacaatttattagtaatgataatatttaagtagtaatgatgatgataaatagtaacagcttattttttaaaaagataccaagctaaatgctttcatggattatctcatttaattgtctcaacaaccttttaagtcttatatttttatcattgccgttttatagatgaagaaagtcaattttcagagaacttaaataacttctcatagatgtctagagcaaataagagacaccaggaaatattacacccaattaaacatgt

SEQ ID NO: 795882 - DNA, 447 bp, Homo sapiens
acatgtttgaaatagatatctatactctctctgatactagtgtgtagcaataacttttactgtcctattttgtttaactgtctgtgtatgtatgctctaaaaaggggattgaggctggaagcagtggcttacgcctgtaatcccagcactttgggaggccgaggcaggcagatcacttaaagtcaggagttcgagaccagyctgaccaaaatggtggaaccccgtctatactaaaactacaaaaattggctgggcgtggtggtgggtgcctgtaatcccagctacccgggaggctgaggcaggagaatcgcttgaacctgggaggcaaaggttacagtgaaccaagatcacgccattgcactccagcctgggtgacagaatgagacttcatctctaaattaattaattaataaaaaggacattgattaaacttttttttttcttttt

SEQ ID NO: 795883 - DNA, 650 bp, Homo sapiens
tcattctttcagtagcatttgccaaacatttttaccatattgttgctaagtaggtaaaacagaaagacacatatctaaatatgcagagacatattttgtaatggaggtaccactctttttgtaaggcgttgctgattctcacttcgcttctgcatctctgaatatgttacaattgtaagagatgtttgaagctttggggatcttctaatggaaatgggggttcttcaccgaatgttcatgtaccgacttcaagaggtcaragaatcacgaattgatatacaaagtggtgtatgttggagtatagtcgtcgcttggtatctgcaggggattcgttcccagacattcccacagatgataaaatccacggatgctcaagttcctcacagtcagtccttcatgccagtgggttctgtatccatggattcaatcaaccacgaattgaaaataccgtcatcacgtaaaacttgtaacatacattctaggaaaaagaagaaaataaaatcaccttgggaaaataatccttaaaattttactatgtagggatttattcttccaaacatatatatgtatttttgaaatcctttaaaaaataatgctgtatcacaagcacctttccctattatgtattcttctacagaatcatttcagtg

SEQ ID NO: 795884 - DNA, 502 bp, Homo sapiens
attatcacataggagtacacacatgcagagattggacactttaaaatttgagctctgcctccactaaagtggcttctgtttgcctcttgtgttctcattgcatttatgagaacagagaatcattgtagggctaatactgtattgtaatatttgtttcctggtctgtgtcttttactctgaggagagagagggcagggagttaaatcatttgtctttctggccctggttccaccagagggccttggcaatataagcactgggtttgttcagtaaatgagccccagggtgagagtcaggaaattttcttcctagtcttcatcyagtcattaaaggtgaggagtgaattcaggcagtgaatttaggcaagtccctttactttcctgaaaacaagttttctgatcaatgaaacgagtgtgttgagttcagggctagtaaatctgtttttggtgggttgaatactgccggcacagtgttttcaaacacttgaattggaatgtcttta

SEQ ID NO: 795885 - DNA, 544 bp, Homo sapiens
atctctcagctcagtaatggccacttggagcaggaatatgatctttatatggaagactcagtggatccttatcaccttcatagaaaggtactcacctcccacgtcaagagaaaagccaacatgtttttcctccaatgcataaaaggaacttccatagggcaggcaggagtcaggctgttcaagacaactggaaggagttgaataacatctatccagtgagtcctgcaagacttcaggctctactgcctccagcagctccctgctgagcctggaaaaggaggaaaaagtaaagaataagccaggggaaatcagacacaacagagccccaactaggtttcatgggtagcataaggaagtggttgaaaaagtaaaaggagagatccatyaatgaggtaacaaattattgccttcatgttgggacagaacagggccaaatggaaaagaatgaaagagaaagacagatagacacacacacacacacacacacacacacacacacacacacacagagaatgagctcagtgaattgtccaggtgacacact

SEQ ID NO: 795886 - DNA, 663 bp, Homo sapiens
tggaagactcagtggatccttatcaccttcatagaaaggtactcacctcccacgtcaagagaaaagccaacatgtttttcctccaatgcataaaaggaacttccatagggcaggcaggagtcaggctgttcaagacaactggaaggagttgaataacatctatccagtgagtcctgcaagacttcaggctctactgcctccagcagctccctgctgagcctggaaaaggaggaaaaagtaaagaataagccaggggaaatcagacacaacagagccccaactaggtttcatgggtagcataaggaagtggttgaaaaagtaaaaggagagatccattaatgaggtaacaaattattgccttcatkttgggacagaacagggccaaatggaaaagaatgaaagagaaagacagatagacacacacacacacacacacacacacacacacacacacacacagagaatgagctcagtgaattgtccaggtgacacactgatgagggagtaacaggacactctgagttagtgccctcaggacacacagcatacagtgatcaggaaaggactgtgctcaataattttccataaaatgtgctcaagtttccatgcagtcgccatgagaatacagtttttgaagtctggtccacctacagtaggttagta

SEQ ID NO: 795887 - DNA, 615 bp, Homo sapiens
accttcatagaaaggtactcacctcccacgtcaagagaaaagccaacatgtttttcctccaatgcataaaaggaacttccatagggcaggcaggagtcaggctgttcaagacaactggaaggagttgaataacatctatccagtgagtcctgcaagacttcaggctctactgcctccagcagctccctgctgagcctggaaaaggaggaaaaagtaaagaataagccaggggaaatcagacacaacagagccccaactaggtttcatgggtagcataaggaagtggttgaaaaagtaaaaggagagatccattaatgaggtaacaaattattgccttcatgttgggacrgaacagggccaaatggaaaagaatgaaagagaaagacagatagacacacacacacacacacacacacacacacacacacacacacagagaatgagctcagtgaattgtccaggtgacacactgatgagggagtaacaggacactctgagttagtgccctcaggacacacagcatacagtgatcaggaaaggactgtgctcaataattttccataaaatgtgctcaagtttccatgcagtcgccatgagaatacagtttttgaagtc

SEQ ID NO: 795888 - DNA, 554 bp, Homo sapiens
tgatggttcttcgggtttgcagggatccttccagtgaatagatgaaagtcacaggtaccagtatgaaaactgcagtgactcaccggaaacacttcatgcttgtcagcttgctaagctgtttgagtccaacaactgcatggggtcctgagttagtctcctgaatgtctcctgccgctactttcgtgagtgttgtcgtcactttaccttgtggtggccaagcccctaaatgcactattaggttatgcagtatgattttcagcgtaaaagacagataaagagcaacagcggggtgaaaaagaccctcttgcattggccgggaattgaacccgggtctcccgcgtgggaggcgagaaytctaccactgaaccaccaatgcctctgcgtaacaaccacctgcaggataacagaaaacagtatccacaaagacttagaaaccgttccaagcggttttttcaagtgtcgactaaaagctaacaaagacatccaaaccaaatgtgtttttacaggaaacttttactagacaacgttataaatatcaaaatagctcatttgtc

SEQ ID NO: 795889 - DNA, 621 bp, Homo sapiens
tccagtgaatagatgaaagtcacaggtaccagtatgaaaactgcagtgactcaccggaaacacttcatgcttgtcagcttgctaagctgtttgagtccaacaactgcatggggtcctgagttagtctcctgaatgtctcctgccgctactttcgtgagtgttgtcgtcactttaccttgtggtggccaagcccctaaatgcactattaggttatgcagtatgattttcagcgtaaaagacagataaagagcaacagcggggtgaaaaagaccctcttgcattggccgggaattgaacccgggtctcccgcgtgggaggcgagaattctaccactgaaccaccaatgcctctgcgtaacaaccrcctgcaggataacagaaaacagtatccacaaagacttagaaaccgttccaagcggttttttcaagtgtcgactaaaagctaacaaagacatccaaaccaaatgtgtttttacaggaaacttttactagacaacgttataaatatcaaaatagctcatttgtcggatcaaactcttaactctgaaaaaggtctttctttctacctgcattacaaacccctataataaaacatcagaaattcattcacgtttcttttttc

SEQ ID NO: 795890 - DNA, 643 bp, Homo sapiens
gtgagagctacccagctgagcccagtcaaaccacagaaccgtgaagcataataaagtactgtttgaagtcactaagttttagagtggttcttacttagcagtagataaccaggacacataccaagatgaatgtctgtgttttcaacacaaagtgtcaataacactgataactatggcaaatagcattgagagcttaatgtatgctgggcaccattctaagcacttgtactaattttttttttttttttttttttgagacagagtcttgctctgtcacccaggctggggtgcagtggtaccatctcggctcactgcatcctccacttcccaggttcaagcgattctcctgcctcagcctcctgagtagctgggattacaggggtgcaccaccatgcccacctaatttttatatttttagtagagacagggtttcaccatgttgggtagcctggtctygaactcctgacctcaggtgttctgcccacctcagcctcccaaagtgttgggattacaggcatgagccaccacacctggccagcacttgtattaattcatgtaaacctaatatccaccctttgagatgggttctgttatcatcctcacttaataggtaatgacaaaggctcagaaaggttaagaaggt

SEQ ID NO: 795891 - DNA, 643 bp, Homo sapiens
gtgagagctacccagctgagcccagtcaaaccacagaaccgtgaagcataataaagtactgtttgaagtcactaagttttagagtggttcttacttagcagtagataaccaggacacataccaagatgaatgtctgtgttttcaacacaaagtgtcaataacactgataactatggcaaatagcattgagagcttaatgtatgctgggcaccattctaagcacttgtactaattttttttttttttttttttttgagacagagtcttgctctgtcacccaggctggggtgcagtggtaccatctcggctcactgcatcctccacttcccaggttcaagcgattctcctgcctcagcctcctgagtagctgggattacaggggtgcaccaccatgcccacctaatttttatatttttagtagagacagggtttcaccatgttgggtagcctggtcttgaactcctgacctcaggtgttctgcccacctcagcctcccaaartgttgggattacaggcatgagccaccacacctggccagcacttgtattaattcatgtaaacctaatatccaccctttgagatgggttctgttatcatcctcacttaataggtaatgacaaaggctcagaaaggttaagaaggt

SEQ ID NO: 795892 - DNA, 545 bp, Homo sapiens
agtaagcatcagagctaggcagtctgattccagtattaccactatactatactatactatactatactatactatactatactatactatactataccatatgtactattactttactgatatatccctaagaggaaatccctgagatctggtrtctcccagatactgggacatcatcctatgccctcctgcttgcctacctgtcttttccacagacctatatctaccatttaaatcagtgtccttgtgaatacccagacatgttgtttcttccaactgcctgagctaccctacaccaagcacaaacttacacattttcaatccagaaagtgcccagacagtgccatccttacccaggccacgaggctgatctcagctcctcagccagcttcccttctagtcaattttttgggagctgggcctccagctgggatactctctggatgagactcttcaggtcctttttggcctgaagtcctggagagtagaaagccccagtgccatcagacagccacacctcatcctcatcagtgacactatgaggt

SEQ ID NO: 795893 - DNA, 552 bp, Homo sapiens
caagagacaagaagaggagaagcttgaagatatatttggtccaaggaagagactcttcagagggaaggtcacatcagctagaaacattaatgcgactggatgggctcaaaccaccgacttttcagtcaacttccgacagcactaacctagtgttccagagaccctgcttgttaaacagtgaaagctgttgctcaattgtgtcatccataattgtcaaatattgtcatttagtagcacaaggaagtattctctgttgccaagctagagtacccataactcttctgttttgttgaacattcttccccaccacaaaccctctttagaagactggtggctcctaaaacattgaggccaacagwcctgtccttgtgcatgtttgggcattgatccagggccaaatcagtgggagactcctccacgcacatgccaggtccccaggtgacaactgcagtctctggatctgaggtcatccactttcccattcctagctcacctcacccatcatgaagcctggtcaggattgccagagacccgagtgggcaggtgcccgca

SEQ ID NO: 795894 - DNA, 619 bp, Homo sapiens
tgatttcccttgctagaccttttcccagggtcctggctctgtatgaccagggacctgtctccctctctaccaggaccctaacactgccgcagcctcctccctccaccggctgcccaagcacccacccccagctgcccaagcacccccacttctgggctggcttcagcgcagagccctcgrccacctccttgggggtcctgacaccctcagacactatttctcagggctctggctgcaccccagggcgctcagactcctcccccagacacgcccccacccccacctggagggcgcgagcccctccccctgggcctctggctgcgcccagaaaactcaagccccttcctacctggaccttcagctggcaaaagtgcagggcggagagaatcagggcaagcgagcgtggagtcgtctgagcaggccggggaggggcctctgcggggcgaacggcctcggcccggcgaggagcgccgcggtggagacggggtccgctggcccgagagcccccgcaggctgcggtcggacgctgttggacgcaggctgccgctctcagcgtcagacaggacggcctgagggtaagggagggaagcaggaggccgcagagttaggaacttcgggg

SEQ ID NO: 795895 - DNA, 619 bp, Homo sapiens
tgatttcccttgctagaccttttcccagggtcctggctctgtatgaccagggacctgtctccctctctaccaggaccctaacactgccgcagcctcctccctccaccggctgcccaagcacccacccccagctgcccaagcacccccacttctgggctggcttcagcgcagagccctcgaccacctccttgggggtcctgacaccctcagacactatttctcagggctctggctgcaccccagggcgctcaractcctcccccagacacgcccccacccccacctggagggcgcgagcccctccccctgggcctctggctgcgcccagaaaactcaagccccttcctacctggaccttcagctggcaaaagtgcagggcggagagaatcagggcaagcgagcgtggagtcgtctgagcaggccggggaggggcctctgcggggcgaacggcctcggcccggcgaggagcgccgcggtggagacggggtccgctggcccgagagcccccgcaggctgcggtcggacgctgttggacgcaggctgccgctctcagcgtcagacaggacggcctgagggtaagggagggaagcaggaggccgcagagttaggaacttcgggg

SEQ ID NO: 795896 - DNA, 621 bp, Homo sapiens
gtgagaggcggaccttgtccccgcccggggactccctgtcacggctatcccgtccaacctcgccggggtatccgggctcagaactgaacctactccgtctgggagcccaaggatggctcccccaagtcgcccccgcctggccccaagctccagaggacctgccagaccagcttccgctcggagtttcgcactcagatcccggcgctgcaggtgccctcgcastggactaaactggaccgcgaagggaatagccggaacccgccaggctcagagccctgccgcccctcactcaccccgagcctcggccgccgcgacccggttcacaacatccgcccaacctctcggctacggcgtccgttcagggccaaatcacgcgcacgctcgcgcgctgagcctccagccgcgcacgcgcaccggcccgcgcccagcctccgctaggggaccccctccgtggcttcccaccgggttgttccaggcctcagcttcgccgaaaggcctcaccacctccgacctccgcctgccccggggatgctcccagccctgctgcggcagaacgcgacgtgctaaccggaatccctaggccgcctgtctcctacccatacttggaggccccgctcagac

SEQ ID NO: 795897 - DNA, 507 bp, Homo sapiens
attcaccgcccgcccagcctggcgcggcgccctcacctcagaaacgctgggtggacttcgcgtaacttcccattcacagggcagccggcagccgcgccgccgcgcctcggcccagctcctggcgccgcagatcgcccgtcccgcgttcccaaaagcaccgcgctcgctcaaaagctcgggcagcctcgcgaccctcacctacgcctcccagtaccgccgctgtctcaaccgccacccagcccctcgcctgcgcctgcgcctgcagcccactggctcctcaggmtcccgatgggcgtgtcaggataacccaaggcgcaggcgcggcggggccttaaagggacccggcggcctcttctgcacaacgggttcgagcaggttaggggccgcgcaggcagaggaaaggagtaacccaggggaaggaccgagtgcagcggggacggggaaatccctctctcccctccgcctgtctttcaaagcaccagccctcgaccctccaaatcgctggtt

SEQ ID NO: 795898 - DNA, 378 bp, Homo sapiens
tttacgagtatggaacagacttacataacaattctgcaggtaatggctctggaaaggtcaaccacttagttttggacaactcttttctattctgtataaccactttttcaccaaaatgatactaaataaatatgctataggaagctatattttgacatgactgttttaggcaaagatacactcaccaacttactccacaagagtttctaatcagagamtatcatatggatctatttgaattgctcccatgcttggctgagcccaaaataatttactgtgcgtatgtacaccaagtgagaaggttgaggaggtgtcacttgtacatctctttattctttttttttttgtatgtgtgtgttattttcatgtgttttgaaa

SEQ ID NO: 795899 - DNA, 567 bp, Homo sapiens
tatgctataggaagctatattttgacatgactgttttaggcaaagatacactcaccaacttactccacaagagtttctaatcagagaatatcatatggatctatttgaattgctcccatgcttggctgagcccaaaataatttactgtgcrtatgtacaccaagtgagaaggttgaggaggtgtcacttgtacatctctttattctttttttttttgtatgtgtgtgttattttcatgtgttttgaaaggctctcttgcttagcttttattttgccattaaagatttttttctgtgctataactgtatttttaagtctggtttgagttcaagaaatccacaaattcacaaaagattaagaataatttgtgaacaaaatgatgcagaaataaaaaatgcattttccaaataactcccttgcagtccttctcgcccaactaccactttctattaagtttcttcttcctactctatgaagtgccatgagctttcaattcattgtattttaagtataagctatacttactaaccttcaccttattctttgctacttaaataagcttgcttt

SEQ ID NO: 795900 - DNA, 507 bp, Homo sapiens
attcaccgcccgcccagcctggcgcggcgccctcacctcagaaacgctgggtggacttcgcgtaacttcccattcacagggcagccggcagccgcgccgccgcgcctcggcccagctcctggcgccgcagatcgcccgtcccgcgttcccaaaagcaccgcgctcgctcaaaagctcgggcagcctcgcgaccctcacctacgcctcccagtaccgccgctgtctcaaccgccacccagcccctcgcctgcgcctgcgcctgcagcccactggctcctcaggctcccgatgggcgtgtcaggataacccaaggcgcaggcgcggcggggccttaaagggacccggcggcctcttctgcacaacgggttsgagcaggttaggggccgcgcaggcagaggaaaggagtaacccaggggaaggaccgagtgcagcggggacggggaaatccctctctcccctccgcctgtctttcaaagcaccagccctcgaccctccaaatcgctggtt

SEQ ID NO: 795901 - DNA, 458 bp, Homo sapiens
taaggccacgccaggcaaggtggagtcatgcgcccctcaacttaaagaataaactatgttccaattgccacaggtttttttcttcttcctttttttctctagctaaacaagcactggccttgagataagcaatgctgaagcacttgcagctcacccattaccrtaaactgactgagccctccctacacaagccataactacagctttgattggacaagagactgatttcagtaacttccccttgataagagagcactggctgtggacgggttctggacggtttacagaggctgtgcacttgactgcctttgtgtccctgcttccccttttgaagcatagggcctaattataatgtatttaaatgttgtctccactccaaagtgaacatgggttgcatgtaacaggcatgtttactcagcatgcatgcagcaggatcccttcatgaatattcagagctc

SEQ ID NO: 795902 - DNA, 554 bp, Homo sapiens
tgtttactcagcatgcatgcagcaggatcccttcatgaatattcagagctcctcctattccctgttgaatatgtatatgtggcccaccagatcaacataaatccctgttcccccctcccctccctggaaacgtacttttcaggtttcagcargagggtatgcctccctgtctgtcggaatggccaccttgcaggctgtaaccatttataaaaaataaaatctcccttctaaatttataaattgtgtgatttttcagttgacagctttcagtcagacttttcactgactgggaaaattcatttgcaatatatttattttaaaaatgactcctcagcatacaaaattcttgtgcaaagatcacaagcattcttatacaccaataacagacaaacagagagccaaatcatgagggaactcccattcacaattgcttcaaagagaataaaatacctaggaatccaacttacaagggatgtgaaggacctcttcaaggagaactacaaaacactgctcaacaaaataaaagaggatacaaacaaatggaagaacattcc

SEQ ID NO: 795903 - DNA, 523 bp, Homo sapiens
aatacactaaaaaatgctcaacatcgctaatgatcagagaaatgcacatcaaaaccacaatgagataccatctcataccagtcagaatggctactattaaaatgtcaaaaaaacaagagatgctgttgaggctacagaaaaaaagggaatgcttatatrctgttgataggagtattaattgcttcagccactgtggaaagcaatttggagatttctcaaataacttaaaatggaactaccattcaaaccagcaatcccattacttggtatatatccaaaagaaaataaattattctaccaaaaagacacatgcactcacatgttcattgcagcactatcacaatagcaaagacatgtaatcaacctaagtgcccatccatggtggattgcataaaaaaaatgtggtataaaaaatatgaattaccatcagagaatactataaacacctctacgcaaataaactagaaaatctagaagaaatggataaattcctggacacatacacccttcccaaattcaggta

SEQ ID NO: 795904 - DNA, 617 bp, Homo sapiens
caaatagaattaagataatggatgaaaaagtcccgaatactatgatcagcccaagtaaattagtaataataatgaagtaggcatggttagcaaacacacaacaaagtgaaactcatggcataaaatatctgtgggaaatgtraatatgggatatgattccatagctatttctttcccatccctctttggctagttagctctgcatcagccttcctcaggagaatcttaccaactgccttctcctctactcctactccattacaatgggtactacgtgtattacctccaatatactcttatgatcactacgcttcatagtactacatccaatatctacttgtgtgcatattatgttgtctctctcattagcttcatgagagtaggaacttgtttgttttgctcacatactttaacatcaatacactgtgtctgacaccaaatcattgttgaatgattgttggataaaagtttcagctgttaatatgcttatctaaatcaacttcagacactaactaaaaattggattcagaaaatgctaaaaaaaactcaagaaagtaatctacagaggtgaaggcatagtcagtcattctagttaaaatgggattaattttgcttag

SEQ ID NO: 795905 - DNA, 617 bp, Homo sapiens
caaatagaattaagataatggatgaaaaagtcccgaatactatgatcagcccaagtaaattagtaataataatgaagtaggcatggttagcaaacacacaacaaagtgaaactcatggcataaaatatctgtgggaaatgtaaatatgggatatgattccatagctatttctttcccatccctctttggctagttagctctgcatcagccttcctcaggagaatcttaccaactgccttctcctctactcctactccattacaatgggtactacgtgtattacctccaatatactcttatgatcactacgcttcrtagtactacatccaatatctacttgtgtgcatattatgttgtctctctcattagcttcatgagagtaggaacttgtttgttttgctcacatactttaacatcaatacactgtgtctgacaccaaatcattgttgaatgattgttggataaaagtttcagctgttaatatgcttatctaaatcaacttcagacactaactaaaaattggattcagaaaatgctaaaaaaaactcaagaaagtaatctacagaggtgaaggcatagtcagtcattctagttaaaatgggattaattttgcttag

SEQ ID NO: 795906 - DNA, 596 bp, Homo sapiens
agatctctcctaaaagaaatgttaaagacagttcttcaatcagaaagaaaaggacattaatgagcaataaaaaatcatctaaacatacaaaactcactggtaacagtaaatacagaaaaaaaacagctaaataacactgtaattgtgatatgtaaactacttgagtagaagggctaaaagtttaacctatcaaaaataataactacaaaaacttttcaagacatagatagtataataagataaatggaaacaacaaaaagaaaaagtgttgagttttgttttctctttgcttgtttattaatttgtttaagcaatcagtgataagttgttatcagtttaaaataatggcttatactatttgtaagcctcatggtaacctcaaatttaaaaacataaaacagatayacaaagaattttaaaaagcaatatgttaaaacatatcatcagataaaaacaccttcactaaaaggaagacagaaaggaaaggaagaagaaagaaaatgccacaaaacaactggaaaactagtaacaaaatggtaggagtaagtccttaattatcaataataactgaaagtggaacaaactctccaataaaa

SEQ ID NO: 795907 - DNA, 469 bp, Homo sapiens
  misc_feature 209: n = A,T,C or G
attaacaaaattttcctctgcacagattgagcacaatatttttaattgctagtagtaatagtagtgttatgggtactttgaaagcagtaaagtgttgggggtggggtgaggaggactctctttgtgaaggttttatctaagaaactcagaatttgcatttaagcccttcaatgatgtttctgaatttcatatctttctgcccaattcanacacacataaatgaaattkcatgttttctgagttaaggatcatcaatgtgataatcagaatggagtaaagagattaaaaattctacagggtctcaccctaagaccttctgtttaattcaggtgaaattttattatagtaagtatctgtgtcagtcacaagaaagggaagaagtgttatttaagtctcatgtgtacataatggtgtgtggcatggggtaggaagccaacctcagtttctccgccccttcatatgttaattg

SEQ ID NO: 795908 - DNA, 635 bp, Homo sapiens
gactacgaaaggataaagtaaaggatcctgtggtaatcagaaagttatgtatcttaacttcatcaatgtcaatatcctatttgtgaaaaggaaacaaggcacgtagattggaaaataattttttaaactgtccctagttgcagatgaggcagaaaatcagagggggtcggacatatgtggttcccacatataatcccagcactttgggaggctgaggtaagtggattgcttgaatctaggaattcaagagcagcttgagcaggatggcaaaaccccatctctacaaaaaatacaaaatatagccaggtgtagtgacacacagytatagtcccagctacttgggaggctgaggtgggagtattatttgatcctgggaaatagaggctgcagtgagctgtgatcaagctactgcactcaagcctgggcaacagagcaagactcatcctcaaaaaaaaaaaaaaaaaaggaaatttaagaaatttaaaaaatcagaggaaaatatttcttaattctagaataagagaattagcaagattacaggatagaagataaacttagaaaaacaaaacacttctacatcttagcaatgaatacatggaaactaaaatgaaaaaaatatcatttacaactgctta

SEQ ID NO: 795909 - DNA, 724 bp, Homo sapiens
tgtggtaatcagaaagttatgtatcttaacttcatcaatgtcaatatcctatttgtgaaaaggaaacaaggcacgtagattggaaaataattttttaaactgtccctagttgcagatgaggcagaaaatcagagggggtcggacatatgtggttcccacatataatcccagcactttgggaggctgaggtaagtggattgcttgaatctaggaattcaagagcagcttgagcaggatggcaaaaccccatctctacaaaaaatacaaaatatagccaggtgtagtgacacacagctatagtcccagctacttgggaggctgaggtgggagtattatttgatcctgggaaatagaggctgcagtgagctgtgatcaagctactgcactcaagcctgggcaacagagcaagactcatcctcaaaaaaaaaaaaaaaaaaggaaatttaagaaatttaaaaaatcagaggaaaatatttcttaattctagaataagagaattagcaagattacaggatagaagataaacttagaaaaacaaaacacttctacatcttagcaatgaatacatggaarctaaaatgaaaaaaatatcatttacaactgcttaaaaagatgacatatttaagtataaatctggcatatcatggaaaggatttgtatggtgtaaactacaaaacactggtgaaagatctaagtaaatacagagacacatcgtcttcacaga

SEQ ID NO: 795910 - DNA, 554 bp, Homo sapiens
ggaaaaagagaatattctgatcactgaaagaataaaagtccatcaaattgagagcaatttgattcctaagatgattgagtgtctgaacatttatcatcagttgtggtatgctatttattaaagaaagaatcttggagggtttgcacatcatcatgctaacttggaaaaatttactaagtcaaacgcttgacccaatgcagttgggcttctttcatcttctttcgtcttcttcagtatcrtgtgggaaataatacttaaaatgggaagacctgaagacaaaattttatatcttattaaatataagcctccctattaaatatggagcctactgttatgaactgacataaaggtaaaataaagttagggctcaagatctcacagctcaccctttcatagaatgggaacctacagtgtggatgagacaaccttggactaaaagttggatctggattctaatgtctggacctggctctggcattatctgtgacattatccaggccattgtcctccggtttctttacaaataatacctaattgataagttacttataatt

SEQ ID NO: 795911 - DNA, 649 bp, Homo sapiens
accagagtcctatttaacgacaagtactaggaaggtatgttacttggtgagtattagaaacttggggccaagcgtggtggctcatgcctgtaatctcagcactttgggaggccaaggtgggtggaccgcttgaggtcaggagttcgagaccagcctagccaacatggtgaaaccccatctctactaaaaaaattacaaaaaatcagccgggcttggtggcggatacttgtaatccccgctacttgggagactgaggtaggagaatcgcttgaacccgggaggcggaggctgcagtgagccaagatcgcaccattgcactccaccctgggtaataagagggaaactccgtctcaaaaaagaaagaaagaaagaaacttagcagtgagttattggtgcagcatggatttccatagattctgtattttccagcattaggcaaatggcaacacctgttcatgtgtcagagttgtctctctagaacgttccmcaacacagttgaaaacaggtttgtgtgtgtgtgtgtgtgtgtgtgtagtgttaagttttgccttacattctatcatacttctgaaagtatcttccaaaattagtctcagttataattttggaatgtaacatgagaatcagtttggggacacattacaatagc

SEQ ID NO: 795912 - DNA, 631 bp, Homo sapiens; identical to SEQ ID NO: 793737

SEQ ID NO: 795913 - DNA, 732 bp, Homo sapiens
tgggaatttactgcttaacagctttacaccgctttgggaatttgtgcttgttataaacagattaaaaattaacatatttaagaactttgtcttatcacaaatttcaaaccaggtttagaggcaaatctacaggagttattttaaagttggtctgatcaatgtactgttaaagctacttctactttttttagtaaaatgaaaggaaggatggaaagaaggaaggaagggaggaaggaaagatggatggacggacggacagaaggaaggaaggaaagaaggaaggaaggaaggagagaaagaaagcaggcaggcaggctctaaggaaaatcataaaactgcatcaaaattcactagaaaacaatcccatttcatattctgctaaacgccataggaaatgacatttgctatagtaagaaaaacagatggtggagagasagtggaaaatacaactccttgaacactgagaatgaaaatgccactgtgaacattttgggtctctctgacgtgttcctttatcaagttgtagcctccaagacaaccactttctttattatatgcatgccttccagcctgaaatagttttgtggggcttccaaagtaagaagcgagtggtgttttggatgtgtgtttgtgtgaggttgcatgtgagttcatgagtggggccaggacagagaacactgagggtcattcaaacccatgagacagacaactctgacccaggatccttcgcca

SEQ ID NO: 795914 - DNA, 611 bp, Homo sapiens
actgagggtcattcaaacccatgagacagacaactctgacccaggatccttcgccagcagcacagtgattcatcctctcaggcacaagtacatcaagtcctctgttttctcttagttcacatttgtcctcttcaaaccaatgagtcataagttggaaatatgtatgaaataagctagcataatatgtcactgaattatttctggtgattcaatatacacatcctaggacaccaggcatctgaaaggcaaatttttaaattcaagagatttatacaaagcagatacagttgattgtgtaagaaagaagaaaatcaggtgcaagaagaaacagatcctggtaaaacgattaactttcagtraggggggtaaaatatttcttcctgctctcaaaaggataattttcttcagaggaaattgcataaattcttggtcacttgaattagcagagaactattcttgccaaagtttagtgctgggaaacaaatgatattttggcctcttgcaaaacgattctacctctccacagcaaaatgagcttcattccttaatgcaaacagaattcataccttcccattcgtaccttcaaacctcaattacctgagaaatcagag

SEQ ID NO: 795915 - DNA, 599 bp, Homo sapiens
ctctctgtagctcagattgatatataagcctcaatcatctagcttgagtctcatatgcatactctcatgcatatgtacgtaattaaaattgtttttctcttgttaatctgccttatgtcaatttaatttacagacaagctaatgaacctggaagagaaggaagagattgttttttttttttcaagaatacattggacagaaatgtaaatatggctttgattattcatgagataactgaatgtgcacttacctttaatggaaagaggattaaccccacaagtcaggattttctttcgtgtcctagccttactgaatggtgaacaggacagtctatgragccagactcctgtgacttgagatagttacttaacttctctgagcctcagcttccttatcttaaaatgggaataaaaataatgctaacctgacagggttgaattatacctggcacctaataatcactatgtaattgggaaataagttacccttctactgacaacatagatcagatattaatttttctacgctcagtttttctgtttgtaaatagagataactagtgctttttttcctccataggaatgttttcaacttttcct

SEQ ID NO: 795916 - DNA, 497 bp, Homo sapiens
tttggaaaaggaacagaccagtttatccctctagctcaacttctgaccatttagccttgtggctaaatgtttatattatactgataccatttgttgcaagatttgtatcaaatatgcaaatcagattgcacagcctcagaacagctctataaattgaggagcaataagacctgcaaaagtaaacatgatgtactgaggctcaagcatgcaaaaagccrcatgcgtctcctggcatctgctaccaactcccagctgaggccacatctgaagaacatatcctaaaagaaagtatatccactttctaatgtgaatatataaaatctaatctgctaaaaggaaggaaagtaatgggaacatgtggtggtagtaagaatgattttaacaaagatgcagaggcaatttaatggggggagaaatgtccttttttttttttttttttttgaaatggagtctcactctgtcatccaggctggagtgcagtggcgcaatctcggctc

SEQ ID NO: 795917 - DNA, 625 bp, Homo sapiens
taggtggcaggggaggagccagttcccactggggccagcagaccccctccctaatgggcagagagtccccttggggcctgctccagctgtcctgggaatggtttccaggccccaggcctttgggatgcagcaatgacaccggctgtgggggtcgcagccccaaaggggagggaagagtcagtggctcctggggagtcccgcagatgctccctccacattccccgaacctccgtccctctccaatctatgtggctcacccttcccacccgctcggctgctgsgagcccgcgaggcccttgaggccaggcacagggctggacgtggcaggtgcccatgaacaaggagggatgaagactgaggcaggatggggcgggttgtcaggggtctgatcaggggagggtggaacccctccaccaacaccgtgtgctgacactggagtgaggcctatgcctctggatggggaaggtgggggacaaggacctgagcccccaagggccagcgggtcccaaggagcacagagccctggggtggggacaagggacccctgccttcggctgagtccctggaccccgaccccggaagcaccaggcctggggcgcagccacctctggccagcagcggccgg

SEQ ID NO: 795918 - DNA, 547 bp, Homo sapiens
acactggccagtagccacggctcccacgtcctcatggtcactgtggcctccataactcctgaatgctggagaaccgcgtggcaggggcctccggctcccacggcccttcccagtcgccatggcagaggtccaacactgcactgcaccccagggctgtcaccctccactgccccagcagtggggctccttcagccatcccgagccccctcccagagtcccttctggccccagctgacttagtgtggctcttggaagcacccctgaggaccagggtgcatattgatgccatctatttgggaaggcaggcggcacacgatgggggtggatggaggacgggaggtaaccagcacgtgtgctgccggctcccagcgtgggtcagggctctgtcccccgggytgggaaatggtgcagaacttggagcagcctcgcagggcccctggctgccccagatggtgccaactctggcccgagaaccaagtgggtgagggcacaggtatcaccagcagatgacaccttgatggagatggcagaggtccaaggggacaca

SEQ ID NO: 795919 - DNA, 644 bp, Homo sapiens
aacagggccctgggggctcatgaccctgcccgctgcatcccgggatgaccctgcctgatgcgtcccaggatgaccctgcccgctgcgtcccgggatgaacggctgtgggtatctcctgcaggcgcatgcaggtgttgtgtgtcagtgagggatggggatgggtgtggggccggtctccctctttatgcttcagcaggtaggtagggtgcaggtggggcctggcccctctctatggcctccagagctgctggctctgtgggccgccacsctagccgctccctgcagccaaagcatctttgggaagcccagctccagccaccctctgccctccccttgactgcagggctcagttcctgcagccccgcctggaagagcctgccccctgccctcgccctccagccaccccagggttctggtctgtttgtctggggcacctcgctgtcccctctggtggcttacgtgaccccatccatcctactggccttggctggaaccctggggggccctcgccacggcaggggtaggtgcctcatcctcgctgggtgagcccctcccatgcagggtcttgggggagggagggcactgctacaccccgacagagcctgactctcaagaggctcagcagatcttcgagcagagaatga

SEQ ID NO: 795920 - DNA, 644 bp, Homo sapiens
aacagggccctgggggctcatgaccctgcccgctgcatcccgggatgaccctgcctgatgcgtcccaggatgaccctgcccgctgcgtcccgggatgaacggctgtgggtatctcctgcaggcgcatgcaggtgttgtgtgtcagtgagggatggggatgggtgtggggccggtctccctctttatgcttcagcaggtaggtagggtgcaggtggggcctggcccctctctatggcctccagagctgctggctctgtgggccgccaccctagccgctccctgcagccaaagcatctttgggaagcccagctccagccaccctctgccctccccttgactgcagggctcagttcctgcagccccgcctggaagagcctgccccctgccctcgccctccagccaccccagggttctggtctgtttgtctggggcacctcgctgtcccctctggtggcttacgtgaccccatccatcctmctggccttggctggaaccctggggggccctcgccacggcaggggtaggtgcctcatcctcgctgggtgagcccctcccatgcagggtcttgggggagggagggcactgctacaccccgacagagcctgactctcaagaggctcagcagatcttcgagcagagaatga

SEQ ID NO: 795921 - DNA, 314 bp, Homo sapiens
aggttcacccacgtcacagacgaaccgctccggtgcagggggagctgcgcacgtcggggcgggggctgtggcgtggcacctctgtaccttctctcaatttggctgtaagcctacaactgccctaaaataaagtctctttatttwtttttttatttatttttacgcagctctcttttccttaaaataaaggctctaaaattgtgtgattccacctccctgaggctaagcgaaagagccgcgtctgcccctgtccttcccgggggctggcagggagtgggtgcccggcggtgactcagccctgcagcctcccagcc

SEQ ID NO: 795922 - DNA, 632 bp, Homo sapiens
cccggaaaatgcaaggggtcagggaactccctcccctagccaagggaagccatgagggactggcttccctgtgccatgagcaacactgcactccggcccagatactacccttttcccatggtctttgcaacccgcagaccaagagattccctcgggtgcctatgccaccagggccctgggtttcaagcacaaaagtgggcgrctgtttgggcagacactgagctagctgcagtttttttacacaccccagtggtgcatggaatgccagcaagatagaaccattcactcctctggaaagggggctgaagccagggagccaagtagtctagctcaatggattccacccccatggggcccatcaagctaagatccactggctggaaattcttgctgccagcacagcagtctgaagttgacctgggatgctcgagcttggtatggggagggacatccgccattactgaagcttgagttgctggttttcccctcacagtgtaaacaaagccgtcaggaagttggaacttgggggtgcccatcacagctccgcaaagccactgtagccagagtgcctctctagatttctcctctcggtgcagggcatctccaacgcagcagccccagtcaggggctta

SEQ ID NO: 795923 - DNA, 524 bp, Homo sapiens
acacttttttctatcatgttttatgctttcttgctaattaaaaaaatttgtcttgcaaaataaatgatgttttctttgcctttatcttatttgacaattccttatcacagttgatgttttatttggacttaattctaaacttaaaaatattcttaagcctatatttgtaatatgtacggtgaaaaaatgaagtgagctctcttggctccttcctatgtatratgataactgatccaattgatcctttctcctggcaattgctttgtttatataatttgcaatttcagttctagcatatgattgttatactttattacaagcagtaagctctttcatcatttgtatccactttattaacatgtttaaaataacgtacttatttagacttgactctagactcaattggtcttagcattaagcaccagtccttctaaatcacaatttacccctcttgagttttctaattatgcatcttcaaataatacttcttcccagtgacacacgaagattagatactctaaacc

SEQ ID NO: 795924 - DNA, 608 bp, Homo sapiens
cccggctcttggatttttgcattctgcaattcagggcacctcctagaatctccaagatcccaagtaacactgtctgggggaaaaaagtgtttaaatatgaaatccttatttgacagatgggtaaaccaagaccaagagactaagtcacttgccttagaaatcacagctacttagtagtggttctgagtacagaactcgtawctcctccctcagaaaataagactctttctaccacactccattccttcattccataagtatctattaacctccaacaatgcctcaggcaccagcttcatcactgaagaaaatgcaatgagaaaaaaaaacaacatgccactggccttatgctgtattcatttcctatattaaaaaataagcacaaaactaaatacttaattatgaattgtggtaagtccaacaaataaatgtgccctaaagcatcgtaatatgcccttcataagactaggaacagaaaagagatttatcacatgggctataggaaggttttgtcttaagaatttacattcttagtaataagcctcccccacgtgacatatgttgactctttgtattttaataaagacttttcatgattgaattcatgc

SEQ ID NO: 795925 - DNA, 612 bp, Homo sapiens
atttttaaattttttgtagagaaacggtcttgccatgttgccgaggctggtctcggactcttgagcacaagtgatctacatgcctcgacctcccaaagtgctgggattataggcataagccactgcacccagactggagatatttttgcagtttttcatgatgtggatgttccataccttattcaataaaaatgtcctatakttggggatttaggtcatttctaatactttaaaattataaataatactacattgaataaccttgtgcatatatatttttatattgttgagatctatcttcagagtaaattccttgaagtgggattattgtaccaaaatgtaaacacactgtggtctgattaggcattgccacattccactccatacggatgtaccattttgtgctttcactagcaatatgtggacttgcctgtttttttcctgcctccctgaaaaagtatattgtcaagctttttaattttttgccattagtttgcacttttctcataacattaaacattttgtatatgattaaaattaaacattttgtatgtgtttaatggccatttcaatcttttttggtgagttatccctcatgtctcttattttata

SEQ ID NO: 795926 - DNA, 608 bp, Homo sapiens
aagagtatgtatgtgatgatggaggctatgcataattccaatctttccatctctatctcaaccctttttttctcccatgtaagaatatgttaaaacggtgataatgactgtgtttaagggacaagtttcaagtagctctggcttatgttttaaaaagttaatgatgtggaaaattgaaggtagtgttttgtgcacatttatgagagattctaaagcctgatacttaaatactgctttgaattgtagagacaattttcacatctttttccatgtgtgaacattggtcattattttcttcagttcatgttaatattaagttttaaaggtgatagagaaaaggaacaggagaatagtctggcttctggctaaatgatcacttctccacctaatgtgggtccagtggggatrgaggggagtagattgttgccatttttaaatgagataatttgtagaagtgcttgacatcatctttattttagaaagagtttaacagatgatattttgattccaattttggagtggctccttatttaaagagtagggttaatgctgtgctgagtgttcacatggatgtatgagaaaactgctgctaaacaatagattaaagg

SEQ ID NO: 795927 - DNA, 606 bp, Homo sapiens
tgcttctctgtgtgcctggcagctggctgccacccctttgtcaactctggctactcagctttgctgcctggaaaagatctgcaaggctccagcctctaatagggctctgatctagcctcaaaagcatgaagtgtcaagacctggtgaacagctctggagctttggtgcagcacagaagctctcgggtgcactgtcggcctttggctggctgtggtttatgggttgggtagctttatagcttgtggccatgcaggaagagatcttcacagccctgttttgggaayaccattaggagctgtgggactgataatgctgcctggaaaagcagggacagggagccagggagaatcctcctcctgtcgcaccctctggctgggcttaggaaaatgtcatccagagtgaaaacttagggataagctcagatgagattgtttctggaggtcatgatcaatagggcagtgtgcaggcacctatctgagagcttggagttaaatcggtgtgctccccattgcctcttctaggctaggcctttagtccacacgtagggtaggactcatagaaacactagattccagttctctaagttccagcagcaggcgaataaag

SEQ ID NO: 795928 - DNA, 635 bp, Homo sapiens
cttaacattgatataatcaaggaatataactttgaacctgagccctgaaaaatgggtgatttctagcaggaggagaaggggtggaaatttaggcataagcttccataagagaggtcctaacattgaagagccaaaggcaactgaaattttttcaaacagaaaagataaaatacagacagcaaaaaagttatttcacccaaagggctgtgtgtcaaggaggctttagacatagtctatccccaaataacaaagagttccctgggtgatggggagctcccgcttcctccagatggccatgcacaggctgtaagagagtcaggagtgccacatggaaccacagtctttataagccctgaaggtactgacagttctgagagctcagagcctctggatgggatagaagaggaggaaattccacagagattgttctgtcccttaaccaagcaattcctcatgcccaygcaatgctcacctggctgagctagtcttcccagcatctctcaacaagtaggagcactttcacactgcaccccactccacctcttactcagacaggcacaactcattaatcgcatggacatggcattaggcaagccctttctgtgactttttgtttttaattcacaatttagact

SEQ ID NO: 795929 - DNA, 492 bp, Homo sapiens
aagtcatccaaatacgcgcgcgcacacacacgtgcgcacgcacgcacacacacgtgcgcatgcatgcacatgcgcacacacgcacacgcacacagacgcacatgcacacacgcacacacacacacagacacgcacacatgcatgcacatacacacagagaaaaagtaaaaagtttcctcgaatacataacctgtcctctgactcagtaactctgcttstaggagccagccctatggaagtaatcagaggcaggcagcaatgaatgcactagtatgagtgctttaatgctatttacaaagtaaaaaaattaggaaaacaaaaacaagagagggctaaataaattaaagcatgcctaaactagtatgtagccattacaattatgtttataaatacattttaattgcttggaaaatgcttgcaatgttaaatgaagataataaaatgaataaataactatacaatatgaattcaaatatttgagtttctctctat

SEQ ID NO: 795930 - DNA, 442 bp, Homo sapiens
tcaagaagcatgcatatttcaaatagttatagtataatatgccatcttcaattaaatctttatgaattttaaatgttatttacatttttcttagctaccatttagtgcttgcatgttacactaatatgttaagaatataatgtattaaaacattcatcaatgggaagccacaggctctttgcaaatagggactaggaatgatgttttaccactgcatccccaggccctagcacaatgcctgatagacagaaggtgcttggcaaataatagctggaatgggtccttgtttctagtttgggaatarcaataatgctgcagtaatcatctttgtatctggaggttttggcttatgttgaattatttcccaaagacagatcttttcaaactttcccaccaaagttctagtagcaacagaaaatgcacattggagggctataaatgg

SEQ ID NO: 795931 - DNA, 656 bp, Homo sapiens
ataacagtaatgtgaggtgggcactgtgttgaacagagtttctaacttacaattacttaaataatatagatatttatcaccaaacttaacaagaagcgtggtggtaagggattccacaattgtgtcagcagttcaacaatgtgttggtgtctctgagactcttcaggtcactcactgtggcaagatgacccctgcagggttgagcatcgcactcgcatgtgaaaacatccatctcccrggcaaaagctggcctcctcttccagctcactggccaaatcaggtcacataacaccctggacgaacacctggctgagggaggaaattgctgcaaggattcagggcaggcatgattcattgccacaaaggacccagctctgagggcaagggaggaccatggctaccccagagcacctgtccacagggcctgccgcaggcgtgttctcaacatatgcacaggttagtgtggctaacaggggcagagaggtatggacacgcagcctcgatgcatgggggaagatatagagcaactctgctgtgttgtttgagacaatcttgaaagataagtagaagtctgtcaggaggatgtggagggtgtgtgtgtgtatgcatgcacatgtgtgtggtgtgtagaaagaaagtaaagggagaggtgatct

SEQ ID NO: 795932 - DNA, 686 bp, Homo sapiens
cgtctctctcccatttgctggatgtctctaccttgggcagccttaggagccatatgttgaagatgatcccttacatccctataaaatggcatagatttgagggattcccccaccccatggctggacattctgtgagattctcagccaggatcaatttctgttgcttgcaaataagaacccagacttatacactgtcaatacaaagcatctgcctataaagaagttattttataggtaaattcaattgttagcccagaatatggtgatcactgtagctggtcatagtttacacagcacttatggaaattgttaatacaacaccattggctgttggctgtgacgtgtggcctggaattaattctgactttgaaaagcctgtgtatgaagataacaggccatatatcaaatacttcagactggctccctggagaagagaagggaagcagagatcagggaagaaagagaaaagtaaaataataattaaaaggggaaaaatctaattgtaacaatatacaaacgcatagctcctactatccatcagtcakaggtctaagtattttttgtacaataaccattttacccttacaacaggcttgcagtggtaggcaccattgctaaccctagttaacagagagctgtcgccaaggccacatggccactaagtgatagagccagtgtttgagaga

SEQ ID NO: 795933 - DNA, 633 bp, Homo sapiens
tcttccacaagcctggcactaatgtcacttcactgagcccttactgtaagtatcaatagttagtaatagactgatcctttattcctcctttatccttggtagtggccctttgacaatataagagattacagatgtgtgagagagaaayttgcccaactgcacaccattctcaaatatttatttattcttttccagctctggttaaatttctaaactaaagggaaggcagatggcttcttaaaaataaaaatagacttcattccccgaagttgcccagccttgtttgaagggctgaacctggtgtttgaaagattctgaagacacgcgtgtagttttatgttgcatgctgcagtgagatggacaaccatagatctgtgaaaatgaccacgggaaagctcaggatactccagagaacagactcccaggggccttcctgccatgcccatgatcaaggtctgcaggaggaacaggattgtgggaaagaacaagagcatgagacccagactgttttggggctgaatcttggtctagctgttgtgtgaccttgagcctcagtgtgctcacctgtaaaacgagttgcatgaagactcagtgaaatagtgtgtattagtgatctattgctgtgtaacaaat

SEQ ID NO: 795934 - DNA, 633 bp, Homo sapiens
tcttccacaagcctggcactaatgtcacttcactgagcccttactgtaagtatcaatagttagtaatagactgatcctttattcctcctttatccttggtagtggccctttgacaatataagagattacagatgtgtgagagagaaatttgcccaactgcacaccattctcaaatatttatttattcttttccagctctggttaaatttctaaactaaagggaaggcagatggcttcttaaaaataaaaatagacttcatyccccgaagttgcccagccttgtttgaagggctgaacctggtgtttgaaagattctgaagacacgcgtgtagttttatgttgcatgctgcagtgagatggacaaccatagatctgtgaaaatgaccacgggaaagctcaggatactccagagaacagactcccaggggccttcctgccatgcccatgatcaaggtctgcaggaggaacaggattgtgggaaagaacaagagcatgagacccagactgttttggggctgaatcttggtctagctgttgtgtgaccttgagcctcagtgtgctcacctgtaaaacgagttgcatgaagactcagtgaaatagtgtgtattagtgatctattgctgtgtaacaaat

SEQ ID NO: 795935 - DNA, 633 bp, Homo sapiens
tcttccacaagcctggcactaatgtcacttcactgagcccttactgtaagtatcaatagttagtaatagactgatcctttattcctcctttatccttggtagtggccctttgacaatataagagattacagatgtgtgagagagaaatttgcccaactgcacaccattctcaaatatttatttattcttttccagctctggttaaatttctaaactaaagggaaggcagatggcttcttaaaaataaaaatagacttcattccccgaagttgcccagccttgtttgaagggctgaacctggtgtttgaaagattctgaagacacgcgtgtagttttatgttgcatgctgcagtgagayggacaaccatagatctgtgaaaatgaccacgggaaagctcaggatactccagagaacagactcccaggggccttcctgccatgcccatgatcaaggtctgcaggaggaacaggattgtgggaaagaacaagagcatgagacccagactgttttggggctgaatcttggtctagctgttgtgtgaccttgagcctcagtgtgctcacctgtaaaacgagttgcatgaagactcagtgaaatagtgtgtattagtgatctattgctgtgtaacaaat

SEQ ID NO: 795936 - DNA, 500 bp, Homo sapiens
aacagtggtgttatctgcaggagtggctggcaatcatttgtgtctacgtcttagccgaatcaggctcctctcttctccctagcctaatgggctttcattagatttacaaaggcgattgagtttaggggaacacctgtcatcatttaaactataaagtagatgtgtctcaaagttaacttggcctaagcccaggaatgattaagggaaaggcaagatggggttgtcggttaaatcagatctcttttactgtcataattttctcattcatataatttttgcaaaggcagtctcaagatcagcaatctgttgctgaaaattagacattctgtgcaawaacccagcctggaagtccatttctccttatgttaaatggaggaaatggtgatgtgttacaagaacaccaaaacctctagccacttccctaacacataacctaaacacagttaacacctgtagaatatattattatgaatgcctaaatcatcacttgtcttggtctc

SEQ ID NO: 795937 - DNA, 489 bp, Homo sapiens
gtcttggtctctaatcaattaacaaggttgttaacagtcatcctgtgtgcagcaacaaatccgtttgcacaccatgccatacatagccttacctttttttttttcttttgagatggagtcttgctctgttgcccaggctggggtgcagtggcatgatctcggctcaccgcaacctccgcctcctgggttcaagtgattttcctacctcagcctcccagatagctgggatkacaggggcccaccacgtccagctaatttttgtatttttagtagagacggggctttgccatgttggccaggctggtctcgaactcttgacctcagctgatccacctgcctcagcctcccaaagtgctgggattacaggtgtgagccactgtgcctggcccatagccttacctttaaggtgagtcctggcaaataaataagacgtatagccagtaatttaatacttttaagcaaaaatatgggtaaaatttacagtaactt

SEQ ID NO: 795938 - DNA, 489 bp, Homo sapiens
gtcttggtctctaatcaattaacaaggttgttaacagtcatcctgtgtgcagcaacaaatccgtttgcacaccatgccatacatagccttacctttttttttttcttttgagatggagtcttgctctgttgcccaggctggggtgcagtggcatgatctcggctcaccgcaacctccgcctcctgggttcaagtgattttcctacctcagcctcccagatagctgggattacaggggcccaccacgtccagctaatttttgtatttttagtagagayggggctttgccatgttggccaggctggtctcgaactcttgacctcagctgatccacctgcctcagcctcccaaagtgctgggattacaggtgtgagccactgtgcctggcccatagccttacctttaaggtgagtcctggcaaataaataagacgtatagccagtaatttaatacttttaagcaaaaatatgggtaaaatttacagtaactt

SEQ ID NO: 795939 - DNA, 489 bp, Homo sapiens
gtcttggtctctaatcaattaacaaggttgttaacagtcatcctgtgtgcagcaacaaatccgtttgcacaccatgccatacatagccttacctttttttttttcttttgagatggagtcttgctctgttgcccaggctggggtgcagtggcatgatctcggctcaccgcaacctccgcctcctgggttcaagtgattttcctacctcagcctcccagatagctgggattacaggggcccaccacgtccagctaatttttgtatttttagtagagacggggctttgccatgttggccaggctggtctcgaactcttgacctcagctgatccacctgcctcrgcctcccaaagtgctgggattacaggtgtgagccactgtgcctggcccatagccttacctttaaggtgagtcctggcaaataaataagacgtatagccagtaatttaatacttttaagcaaaaatatgggtaaaatttacagtaactt

SEQ ID NO: 795940 - DNA, 554 bp, Homo sapiens
tggggaagcctcaggaaacttaaaatcatggtagaaggcaaaggggaagcaaggcacatcttccatggcagcaggacagagagtgagggaggaactaccaaacacttttaaaccatcaggtcttgtgagaactcactcactataatgagaagagcatgagggaaaawgcccccatgatcaaatcacctcccaccacgccctttcctggacacatggggattaaaactcaaaatgagatttgggaggggacacaaagccaaactttatcaggtacattcaaacaactgagaagttcgatttggaaacccacaggcctccctttttctgttctatacggccttgttttttgtgatgtgttccaagaatcatcagtatcacctgggagcttgttagaactgcagaagcttagtccccattccagacatatttaatcaattattttaccaagaccaccaacaaagtgactcatatgctccttaaaatataataaacacttctataatatgttagctttctactgtcttatattcacttaagactgttggccccttatc

SEQ ID NO: 795941 - DNA, 611 bp, Homo sapiens
ttttgtattaggtgtaaattgagttctgtgggaattttgctgttgttattttagctttgttctgttttgttttgcttggcaccgtgaattttaatgtctcttctttggagaaggagaaggtcacattaccgacttttgaatacatcccgaagtttatctggcacaaagagaatttkgttcagttttatgctggattaggatacaaaaaggaacataaagttggtggctcaaacttctctgagtctaggtggatagaaggtcgacctggatgtgttttgggagagacagaattgggtgcctgcttgagtttttgtgaccaaagcagttggtcctgatgggatgcttgggtgatcaagagctgtcaggcagggtaggcactgctgtgatggccctccactgcccagttcaccagctcactgctctggtaccaacagctggatatctctctgggacccatccatggatttcctaacacggatgatgttcctgctaatgtagatgctgaagtctcccactgtggtccccggcagcatcagctgagtcagtgagtcctatcatgaccctggaggcatgaaccacattgtaccctttccagacgatggctgccatag

SEQ ID NO: 795942 - DNA, 611 bp, Homo sapiens
ttttgtattaggtgtaaattgagttctgtgggaattttgctgttgttattttagctttgttctgttttgttttgcttggcaccgtgaattttaatgtctcttctttggagaaggagaaggtcacattaccgacttttgaatacatcccgaagtttatctggcacaaagagaattttgttcagttttatgctggattaggatacaaaaaggaacataaagttggtggctcaaacttctctgagtctaggtggataraaggtcgacctggatgtgttttgggagagacagaattgggtgcctgcttgagtttttgtgaccaaagcagttggtcctgatgggatgcttgggtgatcaagagctgtcaggcagggtaggcactgctgtgatggccctccactgcccagttcaccagctcactgctctggtaccaacagctggatatctctctgggacccatccatggatttcctaacacggatgatgttcctgctaatgtagatgctgaagtctcccactgtggtccccggcagcatcagctgagtcagtgagtcctatcatgaccctggaggcatgaaccacattgtaccctttccagacgatggctgccatag

SEQ ID NO: 795943 - DNA, 537 bp, Homo sapiens
ctgcatagtatcattcatcacttttcaagtgctcagtagtcacatgcatataatggcttacttgctggaaagtgtggttctagatattaacatatataccacttacgtatcacaatccaccttcaaataatgctgtgccacttcacatcaaacttcaaacatcacttcactgtctccccctccatttttaagctattacttttatgtatttatgctacatgctgatatattataaacccctaatacatttttattgtttttccatgaacagtwaattacattttaaggatatttttacatgagcaaaatatattttatgtttacccacatagtgaccatttctgggttttgttcattgctttgtacgaatccaaatttccttctagtatcatttttctttgatctgaataacttcctttaaaatttcttgtttctaattttctaataaattcttaacttttctctcacttaaaaaattttaaagagcctttttgagatacaatttacataacataaaatttccccattttccatgta

SEQ ID NO: 795944 - DNA, 605 bp, Homo sapiens
tctaatatctagtcacttaactaattttcagtataaaatacagcattatcaactactatactcatgctgtacattagctctatagacttatttttatcctacgtaactccaggtttatacactttggcctataactttttaagtgaacatattttttcaatactcccggttagacatatgggagtgaaattcctgggtcatctgatttaaattttgagaaaatgccaaattgtttactacagtgctgcaacattttatattcctaccagcaatctaagaccgttccaatttctctacaaccttgctaatgattgttattatcattaattttcatacccatcctagtggatatgaagtggtatctaattatgartctcatttgcatttgcttaatgactaataatgttgagcatctttttctgtgcttgctgagaaggattagtattaattcttctttaaatgtatggtagcattaaccagtgattgcatccacccctgagtttgtctttgttgagagattattactgatttaatattctattataaatatattcatattgtctatttctattcaaatcagttttggtagtttgtgtgtttctagg

SEQ ID NO: 795945 - DNA, 622 bp, Homo sapiens
cctttcacatcccacctggaaatgctcctgcaaagatggagtgagagcctctcccttttctgcccaccttcctctcaatatggaggaacccacctccccgcaaaatgctgctctacagtcctttggcaattttccttttgaaaagctgaccaataaagtccacatatcatatacttccattcaaatgaaagtccagactaggaaaatctacacagacagaaagtaggttactggctgyttagggtcagggggagagagatgtaggaggaaaatagtttaaagggtatgaggtttctttggggagtgacaaaaatatctaaaattggctggtgatggttgcacagctccgttaatacactacaaaccattaaattgtacacctcaaatgggtgactctgtgctatgtgaattatatttcaataaagctgtttaaatgaaagaaagctgattgttggacagtccttccttagctgccccacctcgctttatttccaaggagccctggaagaacgtgtgccgtggatccttctgcacctggcctgtaccagggccactcttgggaatgttgttgctcgtgctgggcgccactctgtggggctgggcacctcgttgtgattgcaga

SEQ ID NO: 795946 - DNA, 622 bp, Homo sapiens
cctttcacatcccacctggaaatgctcctgcaaagatggagtgagagcctctcccttttctgcccaccttcctctcaatatggaggaacccacctccccgcaaaatgctgctctacagtcctttggcaattttccttttgaaaagctgaccaataaagtccacatatcatatacttccattcaaatgaaagtccagactaggaaaatctacacagacagaaagtaggttactggctgcttagggtcagggggagagagatgtaggaggaaaatagtttaaagggtatgaggtttctttggggagtgacaaaaatatctaaaattggctggtgatgrttgcacagctccgttaatacactacaaaccattaaattgtacacctcaaatgggtgactctgtgctatgtgaattatatttcaataaagctgtttaaatgaaagaaagctgattgttggacagtccttccttagctgccccacctcgctttatttccaaggagccctggaagaacgtgtgccgtggatccttctgcacctggcctgtaccagggccactcttgggaatgttgttgctcgtgctgggcgccactctgtggggctgggcacctcgttgtgattgcaga

SEQ ID NO: 795947 - DNA, 706 bp, Homo sapiens
ataaccattgccaaagtaaggcgaatataaccaatgaaaattgggatgtgggagaacaagaaaataaacgtcttcttccattgtgggtagtccattgacagtgtctacatagattttccaagaaaaaggaaaggaaagggaaaggtgggggaggggaggtaaaaagggggggaagagaaaaagaaaataatttctccaattgcataattttttaatgttgtttgtttgttcgtttgtttgttttgagacggagtctcgctctgtcgcccaggctggagtgcaatggcactatctcggctcaccgcaacctcagcctcccaggttcaagtgatgctcctgcctcagcttcctgagtagctgggattacaggcatgcaccaccacgcccagctattttttgtatttttagtagagatggggtttctccatgttggtcgagctggtctggaactcccratcccagatgatccacccgtctcggcctcccaaagtgctgggattacaggatttatgattttttttaaccccagggccttacaaaactagtagaccttatggggaagaaacatttacatcaagttcagtagtttctttattttctaactagttcctttttgtatatcttaaattcaagtaaagccaaatctgacactttttgttaaaaaattagcatgactgacatgatccccttgttataaaattattca

SEQ ID NO: 795948 - DNA, 581 bp, Homo sapiens
agcggaagaaactgaggcccagagaagggaagaatcacacgagagattgaggtcacaagcaagtcagtgatagagcaggacatggaagctggatcccctaaccccagcctagttcttgctactaaaacccaaaatccagtttccattgytatatgtcagagggtgcacagccatggccacaggccagatacagactttaagtttatttggtttgatccttactttctttttttttttaattcaaaatagtatcaacatttaaaaattaggggattttatattttaaaagtctaaatttctgatttctcccctcaaaaatcagaaggtctggtaacccttgacccacattctaactcagcaaccaactattactgtcttttgttttgttttgttctgttgagacaaggtcttgttctgtcacccaggctggagtacggtggcgtgatcacggctcactgcagtcttgaactcctgggctcaagcaagccccccgtcttggcctcccaaagctctgggattacaggtgtgagcccacgcccagccctatcattctgtaatatccttccacacaggctagttca

SEQ ID NO: 795949 - DNA, 611 bp, Homo sapiens
atccaggccttctttattttgctaaagtacatgatgagtaaaatggcctctcagtcagcactttccaattttgaaagatgctaaaaactgatctttaaaagcatatttttctactttatgcatcaaagggccatgaggcctgctggaggggatggatgaactgcaggaaggtggcaccacctgcaaggctgggcctcactgtggagggcaggaagcggctgggatggggagcaggtgtttgggccagggcctggctggtctcctggtggccgccccacccrttctctttcagcctgttcttctccatgggacaggacccagctggatcccaatgccccagaaagcaacaaagaccccatttacctgacccatgagagcctctggctgatgctcagtaattgtctgttgaatgaatgaatgagtcacaggggtcactgtacacattcctattaaccacactgagataatgaatgtaatcccatgtatagagctttcaaaaatagattttccttagaaataaaggtggacactcactatgtgctaggcactgtgttaagcactttacaaggactatttcacttagtcttcccagaaatccggtaaggaacgta

SEQ ID NO: 795950 - DNA, 611 bp, Homo sapiens
atccaggccttctttattttgctaaagtacatgatgagtaaaatggcctctcagtcagcactttccaattttgaaagatgctaaaaactgatctttaaaagcatatttttctactttatgcatcaaagggccatgaggcctgctggaggggatggatgaactgcaggaaggtggcaccacctgcaaggctgggcctcactgtggagggcaggaagcggctgggatggggagcaggtgtttgggccagggcctggctggtctcctggtggccgccccacccgttctctttcagcctgttcttctccaygggacaggacccagctggatcccaatgccccagaaagcaacaaagaccccatttacctgacccatgagagcctctggctgatgctcagtaattgtctgttgaatgaatgaatgagtcacaggggtcactgtacacattcctattaaccacactgagataatgaatgtaatcccatgtatagagctttcaaaaatagattttccttagaaataaaggtggacactcactatgtgctaggcactgtgttaagcactttacaaggactatttcacttagtcttcccagaaatccggtaaggaacgta

SEQ ID NO: 795951 - DNA, 636 bp, Homo sapiens
tgtctctagcatccagctgtccccagctcactcattagcaccaggagttttctggtaggaggaatagcaaggtcacgggctccctccagaagcacgttcttcagtcctttcccattggactgtcctgcgttgggacttggaccttcaggctttctgagcccattcagagctcaattttctgggacctcatgaagacagcccctggactcctgctttgggcccaacattggctccttctctccactgaggctccccatcactgttctactcccgcaaagtgacttgacatcggtgatttcaagtgtcagcttccatttttcaagtcctgttcgktttgtttcctttgtgagcatttataattctggcttgatttctccagcgatggctcagcctctccaatagggacattcttctcctgttattgtgcccctgctgaggctcagtgctgggccaaggccccagatgagctgttcatagcaccctgagacctctggagtagccctagccctccatcaaaggcacaggtccatcctttggaagactttgtaatgttttctggcaagaaacttctgtgaccacccatgattatttattcaacccagcaaatctagtgatccttccacttagagccaatgg

SEQ ID NO: 795952 - DNA, 624 bp, Homo sapiens
ctttgcttcaaatagtgagcttgactatagttctcttttgcattgattgtggctctggcccccgcctttacttgggcgtgctatgagtctctgttaccccagagaattctcaatgccaggcacctctgtctgtattgcactcagagcccatcaagcctgcagcctcatctccacttaccatgttgtggttttttcccccctgagaattttatttttgagtaatgctatgtctttaaattttctatttttgaatttcagctatcattgctgtgtgtttattacagcaaggaggaggagacctcaaaatgtgaatttaatttgcgataccaccttggctgggattcttttgtttactttcttcataaaacagtgcttgtcacattctccaggaaacagatgaggctgtgacagcacattagaatgtacataactgtgatagtgagaacaaaagtgcagactctctgggttagaagsggccctctagtgcttgaatccctcctcagcctgtcacacaggtgagcatctaacacctggacagctccagggctggctgaccggccacgtttctgttgcatccaagcatagccctggctttgaaaaaaatgccgttattctccagctggt

SEQ ID NO: 795953 - DNA, 619 bp, Homo sapiens
tgggggttgctgtggacatgcagcttcatgagatgatgcttgtgaagtgtgcaggattttccctgccacatagcaagcttcaggagttcagtgccattattattatttctggctgctgttattgccaccctagtgggcactcagcccatgcatgttgtccctggcatgttgtccctggcatgttgtttgtgatcrcaaagttcccagcataagaataaaattctgtatgctctgttgtgcaggagaacacacacattttttgccatctattttagagcaacatgtatggaatcttggtggggtggcctgaatcctaggctgacgggtgggggcctgcagatctcagataagctgcaccacttgggttcacaatgcggtgcttggcccagacaacccctgggatcccttgttgacctaatatttcctaaaatatgagtatctggagactgagcacagcataggggtgggccttatcagctcctgctagggaaggcgagtcagccctggggtttcatgcaaagcttcgaggtggtcgcctggcctccctcagtgcttgcctaaggcttgcaggctttggggaggggagctgccaattcccatgcatattgggagtagggat

SEQ ID NO: 795954 - DNA, 619 bp, Homo sapiens
tgggggttgctgtggacatgcagcttcatgagatgatgcttgtgaagtgtgcaggattttccctgccacatagcaagcttcaggagttcagtgccattattattatttctggctgctgttattgccaccctagtgggcactcagcccatgcatgttgtccctggcatgttgtccctggcatgttgtttgtgatcgcaaagttcccagcataagaataaaattctgtatgctctgttgtgcaggagaacacacacattttttgccatctattttagagcaacatgtatggaatcttggtggggtggcctgaatcctaggctgacgggtgggggcctgcagatctcagataagctgcaccacttgggttcacaatgcrgtgcttggcccagacaacccctgggatcccttgttgacctaatatttcctaaaatatgagtatctggagactgagcacagcataggggtgggccttatcagctcctgctagggaaggcgagtcagccctggggtttcatgcaaagcttcgaggtggtcgcctggcctccctcagtgcttgcctaaggcttgcaggctttggggaggggagctgccaattcccatgcatattgggagtagggat

SEQ ID NO: 795955 - DNA, 481 bp, Homo sapiens
gaagggaacccataagccagagcccccacccccaaggctgtgctgtgactgcctttatttcccccattgggaaaattcagcaaacaggtaggagcactcagtgtgtgcaggtgcaggggtcctgaggcagtacatggaacagctaacatctcccaagtgttcaccrgtgccagcactctttccagccctttgaatgaatgaattcatctgaccttcaccataacagcataatgtaaacactattatcatcctcgtttatgggggaggaaactgaagctaaaagtttgcccaaggtccttcagctagtaagtgggatacttgaagtcagacacctggctcaagccagacccttgaccattaagctacagagatgtaggagacaggggctccatgggccttccccaacagagggtgctggctcagcccatggaaggggcatctcacctggcaaagacttccagaagaaagcaagatgcatgga

SEQ ID NO: 795956 - DNA, 636 bp, Homo sapiens
gaggtaattttttgaaaattcttggcctttcatttttgccgggtactttgatggagacttgaaattggttttctttccccagtgcatttttttcatatgaacttaaattgccagtatttctggcatgacctaatatgttgttatgccacccacatcatttttcataatggagaaggtaagaagcccaggactacttcccaggtgagatctgcgactcctgtcttggaatcaccgtggccccatggtgatgcagaagtccaggctccactttgatgcatggagtcagaaccgggtgcatggtggggtatgcaagggacactgcgtggcaaggctagagtctggttgtgaagcaggctccacaggtgacttctaatacaarctcaagtttgagaaccaccatcaatgcccagtctcatgggaaaacacagctaaagagaggaatcctgtacccagtctaagaccatgtttgacttcaacttctattcttatctctttgatttgcaaatactccagccacagtgaacttgtcctcattccttgaacatggtctaaagattcagaagttccttctgcctggtctgtctatttttttcagattgtcacatctgacttaaagacccaacctacagacacctc

SEQ ID NO: 795957 - DNA, 579 bp, Homo sapiens
agttttcccctgacagtgccaaggagactgagaggtttagactaggtggaattcaccacagtgcagctaagtggccatggccagactgcttctctagatgcctcctcacagggcagggcatctctgcaggaaatccagcagctccagttaggggcttacagacagaactctcatctccctaggaaagagtacgttgagggaaaggtggctgcagtctcaggtttagcagatttaaacttgtttacctgccggcactgaagagagcagctgatcctgacaaggsggattctcccagcacagcgcactagctctgctcagggaaagactgcctcctcaagtgagtccctgaccccatgcctcataactcagagagacctcccaacaggggtcgacagacgcctcatacaggaaagctccagatggcatcagaccagtgcccctctgggatgaaccttccggaggaaggagcaggcagcaatctttgttgttctgcagcctccactggtgatacttaggtgaacagggtctaatgtgaacccccagcaaactgcagcagacctgcagaagaggagcctgact

SEQ ID NO: 795958 - DNA, 580 bp, Homo sapiens
gcattttgggtggctgaggtgaggaaatagcttgagcccaggagtttgagataagcctggcaacagggtgaaacctcttctctataaaaaaatacaaaaattagccaggtgaggtgcgcatctgtatttttagatacttggaaggctgaggtggaagagtcagttgagcytggggctgaagtgagccatgattgtgccactgtactccagcctgagtgacagagtaagatcctgttacataaacactgtactctgttttcgttttcatttatttttctcatagaggtacatgttagcccttctgaaaggttaatatatatatagggattggataaataagtaaaaggaagatggatattgggtgtcacctttctcactgttggagaataaagttatagctaagcaagaggggaaggctaaaataaactccatagtagtggatcagagttggagacatctgcatgaacttatttttagcttactatagatgcgaatggatagatacagaaacaagcatagatattcatgtacacataaattagtatatataaatgtatgtactatatacataatatactat

SEQ ID NO: 795959 - DNA, 603 bp, Homo sapiens
gattcccttcttctcagaacagcagatgttacagaatcaaggttatcaaacagttactgaagatcttctctcaggccccggtacaagggaattaaaccacagtgtcatataatttggctgagtccttttcaacaataatgttttccttgttttatattttaatgccccctctttctcacatgtatttttatctccataaattattatctttccaataaatcaagttttaaatagcctgccatacttaacacattgaatcgtctttgcaatgcagtaacctggttcaatattattaactcttcattattatttttattgtaattcaaaagatccaaccagtattttcatctcctaggaaataaaggagtgaagctgcactctaactctcatcgttagttctttgactaactgatcgaaattttgaaatagtgtggagcattctttccactgagattttatgtrtagccacatatgttataaatagctggagctggtttaaatatggttcttatgagtgactatcgctgttcaccattccttcctattcttggtatgtggctacattttccagaatgacttgagtttacccagataaacttggta

SEQ ID NO: 795960 - DNA, 492 bp, Homo sapiens
tttcattcaatcaagttgacacttaacattaaccatcacatggaatcaagctaagtgtccatcaatggatgaatggttaaagaaaatttggtatatatacacaatagaatactattcagtcataaaaaagaattaaatcatgtattttgcagtaagatggatggaactggagattttatgttaaatgaaacaagccaggcacagaaagacaaatatcacatattctcactcatacataggtgataaaaaatgtgttcacatggaggtagaggkggaattatagataatggagacacagaaagatagggtatggagatcaggataatgagaaattggttaatggtacaatgtatgttatttgggtgatggataccctaaaaactctgattagactacacaatccatgcatataacaaaattacatatgtaccccataaatatgtacaaacaaaaaagaaataaaagaattacagcaattatgtataaaatacc

SEQ ID NO: 795961 - DNA, 593 bp, Homo sapiens
gggtcaccggcatacactgggggatggctcttatcacagagatacttactgtttagggccacatccccctcccttacaagcccgagacaagagaagaatgatcagtggtaagttactactcatacagccattaaaaagttcaacagagtttcagcaaatacttctgctttttcatacaccacagggatcatgatgcaccatgctwtttgcgttcagcagggtctagaacaaggaataaaggaaactgaaaaaaaagcacatcttctctgatgtgtgtgcacatctgagaaacttttggaaccaaaattatatctccatgcaccttctactactaattaattacagcaacctacaatatataaataaccttgtaccagattctatatgtaagagtctagaagtggccaggaagacccctctgcaattgaagcaactgtgttgaatgaacagaacagtgacctcttctttggaagacatgggttccaccccagagctaccccttaccacctgtgtccttgagcaagtcattgaaactctcagaaccatagcttttcacctttagatggggactctgataaatacatcacaataat

SEQ ID NO: 795962 - DNA, 528 bp, Homo sapiens
ttggaatctttccctactattctttttctttctttttttatttttattttttatttttttattttattttattattattatactttaagttttagggtacatgtgcacaacgtgcaggttagttacatatgtatacatgtgccatgctggtgtgctgcacccatcaactcgtcatttagcattaggtatatctcctaatgctatccctcccccctccctctttttctttcactgcctatatctggaaattctgttggctattccttaagaatatttccagtwtctgaccacatcttacgacctccattgccactaacctggtttactctgataacctctgaataagtccctgtttcttttttccattccatttttttctcaacatctattctcaaaacagaaaccagagctatcctttttaaatgaaaggcaggtcatatcattcctctgtgaaaaaccccttggtcaattcctaatttcacttagagtaaaagccaaaatcctgacatgacctcaaggcccttcata

SEQ ID NO: 795963 - DNA, 630 bp, Homo sapiens
acccctgcaggtggatcatattggagaagcaaacaacagttgcacaatattaccagattctggaactgtccaccaatgctaccttaaatggctctggattggaactgcataaaaggctcttaatttagagattcatgaacattggcattaacgtaaagaagctgttaatgtatcgccttaatgtacttgatgatacctgatatatgcaaaagagatgtgaaccacttaccctcttgtgggaagccccatgctttttgagtttcaaagaatgatgtcatctcttaaacattttatccgtctcttaatctgaagttctstctaaggtaaattcagttattccccttagtcttttagtcttatgtaattaaactctgtgggtgtgtatctagggtttcatgtcagggagagataaagtctgattaggtttgctccctaggggaagaatcattactctgagacatgttaatctttgttcttcagggccctgcattgcactgcattgtggttgggagacatttgtcagtgtgtcactgtccactgaaatcacagcttatacctttcttctattctcccaactttagggtatcatacagtttttcagaagcaataaatcttgtttttgtctataaa

SEQ ID NO: 795964 - DNA, 510 bp, Homo sapiens
gaggtggaaggatcacttgagcctaagagtttaaggctgcagggagccatgattgtgccaatatactccagcctgggtgacagaacaagacctgggctcataaaaattatgaaaagtagacattgaaaaggtttaatgagtgkgccaactaaggtgatgctcatctctatcagaactatggtgaaatctaggggttctctcccacattctcaagatagcagtctgaaattccagggtacagcacttattatagggagaacacttggaaagaacatcttatgttagctaagagtctgaaatggaattcatttcatataccgtaaaactgagctgaatgttctgatacatttagctttagaatgctgctgtcattgctaggccagcatatttgtcacacagtagcatgaaaataaaaaacaaaaaataagccgctctagaactgtaagcattacaaaataatttatggcctaacatgtctcgaataatcagacaattcatctcttgtcaaca

SEQ ID NO: 795965 - DNA, 613 bp, Homo sapiens
gatgcttgttgcattgagctgataaggacatactgctacagactcagcaattgagttgattttgtggatggcacggtcactctctcagccatgctggggcacaaccttaaataggagtctaagtgggaacatggaactcacgaaagtggcactccgcaggacggggtctcctggctgcattaaagcagtgagaaatataagaactracttcgtttttttactgtctgttgcataatatgcactgcattaagctctttgggtagagttacttcacttaatcctcacagcaattccttatggtatgagataagaaaactgagatttggagaagttaaatgacacatccaaggtcacacatttaataagctgtcagatgaagccctgaccctaagaccctgtttcttccattagaccaatgtgttgtctcttcctttttgttgtttgctgtgcagaatcacatcattctacttaaagagtgtgcctctaccatagttgcactaggatgatttgagaggccaccagcttgaacctgttaaattctaggaaactctcattaagatgaaaatgagtggggcttcacaatatctcagctccatgtacttctaatgcagag

SEQ ID NO: 795966 - DNA, 516 bp, Homo sapiens
ttagcccaagacaagggagtggagggagtggggttccaaagattggggcagggaacccaaggaaggcaaggataagttgaagactcagagaaagcaggagatgaggcatggagaacgagaccacctggatctccatcccyggtcacatccaggaactgtgcgtgggtgtgtgtcctccccctagagttctgctggcacttggcatagggtgagcactctaaatcattcagagaaggacttggcaggacacaagccccttcttgggatagggaggccaccttggtacctggagagtctgtgcccccatgggccccttcccctgcaggtgagggactgggttttgggggagccattgcagttatttggtgaggtggggataagggatagggtgcgggtgccctctattctaggagggcagggaaggcagtagccctggcttggggagaagaggtgcattgttggaagtatctagggtgaggagcagacaaggcagggctgagaggtcccagctggcct

SEQ ID NO: 795967 - DNA, 630 bp, Homo sapiens
tcaaaaaaaaaaaaaaaagagaaaagaaaacaggcttggagccaggctgccttgagtcaggatcctggagttaccactttctggctgtggctcctcctacagattaacctctctgagcctcatttttccaagtataggatagggcagaatatctcaacctcagactggtgtggggtaaattaaatgtcaaacagttgaaaccatgtttggtgcatagaaagccctgcactgggmgctgctgttgctgagtgctcccaggaagacttttcataactgctccccgtgggtcattgggacaagcctgcagcacggctgtctgcccctccattgtacctggaccagggtggactgcctgcatctcagtgggagacataggacttgaaggttgcccaggtaaaagtagaggagagacataaactcacaaacacattccctggaaaaattcctatcattgagtttaccacatcacataattaacaggcagagctagattagcccaccgggtatctttaggagctaagcaagcatgtcgccaaggagcaagtcatatgtcattttaaaaggctgctaggggggtctgtgggaaataggcctaggtctctccagaagtctctggtggtcctggctgca

SEQ ID NO: 795968 - DNA, 602 bp, Homo sapiens
atataatggctacatagtattccatttcaaaatataattataactagtcttttgtagatggatgtgggggtattgctagcattttgttgtcataaataactatgtgatgaacattttagtgacaatatatttagatatgagtaaatacatacccagaataaattcctgcaggaaattgataccaccaataaggtagtaccttctcattcccccacatcccctttaatactggaacttattaactttggttaacaattttcttttctgaaactagrgtgagattttagaagttcaaatgttggaggaagggtgagtagaaaagcagggaggagggatgttccagggggccggcagaggcttctctgccaagtggggcagggttaccccttacagactctaagcaagtacacccagcccctccccgctgcagggagctgagccctggggcctcccttgctcataggggagccatggaaggtctgaggatgatcaagaccttttccttatgactgtgatgcacctccaggtgaaggtctggaggaaggtcagtgggcactgatggggtgtgcacagacgggcttttgagatgaggatgtctgatg

SEQ ID NO: 795969 - DNA, 446 bp, Homo sapiens
taagtaaatggctgtgatgttttctttttaatacttcagtctcactaaggctgtcagtaagcctaattctctctcatttctgccaattcctattagatacacagagaagtacattgtgtttatgagactagggttccatttttactaagcatataaaagcttctattaatctctcttaacagttattgaatttgcctttgaatgtttgctaaaacaatgatggacattcattaacaacaggatagactctcacagtttgcatatgttagttccaaaactttcttcaatcaaactsaagcaactaaaggaagaaaaatgtgtcaagtacataaaacattttactcagacttaaaatgcttttatttcaacttcaatttatttccactaaggcttcagtggtaggaaggaagatggagaatattcattttactgccttaacaaattac

SEQ ID NO: 795970 - DNA, 656 bp, Homo sapiens
gattagtagttgccggaggatagggtggggaaggatatttttataaaggagcagtacagggcaggtttgaaggatgatgaaatggtctataacgtgattatagtggtcataatacaaatttgtatactaaagcttgtagaacttgtcagaaaatagtcattttaactctacgttaatttgaaaataaaaatacatacgtaggggattgtgggagtaagttracttcattctgcagaggaagatacccccagtgtagttcagcgtatgctttcttgtccactctcaggcaactttagataattttaagaaaaggacttaaagaaatgattttacaccatatttatcttcaaatccctaagatttcctatgaataatattttctaggcaggtaaccttttagattataagaatataatttatgcctcaagttcttctgtatttcaaattattatttttttccaatcaagttattattaatcattaaataacatttgaaaggcatacttaaaagtaaaataacctttttagaaaactaattactacccaaagcatctattttcccctgtcacaaaacaaatgtttgtgaaagatgctatagccttctaggaaatgtggtcaaccttagtcaaaatcacagtgcttctgtctaagggtga

SEQ ID NO: 795971 - DNA, 685 bp, Homo sapiens
gaaacaagaacaaaaaaataaaattaaaaaaaaaaacgtactggaacaagttcaatacctgtccacttctggagactctcatccagtgcttatcagaatccacttaaatttctgttccttgctctcagagtcttttattgattgccccttcattgaaaaatacctctgctagttttcctttcttaactgcttctgcagtacaaccacagggcccagcttcctgctacctcctggacaaactctcatatcaataatcccagaattagagcaaaggaaatggcctgcgttgaaaacaaaggattcttatgtgtagaacaaagccctaagaaacttgacaattttcattttagaaaactaattatttgatgtttctatttacaacagggagaaaatatttttgygaatttattttcgtgaatagtaggtgtttatttctttgtggtgatagtgcaattatcaaagaatgaaaatagcagttataggtttatgtaaatttttatgtttaaaatactggactagtagcttgtttgtgatggttttagtaaacctgagaatatcatattacccggaccaaaaattttgtttcttgagaaccttttgaattttacaacgtttaacatatgttcgtaatatttttaaataaatactttttttgtaattttaactagcatttgtaaattaggag

SEQ ID NO: 795972 - DNA, 645 bp, Homo sapiens
agacaaacaaaagatgagcaatttcaccaataccagacctgtcctacaagaaatgctaaagggagttcttcaatctgaaagaaaatgatgttaatgaataagaagaaagaatctgaaggtacaaaactcactggtaatagtaagcacacagaaaaacccagaatattgtaacactgtaattgtagtttgtaaactactcttaggtagaaagactaaatgatgcaccaataaaaaataataactacaacaacttttcaatacttggtataataagatataaagagaaagaacaaaaagttaaaaagcaaggggatgaagttaaagtttagagtggttattagttttattttgcatgttgtttttttttatgtaatcagtgttaagttgttawcagtttagaaaaatgggttataagttgcatttgcaagcctcatagtaacctcaaattaaaaaaatgcaatgaatacaaaaaaaataaaaagcaagaaattaaaaccaccgaagaaaatcaccttcactaaaaggaagaaagaaagaaaagaatgcagagaagacctcaaaacaagcaataaaattacaagagtaagtccctactttctataataacattgaaagtaaatggactaaactatctaataaaatgca

SEQ ID NO: 795973 - DNA, 472 bp, Homo sapiens
tgaaaacagaagttattgttgaagtaatgcgagtggaaccaaaaaccagcactcttaactcctctctcatacagaatagccccagacacacatcctcagagtcctcattcctcagagcaagatttgaatgccactgcagattctcacatgtttcagctttctctgagctttagttagggagaagaaaaagaagcaggtcttccaccactcattcaattgcgtaaaaaaaaaaaaaaaaacaaaaaaacaaaactgagggctatcaacagagtcatrccattctcacccaccaccaatgtgttatgattcactcttctcttagaaggaatcaagaaaaaaaatgactattaacacctttttctttttactaccagcacttttctaaaccctgatacctggaagatcctaatttattctttgacctcctatatgaaaggagcagaatgtagctataggagacaataaaacaagt

SEQ ID NO: 795974 - DNA, 536 bp, Homo sapiens
agtggctcatgcctgtaatcccagcactttgggaagccaaggcaataggatcagttgagcccaggagttcaaaacaagctggggcaacatagtgagacccccatctgtataaaaaaaaaaaaagtaaaaattagccatgcatggtggcatatatctgcagtctcagctactcaggaggttgaagcaggacattcacttgagccctggaagctgaggatgcactgagccaagattgcactactgcactccagccagggcgacagagccaggcctggtctaaaagaaaaaaaaaaaaggttgactgggctgaaagatacccagacatttggtcamccattattccaggtatttctgtgagggtattcttatattttcatattcttgtatgagcttaacatttaatttggtactttgagtaataaagatcacccttcctaatgtggagaaatatattaatcatccactaatagagtccaaagagaacaaaaatttgacctctcttgcaaaagagagactttctcttgtctgatggtctt

SEQ ID NO: 795975 - DNA, 600 bp, Homo sapiens
cacctggttctttctagccttgtttactcttccctataaaagaaaagctctttctgcctgattgttgagacaattgtagataatacagtcaatgcattctcccattgcaatagttcctttcccccattgcagtagtccaccatcctcaattgtaatagtctctccttactaagtctcaatttgttttttattttatttatttatttatttattttatttttgagacagagtctcactctatctcccaggctgcagtacagtggctcaatctcacctgactgcaacctccacctgccaggctcaaccagttctactgcctcaacctcctgagtagctgggaccacaggctcaggccaccatatctggctgattttkgggggtttttttgcttgtttgtttgttttagtagagacagggtttcaccatgttggccaggctggtctcaaactcctggcctcgtgatctgccaaccttggccccccagagtgctgggattacaggcatgagtccatttattttatgacactgtgtaaatagtttctaatagtttttagaagtatatttttcctgtgtcatatttgcttttatttatgatttccc

SEQ ID NO: 795976 - DNA, 684 bp, Homo sapiens
tgacaactccacagctaacatcatagtgaacaagaaacaagacaaggatcccctctttcactactctgttgaacaaagtcctggaagtcttagccagggcaattagacaacagaaagaaataaaaagtatcgaaattggaaaggaggaagtcaaattgttcctgtttgtagaaatggcatgaccttatatatagaaatccctaaagacttcaccaaaaatactgttaaaactaataaacaaattcagtaaagttgtagcatacaaagttaacatgcaaaaatcagtagcatttctctacgctaatagtgacctacctgaaaaagaartcaagaaaacaattaaattcacaatagctacgaatgcatacaaataacatacctaggaataaacttaaccaaggaggtaaaagatctctatgctgaaaactataaaactttgataaaacaattaaagaggatatgaataaatgaagagacattccatgttcatgggttgaaagaattaatcttgttaaaatgaccacactacccaaagcaatctacagattcaatgcaatttctatcgacataccaatgacattcttcacagaaatagaaaaaacaatcctaaaactcatatgatacaacaaatatcctggatagccaaagaaatcctgaacaaaaataacaaagctggagacatca

SEQ ID NO: 795977 - DNA, 684 bp, Homo sapiens
tgacaactccacagctaacatcatagtgaacaagaaacaagacaaggatcccctctttcactactctgttgaacaaagtcctggaagtcttagccagggcaattagacaacagaaagaaataaaaagtatcgaaattggaaaggaggaagtcaaattgttcctgtttgtagaaatggcatgaccttatatatagaaatccctaaagacttcaccaaaaatactgttaaaactaataaacaaattcagtaaagttgtagcatacaaagttaacatgcaaaaatcagtagcatttctctacgctaatagtgacctacctgaaaaagaaatcaagaaaacaattaaattcacaatagctacgaatgcatacaaataacatacctaggaataaacttaaccaaggaggtaaaagatctctatgctgaaaactataaaactttgataaaacaattaaagaggataygaataaatgaagagacattccatgttcatgggttgaaagaattaatcttgttaaaatgaccacactacccaaagcaatctacagattcaatgcaatttctatcgacataccaatgacattcttcacagaaatagaaaaaacaatcctaaaactcatatgatacaacaaatatcctggatagccaaagaaatcctgaacaaaaataacaaagctggagacatca

SEQ ID NO: 795978 - DNA, 589 bp, Homo sapiens
ctgaataatgacagggagaatggaacaaagttggaaaacactcttcaggatattatccaggagaacttccccaacctagcaagacaggccaacattcaaatttaggaaatacagagaacaccacaaagatactcttcaagaagagcaatcccaagatacataattgtcagattcaccaaggttgaaatgaaggaaaaaatgttaacagcagccagagagaaagcttgggttacccacaaagggaaacccatcagactaacagcagatctttctgcagaaaccctacaagccagaagggagtaggtgccaatattcaacattccttttttttttttctttttgagacggagtctcgctctgtcgcccaygctggagtgcagcggcatgatcttggcttactgcaagctccaccacccgggttcatgccactctcctgccttagcctcccgagtagctgggactacaggcgcccaccaccacgcccggctaattttttgtatttttttagtagagatcgggtttcaccatgttagccaggatggtcttgatatcctgacctcgggatccacctgccttggcctcctaaact

SEQ ID NO: 795979 - DNA, 626 bp, Homo sapiens
gcaggacttacggaaaccaaggtaaggtattgagacttcattttggaccctccaaaatgaagccatttgaaaaaagtagagtggcataattaaagctttgctttggatagctcactttgattgcagaatggagacaaggttggaggaaagccattctgaaggcagagaaaccacggagaaggctgttgcggttgtctagatgaaagatgacagtggctcggatgagagttctcatatctctaaggcctactacagtacccagcacataacaggtgctcaacaaatatttgaggtgaaacaatttgagcrgaaatctgaaggccaatatattcttcatttggatgacaaaagtaaaagcagggctacaaaaaagaaacagcatctttcaagatttacatgatgccaacagctatatcaagattacatttcagatgggtaaaatgaagaaggattttgaatctcacagtaataattttggtcacatccaaataaaaagaaaacaatttatgcaaataacattatcttagaaaatgaagagtaagattagcagggcaatgataaacaagaaaggaggatgtaatatctgaacactctatttttggtctaaagaagacttccatgttaat

SEQ ID NO: 795980 - DNA, 670 bp, Homo sapiens
tgagtaaaggaaccttgagaggattccattctccagccatctgaattggtctgcagatgttcaagcctttatttttttttttaatttttatttttattgttgagatagagtctcgctctgtcacccaggctggagtgcaatggtggatctcggctcactgctagctccgcctcccaggttcacgccattctcctgccacagccttccgagtagctgggactacaggcacccaccaccacgccaggctgttttgtatttttactagagacagggtttcaccatgttagccaggatggtctcgattccctgacctcatgatcygcccgcctcggcctcccaaagtgctgggattacaggtgcaagccaccacacccagacatttaagcctttcagctaggtacccagtcaccaagaagcagagttaagccatccctgctgtgcttgtccaaattcctgacccatagaacccatcatcttaataaaatgactgggtatttttacaccataaagttttgaaggagtctgctacacaaacaaagaaaacaaaatataaagtccagtatctaaacagaaggaagctggtagaaagaccaaaatggtcagaatacagatatagtgactagataccagtataaatttaacaaagcattcccatccaggaaggactctt

SEQ ID NO: 795981 - DNA, 583 bp, Homo sapiens
caccaggtgaagaaggatggtgctctctgggagctggaatacaaacaaggggattcctatgattgcactcagcttactgccttgagagattttttttttttttttttgagacggagtcttgcccaggctgtagtgcagtggtgtaattttggctcactgcaacctccacctcctaggttcaagtgattctctcgcctcagcctctcgagtagctgggactacaggcatgcaccaccatgcctggctaatttttatatttttagtggagacagggtttctctrtgttggccaggctggtctcaaactcctgacctcaggtgatatgtccatcttggcctcctaaagtgctgaaattacaggtgtgagccactgcgcccggccttccttgagagatttctaagttgcagcgcagagaaaggacactcagacagagactgctggactccctggtttgaggagctagaactgagagtctgaggaaatcaaaacatctagaagtctcaggacagaatactgtagggtaaagacttcccagagagatcctaagagatctatagaatgtcccccttgaggacccagcaga

SEQ ID NO: 795982 - DNA, 567 bp, Homo sapiens
aaggatggtgctctctgggagctggaatacaaacaaggggattcctatgattgcactcagcttactgccttgagagattttttttttttttttttgagacggagtcttgcccaggctgtagtgcagtggtgtaattttggctcactgcaacctccacctcctaggttcaagtgattctctcgcctcagcctctcgagtagctgggactacaggcatgcaccaccatgcctggctaatttttatatttttagtggagacagggtttctctatgttggccaggctggtctcaaactcctgacctcaggtgatatgtccatcttggcctcctaaagtgctgaaattacaggtgtgagccactgcgcccggccttccttgagagatttctaagttgcagygcagagaaaggacactcagacagagactgctggactccctggtttgaggagctagaactgagagtctgaggaaatcaaaacatctagaagtctcaggacagaatactgtagggtaaagacttcccagagagatcctaagagatctatagaatgtcccccttgaggacccag

SEQ ID NO: 795983 - DNA, 636 bp, Homo sapiens
acaaaaaacccagacaaaatatataaaacaacaggttttaagacagcacaccaggtgaagaaggatggtgctctctgggagctggaatacaaacaaggggattcctatgattgcactcagcttactgccttgagagattttttttttttttttttgagacggagtcttgcccaggctgtagtgcagtggtgtaattttggctcactgcaacctccacctcctaggttcaagtgattctctcgcctcagcctctcgagtagctgggactacaggcatgcaccaccatgcctggctaatttttatatttttagtggagacagggtttctctatgttggccaggctggtctcaaactcctgacctcaggtgatatgtccatcttggcctcctaaagtgctgaaattacaggtgtgagccactgcgcccggccttccttgagagatttctaagttgcagcgcagagaaaggacactcagacagagactgctrgactccctggtttgaggagctagaactgagagtctgaggaaatcaaaacatctagaagtctcaggacagaatactgtagggtaaagacttcccagagagatcctaagagatctatagaatgtcccccttgaggacccagcagaacact

SEQ ID NO: 795984 - DNA, 630 bp, Homo sapiens
atgtactaagtttatgtactattctaagtttatgtactattctaaatttatgtactactctaaactctttgttgtcttttcaacaacgttcacagcatttttgccaggagcagattccatcacaagaaactactttctttgctcatccataagaagcaactattgatccattcaagttttatcatcacactgcagaaatccagccccatcttcaggcaccacttctaattttaattctcttgctatttctactgtatctgcagttacttcccccactgaaatcytgaatccctcaacgtcatccatgagcgttggaatcaacttcttccaaactcccgtaaatgttgatattttgatctcctctcatgaatcatgaatgttcttaatagcatctagaatggtgaatcctttccagaaggttttcaacttacttttcacagaaccatcagaggaatcactatttttagtcttaccaaatgtatttcttaaattagacttgaaagtcaaaattatttcttggtccatggggtgctgtattagtccattttctgttgcttataacagaatatctgaaacgtggcaacttataaagaaaaggaatttatttcttacagttctgggggcaaagaa

SEQ ID NO: 795985 - DNA, 631 bp, Homo sapiens
agacatctgcagagcatgaaggtggcaagactgcatcagagacagcacagagcagcctaacccccggggaccgcggcccagcmccagcaaagagacctgtgccctgtgtccagcacagaaacagagggctgctgggtctcaagggacttctcaggccaggaccataagacagcaatgcctccctgatgcactacaaatttgaggtcctttcctagtttttcccagcaccacatgaacccctcagattcctgtgtggccctaagggacagagccccagttctgactgaagtggaatttcctgccagtccagtgcaatacacactcagatttggatttaaatggatagaaagaaaatgaaaaacaaattgtgttgctaatgcctccctgagatggcagaactcttactgcccaagcaacaagtaatgatacagagcccttagtgctaaggcagtggcagtgcaggacaaccaggggacacccagacccagcactcgcagcctggggagctcccggagagaggaggggtgggagaagagcctgcagagggcctgagggctgagtctggaaggatgagttgacatggtagcgagggaaaagcattctaggcagagggaatagcacagccacagag

SEQ ID NO: 795986 - DNA, 599 bp, Homo sapiens
tgtagaatttgcatataacctatgtacatggtcctgtatactttaaattatctctaccttatttataatacctaatacaatgtaaatgtcatataaatagttgctataatgtattgtttatggaataatggcaagaaaaaagtagttcaatacaggcacaaccatccttttgtttaaaawtttttttgattcatagctggttgatccatggatgcaggacttaaggacatagagggccagctgtgtatatcctattggctgtgtttctctggagaaccctgactaatacagcatctttcccttcagaatcagaaccattttccaaaatcccaggtccagttatgctatattttcacggtttgaagttttcaatactccccaacatacaacacccacagcctggaattctatatcactcattggatagctctgacttctaacatcagaagagttgatgatgtaactctcagtctgaggccaaagacgtaagaaacttctcaccattattgcctctcacttctctagaaggcttgccatgatgagcccacagtaaatatttgtaattactgttatcccatcatcttaattcaaataacatt

SEQ ID NO: 795987 - DNA, 496 bp, Homo sapiens
attatgctaaagttgagtctgaatttgggcagctcatcaccttcctgcatcatttgtgcctcttctataaggtaagaaacttttccaggctgaggatctgagctcctaccagcccctagttctcagagttcttagatcactgtgggtctcatctccctcttttctaactctgatccagtcgctgcatgtgctttttaaatggaataacaatgcctggatgacagcacatctgtttacagcatggtttactaaatatttttagcctastgttgagacctactgctcaggaagaaggattcctctcaaaatattctttctcatagacagtatacctggtcacccaggaactctgatgaagatggacaaggaaatttacgtggcttattttttaatgtctgctaacacaacatccattctgtagcccacagatcaaagagtaatttcaactctcaagttttataattataaaaatgcattgcataaggctatagctgtc

SEQ ID NO: 795988 - DNA, 489 bp, Homo sapiens
ttgcagattttacaaaaagagtgtttcaaaactgctctatcaaaagaaagcttcaacactgttagttgagggcgcacatcacaaataagattctgagaatgcttctgtctagttttcaggggaagatatttcctttttcaccataggcctgaaagcgctccaaatgtccacatccagatactacaaaaagagtgtttcaaacctgctctctgaaagggaatgttcaactctgtgacktgaatgcaaacatcacaaagaagtttctgggaatgctgctgtctgctttttatatgtaatcccgtttccaacgaaatcctcaaagctagacaaatatccatccacttgcagattccacaaaaagagtgtttcaaaactgctctatcaaaagaatgcttcaacactgttagttgaaggcgcacatcacaaataagtttctgagaatgcttctgtctagttttcaggggaagatatttccttttaaaccatagg

SEQ ID NO: 795989 - DNA, 457 bp, Homo sapiens
ggaagatatttcctttttcacaataggcctgaaagcgctccaaatgtccacatccagatactagaaaaagattgtttcaaacctgctctatgaaagggaatgttcaactctgtgacttgaatgcaaacgtcacaaagaagttactgggaatgctgctgtctgctttttatatgtaatcccgtttccaaagaaatcctcaaagctagacaaatatycacttccagattccacaaaaagagtgtttcaaaactgctctctcaaaagaaaggttcaactctgttagctgagtagatacatcatgaaaaagtttctgacattgcttctatgtagcttttattggaagatatttcctttttcaccataggcctgaaagcgctccaaatgtccacatccagatactacaaaaagagtgtttcaaacctgctctatgaaagggaatgttcaactctgtcacttg

SEQ ID NO: 795990 - DNA, 612 bp, Homo sapiens
gatatagaacaattgcaggtacttgagagtcacagaaaatgagactggaaaactaagctggaaccaaggacaaaggatttttaatgtctttattagggggtttggatttatgtactaggtaatgatcagcctcggtccccacctgtacaacgatggaaaggtgtgtggccatgcaaagaagtcaaatgtcatgaatgaccttcctgcagagttaggatttttgttaagaatactttgcattttctaagaagtagtttgggttattacatgggttattaagatcccgtgtactgaaaaaatttagcgggggcggaggagaaggcgggctcccaatccggttctatccggttctcccaccatcccccgccaggggtctcagcagctcggagggtggaggggcggcagcgccaggcaccgcgcacgcgcctttccggagccagaatgcccaagaggaaggtcagctctgctgaargggccgccacaggaaaagcctaacaggaggtcagcgctgttgtcaggtaaacctgctcctgcaaaagtgcaggcgaagccgaaaaaggcagcagcgaaggatacatcttaagacaaaaaagcacaaacaaaagggaaaag

SEQ ID NO: 795991 - DNA, 620 bp, Homo sapiens
gcagtgtcgtgtttactccattgcactccagcaagattctgtctcaaaaaaaaaaaaagaaaagaaaagaaaagaaaagaaaagaagaagcaagtaacaggaactgtacctgaaaagaaaatccagtatacatggtggtagcacatttgtgtgtttgtgaaaagcgtggtgaatwtattaaggtttgccacttgaaaggtctgaactgttcttgtccttttaatatttactttttcttcaatatttctatttatcaattttacattactaaataataaacttttctaaaatttttaaaatataaataagcagaaaaaacttttctagtaaactcagagtaatgttaaagccatcgataagccttatgtatgttcatactcccattctttcttaatgttatgcattttcagagagaaataggtttctatttgattctgtaattctaaaaatgtagtgtaaataagtttatatgtagtgaagtatcttgcacagcatagttttatagtattttactttttgaaaatatcaaaatttataaaatcttattataaacatattattttctccattatgataaatatcacaacaacaaattgacatttagatggaacttttttact

SEQ ID NO: 795992 - DNA, 590 bp, Homo sapiens
atcaattaatgattcttgctttgcctgagtcagctgttgtattgggagttacaaaatggtgatgttcttggctgggtgtggtggctcatgccaataatcccaacactttgggaggccaaggtgggcgaatcacctgagatcaggagtttgaggccagtctgggcaacatagtgagactccatctccacaaaaaaatttaaaaaccagctgggtgtggtggtgtgtcccagctacttgagaggctgaggtgggaagaccacttsagcccagaaggttgaggctgcagtgagctatgatggcaccactgcactccagcttgagtgacaaagcgagactctataaaaaaaaaaaaaagggatgggcacggtggctcatgcctgtaatccgaacactttgggaggctgaggcaggtggatcacgaggtcaggagttcaagaccagcctggccaacatgatgaaaccccatctctactaaaaatacaaaaattagccagatgtggtggcacacgcctgtaatcctagctactcaggaggctgaggcaggagactcgctcaaacccgggaggcggaggttgcagtgagctgagatc

SEQ ID NO: 795993 - DNA, 564 bp, Homo sapiens
atcaaagcttattttcagtgttctggaacttcacacaaatggtcatacagtgtctactcttgtgtatctggcttcttttgctcaacataaaatttttgagaaccattcacattattatatatcagaggttgtttctttcttacttctgagtacttttacactgtaggaatatgctgatgtggtttggctgtgtcctcacccaaatctcatcttgaattgtagctcccataattcccacgtgttataggaggtacccggtgggagataattgaatcatggggcagtttcctccatactattcttgtggtagtgaaaaagtttcacgagatctgatggttttataaggggttttccctttttgcttggcccartatttcttctcattctctcttgccggctgccacgtaagatatgcctttcaacttctgccatgattgtgaggcctccctagccacatttaactgcaggtccattaaacctctttttctctataaattatccagtcttgggtatgtctttatcagccgcatgaaaacgaactaatacatatactacaattttttt

SEQ ID NO: 795994 - DNA, 564 bp, Homo sapiens
atcaaagcttattttcagtgttctggaacttcacacaaatggtcatacagtgtctactcttgtgtatctggcttcttttgctcaacataaaatttttgagaaccattcacattattatatatcagaggttgtttctttcttacttctgagtacttttacactgtaggaatatgctgatgtggtttggctgtgtcctcacccaaatctcatcttgaattgtagctcccataattcccacgtgttataggaggtacccggtgggagataattgaatcatggggcagtttcctccatactattcttgtggtagtgaaaaagtttcacgagatctgatggttttataaggggttttccctttttgcttggcccaatatttyttctcattctctcttgccggctgccacgtaagatatgcctttcaacttctgccatgattgtgaggcctccctagccacatttaactgcaggtccattaaacctctttttctctataaattatccagtcttgggtatgtctttatcagccgcatgaaaacgaactaatacatatactacaattttttt

SEQ ID NO: 795995 - DNA, 636 bp, Homo sapiens
aagttattctcttgtaatgtgttatccatacatgcatgtaacactgatgattttctttattaggttatggtaacataacaaactagcagcaggagcagtcatggttttgtaataaaagttatctgaaaaagtctgttactggtggagggtgtccaggttcttggcgttttggacaaaaaattggacaaaacacataaacaaagcaaggaaacaatgaaacaacaaaagcagagatttactgaaaatgaaagtacactccacagtggggagcgggcctgagcataggggctcaagggccctgttacagaatttctgaaggtttaaataccctctagaggattccactggttacttggtgtacaccctatgtaaatgaagagaatgaagtaaagttacaaactcatttactcagcatacaccctatggagaggatctttcctgttatagctaaagtgtgaatcagccttatgttccctgcctccagaccctattttcctgcctcaaatctctaatacttgattttgatgatttaactgttgatcccaatgcaaatataaaagactttgtaaagcatwgactatactatatattaattcaaggaatgtcagggcatgtactgatgttgaattctgagaa

SEQ ID NO: 795996 - DNA, 549 bp, Homo sapiens
gctcccaatttatctacattgtcatttatctacatcatcagaagtgaagggttactcacgaaaagagccaaaccttcagtgcgtcagtcaagccctcacttgaccctcataggacatggacttttctagacctatttcaaaatgacaaattagatttttaaaagaaatatacaagagaagggaagaaaagcatagtaccaactgtaaatattttgaagacaaggaacgattatcttttatgaaagtttcctgtgggcctcttccagccttatttactacaaatcattaactatcttcactctctgtggtagcagctaaatcatcaccctcattcaccattgctctccccaacccctaaatcagcagcccaggaaggttcttcacgtgcactctgcagcctccracccactgccaacttccacttcccaggacacacagttccgtgccagcatctcccagggaagcgcagtcacgcaaagaaaatctgcaatcccaaatactagaaagcagcactagtttgctactagttataaactatagttatatata

SEQ ID NO: 795997 - DNA, 597 bp, Homo sapiens
attcttaatttgtggcagtgcagttatttgcataaattcaatgagaatctgttttctcttgtaacaggacacaaaccactcaccttgttcacccttccccacttttcccctccttcctctgctgcttgctctttttcctttaaatattgaagtgctcaaractttggaaaaagcacaggccacagatcctactgtgacttgtgtcttttttttcccttgtgtgtcctcaacatttgcaaaataaagttctaaattgattgaggtctttctcagacactttttggtttacaataaccaagggatttaatatttcacattttggttattagtgtgcatttccttatgtatccattggcccaactctctaggagttgaattcatctgtaaattccactggtaacttttacatttagtaactgaatgcagtgcagcagctctatgccgtgggtgatcacatgggcacccgggaatcaaaggttcctcattcctcacctgtttatccttttcctttttatgcattaacttttatctacatcatttatttccttcattttgaaacatttaacctctagacaaaattagttctcctttaccaaa

SEQ ID NO: 795998 - DNA, 622 bp, Homo sapiens
cactgtctacctggagatagtgtcacatcccacaggttgaggatcagtcctcaagaatgcccactgccagcccctgcgaccttcactcctgccgcaagttcaggcctctggaacttctttttaattaatttatttttttgagacagagtctcgctctgtcacccaggctggagtgcagtggcgtgatcttggctcactgcaaccctcacctcccaggttccagtgattctcatgcctcagcctgggattactcagtagctgggattactgacawgcactaccacgccccgctaattttttgttttttttagtagagatggggtttcgctatgttggccaggctggtctcaaactcctggcctcaagtgacctgcccgcttcggcctcccaaagtgctgggattacaggcgtgagccactgtacccggcctggaacagatcagcttcaagttggggttcccacaactctctctttgggttcggttaatttgctggagcagttcacaaaactcagataaacacatttactggttcattataaatgatattacaaaggatacagatgaagagacatgcagagcaaggtacaagggaaggggcgcggagcttccatgccctctcta

SEQ ID NO: 795999 - DNA, 651 bp, Homo sapiens
cctggcccagctgctggctgtcctgcgcttggatagtctggacgtggagagtgagcagacagtgtgccatgtggcagtgcagtggctggaggctgctcccaaagagcggggtcccagtgctgcagaagtcttcaagtgcgtgcgctggatgcacttcactgaagaagatcaggactacttagaagggctgctgaccaagcccatcgtgaagaagtactgcctggacgttattgaaggggccctgcagatgcgctatggtgacctgttgtacaagtctctggtgccagtgccaaacagcagcagcagcagtagcagcagcaactctcttgtatctgcagcagaaaatccaccccagagactgggtatgtgtgccaaggagatggtgatcttctttggacaccccagagatccctttctctgctgtgatccatactcgggggacctttacaaagtgccgtcacctttgacctgtctggctcacactaggactgtcaccactytagctgtctgtatctctcctgaccatgacatctatctagctgctcagcccaggacagacctctgggtgtataaaccagctcagaatagttggcagcaacttgcagatcgcttgctgtgtcgtgagggcatggatgtggcatatctcaatgg

SEQ ID NO: 796000 - DNA, 632 bp, Homo sapiens
taaaaataaaaaaaattagctgggtgtagtggcatacacctgtaatcccagccactcgggacgctgaggcaggagaaccacttgaacccggaaggcagaggttgtggtgagccaagatagtgccactgcactccakcctaggtaaaaaagcaagacccggtctcagaaaaaaaaaaaaaagcaattaaaagtagtacctgatctctttggcttttggagtaccagggattactttgtattgtgggagagaacctgacttttgtatgtgtaatggcaagttactggcaaaatctacagttactggcaaaagctgcagttttggaagtggcagccagtggttgcagtgagtggttgttacttcagggggcttagataaaaaggaagttttgaaaccttggagattgtaagaacactcaacaccaaaagatagaactatggtgggctaatcagagtgggctgattggcattgggtcgcccactagccttggggaatgtctttgtagggagatgtactgtggaagtgttgactttggaaaacaaaatacaaaaagaatcagcagtatttcaaacaagaatttatgtaatcattttagtgctccatcagttcagtcccttgtaattctttttctgct

SEQ ID NO: 796001 - DNA, 632 bp, Homo sapiens
taaaaataaaaaaaattagctgggtgtagtggcatacacctgtaatcccagccactcgggacgctgaggcaggagaaccacttgaacccggaaggcagaggttgtggtgagccaagatagtgccactgcactccagcctargtaaaaaagcaagacccggtctcagaaaaaaaaaaaaaagcaattaaaagtagtacctgatctctttggcttttggagtaccagggattactttgtattgtgggagagaacctgacttttgtatgtgtaatggcaagttactggcaaaatctacagttactggcaaaagctgcagttttggaagtggcagccagtggttgcagtgagtggttgttacttcagggggcttagataaaaaggaagttttgaaaccttggagattgtaagaacactcaacaccaaaagatagaactatggtgggctaatcagagtgggctgattggcattgggtcgcccactagccttggggaatgtctttgtagggagatgtactgtggaagtgttgactttggaaaacaaaatacaaaaagaatcagcagtatttcaaacaagaatttatgtaatcattttagtgctccatcagttcagtcccttgtaattctttttctgct

SEQ ID NO: 796002 - DNA, 466 bp, Homo sapiens
aaactatgttcagttgaaactgaaaggaacatagtttatagatttgtttccttgatatgccataacatatatttaaacaattattaaatatttactcttaaaaatacttgacttactaattctgtacatttctgcagatataaacgcctcctggaaatgacaataaatatgtgaaatgtatttggaaatgaagackttggttgccatggagacttaaaaacagatcaactgaaaatggatattctgattaagaagctaaaacagaaggtaattttaaaaaaattatattatcttaaggtctagattacgtgtgtgagatgtgcgggtttgttatataggtaaacatgtgccatggtggtttgctgcacctatcaatccatcacctagatattaagccctgaaggcattagttattgatgttgatgctctccctcctgaccccaacaggccccagtgttttttgttc

SEQ ID NO: 796003 - DNA, 466 bp, Homo sapiens
aaactatgttcagttgaaactgaaaggaacatagtttatagatttgtttccttgatatgccataacatatatttaaacaattattaaatatttactcttaaaaatacttgacttactaattctgtacatttctgcagatataaacgcctcctggaaatgacaataaatatgtgaaatgtatttggaaatgaagacgttgrttgccatggagacttaaaaacagatcaactgaaaatggatattctgattaagaagctaaaacagaaggtaattttaaaaaaattatattatcttaaggtctagattacgtgtgtgagatgtgcgggtttgttatataggtaaacatgtgccatggtggtttgctgcacctatcaatccatcacctagatattaagccctgaaggcattagttattgatgttgatgctctccctcctgaccccaacaggccccagtgttttttgttc

SEQ ID NO: 796004 - DNA, 550 bp, Homo sapiens
gattgaagtgatggttatacaactttataaatttactaataatcagggaatggcacaattacaatgaatgaattttatgtacataaattacacctcaataaagttacttaacaaaaaaagatgtacagagtattattgtttcaaataaaaacaacaaaatcatttgcttctctctattataacatcaccaatgtgagattctgagtaactcatttaatcctcataacaaactaacaagtagaattctattattacyttcatatcacaaaccagggaactgagacagagaaattaagtattatgttattcagttaataaatggcatgaccagagttagaactcctatttatctgacttcaaataataaaaattgataggcacttcatttgttcacaaaatgcataagcatttttttctatgaatcaattttttgaattctgaggttttaaaggaaagaaattctttagacaccaaagagatcataaatactcgggtagtgatgtagaaagaacacttcattgaagtcagaagaaccgggttgatgaacctt

SEQ ID NO: 796005 - DNA, 598 bp, Homo sapiens
tctaagtctcttcgtagatctctgataacttgctttatgaatctggttgctcctgtattgactgcttatatatttaggatagttagctcttcttggtgcattcatccctttaccattatgtaatgcccttctgtgtcttttttgatctttgttggtttaaagtctgttttatcagggactaggattgcaaccctgctttttttgctttccattccctttattttgagcccatgtgtgtctttgcatgtgagataggtctcctgaatacagcatatcgatgggtcttgaccctttatctagtttaccggtttgtgccttttaactgagacatttagcccattacatttaaggttaatatcgttagtatgtgaatttgatcctgtcatcatgatgctagctgattattttgcacatwagttgatgcagtttctttatagtgctgttctttatattttgttatgtttttgcagtaattggtaccagtttttcctttccatatttagtgcttccttcaggagctcttgtaaggccttgtggtgacaaaatttctcagcatttgcttgtctgtaaaggattttatttctccttcatttatgaa

SEQ ID NO: 796006 - DNA, 659 bp, Homo sapiens
aatggcatgatgtaaagaagaaagggctagggaagatttttcatgtgtctatttatttaggatgaggaaaacttcagcctataaacgtgttcaacagaatgcaccaatagaaaacgaaagagtaggaatttaaggttcagaaataatacactggagccctatctcagagaagtcaggtttaacactggttaaaacctgtgaaagaagtagggacacttattctgkaatagaaatgaaaaatgtaaggttggtggaagacagagatagaactagtgatagaaaacgagaaagctgagggaggttatatctgagggtccctcttttctgggcaatatatgatgaagcagtgtttgctaatatagtcataggaaaccacacataatttcagataaacagaaaaagggaatgaatttgagttgtgagtttaactttatgaaatgggtgttgagaaagagattttcagaactctgcaatttcatcttttatgttgcaacaatgagtaggatagatcagaaaagaagaaaaccactgtatttgtagaaactgcaatggtctagagcaagagtgaatgagggtctgacctgagcagagaagagtgagactaaataggatgcagcagagagtctcttcatgcatttactatatgcaccgtgcccagc

SEQ ID NO: 796007 - DNA, 659 bp, Homo sapiens
aatggcatgatgtaaagaagaaagggctagggaagatttttcatgtgtctatttatttaggatgaggaaaacttcagcctataaacgtgttcaacagaatgcaccaatagaaaacgaaagagtaggaatttaaggttcagaaataatacactggagccctatctcagagaagtcaggtttaacactggttaaaacctgtgaaagaagtagggacacttattctgtaatagaaatgaaaaatgtaaggttggtggaagacagagatagaactagtgatagaaaacgagaaagctgagggaggttatatctgagggtccctcttttctgggcaatatatgatgaagcagtgtttgctaatatagtcataggaaaccacacataatttcagataaacagaaaaagggaatgaatttgagytgtgagtttaactttatgaaatgggtgttgagaaagagattttcagaactctgcaatttcatcttttatgttgcaacaatgagtaggatagatcagaaaagaagaaaaccactgtatttgtagaaactgcaatggtctagagcaagagtgaatgagggtctgacctgagcagagaagagtgagactaaataggatgcagcagagagtctcttcatgcatttactatatgcaccgtgcccagc

SEQ ID NO: 796008 - DNA, 507 bp, Homo sapiens
gtttttgcttgttgatttttttgaattccttatagattctgggtatcagacctttgttggatgcatagtttgcaaatgttttctcccattctgtggggtgtctatttactctgttgatatcttcttttactgtgcagaagctctttagtttaattaggtctgacttgtcaatttttgtatttgttkcaattgcttttgtagtctttgtcatgaagcctttgccagggcaaagtctttgcctatatccagaatggtatgtcctagattttcttctagggtctttatagttttatgttttgcttttaagcctttaatataacttgagttgatttttgtgtatggtgaaaggtaggggacagtttcaatcttccatttatggctagtcagttttcccagcaccatttgttgaatagggaatccttttcccattgtatttttttgtcagctttgtcaaaaatcagatggttgtacatgtgtggctttatttctgggctctctatgcttttc

SEQ ID NO: 796009 - DNA, 507 bp, Homo sapiens
gtttttgcttgttgatttttttgaattccttatagattctgggtatcagacctttgttggatgcatagtttgcaaatgttttctcccattctgtggggtgtctatttactctgttgatatcttcttttactgtgcagaagctctttagtttaattaggtctgacttgtcaatttttgtatttgtttcaattgcttttgtagtctttgtcatgaagyctttgccagggcaaagtctttgcctatatccagaatggtatgtcctagattttcttctagggtctttatagttttatgttttgcttttaagcctttaatataacttgagttgatttttgtgtatggtgaaaggtaggggacagtttcaatcttccatttatggctagtcagttttcccagcaccatttgttgaatagggaatccttttcccattgtatttttttgtcagctttgtcaaaaatcagatggttgtacatgtgtggctttatttctgggctctctatgcttttc

SEQ ID NO: 796010 - DNA, 662 bp, Homo sapiens
taccagcaaaattattttatagaaagtaaaaagctaattctgaaatttatatggaaattcaaggacttaaatatagcataaaaatgtacatatatatgtgtgtatatataaatacacacacataaataaaaggaccaagttagagaaattgcactatctattttcaaggcttactataaaaccacattaatcatggtagtgtggccaggcacagtgactcacacctataatctcagtactttgggaggccaaggcaggtggatagcgtgagcccaggagttcaagattagcctgagcaacatgatgaaacctcatctctaaaaaaaatacaaaaaaattaggcgggggtggttgcatgctcctgtagtcccagctacttgggtagctgaggsaggaggatcgcttgagcccaggagttggaggttgcagtgagctatgattgtgccactgtgctccagcctgagcaacagaatgagatcctgtctcaaaaagaaattatggtaatgtggtgttgtaaaaataatacacatatagatcaataaaacagaattgagagtacagaaataaaccaagacacatttggccaatgatttttatttatttatttgtttattttcttgatataaaatattttacatatttatggagcacatgtgagtatt

SEQ ID NO: 796011 - DNA, 662 bp, Homo sapiens
taccagcaaaattattttatagaaagtaaaaagctaattctgaaatttatatggaaattcaaggacttaaatatagcataaaaatgtacatatatatgtgtgtatatataaatacacacacataaataaaaggaccaagttagagaaattgcactatctattttcaaggcttactataaaaccacattaatcatggtagtgtggccaggcacagtgactcacacctataatctcagtactttgggaggccaaggcaggtggatagcgtgagcccaggagttcaagattagcctgagcaacatgatgaaacctcatctctaaaaaaaatacaaaaaaattaggcgggggtggttgcatgctcctgtagtcccagctacttgggtagctgagggaggaggatcgcttgagcccaggagttggaggttgcagtgagctatgattgtgccactgtgctccagcctgagcaacagaatgagatcctgtctcaaaaagaaattatgrtaatgtggtgttgtaaaaataatacacatatagatcaataaaacagaattgagagtacagaaataaaccaagacacatttggccaatgatttttatttatttatttgtttattttcttgatataaaatattttacatatttatggagcacatgtgagtatt

SEQ ID NO: 796012 - DNA, 629 bp, Homo sapiens
ttctgatgctgcacaggacagcagagccctggacctggcccatgaaaccatttttccctcctaggcctttgggtctctgaagcaagggcctcctgtgaaggtctctgaaatgcctttgaggccttttccccattgtcttggaaattagcactsggttcttttttagttacaggaatatctctagcaagtggttgctccactgcctgcttgaatttcttttctgaaaaatcttcctttctctgtcacatggctcggctgcaaagttttcaaatgtttatgctttgcttcctgtttaaatataagttccaactgtaagtctgtttttttttgctcccacggctgagcacaggttgttagaaagagccaggccatttcttgaatgctttgctgcttagaaatgtttacccccagatatcctaaatcatcactctgaagttcaaacttccacattttcaggtatctttatagcaatgccccactcctcagtaccaattttctgtattaggccattcttttatcaccattaaaaaatacgtgagacttgcgtaattaataaagaaaagaggtttaattggctcatggttctgcagctttgcaggaagcttggtgctggcatctggttgacttgt

SEQ ID NO: 796013 - DNA, 629 bp, Homo sapiens
ttctgatgctgcacaggacagcagagccctggacctggcccatgaaaccatttttccctcctaggcctttgggtctctgaagcaagggcctcctgtgaaggtctctgaaatgcctttgaggccttttccccattgtcttggaaattagcactcggttcttttttagttacaggaatatctctagcaagtggttgctccactgcctgcttgaatttcttttctgaaaaatcttcctttctctgtcacatggctcggctgcaaagttttcaaatgtttatgctttgcttcctgtttaaatataagttccaactgtaagtctgttttyttttgctcccacggctgagcacaggttgttagaaagagccaggccatttcttgaatgctttgctgcttagaaatgtttacccccagatatcctaaatcatcactctgaagttcaaacttccacattttcaggtatctttatagcaatgccccactcctcagtaccaattttctgtattaggccattcttttatcaccattaaaaaatacgtgagacttgcgtaattaataaagaaaagaggtttaattggctcatggttctgcagctttgcaggaagcttggtgctggcatctggttgacttgt

SEQ ID NO: 796014 - DNA, 632 bp, Homo sapiens
atcattctcaaggatagaccatatgttaggtcacaaagccagtcttaagacattcaaaaaaactgaaataatatcaagtgtcttctctgaacacaatggaatcaaactagaaatgaataacaagaggaattttgaagactttaccaatacatggaaatttgacaatacactcctgaatgatcagtgggtcaatgaagaaattcagaagaaagttgaaaatttttctgaagcaaatgaaaatggaaacacaacatgccaaaacccatgggatacagcaaagacaatactaaaagggaagtttatagctataagtacctacatcataaaaaggaaaacctttaaataacctaatgatgcattgaaaaaaactagaaaagcaagagcaaactggacacaaaattaatagaagagaagaaataataaagatcagcacagaaataaatgaaattgaaataaaagcatacaaaagatsattgaaacaaaagttgattttttgaaaagatgaacaaaattgacaaacctttagccagactaagaaaaaaagaaagatccatgtaaatcaaaaatgaaaatggagacattacaactgatagttcagaagttcagaggatcattagtgactactatgagca

SEQ ID NO: 796015 - DNA, 420 bp, Homo sapiens
ataaaataaatccagtagctctcttaaaggagtaattgaaataatakatttaaatcacctactacagtgcctgacttagagtaagcatgtagtaggtacttttcctccccttatcacactttcatacttttttaaagcattgagaatcatcctttgcataggatagatagtgagcagataactgtgacataaaaatgtcatactgttgaagcatgttattaatctgatctttagttttcttttactcaagctaagaaatttcagatgcttataaaagattttataaaggacttaatatttctggatatatttatctctggattctctcctccaagttatctgctctttgtgctcatgatgccccttagtgggaagagactgctttttaccacagatggaagatgccaaatattgtttccc

SEQ ID NO: 796016 - DNA, 632 bp, Homo sapiens
taattttatagctccccactccatctgccccgccccttcccttcaatgatgacgtttgcaggtttcagggggaccagggaacaaagctggagcctggcagccccactatgctgccagccggggagagcaagtcacagttacaaattatcacaacaattagcgcctgtacttgggggatctgcaaattgaggagaccccaactcctcattgtacaggggtctatttggcagtgaccttgctctggaracgatgatattccctcagcgtgagggaattgatgttgatgaacctgatggcatcaattggctcataatcatcctgcactttcatgctcaccagcaactggctgtagagagacagtgcgtactcccagctgaggatgtacacctggcccttgaggacggacacctgcactttcccttctactcgctcctggaacttggcaatgcagtggcggacaaattcacactctggtctgtgccagaaaccggtatacaccagctcagcaaattccaagcccaggccttgtttggttttgcgcacttccaggtccatggtgaaggccttgatgtctaaatgagcgtggtaaaggatggtgcctgctggggtatcctagataccttgggacttca

SEQ ID NO: 796017 - DNA, 654 bp, Homo sapiens
atccatcacctctaactttaccatttctgtgtgataataactttcaacatcctctttttctagctgtcttgaaatatgtagtagattgttattgggtacagtcaccctactatgtagtagaactccagagtttattcttcctatctaactgtaactttgtaccctttgaccaacctctccccatccttccttccttaacctggggaagctactattttactmtctacttctataaaatgaatgtttttaggttccacatctaggtgagagcatgcagtatttgtctttctgtgtctggcttatttcactgaatattacgtctccaggttcgtccacctcaccatgaatgacagcatttcattctattttaaggctgatcagtattccattttatatatataccacattttatccatccatcagttgatgtacatgtatgttgattctatctttcactactgatagtagtactgcaataaacataggaatgcagatatctcctctaaatactgatttcaattcttttgaatgcattccaagcattggcattactggataatgtagtagctctattttaagtattttaagaaactttcatactgttttccataatggctatattaatttacattccttccaacagtgtacaagcat

SEQ ID NO: 796018 - DNA, 654 bp, Homo sapiens
atccatcacctctaactttaccatttctgtgtgataataactttcaacatcctctttttctagctgtcttgaaatatgtagtagattgttattgggtacagtcaccctactatgtagtagaactccagagtttattcttcctatctaactgtaactttgtaccctttgaccaacctctccccatccttccttccttaacctggggaagctactattttactctctacttctataaaatgaatgtttttaggttccacatctaggtgagagcatgcagtatttgtctttctgtgtctggcttatttcactgaatattacgtctccaggttcgtccacctcaccatgaatgacagcatttcattctattttaaggctgatcrgtattccattttatatatataccacattttatccatccatcagttgatgtacatgtatgttgattctatctttcactactgatagtagtactgcaataaacataggaatgcagatatctcctctaaatactgatttcaattcttttgaatgcattccaagcattggcattactggataatgtagtagctctattttaagtattttaagaaactttcatactgttttccataatggctatattaatttacattccttccaacagtgtacaagcat

SEQ ID NO: 796019 - DNA, 604 bp, Homo sapiens
cattccaagcattggcattactggataatgtagtagctctattttaagtattttaagaaactttcatactgttttccataatggctatattaatttacattccttccaacagtgtacaagcattccctgttctccttatcctcacagcatttgcaattttctgtctttttgataatggctattctaactgaggtaggttgatatctcattgtgtctttgatttaaatttccctgaygattagtgatgttaaacatttggtcatattcctgcttgttatttgtatctgcacttctacatttgttgcatcactgtttacaatagctaagattcaaaagcaacctcagtgttcatcaataaatgagtggataaagaaaatgtggaacatatacacaatggagtgctattcagctataaaaaagaatgagatccagtagtttacagcaacatggatggaaaaagagatcattatgttaagtgatataagccaggcagagaaagaaaaataccacagcttctcacttatttgtgaaatctaaatgtcaaaataattgaactcatggacacagtagaaggatggctaccaaagactgagaaggttattgg

SEQ ID NO: 796020 - DNA, 604 bp, Homo sapiens
cattccaagcattggcattactggataatgtagtagctctattttaagtattttaagaaactttcatactgttttccataatggctatattaatttacattccttccaacagtgtacaagcattccctgttctccttatcctcacagcatttgcaattttctgtctttttgataatggctattctaactgaggtaggttgatatctcattgtgtctttgatttaaatttccctgacgattagtgatgttaaacatttggtcatattcctgcttgttatttgtatctgcacttctacatttgttgcatcactgtttacaatagctaagattcaaaagcaacytcagtgttcatcaataaatgagtggataaagaaaatgtggaacatatacacaatggagtgctattcagctataaaaaagaatgagatccagtagtttacagcaacatggatggaaaaagagatcattatgttaagtgatataagccaggcagagaaagaaaaataccacagcttctcacttatttgtgaaatctaaatgtcaaaataattgaactcatggacacagtagaaggatggctaccaaagactgagaaggttattgg

SEQ ID NO: 796021 - DNA, 603 bp, Homo sapiens
ataaatgttttttgaaagggctttggaccttctgagtactcagtatgtattatggggaagatttgaagatgaccatcaaattagtgaggaggacctttttttcctgccagaggagagttaacagaaagaggacatttgttgaaaaaactgctttctggtatttggcctataattacctcccacttccttataattaatagtcaataaagtagagggctgcttattattacacaattgaccatacaatttgctcaccatgttttctgcatttatggacttacctcaaatcctatcagttcttccaaagaccctcacctatcctcttccattaagtcatttatctgtcaacwttccatcctcattgacaaaattgtcaagaactgttgtgaatggattttactccacttgtatgctaacaagttagcttcatgcttactagtataagatatacaacctctggttcagagacaagagactactaactcacagtacagcaagccgcaagtacagcatcatatcacaccaattcttggtctaagtcccacagaagggatgggatggtggtggtggtgatgtggatgatccaagatagatgacttccca

SEQ ID NO: 796022 - DNA, 603 bp, Homo sapiens
ataaatgttttttgaaagggctttggaccttctgagtactcagtatgtattatggggaagatttgaagatgaccatcaaattagtgaggaggacctttttttcctgccagaggagagttaacagaaagaggacatttgttgaaaaaactgctttctggtatttggcctataattacctcccacttccttataattaatagtcaataaagtagagggctgcttattattacacaattgaccatacaatttgctcaccatgttttctgcatttatggacttacctcaaatcctatcagttcttccaaagaccctcacctatcctcttccattaagtcatttatctgtcaactttccatcctcattgacaaaattgtcaagaactgttgtgaatggattttactccacttgtatgctaacaagttagcttcatgcttactagyataagatatacaacctctggttcagagacaagagactactaactcacagtacagcaagccgcaagtacagcatcatatcacaccaattcttggtctaagtcccacagaagggatgggatggtggtggtggtgatgtggatgatccaagatagatgacttccca

SEQ ID NO: 796023 - DNA, 428 bp, Homo sapiens
aggccatttcaataggaaaaagtttcaataaatgactattaaacgtgatctatttttaaattttagtcattgccatttttacttctagaatttttatttgatgctctttttaataacagcttttagatataattcacataccacaaatttatccttttaaactgtacaatacagtgtacatattttcaaggttcatttttgtttcagtatgtatcaacaattccttcttttttattgtygaataatatttcactgtttggatatatcacattatatttatttaacagttattggacatttggaacattttcacttttcagcattatgcataatgctgttataaacatttgtgtgcaagttcttctttgaatatatattttcagtactcttggatatatacctcagactgcaactggtgagtagtatgc

SEQ ID NO: 796024 - DNA, 489 bp, Homo sapiens
aaatttatgaacaagtgttggagtcagtgacaagatatgttttctaaaacctcgtgattacacagcattgtcttagagtcccttgtcatgcatcctgggaaatatactgctgcaaaactagcaagggcatagtcttagagggttgatcaagctggaactgcttctttagcaactyccttcccacacatggcttaatttaaatttcccgagaaaaactgcctatggctgcttggtaaagactaagagagttgcttcaggctctattaccctcaagtactgagcctccgttttctggttgattgccttaaattcagcttcttccctaatgctgtcccatttgaatgaagtccaggaacttaagattgttatatatgcaattgctaggagacagagataataccattgaattctagctacctctatgataatgaaaacaaccaaggaaaatcatttagtaaagctggcttttgaagtctagctatgtcatta

SEQ ID NO: 796025 - DNA, 489 bp, Homo sapiens
aaatttatgaacaagtgttggagtcagtgacaagatatgttttctaaaacctcgtgattacacagcattgtcttagagtcccttgtcatgcatcctgggaaatatactgctgcaaaactagcaagggcatagtcttagagggttgatcaagctggaactgcttctttagcaacttccttcccacacatggcttaatttaaatttcccgaraaaaactgcctatggctgcttggtaaagactaagagagttgcttcaggctctattaccctcaagtactgagcctccgttttctggttgattgccttaaattcagcttcttccctaatgctgtcccatttgaatgaagtccaggaacttaagattgttatatatgcaattgctaggagacagagataataccattgaattctagctacctctatgataatgaaaacaaccaaggaaaatcatttagtaaagctggcttttgaagtctagctatgtcatta

SEQ ID NO: 796026 - DNA, 622 bp, Homo sapiens
ctccaggttggtgtcccattctgaagcattagtgataacactcagccttccactgcctgtggctttctgtctccattgcacctgtgtgctcatgactccctggggcctatggctccttcctccaatatgcaggcctcccccacaggacaagaaactaagttatgaggccatatttccaaaaaggactgtatatttccctacaattcgtccttaggaggcaacattgaaacccaaataccacatgtgtcagtcatcaacaaaagggccagtatgcgggtytaattttttgagtgtttataaaacgccagatatttctggcaaatgccagaaaggagttaccagaaatgctgacagcagaaagccctttggagataacactgtccaagcccttcattttatctgagagctaggaacttacccatggccataaagccaggaagtggcagagctagaactagactgcccagctcctaagctcctgggaagctgcttccattgcccccagtcagcaacaacgtcctgttgttcttaggttcctgagaacattcaggaccatggagagcaaatggggggggggttgagggggctgcgggggatgtttgcacactgtttcctgtgatta

SEQ ID NO: 796027 - DNA, 622 bp, Homo sapiens
ctccaggttggtgtcccattctgaagcattagtgataacactcagccttccactgcctgtggctttctgtctccattgcacctgtgtgctcatgactccctggggcctatggctccttcctccaatatgcaggcctcccccacaggacaagaaactaagttatgaggccatatttccaaaaaggactgtatatttccctacaattcgtccttaggaggcaacattgaaacccaaataccacatgtgtcagtcatcaacaaaagggccagtatgcgggtctaattttttgagtgtttataaaacgccagatatttytggcaaatgccagaaaggagttaccagaaatgctgacagcagaaagccctttggagataacactgtccaagcccttcattttatctgagagctaggaacttacccatggccataaagccaggaagtggcagagctagaactagactgcccagctcctaagctcctgggaagctgcttccattgcccccagtcagcaacaacgtcctgttgttcttaggttcctgagaacattcaggaccatggagagcaaatggggggggggttgagggggctgcgggggatgtttgcacactgtttcctgtgatta

SEQ ID NO: 796028 - DNA, 656 bp, Homo sapiens
tagatacataaacagtcctttaagactcatgatgactagtgctactagtgaggggagtgcaagaccccctgggagcacagtggacaaagtgggcagtggagggagaagcaggaagtgtttcagagaggggttgcatcttcaaggagaatgtttttgaggatagagttgcaggragagcgtcttaggaaaagtaccagcatgaacaaaagtctgggggtatgaaaaaaatgagttatgtttcctgagaagttcactaggctgtgtgctggtgacgataggagggagatgaggttggagaggaaagtgaggctcaacttgataagactggaatactgtgctcaaggactttagccttaaccctggaggaagctggaaattcatcatgattttgaaaggtcactctgatcttgtggtggatgggctggccagcaggaagaagccgctggaagggaagcctttctgaaagcagcctcctctcctgtgcttgtgtgcttagcctagtatgtctgcacattggtaagcagagcctggagcagtggctagtgtgatagatggcaccaggaatctctaaaggaaacctttgaggatgaggcacagggagaggaaatcagtggtggcaaaaacactgggagccatctggtatcccaatggatccc

SEQ ID NO: 796029 - DNA, 583 bp, Homo sapiens
ggggctggatcccaaaagtgctccccacagcctctgcacctgcctgtctgcatgcttcccctaggggtttgagcactggggcaactgaaggatcaagccacacccctgtcacacatcctgtgagggggataagggaackctcttgtttcagtttcaccttgtaacagttagctattgctgtgtaacgagccaccagtataagtcagggttctccagagaaacagaaccaataggatagatagatgatagatagataattagatagatagattgatagatagatagacatatgaggagatttattataggaattgcctcacatgattgtggaggcagaggtctcacaatatgccatcagcaagctggagcaccaggaaaaccagtaatataattcagtcctagtctaacaacctgagaaccagggagcctctggtgtaagccttgaaggctgaagacccaagaaccaggagctctcatgtctgaaggcaggagaagatagatgtctagcttaagaagagagggaattttactttctttgccttttttgttctatttgggccataaacagattgaatgatgttca

SEQ ID NO: 796030 - DNA, 609 bp, Homo sapiens
tgctttttatcatgggttttttattttattcttatccaaaaagctctatttgacacaattaaacatgggctttttatttatcacatcattcttgggcattcacattaaaaaatgataagcaaaattaatgtcttaagggctctaaaactccttcacattctgaatccaagtcttcagattaacttttatattcggagaggtttatggctggattttttttttacctaacattgtcctctgtgacaagagcatggtgatgctacatttcttcaaaaagggcttcattaccatctcttggggttttcctccaagctgctgayatgcatttgcaagttttgattctagactttcctgctcttctgttgacatcagagggtaccaacagaaaactttcagacaaaaacccaggctcatcttccttccttgaatggcccttaactggtttgcgactgaaacactgaggggctgcagttgtctggtcaaggcaccagaaataacaatccacttccagcatgcataggctgtggtcacctgttacctatccaacagtaattatggtaatggcacactttgtaaaagtgcaccccaatttcagagaaatgaacaggc

SEQ ID NO: 796031 - DNA, 726 bp, Homo sapiens
gacggcccggaaagcatatctgtgggatcctaaatgaagcaaaattaaaatgcatttttccagaaagccaaacaaattataagtaggaacaattaggtgacgacaattcctctagtagaaatatatatgtttctgttttcctatttataatggagctagaaggtatcagagtcctcctgytactggtttgaagctaagccttaatttagaataaaaatattcaggaaagaaatgggggcaaggactttggtctagatagaactgtaacccacacttaagagtttccagctagttagtaccagattttgactatgaacccacaagagaataaacagttcatcctgagaacgctggggttctgaattgtccaggaatccttcttattgtctaaaaacacgaatatcttatgtcatccaaaggcaccctcagagatatgttattttcttagggaataaatagttcatagttcactctggacttttgagcccaagtttaccaagtaacactcaatcccttttacagggcttctggttaaagattccattttgattttaatggaaagatcagttaaacctgaaaccccaagcaagctcctcgtcctctcctggatctatctagagaacaaacaagaggaaggcttgcatcccaggaagtagtccgacataggtagatatttctaatttaccgatagaaaactctccagttaaaaaacaggctagctagtaa

SEQ ID NO: 796032 - DNA, 671 bp, Homo sapiens
cggaaagcatatctgtgggatcctaaatgaagcaaaattaaaatgcatttttccagaaagccaaacaaattataagtaggaacaattaggtgacgacaattcctctagtagaaatatatatgtttctgttttcctatttataatggagctagaaggtatcagagtcctcctgctactggtttgamgctaagccttaatttagaataaaaatattcaggaaagaaatgggggcaaggactttggtctagatagaactgtaacccacacttaagagtttccagctagttagtaccagattttgactatgaacccacaagagaataaacagttcatcctgagaacgctggggttctgaattgtccaggaatccttcttattgtctaaaaacacgaatatcttatgtcatccaaaggcaccctcagagatatgttattttcttagggaataaatagttcatagttcactctggacttttgagcccaagtttaccaagtaacactcaatcccttttacagggcttctggttaaagattccattttgattttaatggaaagatcagttaaacctgaaaccccaagcaagctcctcgtcctctcctggatctatctagagaacaaacaagaggaaggcttgcatcccaggaagtagtccgacataggtagatatttct

SEQ ID NO: 796033 - DNA, 657 bp, Homo sapiens
atattagaatgccaggaagctgggatccagcatcagaaaaccaccaggcttgtgccctgagcatcctctccatcagcctggcacctcgtagagagcagaaaacatcctgggccgatttttttcttttaattctgaaagaccagcaatgaagccacgctgcaggtggtaaaagtgtatgcagagtatgctcctgaagaaagctgaaaacaccgggaacggccatcaacttaatctggggctgacaggggcttcaagcagaactaatggctcagttacatacctcattagccgagtgggattttacccttttccttattgtgattgttaatttcccccctctgctattgagaggaaggaattttgtaacaatgttaaattatttgccatttccaagagggaaaaaatcaattaaaaagagrgtctgggagaagataaaaatgaatttctttatcacttgtgctgatcatttaagatgggattttcccctgcgggaatactgcacagaataacagtagttctagggcatttgataaagaaaaagttctctctcagtggtgattaacgttaccatctcccatctctttcctgcaaaaggagcttggaattccattcgatccccagctttgtgtggctttccctacttccctatcaactcaa

SEQ ID NO: 796034 - DNA, 623 bp, Homo sapiens
tttccaaagcaaatccatccccactggtggggactgtcgatcatatggccctacctccccagcccaagttggccaatcaaaataccccaatggtactggactcagagtgattggccaaggcatgggcacatgacccaagctggcagactgtcccaatggctccagacacaaccacgtgttgatccagaactgatatctccaaggtgcagatgaaaacagtaagttgaggaagaaagtttctctgtctgacattagctttgcccagagtgtctctgagtgcaaatctaacatagtcattttcctagtgctgatgacattcactggggccatgaattagtcaggacaggctacactaggctgcaggaaaaactaaaccatgaaatctcagaggcttaacacaataaaggtttacttcttagaaaaagtcagatgtgagtcaggctggycccctctgtcttgaatatttggctcctctcaaagtctattggcctgaactagtaatgttaccccaacccaaccacaagagatactgggaaacataagagtgtgtgtagatactgggtgagtatcaactgccataagtcgaatgatattttttttaaatctctaaatattatttgagc

SEQ ID NO: 796035 - DNA, 551 bp, Homo sapiens
ggccaacatatacatggccaattgatttttaataacataggcaccagcataattcaatggggaaggggtaatgattttttaaaaatagggctagaacaactggattgtcatatgaaagaaaagtaaactcaatccccgtctcacaccatacacaaatattgatttgaaatcagtcatagacataaacataaaacctaaaactayaaaatttctagaagaaataatagaaaaaagaaccctttgtagtttggggttagacaagaatttctttgatagacaaaagtattagtcataaaagaaaaaattaataaactagacttcatcaaaataaaacacttctgctctctaaaagacataatcaaaaagtgaaaaggcaagtcacaaattgggagaaaatatgtgcatcacatatatctgtcaagaagcatgcataaaaaagccagaatacaaaaagaactcttattactcaataagaaaaagacaaaacactcaattttttaaatgggcaaaatttgaatggtgctttatgaaagaagctatacaaaaaggtc

SEQ ID NO: 796036 - DNA, 605 bp, Homo sapiens
ctccgaagttccttcctctgcttgttctattttattgctgacaccttctagtacattttgcatttccctaagtgtgtcctttatttcctgaagttgtcattatttttatttatgctatctatttcactgaagatttctcccctcatatgttgtatctttttttttttttttttgacacagtctcactttgtcacccaggccagagtgcagtgacatgatctcggctcattgcaacctttgctccccagttcaagcaattctcttgcctcagcctcctgagtagctgggactacaggcacccacgaccatgcctggcgattttttttttttattgcatttttagtagagacagggtttcaccatgttggccaggctggtctcgaactcctgacctcaggtgatctgcccaccttgrcctcccaaagtgttgggattacagttataagctaccacacctggccttgttgtatctttttatttttatttttttaaattggatgtcacctttctctggtgcctcattgattagcttaataatcaactttcttaaattgttttcaggcaattcagggatttcttggtttgtatccattgctggtgagcta

SEQ ID NO: 796037 - DNA, 627 bp, Homo sapiens
tgagttaatgctgaaatgagttaagactttggggagactgttgggaaagcatgattcattttgaaatgggaggacatgagatttgtgaggggccaggtgtggaatgatatggtttggttctgtccctgcccaactctcatcttgaaatcccatgtgttgtgagagggacccaatgggagataactgaatcagaggagtgggtctttcccatgctgtttttgtgatgctaaataagtctcatgaaatctgatggttttaaaaacaggagtttctcttcacaagctctctctttgcctgctgccatccatgtcagatatgacttgctcctgctagccttctgccatgattgtgaggcctttccarcatgtgaaattgaagtccattaaacttctttttcctcccagtcttgggtgtgtctttatcagcagtgtgaaaacaaactaatacaactcttatcctcttataatcacaattttgctcctacatctatgagctcaatttttgtttcttagcttccacttatgagtgagaatatacaatatttatctttctatgtctggcttattttacttaaactcatgtcctctaggcttattcatgttgccacagatgacacaattttatttc

SEQ ID NO: 796038 - DNA, 393 bp, Homo sapiens
gccatgattgtgaggcctttccagcatgtgaaattgaagtccattaaacttctttttcctcccagtcttgggtgtgtctttatcagcagtgtgaaaacaaactaatacaactcttatcctcttataatcacaattttgctcctacatctatgagctcaatttttgtttcttagcttccacttatgagtgagaatatacaatatttatctttctatgyctggcttattttacttaaactcatgtcctctaggcttattcatgttgccacagatgacacaattttatttctgtgtgtgtccatgtgtgtgtgtgtttgtgggtatgtctaaataatataccattatatacatatgtcacattttcattatatctcaatcttttgatggacatttt

SEQ ID NO: 796039 - DNA, 429 bp, Homo sapiens
tacgttttccaagctgcttccattctcctcatctctttcagggatgccaatgaatcatagatctggtctctttatatagtccaatatttcttggaagttgtatttattctttttcatacttttttattccttattcctttcttactgtcttgtgtccgaaaaccagtcctcaagctctgagattgtttactcagcttggtttattctgctgttaatacttgtgattgcattataaaatccttgtagtatttcctatagctctattaattcagttatgtwctttgctataatggctattttgtctgtcagctcctgtgtcattttactgtctttcttagcttccttggattgggtttcaacattctcctgaatctcaatgatcttcattcctatctatattctgaattctatttctgtcatttcagtcct

SEQ ID NO: 796040 - DNA, 641 bp, Homo sapiens
tcaagccacatggtcagtttttccagctgtccgtgccatatcggggctggcagcaggaactgcactctgctcagcccgcccagagccctggtgcattatgaccacccacacccttgcccctgctgcgggacatggagaaacaaacttgccagccacccagctcacaagyggtcccagaagacacgtgtccctggtgctgtcacgtggtggccaccccaggcttggcagggcaggaacatgaggcctttcagtagcagagggtgtcacttactggcagagaggccccccatccctggggcccagttgaatgggaattcttctgcttccgcgtcagacccaggctgttggtcaacaatgcagaagaggggaggagctgagacccagagcagggagagcagcatcagctttgaaacggtgcccagggaggctgcaggcttttctgctgggccccccacccttcctccagttgggtcaaggggcatctgaggccaggcgtgtctcccagggccatccacagccgaaagaagaggtggcagatccaggcctagtcctggagggagagtcaagaattgaatggaagagaccaagggcaagtccagtgggtttgggagagactgggcatgggaatcggagctagaggc

SEQ ID NO: 796041 - DNA, 584 bp, Homo sapiens
gcattgacactttttctaacaggtcaagtgcagatgtttgcatgagcccgtttctgggttatctcctttatttcattcatcgatttgtttatctttctactaatactatataatcttaactaatgtagctttcttataattttttatcttaagaattatataacaccaccaaatgggatttatctgagataatcaaggctagttcaacattcagcatcaatcaatacaaaattgggcacattgccacaagccyatagtcccagaaatttggtaggctgaggtgggaggatctattgagcccaggaattcaagaccagctcaggcaacataggaaaatctcatcttaaaaaaaaaaatacaaacaaaaagaatcaatcaatcaatacaataatataccacattaaaggacgaaaaggataaagaagggaaatcagatgattataacaaccacggtaaaaaaggtatatgacatagtccaacaccattcatgttaaaaaaaaaataatctcagcaaacaagaaatagaggacaactttatcaagttggtaaataatgtttaaaacaacttatagctaacatcataa

SEQ ID NO: 796042 - DNA, 599 bp, Homo sapiens
agattacccagtttgagaaacaaaaagaaaaagaatgaaaaaaaaatgagtagtctatgggacctgtggaatatttcaagcatactaaagtatgaaaatcccagaagtcgtctcagaagaagagttccagaaggasatgggcgagagaaagaagcaggaagaatatttaaataaatgatggcccaaaacatcaaattacatgatttatcataaatattaatctatacatgcaaaacttcatgaactccaaacagaataatcccaaaagatccagacatattgtaatcaaactgttaaaagtaaaattcaaggaaagaattttgaaatttacgagagaaacctgagttatcaaagggaatcctcaataattttactaccactttctcaccagaaaccatggaaaccaacagaaactggaataacatatttagagtgttggtggtagcagcaagaggaaggagaactctcaaccaagaattctatatgcagcataataatccttcaaaaatgaagtagaggaaaccatttcaagataaaaacagagttatttggtaacaaagctgttttcaactgtgcttgtcaaaaacaattagctgaga

SEQ ID NO: 796043 - DNA, 599 bp, Homo sapiens
agattacccagtttgagaaacaaaaagaaaaagaatgaaaaaaaaatgagtagtctatgggacctgtggaatatttcaagcatactaaagtatgaaaatcccagaagtcgtctcagaagaagagttccagaaggagatgggcgagagaaagaagcaggaagaatatttaaataaatgatggcccaaaacatcaaattacatgatttatcataaatattaatctatacatgcaaaacttcatgaactccaaacagaataatcccaaaagatmcagacatattgtaatcaaactgttaaaagtaaaattcaaggaaagaattttgaaatttacgagagaaacctgagttatcaaagggaatcctcaataattttactaccactttctcaccagaaaccatggaaaccaacagaaactggaataacatatttagagtgttggtggtagcagcaagaggaaggagaactctcaaccaagaattctatatgcagcataataatccttcaaaaatgaagtagaggaaaccatttcaagataaaaacagagttatttggtaacaaagctgttttcaactgtgcttgtcaaaaacaattagctgaga

SEQ ID NO: 796044 - DNA, 599 bp, Homo sapiens
agattacccagtttgagaaacaaaaagaaaaagaatgaaaaaaaaatgagtagtctatgggacctgtggaatatttcaagcatactaaagtatgaaaatcccagaagtcgtctcagaagaagagttccagaaggagatgggcgagagaaagaagcaggaagaatatttaaataaatgatggcccaaaacatcaaattacatgatttatcataaatattaatctatacatgcaaaacttcatgaactccaaacagaataatcccaaaagatccagacatattgtaatcaaactgttaaaagtaaaaytcaaggaaagaattttgaaatttacgagagaaacctgagttatcaaagggaatcctcaataattttactaccactttctcaccagaaaccatggaaaccaacagaaactggaataacatatttagagtgttggtggtagcagcaagaggaaggagaactctcaaccaagaattctatatgcagcataataatccttcaaaaatgaagtagaggaaaccatttcaagataaaaacagagttatttggtaacaaagctgttttcaactgtgcttgtcaaaaacaattagctgaga

SEQ ID NO: 796045 - DNA, 599 bp, Homo sapiens
agattacccagtttgagaaacaaaaagaaaaagaatgaaaaaaaaatgagtagtctatgggacctgtggaatatttcaagcatactaaagtatgaaaatcccagaagtcgtctcagaagaagagttccagaaggagatgggcgagagaaagaagcaggaagaatatttaaataaatgatggcccaaaacatcaaattacatgatttatcataaatattaatctatacatgcaaaacttcatgaactccaaacagaataatcccaaaagatccagacatattgtaatcaaactgttaaaagtaaaattcaaggaaagaattttgaaatttacgagagaaacctgagttatcaaagggaatcctcaataattttactaccactttctcaccagaaaccatggaaaccarcagaaactggaataacatatttagagtgttggtggtagcagcaagaggaaggagaactctcaaccaagaattctatatgcagcataataatccttcaaaaatgaagtagaggaaaccatttcaagataaaaacagagttatttggtaacaaagctgttttcaactgtgcttgtcaaaaacaattagctgaga

SEQ ID NO: 796046 - DNA, 630 bp, Homo sapiens
ggaggctaaaggccaaaatcaaggtgttggcaggaccgtgttttctctgaaggatttaggcaggaatctgcttacagcctttgttgtagtttcttgtgtttgccaggagtccttggcattccttggcttgcagctgcatgactctagtccctgcctccatcttcacatggcactctttcctgtgtctgtctcttctcctcttcctctttttttttttttgagatggagtctcactctgtcacacaggctggagtgcagtggtgcgatcttggctcactgcaaactctgcctcccgggttcaagcgattcttctgcctcagcctccccagtagctgggattacaggcacccgccaccatgcctggctaatttttttgtatttttagtagagacagggttttgccgtattggccaggctggtcttgaactcctgacctggtgatcygcccaccttggcctcccaaagtgctgggattacaggcatgagccactgcgcctggcttcttctcttcctaaaaggacaccagtcatagtggatcagggccgaccctaatcaaatatgacctcatgttaacttgattacatttgcaaaaactttatttccaaataaggccacattcacaggtgttgg

SEQ ID NO: 796047 - DNA, 481 bp, Homo sapiens
tgacttcacaagagtttcatgtagtggaaagagtgtgaagttgatttaccaactttttcaggttctgaagcagatgaatcatgagtaaaataacttgataggtatatattgaagcctaaatgtttgtatgagtgtacttgtcttagtccactgacggacaatataccatattcccgttagaatgctgggagatactctccccatcattactccaaaggtcatacaaattagtacatgaattctactcattagctaaaatcagataattctaaaatgcattgctctcaatggttaaatattttyttgaattttaaaacaaactaagtaaagcctacaattcaaaaatgactctgtatggtttcattaaaacttacattttgacactttctcagaaaaccaacacttcataattaatgaatgttcagccaaatgttgaccttctgaataactggagaagtgcaaacttaggaggaaaaaaaat

SEQ ID NO: 796048 - DNA, 597 bp, Homo sapiens
ggactgggcaccgtggagcagggggtggtgcccgtcggggtggctcaggttgcctgggagcccacgggggtaggggggtggaggggccttgggcatggcgggctgcaggtcctgagccctgccccatggggaggcagctgaggcctggcaagaattcaagtgcagcgcaggtgggctggcagtgctgggggacccggtgcaccctctgcagcttctggcccaggtgctaagcctctcactgcccagggcyggtggcaccagcctgcggcgcagagtgtaggacccactaagcccacgcccacccagaactcacgctggcctgcgagcactgtgcacagccccagttcctgcccactccactccctccacacctccccacaagcagagggagccggctctggcctcggccagtccagagaggggctcccacagtgcagtgtcaggctgaagggctcctcaagtgcagccagagttggcaccgtggcctgaggaggtgccgagagcgagcgagggctgctagcacgttgtcacctctcactgtggtgaggaataagtaagattaagcgcttactacagtatctggcatgtgatatgcaa

SEQ ID NO: 796049 - DNA, 464 bp, Homo sapiens
gaggacaaaaaggcaatgtctaaattgttcagaccatttttaattctgcaagtcctagccatggagtctatacaagactaaattttatgattgctaggaagccagaaaaaaaatatttaaggaaaaataataatagctactaattattaaatgtttactayatgctggccaatctatgaaacgctttacagatattattttgcttcctcttagttacaatcttgtaaagtatctatttaacaatactatacatgatgccttaagtgtataaacaaatttattgttggaattgagattcagactcaggtctgtcttacttcagggcccttgatcttaatgtgagtcatcccagctctctgaagaatgccatttttctcatctgccctactctaggatttagcatttccttttgctgttaaaagttggcccatgtgccctggctggtgtgtgggccagtccctgtg

SEQ ID NO: 796050 - DNA, 614 bp, Homo sapiens
acatatgagaaaactacatcaaatctaaattaaataactttcctaaaactacccaactagaatggcacagccataatcaaactctagttgaactcctttcactataccacaggttagcaaattatgacccttatgtcaaatcagtcttgctgcctaattttatttttaaaagtcttattggaacatagatactccttcattcatgtattgtctatgggtgagtctttattacaacagcagagatgagtagttgtgacagaaactcgatggccctcaaaagygaaacaagctactatcaggacctctatagaaaaagtttgccaacctctacactgtagtatgccttaaggatttttagaagattgagtatgataaacactttcaaagaatgatgaaattctgagaaatgggagttaattgtcatcaatttctttgttaacagctacactaagacattctgtccaaaaccaagttggagaaagaatagttgcgtttcagaatacaagaatttgaattttattgactacttcatctcttccctaatcctaactcgggcttcttttcacctcaatttctcccaggatatctcaccaaagtaaacacctaaggcagaa

SEQ ID NO: 796051 - DNA, 607 bp, Homo sapiens
atagcacattcagtgccaacaaagcatctggcacgtagtaggcactctgtcaatagatggcaaacaccagcgttattcttacaaaacaggtgaaactgcatcacctcagtctcttcttggaccaacatcagcaggtgttaattgttggagcaagtggcatctcactactcaaactatggatgataatctgctggctgcatactgtataggaaaagcatttttacctgagaaagataactttcaactttctaatctagccttgtaccagttgcaaataattgttattatatgttatgctttatagacagtcttgtttttaattatgargtttttattggagtggcacgtttcaaggtaagtctgccatctgacttgccagtacttgttaaaagtttttatagtgtgactcatttacatatgcatgtgtatgtttaggtgctattattaaattttgctggcatatagtgaggaaattgtgattcaaattcgtccgtatgtactcctcccccaccatctgctctgcccctccatttaccagaaggctagctttagctacttgtgcatgtaaaacagaagcaagcaacactgtgaaagtgaaaatctttta

SEQ ID NO: 796052 - DNA, 533 bp, Homo sapiens
aagcataaccagtgtccagatattggttcctaataaaaggaaactgactaaaggaatcagggcacattgtagaaatgactaatcctaggactggcacaggaaataaacaagatgagcctggaggatcttgtagtgccagaaatgaaaaatgtgctaataaacacacacacacacaaatcctacatttgccaaggtatgtcaaagaaatacrgaagtcaactgaaagagctcccagtggccaaatctagaagtatgtaagcaacaaaataataaaaaagtattagattataacccaaagtataaaattaatatctatgagctcatactaaatgactgaataaataaataaaaggagaagtagaaaaaatctcccatgcagaagaatccccaaaagtttatgcaacaacttcaccctcaagatggggaaataaaacttcctattcctaaaatgtggactgctcacagtgaccaattctaatagaaaggagttttacaaaatgcctagtcaatactccttaaaattgtcaaggtca

SEQ ID NO: 796053 - DNA, 533 bp, Homo sapiens
aagcataaccagtgtccagatattggttcctaataaaaggaaactgactaaaggaatcagggcacattgtagaaatgactaatcctaggactggcacaggaaataaacaagatgagcctggaggatcttgtagtgccagaaatgaaaaatgtgctaataaacacacacacacacaaatcctacatttgccaaggtatgtcaaagaaatacggaagtcaactkaaagagctcccagtggccaaatctagaagtatgtaagcaacaaaataataaaaaagtattagattataacccaaagtataaaattaatatctatgagctcatactaaatgactgaataaataaataaaaggagaagtagaaaaaatctcccatgcagaagaatccccaaaagtttatgcaacaacttcaccctcaagatggggaaataaaacttcctattcctaaaatgtggactgctcacagtgaccaattctaatagaaaggagttttacaaaatgcctagtcaatactccttaaaattgtcaaggtca

SEQ ID NO: 796054 - DNA, 533 bp, Homo sapiens
aagcataaccagtgtccagatattggttcctaataaaaggaaactgactaaaggaatcagggcacattgtagaaatgactaatcctaggactggcacaggaaataaacaagatgagcctggaggatcttgtagtgccagaaatgaaaaatgtgctaataaacacacacacacacaaatcctacatttgccaaggtatgtcaaagaaatacggaagtcaactgaaagagctcccagtggccaaatctagaastatgtaagcaacaaaataataaaaaagtattagattataacccaaagtataaaattaatatctatgagctcatactaaatgactgaataaataaataaaaggagaagtagaaaaaatctcccatgcagaagaatccccaaaagtttatgcaacaacttcaccctcaagatggggaaataaaacttcctattcctaaaatgtggactgctcacagtgaccaattctaatagaaaggagttttacaaaatgcctagtcaatactccttaaaattgtcaaggtca

SEQ ID NO: 796055 - DNA, 533 bp, Homo sapiens
aagcataaccagtgtccagatattggttcctaataaaaggaaactgactaaaggaatcagggcacattgtagaaatgactaatcctaggactggcacaggaaataaacaagatgagcctggaggatcttgtagtgccagaaatgaaaaatgtgctaataaacacacacacacacaaatcctacatttgccaaggtatgtcaaagaaatacggaagtcaactgaaagagctcccagtggccaaatctagaagtatgtaagcaacaaaataatwaaaaagtattagattataacccaaagtataaaattaatatctatgagctcatactaaatgactgaataaataaataaaaggagaagtagaaaaaatctcccatgcagaagaatccccaaaagtttatgcaacaacttcaccctcaagatggggaaataaaacttcctattcctaaaatgtggactgctcacagtgaccaattctaatagaaaggagttttacaaaatgcctagtcaatactccttaaaattgtcaaggtca

SEQ ID NO: 796056 - DNA, 593 bp, Homo sapiens
aattcattaacttaataacttcaatatgttgttcatataaaaatttctggtaaatgagaactgtacattactgatgtgacaaggtacacaagccaatgttgacataatgttttcaaaatggggtgtctgctgtaactgaactaaatataataactttattcaagaaygagtttcaatgataggacaaaacttgataaaatgaataaataaataattatatgccagagttcagtaaaccctgtgtgtacacctgaaaaagctcaaacttgcctagcacatatagagtccgaattcagttgggtttgtgtgaaacgggtaggttgagccctaaaaaagaggtagataacccatataggcagacttccttattttatttatttttttctgcttcagcctcctgagtagctgggactacaggtgtgtgccaccacgtctggctaattttgtttgtttttagtagagatggggtttcaccatattggccaggctggtctcgaactcctgaccttgtgatctgcgcgcctcggcctcccaaagtgctgggattacaggcgtgagccactgcgcctcgccaacttccttattttaaatgc

SEQ ID NO: 796057 - DNA, 566 bp, Homo sapiens
gtacacctgaaaaagctcaaacttgcctagcacatatagagtccgaattcagttgggtttgtgtgaaacgggtaggttgagccctaaaaaagaggtagataacccatataggcagacttccttattttatttatttttttctgcttcagcctcctgagtagctgggactacaggtgtgtgccaccacgtctggctaattttgtttgtttttagtagagatggggtttcaccatattggccaggctggtctcgaactcctgaccttgtgatctgcgcgcctcggcctcccaaagtgctgggattacaggcgtgagccactgcgcctcgccaacttccttattttaaatgccatttcccactaaaaataaaacmagtaattctttgaaaaaaagttaatattatgtataggactggaagtatataagataaaactggaatatattgtcataccagaaatcaaagattttgtcaaagactaatagttccatgtcaaaaagattcactaatcaatttgcagaggctcccactggccaaagatagagcttgatcatcaacaggaataataa

SEQ ID NO: 796058 - DNA, 514 bp, Homo sapiens
gagtgcagtggtgtgatctcggctcactgcagcctctgcctcccaggttccagtgattaccctgcttcagcctcttgagtagctgggattacaggcacccaccaccacacctggctaatttctgtattttcagtagatacggggtttcaccatattggccaggctggtctcaaactcctgacctcagatgatmtgccctcctgggcctcccaaagtgctaggattacaggcatgagtcactgtgcccagccatgactgccatttttaaaatgacctgctataatgttatcccttgcattttatcaatcaaataattttaatgtgagttttgttgtttttttttttccagacagcatcttgctctgtcacccaggctggagtactgtggcatgataatggctcactgcagccttgatgtcccaagctcaagcaatcttcccacttcagcctcccaagcagctgggactacaagcatgtactaccgcatccagctaatgtttgtattttgtgtaga

SEQ ID NO: 796059 - DNA, 616 bp, Homo sapiens
ttccggtagccggtggcatctcctgtcagacgccggccactccgcgctcctgtcacctccggtggaggcgaccccatcccgagggcactgccgcgggggctcgcttccgactgcgggagacccagggatggggtggggagccgagccttctaaataaagctgttacagctgcgggtcctggggcagcccgaaggccagaaggggcgaccctgggacagaggccgcgacatccctcgggatccccactgaggcaaccgggacagcattcgacgactcggctcgcgagaccctcggcgtgacgccgggtaggaccgggtcgactggcaatgggggaggccctccaccgcgactggactggatacccggcgggggtcctggagaaagraagggccggccggcgggcgccccacagccggaaggggcgagcccgcaaatagggctcaccttcaggtcgttctctggcaggtacttgcacagccgcgctatttccacatacttgtccaggtctagcggcgccattttaagaataacaagccgcggcaacagcggcggcggcggctgtagcagcggcggcggcagcggcggaggccgaagccggaactttccctgcgtcacg

SEQ ID NO: 796060 - DNA, 566 bp, Homo sapiens
gtgttctgttttctatttatttattttttattatacttaagttctgggacacatgtgcagaacgtgcaggtttgttacttaggtatccacgtgccatggtggtttcctgcacccatcaacccatcatctacaatcggtatttctcctaatgatatccctccctttaccccggaccccctgacaggccccagcatgtgatgttcccctcccctctgcccatatgttctcattgttcaactcccgcttacgagtgagaacatgcggtgtttcrttttctgttcctgtgttagtttgctgagaatgatggtttccagcttcatccatgtccctgcaaagtattccatggtgtatatgtgccacattttctttaaccagtctatcattgatgggcatttgagctagttccaagtctttgctattgtgaatagtgctgcagtaaacatgcaagtgcatgcatctttatagtagaatgatttataatcctttgggtatatacccagtaatgggattgctgggccaaatggcatttctagttttagatccttgaggaatcgctacgctgtctt

SEQ ID NO: 796061 - DNA, 566 bp, Homo sapiens
gtgttctgttttctatttatttattttttattatacttaagttctgggacacatgtgcagaacgtgcaggtttgttacttaggtatccacgtgccatggtggtttcctgcacccatcaacccatcatctacaatcggtatttctcctaatgatatccctccctttaccccggaccccctgacaggccccagcatgtgatgttcccctcccctctgcccatatgttctcattgttcaactcccgcttacgagtgagaacatgcggtgtttcattttctgttcctgtgttagtttgctgagaatgatggtttccagcttcatccatgtccctgcaaagtattccatggtgtatatgtgccacattttctttaaccagtctatcatygatgggcatttgagctagttccaagtctttgctattgtgaatagtgctgcagtaaacatgcaagtgcatgcatctttatagtagaatgatttataatcctttgggtatatacccagtaatgggattgctgggccaaatggcatttctagttttagatccttgaggaatcgctacgctgtctt

SEQ ID NO: 796062 - DNA, 653 bp, Homo sapiens
ttataaacttacaagataaaaaaatcctttcatggtacaattacaatttaatagtcatttactatctgttcacaatgcaatatatgtattaaattatctgaaagttgtgagccattcctcagcatacaaagctgaattaacttctagtcataagggagtaacaggaacctgatttatcctgctgccttaaaaaaccttgaaaactgtacaaaatatacaaaatattatcagacactgtacaacaggaaacaaagggctgtgatccctgaagaaaggtaactaatgaagtaagttctatgattgcccccggcttactagatagagacagtgttccagctacagcaaaggaagaagagacccaaayagctctgggtctcattaagttgtgcagacacagactggagtaaggaagctcaaggcaggtagaatttgccaggcaatatactagaggatggagctgcattgagagagagagttccggaagttctgagtattaatcagtccacgcctgagagaaaagctactccagacaaaggaaaggagtcattggaaagcagcagactgaaaaattcctaaaggtaagagaggacttacaatagttcgtgttcccatcagtcagagtgaaaagacctcgtaatattcaagaaattaag

SEQ ID NO: 796063 - DNA, 586 bp, Homo sapiens
caaaatccaatattcccttcataatgaaaaacacctggtgagaggaagtggagcaagatggctaaatagaagcctcaagcaatcattctccatgcacgaacaccatattgaacaactatccacacacaaaaaagtaccttcttaagaaccaaaactcaggtgagcaatcacagtacctggttttaacatcgtattaaagaaagaggcactgaagaaggaaggacagacagtctcaagtaacacacacaaccccttccctatcccccaacagtagctgcatggtgcagagacagaaattgtgttattgggagaggcagagcacagggactgtggaactttgcactacaactcagtgctactctgtcatagtagaaagcaayatggggcagaactcagctggcaccatggagggaacatgtagaccagccctagccagaagcaaatctcccaacccagcagttggaatctgagttcaggcaagccctgtcacaatgagctaaggtgatctgaggtcctaaataaacttgaaaggcagtctaggccacaaggattgcaattcccaggcagtcttggtggtgtgctagac

SEQ ID NO: 796064 - DNA, 598 bp, Homo sapiens
agtgaaaaatacttatccacctagagagacattaagaaaggaagaaggaaacagaggagttacaatacaaccagaaaacaaacaaaattgcagaaataagtttttacttaataataacactgaagttaaatgaactcagttctcctattaaaaggcacagagtgggcgaatggataaagaaacaagacccaagtatgtattacctgtaagaaacccacttcacttgtaaagacatcatagactgaaagtgaagagaaaaagttattccttgcaagtggaaaccaaaaaaaaaaaaaaaaaaaaacaggagtagctrtacttagatagaacagactgcaagttaaacactataaaatgagacaaagaaggtcactatataaagataaatgggtcaattccgcaagaggatataacaactataactatcaaggcaccccacaccagagcacccaagtatataaaacaaacattaacaaatctaaagggggagatagactgcaatacagtaataatagggaactttaacactccactctcagcaatgaacagatcatctggacaaaaaaatcagcaaaaaaatcagagttaaactgtacac

SEQ ID NO: 796065 - DNA, 309 bp, Homo sapiens; identical to SEQ ID NO: 777275

SEQ ID NO: 796066 - DNA, 603 bp, Homo sapiens
agaagaagatgacatccttgatgtgaacagctttttcctgaggccatggatccagacctctctactatcgtgagactctttgaatattttttcccttgcttatgcctctatgaacaacagaaatgaaaagagcggctgggcatggtggctcatgcctgtaatcccagmactttgggaggccaaggagggcagatcacttgaggtcaggagttcaacactagccttaccaacatggtgaaaccccatctctactaaaaatacaaaaactagccaggtgtggtgacacatgcctgtagttgcagctactcaggaggctgaggcaggagaatcacttgaacctgggaggcagaggttgtagcgagctgagatcatgccattgggttccagtctggaatggtgacagagcaagactctgtcccccccccaacaaaaaaaagaggatctgttagtatacttttatctgtgaaggattttgtagtgagccttatacatggatgatattataccttgatagatgggagatgaaggctcaatgtaggtgagaaattttaatggtacatatgttacttcataatcattcagaaacagaacattggttcaccc

SEQ ID NO: 796067 - DNA, 576 bp, Homo sapiens
tggatattcagtcttctcagtatcatttgtttgaaaacattgccctttccccattgaatggtcttggcaaccttgtcaaatatcatttggccatatatgctagggtttctttctgggctctctattctattgtattagtttgtatgtctgatcttatgccagtagcacactgctttgtgtactgtaactttgtagcaagtcttgaaatctggatatctgagtcttcaagcttagttctttttcatggyggttttggctatttggagtctcttgagattccatatgaattttaaaatgggtttttctatttctgcaaataaatatcattgggattttgatagatattgcattgaatctataaatcactttgggtagtattgacatcttaacaatattaagcctttcaatccataaacatgagatgtctttccatttatttaagtctcgtttaatgtctttcagaaatgttttgcaaggagtctcacttccttgactaagttaattcctaagtgtgttattctttttggtgctattgtaactggaatttttaattttacttttcatattgttcattgt

SEQ ID NO: 796068 - DNA, 621 bp, Homo sapiens
tttagatatatatctctctatataatgctatactatatataccccaaatgcatataataccatatatttactatatataatactatacattttgaagacatatagtattatctatttattaatatatatttactacaatatagtatgtatatatctatacatagatacagatatacgtatatatctatacatagatacagatatacgtatatatctatacatagatacagatatacgtatatatctatacatagatacagatatatgtatatatatttacatagatacagatatatgtatatatatttacatagtatacatttagaagacagaaagatatagatacatatattatttgttctgtatatgtgtgtgtgtacatatatatcttatatatccatatctatacttawatttatagatgtatctattttatatctgcatacatagagggtatatatgtatttatatttacattttgtacttttatatgccaccttacaactataacacttccacatggaaaatgagaaattacagttgatcaattattggaataaaatcaatgtcttatattcaaagaatgttcagctaccacactttcattacatcccaagattt

SEQ ID NO: 796069 - DNA, 641 bp, Homo sapiens
tatcatagctaggaaatacggcctcctcctgtatatatagaaattaaatcagagcctaacaacttggcatatccaaaatgatcttggaatgttaccacagtagagtgatttggaacaactttaagtatctggaatgccatccctgtccaaaagcttgatattgcaccatactcatcactttcaaaatatgttctgtgataacatttataaatgcccttgacattttaagactccacaattctagataatttcatattttacataatctataaagatcacgattgcttagtttatccatcctactaggataattttgaaagtaaaaggagcactgtaatcctgggaaagtaggcgaaaattgggactgttatgggcaaattttttagtatgtggaatggatcttaatgtatagkcataatattacgacacagtagcgaatgacagaaatccacctcacctttagagttactaatttaaacacaaaggagaaaaaaaagaaaaatgtcttggcttacaataccagccagtccacttccacccccatcaataaagagtttggggcagatagaggtagtactaatatatactacgaatttctatcctgggatgcaggatccacttgtgtttgcatgacaattaca

SEQ ID NO: 796070 - DNA, 627 bp, Homo sapiens
agagtgtttggttggctgggcacagtggctcatgcctgtaatcccagcacttcgggaggccaaggcgggtggatcaccaggtcaggagatcaagaccatcctggccagcatcgtgaaatcccgtctctactaaaaatacaaaaattagctggacatggtggtgcatgcctgtagtctcagctactcaggaagctgaggcaggagaattcttgaaccagggagtcrgagaatcgcttgaaccgagttggggttcaagggagttggaggttgcagtgagccgagattgcgctactgctctctagcctggcgacagagcaggactctgtctcgaaaaaaaaaaaaaagtgtttagttaaaagaaggtcagcctaaaatgactggttttatcttcctaataatacttactagaacagctatccttgctcttgtgaatattatcattggaattttatttttaatgcataaaatgtatagattgatattatggtataattgtaaaattaaccatttctaaattttctctgttaatatggtactattttgcatttcttcagtttatttccaatatacttgtgagatgcttgtatttggagtgcccttgatccgcactatgttgtattttcaata

SEQ ID NO: 796071 - DNA, 641 bp, Homo sapiens
tgggtccttgggaaagaactccaccctcacacctggaatcatggcccaaattgagaattttatatccctgttttcccacttgaatgttgccttttccaaaaccacccatggcctgccccatccctcgtcctgtgcccataaaaaccccaggctctgccagcagaaggaggagaggaagaaaagaggaaaagcagctggatgttggagagtacagttggacatcaaagagasgcagcttgatttcagagggatggcttggtggtgtggcttttgaagggaatgcgctggccaaactccaggggaagatcacttacctgctccagcccctttctaactccctttcccaccaagagccactttcatcagcaataaaattctccacattcaccacccttcaattcatttgtgtgacctgattgttcctggatatccaacaagagcttgggtaccaaaagtatggatgcaaaaggctgtcacactgatcctccactgagttgttaattcttgagccgtctttgaatggcaaacctaaaagagcgctgacggcaatactacttagggagctttggagatcatgagtactcctccctagatgctgctgtggggcctgcatggagttttgctcctgccagcacccaaaa

SEQ ID NO: 796072 - DNA, 526 bp, Homo sapiens
ccaaggcaaacctaagcaaaaagaacaaagttggaggcatcatattacctgacttcaatctgtactacagggctacagtaaccaaaacagcagggtactggtacaaaaacagacacatagaccaatgaaacaaaatagcccataaataaggccacacacctacaaccatctgatctttgacaaaactgacaaaaggaagcaattgggaaaggactccctattcaataaatggtgctgggataacaggctagctacatgcagaagattgaaactggaccccttycatatacaaaataactcgagatggattaaagacttaaatgtaaaacccaaaactataaaaactctggaagacaacctaggcaatatcattctggccacaggaatagtcagagatttcatcacgaaggggctattgcaacaaaagcaaaaattgacaaatgggatctaattaaacttaagagctcctgcacagcaaaagaatctgtcaacagagtaaaagacaacctacagaatgggagaaaat

SEQ ID NO: 796073 - DNA, 638 bp, Homo sapiens
taagaaagaagacaaagacactcatttttgccacttctaaataacattgtaatggaagctctatccaaagcaactgtgcaacaaaaagaattcacacagccaacttggaaagcaagaaatgaaactatcttttttttaaaaaaatttagagatggagtcttaccatgttgcacaggctagagtgcaatgactattcacaagcattattatagtgcactacagcctcaaatgatcttgacctcaaattcgacttcaagaccagcctggccaatgtgatgaaactccatttctaccaaaaatacaaaaatcagccaggcatggtggtgcacgcctgtattcccagctacttgggagagttgaggcatgagaacygcttgaacccaggaggctcctgacctcaaacgaccctccctactcagcctcccaagtatctgagactacaggcatgtgccattatgctcagcaatgaaactaacattattgacagatgacatgatctaatatatggaaatccacaacaatctacaaaaaaactattagtgttaataaattcaacaaagttgcaggatgcaagatcaacatacaggccaggtgtggtggctcacacttgtaatcccagagttttgggaggtcaaggg

SEQ ID NO: 796074 - DNA, 552 bp, Homo sapiens
gatctaagggagccaccagtaatttaatggccaccaagaacaatctcaacaggtttttaaggagtcaacataattcacataatggattatggatccagcaatgtccagtataataaaaaatgccttgacctgcttagaaaattyaattaaaaggcacattcaactaaaaaaagacagaaacagacactttacaaaagaatgtgcttgaataaccaatcaacacttaaaatgtactaaacataattagtcatcagggaaatgcaaaataaaattacaatgaaataccattttaaaccagatagaatggctgaaattaaaatgactgaaaattcaaatgttggcaaggatttgaagcaaagtggatcactcatacattgctggatacattgctggtgggaattaaaatggtaaaactatacagagaactgctggggttgtttcttaagaagttaattatacatatatgctataatgcagcaagccaacttgtagctaaaatctgcatgtaaccaaaacatttatcaactgagaatgaaggaataaatttggtat

SEQ ID NO: 796075 - DNA, 552 bp, Homo sapiens
gatctaagggagccaccagtaatttaatggccaccaagaacaatctcaacaggtttttaaggagtcaacataattcacataatggattatggatccagcaatgtccagtataataaaaaatgccttgacctgcttagaaaatttaattaaaaggcacattcaactaaaaaaagayagaaacagacactttacaaaagaatgtgcttgaataaccaatcaacacttaaaatgtactaaacataattagtcatcagggaaatgcaaaataaaattacaatgaaataccattttaaaccagatagaatggctgaaattaaaatgactgaaaattcaaatgttggcaaggatttgaagcaaagtggatcactcatacattgctggatacattgctggtgggaattaaaatggtaaaactatacagagaactgctggggttgtttcttaagaagttaattatacatatatgctataatgcagcaagccaacttgtagctaaaatctgcatgtaaccaaaacatttatcaactgagaatgaaggaataaatttggtat

SEQ ID NO: 796076 - DNA, 552 bp, Homo sapiens
gatctaagggagccaccagtaatttaatggccaccaagaacaatctcaacaggtttttaaggagtcaacataattcacataatggattatggatccagcaatgtccagtataataaaaaatgccttgacctgcttagaaaatttaattaaaaggcacattcaactaaaaaaagacrgaaacagacactttacaaaagaatgtgcttgaataaccaatcaacacttaaaatgtactaaacataattagtcatcagggaaatgcaaaataaaattacaatgaaataccattttaaaccagatagaatggctgaaattaaaatgactgaaaattcaaatgttggcaaggatttgaagcaaagtggatcactcatacattgctggatacattgctggtgggaattaaaatggtaaaactatacagagaactgctggggttgtttcttaagaagttaattatacatatatgctataatgcagcaagccaacttgtagctaaaatctgcatgtaaccaaaacatttatcaactgagaatgaaggaataaatttggtat

SEQ ID NO: 796077 - DNA, 602 bp, Homo sapiens
attgccatttaaaagtgctctttagttttcaaatatttgtgaattttcagttatctttcttattgtcttgtttaatttatttatggatacaaaacatatcttgtataagatgaattcttttaagtatatgctgttttatggccctgaatttagattaccttggtaagtattttgtgtacttaaaaagaatgtgtattttgctgttgttaggtgaagtgtttcataaatgtgaattagtttacgtagattgttggtttatctcaaacattctggctktactgattatcttttttcaatttttgagaggggatttttgaaatctgactataattttctatttgtctttctttggagttacatcatctagatattctccaatgttctcttctagaagttttatggctttgaattttatatttaggtctgtgatccattttgagttagcgtttgtgtgtgatctttgtctagatttatttatttttgcatgtgaatgtctagttatttcatcatttgttgaaaagactatctttgctccattatattgtctttgctcctttgtcaaatatcagttgactataattatttagatctatttctgggca

SEQ ID NO: 796078 - DNA, 611 bp, Homo sapiens
ctgggttcaagcaattatcttcctcagcctgggattacaggaacccaccaccatgcccacctaattttgtatttttagtaaagacggggtttcaccgtcttggtcaggctagtcttgaatgcctgacctcgtgatccacctgcctcgacctcccaaagtgctggaaytacaggcatgagccaccttgcctggcctcaatattgtttttaataatttctgctttacttgcagttaatcatatcaggccgtctaccatacccagttgtgtcagcaagaagatctgtacaatgataagtaacacatggctcccagagctaacatattcctaacacttatataaacactttttcagaaatttgacaatattttataattaaacaatatcttattttacaagaaaagatatggtatcacaatactctgagcaaagagttaatttgcttctcaaatttcctagataatgaagtagtcctaaaatatttaactcagtattggtaatagtttcaatttgaggaagtgttctgaatagcctttttaatgctgatgtcataagattgtgttacaaacacagactttcatttaaagacactttatttttaattttgttctaa

SEQ ID NO: 796079 - DNA, 611 bp, Homo sapiens
ctgggttcaagcaattatcttcctcagcctgggattacaggaacccaccaccatgcccacctaattttgtatttttagtaaagacggggtttcaccgtcttggtcaggctagtcttgaatgcctgacctcgtgatccacctgcctcgacctcccaaagtgctggaactacaggcatgagccaccttgcctggcctcaatattgtttttaataatttctgctttacttgcagttaatcmtatcaggccgtctaccatacccagttgtgtcagcaagaagatctgtacaatgataagtaacacatggctcccagagctaacatattcctaacacttatataaacactttttcagaaatttgacaatattttataattaaacaatatcttattttacaagaaaagatatggtatcacaatactctgagcaaagagttaatttgcttctcaaatttcctagataatgaagtagtcctaaaatatttaactcagtattggtaatagtttcaatttgaggaagtgttctgaatagcctttttaatgctgatgtcataagattgtgttacaaacacagactttcatttaaagacactttatttttaattttgttctaa

SEQ ID NO: 796080 - DNA, 611 bp, Homo sapiens
ctgggttcaagcaattatcttcctcagcctgggattacaggaacccaccaccatgcccacctaattttgtatttttagtaaagacggggtttcaccgtcttggtcaggctagtcttgaatgcctgacctcgtgatccacctgcctcgacctcccaaagtgctggaactacaggcatgagccaccttgcctggcctcaatattgtttttaataatttctgctttacttgcagttaatcatatcaggccktctaccatacccagttgtgtcagcaagaagatctgtacaatgataagtaacacatggctcccagagctaacatattcctaacacttatataaacactttttcagaaatttgacaatattttataattaaacaatatcttattttacaagaaaagatatggtatcacaatactctgagcaaagagttaatttgcttctcaaatttcctagataatgaagtagtcctaaaatatttaactcagtattggtaatagtttcaatttgaggaagtgttctgaatagcctttttaatgctgatgtcataagattgtgttacaaacacagactttcatttaaagacactttatttttaattttgttctaa

SEQ ID NO: 796081 - DNA, 614 bp, Homo sapiens
ttttttttttttttgagacagaatctcaccttgtcacccaggttggagtgcagtggcacaatcttggctcactgcaacctcagcctcccagattcaagcaattatcctgcctcagcctcctgagtagctgggactacaggcccgtgccaccatgcctggctaatttttttgtattttttttttttagtagagacagggttttatcgtgttrgccagtatagtcttgatctcctgaccttgtgatccgcccaccttggcctcccaaagtgctgggattacaggcatgagcaactgcgcccagccgctactgcattgattctaaagattaacttccagagaattcacatcaatgttgcatcttcaaatctaagaacatggtagatctttacatttatttaagtcttctgtaatgtttctctacaagaaattttaaaaagttttagtgtgaaagatttttaaaggtttcacttaaattattcttaactatttttataccattaaaattttacttttaaatgtattctcaattgtttatttctagtatttagaaattccattaattttccatattgtattttgtgtattgaccttgcattctacacattctgcaccat

SEQ ID NO: 796082 - DNA, 614 bp, Homo sapiens
ttttttttttttttgagacagaatctcaccttgtcacccaggttggagtgcagtggcacaatcttggctcactgcaacctcagcctcccagattcaagcaattatcctgcctcagcctcctgagtagctgggactacaggcccgtgccaccatgcctggctaatttttttgtattttttttttttagtagagacagggttttatcgtgttagccagtatagtcttgatctcctgaccttgtgatccgcccaccttggcctcccaaagtgctgggattacaggcatgagcaacygcgcccagccgctactgcattgattctaaagattaacttccagagaattcacatcaatgttgcatcttcaaatctaagaacatggtagatctttacatttatttaagtcttctgtaatgtttctctacaagaaattttaaaaagttttagtgtgaaagatttttaaaggtttcacttaaattattcttaactatttttataccattaaaattttacttttaaatgtattctcaattgtttatttctagtatttagaaattccattaattttccatattgtattttgtgtattgaccttgcattctacacattctgcaccat

SEQ ID NO: 796083 - DNA, 608 bp, Homo sapiens
tgcccaggagacattttcaccattgtcttggggattgacattcagttcctcgttacttatgcaaatttctgcagccagcttaactttctcctcagaaaatgggtttttctcttctatcacattgtcaggctgcaaattttctgaacttttatgctctgcttgccttataaaatgaatgcctttaaaagcacccaagtcacttcttcaaygctttgctgtttagaaatttcttctgtcagataccctaattcttctgtcaagttctaagtttcactaatctttagggcacgggcaaaatgctgccagtctctttgctaaaacataacaagagtcaactttgctctagtttctaacaagttcctcaactccatctgagaccacatcagcctggatctcattgttcacatcattatcagcgttttggtcaaagccattcaaaacgtctctaggaagttccaaactttcctgcattttcctgtcttctgctgagcccttcaaactgttccaacccctgcctgttacgcagttccaaaattgcttctgcattttcaggtatcttttcagcagcatcccactctactgataccagtttactgtattagtctgtt

SEQ ID NO: 796084 - DNA, 357 bp, Homo sapiens
aatctttgaatataatgacacgttaaacagtgaatattaccttatatggcaatgcttgtgattaagttaaggactttaagggaaggggcttattctgaaatatactcacgggtctttaattcaatgacaaatgttcttcttttttttttttttttgagatggagtcttgttctttcgcccaggctggwggagtgcagtggtgcaatctctgctcactgcaacctctgcctcccaggttcaagcaactctcctgcctcagcctcctgaggagtgggattacaagcgcctgccatcatgcccagataatttttatacttttattagaggaagggtttcaccatgttagccaggctggtc

SEQ ID NO: 796085 - DNA, 550 bp, Homo sapiens
tctcacctctgcggcagactgcttgtttctgaactgttggagagccctccattctcacaagcccaagcactggtgtgggccgcaatcttggaacaaattgaggacagagaacaaggctactatttcctgcagtgccacttgcccttcacccagccccaagatgaggtggtgggcaccatactggatatgcctctgtggtggacttctatactgcctttgagtgaragagaggcttgccccatccccttgccggcttccttctccgtccctgcgtcgagctgtggctagatttctccatgagggcagagggcagggcaagaggcgtgagaagcatcttctggaaggtctgcgggcaccctcctgcgggtggacaatgagcgcctgggaggccgttgtccttggttggggagcggtcgtctggatctagcctagcaaagaggctgctccggatggggagggaatgaaaacccctgcggctccgacgcagatgcccacgttgcccaggccttcacagacccccaagccggaaccgccgggaaaacgattgcca

SEQ ID NO: 796086 - DNA, 485 bp, Homo sapiens
catccgtcgttggcgcccagggtgcgcgtcgggccactaggggtaccccaactcggacagaaggcccatgagttgaatttgaagtttgtgggaatagaggtgaggcaccaggggcagaaaaaaaacaggagacctcgcctcagacaagcggggcctgggtcccccatggatgaaagtgccttcccattatgctgtaccctgggcagagtggacagwgacgaccctggttcgagcccagggtgcgcttcgggaccgcttgcggttaccagaaagtgaacaaatggtccatgagcggaaggtgaggcacctgaggcagagaaagtaaagaaacgcgccgccgagaagcagtgcctgggtccctcacggaggaaattgtcttctccttagcccgttcgcttggcagtgaggtccctggcgtccctggtttgatcccagggtacgcctcgggccactagtgttaccccaaggtgggcagaaagcccata

SEQ ID NO: 796087 - DNA, 358 bp, Homo sapiens
  misc_feature 30, 32: n = A,T,C or G
tggcagacaaaaaaaaaaaaaaaaaaaaananccgcaccgcagagaagcggggcctgggtccgccacggacgaaagtgtcttcccatcagcccttgcgctgcgccccggggaccctgacgaccctgattcgagccgagggtgcgcctcggtccactaggggtaccccaaagcaggcagatggctcatgagggraaggtgaggtacctggggcagccaaaagaaaaaaaaaactgcgccgcggagaagcggtgcctgggtcccccacggacgaaagtgtcttcctatcagcccttgcactgggccccgggaaccctggcgtccctggttcgaccccatggttcgcctcgggccgctagg

SEQ ID NO: 796088 - DNA, 611 bp, Homo sapiens
tgtcaatctagagcctggtgtccacttgaggactaggcagacacctggggcttggtgttcaccaggggcctggtgttcaacttgcaaccagtgtccacctggaccctgtgtatcaacctgtggcctaggtggccacttggagctttaygtgcacctggggcctgagaggttcctaggatctgatgaccactggggcccaggtatccacctgggatatcaggcttcaagtgtacacccaggctccatgtggacaccaggccaggagaacgccagcccttatctgaacatcaggtcctggatggactcccaggctccatgtgtacatcaggccccaggtatacacgggactccaggtggacaccagcactcaattggatacacaccctgaaggtggataccaggccccacgtgaattcctacactccaggtgaacatcaggtcccaagtggatacctggaccccaggtggataccagtctctaaattaataccaggcctcagatggtccttaggagccatgtgggcattagtcatcaggaagttacctaggcccaaagtggacatcaggccccatgttgacacaagatctagttggaagtcaggccccaggtg

SEQ ID NO: 796089 - DNA, 611 bp, Homo sapiens
tgtcaatctagagcctggtgtccacttgaggactaggcagacacctggggcttggtgttcaccaggggcctggtgttcaacttgcaaccagtgtccacctggaccctgtgtatcaacctgtggcctaggtggccacttggagctttatgtgcacctggggcctgagaggttcctaggatctgatgaccactggggcccaggtatccacctgggatatcaggcttcaagtgtacacccaggctccatgtggacaccaggccaggagaacgccagcccttatctgaacatcaggtcctrgatggactcccaggctccatgtgtacatcaggccccaggtatacacgggactccaggtggacaccagcactcaattggatacacaccctgaaggtggataccaggccccacgtgaattcctacactccaggtgaacatcaggtcccaagtggatacctggaccccaggtggataccagtctctaaattaataccaggcctcagatggtccttaggagccatgtgggcattagtcatcaggaagttacctaggcccaaagtggacatcaggccccatgttgacacaagatctagttggaagtcaggccccaggtg

SEQ ID NO: 796090 - DNA, 578 bp, Homo sapiens
aggtggacaccagcactcaattggatacacaccctgaaggtggataccaggccccacgtgaattcctacactccaggtgaacatcaggtcccaagtggatacctggaccccaggtggataccagtctctaaattaataccaggcctcagatggtccttaggagccatgtgggcattagtcatcaggaagttacctaggcccaaagtggacatcaggccccatgttgacacaagatctagttggaagtcaggccccaggtggacacccaggccctaggtaaatacttaggtcccaagttgacagcaggccctatatgaacactcagaactcaggtggacatcaggcctcaggtggacatctgagttcatctggaacctcrtgttacaggccccatgtaaacaccaggccttagatggatacccaatctctaggtagacatcagagctcagattgacacaaagactccagtagacataatgtaccaatgaatatccaggcgcccggtaaatacccaggccccagattgacaccacggtctatgtggacacagaggccctgggtagtaaacaggcccaagg

SEQ ID NO: 796091 - DNA, 555 bp, Homo sapiens
caagccccaggtagacaccaggccgtaggtgagcaacaggatgcagtaggtcatcaggccacagctggataccagtccccggtgatcacaaggccccagtgggacatagatctaaggcagacatcaggccccaggtggacatacaggtctgaggtggaattcaccctgagggggacattcggccccaggtacgcatcaggcctcagctgaataaccagtccccaggtggacattaacccacaggtcaaccacagtccccaggttgatacctggtccccaggtggctactcaatctgcagggtaacattagkcccctgtaggatcccaggccccaagtggattcctaggcccctggtgaacatcaggtgcaggtgtccaagtaggccctgggtggacataactgtgtacaggtaaggagttgacctgtggggaggatgagcagtcagcagcccactggggtcctgagtaggtcttctggaaggaggaggctgaggggatggaaccttaaagaagcaacctcacttctttggcaacagaccctaacagaacttagaa

SEQ ID NO: 796092 - DNA, 586 bp, Homo sapiens
gtgtatgttgtataggatcattttgcttcatttctgggtactttcagaggaccaaggctctgtacaagttccttggttgcagataggctcctgtggtggcttggtgtggtgatgtatttttgtttggtggtgtaattcaggcttcagtccagtagacagtgcttaagagtaacagctggctgcagggtcttctcctctgtgtacttgtcctcgacaggtgcagaagtgacaaagtgccaaaagcgccctgtcccagtgtgtactagtcttcagcaggggcagagctgctggagaaacctaagaagcagcctctttcagcccacgttccttgggtcccaacaggatgaccactgctggatctgcagcagtgcactaggaaggggacagagggcaagagatraccacctctctaaatctgttcccaggctttggtgtgcccctttcagcagctgatatcgtgatcgtgtttcctttgatccaaggggtggctttggcaagctgtattcctccttcccttagggctggtcctcaccaaagtttaggtctcctggggaatggggttcacctccctcttgtttcttggaac

SEQ ID NO: 796093 - DNA, 586 bp, Homo sapiens
gtgtatgttgtataggatcattttgcttcatttctgggtactttcagaggaccaaggctctgtacaagttccttggttgcagataggctcctgtggtggcttggtgtggtgatgtatttttgtttggtggtgtaattcaggcttcagtccagtagacagtgcttaagagtaacagctggctgcagggtcttctcctctgtgtacttgtcctcgacaggtgcagaagtgacaaagtgccaaaagcgccctgtcccagtgtgtactagtcttcagcaggggcagagctgctggagaaacctaagaagcagcctctttcagcccacgttccttgggtcccaacaggatgaccactgctggatctgcagcagtgcactaggaaggggacagagggcaagagataaccacctctctaaatctgttccyaggctttggtgtgcccctttcagcagctgatatcgtgatcgtgtttcctttgatccaaggggtggctttggcaagctgtattcctccttcccttagggctggtcctcaccaaagtttaggtctcctggggaatggggttcacctccctcttgtttcttggaac

SEQ ID NO: 796094 - DNA, 634 bp, Homo sapiens
agaggggagagaatacaattgcaccaaataaagactcactttggaactcagtgattatatgtgtgcatatatgtgtatatatatgtatattatacatgtgtatgcatgtatatatgtatattatacacatatatgcatgtatatatatgaatayatataaaactgaaaactgcacacatcccatatacaccatatacatgaaagtgaacacacacacatacataaacatatatattcagtttcaaacaattgttagggaacctgaggaagaaactaaatggaatataatggttgcatctatgatagccatggtactagaactagtagtagttctactaaggtgagaattgacatagtaaaagaaataagatacaaagcagtaagagagagctacattttccttaaggccaggctgaatattcactaacaaggaaatttctacagtcattattttaatctgattcattctcttggtgggatattccagagttaccacctacagaaattccacttttccttactgaggttctctttttttcttttcagtccaaatattagtcatttggtagagaaggcagaaacaattaacaattgagtaattcctcaggaatcatgttaaaaggtttccaaatca

SEQ ID NO: 796095 - DNA, 604 bp, Homo sapiens
ctttttaataatagccattctgactggtgtgcttactggttcttaatctcacccacatcttagaataatgtggaacatttcaaactaccgacacctctttctaaaaactgaagttctgttttaattggactttagtagagccaagaaatgagtattatttaaaatcttgccatgtgattctactaggaagccagggttcagagccatggattacatttttaatataaatacacattattagttgaagcagttttaagttaggatagctgtaacgttgattgaaaggggaatacttaaaacagaaccctgccttgggtcgtcaagacttaaaaaattcttctgtttttattctattaaatataatcatgcattcacttactttagcatttataattctaaaacacattgcaaatttcacaaaactaccattttytaaatgtcaacactctaaatacaccatttatttttcaaagtagtatattcacttcaaattccattgctgtgtcaagagttagttgaacttaaaatataattaatagttactcagcaaaaatagaaagatgttagctgactgtgtcaaaagaaatattttaacactgatttc

SEQ ID NO: 796096 - DNA, 578 bp, Homo sapiens
ttactgggtgctttaaggcaaaactgaatgagtttccaatagtcagtacaaaactacaagaaatacaggcacaaagtgcctggggttatcctcagatgaagttagatttgaattgcattcaataaccttttttacaatgtgtagatgctcaaagcaaatacaatagtttctctttgcctctgtgacttgagttcatagtgttgtgtttaaatataacttttgtaatgtctacttcactgaaraaacttttaaaaaatttgacttataatggttttctgtaataacctatggtgcttggtttgtaaagtaaaacaggaactcaatttagtacctactgaataataacattttttaactgagattccactcataaggcacctaaatttttaaagttaaaacatattatattgacattaaatttaaaaagaataaacaagttagagaagaaataaaaaaaaaatcttcagagaataaactgcttccaagtatacaagtactaaagaggctacacactggtatgctcattataaataaaaacactcattcatgtaattttatctcattactacatatttaaa

SEQ ID NO: 796097 - DNA, 578 bp, Homo sapiens
ttactgggtgctttaaggcaaaactgaatgagtttccaatagtcagtacaaaactacaagaaatacaggcacaaagtgcctggggttatcctcagatgaagttagatttgaattgcattcaataaccttttttacaatgtgtagatgctcaaagcaaatacaatagtttctctttgcctctgtgacttgagttcatagtgttgtgtttaaatataacttttgtaatgtctacttcactgaagaaacttttaaaaaatttgacttataatggttttctgtaataacctatggtgcttggtttgtaaagtaaaacaggaactcaatttagtacctactgaataataacattttttaactgarattccactcataaggcacctaaatttttaaagttaaaacatattatattgacattaaatttaaaaagaataaacaagttagagaagaaataaaaaaaaaatcttcagagaataaactgcttccaagtatacaagtactaaagaggctacacactggtatgctcattataaataaaaacactcattcatgtaattttatctcattactacatatttaaa

SEQ ID NO: 796098 - DNA, 609 bp, Homo sapiens
ttttctgatctagctctagattattgtttgatctcatttttactattcttctcattgctcattcaattcaatttcaagcataatgattttttgctcttttgggaatacactagctttttgatttcattagagcctgtacacttccctcttcctgaaatgttcttccccaaatttatgtatagcttattttctctctttgttcagggctcagtgtaattgtagattgttctctaccttgaatatgtcttacccctcatttgactggttttccttcataccaattatttgtattctaaaatattttatatttttctgttgacttgttcactgagttccttcctctaaaatgtagcttcatgagggcgatattttgttaaaattgtatgctactgtatcactagaactgagaacaatgcctgaacagagtagctactcatgactcattggctaaaacaagttaatgaatgagaacaggcaggtagaaagccaggaasgaaaagaggatattatattaagttgaatgagggattaaatgaatataaataagctgaaagtagcataggttatgcaatatgcttaataaagtatgtttgtctattttcgttatgt

SEQ ID NO: 796099 - DNA, 542 bp, Homo sapiens
ccacatttggtgttctcatctgaccaaaccaaattttatgtatacattcaattctcaatccaacccagtctgtttgcctaagccattccagacaaacttccactttgaaggttttaaatgcataagtcagatagcaatccttcagttgccccagaggcacatcacgttctttgaatgcttcagtatagtcctcttcatttagcaatcagtgaggcaatacactggcatcatgatccctwtttttaggaactctgtacaaaattccctttgaaaatataaattttggaaatgagtgatgagcaaaggggtttcattaacattatcacaatctcttgatatatctgcttgataatgtagcacctattatttggggccattaggaccttggcagaaattctggtaaatgtaaagaaaccacatttaacatccagttaatttagtttgtttgtttgttttgtttttgtttttgtttttgagacgttgtcttactctgtcacccaggctagagtgcggtggtgtgatctcgactcactgcaacctcc

SEQ ID NO: 796100 - DNA, 534 bp, Homo sapiens
tggaaggggaagaggaagcagagtactttcttcacaaggcagcaggaagacgtgcctagtaaaggggagaatttctccttataaaaccatcagatctcctgagaactcactcactatcacgagaacgcatgaggaaaaccacccccatgatttaattacctccacctggtctctcccttgacacctggggattatggggattacaattcaagatgaggtttgcgtgggaacacaaaacctamccatatcagctacctttcataatcaaaagaaaaaattcctacaggcaaacatgaggacagggaaggtgaccaagtcacatgggaagtaagtttattgatttgtcctttcctctgtttctttctgtttccatgtctgaagagagaagggaaattctcatttttccatgtgttataaaatggaaatggttgttgccctcaaagaaaaccattctaaattaaaggagcaagaaattaagaaagtactcagcctgtaacaaagtactctagtgccctggaattggtgggaaatcaa

SEQ ID NO: 796101 - DNA, 644 bp, Homo sapiens
agatttcattctgcttttgtcaagtcctaaattattattagtttttacaaaacagtgagtgaaaagttaagaactttaagagacatatctatgaggttattttttcaataaagttcttttttcatttccattcaagatagcattaataagcacaaaaaatacatacattgaatttttagttagcaatggctgaagtttcctccctcaaaatgttttatatactgagtcataaataccctgccccccgttctaggaaggcagacaaaaatagtgtttgtttacaaacagtttctacaaataggacttggttgctacttcccctcaggcaggtctgcccaccttcttttaaactgagatgattgacaatgatgagatccagccartttggggcaataagaggaaggctcccttagtttttaattaaaatattactggtgacaagcaagtcaaaattatcatgaccatagtggaagatacaaagatcagaaaatagctcattatttcgtttcctccacttgataaaatctttaaagtatacattaagaaaaatagaaaagcgagccttctagtgccgtgttcttatagcagccaaggaatatcacaaggcaaatggtaaagaaagccctatagtctgagaggtagaa

SEQ ID NO: 796102 - DNA, 630 bp, Homo sapiens
gtgcccttaagaaaaaaaaaaaaaatccccagtattttattcacatggttgaacagtgcaagcttgaggccagtaggaggtgcccataggtaaaaaccagcttctactaaagcaggtggataaatgccatacttaatagtgagcagagctcccagccttgacagaagcagctggggaaggtstatgaaatgcactgaggtcttttcagggagaagggagggagccaccacagctctccttccaggccaacaggaaagtaatacacctcccaggcacactcctgacctgctgttccagctgttcaaatcagaaaggcatctcttttcatctgcaggaatactgatgttccatgtagactttccccctatgagcccagcactgcacctgtgcctctgatgaaaaacaacttcccacaagtggaaagttcagggactcaaggcctgcagactggtttcttttgtcccacacggtgcctccgtaatgtgcggcactccccctttacctggagggccagactactgtgaatcctgctactcctctgggtctagctgctcagtgggactcccacactccaggatggtactggagaatatccgccaaggatccagtgatgtgacctgtcctctactc

SEQ ID NO: 796103 - DNA, 603 bp, Homo sapiens
caccgcatgataaaacattaaacaggtgctggaatagatataaatatacaagctgacttttttacttcttcaacagagaaaagtgattgatgtaattagattactttgtttctactttcaatctctcttttttcttttccttctttttattgtattttatttttatttatttatttattttttttgagacttagtttcactcctgtttccaggctggagtgcaatgacgtgatctcggctcaytgcagttcaagcaattcacctgcctcctgagttcaagcgatttgcctgcctcagcctcccaagtagctgggattacaggcatataccactacgcccggctaattctgtacttttagtagagacagggtttcactgtgttggtcaggctagtctcgaactcctgacctcaggtgatctgcccgcctcggcctcccaaagtgctaggattacaggtgtgagccatcgcacccagcctcttttttcttttatattctctctctctccccactgccccaccccctgaggtggtgacaaggtggaagaccttaaatggccaaattagacaagatggaaataccgtcctggcttagttcgctgtaa

SEQ ID NO: 796104 - DNA, 603 bp, Homo sapiens
caccgcatgataaaacattaaacaggtgctggaatagatataaatatacaagctgacttttttacttcttcaacagagaaaagtgattgatgtaattagattactttgtttctactttcaatctctcttttttcttttccttctttttattgtattttatttttatttatttatttattttttttgagacttagtttcactcctgtttccaggctggagtgcaatgacgtgatctcggctcattgcagttcaagcaattcacctgcctcctgagttcaagcgatttgcctgcctcagcctcccaagtagctgggattacaggcatataccactacgcccggctaattctgtayttttagtagagacagggtttcactgtgttggtcaggctagtctcgaactcctgacctcaggtgatctgcccgcctcggcctcccaaagtgctaggattacaggtgtgagccatcgcacccagcctcttttttcttttatattctctctctctccccactgccccaccccctgaggtggtgacaaggtggaagaccttaaatggccaaattagacaagatggaaataccgtcctggcttagttcgctgtaa

SEQ ID NO: 796105 - DNA, 635 bp, Homo sapiens
gtactggagaatatccgccaaggatccagtgatgtgacctgtcctctactctcccagcagcgggtaccagcaccagttctgatgggggtaggagaggagtgacgtagactctgagatttccttagttacaaataaccttagtgttggctttctcagatgccagcagtagcagtaatgtactgggcacatggacagactcaagacctcctggttagccgaggcaatgcaggcaatggcaacagctgagggcatgcagaagttttctccttcctgagtgctgtgttattctgccttcaggtgtcataatgggctktgcctggctaccagccaggaggtggtgcttgcaaaagagtaccaggtgcggtggtagtagtggaatttgtgcttgccttatgttacccagggcaggcactctggggtctcaggcaatgggcggggctatggagcctccaaatatccctgtccattgtgttatgctaccagggctcataaagtggcaaagcctggtgaggactggaccaggcaagtcctcactcaggctctccaggtacaagcacaagcagtgtccccagtggggatcagagaacagctttctggccactggggtaatgttccagaggggagcagagctgcct

SEQ ID NO: 796106 - DNA, 620 bp, Homo sapiens
tttcttatatgtaaagatgataataatagcacatattatctaggattgtccttataaatatgaaactctgaacagtgcctggcaaatagtcatcaccatgtagctcttgttattatcattatcttgttatattgagytctattggtgcatagaatagtatatatacattattgatttaaagaacgggaatatgtagcatattgaaagaaagtcaagagagatggtgttgtgtggtctaaaacaatggcttccaagctccatttttgattaaaatcatctgggatgattattaaaatccagatccctgcccactctactcctccttccatgctctatatttgtaacaattgcaccaaagatcatgtttgcatagtcagctttggaatgcagtgaaatcaaatgaattttaataatgcatgttcaggtaccatatgatttaattagagaagctattttggtacaggggtttttccattgacctataaattcaatcctgtggggagttgtgcattctaccatgtctccaccatgtgccatttggatgtctcctctctcctttcttcctttcccttcctcccctcatccatagagagaagatgactactcccagttgatgctga

SEQ ID NO: 796107 - DNA, 528 bp, Homo sapiens
tattcgaccattttaattcttataaagggtgtctattttctataaaagaatcctggcatttgaatgcaggaacagaatactaagttggatattgtcccaatattgtgatcatatgatttgttggaaaatacagtgaagaaaaaattaaatatatattattaccttctctgtatatctgtactaggcaggtggtaggaataaacaagctatttcagtattgacttgtaraaccaattatagaaataattataaaaataaatgcaaataggtacccattctgggcatagaaaattatttttgcaatgaaattcttatgagtttcagtaatatcactgaaatacatacatgcatacataataatctctgtctctattacacacacatacacatacgcacacatatatacagatatatatacacaagtaatcagagaaatccccctcttttctaattacatcagatttctctgtcctttggcatttcctttttctcataccaaaactccagtccttatttctcatatcagtc

SEQ ID NO: 796108 - DNA, 596 bp, Homo sapiens
tacaagttcatggtgcagaaccagcagtctagagattttatagcccttttgttaatcatagaatttattctgtttcataactctaaaccccattaactggccatgattggtagtttaataatctaggtattgacctcaaagctgagaatgtgcccgatgagatcatctgagtcctcattaccaaaaacaaaacaaacaaacaaaaaacctgaggtatcatgtaatattaggaagcttttttaaaatttaatttccagaaaattaatccaacctcctgagtagtaaagtcataattgtcaataggctaaaaagagaggctttacaatgtgaaaatggkgccataatctgggcatagagagaggcgttgcctctgaattatgcttcgaagccctgatcagagttctaggatgcaccagagtcacagacaagcttccgtgttccccaccctggttgtaaagaaatatttcaaagaaattaagcttctctttgaagtaaacctagtgtttttctacattttatgtcatgacacatactaccatctggttatacaataaaatataattacttttgagagaaaagtcattttttccccttca

SEQ ID NO: 796109 - DNA, 618 bp, Homo sapiens
cagttgtcatcaaaaatgaactctgatgatctttcaattacagtgctttgggcaagtttttgttcgtttgtctgtttcattttagattgctaaagaatttctgtgaaagttcacagaaccactggtaccctgaagtcaagtctcaattacctttggcttggggaatagggttacatgaacacttgctggtgatttccaggcatcccttactcaattccctcaatattcccaccaccgagcttttcttagaagggctgttaacaagaaaccaaatgtacagrtttgagttttgcctcatttcacttctgcaagattacagaaggaaactgaaatttctaaaatacatcttgtaggaaagagaacataaaaagaggaaacaaaggtaatcagaacacagaataactggcacctgaattcctgggtatggcctgcactgggaatgcactatagaatctgaagggattagtcaccatttattgagcttgtctagaaggagagcaggaaaagcagaaagtacttgggaatgagaacaaataattctatgcattagatgtattttagttctacaaaacgcaaaggacacactatctgaacttcctttcaggtgttcacgtgaac

SEQ ID NO: 796110 - DNA, 575 bp, Homo sapiens
caggctgatctcaaactcctgacctcaagtgatctgcccgccttggcctctcaatgtgctaggattacaggcatgcgccaccatgcccagccatccatttatactcttaattattttaaaatgtacatagtattagttctttaaatatttggtggaattcagcagtgaagccagcaggtcctgggcttttctttattgggaattttttttytttttttgtagaaggaagggctttattcagctgggagcatcggcaagctactgccttaaaatccgagctccccgaatgcacaatttctgtccctttttttattttattttattttatttttattgataattcttgggtgtttctcacagagggggatttggcagggtcatgggacaatagtggagggaaggtcagcagataaacaagtgaacaaaggtctctggttttcctaggtagaggaccctgcggccttccgcagtgtttgtgtccctgattacttgagattagggagtggtgatgactcttaacgagcatgctgccttcaagcatctgtttaacaaagcacatcttgcaccgcccttaa

SEQ ID NO: 796111 - DNA, 569 bp, Homo sapiens
gttgttcttagccagctatgaatttctaagagctgagttatgttcagtcaacacttgtagaaaatattctgctgtttccagggttctactttagctcttgggaaggtggagggggttgtgttttctgtcagtcttgtacctttgtraataattaaccttttttctctggttgttttttgtcctcggttctgtatattctctgtgctatgtgtatctgaggatttatttttatttctttctttggaattcatttatgtttcctgaatctgaggatttacatctttcataaattcttcaaatattgccacttctgtagtcttggttttgttagaacatcttattctgtcataatgtctcttaatttcttaaacttttttgtttcttctgctggtgtttcattctagaaatttttcttcagatttagttttcagttctttaggtctctcttacactgtgtctcatctgctgtataagctgttttttctttttctattttcagtgactttatttttctgttttagaagttctcatgtttcttttttaaacatgcttggactttttgttatttc

SEQ ID NO: 796112 - DNA, 581 bp, Homo sapiens
catgtacaatatgtatctgccaatttttggacctttctgactcaccattgttctgtattaaaaattcatactgcacaccaccttcacacatggatttctctctctctctctttctttctttccctccctccctctcttttctcttttttctytctttctttctgtctgtctttctttctttttctttcttttttttagacaggatctcgctctgtcacctaggctggagtgagtgctgtggcacaatcatagctcacagcagccttgaactcctggccttaagccatcctcctgcctcatcctcccaaggggaccacaggtgtgcaccaccacaactggctaatttttttttttttttttttgtagagtcagggtctccctatgttgcctaggctggtctcaaactcctgggcttaagcgatcctcctgccttggcctcccaaagtactcagattataggcataagccatcatgcccagccacccatggatttctgattatgtggcccaccatggaaataactcgagtaccccttcaaatcttgctctgatctaaccagtaattaatcctgttacttagac

SEQ ID NO: 796113 - DNA, 581 bp, Homo sapiens
catgtacaatatgtatctgccaatttttggacctttctgactcaccattgttctgtattaaaaattcatactgcacaccaccttcacacatggatttctctctctctctctttctttctttccctccctccctctcttttctcttttttctttctttctttctgtctgtctttctttctttttctttcttttttttagacaggatctygctctgtcacctaggctggagtgagtgctgtggcacaatcatagctcacagcagccttgaactcctggccttaagccatcctcctgcctcatcctcccaaggggaccacaggtgtgcaccaccacaactggctaatttttttttttttttttttgtagagtcagggtctccctatgttgcctaggctggtctcaaactcctgggcttaagcgatcctcctgccttggcctcccaaagtactcagattataggcataagccatcatgcccagccacccatggatttctgattatgtggcccaccatggaaataactcgagtaccccttcaaatcttgctctgatctaaccagtaattaatcctgttacttagac

SEQ ID NO: 796114 - DNA, 612 bp, Homo sapiens; identical to SEQ ID NO: 766086

SEQ ID NO: 796115 - DNA, 563 bp, Homo sapiens
gaagattaactcactcatggtgattccatgagtcaaagggattaaagaaagatctttctttccctttcagaggatttaaggtaagtgatgctgtcacatatataataaggcaagtagagttgatccttgaataacataggggttaggggcaccaaccccctgtgcagttgaaaaatttgtgtataattttaaactcgccaaaaacttaactaccaatagcctgctgttgagtggaagccttcctgataacataaacaatagaataacacatattttttatattgtttttactatattctaacaaagtaagctagagaaaagaaaatgttattaagaaaatcaaaaggaagagaaaatatacttactattaaatagaagtggattattatgaaggtcktcattcttgtcattttcaagttgagtaggcagaggtggaggaagcggagggattgatcttgctgtctcatggggtggcagaggcagaggaggtggcaggggaggcaggcacactctttgtaacttttattgaaaaaaatctgcatataagtggacctgtgtacttc

SEQ ID NO: 796116 - DNA, 506 bp, Homo sapiens
tattcagtactatgcttaatcatattgaccaatcttacctttgagataagggtggagcttaattacgcgtagttaatgaaacatattctgctttatatgccacagtgaccattgtgaagttctttcagtgatgctgaaataacttgatcatctattagtgtacaccaaaatrtcatgcttggatattctttgataatatagaaaaaactctgaatgataacataaatgatgaattaacaaagaattttataatttctaatacttaactcatttatgcattttgtcaaccagtaaataaatcagtgataaaaataaactttattttcaatgttaatcaacctgattttaaattcataaggacatagattattccattagtgtatattatttaatcaaagatttacagtttcacaaaagtatctaagaatatttaaagattatataataagtgtctgagtaatcaaagttcagaaactaatatgagtcatatggaaactaatgtaaat

SEQ ID NO: 796117 - DNA, 619 bp, Homo sapiens
cagaccacttagattattgaggataatctctcttatttgaagtcagcatgttatgggctttaatcacatttagaaaatatattcacagcaaccttagattactgtttgattgggtaactgggaactgagtctcaccacgttgatggacaatattgaccatcgcactgggggaaaatattctaggcagaggaatgggttagtgacaaaattctgaaggaagacgtctagcttattcctggaacaagaggrccatgtgttttggatgatgttttagtaagcccatgctgctacaacaaaatattataggttaggttctttataaacattgtaaaaaatgaaatttactcctcacagttctggaggctggttggagtctggtgaaaacctatttccaagttgcagactgatgatttcttgttgtaccctcatgtggcacaaagagaatgagagagctctctggggccccttttataggggcactaatcccattcttgagagatccactctcatgacctaatcacctcccaaagtttctacctcctaataccatcacactgtggcttggatttcaacatatgaattttgtggagacacaaaccttcagtacattgcagatcaa

SEQ ID NO: 796118 - DNA, 555 bp, Homo sapiens
gaattatactttatgttatcacgctggcttcaatgttcagactagacaaggacaaatgcattgggaggctagacaataactcatgatagcagtgagagtgatgtggagtttaaatattcaaattgtattttgaaagcagagccataaatatttgctgatggactgcataagaaatatgagtaaagtgtaaaaataaaagtcattccaatattttggctacagcaaccattagcaaagaagggcaagactttatgaactttatttagcaaaagtcagaagctcagttttgcatttgtagcatgtcagatgcctattaactatctaaattaagatgctagattggtggttgtatatataggtctggagttcaaagactgtatccmagttgagattcatcagcttataaatagggtttaaagttgtcagtgtgaatcagaaaacggtaagaaaagcaagacattaatgtatatattttagatttttaacttgtcctattttttaaaccttttatggcttctgattgattttcaaggtatcatacatacatagtaattt

SEQ ID NO: 796119 - DNA, 606 bp, Homo sapiens
tgagtacacgttgacacatgtgcacttggagggtggagggtgagaggagggagaggatcaaaaaaatacctatcaggtactatgcttattacctgggaaaataaataacctgtacactgaacacctgtgacacacaatctacccatctaaaaaacctgcacatgtaccactgaacctaaagtaaaagttaaaaaaagaaaagaaaactgtaaagtttgtttgccactcttccttttggggcgaggaggtgtagggaataaataaatggrcacagataaatgagagtttattcttactcttcagaatgattcagtggtaaaaaccatttcttatgagaatctagaaggttttctttgaggctgtgggattcaatttgcctttgagttttagaagaattttaataaatatatatggctaagtaaatgtgctacagggtaaaggaaaggtggaatgaataaagggatatatgaagagtaaagaagaggttgaggacaaataagtagattaatataactggaattaaaggtctgctgagctaggagaacctattggctaacatttgataaaggtaggtgtcagatgtatatgaattaaatgccagttgac

SEQ ID NO: 796120 - DNA, 637 bp, Homo sapiens
ttgctcatagtagtcactaatgatcctctgaacttctgaactatcagttgtaatgtctccattttcatttttgatttacatggatctttctttttttcttagtctggctaaaggtttgtcaattttgttcatcttttcaaaaaatcaacttttgtttcaatsatcttttgtatgcttttatttcaatttcatttatttctgtgctgatctttattatttcttctcttctattaattttgtgtccagtttgctcttgcttttctagtttttttcaatacatcattaggttatttaaaggttttcctttttatgatgtaggtacttatagctataaacttcccttttagtattgtctttgctgtatcccatgggttttggcatgttgtgtttccattttcatttgcttcagaaaaattttcaactttcttctgaatttcttcattgacccactgatcattcaggagtgtattgtcaaatttccatgtattggtaaagtcttcaaaattcctcttgttattcatttctagtttgattccattgtgttcagagaagacacttgatattatttcagtttttttgaatgtcttaagactggctttgtgacctaacatatggtctatccttgagaatgattcac

SEQ ID NO: 796121 - DNA, 583 bp, Homo sapiens
gaagaatatctcctgagattcacaggaataattctcttgccttcaggtgagattataatccatttttttctgggttggtttagatattaaggacacagaatctactatgtcttttaaatatagaaaattcttccttatagctattttgaatcctgtatgtcacagtttaagatttttcttctgtttcatcctgaaggaaggtgaaaaacagtttggatgtttcacatcaaaatataaagtctatatgctcttaaatctcctttgattatttttctaggttagaaagtcccatcctctttcatctttcctcatgtctcattttgcaactttttacatcrtccttataggtccaaaccctctttcatgtacttacaaaattgaacccatttttcaaagcctaaaaaaagtctgaacaatactttaaaaaacttttctagtaaaatttcagggttaagagtcatgaatagaaattgtcatatgtcttgaaactgaacaattccatttcatttatacaggatcatcaagaggtaactaaggcccttggaaccagatccctgctctgtgaaatacttgtgatagaaca

SEQ ID NO: 796122 - DNA, 529 bp, Homo sapiens
tagagcttttaactatactttgggaaattcaaataataagcttgttttgcttcaaaagtcaatatgccaaatttgaaagtcccatttgagttgttcatttacaagaactgataacttcacttcccaggcatttaagagagaatgctatttatagatcttatgaaatatagtatgaatgtgggtcagattctccaattgtctgccctaagatgttaacactggcatggacagtccaaaaagtataatagaagtgttattatttataactttaaagatatttccccccagttgttttatcttctattgctttactgaggctactattaaaatcagtttgaatgcattgattaragcctgactaggcttcggggagtacaaccttggattgttctgtaggatgaaagacaacaatttaaggttaactagcattcctagaaataagagacttcactcaattacatgcctgttatagcatctgaatatgtatcacatatgtaccaaattgccctaaaagctgttaaaatttaag

SEQ ID NO: 796123 - DNA, 641 bp, Homo sapiens
ttcaatgtctacattttcatgaaagtagaacattgacccacaaattgcaaatggaaattccaacatcctttgtaaatgtgttcaactctacttatttaatcttttgttctattcttcctgatagcccatctagtcaaagtcttcctctggtggcacaatcagcatcccggcgtctacgcagatgttgtttcttttacctggagcttactccattccacaacctaaaatgttgttcatcacccagagcctagttcccccacttgtaaaatgagctggtgagactaaatggtctttaaaatttcttagttctagaatactttggttcatttaaccttgccagtgaaggaagagggaagattttgttcccttcatttttacttctaaattgcattttctgtgcttggtcatcatgatgtattgtttttagcttttcctcgtatcagaactccaaacagaagaagctgraatgtagggcatgcattacatgaaaagtgaaatgttttgaaagggctttgaagtgttgaataggaatattgtattaagaacattccactaaatggaagaaacctggaaactggacaagctgtggatgtgcagatggtattactaaccatcagtcaaatagagaacacaggctattt

SEQ ID NO: 796124 - DNA, 525 bp, Homo sapiens
ccctagcaaatgaatgtgaacaaggacagatccctagacatttagattttagtatatgtttaaatagatcatactgatgttgccatgtcgtcatggcagtgcaatcaaggagagcctgatgatttctccccgaaaggtcaatagagctttactctttatccattaaagaccaaccatcatacataggagagctgacttgatttttgagtgttgttaacattagtattttttaaagtacctttttggatagaggttttaaaaaaactaacatgcaaattatgtaatatataatttaaccccttttatgattcrgaagtatccatttcagctcacaaaaaatttaagctctccctctccctctccgtctccctctccccacggtctccctctctctctctttccacggtctccctctgatgccgagctgaagctggactgtactgctgccatctcggctcactgcaacctccctgcctgattctcctgcctcagcctgccgagtgcctgcgattgcaggcgcgcgcc

SEQ ID NO: 796125 - DNA, 635 bp, Homo sapiens
ttcaccacagaaaataatcaagaaaccccatatgataacacaaaaatggtgatttgattatagcttgatgatgtctcataaattttttttcattttcaactttttctgatttctttctaagaaaggcagaaagagttsagagaacctaccattgctataacacaggaattcattaccatgaagacagaagattttcctgatttttacttcctgtatataaaaactagttgttttggttctagagtaccttcactaagatttttacaagtttgctagaactgctatgagattttaatgtggatcactcaaagagctcacattttccaaattgacatatagggttataagaatacattagggcatttgaatgaagcagatttgctgattttgtacactttcattatgaagagatatattttgaagatgtctaaaaatgattaaacagttttactttttggtttctagtaaatttgccgatttttaagtacatttgggatatgtaaataataaagtagtttttaaatgaaataaacagaaaattatttgtcgagagcctcattccacatattggcttggcattttaaaaatctcactaaataagatgttggtgtggatgcggtgatcagggaacactt

SEQ ID NO: 796126 - DNA, 635 bp, Homo sapiens
ttcaccacagaaaataatcaagaaaccccatatgataacacaaaaatggtgatttgattatagcttgatgatgtctcataaattttttttcattttcaactttttctgatttctttctaagaaaggcagaaagagttgagagaacctaccattgctataacacaggaattcattaccatgaagacagaagattttcctgatttttacttcctgtatataaaaactagttgttttggttctagagtaccttcactaagatttttacaagtttgctagaactgctatgagattttaaygtggatcactcaaagagctcacattttccaaattgacatatagggttataagaatacattagggcatttgaatgaagcagatttgctgattttgtacactttcattatgaagagatatattttgaagatgtctaaaaatgattaaacagttttactttttggtttctagtaaatttgccgatttttaagtacatttgggatatgtaaataataaagtagtttttaaatgaaataaacagaaaattatttgtcgagagcctcattccacatattggcttggcattttaaaaatctcactaaataagatgttggtgtggatgcggtgatcagggaacactt

SEQ ID NO: 796127 - DNA, 629 bp, Homo sapiens
attttttaacatctcagaaataggataatttttttctacctgttgactagatgacagcaggactcagaatgtgaaaaaaaatcttagaaatatcttaacagtttatttggcttacattttcctttttggtatgtacaaaataatatttttttttaattgtttaagcaaatctaaattagctctaagttttaagacattaaactgtttactttgtagctatgtttcttaaacataaaacatcaaatataaaacaatggtacaaatcttataattagatactttcttagattccytaaaaagtagagaaattgaatgcccttaattctcagtcttctggtctttggggaagtgtagaacaagtgccagaacaagaaatgaaaaatcaaaggatttcacttaaattggtatggtggtttcatgtttttgtaagatttttcaaagggaaaatactatgcaacaaatattcaaagggaaaatactatacaacaaaaatttcatcttggcttcactgagaacctctttaaaaagagcaggctggaagagcccaaactgtaatagctgcagagaaaaacctcggttccagattttctaaatactaattagccgcactacttgctcaaattagcaga

SEQ ID NO: 796128 - DNA, 660 bp, Homo sapiens
atgtccctttaaaaagaacatggagggccaggcacggtggctcacgcctgtaatcccagcacattgggaggccaaggtgggtggatcactttaggtcaggagtttgagaccagcctggccaacatggagaaaccctgtctctactaaaaatataaaagattagctgggcgtagtcrtgggcgcctgtaatcccagttactcaggaggctaaggcaggagaattgcttgaacctaggaggcggaggttgcagtggtccaagattgtgccactgcactccagcctgggtgacagagcgagactccatctcaaaaaaaaaaaaaaaaaagaacatggagtcattcttacagctgtcattccctggaccactgctaattggctcagggatgaacatctaacccaaacctcaatcaggcactccctccaaattttatatgtggaaagtatacagaagtgtcaggaagacacttcatatgcagaaggagtgagtcagtccctctccggtgatgggaactgcaggatgtgaaacatcggatctattcattgtcttgatctctaccgtatgaaaaatgccaaatgcaggtagagaggcagcaaggccaacatactaagaaaagcagggacaagacttggacagagtcctgacagtggtcagcttgcaa

SEQ ID NO: 796129 - DNA, 660 bp, Homo sapiens
atgtccctttaaaaagaacatggagggccaggcacggtggctcacgcctgtaatcccagcacattgggaggccaaggtgggtggatcactttaggtcaggagtttgagaccagcctggccaacatggagaaaccctgtctctactaaaaatataaaagattagctgggcgtagtcgtgggcgcctgtaatcccagttactcaggaggctaaggcaggagaattgcttgaacctaggaggcggaggttgcagtggtccaagattgtgccactgcactccagcctgggtgacagagcgagactccatctcaaaaaaaaaaaaaaaaaagaacatggagtcattcttacagctgtcattccctggaccactgctaattggctcagggatgaacatctaacccaaacctcaatcaggcactccctccaaattttatakgtggaaagtatacagaagtgtcaggaagacacttcatatgcagaaggagtgagtcagtccctctccggtgatgggaactgcaggatgtgaaacatcggatctattcattgtcttgatctctaccgtatgaaaaatgccaaatgcaggtagagaggcagcaaggccaacatactaagaaaagcagggacaagacttggacagagtcctgacagtggtcagcttgcaa

SEQ ID NO: 796130 - DNA, 660 bp, Homo sapiens
atgtccctttaaaaagaacatggagggccaggcacggtggctcacgcctgtaatcccagcacattgggaggccaaggtgggtggatcactttaggtcaggagtttgagaccagcctggccaacatggagaaaccctgtctctactaaaaatataaaagattagctgggcgtagtcgtgggcgcctgtaatcccagttactcaggaggctaaggcaggagaattgcttgaacctaggaggcggaggttgcagtggtccaagattgtgccactgcactccagcctgggtgacagagcgagactccatctcaaaaaaaaaaaaaaaaaagaacatggagtcattcttacagctgtcattccctggaccactgctaattggctcagggatgaacatctaacccaaacctcaatcaggcactccctccaaattttatatgtggaaagtatacagaagtgtcaggaagacacttcayatgcagaaggagtgagtcagtccctctccggtgatgggaactgcaggatgtgaaacatcggatctattcattgtcttgatctctaccgtatgaaaaatgccaaatgcaggtagagaggcagcaaggccaacatactaagaaaagcagggacaagacttggacagagtcctgacagtggtcagcttgcaa

SEQ ID NO: 796131 - DNA, 633 bp, Homo sapiens
cctcatgctctgatggcaaatgaggtgtatgatacagcggtttgccaaaggacagggaaaaacccaccgtcacactcaacaacatgaagcagtgaaagctcacggcagcttcccagtaacccctaagcagcttaaagcaactggcctcctcatgggctcctgagggcttcaggactcagccctgcgggagcagagtccagcaagttccacgcagccctccagggttccacagtgaaggctgggatgacagccagatagctctttatgaacggaaaaaactcttaaacatatttctgaccctacaaaacccaaayccagggcacagcctggtcaatgtctgcatctaggattagaccagcagctttctgcagcccacacaaacccgggtgttagagggaggtctctccctaccctaagtcactcagaaaatgccaaaggttgaaaatcaatttccgatgtcgaatcctgataactgttctgaaaagatggcaattttaccatttgatcggaagatcagaggaggaaatttgtagatgttcaatcatacataagaagaatgattatgaaaactgaagagtaaaacaatgtttcttaagacaggattttaaccaaagcaacaacaataaaacaatt

SEQ ID NO: 796132 - DNA, 607 bp, Homo sapiens
actgggcctgagcagatgttgaattcttgctttctatggctgcatctaccactaggccccttcgctaaggctggtctgcagttgggagcgttacagaacccaggctggttccaggccacagtctccctgctgaggggatgcagagmccactttgggactgagccgataatcgtctctgaattgccttcgtttttgccagtcttgaatgcctcagtcaaggggtaaatccacaggagttaggcagggagaagtgtctcggttaggagcaggaagaacaaagaagccacatgaaattgggctggcagctttccctacatccaatcagctttgaagatatttgggtctgaagagctcaagcatcttgcatttgccacagaggcctgagcattgctctcctagttcagactcttgtcacctccacctggagtgcagaaccagactcctgggtacccccaccctctgctttctcctctaccccatcctgtgcgcactggtagtagtccagctttcccaaactgcagtactgatcctaccatggccatggaaccacaaccatccctggctccctattacctctcaaagaagatagcctggcacagcctggccc

SEQ ID NO: 796133 - DNA, 607 bp, Homo sapiens
actgggcctgagcagatgttgaattcttgctttctatggctgcatctaccactaggccccttcgctaaggctggtctgcagttgggagcgttacagaacccaggctggttccaggccacagtctccctgctgaggggatgcagagcccactttgggactgagccgataatcgtctctgaattgccttcgtttttgccagtcttgaatgcctcagtcaaggggtaaatccacaggagttaggcagggagaagtgtctcggttaggagcaggaagaacaaagaagccacatgaaattgggctggcagctttcyctacatccaatcagctttgaagatatttgggtctgaagagctcaagcatcttgcatttgccacagaggcctgagcattgctctcctagttcagactcttgtcacctccacctggagtgcagaaccagactcctgggtacccccaccctctgctttctcctctaccccatcctgtgcgcactggtagtagtccagctttcccaaactgcagtactgatcctaccatggccatggaaccacaaccatccctggctccctattacctctcaaagaagatagcctggcacagcctggccc

SEQ ID NO: 796134 - DNA, 528 bp, Homo sapiens
taaagaaagatgacagttcctgtcatcatgaggccttccctgatcgccttgtccccaagcactggtcctgctttctgaagactccttgagctgttgatacactgtgagtgtgtttataaccttactctgcaattgtttgtttgctcttttcttcttgtgcaaggagtgagaccatgggctaaggctcgaagcagaaagacattaaggtgcactccaggaacagaaagacggccagtattacgggttcaaactcgacgcaggacgtggcaagaggcaaggctgaaggaaagagtcgtggatgtcacagtagaagtctggacttcgtccgagggcagtgggaaaacatcaagaggggcgggaccactttwgcattttttttttttttttttttttttgagacggactctcactctgtcacccaggctggagagcagtgacgcgatctcggctctctgcaaactccgcctcccgggttcacgccattctcctgcctcagcctcccgagtagctgggactacaggcgcccgc

SEQ ID NO: 796135 - DNA, 617 bp, Homo sapiens
ggagctcagagcctggtgggaaaggtggaccctgagccgactattataaagaacttcaaacacctcgcatgtgcaaagtgcaggcatggcagagtgggcagagctaagggaggtctcgagaggtgtccgccaggcgaaggagaggagtccaggaagaagtatgggaggactctgcatttgggagggggtaggagagggactgagctggagaccctcgagaatcatgcactcccaggggcaatgggaagccacyggttgtgctgagaaagacagaaatagacttgcttttttttttttttttttttttgagatgaagtctcactctgtcacccaggctggagtatagtggcaaaatctcagctcactgcaacctctgcctcccgggttcaagcgactcccctgcctcagcctcccaagtagactacaggtgcacgccaccatgccgaactaatttttgcattcttagtagacacagggtttcacctttttggctaggctggtcttgaactcctgacctcaagtgacccacctgcctcggcctcccaaagtggtgggattacaggcgtgagccactacacccggccccagacttgcatttttttaaaaagccctggctc

SEQ ID NO: 796136 - DNA, 617 bp, Homo sapiens
ggagctcagagcctggtgggaaaggtggaccctgagccgactattataaagaacttcaaacacctcgcatgtgcaaagtgcaggcatggcagagtgggcagagctaagggaggtctcgagaggtgtccgccaggcgaaggagaggagtccaggaagaagtatgggaggactctgcatttgggagggggtaggagagggactgagctggagaccctcgagaatcatgcactcccaggggcaatgggaagccactggttgtgctgagaaagacagaaatagacttgctttttttttttttttkttttttgagatgaagtctcactctgtcacccaggctggagtatagtggcaaaatctcagctcactgcaacctctgcctcccgggttcaagcgactcccctgcctcagcctcccaagtagactacaggtgcacgccaccatgccgaactaatttttgcattcttagtagacacagggtttcacctttttggctaggctggtcttgaactcctgacctcaagtgacccacctgcctcggcctcccaaagtggtgggattacaggcgtgagccactacacccggccccagacttgcatttttttaaaaagccctggctc

SEQ ID NO: 796137 - DNA, 617 bp, Homo sapiens
ggagctcagagcctggtgggaaaggtggaccctgagccgactattataaagaacttcaaacacctcgcatgtgcaaagtgcaggcatggcagagtgggcagagctaagggaggtctcgagaggtgtccgccaggcgaaggagaggagtccaggaagaagtatgggaggactctgcatttgggagggggtaggagagggactgagctggagaccctcgagaatcatgcactcccaggggcaatgggaagccactggttgtgctgagaaagacagaaatagacttgcttttttttttttttttktttttgagatgaagtctcactctgtcacccaggctggagtatagtggcaaaatctcagctcactgcaacctctgcctcccgggttcaagcgactcccctgcctcagcctcccaagtagactacaggtgcacgccaccatgccgaactaatttttgcattcttagtagacacagggtttcacctttttggctaggctggtcttgaactcctgacctcaagtgacccacctgcctcggcctcccaaagtggtgggattacaggcgtgagccactacacccggccccagacttgcatttttttaaaaagccctggctc

SEQ ID NO: 796138 - DNA, 612 bp, Homo sapiens
ttaaggaaatcattttttgaacgtacaaataaaactatcctccacaaaaattagtttttattcataggattttttgcttgaaggatatgatctgatctcaggtcaatacatgaaatgcattttctgttatttcttgattaccactacctacaccgcttaaraggctcttgctttatttaggactttaacatgaatagagaaactctctttctcgtagtttgaagtttcaaaaaatgtcttcattggctcttgaaatataattctgtttaagcaagtacctgctatcagatccccccttattgggagaattacattttattttttgtcaggaaccatgtgtaagacatgcagttgctctcatattttgtggtgcagagtaaggcctatattccacaattgacatgtgcaatattctgcataattgtctgctaaatcatgctgatgttggtagtatcccattgcaaagatgaatatagttatagtcaaaatacagtatgtctggtcatccacctctgataggatgtggatttcaccatctcagctgaaaacaaagaatattatgttctacatggagagggattgcatgcatgccagtgaatccaacaggtacaa

SEQ ID NO: 796139 - DNA, 612 bp, Homo sapiens
ttaaggaaatcattttttgaacgtacaaataaaactatcctccacaaaaattagtttttattcataggattttttgcttgaaggatatgatctgatctcaggtcaatacatgaaatgcattttctgttatttcttgattaccactacctacaccgcttaagaggctcttgctttatttaggactttaacatgaatagagaaactctctttctcgtagtttgaagtttcaaaaaatgtcttcattggctcttgaaatataattctgtttaagcaagtacctgctatcaratccccccttattgggagaattacattttattttttgtcaggaaccatgtgtaagacatgcagttgctctcatattttgtggtgcagagtaaggcctatattccacaattgacatgtgcaatattctgcataattgtctgctaaatcatgctgatgttggtagtatcccattgcaaagatgaatatagttatagtcaaaatacagtatgtctggtcatccacctctgataggatgtggatttcaccatctcagctgaaaacaaagaatattatgttctacatggagagggattgcatgcatgccagtgaatccaacaggtacaa

SEQ ID NO: 796140 - DNA, 519 bp, Homo sapiens
tattagaaaggccaggtggaaatttttggaagtgtgcttcactatcaaaaaagtaaaccaaagaccagcaaaaatagaagtacttattatattactacagcgcctagaatattttaaaagccaagtaagaaagttcttctacattcccacttaatcatcttttggatttttgctgtgcatcttraagaactgccataaattaatgtaggcaaaattaggtagtgactccaatttcaacttatgtttcatatacagactctttggtgggataaatcaataaagctaagtatctggcaaataaccaatgattttgtaaatgacttctgtctataaaaatacacaggagaaaatagaggcaatctcttttctcatggacaatgacaacaaagtaccttcattcaaagctataactttgctctggcctttatcacttttccagctctgctttatgtgcaagggtcttcattatgctgacccacagcactggtgatctaaagatgaaagtatcatacataaaaa

SEQ ID NO: 796141 - DNA, 550 bp, Homo sapiens; identical to SEQ ID NO: 771472

SEQ ID NO: 796142 - DNA, 695 bp, Homo sapiens
ttggaccccaaataaccagcaacaatacccagtaaagttgtcatggcccctgggatctgagacgtgccggttgtgggacctagcatattcccatctgtggtggctatcatgaaagactccttctgtttgagaaaagcagaggaaaaataaagggaattctgtcctgcacattaggtaccagctcagccatagcaggctagagcaccaaccagactcttggagtccccaaatctagcctaggctcttagcatgtctggacctgctgtgctccagaggagagcccactgccctgaaggatgagtttcaggcctggcaacattcaccacaaactgactaaagaacccttgggctttaagggaacattgatggtctcctggcagaacccctcaagggtcaatagtgttggtggtcccaaggcraggctcctctgcctatggaaaggaaaggggaagcatgagaaagcctttgtcttgtagtttgaatgcctgcttagacacagtagaatagaacttcagataaatttctaaggcttttgactccaagccctggctcccagacagtattgctggacccatctggggatgggggaactgacccccatgaagggaaggaaataaacctggcttggttactacctgctgatcaaagagtcctagtgttataagtacacattagtggtagccaggtagtggtta

SEQ ID NO: 796143 - DNA, 593 bp, Homo sapiens
atgagtttatcaaagtttcaggatacaaaattaatgtacacaaatcagtacttctgctgtatacaaacaatgacccagctgagaatcaaatcaagaactaaacccctttgccaaagctgtgaaagaaataaaatactgggaatacacctaaccaaggaggggaaagacctctaccaggaaaactacaaaacactgctaaaagaaatcataggtgacacatggaaacacatcccatgctcatggatgggtagaatcaatattgtgaaaataaaatgaccatactgccaaaagcaatctataaattcagtgcaacacccatcaaaatatcatcatcattcttgacagagctagaaaaaacaatcataaaattcatatggaaccaacaaagagcccacagagccaaagcaagactaagcaaaaagaacaaatctasaggcatcacattactcaacttcaaaccttactacaaggccatagttaccaaaacagcattctactggtataaaaacacacatgtagaccaatggaacagaatagagaacccagaaataaagccaaatatagccaacctataattgacaaagcaaacaaaa

SEQ ID NO: 796144 - DNA, 527 bp, Homo sapiens
gcaaaaatatgggtccaggctaaattcccatcgaccaatgagtgaatacataaatatacaacagaatactacctgccttaaaagggaatgaaataattgcattcagagcaacctggatgtagttggagatgattattctaagtgaagtaattcaggattggaaaaccaaacatcgkatgttctcacttataagtgggagctaagctatgaagacacgaaggtataagaatgatataatggactctggggattctgggagaaggatgggaggggagtgaaggataaaagacaacacattgggtacagagtatgctgcttgggtgatgggcgcactaaaatctcagaaatcaccactaaaccaccactaaggcaatctgcagattcaacgcaatccttatcaaaataccaatgacgttcttcacagaaatagaaaaaaactattctaaaatgtatatggaatcaccaaaaacccagaaaaaccaaagctatcctgagcaaaagaatgaaaatggaggaattgctttacc

SEQ ID NO: 796145 - DNA, 527 bp, Homo sapiens
gcaaaaatatgggtccaggctaaattcccatcgaccaatgagtgaatacataaatatacaacagaatactacctgccttaaaagggaatgaaataattgcattcagagcaacctggatgtagttggagatgattattctaagtgaagtaattcaggattggaaaaccaaacatcgtatgttctcacttataagtgggagctaagctatgaagacacgaaggtataagaatgatataatggactctggggattctgggagaagratgggaggggagtgaaggataaaagacaacacattgggtacagagtatgctgcttgggtgatgggcgcactaaaatctcagaaatcaccactaaaccaccactaaggcaatctgcagattcaacgcaatccttatcaaaataccaatgacgttcttcacagaaatagaaaaaaactattctaaaatgtatatggaatcaccaaaaacccagaaaaaccaaagctatcctgagcaaaagaatgaaaatggaggaattgctttacc

SEQ ID NO: 796146 - DNA, 545 bp, Homo sapiens
tcacagaaatagaaaaaaactattctaaaatgtatatggaatcaccaaaaacccagaaaaaccaaagctatcctgagcaaaagaatgaaaatggaggaattgctttacctgactaaattatactacaaagctattggatactawtcagcaataattaagaatgagatcctgtcatttgcaaaaacatggatggacctggaggttattatgttaagcgaaataaatcagacacacaaagacaaactttgcatgttctcacttacttgtgggatgtaaaaaatcaaaacaattaaacccattttgatcaagagtaggttggttaccagagagactgcaaagggtagtggagggtgggaggaaagtggtgatagttaatgggtgcaaaattaaaatagttagaattaatgaataagacctaatatttgatggcacgatggggtgattatagtcaataataatttaattgtacatttaaaaattactaaaataatataattgtattgtttgtaacacaaagtataaatgcttgaggggctgaatacccc

SEQ ID NO: 796147 - DNA, 630 bp, Homo sapiens
ttaaaatctacatctgaaaagcatattaaaattgagtgctctcattttgtgtactaagcccttctgcttcatttaattatttgtacttacattttaactttgaaattattctttcattcattcattagatttcatgtatcattgaatgctccaattawttcttcttcacttcgtcaaatgtcacttaatgattaacatattgacctagtcaatgataatacttactgaccactatgtggtaaaaacgttaaaaatataaaattggtcaagaaggtgtatcaaatattacaaatgtactactttcactcaaatgcatgatattgcttttactgcacactctggcatttttgttgtcgttgttgtccctatactggatatctacaggaactagtccagacattctgacacatctgcaaacctgaatgtggaaagagttaacagcccatgaggatctcatgttttaatctcttgccacttttaagttcttgaataaatgatcatttattttaagcttattttaaatggaaaacaatctgtatttcaattcatattcttaactcctgcttaatttattacgattgtcaaactcataatctagttatttatcttatctgtattcccaccagacct

SEQ ID NO: 796148 - DNA, 630 bp, Homo sapiens
ttaaaatctacatctgaaaagcatattaaaattgagtgctctcattttgtgtactaagcccttctgcttcatttaattatttgtacttacattttaactttgaaattattctttcattcattcattagatttcatgtatcattgaatgctccaattatttcttcttyacttcgtcaaatgtcacttaatgattaacatattgacctagtcaatgataatacttactgaccactatgtggtaaaaacgttaaaaatataaaattggtcaagaaggtgtatcaaatattacaaatgtactactttcactcaaatgcatgatattgcttttactgcacactctggcatttttgttgtcgttgttgtccctatactggatatctacaggaactagtccagacattctgacacatctgcaaacctgaatgtggaaagagttaacagcccatgaggatctcatgttttaatctcttgccacttttaagttcttgaataaatgatcatttattttaagcttattttaaatggaaaacaatctgtatttcaattcatattcttaactcctgcttaatttattacgattgtcaaactcataatctagttatttatcttatctgtattcccaccagacct

SEQ ID NO: 796149 - DNA, 631 bp, Homo sapiens
tctaaggtgtgagtacatgcattagttttgatcttccagatatttacacctgggtgggactttgcatactgaatgtcaatgactcaggagcaagttagaaaactcttacagtggcaaggactgtgagacatatccaggaggagctggaggagtggactcggcaatccatctgtgacagaagtggtatccaaagttgggtgccttttggtatgatttttgatcctcacgctgcctcacttctgttaacttctgtatattttctaagactattcatgaatcatctaatgtccttcaaaaaatcattctgctaaaaaccttcaagtctattcctgtttgcaactatgaaccataactgacatatttggtcttcagagtgcartgagaaagataaaagataaagaaactcttaatactctttgatatgattttatgtgaaatattgtagttttattttaaacagttttgttcaactataacccgtctaacttcttacatttagtgagtttctcccctatttagagactgtgtattagttttcaatagttgctgtaacaaattgccacaaatttagtgacttaacacaaatttattactttaatttttgaaggaaagaaatctgaaatgcatctcc

SEQ ID NO: 796150 - DNA, 556 bp, Homo sapiens
ctagctatgtattttactataaactcaactgagacaagatcacctgcttgcttagattagcaatagtcactggttgcttccaaaatcaaattcaaactccacagtctaataaaaaaaatctaccaattgaattttatgtaatctaaaacaaacatggcaaatgataaatttagaacactagtttggttttgtctctttgttttgttktgttttgttttgttttttgagacggactctaccctttgatgcccaggctggcgtgcagtggtgcaatctcagctcactgcaacctctgcctcctggcttcaagcgattctcctgcctctgtctcccgagaagctgggtctacaggcatgcaccaccatgcccacctaatttttttgtatttttagtagagatgagatttcgccacgttggccaggctggtcttgaattcctgacctcaagtgatctacccacctcagtcacccaaaatgctgggattacaagtgtgagccaccgcacccggaatatatgcctaattttctacacagacaagttaattaataaacatata

SEQ ID NO: 796151 - DNA, 605 bp, Homo sapiens
aagaaggaaatccatacagaaacagtagctccatcatttatcagtgaggaaaagtgtatccaaataagaaagtgcctagaccactttttccacaattatggcttcatatgtcttgattacaacataaagattcaataaactgggactggtatatcataaccaccctctcccagtgaaataatgatgaaagaaacaagacacacagtatatccaacagtaatcctcatacaagataacttaggagacacactgtagacatctcaactactaccctataatgagrattcaagagaaagtccactgctccaaactaccaactctgtgctattattcttctcctctgtgagtccttattttcaaaatttcaacttttatgttagatacagggggtatatgtgtagtactattacctggctatattgcttgatgctgacatttggggtatggatcctgttacccaggtggtaaatatagtatccaacaggtagatttttccacccatgcaccctcactcccttcaccgtctagtagtccacagtgtctactgctcctacgtttatgtcgatgggtacccaatgtttagctctcacttataagtgagaaca

SEQ ID NO: 796152 - DNA, 628 bp, Homo sapiens
atcagatttcatgagaactcactcactatcatgagagcagcatgggagaaaccacccccatgattcaattacctccacctggtctctcttttgacacgtggagattatggggattataattcaagatgagtctggggtggggacacaaagcgtaacctatcacttggatagtcttgatccttatggatgtttgctggtgtctgggaatacaaaagttagatatttatttttgtctttgcagtctgggattgtttgtacccaatcttcttgagaagatgggtacaaagatgctaaggcagtaggattgattcagcccaagactttccrgtatttgaaaggacttgggtgttgtgatctagtccatatctgcattagtgggcaccccaagtccagtaagactggggttcttgccgacttctagaactactgcctgggcagtcttggataagatccggaagaattctctggattaccaggcagagactcttgttttctttccttctcccaaacaaacagagtctctctctctttgctgagccttctggagctggggatggagtgacaaatgcacccctgtggccaccaccactgggactatgctgggggtcagaactgacaccagtatatc

SEQ ID NO: 796153 - DNA, 604 bp, Homo sapiens
ggcactttggctttttgagttttcattgattctttctcatctttgtgagtttacctagctttgatctttcagtttgcgaggacctttttgttgatgctgttattgttgttgctttctgtttgtttttcttttgacattcaggcccctcttccatagggctgctgtggtttgctgggggtcactccagaccctattcacttgggtcccttctgcacctgcaggtatcaacagtggaagatgcagaatagcaaagatggctgcctgctacttcctctggctgggatcttcgtcccagaggggcaccaacctgatgccaacaggaatgctcctgtataagttatctggcaacccctgttggggtctcacccagtctggaggcaggggttctgggatctgcttaatgaagcattctggctgccccttggcggagcgggtgcgctgtgctgtggsgaatctcaatcatctggactgcctggattcctcagagctggcagggggaaagtctaagtctgctaatctgtgaatactgtggctgcctctcccactagaggctcagtcccagcgacatcagagttctgtccctaaacccctggctgcagttgct

SEQ ID NO: 796154 - DNA, 643 bp, Homo sapiens
aacagtaataatgataatgataataaattgtttactacttactgtcaggaattatggtttatgatcacatttaatactcccaacaaaactgcaagatgtaggtattactatcctcatttcacagatgaggaaactaaaggtaaaataacttaaatattttaccagctaaagcaagtagagttggaagtgagatatagacctgattcaaaattctgtttcccctaaaacatactgcttcttaataatatttttgtatcaccaaagtcactgtttaaagaaaaaatgtggaccaatcaaggcaacacaatgcgaccccatctctacaaaawataaaaaattagccaagtgtgatggtgcatgcctctggtcctagctccttgggaggctaaggtgggaggatcacttgagcccaggaggtcaaggctgaaaaaccatgatcgagccatggcactccagcctgggcaataaagtgagatcttgactcaaagaaagtgtaattacttacttgcatcaaatatgtatttaaaaaatagagtatgttttactcactcccctttggaatttaatatgcaaaagtattttaaaatatatttatgaaaagtatgctgatttgggcagtgattaacactccttcaataaaatt

SEQ ID NO: 796155 - DNA, 643 bp, Homo sapiens
aacagtaataatgataatgataataaattgtttactacttactgtcaggaattatggtttatgatcacatttaatactcccaacaaaactgcaagatgtaggtattactatcctcatttcacagatgaggaaactaaaggtaaaataacttaaatattttaccagctaaagcaagtagagttggaagtgagatatagacctgattcaaaattctgtttcccctaaaacatactgcttcttaataatatttttgtatcaccaaagtcactgtttaaagaaaaaatgtggaccaatcaaggcaacacaatgcgaccccatctctacaaaatataaaaaattagccaagtgtgatggtgcatgcctctggtcctagytccttgggaggctaaggtgggaggatcacttgagcccaggaggtcaaggctgaaaaaccatgatcgagccatggcactccagcctgggcaataaagtgagatcttgactcaaagaaagtgtaattacttacttgcatcaaatatgtatttaaaaaatagagtatgttttactcactcccctttggaatttaatatgcaaaagtattttaaaatatatttatgaaaagtatgctgatttgggcagtgattaacactccttcaataaaatt

SEQ ID NO: 796156 - DNA, 632 bp, Homo sapiens
agagcaagggctagatctgacatcctcagccatttaaacagtggttgaaccagcttcaaagcccacctcaaggttgtacataggcagagagacaaatcttaattaaccatgcatttctactcaacacagcagctagtcttgtacatgctgattagagactttgcctaactgtgaggattctactgcaatcctgtccaacttctgatctcaaatagtggtaccatctggccagggaacatgccctgtgrccagtctcagtcagacgtaattgtagtttcccacccagcagctcagcctgattgcagagctcagccagtagtcttgccagatagcagggcccagccagatgttccacctaatccgaaaacaagggcacaagccctgccatctatagaacctcaaagcaaacactgactgaacagagttgttaccagttggcccatccagaatcatagtctagactacatagtgaacgtcaatccctgccaaaaacatgtataaaagctgaaaaaggtggatgcccacttaaaggtacagacattaacacaaaaacaaaaagattacaaagactcatgaaatcatgaaacctctaaaataaaataacaaattcctcaaaataaacactaaagaaa

SEQ ID NO: 796157 - DNA, 632 bp, Homo sapiens
agagcaagggctagatctgacatcctcagccatttaaacagtggttgaaccagcttcaaagcccacctcaaggttgtacataggcagagagacaaatcttaattaaccatgcatttctactcaacacagcagctagtcttgtacatgctgattagagactttgcctaactgtgaggattctactgcaatcctgtccaacttctgatctcaaatagtggtaccatctggccagggaacatgccctgtggccagtctcagtcagacgtaattgtagtttcccacccagcagctcagcctgaktgcagagctcagccagtagtcttgccagatagcagggcccagccagatgttccacctaatccgaaaacaagggcacaagccctgccatctatagaacctcaaagcaaacactgactgaacagagttgttaccagttggcccatccagaatcatagtctagactacatagtgaacgtcaatccctgccaaaaacatgtataaaagctgaaaaaggtggatgcccacttaaaggtacagacattaacacaaaaacaaaaagattacaaagactcatgaaatcatgaaacctctaaaataaaataacaaattcctcaaaataaacactaaagaaa

SEQ ID NO: 796158 - DNA, 632 bp, Homo sapiens
agagcaagggctagatctgacatcctcagccatttaaacagtggttgaaccagcttcaaagcccacctcaaggttgtacataggcagagagacaaatcttaattaaccatgcatttctactcaacacagcagctagtcttgtacatgctgattagagactttgcctaactgtgaggattctactgcaatcctgtccaacttctgatctcaaatagtggtaccatctggccagggaacatgccctgtggccagtctcagtcagacgtaattgtagtttcccacccagcagctcagcctgattgcagarctcagccagtagtcttgccagatagcagggcccagccagatgttccacctaatccgaaaacaagggcacaagccctgccatctatagaacctcaaagcaaacactgactgaacagagttgttaccagttggcccatccagaatcatagtctagactacatagtgaacgtcaatccctgccaaaaacatgtataaaagctgaaaaaggtggatgcccacttaaaggtacagacattaacacaaaaacaaaaagattacaaagactcatgaaatcatgaaacctctaaaataaaataacaaattcctcaaaataaacactaaagaaa

SEQ ID NO: 796159 - DNA, 680 bp, Homo sapiens
gctcagcctgattgcagagctcagccagtagtcttgccagatagcagggcccagccagatgttccacctaatccgaaaacaagggcacaagccctgccatctatagaacctcaaagcaaacactgactgaacagagttgttaccagttggcccatccagaatcatagtctagactacatagtgaacgtcaatccctgccaaaaacatgtataaaagctgaaaaaggtggatgcccacttaaaggtacagacattaacacaaaaacaaaaagattacaaagactcatgaaatcatgaaacctctaaaataaaataacaaattcctcaaaataaacactaaagaaagggagatatgccaaatggtaaatgaggattcagattaattcccataaagtttagtaacttataagaatatacagataaaaccttaaatgaaawttggaaaacactacatgaacaaaatagaaaaagacaaaaaaataggaacaaaaaatagaaatcctacagattgataatataatgactgaaatgaaaaatgccatagaaaacttcaacagcaggcttactcaagctgaagggtcagtgaactcaatgacaaaacatttgaaaatatccaatcaagtgggcaaaaaaaaaattaaaaagaataaataaagcctacaggatttatgggacacattc

SEQ ID NO: 796160 - DNA, 513 bp, Homo sapiens
ttgaactatgtagaactaaaggaaaaagaagaaactaaagaaagtctgcacaacaaaataaactatcaacagagtaaacagacaaccaacaaaatgggagaaaatactgacacactatgcatccaacaaaggtctaatatccagaatctataatcaacttaagcaatagaacaagcaaaaaacatataactacattttaaaaatgagcaaaggacatgaacaaacaggtctttaaagaagacatacaaatggccaacaaacacaaaaaattcrtcatcactaatcttcagagaaatgcaaatcaaagccacaatgaaatactattacacaccagtcagcgtgactattgtaaaaatgtcaaaagatggcagatgctggtgaggctgcagagtaaagggagcacttatatactattggtagaatttaaattagtttagccactgtggatagcagttaggagatttctcaagatcttagaattaccgttcaccccagtaatcctattactaggta

SEQ ID NO: 796161 - DNA, 558 bp, Homo sapiens
gaacttaaacaatacaacaagtaaaaaacaaacaaccacatttaaaagtgagcaaaagacaggaacattcaagacatacaagcagcaaacacgcatatgaaaaaaatgctcaacatcactaatcatcagagaaatgcaaatgagataccatcagaatggctttcagaatggctatcattaacaattaaaaaaaaacaacagaygttggagaggatgtggagaaaagggagtacctatacattgttgattggaatgtaaattagttcagccactatgggaagcagattggagatttccaaaggacttaaaacagaattaccatatatatataccaagtgatgagattgctgggtcaatatatatctaccaaaaagaaacatgcgctcatatgtttatcacagatctagtcacaatatcaaagacgtgaaatcaacctagttgtctaacagtgatggagtggataaagaaaatgtagtacatatacaccatggaatactatgcagccatagaaagaaagaaaatcatgtcctttgcggcaacatggatgcagctggaggt

SEQ ID NO: 796162 - DNA, 599 bp, Homo sapiens
aaaaaaataactgaggaatgtgttcctagaaaatctgccttaaaagaaatgttaaaatgaaattcttatgataaaacaaagacatatatagtaatttgaatctacataaagaagcaaaaattaccagtaaaggtaattatgccattataaacaagataagtaatatctaaatccatattttctcctttcttctgttaagtaaagagcaattgtgtaaaaaaagcatataattgtttkgttgagcctataacatacagaaatgaaatacatttggtaataacagcacaaaggaggtgagtggaagaatagttttgttggaatgagaaaaagacactagatggtaacttgaatccacaaggacagataaagaaaacaaagagcaaataaacaatattaatattgcaaacatcataaatctatacttagtcttcttctttaagtttcttccttttttttttaaattgagatggagcttttgctctgttgcccaggctggagtgcaatggcgagatctctgctcactgcaacctctgcttcctggactcaagcaattcttctgcctcagcctcctgagtagctgggattacaggcacccacta

SEQ ID NO: 796163 - DNA, 558 bp, Homo sapiens
agggggccccgtaaaatgggaatcaaagcaacctgcatgtattttggagtcttttgtaagctggttatgaaataccgaaggagccccctgccctcctcccgcccatttcaagggggtaaactgtgtcgcatggtgggaggctcctgcctgccttaaccaaattaacaatctatgatttttaatttaaaaaaattgtgaggatggctcgggcggtggctcacgcctgtcatcccagcacttctggaggccgaggcgggcagatcacccaaggtcaggagcttgaaaccagcctgaccaacatggtgaaaccctgtctctactaaaaaatacaaaataagccaggcatagtggcaggcccctgtaatcccagctacttgagaggytgagacaggagaatcgcttgaacccgggaggcggaggttgcagtgagccgagattgtgctattgcactctggcctgggcaacaagagtgaaactctgtctaaaaaaaaaaaaaaaaaaacacactgtgagagataaaagcaaagggaatatgaacatgtctggggtcggggcaga

SEQ ID NO: 796164 - DNA, 616 bp, Homo sapiens
ccgcgcgggctcttgtccacgcggtgctgcctggccaccggcggccactcttctaacacaatgcctgcgcggaacactctgtggaggggctgtgctgctccacggcgggcgccgggacccctgctctgcccctggaaggccctggggttttggggtttgtctgatgcccaggcagccccagggcgctatgcagattggggctgcttctctcaatccaggggtgctacaggtcgtttgagagccctacagccgttccgtggtacgctggggggcccgcacccctgagtccagctccccgacatttgtgtttgacctcagccctgtccccmgccatcttcagccccactagacagttgacatcccaccaccaacattcttgccctattgaggcaacatgagaaaaagataaaccaaaaaacagaaagcgccggctgtgacagctcctccctgcctcccgcatccccccgcaggcgcttcatcgccaagctcttgttttctttcttcacgttaaaacaaattcaggaactgtccctgtctgtgtctcctgaaacatttcaaaccagctcatttgttcataattacaggagaaagaaccacccaggggtgatctgagtgt

SEQ ID NO: 796165 - DNA, 607 bp, Homo sapiens
tatggtaggccaggcgtggtgcctcatgcctgtaatcacagcacttcgggaggctgaggtgggaggatcgcttgaactcaggagttcaagaccagcctaggcaacatagtgagaccccatctctcaaaaaaatttttttttttttgccaggagtggtggcacatgcctgtagtcccagctacttggaaggctaaggcaggaggattgcttgagctgaggaggtcaagactttagtgagctatgattgcaccactgcactccagcctgggtaacagagcaaaacccagtttcaaaaattaagtaagttaaataagcttaagtaagtaaaaaggaaagaaagaaaagaaagaggaaaggaaaagaaaggagaaatgaagggagggaggaaagacaaggaaaagaaaacaaaggaaaaacaagggaaagggaaggggaaggggaaaggaaakaaagaaaaggctaggatgaaccctgcaaaataactagccagcaaagtgtcaaggttgtaagtgacaaagaaggaccatcgtgggttgcaagaggctaaggagacaggacatttaacacaacctgggttcctaggttggatccttgaactgaaaaagga

SEQ ID NO: 796166 - DNA, 611 bp, Homo sapiens
tgccaagaccagttgcttttcctgccattctatgcttccaatccaccccctgcccttctggggcactgccaggggtggaacacagacctctcctggacccatgcagcagccatcgctagacagtccacttttaacgccaagtkccagggcactccttctgaatcatgactcttaccaaggcctcccctactctgaaaactcttgtagctccctgctgtcaccaggtgaagggcaaaactcctcagcccagtgtgtgaagccgccttctctgggctgctggcccatgagtccttgagacaccctctgctttcacctcagccgcccccgctttgccatttatgcttcctgctgccaggcctttgcctcgcggctctcccctcgatgggtccaaatcttcccattgatcaagacctgttgcaaatgccaccttgtcaggtaaagcattctctgatctggtgccaggaggactggtagcctcggcttgttcctccctcatcccagggagtctgtacccatgccctaccctccctgtagcctgtgggctctgcgagcgtcttctatgggggcaggtggagggagctccagctgtgctctccttccctgtcagcctt

SEQ ID NO: 796167 - DNA, 613 bp, Homo sapiens
gggtagatctcatgttaaatgttcccatcacaataaaacagtatcactgggccataatccatgtttcagtggggttgttcctctagaggctgtaggggaaaatcagatcttctcttcttccagcttctggtgacaaccagcactccgtggctgtgaccacatcactgccatcttcraggccagcatcttccaatctctctgttctggatgcatgtcacagtctcctctgtgggagggacttccctctgcctctttcctctaaggatacatgtaattgcatttggagcccacccagataatacagaataatgtcccctttgaagatccgtaactcaatctcatctgcaaagaccgtttgctgccacataaagtaacatttcaagtttgaggagttaggatgcatgcatctttgggtggaataggggattgtggggctgaactcaagacctactacaaagctacagtaatgaagatatgtggtattggcaagtgaatagacaaacagatcattggaacaaaatagagaacctataaatagacccccacaaatacatcaaatgatctttaacaaaggaatttaggcaatggaatggagaaaccatagcgtgatcat

SEQ ID NO: 796168 - DNA, 613 bp, Homo sapiens
gggtagatctcatgttaaatgttcccatcacaataaaacagtatcactgggccataatccatgtttcagtggggttgttcctctagaggctgtaggggaaaatcagatcttctcttcttccagcttctggtgacaaccagcactccgtggctgtgaccacatcactgccatcttcaaggccagcatcttccaatctctctgttctggatgcatgtcacagtctcctctgtgggagggacttccctctgcctctttcctctaaggatacatgtaattgcatttggagcccacccagataatayagaataatgtcccctttgaagatccgtaactcaatctcatctgcaaagaccgtttgctgccacataaagtaacatttcaagtttgaggagttaggatgcatgcatctttgggtggaataggggattgtggggctgaactcaagacctactacaaagctacagtaatgaagatatgtggtattggcaagtgaatagacaaacagatcattggaacaaaatagagaacctataaatagacccccacaaatacatcaaatgatctttaacaaaggaatttaggcaatggaatggagaaaccatagcgtgatcat

SEQ ID NO: 796169 - DNA, 562 bp, Homo sapiens
cagaagttttacagacagcactagcacatgaaaagaagcttcacgttttatgtcatcaggaaaatggaaatcaagacaataatgagatgccagtacacacctatcagaatggccaaaaccagaacactgacaacaccaaatgctggtgaggatgtggagcaacaggaacgctcattcactgctgatgagaaggaaaaatggtacagccactgtggaagagagtgtgcagctttttcaaaatyttaacatatgtttaccataggctacggtttgaatgtgtcccttacaattcatgtcttggaaactgaatccccagtgcaacactgttgagaggtggggcttaatgagggtctttaactcatgagggttctgctctcatatacggattgacctcatgattgtgggagccggtttgttatcaggagagtaggttcatttatcaaaatgagtttggtgccatcttgctccattgctctcccagctcttgttgttttgccctccaccatgtgatgaggcagcatgaagcccttttcagatattggagccatgctcatggacttcc

SEQ ID NO: 796170 - DNA, 562 bp, Homo sapiens
cagaagttttacagacagcactagcacatgaaaagaagcttcacgttttatgtcatcaggaaaatggaaatcaagacaataatgagatgccagtacacacctatcagaatggccaaaaccagaacactgacaacaccaaatgctggtgaggatgtggagcaacaggaacgctcattcactgctgatgagaaggaaaaatggtacagccactgtggaagagagtgtgcagctttttcaaaatcttaacatatgtttaccataggctacggtttgaatgtgtcccttacaattcatgtyttggaaactgaatccccagtgcaacactgttgagaggtggggcttaatgagggtctttaactcatgagggttctgctctcatatacggattgacctcatgattgtgggagccggtttgttatcaggagagtaggttcatttatcaaaatgagtttggtgccatcttgctccattgctctcccagctcttgttgttttgccctccaccatgtgatgaggcagcatgaagcccttttcagatattggagccatgctcatggacttcc

SEQ ID NO: 796171 - DNA, 562 bp, Homo sapiens
cagaagttttacagacagcactagcacatgaaaagaagcttcacgttttatgtcatcaggaaaatggaaatcaagacaataatgagatgccagtacacacctatcagaatggccaaaaccagaacactgacaacaccaaatgctggtgaggatgtggagcaacaggaacgctcattcactgctgatgagaaggaaaaatggtacagccactgtggaagagagtgtgcagctttttcaaaatcttaacatatgtttaccataggctacggtttgaatgtgtcccttacaattcatgtcttggaaactgaatccccagtgcaacactgttgagaggtggggsttaatgagggtctttaactcatgagggttctgctctcatatacggattgacctcatgattgtgggagccggtttgttatcaggagagtaggttcatttatcaaaatgagtttggtgccatcttgctccattgctctcccagctcttgttgttttgccctccaccatgtgatgaggcagcatgaagcccttttcagatattggagccatgctcatggacttcc

SEQ ID NO: 796172 - DNA, 535 bp, Homo sapiens
agaggtccaaatatctacttgcagtttctacagaaagaccgtttcaaacctgaactatcaaagaaaggttcaacactgtgagttgaatgcaaacatcacgaagaaggttctgagaatgcttctgtttagttctgtgcggtttatcccgtttccaacgaaatcctcagagagtccyaaatatccacttgcacattctacaaatagtgtgtttcgaaactgctccatccaaaggaatgttcagctctgtgagttaaactcagtcgtcaccaagagttttctgtgaatgctactgtctagcttttatatgaagctatttcctttactaccataggcctcaaagcggtccatatctccacttgcagattctacacaaagagagtttccaaactgctctgtcaaagggaatgttcaactctgtgacttgaatgcaatcatcacaaagtagtttctgagaatgcttctatctagcttttaccgggaagttaattcctttttccaccacagcctcaaagccctccaaatgtccacttgcaga

SEQ ID NO: 796173 - DNA, 618 bp, Homo sapiens
gtaattcaacatggtttacaaaatattaagtaattccaaatttagaaaactctttccaaaattaaaatacagaatactaatgatcttgtcatgagaccagtattgccttcatatgaaaatcaaagcaatgaaaatataaaaatattatcctccccaaatagattacttacaactctaatgcaaatctcagtagattaccctgtacaatttgataagaaaatgctaaaatttccacgaggatgaaaaggtcrgaaatagacaaattttaaagaaggagcaaattgtggaataatttgttttactggataccaagatttttatagttatagcaattaagataatatggtgttttgatatagagaagattagcatggccccaacgcaaggatgacatgcaaatttgtgaagcgttccatgtttttgagtcatcatgaacagatgaataaagggctctttttgtctttttctgaaaaataataaaaaatattttcctttcttcaaggaagtgaatattttgtagctgaaggaatggcttccaaagagtatgaataagttcagttataaaagataccagtaaagaaaaataaaacaaaataaataaaatggaggaagcatacc

SEQ ID NO: 796174 - DNA, 588 bp, Homo sapiens
tatctgagtaattaaaggcttccaggtttagagttcttgccttcttgcaggctctccttatctacaaaaacactgccttacatatttgcttccactgtccttgacttttccagccgcaatccacaattacgttgctattttttattccaaattgactgctgtgtcaggtgagctatttaaaagatttttgctcatacgattcctactgtggcccaccytgataatatttgacagagccatttagtttgtatctgttatcttagtgccaaagtaaattccactcccctcctcatgcatctttcctggataaataaatccatctccattggattatgctcaccccttcattagctctctgaaaaagtgactccagaaaacaccctttacagtctcaggagctctctctctaactgcctttctgatgatcaatatctgcacaagaaatgaaaaattcagtcaagcccagccatgactgcaatgatgtgaatatgtgatattacatagatcaccaaatgttatacaaaattttaaaaatctgagaaatgcttcagatgtttttcctcagacatcactcattgaggctggaag

SEQ ID NO: 796175 - DNA, 629 bp, Homo sapiens
caactgttgcttcagctgctctcctatagcacatggcgggaggcgtgcatcccagtagctacctccccacttttggggagatgtggttccatccatgaaacctgggtacccgcctaccaggtcctggcctatcaggtggcagggtctggtcaaagaagggcatgtgtggtcttcagcaagggagacaggacggtggtgcagagmgtctagaccctcagggcaagtctcccccacacctgctcccgaggcagttgtctttgtgacctcccatccccctctgtttcatcctctataaaatgaggggctgagccccaaaataacaggcttctttgccatgatgcaaaactgctgaatctttctttctgacacacaaggcatcgagcagcctctgaaagaaccaaagccactagcaggcttcctgacttgggtttgtaggtactgaatactcccttgaaaaataaaaacatagaggcacttttctcctggctgtttattacagaacgaagaaaaaacacactggcttgaaacagacgccagatttcaaatgtagaggtgaaatacgaggtggcaattaaaatgtgattacagaaagtctggacactgagaaaagtttacaggacagtgggtgt

SEQ ID NO: 796176 - DNA, 629 bp, Homo sapiens
caactgttgcttcagctgctctcctatagcacatggcgggaggcgtgcatcccagtagctacctccccacttttggggagatgtggttccatccatgaaacctgggtacccgcctaccaggtcctggcctatcaggtggcagggtctggtcaaagaagggcatgtgtggtcttcagcaagggagacaggacggtggtgcagagagtctagaccctcagggcaagtctcccccacacctgctcccgrggcagttgtctttgtgacctcccatccccctctgtttcatcctctataaaatgaggggctgagccccaaaataacaggcttctttgccatgatgcaaaactgctgaatctttctttctgacacacaaggcatcgagcagcctctgaaagaaccaaagccactagcaggcttcctgacttgggtttgtaggtactgaatactcccttgaaaaataaaaacatagaggcacttttctcctggctgtttattacagaacgaagaaaaaacacactggcttgaaacagacgccagatttcaaatgtagaggtgaaatacgaggtggcaattaaaatgtgattacagaaagtctggacactgagaaaagtttacaggacagtgggtgt

SEQ ID NO: 796177 - DNA, 616 bp, Homo sapiens
acagacacttaaatatacatgacgataattgcagatagaaaccatcaaagacaaaccccaaatcaactaataatgtttacagatgttcccccccaaaccacagagccttacatcaaaacaaatactgaaaggctttaaaccaggaacagctcgccttaaccccacgagggtgcacacaagctgggctttttctctcggtctgaatggtaaagggaggaggatactctagctcctccaggtggattgctgagacagggctcggctcacacactgtctatgcgcctctcccaaatctggagaactctcccagcctcctggtaaagtgtctctgtggggcacttaacgataaaacrgcttctgctgtaaagctcattaggaaagagctagcggagactgaaaggttcgcaaaagagattaagaatcacacaaggcaataggatttttagtgaacatagaaataaatggccaagtggttttctatttggcatttgtcaacttgcacaacaactcttggtcatatccacattgctcattccattaaaaccataagcgactcagccacctagcttaacaaggtatcactggagcaaacaacacggtctgcatatttgtaaca

SEQ ID NO: 796178 - DNA, 596 bp, Homo sapiens
aaaggctggacagtgtcaggacaaggagttgaatttttaaacagggagccagggaaggcctcactaagaacgtagtattttagtggaaattgaagttaaggaacaagctctgtggatttttaagggaaaactttccaggcataggaaagttgaaattcaagcgcaaggcaactgtgactggagcggaatgagcaaggggaggagttagatgaggtcagaaaggttaccaggacccagatcgggaaggtccttgaaggttatagtaaggaatttggttttgagtgaagtggggagcccttggagggctttgaacacaggaatgacaaaactcggtattagagctgattttttgagaaaagccaggtgtggttgagagggagggtaaaacaatcaggtagaaggctactgtaaggatytagaggagacacgagggtgacctgaacaaagatttcagccctggtgaactccaatcggattctgaatctatactgagagagagtctgctggatttgttgaaagagcggataccgggtttgagagacagcaatcagagatgagccaggatttcgacttcagtaactgaaaagatgttttga

SEQ ID NO: 796179 - DNA, 643 bp, Homo sapiens
gttcctgaatggagttagctataggttcttgggatttaaaagagagcagaggggatgagtttttgaaacagtctgaggacccagctctgaaccactgctaagacactcaagccagtaaggctctcacagtgacatccttgcaccattttcctaaatataggtcatttaagattttatttttaaaatttaatgtaaaagatacacatttctgactaactttgcattgcctgggagagaataaaagagcagcggtttctcaccccctgctaatagggatttcactcagcaaaagtatgcactggacagacragagagagggaggaaggaaggaagatggaatggagagaagagaggagacagaagagaaaaaatggagggagggagttgagtggaagcttatttcctgagcatacagtcattctgaagatatcatgagcagcaaattaaacaatccttcagcaagaattttgacaaggaaatttcattagggatttaaatctctatggaagctcaagttgctgcattaagatatgaaaattgtgcaaatattgttccttagaataatgtttgccgcaggtcattgagtttcagtcagtggaatttagagtgataaatgtcctgttgaaaataactagagaaggga

SEQ ID NO: 796180 - DNA, 643 bp, Homo sapiens
gttcctgaatggagttagctataggttcttgggatttaaaagagagcagaggggatgagtttttgaaacagtctgaggacccagctctgaaccactgctaagacactcaagccagtaaggctctcacagtgacatccttgcaccattttcctaaatataggtcatttaagattttatttttaaaatttaatgtaaaagatacacatttctgactaactttgcattgcctgggagagaataaaagagcagcggtttctcaccccctgctaatagggatttcactcagcaaaagtatgcactggacagacgagagagagggaggaaggaaggaagatggaatggagagaagagaggagacagaagagaaaaaatggagggagggagttgagtggaagcttatttccygagcatacagtcattctgaagatatcatgagcagcaaattaaacaatccttcagcaagaattttgacaaggaaatttcattagggatttaaatctctatggaagctcaagttgctgcattaagatatgaaaattgtgcaaatattgttccttagaataatgtttgccgcaggtcattgagtttcagtcagtggaatttagagtgataaatgtcctgttgaaaataactagagaaggga

SEQ ID NO: 796181 - DNA, 610 bp, Homo sapiens
tcatggatctgtatgttcatatctctcacccaacttgggaagtctttagctattattttgtcaaataagctttatgtgcctttttccatctctttaccctctgaaactctcataatctgaatatttattcacttaatggtgtttaataagtcccatagactttctttttcttcactctttttcattttttttctctccgggttattttaaaagatctgttttcaagttcagacagactttttgctgcttgatctagtctgctgttgactcttacatgtacttcttatttcattcaccaccttcttcaactcgcgtatttctgttaggtcctttcttatatctatctctttcttaaatttcacaatcagattatgaattattttcttgatcttactgaattgtctatctgtatyctcttgtatatcatgaattccctttatatgattatgtattcatcttcaggcaatttgtaattttcatttatatggggttagctactgaggaactgttgtgtttctttggtggtgtcatgttcccttgctttttcatgtttcttgtgtccctgtgttgatatctgtgcatctagaggaacagtaactacttttaattt

SEQ ID NO: 796182 - DNA, 636 bp, Homo sapiens
accacttgctcaggtggcctctgaaagggtattcatggttatgatgtgagacatatctttggcatgttaggaaacttgcataaaataatgggcttgctgatttctttctttttctttctctctcttttttcctcacttttcctaatgtatctagtttttctctttttctttctctcttttttctgtttttatcccttctcttttcctatttatttcccttcattattttgtctcctttaatataatacttcttcccttcctccctctttcccttcctccctctttccctttccccctttcctcccttcctcccttcctctcttcctttcttctttctttcctttcttccttccttcctccctccctcccttctttcctkttttgctttcttttcatatgtggctgtggaatagctattcagtacaggttacaaagggcaaggtcttgcatatggtacaaagtgggtaaaaaaaacctctttaaacaatctaatcaaatgttaccagccatttagataccatagttcatcactgcaagagtggaggagggggtcaccataatgactattctctcctcgtagaacaaaatggtcccacggttacagtcactatccctgaaaacctatttcaatgtcta

SEQ ID NO: 796183 - DNA, 626 bp, Homo sapiens
ttggcagtggggtttctggcccttaatttagagtggaaacaccttatggttttctcttatcacattttatgacttagatatctcttatgtttatatcatctgctccctacatagtctgggcccggaaatgattatactcagagcatctctagcaagacagctagataagcagataaatgcagccctcaactttttattaatcaattgaaactacttttccatttaaatcaaagccctttaaaacttccgaattatattattaatgtccaggagaagatatgccatcagttaagtatcctctgctgcctattggctgctgtctacttattgtaaaaaaactagctatttctaagtgttgatgatttcagatttgagttcatcttgttaagtggttcagaacatcaactcttagcatacattccctactgctaaataaaaggtgacccttcttttaatcgtttttgtggtttctcrttagagaataggtaaataatgaaataactagagtcttcccttgctttcattcagttttgtgttgttctttccttccagttctttgcaactacacgatcaaaaacattttttttggtgcacattaaaaagactagagaaatgctttaatactt

SEQ ID NO: 796184 - DNA, 534 bp, Homo sapiens
agctttattttgtctggagaagactttatatctccttcatatttgaaggataattttgatggatacaatattcttgaatggaagttgtcttctttcaacactttgaaaatctcattctattgcctcctggcctgtattattttcattgaaaagtctgttgctaggcaaattggagctttttaatatgttatttgcttcttttctcttgcttcttttaggattctctttgtccttgacctttgagagcttcattattatatgtcttatgtagtcttacttgggttgaatctktttggtgttctcagaatttcttttacctggatattgacatctttcagaagttttggaaagttttctgttattatttctttgggtaagttttctacccctttcttttcctcagctctctcttgaacaccaataatttttagatttggttctttaaaataattttctatatcttgaaggtaatttttattccttttcattctttcttcttttttctcctttttgtattttcaaatagccaatctt

SEQ ID NO: 796185 - DNA, 503 bp, Homo sapiens
tattactgatcatctgaagtcttgtctcgactcatcaaagtcattctccatccagctttgttcggttgctggtgaggagctctgtttctttggaggagaagaggtgtctgatttttagaatattcagcttttctgctctggtttctccccatctttgtgattttatctacgtttggtctttgatgatgctgacgcacagatggggtttggtgtgcatgtcctttctgtttgttagttttccttctaacagtcaggaccgtcagctgccggtctcttggrgtgtgctggcggtccacgccagaccctgtttgcctgggtatccagcggaggctgcagaacagcaaatgttgctgcgtaatccttcctctggaagcttcgtctcagaggggcacccggccttatgaggtgtcagtcgcccccctactgggaggtgcctcccaattaggctactcaggggtcagggacccacttgaggaggcagtctgtccgttctcagatctcaa

SEQ ID NO: 796186 - DNA, 623 bp, Homo sapiens
tcagcactctgtgaaatggatcaatcaacaggatgtgggcggggccaaataagggaataaaagctggccacccgagccagcagcggcaacctgatcgggtccccttccacactgtggaagctttgtttttttgctcttcacaataaatcttgctgctgctcactctttgggtccgcactacctttataagctgtaacactcactgygagggtttgcggcttcattcctgaagtcagcgagaccacaaacccactggaaggaacaaacaactccagatgcgccacctttaagagctgttaacactcactgcgaaggtctgcggcttcactcctgaagttagcaagaccacgaacccaccagaaagaagaaactccggacacatctgaacatctgaaggaacaaattctggacacaccatctttaagagctgtaacactcactgcgagggtctgtcgcttcattcttgaagtcagcgagaccaaggatccactggaaggaataaattccggacacagacttctgacaaagttggttctcatagtttttgcttgtgttttatgtttttgtggggagtttgggagcttggagctttctattccaccatttttctgacatcactatgc

SEQ ID NO: 796187 - DNA, 666 bp, Homo sapiens
atctgttcttatgctcatacattaaatttttaaattcagatattatgattttcagttccagaatttccatttgactattttttttttaaagagacattgtcttatttttattacccaggctggagtacagtggcaggatcatagctcactgcagctttgagctcctgggctcaaatgatcctcctgcctcagcttcccaaggagctaggattataagtgtgtaccaccatggatggctaattcaaaatgtgttttatagacatagygtcttgctatgttgcccaggctggtcttgaattcctggcctcaagcaatcctcccaccttggcctcctgaaatgctgggattataggtgtgggcatgcattttttatagcttatatttctctgctaagatttccataattttatttattatgagcatattttcctttatgctggacatttttattatgcttgctttaaacatctgtatgtgaattttaaaatctggattgtcttgcttgggatcactttttgctcattgtcttttatcttaagaattagtttcacttttctgtttcttcaaatgtcaagtatttctaaattatatcctggctattatgaatatcatattcttgaaaccctagattgtgttatattcttctgattattattatttttttct

SEQ ID NO: 796188 - DNA, 638 bp, Homo sapiens
ttattatggggtataaagcaatgttatgatttacgaatataatgtggagtacttaaagctaattaacacatccatcagctcaaatatcactttttatagtgagaacatttgaaatttactctcatagcaattttgaaatgtacaatatgctattatattcaccatgctgtacagtagatatcaaaaaacctttattcctcgtgaataactgagattttatactttttgacatcatctcyttattacccccacctgcagcctgtgcagcccccattctgctctctgcttctatgagttcagttgttttatcttccacatgtaagtgaaaacatgtggtatttgtctttctgtgcttggcttatttcacttagcatagtgttctacagttctatccatgtcattgcaagtgacagaattccatttttaaaggctacatagtattctactctctctatgtactacattttctttatccattcatccattgataaacaggttgattccattacttggctatcatgaatactgctgcctgcagtgaacaagggagtgcagacatttctttgacaaacgggttttaaacttttggtaaatactcagaaatgcaattgccagatcatatggtgattctattttta

SEQ ID NO: 796189 - DNA, 638 bp, Homo sapiens
ttattatggggtataaagcaatgttatgatttacgaatataatgtggagtacttaaagctaattaacacatccatcagctcaaatatcactttttatagtgagaacatttgaaatttactctcatagcaattttgaaatgtacaatatgctattatattcaccatgctgtacagtagatatcaaaaaacctttattcctcgtgaataactgagattttatactttttgacatcatctctttattacccccacctgcagcctgtgcagcccccattctgctmtctgcttctatgagttcagttgttttatcttccacatgtaagtgaaaacatgtggtatttgtctttctgtgcttggcttatttcacttagcatagtgttctacagttctatccatgtcattgcaagtgacagaattccatttttaaaggctacatagtattctactctctctatgtactacattttctttatccattcatccattgataaacaggttgattccattacttggctatcatgaatactgctgcctgcagtgaacaagggagtgcagacatttctttgacaaacgggttttaaacttttggtaaatactcagaaatgcaattgccagatcatatggtgattctattttta

SEQ ID NO: 796190 - DNA, 588 bp, Homo sapiens
aactattggcagagaggtagtggaatgaatactcttaccatgctaatataatagaaatttccccctttcgaggacaatttagcacagtttagtaataacaaaagtgtatgccatgttatatagcaaatctctttttatctaccctcgggaaaggagtacaatgtgctcaagaaagcatataaaaggaattttttttgcatcagtgcgatggtagcaraactagaaagaacctgtttttgttagtaggagtatggctcaataatctatggtaaatggataataagggaatactatgaataactatgtgaccacaaattagataacttagatgatatatatctctagaaaaacccaaactaaactgtatcaagaagaacaagaacatgtgactgaacttataagtagtaaaagatttaattagtaattaacatattcccaccaagaaatgcttaggccagatgacttcactttttaatcctgtcaaatatttaaagaagagttaataccaggcctgtacaaactcttctaaaaaattaaagagttcacacttctcaattcattctatgagattagtgttactctgatacc

SEQ ID NO: 796191 - DNA, 603 bp, Homo sapiens
ttattttttcttaagttctttctagattctggatattagacctttctctgttgcatagttgtaaatattttctcccattctctaggttttctgcttactccattgattctttccgtccgcccttcctccctttctctctctctgtctctccttccttcctttctctctttcctttctatctttcctacctttctatctctcttttcttttctcttttcctttcttttctttctgtgtctcactctgtcacccaggctggagtgcagtggcaccatcttgactcattgccacctctgcttcccgggctcaagtgattctccagcctcagcctcccaagaagctggcactacaggcacgagccaccaatgcccagctaattattgtattttayttattttttatagagatggggttttgccatgttgaccagggtggtttcaaactcctgagctcaaagtgatctgcctgcctcgtgctcccaaagtgcatggattacaagtgtgagccacagtgcctggccagttgataattagccatgaagaacctctttagtttaatcaggtcccacttgtcaatttttgttgcaattgcttttgaggattt

SEQ ID NO: 796192 - DNA, 519 bp, Homo sapiens
aaatcctgttttttctgtcttcaaagtatatccaaaatataattagctctctcaacctcaattcctgccacccagatccaagccatcatcatatctagcctagaattttgcataatagcttcttaattggtctcactgctacatactttcttcccttcaatgtatcctcaacaaaatagcagagagaacttttcaaaacataattgtcagtcaagatagagtaacaagaatcagattagtcctcctgcctcaggcaagaggaaaccagaaaaatgttaatcaggttttcaggcattggaaaacagatgacacagaaatacaaactctgaaagatgacaacaamgtaagcactaattatttcatcagtttatttcctgtaagcagtgtctaggctacatctgagacaggagtaacccattcagggtctgcggtcttgctgaactaaggagatgcaaatagaaacctggtaagaaaacttgaaagggttagaaatttgcagcacagattactggagaatag

SEQ ID NO: 796193 - DNA, 619 bp, Homo sapiens
atccttagaatggtattatattagtagtcaggctagattagcttagacctaagattgctatgaaccacatctaacaaagatagaatgaagccttgaaagaattcaattaattgtaagtaactcatctggaagccagagcaaaatccaacactattttgtagatasaataaattctactaaccaaaaggtaaatctccctggtatgcaaagaagcaggaaaatatgacccattactcatattaacgagaaaaatatcaatcaacagagaaatccagaaataatagagatgattgaactaacatccagggatgttaaagcaattataaattcttatatagaatacatacttttcatgtgtttaataagctagacaaatatattagcatgatgaggagaaagaataaaaaagtgctagatgaaacttgtgaaggaaaaaaatgcaataactgaaatgaaaaatacactggatgctattacaagcaagttagattttgcagaaaaaaatcagaaaactttaaaacatagaaaaaattatttgaattgaagcacagagagaaaaaaagtgaaacatgaacataagtagagcatgagtgagctatgggacaatattaagctacaa

SEQ ID NO: 796194 - DNA, 601 bp, Homo sapiens
actcaaaatccagaggcaataaaagtctattaaatttgattacattttaagaatgtgcataacaaatgcaccataacaaaatcaaaacatgagtgacaaactggtagaaaatatttacgacatataacacagagaaagracagatctatctaatatatgaagaactcttaaaaatcgaggggcaaaagcccagactttgccactatgcaatatatccatataacaaaatcgcactcgtaccccttaaatttgtacaaataaaaaatattaagggacataccaggcaggaccagagataggcaggcagttcaataagcctaatgtacagagtgggtcaaagtagtgtactatcaagctggaggtttagagtatgcttccctggtttaagaggagagatatgtttagatctgcagtttagaaagaacactctgttgacttggtgaatgtgaattagaaaagcagggagaggggttcagaaacttaaagtaatccatctgagagataatggtgcttcaaaataaggtagtgactataaggattaagaaaaaagataaagacttattaaagaggcagaatttactggatttataaaccaaattat

SEQ ID NO: 796195 - DNA, 425 bp, Homo sapiens
taagtgataaattaaacataaagcaatattattggttttaggggattctctctcatttatctttgtatttcccatagaccccacctgcctagaacggtcttacagttgatagtaaatactgatcaaatctgtggtaactgttttctgcttgacatttttcttttattttttttcttctagtctgccaaaggctgttaatcttcattttaaaagtmtcatttaaatggttagagcagcttctccttgcttaatgtttattttgcttaatctctctctctctcttatttttttttacttacaaacaaacaataacccatgcttcataatacataacactttcttgtaaaatttcttgagaactccccctatctgcactcccaagcccttataagagtttcattcagtaatagaatctcagtccctat

SEQ ID NO: 796196 - DNA, 500 bp, Homo sapiens
gcttcataatacataacactttcttgtaaaatttcttgagaactccccctatctgcactcccaagcccttataagagtttcattcagtaatagaatctcagtccctatctggcttgactgtgatgagaattacccaggctgctgaacctattccaaaattgttgctgatctccagaacttccaccagaattaagaacagtcaattaacaacttggtcaaacatgttggatttaatcatggtgaatcatagccactgaaaagacatttaatttgatctgaaayactttcacaagaatatcaaatctcaggcataatttgtgattagcaactctataaaaataaagagtaattggaaattttaaaagactaagtgtcaaaggaccagacacccaaaagtgtaactgccaattctgttgatgagtcttagggaaataggcattctcattgctactgagaatgcaaaccggtacaactctttgaggaggaatttggcaacagct

SEQ ID NO: 796197 - DNA, 611 bp, Homo sapiens
cccaggctgctgaacctattccaaaattgttgctgatctccagaacttccaccagaattaagaacagtcaattaacaacttggtcaaacatgttggatttaatcatggtgaatcatagccactgaaaagacatttaatttgatctgaaatactttcacaagaatatcaaatctcaggcataatttgtgattagcaactctataaaaataaagagtaattggaaattttaaaagactaagtgtcaaaggaccagacacccaaaagtgtaactgccaattctgttgatgagtcttagggaaataggcattctcattgctactgagaatgcaaaccggtacaactctttgaggaggaatttggcaacagctaacataacctttcaactcagaaatcccagttctaagaaactatcctcgaatatgaactttttttacaattcaaaaatacatatgsacaaagttattcattgcagcatagtttgtaattgcaaaatattggaaacaacttaaatgcctgaacatagaaaagtggttaaataaattatgcaacatcagctcagtggcattccatacagctgtaaaaaaaaaaaaaaaaaaaagaataaggaagat

SEQ ID NO: 796198 - DNA, 611 bp, Homo sapiens
cccaggctgctgaacctattccaaaattgttgctgatctccagaacttccaccagaattaagaacagtcaattaacaacttggtcaaacatgttggatttaatcatggtgaatcatagccactgaaaagacatttaatttgatctgaaatactttcacaagaatatcaaatctcaggcataatttgtgattagcaactctataaaaataaagagtaattggaaattttaaaagactaagtgtcaaaggaccagacacccaaaagtgtaactgccaattctgttgatgagtcttagggaaataggcattctcattgctactgagaatgcaaaccggtacaactctttgaggaggaatttggcaacagctaacataacctttcaactcagaaatcccagttctaagaaactatcctcgaatatgaactttttttacaattcaaaaatacatatgcmcaaagttattcattgcagcatagtttgtaattgcaaaatattggaaacaacttaaatgcctgaacatagaaaagtggttaaataaattatgcaacatcagctcagtggcattccatacagctgtaaaaaaaaaaaaaaaaaaaagaataaggaagat

SEQ ID NO: 796199 - DNA, 643 bp, Homo sapiens
aattaggctgtcttcactgtttgctatagttgtgtcagaggctaaaatttcctctagtgtccttatttttgcctcccctgttgtctttagcttttcctagaattttttctttaaataagatttgaaacttgcaggtttttttttttttcagctgcaataccctgttttatggaaccctattggtgtggtggtaaattgtgaaggaaggaaaattctatagtcctatgattaagtctcagtcttttagtgaacctgtgtscctaggctgtgagcttcacaagtgctatttcactccctaccccttaagtgagacaggaaggctaaaggggacaggagtcgggtatttcccttctaccaggttggttagaattgtaaaatgatgcagccactgtggaaaacagtatgacattttctcaaaaaatttaaacatagaattactatatgatccagcaattctacttctgagtatatacccaaaggaattgaaagcagggactcaaacagatttgtatgccaatgtttacagcagtattatttataagagccaaaaggtggaaaaagtctaaatgttcattggcagatgaatggataaacaaaatgtgatgtatatataaatggaatattattcaacctttaaaatgaa

SEQ ID NO: 796200 - DNA, 624 bp, Homo sapiens
aaaaagacgattaacatcattgctcattagagaaatgcaaactgaaaccacaatgaaatagcactagamacccactagaatagctcacattaaaaagggctgaaaatatcaaatgttggcaagaatgcagagcacctcaaattctcataccttgctagtgagactataaagtagttcaacaatgatatggtttggctgtgtcaccacccaaatctcatcttgaattacagctctcataatccccaggtgtcttgggaggtacccggtgggaggtaattgaatcatgagggcggttttttcctgtgctgttctctgatattaaataagtctcacaagatctgatggttttataaagggcagttcccctgcacatactctcttgcctgctgccatgtaagacgtgcctttgctcctccttcaccttccaccatggttgtgaggcctccccagccatgtggaactgagagtccattaaacctctttttctgtataaattacccagcctcaggtatttcttcatagcagtatgaaaatggacgaatacaaacaactttggaaaaatatttagcagtgtctactaaaactaagtacatatatactcacgactcggcaattccaagctta

SEQ ID NO: 796201 - DNA, 608 bp, Homo sapiens
caagaggaaggtgattgaatcatggggacagatttccccctccatgctgtcctcatgatagtgagtgagtgctcacaatatttggttgtttaaaagtttgtgatggctgggcacagtggctcacgcctgtaatcccagcactttgagaggccgaggcaggcggatcataagttcaggagttcgagaccagcctgaccaacatggtgaaaccccgtctctactaaaaatacaaaaaattagctgggtgtggtggcgcacacctgtaatcccagctacacaggaggctgaggcaggagaatcgcttgaacctgggaggcagaggttgcagtgagccgagatcatgccactgcayagcagcctgggtgacagagcaagactccatctcaaaataaataaataaataaacaaaagtttgtggcaccttcccctacctcttcctcctgctattgccatataagacacgcctactttgccttcaccttcagccatgaatgcaagtttcctgaggcttccccagccatgcttcctgtacagcctgcaaaatcatgagacaattaaacctcttttctgtataaattattcactttcaggtatttatttataacaat

SEQ ID NO: 796202 - DNA, 513 bp, Homo sapiens
aggcccagctaatttttgtatttttagtagagacgggatttcaccatgttgtccaggctcgtctcaaactcctgacctcgtgatccgcccacctcggcctcccaaagttcccagttttttttttttttttttttttttgagacggagtcttgctctgtcacccaggctggagtgcagtggcgggatctctgctcactgcaggctccrtcccccaggtttaccccattctcctgcctcagcctcccgattagctgggactacaggcacccgccacctcgcctggctaatttttttgtatttttagtagagacggggtttcaccgtgttagccaggatggtctcgatctcctgaccttgtgatctgcccgcctcggcctcccaaagtgctgggattacaagcgtgagccaccgcgcccggcctgatcccagtttttagcaccaaagctcatggactctatctctgtactccaccatattcctttccttgaattctgaatcataattaaccaagtt

SEQ ID NO: 796203 - DNA, 674 bp, Homo sapiens
gtttgaacttctacactcattgataagaagcttctggactgtggaatgaatctagctcttgatgtcattcggaatgattaaaatgtcagtaggaacctatgatgacagaaatgtaacgcaagctttattagtaataacctaataggacttaatatgagaaatgcttttagatgagcatcagtttatattttaggcaccattggtttctcagtgtctttctcacgtatttcattgagactcattatgtccctccctttgtaatcattctgttgtctgaatggagtttgtatgtgttatgtctatttctatttatttatttagatggagtcttgctctgttgcccaggccagagtgcagtggcacgatctctgctcactgcaacctccrcctcctgggttcaagcgattctcctgcctcagcctcccgagtagctgggactacaggcatccaccaccatgcctggctaatttttgtatttttagtagaggccaggtttaaccatgttggccagactggtcttgaactcctgacctcaaataatccacccaccttggcctcccaaagtgctgggattacaggtgtgagctaccgtgtctggcctattttttttttattaatcatggcctagaaataaaatatcacaattattatcacatattataggacttgtatgc

SEQ ID NO: 796204 - DNA, 622 bp, Homo sapiens
attcaccagaagtgaaaagtctagttataataggatatagaggctattagtctggtttccaaagacccctaagaaacttacaagtgtcttaaaaggtacttgaaaaaatttgtacatatgatgatattttgggagatgtatatgactcataacttgaatcagaatcccaatgttgtcctctgacctttcactctaacttagggatggaaggcatagaaggatcggaggattttcccctggtttttcaattaggtkttctcttgctgtggaaattgcacactcaaaggtagttaatgtctcttggagatcaggaagcaggcttaatgcctcccttccctatctacatcaccaaagaacaaaaagcaagatagcttagcatgtctctaagcactgcatttcacgttgatgcttcgttaattttatccaacttgccctgaatgacttatctagtgttaggaacaatattgtttgtgaaccctctggcatctactattacatgaatacagcaaaaatctattatatgaacacaatttcagttattgttttcttgacagagagcaggaactaagtaaataattccaccagttacagctatataacatctagcaggtcacaaaatgat

SEQ ID NO: 796205 - DNA, 622 bp, Homo sapiens
attcaccagaagtgaaaagtctagttataataggatatagaggctattagtctggtttccaaagacccctaagaaacttacaagtgtcttaaaaggtacttgaaaaaatttgtacatatgatgatattttgggagatgtatatgactcataacttgaatcagaatcccaatgttgtcctctgacctttcactctaacttagggatggaaggcatagaaggatcggaggattttcccctggtttttcaattaggttttctcttgctgtgraaattgcacactcaaaggtagttaatgtctcttggagatcaggaagcaggcttaatgcctcccttccctatctacatcaccaaagaacaaaaagcaagatagcttagcatgtctctaagcactgcatttcacgttgatgcttcgttaattttatccaacttgccctgaatgacttatctagtgttaggaacaatattgtttgtgaaccctctggcatctactattacatgaatacagcaaaaatctattatatgaacacaatttcagttattgttttcttgacagagagcaggaactaagtaaataattccaccagttacagctatataacatctagcaggtcacaaaatgat

SEQ ID NO: 796206 - DNA, 566 bp, Homo sapiens
atagaggctattagtctggtttccaaagacccctaagaaacttacaagtgtcttaaaaggtacttgaaaaaatttgtacatatgatgatattttgggagatgtatatgactcataacttgaatcagaatcccaatgttgtcctctgacctttcactctaacttagggatggaaggcatagaaggatcggaggattttcccctggtttttcaattaggttttctcttgctgtggaaattgcacactcaaaggtagttaatgtctcttggagatcaggaagcaggcttaatgcctcccttccctatctacatcaccaaagaacaaaaagcaagatagcttagcatgtctctaagcactkcatttcacgttgatgcttcgttaattttatccaacttgccctgaatgacttatctagtgttaggaacaatattgtttgtgaaccctctggcatctactattacatgaatacagcaaaaatctattatatgaacacaatttcagttattgttttcttgacagagagcaggaactaagtaaataattccaccagttacagctatataacat

SEQ ID NO: 796207 - DNA, 499 bp, Homo sapiens
gtctgaattaggaactacatgttaaattatgtatgacagagaaatagcaagcaggaagaaaaaagatgaaaattagctaaaagtccagtggtttgaactgtgtggtagacagagcctgaggaagaagacacaagatgcatgagaaatggctagtccctgtcttcaaggagcccacagatcaagaggtgatcaataggtccaaaatcaataggtgatcaataggtcaaaaatcaataggtgattttggacaacaatgtctccttcaacactgcaactcccactgttgcacctactacaaataataaacatagcacccttttcccaatttcccaccaagattcagtaccctatgggctygttttacaccctaccctgcctttcgattcttccctccccttacataaaaatgtctttaaaggaaaggacacatcagtcaatgttcaaagccaacgttattatacctgataaataaaagtattaacagtaaagctaaaaacac

SEQ ID NO: 796208 - DNA, 621 bp, Homo sapiens
atgagacgagggtagatgataaattacttaatgggtacaatgtatgctacttgggtgatggataccctaaatgacttgacttcaccactacacagtctatgcacataacaaaattgcatctgtaccacataaaggtatacaaataaaaaataattcttgaaagttttgcacatatattaaatatatttgagcattcaacacwtgctttctgcattgcttttacatcaggagtcagcacactttttctatagggggccagacaataaatgctttaagcttaatagatcatagggtctctgttacaaccactcaattcagccactttagtccaaaagcaactatagacaatatataaaaatgaatgcagctgtgttctaataaaattttatttacaaaatagacagcaggtcagatttggctcacagatcacaatttgctgacccctggtctatacaatgtcagtgtcaaccatagtgaagtgttctctaccagtacaatctatagattaaaaaaatatatagggtaatgcttgtaaggtctgcttcctcttctatttgaagtctcataccaaatttctggcttcagaagggagatgtcagcctatgctcactatcctcataa

SEQ ID NO: 796209 - DNA, 621 bp, Homo sapiens
atgagacgagggtagatgataaattacttaatgggtacaatgtatgctacttgggtgatggataccctaaatgacttgacttcaccactacacagtctatgcacataacaaaattgcatctgtaccacataaaggtatacaaataaaaaataattcttgaaagttttgcacatatattaaatatatttgagcattcaacacttgctttctgcattgcttttacatcaggagtcagcacactttttctatagggggccagacaataaatgctttaagcttaatagatcatagggtctctgttacaaccactcaattcagccactttagtccaaaagcaactatagacaatatataaaaatgaatgcagctgtgttctaataaaaytttatttacaaaatagacagcaggtcagatttggctcacagatcacaatttgctgacccctggtctatacaatgtcagtgtcaaccatagtgaagtgttctctaccagtacaatctatagattaaaaaaatatatagggtaatgcttgtaaggtctgcttcctcttctatttgaagtctcataccaaatttctggcttcagaagggagatgtcagcctatgctcactatcctcataa

SEQ ID NO: 796210 - DNA, 570 bp, Homo sapiens
atatatatatatatatggctaaagaaataactttaatgcatttagaaacctcaaaatcaaaatttccctgctggcactgcagggtcccctccctttggctggccctcctctcagaacactgagcactcccgggcactcaaagtctctcttgcccacatgtgggtaggagggacacagggagaccctgcattgtccctaataattgcaacggtgccccttgtgcctgtcagtccgggtgaggttgccccatgggtgcagtgtggaagtggtggygaccagaagctgagagaggcctggccagcaaatgggactaggctggactccctggaagcagcagggagatatatatatatacacacacacacacatatatatatacacatacatacatacatatatacatagatatatatacacacacatatacatatatatacacacatatatacatacatatatatatacatacatatacacgtttatatatatatatataaagtctgtgtgtacatatgacaacatataaacatttaggcccacacaacactatttaattgcatagttaaagtg

SEQ ID NO: 796211 - DNA, 536 bp, Homo sapiens
actggctccaggccagtccccacggttccaggctccagtggccccagggtccatgcccccaccagtaaatcctcgtatcaggccagaccctaaggaccaaaactccaggatagcctctgcagacccaggcttatctcagggtctatttagaagactcatgtgtagccttactctagcaccaggtcagtacccacagaagttcctgtggacccaggcttcagttcagactttatggatacaggctccagccagcctcaaggaaccagtctccagacacaccattacagacccaatcaaaacttctggcacagtttacccaggctctaaggccatctctgcataccygggtgccaagcccactcacctattgaccttggtactgggccagcctgcctgatgactccagcagcaagtccatctatgaatcatggcagatagtctgcccataacctctggacaagctgaatgataaagggctttcccagacaaagccagtctgcaaagactgaaatgagtccctacttcttcaaatgtga

SEQ ID NO: 796212 - DNA, 624 bp, Homo sapiens
cctaatctccagtctctccccttttcccagaaaaatttagcagtcctcggttccgtatactcagggttccctgataaaatgtatggtggggactggggagaagggcatgctcattctctcagaagcagcatattgcagtggaatgagcacaagtttccaaatgaagaatctggtacttgtaggatttcatggatgtatctcgtgtccaggcaacttcaaatcaaaccaccatattacgatagtcttcaagaatggagatgcatgaggtggcaatggagatgaaacagtttgttatttatggctccaaatcacattaacttgtgtagctcaggaggatactcacttgatctattcaatatataccttctgatatgtattcaaaaaatttctggttccagatgtttytgattttctggttggggtgtgattacgtgatacctttgtctaaggtgctcagcaatctccctggaggaagataatttgtttcattcactctgaagattgttcaggaaaaataacattcagacttccatccatatctgacaggcccgaggggcctgcaacttctctaatgatgcctttaaatgattttaatgttgtgataaacacaaactcagtacggaa

SEQ ID NO: 796213 - DNA, 597 bp, Homo sapiens
catgtcttttgcagggacatggatggatctggaggcaatgatacttagcaaactgattcaggaacagaaaaccaaataccacacattctcacttataagtgggagctaaatgataagaacttatgaacctgaagaaggaaacaatagacactagggcytacttgagcaggcaggatgggaggagggagaggagcagaaaatataactattgggaactgagcttagtacctgggtgatgaaataatctgtacaacaaacccccatgacacctgtttacctaagtaacaaaccttcacatgtacccccgaacctaaaataaaagttaaaaaaaaaaaaagaacttgattaggctttgcttactatcaggtggagggactgcacttaaatggcattttttaaaaagctttattaatgtatcactggcataaaataaactacacacattgaaggctatgatctgataagttttgatgtgtatatgcattcatgaagaaaataattacaatcaagataatgaactatctgtcactccccaaaatttcctgtgtccctggctagaaccacaaagttgaatagaagtggggagaacagacgctg

SEQ ID NO: 796214 - DNA, 607 bp, Homo sapiens
catggtgaaaccccgtctctactaaaagtacaaaaattagccgggcgaggtggcacacgcctgtagtcccagccactcaggaggctgagataggagaatcacttgaacctgggaggcaaaggttgcagtgagctgagatcgcgccaccgcactccaacctgggcagcagagcaagactccatccccatcaaaaaaagaaataaaattgatttttgtatacattgattttatatcctgcaaccatgctaataaactcacttattaattccagtagcttttaaaataaatttcatgggggcccacgacggtggctcatgcctataatcccagtattttgggaggccttsgtgggtggatcattcaagtccaggagttcaagaccagcatgggcaacatggtgaaaccccttgtctaaaaaaaaaaaaaaattagctgggtatggtagcgtgcatctgtaaccccggctactagggaggctgaggtaggagacttgatcgaattaatgagattgaggctgcaatgagctataattgcaccactgcactccaacttgggagacagaatgagaccctggctcaatcaatcagtcagtcgtttccattggatt

SEQ ID NO: 796215 - DNA, 548 bp, Homo sapiens
ttactcacgttgcttataatacacagtacccagcaaacattaagtattcaaaccattcagagcctgggccctgcaaatcatgcacaagtccagaaaactttcccagatttctccaatagtattttggttgtttaaccctgataacacagagatgtgttgtgttgtttattttttgttacattttgtatatttgatgttagaccaaacctctcctggtttatcgactttataacattwgttagtttaaaataaacaataataccgattacttatcatttctgttagaatttgcatgtttatcatagcttaaattgtttaaaatgatagattcaggattcagatttcttgcattcttcattccattctagtgtttctcaaactttttggacagtaacacatattaaaaagtagactttgcattgtgacccagggtacacacctatattcttatgctagaagtaaagttcctcaaaatgcatcttctaacattcagtgctctgcagtgttttttattctgttttgtttcatttttaagttactgatcaaga

SEQ ID NO: 796216 - DNA, 418 bp, Homo sapiens
gaaaatagggtgatataacccaagtactgaaagaaaaaaaaatgccatttaagaatactattcctagaaaaattttcctttaaaaatgaaggagaggctgggcatggtggctcacacctgtaaccccagcattttggaaggctgaggtggaaggatcacttaaacctaggagtttgagaccagcctgggcaacatggcaaaacctcatctccacaaaaaaaatttaaaaattagccaggtgtggtgacacactcctgtagtcccagataccaggraggctgaggcaggaggcttgcttgagcagaggtgtttgaagttgcagtgaggcatgatcacaccacagcactctagcttgggcaacagagcaagattctgtctataaaaataaaactaaagggctgggcgcagtggctgatac

SEQ ID NO: 796217 - DNA, 525 bp, Homo sapiens
tagaattcatccaaggagggcagtaaatctggagaacggcttcgtcagagccgcagtttggaagaactacctttgcagccttttgcccacgcgggggtgcagaaggggctggtcagtgccaaggtggtgctgcccggacccgcccctccatccatagaatatgtcgtgctgcagtggtgagcggccagcagccatygcaaaggtggagactgagcgtcaaggagaggtccaggaaggagggaggccggctgcccaggtgcagggagcggctactccgtggtcccgtgaatggctgctgtcagcccagcacccaggaacagaggccatagggagggactcagatgtgatttctggtgtctgtttttgtgtttttttccaggtcgcgggacaagaaagatctctgtgttggacacagactagacgacaggagctacgtgttcttctgcatggggaccaccacacccagtgctgaccaccacacgatgtgccagtacctggggatgacacaggggcccccgggcttca

SEQ ID NO: 796218 - DNA, 525 bp, Homo sapiens
tagaattcatccaaggagggcagtaaatctggagaacggcttcgtcagagccgcagtttggaagaactacctttgcagccttttgcccacgcgggggtgcagaaggggctggtcagtgccaaggtggtgctgcccggacccgcccctccatccatagaatatgtcgtgctgcagtggtgagcggccagcagccatcgcaaaggtggagactgagcgtcaaggagaggtccaggaaggagggaggccggctgcccaggtgcagggagcggctactccgtggtcccgtgaatggctgctgtcagcccagcacccaggaacagaggccatagggagggactcagatgtgatttctggtgtctgtttttgtrtttttttccaggtcgcgggacaagaaagatctctgtgttggacacagactagacgacaggagctacgtgttcttctgcatggggaccaccacacccagtgctgaccaccacacgatgtgccagtacctggggatgacacaggggcccccgggcttca

SEQ ID NO: 796219 - DNA, 545 bp, Homo sapiens
tatagaagcatgtgtactagaggacgcatctgtaaacctgctggtatggtttggctctttccccacccaaatctcaacttgaattgtatctcccagaattcccacgtgttgtgggagggacccgggggaggtaattgaatcatgggggctggtctttcccatgctattctcatgatagtgaatacgtctcatgagatctgatgggtttatcaggggtttccacttttccgtctttctcattttctcttgccgctgccatggaagacatgccttttgcctcctgccatgattctgaggcctccccagccatgtggaactgtaagtccaattaaacctctttttcwtcccagtcttgggtatgtctttatcagcagcgtgaaaacagactaatacacctgctaatattttcccgtctagaaaaactcaaattctagctttctccataccactcctcatggtcttcttcataagcaatgcagtgtttccagaggctatttgaacagcagtagtatcatgacagataatagtttttaaaaatgaaagct

SEQ ID NO: 796220 - DNA, 593 bp, Homo sapiens
ccacggctgggaagcagaacccctagaaggcctgaagtttctattcagaaaacgctaagactttctcttctagcgctccgtcttgcaatacctgctcttacctctcatcttctcttacactgggcacaggactaggcagataacctgcagccagcctccttcagggtctgtggcctctcacccctctctagcacctcagggttgccttggcgggggtcgcccatccaagggaaggactggatttacctgcaaacctttttgggaaatctaaaatcttggactgggtcacaaatgacaggagtaaccagcgcaaatgtctcagagtggcccataaacaaaactttagaaggcccagggcacaaaaggccattctcagtaaacaaaacaagggatgatgcaaccgctttagctatgcccttgctgagtccgaaggtggatgtccaggctattrtaccacaaaatgtccagtataaaaacggctttcttcgaatttggaatggatttatttggctaactgcctccaccggacatttaaaccagatagcccccttacgctacaaacgacagaacccctcccttgaccaccgacttta

SEQ ID NO: 796221 - DNA, 515 bp, Homo sapiens
ctcacagcagccttgagctcctgggctcaagcgatccagggatcctcccgcttcagcgtctcgagtagctgggagcatcaccaggcccagcttggtttttttttttttttttttttttttgggagatgggagtcttgctttgctgcccacatttgtctcaaactcaagtgatcytcctgccttggcctcccaccatcatgttgggattacaggtgggagcccctgtgtctagcgctaaagcaaaaggaaaaggagaaagaacaaaaaggacaaatccctgcactttggtttctaaacagccacctctcagtgctctgtgcacgctggcctccctgcatggagttctttctcccttctttttcaccttgaatttctatttatttttttaaagacgtacatcaaatatcatctccttccaaaagttttccataactaatcttggcagccagctgttcctccttctgaaaactataataagggctaacattatggagtgcttactgatacactaactg

SEQ ID NO: 796222 - DNA, 515 bp, Homo sapiens
ctcacagcagccttgagctcctgggctcaagcgatccagggatcctcccgcttcagcgtctcgagtagctgggagcatcaccaggcccagcttggtttttttttttttttttttttttttgggagatgggagtcttgctttgctgcccacatttgtctcaaactcaagtgatcctcctgccttggcctcccaccatcatgttgggattacaggtgggagcccctgtgtctagcgctaaagcaaaaggaaaaggagaaagaacaaaaaggacaaatccctgcaytttggtttctaaacagccacctctcagtgctctgtgcacgctggcctccctgcatggagttctttctcccttctttttcaccttgaatttctatttatttttttaaagacgtacatcaaatatcatctccttccaaaagttttccataactaatcttggcagccagctgttcctccttctgaaaactataataagggctaacattatggagtgcttactgatacactaactg

SEQ ID NO: 796223 - DNA, 502 bp, Homo sapiens
tcacagcagccttgagctcctgggctcaagcgatccagggatcctcccgcttcagcgtctcgagtagctgggagcatcaccaggcccagcttggtttttttttttttttttttttttttgggagatgggagtcttgctttgctgcccacatttgtctcaaactcaagtgatcctcctgccttggcctcccaccatcatgttgggattacaggtgggagcccctgtgtctagcgctaaagcaaaaggaaaaggagaaagaacaaaaaggacaaatccctgcactttggtttctaaacagccacctctcagtgctctgtgcaygctggcctccctgcatggagttctttctcccttctttttcaccttgaatttctatttatttttttaaagacgtacatcaaatatcatctccttccaaaagttttccataactaatcttggcagccagctgttcctccttctgaaaactataataagggctaacattatggagtgcttactg

SEQ ID NO: 796224 - DNA, 502 bp, Homo sapiens
tcacagcagccttgagctcctgggctcaagcgatccagggatcctcccgcttcagcgtctcgagtagctgggagcatcaccaggcccagcttggtttttttttttttttttttttttttgggagatgggagtcttgctttgctgcccacatttgtctcaaactcaagtgatcctcctgccttggcctcccaccatcatgttgggattacaggtgggagcccctgtgtctagcgctaaagcaaaaggaaaaggagaaagaacaaaaaggacaaatccctgcactttggtttctaaacagccacctctcagtgctctgtgcacgctggcctccctgcatggagttctttctcccttytttttcaccttgaatttctatttatttttttaaagacgtacatcaaatatcatctccttccaaaagttttccataactaatcttggcagccagctgttcctccttctgaaaactataataagggctaacattatggagtgcttactg

SEQ ID NO: 796225 - DNA, 618 bp, Homo sapiens
acgttcactaactgctttacagaataatcaaaaataaaaataaatttacacataaactcctgttgcaagacaaaatataatttacaaaaggtttttaagcagaaggaagagatgggttaattaccaagaagcaagagtaattgcattagatttctcattggcaatattggatttgtagacaggggggcaaagcattaaaaaaggtgaaggaaaccaaaccttcaagatcaactctgatactcataaaaaacggagggtgaaattaagrcatttaggaaaaacaaagacttaggaaatttaccgttttacactctcacttgaaaaactattatcatcatttgcaaagaggaagaaaattaatcctagagacaagggtaaaatgtcaaaggaacagtaatcaaatatattagtaaaccaaattggcatatctaaatacattttaattaatgtcaggaattctcacctggaatagtgctatttccctagagggcatttggaaatgtgttaggtctttgttagttgtcaaaataacagaagggtgctactagtacttagtacctgcgatgcaggaaataccttcaaacatagtgtcctattatcctgaatggatataatgtt

SEQ ID NO: 796226 - DNA, 614 bp, Homo sapiens
tatttgtcccaaaccacaaaatgatgtgtaagcacttcaagaaaatctcaggagtaaaagaaaatggttcctacttgcaaaaaaaaaaaaggatctgacaacttgtcaccttggaaaggttccatttcattttttgtgaactttgttttttaagtgtgaagcagagaaatcttcatacaccacagtgcatacacctcgccttatatccacagactaattcacaggaggaagtatgcatacatcaaatgaccaatgtgcaaggttgaasggcttgaaacactgtcttcttacagttttatttattttatatgagtttagaaacagagaattcttcttaatgtataataaaaatatgaaaaccccactgatactgttgatgtgttttcatgtaaccatgcaagaacagcttcttaatcagccagccactgttgcagcccgaatttaacaattgtatagaaccatacagcatgcatcttcttgcatgtttgcttttgttgggccaaatcaagccactgtatactacttactttcatctgacttctaaaaatccattttttatcttctccctcaatgtctcgagtctattactgtaaaacaactaaaatcatatggta

SEQ ID NO: 796227 - DNA, 577 bp, Homo sapiens
ctaattcttatggaaagactctactttaaaatgatttccttttttgatttatcattttgcatttatcaccagaggagttataccaggatgccagaaaaaaacaagctctttgaatttttagatcccttagctaccattgtaaagcctccttaaaagataaagacataaagactattacatattttataatgaaaatataatgttaagaaggaacacctttgatagattctgttcattttaaatttcttttattttaccatatttatcttagatatttccctgaaatctacatgatttattttttctgtctcactgaatttgttttagaaagcctgaacgtaattgcctgggtttatatccaacagtatktttgcaagtttttgggaagtaacaattgtgtcacttctcttttaattcagcattatttgtggtatcaaacagctaagtttcagaagaaaacgatgatgtgttctactctggggatttagggactccaaaatatagtgaagaatatgcctttgtattaattatggctttgacattgctccagatgtacataatacctgatgtgtaagcc

SEQ ID NO: 796228 - DNA, 579 bp, Homo sapiens
tatatcatgagtggcaaatgtaatgatgcaaataagtacagtatttgaatgtaaatgaactggcattatttttaaaagtaaatgtaattatggaaattgacctttggcactgtaatatcactaaaagcctttttttaattaaaaaaatgatttrtagattcaagagatatgggaatatttatcgtgaaacttgaagtcaggttttaagaaatggtccatagctgtctcctttttccccttcagagatgatgacacaaacacaaaatactccaggctaattgttttagtagtaaatttaaatatttcagaagttactgaaaaagtatttgaacagagaaaagcatttctactttcaagcaggtttggcaaaatgatccaatgacagtttaagctgtcatggatcagaacagagaaagggctagaccaggagatgttccaccattgagaacacatattccaaatgttctaaaaagtgtcttgaaaccaagtcacacaaatttcagaggactttgaaaataagggttgcaatggtaaagagaaaactggttataaactggagaacaatgtaggaagtgagga

SEQ ID NO: 796229 - DNA, 615 bp, Homo sapiens
atattctgtcaaaaataattgtaacagagcagagatattattacatttcgggtgatggagaagtggtacttgttatttcttagtgaggggacacatagagtcccttctgttgattgtaacatactgctgagaagtcatattttaaaaagtacaagtacaaaaccgaacatctgaactgaaactagggcactctaaaatcccccattctatcattggtatcagaggcagtgtttctagagtggatacaaaaatagcataatagcaagcgtcacacaatagcatgggggcccaaagttattgcccgacatgtatctctaaaagatgttttcstgtggtaaaaaaggagtagatgcattacatagaactgaatttttaaatcatcttgtagagaaaagaaagcacagttaactttgttaatctttgctgaatactttttctagagatcaaggcagaaattaaaattgcatgccttgcctaggaatttattttagagtcagcatttcctaaaagccaacattcatttaaaatgtaaaattttactcttctttctccagatctttaaaatttctgttgtattaaatgttttaggagaatagctctccttggggagtcata

SEQ ID NO: 796230 - DNA, 563 bp, Homo sapiens
tgacttctgctccaataagcatatcttgtttgctatatctctcaacaaggtgtatggattactttgggagaaaaacttgagatataagaatgacttgtgaattgttcattgcactcttcaagtacattaaatatgcctcaagtgcaggaaatgtccattgtttatctttatgtccccaaaatattttatactgactttcacacatagaaagttttcaatacatatttgattgatgtgcttattaaaataagccatggaagataactgagattcttgtttaaagaacatctgcagtggtttcacaggacaacattaaataataccaacattatcttcttacaatggcttactgctttgaaacacttycacaacccttaaattaatgcagtttggcaattatagtatgaggtagacagggattattagtttcatttagccgatgaattaggctagaattttcacttcaattttaacaaggcaaaaatttaacattattgccttctaagaatgtattgctcagtgtaataaacttattaactagaagaatttgtgataagaccaaa

SEQ ID NO: 796231 - DNA, 669 bp, Homo sapiens
taatgtttactttaattttttaaatcaataatacataaaatgaggtgatatggtgaaacagttacatgattttcttaaataacagtaagacaatagcattaaaaaatagtcctggattctcactttctaggaaacattttctaccatttaaaatatttatcctggcatacacctttatacttgtaagtaagccatgtttgtcttttaaaaagtatgctttgcatattaactactaaattcaaactcaaagattttactctcctctcttacactgagatcaaacacgcacatagacttccctctccctttgatggtattgaaatagccatgtcataattttaacttaaatcaacactaagcatttatattattatggctattgaataatatgtcattaaatcacactagtggcctatgaatatctattcttcttttaaaatgtactttctctagcattagcaataggcctgttgttttcattttgcttaattataattatctagtatatatcaatcatccattccccaaatctcyttccaatatgtatctcaatttgcaatattttcaaatcatcatcttttttccccattggaattattcttctggatttaacagtctgctcactctccaggactgctaccgggctaatgtcttagtatatcccttcac

SEQ ID NO: 796232 - DNA, 655 bp, Homo sapiens
taaagtaagctagagaaaagaaattgttattaaaattgtaaggaagagacaatactatatttactattcattaagtggacgtggatccatcaaggtcctcatccttgtcatcttcacattgagtaggctgaggaggaggaggaagaggggttggttttgctgtctcaggggtggcagaagcacacaaaaaaattagtttataagtggacctatgtagtttaaacccgtgttgttcaagggtcaactgtacacacacacacgtttagaggtccatttacacacatgtattgcatggctattttacaaattaaaagtactggactttggtttttaaacaaatcacccatatccatccaggttagaggaagtctgcagtcagtagcagttcacctggagaaaggcatttttgttttttgttgcttgctaccccaacctgagttagtaatctaagtttactrtcagaaaagtgaatgcttgctaaggctgaataactaaaacaggggtgtgatattttcactacgttcttgacaattcagaaaacatttagagttctctattcaattcctgggagctgcattttaaaataaagttgtgtccagagccttatgacaaggcaaggatgtcttgttaaatgatgaatgttttcaggaaacca

SEQ ID NO: 796233 - DNA, 692 bp, Homo sapiens
aaggttgcctggaaaaaaacaaaataaaataaagctgcacacattattgtttaattcgtaaaaggttgaccctactttcaaggtaactgtcagttccaaacttagagacacaagtattatgttcacttctctaagagcactgttcttcattcaagcttgagatgatcgctccataaatgtagtgttgaaatctatacttgtggaaacccaggtcattgtatatctgttttcttcatatatatttattatttattgtgtcagggaaaatacatgcactatctcatttaattttctcaaaaattgcaggaggtgggtgctaatgttattcgcattgtacagatgaggaaactgcagctcagaggaatatgcccagtgtcttggagctcaagactggtagagatgggattggagcagagtctctgactccagaatatggggtgtttgatcatttggctatggtgtctctgggacatgccaccacataccaagacctactcaagtgcaaggtctttaaatgctattggcagttgaggccatgttttaagtcctcttagaaagacactatattgtgcttcataagatgatacaaaacatacatgagcckgttccttttatgggaaaatctgaagttaacagtgagattggggagtggggagggtttaacactttaacagctgtcctgctaagtgtga

SEQ ID NO: 796234 - DNA, 635 bp, Homo sapiens
aaacttttcctgtggagggccaaataggaaatatttgaggctttgcaggctgtatggtttctgtggcactgcttgtctgtcactgtagcacaacagcatccagagatggtacattaatgaatgggtgtggctgtggacaaaggaaaattcttacaaaaacaggtggcccagggtcacagtttgcaggcctctggtatcctatacccatatgcaatatagctctgtgatgaggggctgagggcttagtatcaggggagcctgggttccaattttggacattcyagccctagttgtagggtctatttgtgcaaattgtagaacatctttctgcctcagttccctcatctgtataataggactaataataaccagatcccagtgttgggattagatgagctaaggtgtgtaaaaaacatggccagatcctgtgcacggcagaatctgtaaaaacagtggatgctacgttacttgctatcatgagccaagtttcttgtttgtctttcatccttctgtgtgttagtccattgagtaaatacactttaatctgcttcattatttctcccagactgtctactttaaatcattcaacacccttgaagcaccgaggatgaagaaaagaagctgattttcatttt

SEQ ID NO: 796235 - DNA, 635 bp, Homo sapiens
aaacttttcctgtggagggccaaataggaaatatttgaggctttgcaggctgtatggtttctgtggcactgcttgtctgtcactgtagcacaacagcatccagagatggtacattaatgaatgggtgtggctgtggacaaaggaaaattcttacaaaaacaggtggcccagggtcacagtttgcaggcctctggtatcctatacccatatgcaatatagctctgtgatgaggggctgagggcttagtatcaggggagcctgggttccaattttggacattctagccctagttgtagggtctatttgtgcaaattgtagaacatctttctgcctcagttccctcatctgtataataggactaataataaccagatcccagtgttgggattagatgagctaaggtgtgtaaaaaacayggccagatcctgtgcacggcagaatctgtaaaaacagtggatgctacgttacttgctatcatgagccaagtttcttgtttgtctttcatccttctgtgtgttagtccattgagtaaatacactttaatctgcttcattatttctcccagactgtctactttaaatcattcaacacccttgaagcaccgaggatgaagaaaagaagctgattttcatttt

SEQ ID NO: 796236 - DNA, 635 bp, Homo sapiens
aaacttttcctgtggagggccaaataggaaatatttgaggctttgcaggctgtatggtttctgtggcactgcttgtctgtcactgtagcacaacagcatccagagatggtacattaatgaatgggtgtggctgtggacaaaggaaaattcttacaaaaacaggtggcccagggtcacagtttgcaggcctctggtatcctatacccatatgcaatatagctctgtgatgaggggctgagggcttagtatcaggggagcctgggttccaattttggacattctagccctagttgtagggtctatttgtgcaaattgtagaacatctttctgcctcagttccctcatctgtataataggactaataataaccagatcccagtgttgggattagatgagctaaggtgtgtaaaaaacatggccagatcctgtgcayggcagaatctgtaaaaacagtggatgctacgttacttgctatcatgagccaagtttcttgtttgtctttcatccttctgtgtgttagtccattgagtaaatacactttaatctgcttcattatttctcccagactgtctactttaaatcattcaacacccttgaagcaccgaggatgaagaaaagaagctgattttcatttt

SEQ ID NO: 796237 - DNA, 632 bp, Homo sapiens
acacgactataaagaaatacctggctgggcgcggtggttcatgcctgtaatcccagcactttgggaggccgaggagggtggatcacgaggtcaggagatcgagaccatcctggttaacacggtgaaaccccgtctctactaaaaatacaaaaaatyagccgggtgcggtggtgggtacctgtagtcccagctactcgggaggctgaggcaggagaatggtgtgaacccgggaggcaaagtttgcagtgagccgagatcgcgccactgcactccagcctgggtgacagagcgagactccatctcaaaaaaaaaaaaaaaaaagaaaagaaatacctgagactgagtaatatataaagaaaaggggtttaattggctcacagttctgcaggttatagaggaagcatgaggctggcatctgctcggcttctggggaggcctcaggaagcttacagtgatggtagaaggtgaagggaaagcaggcatgtcttacatggctggagcaggagagaaagaggaggtgctacacagttttaaacaaccagatctcacgagaactcactcactatcatgagaacagcaccaagagggaaatccaggcttgtgatccaatcacctcctaccaggccccacct

SEQ ID NO: 796238 - DNA, 431 bp, Homo sapiens
ctactgttttttttttcttttttttctttttttgaaacagagtcttgctctgttgtccaggctggagtgcagtagcacaatgggctcactgcaacttctgcctcccgggttcaagcaattctcctgcctcagcctcccaagtagctgggactacaggcacrtgccactacgcccagcaaatttttgtatttttagtagagacagggttttgccatgttggacaggctggtcttgaactcctggcctcaagtgatctgcctgcctcggcctcccaaaatgctgggattatagtcatgagccactgtgcctggcctccattttagaaggataactctgatcacagcaagagtgaaggcagggaccagggaagaggctggtacaggtgtccacgtggaaggggtgtgggcctgagccctggcagggaaatttaa

SEQ ID NO: 796239 - DNA, 626 bp, Homo sapiens
atcccacagctaataggaggaagaggctggattcatgtcaggctgtgtcaacaccagagcccctttttcactccaccattaggttatctctcccgacttccagctcattctccaaggagcccccttggctccttcgcaacttcctatcctgatatccagggacatttccacattaatctcggtttcctttgctatttatgttgttaccttgcccatgctgtatcacaagggttattagtcagaaattgtgtgtcagtggttatgaccctaaaggaaacattccggaactcccaccaacccttccctgatctcagctcatgaataatagactatttatcagygggcagaatacaacctattgttggagtataaaggaacagcgaccaggttagaaggcctccgtacaagatgtgtgcctcaaggacctgctgagtaagctggtgaacacgtggcttttggaaaacaggatgacgccagcccaaattgctgacaggtcagccccgcttgctgtgaactgagtcttctaggaacagggatgcattgccccagagagagtcatgcattcacctaatgacaagtaaaaatgaaaattgtagcagctaccatctgagtgctccccatgtgcc

SEQ ID NO: 796240 - DNA, 626 bp, Homo sapiens
atcccacagctaataggaggaagaggctggattcatgtcaggctgtgtcaacaccagagcccctttttcactccaccattaggttatctctcccgacttccagctcattctccaaggagcccccttggctccttcgcaacttcctatcctgatatccagggacatttccacattaatctcggtttcctttgctatttatgttgttaccttgcccatgctgtatcacaagggttattagtcagaaattgtgtgtcagtggttatgaccctaaaggaaacattccggaactcccaccaacccttccctgatctcagctcatgaataatagactatttatcagtgggcagaatacaacctattgttggagtataaaggaacagcgaccaggttagaaggcctccgtacaagatgtgtgcctcaaggacctgctgagtaagctggtgaacacgtggcttttggaaaacaggatgaygccagcccaaattgctgacaggtcagccccgcttgctgtgaactgagtcttctaggaacagggatgcattgccccagagagagtcatgcattcacctaatgacaagtaaaaatgaaaattgtagcagctaccatctgagtgctccccatgtgcc

SEQ ID NO: 796241 - DNA, 605 bp, Homo sapiens
ctcctcccccaacccaggttcaggggtgacaggagtggctgcagtggtggtgggtggtggtgatggcaactgctataggagccaaagggtgggtcactggcttcagaggtcctggctttcagtagaatatcgggctgcagccaatatgtacatacaggggcagggcagctgcactgcagaaccgtgctgaagaagggaggcctatttttcaaggagcacctgaggcaggcagtcattgcagtgcatggcccacccactcctctctactgcagctgttgtatctgtctttggggcatgcaaaagtgtctggcctgtctgctccctccctgatccagctgcagcagccggcaccaggcttctcagcattccaaagcctgcggaattctaggtaggcttsagcagtacctatgcactgtctccaggcagcaccctgtattagactaaaggcctgggaggagtagagggggatctcccatggctaggattgtacaagtccatggcagaattgtggaaccccaggggtctctcactcaccacttctctgtatcaggaatcttctcttggctccatgccagtcccagctcagctggctgtacagctttgct

SEQ ID NO: 796242 - DNA, 643 bp, Homo sapiens
tgaacttccatggttggcaatgcttctcttgtgttgcctcacatcactgatgggagaattaagtgctgtccatgcaactctgctcagagagacaactagagacttgttcctagttcctcttcgactccaccctaggagtcttttacctttgctgattttattttacttttaattaattaatttatttttaaagaaatagtgtctcactccgttgcmcagggtggagtgcagtggcacagtcacagcccactgcagccttgaactcctgggctcaggctattctcctgccacagcctcccaagtaaccgggactacaggtgccaccatgcctgatttaaaacttttttttttttttggtagagacaaagtcttgttttgttgcccaggctggtcttgaactcccggcttcaagcatttctcccgtctcagcctcccaaagtgctggaattacaggtgtgagccactgcacctggcttctttgctaattctgatctttatccttttgctgtaataaaccataaccatcagtatacataacagtttttcagagttctgtgagtccttctagtaaatcatcaaacctgagggtgggcttgggaaccctgacatctgcatatgtatgtgtatacattgtagtgagtag

SEQ ID NO: 796243 - DNA, 594 bp, Homo sapiens
taacatatttataaattaatttacactcaatttacaatatgtctttactccaggaacatgttggcttctgaattatagaagttgcatgtctctgagaagacttgtgtgtgtgtgtgtgtgtgtgtgtgtgtgtgtgtgtgtagcctgtatattgcatcttatttttktttataagtacagaagcttttgtagatataaatgaagtagttttcaaaatgtttgctaactggttgtcatacaggaaagtcaccatgcagaactctctagctataatcatttttccgtaatccttttggcttttcaagacacacaattctataatcagaaaataaggacaattttaccttaatttcccaagattcgtgcttctttttaaactaaactagtcacaacttaaaggaaaatgttaaataaatattgtgaaatatggtataatcctacaatggaatattattcggccataaaaataatgaagtactgataaatactacaatcatggatgaaccttgcaaacattaagtgaaggaagccagtcacaaaaaaacaaatattgtatgattgcatttatacttaagtccagaataaagaaatcta

SEQ ID NO: 796244 - DNA, 624 bp, Homo sapiens
gtcattcaggaggaggacactgctgtgctgcccggtcccgccggaccattccagttcaaagagtacctgctgcagttggtggaagtgcaaagccttttctgtttgataagaaactggccaagatacccggcttatggggagcactggatgaccacagccacctgtggacttggcaatccactggttcctgcacccgggtaagtttccgggcagagctgcatttattgacggctatgaagaccsgtcagtgaaagtgaaactgcatcttggcatcttggcattggccactgagctctccacttatgcactgtgtatgtctctcccatgcctaaggacattctgggggtggatgttttgcacggcttggcagctgtgccgtcacagacttcatggacccctggacaatggaaccgggacagtccactgagagccagaaagagtttgccttcgtgggaagatgacaacgggctttctcagtgttgctgcagggcttgcatagccccatcatatatcatggttttgttgatgatattatattaacctctgatttgcttgcaggtttagaagaggcagcacccctcttgcctgggattgggataatgcagctgagacggccttcctggt

SEQ ID NO: 796245 - DNA, 624 bp, Homo sapiens
gtcattcaggaggaggacactgctgtgctgcccggtcccgccggaccattccagttcaaagagtacctgctgcagttggtggaagtgcaaagccttttctgtttgataagaaactggccaagatacccggcttatggggagcactggatgaccacagccacctgtggacttggcaatccactggttcctgcacccgggtaagtttccgggcagagctgcatttattgacggctatgaagaccgrtcagtgaaagtgaaactgcatcttggcatcttggcattggccactgagctctccacttatgcactgtgtatgtctctcccatgcctaaggacattctgggggtggatgttttgcacggcttggcagctgtgccgtcacagacttcatggacccctggacaatggaaccgggacagtccactgagagccagaaagagtttgccttcgtgggaagatgacaacgggctttctcagtgttgctgcagggcttgcatagccccatcatatatcatggttttgttgatgatattatattaacctctgatttgcttgcaggtttagaagaggcagcacccctcttgcctgggattgggataatgcagctgagacggccttcctggt

SEQ ID NO: 796246 - DNA, 672 bp, Homo sapiens
ttatacaggtacagataccagaagtggtttggtaaaagcttccaaagaaaattgagagcatatgtggtttgtttctactggctgggacaaaaagcttataaacctacacagcattaagggtagaattttgacattagaaattccacctctgcccacctagaatgaagtgtgtgttgcagaaatggcatttggacctatatgcctgcatataattgaatgaagagcatgaaattcaaagactgtgggtgagttactactaatagagatggtttgcttaaagtgccccaattcctacccattcaaagtacagaatgaatgtgagactttcaaagcctgtgctaaataaatctttcacctcttgcagctgtagggcttcaaaacaagctttgaccccaggattgaatttaaattcctttcagatctgttatgttaaagttacaaagaaccrtgattggagaggcatgggaacctcggaactgaagggtagatatgtaggatgactggaattgatttaaaataatctaaagcataaacttttgctttcccacccctgtgaagccaattcttatgcccattatgccccaggggagcttattaaaaatattcaaagggaaggataattttccaacagactaccaagaatttgctcattttttattggaggaaaaagca

SEQ ID NO: 796247 - DNA, 550 bp, Homo sapiens
aaattgtaaatttaatcacactttatttgaaaatatatagtaagaggagaaaaagaaaaaataatagaagggatgaagaaagcttacataatttttgaaacagcatcaaaagagaaaatgttcaaatcatttatacrttagacctactaagactgaataatgaacaaatagaaaatctgaacagacaaataagtaaggaaattgaatcaaaaataaaaagtctcctgtccaagaaaagccctaaacctgatggtttcactgttaagtactgtcaaacttttaaagaacaattaatacaaattcttctcaaacaggtcccaaaaattaaagaatagagaataattccaatcacacttaacaaggccagcatcatccttatagcaaatccaggtaaagacactaaggaaaacaaaattataggccagtatttctgatgaaaacagatgcaaacattctcaacaagataccagctcacgcctgtaatcccagcactttgggaggtcgaggcaggcagatcatgaggtcaggagttcgagaccagtctggccaa

SEQ ID NO: 796248 - DNA, 647 bp, Homo sapiens
aaaagattatatatattaataacaatgttacctgtggggtagatgaggtggaagtggataaataagaccatggacgggagcaagatttttcactgtctacactttgtttatataaaaacaacttataagacaaacaaaggtattatctactcaaaaattaaatattaaaaactattaatagaaaaaagtgggatttgtagaaatgcatgttttcaggttgaagggaggaaaaatatataaatgcttttgtttgtgggatgttgtcataattatgtttgggttaaaagaaaattagaaatgtacacaaatacttattggaagctagctatatacattacactgtttttttacattgactgaatattggaagcattccaaatactttgatatattcacataataaaagaccattgaagttaaaatgatgttgtaaaataatacataaaatggtattaaatatatggaaatgcattcatggtatrttaaggtagggcatggatagggaagcaaatgagatgatagtatgtaaagtaggaatctatatttttaaagtaaaaattttcaaagcatgcatacaagcttatatgtacatatagagaaagaactggaaggatattcacctattaatgatagtgcttttctcaggg

SEQ ID NO: 796249 - DNA, 563 bp, Homo sapiens
aaataacttaatgattctaatactaaatgttgtcttttaaaaaatatctaccttttggaagcaactggtgtttacactgttgtattactggctgagtgtagaattaaacagctgtgttttgcattatttgccatcatagcaagcctttagaggacgctgtctatacctcctatttcctatgtgatcaataggaaataacagtgtaaatcaattctaggtaataatgtaaatgggctcttgaaggcaattcctgctgtgaaataagtagttagcagtgacactggcattaaccacagkgggggtaatcagcctttggatgtgtttaatcagagttatcagctaagattaaaaagagagccactgttgtacagggataatcattttcaggatttaaaagatgaatatttggaggtgttctcataaattaaagccatcagaatggctttgagtaatttaggatgccctgaggtcaggcacaagcaaacaggaaaggttaatctcagagctacggtagctgatgtgcagagatggcagaatacatttattgaaataagtagcaaatg

SEQ ID NO: 796250 - DNA, 623 bp, Homo sapiens
aaacaattgcaacaatagcaaaaattgacatatgggatctaattaaactaaggagcttctgcacagcaaaagaaactattatcagagtcaacagacaacctacagaatgggagaaaatttttgtaatctatccatctgacaaaggtctaatatccaaaaactacaaggaacttaaacaaatttataataaaaaacaatcccattaaaaagtgggcagaggacatgaacaaacacttctcaaaagaagacattcatgtgaccaacaaacatatgaaaaaaagctcaacatcaccggccattagagaaatgaagatcaaaaccacaatgaggtaccatctcatgccagtcagaatgaagattattaaaaagtcaagaaacaacrgatactggtgaggctgtggagaaataggaacacttttacactgttggtgggaatgtaagttagtgcaaccattgtggaagacagtgtggtgattcctcaaagacctagaaccattaatagatttgacccagtaatcccattactgggtatatacccaaaggaatataaatcattctattataaagatacatgcaccagtatgtttactgcagcactattcacaatagcaaagacatagaat

SEQ ID NO: 796251 - DNA, 623 bp, Homo sapiens
aaacaattgcaacaatagcaaaaattgacatatgggatctaattaaactaaggagcttctgcacagcaaaagaaactattatcagagtcaacagacaacctacagaatgggagaaaatttttgtaatctatccatctgacaaaggtctaatatccaaaaactacaaggaacttaaacaaatttataataaaaaacaatcccattaaaaagtgggcagaggacatgaacaaacacttctcaaaagaagacattcatgtgaccaacaaacatatgaaaaaaagctcaacatcaccggccattagagaaatgaagatcaaaaccacaatgaggtaccatctcatgccagtcagaatgaagattattaaaaagtcaagaaacaacagatactggtgaggctgtggagaaataggaacacttttacactgttggtgggaatgtaagttagtkcaaccattgtggaagacagtgtggtgattcctcaaagacctagaaccattaatagatttgacccagtaatcccattactgggtatatacccaaaggaatataaatcattctattataaagatacatgcaccagtatgtttactgcagcactattcacaatagcaaagacatagaat

SEQ ID NO: 796252 - DNA, 579 bp, Homo sapiens
gtgacaaaaacggatgaacttggaggacattatattcagtgaaatacggcaggttcagaaatataaataagatctcatttatttttgtaatcttaaaaagttgaactcatagaaacagaaagtctaatggtatttaccttatgctgaggatttagggcactggggcaaggagattttggtgaagggatatgaaatttttgttagaaaaaaacttcaagagatcyactgcacatgactatgttaataacaatatattgactacagttaattacaatgatgatgactatagttaataacaatatacttcatacttgaaaatgataagaaagtaaattttatattctcaccaaaaaatatgtgaggtaacatatatgttaattagcatgatttagccatttcacaatatatacatatatcaaattatacaccataaatatatacaatatttatttattagcttaagtgcataaatacacaaataaatgaagtaatatatcttgttttaaaaatatgacctttacaattttaggagagaagtctaaatatattcataaaggcaacaattgatttctaagaaat

SEQ ID NO: 796253 - DNA, 599 bp, Homo sapiens
atacagtgctatgattgggttcaccctagcttgattacagggaaattttacattgaaagaggcaggtgaagaggattagaggctattgcccacctagcactctgcctgtagagcagatatgtttctttgagagaaatgggctgctgtccttgcctccagctctggagctgcaacatagagcttccaccctggggagaggtaggccatgaaaacatatggcactttagctctccctaaggggactcactttactgggacaaatatgtaaaaaagagtgctgccagttttagtcaaacaatacaattttaaataatggatattttggcaataaraaattaagaggaggctgatagcttcttgagaacaacagctaaatttcaaaccagctaataatttatcagagagaataagggaaagagtcagaaataagaagagccctgctggggtcagagcaagcctcaaagactggcctccatgacaatctatccaaaggggtctacattttattgtttgaaatgtggatcagtttataccttagtgtattgttaagaatagtagagaaataagattgcacttagtagatgctaagagctggatat

SEQ ID NO: 796254 - DNA, 577 bp, Homo sapiens
atgcatatatttttaccatcagtaggtacaactacaaattttctaaacaaattgagcaaatgtatttatttccaccagcattatatggaatttccagtggtgcctcattcttatcaacatttagctgtgtggacattttaaaatgtgtctcttctggtgagtatgtaaatgtatctcattatggttttaatttgcatcatcttgatgataagtgatgttgaacacattttatgtttatttgatatttgattgtttgaaaagtgtctttttgagtatattgtctgtttcattaaattgtctcacttgccttttttaaaaatgtgagaattattatttatgctgtatatcaatcctttgttaaatatctgtttggcaaatattcttccycccactctatgattctgacatctttgctttatcagaaacccatcaggagctttttgataccacactttttaagagccttgacaggtggctagtaattgatatggtaaactaatattggaaaagttttaatggtaggtagtgaagtttggtctgtcatacttcccagatagccatttctttataggacctt

SEQ ID NO: 796255 - DNA, 615 bp, Homo sapiens
gagctctggacccacattttccttctacactgccctagcagaggttctccatgagggcttcacccctgcagaaaacttttgcctgggcatttaggcatttccataatcttctgacctctaagcagaggttcccaaacctcaattcttgacttctgtacacctgcaggctcaataccatgtggaagctgccaagtctcagggcttccacactctgaagccacagcctgagctctatgttggctccttttagccatagctggtacagctgggacatagaaaaccaagtccctggactgcacacagcgtaggggcctgggcccagcccatgaaaccactttttccttctgggcttcagkcttgtaatgggaggggctgttgtgaagtcctctgacagggcctggagacattttcctcatggtcttggggattaactttaggcttcttgatacttatacgcaaatttctgcagctggcttgagtttcccctcgtaaatggggtttttcttttctactgcatcatcaggctgcaaattttctgaacttttatgcactgtttcccttttaaaactgaatgcctttaacaacaccaaagtcacttcttgaatgaatgctttg

SEQ ID NO: 796256 - DNA, 576 bp, Homo sapiens
agataaagctgagaaaatttcacagaaacaagagaaaacaaacaacaaaaagacaaacatggagggaagaatagagatgtgtaagacaataaaagacacatcccattaattcaaacatccaagtaataggaatgtatgaagtagatcgcataaaaagttaaaaagattaaagtattaaataaacattttgaaaatttttatataaattaaggacatgctttttcatatttcaagaatccattatgtgcccatagaaagggaaaaattagagcaacactgaggcacatcattataatattccagaatattgaaaaataaaaagatcctacaatattacatatgagaaaaaatgcctacatgctgaggttcggtcattagtatgcttcaggctttttgtgataaacactagaagctaaattaaaatggaaatgccttaaaawttctgaagaaaacagaaattcataaatccataatcagtcaaaatgtcactcaactgtcaatataatatagacatttttatacgtgtgaggattcaaaaaattaaagcatattacttagctctcaatagtatgtata

SEQ ID NO: 796257 - DNA, 622 bp, Homo sapiens
aatatagtttttcaggtttctctggagtccgttggccaaggggtgatccattcagtcggctgggaagcttaggattttatctgtggtttacagctgttcatctcttactctatgtaatttatagattgaactttatcatagttatgtatgtataggaaaatacctcatatatacagggtttggtattatctacagtttcaggcatccactgggaatcttggaatacatcttgcatggataaggtgggactactctctctctctctctctctctctctmtatatatatatatatatatatataaataatatatatataaataatatatatatataaacatatatgtcaatataattgcatgcctgtatcccagttgctctggagataattaatacaatctatcaaactatctatctatctgtctatctatctatctatctatctatctagtctcagaacttagaatttatggctctttttctttttattctattgtctacatatttaaatcttatttctcatttattttgtatttttcattttgtattattaactgctcattcccactgcaaaattttaagactaattttagttttctttttatttacactgttttattttca

SEQ ID NO: 796258 - DNA, 619 bp, Homo sapiens
aacagaaatttattccctcccatctttggaggctacatgtccaaattcaaggaattggcaaggctgtgcttcctctgaagcctcaagtagaaagtctttcttccagcttctggtagcactagatgtcccttggtttgtggtagcttaactacaatttattcctccattcttacatggtctgtgtgtttctgtgtyttcatgtgacattctgctctatgtgtgtgtgtctctttccttttcttgtgaggacagcactaatattggattaagagcccaccttactccagtatgaccccatcttaattattaacatcggcagtgacactacagtgatgtttcatttagtgatagggatacattcttagaaatacagtattaggtgatttttgtcattgtgtgaacatgttaagttcagtatacagtaacagcattagatagggtagttaaagaaggcttctctaagaaagtagcacttaaattgaatacttgaataatgatgacaagacatccatgaaaaagaatgattgtgggtatgggggagaatgattcactcaagagaacagcataaacaaacagaatcaaatactccaatatgtgaaagatgagcagtgtggataga

SEQ ID NO: 796259 - DNA, 619 bp, Homo sapiens
aacagaaatttattccctcccatctttggaggctacatgtccaaattcaaggaattggcaaggctgtgcttcctctgaagcctcaagtagaaagtctttcttccagcttctggtagcactagatgtcccttggtttgtggtagcttaactacaatttattcctccattcttacatggtctgtgtgtttctgtgtcttcatgtgacattctgctctatgtgtgtgtgtctctttccttttcttgtgaggacagcactaatattggattaagagcccaccttactccagtatgaccccatcttaattattaacatcggcagtgacactacagtgatgtttcatttagtgatagggatacattcttagaaatacagtattaggtgatttttgtcattgtgtgaacatgttaagttcagtatacrgtaacagcattagatagggtagttaaagaaggcttctctaagaaagtagcacttaaattgaatacttgaataatgatgacaagacatccatgaaaaagaatgattgtgggtatgggggagaatgattcactcaagagaacagcataaacaaacagaatcaaatactccaatatgtgaaagatgagcagtgtggataga

SEQ ID NO: 796260 - DNA, 625 bp, Homo sapiens
  misc_feature 593, 594, 595, 596, 597, 598, 599, 600, 601, 602, 603, 604,605, 606, 607, 608, 609, 610, 611, 612, 613, 614, 615, 616,617, 618, 619, 620, 621, 622, 623, 624, 625: n = A,T,C or G
ctatataattttttgccatcaaattaagttttcttgatttctgctcttttttctcaagtgtttcataaatggtatatactattgatctttaaattgttcacgtgaacacctgatttaataaagtgtgaatatcattcctctaccagtgtaacatgaggacatttgggtgagctcatcatgtcatcactattattatcctctttttattttagttgtctttttcctaacattctattagttaatataattatttgaattgttcttctaaaaaaatacccattcaatttcctcacatttttactagtctctgttaaccatttattcttttatccctatctccattctgttttaaattttctatttcctttgtgaaatacactagaatcatggaartgagaagcagaaaccatttattcagagcttgctattgcaagtgagttgggtaccaccatttgcatcaggcagagactcaaaggcaggcaggaaagccttataatgggaaaaaaaagagagagagagagagagcatatcgttgggagtgctctgtttggaagcttttggcatgaggaagatggaggaaggttaagtagcannnnnnnnnnnnnnnnnnnnnnnnnnnnnnnnn

SEQ ID NO: 796261 - DNA, 607 bp, Homo sapiens
ggggggacttcagatcatacagtctgccatggagaaaagaacttgctggcagacagcctgatggttcagaggctccagtgcccagttagccacctggtctgcaatctttccacagacttactgatcaggcttgatcaggatggcccagccatccagaaaaagcccccatcaggttcagtcccttcggggtacagatggaaaaggcgtcaatcactgagtgcayagtatgaaaggttccaaaatctcccccagctggtataatacaatcagttccccttcaagttatggtaagccatatgtgccaagcatgaaataatcagattgcaactcatcacggaagtagttaattctgtttttctagtacagcagtgtctatgatattccgccgctttggttctagggctgcaaaaaaggaaacatcttggtcccggtctgactgcaatgctaagatggtctcttcaatgacttcaagatgagggttaccagcatttctaaaatacgctaaagagagaaaccatgagtctgaatcaggtaagccatgaacagtgttcaaaacacactcggttttgttttttgttagccacatgtcaggacaataaatcaaaga

SEQ ID NO: 796262 - DNA, 607 bp, Homo sapiens
ggggggacttcagatcatacagtctgccatggagaaaagaacttgctggcagacagcctgatggttcagaggctccagtgcccagttagccacctggtctgcaatctttccacagacttactgatcaggcttgatcaggatggcccagccatccagaaaaagcccccatcaggttcagtcccttcggggtacagatggaaaaggcgtcaatcactgagtgcacagtatgaaaggttccaaaatctcccccagctggtataatacaatcagttccccttcaagttatggtaagccatatgtgccaagcatgaaataatcagattgcaactcatcacggamgtagttaattctgtttttctagtacagcagtgtctatgatattccgccgctttggttctagggctgcaaaaaaggaaacatcttggtcccggtctgactgcaatgctaagatggtctcttcaatgacttcaagatgagggttaccagcatttctaaaatacgctaaagagagaaaccatgagtctgaatcaggtaagccatgaacagtgttcaaaacacactcggttttgttttttgttagccacatgtcaggacaataaatcaaaga

SEQ ID NO: 796263 - DNA, 627 bp, Homo sapiens
ctacatggagaagaacgaaactggatccttatctctccctttatacaaaaatctactcaagattttaaatctaagacctgaaaccataaacattatagaagaaaatctaggaaaaactctttctggacactggtgtaggcaaagaatttatgactaagaccccaaaagcaaatttaacaaaaaccaatataaataaatgcgatctaattaaactaaaaagcttctgcacagcaaaagaaatagtcatcaaagagacaactcacagaatgggagaaaatatttgcgaaccatgcatccaacaaagaactaatatccagaatctacaaggaactcaaacaaatcraagaaaaaaacaaataatcccactgaaaagtgggccaatgatatgaataggacatttctcaaaagaagatatacaaatggccaagaagcatataaaaaaaattcaacatcactaattatcagacaaatgcaagctaaaaccacattgacataccacgttaccctagccagaatggccattattaaaaagtcaaaaaacatagatgttggcatgaatgtggtgaaaagggaatgcttatatactgctggtggggatataaattagtacaacttctatggaaaaca

SEQ ID NO: 796264 - DNA, 586 bp, Homo sapiens
ttttgactcatgtaactggaaaactcaaaagtaggtctggtttcaggtacagcttgatcagggattcaagcaatatcaccaagacccagggtttttctgctccaatttccttcagtttggtctatctgactgctttcagctgcaagtaacatggctcagcattgttgaaatgacaaggctatttcttagatcacagacaggaggtccccaggtaggcagagcaccagggctagtctagtaacttaaattcagcaaggatttgcatgcttttaaccacctctctcagccatgccactcccaatgccagcctcgtcaaaggctggctttcttcctggctgtaggatgggcaccgtcagcggcctaggccacatgctttcytgttcacctctggcaatagaaagagggaaaggtttcccactcatccctgcaactcctctggagggtgtcattggccagaaatgtatcgtatcctcattcctgagtaaatcatggctttatctcccttgggccaaacaagccaaccccttcccacgctgcatcgtgactctgtagtaggaggcagtgcaacatccaccggaacttcaca

SEQ ID NO: 796265 - DNA, 506 bp, Homo sapiens
aggtcatgagatcagagccctgaaggatgacattagttcttttatactaataaaaaaggcccaagggagcttgtttgccccttccaccaagtaagaacatagcaagaagatgccttcagtgaagtggaaagcaagacctcactgaatgacaaatgtgctgtcaccttgatctttggcttcctcacttmtaaatctataagaaataaaattctgtggtttataagccacttggtttatggtagtcttgttataacagcctgaatgaactgacaccactaaacctgccctacaaaacatgctaaaagaagttctttaacctgaaataaaaagaaacgaataggcagcatgaacagatatgaaatataaaactcgcaaaaatgtacatatataatcaaatacagaatactctactactgtaataatggtgcataaattaattttaactatattataaaagttgaaagacaaaagtagtaaacgtaactataactataataatttgttaa

SEQ ID NO: 796266 - DNA, 480 bp, Homo sapiens
aacctcagaaccactgttttcagggttggacaaaaattaaagtgtgaaactattgaaataaaaatattaaagtgtgataaacaatattaatgggtattaagttattaatcttgccaagacaccattctccagataatattacatccctgactaatattcttcacaatgtccctgtctagatttccaattcctcattaggaatggaaccctgtccttatctctaacctatgtggctaaagtcttgtgattatctagccattaccttgcctccattttcaggaatgtgaaycctagacctttgttcattcaattaccaactggaaaagatacaagaatgtactggctgcctctaataatggctaccaatccttcttttcctccttcctgtctcatgactatttgaatttccttttacaatgcagattctcctggttggttcacctcccataatttcctttaccatgactggctaaataaaat

SEQ ID NO: 796267 - DNA, 603 bp, Homo sapiens
aacaagaaaaaaaattcagaacaaattgaaaaatcaacaattcttcttaggtgtgttagaaaagtgaagtcacagttcacaccactgcccccaaaattggagagacaagttgatgaatacagagaatcacaacttaccagagcagaaacccaccttcataggaaccagtaccaatgcaggaaaagctgaactgtagttcacaaattgctggaggctcagaatagacaagtatgagagatgaaaactccaggtggacccatttataggacaaccctaacagttttgtgagttctacctccaagacctctaccaggttctcacagtgaagatcagagaaaaatcyactttggcttcctgcaagaggaggaggaaagaaatcattttgaaatgcaccatggcaacctgttcctgttaacaaagcctgccttcaaaaaaattattttaccagagcccaacctattgggtttttatcagagcctgattcacctgaaagaagaaaaatattcaactgcagctattctagcttttcctgtggaggcagagatttaccccactccagtcccctatggccatcctgtaccatctaatgaggtgaaaaaagaa

SEQ ID NO: 796268 - DNA, 624 bp, Homo sapiens
ctggtgggagccacaaagctaaagggcaaggcggggctgccacttcggagctcactacagattatttgttgggcatctaccaggtgcacacagcagggctttcttgtttgcacccaccaagaagagggccagagcacccaagaacacacacatygcttaggatcccggtgagagatctgctaagggggtggggcctgggaggatcggaggcacgcgggctggtcagaggcttctgaagggacatgggagttcatccactgagaattctgacccaaactcagcttctgaaacaaacacgggacttctcatagaggtggtccatcccctactcatgccacccatcgatatggtattgaaaacacaaaggaaggtctttacaaaacatttattggggtcccattcagagaagaataacctattattacttacacatatttagtacctagtaccagcttacaaaggcctttctttcacacatatttccttgatgaatacagcaaccaccctctgcacaggcaggttcctctctctgcaacactcttctcctctctactcaggcctgggtgataccctttcgtcatttatgtgtttctcagcacagtgtttgtcacacctgactgttaa

SEQ ID NO: 796269 - DNA, 634 bp, Homo sapiens
ccaggcctcgatgtctgattctagagtctaacagggtcctgggtagcccatcattctacaagactgcgagcagcacctccgtgtcatctgtcagggcagaaagcaaagggcaaagtggaatgaacccaaggctgaaggacttgggagagcaccgagatgccgggtgctgacctcctatgtggccagccagccccatgytggggtctggaggcacatcagacttgtcctgaccctgaggagctgccaggctaaggacaaaaacgattacacagagagaaataagcttaagtgttggcttaacctgccaggggctccaagagagggtgatgcctacctccctctcactcccagacaggtaaactgaggcccagtgtggccacagcatgtaggcctggtacccccatgagccaaccggaactgggatgagaactggggtccactgacgggtcagagctctttccactgcactgcactgcctctgcagggtgatggcagcaggaccaagccctggggtagacctcaacatgggggaaaatccccactcctgaatctgggaaaaggaggcaggaaacacgcccacttcctgtccagccttccagctgccctggaccctgttaatggactcgctattcca

SEQ ID NO: 796270 - DNA, 634 bp, Homo sapiens
ccaggcctcgatgtctgattctagagtctaacagggtcctgggtagcccatcattctacaagactgcgagcagcacctccgtgtcatctgtcagggcagaaagcaaagggcaaagtggaatgaacccaaggctgaaggacttgggagagcaccgagatgccgggtgctgacctcctatgtggccagccagccccatgctggggtctggaggcacatcagacttgtcctgaccctgaggagctgccaggctaaggacaaaaacgattacacagagagaaataagcttaagtgttggcttaacctgccaggggctccaagagagggtgatgcctacctccctctcactcccagacaggtaaactgaggcccagtgtggccacagcatgtaggcctggtacccccatgakccaaccggaactgggatgagaactggggtccactgacgggtcagagctctttccactgcactgcactgcctctgcagggtgatggcagcaggaccaagccctggggtagacctcaacatgggggaaaatccccactcctgaatctgggaaaaggaggcaggaaacacgcccacttcctgtccagccttccagctgccctggaccctgttaatggactcgctattcca

SEQ ID NO: 796271 - DNA, 578 bp, Homo sapiens
tcatatttgaaggttagtaaaaattttgatgtgtatgtttataattcataactacattatttgcatgaccttgaaaatgatattgacccttcctctcagagtctcagatttgctgtatttaaaatgaagagttgagtttaggattttaaagaaacccaactggaacaactcttggattattaagttcccttctagatcttaaattttatgattttatgacccatatctcacaatacccaagacatttcttttgtgttatttytgaagtatcgtacaagtggttttgaggcatatgttaaaatatagtaattttaaaatgatggcacaaatcatattttgtagatggtcataaacctcagtaagatttataaagccttagctagaagaggactccaaagtgcccaaccatgctaataatcactgctactctctttctattttttggctcttgacctataggaagcagtatctttattcttcaaaaccaaacacatacttttatagcaaacctggtgaaatataagccaggtcatgcactcctttgctcaaaatcccccagtggctcccttttcactctc

SEQ ID NO: 796272 - DNA, 636 bp, Homo sapiens
atctgtcctttaataaagcactattgaaatatgatgacatatagggaaagcctgtttgtgctctacaggcttgtgaaaaggtgctagaatcaaatacttgaaaatgagttgaaacatcagagacaccccataagccatatgtggcatgggcatytgaacctaatgtggaagcgtataaacatattctctagccctaaggaaaaaaaaaaaaaaaaagagagaccatgaagagaacatcttgaaagagcctgagaggggaggtcaccaagatggcaggataggagttaccaaccttcagccttccacaaaaaacaaaacacaaaaacaaacaaatatagacagctatttacaaaccaaactagcccaaaagatctgaagggttcattaaagaatctgcagcaaactaacctgggctacatagcaagaccctgtagtaaaaaaaaaaaaaattaattagcctggcatggtggcacacacctgtggtcccagctacttaggaggctgaggcaggaggattgctggagccctggaagttgaggctacagtgagccatgatcatgcactacactccagcctgggtgacagataccctgtctcaaaaaaaaaaaaaaaaatcttcagcaacacaatgaagca

SEQ ID NO: 796273 - DNA, 591 bp, Homo sapiens
tacagtaagaatacagtactatactcttctgggaccatcgttgtatatgtggtctggtgttgactgctacatggcacatgactgtatcttcataaaggcttgtatccagaatatatagagaactcttacaacctaataagagacaaatgacctaataaaaaatgggcayagccaggctcagtggctcaacacctgtaagctcaacactttgggaggctgaggcaagaggattacttgaggccaggagttcaagacagcctgggcaacataatgagacctcatctctacttaaaaaaattttttaattagcagtcttggtggcgtacacctatagtcccagctacttgggaggctgaggtgggaggatcgcttgagcccaggggttcaaggctgcactgagctatgatcacatcactgtactccagcctgggtagcagagaaagaccttgtctctcttaaaaaaaataaatgaataatgaacagatacaatctatgaaagtatcttataaagttaaatcatacttataaaataatttacttataaaccatacttataaagttaccatacaatccacacatttcactcctagg

SEQ ID NO: 796274 - DNA, 529 bp, Homo sapiens
ctttactgtgagctactggcatcagttgtcagcttgcttttgaccttcttgaatgggcctcagggggagggggtgggagaaacaatcccatttgctgatcctcagcagacaggactgaagattatctccagccccctggcatcccctccttcactgtcacttctacaggaagatcacgccaggcaagtatcaagtctctaactaggtcaacattaatcctctaatatctgcttcttacattaggtaatcagtccatggctctgggcacttctttgggagataatcatctaatgaagtcacaggctggggacaaactgataagcagatggcatgggaagtgtttgcaaggagggctggtcctcagccctcyaccctgcctccatttcccaggttgccccagatgtgcaggcaaacttaggaattaccacacatgcaaagtggtgacttatcatcagccactttcctttggtcaaaagtcccccaaagttcccactggggcaaaagtcagaggagtccctggtccttcccc

SEQ ID NO: 796275 - DNA, 617 bp, Homo sapiens
cgtgggcctggacaggtggggtgcggcaggttgcagagggcctcccttgaggctggccagttgggttttatcacgagttgattctaatcatagtcacttatagggctttgctttctctccaaaggctgtacatccttttgaaatcccagagatcttcagtctccctgtggattaaggagatgtgcagtatttaaagtggcttcaggaaggcatggaaraggactgagtggggaaagctttttgtgcatgctgctggctacctccagcggctgcctccagcctccatcagctgcactctggggaagaggaggctgccttctacctcccagcatctctggatttcatgttcctgtcagcacagaggagctaaatggcctgtagaggctgaaggtctgaggctcctaaagctggaagaaaaggctgggccagtcaggccaagcaagaacacagtgtaacttgtctctgagtgcttcatggttaagggggctaagcaggcacaagggcatgaggatggttatatgtacagactgaggggaagaagcagtgaagatgagacttgccatcttcttgagtcagtaggcctgcctcaggtgcctaggatgtaattgctctgctgc

SEQ ID NO: 796276 - DNA, 617 bp, Homo sapiens
cgtgggcctggacaggtggggtgcggcaggttgcagagggcctcccttgaggctggccagttgggttttatcacgagttgattctaatcatagtcacttatagggctttgctttctctccaaaggctgtacatccttttgaaatcccagagatcttcagtctccctgtggattaaggagatgtgcagtatttaaagtggcttcaggaaggcatggaagaggactgagtggggaaagctttttgtgcatgctgctggctacctccagcggctgcctccagcctccatcagctgcactctggggaaraggaggctgccttctacctcccagcatctctggatttcatgttcctgtcagcacagaggagctaaatggcctgtagaggctgaaggtctgaggctcctaaagctggaagaaaaggctgggccagtcaggccaagcaagaacacagtgtaacttgtctctgagtgcttcatggttaagggggctaagcaggcacaagggcatgaggatggttatatgtacagactgaggggaagaagcagtgaagatgagacttgccatcttcttgagtcagtaggcctgcctcaggtgcctaggatgtaattgctctgctgc

SEQ ID NO: 796277 - DNA, 617 bp, Homo sapiens
cgtgggcctggacaggtggggtgcggcaggttgcagagggcctcccttgaggctggccagttgggttttatcacgagttgattctaatcatagtcacttatagggctttgctttctctccaaaggctgtacatccttttgaaatcccagagatcttcagtctccctgtggattaaggagatgtgcagtatttaaagtggcttcaggaaggcatggaagaggactgagtggggaaagctttttgtgcatgctgctggctacctccagcggctgcctccagcctccatcagctgcactctggggaagaggaggctgccttctacctcccagcatctctggatttcatgttcctgtcagcacagaggagctaaatggcctgtagaggctgaaggtctgaggctcctaaagctggaaraaaaggctgggccagtcaggccaagcaagaacacagtgtaacttgtctctgagtgcttcatggttaagggggctaagcaggcacaagggcatgaggatggttatatgtacagactgaggggaagaagcagtgaagatgagacttgccatcttcttgagtcagtaggcctgcctcaggtgcctaggatgtaattgctctgctgc

SEQ ID NO: 796278 - DNA, 586 bp, Homo sapiens
ggtgtcagagttttggttcacttcaagaattttctaacaagtagaactgcccaaggtggagtcatctgtcttgtgatccaataagctctccaaccacataacattctcaaaaatggctgaatagtcaaatgtgggatcacccattcataaatatttattgagttcacattctatacccgacgctgcgttagatactagggacacaagaatgaaaacaccctggggttgatgaraaagacatacaaataattgaatgcaatgtgacagctgctataatagagctatctgcaaagtgtaacaagaatatagatgggctagaagttgttctggggggattgagttgatttctctcaaaaggagagatatgatttatctgtgaacaccatagataaacctgaggcaaagaatattgaagttggaggcactataatccagttattttaaatatgaagaaactgaggactgaggtgaaacggtctgctcaatgtcaagaagtagtttatgtacaatattttgtatgcagtagttttgaatgttcaaattgggactttcatgaagagtggtccctaagagaggcaatacataa

SEQ ID NO: 796279 - DNA, 481 bp, Homo sapiens
ctgtcctgggcctgaggggatcccactggcctgaaaggtgagtcccaggccaggcaccattgggacttaagggcacatcagtggtagtctggaagtactgttagtggcctgggatggtggtggctatgaggtgaggctcctctgcctttggaaaaaggaggaaagagtgggaaggcctgcatcttgtggtttcagcgccagctcagcagcaataaaacagagcactaagatagacttctaaggtttcgactctagtcgctgactccctggtggcaccactggacccaygcagggcctggggaacctcaccaccccaaagggatgaacacagccctggctggctctgctgattgcagcgccccagtgccttgagcacacatagacagtagccagaaattgcttacaacaggttttgggtgagaccagcgctgtgctggcttcaagtctgatccagtgcagtcatagtggaagtggtcacaag

SEQ ID NO: 796280 - DNA, 525 bp, Homo sapiens
tgtgctgtttggtgatgagcaggtggagaagtagttggatcccatgggagatggactggcctcctcttcttgggttgactgcagcttgttggaggtgtggataaggcacttagtgtctttgctccttcattagtatgagggtagcaagggaagtttcactgcagaggtggtggcagagaggctttcagttccccaggagctctgttcaaggagttgcagagctgctaatggctcgataacccggcaagggatgactagaggccaaggcctggaggatctgcctggtgaagagttatgggaatgggcacccatgcaacagtctgtccacttttgttgtatgccttgtgtaatatgctggggttctactccagtccatagtygccttgaatattgcagtacctggaggtattaacagtgaaggctgtgaaacagtcaaggtgtcggccttccctttcctctgggacctctgtttcatggatgtatgaacatgttgctgatctaaacacacttgtaggaggtggatgg

SEQ ID NO: 796281 - DNA, 620 bp, Homo sapiens
gaaatgcggggttggagtcccccaacagggtccccactggggcacttcctagtggagctgtgagaagagggccactgtcctccagacagcggaatggtaaattcattgacagattgccccatgtacttggaaaagctacaggcactcaacaccagcttgagaaaacaaccacaagggctgtaccctgcagagccacaggagaggggcagaggagccacctagggccrtggagcccatcccttgcatcaatgtggcctggatgtaagacatggagtaaaaggagtttatgctggagatttaagatttcataactgttctgctggataccggacttgcatcgggcctatagtccctttgttttgagcaatttctcctttttcaaatggaaacatttacacaatgcctgtttcccccgttgtatcttggaagaaacaaacttgcttttgattttacaggatcctaggtagaaggatgcctcagatgagacattgaacttggacttttgagttaatgctgaaataagttaagactttgagggactgttaggaaggcatgattggttttgaaacagtagacaaaaactattttaaaattcctatggaacctttaaaaaagcctga

SEQ ID NO: 796282 - DNA, 568 bp, Homo sapiens
attacaagaatgagcgagccactatgcccagcctaatattccactctttaagaaagtgacccaattatgttcttgatcttttccaattcacctcagtgcttcagtgtttctactcttcaggagacatagtgaaggaagagaaagcttactgagctccttcttcaaagataaaaatttccaatgtttatggggcaactaaataaggaaatacatgaagtggacctggaggagactggcaaatcagaatacaacccttatctgaagaaggcagccaatattcacctctagtcaaattacagccctcaagtgtatragcccaatgtagccagatcatttaattttgaaagagaattttgaaatctggatttgtaggggagattttccgagttttaggtgtcggcaggccaaagccagcccaggaattgccagtttgtaatttgtgtcctggaagttaaagtggatatctaacactagaatttctgggcattcaagatagcctgatttgtacattcttgcttaacaggcaaactaaatgaaaaagcaaaattattagcagattatagggaac

SEQ ID NO: 796283 - DNA, 563 bp, Homo sapiens
gactgtatctctgctctgatcctttctaggttttttgtgttgttttgttgttcattttttcatttcctaatttaacctaccaatggtaaacttatttcatttgctttattttcagagaggggtgtgtgtcagagcaattattgtctggctcatgtacttactgcctgtgactacaaccctgaagggtatrtgtattaatcccacttttgctgatgaagaaactgaggttcaaagaaatgaatgaactactcagtcacaaaactgtaagtgaccaagttggagttgaaatactggtctgtttggctccagtttaatctcttgctacaataccacaatactgtttctctggttctgactttattatttgcccccaaatgcatcaacaggagtagggaataatcatgggatttctcttaggttctgtagttacactgcaggaagaaaacacatttagtataatcatctcaagacgccaagagcaagaattactgcctccagataaattcctaaacgtagaattactcagtgaacttgtctgcacattttcttaaacttttagtgtt

SEQ ID NO: 796284 - DNA, 564 bp, Homo sapiens
gatgtaaattctgggatcaaagttgatctagaatgaagtcatgttacagacttctatcctgcatttcctagtttagtaaacactcatgagtagaccgaatacatttttttacatataagatctaggtaaattcatcattttaatctttaatgctacatatggtaaaaggacccaaatcatataatgttaaaatgaatgtcacaaagtactcagagcttgggaggagaaaataggaagggatgtytgaggtcaaaggactctggttagagggtgaaggctacaggagtactctgacctcctgtttctcttgataatattcccctaccccttgtcattcacagtggtggttaaagtggtggaagtaagctgaaacagagtggaatgtgaaatgtgatggcagagggtatttttttaattccatgtatatttctttagtcacagtgatcgttttggagcaggaaaaaaaatgtttgtgttttccattatgtgacacccaagtgggtgtccttatattaaataaattaccttaagattctgagtcactatagtttatattctttataa

SEQ ID NO: 796285 - DNA, 564 bp, Homo sapiens
gatgtaaattctgggatcaaagttgatctagaatgaagtcatgttacagacttctatcctgcatttcctagtttagtaaacactcatgagtagaccgaatacatttttttacatataagatctaggtaaattcatcattttaatctttaatgctacatatggtaaaaggacccaaatcatataatgttaaaatgaatgtcacaaagtactcagagcttgggaggagaaaataggaagggatgtctgaggtcaaaggactytggttagagggtgaaggctacaggagtactctgacctcctgtttctcttgataatattcccctaccccttgtcattcacagtggtggttaaagtggtggaagtaagctgaaacagagtggaatgtgaaatgtgatggcagagggtatttttttaattccatgtatatttctttagtcacagtgatcgttttggagcaggaaaaaaaatgtttgtgttttccattatgtgacacccaagtgggtgtccttatattaaataaattaccttaagattctgagtcactatagtttatattctttataa

SEQ ID NO: 796286 - DNA, 564 bp, Homo sapiens
gatgtaaattctgggatcaaagttgatctagaatgaagtcatgttacagacttctatcctgcatttcctagtttagtaaacactcatgagtagaccgaatacatttttttacatataagatctaggtaaattcatcattttaatctttaatgctacatatggtaaaaggacccaaatcatataatgttaaaatgaatgtcacaaagtactcagagcttgggaggagaaaataggaagggatgtctgaggtcaaaggactctggttagagggtgaaggctacaggagtactytgacctcctgtttctcttgataatattcccctaccccttgtcattcacagtggtggttaaagtggtggaagtaagctgaaacagagtggaatgtgaaatgtgatggcagagggtatttttttaattccatgtatatttctttagtcacagtgatcgttttggagcaggaaaaaaaatgtttgtgttttccattatgtgacacccaagtgggtgtccttatattaaataaattaccttaagattctgagtcactatagtttatattctttataa

SEQ ID NO: 796287 - DNA, 486 bp, Homo sapiens
aactgtgccaggccagagataactactatttcatttgtatatattttttcaacttttattttagattcagttggtacatgtgcaagtttgttatctgaatatagtgtgtgatgctgaggtttggggtatgaatgatcccatccaccaggtactaagaatagtactcaacagttagttttccaacctttttctcyctcccttccacactaatggaccccagtgtctattgttgccatctttatgtccatgagtacctgatgtttagctcccacttataggtgagaatacatagtatttgattttctgttcctgattcacttaaaataatggcctccagccacatatatgttgcaccaaagtacatgatttcattcttttttcttgctgtgtacaattccattttgcatatgtgccatattttctttttccaatccactgaggatgggcacctaggttgattctatgtctttggtattgtgaatagtg

SEQ ID NO: 796288 - DNA, 653 bp, Homo sapiens
agctctcctgtatgaggtgtctgtcgacccctgctgggaagtgtctcccagacaggaggtacagggttcacgaacacacttgaggaggctgtctgttccttagcagaggtcgagcactatgctgggagatctgctgctcttttcagagccagcaggcaggaacgtttaagtctgctgaagctgcgcccacagctgccccttccccgaggtgctctgtcacagggagatgggagttttatctataagcccgtgactgtggctgctgcctttcttccagtgatgccctgcccagagaggaggaatctagagaggctgtctggctacatcagctttgcagagctgtggtaggctttgcccagttcctacttcccggcagctttgtttatactgtgaggggaaaactgcctactcaagcctcagtattggcagatgcccctccgcccaccaagctggagcatctcaggtcaacttcagactgctgtgctggcaggaagaatttcaagcmaatggatcctctcttgctgggctctgtgggggtaggatcctctgagctagaccatttagctccttggcttcagtcctttttccaggggagtgaatggttctgtcttgctggcattccaggtgccactgggatattaaaaaaaaaaaaa

SEQ ID NO: 796289 - DNA, 651 bp, Homo sapiens
ttcctattttgagagagtcattaaattactcataaagagtatgttcaaatttaatgagtcttgatttaaaggtgtctaaaagattcgctagtctcctttcagacaaggtggataagtatgggttaaatattatgtttattgtgtttgtatctggttggacygatggtctcgaaaactggcaattttgctccctgttcactcggtttccaccagcatgatgcatgagttggccctgggtagcttaccatgttcacccatgaccttaatgaaagcataaaagcagtgctttgcaaatgcaaatgacaaaaaaattgtaaatgatagcaaacagactacacaagtgttgtcaaggccaccatacatcttattccctttacaaataccttaaatttctttcccagtcctgaagccctgatcataaggtatgcacagatttactaagaagctttgatgacccattgtgtttttgcattgactgaagccagtccatggatcccaggttaaggcccctggtcctttatgctaggagtgagaaatataccacaggagtttataagtagctcacagtggagtgggagaggcaagacatgaaaacagttttagaacacagtagtctataatgaggagttcaaaagggaagaaaccaatgtt

SEQ ID NO: 796290 - DNA, 574 bp, Homo sapiens
acaagctgtgcctcaggacttggcatttactattcatcccttctacttggaatgttttccccatatctgcagtttgtttctctacttcatttaggtcttcatctgttatgaactgaatgtttgtgcccccctcccccacataaattcatatattggaatccatacccccaatatgatggtattacgaggtggggcctatggggaataatgaggtcatgagggtggagtcctcatgaatgggattagtgccctcataaaagagacatagagagctcacttcctctctgctgtctgcatgtgaggatgcaacgagaagatggccatctgtaaaccataaagtgagccctcaccagacacyggatctgtcagcaccttgatcttggacttcccagccttcagaactgtgtgaaataaatgttcgttgtttaagctacttgatcactcaatctacagtattttgtaatagcagccagaatgggcaaagacaatattcatgtgccagctctttagagaggacttctctcaccttcctttctaaaataacacctcaccaccaccactaccatcattctac

SEQ ID NO: 796291 - DNA, 606 bp, Homo sapiens
aaaagtaaatagtggcaggacgatgaggggaaatgaccagaattggaagctccaccaaattgacaaaagagaggtaaatctggttcctgttacttcactatggctagaagtggaagtctctacaaaggctttgaaaactaaactgatgttggaaacgtaacccacrgaaagaggtttagaacttgaagcctgaagctattcacgacaattgcctgctaagacaaaaatagcaacattctcagtaggattgaaacaaaactcagaatcttgtaatagagtgttccaaatgtctaggatacaaccgagaattacttggcatatgaagaaccaggaaaattatccatttttatgaggaaagacaattgacagaggccaatactgaaatggtaaagatgttggaattatctgacagacttttaaagcagctcttacaaaaatgctcaacaagtaaaaacaatcacttctgaaacaaaaagaaattctcagcaaatgaatacatgatataaagaagaaccaaattaaaattttagaattcaaaaatgcagtaaccacaattcttaaaactcactaagtaggctcaataactgaacagaggtgaaagagagg

SEQ ID NO: 796292 - DNA, 606 bp, Homo sapiens
aaaagtaaatagtggcaggacgatgaggggaaatgaccagaattggaagctccaccaaattgacaaaagagaggtaaatctggttcctgttacttcactatggctagaagtggaagtctctacaaaggctttgaaaactaaactgatgttggaaacgtaacccacggaaagrggtttagaacttgaagcctgaagctattcacgacaattgcctgctaagacaaaaatagcaacattctcagtaggattgaaacaaaactcagaatcttgtaatagagtgttccaaatgtctaggatacaaccgagaattacttggcatatgaagaaccaggaaaattatccatttttatgaggaaagacaattgacagaggccaatactgaaatggtaaagatgttggaattatctgacagacttttaaagcagctcttacaaaaatgctcaacaagtaaaaacaatcacttctgaaacaaaaagaaattctcagcaaatgaatacatgatataaagaagaaccaaattaaaattttagaattcaaaaatgcagtaaccacaattcttaaaactcactaagtaggctcaataactgaacagaggtgaaagagagg

SEQ ID NO: 796293 - DNA, 641 bp, Homo sapiens
tctacagagactgtttttcaaaataaggtaatatttacaagttctaagaattaggatgtggatatctttgggggaccatgagtagatattattattctcattttaccatgagggaacttcaagtcatgtgcccaaggacaaatggctaacaaggggtagaggcgggatttgaacccagctctgtccacctcagaagctcattcttttttctttatacattgtcacctacagaggctggagaaaagatctgaaaccyggccgagtgcggtgggtcacgcctgtaatctcagccctttgggaggcagaggtgggcggatcacctgaggtcgggagttcgagaccagcctgaccaacatggtgaaaccccgtctctactaaaaatagcagggcgtggtggcacatgcctgtaatcccactactcaggaggctggggcaggagaatcgcttgaacctgggaggcggaggttgcagtgagccaagatggtgccattgcagtccagcctgggcaacaagagtgaaactctgtctcaaacaaaaaaaaaaaaaaaaaaaaagaaaagaaatctgaaactcagccgccgagtggtgcctactgcaagaaaactacaaatccaggcgtattctaagcactgtctgtaaaa

SEQ ID NO: 796294 - DNA, 599 bp, Homo sapiens
atacatttgtgtttcttttcctttcttttctgagacaaggccttgctgtgtcacccaggctagagtacagtggtgcgatcatagctcactgcaaccttgaactcctaggctccagtgatcctctcacttcagcctcccaagtagctgsgaccacaggcacgtgccaccatacccagctaattttttatttttgcatagatggggtcttgctatgttgcccaggctggtctcaaactcctgggctcaagtgattcgcccacctcggcctcccatgggattacaggtctttggtttctatttgaacagtttcctctctcccagcactgattggagcaaagtattatttctgagtctggtgatgcacataagccagaagaatcatagtgaatagataaaaacaaacattttggccgagcacagggtctcacacctgtaatcccagcactgtgggaagccgatgcctgtggattgcttgaatccacgagttacagaccagcctaggcaacatggtgcaaccctgtctctgccaaaaatacaaaaattagccaggcatggtagtgcgtgcctgttgttgcagctactcaggaagttgaggtggg

SEQ ID NO: 796295 - DNA, 599 bp, Homo sapiens
atacatttgtgtttcttttcctttcttttctgagacaaggccttgctgtgtcacccaggctagagtacagtggtgcgatcatagctcactgcaaccttgaactcctaggctccagtgatcctctcacttcagcctcccaagtagctgggaccacaggcacgtgccaccatacccagctaattttttatttttgyatagatggggtcttgctatgttgcccaggctggtctcaaactcctgggctcaagtgattcgcccacctcggcctcccatgggattacaggtctttggtttctatttgaacagtttcctctctcccagcactgattggagcaaagtattatttctgagtctggtgatgcacataagccagaagaatcatagtgaatagataaaaacaaacattttggccgagcacagggtctcacacctgtaatcccagcactgtgggaagccgatgcctgtggattgcttgaatccacgagttacagaccagcctaggcaacatggtgcaaccctgtctctgccaaaaatacaaaaattagccaggcatggtagtgcgtgcctgttgttgcagctactcaggaagttgaggtggg

SEQ ID NO: 796296 - DNA, 599 bp, Homo sapiens
atacatttgtgtttcttttcctttcttttctgagacaaggccttgctgtgtcacccaggctagagtacagtggtgcgatcatagctcactgcaaccttgaactcctaggctccagtgatcctctcacttcagcctcccaagtagctgggaccacaggcacgtgccaccatacccagctaattttttatttttgcatagatggggtcttgctatgttgcccaggctggtctcaaactcctgggctcaagtgattcgcccacctcggcctcccatgggattacaggtctttggtttctatttgaacagtttcctctctcccagcactgattggagcaaagtattatttctgagtctggtgatgcacataagccagaagaatcayagtgaatagataaaaacaaacattttggccgagcacagggtctcacacctgtaatcccagcactgtgggaagccgatgcctgtggattgcttgaatccacgagttacagaccagcctaggcaacatggtgcaaccctgtctctgccaaaaatacaaaaattagccaggcatggtagtgcgtgcctgttgttgcagctactcaggaagttgaggtggg

SEQ ID NO: 796297 - DNA, 496 bp, Homo sapiens
acagctttttatagcacatattttaaggaaaaatatgggagttggcagtgctttggagattacaaataatttaacccaaaaggcaaagctattctgtgaagatacaagttagaaagtattggagagttgcccagcatcttcatactacttaaaactgtctgtcttttccagtgtgaagcaggcagagaacatcagactacagcaaaggactaggcgatgacctcttaaaagtctgctgtgtcctaggtttgtgttgcccataggttgggaacagtaggtgttgcatgtttgkgtagttttttcttaattttggagtaatgaatgtatgaaagaagcccttctttgtgaccattctgcatgccaagcgatatggtggcatttcctctacagactttcagatgaaaaaattaaataagaggtttatttaatatgcaagagtttgtctgtgatatcctgataagaataaaaggcataaattgaacatgtacatatacta

SEQ ID NO: 796298 - DNA, 624 bp, Homo sapiens
ccccattttatagctgaaaatgctgaagaataaagtagctaagtgactttcgtggggttgcatggaagttgcagagccagaatttcagcccaaattcaagctcttaatcaccacaatacattctactgcctcctaataaatatactagttaaatgatcctttaaagagtctaagtattgccgggcacrgtggctcacgcctgtaatcccagcacgttgggaggccgaagcgggtggatcacaaggtcaagagatcgagaccagcctggccaacatggtgaaaccccgtctcaactaaaaatacaaaaattagctgggcatggtagcctgcacctgtagtcccagctacttgggtggctgacgcaggagaattgcctgaacccgggaggcggaggttacagtgagctgagatcacgccactgcactccagcctgggcgaataagcaagactccatctcaaaaaaaaaaaaaataaaatgtataaaaaaagagtctaagtatttcaataagtggggatctcagaagaaaagagaaaaacccttggtctgtgacctcaaactgactgagaaaaattttattcaattgttctcccccaaatctaaatgtcacacagagtttgtgcata

SEQ ID NO: 796299 - DNA, 561 bp, Homo sapiens
gttcatttttagtacagtttagtacatttacaatgttatgcaaccactacctctatgcagttccaaaacatctgcatcaccccaaaaggaaactcagtgcagtcagcccttggtatctgcgggagattgattctaggacctgtggataccaaaatatactcaagtcccttatctaaaatgacacagtatttgcttttgtttctctttttgagacaggctcttcctttattgcccaggctggagtgcagtggtgcgatcatggctcactgcagcctcaaactcctggsctcaagcaatcctcccacctcagcctcctgtgtagctgggaaaataggtgcaagacattgaacctggctaattttttattttttatagagatgagttctcactgtttttcccaggctggtctcatactactggcctaaagcaatcatcccatcctggcgtcccaaagtgctgtgattactggtgtgagccacaatgcccaaacgtattatataatgttttttaaaacaatgtttgaattcatacttaccttgacttcattagttacagatgatg

SEQ ID NO: 796300 - DNA, 565 bp, Homo sapiens
gggtaaactcagtcacttagttccaaggcacagaaatggttgatgaatccctaggtttagcatatgccgtgtttattaaaagcccagaatttaaagcatgcttcaaaagcgtaaaagaaagtcagaaattttacccttccttggtgtattaaatgttctgcatgcagtttaaggtaagacccttaaattatggttccctaattatgaagttatccttgtttaccacagaagtarcataactggctttaaaaattcagatgaattataggtcacatgtgaaaatcttatcattaggaagagagagaaacacatttgaagatcagatctcccaatgaaaaaacatattttatcttaaggcattagaattcacaaagatacgcaatagttttgagtgtgtaaaaatgtaaacttctctatatcataattatgaaacaagttaaaaggacacggtaagctgggcacagtgcctcatgcctataatcccagcactttgggaggccaaggcaggaggattgcttgagcttaggagttcgagaccagcctgggcagcatggcaaaaccctgt

SEQ ID NO: 796301 - DNA, 508 bp, Homo sapiens
atagaggagttgcccaagggtagtagaattgagtaatttttttgttctgactcatattttttggtacttcccagataattttacagtgagcatgcataaccagaagaaaagttttttaaaaggctatgtagcctgggcacggtggcamatgcctataatctcagttactcgagaggctgagatgggaggactgcttgaactgaagagtttgaggctgcagtgagccatgatcacaccactgcattccaattccagcctgggtgatagagtgaaaccccatctctaaaaaaaaaaagctttgtagaaagaaacttatacacatgtacatgctttcttagagcatatgggataaaatatattacgaaaatgttttagatttatttttgaaagattaaggaatgcagatttcttttttagtattctgaaatgtttctgtcttccttaggaacaacagcaatagcaataacaaaaacatacttaactaaaatagatcctttggttagcaata

SEQ ID NO: 796302 - DNA, 563 bp, Homo sapiens
atagtgtacaactatacgaatctggaagatttataagcaaaagactacaaacatattcgataagtagatattcagattgagaaagcagcacaattcctctacttgagaacaggttggattcctaaaggctatgttaagtccacttactctttagtccaaagtggcatcacataaaggctacaagcaaccaaagtactcacacctaggtaaaattaagcactaaacactctggacattggcagtattgcttctgactctatttgtttctttccaattattaaaaacaccatggtgggcagatctggctggttttgtgctattgcttagctttgttcctgtttcttaaagctcctgarctagaaatttccaagggaagaaatgcctaaatacgcttttcccaatggtatgactatggttaaaactctcccagcactcctgtcagagtctttcgtatatgttgttgcgcattacaaaaatagcaaaacctcattgtttgaaagcagatgtgatttttggaaacagataaaaatcatacacagctacgtacttattcaataagtata

SEQ ID NO: 796303 - DNA, 618 bp, Homo sapiens
  misc_feature 588, 589, 590, 591, 592, 593, 594, 595, 596, 597, 598, 599,600, 601, 602, 603, 604, 605, 606, 607, 608, 609, 610, 611,612, 613, 614, 615, 616, 617, 618: n = A,T,C or G
gaagaaatgcctaaatacgcttttcccaatggtatgactatggttaaaactctcccagcactcctgtcagagtctttcgtatatgttgttgcgcattacaaaaatagcaaaacctcattgtttgaaagcagatgtgatttttggaaacagataaaaatcatacacagctacgtacttattcaataagtataggaaataagtgtgtggttggccaggtaaatatttggaaatacaacacatttagataaatatccttttayagtcacacttcaaatgttttagatatacaaactcttggccatgagctatttaagtatagataagcattagaaaaataaatgctatgggagcacatgttctcagatctcctgagggctgtgttacggaaaaaaatatttaaaaaaaaagaaaagaaaattctatgaaataaatgtgaaaagcaccaaacacatctaaagcacagctcatgctttctctgtagctctactatccataatagatttagtatttgttcacacagttcagcttaaaacatttttcattttctctctatatttataaacatatactactgaaggcaaaaaaacnnnnnnnnnnnnnnnnnnnnnnnnnnnnnnn

SEQ ID NO: 796304 - DNA, 520 bp, Homo sapiens
tgtaaggagacattatgttgtccactttacagagaatactgaggctcagaaacattaggaaacttccctgccaaggtctcatagcttctaaatgttatgaggataatgtaatctgtacttttctaacagagatctgtaatgcccctgggggtacttggtagtgtgccagagggtaaatatggcacatcttcttggggcattaattttactcaagggtaatacttttcaattcatagttttaaaaaatattcatattgtataaattaaaataaaatataagagtttaaatgaatttaatgtgacacggacactacttccccaggtgccccaagagtctgcactcttcttgtgtccacacacctctgccttcagggsccgccccgcctacattagaagattaaaaagtcctgccttgagtcatcaagacatcattatatggtcttcagaattttccaatccagaagtaaggaaaacaaagagtttcatccaacagaaaaagaaaaatatctaatatacacat

SEQ ID NO: 796305 - DNA, 514 bp, Homo sapiens
ccttcacctgcactagaaatgcagcagcaggtggtgaaagatgtctctcacttgacttacttgtttccctaattatcctttgacaacacatctcctccttcagcatttataaaaagggaagattagaaaaataatctctaagatctctttcagcaataaaatttctaagagaaggtttggtctgtacagtttctttcccctcaggaagactcagtggtaggactggcatcatataaacaaacccagaggtgtaaagtgaaaggtcatggactttgggattagagaatcctgggcctaaagaagggttctaccacttactagctctcctcctcaaaaaaaaaagacaaaaaacaaaaaaaaaaaaaacagtatataattatatccmcctaaagggcaggtagggattaaataaaatatttattaagagcaaaaagagatattctttccattactgtcttttcaccccatgttcctacttagaccttcacacaattagaaatcaaagtccagggcc

SEQ ID NO: 796306 - DNA, 628 bp, Homo sapiens
ccagctatctgctaaactccagatgttgctgtgaaggtattctgtagatgtgattaatatttataatcggctgactataaggaaagcagattattccccataatgtgggaaggtcccattcattcagctgaagaccttaaaagcaaaaactgaggcttcgcagaaaagaagaaattctgccttaaggctgtaacagaaatcctccctaagtttccagcctgccctacagatttcatactcaagacagcaacatcaattcttacctgaatttccagcctgccaacctgcccccacaaatttcaaacttgccatcccctacattagctaatcttttaaagtaaatctatccacactctattactctctctccctcccgccccaccctattccctctctcaccgtctctctatgtaagtacagctgacccttgaacaacacaggcttgaactrcacaggtccatttatattcgtatttttttcaatgaatacagtcggcccttcatattgtggattctatacccgcaaccaaacgcacatcaaaaatatggtacttgaggaatgcaaaacccaagtatacaaaaggctgacttttcatatctgagtgttctgcagggttgactgcaggact

SEQ ID NO: 796307 - DNA, 628 bp, Homo sapiens
ccagctatctgctaaactccagatgttgctgtgaaggtattctgtagatgtgattaatatttataatcggctgactataaggaaagcagattattccccataatgtgggaaggtcccattcattcagctgaagaccttaaaagcaaaaactgaggcttcgcagaaaagaagaaattctgccttaaggctgtaacagaaatcctccctaagtttccagcctgccctacagatttcatactcaagacagcaacatcaattcttacctgaatttccagcctgccaacctgcccccacaaatttcaaacttgccatcccctacattagctaatcttttaaagtaaatctatccacactctattactctctctccctcccgccccaccctattccctctctcaccgtctctctatgtaagtacagctgacccttgaacaacacaggcttgaactacacaggtcsatttatattcgtatttttttcaatgaatacagtcggcccttcatattgtggattctatacccgcaaccaaacgcacatcaaaaatatggtacttgaggaatgcaaaacccaagtatacaaaaggctgacttttcatatctgagtgttctgcagggttgactgcaggact

SEQ ID NO: 796308 - DNA, 549 bp, Homo sapiens
cagagaatcgtaaagcaattggagagatgttgaatgcttttcctttgagaatggaactgtatgttgatggctgctattgccatttctaattctacactgtactgaaggttctagccagtgctaggggagagaaatgactgaaatggaaaaaatacaatttattattttcatatgatgtaatcatgtaccataaaatccaaaagaatctatagataaattagtagaactaataagtgagtttaggctgggcayggtggctcaggcctgcagtcctagcactttgggaggcggaggctgaggctggcagatcacttgaggcaggagtttgagagcaacctgggcaacatagcaaaaccccatctctacaaaaaaatcaaaaaattagctgggcatggtggcatctgcctgcagtgctagctactcaagaggctgatataggtggatcacctgagctcagggaggttgaggctgtactgagccgtgatcatgccactgcactccagcctgggtgacagaatgagaccctacctcaaaaaaaaaaaaaagtga

SEQ ID NO: 796309 - DNA, 529 bp, Homo sapiens
gtaattagagaagcagtttttagaaagtctgtttttgatactttcttgtttaatgtgcactagttagtagctgactgcagaatctctttgggccaggactagagtgaggtcaatgaggtgcaacatttaagggaatgctaaaaattgtaataattaaaataaataattttaacgcaatattttaataaaaattaatgcaaaatatctatgmtgtatacaatatcaacattttaaataaagacaagacctgatggggcaggattaaggtgaggggagtaaagccatgttacacagaaaaaaaattcagtaatcaagatacttccctcacttcacctggctctgctcttactcctgccagaaccatgacttcttccttcctcgtgagaatagtatcaagcttaattagataaattcttcaaagagccttgcccatcctcacaactcttaggtagataaaaagcaacatttcacaactcaaaacaaagcctctcctgaatgtaaatatctttgcttagtcaatacatgtgga

SEQ ID NO: 796310 - DNA, 478 bp, Homo sapiens
aagcgattctcctgcctcagcctcccaagtagctgggattacaggcatrcactaccacgcctggctaattttgtatttttagtggagatggggtttctccgtgttggtcaggcttgtgggcaaaagaaagagagatcagactgttactgtttctacatagaaagaagtagacataagagactccattttgttctgtactaagaaaaattcttctgccttgagatgctgtgctggcagaaacatgtgctgtgttgactcaaggtttaatggatttagggctatgcaggatgtgctttgttaaacaaatgcttgaaggcagcatacttgttaaaagtcatcaccactccctaatctcaagtacccagggacacaaaacactgaggaaggctgcaggaacctctgcctaggaaagccaggtattgtccaaggtttctccccaggtgatagtctgaaatatggcttcctgggaagggaaaga

SEQ ID NO: 796311 - DNA, 596 bp, Homo sapiens
aaatgtgctcgaggcaaccctattaaacagcgtttctcaggtctgttgcccacacatggcacaaactgccagagctcacaggccctctcctggcctggagtgagtccccagcaaaccctagatagagcctgctgggggtgcaggcatggaaaaggccaggcagcggggtgctctgtcccaggatggaacagcacagccgaaccacgttagagccagtcagccccaaggcatgaggcagggaggctgggcttgtttaactttctctcttccaaggttctgtggtgcctgtctgtaggggacagagaagctctgtgagctcattgtccgtgtcctattaaaagatcctgcagacggtgctgcctgggcatgggggtgattaaggcacagtgacagcakgttggcctgctgccctggccagggagcggtgctttgccaggcattgtttccttcatcaaacggggcgaacaggtggctgggcccaaagtgcttccctctgacaggggtgcggcttcactcccatcatctaggtctgaattaatcccagagcagccttctccaggtgggctgggcaggagacaggtgcatgggcggaggga

SEQ ID NO: 796312 - DNA, 487 bp, Homo sapiens
catgaaggctgagcatctcctggggacactaaacttgaaggccccccctcagcctaaacacaccgtgagcccccagtttactagctatggtcactgtcacaggtaggcacagggggagtcatctgggaggggggcatggtccctctgtcttgggcactgtattagattcctagagctgagcaacaagaacaaaactcaatctaaaaaaataaaaataataaagtaaaaaccarcatctccacagtccccccagtccccggtaaccaccattctactctctgcttctatgaatttgacttttttagattccacaaataagtgagtcatgcagtatttgtctttctatgcctggcttatttcacttagcataatgttctccaggttcatccatattatcacgtgacaggatatcctctaaggctgaattgtatgcctttatttatagatagcacatattctttatccattcatccactgatgacattta

SEQ ID NO: 796313 - DNA, 487 bp, Homo sapiens
catgaaggctgagcatctcctggggacactaaacttgaaggccccccctcagcctaaacacaccgtgagcccccagtttactagctatggtcactgtcacaggtaggcacagggggagtcatctgggaggggggcatggtccctctgtcttgggcactgtattagattcctagagctgagcaacaagaacaaaactcaatctaaaaaaataaaaataataaagtaaaaaccaacatctccacagtccccccagtccccggtaaccaccattctactctctgcttctrtgaatttgacttttttagattccacaaataagtgagtcatgcagtatttgtctttctatgcctggcttatttcacttagcataatgttctccaggttcatccatattatcacgtgacaggatatcctctaaggctgaattgtatgcctttatttatagatagcacatattctttatccattcatccactgatgacattta

SEQ ID NO: 796314 - DNA, 607 bp, Homo sapiens
agagcttttgcatggcaaaaggaacagtcagcagagtaaacagacaacccacagagtgggagaaaatcttcacaatctgtacatctgacaaaggactaatacccagaatctacaatgacctcaaacaaatcagtaagaaaaaaaaataccaaaaagtgggctaaggacatggatagacagttctcaaaaaaagatatacaaatggccaacaaaggtatgaaaaaatgctcaacatcactaatcatcagggaaatgcaaatcaaaactacaatgcgatgccacctcctcactcctgcagaaatggccatagtcaaaaaatcaaaaaacaatagwtgcatgcgtggggtgaacagggaacacttctacactgctggcaggattgtaaactagtacagttactatggaaaacagtgtggagattccttaaagaactaaaagtagaactaccatttgatccagccttcccactgctagatatctacccagaggaaaagaagtcattattcgaaaaagacacttgcacacgcatgtttatagcagcacaattcacaattgcaaaatcgtggaaccaacccaaatgcccatcaatcaatgagtggataaagaa

SEQ ID NO: 796315 - DNA, 587 bp, Homo sapiens
ttaatgtgagaacaataatcagaaaagtcattttgtccatattatattaaaaattttgaaataaatttttaaaataatcaacttacttaaaatataaaatacttaatctttgccatattttaaaattctgtaactaaactgataatgcaattataattgataagtgacaccaaatgggagatgtcaatacttaatttttcccttctccaaaaataggatttaactatttgagagaaaattgattttatccagatgtttctcttaagtgaaaaagcttcgagaatacaatgtcaaggcagcttgacatatctcctcaacctcttttgttgttgacagtacataataggttgtatctttaaccttaaaagcatagtcaagcaaaaaccagaaaaatatagatctttcaaacaaagaaagtgtwcaataataaaggctagctattgtactaaatagtcacatttctcactttcaacacgaacaatacctttcttcaatattagccacttctgaggaatcatcatgtttttgtaagttcttatcatttgcttcctgaatctgttctgtcactttctcccaacataagatac

SEQ ID NO: 796316 - DNA, 514 bp, Homo sapiens
ctacaagttactatgctaaaacatttttttaattaaaagtaatgtatatcacagattttacaacactcaaggaattctttaatataattaagagaaactacaaaactccaattaagacacttgaggccgggtgtggtggctcacacctgtaatcccagcactttgggaggccaaggcrggagaatcacttgaggccaggaattcgagcccagcctggccaacgtggcgaaaccccgtctctacaaaaaaaaaaaaaaaaaaaaaaaaaaaaattagccaggcgtggtggcacatgcctgtaatcccagctacctgggaggctgagagcaagcagaggttgcagtaagccaagatggtgccactggactccaacctaagtgacagaggaagaccctgtctcaaaaataaaataaaataaaataaagacacttgacattcttcaaaaggttaatgtcatgaggaaaaaagtgtggggttttctagagattaaaaaggctaaagagttgtaagaatc

SEQ ID NO: 796317 - DNA, 586 bp, Homo sapiens
gggaatttgagggcagcctgtgcaacacagcaagctcttcctcactacataagtaaaataaatgcagctaaaaaaaaaagaaaaagaaaacaaaagtggaaggaggccccaggccaaggaacacaagcagcctctagaagctggagatgacaaggaaacattctcccctagagcaccagagggaacacagccatagggatatctttatttatttatttatattttattttcttgagacagagtctcactctgtcacccaggctggagtgcagtggcgccatctctgcttactgcaacttttgccttctgggstcaagcgattctcccacctcagactcccaagtagctgggactacaggcatacaccaccacacccagctaatttttgtatttttagtagagacagggtttcgccatgttgcccaggctggtcttgaactcctgagctcaagtgatccacctgcctcagcctcccaaattgctgggattacaggtgtgagccactgcacctggccgacgtcttgctttaagcccagtgagacccattttggacttgtgacctccagatgtgtgagataatacatct

SEQ ID NO: 796318 - DNA, 586 bp, Homo sapiens
gggaatttgagggcagcctgtgcaacacagcaagctcttcctcactacataagtaaaataaatgcagctaaaaaaaaaagaaaaagaaaacaaaagtggaaggaggccccaggccaaggaacacaagcagcctctagaagctggagatgacaaggaaacattctcccctagagcaccagagggaacacagccatagggatatctttatttatttatttatattttattttcttgagacagagtctcactctgtcacccaggctggagtgcagtggcgccatctctgcttactgcaacttttgccttctggggtcaagcgattctcccacctcagactcccaagtagctgggacyacaggcatacaccaccacacccagctaatttttgtatttttagtagagacagggtttcgccatgttgcccaggctggtcttgaactcctgagctcaagtgatccacctgcctcagcctcccaaattgctgggattacaggtgtgagccactgcacctggccgacgtcttgctttaagcccagtgagacccattttggacttgtgacctccagatgtgtgagataatacatct

SEQ ID NO: 796319 - DNA, 701 bp, Homo sapiens
aaaagtccacgcttgtgttcctttcagagtttccactagaaaccatacttgttttccagagcaacacttctcccattttttttttttttttttgcccaaatgcctgagcatttgattaagccagaagtggttccaggattaaaaatgaaaggtttctgggtttcaatcagagactaagttgttcacttttttttttttttttttgagacagggtctctctgtcacccaggcacgtgcagtgtcacggtcatggctcactgcaacctctgccttgtgggctcgggtgatcctcttgcctcagcctccccagtagctgggaccaaaggtgcwtgccactatgcctggttaatatttttttaaattttttgtagagacagtgtcttgccatgttggccaggctagtctcgaactcctggcctcaaggaatcctcccaccttggcctcccaaagtgctgagattacaggtgtgagccatttcactcggcccctaaatcttaagaaaattctgagttcttgttttagagttacttgtttaactatttgtgttgttttgttgctgctataaagagtttttatagcagttgaaacacaagtaactagaaacagctaagtttactaagctattggagagtggcttagtaaagcagagtataagtataccaaagagccaatgacactaaatagccattaaaaagtgtgga

SEQ ID NO: 796320 - DNA, 666 bp, Homo sapiens
aagcttgcatgatcgctggcagaattcagttcctcccgggctcccgactgagggcctctgttcctagttggttgttgctcagaggccaccatcaattatttgccttgtagacttctccaacagggtagctggttaaagcaaagtgtggaagccaaagccaagaaggtcaaggaggcaaggaggagagtctgctagcgagatggaagtctcaaccttctgtaawctaattgcaacaaaatagactactattttttgattgcttactatgtgctgggctctgtgttaaacacctcgcatgaattatctcatataattctcacgaccaccatgtggcataaatattatctccattgtgcagaaaacctgaactccagagggattaaatatctggctcaaggtcaaatagtaaatgccagagccaggattcagtcaggtctaccaacctccaaagcccataccttcagccaccaccattactgaactgccatttaagcgaaacactcaaatttcttctacctgcctccttctttgtggttccatggtcaccccctggagtccagacctcctactctggtgatgataatgatgatactgtcgggagagcagtgtgccttcctactctacggctctctcctaatcctattctatatcctcatttgctttagt

SEQ ID NO: 796321 - DNA, 666 bp, Homo sapiens
aagcttgcatgatcgctggcagaattcagttcctcccgggctcccgactgagggcctctgttcctagttggttgttgctcagaggccaccatcaattatttgccttgtagacttctccaacagggtagctggttaaagcaaagtgtggaagccaaagccaagaaggtcaaggaggcaaggaggagagtctgctagcgagatggaagtctcaaccttctgtaaactaattgcaacaaaatagactactattttttgattgcttactatgtgctgggctctgtgttaaacacctcgcatgaattatctcatataattctcacgaccaccatgtggcataaatattatctccattgtgcagaaaacctgaactccagagggattaaatatctggctcaaggtcaaatagtaaatgccagagccaggattcagtcaggtctaccaacctccaaagcccatrccttcagccaccaccattactgaactgccatttaagcgaaacactcaaatttcttctacctgcctccttctttgtggttccatggtcaccccctggagtccagacctcctactctggtgatgataatgatgatactgtcgggagagcagtgtgccttcctactctacggctctctcctaatcctattctatatcctcatttgctttagt

SEQ ID NO: 796322 - DNA, 532 bp, Homo sapiens
tcctagggaagttgtagtagacatacagagacatgacccagttggaaatatgacctggtagttgagtcaataggatttgttgatttactggatacagagtccacaaaagggaagaatcaagactgagtcttaccttaggggcttaagcaactaggtagatattagtgtgcttcactgaggtgggagtgactgaggagctgcagattaggtgggcagtgggaggtggtttgcaaatcaacaactctgtttaggtttgagatgactgtgaactataaaagaattatcaagtaggtagttagatgttccgtgtggaggttagtgcagatttccaggttggagatacaaatttgagagttatcaagatatagattggatratctcacccaagatatagactggataagctcacccaaggattgagtgtagataaaaaagtctagagtggaagttagagttgcttgcgttaccacataaaaatagaagacactcggttgaatttgaacttcagataaacaataaatttttttagaat

SEQ ID NO: 796323 - DNA, 597 bp, Homo sapiens
gcacatttctggatcagaacccatgggaaacaggaggtactaagtgcaatgtcttagcattctgcaaaatggagatctgttgtccagcggcttatctcctttttagtaacccttctttctgaacccagggcccttttcagccttccctcatmttttcttgagatcaaactttacttctttcttatttactaagaatttgcctgtttgaataagaacaaaacgctaaggtgggtagcctaagctgattttctgctggttacacgtgtctctcacaccacatttcctcaaagctaatctgaattctgtaggctaaaaatattcatgtagcaaatctgagaattgaaaactgcagataaccggccgggtatggtgactcatgcctgtaatcctagcactttgggaggccgaggtgggtggaccacctgaggttaggacttcaagaccagcctggccaacatggtgaaaccccatctgtactaaaaatacaaaaatttgcctggtgtggtggtgcatgcctctagtcctagctactcgggaggctgaggcacgagaatcacttgaacctgggaggcggaggttgcagtgagtcgagataac

SEQ ID NO: 796324 - DNA, 513 bp, Homo sapiens
accctattcattttaattttgcagagcaaacatatccaaataaatatgtgagttcaatttcaataacatagaaaagtaaaataggttagataataagtatgcaagaggaactaacagcaacaaagaaatcatactcaagatgtaatactttatttctatgaatctctatcactaggacgataccagatcaatatagcttccagtacctttgtgaattagtggtagatgagctttcatttacttgaattaattttctcatattcaactatatccttactttaacttctaaataaaaaaattataatgaatacattcctrccttgtggtttattgttattttttaaaggcagtagaatgaagaaaataacatttttataataaattctctctccatttaatcctttccaaatcttcttctggaaattgaattgcttagactcatcttgatgattaatattctcagtacatgtctttccccctcaatgaactcacagagagaaaaaaatataatta

SEQ ID NO: 796325 - DNA, 532 bp, Homo sapiens
agacagacagtggaaacagctatctttctttgaagggactatgttggttattcagataatgagaaactgtctacaacaatcccagggactccataagattaaaagaaagaaaagaaaagttgttaaataaagagccagtactttataactgaaagtttagcttttatttcaggcaatctttagaggttgattaaaccaggattacttgtttaatgccttttattatctagataaaagaatgtaaaatggtacgtggtcatgtaagtaatacagttcctttgcaaattctstaactactgacttggaattgtagttatataatctttaaatcattttggggttgacttaatcccaaaactcttctccctcacccaggaaggcccaatcaataccacatctataaggagctaactctgcttctgctgctagttttgtgtccctggaaattcacctggcttccatggtcgtcagattcctggttgaaaaaacaaaaggttgaaaaatgaaatgcttgatgatttttgaagtgcct

SEQ ID NO: 796326 - DNA, 624 bp, Homo sapiens
acactcgttaggatggccactgtttacaaaaacagatgataacaattgtaggtgaggatgtggagaaatgggtaccctcatgcagtgttggtgggaatgtaaaatggtaaagccactgtgaaaaacacttgtggaggtttctcaaaaattaaaaaaaatacaattactatatgattcagaakttccacttctgggggtatgcccaaaagaattgaaagtagggtgttgaagaatatttgtattctcatttctatagcagtacgatcaccatagctgaaatatggaagtaaccaacccaagtgtccttcagtggatgactggataggcaaatgtggtaaatacatacaatggaatattgtttagcattaaaaaggaaggaaaaatctggcatttgtaacaacacagatgaactttgaggacattaggctaagtgaaataagccaatcagacaaaggcaaatatataattccatttttatgaggtaattagtcaaaattataaaggcagaaactggaatggtggatgccagagactgaatatctatattcattaaacactaactcctcatttccccttccttccagttttggaagatggaagcagttctagagtggatcgtagtga

SEQ ID NO: 796327 - DNA, 424 bp, Homo sapiens
tgatccttctattttaataaaatcactgataccaattaggagattattgcaaatgtaagaaaagaaactatgtggcttaggcattgccgttgtttttgctgttgttgcagtggtggtggtagtgttgtgtgtctgtgttagggaaaaagccagagccgagagaagtaattagacacaaactgcagartagtgtattaacagggaagcgtgacaaattagagtcaggaatggaaaaataataagtgacgttgagacgtctggttagaagttttgaaaataatattttgtagcaccatgagaatgttttctaaatagattttaaagttaaatattaaagcacgtaaaatgataggaaaatataaataaatattagtctatccttttgatggagaagagtaaaaactggagaaatgactgtggaagg

SEQ ID NO: 796328 - DNA, 548 bp, Homo sapiens
tacaattggattgtcagttttagagtatgtatcacatgcatatgagaagaatgtatattcttttgttttagggtagaaagttctgtagatgtttgtcaggcctgtttgatcaactgtcaagttcaggttctgaatatctttgttagttttgtgcctcaatgayctgtctaatactgccagtggggtcttgaagtcttccacttttattgcgtggttatctaagtctctttgtaggtttctaagaactcgttttatgaatctgagtgcctcttgttaggtgcatatatatttagaatagttaggtcttcttattgaatacatcctttactatcatgtaatgcccttctttgtcttttttgatcactgtcgtttaaagtctgttttgtctgaaattgaactatcaatccttgcttttttcagttttctgtttgtttggtagatttttctccatctctttacttagaacctatgggtgtcattgcatgtgagatgggtatcttgtagacagcatacagctgggtctttcttctttatctaacttacccctc

SEQ ID NO: 796329 - DNA, 570 bp, Homo sapiens
acaaaaaattatttgttagtctaagcctagggctaataatttaccagaatgtttatgaagactggtggataagagaaaagacttgtgctttttacttcttcagagtggttgcaactttaaatacactaatagcttttttttttctttttttttttttmtgaggtagagtcttgccctgtcacccaggttggagtgtaatggcatgatcttggctcactgcaatctccgcctcccaggttcaatcgattctcctgcctcagcctcccgagtagctgggattacaggcaggcaccaccacacctggcttaattttttggattcttagcagatatggggtttcaccatgttggccaggctggtcttgaactcctgaactcaggagacctacccgcctcagcctcccaaagtgctgggattacaggcgtgagccaccgtgactggcctaaatacactaatagtttgatttgatgtctgatgaaacattgatccagaaaataattataataaacaccttaaaagaaattcggcacgattacatacatatggctctaaatcaggagattttaaatt

SEQ ID NO: 796330 - DNA, 570 bp, Homo sapiens
acaaaaaattatttgttagtctaagcctagggctaataatttaccagaatgtttatgaagactggtggataagagaaaagacttgtgctttttacttcttcagagtggttgcaactttaaatacactaatagcttttttttttctttttttttttttctgaggtagagtcttgccctgtcacccaggttggagtgtaatggcatgatcttggctcactgcaatctccgcctcccaggttcaatcgattctcctgcctcagcctcccgagtagctgggattacaggcaggcaccaccacacctggyttaattttttggattcttagcagatatggggtttcaccatgttggccaggctggtcttgaactcctgaactcaggagacctacccgcctcagcctcccaaagtgctgggattacaggcgtgagccaccgtgactggcctaaatacactaatagtttgatttgatgtctgatgaaacattgatccagaaaataattataataaacaccttaaaagaaattcggcacgattacatacatatggctctaaatcaggagattttaaatt

SEQ ID NO: 796331 - DNA, 640 bp, Homo sapiens
atagtttgatttgatgtctgatgaaacattgatccagaaaataattataataaacaccttaaaagaaattcggcacgattacatacatatggctctaaatcaggagattttaaatttttgtgtgccatggatttctttggagatctgaagcatcctgtggaccctaattcagaaagaatactatttctaaacaaagatccatagtattatacataaaaatatatttaaatatatgtaaaatacattaaaaaatatgcaatgtggtaacatgwatgcctattagtacattaaataaaaagttacactggaagataattagactacttttgaaataataaacatatatcagatatatagtgtaatagtgatacgataggaaaatatctatgatttctactattgacaaagacacagtcactgctatggaaactgacttttggcctacattcataattgaaggaaattacatattccatttagaagtcagtaaaactaaagatataatttttcccatcttagttcacagacatctttgaattctatctagcacatccctaagttaagaagctcttaagtctaagtaaattagacttggaagacaaatacaatttttaactggaaagcacaaagcagatagttg

SEQ ID NO: 796332 - DNA, 475 bp, Homo sapiens
  misc_feature 433: n = A,T,C or G
tattcgtggttacaggctatgtatgcgcttttcattgctcatataataggtgaggttagaaatgtaagagcgtaaaagctggattgctcatcctgttaaggtatttttggttctatcagagatggggaagtcagctaatgattgcatatttagaagttggaaagggtcttttccttcataatgggagtggtaggttaagttagcaaagaaatccccttgacttaggcgtatgggtgaagtctaactgccagtcctctctgggatagtgccctattctttgttctcccagagggaacttatgatggatcaaagyattattcctttggcatacctcacaggctttgactacttgccggatggtccaaaggagatgtggccctgtaaatagggctttggccatttgttgagtgttctcaatacccatatgaaaagnttggtggagggtcttaagtattttccactggttggcttcatg

SEQ ID NO: 796333 - DNA, 508 bp, Homo sapiens
cgccactgacagcttgcaccgtgcacctgtaaaggtcgcagacactcaacagcagcccatgaatgcagccagaaaggggtctgtacccagcaaagccacaggtgcagagctgcccaagaacatggaatccaacctcttgcatcagcgtgatgtggatgtgagacatggagtcaaaagagaacattttggagctttaagatttgactgccccactggatttcaagacttacatggrgcctgtggcccctttcttttggccaatttcttacatttggaaaaaggtgtatttaaccaatgtctgtaccccattgtatctaggaagtaattaacttgcttttgattttatacgctcttaggtagaagggacttgccttgtcttcgatgagactttggactgtggacttttgagttaatgctgaaatgagttaagatttgggtggaggggggctgctgggaaggcatgattggttttgaaatgtgagaatatgagatttgtgggggtcagggc

SEQ ID NO: 796334 - DNA, 624 bp, Homo sapiens
tggggcctgtggcccctttcttttggccaatttcttacatttggaaaaaggtgtatttaaccaatgtctgtaccccattgtatctaggaagtaattaacttgcttttgattttatacgctcttaggtagaagggacttgccttgtcttcgatgagactttggactgtggacttttgagttaatgctgaaatgagttaagatttgggtggaggggggctgctgggaaggcatgattggttttgaaatgtgagaatatgagatttgtgggggtcagggctagaatcatatggtttggctgtgtccccacccaaatctcatcttgaattgtagctcccataattcccatgtattgtaggaaggayctggtgggaggaaactgagtcatgtggccaggtctttccagtgctcttctcttgatagtgaatatatctcacaagatctgatggttttacaaagggaagttctcctgcacacgctctcttgcctgcccccatttaagacgtgactttgctcctccttcatcatccaccatgattgtgaggcctccccagccacgtggaactgtgagtcaactaaacctctttcttttataaaattgcccagtctcaagtatgtctttattag

SEQ ID NO: 796335 - DNA, 624 bp, Homo sapiens
tggggcctgtggcccctttcttttggccaatttcttacatttggaaaaaggtgtatttaaccaatgtctgtaccccattgtatctaggaagtaattaacttgcttttgattttatacgctcttaggtagaagggacttgccttgtcttcgatgagactttggactgtggacttttgagttaatgctgaaatgagttaagatttgggtggaggggggctgctgggaaggcatgattggttttgaaatgtgagaatatgagatttgtgggggtcagggctagaatcatatggtttggctgtgtccccacccaaatctcatcttgaattgtagctcccataattcccatgtattgtaggaaggacstggtgggaggaaactgagtcatgtggccaggtctttccagtgctcttctcttgatagtgaatatatctcacaagatctgatggttttacaaagggaagttctcctgcacacgctctcttgcctgcccccatttaagacgtgactttgctcctccttcatcatccaccatgattgtgaggcctccccagccacgtggaactgtgagtcaactaaacctctttcttttataaaattgcccagtctcaagtatgtctttattag

SEQ ID NO: 796336 - DNA, 653 bp, Homo sapiens
gcctgagtgtttcccacctgaaagaaaaaactgcccattttttcccacctgccaagaacctacaacagtccctggaccctgtgttcagaatagttgcactcactgaagcagcagcggaaacactagttttcctcctagaccacaaacgggaccaaggaaggttggatttagtggcccttactgaagcattcttgaaacctgttagttagagtcctaagcattttctcctgtgggtattgggaccttacccttgtcctataaagttatgcctcaaaatggagtcgagggccataccctgagggagggaagggatctccagggttggaagagtgacaacttttgtcctcacttctcatcatatgaataggaaggatataatttctgaggctccccatatcctagcttygggaatagcctttgttaggcctgctagtctgaggatggatcctaaaattcctgataatgcccccccaaatgggagttcaggcaaaaattatgtctttctgattggtgagcccaggtgcctaaagaagggaacagagtcccaaaatttatattagaaatcttccttataggagaaactagaagaccaccagggacaaggagtggtttttagaagtgggactagccttggagaagagaggtgggagggt

SEQ ID NO: 796337 - DNA, 642 bp, Homo sapiens
cagatttttaaaataacatttatgtcactctcttcaagtcattttagaccctcactaatacctactgtcatttcaaagccactcctagatcacaacactttacttccagttatcaaaatctttattatctatatactgtggcataacaatccatacagtgcttagcaatttaaagcaataaatatttattaattcacaaagcttcatattgtgaagaatttatgagtaggttctctgcattgcactggctcaggattcatcatatagctggagtactatgtaagaggaaaatatgtatgttgtagataccaagaattggggatcatgggacaatcttgaggactgcctgccacagaagcaaaatgataccagctgggtattcagatatacctaatggaaggaagaatatcagaaatggtaaaaacataattaaatatrtaagacttttcttattattaaatacctttagaggacaattgactttaattaaacatagtaacaatatagtgtccttaatatgacatattatttgatgcttatgtaggcccatttcttacattgagtctaattactctatttaaaatgttaactaaacactccaagatgtaaataaaggtaatatatttaaatattatatgacaa

SEQ ID NO: 796338 - DNA, 643 bp, Homo sapiens
ctttagcaacaaagaaaagttcttaacagaaataaaagattgaaaaaatctacaaagtaataacaatttgatctataaccaagttgtcaaaactgataaaggaagttaaaaaagagaatgatactcttatattactaaaaagaaaaaatagtcaatccagtattagctatctagaaaatctatttcatgcttgaatgtaaaataaagatatttatgtgcaatgagagaaaaggaaatgattattaagagacaatttttaagtaaatttctaaaaktcgtgctgcatgaaaaatcaaaatgaacctggaaataattttgatgtaaaggaaaaactctgaacaataaactaagcaattctgaacagtatgcctctatagaacaaataaaatattatcagtttattaggttaaaacaagaaatgatgtataaactggacaaaacaatatgtaaattaacatgtaaatggaaggacatgctttttccgaagaatgccttttacattgaagtcactttcattcttttttaaaagtattttacagacatatatttcttaatattccctactttcagggagtgaaaaatgagcaagtctcacaatagacatgtaaattgggatggagatattctcccttcttgtattttc

SEQ ID NO: 796339 - DNA, 643 bp, Homo sapiens
ctttagcaacaaagaaaagttcttaacagaaataaaagattgaaaaaatctacaaagtaataacaatttgatctataaccaagttgtcaaaactgataaaggaagttaaaaaagagaatgatactcttatattactaaaaagaaaaaatagtcaatccagtattagctatctagaaaatctatttcatgcttgaatgtaaaataaagatatttatgtgcaatgagagaaaaggaaatgattattaagagacaatttttaagtaaatttctaaaatwcgtgctgcatgaaaaatcaaaatgaacctggaaataattttgatgtaaaggaaaaactctgaacaataaactaagcaattctgaacagtatgcctctatagaacaaataaaatattatcagtttattaggttaaaacaagaaatgatgtataaactggacaaaacaatatgtaaattaacatgtaaatggaaggacatgctttttccgaagaatgccttttacattgaagtcactttcattcttttttaaaagtattttacagacatatatttcttaatattccctactttcagggagtgaaaaatgagcaagtctcacaatagacatgtaaattgggatggagatattctcccttcttgtattttc

SEQ ID NO: 796340 - DNA, 579 bp, Homo sapiens
gcttcactctgtactacaatcatcaagcaaatgggtggatgtttaaaaatgaaacaagaactgcattttcttaaaaatcactctaaactaattctataaggttgttataaggaactaatgagccaacttgttgaggtgcttggaaccattctggcacagtgttgggctatgtgtttgttgaatgaatacaatcatgatgagaagtttgaattgttcatctgaaaagtcagaggcaactattaagttcatctcccatggcttcgagaagaagatgctcctgaggtttcagtttgtaactgtgagttttctatgagagtagctgtgtatgtggggkgtgtgtgtgtgtgtgtgtgtgtgtgtgtgtgttttgtttctttagatttaatttttctaaataattttttagtttcataccaaagtctcattatttaaaacaatacgtcagagaatacattcatgtttctgaaattactgagttcaatgtcacaattagcatctgtgataaagttttatatgctattattttaaattaatagaattctatatttaaaaccctgctatagctatttaaaggattta

SEQ ID NO: 796341 - DNA, 724 bp, Homo sapiens
gagggggggttgatggaccttcggaaatgggagcagaaatttcatatgcataagtgaaagcaacacatgtccagctctatgtattgaggctgtaagaaccaggcttctaggatctagattctaggggcaggagacctgagagaaaacatggaatatattgacatagcagccagttattgcctcacttgtattcctgtcttatcatgtcagtcyttgccttccaaatgccagcaagcatctgcttttgtttgcctgagaaatcctcagacctccagagcccactttgcacacaagtacaccaggtctgaattcttggggaatgagcaacactctcccagcagtcttcaacaaatgaatgaggcctgctcacctcaagaaagtattgaagcagactggttggggactgtgaatgaagcaactgcttggggactgtggtgagctccctcgctgaagtagccagctacaactagctacagcctgtttgatttcatttggcagtgtggcctttgatttgtccaattctcttgtgggaaatctgatttttaaatatttataattaatttaaacttctttttttaaaaacaaatcatatttgtttatttgatttttttggaaatagagtctcactctttctcccagtcttgaatgcagtggtgcaataacagctcactatagcctcaaccttccaaactcaagggatcctcccatctcagcctcccaagta

SEQ ID NO: 796342 - DNA, 519 bp, Homo sapiens
agttcaatcaatgcaaactcttaatacctcccaactcaagtatttcccaaggtgtgctctcattaaatgagcttgaaaatgctttgtattttattggcctcttgggatatcaaaggatctgagaatttctgcagtaaacaaggtttttaatttcattcaacttggcaatttcaaacttataaccaccattcccattgctaattcctrtagaaatttcacacaattaaatgtccccagaaacatagtttgggaactattgttctttgtccccctttcccattacagctgtgtagtggatacccttggtaccccattcagatcctctagggtcttttaaccaactttttttcaccattgcccagctgtgctcttgccattaaaagtttatacctttgaccttcagaggactgaccttgggcctgtaaccagcctcacctgtagagagagtcagaagtgactcagagtttacatctcccttaggatggattctagcccatggctagctggtatgggatacag

SEQ ID NO: 796343 - DNA, 508 bp, Homo sapiens
atagtattgcctctgaatttcatatgactttagtgcttcctgtaaaagtgatggctcaattctctcaccagttttctcttattaaacagccacaaaatctttattggtagcatgtaaagatatcttagagctattacttgtctccataaatgcaaatgctgacactgcaattgcaggacaagacttacttataygggcttatctgggggacccaaagtagcctttaaaatgttactcttttattcacttatcaaatgaaaaccacaaatgcaaaatttccgctaaagaattcataaatcccagtttgattgaaactgttctaacatcaattttaaaatatcccatttcctgacactgcattcctggcaaataaatatctccagtttctgaaaatgagtagccttcaccagggcccagcggttactgacaaccagcagtttctgacaagcagttactgtgggactgacacagtcaagtgcctagggtacagggaatcctctcccaacaa

SEQ ID NO: 796344 - DNA, 560 bp, Homo sapiens
attctttaacacctccagaagatcactctggctcaccagcaatggatccaaaccaagatgaaatctccaaattgccagaaaaagaatttagaaggttgattattaagccaatcaaggaggcaccagagaaagttgaagcccaacttaaataaataaaaaagatacagaatatgaagggaaaattcttcagtgaaacagacagtacaaataaaaaacgaacacaacttctggaaatgaagaacacacttagagaattgcaaaatgcactggaaagtctcagcaatagaatagaacaagtagaggaaaaaacttcagagctcaaagacaaaactttcaaattagcctaatctgacaaagacaaagaaaaagaattttaaaaaataaacaaatcctccaagaagtttgggattatgttaaacgaccaaacctaagaataattggtkttcctgaagaagagaaatctaaaagcttggaaaacatatctgaggaaataatcaagaaaaacttccccagccttgctagagatctagacatccaaatacaaaaggctcaaagaacac

SEQ ID NO: 796345 - DNA, 605 bp, Homo sapiens
aagaatccaatcaaggactcaactccttttacaatagctgcgaagaaaataaaatacttagtaatatacctaaccaaggaggtgaaagacctctacaaggaaggctacaaaacactgctgaaagaaatcatacatcacacaaacaaatggaaacacatccccactcatggatggrtagaatcaatattgtgaaaatgatgatactgccaaaattcaagggaattcccaccaaaataccaccatcattctttacagaactggaaaaaacaatcctaaaattcatacagaaccaaaaaagagtctgcatagccaaggcaaggctaagcaaaaagaacaaatctgcaggcattacattacccaacttcaaactatactataaagtcatagttatcaaaacatcatggtactggtgaaaacacaggcatacaggccaatggaacagaatagagaacccagaaataaagccaaatacttacagtcaattgatctttgacaaagcaaacaaaaacataaagtggggaaaggacacactattcaataaatggtgctggcataattagcaagccacatgtagaaaaatgaaactggatcctcatctctcatct

SEQ ID NO: 796346 - DNA, 454 bp, Homo sapiens
gttgtaaggaatataataagaaggaattatattcggctttcccagtaccaaatcagtattagtcagggttttccaaagaaccaatagggtatgtatatagatacataaggcgggaaatttttaggggaattagctcagacaattatggtggctgtgaaatcctatgactgccatctgcaaactggagaccctgggatatcagtagcatggctyagtccaagtccaaagacctcagagtcaggaaagctgctggtgtaactgaaaacctcaggacccagggggccactggtataaatcttggagtccaacgctcaatgagcctgaagttctgatgtcaaaggcagcaaaggtctgtctcagctctcagagagagaattcactttctgtattattgtcttcaggtccctggccaattggatgatgcccaacaatactgagggaataccttccccac

SEQ ID NO: 796347 - DNA, 608 bp, Homo sapiens
gctgtgtttcattccgattatatgttagagaatgctgtttacacatgcaagtctcacagtaatagaaaccattggcaaaaacaacaagcaacaattgggagggggacttgggggagcatcaaacaatctgatattgtactcagtgtattgcagctattaataacatttggttataaaatccccccaaaacactgcgacaatgttaaacaagataggatgagataccgggacaataggtataagctgtttccatcctgggaaaactggaatacggccaccttaataagacccaaagcctgaactcttctctaactagtttagggtttgtaatattttttgataagcccctcccttgaaaaagactcagtctaaccaaatttctccaagcttacatattaaatccaaatytgaatggcttctcttatgtattttgccttgcaaaatttgcagcacttacattaaataaaagtccatatatttccatatatttcatgtttcaattgatcttggccattaacataataaaaaggaaaattcctgaggatacttctcaagattttacatcaatgtttggcaaatttgcatacatttatgttaaagtcttggct

SEQ ID NO: 796348 - DNA, 488 bp, Homo sapiens
ttcaaagaacttcttgatttttgccttaattttattatttacccaagagtcattcaagagctggtagttcagtttccttgtagttgtgtggtttcaggtgaacttcttaatcttgagttctagtttgattgtgctgtggtctgagagactgttaagatttaagttcytttgcatttgctgaggagtattttaattctcattatgtgatcaattttagagtaagtgccagagttctgtagatatctatcaggtccacttgatccagagcttagttcaggccctaaatatctttgttaattttctgtctcagtgatctgtctaataatgtaagtggggtgttaaagtctcccactattattatgtgggagttgaagtctctttgcagatctctaagaacttgctttatgaatttaggtgttcctgtattgggtatatatatataatagttagctcttcttgttgaattgaactctttaccattatgcaat

SEQ ID NO: 796349 - DNA, 608 bp, Homo sapiens
atttaatacacaaaacaaaaagaagatacaaaaatgagagctgggcgtggtggcatgcacctgtaatcccatctacttgaggctgtggcaggaggaatgcttgagcccaggagtttgagaccagcctgggctgacatagcaacaccgtctcaataaaaaagaaagaaagaaaaacaacaccaacaaaaaaaattgaagcattccttggagatattgtgggtttggttccagactgttggaataaagcgagtcacacaaawttgttggtttcctggtgcatataaaatttaggtttacactatactgtagtctaaatgtgaatagcattacatcttttaaaaaacctatatatcttaatttacaacactttattgctaaaaaatgctgacacaacaacacaaaatgagcacatgctgtggggtaatgatgtgaataaacgtgcttgtggcagggttaccacaaaccttccctttgtaaaaaacacagtccctgtgaagtgcagtaaagcaaagctcagtgaaacaaggtaggcctatagaggaaagttgtaaaattttatgcaaacattcatatgtgaaaagatactctaaaagctagtagcttctgat

SEQ ID NO: 796350 - DNA, 608 bp, Homo sapiens
atttaatacacaaaacaaaaagaagatacaaaaatgagagctgggcgtggtggcatgcacctgtaatcccatctacttgaggctgtggcaggaggaatgcttgagcccaggagtttgagaccagcctgggctgacatagcaacaccgtctcaataaaaaagaaagaaagaaaaacaacaccaacaaaaaaaattgaagcattccttggagatattgtgggtttggttccagactgttggaataaagcgagtcacacaaatttgttggtttcctggtgcatataaaatttaggtttacactatactgtagtctaaatgtgaatagcattacatcttytaaaaaacctatatatcttaatttacaacactttattgctaaaaaatgctgacacaacaacacaaaatgagcacatgctgtggggtaatgatgtgaataaacgtgcttgtggcagggttaccacaaaccttccctttgtaaaaaacacagtccctgtgaagtgcagtaaagcaaagctcagtgaaacaaggtaggcctatagaggaaagttgtaaaattttatgcaaacattcatatgtgaaaagatactctaaaagctagtagcttctgat

SEQ ID NO: 796351 - DNA, 603 bp, Homo sapiens
ccaaggaaataattctaacagtggcaaagtaattatgtacaaagaatctttgagatcattaagtatttatattcagaacaatgctggccctaagacagtatggtgagcacaatttaaggcaaaaaataagcaggaaaaattcctactgacaaaacttaggataattttactttatgggtattgcctcattcccaaccactattactggatcrttttctgaatgcttatattttattaagacacaggaatttaaaattaagtcatctgtgcttttgattagaagaatgtacttttcagtagtgaaatacagagtatcttaccagaaaaacaggaagctgaaatttatcattcagaactacagcttgtacactacacggtccacagagccgagcaataacttctttacccaaaaagtttgcatggaagataaacagcaggatgccagagcctgaaaatgggagatgtgtgtgaattacttcaaaggcaaccttcagtccccagaggaacactcaacaccagatggaagcaggcccctgagctgggcctggtcagacaggcatcacccactctgcctggaggctcagaggaggctggccctctcaa

SEQ ID NO: 796352 - DNA, 651 bp, Homo sapiens
gcaaagcaataaaagccaaggcagctttgtcatggtgagctacttctcgcgggagtcaggatccgcatctgcagactatacaaacaacacaaattaaaagcacaatcatcattgaaatcacagagcttccaagtgtttttatccattttaatgggttactagctgctaatctgtctgcagctccttcaagcactccagttcctggcattaaggtcaggtgtgcctgggatgctttaaatatttgttcttttaattttgcaatatctaaagacaaatttgtagagtgtctttctagatgcttttttattctttcccaaatttttgatcttattaagccacaaatccttatcttatgtttagctcctacaacgggccatatcatctgaggttgaggtgccactataccgccatggtttcagataagaggaactcttgccgtactttttatcatttctaccatctgaccrttttgttcagatcatctaaacatagtgtagcagtggcacacagactgagaggtgcaattcaagctaaacatccccttaggggaccaattaataatgattccataggaatcgttgtgcagcacctctgcctgttctgcaatgcaatcttcctaaacaagtatgttcattttgtctaactgggtcc

SEQ ID NO: 796353 - DNA, 527 bp, Homo sapiens
aaatatgtcagttatattcttttcagcatcctgggctctctgttttatagtaagtacaagttaggaagaatgggaatgccaccaagtctggggacctgacctctgcaagaagcattgtttttttcttctcttcttgacaagagatgatgaaaacttgggattaaatgtataattcagcgtatgcaaagggtttttaaaatgttcaagttgacattatgatataattttggttaataatcacattatagtagtatatatagtcttaagtacttttggagcataaataaatggaatcaactctagtttgccaaaactcatttttttytatatagctaatctatagtatgaaatatgtatttggttacataaaattttcatgtgtgttttcccagtgttcagtgtctttgccatttccttaattttgcatcctcgttatcatcctgtttttattttgcttttgtcttcactctaggcttccctctggaggcctgccttttcctgctctagtctgaactggctgctgtcta

SEQ ID NO: 796354 - DNA, 598 bp, Homo sapiens
atgtgtgttatcattcaactcccacttataagtgagaacatgcagtatttggttttctgttcctgcatttaatttgctgaggataatggcttccagctccatccatgtccctgcaaaggacatgatttcactcctttttatgawggcacagaattttgaattctctaataaagactctacatttcaccttcagaagtagttactcaccacaaatattcttatccaaatacatactaggagttctgttgcatagcatgaagtatgttagtaataatttgtattgataataatatccataaaaatcaagtagtgttcaaattgtgtcatgttgattaagaaaattgtcgtctcttttctcagtgaagtgcaaaaatccaacaggcccagcagtcatacaacatgcctactggaagaaaagtagtggttttcaaaatggagtacccaaatgcttggaggctatgagaagatttactaacgagttttaaagagctccatttccagatcctcaagtttctcatgcattcttttgtaaaaactgtttttcctgggaacgtgcctgttccaaaccacttctgctttcccaccacctcatttacca

SEQ ID NO: 796355 - DNA, 598 bp, Homo sapiens
atgtgtgttatcattcaactcccacttataagtgagaacatgcagtatttggttttctgttcctgcatttaatttgctgaggataatggcttccagctccatccatgtccctgcaaaggacatgatttcactcctttttatgaaggcacagaattttgaattctctaatmaagactctacatttcaccttcagaagtagttactcaccacaaatattcttatccaaatacatactaggagttctgttgcatagcatgaagtatgttagtaataatttgtattgataataatatccataaaaatcaagtagtgttcaaattgtgtcatgttgattaagaaaattgtcgtctcttttctcagtgaagtgcaaaaatccaacaggcccagcagtcatacaacatgcctactggaagaaaagtagtggttttcaaaatggagtacccaaatgcttggaggctatgagaagatttactaacgagttttaaagagctccatttccagatcctcaagtttctcatgcattcttttgtaaaaactgtttttcctgggaacgtgcctgttccaaaccacttctgctttcccaccacctcatttacca

SEQ ID NO: 796356 - DNA, 598 bp, Homo sapiens
atgtgtgttatcattcaactcccacttataagtgagaacatgcagtatttggttttctgttcctgcatttaatttgctgaggataatggcttccagctccatccatgtccctgcaaaggacatgatttcactcctttttatgaaggcacagaattttgaattctctaataaagactctacatttcaccttcagaagtagttactcaccacaaatattcttatcmaaatacatactaggagttctgttgcatagcatgaagtatgttagtaataatttgtattgataataatatccataaaaatcaagtagtgttcaaattgtgtcatgttgattaagaaaattgtcgtctcttttctcagtgaagtgcaaaaatccaacaggcccagcagtcatacaacatgcctactggaagaaaagtagtggttttcaaaatggagtacccaaatgcttggaggctatgagaagatttactaacgagttttaaagagctccatttccagatcctcaagtttctcatgcattcttttgtaaaaactgtttttcctgggaacgtgcctgttccaaaccacttctgctttcccaccacctcatttacca

SEQ ID NO: 796357 - DNA, 495 bp, Homo sapiens
aacataaaaacactgaatattccaaaagccagaatgcctcttctcctccaaatgattgcaaaacttctcctccaaacaactgcaacacttctccagcaagcacgcagaatggggctgcagctgagatggatgaactgatagaagtaagtttcagaaagtgggtaataacgaatttcactgagctaaaggattatgttctaacccaatgcaaagaagctaagaaccatgataaaagattacaggagctgttaactagaataaacartttagagaggaacataaatgacctgatggagctgaaaaacacagcacaagaacttcatgatgcaaacacaagtattaatagctgaatcaatcaagcagaagagagaatatcagagcttgctgaaataagggaggcagacaagattagagaaaaaaagaatgaaaaggaataaaccaaacctctgagaactatgggactatgtaaaaagactgaacctatgactgattgga

SEQ ID NO: 796358 - DNA, 522 bp, Homo sapiens
ccaatattcagattcagtaagtccagagaatccaataagatatccatgagaagatctaccccaagacacataatcatcagattctccaaggttgaaatgaaggaagaaatattaagggcagtcagagagaaaggccaggtcacctacaaagggaagcccattagactaacagtagacctctcagcagaaaccctacaagccagaagagaytgaaggtcaatgttcaatatttttcaagaaaagaatttccaaccaagaatttcatatccagccaaactaagcttcataagcgaaggagaaataaaagccttttcagacaagcaaatcctgagggattttgtcaccaccagccctgctttgcgagagctcctgaaggaagtattaaacatggaaaggaaaaaccgttaccagccactacaaaaacacactgaagtacacagaccaatgacgctatgaagcaaccacattagcaagtctgcaaaattaaccagctagcatcatgatgacaagaccgaatttaca

SEQ ID NO: 796359 - DNA, 522 bp, Homo sapiens
ccaatattcagattcagtaagtccagagaatccaataagatatccatgagaagatctaccccaagacacataatcatcagattctccaaggttgaaatgaaggaagaaatattaagggcagtcagagagaaaggccaggtcacctacaaagggaagcccattagactaacagtagacctctcagcagaaaccctacaagccagaagagactgaaggtcaatgttcaatatttttcaagaaaagaatttycaaccaagaatttcatatccagccaaactaagcttcataagcgaaggagaaataaaagccttttcagacaagcaaatcctgagggattttgtcaccaccagccctgctttgcgagagctcctgaaggaagtattaaacatggaaaggaaaaaccgttaccagccactacaaaaacacactgaagtacacagaccaatgacgctatgaagcaaccacattagcaagtctgcaaaattaaccagctagcatcatgatgacaagaccgaatttaca

SEQ ID NO: 796360 - DNA, 522 bp, Homo sapiens
ccaatattcagattcagtaagtccagagaatccaataagatatccatgagaagatctaccccaagacacataatcatcagattctccaaggttgaaatgaaggaagaaatattaagggcagtcagagagaaaggccaggtcacctacaaagggaagcccattagactaacagtagacctctcagcagaaaccctacaagccagaagagactgaaggtcaatgttcaatatttttcaagaaaagaatttccaaccaagaatttcatatccagccaaactaagcttcataagcgaaggagaaataaaagccttttcagacaagcaaatcctgagggattttgtcaccaccagccctgctttgcragagctcctgaaggaagtattaaacatggaaaggaaaaaccgttaccagccactacaaaaacacactgaagtacacagaccaatgacgctatgaagcaaccacattagcaagtctgcaaaattaaccagctagcatcatgatgacaagaccgaatttaca

SEQ ID NO: 796361 - DNA, 330 bp, Homo sapiens
ttcaacatccttaaagttaaaaactctcaataagctaggtattgaaggaatatgcctcaaaataataagagtcatttatggcagacccacagccaatattatactaagtgggcaaaagctggaagcattccttttgaaaactggctcaagacaakgatgccctctctcttattcaacatagtattggaagttctggccagggcaatcaggcaagagaaagaaataaagggtattcaaaagtaggaagagaggaaatcaaattgtctttgtttgtggatgacatgatactatatctagaaaacaccattgactcagcccaaaagcttctta

SEQ ID NO: 796362 - DNA, 605 bp, Homo sapiens
tcaaattccagggtgcatctgaccagcacgtgcttatgccctcactgcaagggagactgggaaagtgagctactggtatctgatatttcaatgaccactacagtaaaatctccatttgtttcctgtggttgctgtaaaaaattaccacaaacttggtggcttaaagcaacagaaatttattctcrcatagttctggagcccaaaagaccaagtcacggtgtcggcagggccacactccccactttctagtttcttgcctcttctagcccgggtggctgcaggcattccttagcttgtagccacatcactccagtctccacctccatctttatattgcactttccatgtgtatttgtcaaatctccctctgcctttctgtaatagcatgtgatggcagatagaactcaccttaataattcaggctaaccacctcatcttaagatccttaatttagttatgtttgcaaaaatatgccccaaaaggtagcattcacagggcctgatatctttgagattcagatgcaacaaattatcctttacattagaaggagtatttagatgtacacctttcactaagatggcaagcccctgaatgtttttttcagg

SEQ ID NO: 796363 - DNA, 497 bp, Homo sapiens
agaactgggtggcagttactaagggctactgaggtgctggagaaaaaatgatgggaaaaatgttacagagctatctattgctctgtaacaaaccaactcaatacttagtagcaaccaaaacattaattttgttcataaatcagcctcaggcggggtggcctaaatgctagaatctggaatcatgcaaagtcttgctccctcacatgtcaggcagttgatgctagctctcagctagaacacctacccatggccctctcacatgactgcttcaatttatcacacctcrgtagctgaatttttagggggaaaagtcccaagaggggaaagagagtgacgtggaagctgcattgccttttatgaatttgcctctgagatcatgcagcatttactaccagcgttatatttgttaggagtaagccacaacagctggccgagatgtcaaaatctgctgatatgtttaaacccatcggaatgatgaatcactaatttaaggtaag

SEQ ID NO: 796364 - DNA, 572 bp, Homo sapiens
caatttccagctccttattagtaataaatctggtgataacccttaagtgaccaagagacagtagtctctggtatggccccctgggtaccccattctctttgtcccctgaatcatctgttcagagacacctgcttcttgatcagaggtcttatcattcatttcaggaattgcctattctttatattgcagatgttccaagtagacactgttcactgagtctttatgaattgccatttcttctctctagcatgctctgtagaatactggctccctatgccacctgaggatggaaccattgccctttcttctaagatcagaatttgttgcaaggtggagctgcaagaaggttttcaaacctattttgaargatattttaggcttagatccactgaaaatggattctcttatacagctccatgatacctcctgataacacattaaatatgctctaatgataacagctcaaatatattactgtttacttatttcctgcctctacatttagggctaaattatgcctacacctagttttgttatatagtcattctcaaggtgttatcagatactcagat

SEQ ID NO: 796365 - DNA, 625 bp, Homo sapiens
acacagcactcaacaagattactatatgcatgaaatgcaaaaggatatataaaggattatgaaaccaatttccagctccttattagtaataaatctggtgataacccttaagtgaccaagagacagtagtctctggtatggccccctgggtaccccattctctttgtcccctgaatcatctgttcagagacacctgcttcttgatcagaggtcttatcattcatttcaggaattgcctattctttatattgcagatgttccaagtagacactgttcactgagtctttatgaattgccatttcttctctctagcatgctctgtagaatactggctccctatgccacctgaggatggaaccattgccctttcttctaagatcagaatttgttgcaaggtggagctgcaagaaggttttcaaacctattttgaaggatattttaggcttagatccactgaaaatggwttctcttatacagctccatgatacctcctgataacacattaaatatgctctaatgataacagctcaaatatattactgtttacttatttcctgcctctacatttagggctaaattatgcctacacctagttttgttatatagtcattctcaaggtgttatc

SEQ ID NO: 796366 - DNA, 625 bp, Homo sapiens
acacagcactcaacaagattactatatgcatgaaatgcaaaaggatatataaaggattatgaaaccaatttccagctccttattagtaataaatctggtgataacccttaagtgaccaagagacagtagtctctggtatggccccctgggtaccccattctctttgtcccctgaatcatctgttcagagacacctgcttcttgatcagaggtcttatcattcatttcaggaattgcctattctttatattgcagatgttccaagtagacactgttcactgagtctttatgaattgccatttcttctctctagcatgctctgtagaatactggctccctatgccacctgaggatggaaccattgccctttcttctaagatcagaatttgttgcaaggtggagctgcaagaaggttttcaaacctattttgaaggatattttaggcttagatccactgaaaatggattytcttatacagctccatgatacctcctgataacacattaaatatgctctaatgataacagctcaaatatattactgtttacttatttcctgcctctacatttagggctaaattatgcctacacctagttttgttatatagtcattctcaaggtgttatc

SEQ ID NO: 796367 - DNA, 572 bp, Homo sapiens
caatttccagctccttattagtaataaatctggtgataacccttaagtgaccaagagacagtagtctctggtatggccccctgggtaccccattctctttgtcccctgaatcatctgttcagagacacctgcttcttgatcagaggtcttatcattcatttcaggaattgcctattctttatattgcagatgttccaagtagacactgttcactgagtctttatgaattgccatttcttctctctagcatgctctgtagaatactggctccctatgccacctgaggatggaaccattgccctttcttctaagatcagaatttgttgcaaggtggagctgcaagaaggttttcaaacctattttgaaggatattttaggcttagatccactgaaaatggattctcttatacagctccatgatacctcctgataayacattaaatatgctctaatgataacagctcaaatatattactgtttacttatttcctgcctctacatttagggctaaattatgcctacacctagttttgttatatagtcattctcaaggtgttatcagatactcagat

SEQ ID NO: 796368 - DNA, 432 bp, Homo sapiens
tgacaaggaaattaacttttctgagactcccttcccctattctgtattatatagataataatatctcttttataagactgatgtgaaaagatggaaggctgctggcttatgtccccaaatatttttattctttttttctcctgttcctacattgaagtcttggaaaggtggttatttttaagycatttggatagttactgatttgtagcatgtacttacttttctgtgaaataaaaaagttaatgaccaattatgatcttctgtgctgaccatgttgcacattctatttactggatgccaagggggcaatgatagccatggtactgattaatagagtcttgtgacagatgggattcatttaaacttctaagacagtaattgcttacattcaactgtggaaagtctacattaaaaatccagatggaacatgga

SEQ ID NO: 796369 - DNA, 555 bp, Homo sapiens
catttctattttgtgtaagacacctaatttatgaaactttgttatagctgccagagctgattaagatagtcagaaatagaatggggcctacattccattttacattcttaaaaaaccctctaggggaattttttcatgttcatttttcctaatgtattcctcaaagctcaaattgatcagaaatgcttcacgtttctgcctttcacccccggagatcgaaacacactatccttctttctgctgctatctgagctgatttttaaaaaaataagtgcacacragacattcaaatacttccctgtgctatcatccttaattcttactgggcctgttgactcccagatcccatgacttccaatcccttcttgtttgtggttaatatttttgttttactaaatcatatgctctgaaaattacctaaatatatattgaattaatacatgggaataattttattactttttttgttgttgtttttagaagtgtagtattcttggttgaaaaattaactcacgtagaaatttgcagtattgttgcattgttttctagaatata

SEQ ID NO: 796370 - DNA, 585 bp, Homo sapiens
taaaaaaaaaattacaaattttatctattccctttcctttaaattatattggactgatgctattaaagcagacctccaaattttaaagtcctttagatttcaacctcaaattactaaggggtagagtagctatccacttcaaggtctattttatagtctaaactttatttcattytttctctctacaatcaccacccaatgctgtctgattttctttgaaccattcttagatgatctcattcaaatcatgttctttaaatgttctcaattcacctttttctattacaaccctagaagtgtaaggtgttaaaatcaactctgaagctattctagctacgttcactcagcctaataattcctagattatgctatgcttttttaaagcacacaattagcaactcattgggtagtttgaatcaaagaatttcttagaagttatcacatgtaaatccattggcctgcataagtaatccaaactatatcaatatttttttaagttaagaatattttgagattcctattcatgctgttttttgtctcttttcagtcaagtcattatccctaaaatattgttattaacagaca

SEQ ID NO: 796371 - DNA, 622 bp, Homo sapiens
cagtgaaggataatgttttgtttaagttgtcagtgttcacccttcaaaaatgtaaaatataattccaaatcaaaatccaagttgcttttctttttggtattttgcgatttattgtagcattacctttatttgtgaggaaaatatattgaaggtttttttctcattaaatatgtaactatgaaatatttaggtctacaaaatgaatttctctatattttatgaacaaaatatcctagaaaagagagactttttaaataaatgaagattagtgaggataattatttcayatagaaaaattacatttattggcttctaagacctaatctactcaataaaataagttatgataccttaataactgaggaaaatagacataagtaaaaaaaaacacgaggagagaagtctacatgtaagtattctgaggtcaggactttttcaactttatcacaaaattcacagggtggataaatagtatttccacattttataaaggtttcgaggaagcctcagtataatcagcccctaacatattatcttctagatagccaagttctgtagctcacaacacatggcccctgccttccaactgtaattaacataatctggttatcttattctgtaa

SEQ ID NO: 796372 - DNA, 601 bp, Homo sapiens
ctctcagtctcaagtgatcctcctacctcagcctcctgagtagttgggaccacaggcatgtaccaccatgtctagctaatttatttttaatttttgtggaaatgggtatctccctcatttgcccaggctcgtgtcaaattcctggactcaagtgatcctccctcctcggccttccaaaatgctgcgataacagacatgagccactgcacctggcctttttcttttctttyttttttttcttttttttgagacagggtctctgtcacccaggctggagtgcagcggcgtggtcttagctcactggaacctctgcctcccaagctcaagcaatcctcctgcctcagcatccccagtagctgggactacaagcaccgtaccaccacgcccagctaattttttgttttttgtaaaggcggggtctctctgtgttgcctaggctggtctcaaacttctgagctcaagaaagttgcccgccttagcctccaaaattgctgggattacaggcacgagccatggtgcctggccctttgtattcttataaagtgatggaagatgccattttataaagtttaaaatgtagggaaaaaaaaacttatttgga

SEQ ID NO: 796373 - DNA, 676 bp, Homo sapiens
ggtgccccaaggagggacctccagtgcaggcagagaaggccttgcctgtagagaattttacaacgataataaaactgacatctctctgcttgttgttatgactgtgcactggcaatactaaacagtgtcagtgataaaatattgcttcctgaaaaaaaactcttgttggtctaagctctaaacaattgctttgattattgttgaatatatatatatataatgtgtattgagaaataaagaaattccaagctccctcagctgactgaatggatcccctcttggccaatggaacaccaggggaaccttggaagctgaattcacggccatgatgagatgggagatcagacataacctcactgacccctcccttgtgaacagccattaggttttcttccctaagagttaaagagaaattaggcctttygaaagactgctagctgatcttcccaggtacagagcaaagacaaagcatgagattaagctcatcattccttcacccctccccaagatctctgcttgctccattccctttttcttcaaatgttcaccttatcttatgtaaaatttagatttacttggcattaactcaaatctcacaattatgtaatcatttctctcattgctgtccccctcctttttaaggaaaatgtctatataagaacccctctaagaactt

SEQ ID NO: 796374 - DNA, 676 bp, Homo sapiens
ggtgccccaaggagggacctccagtgcaggcagagaaggccttgcctgtagagaattttacaacgataataaaactgacatctctctgcttgttgttatgactgtgcactggcaatactaaacagtgtcagtgataaaatattgcttcctgaaaaaaaactcttgttggtctaagctctaaacaattgctttgattattgttgaatatatatatatataatgtgtattgagaaataaagaaattccaagctccctcagctgactgaatggatcccctcttggccaatggaacaccaggggaaccttggaagctgaattcacggccatgatgagatgggagatcagacataacctcactgacccctcccttgtgaacagccattaggttttcttccctaagagttaaagagaaattaggcctttcgaaagactkctagctgatcttcccaggtacagagcaaagacaaagcatgagattaagctcatcattccttcacccctccccaagatctctgcttgctccattccctttttcttcaaatgttcaccttatcttatgtaaaatttagatttacttggcattaactcaaatctcacaattatgtaatcatttctctcattgctgtccccctcctttttaaggaaaatgtctatataagaacccctctaagaactt

SEQ ID NO: 796375 - DNA, 581 bp, Homo sapiens
aacccctctaagaacttctttggataaaacagccacagatgcctccgtgacttgactttctcctgggcacatcctccagctggctcaaaaagccttagtggtttgagacttatgctgcaatcactcattttggttgtcagtttgtatattatatataagcttcaaattaacagacatgtattatcttttaaaaaagtattttctacagaacagttaatcggcgaactctcacctacagaggcagccccggcacacctagatttagccatctgattttgttttgagtgtccatccacagccatgcaggattatttgagcttgactcaggtgtgtctttgcagttgatggcttcaaaccccatgrtcctccacattcctgtgtttacactgttggttctgtaatcacccaatgtgttcttcctggctacagcacagacaaaaccaattcactgaggccatggtattgcagtagagaaagagtttagttgatgcagggcctctgagagggaggactggagtcatcacttgaatcagactccctgagaactcagaggctagggtttttatggataacttggtaag

SEQ ID NO: 796376 - DNA, 655 bp, Homo sapiens
actgcactacagtgaatgttaaattcccaggacccccccgtcccaatgcctgcttgatctctgttcaagagatggagagcacagggctgggcccatgcccaggtcttcttatgcaggggactctccagcttctctcaccagctcccaggggaggctggtgctgcccacccagggccccacctggagaattgctggtctaagcttacacagtttcctggggaatcaattgtccctaaaaaagccagaagrtctagagtggtagccagagtcctgggcgtcctgcctgaggatgcctgtcttactctcgaggcagccataccagcccctctgcaggtggcctcaggcactctggctgccagccaggggcaggtgcctccctggagcaggttgcttgcatttggtgcatggctccctctcaggtggggtcttctcaggggctggccaggccatagagtaccctctgtgactctctccattcccacgtgtcactagctctgctgagcacctggggctggggtcctggccaagtccccagagagtggtgtcaccattagaactggatgaaccctggcacccagcaacccatctttgcccaatttatttcctcactgtccaaagctaaaatgttgtattaaaagacaaatgcgtgcctgga

SEQ ID NO: 796377 - DNA, 593 bp, Homo sapiens
ggattcaggcgctgcaggttttacacggttgtggtggatccaggctaggattctctctacgttcacagcagtgggagtgatcaggacgacagtctggggtcctttccaccatgggcacaaagaggctacgttccagtccttgatccacactcgaacacctggggagaaaaggtgaactggggagaataagctaacagggtctctcatttacccaggctgagattgtttgtgtaatttttcctaaagcctgtagctgtcgctgtaactcaatttcacctaactctcaggaagtgcctggaagtccctgcaatatgggarggggcccatgatataatatttcctaaggggaatatcctgttcttttagaaggggtacatctaattttaaataatactatagagagcatgtatccattttaatcctgttttctgacatactttccctaaactatttttgatagtctgattcatctgctctgcctttctggaactctgaggccggtaggcggcatgcagtttccaagtgatccccaatacctttgctatcttctgtaccaagtcagccacaaacgttagcccgttatctgagctgat

SEQ ID NO: 796378 - DNA, 593 bp, Homo sapiens
ggattcaggcgctgcaggttttacacggttgtggtggatccaggctaggattctctctacgttcacagcagtgggagtgatcaggacgacagtctggggtcctttccaccatgggcacaaagaggctacgttccagtccttgatccacactcgaacacctggggagaaaaggtgaactggggagaataagctaacagggtctctcatttacccaggctgagattgtttgtgtaatttttcctaaagcctgtagctgtcgctgtaactcaatttcacctaactctcaggaagtgcctggaagtccctgcaatatgggaggggkcccatgatataatatttcctaaggggaatatcctgttcttttagaaggggtacatctaattttaaataatactatagagagcatgtatccattttaatcctgttttctgacatactttccctaaactatttttgatagtctgattcatctgctctgcctttctggaactctgaggccggtaggcggcatgcagtttccaagtgatccccaatacctttgctatcttctgtaccaagtcagccacaaacgttagcccgttatctgagctgat

SEQ ID NO: 796379 - DNA, 593 bp, Homo sapiens
ggattcaggcgctgcaggttttacacggttgtggtggatccaggctaggattctctctacgttcacagcagtgggagtgatcaggacgacagtctggggtcctttccaccatgggcacaaagaggctacgttccagtccttgatccacactcgaacacctggggagaaaaggtgaactggggagaataagctaacagggtctctcatttacccaggctgagattgtttgtgtaatttttcctaaagcctgtagctgtcgctgtaactcaatttcacctaactctcaggaagtgcctggaagtccctgcaatatgggagggggcccatgatataatatttcctaaggggaatatcctgttcttttagaaggggtacatctaattttaaataatactatagagagcatgtatccattttaatcctgtttyctgacatactttccctaaactatttttgatagtctgattcatctgctctgcctttctggaactctgaggccggtaggcggcatgcagtttccaagtgatccccaatacctttgctatcttctgtaccaagtcagccacaaacgttagcccgttatctgagctgat

SEQ ID NO: 796380 - DNA, 534 bp, Homo sapiens
gcatgtgactactgagcacattaaatgtggctgatgtgactggacgtggtggctcacacctgcaatctcagtactttgggaggccgagatgagagaatagcttgaggccaagagtttgagaccagcctggtcaacatagcaggacccccatctctaattttatttaattttatttatttatttattttgagactgagtttctctcttgttgcccaggctggagagcaatggcatgatagcggctcaccacaacctccgcctccgggttcaagtgattctcctgcctcagcctcccaagtagctgggattacaggcatgtgccaccacrcccagctaattttttgtatttttattttttttttagtagagacagggtttctccatgttggtcaggctgctctcgaattcacaacctcaggtgatcagcctgcctcagcctcccaaagtgctgggattacaggcttgagccaccgcgcccggcctccatctctaacttaaaaaatattttttaaaaatgtggctgatgtgactgag

SEQ ID NO: 796381 - DNA, 567 bp, Homo sapiens
tttcttcaggtgacctcggacttccctcaggttcttaattttgttctgcagggtttcaatctgagggaggggcagaagaggaggccttgaaaccttcaaggctggacaacaaagacttggcctggtgactgcccccacgctgccgtgtctgtgctcagcagcggcagcctgcacyccccgggccccagggcaagcaccggcatgtctgggtggggaggaggtacttgttctgcctgaaggaagcccgccttctcctccagccagcccttgcaagggaaccgagtcatttttccggcctggcctgcgcaggaacccgctgagcccactgaggcctccagtgtctcccctgggtttgatgaaaggcctcctgtagcgtagacttcttgttagtcaaaagggggacaacgtggctaagccatcgtccctcagacggcctgggcaggaagctatctgtctcatgctgggactgacacctatccccgcgttgaggaatctgtggggacctcacttcacctctccagcctcttccctgggtctggcctcactgccctcccactgtgaaccggg

SEQ ID NO: 796382 - DNA, 557 bp, Homo sapiens
tgagcacacccaggccaaacaaggtcttggcagccctggcgaggagatgccagtttatccaaaaagcagtgggcagccgtaggaggttttcagccggaagtgatgtggtcaggtttacaatttttaaaagtgtcctccggctgtgggtggggagaaggaatggccagttgctggggacaaacagggacaagcagatcgccagggcgagaggcgagagctgcttctgtcttgccactccatgcattcctgtcttccgcctgcctgtttttagtgaggctgtggctattgaggaagactgggctgcgggggacaccaaggccctgctgactggttgtagcagggccaggyggagctctgggtgttggtggcatggagggcgggctgcctgtgcctaattaaatgctggctccagccatccgctccctagaagggtcttgcagctcctgcaaatgaggatgaggcccattcattccctggaaactcaattagctgggtatggagggctccatctctagtgacaggttttattgcctgctgagtcaccacgaggacaagct

SEQ ID NO: 796383 - DNA, 498 bp, Homo sapiens
aaagtactctaactttattgttcttttaaaaaattgttttatctattctggatcctttgcatcctatataaaatgtgggatttacttcttcatttctgttggcattttgataggctttgtgttgaatcagtttagggagaatttctcctctttcttaaacctggcttgcccaagctttagatagctatacatgtacttagtcatctgattaatatgtggcccctcttgggtcttattattggtaggacagagatgtgaaatcttttcctggaagaaagtcctatctttcaattactgattcagcctgcttcaatcacgtacctatttggccggaawagctacccattttgccttctgcatttccagctggtacctttcccatgtccactcagcattgttcaatctgcaatggccccattcccactcagccattctctggtttggcctcaggcctcattcactttcagattccccactctgctttcctctcccaataga

SEQ ID NO: 796384 - DNA, 561 bp, Homo sapiens
gtgggttatgttggaaggaatggttttatgaagtcattggaaacccccacatgacttctccttccccttctcatcaaagagaaaatttaagtcacaaaggagggttttaaactacctacttaatctaaagaagtgagtattgattttggcaagtgggtgggtttgaggtaacaactttggagccaaagctgaatgactagtgacagtagaggaraaattaaagcacagccaacacagccaccagggagcctccctctgccctcccatcacagagctcacccaggtggacaacgttttaaagaaccatcctttaaaggggacaaaatcactcattcttccagggtggcttggactggccttgccatcacagaaagagaatccgactaaaccaatgccagatggttgagttcagttcactcctgaagcagagggagaacagattatgccttcatggcttagggaggtcctttatggccatcctgacagaaaatactattaaaaatgtctaatagttcttacaaaatatataaaaggaaaaaaaaaaactggagcccatatttt

SEQ ID NO: 796385 - DNA, 611 bp, Homo sapiens
aggttgaaaacaaggagaaaatattggagaatatcttttcaccttggaataggaaaatattccttaaacaaggcagagaaagcaaacattttattgattcaccaaaagatcataaattttattgcatttaaacctcatgtgtattatttaacttcagtacaaaaagaaagaggtctgagacaaaaggttattgctacatatataaccagctatgaattaacattcaaagtttacatataacatttggcaaatcaataagtaaaagacataacaaggggaaaattggcaaagtatatgaatgggtagttcacagaagaagaaatgttaagtggctaataagcattggaaaacacactcagcctcactagtagtaaaagaaatgtagctaaaggccaggcgcggtgrctcacgcctgtaatcccagcactttggaaggccgaggcgggtggatcacgaggtcaggagatcgagaccatcctggctaacatggtgaaaccccatctctattaaaaatacaaaaaattagccaggcgtggtggcacgtgcctgtagtcccagctactcagaaggctgaaacaagagaattgcttggacccagaaggcagaggttg

SEQ ID NO: 796386 - DNA, 636 bp, Homo sapiens
ctcctctcccaggtctgtggatccctttgcctcaggtttcaaggagcaagacttttaaacccacttcagacagagttataagcacagagacaaacaagaggcatcattagaaaaatgagccattgtaaacctgtcctttcctccaggccctcgggcgctgatgcggggtctgggcgcaggatgcgcttgagctgagtcggaaggacaacttggagaccccactcaaaccaggatggagggaggcttttccaggcttggggtacagggtattttcagacctccagaaagaattcgagaaggaggcagagtagcaggactcctgtggttttaccaagagagggcatcccttaaggagaggcaactgctctgagaattgggggtctactcctcaccccccgcggccccccttcacttgcgtagaccccttagtcaggaatcaagcaaattagaaagagactcaagatttcaaaatcsctaaaattcaggctcatggaaaataaacaagatgccgtgtttttacattaatatgagatttttgtcggtggctaatcaagagatatccttattgagttaatgggatcaaatattctggttctggggtggtccctgtaatcctgtaaccatgctggctgggct

SEQ ID NO: 796387 - DNA, 601 bp, Homo sapiens
gaactattaaaatcaacacatttttgccaatgagaaataagtttgtttattcttgtagcataaaaacccatgcttcaggattcaacaaactcttggaaagcattttctgcatcctgctggttgtggaaacattttctctgcaaaacgttgttgagatgtttgaagaagtaatagtcgattggcaagaggtcaggtgaatatggcagacgaggcaaaacttcacatccytttgttcaacttttgaagcgttggttgtgcgacatgtggttggatgttgtggtggagaagaattgggccctttctgttgaccaacgctggctgcaggtgctgcagttttctgtgcatctcatggatttgctgaggatacttctcagatgtaatggtttcccagggattcagaaagctgtagtggatcagaccagcagcagaccactaaacagtgaccatgacctttttttggtgcaagtttggctttgggaagtgccttggagcttcttctcagtccaaccactgagctgttcattgccagttttcagtcgttgtataaaatccacttttcatcacacctcgcaatcggatccagaaatggttcattgttgtt

SEQ ID NO: 796388 - DNA, 550 bp, Homo sapiens
gcgatcatcacagcatgtctccctgcttctggttctccccactccgtcccattttgcacactgaggccagataaacatcactaaagctgctcctatcactgtgccccctgcctaagagcctcccagcccctctgggccacctggactaagcacagcccrcttggcctggctggtcaaggctcccatgttaagccctccattgtcctgaccagcccttctcacagctgctccctgaacacaatgcccagggctctcccgcacacccaacccacttggcattaccctacacaatgtcattgtgcagtctcctctctcaggagggccctctaccctttccagctgctcagtccaatcggttctgtaacattcatgtcaaaacattaacttcatgatacactttctctttccttcaaaacccctaaaccagtgctgttcaataaaaaatagatgcaagtcacaaatggaacttaaaattctccagttgtcctattaaaaaaaggaggaaagtgatgaaatcagtttctgtaatattattctatttcacccaaaa

SEQ ID NO: 796389 - DNA, 640 bp, Homo sapiens
tgagtgacagaaacactgtcattaaagatgttgcataatcttacttttttgtttttgcctatggtaaattaagatagttttgctcttgccttgaaaggattcagctgtccagcttctcctcccatcctccttcctcccgccctcccaacccatttccctcccccgttcccccaattcctcctcccttttgttcctatacccattatccatggactggactcccaatatttttctctggactctaaccaaaagcctcacctttgtcctttcaatgttgggttgagacgtgttccctgattgggtcaccatcctctgttcaggagtctggggagccattcctcctgacccccaccccmgcgggctgtccaactgtcttgtcctggaattactgctatgtccaggcttccggaacttcagaaacgcatttgttgcacagaactctcggctgtggcttgttggtgcagtgggaactgagctttatttaggtggtggtgtttgaagtaactccagtggtagagaagcatggggcaaaggctaatctttggctggaagtggataccagttctgaaaagcagggagtctgagcagaaagcccacatgttaataaaaaactaaaagcaattataaaattaccattcgt

SEQ ID NO: 796390 - DNA, 629 bp, Homo sapiens
agaaggaggagcagaggaagaaaagagaggagaaggggaaagagaatgggaagaagaaaaatggagaaatttcagactgctaggaagacattcagtatgctatgaagaaaacacagtgggtatggatcagggaaggtctctcccaggagacactgattgacttgaagttccaatgacaggaagttgttggtccgggaaagggagcagcrgatgccaaaacccccaggtgggaacacactgggtgtgttgaggggaagaaccaagacgcttatggctacagtgcagtgaataaggggtgaagggcatgagatggagtcagctcatactccttccggcccctcttttcacacattggaaaggtcagggaaagaagcagtgagatgcccacctttaactattgttcttcccaacaagaagagaggagctgaagaaacctctgtgagtctgggttcctgggcccagtccccatctattcaatgtcctttaaagaatactctgcctgcagtgtttacacttgtacgcgtggtaattctgatagtgacaataagtattggtaattgacagcatcgctaaacttccatattgagtgtatcctcctcttccaattccaactcctctaagatacatat

SEQ ID NO: 796391 - DNA, 629 bp, Homo sapiens
agaaggaggagcagaggaagaaaagagaggagaaggggaaagagaatgggaagaagaaaaatggagaaatttcagactgctaggaagacattcagtatgctatgaagaaaacacagtgggtatggatcagggaaggtctctcccaggagacactgattgacttgaagttccaatgacaggaagttgttggtccgggaaagggagcagcagatgccaaaacccccaggtgggaacacactgggtgtgttgaggggaagaaccaagacscttatggctacagtgcagtgaataaggggtgaagggcatgagatggagtcagctcatactccttccggcccctcttttcacacattggaaaggtcagggaaagaagcagtgagatgcccacctttaactattgttcttcccaacaagaagagaggagctgaagaaacctctgtgagtctgggttcctgggcccagtccccatctattcaatgtcctttaaagaatactctgcctgcagtgtttacacttgtacgcgtggtaattctgatagtgacaataagtattggtaattgacagcatcgctaaacttccatattgagtgtatcctcctcttccaattccaactcctctaagatacatat

SEQ ID NO: 796392 - DNA, 596 bp, Homo sapiens
gccctaggtagcaactacctagtgcgatcaatcccatatgcatagattaccatattgtggacatttcctataagcggaattgcacaataggtgagctgttatgactgacataacacgtagcacaatattttcaagattcgtccacattgtaggcttacccacagggggaaaccattttwttgggggcttttagtaacaccggtgttttctccttccttacgtccttctttccttccttccttccttccttccttcctgacttccttctttccttccctccttcctcctatttctctcttactccttctgccctctctctttcctatgccttaggtgcatcccacattctgcgtttctttggggaaatcctcgacaggtgcaggaaaattgtgttattgtaactatttaccgttatctctctttcacggctctccatcagttgtgaacatctattggtttatcccaagtcactaagcatattttcattaggtaaacctgtttttccttatacagctgtttctggagtatagggtcgcatactcataaacccagtgtaactcagaaacgcatctaatattccagtaaacccatcataa

SEQ ID NO: 796393 - DNA, 530 bp, Homo sapiens
ggtgactgatggaaaggaggagtgaagctccgccctttccgctgctaggctgcgcccgaggctatttaaacccaccctggctggcctgtactcagatcttcgcggagcggatcagcggccggagcgtttggcggactctgcgtggacttggagctcacagcgtcttgcgwcttggaagcggattcagaggacaggacagaacacttgggcaagtgaatctctgtctgtctgtctgtctgtctgtctgtctgtctgtctcattggttggttgatttccattttcttaaggggcacatacctcacaccgcacacacacaaacacacacacgcacacacacacacacacgcacacacacgcacacacactccttccttctgcgatttagaacattagtaggggcccctgggagctgcaggtttcctaatcatgtctgcacctaagaacagtagggtcttgtgtggctcttcttatgaacggtcccccagcccgaactcgccaaggtccatgctagcctcacccagcttctccc

SEQ ID NO: 796394 - DNA, 530 bp, Homo sapiens
ggtgactgatggaaaggaggagtgaagctccgccctttccgctgctaggctgcgcccgaggctatttaaacccaccctggctggcctgtactcagatcttcgcggagcggatcagcggccggagcgtttggcggactctgcgtggacttggagctcacagcgtcttgcgacttggaagcggattcagaggacaggacagaacacttgggcaagtgaatctctgtctgtctgtctgtctgtctgtctgtctgtctgtctcattggttgkttgatttccattttcttaaggggcacatacctcacaccgcacacacacaaacacacacacgcacacacacacacacacgcacacacacgcacacacactccttccttctgcgatttagaacattagtaggggcccctgggagctgcaggtttcctaatcatgtctgcacctaagaacagtagggtcttgtgtggctcttcttatgaacggtcccccagcccgaactcgccaaggtccatgctagcctcacccagcttctccc

SEQ ID NO: 796395 - DNA, 513 bp, Homo sapiens
tcccacactccggaatcacctacagactcacagacttcacggaggtcctccctggtctctctcaggtctttgccctcagcccacagggactcttgtgtctctttcagctactctcgaaacttctctagattccagctggactcagttccaggcacccacgacacaccaccaaaatcacgaatttcactgaattactccccagtctctctcatgttctcacccccagccctcagggactcttctgtctctctcagctactctccaaccatctccacatcacacctggggtcagattcccacacccaggaatcacctacaaactcagggaccttactgcaaccctcccccrtttctttcacctcttcaccccctgctttcagggactctcctgtgcctcccagcttctctccagccttccccagatttctgccacagtcagccccaggcacccaggggaatcctggacactcacaggcctcacgagactatttcccaatgacttgtatctataga

SEQ ID NO: 796396 - DNA, 643 bp, Homo sapiens
cctggccatgtctccacatttctggggagggccccacacccagccacagaagagcccctcctgcattccgtcctcacacacaggcctgtccttccacttgctactgtcacactcttgccagcagaagaggcccctgtaatggccgatatcaccgcccagtctatcctcaccccacagctgtgcagcgggaccctcctgctggcccacgtggctgccacagcccatgctggcacgacgctccagcatgtcggcgtccctgcgggccacgctaccggtgacatggctagcatcaccctccttcctggcagtgacactgctgatttgaaccccagtttcacagctgtcatttgtaaataggaccattttcccttttctctctcccttccattcacagggcttctcattcyctctgtttctgcctccgtttcagagatttactcacctttttctctctcactatgtctgccgtggtctccataagagtgtgccacataaaattgccccattaaaagtcatgaattgagtggattttagtatacctgtggttgtgcacattcaattttaattcgcgatccattttagaaggttttatcacccccgaccagagaaacaccctgtggacattagtcactcctcattctgt

SEQ ID NO: 796397 - DNA, 529 bp, Homo sapiens
  misc_feature 451, 452: n = A,T,C or G
ggtgcaaagtaattggatcaaatggatccattttgagctaatccacataaatgtaaggactaaaactataaaatcctgagaaacaaacatagaagtaaattgtcatgaccttgaatttggcaaagttttcttaaatatgagaccagcaacaggaataaaaattgatgaactagacttcatcaaaattaaacatttttgcacttcaaaggacaccatcaagaaagtgaaaagacaactcacaagatggaagaaaatacttgtaaatcatgtgtagcactttttgatgataaacttgaggaagacttttttattttttatttttattatactttaagttctagggtacatgtgcacaatgtgcaggtttgttrcatatgtatacatgtgccatgttggtgtgccgcacccattatctcatcatttacattaggtatatctccataaggctatnncctcctccctccccccaccccatgacaggccccggtgtgtgatgttccccatcctgtgtccgagtgttctcattgtt

SEQ ID NO: 796398 - DNA, 529 bp, Homo sapiens
agcatccatttgggcaggcagctggcgtggctggtggctgagccactgtggctcggggactccaggtgtctcctggacagaaagagccctggtcactcatggctgcagcatagccatggcgacaggaaagtgctgctgtacattgtgctcctggggctggctcccaatggacacccaatggcatctcccccactgtamtctgggatgctggcaggggtgatgggcactggggtaagagccttggcaagcccttcgctccctgggtgtgagaccttgggctcctggatgcctgggtttctgtgtcctatttttcccatggaagatgtttggggtgctcccacgaaatggggagggccctggggggtcaggattgtattattaaagccagaaagtctggggttccatttttagcacaaggcaggcagcccatgagccacagcccagtggccagcctgtgtgggaggggagtgggggtctgaaggagtgaggatcctgttaccgcaggctccactgcagccccccagggtgg

SEQ ID NO: 796399 - DNA, 528 bp, Homo sapiens
ggaggtaccatagtctcttctaggcgagagctgctggagccttctttattcttgtgctagaagcccagggtggggagaggagcctgagaacagcccagtgtgggcatccaccttcctgcccactttggaggtctgaatcacctccggccactctcccaatccccaggagccaagaggcttcctggagcaagccgcacctgatctccaccatgggtaggagttcaaggccaggtcaacggggactccacagaggggcctgtgggttagcwgcagctgccagtgtccagatggcctcaggggtgggggttggacaatctggaggtcagcagggaattcagcatgaggagacagcccttagggttctggcccagcagccccaggtgctggctctgcactgagtcatgaagtttgtgggccaggggcgttggcctctctctagctggaagtgacttccatcactgctgtcattagcctcccctgcatcaacctgtccctggggtgggagcacagtgggcacagggaccgtca

SEQ ID NO: 796400 - DNA, 631 bp, Homo sapiens
cctggctgtcaaaaccccatggtaacagcatccagggcgaatttaaatggcaccccaaagaataagagtgggcctgggtgtcactgtagtgactggtggcttgtgacaagtagtgtggcttccgtggtgatgggaaatgacagttccccctgaatctgcactggagagaaggtcctggaagctttcgggcccaccctccagggtctgggtctgcatctctgakagtggctgggtgggaagaagaatcctcactgcctggcagtcgggtttggagctggggagggccgggcctggttagcaacgagcctatcacagtgaaccagagctcaagataaagcgagaggcctagcccagacacctccttccctggtcccagcccctgtgccttggcctgtgcggtggaagccaggctccctcctccaggaagtcttccctgcactgcctgctcacacacagcctctcccagatttctccccatccaggctgagtaggtttcccaagaaggctcctccccgagccaactgcctgcagtcaacattatcacctcccccagtgaacggcagtagtgtttttcgtcttcagcagtggcctctggaggggtcctagcaggtcggggagagaggtctgagtt

SEQ ID NO: 796401 - DNA, 602 bp, Homo sapiens
tgtgtgtcatggtggtttcctgcacctatcaacccatcacctaggtatcaagcccagcatgccttagctatttttcctgatgctctccctccccccaccccacccccaaaaggccccagtgtgtgttgtttccccctacatgtgcccctgtgttctcatcattcagctcccacttataagtgagaacatgcagtgtttgcttttctgttcctgcgttactttgctgaggataatggcttcctactccatccatgtccctgcaaaggttgaactaatttacacttccaccaacagtgtaaattagttactttttctccacaactttgccagcctctgttattttttgactttttaataatarccatggcagaaatatgtttcaagaccttcagtggatgcctgaaacctcagatagtactgaaccttatatataccatgtcttttcctctactacatacctgtaataaagtttaatctataaattaggcacagtaagagattaacaacaaataataataacagaacaatcataatatgccagcatcaccactcttgcactttaggaccattattaagtaaaataagagttacttgaacacaag

SEQ ID NO: 796402 - DNA, 645 bp, Homo sapiens
gactgcctgcacctttctgacagcctgccctataaatttcacacttgtctagccagccactgtaatcatgtaagccaattcattgtaataaatctcaatatatatatcctattggttggcttctctgattaaaccctgactgacacacacgagtactataaagtcattttagtaaactttttaaagaagaaatcatcaagtaacatatttttaagtatattatgaataattattaaaattataattaactataatagctttaatgagcttaaagatattattctactatagcacaccatgaatgataatattaaaaactactgaatttacatttatgccctgacttccatgctcctttttaaaaataatgaattttaagccctagccatataattcagtaattttgatgagaaagacatcatctctttttatttttaaaaataagtttcttgaaatctcgtcactggcctgtgttaatgttctcattttccttgtggtgaatttrtaatcttttctaaactctccataaaaagaaaaactcatagtctttccttaatgtttcgatctcattttcagtgccttaattttactttcactgtaaaatgaaatagaattgctatggtaagcaatggtgaatctttgatg

SEQ ID NO: 796403 - DNA, 640 bp, Homo sapiens
agctaattctttgaaaagataaataacattgatagaccattagcaagattaaccaagaagagacaagatccaaatgagctcatttagaaatgaaatgggagacattacaatgcatatcacagaaatacaaataccattcaaggctataatgaacacctttatgtgcataaaaaaataacctagaggaaattgataaattcctggaaatacacaaccctcctagattaaaccaggaagaaataaaaactctgaacagaccaataacaagcagcaagattgaaatggtaataaaaattttgccaacaaaaaaaggttcaggaccagatggattcacagctgaatttcattagacaacttcattccattctaacagaccaattaaacaaagaagaattggtaatattcctattgacattattcccaaagatagagaaagaggaaatcttgcctacstcattctacgaagccagtattaccctaataccaaaaccaggaaaggacataacaaaaaaagaaaactacagaccaatatccctgatgaacacagatgcaaaaatcctcaacaaattactagctaactaaattcaacatcatatcaaaaagttaatccatcatgatcaagtggttttcatataaggga

SEQ ID NO: 796404 - DNA, 385 bp, Homo sapiens
aacatcttaaattaatatattatatatgtcacaatgaaccaatattaatgtattattattattttattataagcagtagttaactaaaattaaagtgttattcagattttctcagtttatacctaatgccattaggtataatggcatagtgtttcactattccatccargatatagtatcacatttatttgtcgtgtttccataaactccttctgacattgataatttcccagacttcctttgttattgaaaactttgagaattgtaagaaataatcatcagatattttgtaggaagccattatattgaaatttgtctaatgtatttctcaatctttgactgaagttgatgggttttttggaggaagatcacagaagtaatgtgt

SEQ ID NO: 796405 - DNA, 385 bp, Homo sapiens
aacatcttaaattaatatattatatatgtcacaatgaaccaatattaatgtattattattattttattataagcagtagttaactaaaattaaagtgttattcagattttctcagtttatacctaatgccattaggtataatggcatagtgtttcactattccatccaggatatagtatcacatttatttgtcgtgtttccataaactccttctgacaytgataatttcccagacttcctttgttattgaaaactttgagaattgtaagaaataatcatcagatattttgtaggaagccattatattgaaatttgtctaatgtatttctcaatctttgactgaagttgatgggttttttggaggaagatcacagaagtaatgtgt

SEQ ID NO: 796406 - DNA, 630 bp, Homo sapiens
ttaaattaatatattatatatgtcacaatgaaccaatattaatgtattattattattttattataagcagtagttaactaaaattaaagtgttattcagattttctcagtttatacctaatgccattaggtataatggcatagtgtttcactattccatccaggatatagtatcacatttatttgtcgtgtttccataaactccttctgacattgataatttcccagacttcctttgttattgaaaactttgagaattgtaagaaataatcatcagatattttgtaggaagccattatattgaaatttgtctaatgtatttctcaatctttgactgaagttgatgggttttttgraggaagatcacagaagtaatgtgtaacttttatcagatcatatcaagggcacatattatcaaatgattttttatggtttacattgaccttgatcatctggttgggatagtgtttatttttcaggttcctcaatgataatgttgctcttacacctccactctcaacctccttcatactgcactctggaaacatcataatgcacagtccacacttcagaagtggagagttatgcaccctgctcttaagggtagaattgtctaaatgattttaaattt

SEQ ID NO: 796407 - DNA, 628 bp, Homo sapiens
gggcacatattatcaaatgattttttatggtttacattgaccttgatcatctggttgggatagtgtttatttttcaggttcctcaatgataatgttgctcttacacctccactctcaacctccttcatactgcactctggaaacatcataatgcacagtccacacttcagaagtggagagttatgcaccctgctcttaagggtagaattgtctaaatgattttaaatttttaagcatgggagatttttcttttatctgtatttatttttaatcattttaattatgtcaatatggaatcacagatatttattattttgtttataatctaatacaaatttatttatgttgcttaggttgttcaagctttagccatttgaarccctatcaattggttcctatgtcttcttcatatatgcagatcatagggtaaagcatttccatactttctggaactccaggcttattttgtctatccccagcccaaatcgtagcaggagccctttctacactaaggcctatgttattttaaaatccaaaattgaattaaaaagaccgatccgggtattacgtctgcctactaactggatgatcagggtggtcattgagactaggtgttctcacctgacca

SEQ ID NO: 796408 - DNA, 644 bp, Homo sapiens
ctccagaaaaccgagagaatttgaagtgctcaaaaattgtttaaaagctttcactaacccactattttttccttcttcaggctgctacatttggtgaagactataaatattccatattacttttaaaatttagtctcataggtttcaatgatactgytgaaatcagcagtcaagcttgagaagacatctaccccttgaacgtcagatattccataaagtcaacatatttgtatcagtattattgctaaattgttaatttgtaatcaagtcatagcatagttcatgtaccacataaaagtcattagtaatgtgtaataaataaaagtctaagcccagaaattgtctggaaggaaaaaaattattctattttacatgactcaagctaattttgcttttatgcctcctccaccaatttgatggaacattttaagttcaggcattcttagggattctctccttcccatgcacttaatatttcccaaggttccaaagtgttatgcagtactcaagtgttggaatggctcccagtcatctgtccatatattccatagatttctgaagtgcccatttcccagatcaactcaggctttcatgtctggcgactccttccttgatgttactttgacatgcttggaaatagacaa

SEQ ID NO: 796409 - DNA, 600 bp, Homo sapiens
aaatccaatgatatgtgaattgttccactatattaatgtgctgttttaaaaagaaaacattataatccgcccgcaggtgctgtatggaacttctaccttgaacacattttcttttataactttctgtatgtaatcagttctgtgcttttgatgattaattcatgtattttttttttagcacctcctggattagagacatttttcataatttcttmctgttttattctgaattttcaatttaaggcctgagtttttaatttgctgatttcaatgtttcatattgtgcctttaagaatatagctgactaagcagatggtaggatattggacatctaggaggacagatgttttcagcagaatgctcaggatgaccagaagcaaccaatgaggtcttctgtggggaatgttatgcccttgaaacacttttgtatgcttgttgctttaaagtcttcagaacggaactctgaccctgattgtgagggctatctttgaatacatattctccacttttgatagtgtgttttacagaaatgggagaaaaatagacaggtcaggttgaacagatattaatatcacggctaaggctgaacttttaatttat

SEQ ID NO: 796410 - DNA, 653 bp, Homo sapiens
aagccttagtttttcctgtttatgcacatgccattcctagagcttctccttacttcctgtaggtcaaaattttcatctgttgttatctttctttagtctaaaaaatttccgtttgcatttcttgtatctaggtctgctaatgacaattgttcgaagctttcttttatctgaataaatctttattttcgcaagaattactttttctagttatagaatttggagttgacagtttttttttattttaaagatgtagtttcattgctttttaaagtgtcatttctgatgacaggtagatgacctatttgtttccacgtatgtaaattattttctccctccctttagctactttcaagatttactctttttttttgcccagtggtttgactatggtatgtctacatttggwtctgtatatttttattctgttctttgagtttcttaaacctgtaagttgatatatgctgacaattaggaaaacttttggtctttactttttcaaatagctttttctgtctcattttcttctctactctttctaggagtccaattatattagtgctagactggtcatatttttattatttttctcctttgtattagctgtattgggaaattgttcttgatctgtttttaagtgcactgatagttttttc

SEQ ID NO: 796411 - DNA, 653 bp, Homo sapiens
aagccttagtttttcctgtttatgcacatgccattcctagagcttctccttacttcctgtaggtcaaaattttcatctgttgttatctttctttagtctaaaaaatttccgtttgcatttcttgtatctaggtctgctaatgacaattgttcgaagctttcttttatctgaataaatctttattttcgcaagaattactttttctagttatagaatttggagttgacagtttttttttattttaaagatgtagtttcattgctttttaaagtgtcatttctgatgacaggtagatgacctatttgtttccacgtatgtaaattattttctccctccctttagctactttcaagatttactctttttttttgcccagtggtttgactatggtatgtctacatttggttctgtwtatttttattctgttctttgagtttcttaaacctgtaagttgatatatgctgacaattaggaaaacttttggtctttactttttcaaatagctttttctgtctcattttcttctctactctttctaggagtccaattatattagtgctagactggtcatatttttattatttttctcctttgtattagctgtattgggaaattgttcttgatctgtttttaagtgcactgatagttttttc

SEQ ID NO: 796412 - DNA, 653 bp, Homo sapiens
aagccttagtttttcctgtttatgcacatgccattcctagagcttctccttacttcctgtaggtcaaaattttcatctgttgttatctttctttagtctaaaaaatttccgtttgcatttcttgtatctaggtctgctaatgacaattgttcgaagctttcttttatctgaataaatctttattttcgcaagaattactttttctagttatagaatttggagttgacagtttttttttattttaaagatgtagtttcattgctttttaaagtgtcatttctgatgacaggtagatgacctatttgtttccacgtatgtaaattattttctccctccctttagctactttcaagatttactctttttttttgcccagtggtttgactatggtatgtctacatttggttctgtatatttttattctgttctttgagtttcttaaacctgtaagttgatatatgctgacaattaggaaaacttttgstctttactttttcaaatagctttttctgtctcattttcttctctactctttctaggagtccaattatattagtgctagactggtcatatttttattatttttctcctttgtattagctgtattgggaaattgttcttgatctgtttttaagtgcactgatagttttttc

SEQ ID NO: 796413 - DNA, 583 bp, Homo sapiens
ttcgcagacctttccttaacctaaactgtttaggtttcctgtcgacagactgcatgtattctcacctttaacctttccataatcttccctaattacagatgtcattgattcttaatagcaaaagaacagcagtagcttataaagttatattatttgttttttactaatatgtgaagtgattttgtctttcatttcacctctagagctaattatgtcttctaggttaacaaaaattccagatcataccatcattagtttaaactttacaatgaaatcattatttccatttattactagcctgcattatagcaatgtttagctaatgaattctcaaaatatttcttgaaaggtgaaagagtacctcaagtaaatggkgtaattaatttatttatcagaattttaaattaagtgttctgtttaatctcaaaggggtaccaatgaagtcagggcataaggactctgtggttaataaaatggcaagaattaaaaaggattattacatttttcctcatactatgatggctataattttttaaaacagtagaaatgtttaatttttaaaggctactagtgtctatttcat

SEQ ID NO: 796414 - DNA, 670 bp, Homo sapiens
ttatttataggatccactctttgggttctttttaaaataagtgaggtgaaaaataaagtgcatgtatctttatttcctaagggtgttttagtataatggaattgatgggtaaagggcatacatattttttaattgtagtacttaccaccaaattatctatttgaaaagtaatcagcaacttaaactttaagcaggagtataaaacatcctcacaaatattgtggatagaaaactgtttcattcctcttttaatttaaattcttatgccagaaatgcgaaggactttttcctatgtacacaagtaacttgcagatctggagaagtgtactttgcccaattttagagtgtttgatgatttgatttgaaagaattccctgtcaaatgaaaatgtrcttttcatctaatgtgtatatataactgatatatatgacatattatatctggtatatatgtatacgtatcagtaatatatatatatatatatatatatatatatatatatatatataacttatgatatataataaacaacataggctgggcacggtggctcacacctttaatcccagcactttgggaggcggaggcgggcagatcacttgaggtcaggagttcgagaccagtctggccaacgtggtgaaaccccgtctactaaatatacaaaaattag

SEQ ID NO: 796415 - DNA, 704 bp, Homo sapiens
gattcaaatggtaaaggaagacaaggtctttaaaagaaaagcgatcaacctggaattatgggggagtagaaaaaaataaataaaggaaaaatgaagaggcttctataattgttttgttatagttatctttgactataaagatcaacaacaaggtccatgtcagttgaagtttgagcaggtggttgctggatagatgtcctcacacaagtgtatttygtgtaaggttgctatggcctttgtgcaaggttgtggattttgtggtattttgtgacagtttgtatcaggcctagaagcacgagaaccctctcttcaaggccttctctgaatctatttgtccaggttttttcttttctttttaaagattactgacagttttgattctgataacttttatatcatgatccctaatttcaaaaaaaaattaaacgtgtaactttatgatgtatttgataggcttggatttatgaatcacctctactatctatagtggtagatatatctgagcctacttacacagcacttccatcagattctctcttcagtggaattggaagaggggggttttggagaagggaatgaaggaattgtgctgtatcagaggtccccacctaacagcacagggactttttctgtgctcttgccaggccgttgtattaggctgatacaaaagtaattttggttttgtcattgaaagtaatgagacc

SEQ ID NO: 796416 - DNA, 704 bp, Homo sapiens
gattcaaatggtaaaggaagacaaggtctttaaaagaaaagcgatcaacctggaattatgggggagtagaaaaaaataaataaaggaaaaatgaagaggcttctataattgttttgttatagttatctttgactataaagatcaacaacaaggtccatgtcagttgaagtttgagcaggtggttgctggatagatgtcctcacacaagtgtattttgtgtaaggttgctatggcctttgtgcaaggttgtggattttgtggtattttgtgayagtttgtatcaggcctagaagcacgagaaccctctcttcaaggccttctctgaatctatttgtccaggttttttcttttctttttaaagattactgacagttttgattctgataacttttatatcatgatccctaatttcaaaaaaaaattaaacgtgtaactttatgatgtatttgataggcttggatttatgaatcacctctactatctatagtggtagatatatctgagcctacttacacagcacttccatcagattctctcttcagtggaattggaagaggggggttttggagaagggaatgaaggaattgtgctgtatcagaggtccccacctaacagcacagggactttttctgtgctcttgccaggccgttgtattaggctgatacaaaagtaattttggttttgtcattgaaagtaatgagacc

SEQ ID NO: 796417 - DNA, 704 bp, Homo sapiens
gattcaaatggtaaaggaagacaaggtctttaaaagaaaagcgatcaacctggaattatgggggagtagaaaaaaataaataaaggaaaaatgaagaggcttctataattgttttgttatagttatctttgactataaagatcaacaacaaggtccatgtcagttgaagtttgagcaggtggttgctggatagatgtcctcacacaagtgtattttgtgtaaggttgctatggcctttgtgcaaggttgtggattttgtggtattttgtgacagtttgtatcaggcctagaagcacgagaaccctctcttcaaggccttctctgaatctatttgtccaggttttttcttttctttttaaagattactgacagttttgattctgataacttttatatcatgatccctaatttcaaaaaaaaattaaacgtgtaactttatgatgtatttgataggcttggatttatgaatcacctctactatctatagtggtagatatatctgagcctrcttacacagcacttccatcagattctctcttcagtggaattggaagaggggggttttggagaagggaatgaaggaattgtgctgtatcagaggtccccacctaacagcacagggactttttctgtgctcttgccaggccgttgtattaggctgatacaaaagtaattttggttttgtcattgaaagtaatgagacc

SEQ ID NO: 796418 - DNA, 624 bp, Homo sapiens
acctctctccccgacctgctaggacccctccagaggccactgctgaagacgaaaaacactactgccgttcactgggggaggtgataatgttgactgcaggcagttggctcggggaggagccttcttgggaatcctactcagcctggatggggagaaatctgggagaggctgtgtgtgagcaggcagtgcagggaagacttcctggaggagggagcctggcttccaccgcacaggccaaggcacaggggctgggaccagggaaggaggtgtctgggctaggcctctcgctttatcttgagctctggttcactgtgataggctcgttgctaaccaggcccggccctccccagctccaaacccgactgccaggcagtgaggattcttcttcccacccggccactmtcagagatgcagacacagaccctggagggtgggcccgaaagcttccaggaccttctctccagtgcagattcagggggaactgtcgtttcccatcaccacggaagccacactacttgtcacaagccaccagtcactacagtgacacccaggcccactcttattctttggggtgccatttaaattcgccctggatgctgttaccatggggctttgacagccagg

SEQ ID NO: 796419 - DNA, 529 bp, Homo sapiens
accattacaagtgacttctgccaaacattggccaaaattcacctacttggtttgcaggtatggtttgtctaatcctggaaagtaatttcgatgaactacttcagtgttcagaaacattggagttataaatagaaagaggaagagtgacataacctaatggacaattatttctgatatgccagcggtcaacacattcataagcccatgggtggttgatccagggaccacacagcgggcctgacagactctgaaakttaaggctttggtttactggtaacagagacaggttaaagtacatgtcttcagtcttgagtagagtgataatcagtctcatttttttttaagtttaagtagtccttcaaaaatacatctcattcctgacaggataaaacaagttttaaaaaatatattatattcagattcactagggaacacttggagccaggaaataattcaggattcagcccaaattataggcaaataataaaaactctaaaacaatgatcagggttggaatctaatagcatat

SEQ ID NO: 796420 - DNA, 618 bp, Homo sapiens
gggggatcccttgatcctagcagtttaagaccagcctgggcaatatagtgagaccttgtctctacaaatttctttttaatgagctaggtttggtgatacgcacctgtagtcccagctactggggaagctaaggtgagaggatagcttaagctgggaggtcaaggcttcagggagccaagattgtgccactgcactccagtgtggcaacagagtgaggctctgtcttaaaaaataytaaactttaaatataaaggcaaaaacaaaatagaaataaaaggacaaaaatacataccacaaatcacgaatcatattagtgtttgagtggccttgttaatatcacacaaaatagattttagtgaaataaatgtgagaaataaaaatggatatctgataattttgttcactatttaagaaggtacaaaaatctaaaacgtatacatacctaggaaaagcttcaaaacacaaagcaaaaccccatagaaccaaaagaagagatagaaaaattgacaattattttcatagctttcatcactttacatttagtaaatgctagaaaaattagacagaaaccagtaagtatagagaagacctgaaccaacactattaaccaactcgacc

SEQ ID NO: 796421 - DNA, 555 bp, Homo sapiens
tggagatgccaggaactgcagagtcccaaagaggatgtcacaagccctggcttgtggagtccctaggtctgtggtccctgaatggctgcagcttttctctccttcttgttactcacaacatggtgagcaaggggtcgtgtttcagcactgtttgtgtaacagctgtttcagtcctgctatttggtgggcccaagttcttgtcctgtgtccaggaaaaatgaagtatgcggacaacaagcaggcaggttgtcccaaagaatgtctgagcctgactgattctggggtttttatgtgcccagaagtgaggaagtccatgctgattggcccatgggtagccacaggcagrcctggaaaaagcaccattcaattggccaaatggtcctcaatgaagttctcactccaggctgcaggttcccccaggaactggcagcctggtctccaggtttcaggctgtctctggactgaaggtagagtttcactgggaacccatctcttcctccccaggaacctgtctgctattaacatgccatccatggcacctggactgtctatact

SEQ ID NO: 796422 - DNA, 678 bp, Homo sapiens
actcctggtctcaagcatgagccaccatgcctgaccccatataatttcaatactaaattagggtttcatttttgctgctggtgttgaatagattcataccacagataacaccaaagctgtgataacagagaaaacattttgaaaggctgttacatttctcttggttgaaaccatttaaaattaataagtcagaagtagacaggattattagtcctactctcaactggagaggacaaatactacttcctacatacctacatgtgaaggttaccaggttgttgtcttaacagcccacagtcctactcattctcatatcagggtctccatatagaaacatagaaacacgttcacagtgtacttcttgctttatctacaaatatctttacrgcgaactgattacaccaacatatttttcttcccaattcatttggcaaaagtatttacagttgtttagaaagactatagaattacaagtgcaggaaaggcagcaaagtttccagctcagattttgatatgacatgtgttgtatctcaaactaattataactttctttttctagggttcatgagggattttcctgattgttcccacctccagtgctgccagcttgcccctttgctcccctccttctacctatttcctactcgttataatctgattttatctctgcctactatc

SEQ ID NO: 796423 - DNA, 607 bp, Homo sapiens
ggagtttattaagtagtagtaattcacacaatcaccaggtcccacaatagcccatctgcaagctgaggagcaagaaaaccagcctgagttccaaagccgaagaacttggagtccgatgttcaaagccaggaagcatccagcacgggagaaagatgtgggctgggagactaagccagtctagccttttcacgttttttctgcctgctttatatcccagccaagttggcagctgattagatggtgcccacacagattaagtgtgggtctgcctttcccagcccactaactccagtgttaatctcatttggcaacaccctcacagacacacccaggatcaatactttgcatccttcaatccaatcaaatttacactcagtgttaaccatcacacttgctaactgtaacacttgctatctggcaatctcttctcgctaggacraatccttaactgagaatgattgtttgtttcccgttccaacttacctgcttctcactgatggctgatacattattgcagctcatgaaaccattgcccaacccctcccctcaatagaaggtgtacttcctaagtgcagaggttttgcatgttttgtacatttttatattt

SEQ ID NO: 796424 - DNA, 454 bp, Homo sapiens
ttatcaaattttatattgccaaattacacccactgcttcatattaagaagtgcaggtgttaattagtgtggtgatgtaactatgctatgcagcagcttgtccaagtaatcgataattggcaaattatagattacttttttcttacataaaggtaaaaataattataaaatacatcatattttttcaagcatattacctattattcaggtaatagtaatttttgaagggaaataatcaacttgaaaaaatatacatggattcagttctcttaaggaataatatgtgtttttcccaaaagatcctgatcgtgagattgtmggacagctgcaatatattcatgatgtttgttaaaatagacaaaaagtaccagatcccctgagtatccaaagtataaaaattcagagagaatttggtgataattagttgctggataattatcccattgaatagtaat

SEQ ID NO: 796425 - DNA, 601 bp, Homo sapiens
ttcattccgattatatgttagagaatgctgtttacacatgcaagtctcacagtaatagaaaccattggcaaaaacaacaagcaacaattgggagggggacttgggggagcatcaaacaatctgatattgtactcagtgtattgcagctattaataacatttggttataaaatccccccaaaacactgcgacaatgttaaacaagataggatgagataccgggacaataggtataagctgtttccatcctgggaaaactggaatacggccaccttaataagacccaaagcctgaactcttctctaactagtttagggtttgtaatattttttgataagcccctcccttgaaaaagactcagtctaaccaaatttctccaagcttacatattaaatccaaatytgaatggcttctcttatgtattttgccttgcaaaatttgcagcacttacattaaataaaagtccatatatttccatatatttcatgtttcaattgatcttggccattaacataataaaaaggaaaattcctgaggatacttctcaagattttacatcaatgtttggcaaatttgcatacatttatgttaaagtcttggct

SEQ ID NO: 796426 - DNA, 507 bp, Homo sapiens
tagctgcattcctaggtattttattcttttttgtagcaattgtgaatgagagttcattcatgatttggttctctgcttgcctgttgttggtgtataggaatgctagagaatttgcacattgattttgtatcctgagattttgctgaagatgcttatcagcttaagcttttgtgctgagttgatgaagttttccacatataggatcatgtcatctacagagacaatttaasttcctctcttcctgtttaagtaccttttacttctttctcttgcctgattgacttggccagaacttccaatactgtgttgaataggagtaatgagagaggacatccttgtcttgtgccagtttacaaaaaggaatgcttctagtttttgcccattcagtgtgatattggctgtcagtttttcatacatgagatatttcccttcaatacctagtttattgaaatattttaacatgaaaggatattgaattttatcaaaggccttttctgcgtctattga

SEQ ID NO: 796427 - DNA, 465 bp, Homo sapiens
ccttaattttattatttacccaagagtcattcaagagctggtagttcagtttccttgtagttgtgtggtttcaggtgaacttcttaatcttgagttctagtttgattgtgctgtggtctgagagactgttaagatttaagttcytttgcatttgctgaggagtattttaattctcattatgtgatcaattttagagtaagtgccagagttctgtagatatctatcaggtccacttgatccagagcttagttcaggccctaaatatctttgttaattttctgtctcagtgatctgtctaataatgtaagtggggtgttaaagtctcccactattattatgtgggagttgaagtctctttgcagatctctaagaacttgctttatgaatttaggtgttcctgtattgggtatatatatataatagttagctcttcttgttgaattgaactctttaccattatgcaat

SEQ ID NO: 796428 - DNA, 449 bp, Homo sapiens
aaggaatataataagaaggaattatattcggctttcccagtaccaaatcagtattagtcagggttttccaaagaaccaatagggtatgtatatagatacataaggcgggaaatttttaggggaattagctcagacaattatggtggctgtgaaatcctatgactgccatctgcaaactggagaccctgggatatcagtagcatggctyagtccaagtccaaagacctcagagtcaggaaagctgctggtgtaactgaaaacctcaggacccagggggccactggtataaatcttggagtccaacgctcaatgagcctgaagttctgatgtcaaaggcagcaaaggtctgtctcagctctcagagagagaattcactttctgtattattgtcttcaggtccctggccaattggatgatgcccaacaatactgagggaataccttccccac

SEQ ID NO: 796429 - DNA, 631 bp, Homo sapiens
tatgttatatagtaatagaatattaaaaagagatgctccaaaactgaatgcattcctctcttcacacaatgatctgcatgcattacttgtatatcacgtacaaaatctataccagaacatttcctaatctgggagagaaataatatttggaaaattacattgacaatggcaaattatgctaggggaagaatgcttggcctgtctgtactattgcctctgtctttaaatcagtaaacttggttctccctataatctttcatttgtgttaagggcaattggacaatttggtcctttttattatttacaaggcaacaktctctttcctcttcctaaaaaaaaaaaaattgcaaaacttattttgtgtgaacgtagcctactctttttttcattgattttgttctaatttattggctattttacattgcttttcttttgggaaatacgtaagttttgcttccctacctacactggtacctctttagcataaagggaagtgtatagctggtgatcaagtatcacttaaggagcgaatgaaattttcagatggtggattaggtcttctttgaaaatctctttcagaagggaattaaatgacacatggtggtaagaaaagtgaagatttagctgacga

SEQ ID NO: 796430 - DNA, 687 bp, Homo sapiens
taccaagaatcaatattgttaaaatggccatactgacaaaagcaattcacagattcaagctattcctatcaaactaccaatgacattcttcatagaattagaaaaagtatttaacattcctatggaaccataaaagagcccaaatagacaaagcaatcctaagcaaaaagaacaaagctggggcatcacattacctgacttcaaactatactacaaaggctacagtaacaaaaacagatgatactggtacaaaaacagacacagaccaacggaacagaatggagagctcagaaataaactgtacacctacaacsaccagatctttaataagtcaatgaaaacaagcaatggggaaaagacttcctattcaataaatggtgctggaataactggctagccatatgcagaagattcaaactgggcaccttatttacaccatatacaaaagtcaactcaagataaattaaagacttaaatgtaaaacctaaaactatagaaaccctaaaagataacctaggaaataccatctggccataggccctgggaaagatttcaggatgaagacaccaaacacaattgcaacaaaaataaaaattgacagataggacctaattaaactaaagagcttctgcacagcaaaagaaactatcaacagagtaaacagaaaacctacagaatgggagaaaa

SEQ ID NO: 796431 - DNA, 603 bp, Homo sapiens
tcctggaaatgtcttccactagttacataggctagttacataactcacttcattttatagatttaatgttttcatggatatatcagtttacaaaattatctgagagtatcatttttaaaggtctaccagaaaaaataaaacaacctaccacaaaggcctatgatttaaataaacattttccaaaaaacccrtttttgttaaaaatgccttgagataccatcactactataaacgtgaatgcttatgatagaataatatgtttgctttgatcagtcttagagcaaaacgtgtttcttaagttgtattgggtatattttctaccaaaattctcaaagcccatgctcatgcaaatagttctgttcaggcaaatgatcattatacccagtttccatatcattcatacacagctagacacattttctggtggggatttaaacaatggtatggaattctgcagtctctcctatctatatattctttcactctgaatatgtaccctaaataataattcttaaacttcatttctttatacaaatattatttttcttatgttggtgtttgtaaactaatacctgcatacaggaaataaaaaagtgatacaaa

SEQ ID NO: 796432 - DNA, 603 bp, Homo sapiens
tcctggaaatgtcttccactagttacataggctagttacataactcacttcattttatagatttaatgttttcatggatatatcagtttacaaaattatctgagagtatcatttttaaaggtctaccagaaaaaataaaacaacctaccacaaaggcctatgatttaaataaacattttccaaaaaacccgtttttgttaaaaatgccttgagataccatcactactataaacgtgaatgcttatgatagaataatatgtttgctttgatcastcttagagcaaaacgtgtttcttaagttgtattgggtatattttctaccaaaattctcaaagcccatgctcatgcaaatagttctgttcaggcaaatgatcattatacccagtttccatatcattcatacacagctagacacattttctggtggggatttaaacaatggtatggaattctgcagtctctcctatctatatattctttcactctgaatatgtaccctaaataataattcttaaacttcatttctttatacaaatattatttttcttatgttggtgtttgtaaactaatacctgcatacaggaaataaaaaagtgatacaaa

SEQ ID NO: 796433 - DNA, 591 bp, Homo sapiens
attcatcatgatggcacataatatcccatccagagaatcatcaaatgaactgtttattattgcacacttgtgcttttattttcatcttgtgctaatatttgtcaatcattatctgtagttccagacattatactaacagcttctaggctttaacttccataaggattatttccaatgattcctagaataatgccatggtgacaacagaatgcacatattattttgcatcttctctattatattttgagattgatgtaccagaagcagaattactatgtcaaaagttataaatgcttcttggttagatattgtacaaaagagttgtactaagttccacataccaaacaacttgtaccaagttagaatgctactaggtttataagagagcatctctttcagcctttcytttttaatctaaaatgtttagcaagttcaaaaataaagctctgtaaacatacaaataattcagattaaatatctaaaggaaatttatagctaccagaagaaaagatatacattttataaaattgttgtataattagcttctttcttttttcttttcttcctaatctcaagctgttcattgatcat

SEQ ID NO: 796434 - DNA, 590 bp, Homo sapiens
tgcaatactaccttactactgcaagaatggccataattaaaaaaatcaaaaaacagtagatgttggcgtggatgtggtgatcaaagaacacttccacactgctggtgggaatgtaaagtagtacagccatagtatggaaagcagtgtggagattccctaaagaactaaaagtagaactatcatttgatccagcattcccactgctgggtatctacccagaagaaaataagtcattatacacaaaagataactgcacatgcatgtttatagtactacaattcgcaattgcaaaattatggatccaagctaaatgcccattaatcaataagtggataaaaaaaactatggtgtgtgtrtatatatatatatatatatatatatatatatagtgtatatatatatggtgtatatatatatggtgtgtatatatatatatggtgtatatatatatatggtgtatatatatatatatatagtctccaatatcatctaggtcactgtgaatgccattaattcattcctttttgtggctgagtagtatttcatcatatatatcatatatagacgttttataaaaattcaagacaagc

SEQ ID NO: 796435 - DNA, 604 bp, Homo sapiens
tgataaatgagaagcagtaaaatgtcctagcactaatatttacacacatacaatatgtaatgctgtgtagagcagcattttaattaacactttatgaatttaataggaattataatttatgttgatatcaatatccactcagaggaatacattagttttkatttgtttctttccatgcctctatctaggggttcctgtgctgtcactttgaattatactaatttattgtgtttattttttctacacattcaatttaacatttttaaacactctgtaacagtgtgagatgagtagaaatagtattatagactccattcattaactcgtttttacatcctaatactttttcttacaggtttctatcacttttttttgctgatcatttaatttgtcctagcaggaagaatttaatttcctgaaagataacaagatccaggagttactctgtgatttttctgttgccacattttatatagctcacattgtcataagtaggttgtgagcttttctaaggcacaaccttgagttacagttcatatttactccagccagactctggtatgaagttgtttattcacacattgcgtgctatgtggatgtgctc

SEQ ID NO: 796436 - DNA, 604 bp, Homo sapiens
tgataaatgagaagcagtaaaatgtcctagcactaatatttacacacatacaatatgtaatgctgtgtagagcagcattttaattaacactttatgaatttaataggaattataatttatgttgatatcaatatccactcagaggaatacattagttttgwtttgtttctttccatgcctctatctaggggttcctgtgctgtcactttgaattatactaatttattgtgtttattttttctacacattcaatttaacatttttaaacactctgtaacagtgtgagatgagtagaaatagtattatagactccattcattaactcgtttttacatcctaatactttttcttacaggtttctatcacttttttttgctgatcatttaatttgtcctagcaggaagaatttaatttcctgaaagataacaagatccaggagttactctgtgatttttctgttgccacattttatatagctcacattgtcataagtaggttgtgagcttttctaaggcacaaccttgagttacagttcatatttactccagccagactctggtatgaagttgtttattcacacattgcgtgctatgtggatgtgctc

SEQ ID NO: 796437 - DNA, 604 bp, Homo sapiens
tgataaatgagaagcagtaaaatgtcctagcactaatatttacacacatacaatatgtaatgctgtgtagagcagcattttaattaacactttatgaatttaataggaattataatttatgttgatatcaatatccactcagaggaatacattagttttgatttgtttctttccatgcctctatctaggggttcctgtgctgtcactttgaattatactaatttattgtgtttattttttctacamattcaatttaacatttttaaacactctgtaacagtgtgagatgagtagaaatagtattatagactccattcattaactcgtttttacatcctaatactttttcttacaggtttctatcacttttttttgctgatcatttaatttgtcctagcaggaagaatttaatttcctgaaagataacaagatccaggagttactctgtgatttttctgttgccacattttatatagctcacattgtcataagtaggttgtgagcttttctaaggcacaaccttgagttacagttcatatttactccagccagactctggtatgaagttgtttattcacacattgcgtgctatgtggatgtgctc

SEQ ID NO: 796438 - DNA, 638 bp, Homo sapiens
agtcaatttaatggaaactttgtaccctatgactgacattttcccttttgcaatcttttccccttcttctagcctctggtaatcacctttctactctctgtttctatgaaattgcttttttaaaattccacatataactgagatcttacagtatttgtctttctgtgcatttcatttaagataatgttttccagttctatgcatgttgccataaatgaaggaatttgcctctttttaaacactaaataatattccattgtgtatgtataccacattatcttttcatctgttgatgaacacataggttgcttccttatcatggctattgtgaaagatactgaaatgaacatgagagtgcaaacatctctttgacatgcctatttcgattcttttggatatatacctagaagtgggattactggatcatatgataattattttagttttttgaagaacttacattttytaaaatggctatactaatttacatgaccatgaacagtgtataagtgttcccttttctccacatccttgctaacgctttttatcattcatcttcctgataatagccattcaccaggatcaagaggaatttatcccagggatgcaagaatggctccacatacattaagtcaata

SEQ ID NO: 796439 - DNA, 599 bp, Homo sapiens
atgcgacggagtgtgcattacatttggaaaaaaatgtgaatcagtcactactggaactgcacaaactggccactgacaaaaatgacccccatttgtgtgacttcattgagacacattacctgaatgagcaggtgaaagccatcaaagaattgggtgatcaagtgaccaacttgcgcaagatgggagcacccgaatctggcttggcagaatatctttttgacaagcacatcctgggagacagtgataatgaaagctaagcctcaggctaatttccccatagccgtggggtgacttccctggtcaccaaggcagtgcatgcatgttggggtttcctttaccttttctataagttgtaccaaaacatccacttaaattctttgatttgtaccattccttcaaataaagaaatttggtacccccacccaaaaaaaaagcagagaaatcagcacwctatttgttaatctcacaggactaaagaggaataagctaaagtttgtgacttcaaaacagctgagatgtgaaatcaagttattgttgagaaaagagagataaagaattaggacattttttttctcccttagaggcgtttgctgaattct

SEQ ID NO: 796440 - DNA, 504 bp, Homo sapiens
aaataaataagcaatttgaagaataagactaaataatttctttttttgttttttttttgttttgttttgttttttgagaaggagtctcgctctgtcccccaggctggagtgcagtgacacgatctcagctcactgcaagctycgcctcccaggttcaagccattctcctgcctcagcctcccaagtagctgggatgacaggtgcccaccaccacgcccggctaattttttgtatttttagtagagacggggtttcaccgtgttagccaggatggtctcgatctcctgacctcgtgatccgcccgcctcggcctcccaaagtgctgggattataggcgtgagccaccgcgcccggccaagactaaataatttcaatttttaaaaaatatgtttttcttacgtaatttccagtgccaaaatgtgatactttaaggggctggcaaggtgcagaagaaaatggcactcatttataacagttcttactgataactactcactacaaact

SEQ ID NO: 796441 - DNA, 560 bp, Homo sapiens
tctgtagggcttccccctgaggctaaaaagtcaagacgactaagatgctacagggctgacaccactgctttctgcttctcttcatgacatctctctttctcctagactccagatctttctagccagctttttcctttcaagaactaggctgatgaatcatgcactttgaagcattatagactaaaggtgctcccacttgtaggtctatgcacatttttgacaaatatcataggaaaaggtcaatgttttcctttaaggaagagttgttagtattgggatttctggyctcagtgcatttgtatcaaagtagttggccaggcagttcagagaacccacaaacagtcatttactgcaaaccagaatatgactccaagactataagctgatggctgctaactttaatatattttttgtcattaggtaattctctgcaagatgggctttgtgaagccgtgtctaggagtgctattatgtactgagggacacttggggggatgtcaggctcatctgtgacccttttctggcctcagtttcctcagttcttgaatagaataaagata

SEQ ID NO: 796442 - DNA, 560 bp, Homo sapiens
atcacatttattaaatgtcatatgcagcttgattacatgttaatcctttatttgattagtatgtttaagtggtcatagttaacagaacttcttccccttaagacaagagttctccaactttcaaggtatgcctttcttttttttctctgtggaagacagtctgagtcaaaaacacratttagtccatttcccccttcaaatattatggaaaaatttttttttctagattggtagccaacgtatcacactttcatccttctggaactttcttgtgccaagaagaaccctttaagcacagttgttaacagtgacccaggcagcctcttctgaacagcccacggctgtcacacacccattgctacaatttctacagacttgaagctaacacttcaagctaacacacagtgttttttaagatcttgtgttagtaataaaaaagtcataaataattcctgtgtgaagctctctagttttcatcagtatttttgacttaatacaaaggcattttagaagtgagtcctattactgtctgtgaaacaatgcaaggctgtggtaggtct

SEQ ID NO: 796443 - DNA, 489 bp, Homo sapiens
aaagtgtctcattagggttggtggaaacattaaagaatatgagaatttaatgtttgttgctgtttctattgttttaattatctccatcacagctctgatgaagttattctactttttctactttttgcttataaaaggaatatccagaatcagataaaaaattcatgcattagaaaagagaatttaggaaaaattaattttgcctgccaccccctcaccgtcttagcacctactcctcaacgcccatagccccattaccatgtattcatcaatgacttcaactctgagacgaactcattagatattctactgccatasaaaacagaaggcttcctacaaagtgacagtatggataaatttaaagtgggatcaatagttatttgtttctgcaattttcccaaagaataacagcataaataccaataaaaattagttattacacgtggtaaaactccttcaaaacttatatctattaccccaatataggaa

SEQ ID NO: 796444 - DNA, 646 bp, Homo sapiens
ttagatgatttatatttacagtattctaacatagaccagagaagttaaaattagtcagtttttcttagagtagaattcaatttctccagctataatttatattaaaaatatttayagtttctcccctgctgtgaaaactcttaaataactagactaactgcaaaagtcaaagatttcctatatgtgaaaaacatatcatcttaatttgtaaatggtattttaaaaaattgcactgtgtcaaaggaaatggagaagggagagttaaggacatttctaaagtggaatcaataggtcttaggaaccgaaagaaggcggaactgctaaggacatgtctgagatctctgcggcccattgctggagaaaagaaaatatgaaatttaaatattattgattttgatggggaacaaagattggaaaatataatgagtttccttttggacatgttaatggaaggtgctagcagggacctccagtaacttctggaagacagctggaaattcgggcctcaaattcagacaaaaatgtgggtaatatttttggaagtcatttccatattgtaaaaaatactcattcagcactctggaaaagtatatgcctgaatcagaagaggtggcatcttggaaaccacctaagtttaaaggacagg

SEQ ID NO: 796445 - DNA, 646 bp, Homo sapiens
ttagatgatttatatttacagtattctaacatagaccagagaagttaaaattagtcagtttttcttagagtagaattcaatttctccagctataatttatattaaaaatatttatagtttctcccctgctgtgaaaactcttaaataactagactaactgcaaaagtcaaagatttcctatatgtgaaaaacrtatcatcttaatttgtaaatggtattttaaaaaattgcactgtgtcaaaggaaatggagaagggagagttaaggacatttctaaagtggaatcaataggtcttaggaaccgaaagaaggcggaactgctaaggacatgtctgagatctctgcggcccattgctggagaaaagaaaatatgaaatttaaatattattgattttgatggggaacaaagattggaaaatataatgagtttccttttggacatgttaatggaaggtgctagcagggacctccagtaacttctggaagacagctggaaattcgggcctcaaattcagacaaaaatgtgggtaatatttttggaagtcatttccatattgtaaaaaatactcattcagcactctggaaaagtatatgcctgaatcagaagaggtggcatcttggaaaccacctaagtttaaaggacagg

SEQ ID NO: 796446 - DNA, 572 bp, Homo sapiens
gaagtggtccatcaccatcttaaaatcaaaactattacctctagcattggtatctgggaatccagttgttttaactgctgatccctaaaagtacactttttgtaaatcaaagctctttgatgtgaattcttaatttttaacaaggcataacttggctattttaagtaaattgaaaatatctgcaaatttgagcagtcttcttgaatcactagaacacagaaatagttttaaatctttactataatgrtaggcaacataaaaagctacttgttagatagacattttcatataaccttgcatggtatcagatttaatgtacatggaaaatatttcaaaattgtaattttatatattattttaattcaagtgtcaaaacataggtaaaaaaaaaacactctaaatagtctgtggttaaaaatgtaatgcaaattctcccttattcacctattctcttatggaagacatggcaaatagagtatcaaatagacaaactaaccaaataatagaaaagcaagcaagcagggaaataaagaaaaaagaaaggagacagaaaaggggcaggcggggaagag

SEQ ID NO: 796447 - DNA, 628 bp, Homo sapiens
tagaaattgaaatcatattgtttggtttaaataaccacctagcactaaatagctgtgtgactatgcctcagtttcctctactgtaacatggacaaaatagtgcctgcaatacaaggatattttaagaaataaatgaaataatgmatgtaaatagcttatatcattgcctcacacataaattttagccctatataaatgttaacaagtattattatttctttacaataacatcaacaattttttattattacagtaccattaatgaagtgcctcaaacacatttatccagcaacaattcaagaaaaaaacatatgctggcttatatcaattatatatgcttccatcaaacatatgggggagtgccaattttcatagttcctataagaatatgaatgctttctattcagagatattggaatacgatggtacactgagctgatcaggagtaaaatggttgcatccaatacaagctgcatcacttggcaggaaagctatagtggtaaattaaatatggaaggcaagatgtagttctcaacctcaagtctagctattatacctctgaagatttaatttacatatatatgcacattgtttttaatattctaaatctaatgttcattatgagatt

SEQ ID NO: 796448 - DNA, 601 bp, Homo sapiens
ccttctcactttaatatgtgtgtagttcttttcttccccccacctaatcagctaatatgtttgaaaagatatttttaatgcctaaatgaaaggattccacatcaaagacctgacctccctattaaagtatcctaaaggaaaccctacgaatgtaaaacctattcaaaggcaaattgcgtgtagcttattgtacaatgcattaaggaaaaaaagccttacaaaagctgcaaggaatttggtaaaattatatcacaaaaatataarctgatcttgaagtataaagaaacaaattcatagccaaaaacttattacagaagtgctctgtaattagccagcaagggagtctttatgaagaacttcagaatttgtcactttttcaatcaaaatgtctgattacagcttaatgttggaaaggccaaaaggagaacaaaccatacatttttcaatagatttttaaatctgaaattttatagctttcaaaatcagaaaagataggttttcctacagcaacaagagtagaacgatgtaatgagataatagataagatagtataaataaaaaaactttttaaaaaacaatttttttaccataccatgaatgt

SEQ ID NO: 796449 - DNA, 601 bp, Homo sapiens
ccttctcactttaatatgtgtgtagttcttttcttccccccacctaatcagctaatatgtttgaaaagatatttttaatgcctaaatgaaaggattccacatcaaagacctgacctccctattaaagtatcctaaaggaaaccctacgaatgtaaaacctattcaaaggcaaattgcgtgtagcttattgtacaatgcattaaggaaaaaaagccttacaaaagctgcaaggaatttggtaaaattatatcacaaaaatataaactgatcttgaagtataaagaaacaaattcatagccaaaaacttattacagaagtgctctgtaattagccagcaagggagtctttatgaagaacttcagaatttgtcactttttcaatcaaaatgtctgattacagcttaatrttggaaaggccaaaaggagaacaaaccatacatttttcaatagatttttaaatctgaaattttatagctttcaaaatcagaaaagataggttttcctacagcaacaagagtagaacgatgtaatgagataatagataagatagtataaataaaaaaactttttaaaaaacaatttttttaccataccatgaatgt

SEQ ID NO: 796450 - DNA, 621 bp, Homo sapiens
ctcctgaagtgatgcacaacttaacctgtgtagcacttcgcacaaaaatatttaacttgaatctgaatgcaaggcaacaatcatagaagtccaaagtaagggacattctgtgacacaactggcctaggatctaaaaatgtatcaatatcatgaaagataaagagaggaagaaatagagaaagagagaagaaaaggctagagaactgttctagattaaaagagactaaagaggmacgacaatgaagtatagaggagtccctgattaacccctgaattgaaagaagttatatatgacgttattgggataactggagaaatttgaatatggactgggtatcagataattacattgtaccaatgttaagttatcagagtgtgataactgtattatggttcactagaataatctcattgttcttaggcaataaatgctgacagttttaggctcacaaaacaacttacacagtctcatgtttattacttcatgcctttgaacatgctattatatctacacagaacatctgtctcactttcttcaccaagctagctcttacccttccttcaaaacggagaactgagaatcctttcctgacccatgtggcataaactaggtgcccctct

SEQ ID NO: 796451 - DNA, 632 bp, Homo sapiens
aaaatacatagtaataaaaatgtaggaaggagagttcctctttaaagaacagtgtcaactaatagatgtcaaagatatgagggaactacaaaattcaccacattacaattcacatagtaagaaatgattcaggcaggagtcatcaacggttgcaaaaactattgtgcataagggatgtagaggaacaggatatagagaaatctggtagataccaccttatccaaataatcaaatttgacattaccaacaatgtggaatatgctgatatcaattgcctcctgaagtgatgcacaacttaacctgtgtagcacttcgcacaaaaatatttaacttgaatctgaatgcaaggcaacaatcatagaagtccaaagtaagggacattctgtgacacaactggcctaggatctaaaaatgtatcaatatcatgaaagataaagagaggaagaaatagagaaagagagaagaaaaggctagagaactgttctagattaaaagagactaaagaggaacgacaatgaagtatagaggagtccctgattaacccctgaattgaaagaagttatatatgacgttattgggataaytggagaaatttgaatatggactgggtatcagataattacattgtacca

SEQ ID NO: 796452 - DNA, 529 bp, Homo sapiens
ataaactactatgcagctctaaactccagggcagagattcttcatttatgctctaacattctctagaaaaatttcacaatgctgccaagatactcttcctgcctcaactactctattctctccctcccctctctctaaccatcttttaaaaagtcttccaaaagcatcaaarcataaaatgtattaggtccttatccatttgctcaatatttttttcatttcattaatgaaaattaccaactaaaaaggcacattctactcctactcatatcatactcactcatatcataatcagtttctgagctagaacaagtaaagcttggaatacagtgttaattttgttgaagatgagtaacaacttatgtaaactttgtaacgctaaatcttggaaagaaaataaaatatttgctttaaaaatatcttcaggttaaaagtatgctttatttaaactttaacagtcagtgcttgacaggatttcttttgtattactgtcaagagatttatcttactgatgagtaatcatcaccgt

SEQ ID NO: 796453 - DNA, 573 bp, Homo sapiens
attttttaaaaaatgggcaacatatctgatagatatgtctcaaaaggagagctacaaatggcaaacaggtatatgagaaggtgctcaacctcactgaccatcagagaaatggaaatcataactacaatgagatatcatctcaaatgatatatctcaaaaagatatcatttcaaatgatatatctcaaaaagatatatcatttgagatatcatctcaaataaaatggcttttatttaaaagacacgcaataacaaaggccggtgaggatgtgcagaaaagggaaycctcatacactgtggaaatgtaaattagtacaactactatggagaactgtttggaggttctttaaaactaaaaagacagctaccatgtgatccagcaattccactgttagatatatactcaaaaaaaaagaaaataaacatcatgaagaaatatctgcactaccatatttattgcatcattgtttacaatagccaagatttggaagcaacctaagtgtccgtcaacagaaggaaacataaagaaaatatggtacattgacacaacaaagtactattcagccattaaaat

SEQ ID NO: 796454 - DNA, 573 bp, Homo sapiens
attttttaaaaaatgggcaacatatctgatagatatgtctcaaaaggagagctacaaatggcaaacaggtatatgagaaggtgctcaacctcactgaccatcagagaaatggaaatcataactacaatgagatatcatctcaaatgatatatctcaaaaagatatcatttcaaatgatatatctcaaaaagatatatcatttgagatatcatctcaaataaaatggcttttatttaaaagacacgcaataacaaaggccggtgaggatgtgcagaaaagggaaccctcatacactgtggaaatgtaaattagtacaactactatggagaactgtttggaggttctttaaaactaaaaagacagctaccatgtgatccagcaattccactgttagatatatactcaaaaaaaaagaaaataaacatcatgaagaratatctgcactaccatatttattgcatcattgtttacaatagccaagatttggaagcaacctaagtgtccgtcaacagaaggaaacataaagaaaatatggtacattgacacaacaaagtactattcagccattaaaat

SEQ ID NO: 796455 - DNA, 661 bp, Homo sapiens
cttgggtcatcaagtgcaacatgtaattcccagaagtgtttacaacatattttctgaggattcaatggaataaatgagaagaaacaactaacaatattttgataagctgtcaatagggaaaaaaattcatctgaaacattactgttaaatatcaaattttaaatgaaaaataattatcatgaacaagatacacaaaagtagctttcattaaaataatgtagattttttttctcrtgtcatgtaaactttagagaaaaatataaataatagacttttgttattttcaaaatctttaacatgtaagagacttggaggtcagaacctgcagaaggatttgcttactggggagtggtgattgtttctttttaaaggtaggtgttgtagaacgagtagggggcttaagtgacaaaaaaggatttaaatattatttgaagtttcagtttcaccataataaggaccaggaaattgtctaggattcaaataaatattctgaatcacagactaccataggccaacacatggcatcagttacctagaagatgaccaggtaggaagaacagcttcacagtatagcattgccaggcatttctttcagcaagaaccctggtggcagcagttcctaaagtagtctctaggacagtttgggagctagtctctcctc

SEQ ID NO: 796456 - DNA, 461 bp, Homo sapiens
tttttataaaactacttgtaatatctatgataaagaaggaccatttatcttttagcaatggcaaaagtgatttattttccacacgaggttaaaagctaacatttaatttctcatttgaaaatttccagtgctttggaaaataaacatgcctgaccttaaaaatttttgcttgttttagtgtatatatatatatatatatatatatatatatatatgctttactatatatgtaagagctcagatatgtttgtacaaagatatggcacagctatgcaaatatcaattcaccatgtcttttacaaacattctactmaatattttacaaaaaaagcaccttcctcatttcaaaaatataaagaatattaaatatataaaataatttcttaagattctatattcagagttttacctttaagtcatggtagacagagtgatcaagaaataataaataaaatatattt

SEQ ID NO: 796457 - DNA, 570 bp, Homo sapiens
acccccggttcacagtgggagggcagtgaggccagacccagggaagaggctggagaggtgaagtgaggtccccacagattcctcaacgcggggataggtgtcagtcccagcatgagacagatagcttcctgcccaggccgtctgagggacgatggcttagccacgttgtcccccttttgacttacaagaagtctacgctacaggaggcctttcatcaaacccaggggagacactggaggcctcagtgggctcagcgggttcctgcgcaggccaggccggaaaaatgactcggttcccttgcaagggctggctggaggagaaggcgggcttccttcaggcagaacaagtacctcctccccacccagacatgccggtgcttgccctggggcccggggrgtgcaggctgccgctgctgagcacagacacggcagcgtgggggcagtcaccaggccaagtctttgttgtccagccttgaaggtttcaaggcctcctcttctgcccctccctcagattgaaaccctgcagaacaaaattaagaacctgagggaagtccgaggtcacctgaagaaa

SEQ ID NO: 796458 - DNA, 562 bp, Homo sapiens
atcccttgaggccaggagttcaagaccggcttgggcaatacagcaagatcccatctacacaaaatatttaaaaattagctgggagtgttggcacaccccattgcattcttgtctgcatgcagtgcaatgtacaggccggcaggtggcacaattgaccacttgctggtctcccgttttggcgatgccatcttagggcatatcctctgcgggtggggcctggcattggcaccccaacctctgcctctggagtcagcctcagcctccaaggcagtgtgggcctgagggtctggcttccytgcagccagcctcacctgagttctcagatggttcgagccaggagcaaatctgacggagcgggtgtggtagcaggagccggtgctgagtgtgtggactgacccccggcgtctccccgactgtcccctcttccttcacttctgccaccaccacctagttgaagccaccgtcatctcccacctgaactgcttgccctggccctcttagcagcctcaccgtgtcccctcaggccacatttcctgacccacggccatcaacaaatctgatc

SEQ ID NO: 796459 - DNA, 524 bp, Homo sapiens
gcatgtgactactgagcacattaaatgtggctgatgtgactggacgtggtggctcacacctgcaatctcagtactttgggaggccgagatgagagaatagcttgaggccaagagtttgagaccagcctggtcaacatagcaggacccccatctctaattttatttaattttatttatttatttattttgagactgagtttctctcttgttgcccaggctggagagcaatggcatgatagcggctcaccacaacctccgcctccgggttcaagtgattctcctgcctcagcctcccaagtagctgggattacaggcatgtgccaccacrcccagctaattttttgtatttttattttttttttagtagagacagggtttctccatgttggtcaggctgctctcgaattcacaacctcaggtgatcagcctgcctcagcctcccaaagtgctgggattacaggcttgagccaccgcgcccggcctccatctctaacttaaaaaatattttttaaaaatgtggctga

SEQ ID NO: 796460 - DNA, 579 bp, Homo sapiens
agtttctaggctgcacagagcacgggagccctgagcctggcccaggaaactgaatgcctttaacagcacctttaatagcacctcttgaatgctttgctgcttagaaatttctgccagataccctaaatcatctctctcaagttcaaagttccacaaatctctagggcagggcaaaatgccrccactctctttgctaaaacatagcaagagtcatcttttccccagttcccaacaagttcctcatctccatctgagaccacctcagcctggaccttattgtccgtatcactagcagcacttttgtcaaagccattcaagtctctagaaagttggagtttcccacatttttttgtcctcttctgagccctccaaatggctccaacttctgcctattacccaattccaaagtcgcttccacatttttgggtgtcttttcaacaacgccccactctgctggtaccaatttactgtattagttcgttttcacgctgctgataaagacatacccaagactggacaatttacaaaagaaaaaggtttaattggacttacagcaaagatttttaaagtatcctcaaa

SEQ ID NO: 796461 - DNA, 613 bp, Homo sapiens
ccatttcctccgtgacaaatgggcatgaaagagaacgtgctcagtgctgctcagcaccaccttcccagggattttgtcagaaatgcagagtctcaggccctgtcccaaacactgagtctcgcatccttgggaggtggggcccagcaatctgtgttttaactaagcccgcttgcgactgtgatactaattgagaatgtccgccttccagggtcactgaaaagaccaaataagatcacgtgtgcgggatgcctggaaaatactcaacacacgaytgtcgtaattctccaactctagacagcctggcgtgggggccggggggagcattttctcttttccttcctttttttattggttattatttcttaatacagggtgtcactccgtcacccaggctggagggcagtgctgtgatcacagctcactacagcctcgacctccccagctcaagccgtcctcttgcctcggcttcctgagtagttggaaacaggtgcatgccaccagctaattttttatatttttttgtagagatgggggtctcactatgttgcacaggctggtctcgaactcctgggctcaagcaatcttcccacctcagtttcccaaagtgttcgga

SEQ ID NO: 796462 - DNA, 613 bp, Homo sapiens
ccatttcctccgtgacaaatgggcatgaaagagaacgtgctcagtgctgctcagcaccaccttcccagggattttgtcagaaatgcagagtctcaggccctgtcccaaacactgagtctcgcatccttgggaggtggggcccagcaatctgtgttttaactaagcccgcttgcgactgtgatactaattgagaatgtccgccttccagggtcactgaaaagaccaaataagatcacgtgtgcgggatgcctggaaaatactcaacacacgattgtcgtaattctccaactctagacagcctggcgtgggggccggggggagcattttctcttttccttcctttttttattggttattatttcttaatacagggtgtcastccgtcacccaggctggagggcagtgctgtgatcacagctcactacagcctcgacctccccagctcaagccgtcctcttgcctcggcttcctgagtagttggaaacaggtgcatgccaccagctaattttttatatttttttgtagagatgggggtctcactatgttgcacaggctggtctcgaactcctgggctcaagcaatcttcccacctcagtttcccaaagtgttcgga

SEQ ID NO: 796463 - DNA, 642 bp, Homo sapiens
caactgcaaggagaaatagacaaaagtaaatgtcgaagtccagaaacaaacccacacatataccaagtaatttttttttttttacaaaggtgaacagggaaagtcttcaaaaagtggtgctagaataaatagccatatggggggaaaaaaaattgactcttatttcataccataaaccaaaattaattcaaaatggacccatagatstaatgtaagaactaaaacataaaacttcttgaagagaaaaaaaaatctttgtgaccttaggttagacaaagatttctgaggagccaaagtatacaaaccataaaagaaaaaaattgataaatttgacttcatcaaaatttaaaactttgctccctaaaccacaccactgagaaaataaaaatcatgagccacagactggagaaaatatctgaccaaaactggtatccagaatatataaataatccttgtactcttataactccataataagcagacaaacagcccaattaaaagaataagtgttcataaatgagcccagcacattattaatactaataaccgaaagatggaaacaacctaaatatctgtcaactgaggagtgaataatcaaaatactacgtatccattcaatggagcattattaaaggaatgagg

SEQ ID NO: 796464 - DNA, 642 bp, Homo sapiens
caactgcaaggagaaatagacaaaagtaaatgtcgaagtccagaaacaaacccacacatataccaagtaatttttttttttttacaaaggtgaacagggaaagtcttcaaaaagtggtgctagaataaatagccatatggggggaaaaaaaattgactcttatttcataccataaaccaaaattaattcaaaatggacccatagatgtaatgtaagaactaaaacataaaacttcttgaagagaaaaaaaaatctttgtgaccttaggttagacaaagatttctgaggagccaaagtatacaaaccataaaagaaaaaaattgataaatttgacttcatcaaaatttaaaactttgctccctaaaccacaccactgagaaaataaaaatcatgagccacagactggagaaaatatctgaccaaaactggtatccagaatatataaataatccttgtactcttataactcmataataagcagacaaacagcccaattaaaagaataagtgttcataaatgagcccagcacattattaatactaataaccgaaagatggaaacaacctaaatatctgtcaactgaggagtgaataatcaaaatactacgtatccattcaatggagcattattaaaggaatgagg

SEQ ID NO: 796465 - DNA, 511 bp, Homo sapiens
gcagtacagacactcttcctaacttagcaatgaaaaagttcacaaaacttcattgacattgtcaatatgtgtctggttaaacatggccatagtatctgccattgggagttcggatgtgggaagtagtgtcgtggaacctgcttgtaccagctcacataagcagatttttctcrttgctttccaactctgtgttcaatggcataatactggtagctcaaattctgccatcatgagaatatttacaccacagaaactggtgtatattgcagacagggattttttttcataagagagaatttacaagcataccactgagtgtcctctcttcttgaattgcgacggattctgagattgctttgaccagttgattttggcagaagttatgccgtaccagtttcctggccagttcttcagagagttcagttcttcaaatctccagttcttcagagttcttcagttcttcacttcttgcctcttagaatatttgctcttagaaaatgcccacacaatc

SEQ ID NO: 796466 - DNA, 591 bp, Homo sapiens
tcattctaacagtttgtcacaaatatttttaaagtcactattgtggaactgttggaattctgagtcctgttttagaaatgtttaataattgactttcttttctgattagaaatttgtatgtaatgcacaaaacatttggaagccaagtcattggtattgttatgtgcttagaattggtgtttattttgttgatttgctaactaccacaaatactatgagtaataacattagtagaattgtcaaraaactggatatatgatcacttcaactcaattatagtaacataaaatattaattgtagggaaatgttggttatctttctttcttatacatctggaaacataatttataggtgtttcaaacacagtaaaatgtatagaatcatattgttaattggtaacttaaagtatgattatagatatttcaaggattatattcaattacttaataacatggtgtttgtgagtataaaataaaaccaccaatcaaaatatttaattttcaacggtactgatttgaatattgattacctgtcaccataattattgttgtgtcatcttaccttttcctgtcttcttctagtcgtattac

SEQ ID NO: 796467 - DNA, 618 bp, Homo sapiens
ctgtacaatgaatgcttgacctcagctatgattgcaaacatatcctcttatataggtaaacatattgacttgggacaactcaaattcatttagggcaatgcctgtgacaacagaaaatacaaaccattattaaaatttctgattccatgttatcctgggccacataatgaaatcccatctcttaaaaaaaattagctgtatgtggtggcatatgactatagtcccagctactcaggagtctgaggtgggaggatggtttgagcctggaaggttgaggctgtagtgaccggtgattgtgtcactgcactctagcctgggtaacagagtgagaccctgtctcaaaaaacagaacaaaacaaaaaaattgctgactctatttcttgggaactcccyggtgattcactactcattatttatgtgtgcctagatatcttttctctgcccaaatggtagataaatcctaatttaaaaactctcatagtatttccacagaaattaaagtgagtgtcttgatggaaatttaatagatattgatatatttttatagcatcattgtatatttcatatcataaaatataatttgcaatttaaaattaaaaaaacagagggacaaatatt

SEQ ID NO: 796468 - DNA, 528 bp, Homo sapiens
ctgcaaagacttaaaccacagacaggaaaggcgctgctgcagtctcgacggtcaaatgcagggccccctcagctgccatcccactgaggggcgaaggcccatcatctcccttcggctcggtaactgcctggcgyagcacaagggttctctttaaatccccagcaaatggagctgagtggaaattccgccccatattaccaggcacacgtctccttccactcctcactataccctgcccatgccatggccgccttctgagaataacgctgacagttccatggcccacagcccctctagttaacttgctgtgcacacggcagcccagccagaaacacgcagccaggtcggatattgggtgcattcagtcgtgaagcctgaggcttcctggctcccactgagcacagagaagtgttctgaaggacaggaagcagctagcctcactgctcttctcagacggctgatggagaaaagctcacagctgcctgcgccgctctgcctggacttgcatcctcggccccaccccttgcg

SEQ ID NO: 796469 - DNA, 528 bp, Homo sapiens
ctgcaaagacttaaaccacagacaggaaaggcgctgctgcagtctcgacggtcaaatgcagggccccctcagctgccatcccactgaggggcgaaggcccatcatctcccttcggctcggtaactgcctggcgtagcacaagggttctctttaaatccccagcaaatggagctgagtggaaattccgccccatattaccaggcacacgtctccttccactcctcactataccctgcccatgccayggccgccttctgagaataacgctgacagttccatggcccacagcccctctagttaacttgctgtgcacacggcagcccagccagaaacacgcagccaggtcggatattgggtgcattcagtcgtgaagcctgaggcttcctggctcccactgagcacagagaagtgttctgaaggacaggaagcagctagcctcactgctcttctcagacggctgatggagaaaagctcacagctgcctgcgccgctctgcctggacttgcatcctcggccccaccccttgcg

SEQ ID NO: 796470 - DNA, 509 bp, Homo sapiens
aaagctcacagctgcctgcgccgctctgcctggacttgcatcctcggccccaccccttgcgcagcagtgaggccccccgagacactggtgcctgggcttgcggtaccgcagggctgctggacaacgggccagacgcagccccagtgtggatccagaggtctctctccgtagcaagccatggaagcacgacgggcactgtgctgagaaccctggtctgcacttctgacctggggctctggctgtgcggttctgctgagctcatccgagagtccacgcgtgcatggcggagaccygagtcagcggcagggccaccccgttatgggcaccccaaccccttattaggggtgttaatcagcacaaatgagcaactggctcatcagtcggtgcaggctgacaggtgcaggaaatacggagggcaggcggggtagggggcacggaatgcttcccaacatgagggcatctcaggccagcaggcggggcccagagacccagaagcaccacaactcccc

SEQ ID NO: 796471 - DNA, 532 bp, Homo sapiens
gacccagggcaacgcctgccggaaggacccaagggtgggacgctgtctgtgcaaacccaacttccaaggcacccattgtgagctctgcgcgccagggttctacggccccggctgccagcgtgagtcccctctccccgctcaacctctrcctgcgctcgaggtggacacctgaggcctggtgcctctgaccaagcatgtgggccaccctttcctgcagcctgccagtgttccagccctggagtggccgatgaccgctgtgaccctgacacaggccagtgcaggtgccgagtgggcttcgagggggccacatgtgatcgctgtgcccccggctactttcacttccctctctgccagtgtgagtggtgcctctccacgtgggcgtgggtaggggaggcccgtgggcctggcctaccgtgacacccgctccgctctgcagtgtgtggctgcagccctgcaggaaccttgcccgagggctgcgatgaggccggccgctgcctatgccagcctgagtttgctggacctcattgtgacc

SEQ ID NO: 796472 - DNA, 574 bp, Homo sapiens
gggagccggtggggctggagtaagggcacgcccggggctgccccacctgctgaccaccctccccccacagcaccctgtgccggggcactgcccgggatacccaggaccacctggctgtcttccacctggactcggaggccagcgtgaggctcacagccgarcaggcacgcttcttcctggtaaggacccctcaggtccccaccccaaggggtcagcttctttcagaagatttgaaacatgcatgagaggggagaggacagttggggtcccaggtccccaaggcggccacactcgctcatgcccagcccagcatgtttcttctggaacccctcctgcaagcgttttgtggattcagtcccttttgacgtacccccgagctgttccatgtgctcaggaaagcacctgcagtcacagctccctggccccagggcagccacctcctggcacagacagcgttggttgcctgttctggaactttcttttctttttttttttttttgaaatggagtctcactctgtcgcccaggctggagcgcaatggcaagatcttggctcactgcaacctccacctcct

SEQ ID NO: 796473 - DNA, 540 bp, Homo sapiens
cttcttttgaaaagtctctgttaatgtgctttgtttatttattaatggggttgtttgttacttgttaaattgaatgaattcctcatagatcccaggtattagacctctgttgaatgcatagtttgcaaatatttcctaccattctgtaaatgcttgtttactctgttgacagtttatttcattatgcagatttttagtttagttgagtgtattagtccattttcatgctgctgataagggcacacctgaaagtaagcaatttacaaaagaaagaggtttaattgaacttacagttccacatggttgaggaagactcacaatcatggtggaaggcaaggaggagtgagtcacatcttacgtggatggcagcaggcaaaagagagggcttatrgaaagaaaccctcatgttttaaaatcatgagatctcatgagacccattcactatcatgagaacagcacaggaaagacccgcccccatgatttagtcatctcccactggacccctccctcaacacatgggaattatgggagctataagat

SEQ ID NO: 796474 - DNA, 626 bp, Homo sapiens
tattcaagactattgcagcaggactcacaactattgcagaggagtgaaggatgttactcaactctaaaggcatcaaggacagttgaaaatgtgtagctaaagagtagagctagagggtcagtggatagaaaaattgttaacaggaacttgattagataccaagactcttgctaaactggcttaacaagattcttgatgaaggcaggatgctacattactggtgggattttaagtggattctatttctgaaggttgtcaatactgtgtactctacaactcagcagttctatcccccagtatataacaaagaaaaattttgtcatatgtactctatgatacatttccaagaattttcacagcaatgcttttcacagtaacacatttcagaaaataaacataattttcttctttctcccatcctctttctcccccyctccgtctcaccttctctcattcattttttctttttattttatttgataatgcttttgaaacctcagagccattattgttgtactaatattggcttcaacagggagactttaacacacacacacacacacacacacacacacacacacacacacacacaatgtatattgacaaggactctctccttgaccaaa

SEQ ID NO: 796475 - DNA, 627 bp, Homo sapiens
actcctaaggataatatattgagagtggttgcctggagaactgttaagaagcattgggaagcgaagctcaagatattcatggtaaaagtactgccaccaataaccaagttttattgggcaagaaaaatgtactgagtgataacacatttaaaagacctttagacacaattcaaactctatcattgtaataggtagcctgttttatatgccctaaaaacattcagaatgctaattaaccataaaattcaactttcttgttgaatttttaaattsatttgaatattgtattgtaaagctttggttattacattgagagaaaagaatgagaattatacttaaaacacgtaatgatgtattgtcctttgaaacaaatacagataactttagttttaaattcataccatttttaagtatgtaagtgtattgtgaactgaaagtgttgttttagaagtgcttggttgtgatttacaaatgtgttttactttctcttttaagaagcaaatttcatttggaatatgaagcttttcagagaaaataaaaacgtgctaatagtaatgttcctcatgcaataaataccttaagggcttccttagtggaaaaggcggctgaaaataataatttatcgat

SEQ ID NO: 796476 - DNA, 627 bp, Homo sapiens
actcctaaggataatatattgagagtggttgcctggagaactgttaagaagcattgggaagcgaagctcaagatattcatggtaaaagtactgccaccaataaccaagttttattgggcaagaaaaatgtactgagtgataacacatttaaaagacctttagacacaattcaaactctatcattgtaataggtagcctgttttatatgccctaaaaacattcagaatgctaattaaccataaaattcaactttcttgttgaatttttaaattcatttgaatattgtrttgtaaagctttggttattacattgagagaaaagaatgagaattatacttaaaacacgtaatgatgtattgtcctttgaaacaaatacagataactttagttttaaattcataccatttttaagtatgtaagtgtattgtgaactgaaagtgttgttttagaagtgcttggttgtgatttacaaatgtgttttactttctcttttaagaagcaaatttcatttggaatatgaagcttttcagagaaaataaaaacgtgctaatagtaatgttcctcatgcaataaataccttaagggcttccttagtggaaaaggcggctgaaaataataatttatcgat

SEQ ID NO: 796477 - DNA, 627 bp, Homo sapiens
actcctaaggataatatattgagagtggttgcctggagaactgttaagaagcattgggaagcgaagctcaagatattcatggtaaaagtactgccaccaataaccaagttttattgggcaagaaaaatgtactgagtgataacacatttaaaagacctttagacacaattcaaactctatcattgtaataggtagcctgttttatatgccctaaaaacattcagaatgctaattaaccataaaattcaactttcttgttgaatttttaaattcatttgaatattgtattgtaaagctttggttattacattgagagaaaagaatgagaattatacttaaaacacgtaatgatgtattgtcctttgaaacaaatacagrtaactttagttttaaattcataccatttttaagtatgtaagtgtattgtgaactgaaagtgttgttttagaagtgcttggttgtgatttacaaatgtgttttactttctcttttaagaagcaaatttcatttggaatatgaagcttttcagagaaaataaaaacgtgctaatagtaatgttcctcatgcaataaataccttaagggcttccttagtggaaaaggcggctgaaaataataatttatcgat

SEQ ID NO: 796478 - DNA, 470 bp, Homo sapiens
gcttttgttccctgtgcttttggggtcatatccagaatgtcaattcccagaccagttatggagcttttcccctgttttgttctagttgtttcatagtttggggttttacatttaagtctttaatgcattttgagttgacttccatctgtgatatgaaataagscttatttctttcttctgtgggcacatacccatttgtcccaacaacatttaccgaagagacacttctttccccattgtgtgttcttgacacctttgtcaaaaatcagttggctgccaatgtctcaatttatttctgggctctctattctgttctataaatctatgtgtttgtttttgtgctagtgccatactgttttcataactagagctttgtagtatattttgaagtcaggtcatatgatacttttagcagttttctttcttctccagattgctttagttattcagagtcttttgtagttccatac

SEQ ID NO: 796479 - DNA, 619 bp, Homo sapiens
agtgtttctatatcattgactgaaatttagttaatgtgaactgaaatgactcaaagggggactagaaataattcattattccaggtacccatgtgtccatataatatttagggattctatcacaatggaataagaaggaataggtattagaaatgagcaaatagtctgaaacattgacaacataatatagagatgagwagtttttgttttactttgggaatgacgttggtgtgcttgttgtggatgaattagagagctatctatctatttgtgaggttttctaaatattgctcagccattctttcagtccactctaactgccttttcaccagtaattttgtttctcagtgccaggaacatacaaaaaatacatgaaatatgtatgggagtgtttccttacctgaaaaatgaagcaatgagattagacagcctcaaaattcactccaaaatttattattctatgactttcttttctaagaataatacactttgttattcttccaataaattgtgagggtatggtagacataaatactgtattttttaaaatctctaaatatattgcacactattaacgctacctggaaattctactcatctcaataaatttttaatgaac

SEQ ID NO: 796480 - DNA, 592 bp, Homo sapiens
ctcaacattgatatgaatcaaatgaaaatagcagaaatgtatatatgttcacatttgttttattattttataaatgcaaagaagttctattgtgttttcaaaaggatataaaaggaccaatataacaatctatacattttcttatgttctttcagaagcatttataggagtagacaaacatctttaatgtattacactgacaactttttaaaaattatttttaattgacacataataatagtacatgtttatgaggtacaaggtgatatttcaaaacctacatgcaatgtgtatcaatcaaatcagagtaattagcaatccatcacttcaaayatttattatttctttatgttgagaatattcaaatctgctcttccatttgaaaatatactattggttgttgtttattacagtcactaaatagtgctatggaacacgagaacttacttctgctatgtagctgtacttttacacccattaacaaatctctagctatccccgacatacccttcccttcctagcctctagtaaccactattttactctctactactgtgagatcaactctttgagcttccacataggagagagg

SEQ ID NO: 796481 - DNA, 592 bp, Homo sapiens
ctcaacattgatatgaatcaaatgaaaatagcagaaatgtatatatgttcacatttgttttattattttataaatgcaaagaagttctattgtgttttcaaaaggatataaaaggaccaatataacaatctatacattttcttatgttctttcagaagcatttataggagtagacaaacatctttaatgtattacactgacaactttttaaaaattatttttaattgacacataataatagtacatgtttatgaggtacaaggtgatatttcaaaacctacatgcaatgtgtatcaatcaaatcagagtaattagcaatccatcacttcaaacatttattatttctttatgttgagaatattcaaatctgctcttccatttgaaaatatactattggttgttgtytattacagtcactaaatagtgctatggaacacgagaacttacttctgctatgtagctgtacttttacacccattaacaaatctctagctatccccgacatacccttcccttcctagcctctagtaaccactattttactctctactactgtgagatcaactctttgagcttccacataggagagagg

SEQ ID NO: 796482 - DNA, 625 bp, Homo sapiens
ctaagtctgctgtatgcacattttattcatatatacattaaacatatataactatatacatctatgtgcaagtagatgtatatacacacatgatgtaaacatgcatacattgtctcagctggattgaaaggcaggaaaaagagaggtcattataataaaacaggccaagggtaaaaatcgaatataatttttctacacctgtgaaaacaaagtattgcagaattctattttctaatagtcttagttctcttctgagaagaatccaggaacccaggctggttttcccatgtgaagagctcacctttggcttcgggctggtgtcccgctctcagattcagaacttggcttggaccaggatgakgagaacagcggcattttgcagagaatgctttgtcataattaaacaaaagagaccaagatatgatgtcagaatagcaagcgacatcttaggagatgcagaatcttctcagcaggctggctggtatagctgcagggtgaccccagtcctccatctgcacagatgtcgggggctgcccgcggaacatgggctcagagtgggagtagttagttgcacaggcccagtgtccaagggcctcaggccgaggggacagctgcagccactgca

SEQ ID NO: 796483 - DNA, 606 bp, Homo sapiens
tcaagcattagatgattcttaaaaggagcacgcaacctagatcccccgcgtgtgcagttcacagtagggctccgctgccatgagaatggaatgcctctgctgttctgacaggaggcggagctgggcggtaatgctggctaggctgggctgctcacctcctgctgtgcggcccggttcctaacaggccacagacaggcccggggtgggggagggggatccctgctttagttgaaaggaggtgagtccttatataaatagaaactaacaagaggaatcttcagaaagtgggaaagccagtgaagctcgacaaatgacctcggggaaaacgtcagcattcctcaaarcccctcccagcacagtagtgcactcccagctccctgagggcctggctctaagtctgaggaaacacactctctctcgaacttgaacttgccagagagaactcaggcactgactgtgacgacgcgggtggggagagactgtgcacctacacgtgtcacttcacaaaggcctccaggtaacaagcacaaacctgagtcccaggaggaagccgaacggcccctgggttttttcgtttgtatatttgttgttgttgtttgctaaaga

SEQ ID NO: 796484 - DNA, 606 bp, Homo sapiens
tcaagcattagatgattcttaaaaggagcacgcaacctagatcccccgcgtgtgcagttcacagtagggctccgctgccatgagaatggaatgcctctgctgttctgacaggaggcggagctgggcggtaatgctggctaggctgggctgctcacctcctgctgtgcggcccggttcctaacaggccacagacaggcccggggtgggggagggggatccctgctttagttgaaaggaggtgagtccttatataaatagaaactaacaagaggaatcttcagaaagtgggaaagccagtgaagctcgacaaatgacctcggggaaaacgtcagcattcctcaaaacccctcccagcacagtagtgcactcccagctccctgagggcctggctctaagtctgaggaaacacactctctctcgaacttgaacttgccagasagaactcaggcactgactgtgacgacgcgggtggggagagactgtgcacctacacgtgtcacttcacaaaggcctccaggtaacaagcacaaacctgagtcccaggaggaagccgaacggcccctgggttttttcgtttgtatatttgttgttgttgtttgctaaaga

SEQ ID NO: 796485 - DNA, 541 bp, Homo sapiens
cgtttttcttttagtgctttcactatgtcatctactgctttttggactccataattttgaatgcataatcagctgttaatctcattaaggagcctcatagtgctattttgttctcctcagtttacctgttgccacaggggctccctctagttaccactggtcgtgcctaaggggccatatggggtttcccctggctaggccaccagtgtctttctgtgagggatgggaatcttaggcctatggagataaggagacatccctaatttggggcttgctgtggtaggatcctctttgtctttgggcatggagaatgcatctgtgctcttgtgcttgttctgkcagaatactccctggaggtgcccattggctactctgatgtctctaggtggtggagtggcatctcaggcctgtgaatacaaagcagcttcctgggctaggcacttgttgtagtgtggtttctctttctagtgccatctgggcaccctgtatctcttagtggtagaggggaatcccaggttcaatggtaaaaaacactaccccc

SEQ ID NO: 796486 - DNA, 360 bp, Homo sapiens
ctaacatgattatgtgggcaccatgaggacctggtaactacatcagcgcatattcattcatctccaaatttgtgtctaacacaacattgggacttctaatgctttatcaactaatgattttttaaattttaattataactgacttatctttttgttactttygaacaccaaactatcttaaaagcataaaatgtttccctatttatgactgattaaaaatacatcccagggaaactaagagtttgttttggtgagataatgccctttctacacacctagtcatctacagtgtctaccttattttctctcttaaattgacaatctggctgacagagtcttgccttcatcctttcacctcaa

SEQ ID NO: 796487 - DNA, 576 bp, Homo sapiens
aggagactcatgttgaaacatataaatggccacttcgccaggtcatagccatggtagtggggctcggaaggagaagcccatggcgttatgagggcgtgtggagcggcggtcgccaaggagggcttccctgggggagtgacrgtgaagcagagcccccagacctgagcgggacttgaccagaaaggagggaggaagagtgtggccggcagagggagctgcgagtgcaaggctgacaggcaggaaggcccgggcgcttgcagggagatgcaagtctgaggacgatggcccggctacggctgttccgctggggctgttcctgctctccttccgccctgggggagatgttccaattctacccggcgctccccagtccgtggactcagtctttccttgtgggctccatttcccagcttctaatctctctgcggctcaacccctcttcccctctgtgtagccatgaggcccggagccaccccaagagcagccttggaggcctgattgagacagcatcaccccatccctgagcccagagcatggagaaagcttaggtcacggtggagcctttcttgttttttg

SEQ ID NO: 796488 - DNA, 648 bp, Homo sapiens
ggtgtgaagagagaaaggaggagagtagaataaatggaagttgggtgttaacagagttgcaaggacacactgtgttagaccttgcaagtcattataaccactggctttagatgaagactgaaagccattggagggatttaaacggaagaatgacatgaatatactttcataaccatctcattaacaatctcgctgctgtgttaagaatagctaagaggggttctcaggagcaagagattagtttaggaggctattgcaataatctagaaggtggctttcactagggtggtagcaatggaatggtagggagtagtgaattctgaatmcattttgaatacagagtcaacaagatgagcacactgaatgtggaatatgacagaaagacagtggccaagggaagccttgagtattttaaacctatgcaacttttgaaaagatgaaataactagtaactctagacagaaaaatttgtgggagagacaggtttgaagaagtttaggaactcagtttctgtcatgctatgtttaagatgctacagttgcctctagtttatgtgtgatattggggttaattatgtaaatctggagttttcagcatcgacatggaatttaaagtcatgaactaaatgagataaaaggaagtgagtat

SEQ ID NO: 796489 - DNA, 648 bp, Homo sapiens
ggtgtgaagagagaaaggaggagagtagaataaatggaagttgggtgttaacagagttgcaaggacacactgtgttagaccttgcaagtcattataaccactggctttagatgaagactgaaagccattggagggatttaaacggaagaatgacatgaatatactttcataaccatctcattaacaatctcgctgctgtgttaagaatagctaagaggggttctcaggagcaagagattagtttaggaggctattgcaataatctagaaggtggctttcactagggtggtagcaatggaatggtagggagtagtgaattctgaatccattttgaatacagagtcaacaagatkagcacactgaatgtggaatatgacagaaagacagtggccaagggaagccttgagtattttaaacctatgcaacttttgaaaagatgaaataactagtaactctagacagaaaaatttgtgggagagacaggtttgaagaagtttaggaactcagtttctgtcatgctatgtttaagatgctacagttgcctctagtttatgtgtgatattggggttaattatgtaaatctggagttttcagcatcgacatggaatttaaagtcatgaactaaatgagataaaaggaagtgagtat

SEQ ID NO: 796490 - DNA, 669 bp, Homo sapiens
gccttaccagttatggtttgagggagtaaagtaggctcattttaaggatctgttagcttcactgttattattataactacagcagtgcaggcccttcctatgttagcacagctatttcatttgctttctttccaataatatgttctcattgtaccctcttatcactttcaaaaacataggagcttagctgagccatttctttgacttagaggaactttagtttctacaacaggaacaatgaaatcaacttttttccatctatatagtttagggtgcatattccagggggtctagtcctacaactaggttcttaaaatagaacataaactgtggatycctaaagagaggatcaaacactgagagtgaattattagtacttttagcataagtaaaataacacactgtgagaagattagtttcataggccatgaaattgataagacaaaacacagtacttcttaggtaaaaagttgaacaagaaaagatcagcagagagtgaatctgttgattttagaattcagtgatgagcactttgaaaaatatgcagcagaagccaaatcacttattcatctacaagagtaacactaatgttacagagatttttcaaatacaaaaaaatagacttgaccattggtttccataaccagagataacagctgaaatcagagc

SEQ ID NO: 796491 - DNA, 669 bp, Homo sapiens
gccttaccagttatggtttgagggagtaaagtaggctcattttaaggatctgttagcttcactgttattattataactacagcagtgcaggcccttcctatgttagcacagctatttcatttgctttctttccaataatatgttctcattgtaccctcttatcactttcaaaaacataggagcttagctgagccatttctttgacttagaggaactttagtttctacaacaggaacaatgaaatcaacttttttccatctatatagtttagggtgcatattccagggggtctagtcctacaactaggttcttaaaatagaacataaactgtggattcctaaagagaggatcaaacactgagagtgaattattagtacttttagcataagtaaaataacacactgtgagaagattagtttcataggccatgaaattgataagacaaaacacrgtacttcttaggtaaaaagttgaacaagaaaagatcagcagagagtgaatctgttgattttagaattcagtgatgagcactttgaaaaatatgcagcagaagccaaatcacttattcatctacaagagtaacactaatgttacagagatttttcaaatacaaaaaaatagacttgaccattggtttccataaccagagataacagctgaaatcagagc

SEQ ID NO: 796492 - DNA, 613 bp, Homo sapiens
tgaggctcgcagcatggctggctccagcagagagaatagaggagcttaagtccaagattaaatggtgggtcaggtcaggtagggtttcataagccactgtgtaatttgaggatagtttagagaacatctgacttaactttccacaggaacatcttgtttttatgttaaagaatagattgcaagagaaaagagtgacaatatgtggggtcaagtcctaactggcatcttcatttgaatttctcatagacacttcagatgtaacatgtccagtaaataattctcgatattttctcccaattttttctcctcaatcttttccytatcagaaaatagcaacagcattcatttagttgtctaagccagaaagcttgattcttgttcttccttaatcctcccccatctcattagtcagcagctcctatcacttatgtccagaatagtaatcttcaatccatccactccatccatcttcactgacattttcactcacctaagtcacaggtttcccctccctggtctgcaataacctcctgattgtttccctccactttcactcatgttgtatatagcagcttaagtattcattttaaggtgcaaataaaattatatcttt

SEQ ID NO: 796493 - DNA, 613 bp, Homo sapiens
tgaggctcgcagcatggctggctccagcagagagaatagaggagcttaagtccaagattaaatggtgggtcaggtcaggtagggtttcataagccactgtgtaatttgaggatagtttagagaacatctgacttaactttccacaggaacatcttgtttttatgttaaagaatagattgcaagagaaaagagtgacaatatgtggggtcaagtcctaactggcatcttcatttgaatttctcatagacacttcagatgtaacatgtccagtaaataattctcgatattttctcccaattttttctcctcaatcttttccttatcagaaaatrgcaacagcattcatttagttgtctaagccagaaagcttgattcttgttcttccttaatcctcccccatctcattagtcagcagctcctatcacttatgtccagaatagtaatcttcaatccatccactccatccatcttcactgacattttcactcacctaagtcacaggtttcccctccctggtctgcaataacctcctgattgtttccctccactttcactcatgttgtatatagcagcttaagtattcattttaaggtgcaaataaaattatatcttt

SEQ ID NO: 796494 - DNA, 509 bp, Homo sapiens
ttgttagtaccctgaactttttgatcagctaatgttaattaaacattttttacctatatttatttaaaatttgcatataattttgttttcctagtttaaggattaaggtaatacttacatagttaaatgaattggacactttgcctaatttaatacattgatttaatttgcagaagtatgtttggaaagagaaatagaatcggttccttgacattttgatagtatttacctgtwataccctctaggcctagaactatttgaagagaatgcctttttattacactcaaatttctttattggttatcaatcttttcaaatttcttactttcttttgaaccaacttgggcgtttcattatttgcctcaaatttacccacattttcaagtttattgatgtgtaattgtacataatattctttatgattttatatatctattttacctaaggttatttctcctttttatttaatatttggtctattaagtctgttttatgaggtgcttagcgta

SEQ ID NO: 796495 - DNA, 656 bp, Homo sapiens
catgttgtatcttctacatccttatggcaccctgagatgaatcatagcatttttatctcccatctgtttcttctgccaggtaattggaaagggaaactagagctttgagaataaaagagaccagggaaggcaccagggtgggtttctgttttggtttgctgcatattttggtatttattgttttcctttgcatatttgttcatctattcctcttgtcttaaaaaaaaaaaaaaaaggtrtttcatctcctgccaccagaactcactagttcctcatagaagatccatatctccttgaaatcataacgtttggatcttattgaataataagaaaactatttccttcctaaatgtgagctacattaaaatccctcttcaattaacttccattactggggaggatcactattccggaactgaatcatttcttcctgtttgtttgcccttttattatatggaaaatgagagagttctgttatagaaaaatgtgtctctaatcctcacatcaacattccaaataaggcactgggtcttaacatatgaagatctgctaaatttattcaaattttatactaaatcattggcagaagtagaaagtttgatgcaacgtttattaaaccaagcttttggacaggaaatggcatcaaaatatattca

SEQ ID NO: 796496 - DNA, 661 bp, Homo sapiens
gtgagtcagcatatgcaaccataatgaagatgaaatgaaatcatatatatgatggatctaacacatagacaatgctcaatacatcttacattcctcctttcctcactttattccctaccctatgtgtcagcattgctgacttgcatgaaacaccttgcatctcttctgggattccattcatatatttcctctaaaagtaactctctttcttctgttggaaaactctttctcgttcttgaagctgaagctgaaggtcatgtcttttgtaaagcaccccttcatacccaggacaaaggtaaacacccttctttttacctctttctgtatcttgtgcatttgccaagtcaacttttatgcctttgtgctataataacaaggcacttggatatggagggcacatgaagctgtcattaaaagctggtgtgatgccaatacaaattttaaacatgcataaaaagacctctggaaagatcttctcatctaatgataaaaaggatttttatcattasaaattgagtatgagatttactgaaaattattgtttgataaaataagacctctggggaaaagctaatcatagtgatattacttggtctaaagaggaggtagaaattactgaataacaacgctcagtcatgaagcattttaacatagaggaggt

SEQ ID NO: 796497 - DNA, 619 bp, Homo sapiens
gagccagctagggtgtgaaggacacaggctggattcacctctctgggcctcagtttctgcattcaaaaaatgggaatcatgatatctgttctatttcttatctctcagtactgatgtgaacctccaataagagtttgaacaatactttttataccttacttttatttttcatttactttgggacaatgtctagctgtctcacctagtctggagtgcagtggtgtgatcatggctcactacagccttaacctcctgggctcaagtgatcctcctaccacagcctcccaagtagctggaactacagtcatgcaccgccatacctggctaattttttcttttgagacaaggtttcactcyttcacccaggctggagtgcagtggtgtactcttggctcactgcagcctcaacctccccgaacttaggtgatcctcacacttcagtctcccaagtagctggtactacaggcgtgtgccagtacagccggctaatatttttgtatttttgtagagatggggtttcactatgttgcccaggctggtcttgaactcttaggtttaagcaatctaccttcctcagcctcccaaagtgctaagattataggtgggagccaccccacct

SEQ ID NO: 796498 - DNA, 503 bp, Homo sapiens
ctccaggatccaggcaggtctggcatgcctctgggtgctaggtgttgggctccaggtggcctccttgctttgcttttctctgagggtccagagagccctgctcagagaccccccaggtgagcatttctccctctggactcctgtgccctgcacagcccggttctgaccacagacctcctgcatcagggtggactgtagcccagggcgggacaccaccacacccgtcatccccaacccctggagctycctgaccgaggctcctccgggtacttaaccagtgatctgatctcaccacagtcaaggattagagcctctcctggaggactggggtccaaggggatgatgtgttttaggtgggaaacaggttcagggatgcccccagcgttactggcttgtgtgggcagagcagtatgaaaggcagatgagagtccagaattgggatcacgccgtgaccccgtgatccatgaggtccttgagcaagagggacgcactcagttgaagtt

SEQ ID NO: 796499 - DNA, 595 bp, Homo sapiens
tgtgtatggctgctttcatgcagccagaattgagtagttaaacaatagagacagagtggcccacaaagcttcaactattatctctctggccctttacagaaactttgctgacacctggactagaaatgtaaagaaaccagccatcaaaagcaatggagacagtaaagaggtaaggaatgcataggctttggcagggcccagggaggtcagcaatagcatctttaagaggtaggtagatgaaaggaaaaggaattcaaaatctggacaaagacttggctcaggaaagaaaatttcagatgcggaagaaaagcaatcygcagggcagttattctgggcagtaaatgacacattttcttttcttttctttcttttttttttgagacggagtcttgttctgtcaccaggctggagtacagtggtgcaatctctgctcactgcaacctccacctcccgggttcaagcaattctcctgccttagcctccccagtagctgggactacaggggcacgccaccacgcccagctaatttttgtgtgtttttagtagaaacagggtttcaccatgttggccaggatggtctcgatctcctgacctc

SEQ ID NO: 796500 - DNA, 659 bp, Homo sapiens
tacatttatttatttagtgataaaccctttgtttatgttgctggtgatccagaaaaagtggtctcctacaacacgccatgacctaaacaacgacaagttgaattactctttcatttaccataggagactttctaccatgtgttttgcagcaatgatttctgacacagcttaagaaatgataaattacacccaacgaaaacaaagagaaactcagaatttcatagcataattgtaaagaaaacagttatttgcatctctgtctcccacattttcaaaaaacaatgtacttgaaacgaaaaagacccaagaatagtaaaaacaatttcattttcctcttataattggaaacatttggagaaagcactttgtctactcggcctgcatatttatggcttaattttaaatagggaatgttactgtacctttgcctctcatttcattgttattgtaattttyacaaatgaccaatatcatgttattaaaacaaatgtcacaagtacaacagcattcctgtatacacacacactaatatagctgtcctttgtgttgaaagacattctatggcgtgctaaccttgtctgcaaggtcatataaaagtgggaggcaaagatagcaatgctttccacacccctttcagcaataataacaattgtgtggcc

SEQ ID NO: 796501 - DNA, 647 bp, Homo sapiens
aatgaaataaaatatttgcaaattgtgtatctcagaggagcttaatatctagaatatataaataactcctaaaactcaacaacaaaaggacaactcaaaagtgggcaaaggatgtgttgggataaatatagacatttctacaaacaagatatatacgtagtcaataagtacatgacaggacgcccgacatcccctgtcactaggaaaaagtgaattgaaaacctcaatgggatgctactgtatacctactagagtggctacagtaattttttttttaaggaaactracacttggagaaattggaactcttgtacattgctggctggcatgtaaaatggtacagccactgtggaaaacagtttggtatttcctcaaaatgttaaacacagaattaccatatgaaccagtgattctactcttcattacacatcctaaggaaataaaggcagggacttgaccagatgcttttttggccaatatgctccccagcactattcacgatgcccaaaggtggaaacaatgtaagggtccaaccgcaaatgaatggataaaacaacatgtgatatgtacatacaatgcaattattttatttggccataaaaagaatgaagttctgacccatgtaacaacagggatgaagcctgaat

SEQ ID NO: 796502 - DNA, 619 bp, Homo sapiens
  misc_feature 603, 604, 605, 606, 607, 608, 609, 610, 611, 612, 613, 614,615, 616, 617, 618, 619: n = A,T,C or G
ccagccctgaaagccactctaagaacaaacgcactgcagggtcatggaagtgtaggaccactggctgagactgactctctcagagaatctctgtgcatgttacctgcacaaaggctctgaagatgcccatgatatttatccctgcttgctgcactttatttcatycagcatttctcatgcttacttacttgagcaagcttcccagggaattccacttagcactgcagttccacttcaggaatcaatcaaggaaatcgaggagaaggccagcaatctgcttaaagtctcatgagatctccatttccacaaaaataaacattctcatcactcagataataaaatgttggtgtcgtatataatacaaaagtgacattgacactgatgtaaaacatagatgctaactgttaaagtggagttaaaaaccatctctcactaagcatgattcagaatgcaccctgatggaagaaatcataaaagttctatactacaataaataaataaccatagaattaaaaagctctggagaaatattttcaataattatgacagtggatttacaacaggtaaaatgtaggtgagtgttaacaagaggcatattaatannnnnnnnnnnnnnnnn

SEQ ID NO: 796503 - DNA, 619 bp, Homo sapiens
  misc_feature 603, 604, 605, 606, 607, 608, 609, 610, 611, 612, 613, 614,615, 616, 617, 618, 619: n = A,T,C or G
ccagccctgaaagccactctaagaacaaacgcactgcagggtcatggaagtgtaggaccactggctgagactgactctctcagagaatctctgtgcatgttacctgcacaaaggctctgaagatgcccatgatatttatccctgcttgctgcactttatttcattcagcatttctcatgcttacttacttgagcaagcttcccagggaattccacttagcactgcagttccacttcagraatcaatcaaggaaatcgaggagaaggccagcaatctgcttaaagtctcatgagatctccatttccacaaaaataaacattctcatcactcagataataaaatgttggtgtcgtatataatacaaaagtgacattgacactgatgtaaaacatagatgctaactgttaaagtggagttaaaaaccatctctcactaagcatgattcagaatgcaccctgatggaagaaatcataaaagttctatactacaataaataaataaccatagaattaaaaagctctggagaaatattttcaataattatgacagtggatttacaacaggtaaaatgtaggtgagtgttaacaagaggcatattaatannnnnnnnnnnnnnnnn

SEQ ID NO: 796504 - DNA, 609 bp, Homo sapiens
gacaatctggtgcttatctgttctaatggccccacagtgagaaaatgaagcaggactggctcactcgatatggcttctgcccataggagaatgcttcccacatcaacactccaaagctccagacatcgcttttgctggagaacttgtagtagttgatgcattccggagcgtaccacttgacaggccactttccatgggtctgggcctaaaagcaaagcagwgggagaaattccattaagaataaaattgtgggccgggcacattggttcatgcctgtaatcccagcactttgggaggctgaggagagcagatcacttgagatcgggagcttgagaccagcctggccaagaggaaaccccatctctattaaaaatacaaaaattagccaggtgtggtggcgggtgcctgtaattccagctacttgggaggctgaggcaggagaattgcttgaacccagaaggcagaggttgcagtgatctcagatcacaccactgcactgcagcctgggtgacacaacgagagactccatctcaaaaaaaaaaaaaaaagaaagaaagaaaagcataaaattgtgtacattcatgttcatagcagcattattcccaatag

SEQ ID NO: 796505 - DNA, 621 bp, Homo sapiens
atatctgtagttccacctctaatgttatttacttaaattttttcttttaataattcactatgtttacttgaattcatttgttttaaaaggagtcttgatattcctgctagaaatgaaaaatcagcatttgccataaatagaaaggaaaagtcaaaacaaattcagtgagaataaggctattaaatgttttctagatcctgctgctcaccaatgtcccaaagccctgggctcctagaaggagggatgaaagagaacagaaaggggcatcgcacttgcagacttgattccatggtgtcctgcgctctctctgggactttgcaactgccttgcttgcctctgacgttgtgaggaagctgggtgaggccagtgctctyttctcatcaccaagaaaacaggctcagagaggggaactgctatgcccaagagcatgctagtggccaagccaagaccagcactcagggccctgactcccaagccttattgtcccccacacccatttgtagacattttcacacaggcctcacctacaaggttactccttgtagggttaactggtctcctacatcttgactctggctcggccacctcagcttgcccttgggatcccacatttccagagta

SEQ ID NO: 796506 - DNA, 629 bp, Homo sapiens
atcttttagcttgtaatgatgaaaactcatagcctttttgtgtccttcgtataattaaaatgaacgtgtctcacttatttctgtggagaaagaaaaaatatctgaaaatataaaaggctaataagaccttctatgaaagaggcagttgagaagaaacgcagtttcccagtcaagatgactaacctgggttccagaatataaaagaatatcgtgctgtgctgcagtattacaaacaaataaaatrggccgaaaagaatcccccttccacttccataaaaagaaaaatgcatcttcatgctcaatgtaaacatcacaaaagcttggtcaatggtttaatatttaaaaaatggttttgggtcatcagataactatagcaacacaacgtggaaagaaatttttttaaatgaataaaatatatacaaaatttcttgtatgtgtagccaaagtatcagcattttccatatagaacatccaatattttggctgcattttaattaaggtgtctaaacattatcacaaagaactgcaaattggtcagagcatgcagtaaggaaaattaagctctaaagctttttatcaccatatttcaggaaccaagggtgtaaaatgttctaatttgggatatatta

SEQ ID NO: 796507 - DNA, 616 bp, Homo sapiens
cacttaattctaccgaactgcacagctaaaaatgattaagacagtaaattttatgttatgtacattttacaatttaaaaaccttatataaaatgtcagcttattttctgaaaggccatataactgccatttatgttatttcttggctatttccctaaatgaagtccatggctttataatttcctttatattagtcattaatatatattctctctcacacacacacacaaacacatacacacacattaaacacagaagtatttaatgtgacaaatgattttaaaaggtttaaagaaaaaaatataatttctgaatcccctttctgaacttgttttttccctacgycaaaataaaaaattcacaagatacttaaagcctgcagccaaaaagaaaaagacaaaacgaaaaacgcaaaaatcacaacaaacatccatccacagtagatatttttacatcagatataatgatggaagagtgcaacagtatttccatagaagaatttgctgaaatcacagttatctctggtctcagtttaggataaaaagtccacctgcaagtcagaatagtgagtgtggccagtaatttacccagataacccatgatgctctctacgtaac

SEQ ID NO: 796508 - DNA, 597 bp, Homo sapiens
aaaagaggcttcggggacaaaatatcttctctctctccttccccctcaggacctagtgagtgatcagatcccattcgaggcatcctcttcaattattccttattcgttatattaaaatctatgttaatttcctttttcttaataccttcatcttccaaaaacatcccgctgtctgattaatgtctctgaatgaaggaatacatgtaaagctttaacatagagcctgtcatgtagtcagtggctaacaaatattagcttccttccttccttcacgtgtaaaaactaagaaactcataaatgttggtagagtattagattcatctgtcaatrtcttcatcgttgttactatgtgcccaatgctcagcactatgctaagggttgaagattcaaaagaactgtatagaaactggcctcaagaagtttgtagtctgagacataataatatttaaaccataagtactaaaattgtgaggttcatgatgtcaatatgaactatggaagtcctaagaatggaaaagtaagccaagtggaatttagtatatactatttcctttgcctgaaataactttctcttttatacctggtaaatgtcttttc

SEQ ID NO: 796509 - DNA, 626 bp, Homo sapiens
cttgacttcggtggggaaattgtttctccaagccataatgtcttggatctgttgagcatttccccataccatttccccaactaggccaaggtctggctttcctattcattctcaggaattacctgttgccctttacctctgaataaggcaacttttggggtcaagaagactcatcctctgccttcargaagcttccaatccagttgaggaggctagacctagtgaagagaagatgaggaggtgctaagtgggtgctaaagacatgttaccgcttcagttatttcgggaaccattactgagcacttcacttaactcaggatcatactctgccacgcttcaattccttactctcaaacatttcctttcttaccatgattttataaaagatatctcctattttaatgcatagttgcttcactctcctctttagtagattctgtatctactgcagatctcttaaatctgcacaacaacctaactaaactgccgcatctccaagagaaagccctatgactagttagttcctctatgctttctgccacttgtggaactattcaggcagatggttgagattcaggtccaaggaatttttccatcatgtgagacttttttgtgcccgagaaaaa

SEQ ID NO: 796510 - DNA, 580 bp, Homo sapiens
cctcaaaatggttcccatgtttcagcatgctacacatgtgaaggcaggtagggaaaacactgcagggcttggcctccattgcacagaaggaatctgaaattcaaagaagatgccatttctccagcttgggtccagatgaggattcagaatataactcaaggctttcaaaagatgattcatgggttggaggaattacagtgtgrtatttttgaagcgggtggagaagcagtaaattcccatcatctcattgattccaaactagtattctcatggttggaacctagaaacatgatagcaggtaaattattctctttttagatgatagggaagaaagccttctgaaaatattagttttcaatattttcaataaaagacaattatttatttcacagtaggaaaacaaatatagcaattgctcagtataaatttttagtagagcctatgttatactctgatttttatagtaccatttccctttctgtaaaactggaataaggttatttgccttacctcctttgcaagattcctagtaggatcaaataggataacagatgaggaattacttaagaaactataaaga

SEQ ID NO: 796511 - DNA, 580 bp, Homo sapiens
cctcaaaatggttcccatgtttcagcatgctacacatgtgaaggcaggtagggaaaacactgcagggcttggcctccattgcacagaaggaatctgaaattcaaagaagatgccatttctccagcttgggtccagatgaggattcagaatataactcaaggctttcaaaagatgattcatgggttggaggaattacagtgtggtatttttgaagcgggtggagaagcmgtaaattcccatcatctcattgattccaaactagtattctcatggttggaacctagaaacatgatagcaggtaaattattctctttttagatgatagggaagaaagccttctgaaaatattagttttcaatattttcaataaaagacaattatttatttcacagtaggaaaacaaatatagcaattgctcagtataaatttttagtagagcctatgttatactctgatttttatagtaccatttccctttctgtaaaactggaataaggttatttgccttacctcctttgcaagattcctagtaggatcaaataggataacagatgaggaattacttaagaaactataaaga

SEQ ID NO: 796512 - DNA, 611 bp, Homo sapiens
aaagtctgggttgttctggccagttcctccctatctcaggatgttgtattcccagcatattctacagttattcttgagaactacaggcaaaaaagggaagagaacagggttgattcaaggccacccagagaactatactgcagtagagaggaaagcattcacattcaccctcattcattcctaccctctcctctgactttgagctccattgtttgatgcacgtgtgtgtgtgacagcaatggaaaactaattttgacaagatccccatttagacaccatgtatctaatgacagcattgtctaagagatattaagcacagttgcatccctgtgtcaagatccaattaaaaaawttttttttgagacaaggtcttgctttgtcacccaggctgcagtgcagtggcatgatcaccactcactatagcctccacctcaaaggatccccgccctcagcctcccaagtagcttacaccaccatgcccagctgatttttaaaaaactttttgtagaaacagggtctcactatgttgcctaggctggtctcaaactcctaggctcgagcgagcctcccacctcagtctcccaaaggtctgggattacaggtgtgagcca

SEQ ID NO: 796513 - DNA, 628 bp, Homo sapiens
ataatgtcctcaaggtttatgcagtagtatgtatcagaattcccttccttttaaaagctgaaaaagtatgtatataccacatgcagtatacatttttatatacttacttgggtgtataatttcatacagtggagattatgtccccatttttcaggtaaagaaagagatttagaagggaagtggcttgccctagagacagacccagggctaggacccagaccccatcttattttctctcctcacgcattacttcattataaggcttcccaggcacaggcctcacactcctctgtgtttgagatcctcagacagcgtatggtggtgaggggtgtctgaccatgcccgtcatcatacaagccatcgtaagctagacctagctatagaagacacagactgcgacagggactcagaccccatacggacctctacggacaaaccagrgagagcctgtggctgtcggtaaggagggggcttgttaggcagaaactttgagctctggcagaaggcagtgagagctggctctgacctgaatgacaggatcatcagaaggaggtgggatgatgagatgtgggggtggatttttagcatggaccagcaggggcccagagaaagaaggttttgtaggatt

SEQ ID NO: 796514 - DNA, 526 bp, Homo sapiens
ctcaaaaaaataaaaataaaaataaaaaagcctggaaagaaagaaggatgaatcagcttaaaagatagtccttaaaaataataataaaaatactgtggatcttccaattcagaaatctgcagcgtttgtgaatgaatgaatattggtatgtacaaaggaaaagtctggaaggatacagacattcagtgggtggttacctttggcggaaggaaaggtatttaactctttgtttcttctatattgtttgtgtatgtgtgtatatatagtataactatgtactttttgcaattaaaaaaacacacaaacacacacaatgaggatgagagagagagagagagagacctmccccctccaagtggtatttaagaaaacaatctttctagagtgatggatgcagctgtgttcatagtggatggttgacttaatgacctcacttgcccctggcatccatcccatgattgataggctgcctcaaactcctcaggctctgtgttcctttatgtgcagggagctggaagaaacattc

SEQ ID NO: 796515 - DNA, 645 bp, Homo sapiens
cccactgagttatggatcattcttgtgccttttggcactggtcccattctacagggggattaagctccaaagtgaatgcgttattacatgcacacctgatgctattcctctgggttgtacctttgttggtatgacaacttttatttttgaagttttaacacttgagatactctatttttaaaaatactgcagaatgatggaaatgttctttttctgtggcttatacttttgaaagtcatattatacttcttaataaagtaacatttaaaatatttttttaataaactatgactctgaggtagtcctaacttctagcctctcttttcccaatatcctttttgttcctgttttcgtttttttagagacagggtcttgctctgtcacccatgctgkagtgcagtggcacagtcataactcacttgaacttctggggtcaattgatcctctccactcagcctcctaagtagctgggattacaggcatgtaccaccatgcctagaaatttaaaaaaaaattttttttagagatgggggtctcactatgttgcccaggctagtctcaaactcctgggctcaagcgatcttcccaccttggcttcccaaagctctaggattacaggcatgagccactgtgactggcccccaa

SEQ ID NO: 796516 - DNA, 645 bp, Homo sapiens
cccactgagttatggatcattcttgtgccttttggcactggtcccattctacagggggattaagctccaaagtgaatgcgttattacatgcacacctgatgctattcctctgggttgtacctttgttggtatgacaacttttatttttgaagttttaacacttgagatactctatttttaaaaatactgcagaatgatggaaatgttctttttctgtggcttatacttttgaaagtcatattatacttcttaataaagtaacatttaaaatatttttttaataaactatgactctgaggtagtcctaacttctagcctctcttttcccaatatcctttttgttcctgttttcgtttttttagagacagggtcttgctctgtcacccatgctgtagtgcagtggcacagtcataactcacttgaacttctggggtcaattgatcctctccactcagcctcctaagtarctgggattacaggcatgtaccaccatgcctagaaatttaaaaaaaaattttttttagagatgggggtctcactatgttgcccaggctagtctcaaactcctgggctcaagcgatcttcccaccttggcttcccaaagctctaggattacaggcatgagccactgtgactggcccccaa

SEQ ID NO: 796517 - DNA, 600 bp, Homo sapiens
ttaggaagacaaagactggctgttgaatcattacacttactaggatcctaaaaaaaataacttgggaagattatttgaaagttactggctttatcaggaaatttttttttctttttctttctttttttttttttttaaatgtgctgtttttcctagccctagctagttaggagtttgcaggtgtaaagtcctccccctccccttccctgtctctctccagggggttgtatgtgagaaggtgttgctttctcactcagagagcatatatgtgctaccctgttggatgcctgctgcgagcccagagaacccccgtgctcattgaatggaataagcctattggatggctggaattttgcagccccataatgccaacttttcacttaaagcatctttcctatccacaatgggagtgaagcagtatatgtacttggtctagatttrtattgttttaaaactcgtgtcttaaaaattttgtgatttcctattaaggtttggtttaagcctaaggcaggatagtgctgtgtctgcttagtaggaatgtgcttttacttttaaaatgtttactattagaagtgcagatttacccccaacttttaagat

SEQ ID NO: 796518 - DNA, 584 bp, Homo sapiens
tttatgcccaccagagggcagcagcatcctagccacctgcccttctgaggctccaggagtgggcttgaagccttttccccggcaacttcacgccccacaccagtattgggcaggatcacctcccttagggtgttcaccctcctgactaaaacaacaaaactttcttaaactgtccaggccttagttttgttagtctcaagctcctgtaccaccatcactgaaggccaatcagtcttcctactgtgccccttcccctgctcctcgtccggcaagctccgtgcctgggatcccccacctytcacacttaccacccacaatagatttgttttctgtgtgacaaggtaattacaagcttggggccagtaggcccaggggccagtctgaggatggtcacttcattctggctctccctgttctgctaacggtattgattttcagttttatttattatgatgatgtgtgtgtgtgatctggccctggtgacatgacatatggaggcaagagggcgagagcaaatttccttttgtcacaatttgacttcttgaaaccgcacccccaccaccaccacccagcattgtttattt

SEQ ID NO: 796519 - DNA, 671 bp, Homo sapiens
ggtgtctcactaggtctcatacaccccaagtccactggctatgagctcatatggcaccagtacttgtatggaaattgcagttattgtgaccccgcctatctttcaagttcttttagggcccaaagttctatttagcccatggtggtagggctggccggaactcagcttgcaaaggctgagatagacaaattccctctggcttgggctggtttaaattttctctccatgggtgctgtctgaattttgccgtatgtttttttctgttgtgacaaggcagcactgarttccaatgcaaagtttcacagtcactgcactatctccccctcaagcacagggattttctctttgtgccaggaaccattgctggctaatctgaggggtgttgtcagtaacttaaggctgtattttctaccctcttcagtgcctctttccttgatgtgatgttaaaatcaggtactgtgaccactcacctgatctttggttcttatgaaggtgctttcttgcatgggtagttgttcaatttggtgttcctgtgccggggggtgatcactagagggttctatttagccatgttgctttgcctcctccttccatctgattgttttataaatgaacatctgtattagcaattattaataaatttgaatacatgatacatagaaagtgtaaag

SEQ ID NO: 796520 - DNA, 646 bp, Homo sapiens
agataaataagaggagcttattcaaataagaggagcttaacatgtgtacctgcccctttatcttatatcaaactgcagtttcagaaaaatgcagatatgtatagttatttcacacataccttagggccctagcttgatttcagctcttaccacacttttggtatatgaaaaaaaagtaaataaaaatgtctcacctgtgcgataattttttttgcagtggttgtttaatgtgcaagcagttgtcttcaaatctgatgaatccataacaatttcttccgcactggtgaaggtggaragaagtaatggaaaaaactatctagaggaataaagattaactttgaatcagaagtaatcctctccctttatgattatttttcatgctaacccattatgctaagatccatgtgtatggcagtcataccagatagcaataactcaacttagcgtacaccgagaatgacatggtggtctaaaaaaaaatgtatgttcaaagtcccaagctaaggaatctgggagtggctaatccagagattcacttttttatctatgaaggacatctgaacccctggcccatttttggaatacacctgtacaggggattggggccctttgttttgggttaaatggtggttacaaggagaaggtt

SEQ ID NO: 796521 - DNA, 500 bp, Homo sapiens
atatacttattatacacagagattgaaaaaaaatcaagaaaatctgaaaaaaataaagcaccaattccctggaattttcatctactcagccctcactgaaccctattaaattaaaaaaattatgattactttcattttttaaacagaaatgggaatatggctcctacgtgtgacttccctgagatctgcgaaaggcagttccaagaatacaacctaggycatctaactataacccagtacaacaatttatcccctccatgaatgagtctccctgctgcaggcatgaagatggtggtagctttcagactctcctgaggattcagaaattccccaacccttctcccacctacctcactctgcaagctaggagagctcaccaccaagcccacatcccaccttaggtgagactcgcactgcacatccctacccttccccagccaccacacctttccaaccattagaggtagatgtaattgggggtttaggtcttgaaaggtttc

SEQ ID NO: 796522 - DNA, 639 bp, Homo sapiens
aatatgtcaagaacatcttgccatagcaatagataatcatctacaaccttgcaaagactaaaatgaatgagagatccttatttgccagcatgaacttactgctgagcaaattatttgtgttggacctccattccttaattagaacayctcctaaaatactgagggcagagcagagaggtagcaggtaggggagccctggaccatgcaatgagatgtgtttccaagaatctaagtacagacttggatgaaaggagtatttaagagctaaacttttcatattacatctgccctagttgtagtaacaataagagacaatcatctgtcaatagcttttgtgggctattctgtcattcaggcttatgctcaagcaataataccatttttaggaggtgactatatagttgacaaaccatacagcacccacagactgcctctaagcaaccaatacaaaacagattgatgagacttgctgtacttaaagtcttgtaagagaacagggagtaataaagtctcaaaatagattctctaataagaaaatttttccttaaatgtcaacttttgaatttcagctcaactatagcaaatctgtactcctcatacttaaagaataattattcttagatggaaatatactgtatt

SEQ ID NO: 796523 - DNA, 775 bp, Homo sapiens
tccagccatgtggccagcctcagttttccctacctaacatgggaaaccggatccagccctggctgtgagggtgaagtgagggggtgtgggaaaggcccggtgcagagcctggcacacaggctggtgttcctggtgctgactagtgaggcctgtcatcctgctggggcatggactaacacccttcaacccctgggtacacacctgcatggagtagtgcccataaggcagtggcttgctccgatcaccagagaaagtgtcataggggccgcgggtgccgacggatcgtgccacatatgtctcaaggtcgcttttgaagaagtaggtgccgggtcccagaccactcccctagagcacagcagaggtgatgaggcctgcaggagagctcagcttccccctctgccctgggagtgcccctgcaggacgggaaggcaggcaaggcctggccagccgagggggtacctgatraggccgggggtgtggcttgttgctcatcctgcacatgaggccctcggaatgagaccggttccaggcattctcctccagcttggtgtatgggttacccttctccccataatttccagggcctggatagtagttctgtggggcgggggtgggggcatggaggctgtcagaaccactccttgtgctgagtgtgcctgaggaacagacacctgagattgccatccccaagaagggaatgggattttcagggtgtccgcttgctacctgccctctgacacacaacattgttgcccgtgagcgtccaccactgctc

SEQ ID NO: 796524 - DNA, 618 bp, Homo sapiens
ctacccaataacacataaatcctcaaagacacatttaaatctggctctgccacttcctgggtgctgaccttgggcaagttacccttgccaactttgatttcctcttctgtgacatggacctatgactgtggcttcctggaaaggctgttttgaggtgtcaacaaggtgtggatgtgcacactctccagtcctgtgcacttcagccagccctgggtctgcttgggtattctcagggtggcccagacatgcctgcagctatattgctgcttctcttctggcctgagccccayggctctaggactcatggaggagtgaccaaaggctataagccaaggtccactgggctgggagtcgtggctgccaggaaagccagaacaggccaaatgagtcagctctgcagcaaggccgcctgccctggtcagcccaaagtttcccatcacagcagcttccttgtctagcatctcacccattttcttttataggcaccattgcaccctcattgtacacaagaggaaactaaggctcagatggggagaataacttgccctggtcacatctcgtgaggcatagggtcacaccatgaatatgggactcataagcacattggagagctccctg

SEQ ID NO: 796525 - DNA, 595 bp, Homo sapiens
aatttgggggccccaagattttcctttcacactattttgtatgttttaaacacaacacacacaaaccaaaagcatawctcattttctgttttgcctttttaaaatttaacactatactatgaccatcatctcttatcattacacattcttggaacacatgatttttaatgtatacatcccttggacttctacttctagccgaagtggaataacaggaaccacatttaccctgctgcctgaaaaaaaaacctgacaaaatatatgaaataagagttttcaatgcagtggacataaacaattaaagttagtgatccctcagagacaggaaacaaggtgagctctgaggcgggaggactgcttgaggccaggggttcgagaccagccaggacaacatagcaagacctaaaaataaaaaaataaaaaattattttaaaaaaaggtgagctctagggatggcccatttaactgcctggagttaggcagtgcagggagggaaacccaggtggtggagtccagtggactttctaagagttaaaaagatggaggtgaggctgggcatggtggctcacgcctgtaatctcagcactttgggaga

SEQ ID NO: 796526 - DNA, 595 bp, Homo sapiens
aatttgggggccccaagattttcctttcacactattttgtatgttttaaacacaacacacacaaaccaaaagcatatctcattttctgttttgcctttttaaaatttaacactatactatgaccatcatctcttatcattacacattcttggaacacatgatttttaatgtatacatcccttggacttctacttctagccgaagtggaataacaggaaccacatttaccctgctgcctgaaaaaaaaacctgacaaaatatatgaaataagagttttcaatgcagtggacataaacaattaaagttagtgatccctcagagacaggaaacaaggtgagctctgaggcgggaggaytgcttgaggccaggggttcgagaccagccaggacaacatagcaagacctaaaaataaaaaaataaaaaattattttaaaaaaaggtgagctctagggatggcccatttaactgcctggagttaggcagtgcagggagggaaacccaggtggtggagtccagtggactttctaagagttaaaaagatggaggtgaggctgggcatggtggctcacgcctgtaatctcagcactttgggaga

SEQ ID NO: 796527 - DNA, 607 bp, Homo sapiens
aaaaagaaaacatatagaaatttgtgagctgcctctaaaacagtgcttaggggaaaatttatagcactaaacatttatattagaaaaaaaaggtctaagtcaatgacttaaactttaaccttaaaaaactggaaaaagagtaaaattaaacccaatgtaagaaaagaaatgaaataataaagaccaaagcagaaatcaatgaaattgaaaacaacacacacacacaaagggaaaaatcaatgatatcaaagctagcttttgagaagatcaataaaattcaatagcctttagccagactgttcaggaaaaaaagagaacagaaacaaaataccagtatcaagaacgaaagacytgacatagctacagatatctaaaggaagtattgtgaacaactttatgtcaataaattatacaacttagtgaaatggacaaatacctttgagacacaaactaccaaagctaacccaagaagaaataaataaactgaagagcccagtacctattaaagaaattgaatttgtgcttaaaaacttccttacaaagaaaactccaggcccagagagcttcactttaaggtttctataaaaattctacaataaaatatagg

SEQ ID NO: 796528 - DNA, 573 bp, Homo sapiens
ctaaaatttaggagattggactgagtattaatcctggaacttctttaagaatattacctttgtttggccaggtgcggtggctcacgcctgtaatcccagcactttgggaggctgaggcgggaagatcacaaggtcaggagatcaagaccatcctggctaatgtggtgaaaccccatctctactaaaaatacaaaaaattagctgggtgtggtggcgggtgcctgtagtcccagctactcaggaggctgagacaggagaatggcgtgaacccaggaggcagagcttgcaatgagctgagatcatgccactgcactccagcctgggcagcagagcaagactctgtctcaaaaaagaaaaaagaaaaaaaaawatatatatagtattacctttgttttctttgttttaaagtaaagccctaacaggccaaggttggtggctcatgcctgtaatcccagcactttgggaggcctgggggaggtgggtcacttgaggtcaggagttcgagaccagcctggccaacatggtgaaaccccgtctctactgaaaatccaaaaattagcctggcatggtggt

SEQ ID NO: 796529 - DNA, 545 bp, Homo sapiens
cacctcagctaagtcagtcttctccaggtgcctcaaggatcctatcagccccttgcccagccagcatctcttgccttctcttaaagacaagttcttggctgggcacaatggctcatgcctgtaatcccagcactctgggaggctgaggcaggaggatcacttgaggtcaggagtttgagaccagcctggccaacatggtgaaaccctgtctctactaaaaatacaaaaattagccgggcttggtggcacatgtctgtaatcctagttactagggaggctgaggcagaagaattgcttgaacctgggaggcagaggttgcagtgagacaagatcacaccacactgcaaccagcctgggcaacagagygagactccatctaaaacaaataaataaataaaaaagacaagttccttggctgaggagtggccatactggctgctcccacttccttgctcctatacccacagtagccttgcttcagctcctgtgactctctgctaatcactggcttctaggccaccaatggctttagaattgctagatcc

SEQ ID NO: 796530 - DNA, 525 bp, Homo sapiens
ctttcattaaaggctgcttatagggtgggtgctttgcatacttcatctcatttaatattcagataatcctgcaaggtaagaatcatgaatctttttgagtgttaattaatgtcctatatctcgtttcagtggaggagtaagtttctatctcacttcccaggggagtgacttatcatatggagaggttttaaagaaggtgagcgtggggccctctytttttgtagaaaagcctgtccttggcatgtagagcttttcaactttagtacccagatcctcccatcacccagcactgtttctctctattctgttccaattcatacatgacacagctgctgggaaaccttcaatggccccattgcctacagaataaagctccaactccttatcctggcattgaagaccctccaggtgtggcctaccctacctttccagtctttattctagttcactccaccacatgccccatgaactcagggccagctatgggggacagcagtactacctgggctaaataatttaaagatt

SEQ ID NO: 796531 - DNA, 525 bp, Homo sapiens
ctttcattaaaggctgcttatagggtgggtgctttgcatacttcatctcatttaatattcagataatcctgcaaggtaagaatcatgaatctttttgagtgttaattaatgtcctatatctcgtttcagtggaggagtaagtttctatctcacttcccaggggagtgacttatcatatggagaggttttaaagaaggtgagcgtggggccctctctttttgtagaaaagcctgtccttggcatgtagagcttttcaactttagtacccagatcctcccatcacccagcactgtttctctctattctgttccaattcrtacatgacacagctgctgggaaaccttcaatggccccattgcctacagaataaagctccaactccttatcctggcattgaagaccctccaggtgtggcctaccctacctttccagtctttattctagttcactccaccacatgccccatgaactcagggccagctatgggggacagcagtactacctgggctaaataatttaaagatt

SEQ ID NO: 796532 - DNA, 589 bp, Homo sapiens
ataggccagattctacatactgattgaattatctgtccagtgaagtgagtgtctctgttgctgtgaagtcccagaggaaactccagcttggaataatctttttaaagagaattttacttactgctaaagccgttgctcttttgcatggaaataactcaatgagaaaacatgcagatcattaccaggacatatctgtagcyctgtgaaggtggctgccagataaaatccagttgccatatttcaaagggagccttagctaaaggaaagtgtctttgggagccatgtaatggttttccctgactataccttgtgcaaatatgacaagagttgtatgtcttatgagctatagtcagagaaggctttcaataatattgttttccccaagcaaccattctgtcaggactctagcgagttagatcatatacccatgttaaaaataactgtaatttggccaggcgtggtggctcatgcctgtaatcccagcactttgggaggctgaggcatgcggatcacctgaggtcattgagaccagcctggccaacatggtgaaaccccatctctactaaaaatacaaaaattagccaggggt

SEQ ID NO: 796533 - DNA, 559 bp, Homo sapiens
gagttaaacttgatgccagtgggcagtgcatgtggaaagtatcagagtaaggctctcccctccagagccctgagtttcttggctgcatgaaggttttctttagaatcagaattgtagccagtttctttggccagaaggatgaatacttggatattactgaaagggaggggtggagatgggtgtggcagtgtatggtgtgtgatttttattttcttctttggtcatgggggccaaggagaaaggcatgaatcttccctgtcaggctcttacagccacaggcactgtgtctactgtctggaagacatgtccccrtggctgtggggccgctgcttctgtttaaataaaagtggcctggaagctggcgtttgtcgtttcttgcttgggggaccaaaatgtggagtcagatctgggctcgggtgcaggctgtgccattccccaactcagttgctctcactgaacccatgagcccatggccgagggctagaagaacatgcaggaactgacaggtttatttctatcactgtcagagtgtgattggagtaagtgttgaaaggatccc

SEQ ID NO: 796534 - DNA, 628 bp, Homo sapiens
agctagactacctttcccagccttccttacagtcagttgtgtccttgtgttaagagctttccagtggaatgtaaacagaagtcataaaaacctatatgaggtctcctggctctccccttcactcagtgcagatgacaaccaggccataggtggttggagagtcttatgtcagaaggaacctggattcctgagtcactgcaggagaagcgcttgtggccagaagtgcaagaccaagcctgagmaacatagtgagaccccatctaaaaattagctaagtatggtggcaagtatctgtaggcccagctactctggaggctgaggcaggaggattgcttcagcccagaaacttgagactgaagtgagctatgatcgtgctactgcactccagccggggtgacacagagcaagaccctgtctcaataaataaatataaggcattacctgggctggtgcctgagagcccaacccagagctccttggtttgctgagcttaggcgctagactggactgggtttgctgagcttaggcgctagactggacaatctgtatgttgctcctcccagttccaaatctgaatcttagcagcagctgccttacaaacctcaagccatgaacctggcatcaagac

SEQ ID NO: 796535 - DNA, 450 bp, Homo sapiens
tacctatggggacatgggctataaatgctgacgtcatttggggaacaaaatatgcaacaggaaggtcacatgacttgtcaatagcacatggcttataaacaacagaaccacagtcccctacctcaatctaggactcattttttaagggtctactgtaatatttcataaccccctgaaggtttcctacctgagcaactggtaattcagatatgagaaggcaaaggygagtcccatcctaacattacatcttccaagtggcattttccaaagatttcctcccatgtcaactgcactttgaagaatgcttactggctgcttgatttgcaggtattcatcagcagagaccagactcctccatcaagactcggctgatcccaccccacctgattcacctggcttcgttcttccatatcccctgccacaccccaccctcccgctgctcggccatcc

SEQ ID NO: 796536 - DNA, 551 bp, Homo sapiens
gtctctgtcagctagggggctagagctccacaagggcagggatttctgtccttttgttcagtgatacataataagcacctggaacaacacctgacacatactaggcacttaatatggatttatttaatggatggatggatgggtagatggatggatgattggatggagccatattccctactagattactagattgtaaacatcccaaataaacattytggaaaaagtaatacatgtacgttgttaaatacaattcaaacaacctataagaaaagtatgagactcattagggaaatttgaacagtgaataattgatgatattcataaaacactgcttgtttgtttaggtgtggaatgtattgcagttatggtttacatatttaactacttaaagacacaatgacggctggcgtttgtttcaaaacaatctcaaggcagaggaagagcagtgagggagatatggatgaaacataatctaccatgagttgaccattgttttgggataatgagtgcatgaaagtttattacactgtcgtctctacttttgctta

SEQ ID NO: 796537 - DNA, 613 bp, Homo sapiens
tttattgtgtacaacatgatgttttgaaggatatatacattgtaaaataattgaatctcactaattaaaatatgtattacctaacatagttaccatttttatggtgtactatctactatatagtaatatactattttagcaaatttcaacaatacaatacattgttattaactataataaccatgttgtacaatagagcttttgaacttatttctcctatctaactgtaattttgtatcttttgagccacatctcctcaaacttctccaccctaaccaccctagtgtctggcaaccaccattctgctctctacttttataagatcaacttttttagatcccacataagagtaagaccattattagcttaacwtgattcgtgatgttaagcaatttttcatataccagttggccatttgtatgtctttctttgagaaatgtcagttcaggatttttctccatttttaattgggtgacttattgttattgagcttttaaaattccttatgttttaaatacaggtattaatattttatcagatgtatagcttgcaatttttttctctcattctgtaggttttatctttagtctgttgattgtttgctttattgtat

SEQ ID NO: 796538 - DNA, 495 bp, Homo sapiens
tttggccatcttggctccacccctccaaaaatttaaaatacatgagggaggtggagaaaagtgtagagctttttttttatgcaatcaaagttaagttgttatcaacttaaaatagcctgtaataacaataagatttaaraaataatcctcatggtaaccacaaagaaaaaaacctataataggtatgcaaaagataaaatcaagaaatcaaagcataccactagacaaaatcacctaatcacaaagaaagacaataaaagagtaaagacaaaacaaaagatctgcaaaacaaacataaaacagtagcagtaggtttttatatatcaatgcctaccttgaacttaaacgaattgaattgtctaatcaaaagacatagaatgtgtacatgtataaaagacaagacacaactatatagtgcctataagagactcacttcacatttaaggacacacatagatgaaaagtgaaggggtataaaagatatggatgtgaatg

SEQ ID NO: 796539 - DNA, 609 bp, Homo sapiens
gatcctaagatggggtgaatttggggagaggcatgtttgtgggaggtgaagtggtgagttcaggtttggacctgttgagtctaaggtaacttatgtgacacctaggtagagaggctaagcaagtagttgaataaatatgcataatagagtggcttaggctgtgggaatacacttagaagtccaaagtggcaggtgaagctacagattttgatgaagttgccaagagcaaattgtttaaaaaaaaaagagtatagggctgagaacaagggcctgaagaactaagayttaaacagaagcggagaaagaatggcttaatgctgagcaccaaagaagagggtgtaaaattgaggggagggggtgcaggaatgtcatctaagttttaatggggagggcaagcttgggaatttgtgcctgttttccccataactcctttcaaagtgattatctttcacagatcactgtggagggaatcagccctatgtcattaattatccagatacacagatgactatgatctgggccacatggtctttcatcaaaattcaacgaatttatagttctgtaaggaagtcctggtgtgagaaccttgatcaaataaatcagcaatga

SEQ ID NO: 796540 - DNA, 567 bp, Homo sapiens
ccctcccagcatccctacacagttgtttttggggcccttccctactgatcaacatgctcccagctgcctttgcacaaggctgcagcatactaaagtcacccagggattctcttagaatgcttgctaagtttaaatatatacactatgtcgagatcctctgagcaactattaatagctgtatcaggtccaatggggttaatctgagatctaacatcaaacgggggaataacatatcaaaactaaagttcaaactatagataataaagatgaaataagttagtggatggattgaatggcaagtgsaacatgaaacatacattttggattcttgatcactctcttctttgattatgactcttcctttctggcttcacctcattctagtctgttagggataataaatagctaatatttaatggtggttttttatgtgccagacactatgctaaatttatctcatataattctcacctcaaagagatggatattatcactatttttttccgataagaaaactgaggcacagagaggttaagcaaatcctctaagagcatttaacagtggaaa

SEQ ID NO: 796541 - DNA, 567 bp, Homo sapiens
ccctcccagcatccctacacagttgtttttggggcccttccctactgatcaacatgctcccagctgcctttgcacaaggctgcagcatactaaagtcacccagggattctcttagaatgcttgctaagtttaaatatatacactatgtcgagatcctctgagcaactattaatagctgtatcaggtccaatggggttaatctgagatctaacatcaaacgggggaataacatatcaaaactaaagttcaaactatagataataaagatgaaataagttagtggatggattgaatggcaagtggaacatgaaacatacattttggattcttgatcactctcttctttgattatgactcttcctttctggcttcacctcattctagtctgttagggataataaatagctaatatttaatggtggttttttatgwgccagacactatgctaaatttatctcatataattctcacctcaaagagatggatattatcactatttttttccgataagaaaactgaggcacagagaggttaagcaaatcctctaagagcatttaacagtggaaa

SEQ ID NO: 796542 - DNA, 551 bp, Homo sapiens
gtgtatattatattaatatatacacactcaagatatgtgagtaatatggaaacacacatattcaaatacattgttgctattatcatttagaacagtcatctgtaagatcaattgagaataagaaaaataaaagttttcattttactctcacttattccttctttgataygattcctttctttatgtagacctatttctgacctattttatttttccttctctctaagaacttgttttaacatttccttcaaggcaggtctactaggtaaaaactttcttcagtttttgtttgtctgagaaagtcttaatttcccttcacttttgaaagataattttgcaggacacagaattctaggctgttgagattatttaaaatagtttgctctactatcttcttccttggatgattttgaagagagtcagatgtaatttctgtttttactcctctaaaggtaatatcttttttcctctggctttttgcagtattttcccttatctttgatgttctatagtttgaaagatatatgcctaggtatggattttctggtatt

SEQ ID NO: 796543 - DNA, 657 bp, Homo sapiens
ataacttagtattatgctccaaactaatagttgtcacagattattcaaattctaaacctttccgggaagaagtgccgtatacagcacttctcttccatcctcgcatctcccttcccaccagtacaatgccttggacttacgtaaagtgtagatttactgagtgccagacaaatgcaaaattgrcttttcctctgctcctttcttttacatgtaaaatgtagattcacaaagctaatcagaccctcacaagaatgtaaccacttgtctcattgcttacccactctccttttttgttcccctcccgcttgctctttcccctttaaatattgaagctcccaaaaccatcttttgaaaaagcactggtcacacatcctgctatgacttgcatttcttcttcccaggagtgtcttcaaccttggcaaaattaacctctaattgattgaaatttgcctcagtcactgttcagtttacaaagttacccagctcttctgcttaaatctttctcttaagctccctttaactacctttactggacttctctaccttgttgtttcttagacatctaaagttcagcatattaaaaaccaatgttgtggggttttttaaacataatgatgtccctttattcattgtggtacttcaaaaacaaaatacata

SEQ ID NO: 796544 - DNA, 544 bp, Homo sapiens
aactttgtctcagtttgaaattccatgataatgagtatattataatttagagatcaaatagaaaaaaaagtaaagaagagtaagcaagattataaaaatagcagaaaatgcaataccaaagagaatatggaaagatgattttaactaagagtcaaacctccttgaacatggaccttgaattcaaacaagattctcatgttaatagttaaaaacaaaagcaaaaatcttgacagcwtgctaatttgacattgctacattcttttgttttgttttatgaagcaaaatgtttcttattgttgatgaaacatagtctgtgcttcacatattaggcacactcccaattagtatgaagaacaaagcaatgtgtaatcacatgaaagatcttcaatggtgaatgaagaaaattctagttctttaaagtaaaagagcatctgacttaattattggatcaacctaagcgattaacataaattagaatttttaaataatgttgcatactcttcaagacatgacaggtgagtattctatcacagcactttttaaa

SEQ ID NO: 796545 - DNA, 423 bp, Homo sapiens
gaactgaaagtcctagccagagcagttaggtaagagaaagaaataaaaggtgtccaaataggaaggaaaatagttaaatcatcattgcttgcagatgatatgatcttatatacagaaaatcataaagcctccacaaagaaactattagaaataataaagaatacagtaaagttgcaggataaaaaaatcaacatacaaaaataaggatgtttctacagtaacartgaactatctgaaaaaaaagtaagaccacaaccccacttacaacagttacaaaaaattacataagaataaatttaaccagggatatgaaagatccgcacactgaaaagtacaaaacattgatgaaagaagttgtagaagatattaataaatgaaaagatatctcatgctcatgtactagaagacttaatactgttaaaa

SEQ ID NO: 796546 - DNA, 627 bp, Homo sapiens
ttggcaggctacagaattgtctctgggcagaagttagagccagagcaacagataaggcaaacctggggagtctgtgaggcaaggttatagaaagaggttactttggtgaagatgtagtcagataacaaatggcagcgataggtgcaagttcggatagaaatgtactgtaagtacagacagtctaggaaatgatcaaagcggttatggtagataaggtaggaaataaatggatgcagtttgacagggccctttgtgtttcagatggcttccctttttcctcacgcgcatatccaattcatcagtaaaaaccttcacatctactcacatctctctgtygttactacttccacatgaatcccttcttcacataacagccagtagggtcattttaaaaaattagattatttcactccaaagctctgcaaagttttctcatggtgcttaagcataaaatccaaacttttcactttggcctacgtggccctaatgatttgtcccttgaccatttttccaactccatctattccactccatactcacttaatgtacactagccaagctggaattgttttcttcatcatacatgccaatcttatttctgccttggggagtttgtctcttctccct

SEQ ID NO: 796547 - DNA, 549 bp, Homo sapiens
gtgcaacatgatgaaaacctgtctctaccaataaataaataaataaataaataaataaataaaataaaaaaaaatagtcaggcatggtggcttgtatctatagtctcagctacttgggaggctgaggtgggagaaacacttgagcccaggaagtcgaggctgcagtgacctgagactgcaccactgcactccagcctgggtgacagagcaagaccctgcctcaaacaaacaaacaaacaaacaccaaaacaaaactcctagagttggtggtatcctaacatctctttgctgagaratgtcggaccctaatctgctagccaggattgcttttctatagtagcttgaaaagaataagtacagtcttctcctcaatccattatgaggaattgtggtttcttgggatagctttagttgggcaattagaaaccatggcttccagaatttggaatgaagaaagtcccttcaatttttttatgccttggtttctccctgcttaaaatggtaaagaaaaacttcactctttcattcagcaaatatttattgcacacc

SEQ ID NO: 796548 - DNA, 578 bp, Homo sapiens
agtctgagaaagtccttaggatgataatcatgcaagaagcctgacaagaagcttctctgaaaaaatgaagattttatagacaatcagatcccataaaccttagaaaaaggaggattattattattcaatgcattatgaaaaatacattgtatgaacaaaagaacaacaaggagaaactccaggaaatctatacaggaaaggaaataaaattgtaaacttcttagcttcacaaattcctaaagctgtaaatggaggttaacaactttaataaaaattttattataactgtgttgggaggaagatrgagagtagatggaagacagtagaagagatctaacttcttcatgtattatagaaaaataaatggcaagattaaaaaaaagcagcctattttgagaattgatataaacaaccaaaataaataaaggaattaacaagtgtttccctttagagaatgagttagatgagtgaggagagatttcatggaagagtattgcttttctttatgagcctttgatcttattttatttttaaactatattcatatattactttgataaaaataaaaaatattttag

SEQ ID NO: 796549 - DNA, 586 bp, Homo sapiens
ttatttggtcataaaaataccaaaatgatgaaatatgtattaattaaatatttaaaaaacacaattatgcttttcaggttcttatactcaggaactttaatgagttaaatttcaagtgtggggaattaggtgactaaaatagcacggagactcaggaacagcatgaaagtgaaatttattgttcatttttgctcatttagagttacaaacttcttctgagttcctggtccttgaagagctgttttaggctgatctgagtctcatgtgtcatatgtatttcagcactgctttttaaccaataaaaattaaagattcacttcagaggaagttaattttatgatattctgtggttgactgtctttaatgttagtttcatagaatrctacattttattactttttaaaaataaataaagtagaaataaccaaggaatacaaaaatctaaggggatgcaaagcagtgaatatttcatatgaatctccctaattcttaatctttctaccaggacttcaaaaatcagaatacaaaatacattgctctgcacttgaggaaacctagatcccaaaggtgagattgcattttccac

SEQ ID NO: 796550 - DNA, 586 bp, Homo sapiens
ttatttggtcataaaaataccaaaatgatgaaatatgtattaattaaatatttaaaaaacacaattatgcttttcaggttcttatactcaggaactttaatgagttaaatttcaagtgtggggaattaggtgactaaaatagcacggagactcaggaacagcatgaaagtgaaatttattgttcatttttgctcatttagagttacaaacttcttctgagttcctggtccttgaagagctgttttaggctgatctgagtctcatgtgtcatatgtatttcagcactgctttttaaccaataaaaattaaagattcacttcagaggaagttaattttatgatattctgtggttgactgtctttaatgttagtttcatagaatamtacattttattactttttaaaaataaataaagtagaaataaccaaggaatacaaaaatctaaggggatgcaaagcagtgaatatttcatatgaatctccctaattcttaatctttctaccaggacttcaaaaatcagaatacaaaatacattgctctgcacttgaggaaacctagatcccaaaggtgagattgcattttccac

SEQ ID NO: 796551 - DNA, 624 bp, Homo sapiens
gcccagatgaaccaatgacaaatttggaattaaaaatatctgcctctctaaaacaagctcttgataaactgtcatcagggaatgaagaagaaagaagaagacaatgatgaaattaagactgggacctcatgtaagaatagagggtgttcaaagacatattggggtctagaaagtctagaagaagtctgtgtatatcattctggagtacctattttccatgagggaatgaaatacctaagctgttgtagaagaaaaacttctgattttaatacattcttagcccaagagggctgtacaacagggaaacacatgtggactaaaaaggatgctggggaaaaagttgttccatgtagacataactggcatcagactggaggtgaagttaccatttcaacatatgctaaagattcacagaacttagttgagtagaagcaaatagcacattgttaaatgtgcayattgtatttgaaggagagaaggaatttgatcaaaatgtgaaaatatggggtgtgattgatgtaaagtgaagttatgtaactacgactgcaacaaagattgagatcactatgagaaaagctgagccgatgcagtgggcaagccttgaactccctgcagtgaaaaagc

SEQ ID NO: 796552 - DNA, 492 bp, Homo sapiens
gatgtgtattgatagctaccattacttgaagagtatttaaaatgagtctgaagtctatacaaagaatccttgcaccatataattaaaacacctaatacacctttatatgacatcagggcatatcatatataatctctrtttttcttctcccccaaatctggtttaccagttttattttctccccgccccatgtccacacatcttatgctcttgtagtgctttcaatgacttgatattatggaaactttctgggttttttcccagagcaaaattatccatctgatggtccattatccaaatctataatgaattacagacctggtatatttactttgtatattgtttgtaagttttttttttttttgagccaacagttcaaacccaggaaattttatataaaaatctggatcctaatcataatctggcagcaccgggtctaaatttttgcatgctattataataatggcctagctctacttagtaggtgcccct

SEQ ID NO: 796553 - DNA, 492 bp, Homo sapiens
gatgtgtattgatagctaccattacttgaagagtatttaaaatgagtctgaagtctatacaaagaatccttgcaccatataattaaaacacctaatacacctttatatgacatcagggcatatcatatataatctctatttttcttctcccccaaatctggtttaccagttttattttctccccgccccatgtccacacatcttatgctcttgtagtgctttcaatgacttgatattatggaaactttctgggttttttcccagagcaaaattatccatctgatggtccattatccaaatctataatgaattacaracctggtatatttactttgtatattgtttgtaagttttttttttttttgagccaacagttcaaacccaggaaattttatataaaaatctggatcctaatcataatctggcagcaccgggtctaaatttttgcatgctattataataatggcctagctctacttagtaggtgcccct

SEQ ID NO: 796554 - DNA, 603 bp, Homo sapiens
catctagttttttcaaagcatcagaggatattggtacaagaagcagtctaagatcatacagtccagcagcttattttacaggcaaggaaacaaagatccagaaagttgagctgattgactcaagtgtcacacaggaacgtgttcgcagcttcactcttggatttgcatcagaaacagtgaggggaggtaaaaggtgcttggatctagatttgagatctgcttccaccaattagttaacctttaaacttccattttttaacacataaaatgagattaataattaatgattttcggcctggtgcaatggctgacgcctgcaattccagtactttgggaggccgaggtgggccacttgaggtcaggagttcaagaccagcctggccaacatggtgaaaccctgtctctcctaaaaaaaaaaaaaattatccgrgtgtggtggtgtacacctataatcccagttacttgggtggctaaggcacgagaatcgcttgaacccaagtgatggaggttgcagtgagccgaggttgcagcaagccaagatcgcaccactgcactccagcctgggtgatgcagcgagactctgtctcaaaaaagaaccaaaac

SEQ ID NO: 796555 - DNA, 619 bp, Homo sapiens
tcttctgttcactacattcactgttgaaattctaagagtgagactgctgtctcacaccaaagccagtgggtactatcttcagtaggcacgcagcatcatgtttgtatttgatccagctagatgacatgtaagagaaaactttattgtggactctgtaaagtgtgacattcgtttgtgactcaatttgctcatgtatttgttcctgggagttcattacatagctaacttccagctgctttcaatttacatcataaaagaaatgcatcatatwcttctcagtgtcctggtagtgcattttcctttagtttttcagtgaattctgttgtaagtaaaatggataagattgttcattattttggattattttgctgaagatgaccagctctgagatgtgaggagtaaataagaaagtaacagtagaatctggaatatcttttaaaaattaagacatcatttttaacagcagagtagccttaaatgacctgattccacagaggagccaggaaacagtatgaaactacaaatttattttgtagaaatatggaaaccttaatactattaagatgtaaatcttaatactattaagatgcaaatcttaatactattaagatgcaaatct

SEQ ID NO: 796556 - DNA, 622 bp, Homo sapiens
attatcctgataccataacttgacagagacagaacagaaaaagaaaactttaggccaatatacttggtgaacattaatgcaaaaatccttaccaaaatattggcaaatcgaatcctgcagcacatcaaaaagctaatccaccatgatcaagtcagctttatccctgggacgcaaggttggttcaccatacacaaatcaataaatgtgtttcatcacataaacagaactaaagacaaaaaccacatgattatctcaataggtgtataaaagtctttcaataaaattcaacgtcttttcaggttaaaaattctcaataaactaggtattgaaggaacatacctcaaaatartaagagtcatctatgacaaacccacagccaacaacatactaaatggacacaagctggaaacattccccttgaagactggcacaattcaatgagtattggaagtcctggccagagcaatcaggcaagagaaagaaataaaggacatccaaagaggaagaaaggaattcaaactatctgtttgcagatgacacgatcctgtatctagaatatcctgtatcatagtctctgcccaagagctcttcaatctgataaacaacttcagcaaaatgtcag

SEQ ID NO: 796557 - DNA, 622 bp, Homo sapiens
attatcctgataccataacttgacagagacagaacagaaaaagaaaactttaggccaatatacttggtgaacattaatgcaaaaatccttaccaaaatattggcaaatcgaatcctgcagcacatcaaaaagctaatccaccatgatcaagtcagctttatccctgggacgcaaggttggttcaccatacacaaatcaataaatgtgtttcatcacataaacagaactaaagacaaaaaccacatgattatctcaataggtgtataaaagtctttcaataaaattcaacgtcttttcaggttaaaaattctcaataaactaggtattgaaggaacatacctcaaaatagtaagagtcatctatgacaaacccacagccaacaacatastaaatggacacaagctggaaacattccccttgaagactggcacaattcaatgagtattggaagtcctggccagagcaatcaggcaagagaaagaaataaaggacatccaaagaggaagaaaggaattcaaactatctgtttgcagatgacacgatcctgtatctagaatatcctgtatcatagtctctgcccaagagctcttcaatctgataaacaacttcagcaaaatgtcag

SEQ ID NO: 796558 - DNA, 622 bp, Homo sapiens
attatcctgataccataacttgacagagacagaacagaaaaagaaaactttaggccaatatacttggtgaacattaatgcaaaaatccttaccaaaatattggcaaatcgaatcctgcagcacatcaaaaagctaatccaccatgatcaagtcagctttatccctgggacgcaaggttggttcaccatacacaaatcaataaatgtgtttcatcacataaacagaactaaagacaaaaaccacatgattatctcaataggtgtataaaagtctttcaataaaattcaacgtcttttcaggttaaaaattctcaataaactaggtattgaaggaacatacctcaaaatagtaagagtcatctatgacaaacccacagccaacaacatactaaatggacacaagytggaaacattccccttgaagactggcacaattcaatgagtattggaagtcctggccagagcaatcaggcaagagaaagaaataaaggacatccaaagaggaagaaaggaattcaaactatctgtttgcagatgacacgatcctgtatctagaatatcctgtatcatagtctctgcccaagagctcttcaatctgataaacaacttcagcaaaatgtcag

SEQ ID NO: 796559 - DNA, 492 bp, Homo sapiens
gctgtgcaaatgatatttcaagtaatctttatgacatggggaatattttcactatataatgtcatctgaaaaaacatgcataacgccaatctgtttacacaatttcatctcaattattgaaaagaacacatatctataagaaaaaaaaaaaaaggaagaggcagactcccgtggagggcagttgtgccaagcagaggcatggcctgatgggctcattggcaccacagacgttgctctgtggtgggaagaggaggctggggggccaaattctaagacgtgtggctctctgcatatatagctacgcgcgcrcacacacacacacacacacacacaaaggattttcaacagagatgcaatctacaaacttcctagtgacaggtatcatgtagtgagtaaacccccaaaagaatcttatgcctatgaggcagaaaattacagatttatcaaactttcccaattatccatatctgtccctgtccctttcctcccctc

SEQ ID NO: 796560 - DNA, 415 bp, Homo sapiens
tggattgcgtatgtgtgtgtgcgtgaacatacatttccaacattttggcctcttaaatccttaacatcatatcaaattgggagaattcacctgggatgttctcaaagagagtaagatatgggctcaagaaaaataagaagtaaaacgacamggagcagctgatggtatcaggaaggcttctcatatcagtgtctaagcagagggttaacatgcagtcacaggaggaaacagacaaaaaggaaaggtgaaaatgtttgaatgtctacactccttttttaattaaaatcaggttaatcaaaaataatttaattattcatattttaggttatttctatttataatgctaaaaagcgagcataaatgtgtatattatcagaaagcaattaagatcgaaatctcatatataccttagaga

SEQ ID NO: 796561 - DNA, 622 bp, Homo sapiens
agttgctacaaaaacagccagctgagattataattgggattacattgaatttatacataaattctggaagatttggcattctcatccatgaacatgatatgtcactccatttatttatctcttctttaatttcctttagcaatattttgtagtgttgtatatagtttattaaaaaaatttataagtatttttttatttttaagcttttggaattggtattatgtcgatttgatttttgaaatatttattgctagtataagaaatacaattgatttttctatttgaccttctatctatcttgtgatcttgctaagttcacttattgcctrtagcagctttttcactgattgcttaagattttctatatacataattatgtctgcagcaaaaagacagtttttcttcttcttttttaatcttcctgctttttacttctttttcttgccttatgcttgatcataggggagaaacatttagttttaatatatggttacatataatgagagctgtgtgttttcgttcgtttgtttgctttgtttttgtagatgcccttcattcggttgaggaagtttccttgtattccaggtttgctgagagcttttatcatgaatagtggttgaat

SEQ ID NO: 796562 - DNA, 622 bp, Homo sapiens
agttgctacaaaaacagccagctgagattataattgggattacattgaatttatacataaattctggaagatttggcattctcatccatgaacatgatatgtcactccatttatttatctcttctttaatttcctttagcaatattttgtagtgttgtatatagtttattaaaaaaatttataagtatttttttatttttaagcttttggaattggtattatgtcgatttgatttttgaaatatttattgctagtataagaaatacaattgatttttctatttgaccttctatctatcttgtgatcttgctaagttcacttattgcctatagcagctttttcactgattgcttaagattttctatatacataattatgtctgcagcaaaaagacagtttttcttcttmttttttaatcttcctgctttttacttctttttcttgccttatgcttgatcataggggagaaacatttagttttaatatatggttacatataatgagagctgtgtgttttcgttcgtttgtttgctttgtttttgtagatgcccttcattcggttgaggaagtttccttgtattccaggtttgctgagagcttttatcatgaatagtggttgaat

SEQ ID NO: 796563 - DNA, 622 bp, Homo sapiens
agttgctacaaaaacagccagctgagattataattgggattacattgaatttatacataaattctggaagatttggcattctcatccatgaacatgatatgtcactccatttatttatctcttctttaatttcctttagcaatattttgtagtgttgtatatagtttattaaaaaaatttataagtatttttttatttttaagcttttggaattggtattatgtcgatttgatttttgaaatatttattgctagtataagaaatacaattgatttttctatttgaccttctatctatcttgtgatcttgctaagttcacttattgcctatagcagctttttcactgattgcttaagattttctatatacataattatgtctgcagcaaaaagacagtttttcttcttcttttttmatcttcctgctttttacttctttttcttgccttatgcttgatcataggggagaaacatttagttttaatatatggttacatataatgagagctgtgtgttttcgttcgtttgtttgctttgtttttgtagatgcccttcattcggttgaggaagtttccttgtattccaggtttgctgagagcttttatcatgaatagtggttgaat

SEQ ID NO: 796564 - DNA, 617 bp, Homo sapiens
aattatctagaattgctggaacatgtggtgatcataaaagacaggcctaattttagcaggctttgtgattgtttttaaattctctatagaaaatgcacccccttattgtaggtctccaggacagatggttctcactgcctaatttaagtagttgctgctatgtggtataagtaactcttagagtaacttcctattattttacagcttggctacaggatgatgattatttartgcaggatgcatttatgaaatgtgtttttctgaccacctcactgaacatacacaagcacttcataaacatcatctttataaacattagggaacaaagagatgaataaatgggctggttcattacgtctgtgtgctcatccaaatgtgatacaagcaactgtgttaaatttgttttccaaccaatgtgtacatatatctttggagaacaacaaaatagataatttggtattccccagggcacctttagaccttgttactgcattttgagactaaaacagcttaaacaagttacacagctttgtcatctcatcctctctttcatttcttgactctgcaaactctatctgaaactgactttgatgaatgcctcaagtcatttttaatgt

SEQ ID NO: 796565 - DNA, 617 bp, Homo sapiens
aattatctagaattgctggaacatgtggtgatcataaaagacaggcctaattttagcaggctttgtgattgtttttaaattctctatagaaaatgcacccccttattgtaggtctccaggacagatggttctcactgcctaatttaagtagttgctgctatgtggtataagtaactcttagagtaacttcctattattttacagcttggctacaggatgatgattatttaatgcaggatkcatttatgaaatgtgtttttctgaccacctcactgaacatacacaagcacttcataaacatcatctttataaacattagggaacaaagagatgaataaatgggctggttcattacgtctgtgtgctcatccaaatgtgatacaagcaactgtgttaaatttgttttccaaccaatgtgtacatatatctttggagaacaacaaaatagataatttggtattccccagggcacctttagaccttgttactgcattttgagactaaaacagcttaaacaagttacacagctttgtcatctcatcctctctttcatttcttgactctgcaaactctatctgaaactgactttgatgaatgcctcaagtcatttttaatgt

SEQ ID NO: 796566 - DNA, 592 bp, Homo sapiens
ccaacctgggcaacagaatgagatcctgtctcaaaaacaaaaaaagatttaattagtgaatatgaagcattctgactagttcccagcctagtagtcactcaatcaacagtagcaaatattatgaggtggagcaaggatttcaaatccaagtctgtttgatttcaaaactcatgttcctagtcattattcactttgcctcccctctaaatgttttttgaaaaatggaaacacttgggcttagggggctttttagaggaatagtggagctcaaggccattcatcactgtgtcattttgatagaggcaggaagcagagaactctcctaggcagataggggagggtccccagagaatttccgacrtgccccacacatatttgcaccagatgctttgtgcaggtaagggaacctgcacagggggcttgcctaaacctgcctgtggtgaaaaattccatccatgaacacatgcacagtcagagaaataaatcaatatagagtggctcagactaagggcctgcatgtgcactgggaagatggagtggagcttccaggaattcatgccttacacaagtagggaacctagccccatcagtg

SEQ ID NO: 796567 - DNA, 524 bp, Homo sapiens
gagttaacaggaggcctctagctttctagtaggcattggatcaaggccaaattcgtggtgctgtcaggctcatctgtagagctattcagtgaggacttgaaactctcagttctcccacttagcattaaggtgacctggaaagaaggtcatcttaaccatcttaactgaaggtttcagtgctgtagtcaatttacttgtaatcttgtaaagaaatctgacagttttgctgggaagttaccaacattagtagggaaggaaggatgctatgcacagtaagaagtttaaacaggctccttgctccagatatctttttaggaagaaccaagatggaattacaacaaaagggaattaagatgwaacatcagcatatgttttgagtctgtggaagcagcatcattggaagtatttaaatatacagaacctaatgctaaaatgtaaattatacaatacagaatgaatatactggctttttatgagtcttcttctgtcatgttatgtttatgtaaatttcctatcccacagca

SEQ ID NO: 796568 - DNA, 598 bp, Homo sapiens
tatcaactttatagctttacttttcaattttaggcctttaattcttctagcatctccctttatttgtagcattaggcagtgatccaacttcaaattctcaaaatggtaaactagtttttccaatacaatctaccaaacaatctaccttttccctagtggtttatggaaaaacaattgtttgcaagattttttttttaaatccccctgagtatttgytttctccaaatttcctttttaaaaactcttgatatattgtgactcctgcttttttttaattacaaattatatttcagcatctggtgagcctccctgcttgttcatatgttttaaaattgtcacactaaaaagctgatgcaggtgggggaggtttgcccatttgcaggcacatagtaggatgggctgggaggcggggagtctgtttccttagggaattctcaatcttggtatatcttaattgtttcatttaagagaaggctcttctaatatcttgtctgaaagatacccattcagctccatgctgttagaaagggcgaggaaagccctgaggtaagggatcgtgttgagggagattttcaaagtagaatagacaaattgtttg

SEQ ID NO: 796569 - DNA, 598 bp, Homo sapiens
tatcaactttatagctttacttttcaattttaggcctttaattcttctagcatctccctttatttgtagcattaggcagtgatccaacttcaaattctcaaaatggtaaactagtttttccaatacaatctaccaaacaatctaccttttccctagtggtttatggaaaaacaattgtttgcaagattttttttttaaatccccctgagtatttgttttctccaaatttcctttttaaaaactcttgatatattgtgactcctgcttttttttaattacaaattatatttcagcatctggtgagcctccctgcktgttcatatgttttaaaattgtcacactaaaaagctgatgcaggtgggggaggtttgcccatttgcaggcacatagtaggatgggctgggaggcggggagtctgtttccttagggaattctcaatcttggtatatcttaattgtttcatttaagagaaggctcttctaatatcttgtctgaaagatacccattcagctccatgctgttagaaagggcgaggaaagccctgaggtaagggatcgtgttgagggagattttcaaagtagaatagacaaattgtttg

SEQ ID NO: 796570 - DNA, 584 bp, Homo sapiens
gtctggcccttcctacttttccaacatcctctcacaacatgctccccttgctttctctgcggcagccaggacagtcttttgtcagtcccatgatccctcacatcacggggcctattccccctgttgggaaagcttttcctacccacctctgccttgctaactcctacacacccttcagatctcagcccagttgttgcttcctcggggaagctttctctggcctccctgactaggtcagatccccctgctgtttgctctcaaggcaccaygtacctgtctcttatattgttaccattttaaatttgtgtgactcctagattgtccatctctcccattagaatgtaagctccacataagtgcaggaattttatccatcttatccactgaattctccccagtccctagaacaatgcttagcatatggcaggcatttgttgagtgaatgtgagtctacaaagaacaagatgctttcgtttatgatattttatgtgattcccacaactattccaaaggatagatattatccaccccccccccaccaccttccagtgtacagaagaagaaactgaggtttggagaggcta

SEQ ID NO: 796571 - DNA, 616 bp, Homo sapiens
tttgttttttttcttttgttgagatagggtctcagtcttgctatgttgcccaggctagtctcaaactcctagcctcaagtgatcctcccgcctcaacctcccaagctgttgtgattacaggcatgagccgatggtgcccagcttgtgctgctgtcctaacatttgctcttgatataattaaaactctttttttatatcgtagaayaatgccatttaagtgttatattaagtggtggtgctagtgctaaaaaaatgtgccccaaatttaataactttagaacaaaagttagatgtgataaaaaatctatgaagatgaccaaaccactgctgtgatatctcatgctattaatttaggagagtgtacccagcagaatattagcagtagtgctcaaaaaactgaaagcagtattaaagcaggtatgcctcttagttcacaaaaattataaccaggcaatgataatggaataaatggaaaaaaattctggtacacaagttgcaagatcagtgctgccataatgcacccctgagggcaatctatcatctatgctaaggcatcagtattttcattttgatttgaaaagaggtgacagtgagacaaaaggtttactacaagtta

SEQ ID NO: 796572 - DNA, 602 bp, Homo sapiens
ctcaaagtagaatccaaaattcttacgaggactttcataacttaataatatctaaatcctggccactattctgaccttatttcctacctttcttcccttcattcactccagtccagccccactggcttatctgttcttcctcaaagaagccaaatgtgctcttccacaaggccgttgcacttggcacttctcactacacggaatgccccttccttacatatttgtgtggcttamtcccctattttattgaggtctttgttcaaatgtcatttatttagagaagccctgtttatcactgcagcacccatatttactctttttttttttttttttttttttgagacaaggtctccctctgtctcccaggctggagtgcagtggcatgattatggctcactgtagcctcgacctgctgggcttaagcaagcctcccaccgcagctttccaagtagccaggacaacaggcacacgccaccacgtccagctaatttttaaaatgtttatacagacagagtctcaccatgttgcccaggctggtcttgaaatcctgagctcaagtgatcctcccaccttggcctccaaaggggctaggattacaggtg

SEQ ID NO: 796573 - DNA, 529 bp, Homo sapiens
aagggagtcccaggcccatgactctttccagaaagattctccattcctcattttcctctatggctactagtcaatttctgaggtttgactgaattatcaaattcaaatctgcccagatgtcagtgttatcattttcgtgtctcctgatggaaatattctttgattggttactaagacctctaaaccagcagagcccatagttgaggaaatgagaatgaaaaactatctaagtgggttattagatgtaataatgaacgatgttaacactcatttcttttcttttttgaaacagggtctttctctgtcacccaagctggagtgcaatggtgtaatcatagctcactgcagcctcgactsctgggctcaactctcacttcaggcacgtacgtgtctcacccaaggcatcgaaaatacctggtatgtctggcctccaagtcctgttagctttttttttgttttttgtttttgagacagagtcttgctctgtcacccaggctggagtgcagtggtgtgatcttggctcactgca

SEQ ID NO: 796574 - DNA, 601 bp, Homo sapiens
ctttccttggtccagtccttatgctcacaggcattctccagtgttttgctaacaaaaatgagcaaatgcttaacatccttttgatgttttaacttcctccttcgttctggatccccaagggcatgctggctgtcatctggagrcaatcagagatggtaagaatgcccggtataaagagaattggcaacggtaactccctgtagcaaggtgggttccctgacagaagaggaaaaggagggagagctgcatttgctggtaagagaggctcactgggacttgggatactctgaatcacatgaatttccccaaaccaattcttctaggccaactacttctttctgatcaatgccataacttttgcaatagacctgatgaggctatgaactcaactaatgttttaattcaacatcctacagaatgaaactttgagtgttaggaagcagcagggaataccaagctggtcatcaaatctgagtgagtgggaaactggagcagggagatgaagtcagcagggctgagagccagtcatatgcaggaacagattggagagtaacgttctggagaagtcaagtggaggcaggaagtcaaatgaagtgggctg

SEQ ID NO: 796575 - DNA, 654 bp, Homo sapiens
tgatgttttaacttcctccttcgttctggatccccaagggcatgctggctgtcatctggaggcaatcagagatggtaagaatgcccggtataaagagaattggcaacggtaactccctgtagcaaggtgggttccctgacagaagaggaaaaggagggagagctgcatttgctggtaagagaggctcactgggacttgggatactctgaatcacatgaatttccccaaaccaattcttctaggccaactacttctttctgatcaatgccataacttttgcaatagacctgatgaggctatgaactcaactaatgttttaattcaacatcctacagaatgaaactttgagtgttaggaagcagcagggaataccaagctggtcatcaaatctgagtgagtgggaaactggagcagggagatraagtcagcagggctgagagccagtcatatgcaggaacagattggagagtaacgttctggagaagtcaagtggaggcaggaagtcaaatgaagtgggctgtgatcctgacatggacttttttttttttttttgagacagagtattgctctgttacccagactagagtacagtggcacgatctcagctcactgcaacctctacctcctgggttcaagtgattctcctgcctcagc

SEQ ID NO: 796576 - DNA, 611 bp, Homo sapiens
cagcctgggcaacagagccagaccctgtcttaaaacaaacaaaaaaacgtatcatggcagagaaggcgaggagcacctattttcccttattggattagcccatacaacttctagttgatgggctgaaatcccaccagcatctctgagaccttcacaccttctattctcaggttaagtggacagtgggtctggggttttgtctctacagagccacatcggccgggcctcacagatgcgttttccagagattcctgagctgccatacttctttggtcccatacgaccttttcctcccctcagccctcaaaatcaccctctctcctgcctccagcctctcagggctcttacctgaggtaaaaatcgcctcctgcatctcttcctggggtaaaattcccgcccgctggacacgtgaccactgagcctgcactctgtgcttccattggccagaccaggccccgccccttgggctccgggcacttccgtccgcgagtgggcacagcctasggaggtaaggattgtggggattcgaggctgcagcctgggcagcgccgaggtcctcgggagtgagcagaaccctcataacactgggcggagtgtgacggtggagaagt

SEQ ID NO: 796577 - DNA, 615 bp, Homo sapiens
gttggaggataaattaagaccatcgcagcctccatctctccgtttcttctgtcgtatacccatattagagatgctacgtttaagtttctctttctctaccctcagttccttatcggtgccttctattctgagtgacaaaagaatgtgttcttcccrtcatacagtctaactactggatgctaccccatgctgcacaaaccccatgtctttacctatccaccctcccgtgaacagcaggttgcctctgaggccccatcatcacaagtaacattgcaatgaatatccttatagacctttgcaagaacatatttgggatatatatacatacacacacacatacacatacatatacacatacatatacacatgctggagtggaactgttgaatctttaaatgcgtctttacttcacctcccagcaatacatgaagtctatctgtctgtctgtctgtctagctagctagctagctagctgtcatctatctaacctacctacctacctatcatctatctatatagtatacttggcattatacttggcattttattatacctggcaaggtaatagctggcattttccagcatattcttcacatagtcatggcagcatctaaa

SEQ ID NO: 796578 - DNA, 445 bp, Homo sapiens
aagtagtgttttttaaaagaaaacctatcaagaaatataacccaggattcactgtttgatgaatctgaaatgtgtacttccaattgagagatacaattgcaaacaacagcctgcacaaaccaaacagagaaaaactgactgaggggggacaatagaattgagtgtacctttcaaaactagagctgtaatccagtttgtaaraaaataaagaatggaagtattggcctaaactccactgaatcacagaagcctaacacaatacaaaacaagtgacatccttttctcaaagaggcgcaaggctcattgagtctggcgattcaattaccctctcaacctggaaagaacacccctcctgcgttgaggtccactggcaaagcaatgtgggacagcctacattgtacacagctggtaaatatctaaaaagctgcaggctttaaagaacaac

SEQ ID NO: 796579 - DNA, 445 bp, Homo sapiens
aagtagtgttttttaaaagaaaacctatcaagaaatataacccaggattcactgtttgatgaatctgaaatgtgtacttccaattgagagatacaattgcaaacaacagcctgcacaaaccaaacagagaaaaactgactgaggggggacaatagaattgagtgtacctttcaaaactagagctgtaatccagtttgtaagaaaataaaraatggaagtattggcctaaactccactgaatcacagaagcctaacacaatacaaaacaagtgacatccttttctcaaagaggcgcaaggctcattgagtctggcgattcaattaccctctcaacctggaaagaacacccctcctgcgttgaggtccactggcaaagcaatgtgggacagcctacattgtacacagctggtaaatatctaaaaagctgcaggctttaaagaacaac

SEQ ID NO: 796580 - DNA, 632 bp, Homo sapiens
aagctttcacagatgcagtaagtgaaaggtcacatagtatgtatatcaactaacacagcattttaaaacaaaatgaattaaaatgatatcattagtaattgatctggtcatgagaggtgtgtgtgtttgtgtgtgtgtgtgtgtgtgtgtgagagagagagagagaaagagagagagagacagggaaatacattattcctctggaaactctcacatggttttaattcttttctctgggaacactgtccctctgggaactcttacttggttctaccactcattcccagagcagagtctatttaagacagagacatgtgccttcagaacagaatttattagaaactyactaaaatttgagagtggtcacacttaggtcttgccataagtatcacctaatgaagagttatgcatagattaggactgcagtagatgcattttaagtgaatcaaggaatttagaataggaatgtatctgcttatttcattccaattatagtttgtataattgtaatttcaatatcaaattataaattaaaaatgtcctcgtgggaactactgagaaaagctttttgtccttttttttgggttggccgattagggtgcctgattttagaaagtcctgtattccctagg

SEQ ID NO: 796581 - DNA, 618 bp, Homo sapiens
gcatttttgatcatgtgtttattgagagtaattggaacttacagacacctgcccaatttctttacattaaattatcaatacaaatgtaatgttgaaaagtaaagctaaagtcaaatatagtatgcctaaaaatagaacccagggaaaatatcagatcttgcctccttcctacttttgatatacacaataaatataatattgtaattaagatcatacagacagatactaatgacaatggcacccaaaattttctgaaaggaaggaggttcagttragacatttaggagctagaagacagtgtaaatttatattgctttccataattttttgcctaaataaaggggctgacaggcatggtcttagaaatggcattttgataagaaaagtttagtagacaaagaagcattaatgatgactgcacttcagaaaggcaatgaaaaaggacagctgcaaaacaaacattactcagtgtgtgatcacttaaagagatattatttcgaacttcatattctgagtgtgaactgccgaagagacagacaaagtaaaatacaggacgatgagtttatattaaaaatgagtaacaatttaacacagtggtccccaacctttttggcacca

SEQ ID NO: 796582 - DNA, 618 bp, Homo sapiens
gcatttttgatcatgtgtttattgagagtaattggaacttacagacacctgcccaatttctttacattaaattatcaatacaaatgtaatgttgaaaagtaaagctaaagtcaaatatagtatgcctaaaaatagaacccagggaaaatatcagatcttgcctccttcctacttttgatatacacaataaatataatattgtaattaagatcatacagacagatactaatgacaatggcacccaaaattttctgaaaggaaggaggttcagttgagacatttaggagctagaagacagtgyaaatttatattgctttccataattttttgcctaaataaaggggctgacaggcatggtcttagaaatggcattttgataagaaaagtttagtagacaaagaagcattaatgatgactgcacttcagaaaggcaatgaaaaaggacagctgcaaaacaaacattactcagtgtgtgatcacttaaagagatattatttcgaacttcatattctgagtgtgaactgccgaagagacagacaaagtaaaatacaggacgatgagtttatattaaaaatgagtaacaatttaacacagtggtccccaacctttttggcacca

SEQ ID NO: 796583 - DNA, 526 bp, Homo sapiens
tagtacaggaacatacatactaatataaacagtatgcccagccaattcattatcatcctggaactatattcagcctggctactatcatgaaagatgagtagaagcagtgagctggcaaagctggcctctgcctctggttgttaagctgttggcagctcaggatgcatgacctttcaaatatacgcttytaattcaggacttcttatgatgtcatgtagttatgttcttcccttttagtgtattctctcttcaaaattctgtgctgaaaaaaggaaaaaaaagaaatgtaagctactatccttttggccaaatgttgaacttttccttctgtaactttgtaggtaggagacagcagagtaactgatcttcctactgaaatgaatttccttgagcaaaattatttcaaaaaatatgtctggtatctttgtttatacctcagggtgccgagctgtcagctgcatgcctgcttttcattgaagcatatgtatatttgtgtatatatgtgtttgtatggcttccaatagca

SEQ ID NO: 796584 - DNA, 565 bp, Homo sapiens
tgagtcaacggaacttgaaagaaaatgagatttttccacatataatattaatttggtgacaaataaactatgcatatctagattaagtcatgtgtatttagggttggtacctggagatggtgtttcttacaataaatggtggcaaccaagtaagtgtaagtgagtccatgggctctgcagtctggcagacttgaattctaataattcctttgttwcttatcagcttcatgaccctggcaacttacttaactccttttttggggacttcattatttataaaattgggctgataattaaataccttcctgataggatggttgtgaagaatcagagaggtaatacaagcaaaccatttaacacaaatgtctggctcatgatatatgctcagtaaagagttgacattattattactattattatttaagttgctccatgctccttttttggttgatagaccataggctgcctaattttagtgttccctctattgtttgtattacttttgtatgtgtcaaaagtatcttagagttttctgtttcttaattatgaaaaaaatggaatcctt

SEQ ID NO: 796585 - DNA, 634 bp, Homo sapiens
tattactattggatactcctaatcaactacttataaaatgcaagagtttgggtgactgtgcatgtgctacttttgaatatttttggcaaactaatgagtataatgagattggctgattgcttctaatgttactagacaaattggstaaagaaaaggatgaggtcagacatttgaattaccagctcaagtactgcataaatgacctgaaaacttccatgtgtgccccaaaggagagccttatctcctgtattgtcagggctgagattattgaaaatcaaacccagaacctcatcctgtgactggctgaattacaagacaatttgaactcccagccttgtagagtgtctgttgttaaagtcagagcattgattggaaagggagagtgatatgatatggatctgtttcaccatcctaattttcaggtagaattataatcttcaatgctggaggtggcgctggatagcaggtgattggatcatgggggcggtttctcatggttcatggtttaacaccatctccgtcttggttctgttatcacaatagtgagttcttgtgcaatctggttgtttaaaagtatgtggcacctccccctctagtgggactctttgtattttggaggcaacatatttctcat

SEQ ID NO: 796586 - DNA, 618 bp, Homo sapiens
gaggcctcacagtcatgatggaaggtggaaggcacatctcacatggcagccaacaagatggcttgtgcagggaaacccccgtttttaaaaccatcatatctcatgagactcattcactatcaagagaacagctcatgaaagacccgccccccacaattcaatcacctcccaccaggttcctcccatgacacatgggaattgtgggagttacaattcaagatgagatttgggtggggacacagccaaactgaatcatatattaaacgaaaacccctccaccataatctgaatcttgttttagatgattatattcttttcttggtacatgatatgtaaaatctgtattactaggacaatttggctgatttgcttcactaacattgggagggattgaatgctaaaggtctagtaaaatctkgatccttctggttatgggcaaagatttgcaagcaaactcacctggagaagagaggagaccttctgggggcaaacatctccaagtaataaggtcacaggggcaggatgaggaagcggtttatctatctttctaatatgaactttgtccatggagaatagcagaaaatgccacccaaaaaagaacactttggcataaggatt

SEQ ID NO: 796587 - DNA, 632 bp, Homo sapiens
gtagttaaccatgtcctttataagtaaatgaaaattatataatgatgaattaatacttaaagtagtttaggtgacagtcctcaaaacctggagcacacagaagcattagtgctgccttggcctttaggagttctgtgatctccaagtatggaagagacatttgctgcctgtgtcataaccatagtcctccatatttccagctcctgcaattaatagccatgcaactatatctgattataacctaagtgacatacatcacttccaggccaaagtgcataagcattggatgcaaccctccagctccttcttctcctgtctggataactatraggctttgggtggtaatgtagaagcatccatcagctcgggctcagtatgactctgtgcatgagtggccctgccagcccagatggtacctgtagcttgaatgaaagatgaatattggtcattgatattttatggttaacttagcctatcttaatatattaaaccacaggtcttccagggtaatatacatcaggtggtgtttataaattttaatttctgcaactggaaaaatattgctcattcattctttactccttttattaattcatctatccatgcatttatctgcctatatattcaacaaa

SEQ ID NO: 796588 - DNA, 546 bp, Homo sapiens
aaaagcatgaacttctgaatcagaaggcattcaagggtgctgatatctaatcttctgcttcctagatgtgactttgggctgattacttagtctctctgagctaaataccttcttcattttattataaggataacaaaatgagataatgaatgaaataaataaattacatagagctttaaaataaaactacgatgtggttgttaactgatagattccaaagaaccttgaatgatacaatgagatacttgtcttatattcygtgggtctacagaagcaatgggaagtatttttttttaaatcaaaacaggaaaggctggatggatggatgtagagacaatttatcaatattttagaatagcagtccctaatctttttgacaccggagaccagtttcatggaaaacagtttttccactcaccctgagtgagtccttgtgacacagcagacacccagcatggggcaacaaggggatgtggcaagaagaaaccctcacagctctgggctcaagtaagcagaggcaaaacttggcttgaaactgctataatg

SEQ ID NO: 796589 - DNA, 581 bp, Homo sapiens
tggttccagtgtccatgttcttaacctctgcacttgctgcttctatcaagatgatatagaaaaagcatgaacttctgaatcagaaggcattcaagggtgctgatatctaatcttctgcttcctagatgtgactttgggctgattacttagtctctctgagctaaataccttcttcattttattataaggataacaaaatgagataatgaatgaaataaataaattacatagagctttaaaataaaactacgatgtggttgttaactgatagattccaaagaaccttgaatgatacaatgagatacttgtcttatattccgtgggtctacagaagcaatgggaagtatttttttttaaatcaaaacaggaaagkctggatggatggatgtagagacaatttatcaatattttagaatagcagtccctaatctttttgacaccggagaccagtttcatggaaaacagtttttccactcaccctgagtgagtccttgtgacacagcagacacccagcatggggcaacaaggggatgtggcaagaagaaaccctcacagctctgggctcaagtaagcagaggcaa

SEQ ID NO: 796590 - DNA, 546 bp, Homo sapiens
aaaagcatgaacttctgaatcagaaggcattcaagggtgctgatatctaatcttctgcttcctagatgtgactttgggctgattacttagtctctctgagctaaataccttcttcattttattataaggataacaaaatgagataatgaatgaaataaataaattacatagagctttaaaataaaactacgatgtggttgttaactgatagattccaaagaaccttgaatgatacaatgagatacttgtcttatattccgtgggtctacagaagcaatgggaagtatttttttttaaatcaaaacaggaaaggctggatggatggatgtagagacaatttatcaatattttagaatagcagtccctaatctttttgacaccrgagaccagtttcatggaaaacagtttttccactcaccctgagtgagtccttgtgacacagcagacacccagcatggggcaacaaggggatgtggcaagaagaaaccctcacagctctgggctcaagtaagcagaggcaaaacttggcttgaaactgctataatg

SEQ ID NO: 796591 - DNA, 619 bp, Homo sapiens
tttctctttttaggtcaggatcgcagtgaagccactttgataaagaggtttaaaggtgaaggggtccggtacaaagccaaattgatcgggattgatgaagtttccgcagctcggggagacaagttatgtcaagattccatgatgaaactcaaggtgctatgcaaacgttttcttttcaatactttgtgtttaatgtgaatgaggaaaagaagtgattaccatcataattgtaaataactttattcatttattggtaaattacttggcttactgttgaatcaccatattttttcattcggaagatatttcaatcattcagcaaatgtttgttgagcacctactatgtggaaatattttggtaggcccaggtttacaatttttgagtgtatcacattttattccattttattttcattttgcaactcctgcaaaaataaaagcaaaaaattatcaaattgttttgtcmcccacattttatgaattttgccatcttgttatttttgaataaataatatatatttttgccatatggtaagagatgttaagataaaagttgattttattcattcttacagtttctacaaatgtaccccaagcactttaagataatatccttaaa

SEQ ID NO: 796592 - DNA, 660 bp, Homo sapiens
cttatagcccattaacataaagtgttcatgtgcaaactactctcaaggttgatctcgttatgtctcctgtgtcacaaagccccttttgtaatctcaggccttgtcctgtccccgtggcctgtcaagggaggaaagtggtaaatttctgcttccctgggaggtaacatgcattgatctagccatgatttaaaggcttatgagcattcaaatgacacctggggctattgatttcagaagcacaacagattgagtttagaaatcatttaatggtctaagattcatgcaatcattcgacaaatatttaggaactcctactatgtgccgggtatgttttcctattctcatcaggaataagagaaaaataatartgcctccctcatagggttgctgtgaggagggttgggtgagcaatgcatctggatcactgagcataagagctggcacatgataactgctcaaaatattagctagcatttacaaactatattcataaaattgtggtaataattgcagtgttgaggaaaaagcaaagctactacaccatactttgaattcccacattgcaaagctgcttctcttatttttttaaattcatactccaagttccatccataccagactatttgggacagcccagcttttctggaagagagccatgtt

SEQ ID NO: 796593 - DNA, 639 bp, Homo sapiens
atgaatctggcactaaaatctggctctactgctatttagctgcgagaccttgggcaaattacttaatatttcaaagcttcggtttcttcatttgtaagatgagaataattgtacctagttcatgttgtggctttaatgtcagtttttaaaagaaaaatataaagtgcttcacgaagttctagtacatagcaggagctaaatagaacaacagctgttgttcatagttaaaatgctgcatttcatcatgtggtttcggtcaagtttttgaactttctttctttttttttttttttgagatgragtctctctctgtcacctagactggagtgcagtggcactattttgccttatagcaacctctacctcctgggttcaagcgattcttgtgcctcaacctcctgagtaactgggattacagacacgtgccaccatgcctggctaatttttgtgtttttgtttttttagtagagatggggtttcaccatgttggccaggctggtcttgaactcctgacctcaagtgatctgcccgcctcagcctcccaaagtgttgggattacaggcgttagccacggcgcctggccaagttatcgaactttctgtgcctctgtatcctcatctctaaagtgggaattttgat

SEQ ID NO: 796594 - DNA, 607 bp, Homo sapiens
gcattgactcaaagtagccttggctgttggatggggcatgggaaagaacagactggttagagagcagcatcttggctcagtcaggatggttcttcctcttgaagaaagccttctaccaatgctaaaagtgggatgagagataggctgatcctattctctagacagaggggttsatgcgttgtatctggtgggctacagtcaaggatggccataattccatcagaactcaggtggtgatcaggggagacattgggtgagattaaggaaaatgagattaattaagggctcaaatcatggcctactgtaccaggttctttacacataaccacaacagtcctttgaggtagtgattcggttttcacccacatatgcttgttgagccactgttgtgttccatacactatattaggcactgagaataagcctgtgagtaagcctgatatggtgcctgccagttaaggagctcttagtctacttgaggataattacaaactagcaatagcagtgtaaagttctaagtgcaaggcagggtgttttggaagggcaacaaaggaatcggagggggagtacctcacataaaatcatttagctagtaagggctggaccc

SEQ ID NO: 796595 - DNA, 635 bp, Homo sapiens
aggccaaggcaggtggatgacctgaggtcaggagttcgagaccagcctggccgacatggtgaaaacccatctccagtaaaaatacaaaatcagttggtcatggtggcaggcgcctctccagcaacttggaaggctgaggcaggagaatcgcttgaatctgggaggcggaggttgcagtgagccgagattgcgccattgcactccagcctggccaacaagagtgaaactctgtctaaaaaaaaaaaaaaaaaaaaaagaaagaaaaaaagaaaaaaaatgaatctgtgagcttatattttaaaggtgaatgrgactgaagatcatcatctacagtacatcatgtaaggtaaatcaatgtcaacttagatgacccagtgagagcaatttttatggtggtgttgctcttgttaatgttcgtaatctccatgaaattttcttgagagcaatgcttttaaagaagccacatatatcacatataagcacgtacacacaaacatacacatacacacacacacattgtcagtgataaatcactagttactaagaataaggacacatggagtacaaaatgatgagcatataaagacaggtattacggctagactatacctctaaatcgtaactcttgaattagc

SEQ ID NO: 796596 - DNA, 620 bp, Homo sapiens
ctctctgcccctgggacacatgacttatacagggatgacctatctgccctacccaccacaagaccagatattcaaactgaggatgattgtagaaaatgctctggagtcatggaaagaggacaactttttggctctgtgaactsagatacatcattcatatctccaaagctctacttattcaactgttaaatggggatagccatacatgcttggtctactttgcagagtcactggaggtcttaacctagaccttagaaggaaaaaaggctttgtaagaaataaagaacactgacagtgtaactgtctggtgtagacctgtagttaatctactcacccctcaatttcaaagactggctcttcctcaggtgattcacttagcctctctgatcctcagagtcctcatctgaaaaatggggataataatcatagcctagcacactctgtagtgttgtgagaattgtatgaaataatagatatggaaacctttgtcaatgttaccatgctatataaagtaaatatgaggggtgatatggttttgatctgtgttcccacccaagtctcatgttgaaatgtaatccccagtgctggaggtggggcctggtggaagatgattagatcac

SEQ ID NO: 796597 - DNA, 604 bp, Homo sapiens
tttgaagaacatagtacacatttccataataaagcatttccccttttgtgcctgtgataagctgttcagtggtgtcaaatattttttgactttgataaaaatgtattgagggtcaagatcatctcttaatagttcacacttctatttaataacctgcctcratgtcaaaagacaaccccattgtctcgcagttccaggaagtattatgcgctgccgtcccatctccagatgtgcatcagacatgtccatgttattccatattcggtccattccagagaaaggctaaaggagacaaagggtacggatcttgttaggtgcagcctctgacactatcactatcaattgtcttttgccgaggctgatcatcacctcaattatctagtgtccagcctacctgataggtttttgcaaactataactcttctgtcgatgagcatggaataatgacaacgaggagcaaatggacagaatacaaaagagataaatccagaagtaaaatacgtaagtctatctccacatatagacatacaatatgctttcagtatcaagtgattcaacataatgtatagctagtggtttttttgcaggcttattgagattatgc

SEQ ID NO: 796598 - DNA, 560 bp, Homo sapiens
cccattgtctcgcagttccaggaagtattatgcgctgccgtcccatctccagatgtgcatcagacatgtccatgttattccatattcggtccattccagagaaaggctaaaggagacaaagggtacggatcttgttaggtgcagcctctgacactatcactatcaattgtcttttgccgaggctgatcatcacctcaattatctagtgtccagcctacctgataggtttttgcaaactataactcttctgtcgatgagcatggaataatgacaacsaggagcaaatggacagaatacaaaagagataaatccagaagtaaaatacgtaagtctatctccacatatagacatacaatatgctttcagtatcaagtgattcaacataatgtatagctagtggtttttttgcaggcttattgagattatgctaatacgctaagtaaattagatagagctgttggtttaaatgtttttcccattttatcatttcaatggaaacatacccaatatttaaaaatattgcaatatgtcaaatgaacataaatatatagaatttcccc

SEQ ID NO: 796599 - DNA, 605 bp, Homo sapiens
cccagctactcggaaggctgaggcaggagaatcgcttgaagccaggatgtggaggttgcagtgagctgagatcataccattgcaccccagcctgggtgatagagcaagcctccgtctaaaaaaaaaaaaaaaaaaaaaaacattagaaagggatgagactatcttgccaagtctcttataggcctcagagttggcgtctgtggagtttttccctgagtcaccctctctgggagtgacaatcaggaaagttccccagaaacactactgtggcatggttgactctcaggctcttggcaraagaaagcattatgtgtggggatcagtcctaagtggcaatttgtcatgtctttactctccagaaaatgacccaattttgcaagaacagggaatgtgttcagagagtgggagagtatttttaaagtcacaagccaaacatgcaagaactccagttattcacaggcactagataattaaaatgccctattgtttattagctttaatgcctgatgcattttccttgtggtgaatttaagggttaagccatcccaacatgcctcactcccaatttataaaatggaaaatcttccataaatcaaaagttacaa

SEQ ID NO: 796600 - DNA, 605 bp, Homo sapiens
cccagctactcggaaggctgaggcaggagaatcgcttgaagccaggatgtggaggttgcagtgagctgagatcataccattgcaccccagcctgggtgatagagcaagcctccgtctaaaaaaaaaaaaaaaaaaaaaaacattagaaagggatgagactatcttgccaagtctcttataggcctcagagttggcgtctgtggagtttttccctgagtcaccctctctgggagtgacaatcaggaaagttccccagaaacactactgtggcatggttgactctcaggctcttggcagaaraaagcattatgtgtggggatcagtcctaagtggcaatttgtcatgtctttactctccagaaaatgacccaattttgcaagaacagggaatgtgttcagagagtgggagagtatttttaaagtcacaagccaaacatgcaagaactccagttattcacaggcactagataattaaaatgccctattgtttattagctttaatgcctgatgcattttccttgtggtgaatttaagggttaagccatcccaacatgcctcactcccaatttataaaatggaaaatcttccataaatcaaaagttacaa

SEQ ID NO: 796601 - DNA, 605 bp, Homo sapiens
cccagctactcggaaggctgaggcaggagaatcgcttgaagccaggatgtggaggttgcagtgagctgagatcataccattgcaccccagcctgggtgatagagcaagcctccgtctaaaaaaaaaaaaaaaaaaaaaaacattagaaagggatgagactatcttgccaagtctcttataggcctcagagttggcgtctgtggagtttttccctgagtcaccctctctgggagtgacaatcaggaaagttccccagaaacactactgtggcatggttgactctcaggctcttggcagaagaaagcattatgtgtggggatcagtcctaagtggcaatttgtcatgtctttactctccaraaaatgacccaattttgcaagaacagggaatgtgttcagagagtgggagagtatttttaaagtcacaagccaaacatgcaagaactccagttattcacaggcactagataattaaaatgccctattgtttattagctttaatgcctgatgcattttccttgtggtgaatttaagggttaagccatcccaacatgcctcactcccaatttataaaatggaaaatcttccataaatcaaaagttacaa

SEQ ID NO: 796602 - DNA, 590 bp, Homo sapiens
gaagacctaatttaaatcatatgatcagagaaggtctctctaaggaggtaacatttataatgaatcctgaagaataaaaaggaatctgcaattctaagagaggggtgggggactatttcttccatgtagagtgtctcagcagcagcactactgaccttttggcccagatgattctttgctgtgakggcctgccctatgcattgtagggtatttaccagcatccctgcctccacccagtagatgccagtagcactctctccttagcagtgatgaccaaaaatgtcttcaatattgccgactctcctctcagcctcagttgaaaagatctgatgtagagggaacagaatgggggaaggccctgagggccagtagagctgcaaggagagaccatgtggctgcagaccagaggagggtgatggggaacgaggctggagaggcaggtgggggcagattgcatacacagagccttgtaggagctggcaaggggttatgctttaaccctgagtgtggtgggaagccatttggaaggcttcattttatgtatgtttcaagtcgatgattcttgttacacgtggaaagcagattgtgct

SEQ ID NO: 796603 - DNA, 564 bp, Homo sapiens
ggccctaggtgctctccctttggagggtgcttatgtgaattacttacttacgcacttttcaccagggttttctaactgttccaaagtaaggcctcctcctgccctcctggtgctgcgtcaaagtcctgccgctcctcctggggtggtaggaaccaggctccattcattaattgttatggcccttccatgtgacttatgaacatgaattggtcatcattttgtgtgcagtgtctcaggtggggatgtgaagagagataagatacggttcatgccctcaccatgcttgctttttagtgggagatggacatgaaattaaaaygctgattcttgccataagtctgttcaaagcttatgtgattccagtagaaacagcagcagaatttgtaactaataatcagtcctttaacattgttggttccagaatgggctacatttttcaattacaacttgggtgcaaatggagaaaataaattcaggccatgtctaaaattattctgatttttgaaaatatggtctgaccatattttcaaaaatacataattaataaattacaattcattaatt

SEQ ID NO: 796604 - DNA, 564 bp, Homo sapiens
ggccctaggtgctctccctttggagggtgcttatgtgaattacttacttacgcacttttcaccagggttttctaactgttccaaagtaaggcctcctcctgccctcctggtgctgcgtcaaagtcctgccgctcctcctggggtggtaggaaccaggctccattcattaattgttatggcccttccatgtgacttatgaacatgaattggtcatcattttgtgtgcagtgtctcaggtggggatgtgaagagagataagatacggttcatgccctcaccatgcttgctttttagtgggagatggacatgaaattaaaatgctgattcttgccataagtctgttcaaagcttatgtgattccagtagaaacagcagcagaattygtaactaataatcagtcctttaacattgttggttccagaatgggctacatttttcaattacaacttgggtgcaaatggagaaaataaattcaggccatgtctaaaattattctgatttttgaaaatatggtctgaccatattttcaaaaatacataattaataaattacaattcattaatt

SEQ ID NO: 796605 - DNA, 571 bp, Homo sapiens
tgaaagttgaaaatatgtcttcaaatcaggatggcaatgattcaactgaatccatgtaaaaggagaaaaggacctttgaaagatgtgaatgtagagacaattgcagaccttttggtttcatctgtattctgaagtataaaatacaaccaaaattctaccttcatcctacccagaaattattgattttggagttttaaaaaaattgtaccttttttgttgacagaaaaggatcagatatrtataaaatagttgaacttgacagcatataacttaaagcaaaaatgtttttgccagaacatgtcttggtactttgtgaaagctggctgcccttgttcttgagattgactttaaaatgaaccactctgaaaagtacttctgttgctgtgatctatccctgaaaacagatgtcttgaaacacttttcatattcttaaaataatcttcacttctgttaagaagaacatgttggtgggtaattatgcgaatgtttccctgtccctgatttccagattagaaaaaagggcgtatgggttttgaaaaagagattttcagaagattgtcagcttcagtat

SEQ ID NO: 796606 - DNA, 561 bp, Homo sapiens
gagaaaacaaattctctatttccccctttaaattaagtatagggagcatacaatttccacagtaagataaaatgtcaattatacacaagttaaatatcccttatccaaaatacttgggaccaaggaaatgtttcagattttgaattatttgcattatacttactggttgagcatcccaaacctgaaaatctgaaaactgaaatgctccaatgagcatttcctttgagcatmatctcagcactccaaaagtttcagattttggagtattttggattttagattttcagatgttcaacctgtagtatgattaacaaagggaaagtgagcaaagaaatgaaaaggggaagggaaaaatgttaagattccagaagaggagagagtggaaagaggaaagaagatgggataggacatacttcacgggaaaaggtttaacttatttgtgcaagccatgaaatgactgtgatattgagcaaacacccttctactctttgggcctcagtatctagtaccttcacctgtcgaatcaagaaggctgattggggccaggcgtggtggctcaca

SEQ ID NO: 796607 - DNA, 612 bp, Homo sapiens
tggtctcaaactcctggcttcaagggatcccaagtactgggatgacaggcatgagccactgcgctccacctttatgttataattaatgcaccagcgttgatacattgtcgtgagctagagtcccatagcttattcygactgccttaatctttccctaatgtccttcttctgtccccggagtccatctagggtatcacgtgacatttaattgtcatgtccctttaggcttctcttgtcataacaatttctcagacttcccttgtttttgatgaccttgacggttttgaggagttctggtcaggtattttgtaggatatccctctattggaatttgttttttttttgtatgaccacattagggttataggtttgggggaagaagatctcagaggtaaaatgtcattttatcacagcgtatcaagtgtacttactgttaatgtgacttccaactgttgctgttgacattgatcacctagcctgagtagtatttgtgaagtttctccaccatcaagttgctattttttcctttttccacactgtactctttggcaagacgctgctgtgtgcagcctgcgcctgaggtgtgaggagttatctcccctcctttccact

SEQ ID NO: 796608 - DNA, 612 bp, Homo sapiens
tggtctcaaactcctggcttcaagggatcccaagtactgggatgacaggcatgagccactgcgctccacctttatgttataattaatgcaccagcgttgatacattgtcgtgagctagagtcccatagcttattccgactgccttaatctttccctaatgtccttcttctgtccccggaktccatctagggtatcacgtgacatttaattgtcatgtccctttaggcttctcttgtcataacaatttctcagacttcccttgtttttgatgaccttgacggttttgaggagttctggtcaggtattttgtaggatatccctctattggaatttgttttttttttgtatgaccacattagggttataggtttgggggaagaagatctcagaggtaaaatgtcattttatcacagcgtatcaagtgtacttactgttaatgtgacttccaactgttgctgttgacattgatcacctagcctgagtagtatttgtgaagtttctccaccatcaagttgctattttttcctttttccacactgtactctttggcaagacgctgctgtgtgcagcctgcgcctgaggtgtgaggagttatctcccctcctttccact

SEQ ID NO: 796609 - DNA, 632 bp, Homo sapiens
gtccatggcctgttaggaaccgggccgcacagcaggaggtgagcgggcagccagcagcatactgtctgagctccacctcctgtcagatcagtggcatcattagattgtcacaggagcacgaatcctattgtgaactgcacatgtcaggggtgttggttgcactctccttatgagagaatctaatgcctgatgatctgaggtggaacagttcatcctgaaaccattctcccaccctctctatggactacgaaatctgtcactagtaccaaaaaggttggggaccactaattgttgcaacagtgaatcataatttatctccagccccagcctgtttccccttaccaataattttctaaatgktttaataatttaaaaattatgaaacatgatgtacagagaagttaataaaacaaagttacattgtatgtgtacaaatattatacataaaacttctaaccaaggttaagacagacaaaattgcctgtactcaagaagtctattcagtcacaccctgttccctatcctgacttttatgacaatcactcttttgcctttccttatgattgtgtcatcttcctatacatttctgatctatacagtttagttttcccagcttctcagttttgcatatc

SEQ ID NO: 796610 - DNA, 576 bp, Homo sapiens
gatgaggctacgaatatgtgaggttctatgtaaatttatgaccaattacaggaaataaatcacttcacacttgtttcactctgaacttttaaagctacatcaaagtaccatgtagatttcctttgatttaaccttcagcaaaatraagcatttaaaaattcaaacctttagcaaaacaccctcatgaaaatgaagtacttcttttctatttggattggattctgttcagaggaaattcttgttctctaaagctatatcatgtgttttttcagtccatcaatcaattaaccaaatatgcacctagtgtttaggtgacaagtgttgtgatgctggaaaggcaaagacaaatgacaaggctcctgccctcagttaaaaatctgaagggcaagacaaaaaaactaaacagctgattccaaggtggcacactgttaagtaaacccacaggagaagcaatacactggctagaagggagaattcttagggaaggaggaagatgatgatgttcgagttgggtctgtaaggatgagcagaggtggagggaggagaaatcaggcacaggtggcatggggaaaagcc

SEQ ID NO: 796611 - DNA, 576 bp, Homo sapiens
gatgaggctacgaatatgtgaggttctatgtaaatttatgaccaattacaggaaataaatcacttcacacttgtttcactctgaacttttaaagctacatcaaagtaccatgtagatttcctttgatttaaccttcagcaaaatgaagcatttaaaaattcaaacctttagcaaaacaccctcatgaaaatgaagtacttcttttctatttggattggattctgttcagaggaaattcttgttctctaaagctatatcatgtgttttttcagtccatcaatcaattaaccaaatatgcacctagtgtttaggtgacaagtgttgtgatgctggaaaggcaaagacaaatgacaaggctcctgccctcagttaaaaatctgaagggcaagacaaaaaaactaaacagctgattccmaggtggcacactgttaagtaaacccacaggagaagcaatacactggctagaagggagaattcttagggaaggaggaagatgatgatgttcgagttgggtctgtaaggatgagcagaggtggagggaggagaaatcaggcacaggtggcatggggaaaagcc

SEQ ID NO: 796612 - DNA, 652 bp, Homo sapiens
agatgcagttatgctaagccaaaactgtcttatttaacaattactatattccaaatatgctaggcttctaaaatatatacaaaatacaccttatgctttttagccacaagcccatatttaggaaaaatatatattattcttttgaaaatttgggtagaaatattagtttgaccccactgccagagaaaaggctgaactaacagaataactagcagagatactaagtcagagtcctaatcaaataatctttgaggmcttccctgttttctcatttacatggaacaataaagtctctttattatttaaaccagtttaaaaataaatttctggctgggcgtggtggcttatgactgtattcctagcactttcagaggccaaggtggaagactgcttgagcccacgagttcaaaaccagcctgggcaacatggcaagaccctgtctctacaaaaacattaaaaaaaattagctgggcatggtgatgggcacctgtggtcccaggtgcagggagggtaaggcgggcggattgcttgagtctgtgaggttgaagctgcagtgagttgtgttcatgtcgctacactccagcctgggagacagcaaaaacctatcttaaaaaaaaaaaaaaaggaaaaaagaaaaagaaaaaaatacaga

SEQ ID NO: 796613 - DNA, 412 bp, Homo sapiens
gcataatgatgaaatgataaaataatatcctgtgtacttccttttagaggatgattcacataaaattggccatcttttcctgctgttgtatattaatatcattggtccactgaactgcaatgatcagaattatgactttccttgaataaagcatcctgtttcctacccctaaccctagaagagtactctttcagggagaacctatttttgcagctcatcttattttggtagtttttcaccaatcatcttatttgcaatttcccaactatttaattgycatcttacattaatattattttaataatcagactgttccattgttcaaattttaaaaataaatgaaagtcattaatgaaaagtattgtctcattccattataatgagcttcctcaagtatgttttcagtgatgaa

SEQ ID NO: 796614 - DNA, 601 bp, Homo sapiens
tacccagtttattatttctagtccattcaactcataacaacatccagcagcactttacccacaggtgggtgtttattaggtttttatttcttttgtccaggtttattgagtttgaagagtaggcagggatttctgtttttatgagtcacttgtcagctgtaatgaagtcttcttcaytaaaaaaaagatgtgaggacaatcttgcgcagtgtcataattattctaaaaatacatcatgcttaattgtatccacaaaggttttaaaaatttaaacatcagttttgagttttagggctttcttattggtgaattatcaataattgtagtgctttcttgaaaagttccctggggtggatttccttagttgcatataattctagcctcttcagcctactaaggataaaagggacatgaagtacacatatctgggaattaattacatttttctgctcaagagccaagtcattttcagaaattgatgtcaaataggtcttccatagctgaaagtgctaggtgtctcttcacatagttaagatttccccctattcagaaatattagtttctgatgacaatggaaaattccaaatgcagcagcttcact

SEQ ID NO: 796615 - DNA, 644 bp, Homo sapiens
attaatgtgttctcatgctgctaataaagacatacttgagactgggtaatttataaagaaaaagatttaatagattcacagttccacatggctggggaggcctcacaatcatggcacaaggtgaagaagtaaaggtatgtcttacttggtggcaggcacatcttacatgggggcaggcaagagagcctgtgcagggaaactgccctttataaaaccgtcagatctygtgaggcttattcaccatcatgagaacagcacaggaaagactcgcccccatgattcaattacctcccactgaatccctcccaggacacatggggattattatgggagctacaattcaagatgacatttgggtggaaacacagctaaaccatatcagggaaggagaggtccttgaactatttgcattatgggggcactgtaaaattagactacacacttcagttggcccaggtctggattctgatttctctgaggagactcttttgccccgcatggatctggacagaagtcaagcaacattctgcttttttctgagctggaggccagggttcttccagtccagataaaatgcagaacaatcctttgtaacacccagctttgtagagacacctcagctccaacttactgtcttatattag

SEQ ID NO: 796616 - DNA, 603 bp, Homo sapiens
gtacaagcaggcacagattcagaagatcataaataagctggtcagctcagcaatacgtagaagagggctggaaggacatatagagagatggtaatgataaattactcctctagaaacgggtgttacaacctacattaaagacaccaattaaaggtaggtttcatgattaaataagcatctccctagcactctacatatcatattacagttttggaatagtacttcctattgataaggtaattttgttaatacctgattcttaaaatattttaatttttatttctttcaataagcattttgcatttatattaaagcattttaataattttccaagatctttgtttttttaatgtaaaaacttacctaaaatatatctcagaattcaatggttacatatttacaaaaaaattgattgacaacgtagaaacccattcattgtgtgrgtgaggtatacatacacagttgtacaacgcttcaataaatccaacctatgaaaaagtaaactgaaaagacagaaaaaagtcacaattttattatttttaccaaagcatttttcacataaaaaaaatcaatttgccatataattaagtgttattacattcc

SEQ ID NO: 796617 - DNA, 607 bp, Homo sapiens
ttctgaacttccctcaaggggaagacccaaaaccaggaggtggaaatgatcaagagcagttctactgaatgttggaacatttaacaagcagttcttctatgcaacttcaggagatctttttgctctaccaataatttgtgaaatactcatggttcacactatctggtcaatcagatgtataaatgccagtgacctggcagctgaaggggccacaagtgggcagaaggcccatcacatataagcaagtaccaaagaacagatcgaagaaacaaaatgtgtttgagaattcagtgtaacaagaggtttgtactttttatcttcattccatgcactccacaaaagaaaatgatctttaagcggacaaggagtaaagatccacagaaaagaatggaaaagctccactgaagacagatttctttaytccaaaaatcatctagcaccctggcttggcaagcacagcttccacacaaggctcttctgggtttctccatcttgaccctgcctcaatcagctgcctaaggttattcattagtcctaagtctcttgatcatgtgccctttatgagattttaatatagtatagtaactgcatgatttttttaacatct

SEQ ID NO: 796618 - DNA, 572 bp, Homo sapiens
gaagatagaccccatcttagggattattggacaagggcagaaagtcggttgtgggtcaagagaaaaaacagatataaaggcatagcctcctaaaccctgacatttttgcagacccagttagatggcagaatggccttgggctcccgtagacaccatcagacccggcaggytgggccggctgaggggcgaggtggggagagtgaggcctgccctgctggagcgctgccgctccccgtggaagagcccgatggtgcagtttctcacggtcttgtattgtggtcagaggagctcacacaacacacccagtgtactggagtttatgacagacttcattgaatgaggccttgacttccagggaaaaaaaacgcctcacacaaaatccataaaatcggtcatgggaattctcagaataggcctaagtattctttcagaagtgatggaacatagctgttcacgagttccatgtggcatttggagctatgggctttcggtttttgctttgctttgttttccaagtcacgactgggtgtaccattcttgtagcaagcagaaacatctcagcatggaatgag

SEQ ID NO: 796619 - DNA, 572 bp, Homo sapiens
gaagatagaccccatcttagggattattggacaagggcagaaagtcggttgtgggtcaagagaaaaaacagatataaaggcatagcctcctaaaccctgacatttttgcagacccagttagatggcagaatggccttgggctcccgtagacaccatcagacccggcaggctgggccggytgaggggcgaggtggggagagtgaggcctgccctgctggagcgctgccgctccccgtggaagagcccgatggtgcagtttctcacggtcttgtattgtggtcagaggagctcacacaacacacccagtgtactggagtttatgacagacttcattgaatgaggccttgacttccagggaaaaaaaacgcctcacacaaaatccataaaatcggtcatgggaattctcagaataggcctaagtattctttcagaagtgatggaacatagctgttcacgagttccatgtggcatttggagctatgggctttcggtttttgctttgctttgttttccaagtcacgactgggtgtaccattcttgtagcaagcagaaacatctcagcatggaatgag

SEQ ID NO: 796620 - DNA, 632 bp, Homo sapiens
atcttggctgcagcagcagtagaaggtcctcttgggcccagcaccactggccttcctcaggagtcagctctgcaatttaactaacaagccacgattcctgcagactgtgagggccatgtgcaagataagcatgatgacagggctagatgcacagtacctggcagagaaagctttcagtacgtctcaactataactaccatacagttcctttattatattggggtttgtttgtttgtgacggggtctgattctttcacccaggctggartgcagtggcacaatcatggctcattgtagccttgacctcccagacccaagcagtcctccaacctcagcttctcaagtagttgggactacagatgcgtgccaccatacccggctaatttaaaaagtttttttgtaaagacagggtctccctttgttacccaggctggtctggaacttctgggctcaaacagtcctcctacctcggcctctcaaggtgctgggattacaggtgtgagccactgcacttggctatagttggcttttttaacttgaggaccttgggccctggtgttcatggatgggcttcaaagggtcagaaaactccatgaaattgtgtggaaatattgtaggcatatatagttttc

SEQ ID NO: 796621 - DNA, 612 bp, Homo sapiens
ctgggctcaagtaatgctctcacctcagcctcccaggtagctgggactatagacatgtgctcctaggcccagtttgaacattttttgtaaaagttttatatagtcatacattttcatttcccttggataaatgcctaggattggaattgctggattgtgtgatagtatgtgtttaatattataagaaactgccaaatggtttacattctcaccaccaacctatgagagttccagtagctgtacatgttcaccarcacctcacattatcagtctgtttttatcttagtcgtcctcatggatgtatagcagtctctcaaagtggttttggtatgaatttccctgatgatttgacactgatcatcttttcatgtgattctatcttcttttgtgaagtgtctattaaaatattttgcccattaaaaaatatttatcttcttcttaaggtgtgtaagactaccctttatattccagatactgttcctttgtcaaagatatgtattcagagaacatatccactcagttgtggcttgccttttcattttcttaattgtatactcaaaagtgcatatgttttaaatttttactttaaatttaaaaattttcctgatttgt

SEQ ID NO: 796622 - DNA, 628 bp, Homo sapiens
ttttgcccatttttatctcttggtttttgacaagctagaaaccattctgagtatctttgtggcgatagggggcagaccaacccagataaactgaaaagcttcattttagtcagtatttcaatcgtcttcttgacaaaccttttatcatagatgctacagctaagttttcattcacttattttcctttaatattccctgatggaaggacagtgaggagtaaaataaccacaagatgaacaacagccaagagcagaggcaaaaattctggataatctacccccagtgaaaaggaaacaacccaaaaactatatctctggcatattattgctttacaattcaacactaacttaaggcaagtataaataaacattatagagctgtgagcttttatatatatcagtttttcctgacttccaagatgatttacgttgtctttgccatactacatgtgaagtatatgagcacagcrttttaggtttgcttgtttgttttctgaatttttctgtgtagaaccacctcctcatagaattgttcctgatatgtagcatgcacctagaacatttttatggtattgatggttgccagaaaagttagtaagcctggtatccaatctagctctaaacaacaa

SEQ ID NO: 796623 - DNA, 605 bp, Homo sapiens
gcacccccttagaggtcaaactcatacagtgtggccaaggacctcaggtgaaaaacaaaacaaacaaaactaaaaaaacagacatccaccaaaaatcaccttgttagcatgagctatccatgctaacagatgttagagtggccaaaggtccaaagtatacaaaacactcattggacaggatgatccaagggtttataasgtatctctaaggagccagtcaagaccagtcctttctttggaatgtacataaagtttgaacacccaaagcctgctgagttaaccctttactaaatatcatgtttcaagactttgttaaagcttgtcaggaaaaaagttgtccaagacttgaaaagtacaaaaaagattactacatatcctctcagtagagagctagatattgtctagcagacattttgggaattatctgattctacagaggtatacagcttatactgccttgtagaaaattaatagaaatgtaaattattatccatagtaatataaacaattattttccactgcaataaaatgattttttccagtagatatgtaattgatctatgccttgtagaaaagatacactaacattatatgtttgaggttga

SEQ ID NO: 796624 - DNA, 574 bp, Homo sapiens
caacagatgcttcctgaatagagtgataaaatcactttcttatgaacatgtggtagcattattacccaagtaacttccctgacattatatgactctctttagaatatgcctggttttgaattttttgaagttgataataacttcagttccagtcataataaaaataatttattgtatcagtgagagaagtgtagcttatattaagataacaacttcaaaatctcagagattaaacaataaagyatatttcttatttcactacatgtcaggtacaggtggatgaggacatgttctctgctaattatagtcacttagcaacataggctattgaagatttcattttgacatagtctaccatgatgaaatatgtttaattatgaactggttcttaaagtatctgttccaaattatacatattatttttgttctcagtacatttgccaatacaagtcatgtgatcatgtgaccacaaaagggttgggaagtacaagcataccatgtactcaaaagaggtggaaaagtggaatagatgaacaccatttttttcctcagatttgttctttggttataaact

SEQ ID NO: 796625 - DNA, 531 bp, Homo sapiens
gaggtatcttcaatagctgtcattcaaaacaagcactaaaataaattaattagaaccatttgaatcactgggtcacatgataatcagcattttccaaaacagtattcagtaataaaaacatgtagtattttcaataattttcagtaacatgacttctgctaaaaatagattratagttaatatgttttattctcattcatatgtggtagctaaaaatattgatctcatggagggaagagagtagaatggtggttaccagaggctagaaagggtagcggggagaagggggtgaagtgagattggttaatggatacagaaatacagttagctagaaggaataaagcctagtgttcaatagcacagtagggtgatcatagtgaataataacttattgtctatttcaaaataactggaagaaaaaatttggaatagtcccaaaacaaagaaatgatcaatgtttgaggtgaacagtatcctaattactctaacttgatcacgctgtatgtatgaatcaaaatattacatgtaccc

SEQ ID NO: 796626 - DNA, 558 bp, Homo sapiens
tggggaggacaatgaagagggaggggggaagcaggagacaaaaaatgttatagctctttttgttcacattgtggcttcatttccttctgacattgaagttgaacaggatgggggtggggtgaacagacactgcccaaaaaatgagacgtgctaagtagcgcattctgtcctttgttaatccaggtgtgcatctactatggtagcaaaactgaggtcagagttgcttgtggcttgcccaccaacaaagaacaggaatataggactaaagtctaatcttaaaaatggcaccatgtgaattcattatctctctagttcatttctaaagcttggctttgtgccttatttgcatactgtcagtgcctttacattaaaattggtaataaaagtgctttgcrtcagctctttttagaattctgatactatactctggagagagtattgaaaccactttttattcttccacattaaaaattttgctgaatcttaaaggagggtagggtagggatagaatatgcaaaatgatacagtaaattaacaaagtacattaaaatgagtttt

SEQ ID NO: 796627 - DNA, 505 bp, Homo sapiens
ttaaaaaattaagaaggactggtaggttctgctttgctttttaggatagctccacgctgccatgtaaaaatgttggctattttgttggagagtcgatttggagatgcagttgtcacagcatcccagcagctgagctgagatactcagctttcttcaccaaagtgccaggcgtgtagtgagccatcttggatatagcagacccagttggcatcacatggagttgggcctagttgattcacagaatggtggagacaataaaattatctcgttttaarctattaagttttgcagtgatttgttattcagcaatagataactgggcctctaatataagccattaactgtatgagaccataagattatactaaatacaaatgaataaatttgctattttttattttcttactttgaattttaactaaccttaaatttttttctctgtcataaatttattttcggtagccaccaatattagagctttgtacagttgttgctatattgatta

SEQ ID NO: 796628 - DNA, 505 bp, Homo sapiens
ttaaaaaattaagaaggactggtaggttctgctttgctttttaggatagctccacgctgccatgtaaaaatgttggctattttgttggagagtcgatttggagatgcagttgtcacagcatcccagcagctgagctgagatactcagctttcttcaccaaagtgccaggcgtgtagtgagccatcttggatatagcagacccagttggcatcacatggagttgggcctagttgattcacagaatggtggagacaataaaattatctcgttttaagytattaagttttgcagtgatttgttattcagcaatagataactgggcctctaatataagccattaactgtatgagaccataagattatactaaatacaaatgaataaatttgctattttttattttcttactttgaattttaactaaccttaaatttttttctctgtcataaatttattttcggtagccaccaatattagagctttgtacagttgttgctatattgatta

SEQ ID NO: 796629 - DNA, 608 bp, Homo sapiens
tagtctttggcaagacagaaacaagaagatatgtgagtgcttctgactgtacaaaaatgaagtatcacatccaaattctttctagaggataacaccaagaccttgatttttaagcaattaaacttgaaaggaaatgcttttttagctcagatgctagaacttttccttaaaaatgaagattctgaaaagtggacaaatgatcctgtttccccactgtatgttgaggagaaacatacaataaatagaaaatttacagaaatctaaataaccaataaatacacaaaggcctacctaatctcactaaaattcragaatattcaaaatttattttaattcaccaggggcaaaaatgaaaaaaatattttaattaagcagagagtgtgagaaaaataattatcttgtgccttgtatgtgtactttttgacctagcaattccacttaacattatctgtcttattaaaaaaaaaaccatatgtgcattcatgagaataatcattgttgcactatctcacataattaacacatggaagaaatctagatatctattaataggaggatgattaaataaatcagaaaaacccatactataaagcattttagaagaatgc

SEQ ID NO: 796630 - DNA, 615 bp, Homo sapiens
aacccgggaggcggagcttgcagtgagtcgagatcgcgccactgcactccagcctgggtgacagagcaagactccgtctcaaaaaaaaaaaaaaaaaaaaaaaaaaaaaaaaaaaaaaaattatttaagattctgaaaccctggatccaatctggacattattctacttggtcagcaaccacattgggactgtcttagtgaccttaaagggagaatcagatacccagtccaacctgtaagaagtttgatttgtattctcagtaggagaactcatgtcatagggttcagagttataagaacttagagactggtttaatatcaccagagatctcaaagtgactattagtgtctattagtcttcattaaattgactcccaacatccaactacagtatttttaaagatayagaagaaagagaaagactcatatcaatactgaagactaaatttgttagataactcaatgccactgtctggtggtgaatctttgctgactataatataaagcaggttgaagggtattaaaaacaagttactcagaattcacctcaagatatgatgaattatcgggcaattggagtactctgtccatcagctttgctcccaatcatcctat

SEQ ID NO: 796631 - DNA, 618 bp, Homo sapiens
ttcagtgaggctgtttgccaggtgggaaaaagcagttatggcggggcctgaggggatagttgtgggtttcagggagtggagagatgggcaggagttgcctacaaatagaaagacaaaagaagacactgtaaaagttggctttgattggtggcttagagctcacagttctcctttgggatttaaatgctccagaaaagaatgttctgggacttggaagaagaggggagaaaggcaagtcggatatattgctggattacagaaaaagaaaaggagagaagggtagaagtttacaaaatgtaattataataaaacctcttaaaccctggctttgaaaccaggaatgggcttagtargtattaacatagaaagcagtaatttccagggtttccccaaaacacttaattttactttttgaagtttatattcaaaattttaatttagcaaacactcaaatgtgttaaatactaaatttttaatgcattggagtaaagtagatttccatcccaccagagttagatttcaaggttggcaaatattgcttattagcaaaattggcttgaatatccttaaatcccccattaattaacacacatccctgaataataattcttatccaca

SEQ ID NO: 796632 - DNA, 643 bp, Homo sapiens
atcaaggagagcaagagtggagacagtggagtcagctgagggcagtactgatgttgtacataagagcctgactagtggagtcgcagtgggagtggaggtgagaattgtgaagagaagaacattgagaaattgacttggcaatggatgcccactctgccactgtcccccagctgtggggatgacaaactcagatcaagggtatctcttgccttctaggagcttacgggttacctgcatttggaattgaaaatacagaatggaggtgaggtgttgatcatattgatgacagggtgtctttcagcaggccccacagggtggctatcctgtaggtttaaaaaccaattttaccactatactgagaggatccatatctcagggaggatttacagaaacccagtacacagactggcagagagtttactgcctrcatgttcccctatactcagctttctcaagttagatctttggggaaaccatattgtattcataattttgcctagtgagcatagaatcaggatcagaataagttacaggaattaggcaataataaattatctaattatcacctaaaattaaaattctcacctaagagagcatgtggcacttgctcccctcagagagatactttgccagtggaactaag

SEQ ID NO: 796633 - DNA, 577 bp, Homo sapiens
ttaacattttcatgacttgtttcttcaagtatcttataaagaagaaatagaaatctataattaatttttctttcaatagtgtaaaatttaaattttaagttccattttatgattaaaaatgtaggtcactgtctacataaagtttgaatttttttccataatatatttattttatattaattgtaatttgaaagttaacatgaaactagaaatgaagaaaatatgcagagataaattttcaaaatagctcaaaaaccttcagtgctctctttaacatgttttaaacatctttttttcaaggtagaaggtgaacctttgtcttatttattaaaaatacaaattatctttttagatttgctatayatacacagagatagtattttatcaaaccactttatatcatcagtacataataacaaaacttgtatctatgattcattaatctaataacaaataattgtaatgaattccaaatttgtttaaaagtattttttacaatttattttaataaccgtatctaaatgtgatatcaatttcaatacattttttcgaaagtttcattatattcaaacaaatc

SEQ ID NO: 796634 - DNA, 577 bp, Homo sapiens
ttaacattttcatgacttgtttcttcaagtatcttataaagaagaaatagaaatctataattaatttttctttcaatagtgtaaaatttaaattttaagttccattttatgattaaaaatgtaggtcactgtctacataaagtttgaatttttttccataatatatttattttatattaattgtaatttgaaagttaacatgaaactagaaatgaagaaaatatgcagagataaattttcaaaatagctcaaaaaccttcagtgctctctttaacatgttttaaacatctttttttcaaggtagaaggtgaacctttgtcttatttattaaaaatacaaattatctttttagatttgctatacatacacagagatagtattttatcaaaccactttatatcatcagtacataataasaaaacttgtatctatgattcattaatctaataacaaataattgtaatgaattccaaatttgtttaaaagtattttttacaatttattttaataaccgtatctaaatgtgatatcaatttcaatacattttttcgaaagtttcattatattcaaacaaatc

SEQ ID NO: 796635 - DNA, 619 bp, Homo sapiens
tgcggtgatgctggtgtaaataaacctgagcattcagttgtataaaagtatagcacacgcaattatgtactgtacataatgcttgataataataataaactgttactggtttatgtatttactatatatcttctcattactttaaattgtactscttatacttataaaaaaatgactgtgaaacagcctcaggcaggtctttcaggagggattccagaagaagacattgttatcataagagatgacaggtccatgtgtgttattgcccctgaagagcttctggtgggacaagatgtggaggtggaagacagtgatattgataatcttgaccttgtgtaggcctaagctgatgtgcttgtctttgccttagttattaacacaaaaaagcttaaaaagttaaagaaaaatttttaaaaattaaaaacaagaaaaagtttaccgaataaaaatttttgtacagttgcacaatgtgtttgtgtttcaagctacagtgttattacaagagtcaaaactcaaaggttcaaaagtttataaaaagtaagctaaggttaatatattactgatgagagaaaaatattttcagtatatgtagtgttgcctaaatatacagtgtttataa

SEQ ID NO: 796636 - DNA, 619 bp, Homo sapiens
tgcggtgatgctggtgtaaataaacctgagcattcagttgtataaaagtatagcacacgcaattatgtactgtacataatgcttgataataataataaactgttactggtttatgtatttactatatatcttctcattactttaaattgtactgcttatacttataaaaaaatgactgtgaaacagcctcaggcaggtctttcaggagggattccagaagaagacattgttatcataagagatgacaggtccatgtgtgttattgcccctgaagagcttctggtgggacaagatgtggaggtggragacagtgatattgataatcttgaccttgtgtaggcctaagctgatgtgcttgtctttgccttagttattaacacaaaaaagcttaaaaagttaaagaaaaatttttaaaaattaaaaacaagaaaaagtttaccgaataaaaatttttgtacagttgcacaatgtgtttgtgtttcaagctacagtgttattacaagagtcaaaactcaaaggttcaaaagtttataaaaagtaagctaaggttaatatattactgatgagagaaaaatattttcagtatatgtagtgttgcctaaatatacagtgtttataa

SEQ ID NO: 796637 - DNA, 619 bp, Homo sapiens
tgcggtgatgctggtgtaaataaacctgagcattcagttgtataaaagtatagcacacgcaattatgtactgtacataatgcttgataataataataaactgttactggtttatgtatttactatatatcttctcattactttaaattgtactgcttatacttataaaaaaatgactgtgaaacagcctcaggcaggtctttcaggagggattccagaagaagacattgttatcataagagatgacaggtccatgtgtgttattgcccctgaagagcttctggtgggacaagatgtggaggtggaagacagtgatattgataatcttgaccttgtgtaggcctaagctgatgtgcttgtctttgccttagttattaacamaaaaaagcttaaaaagttaaagaaaaatttttaaaaattaaaaacaagaaaaagtttaccgaataaaaatttttgtacagttgcacaatgtgtttgtgtttcaagctacagtgttattacaagagtcaaaactcaaaggttcaaaagtttataaaaagtaagctaaggttaatatattactgatgagagaaaaatattttcagtatatgtagtgttgcctaaatatacagtgtttataa

SEQ ID NO: 796638 - DNA, 629 bp, Homo sapiens
acaaaaaagcttaaaaagttaaagaaaaatttttaaaaattaaaaacaagaaaaagtttaccgaataaaaatttttgtacagttgcacaatgtgtttgtgtttcaagctacagtgttattacaagagtcaaaactcaaaggttcaaaagtttataaaaagtaagctaaggttaatatattactgatgagagaaaaatattttcagtatatgtagtgttgcctaaatatacagtgtttataaagcctatagtagtgttcagtaaaatatttgtaataaatttagtgtagtcttaattgtgcagtgtttataaagtctacwagagtgtacagtaatattccaggtcttcccattcactaaccacttattcacatacccagagcaattccacttatggtatgtactatacataccactttaatgttttgtgccatgttttcattgtatcttctctatgtttagatatattagatacacaaataattagtatttgttacaattgctcaaggtattgagtacagtaacatggctgtaaagttttgtagcctaaaagaaatagactataccataagcctaggtatgcaataggtgataacatctagatttgtgtaagtacattctgtgatgtttg

SEQ ID NO: 796639 - DNA, 629 bp, Homo sapiens
acaaaaaagcttaaaaagttaaagaaaaatttttaaaaattaaaaacaagaaaaagtttaccgaataaaaatttttgtacagttgcacaatgtgtttgtgtttcaagctacagtgttattacaagagtcaaaactcaaaggttcaaaagtttataaaaagtaagctaaggttaatatattactgatgagagaaaaatattttcagtatatgtagtgttgcctaaatatacagtgtttataaagcctatagtagtgttcagtaaaatatttgtaataaatttagtgtagtcttaattgtgcagtgtttataaagtctactagagtgtacagtaatattccaggtyttcccattcactaaccacttattcacatacccagagcaattccacttatggtatgtactatacataccactttaatgttttgtgccatgttttcattgtatcttctctatgtttagatatattagatacacaaataattagtatttgttacaattgctcaaggtattgagtacagtaacatggctgtaaagttttgtagcctaaaagaaatagactataccataagcctaggtatgcaataggtgataacatctagatttgtgtaagtacattctgtgatgtttg

SEQ ID NO: 796640 - DNA, 629 bp, Homo sapiens
acaaaaaagcttaaaaagttaaagaaaaatttttaaaaattaaaaacaagaaaaagtttaccgaataaaaatttttgtacagttgcacaatgtgtttgtgtttcaagctacagtgttattacaagagtcaaaactcaaaggttcaaaagtttataaaaagtaagctaaggttaatatattactgatgagagaaaaatattttcagtatatgtagtgttgcctaaatatacagtgtttataaagcctatagtagtgttcagtaaaatatttgtaataaatttagtgtagtcttaattgtgcagtgtttataaagtctactagagtgtacagtaatattccaggtcttcccattcactaaccacttattcacatacccagagcaattccacttatggtatgtactatacataccactttaatgttttgtgccatgttttsattgtatcttctctatgtttagatatattagatacacaaataattagtatttgttacaattgctcaaggtattgagtacagtaacatggctgtaaagttttgtagcctaaaagaaatagactataccataagcctaggtatgcaataggtgataacatctagatttgtgtaagtacattctgtgatgtttg

SEQ ID NO: 796641 - DNA, 618 bp, Homo sapiens
aggatgccacgtccttggaaggcaaactggtaaaggagatatacttccagaagagattcagaatctttcctttaaaatggaaaatattatttcagagcatggatcagagagatttcaagaggaaagttgccagcgggaaaaaaatgtggaattgaggacataccaaataacatgaaaacaatgtttgtgggaggaaataggagactagcaacttcctgtgtggcacaggtgtactggaatgtggagtgggcttactatggtcttcaaggttctagtaaaagcagactgggtcctggtggatatcagaactgtaattgattatggtctgtgtcctaaataggtgtggtttcatctttgttttcaactgaaagttggtaactcttcagtgaaccaaatactggagtctccatgtgaatgcatctttatgaatttcaagattttagaactttagggacataatcaggtgttatgcttgttatrgaaaaacacaattttgaaaatggaattttatgtggatattaatttgcttggaaactaatatctactcattcattaacttttattcattctacgaatatatattgaccccctgttgtgcacttgacacttttctaggtg

SEQ ID NO: 796642 - DNA, 591 bp, Homo sapiens
tgtctccctaaatgtataaaatcaagctgtaagccaaccacctggggtatatgttctcaggacttattgaggctgtgcttcaggacttgatcattcacatttggctgagaataagcctctaaatattttacaatgtgactgttttttgttggcaaagctccaaattgaaaaaatattcttaatccattgatagttgtttaatagtgaactgaagatttatataaggcaggcttctcatgttgaaaagtgctactgtattctcatccatcagagaaagctgttgaagaggtgagaagaggcaatgtaatgtgaaatatcacttttttaaggcagtagtacttgagtgaaattctgtgaagagatgcagggatggattgttgaaaattttatgtaatagaagaaaatgtctcataataagttatgttcmgaaactaaaattctgtgagtatgaccaaaatacacttatctaatacaaaaatctcttccacagtgaataccattaggggcttatttaggagtatgcacttatatttgcaatttaatagtcattatttttggaagttttattaaatctgtagaacctatgctgtt

SEQ ID NO: 796643 - DNA, 635 bp, Homo sapiens
gtgttatgtctttcacaaaatttgggatatgttttagccatattactctgaataactttttagtgcctttctatatatactttgcttttgagacttcaataacatgtatattagatcttttgttattgtcctgcaggttcctgagattttgttcttcttctattagtgaattttagttttgttgttcagattgagtaaattctatcgatctgctctcaagttcactgatggcattctatgtaatctccattctataatgaacctatctggtaaggtctttcttcagttactatatttttctgtctgataacttcactgggttctttttttatagcttctstttctttgctgagatattctaatctttcatcagctccagaaaatttttaattgctttttgaagcatttttatgatgacttctttaaaattctttttagattatttggcgttggattcatcttattgttagcatctgctgattatcttttctcattcatgttgtcattttcctgattcttggcatgactagtgattttttaaaaaagtatatcttggatattttagatattatatttagagacacaggatcctatttaatctttttttttttttattttaatagcaggtagtgccc

SEQ ID NO: 796644 - DNA, 520 bp, Homo sapiens
tcccccatattatcccatctcattagcgtcagaatcaaaatctcctcacagctcgtaaggcccctgctttcactttatttcttattatactttctctgttcctccaggcacactggcctcctggctgctcctggaacacactagggtgctccccatcccagggcctttgtcctctgtaggacacactcttccttctttctgcagacatccatatggctcacttgctctgctgctctaagtcttcacacagatatcactttctcaatraggtctatcttgttaccccacttaaagctgcaactcatcccccagcaccataactcctatcactctcccccatggcacctatcttctgatgtacaagattattctcttacttacttggcttattgttcattatctgttattcctgctagaatataatctccacatttcacggaatatttttagaggttttcccaattatttttattatggtaaaatgcacatagcataaaatgtgtcatcttaactgttttta

SEQ ID NO: 796645 - DNA, 520 bp, Homo sapiens
tcccccatattatcccatctcattagcgtcagaatcaaaatctcctcacagctcgtaaggcccctgctttcactttatttcttattatactttctctgttcctccaggcacactggcctcctggctgctcctggaacacactagggtgctccccatcccagggcctttgtcctctgtaggacacactcttccttctttctgcagacatccatatggctcacttgctctgctgctctaagtcttcacacagatatcactttctcaatgaggtctatcttgttaccccacttaaarctgcaactcatcccccagcaccataactcctatcactctcccccatggcacctatcttctgatgtacaagattattctcttacttacttggcttattgttcattatctgttattcctgctagaatataatctccacatttcacggaatatttttagaggttttcccaattatttttattatggtaaaatgcacatagcataaaatgtgtcatcttaactgttttta

SEQ ID NO: 796646 - DNA, 634 bp, Homo sapiens
tgttgatttcctcatgtgtaaaatcaggaggttgggcaatggtgatatctgatggccctttcagctctaatattctgtatgtctataacactagattgaaaattttaaattctgagccagaactccaagcccaggtgttttctcatatgagggtttttctctttgtggaagatataagaagttatatcttcttcaactgtcaatttaccatcttcagatccctttctccatcaatgaacctagaaagaaaaggaatgtgtcaaagtcattgcatacaattttttttttcattatttaacagaaatttgaatgccagttgtgtgctaagcacaatgctagatccagggractcagcaattgaaacgttagccatggtcttaaacctcatggagctcacagtcttgagtcaaatcaagcatggtatgcaagggaagcagaagatgccatacagaagacaggaagggcacctctcccagtctcaaaatagcaaggaaagcatttgggaggcagaatgttgcagacaagggggaccagcatctgcaaagactgaaaggcaatagagaaaatgacacactctataaacgaaagacatcctggaagaacagggctaagaatgtgaagggaatatggtcac

SEQ ID NO: 796647 - DNA, 537 bp, Homo sapiens
atggtgcattcaagcagggccggtgcgctcaccactgcacccccaggctccctgggtggccgggtccaatgcctctgacccctctaggtgtgtccactgaacccatctggagagggtctcatcataaaattgcagaatctgatgagtgctgaggggaaggaggttgggggtcccacccatacccctggctcaacactccccaaaacccagaggacggttaatgccaacgcatggttgacaacaactgggtagactttcaggacacaaagtcatcaccgtatccctgagccctagtccgagttccctcccttccccaggagctggctaccgaggtccaggttcaaatttgggttytgcctcttggcaatggtggacaactaggtacactttgagcctcagttctggctgtctgtacccgggatggtgacactgatttccccaggctcccagggttaaaggctgcatagtgctcagcgcagagcatgacaaacaggggtctcagccattattccctgctgtgccccttggggcagtgcc

SEQ ID NO: 796648 - DNA, 664 bp, Homo sapiens
aaattgtagtataaattccctaaaaggagaaggttctacagtttcggcttcatgtagagacttacactatctagcatgtatcttatagaaaacacatgtttaaatatatgttgagaaaattatgttaatatttgaaatgtaatacaagtatatatagtaagcatcacaaatttagaaagcagttattaatcatgcagtgtcaatatataatgaaagttgttttgtttaattataaacttctttatgtatttatagaattatctcactctcacaaggaactttaatagrctacatacattaattcatctctttggaaatactgttcacacagaattatcgccgaagtatgaaattaggtttggtgattcaagagttctatagttttaatttttgtcaataaatgtaaacttcttataatttttcatgaattttaaactatagtatagtcctgatatattttaagaaaattaaatttacatttcacaattactaatttttaaaattcattcagcataatttaccataatatataaaatatgagaaagttcaagaattatttcctttttttgcctagtattaatagcagatctgcttacattaacccaagggaatattgacactactgttttactcagagttacaaagaaaattcctaaagacttgc

SEQ ID NO: 796649 - DNA, 531 bp, Homo sapiens
tatttgtttactcaggtacaattctaatctctaagagaaaaatgttttcagttttcagccttttagtgttaagtgaagctctacacatacaaaattactacttcaataaaaactcattaaatttcatgagagggctggagaataaggtggaggaaatctggaaatgggacarcagtaccaacaaattttcaaaaaatgtatgaaagataaactaaatttagagcatcagaatccttggataagagttcttctgccaataagctagatgacagaaaaagaaagaggagaaaaaaaaagattaaaatgatgaaaggcatttatcaaagaaagagtgctaaaatagaacaaaacagaaatcaaacacaaaaattagctgttcgggtcccagccatcatcttcatcatccctgtggcagggagaagcaagggatggggttgcagagggctcacatccactttcactaaacttcatttctacagggttacccactacccttcactgaatttcactggccagattttggtacatggc

SEQ ID NO: 796650 - DNA, 531 bp, Homo sapiens
tatttgtttactcaggtacaattctaatctctaagagaaaaatgttttcagttttcagccttttagtgttaagtgaagctctacacatacaaaattactacttcaataaaaactcattaaatttcatgagagggctggagaataaggtggaggaaatctggaaatgggacaacagtaccaacaaattttcaaaaaatgtatgaaagataaactaaatttagagcatcagaatccttggataagagttcttctgccaataagctagatgacagaaaaagaaagaggagaaaaaaaaagattaaaatgatgaaaggcatttatcaaagaaagagtgctaaaatagaacaaaacagaaatcaaacacaaaaaytagctgttcgggtcccagccatcatcttcatcatccctgtggcagggagaagcaagggatggggttgcagagggctcacatccactttcactaaacttcatttctacagggttacccactacccttcactgaatttcactggccagattttggtacatggc

SEQ ID NO: 796651 - DNA, 601 bp, Homo sapiens
gaagggaaataagaagtgttggatccactgtgagctgatcctcaaggttcagaaagttgcccaaggcagatggagtctcaactgacatggtccacttgcatgacagctgagggacaccaaaaagtagaccaccctgggctactaactcaggagcatgtgactcactgggcaaagctttgaaggccaycctgcttccaagggagagaggaacaaagccccagttagttccagatagtttctccctaacttaagatgttacatttcctaggagacagagacaagtcccaggcagtttctctctgcctaagcatattgcattcctagcacattctacacttgttgttgagaactgtaagcaagaaggcggggaaaactaagtcagtccaagaccatgtgaagaactgccctgaaaataccactttcacactaagaaatgaatgataacctcataatgtttttccagtattcatattataagggtcttacaagtgatttttaacatattacttttttggatctgaatacaaagaaagtccatatattgcaataggatgttacgtcttcttaatatttgtatctagtcttcttttcatctactttt

SEQ ID NO: 796652 - DNA, 601 bp, Homo sapiens
gaagggaaataagaagtgttggatccactgtgagctgatcctcaaggttcagaaagttgcccaaggcagatggagtctcaactgacatggtccacttgcatgacagctgagggacaccaaaaagtagaccaccctgggctactaactcaggagcatgtgactcactgggcaaagctttgaaggccaccctgcttccaagggagagaggaacaaagccccagttagttccagatagtttctccctaacttaagatgttacatttcctaggagacagagacaagtcccaggcagtttctctctgcctaagcatattgcattcctagcacattctacacttgttgttgagaactgtaagcaagaaggcggggaaaactaagtcagtccaagaccatgtgaagaactgccctgaaaataccactttcacactaagaaatgaatgataacytcataatgtttttccagtattcatattataagggtcttacaagtgatttttaacatattacttttttggatctgaatacaaagaaagtccatatattgcaataggatgttacgtcttcttaatatttgtatctagtcttcttttcatctactttt

SEQ ID NO: 796653 - DNA, 541 bp, Homo sapiens
agaaaagcgctaaggagacatgacatgtaacgtgatcttctggacgggatcctggaagagaaaaaaactttagataaaaactaagggaatcttaataaactgtgaactttggttaataacaatgtatcaatattggtttgttaattataacaaatgaaccatactgatgtaggatgttagtataaaccccgaaaatttgagacaggtctcagttaatttagaaagtgtattttgccaaggttgaggacatgcacccagcacacagcctcaggaggtcctgatgacatgcacccaaggtggtcagagcacccagcttggttttgtacattttaaggagacatgagacatcaatcaacayatgtaaaatgaacattggttcagtctggaaaggcagaacaactagaagaaaaagtaggacaactggaagtggggaggcggcttccagatcacagatgggtgagagacaaatagttgcattcttttgagtttctcattagcctttccaaaagaggtaatcagatatgcatttatctcagtgagc

SEQ ID NO: 796654 - DNA, 625 bp, Homo sapiens
ttaaagtttccccccccctaaaatattcataggaaagtgaaaaaaatttataatataatatattaagaacatatgttgtaatctcaaaacagcactaacagaatggtccaaaaatatataataaacataaggaaaataaaataattttaaaagtttcattagtcgccaaacagcaaggaaagaaattgaaacacatgtctactggttcaaagttttttaaaaatatrgtaagatggtacataaaactcaactatgctgtcattacattaaatgaactaaattattcaagaaaaagatcaatatttttagactagattgaaaagaaaaaccaaattatttgtttcttgcaataaataaaacttgcatacaaaacacagaaatattggaagtaaaaggatagaaatagatatgtcatgcaaagctaaccaaaacaaagctgacatgaatttgcagtaatactataaacatagtagatgttcaggccaaaaaaaaaaaaaaaaaaaaactatgagatgtaaagaaaaatatataaaggaatatatttaacatttcaaaatcaacattcacaaaaacattctttcaaaacatattaaacaaaagtttaatgtggagaaacagatgaatt

SEQ ID NO: 796655 - DNA, 682 bp, Homo sapiens
aaaatatccagtctgaggatcattgccttttaactggaatatttagacctttaacatttaatgttatttttaatatgtttggcttaagtctattattttactatttgtttgttattttttcggtagtcttttggtgcctttattccctttttatgattatatttaatctccttggtttattagctatattttttgatggtatacatgatttactttcatgtatagtaaaagaattacacaatgcccatttcacatctcttgatcattgtgccattttagtcatacatgctattatgacatttattataaactaaaatatattgttattgygtttaaaaacaattattttacacttattttaagaatgagaatcattataaaaatgtttactgacatattaatcatacctagagtctttcttcctttatgtggataatcatatttctatctggtattattttccttatgctaaaggaattcctgtatctttttttttttttttgcagtccaaacctaataaaatttcagcttttgtgtgtttgacagtctttatttcaaattcattactgaaaaataatttcatgaatagaaaattttaagttgacagcttttttgttgttgttcagtaaaggcgttattttattctattctggttgcattggttgataacagaaacataata

SEQ ID NO: 796656 - DNA, 626 bp, Homo sapiens
ttgaaattactatacatgtcataggtactgcaagtactttttaacagaatatttccaagttctctcctttctttcataccattactgtcattcatgttacttacccatgaactggaggagagtagagtgagatggcaatttaggactctgcagcaatcatccctcaacatcaatttgaacaactatccacacataaaaacrtcttcaaaagagccaaggaaactaagtagaatgctacagtacgtggttataatatagtaataagaaaatatttattgatgagggttgaaaggtcagttttatgttacccatatcattcgtctcccaagaccaagcagcacaatgaagagagagatactgtccacttgggggaaagagaaggacataaacataatactttgccttgaacactaacactgtgctacaccaggcagactactgtggctcctgactgtaaactggtatctgtggattgagtctccaaacctcccttggcaccaagtgggaaagcacagcccctatgaagtggacatatgcagtctgcagtggccttggactctgaacaaacctcaacaaacaggcagacgtcattggatatggggctttgggcatgcctcgtcacagtg

SEQ ID NO: 796657 - DNA, 572 bp, Homo sapiens
caagagagacaaaggtatcatgtctgaaaaatatggagtatatttaaaggacagggaccggagccctatttaattggtacatgtaaggtagcgtgggagttaagtacaaaaaagtaagaaaaaatgatcagagaaagcacctggaatgagagacccaatttctccttttaattgctaaattatagctgtggagtttaaaaaaattgttggaaaatttgaatgaaggtttttgctgcgtctttcctcctggcattgaaagacaggaaggttggttttaaccagaaccaagaaggtgaacgccagtaatttttaastgagagggaaaatggaagccaacctttttgacacattcaggtctccctgagagctgagcaatcagagaaactgacacatatatgaacggtgcaccttaatcttggagttcagtatctttctcttcccctgagccagggaaaaacatatacaaaagtggatatctgtgaatagaaaagagtctgtctttaaacctgagtttagaatctcttgtgtatttccagaatttagaacaggaggtaactcaagaagaatctgaa

SEQ ID NO: 796658 - DNA, 502 bp, Homo sapiens
gttgacaagtcatcaataaatgcactgactagaacaaaataaacatagccatatgtcatattctaagaaacctaccttaatgtttctagaaaaatgaatccattactgaacaccttttaagaaaagttgttaaccagctagaattgcaactatcatctgacctgacttcctatgtcatgtataccaagccagattgatgattatcttgcttagattcatatacattacagttaaggctcagccctggtaccacaatcttatcacactaccaaaaaagaaaaagaggttagatttagcatgctcttactaacaatctcagcatgtgctcagaaataaagttaataatcaasagaagacttaaaagaaatgtaatcctaaaaggtcagaggctcaaagatcatggcttgcccattaccaaaattagtgacaatgctttttatattaaacaaatgtacaaaaacttttcccattacttaaacaaaacttgaggtattaaattaat

SEQ ID NO: 796659 - DNA, 582 bp, Homo sapiens
ttaatataaaactccaggtaaaaagaccatttttgtaacagaatgaatactgtgcttcagagtactgtgggctggattgaacatcaaactaatatagctatgggatgtgagggcgattggctgcaacatctgttaacccactgattgccagggttgattcagctgatctggctgggctaagtgggtgtccccttcctccctcaccgctccatgtgtgtccctctcgaagccgcacgcttggtcgaagaggatgaccatccacgatagaggaggaccagtctttggtcaagggtatacaagcagctgcactcccctgctagaacttccaaacaagctctcaaactaatatagctagggaaattytgaatatacaaaagtctgaggcttattagtgaagatatagtatgttcgaaaagaaataataaatgtataagaaatagcaggtaatttttactatggctgaattgcttggtttcaagttaattttagcagaaggagcaatctcaatataaccatttatataccttaactatgatgattaattataactaattttaactgctaagaataaccatgtgacca

SEQ ID NO: 796660 - DNA, 418 bp, Homo sapiens
gaatcagagttctatgtccattattcttttctctacgagctgttccattataaatgatagcaattactttttgacgaactgctgctactctgaacaacttaattatgcagaatcttcatggcattatttcttacaagagaagagatgtgccctaaactagcacccytcagttgctttaaataactacaagggatcaaagaaaggaacaattagcagtaagttacagggactaaacaggtgaatacagaaacatcttaaagtttaaagaagagttatgtcaatcaacagagtcaatggaaacttttcagaaacttctttgctcttgcttttgtaaatcttaattggcacttagtccactgctttgcacaaaagttctcagcagtcgtgaatgccaaatatgtttcctggccatgcgccc

SEQ ID NO: 796661 - DNA, 572 bp, Homo sapiens
gaagtgtaaatggactaagtcataggagtcttttaaaaattcttgcccaggctgtatcccagaccaattaaatcacaatcacaaggagtgaaacacaggcatgagcaatttttgaagctccacagttgacattaatgtgcagagaagtttggcaatcactggactgtggaaaagaagcatgacagtttggcaacacagaggttagaggtcatgactttaatgtgagaccagtcaacatggtcatttttttctcaccagtttcagtggcatgtatgtaggtatagagtggactgtggcttatatttaaccatggttgagtttaactrgataaagatgatggacagagaggaagacaagagagctcaggtgtatggtaaaaaattgatgaatatgatgaaatctgggctgttggctgggaaagaaaggacttgcccgtgacagtaacaagtcagcaggataagtctgtaggctcctatgaggtaaaatttctggagctgctgtactagaaggagtgagctggaaaagtagaagatggtgatcagattttagtgtacgtggaactgagattgtgg

SEQ ID NO: 796662 - DNA, 627 bp, Homo sapiens
aaggtattaaatgaacaaactataacttcaacaaataggagcaactttttgcctggcttcaattctagatgggatctagaataaaatcaaggaaccatgggatggtataaaataagcaatcggaataagcacagttaaagttaacatattgtaaaggttatagttagaatctggtgtcaacaaatggactttgattaaggttctggctctgtcgtatactggatgtactggagttaaggggcttcagtaaaataatagtaccttgctaatggagctagcaatgttgaatcgctattataatgtctgaatgaaatggtgcagccttaagtcctctcagaaaattgcctgatatacattgatccctcaaaaagtggtagttattatttattagacaatgaggttgaagctacaattgaagggacagaatgccctttgccaatagkttccatgattctgatgcagtatagatcatttttctatccaagattatatgggatctaaaaattggcaaaaagaagaatggagtcagacctgaaagaaaaggcaagaaaccaaataagactgtggatattaaccaacccaaagaaaagaagaaaaagtaatagagctggaatacagtcaggagtc

SEQ ID NO: 796663 - DNA, 620 bp, Homo sapiens
gggcagatcacctgaggtcaggaggtcaagaccagcctggaaaacatggtgaaacaccatctctactaaaaatacaaaagttaggtgggtgtcgtggtgggcacctgtaatcccagctactcaataggctgaggcaggagaatcgtttgaacctgggaggtgggaggtttcagtgagccaagattgtgctattgcactccaacctgggtgacaagagcaaaactccgtctcaaaaaacaaacaaacaggccgggtgcggtggctcacgcctgtaatcccagcactttggraggccaagggggaggatcacgaggtcaggagatcgagaccatcctggctaacatggtgaaaccccgtctctactaaaaatacaaaaaaattagccgagcgtggtggtgggtgcctgtagtcccagctactggggaggctgaggcaggagaatggcgtgaaccctggaggcagagcttgcagtgagccgagattgcgccactgccctccagcctgggcgacagagcgagactctgtctcaaaaaaaaacaaagtcattttataatgacaaacggatatagttaacagacgatataataatgctacaaaatatgcacccaaccctggagcac

SEQ ID NO: 796664 - DNA, 578 bp, Homo sapiens
ttggtcagcaaacagtgaataagtcttcagaaatgttgtctgtagtgcactgtacgtatgaatttctgttggtaaatttcttgaatcctgaattaaattcctgcaacccacagcaaattgctagcatgccttttgtccgaggaaagagattctttctgggatctgcttgatctgaaagaattacttagtttttattagagttctgtgagtttcaacagttctttgaaaatggagaggaaatctaatytctcgttcagtccaagattccccccgacagtgccctgaatgatgaatgtccctctgagagtctgtatctcaagcaatgtacaaattgcttttatttcactaacttattccatatgcttccaacttgaatcagaagcagttagaatggtcttgcagtctaattttactcctatgaatgatatttccagtttacagagagggaggatggagtgtggttggtatctttgactgataaaatctgtactgaaataccatcagtttcaagactctgtggctaaggatgagtatatggtctgcagctgagaaactcaactataccaggaggagaaggg

SEQ ID NO: 796665 - DNA, 507 bp, Homo sapiens
gatgaagacactcaggcacagagggataaataacttttctgctgtcatacaacttgtaagtggcagagccaagatgaaaattcagaagccagccccagagccccttcttttatcctctccacgaaaccatctcttgatgtgagagcccttagggtcttcatcatctaatccttggctctgctatcactgtctgggatgctaaacctgttgggtttagggttctagccagtgaagagatgaggctctcatgagccctggagcagtgggtcaraacctgagctgtcccctgtgattcctggaccaaaacaatcagtgcctcagatccagacaagactcgagaaaaataacaatatttgttgccacttattgagcatttttatgtaccaggtgctgtgctaagtgctttacatacaatatctcatttaatccctaagacaagtgagaaaaacacattgttgcaggtacaaatattctcatttccaaatgagagaccttggctcagaaaat

SEQ ID NO: 796666 - DNA, 596 bp, Homo sapiens
ttgattgaactgctcctcacgcaggcaactgactctgcgtagcgtgatccagggcaagtagctgcatggatttaattgtgtgtcctggtgaattgaatgaccgactcactatataaagaagttttattgctaaattaaaaatgatcatagcttggtattaattattagcaattataaaaattattgtgacttcaacataarcttttattgtttccgttacattttatttaacaatggttaattctttctcctgagccaacctcacaatacagtgagtgagataaaatatatcaagtgtttagcatggcgtcagacatttaggaagcagacaagaaacgatggtcttcattttatcacaggaaaactatacttttcccaaaagataaaagcattttggaaaactgtgggttttccaaaagagaaataaaaatggttccagcctgggctgggcgcggtgtctcactcttgtaattgcagcactttgggaggcggaggctggcagatcacaaggtcaggagttcgagaacagcctggccaacatggtgaaaccgtgtctctactaaaaacacaaaaaattagctggacgtggtggtgca

SEQ ID NO: 796667 - DNA, 638 bp, Homo sapiens
tggagtttccactcatgaagcttgattgttccctctggtcctgcttgggtttgattctggatggaccatttccatcttaagatggattgccatgggcttgtataactttaggacttggagggtctgatagaactcagctcatgatggagagtttcatacttggggtcatttgataccccagggtcaggtgttctatgtccactggggtctaggaacattccagtattcactcttcaaaaagcatagaattctctgctgcagatggcatgaccttggtccagaacatcaggggcttaagttgattctcccactggggcttgcatagatccataatgcaccttttgcccccattgacatctccaacacaaaatcttttgccaggtcatatgttccatgtggccaagctacttgcattacagccgggactgactatagatccctttsttgctccaggccctatgcagtcagctaccttttaggtctcctgggttgaagtggcattgagaggtgtgaaatgtattgtctccagagcccaaccaaagaagggttctggaggcaaccaatgccagacattgtacttcattctttgtaatagaggatgcaagatgcagcattttatcctttactttgaacaggat

SEQ ID NO: 796668 - DNA, 655 bp, Homo sapiens
ctgagattttatataaatgcttgcatgctgtagatatcttttggtaatttggtcctgggtattttacattgttgttgagccacaggattaaacaactctggagccattctacctgtgggcttattgttatatgagaaaataaaattccttgttatttaagccacatgaatttggtttgtttttatgtacagggaagcctcctaactgcgataatctaactctatttaaacattcctcgttgttgagtccttaggctcaataatatctatattaaatgtggctgggctggcagttttcatttggctgcatgtytactgatatatagacagttttagtttctcctttaacccatgttgcccaatccagaaaccttttgtatttgtattttatttctgtgtgctatggtctgattgtttatgatttcccccaatttatatatttaacactaatccccactgttacaatgtttggaggtggagcctttgggtgatggttaagtcatgagggtggagccctcatgaattggattggtagatgcatatggggctgtcctagtacaatcaggctgctataagaaaaatacaatttatagacaatagaaatttattgctcacaattctggaggctgggaagtccaagcccatagtgtcagcag

SEQ ID NO: 796669 - DNA, 561 bp, Homo sapiens
atttatgttgctgaattcaccatcgtggggatcacaggaagaggaaaactttttccagtagctcaggagctgcttatgtcgctgaattcaccatgacggggatcataggaagaggaaaactttttccagtagcctgtagttgcaaaagataataagctttccaacctgtgatcacctggagcaaacggagaggaaaggagataaacgaggagtgttgcgtgcggagtggagggaggctccctttctcctcccatcaccaactcctccttctcctcaggccaggcttttaatcaggctccccgcgtgcagtcagagagggcaargccagctcccgtctcagcctcccgtaggaagatctcccggcctcacctgagcgccccgcagccctgggtacctctgctcccgcccagggtcctatggcccctcctcccagcacccaacactgggaccccacctgtacccaggctggcctccctcccccgcagcttcctttgcagccgccgtccgcgggtctccaggcgtggccacacctcccggggccccgcaagggttaaggcagca

SEQ ID NO: 796670 - DNA, 589 bp, Homo sapiens
cataccctgtactaagtatatatgtctgaaaactacagaggtctatcccaggaagaagtagattaattaatttgagttctattatttgaattaagtgctaatataatttgttcttattattagttggactttaattttctaagcctacttaaaaacaggatttttgtttttttatctacccactcatttgtattaaaatgtaatctacactactaaggtgctaagacttccaaatataaactgaaaccaatatttaagatattcatattatcctaatgtaacgttccaaagatggtatagttaygctccagggactgattctgctagctacaaagctaagataacaaataaaacaaatttgaactcttttggtgggctcatcgtgcataataatgatattttttgtttaaatttccagccagaagcttttcatgttatattggtgcctggatatgcacacgatttgagaaaaagtacttttaaataaaacatgtataatatcctgcatagtggaacagttcttttggaaaacattgtctctatactacaagtgataaaacagagacaacaaattcacatgctctaacat

SEQ ID NO: 796671 - DNA, 476 bp, Homo sapiens
caccattgatagggatgtaaaacagtagtcattatggaatagagtatgggggttcttcaaaaaactaaaaatagaactaccttacggtccatcagtcactctgctgggtatatagaccaaagaaagaaaatcagtatatcaaaggatatctgcaccgtcatgtttattgcagccctattcacaataggcaagatatagaatcaagtgtccatcaacagatgaataaagaaaatgtggcmtatatacacagtgaaatattatttagccataaaaagaatgaaatcctgtcatttgcagcaacacggatggatctggaggtcattatgttaaatgaaataagctaggaacagaaagacaaatatcacatgttctcactcatatgtgggagctataaaggtgagtcttacagaggtagagcataggatggtggttaccagaggctgggaagggaaaagggtagaaattaagagaaattg

SEQ ID NO: 796672 - DNA, 637 bp, Homo sapiens
tagagcaatcagaggcaaagcaattactttacaaggttgatttggtctagatctggggtacccccagtagatctttgtactaacattcaacacaaagtggtgagcagtaaagccatgttttgtctttccattctgtctcgtgccagcttgtcatatcccagttcacatgactggagatttagcatatttgctttaggtatgtttctgaaaatagtacaattggacccttggggtgggggagcaaataaactacaaacacttataacaagttccactttatattcacttcactttccttgtgttattgagaacacatggcagtttctcttatttcactgctttcccttggttttctcatctgtaagaaatgggcataaagtgcagacataacaggrtctttaaggataatttattaaataattaagttaaataatatattgtatataaaatttatggtgtaaagactatttttgaaaactggatataattcatatttaacatacacaaactaaatgagaatttggaactatagtacccctgttggcaatgattcaagtgaagcattttgaaattcagacaattttctttttttttttttttgctttcttccctattttaatgactgttgaattataaa

SEQ ID NO: 796673 - DNA, 590 bp, Homo sapiens
ccctaaattatgtctgtaattttgtctttgattaagctacataggcttggtttctcttattcccaaaagaaaaaaaaaaaagagaagaaaaagttaaaaaaaaatcccaccagatttctggaaaaaatagatacaagtccagataaaaaattatgcaaattaacactgtattgctaactggggcgtcagccccaagtcctttttttatttgagcatgttggctagacatggaaaaaaaatcttcagtttacattgtttggcctgaataccttaggagactgaaagtactgctctgcctatttaacatgaaaacccaaagtcatagacaatttgagcccttccttgtttgcttcaaatmtgtggtaatcactttcatcctttcttctttattctcagcagatcatttcatttcttccttctccaaacatagaaacttaactgtatttccatgtaaagtatcttcctttcttcctaaaatgttagataagtcttgcatattcaattccacttaagaaaagagaacatcatgaacaacaagaacaataaaatcaatagcctatctcaattctacttccacatataggtactta

SEQ ID NO: 796674 - DNA, 594 bp, Homo sapiens
cacttttttcttttgaaaagtatgggttatggatatgaaatctatacatgccacatcttcttttaccccaccaggaggaaatcagtcttaagatgagcttatactacggaaggcagagctgagagactgaaagaaacttattccttgatgacgtgattgcaatactgcatcgatccaacctaacatctgcacttcctcttgattttcaattacgtcagttaagccaatgtgagtacggctttgtgttcttttcaatcaaatatatccagatatactatacttgattacttactgtagttatgaaaaacacatagacattytcttttacaattatagatatagttttctttgacctaaagaatttagataattcatttagttgacatctgaaaatgattgccttagggtcaaaaatgcatggtttctcttgaatagtaagtattcaagatgatttgaacacttcaaaatcaacaaaacattgtaatgtttgcttaattttagctagaatgaaaagtaagtacaaagtgcagcaattgacctactgaatctatgaatgttgatcacaaagcttgaggtattaatgaaagaatgatt

SEQ ID NO: 796675 - DNA, 599 bp, Homo sapiens
atgaaagaatgatttaatgttaattacaaaaactagaaacatcacatttaatatttttaagaattgttacagaagttaacacaataaatattaactttgaaaatgtgacaaaaattaatgctttaaaggagcactttggtactttttcttagctgagtaaatttcctcacagtttattcgtgtgtcactatttgcaacaacttttgctgccacaaggaaatgaaaatgttgtggttttaatttgtaaacaaatggacacaaaaacaaacaacatattacacaattttttaaaaagtaaaatcatctcatttcaaagtaccatttatttttttttaaatgcaagtactagacaggcatttttagtgattatgttaaagttaattgtgaaaagaatttccaagttgtgagtaaatagtagaaatatcagggttgttttttttttttgctttgggaactctaaaagyaaattccacactgtcagctgtgaatattagagggttgaagagggtcctcaggtatgcagcacaaaataggtgtgctgcatgtacaatttaagaaaaaaataaatttattgaaaaaatatactgtatatatatttt

SEQ ID NO: 796676 - DNA, 579 bp, Homo sapiens
tttttatttcagccatagtttagaagagcttctctgaagccaaaaatttctctttgtcatacatagacaaaagcaaagatgttgatatgtgatttaacagttgctattgtttggtttgtttgactcctacaaacctcatgttgaaattgatgcccagtgttggaggtgtggcttcatgagaggtgtttggatcatggaggcggatccctcataaatggcttggtaccattctcaaagaaataagtgakttcccactagagttggttgttaacaatagcatggcacctccccagtcccctcttgctctcttgcttgctctcaccatgtgatctctgcacatgccatctgctctttgccttcttccatgagtggaagaagcctgaggctctcaaccagaagcagacgctggtgccatgcttcttgtacagtctgcaaaacggcaagccaaataaatagtataaacttattttctttataaattacccagactccagtacttctttgtagcaaaacagactaagacagcaattaaatacacacttttggttaggtgcttgaaatggtagtaataatggattt

SEQ ID NO: 796677 - DNA, 677 bp, Homo sapiens
ccaggcttctggcaggtctccatttaaatgccactttgtctcccaagcctttcctggagatgctttataaagtagcaccctccctcatccctaccttctcattcaactttttcttcaaaggtcttactttttgtaagttgtaaaattattatttatattttcctttctccctcttccctctttctttgctttccctttttccgtccttcagtatgtttatgtcttgcttccactagactataaattccttgagggtagaaactaggtctgtttgtttccaagttttatcttcagaggctgggtcatagttggtgctcagtaattatttgctgaacaaatcactaaagagcaatttaaagcatagcatgggaataaacaaraacaatgtgattgcttcctctcaatgcaagtcttctaagctactccaaccgtgatttattgaccatttggcataaaagtaaacatgaggcaacatgtcatttcctcaccagtttcacatttgtcttctcagagtatatgcacgtacattctgattccatacccaacatacgcactctcttctcaggctaaaattttcctacttacagctattttgtagattattaaaaattacaaattaagtaagaaaggaagaaaataaatattattcctataacaaatcaaatttaagcataaaa

SEQ ID NO: 796678 - DNA, 656 bp, Homo sapiens
actaaagagcaatttaaagcatagcatgggaataaacaagaacaatgtgattgcttcctctcaatgcaagtcttctaagctactccaaccgtgatttattgaccatttggcataaaagtaaacatgaggcaacatgtcatttcctcaccagtttcacatttgtcttctcagagtatatgcacgtacattctgattccatacccaacatacgcactctcttctcaggctaaaattttcctacttacagctattttgtagattattaaaaattacaaattaagtaagaaaggaagaaaataaatattrttcctataacaaatcaaatttaagcataaaaagtacacttgtttttcatgattcaaatgccaggtatattagttaccaatacataccattaaaaatgaaactatatgctataattttttagtgaaaaatgaatcatgtgcacaaaagaaagtatacagcatatttatgtattagagaatgatcataaactgaattgccgtatgaccacaatccaggtaaagaaacagaacaatgccagtccctgaaaagaccctccctgggtgtctcttctcaatcaccatcccaaatctttataaaagggataactatgtgtttagtttcctgagagttctttgtttgcatttttgaat

SEQ ID NO: 796679 - DNA, 605 bp, Homo sapiens
gtaagtggcaaacttgtctcagcctttttctaaaatatctttatttctttctcacttttgaatgatactttagattagtacagaattctaggttgcaaattatttttctttaacattttgaagttatttctattttattttgttgctatgaaggagtccttagttgcagtctagttgttattcttacttaggcaacctttcttttacccctacgagccacttcatcacaatttttttttagatgtgggtttatttttaatrtatcctatttgtgatttgatcttcaaaataaaaattgacgtcattaatgaatattggaaaattatcagccattatgtcttcaaatactgcatctcccccagtctcttattctggaatttagaatgagaaggtcaaaagatatgactttctcatttttcactttattttccttcctttgttgttttctgggttacttctttacatttatttttcattcaacaaatagctctcaacattatatacattcctttttcaatcatccattgtatttttaatttcactgattatgttacttctagagtaattcttttaaagatgattttctatctcatgatcaattcttt

SEQ ID NO: 796680 - DNA, 642 bp, Homo sapiens
gtaaaataatgcttttcttgattactcaagatgttcatgcaagaagaaataacggagattgaccaccaggctgaacctgaagactgtaaaagtctcacaacttaacacttttgttttacatatcttcctttatacagaaacatgcccaagatattcatcacccaaatctttttttttttttttttcttgagacagcgtctcgctctgtcgcccaggttggagtgcagtggtgcgatctcggctcactgcaagctccaccttctgggttcatgccattctcctgcctcagcctcccgagtagctggaactacaggcacccgccaccacgcccagctaattttgtgtatttttagtacagrcggggtttcaccgtgttagccaggatggtcttgatctcctgacctcgtgatcctcccgcctcggcttcccaaagtgctgggattacaggcgtaagccaccgcgcccggccccaaatctttttaggaactgtttagtgatgctcagaggaaagcagccctattccaaagtacacaaatgtaaaatggcctctagtctatatttgaaaagtgattcaggtatatgttttgaagcaggagtgacaatatgggatatcaaatatacattttgaaaccaagataagca

SEQ ID NO: 796681 - DNA, 642 bp, Homo sapiens
gtaaaataatgcttttcttgattactcaagatgttcatgcaagaagaaataacggagattgaccaccaggctgaacctgaagactgtaaaagtctcacaacttaacacttttgttttacatatcttcctttatacagaaacatgcccaagatattcatcacccaaatctttttttttttttttttcttgagacagcgtctcgctctgtcgcccaggttggagtgcagtggtgcgatctcggctcactgcaagctccaccttctgggttcatgccattctcctgcctcagcctcccgagtagctggaactacaggcacccgccaccacgcccagctaattttgtgtatttttagtacaggcggggtttcaccgtgttagccaggatggtcttgatctcctgacctcgtgatcctcccgcctcggcttcccaaagtgctgggattacaggygtaagccaccgcgcccggccccaaatctttttaggaactgtttagtgatgctcagaggaaagcagccctattccaaagtacacaaatgtaaaatggcctctagtctatatttgaaaagtgattcaggtatatgttttgaagcaggagtgacaatatgggatatcaaatatacattttgaaaccaagataagca

SEQ ID NO: 796682 - DNA, 612 bp, Homo sapiens
taacagttttggagactgagaagtccaaaatcaaggtcttgatggattcattgtctgatgtgttcctgttccccacagacagaaccttctgatgcatctatacatgatggaagtatagtaagcactggcacacatatataaaactgtgttagagaaataatcaccgtctttggttgaccccttcctgctgggccagagaggatagtactttttcctttattacagttactaggatttcaggcagttcaaacctttctgactatgtatcagttgtatgtacaaaatgggtcctctcctcacctgttctttttaaactttaccttcttgtctcatcccaagatttcctgctttaaaaccttcacttcatctcagcaaggaagagacaaggactaccgtytaatgttttgtgtaccccttttacatggattacatgaaagattgaaagtgtattttaatattgccatgcagacggatgatataaatgtaacttattaatctcattgaaatgtcaatagggaagaaaggacataatttaaatcaaagcttttaactagtttttacatatttatgatataatgatttgatagcatcaaatattgtttttatttctta

SEQ ID NO: 796683 - DNA, 586 bp, Homo sapiens
aacgaatgaatgtacaaataatacacatgtgcatgaatgaatgagcttaatggactctagactagcgtgattgtatgcctgtcttaacacatcatatttatcatcaatcataaagaattctaatgaatgccagtagttgtcacaagtaatcccaccagcaccatttagcttaatatgcacttaatagcttagctctcayctgatccccactgttgagatataatataatattaataaccacacagagtcgattgtagctttgctgggggctgcaatcccctctccctaagcaggaggctttgaatgagcagccttctgcaaaatggctgccctcggctctccttcactgagatgagagtgactctcttaaacacactggcttctcagacttcagactcatttccagctgcctccatcttcctcccctctgcaacatggtctgggtggagaatgtgaacaaccgggcttccccttctctgttatatactgttagggtccttgaggtttggctagaggcctcagggaggctgctcatggcctatccgggtgtcagagcatgagctggggccatggggcaaggtaggat

SEQ ID NO: 796684 - DNA, 517 bp, Homo sapiens
aaggtatggcagtaagaccacagcctactgctgccactgctcctgttgtcgtgtgccagaggccgaacacgccgcatactgaaaagatgacagcagttagagtgaccaaccatcctggtttgcccaggactaaggartttcctgacacacaggacttcaatgctccaattggcaaaccaggaggggtgggtcaccctaactgctgttgttactagagcagcacaattctcatagaacctgagggctcaaaaaaattctctaggtcaaatgctttgctttgcacataagataactgtgatccaaagaggtcatgacctgcaaaatcactcagtttgtggcaaggctgggacagaaagccaggggcccattttctggtccgggattattgatttctgctggatggtgctgcctcctggcaccctctcctgatgctctctacctgtgaagtagggcttaagaaacaatagcggatcctccctccccctcctttcccaatagtaggttatggcagaaacag

SEQ ID NO: 796685 - DNA, 587 bp, Homo sapiens
atagcgagaattgacaacgtgctggcggccctcgctcgccctcagtgcctcctcggccttggcgtccactctggccacacctgaggagcccttcagcccaccactgcactgtgggagcccctctctgggttggcagaggctgaagccggctccctctgcttgtggggaggtgtggagagagacgtgtgggcaggaaccagggctgcgtgcagcgcttgcgggccagtgagagttccaagtaggcgtgggctcggcgggccccgcactctaagcggccagccggtgccaccraccctgggcagtgaggggcttagcacccaggccagcagctgcagagggtgtgccgggtcccccagcactgccgaccggcccgcactgctctcgaattctcactgggcctcagccgccttcccgcagggcagggcttgggacctgcagcctgccatgcccgagccccctggcagtgggctcccacatggcccaagcctccctgacggggaccgccccctgctctgcggcggctgttcccatcgaccatccaagggctgaggaggcagcgtgggactggcaggccgctccacctgctg

SEQ ID NO: 796686 - DNA, 426 bp, Homo sapiens
catacagaagaccttggtgggtgagtccattctgcccaagtgggttttcaagcaggagagtgcccactgtccccattaaacactctgtggaagacagaacaaactggattaaatctcgagagttcaccctctagctccaaaagaggtggccactgcggacagctctaacaggcagtgctgaggccagcagtgcgtccaggagcgtgagtgtgaccgctgaagatgcagtccatgcagaaacagctctcaacatttcatagaggtgaaggggarggggaaaaagaaaaaaaaaaaacttatataaaagcccagcagcttggggagcagatactcagtacacagtgaagtgaggagcccgaagacttcagtacaaatgtgcacaatgaggatcctaaaatatcaggaaaaaaatcactatcaatctag

SEQ ID NO: 796687 - DNA, 649 bp, Homo sapiens
catacacacacatagagataaacagagagaaacatttctatatttctgtatctctgtatatacaaaccctgagttaatagtagtatcttctattccaaaccaactccacagtgttctttctagccttccacctttccgtatttgtaatgtttctctgacagtgcggaacctggctctcattatttacgtatatttacttagttctggcacacatattaagtagttccagtattgctaactcataacactgtgcataacaaacctactcactggaacttcatatttgtttatagttcttttttgtccttagcctgaaggtatataggaaaatgcygtgtttaacagttacttagagttttttcttcctttgctgagttattaatttgaagcacaatcaagtttatgtttttatgtttgtattccaatttgggttctttttaccttattcttgttgatttcatttatatacgtatttggttttttgactatacgaaacagcattgttctaaaaattaaatctacattaaaaagtatatacgcagagaactgccatcccctctcccccaatttctttttagcctgtatttattttcacagaaacaagcagatacatatatattttcttatatccttttctttcttacatgaa

SEQ ID NO: 796688 - DNA, 641 bp, Homo sapiens; identical to SEQ ID NO: 789004

SEQ ID NO: 796689 - DNA, 591 bp, Homo sapiens
atttcatttatttatgtttggaaaatgcataaacatttttgtttgcaatcttgtttcttttgttataagtcaagtttgaatgttaaaatacttttattgaaaaacttytgttaagttttgtcttgtaaactttctttacttgtaagtatcatcttatcctttaatcctgtacccaaaaataagaaatacatttttgacagaggcttaatgttttaatgaaagagtgtggacatttttattttaaaatttaggcaaaaatcgctatcaaatggtatgtttgcttatttgtctcacacagccatataggttttcctggagtgttttgttttgttgttgttgaaaagactttgcttacagctagataaaatttgctatagaaaaaaaactgttgaaaggtccgattctcagtaccatgtgagttaataatactacaactaagttctttttaaaaagtgattcatgtatttttgtaaattaccttttcacatatgcaaaatctgttcctactacaatgttatttttactcatgccttattgttgcactctttttgaaataccctgcagtgaatttatgaatcaatttgggcttaa

SEQ ID NO: 796690 - DNA, 591 bp, Homo sapiens
atttcatttatttatgtttggaaaatgcataaacatttttgtttgcaatcttgtttcttttgttataagtcaagtttgaatgttaaaatacttttattgaaaaacttttgttaagttttgtcttgtaaactttctttacttgtaagtatcatcttatcctttaatcctgtacccaaaaataagaaatacatttttgacagaggcttaatrttttaatgaaagagtgtggacatttttattttaaaatttaggcaaaaatcgctatcaaatggtatgtttgcttatttgtctcacacagccatataggttttcctggagtgttttgttttgttgttgttgaaaagactttgcttacagctagataaaatttgctatagaaaaaaaactgttgaaaggtccgattctcagtaccatgtgagttaataatactacaactaagttctttttaaaaagtgattcatgtatttttgtaaattaccttttcacatatgcaaaatctgttcctactacaatgttatttttactcatgccttattgttgcactctttttgaaataccctgcagtgaatttatgaatcaatttgggcttaa

SEQ ID NO: 796691 - DNA, 591 bp, Homo sapiens
atttcatttatttatgtttggaaaatgcataaacatttttgtttgcaatcttgtttcttttgttataagtcaagtttgaatgttaaaatacttttattgaaaaacttttgttaagttttgtcttgtaaactttctttacttgtaagtatcatcttatcctttaatcctgtacccaaaaataagaaatacatttttgacagaggcttaatgttttaaygaaagagtgtggacatttttattttaaaatttaggcaaaaatcgctatcaaatggtatgtttgcttatttgtctcacacagccatataggttttcctggagtgttttgttttgttgttgttgaaaagactttgcttacagctagataaaatttgctatagaaaaaaaactgttgaaaggtccgattctcagtaccatgtgagttaataatactacaactaagttctttttaaaaagtgattcatgtatttttgtaaattaccttttcacatatgcaaaatctgttcctactacaatgttatttttactcatgccttattgttgcactctttttgaaataccctgcagtgaatttatgaatcaatttgggcttaa

SEQ ID NO: 796692 - DNA, 666 bp, Homo sapiens
agagtcagtgttgttaaaatgatcatattacccaaagcaatatacagattcaatgcaatttctattaaataaccaacaccattttacacagaattagaaaaaacaatcttaaaattcatatggaaccaaaaaagagcccaaatagccaaagaagtcctgagcaaaaagaacaaaggtggaggcatcacattacctgacttcaaattctacaataagrttattttaagtaaccaaagcagtatggtactggtatagaaatagacacatagatcaatggaacataatacagaaccaagaaataaaagccatgtacctacaaccaactgatcattggcaaaaagtccacaaaaatacataatggagaaaaaacaccctattcaacaaatagtgctggaaaaattggatagccatatgcagaagaatgaatgtagacccctatcgctcatcatacagaaaaattaactcatgatggattaaagacttaaatgtaagaactgaaattataaaaatcctataagaaaacctagggaaaactcttctggacattggcctaggcaaaatatttatgattaagacctcaaaagcaattgtaaacaaacaaacaaaaaaaaccaccatgaacaataacaaaaaaaaaaccccaaaatagaaaaatataacctaatg

SEQ ID NO: 796693 - DNA, 666 bp, Homo sapiens
agagtcagtgttgttaaaatgatcatattacccaaagcaatatacagattcaatgcaatttctattaaataaccaacaccattttacacagaattagaaaaaacaatcttaaaattcatatggaaccaaaaaagagcccaaatagccaaagaagtcctgagcaaaaagaacaaaggtggaggcatcacattacctgacttcaaattctacaataaggttattttaagtaaccaaagcagtatggtactggtatagaaataracacatagatcaatggaacataatacagaaccaagaaataaaagccatgtacctacaaccaactgatcattggcaaaaagtccacaaaaatacataatggagaaaaaacaccctattcaacaaatagtgctggaaaaattggatagccatatgcagaagaatgaatgtagacccctatcgctcatcatacagaaaaattaactcatgatggattaaagacttaaatgtaagaactgaaattataaaaatcctataagaaaacctagggaaaactcttctggacattggcctaggcaaaatatttatgattaagacctcaaaagcaattgtaaacaaacaaacaaaaaaaaccaccatgaacaataacaaaaaaaaaaccccaaaatagaaaaatataacctaatg

SEQ ID NO: 796694 - DNA, 617 bp, Homo sapiens
attggcaggtgcccctccccccaccaagcttaagcatcccagttccacctcagactgctgtgctagcagcaagaatttcaagccagtggatcttagcttgctaggctctgtgagggtggtacccaccaagccaggcaccagagggaatctcctggtctgctggttgtggagaccaatggaaaagcacagtatctgggccagattgtaccattcctcctgatacagtctctcacaarttcctttgactagggaagggaaatcccccaaccccttgagcttcccggatgaggccacaccccaccctgcttcagcttgccctccgtgggctgcacccactgtcccaccagtcccagtgagatcaactgtgtatctcagttggaaatgcagaaatcacccaccttctgcatcaatctcgctgggagctacagacctgaactgttcctatttgaccatcttgacagctctcctgatgtaccatatttattcacattcatgttcatcagagatattgacctgtaattttattgtttgtagtatccttgtctggccttactatcagggtaatgttggccttgtaaaaagtttggaaatatttcctcttcttcaatattttggaa

SEQ ID NO: 796695 - DNA, 482 bp, Homo sapiens
aacctttctgtgctccagtttcttcatctgtgaaaagaggatcctaatagtatctgtcctaaagggttgttgtgagtactaaataaagctaatacaaagaaagtgcttagaaccgtgccttgtacatagtaagtactcaatatcattttgcttttcagaaataaaactgtcccatggctatacctttacttctaccagtcatccaaacsaaacattagaaatattgtaattttgatcagcatggggattagaaaaaaaaaagaaaaatattgtaataagcataaacttgtagatagtagttgagaagatgtataaaatctgaatgtttgtgttttagattttttgtgtttgaatttcttgatggcttgacttaaaatttttttattttatgatgtaaaaccattctgtttttcacttttactacagtgttcaatacattacatgagatatttaatgcttttataaggtaagctttgtgttgg

SEQ ID NO: 796696 - DNA, 572 bp, Homo sapiens
gtcaaatggtatttctagttctagatccctgaggaatcgccacactgacttccacaatggtcgaactagtttacagtcccccccaatattataattttataatattttctagaatgtagaagactaggattttaatttcaggtttcccattaagtaactgaaataactatccacttgacttctggaaaccttagtttcctcatttataaaatacagatatctaatttgcataccttacasttagtgaaaagtccaggaagaatcatcttgttaaacactaaagatctgtagaaatgtaagctactgttgttgaaacatcactaagtgttaccctggttttttttgtttttgtttttgtttttctttttctttttgctaataacagtagtgcatttgtacgcaattccccattaggaatttagaaattttatttattaaatatctgactgaatataatagatatagttagaatgatgcaaatcacagagccccaggtgacaaatagccctcaaatcttgttttctgagtctatttgggtatagtgaaaaagatgaaacaaacccactagccag

SEQ ID NO: 796697 - DNA, 656 bp, Homo sapiens
aggccagaaagatcactatctcttgtcatctgtggtttaatgctgacctaaaccactactgtataatgtcagaattatcacagtgtccaggctgcagaagtacaacatgctacatgatttattgcatttcctgtctggaatgaagattatgaaaaggccaacaactgtgagctacagtggtttagaagaaaacttaatttctaatttttatttctctttttcctcattcattttagattttggatttagtaaaggggacacattaccaggtagcctgtcaaaaatactttgagatgatacacaatgtaagtatttttttaactttatatcctaattatttgtcttttgttactgtgtcacattcagggtttttagttgcagcaatggaaaccactctagctattttcagcagaaaaggggattgcatggtattaagtaacctacagcatttattgaaygaccagacaaactaagcttggatgctgcagaaccaggaatattttgtaactaggagaagctacatcatgagaaaatctttactacagctgtcacccaccactccatatctagggatgagaccaagggtcaataaagtttttctgtaaagagccagagtgtaaaaattgtaggcttcatggtccatatggtctgcgtca

SEQ ID NO: 796698 - DNA, 590 bp, Homo sapiens
tatgaaatgtcttaattatctttttactatttatttcaaattgaacagcattgtgatcagagaaagtgatctcatgacatcagttcttaagtatattttgatacttagtctgtggcctagtacacagttaatatttgtaaatattttatgtatgcttgagaagaatgcatattttctgactgttgggttcagggttctacatatttattagarcaaatttattttttgaaagcttttatatctctatttacttttttctgctttacttgtatcagtaactgaaagaaatacgtaaaaacagaaaatcctcccactatgattactaacttgtcaatttctgctataattctttcaacttttactttacctgttttgatggtattttgataagtacaggtttaaaattattatagttcacagattattcacaaaattattttatcattatactatgaaatagtttgtcatattaatgcttttgtgttaaattttattttttatttaattactatagctacattgatttcctttttatttggcttttctgcccacagtcaaggcaacatagacaaattcccttccatttctcc

SEQ ID NO: 796699 - DNA, 531 bp, Homo sapiens
gggcctccattttcttttggcttgtaggatttctgttgaaagttacactattagcctcatgaggtttcctctgtaggtgaccttccccttgtttctagctgtctttaaccgtttttcttttatttcaattttggagaatctgatgactatgtgtcttggtattaccattttgtatggtatcttgtggagagttctctgcatttcctggatttgaatggtggcctctctagtgagtttggggaaatttcattaattatattctcaaatatgttttccaagtttcttgctttcattccctctctttcagaaatgccaatgagtcatagatttggtctctttacataatcccagacasctcagaggttttacccagtcttctttactgtattttctttatttttgtctgactgcattatttcagagaaccagtctttgatccctgagattctttcttcagcttgtttacttctcttgtcaatatttgtgactgtattatgaaattcttgaagtgagtttttcagctgtatcaga

SEQ ID NO: 796700 - DNA, 543 bp, Homo sapiens
gcagatgtcaagttcccacccagcctcacacagtggggatcccgcttgggcagcctggcaccagatgaccctttctcagggactgcactgcctttgattttgtgggaagaacactggtttgagagtctgtagccctgggttctgcctccttggggtgaccttggactaccttccgacagtggagatgaatgctgctctgcctcccctgggtcttagatagggaatacaacatatatatatatgtgtgtgtgtgtatctatatatacgtgtgtgtatatatacacacacatatatatatacacgcacatatatatayacacacacacacacatatagagagagagagggaaagagagagagtgtgtgtttatgtgtggcctataccttattttaaggatatggctcatgtgattatgggcgctggcaggtccaaaatgtgtagggtgggccagcaggttggaaactcaggcaggatttgatgttgcagttttgaggcagaatgtcttctctggcaaatgcgtttttgctcttaaagccttcaac

SEQ ID NO: 796701 - DNA, 660 bp, Homo sapiens
tggcttcacccagtggatcccgcaccagggctgcaggtggagctgcctgccagtcccgcgcggtgcgcccgcactcctcagccctttggtggtcgatgggactgggcgccgtgaagcgagggggcggcgctcatcggggaggcttgggcggcgcaggagcccatggaggcggtgggaggctcaggcatggcgggctgcaggtcccgagccctgccccgcgggaaggcagctaaggcccggtgagaaatcgagcgcagcgctggtgggctggcactgctgggggacccagtacaccctctgcagccgctggcccggggccggyggggccggccggctgctccgagtgcatccgccaagcccgcccgccaagcccacacccatccggaactccagctggcccgcaagcgccgcgcgcagccccggttccccgctcgcgcctctccctccacacctccctgcaagctgagggagccggctctggccttggccagcccagaaaggggcttccacagtgcagcagtgggctaaagggctcctcaagtgccgccaaagtgggagcccaggcagaggaggcaccgagagcgagtgagggctgtgaggactgccagcacgctgtcacctctcactgggttcaagcaattctcctgcctcagcctcccg

SEQ ID NO: 796702 - DNA, 660 bp, Homo sapiens
tggcttcacccagtggatcccgcaccagggctgcaggtggagctgcctgccagtcccgcgcggtgcgcccgcactcctcagccctttggtggtcgatgggactgggcgccgtgaagcgagggggcggcgctcatcggggaggcttgggcggcgcaggagcccatggaggcggtgggaggctcaggcatggcgggctgcaggtcccgagccctgccccgcgggaaggcagctaaggcccggtgagaaatcgagcgcagcgctggtgggctggcactgctgggggacccagtacaccctctgcagccgctggcccggggccggtrgggccggccggctgctccgagtgcatccgccaagcccgcccgccaagcccacacccatccggaactccagctggcccgcaagcgccgcgcgcagccccggttccccgctcgcgcctctccctccacacctccctgcaagctgagggagccggctctggccttggccagcccagaaaggggcttccacagtgcagcagtgggctaaagggctcctcaagtgccgccaaagtgggagcccaggcagaggaggcaccgagagcgagtgagggctgtgaggactgccagcacgctgtcacctctcactgggttcaagcaattctcctgcctcagcctcccg

SEQ ID NO: 796703 - DNA, 660 bp, Homo sapiens
tggcttcacccagtggatcccgcaccagggctgcaggtggagctgcctgccagtcccgcgcggtgcgcccgcactcctcagccctttggtggtcgatgggactgggcgccgtgaagcgagggggcggcgctcatcggggaggcttgggcggcgcaggagcccatggaggcggtgggaggctcaggcatggcgggctgcaggtcccgagccctgccccgcgggaaggcagctaaggcccggtgagaaatcgagcgcagcgctggtgggctggcactgctgggggacccagtacaccctctgcagccgctggcccggggccggtggggccggccggctgctccgagtgcatccgccaagcccgcccgccaagcccacacccatccggaactccagcyggcccgcaagcgccgcgcgcagccccggttccccgctcgcgcctctccctccacacctccctgcaagctgagggagccggctctggccttggccagcccagaaaggggcttccacagtgcagcagtgggctaaagggctcctcaagtgccgccaaagtgggagcccaggcagaggaggcaccgagagcgagtgagggctgtgaggactgccagcacgctgtcacctctcactgggttcaagcaattctcctgcctcagcctcccg

SEQ ID NO: 796704 - DNA, 619 bp, Homo sapiens
ggtgtgtgcctgtaatagctcccctagagcctgaggcaggagaatcacttgaacccaggaggcggaggttgcagtgagctgagatcgtgtcattgcactccagcctgggcaacagagtgagactccatctcaaaaaaaaaaaaattattttccaaattatttatctaaaactggatgttgatgagttgtgcagaaaaaccatgatctttttagggtgttcaaaataagcattgcagattattmatgtatttcaagagagcagtagtgatgagaaccgtaagtcctcgcctaagtatcctacttggggatcacagcataaaaattgaattttgagggcaaaatctatggtccagagccttttccagctgggctgtgtgtggtggaccaagcccccgggaagggataggcagcgctggggcactcatgtcaacacagagggactgtggcccctgtgggacgtggagactcaagcgtgtgaaagcagtggcccaagagggatgacagcccaacagtcgtaggcacaagcatgcgacagctgagcaccagcctctcaggatgacttctcagggcagaggctcctcacaggtgtacaggggatcccgtgggatcttcgggtctg

SEQ ID NO: 796705 - DNA, 619 bp, Homo sapiens
ggtgtgtgcctgtaatagctcccctagagcctgaggcaggagaatcacttgaacccaggaggcggaggttgcagtgagctgagatcgtgtcattgcactccagcctgggcaacagagtgagactccatctcaaaaaaaaaaaaattattttccaaattatttatctaaaactggatgttgatgagttgtgcagaaaaaccatgatctttttagggtgttcaaaataagcattgcagattattcatgtatttcaagagagcagtagtgatgagaaccgtaagtcctcgcctaagtatcctacttggggatcacagcataaaaatygaattttgagggcaaaatctatggtccagagccttttccagctgggctgtgtgtggtggaccaagcccccgggaagggataggcagcgctggggcactcatgtcaacacagagggactgtggcccctgtgggacgtggagactcaagcgtgtgaaagcagtggcccaagagggatgacagcccaacagtcgtaggcacaagcatgcgacagctgagcaccagcctctcaggatgacttctcagggcagaggctcctcacaggtgtacaggggatcccgtgggatcttcgggtctg

SEQ ID NO: 796706 - DNA, 604 bp, Homo sapiens
ttatactgctttggctatatactcagtaatgagattgtgggtcaaatgatatttctgcttccagatctttgaggaatcaccacactgtcttccacaattgttgaactaatttcccaccaatattgtaaaagcattccctttgctcagcaaccttgccatcttctgctgtttcttgactttttaataattgccattctgactagcatgagatggtgtatctccttgtggttttgatttgcatttctccaatgctcagtgatattgagctttttttcatgtttgtttgctgcatgtatgtcttttgtgrgaagtgtctcttcatgtcctttgcccactttttaatggggttatttgttttttcttgtaaatttatttaagtttgttgtagaataagttcctatatcctctggatgttagacctttctcagatgggtagattgcaaaacttttctcccaatctgtaggatgtctgttcactctgatgacagtttcttttgctgtgcagaagctctttagtttaattagatcccatttgccaatttttgcttttgttgttattgcctttggcatttttgtataaaatctttgcccatgcctatgtcct

SEQ ID NO: 796707 - DNA, 618 bp, Homo sapiens
taatttagagattaagtgtatggaaagatgtgtgtagtatatattcaaatatcacacaactttactttttgaggtagttcttcattttttttattttatggcagcataacagttgtaaatatttatggagtatatttgatattgtgatactagcatacaatatataatgataaaaygagggtaattgggatatatgtaacttcaaacgtttatcatttatttgtatttgaaactttccatttcccctcttctagttatttttaaatatgccataacatgttagctatagcagtactattgtgcaactgaacattggatctttttccttctaactatttttatactcattaattaagccctctttatttcacattcccactattcttcagagttcctggtgaccatcattctactctctatatccatgaggtcatttttttttagctcccatgtatgagtgagaacatgagatataggatatttgtctttctgtgcctgacttatttcacttaacataatgtcttccaggttgatctacgttgttgcaaatgacagaatttcattacttttatggctgaatagtattctattgtgtatgtgtaccatattttctttatc

SEQ ID NO: 796708 - DNA, 568 bp, Homo sapiens
ccagcaatgcataatcagtctgatttcttcatatctttgccaaggcttattattctctggtatctctctctctctctttttttttttttttaaataatagacatcctagttgatgtgaagtggtatctcattatagttttaatttgcatttatctaattattagtgcttttgaacatcttttcttttcttttacttattggccatttgtatatcttctttgtagaagtgtttatatcagtcctttgctcattttttaatcaggttgtttgtttttttcgttgagttgtatgagttattattctgtataatactcttttatcaggaatatggtttgcaaaaactatctctcattctgtggkttgccatttcattcctttaatactatcctcattttaaaaaaaaaaattgtaaatggcagtttaacatctcattttcaaatgtttataatctcattattgtgctaccttttgcaccactgcctgaaaacagttgccttatatgtgttgttcagatttataattctttagagtgggaggactcattctacatctttgttctttatggcca

SEQ ID NO: 796709 - DNA, 631 bp, Homo sapiens
aaaatgaaattgaaaatggtctcttgcaccattttataggatgatacttgcaaacattttctccctaaagccatgatcctgatatatatctataatctatatggagtaaaacagtaagagctagaacatactgagtagttggtgtgtacaaagtgttcgaatgatatccatatggaaaaattcatttcactctcatgagaaccacatgatgtatttgctgttgtctttccattacataagtaaagaaactgaatgctktagacttacatatgttattcaggcacatatctgttaaattttaaaggcaatctaaatataaatatcatgcttatagccactataccaaactacttctcaaataattgcatttcttagggtgtgagcagttcactgttgttggttttatagtttttgctatttgtgggatgtttaagtacgaaaaagaggtgcacatttatattgaacaaggagcagacattagccgttaatcatatgtctttttttttctgtatgtgttttgaataccctttttatttgggaagtgttcccacattgttatttgcttccttaggaaaatggaaatttgcattttttttccttcctttaaaatagaatacaggtatgtgaccca

SEQ ID NO: 796710 - DNA, 631 bp, Homo sapiens
aaaatgaaattgaaaatggtctcttgcaccattttataggatgatacttgcaaacattttctccctaaagccatgatcctgatatatatctataatctatatggagtaaaacagtaagagctagaacatactgagtagttggtgtgtacaaagtgttcgaatgatatccatatggaaaaattcatttcactctcatgagaaccacatgatgtatttgctgttgtctttccattacataagtaaagaaactgaatgctgtagacttacatatgttattcaggcacatatctgttaaattttaaaggcaatctaaatataaatatcatgcttatagccactataccaaactacttctcaaataattgcatttcttagggtgtgagcagttcactgttgttggttttatagtttttgctatttgtgggatgtttaagtacgaaaaagaggtgcacatttatattgaacaaggagcagacattagccrttaatcatatgtctttttttttctgtatgtgttttgaataccctttttatttgggaagtgttcccacattgttatttgcttccttaggaaaatggaaatttgcattttttttccttcctttaaaatagaatacaggtatgtgaccca

SEQ ID NO: 796711 - DNA, 585 bp, Homo sapiens
ttaaatatttcacacatgtgatatggaatcttcaaaaatgggtgacttttgtaggtgtgcattattttattcacataaatattttttataattctgtacgttttgtctaagcaatatatttttgagatccagtcaactttgttatatgttcattaaatctgtttactctagatttattgtaataccttatattgtatagtcacaatattttgcctattcactttccaagtcacttctggtttcctaccagctcaaacaatatatatttttgcaaaattatacacacagrcataatctgttatggaaatgtaaaaggacatttatttgatgtatcacaggagcagaattattgagtcttttagtattgactacttgttttcactaagttgtgccaggttgctttccacaacattctcagcaagagtgcatgaggattcttgcatacacctacccccacccaccatcactcaacatgagcatcacccactattctattcatgtaacactaaaaaattacacatcatggttattttaatttgtaattaggttataaagatagattcctacattttcttctattaactt

SEQ ID NO: 796712 - DNA, 592 bp, Homo sapiens
attcaatagctcccttaagttttctattagccttggtggtgctgttatcacagcacttactccagcttgtgttctggggacatgcatgcaatatgtctcctttccttcctgcattcccacccctgctccctggatggcagtctccatgaaggacagcccccatacctctagtgcccaccttgagcccagcacagggttggtgctcatgaatgttggttggatctgctcagagaactggctctatgatggtacaggggcaagtaatgggatatgtractctgggctaaacatggacaacattctttgttggcattcatattcctgcatttagaactggaccatgtggtgctggagaggccattgcactgactggcaagagaagacctgcttcaccgtggtccacacagtaatttccctggcttcactcaaggctaactgtcctccagcaaaacacccctcttttcctctcacagatgaagcaggtgagtgactccattatcttccagagagcactcctgtgaacgtagccttgtagcacaagcttacaccctaatcataacgcccgtaggagaggccatcaatgctgagtgga

SEQ ID NO: 796713 - DNA, 614 bp, Homo sapiens
aatgtaaaaaatgaaaaaagaactcttccaccacgatgcagggaaaaaattactcttaattactggggcttctctacaattataggacgtgtgtttgaactctgaagggtcctctcctgaggataacctttatttgcctgattgcgtctgttcagttaattctggctaattactattttcttcctattagattctaattatatacagtattttcattataaagcgtaatgtttcccagagaaccatgtcaattatacaggcgatattaccggaggtctggtttacctcattaagcccaagcgatgaagccatgcatctgattaaacccacaatttgcagggtggactttamctatatgtgggtaccagtgagtctcacctaaaacttgctggatgtgggagagagctagaaagcctaggagaagctcctcaaaggatgtggcagcccatttggatgtgttggattttctgcaggaagaacaagtgttgatttatattgtctatttttaagcaccccatgatttctagtttggctgaggcatgaatttgatgctatcatgaaagagtaggtcttacccttgcttcaaatgattctggtagaacacccagcatttc

SEQ ID NO: 796714 - DNA, 605 bp, Homo sapiens
caatacatctgcctgctcaagatattgtgaggttcaaacaagttaatgaaagtcaaaatgcaatgtaaactgtgaaatgctttcctctcaaggggatgtttagtttaaccatcattatttctgtggatctttagaaagctggttggactttatttcattctttttcatggctgtgtagtattccctggggtgtgtgtgtgtgtgtgtgtgtgtrtatatatatatatatatatatatatatatatatatatatatatatataccacattttctttttctttttttttttttgagatggagttttgctcttgtaatccaggctggagtgcagtggcatgatctcagctcactgcaacctctgcctcccgggttcaagtgattctcctgcctcagcctcccaaataactgggattacagatgtgtgccaccacacccgggtaatttttgtatttttaatagagactgtgttttgccgtgttggccaggctggtctcgaactcctgacctcaggtgatctgcctgcctcagcctcccaaagtgctgggattacaaacgtgagccactgtgcttggccccacattttctttatataaaacattgtttat

SEQ ID NO: 796715 - DNA, 646 bp, Homo sapiens
ttatggccccagaatagaatttctgaatattggtataattgagggaatgtatctggcctttaaaactacaggaatataccacagttctgaaaaatgtttcagatcttgggaaacaaaatgaattgaagggtaggagagagaaaattatgagctcagtattggagtcttgtaccagcctctatctgccagatgttcttccattttctacttagaaaccattcccctatttagtcaaggggagatgakctgcctttttatttggtaaaggagatgggaaacatacattaagaagtatatcattctggaatttaaagggatgggaaatggaataataggggaaggaaagttttgccttgatgactaccttctggacatagaaattaaagtgtgacaaataaggcattttactacaaataaatggtagcaccactttcataacagtagcaaatctaaggaaataaagcctagtttacaaggtctatgagagcatggattttggctactatttgaacaacttacatctagtgctagcttggtagatgttctagaagtacttttgtaagaaacagtggttgaaacttagaaccctatagtgtctttttttctctttttctaaagctggaattaggaactctgtatatcacct

SEQ ID NO: 796716 - DNA, 600 bp, Homo sapiens
gctactattctatgttgactttacatggaatatcaaataagggaaagcaagttattaatgataataacagtagctaataataattgcgtttttaccatttggcagacatttctggttgagacattcacaactttcttataaaggtgacatttatattaccattgcacagataaggaaattgagactttgagtgactttccagctaataagtgctaaagttgggattagataccaagyctgactctagggttcagaattttatgccatttgttttcctttttgctatctttaaatgggctcttccatttgatggtgttggaaggttataaatataaatgatggtccttatttgaagcattatgttaagaaggatcctgaagctctatctgggctcagtgagaaagagtgatatttaggtttggtgatgtctgcactggggatggcgaccacaagcatgtatgctgtcattgttattttagcttagcttttccactgttctgagacacctgtcttgttttctcatttcccctttttcatctttccaaatttcaaagtaccaaatggatagttacaagagtagtttttatttaagaataaata

SEQ ID NO: 796717 - DNA, 632 bp, Homo sapiens
gttctaacagctgtcttcccttactggattgggctctatctttttctttctctaccctcttcctatgacttccaggaacttcctggttgctgtattgaatattgctccttggtaccacacttccctattgctgtctgctttcttgttcattcaatawtgcctgtttttgaccactccatcaccatgcccccacaccacttcattaagaacataagctctcaggtcaaatggaactagtttctagacccagccactcactagctggacaacattgaggaaatcaattgacttatctaagcctcagttttctcacctgtcaaatgaggacagcaatagaacaatagtacctctctcctaagcaggattgtaaagattctttgagatcaggcacttaatatacttaatacagggttaacatatgatagttgattcagaaatatgagttactatactgataatgatgataattataactcattaaaaactacttttatgatgcatcattatcatcattatcatcatcttgggcaccaagctgcttgcctgttcgcatcttctggagatggttataaataataatagcaaaatgataattcttcctattgttgagtttttactatttgtcagtgctt

SEQ ID NO: 796718 - DNA, 549 bp, Homo sapiens
tagttctcaaactttttagtttgaggatccctttatactcttaatatttatttattcattaaaaactaatatgataaaactattgcatattaacacaaatatttttatgaagaataaccatttacaaaataaatttagcaaaaagaatgacattgttttacaactttgcaaatttctttaaagtctggcttaatagaagacacctgtatagccacctgcttctgtgttcagtctgttttgataggttgttttgattgaagccaaggaataaartgcagcctcacacagatatgcaataggaaaaggaagaaaaattctaatagccattcagacagtttctgatagcccattaaaacttgacaaatggtagtttcttaaagggtaattgcatgtggaatctgaagccatatcaatgaaattttgtactgtattccataaaatccattgttctgtccattggatcttttcctcacataacatgatgcattggttatttggaaaacactggtttgctgagttatgcaaatcttccaaacgttaacacatttc

SEQ ID NO: 796719 - DNA, 549 bp, Homo sapiens
tagttctcaaactttttagtttgaggatccctttatactcttaatatttatttattcattaaaaactaatatgataaaactattgcatattaacacaaatatttttatgaagaataaccatttacaaaataaatttagcaaaaagaatgacattgttttacaactttgcaaatttctttaaagtctggcttaatagaagacacctgtatagccacctgcttctgtgttcagtctgttttgataggttgttttgattgaagccaaggaataaaatgcagcctcacacagatatgcaataggaaaaggaagaaaaattytaatagccattcagacagtttctgatagcccattaaaacttgacaaatggtagtttcttaaagggtaattgcatgtggaatctgaagccatatcaatgaaattttgtactgtattccataaaatccattgttctgtccattggatcttttcctcacataacatgatgcattggttatttggaaaacactggtttgctgagttatgcaaatcttccaaacgttaacacatttc

SEQ ID NO: 796720 - DNA, 613 bp, Homo sapiens
agctggtacttgggaggcaggcggatcactagagttcaggagttcgagaccagcctggccaatgtgttgaaaccctgtctctattaaaaatacacacacacacacacacaaaaatagctgggcatggtggtgtgtgcctgtagtcccagctatctgagaggctgaggcaggagaatcacttgaacttgggaggcagatgttgtgataagccgagattgtaccactgcactccagccttggcgacagagcaagactgtctcaaaaaaaaaaaaaaaaaaaggatgtctcttccccggaaaaattggagtacacgtagcgtaagaggtctaaggagactttggatggcaaacatgagaaatgaccacaattctagtgtcyttccctttaattctgccaaagtattttctttctatggaaagctcagaataaatcctgctgatctcttactggtaattgccaagctctgtagaaatttaagacattttcttatcggatctcattttttgtttgaccctgttgattactccctcccttctgcagctcctcacttattcattaaaactccatttcctggcctggatgggtggctcacgcctataatcctagcaatttg

SEQ ID NO: 796721 - DNA, 535 bp, Homo sapiens
gcctggcttgtaaatcattattttatttgggggttaatgagggagtggaggagagaaattgtaagaaaatactgaaggggcgccgggtgcggtggctcaagcctgtaatcccagcactttgggaagccgaggtgggcggatcacgaggtcaggagatcgagaccatcctggctaacacggtgaaaccccgtctctactaaaaatacaaaaaattagccgggcgtggtggtggtggtcgcctgtagtcccagctactcaggaggctgaggcaggagaatggcgtgaacccgggaggcggagcttgcagtgagcsgagatcgtgccactgcaccacaacctgggcgacagagcaagactccggtctcgaaaagaaaagaaaagaaaagaaaatactgaaggggctatttcatgaaaaacgataagacaatgatagacctaatagcatataaaaccagaagaggagcaagatggtatttcagagtattacagagtaatactttgcagccttagcaactgaaggaatccagataaggta

SEQ ID NO: 796722 - DNA, 563 bp, Homo sapiens
taaagttttagcaaggcatgtggcatcccttgaaactagatgtggccattgactaggttctggccaatgggattgtgagtgggagtgatgtgggaacttctggatcatactcctaaaggaaatgaggacatattcccttttttcttatcctcttctgctagctagaatgcagatatccaggtggcagctggaatagccatcatggtccatgaggtggaagccaccttttgagagagcagaataaaaagacacaaggagtcaaaytccacagaatcatggtgccaccttatcagcccttgactcctgtattgaagagaagcaaacttctatttcatgtaagtggctattacttttgttcttattattatacagccaaaccactaccataactactgaagtggataccatcatcattctcattttaaagttggataaactgagacacacagaacttaagtgatggagtggcagagccagggtttgaaccagaaaatctggcttcagagtcttccctcttaaccacagccctctacttttttactttctctgatcagatactatgc

SEQ ID NO: 796723 - DNA, 563 bp, Homo sapiens
taaagttttagcaaggcatgtggcatcccttgaaactagatgtggccattgactaggttctggccaatgggattgtgagtgggagtgatgtgggaacttctggatcatactcctaaaggaaatgaggacatattcccttttttcttatcctcttctgctagctagaatgcagatatccaggtggcagctggaatagccatcatggtccatgaggtggaagccaccttttgagagagcagaataaaaagacacaaggagtcaaactccacagaatcatggtgccaccttatcagcccttgactcctgtattgaagagaagcaaacttctatttcatgtaagtggctattacttttgttcttattattatacagccaaaccactaccataactactgaagtsgataccatcatcattctcattttaaagttggataaactgagacacacagaacttaagtgatggagtggcagagccagggtttgaaccagaaaatctggcttcagagtcttccctcttaaccacagccctctacttttttactttctctgatcagatactatgc

SEQ ID NO: 796724 - DNA, 562 bp, Homo sapiens
tcagaagaatacataaaaatgtgggaatatttggaacttcccagaggcttggaaggctgagaagacagcaaggtgtgggaaagtttggaacttcctagagattgttgaatggttttgaccaaaatgctgatagtgatatagacaatgaattccaggctgagatggtctcagatggagagggacttcttggaaactggagcaaaggtgattctgttatgcttttgcaaagrgactagtggcagtttgccccatcctagagatctgtagaactttgaacttgagagagatgatttagggtacctggcagaagaaattcctaaacagcaaagcattcaagaggaagcagagcataaaagtttggaaaatttgcagcctgatgatgcaatagaaaataaaaacctgtctttggggagaaattcaagctggctgcagaaatttgcataagtaatgaggagatgcatgttaatcaccaagacaatggggataatgtctccagagtatgtcagagatcttcccagcagcccctaccatcacaggcctggaggcctatgagggaaaagtg

SEQ ID NO: 796725 - DNA, 562 bp, Homo sapiens
tcagaagaatacataaaaatgtgggaatatttggaacttcccagaggcttggaaggctgagaagacagcaaggtgtgggaaagtttggaacttcctagagattgttgaatggttttgaccaaaatgctgatagtgatatagacaatgaattccaggctgagatggtctcagatggagagggacttcttggaaactggagcaaaggtgattctgttatgcttttgcaaagggactagtggcagtttgccccatcctagagatctgtagaactttgaacttgagagagatgatttagggtacctggcagaagaaattcctaaacagcaaagcrttcaagaggaagcagagcataaaagtttggaaaatttgcagcctgatgatgcaatagaaaataaaaacctgtctttggggagaaattcaagctggctgcagaaatttgcataagtaatgaggagatgcatgttaatcaccaagacaatggggataatgtctccagagtatgtcagagatcttcccagcagcccctaccatcacaggcctggaggcctatgagggaaaagtg

SEQ ID NO: 796726 - DNA, 659 bp, Homo sapiens
ttattattattatatggtatggtaactccagcctgttacccagctggagtgcagcggcgtgatcatagctcactgtaacctcaaactcctgggctcaagcaatcctcctgcctcagcctctggagtagctagaactacaagcatgcaccaccacctctggctaatttttgtttttgtttttcttttttttttagagacggagttttgatttgttgcccaggctcgtcttgaactcctggcttcaatagatcttcccatttatgaccttctaaagtgttgggattacagatgtaagccagtgttcctggcttgcacttaagttttaatagtacagatatactgcatatatatatgtttatgcacatatatttacacaaaaagtaaaattattttggattaaccctaagaaccaattmtccccctgttgagggcaatataatcacaagaatgcaagattacctataacaactaaactggttcagtagtggagtgcactacccttgagaagagcttcccataacagggattgctcatccagaaggacatctgtcaaagatactaagggcatgcttcccattgaagcttcttgagttctttaaaattcttatagtatttgacttcttccttgttcctggcatattgtcctctgatttctgcca

SEQ ID NO: 796727 - DNA, 516 bp, Homo sapiens
gagctgcgcgagcacggccattcagcacagcccctgcccagcagggaggacccagaggtgagcgtgcaaggatctgagatgagtgttcacatcctagttctgctacttttctgaaatgggcagaagatgggcaaattacttctgtgagccttagcttctcatcagtaaaagggagctgataactccttctaggtgctaartgatattattcttataaaagtgcctaaatgagtgtctggtgcatagcacgccctttgcaagcagatcatcttcacagtgttgggatgcagtgaagtcagactgtccaggtccaagtgcatctgcacctccagctgtgtgactttggggaagttcacttcaacttggggccttggtctcctcttctataaaatgagcgttgttgagagggtgatgatgagttcacataaagcatctaggatagtgcctgccatgatggcaaacactatggaagaatcaattatttattatcagcataagtctgtggtctaccttctg

SEQ ID NO: 796728 - DNA, 571 bp, Homo sapiens
atgatggcaaacactatggaagaatcaattatttattatcagcataagtctgtggtctaccttctgactgctgaagccccagtgtcttttgctttctttctcttcccctgggcaaactttctctctcacattcacatcctctcttatgtctccggaggaaggatgctctgtggmtcccttagcagcaaatgtggaggaatttgaggctgatggggacacagcctttctggcccagcttagttgagaccatgaaggctgcctcctactccctctgtcccatgctggagaatggaacattctattcctgatcctgcagacaaaatgtcgttatggtgattcatggactcagaattccagaaagtccaggctgaaaggggcctcagagggcatcctccctactccatggccttgcccttgtctctccacctccccgatagaaggcactagatctcaatataagccccagggcagcaagactgatctagcttccccattattccgcttgggaataatgcccaaggaccactaggcctgagtctcacagctccaggcctggaaaggagcctacttg

SEQ ID NO: 796729 - DNA, 577 bp, Homo sapiens
tctgcatttaatttttgcttagccccaaagtgttaaaacagcttttcaaagcactaactttttgattttggcccaatttatcaaaacttattattaattcacaaaaagtggcatctgaccatgaacttcttcagaaataattacaaagcaagagcattcagctgcctcaaaattaaattcagctttttttctaaagggggaggaattttaaaataaaatgcttttatctttaaattgatttggagacattataaattctgttttttaagaatcaatcaaacataatctatacacagaaattccaacaaacaggaataagctttttaaaaattaccatgttggtcactgcaaaaaaagaacctccacagaattagatatgcccctgcacaatattataggtttaaatawacaactcatattccagagctattattatggtctcaaagtctgagactgaaactgaaagatgcacttcagctgcaaatatgtagcaattatcatgaaatgaacttcattccacattcttgctaatcaccatggtaacctacattcaatggattctttctgggaaatattc

SEQ ID NO: 796730 - DNA, 549 bp, Homo sapiens
gtctcactctgtcacccaggctggaattcagtggcacagtctcggctcaccgcaacctctgcctcctgggttcaagtgattctcctgcctcagcctcctgagtcactgggagtacaggcatgcaccaccatgactagctaattttttgtatttttagtagagatggtgtttcactatgttggccaggstggtcttgaactcctgacctcaggtgatctgcccgcctcggccacccagagtgctatgattataggcatgagccaccacaccggaccacaaacacaatttgtaatattcatttaagaactagtaactagggttatatccgtttaagataaacaagtaatatctatttacaaacagagttcttaaataacaaaaataatatttcatctaaatactcattaaattttattttcattgttgaataatatttcattgtgggactaaacctaatgttatttaaactagtataatatatgtaggcattacatctagtttgtcgacattataatttgtgcttctctgaacattcttgtccatgaactc

SEQ ID NO: 796731 - DNA, 549 bp, Homo sapiens
gtctcactctgtcacccaggctggaattcagtggcacagtctcggctcaccgcaacctctgcctcctgggttcaagtgattctcctgcctcagcctcctgagtcactgggagtacaggcatgcaccaccatgactagctaattttttgtatttttagtagagatggtgtttcactatgttggccaggctggtcttgaactcctgacctcrggtgatctgcccgcctcggccacccagagtgctatgattataggcatgagccaccacaccggaccacaaacacaatttgtaatattcatttaagaactagtaactagggttatatccgtttaagataaacaagtaatatctatttacaaacagagttcttaaataacaaaaataatatttcatctaaatactcattaaattttattttcattgttgaataatatttcattgtgggactaaacctaatgttatttaaactagtataatatatgtaggcattacatctagtttgtcgacattataatttgtgcttctctgaacattcttgtccatgaactc

SEQ ID NO: 796732 - DNA, 550 bp, Homo sapiens
tctcactctgtcacccaggctggaattcagtggcacagtctcggctcaccgcaacctctgcctcctgggttcaagtgattctcctgcctcagcctcctgagtcactgggagtacaggcatgcaccaccatgactagctaattttttgtatttttagtagagatggtgtttcactatgttggccaggctggtcttgaactcctgacctcaggtgatctgcccgcctcggccacccagagtgctatgattataggcatgagccaccacaccggaccacaaacacaatttgtaatattcatttaagaactagtaactagggttatatycgtttaagataaacaagtaatatctatttacaaacagagttcttaaataacaaaaataatatttcatctaaatactcattaaattttattttcattgttgaataatatttcattgtgggactaaacctaatgttatttaaactagtataatatatgtaggcattacatctagtttgtcgacattataatttgtgcttctctgaacattcttgtccatgaactctg

SEQ ID NO: 796733 - DNA, 644 bp, Homo sapiens
aatattttagcaaatataatttaactatgcagaaaataaagtttatgatcaagtgtgtttatcataggaatgtgaagtgtttaaaataaaaaaatatcagtgtaatttgctacatttaaaaactaaaacgaaacaaaataaaagcccaatagatagtgacaattcattccataaaatcaaacagtcattccagrggaaaaccctcagcaaactaagtgtagaagataaattcctcaacctgttaaggaatatttacaaaaatcttacaatgaacgtcacacataatagtgaaaaacggaatgcttactctcaaaatcagaaagaaagatgaggagttccacactcaacactttggctcaatattgtactagaagtaatggccaatgcaattagttaaaaaaagagaaagagagataaaaggcatctagtctgaacaagaatctaacaaaagtctttatttacaaacgacataattgaagcaggatatttccctgacctttcgtgggacttgtgacaggggtgacttgtttacccagcctgcagttttcaattccttgcgggagggagtacacaagtgaacggggcaggagctggagtgtgggaattttggaagcagccagccactatggcaggggcaaactcca

SEQ ID NO: 796734 - DNA, 644 bp, Homo sapiens
aatattttagcaaatataatttaactatgcagaaaataaagtttatgatcaagtgtgtttatcataggaatgtgaagtgtttaaaataaaaaaatatcagtgtaatttgctacatttaaaaactaaaacgaaacaaaataaaagcccaatagatagtgacaattcattccataaaatcaaacagtcattccaggggaaaaccctcagcaaactaagtgtagaagataaattcctcaacctgttaaggaatatttacaaaaatcttacaatgaacgtcacacataatagtgaaaaacggaatgcttactctcaaaatcagaaagaaagatgaggagttccacactcaacactttggctcaatattgtactagaagtaatggccaatgcaattagttaaaaaaagagaaagagagataaaaggcatcyagtctgaacaagaatctaacaaaagtctttatttacaaacgacataattgaagcaggatatttccctgacctttcgtgggacttgtgacaggggtgacttgtttacccagcctgcagttttcaattccttgcgggagggagtacacaagtgaacggggcaggagctggagtgtgggaattttggaagcagccagccactatggcaggggcaaactcca

SEQ ID NO: 796735 - DNA, 582 bp, Homo sapiens
ttcaatttacatttacttagcctcttttggtcaggatttattagaagtatttattacaagtagacagaaatcttaaaggctctgtggtaattgtgaactaagcactcattggaagccattatctgcccctaatacatcatttaatagcacaggaggtgacatggtataggaagaacacagatttgggagcccatcgatgtggacccacctagtgtctctaatcctctgctgttcctacaggatacctgtgaagaacacctgagtggyaatgctggggcatggaggagagatgttgggaagatacctgggcacacaactggcatactgcgggcattctgaaaatggagttgatatttctggtaggctttctcaaaggggcaaacactgagtgggagtgaattagaggcaaggagacatgacatgagaagtgcaaaacagagagggagaaaagtatgtgagaggtggtcagaagagagggaaataatttttcatatataaaaagcttcaataaattcagtagagattaatatatacactattgccacgcatggtggctcacacttgtaatcctagccctttgga

SEQ ID NO: 796736 - DNA, 638 bp, Homo sapiens
agatgttgggaagatacctgggcacacaactggcatactgcgggcattctgaaaatggagttgatatttctggtaggctttctcaaaggggcaaacactgagygggagtgaattagaggcaaggagacatgacatgagaagtgcaaaacagagagggagaaaagtatgtgagaggtggtcagaagagagggaaataatttttcatatataaaaagcttcaataaattcagtagagattaatatatacactattgccacgcatggtggctcacacttgtaatcctagccctttggaggccaagggggacagaatacttgggcccaggagtttcaggacagcctgggcaacatggtgaaatcacatctctacaagtaatacaaaaattagctgggtatggtggcatgtgcctttagtcccagctactcaggaggctgaggtgtgaggatcacttgagcccaggaggttgagactgcagtgagccatgacagagccattgcactccagcctggctgacagagtgacatcctgtctcagataataataatacatacactattactttaaacgctaggaacacattggtgcagttggttttcaatcaaatccacatccccagccttataattactgtttctgg

SEQ ID NO: 796737 - DNA, 638 bp, Homo sapiens
agatgttgggaagatacctgggcacacaactggcatactgcgggcattctgaaaatggagttgatatttctggtaggctttctcaaaggggcaaacactgagtgggagtgaattagaggcaaggagacatgacatgagaagtgcaaaacagagagggagaaaagtatgtgagaggtggtcagaagagagggaaataatttttcatatataaaaagcttcaawaaattcagtagagattaatatatacactattgccacgcatggtggctcacacttgtaatcctagccctttggaggccaagggggacagaatacttgggcccaggagtttcaggacagcctgggcaacatggtgaaatcacatctctacaagtaatacaaaaattagctgggtatggtggcatgtgcctttagtcccagctactcaggaggctgaggtgtgaggatcacttgagcccaggaggttgagactgcagtgagccatgacagagccattgcactccagcctggctgacagagtgacatcctgtctcagataataataatacatacactattactttaaacgctaggaacacattggtgcagttggttttcaatcaaatccacatccccagccttataattactgtttctgg

SEQ ID NO: 796738 - DNA, 624 bp, Homo sapiens
cttcaacctttatgaaacagttgttgaaaacggacatgactattccagttaatttatactttctaaggaaatatatttaatgacaagtgtgagcaagtagctcctacctcaaattaaccacttagagtggtgtatttttcacctctcaactctctactcagaccctccttccattgcccttagggaattgaaattcagagacatgacgttttccattattggttccttgcccctttgcaactgtacaacattcctcaaaaagtacatagaattctccatcctataggatcagacaacagtatctatttcaggagcaataatatgcataatgtaagacagaataktttttcttggaattgtctgtgttaattgtgatttaaaggttactggttccgtctatgacaatggtgttgctgagttcacctaagtatttttgttcaatctgcatactttaaaaactcaatgtggctaaaactcaaacagtctaaattagactgttgtaaggataccatgtgccctaaacagtggtttttttagagcattatacttaaagacaacattttccttaaaaaaagaaaaaaaacatgtctatgaagaaacaaagatactgcaaaattagtatag

SEQ ID NO: 796739 - DNA, 571 bp, Homo sapiens
gagaatttagtaagcatcaactaagttaaacttttagagcaatgctgtattagggctctctaaagagacagaactaatggaatatatatatatttatatatatatgggagttttatatatatatgttttatatatatgccatatatatatatatatatatatatatatatatatatatayatatgggagtttattaagtactaactcacaggatcacagggtcccacaataggctgtctgcaagctgaggagcaaggagagccagtccgagttccaacaatgaagaacttggagtctgatattcaagggcagggagcatccagcatgggagagagatgcagtctgggaggctaggtcagtctcacttttcgcatttttctgcctgcttatattctagccaagctggcagatgattagattgtgtctacccagattaagggtgagtctgcctttcccaacccgctgactgaaatgttaatctcctttggcaacaccctcacagacacacccaggatcaatactttgtatccttagatccaatcaagttgacactcagtattaaccatcacaa

SEQ ID NO: 796740 - DNA, 571 bp, Homo sapiens
gagaatttagtaagcatcaactaagttaaacttttagagcaatgctgtattagggctctctaaagagacagaactaatggaatatatatatatttatatatatatgggagttttatatatatatgttttatatatatgccatatatatatatatatatatatatatatatatatatatatatatrggagtttattaagtactaactcacaggatcacagggtcccacaataggctgtctgcaagctgaggagcaaggagagccagtccgagttccaacaatgaagaacttggagtctgatattcaagggcagggagcatccagcatgggagagagatgcagtctgggaggctaggtcagtctcacttttcgcatttttctgcctgcttatattctagccaagctggcagatgattagattgtgtctacccagattaagggtgagtctgcctttcccaacccgctgactgaaatgttaatctcctttggcaacaccctcacagacacacccaggatcaatactttgtatccttagatccaatcaagttgacactcagtattaaccatcacaa

SEQ ID NO: 796741 - DNA, 612 bp, Homo sapiens
ggagttctcactggggaaggatgggagaaagattcactgcataaattgttggtaatgtagtggggcccttcctcaaggggacctggcctctccttcattcaagggattctgggtctgtaaactggctcaactctggaaattgattgaggggctatgattctctgtttctgtaattcaaattagtcttttgtacatttaagctagacattttctgtttatataaattaaattggaatgcagcaggcttcctatcaatttcacttctaggaacactgtgattaattagccaatgtcagtgccctacatgagtcagactattctgattgttgctttgcctctgctgtccatcttgccttggatggttgagtgctgccacttgacttctgccaccttgggatccaattattctcattgtatttaaattttgtagttgagtgactgcagttcccactgttagatctcacatacaragaaaagcaattatagggttcttcaatgatgcaggtgctgccctcacaaatctatttcacaaggctttggtcaagagtatatcttcttggccctcccagctgaaatgagtaggtctaaagtgactaatccactccatcatcc

SEQ ID NO: 796742 - DNA, 629 bp, Homo sapiens
ccctgtcacagtggaaagcttcacagagcagaactcaattggcacccacagagggagcatttagacaagccttagccaaaggtgaatcatccattgcagtggttggaatctgagttccagtaagccttgctactgagtgataaagtgctctgggggtctaattctaaaggtagtctaggccacaaggattgcaattcctaggcaagtcctggtgctgtgctaggcttgaagtcagtggactgagggtacacgtgacttagtaagacaccagctggggcagccaagggagtgcttacattacccctcccccaacactaggcagcacagctcacagctctggaagagacttcttccctctgttkgagaagagaagaaaggaaaagggactgtgtcttataaattggacaccagctcagccacagtaaaagaatacccggcagagtcctaaggcaccaatttcaggcactagcttaaagacatttctagacataccctgggccagaatggaacctgctgcctgaagcgaaggagccagtcctggcagaattcacccatggtgagtaaagagcattaggtcctgaataatcagaagtggtagtcaggcagtacttactataagccttaggtga

SEQ ID NO: 796743 - DNA, 615 bp, Homo sapiens
tcaaagggtaccaacttacagttatgtagaataagtaagtctggagatccaacatgagcatgaggactatagttcataagattttattgtatactagcaattactaaaaaggtatattctaggtgcttctaccacaaaaagaagaaaggtaactatgtaaggtgatgagtatgttattgattatggtaataatttcactatgtatatgtacataaacatcatgttgtataccttaaacatatacagtttaaaaaaaaaaagcaaagcacatgcacaacattggtatcaattcagtgagattatttctcttcacgttttacgttttgcaagtttaaygaccatgattaaatatggcatacaatttacctggcttttctagtatatttttctagggtgagctggtatcatcggaaacagaacctttttaaaaattgtgttttgtttttctctgaattttatgattacttttttccaatcttccctagattttcctgccaaataatactaattctaacagaattattaaaaataataaagctaatgtgcaaattttgaaaaaaattaactttgccttgatcaagaacacagattggttgcaaaatgtggaaacttcca

SEQ ID NO: 796744 - DNA, 534 bp, Homo sapiens
gcatgaggttaatttaacaccatgaatttgtctttcagtcttcaattatacttcctttttgatcactctcttgcttacactttagtactgaactgattatgggttctacctaataatattgcatctgcagcctctggtgtgtcaagtttatagtcctatgccaaaatagatgttttcactgcctcctgctattgactcatatggaacaaataaasctgctttttagagaacatttttctctcatgtaatgaacaggttcaagattagcttgagtctacttggtaaagggagtcactcaagcctacagcaagccacacgtgtcaatgccaacaagtcctgatttccctacaactgagtctgtctctcagtcaagccttcttaggaaaagctttgcctgaaaagtaagctaaggcaggcagctgcccaagattttcttgcccaacagactcttaaacccctaaagcccagtgccaagtctctgtgtaataaggatcctcctggtctcttcttcattctgcttcactcattctctca

SEQ ID NO: 796745 - DNA, 576 bp, Homo sapiens
gatgtgcatgttaaagtccagtgagaatgatctgatcctaagttagtgtgaagtcactgaggagtaagaaaagaaaacaggttacaacttgaattcagcacccatgatatagcaggattccaaaataagtagtgcccatggaaagtggattctaaatcatgattattttagaaacccttgcacttttgaagggaccattccagtctgatcaaacagtattgtcaggggtgatctttgcaattgagaaccaagcttttcctcaccttttctatgagagaagtttctgatttcttctgcaaactaaaagaaatggtttcccacaattggctgataytatgcatttgccaaacttggtggtttgtatctgtacctaaattaaaatttacagaaaaaaaaaatcttgaaatctgtgacattacctggaccttgtaatgtgttgtgaaatgattcatacttgtcatattatggagaaaaataccttgcaggaaaaaaagatgtgatgaaagtgtatttatcataaattacattttttctaggtattctatagaccaaataattgaaatatatttactatca

SEQ ID NO: 796746 - DNA, 658 bp, Homo sapiens
tgaagtagaatctgctatgatgtgttacaattgagggtagtaaaaatataactggagcagaaaaagacttagacaaatttgcaatgcttgtaaagatgtaaaaatttttaagcctatgtttatttgttgtagtatctgttacaggtatcttgtgaaaaatacattaatctgttgtgtattattaaaccagtcgtaccagtggtgaacttcatttacgattgtagattttactgtcggttccatgaatttttgtcagagatagaagctaaacattaaacatggcagttttatggtttagcagtggtaaagttttattgcaataaaaattttgagctgagggatracactgaattttttctgaaagagaagaactggtttaaaccattattatcaaacactgaatagctttggaaattagcctttgctacagactaaataatgtttattaatgaattcaacctaaaatcataaggcaaatgtcacttatatatgtgaagcttaactatagtaaaattactttgacaactaatgtttgaactgcaattaatgtcaagctgctttatacactttctaatctgtcaatggttaaaacaagaatgagatctccattcccacataaatttgcagtagatacattctcaagctcagacaatggtta

SEQ ID NO: 796747 - DNA, 609 bp, Homo sapiens
tcttccaccggtgctgccatatttggtccacacgtgaattgctgtgattaccagcttttttctttcctggagacctttggtggcctctatttatgcagctgaaggagacacttacgacctcattcctgacagttttgggagctgacagcagaacattcaaagaatgacatcaagtggctttcctcarggtcatttcctgctagtgatctctgcaaagatcacattctttaaggatgtgtgggggtcagaaacagaccctattctgtcaggcgagagatgcctggaacagctgtaatgggcagacgtgtgtgtgtgtgtgtctgtgtgtctgtgtgtgtgtgtgtgtgtgtgtgtgtgtgtgtgtacatcctctgtgacatgctttgctggtgaatacaacccctcctcccccggccacacttcgctaaaaacaaaccaggtctgctggggtgcatgactcatgcttgaaccggagtcttcaccctgagacaataattctcattttaaaagcaaatgctgaagtcaacagctgctggggtgactttgcctatcttaatttggcttgttagagacagcacctccttagctgcttgaaggagaacttaagtg

SEQ ID NO: 796748 - DNA, 609 bp, Homo sapiens
tcttccaccggtgctgccatatttggtccacacgtgaattgctgtgattaccagcttttttctttcctggagacctttggtggcctctatttatgcagctgaaggagacacttacgacctcattcctgacagttttgggagctgacagcagaacattcaaagaatgacatcaagtggctttcctcagggtcatttcctgctagtgatctcygcaaagatcacattctttaaggatgtgtgggggtcagaaacagaccctattctgtcaggcgagagatgcctggaacagctgtaatgggcagacgtgtgtgtgtgtgtgtctgtgtgtctgtgtgtgtgtgtgtgtgtgtgtgtgtgtgtgtgtacatcctctgtgacatgctttgctggtgaatacaacccctcctcccccggccacacttcgctaaaaacaaaccaggtctgctggggtgcatgactcatgcttgaaccggagtcttcaccctgagacaataattctcattttaaaagcaaatgctgaagtcaacagctgctggggtgactttgcctatcttaatttggcttgttagagacagcacctccttagctgcttgaaggagaacttaagtg

SEQ ID NO: 796749 - DNA, 609 bp, Homo sapiens
tcttccaccggtgctgccatatttggtccacacgtgaattgctgtgattaccagcttttttctttcctggagacctttggtggcctctatttatgcagctgaaggagacacttacgacctcattcctgacagttttgggagctgacagcagaacattcaaagaatgacatcaagtggctttcctcagggtcatttcctgctagtgatctctgcaaagatcacattctttaaggatgtgtgggggtcagaaacagaccctattctgtcaggcgagagatgcctggarcagctgtaatgggcagacgtgtgtgtgtgtgtgtctgtgtgtctgtgtgtgtgtgtgtgtgtgtgtgtgtgtgtgtgtacatcctctgtgacatgctttgctggtgaatacaacccctcctcccccggccacacttcgctaaaaacaaaccaggtctgctggggtgcatgactcatgcttgaaccggagtcttcaccctgagacaataattctcattttaaaagcaaatgctgaagtcaacagctgctggggtgactttgcctatcttaatttggcttgttagagacagcacctccttagctgcttgaaggagaacttaagtg

SEQ ID NO: 796750 - DNA, 613 bp, Homo sapiens
atggctatgagtgagtcactggatgtttagaaaaattgatcaccgatttatacacattgttcactttattcacattactggaaaatcagagctgcaacatttaaactaaaaggcttaaagttatatgagagaacaagggacactgatatttggaatttctttgacttactgctggaacccaatgtgatcaagacatctttaatgggcattctaattggttgctttggccaaagttttggtgtgmccgagagaggggggatgatgaagcctagttaggagctctcctacctaccagggagtaacaacttgtgccggagggaaatatgaacaagaaccatgtaacagaccaaggtcaatagcagtggcagctctgtattgagcatttattcagtgtcaactactgtgctgggctcaccttcacaacgagacagtattaccatcatcattttaccagttaacagttacctacataaggccacaccgttcataagtggtcgaatgataatgatgatgatattaacaatcatcatgagaacttacctggcattgtgcttttctgtttacagaaggaatttaaataaataattgcatttgatccttatagtatgttggt

SEQ ID NO: 796751 - DNA, 613 bp, Homo sapiens
atggctatgagtgagtcactggatgtttagaaaaattgatcaccgatttatacacattgttcactttattcacattactggaaaatcagagctgcaacatttaaactaaaaggcttaaagttatatgagagaacaagggacactgatatttggaatttctttgacttactgctggaacccaatgtgatcaagacatctttaatgggcattctaattggttgctttggccaaagttttggtgtgaccgagagaggggggatgatraagcctagttaggagctctcctacctaccagggagtaacaacttgtgccggagggaaatatgaacaagaaccatgtaacagaccaaggtcaatagcagtggcagctctgtattgagcatttattcagtgtcaactactgtgctgggctcaccttcacaacgagacagtattaccatcatcattttaccagttaacagttacctacataaggccacaccgttcataagtggtcgaatgataatgatgatgatattaacaatcatcatgagaacttacctggcattgtgcttttctgtttacagaaggaatttaaataaataattgcatttgatccttatagtatgttggt

SEQ ID NO: 796752 - DNA, 613 bp, Homo sapiens
atggctatgagtgagtcactggatgtttagaaaaattgatcaccgatttatacacattgttcactttattcacattactggaaaatcagagctgcaacatttaaactaaaaggcttaaagttatatgagagaacaagggacactgatatttggaatttctttgacttactgctggaacccaatgtgatcaagacatctttaatgggcattctaattggttgctttggccaaagttttggtgtgaccgagagaggggggatgatgaagcctagttaggagctctcctacctaccagggagtaacaacttgtgccggagggaaatatgaacaagaaccatgtaacagaccaaggtcaatagcagtggcagctctgtattgagcatttattcagtgtcaactactgtgytgggctcaccttcacaacgagacagtattaccatcatcattttaccagttaacagttacctacataaggccacaccgttcataagtggtcgaatgataatgatgatgatattaacaatcatcatgagaacttacctggcattgtgcttttctgtttacagaaggaatttaaataaataattgcatttgatccttatagtatgttggt

SEQ ID NO: 796753 - DNA, 467 bp, Homo sapiens
accagacaaattgagcagaaaaatgtccttttattcaaatgttatggctgtttagaatctttctgctttatctctttaaaacatacatagtccattaatatattcactgaatctttgaaattttgattgcttcataaaatgattttgttacaaaccttttaataatctattaaatatatcaattcttttaatcataatttaattatacttaatattatatctaagccacctctttagccattttcaaataaagagaaaccagtagagtctttaagtgttcaattgcraatatcaatatagaaaagataatatttcagtaatagagaaaaatttaacctgtaacaatttaacatcaaaagaaaaatgtcttggattcatcaaaattgatatactcagttaatttttttggaaggaaaaaaatcttcaaaacctagaaactgaagaagagcaataataattgaacatgt

SEQ ID NO: 796754 - DNA, 631 bp, Homo sapiens
aaatgacctgaccatatcaggtttaaaatgaccttgagttaatttttaaatggttacctagtacacatcagtatgttggcagcaatgaagtctgactgtaataacattctgtaccagaatttattctgtcaactgaagggaaaaaaaatatcccccaaatataaatatatgcatgatgtatttacattcataaacactagatgaattaaaaaacttaacactctcttactgatgcatatttaaatatatggaagcacctcatattactattcaaatattctattacaaatacatttgctaattttgtgtactttttttgtaatttgtattattttwtaaaaaagtgaataccaaaacaaattatataccacaggaaaacgtgctagctcaacagaatcaattagtatattttgaggacaaatttatacaatatgttatttcggatgtgcttcaagaaaaataaaatgaatcacacctcaaaacagaaatccttttcaatagtaaatgagttcatttataattgttaagcttattagtcagctaagaacaatactagtctctttgtaaaaatttctttattatgtcaaggccttcattgcctttcacacagaagagcatttcttacacattt

SEQ ID NO: 796755 - DNA, 631 bp, Homo sapiens
aaatgacctgaccatatcaggtttaaaatgaccttgagttaatttttaaatggttacctagtacacatcagtatgttggcagcaatgaagtctgactgtaataacattctgtaccagaatttattctgtcaactgaagggaaaaaaaatatcccccaaatataaatatatgcatgatgtatttacattcataaacactagatgaattaaaaaacttaacactctcttactgatgcatatttaaatatatggaagcacctcatattactattcaaatattctattacaaatacatttgctaattttgtgtactttttttgtaatttgtattatttttwaaaaaagtgaataccaaaacaaattatataccacaggaaaacgtgctagctcaacagaatcaattagtatattttgaggacaaatttatacaatatgttatttcggatgtgcttcaagaaaaataaaatgaatcacacctcaaaacagaaatccttttcaatagtaaatgagttcatttataattgttaagcttattagtcagctaagaacaatactagtctctttgtaaaaatttctttattatgtcaaggccttcattgcctttcacacagaagagcatttcttacacattt

SEQ ID NO: 796756 - DNA, 595 bp, Homo sapiens
tatttagctggcctctaattaatttattagatttttaaagtgtgatttcacataattacaaagacatatttgctgatgacgtaccaaatatctggtacattacaaatgtccaataaatgtaagttcccctttcattcctctcatggcatggatcattcagtctgcttatttacatagtgttcacaatgttaacaagtttagacagtggttttatatttattaccctctttttaatcacatctttaattttatcggtttttaaaatattttccagtctcagggcaagtccagtacatatgatttatattcagcaggagcaaacatcaagtggttcagaaggcatcaaacgatttttcaaaaactgtgtgtgtgtgtgtgtgtgtgtgtgtrtgtatgtatgtatatatctgcatacacacatacagttgactcttgaacaatgcaggggttaggggcacacagtcagaaatccacattccacatagaacttttgagtcccccaaaatttaactactaataccctactgttgcctgaaagtttcaccaataacataggcaggtgattgacacatagactgctctctacatatatgca

SEQ ID NO: 796757 - DNA, 611 bp, Homo sapiens
gaagaacatagcatgaacaaattcatggagacaaaatagtactgtatgcttctagaaaaacaatatctttttgattaagaaaatattttgtgggtttgtagagttcatgcctgtgatttatgggaaggaactacaaagagacagtatgggattcccaatgtccarggtccagatacgaagttgggtgttaatttccctggtactgagcaaaggagggagtgagtgccccaaaagagaaaaggatcaaaagttcttgttacgaatgatttgagccatgctccagaaaaacgtttctcgtagcaccatgcaaaatggaatagatctagttatagaaactagtagagttcccagctaagaggccagtacaattattagaggcaagtagcaacccatggtggcactgggaagaggaagaaaagatacagatgtaacagacaagggtctgtgatattgtcaggctgcgggttcaaaatgagagtccttccacaaagtactgttgtagttgaatgaatcaatattaattgaatgaaagcattgtgctgaattttactaaattaggtttgtatagaaaaatgtaacctcatgtatatgtattaccctagtgaatatga

SEQ ID NO: 796758 - DNA, 625 bp, Homo sapiens
attttatgattgattttgctagttctgtgaagaatgccattggtattttgatagagattacattgaatatgcagattactttgatttgtatgatcatttttacaacatgaattcatcccattcataagcatgagatatcttttctttttttgggggagtggggtcttcttcaatttcttccgccagtattttgtagttttcatcatagagatcattcaccttcctggttaaatttattcctaattatgttatttttgtataactattgtaaataggattactttcttggtttctttttcagttagtttgtttttaagtgtatagaaatactactgttgtttgtatgtggatttgcatcstgtgcctttactgatttcccttatcagttctatgaattttttggtagagttttaatgtttttctatatataagatcatgctctctgtaaagaggaacattttgatttcctcttttccaatttgaatgtcctttatttctttatcttgcgtaattgctctggctaggacttccagtactctattgaatagagtggtgaaagtgggcatccttgtcttgttccagcacttaatggaaaagatttctcttttttcctttcagaatgatg

SEQ ID NO: 796759 - DNA, 646 bp, Homo sapiens
ttatctttttgaagtgcttttggattcagtttgctagtattttgttgataattttttcatatacgttcttcagtgatatgggcctatagttttctttttttgttgtgtccttgtctgattttggtatcagagtaatgctagccttacagagtttgcaagtattctttcttctacaaaaaatttttgaagagtttctgtttaattgttttaaccaatttttgattgaattgttttcttattgatttatgagagttctttttatatatctggattcaacttctttatcagatgtatgctttgcaaatattttcttccagcacacaagttgtctttttgttctcttaacagtgcctttcaaagaaaagatatttttaaaatgtttaygaggtccagttttatcaatttattctttcatggatcatgcttttgatgtcatatataaaaaaaaatttgcctaacccaaggtcacaaaattttttcctaggttttcttctagaagttttatagttttatgttttacatttaggtccatgatagtttgagttaaattttgtttatgccatgagatatggatcaatttttgcagttgatatgatatgcagttgtttcagcaccatttgttgaaaagattatccttcttccattg

SEQ ID NO: 796760 - DNA, 567 bp, Homo sapiens
ttgtagttataaaaaagcataaggaatacttaaacaaaaaaaatgttaatctgtttcttttgctacattttccttgacccctctaacatttgggaaatacgactgttgattcttttgctgtcttcaatatccacattattggcaacaagtgagaaaagagctaagctgtctggataagttacaaagcagataatcagatgaacgatggaattttaaaaattgtgtttgagttttctcatcttaaattgccatcctttaattttctgtccttctgtaatataaatcgcacacttctaatgatggtgatcggggtggggacggggctctttgtaaaggttttccatatgggcacctggggagggaagaaatgctatatgaattggtaaaatacatggcccattgtctctacctctgctgtgtaaataaagagygaagagaagcatacaagtggttttgaaacggtctcttcaatagagacctcgagagaaagagatgaagataaatacctgaggcactgttaatttttagaaataactatatcatattataaaccattcatttattttg

SEQ ID NO: 796761 - DNA, 371 bp, Homo sapiens
acccaacatgctggtctttgcggccggacctgcagtggcctggcactcgagaggtgccaggttcatctttgctgatggattcagagttgcttgtcagaggctgactgagaactggggagaggtggtgcatacgaggttgctgggcccctggggaggcatccagccatgctgcyaccaccggctgaatcaagctgattctaaggccggtggtccgagggtcatttttggacctcccgccctgcctaggctcccttcacctgtttccaaggggctggggcgtccagcagcaggctccccctgctggccatccggggccagagcgtgaggtcagtctggggcttggggcgtaccttgccggcccctggcagtcc

SEQ ID NO: 796762 - DNA, 371 bp, Homo sapiens
acccaacatgctggtctttgcggccggacctgcagtggcctggcactcgagaggtgccaggttcatctttgctgatggattcagagttgcttgtcagaggctgactgagaactggggagaggtggtgcatacgaggttgctgggcccctggggaggcatccagccatgctgccaccacsggctgaatcaagctgattctaaggccggtggtccgagggtcatttttggacctcccgccctgcctaggctcccttcacctgtttccaaggggctggggcgtccagcagcaggctccccctgctggccatccggggccagagcgtgaggtcagtctggggcttggggcgtaccttgccggcccctggcagtcc

SEQ ID NO: 796763 - DNA, 666 bp, Homo sapiens
catcagcgtcagacctggggatccagtcctggttccgccacttaggcacctagtggccttgggcaagtggcatagcctctcgggctcagttctgttcccttgtaagcaaggacaatgctatctaccacctggggatggtgatcaaaataaaatcatttccataaagttctcagcacagygctaggcatgctacaagcaatcaataaagacaactatgatggccatcttgcagggactcagcactgcacacttgttatgtgttgacacgttctcagctcacttgggctccacaacaatcctgcaaggtaggcagggaagatttctactttattcattcatttatttatttattttttgagaccgagtcccactctgttgcccaggctagagtgcagtggtgcgatcttggttcactacaacctccgcctcccaaggtcaagcaattcttttacctcagcctccctagtagcggggattacaggcacatgccaccacacccagctaatttttatatttttagtagagacagagttttgccatgttggtagggctggtctcaaactcctggcctcaggtgatccacccaccttagcctcccaaagtgctgggattatacgtgtgagccactgcacccggccggtttttaacattctttctcattttaca

SEQ ID NO: 796764 - DNA, 666 bp, Homo sapiens
catcagcgtcagacctggggatccagtcctggttccgccacttaggcacctagtggccttgggcaagtggcatagcctctcgggctcagttctgttcccttgtaagcaaggacaatgctatctaccacctggggatggtgatcaaaataaaatcatttccataaagttctcagcacagcgctaggcatgctacaagcaaycaataaagacaactatgatggccatcttgcagggactcagcactgcacacttgttatgtgttgacacgttctcagctcacttgggctccacaacaatcctgcaaggtaggcagggaagatttctactttattcattcatttatttatttattttttgagaccgagtcccactctgttgcccaggctagagtgcagtggtgcgatcttggttcactacaacctccgcctcccaaggtcaagcaattcttttacctcagcctccctagtagcggggattacaggcacatgccaccacacccagctaatttttatatttttagtagagacagagttttgccatgttggtagggctggtctcaaactcctggcctcaggtgatccacccaccttagcctcccaaagtgctgggattatacgtgtgagccactgcacccggccggtttttaacattctttctcattttaca

SEQ ID NO: 796765 - DNA, 595 bp, Homo sapiens
tatccaatgggtggctataatattctaaaccctttgttgttactttaacaatgttcatagcatcttcatcaggagtaacattccattggaagacatccttttcttaaccttaataagcaactccaaatccattcaagtttcatcatgacattgcagcaattcagtgacatyttcaggctccgcttctaattctagttcccttcctatttccaccacatcttcagttcctctcctattgaagtcttgagaccctcaaaatcacccatgagggttggaatcaacttattccaaattcctgttaatgttgatattttgacctgttcctagattcatggatgttcttaatggcatctagaatggtgaatcctttctagaaggttttgaatttactttgcccagatccatcagaggtatcactctctatggtagctacagctttacaaaatgtttttcttttctttttctttttgtttttttgagacggaatctcgctctgtcacccaggctggagtgcggtggcgcaatctcggctcactgcaagctccacctccagtgttcacaccattcgcctgcctcagcctcccgattagctggg

SEQ ID NO: 796766 - DNA, 595 bp, Homo sapiens
tatccaatgggtggctataatattctaaaccctttgttgttactttaacaatgttcatagcatcttcatcaggagtaacattccattggaagacatccttttcttaaccttaataagcaactccaaatccattcaagtttcatcatgacattgcagcaattcagtgacattttcaggctccgcttctaattctagttcccttcctatttccaccacatcttcagttcctctcctattgaagtcttgagaccctcaaaatcacccatgagggttggaatcaacttattccaaattcctgttaatgttgatattttgacctgttcctarattcatggatgttcttaatggcatctagaatggtgaatcctttctagaaggttttgaatttactttgcccagatccatcagaggtatcactctctatggtagctacagctttacaaaatgtttttcttttctttttctttttgtttttttgagacggaatctcgctctgtcacccaggctggagtgcggtggcgcaatctcggctcactgcaagctccacctccagtgttcacaccattcgcctgcctcagcctcccgattagctggg

SEQ ID NO: 796767 - DNA, 638 bp, Homo sapiens
agaaaggggtcaaagtggaaggaaaactgagtgtggtgttacagcagccaatgaaaaagaacatttcagaaagaagggagtgtcatcacttgaatgctgctgagagatcacatgaaatcagcattgaagtgtgcctgttagttttaacaacaaggtcactgcaatcttggcaaaagccatttcatagaataaacatcttttgtttcagtctggttataaaatcaaaccatgaaattttgattatgaaagatgcttagcaaaacctttttcaatttcctattttcttactcatacaaaaacatagtaatttttaaaacatgatgtcttttgagcccaacatatttaaatgtcttttgtccttgttggtcactactgagaatgaattaaatcttctcaatagtgaagtgttgaaataatttattacaggtaggaagtatctccagcctgaaagttcctgtgtaacggaggtgttggkcatctacaggaaggtgcccattctagaaacctcgtcataaactgtatttgagttctgaaggcatcaagagagatgggatgggtcgtggctataactgaaagggaagaataaacctaccataaccaggaagaatggatcctttaattctgaagtgattacattt

SEQ ID NO: 796768 - DNA, 638 bp, Homo sapiens
aaatcatctgcagcccgcagcatctgcctcagtgcagagaggatgagaatatccttcatggggtccagttccaaatctgaagcataatttccaaccatcaaaatattggaaataggaatgcctagcattttatggacattcatgacctgtggaaagtatatttaaaaagtgtaagtcctgtatttaatatttgaaatttgaccaattttaaatacaatttaagaaagaaaccaaaaaagcaatggcttaataagttatcttcggaacatacaataattcagatcattgcagttttaaagtgtgatataaatttgaattaatcaagcaattgatcccattcttcatttccctgcaaatacactctgtragcacatatacacgtacagacacacacaaacacacacacgtatgattgtgatactattacaataatatctggttatgatcagcattttttacccggctttgagaagtcatagatctactcatgtttaaaaagttgtcttgaagaacctcactgcaatcatccactttagtaagcaaggccacatatgctatacctatatcaaatagataaatcagttattttatatcataaatagcaatgtgtcaacaagttattaaatatgtgtgaaggc

SEQ ID NO: 796769 - DNA, 613 bp, Homo sapiens
aggacgccactggtttcatccactatgatatcctttagaatctactctttgcagaagactggttattggatctagataaatactaaaaatataaatacctaatgtttaataaggcctaattatgaatcagggactttatatttacaatgttatgagttgaattttatctcctcaaaattcatatgttgtaatcctaagtctgagtacctcaaaacgtgaccttatttaaaaacagggtcattgcagctgtaattagtaagttaaggtgaggtcttactgggtagtagagtgagctcctaactcagtaagagtggtgttcttataacaagaattccaygtgggaagaaagagatggatactgagggaagctgatgtgaacacagggtgacgacggccatctacaagcacaggagataggcctggaacagacccttccctcgcagtctgcagaaggagccaaccctgcccacaccctgattttggacttctaggcctccagaactgtgaggcaatacatttctgttgtttaagccacccagtttgtggtgctttgttaaggtagttccagcaaactaatacatatatcatttcattgaatcttcacagcaaatct

SEQ ID NO: 796770 - DNA, 545 bp, Homo sapiens
catggtttgtgacctccatggatcctaacatttcttctcattaattccttcacttggtatttactgaatgccagtatgtaccaaatattgagcatgacactgggaataagggtgtccagaagacaaaatctttttcttgatggagttgacggtttaatggagtcatggcataagcttccgaaacagttgaaggatgagtaatacacagaaaattgtcaggagaaaattatgtggggtataaccattgcactagattgttttrtagaggagacagattggcactgaactttgtggctaatattttagaccatgagataggaaatgtattcaaaaggctgaaaattacatgggagagagtaaatatgatcagagatttaacccataggctgttacctggagaatgcttgggtatacattgacttataactaagaaagatgaatttcaattttctgcttaggtatgctgaagaaaaattaaaagtgtaactccagagaagtaagttcagaaagttagcaaaaaaaaaaaaaaaaaaaaaaaaagcaca

SEQ ID NO: 796771 - DNA, 608 bp, Homo sapiens
aagcaagcattttaggccaaactaaccaaaaataagaatgtaaccttatacagcaatatatgatctttcatgagtgtatttgtttgccatggctgctgtaaaaaaataccacaaacaagatgacttcaagaacattaatttattccagcagctagaagtctgagatcagaatatcatcagtgttgcttccttccaagtgtgcctgcgttagttcattctcacactgctataaaggactatatragactgagtaatttatgaaggaaagaggttcaattggctcacagttccacaggctgtacaggaagcatggctgggaggcctcaggaaacttacaatcatggttgaaggcaaaggggaagcaggcatcttcttcacatggtatcaagggtggcaggggattgtttcaaactttgaaacaatcaggtctcgtgagaagtcactcactatcatgagaacagcaaggaggaaatctgcccccatgatccaatcacctcccaccaggcccctcctccaacactggcaatttcaattccacatgagatttgggtagggaacagagccaaaccatatcaggtggtgagtgagaatctgttccaagcaccaag

SEQ ID NO: 796772 - DNA, 608 bp, Homo sapiens
aagcaagcattttaggccaaactaaccaaaaataagaatgtaaccttatacagcaatatatgatctttcatgagtgtatttgtttgccatggctgctgtaaaaaaataccacaaacaagatgacttcaagaacattaatttattccagcagctagaagtctgagatcagaatatcatcagtgttgcttccttccaagtgtgcctgcgttagttcattctcacactgctataaaggactatataagactgagtaatttatgaaggaaagaggttcaattggctcacagttccacaggctgtacaggaagcatggctgggaggcctcaggaaacttacaatcayggttgaaggcaaaggggaagcaggcatcttcttcacatggtatcaagggtggcaggggattgtttcaaactttgaaacaatcaggtctcgtgagaagtcactcactatcatgagaacagcaaggaggaaatctgcccccatgatccaatcacctcccaccaggcccctcctccaacactggcaatttcaattccacatgagatttgggtagggaacagagccaaaccatatcaggtggtgagtgagaatctgttccaagcaccaag

SEQ ID NO: 796773 - DNA, 608 bp, Homo sapiens
aagcaagcattttaggccaaactaaccaaaaataagaatgtaaccttatacagcaatatatgatctttcatgagtgtatttgtttgccatggctgctgtaaaaaaataccacaaacaagatgacttcaagaacattaatttattccagcagctagaagtctgagatcagaatatcatcagtgttgcttccttccaagtgtgcctgcgttagttcattctcacactgctataaaggactatataagactgagtaatttatgaaggaaagaggttcaattggctcacagttccacaggctgtacaggaagcatggctgggaggcctcaggaaacttacaatcatggtkgaaggcaaaggggaagcaggcatcttcttcacatggtatcaagggtggcaggggattgtttcaaactttgaaacaatcaggtctcgtgagaagtcactcactatcatgagaacagcaaggaggaaatctgcccccatgatccaatcacctcccaccaggcccctcctccaacactggcaatttcaattccacatgagatttgggtagggaacagagccaaaccatatcaggtggtgagtgagaatctgttccaagcaccaag

SEQ ID NO: 796774 - DNA, 608 bp, Homo sapiens
aagcaagcattttaggccaaactaaccaaaaataagaatgtaaccttatacagcaatatatgatctttcatgagtgtatttgtttgccatggctgctgtaaaaaaataccacaaacaagatgacttcaagaacattaatttattccagcagctagaagtctgagatcagaatatcatcagtgttgcttccttccaagtgtgcctgcgttagttcattctcacactgctataaaggactatataagactgagtaatttatgaaggaaagaggttcaattggctcacagttccacaggctgtacaggaagcatggctgggaggcctcaggaaacttacaatcatggttgaaggcaaaggggaagcaggcatcttcttcacatggtatcaagggtggcaggggattgtttcaaactttgaaacaatcaggyctcgtgagaagtcactcactatcatgagaacagcaaggaggaaatctgcccccatgatccaatcacctcccaccaggcccctcctccaacactggcaatttcaattccacatgagatttgggtagggaacagagccaaaccatatcaggtggtgagtgagaatctgttccaagcaccaag

SEQ ID NO: 796775 - DNA, 645 bp, Homo sapiens
ataaccccatgaaattctggcattttttgctttcaggcctattattctttctagacattaataatgattataagcagaagaagtttagtccaaagaaatgagcaatgggtacaaaataaatagaaagaatgaataagacctaccatttgatagcacaatggggtgactatagtcaataataatttaattgtatatgttaaaataaaaaatgcaatggaattgtttgtaactcaaaggataaatacttgaggggatggataccccattctccgtgatgtgcttattttacagtgcatgcctgtattaaaacatcccatgtaccctagacatacatacacatattatgtacccataaaaattttaaaaaataataaaaaaattttttaaaaccctgaaaaacaaatgcatgagcaactcgaacaacaaaagtagaaacagaccttaactggctcattgttttgaagtgctgcrttggttaatttgtttcgtttgtagggagctcagaaactcgtgcccttacaatgtactgaaagtagcggtcattacaggcttgtaaaattaatacatttctttcaaacatagtttagtatcaaagtgaaagtggaagtgatcccatttgccattttgaaggcttgtttcataggt

SEQ ID NO: 796776 - DNA, 645 bp, Homo sapiens
ataaccccatgaaattctggcattttttgctttcaggcctattattctttctagacattaataatgattataagcagaagaagtttagtccaaagaaatgagcaatgggtacaaaataaatagaaagaatgaataagacctaccatttgatagcacaatggggtgactatagtcaataataatttaattgtatatgttaaaataaaaaatgcaatggaattgtttgtaactcaaaggataaatacttgaggggatggataccccattctccgtgatgtgcttattttacagtgcatgcctgtattaaaacatcccatgtaccctagacatacatacacatattatgtacccataaaaattttaaaaaataataaaaaaattttttaaaaccctgaaaaacaaatgcatgagcaactcgaacaacaaaagtagaaacagaccttaactggctcattgttttgaagtgctgcattggttaatttgtttsgtttgtagggagctcagaaactcgtgcccttacaatgtactgaaagtagcggtcattacaggcttgtaaaattaatacatttctttcaaacatagtttagtatcaaagtgaaagtggaagtgatcccatttgccattttgaaggcttgtttcataggt

SEQ ID NO: 796777 - DNA, 621 bp, Homo sapiens
taagcctttgggtcatggaggaagcttcaagggaaattagagaatatttcaaaatatatttatttgaaaatgcaacaggtgggatacagccaaatcatagtttagaaagaaatctatagcataaaatgtttatattagaaaagtcgctcatcaattatctgtgcatccaccttaagawataagaaaaaagagaaaattaaacccaaagctagccaaaggaaaagtaacaataaagcaaggtgcagaaaccattgcaataataaaaacctaagaatcatagagaaaatcattgaaaacaaaagctgtttctttggaaaaaagaataaaattgataaacccctagacagactaagcaaaaggaaaaagacaagacataagtcatcaatatcagaaacaaaagtaattatatcactacagaccttacagacattaaaaggataataaaggaatgcatcagtctgacagcttagatgaaatagaccaactctttgtaaaatattacaaaaactcactaaagaataaataaataacctggttagtgttatgtctattaaagacattttatatagttaaaattttacaataaagaaaatcccagaccaagatagttttaaaggtaaa

SEQ ID NO: 796778 - DNA, 504 bp, Homo sapiens
aaatccagatgagagatgctgctgctgctgaagtggcaatgagattggaggtgggaaaacttggaaagacatttaggaaatagaatccagagaacattgtccttgattggatgatgaatcagggcccctgacagtgtgatgacaagaagatgagaccttggtttggggcatagatgactagtatataatgacattcactgagagaaagatatttgggaggcagggtgttgagctagttttaggcatgttgagtttatagtaccaaacgtctgagagagaatgagataggcagttaaagacacagtctrtatcccaggaagagatagattttggagtcatgcatacaaggggggttattttaagagatgggagtatatggggacaccaagagaaaatagagatggagagaagagatatgggagccaaggacagaacttgggaactcagggaaaaccccctggggccactttaaagaagattacagacaataaaagaagcctggtc

SEQ ID NO: 796779 - DNA, 596 bp, Homo sapiens
tgttgtgaggggttcagattagatacagtgagtgacgattagaaatagccaacatctagatcatagagagttgtgaatgtgttgaatagttctatgcaaacctaacccaaaaagcccaaggaagctgagaggccaaagaaagaggctgacaaattcaatttctcagaaagaaacattgaataggaacttagcaacagaagtcatgtctgtgttgctggcagtggcaagacaagatagaagatccccatgccattaccatccagatctagggcttatataccatagggaaggaatctgtaggacaatcatagggaaagggaaggatgctgtgtgaatctgcctaaaggcaggatttgtagtcaagtgtatttggacctaagggcagaatttacagtaaatacatgcccttacacaaggaatcaaggaacagtrgacagaatagaaatcttagaggcattttctgaactggggttcatcagaagccaacatggcagatgagcatccaacgtggggttgctttagtctccacagactgccaggctggggattttagaattaatgtagatgaatttggaagatattgagatgtttaaata

SEQ ID NO: 796780 - DNA, 653 bp, Homo sapiens
ttttttaaaaaaaagaaacttgtaaatatccttcaaccttccagttgttatttttgaaacaatttaaataagacagacccaaaagaattaaatacaattcatatttttgatcacctaatggctgctatggaagcaagggatgccacatggcatcgattgttcctcaactgatgcaatcaacatggaatattaaaatggaatgggctgcctctcgaggtggaaaaacttttgattatgtggattacacgatcagaaacagcaaatccacatggctctgtgccaagtgacaattgaggaagggcactgcctcgctttcaaatatttaaggatgagctcattgagacatcaaagaaacaagtttctattatagcagaggattgatttgattgctttaggacacaaattgtttggcataacaccagagattgggggtaaattccaagtacttatacaggtgacccaagacttacagctgcttaacttgtgactattgttcaggaagcamttaagaagtaagtacagaggtgcagtcagcagtacactccagggtcctcctgggagttacagactttggggggctggctagaaaaccaactataatttttgataatttctattgaaacctataaagttctgtacaaccaacataaaaa

SEQ ID NO: 796781 - DNA, 510 bp, Homo sapiens
aaaatggctaactggaaggagacaaaaggactaataaggaagcactttatttcttttttaccttagtaggaaaaacactagtgtgtgtctgtttgtcattattacacctttcttctttatttgaggaaactccagtttcgttacgtggtaacttsctcagtcccaggaggtgattcctgattgtcataagtaaatcacaggtcacctttttcctccactagttattggtatgggcgtggatagaagagccagttctggtcagtggggtatgagcagaagtaggaagaaagcctttttttctgccattacttcccacccccactccaattgggaacgtggtttcaggaagctttgatgattagtactttggcagtgattttgagaccatcaggggagacctcaacaccccactggagacatgcagaggagaagcttgggaagagatgggcccttattgatatcgagtcccaagagcaacccagcaatcacctcctctggccttcttgttct

SEQ ID NO: 796782 - DNA, 646 bp, Homo sapiens
atgaacttcctgtaagccatttttctttttgcttcctcctccctcctgacaagccacagtgaccattcaacgattcaagtgagagctgttgttcatttgtcagtttcctcatggtagagacagatttatactgagtcttctacagtttttcctttattcacctttatgactaatgtcactatttgcagctaagagtgaaagaaaccaggaattgaacacatgatctcaatcttattagcactatatactgaactacagcagycacttcatacctacaaacattaaacagcctggcttgtgacactgtgtaaacttattatagtatacatgtggccacaccactgacatatttccctgaaattaaactgttatgtcatagctcattcaaatattatccacaaaagcataaacagtaaggaaagaaggtaaaagtctatatatatagtgaaaagcaatggaggacactttcaattccagtgaaacataatatttaatatatcctactagtttttcttgagcctgaaaaatatgcagccaactggccctgtccccattcacagttgtttataactttcttaaaagaatgctttggggtctaaaatatcttataaatcatcttggcctagaaacaattttgctcagaaaa

SEQ ID NO: 796783 - DNA, 622 bp, Homo sapiens
ttgagactatagtaagagcaccttctctgccccattatggtaccactgaccttattgcattatcgttgcttgcttgactgtttctcacttctcactcatctgagaactccttcaggatggggttccagtcctactcacccttttctttccaacatctagtgccgtgctttgccgggtgtaggcattgtagataaaagcttagaatctgaagccagattgtcagggtttaaggttttgctttgtcactaaccatttggcttcrgccacatttatattctctaagtttccttttctagaagaggagaattacagaatctagctctttggattttgtgagaattaaatgaacaagtttatataaaaaataagaatagggtctgtttcagagtaagctaacaatgtgctatttgtaattacagtcatattgccttgtatctgtagaggttacaagtacaaattctacagctaaaactcattcactcatttatttattcattaatccatccattcatttactcaatgtttaattcatttattcactaaagatttactccttgcttattaaatagcaggtgctgtgcttggtgatatgggaaataaaataactaatcagacatagatc

SEQ ID NO: 796784 - DNA, 646 bp, Homo sapiens
gaagaagatttggagctcatgggctgctgttgagattcttttgtcccatggggtgctcccttgatgtagtgctctctccgttttcctagggatgtggcttcctgagagctgaacagttgtgattattatttcttttctggaccttgccacctagcagagctattgggctctgggcttgtctgcacagttgtgtgatgtgaactgtcttcagctctctcagccayagatagcagcacctgctccagtggaggtggcaggggagtgaaatggactctgtgagtgtactgagttgtcgtttttttgtttgtcttttttttttttttttttgagtggcatcttgcctggtcacccaggctggagtgcaatggcacaatctcagcccactgcaatctccacctcctgggttcaaaggattctcctgcctcagcctcccgagtagctgggattacaggcgtctgccaccatgccctaaggatttttgtatttttagtagagatggggtttcaccatattgaccaggctagtttcaaactcctgacctcatgatccacccgcctcggcctcccaaagtgctgggattacaggtgtgagtcaccacgccttgctgagttgtagtttttttaattgcactagttttgtgctggct

SEQ ID NO: 796785 - DNA, 646 bp, Homo sapiens
gaagaagatttggagctcatgggctgctgttgagattcttttgtcccatggggtgctcccttgatgtagtgctctctccgttttcctagggatgtggcttcctgagagctgaacagttgtgattattatttcttttctggaccttgccacctagcagagctattgggctctgggcttgtctgcacagttgtgtgatgtgaactgtcttcagctctctcagccacagatagcagcacctgctccagtggaggtggcaggggagtgaaatggactctgtgagtgtactgagttgtcgtttttttgtttgtcttttttttttttttttttgagtggcatcttgcctggtcacccaggctggagtgcaatggcacaatctcagcccactgcaatctccacctcctgggttcaaaggattctcctgcctcagcctcccgagtagctgggattacaggcrtctgccaccatgccctaaggatttttgtatttttagtagagatggggtttcaccatattgaccaggctagtttcaaactcctgacctcatgatccacccgcctcggcctcccaaagtgctgggattacaggtgtgagtcaccacgccttgctgagttgtagtttttttaattgcactagttttgtgctggct

SEQ ID NO: 796786 - DNA, 536 bp, Homo sapiens
tgtggaaggaggtcagacttattctgtatagctctgagaggccgagctaagactcatttattcattcattcagctgatacatattgtatgctactctgtgtcagattgtattctagacattggggttacaagcagtgaaacatttaaaaaaggacaaaaatccctgtgatcagggtgctgacttttattcccccctcaacaggaggaaatttcagggaacaaaggctcaatgtcaggatgaactttctatagccagacctgtgcaaagacggactttgaattccttgaggggataaagagggcattcaggttcgctggtttgacaatcttggtgatgwtgtggttatttgcacatgacagaaccaaatgtttttttttaatttctattcatcctctttttttctgccctgttttggctcttttggaagacttggacagaccttctttctgcctgggtgagagtattttggcatagggtagcctggcatttgatggagtccatttctggtgctgggcttggcagcggtaacagagtg

SEQ ID NO: 796787 - DNA, 571 bp, Homo sapiens
tctcaaactcccaacctcaggtgatccacccgtttcggcctcccaaagtgctgacattacaggcgtgagccaccacgcctagccagagtggtgtaatttcaactgagaaagagcaaaaggtggccctttggaattgtgtttggattcacaaacatggtagatttgaaatcagtgaggcggactattcagtctcattaggaagacggactattcagtttaattaggacgagagaattaagaataaagtctcatatttttagttagaatgtctttgtacttagggagcttataaggactccctcataaataaacaatatcctaaaatgcatcctgtaatccataaaaagrtgattaagtgcccaagtggctaacattcccacttaaaaagcttcctcagttatagaactatcctgtagcatgtactagaagctcaaggttacagtgaggaatcagatgtcatttaaacaccatagaggaaaagtaaataggacattgattcatatgcaaaattgatgtgatgaacctatggccctaagtcgtagctaggatattttgtaggagtgaggtggca

SEQ ID NO: 796788 - DNA, 645 bp, Homo sapiens
ttaaatgcatcatacatattttgatatgctgttttaattttcattaaagactaacctaacactaacccatatttagagatcactgcaaatccagtgctttcaactggttctttgctaaaaagaattgcttcttggtatcaacatttttcatttttaagtatttgtccactgaaagcagttaaaagaagaggtccagattacttgcctttggctctaatattatgtagaactgtatgtttaaaaatgaccagagaaaaacctacaacttctagataatgttacctttgtrgacagataatttaattttatccatggttaaaatttagaaatgatttattatgtcataaagaaatttgaaaattatggtcaagaagatggctgaataggaacagctccggtctacagctccagcgtgagcgacatagaagatgggtgatttctgcatttccatctgaggtaccaggttcatctcactagggagtgccagacagtgggagcaggtcagtgggtgcgcgcaccatgcgcgagccaaagcagggtgaggcattgcctcacttgggaagtgcaaggggccagggagttccctttcctagtcaaagaaaggggtgacagacagcacctggaaaatcgggtcactcccaccca

SEQ ID NO: 796789 - DNA, 588 bp, Homo sapiens
cttgtcacagaatcctgcctacaagtaacggaacaatgagagctgtggccatgtaggtaagacacttgtggcatctgctatagggtgagttatggaaaactgacttttgacataatttttattgttttttgcataggaatgacatattttaaaatcaggaaaaaaaactgagataaaaacaccataatattakgttttctagagaaaagaaaaagcttacaactaagcccccaaatgtgcggggaggccaggggtctcttctcaaaggggcccttccacctaggaaatgtctgccacagagccagcagccctggagatcagctcacccgacatgccgggggacagcaccatgaagaaagagacagctaagacaaagcacagttctgacatttttattcactgatcataaatatagtctcatgagcattaaggtgatcatgaatgatgtactagcacctggaacatgaccatcatggagcactcactgattccccatcactggccaaagaagtcggggcatcttcctttcaccaagtgttcaactttggagggaccctccttctggtgcagcaattttattcttggctt

SEQ ID NO: 796790 - DNA, 628 bp, Homo sapiens
atatagtgtgtccttcattctgttgatgccagtatcacatttattgatttggatatgttgaactatccttccatctcagggatgaatctcttctggtccatggtgggtctagaaacatcggccaggggctaaggcctggaattaggggctttaggaatctacttggtgctttattttactgcagctgagctggtaccaagttgcaagacaaagtcctctgtattcttccctatcctttccccaagtgaaaggagtctctcatagagtggccctgctagagttgggggaggggttatgcaggcactcaatatcccctatagctggtgttgaactggactgcactcaagtcccattgcctccaagaccagtgtggcmccaggactttcccaaggactggagtccttgtagcttaacttccattcaaatgcattcagggccccagaccactttacttagctggtggtgaagtcatccaaggcttgagttcctcctgcttaggcagaagattcccctctggcccatggctggtctaaatgctcattctgtgggcactggcagaattctgtcttgtgttgtgttctgctgtgaaagggcagccctgaattacaatgcaaagttccacagtact

SEQ ID NO: 796791 - DNA, 432 bp, Homo sapiens
tttttttatcatgttgttcttttatagccactcacccctacttgctccttaagccctgacagacactaatctgtgattcagttctattattttgtcattttaagcatgttatgtaaatgaaaccacaaagtatgtaaccttttgagaagagctttgacattgttcttttcttctcagcaaagttctctggcacttatttcaggttgctgtctatatcaatagtcattgcttttactttatactttgaattgtattccgyggtatgactggaccgcagtttgtttaaccatttgcagttgaagaacacgtgggttttttccagtttttgcctatcacaaataaagcttctataaacatttgcatacacagttttgtgtgaagatgtcagcatttctttgggataaatgctctaaagtccaattgctgaattat

SEQ ID NO: 796792 - DNA, 391 bp, Homo sapiens
tattcaaagggataataacagagaacttctcaaacctggagaaatatatcaatatccaagcacacgaaagttatagaacatcaagtggatttcacccaaagaagaccaccttgagacattcaataatcaaatttccaaaggtcaaggataaagaaatgatcctaaaagcagcaaaataaaagaaacaagtaacatacaaagatcttcaatatgtctggcagcagacttcccagtggaaagcttayaggccagtagagaatggcatgacatacacatagcgttggaaaaaaattatcctagaatagtatatctgttgggaacaggcccccaaatctggccataaactggccccaaaactggccataaacaaaatctctgcagcactgtgata

SEQ ID NO: 796793 - DNA, 582 bp, Homo sapiens
atataaatttcacatttttatagtgatttatctctaagtaatacaattaataatttttgaaccactgtttctcattttttagaatatttgtgtattttatggtatatatacctatataccataaataatgaataaataatgaaaaatttaaatacatcaatactgaaaagggaatttttgctaccaaaattatgctatttaccattaatccttgctaggaatctgtcaaacaaatgaaacaaatttaggacagggggaaatggaaaaatctttttaaaaaatggtctatcgttcctgtgaaaaaaaaaatcttaaatttgttaaygatgcattatttctcattctaaatgagagaatacatatgcaattgcccccttaaggccaactggcagccagaagttacagtatactgttaatcatacttcttccaacagaactgtgggaatcactcaaaccagagaatcagagatgtctttgtgagggcatactcatctgtatggcatttgctatgatttaaacgtagccccctccaaaatttagatattgccaaagtgatagtattgagaggtgtggcctgtaaga

SEQ ID NO: 796794 - DNA, 582 bp, Homo sapiens
atataaatttcacatttttatagtgatttatctctaagtaatacaattaataatttttgaaccactgtttctcattttttagaatatttgtgtattttatggtatatatacctatataccataaataatgaataaataatgaaaaatttaaatacatcaatactgaaaagggaatttttgctaccaaaattatgctatttaccattaatccttgctaggaatctgtcaaacaaatgaaacaaatttaggacagggggaaatggaaaaatctttttaaaaaatggtctatcgttcctgtgaaaaaaaaaatcttaaatttgttaacgatgcattatttctcattctaaatgagagaatacatatgcaattgcccccttaaggccaactggcagccagaagttasagtatactgttaatcatacttcttccaacagaactgtgggaatcactcaaaccagagaatcagagatgtctttgtgagggcatactcatctgtatggcatttgctatgatttaaacgtagccccctccaaaatttagatattgccaaagtgatagtattgagaggtgtggcctgtaaga

SEQ ID NO: 796795 - DNA, 582 bp, Homo sapiens
atataaatttcacatttttatagtgatttatctctaagtaatacaattaataatttttgaaccactgtttctcattttttagaatatttgtgtattttatggtatatatacctatataccataaataatgaataaataatgaaaaatttaaatacatcaatactgaaaagggaatttttgctaccaaaattatgctatttaccattaatccttgctaggaatctgtcaaacaaatgaaacaaatttaggacagggggaaatggaaaaatctttttaaaaaatggtctatcgttcctgtgaaaaaaaaaatcttaaatttgttaacgatgcattatttctcattctaaatgagagaatacatatgcaattgcccccttaaggccaactggcagccagaagttacagtatactgttaatcatacttcttccaacagaactgtgggaatsactcaaaccagagaatcagagatgtctttgtgagggcatactcatctgtatggcatttgctatgatttaaacgtagccccctccaaaatttagatattgccaaagtgatagtattgagaggtgtggcctgtaaga

SEQ ID NO: 796796 - DNA, 636 bp, Homo sapiens
ttgataggtattttattgagcctataaatcaatttgggaagaattgacatcttaataatattgagtctttaagaacattgagtctgtgttcattcattaagatcttcttaaaatctttcagcaatattttataaatattagtgaaaggttgtgaatattttaaatgtactactttgtatagaatatttttgatgtcttttaaatggtgttttaaaaaatatgtttactattacctgttttagcmtcagaatttttacatatttttgaaaaattttatacaaggtcaattggctggcccattctttgtgtttgtttatagttttctttctctctgtcttattctttctttcagtatttcttatgtagctttttttttttttttggcaacttatcacccagggtccccaatgtacaaccccattttgtaatgttgctttgggttcttgtcttcttttgatattacagatatagttaactactgaatggggagatgagttcatactctcgaggcaagcctgcttctttccatgtcttattgcctcctgatacatagaactttctgtaaatgataaccaagcctatgattggactgggaattttatttattctccattgtagagcatgggccagctccac

SEQ ID NO: 796797 - DNA, 590 bp, Homo sapiens
tataggccgggtgtggtggctcatgcctgtaatcccagcactttgggaggccagggcgggtgaatcacctgaggtcaggagttcaagaccagcctgaccaacatggtgaaaccccgtcccttctaaaaatgcaataattagccaggcatggtggtgcatgcctgtaatcccagctacttgggaggctgaggcaggagaatcgcctgaacctgggaggtggaggttgcagtgagccgagatcgcaccattgtactccagcctgggcaacaaaaacaaaactccatctcgaaaaaaaaaaaagaaaaaaaaagtatgtatagacaagagcaaagaaatccaagttcaaaaaagtctgtatatagatatagatgcatyaaaatatatatacataaaaaaatccaaaacaacaacaaagtaaaataaaaattcttttcctgctggaagccaaaaaaaattaaaaataaaatattacatgtacattttttatatgaatttaaagtccagtagaatatattccaaattttaacagtggtatttgatagtaatgggatcatagagaatttttatttattttctacaacaaacatttc

SEQ ID NO: 796798 - DNA, 590 bp, Homo sapiens
tataggccgggtgtggtggctcatgcctgtaatcccagcactttgggaggccagggcgggtgaatcacctgaggtcaggagttcaagaccagcctgaccaacatggtgaaaccccgtcccttctaaaaatgcaataattagccaggcatggtggtgcatgcctgtaatcccagctacttgggaggctgaggcaggagaatcgcctgaacctgggaggtggaggttgcagtgagccgagatcgcaccattgtactccagcctgggcaacaaaaacaaaactccatctcgaaaaaaaaaaaagaaaaaaaaagtatgtatagacaagagcaaagaaatccaagttcaaaaaagtctgtatatagatatagatgcattaaaatatatatacataaaaawatccaaaacaacaacaaagtaaaataaaaattcttttcctgctggaagccaaaaaaaattaaaaataaaatattacatgtacattttttatatgaatttaaagtccagtagaatatattccaaattttaacagtggtatttgatagtaatgggatcatagagaatttttatttattttctacaacaaacatttc

SEQ ID NO: 796799 - DNA, 522 bp, Homo sapiens
ctgagaagttgagtttttctggttttcctctcatccattcctctctgtgtattgatgtcctggagaccaagccctgtggtctgtattcccagagagaactcatgctccctatgctcattgtccatgttctagtttttggctgatcatgttggccactcttgtaatgtgatgttgttctcataaaaccagtgacggccaggcacagtggctcatgcctgtaatcccagcactttgggaggccagggcaggtggatcacctgaggtcaggagtttgagaccagcctggccaacatggtgaaaccccatctctactaaaaatacaaaaaattggccaggcgtggtggcgggcgcctgtagtcccagctactcgggaggttgaggcagamgaatcacttgagcctgggaggtggaggttgcagtgagcagagattgtgccactgcactccagcctgggcggtagagtgagactcggtctcaaaaaacaaacaaacaaacaaaaaaccacacacacacaaaaaccaa

SEQ ID NO: 796800 - DNA, 600 bp, Homo sapiens
caacaaccaaaacaatgctatttcattgagttgaaagatctaaactcttttttttttttttttttttttttgagactgagtcttgctctgtcgctcaggctggagtgcagtggcgcaatcccagccgactgcaacctctgtctcccaggttcaagtgattctcctgcctcagcctcctgagtagctgggactacaggaacccgccaccatgcctggctaatttttgtatttttagtagagacggggtttcaccgtgttagccaggatggtctcgatctcctgacctcgtgatcsgcccaccttggccccccaaaatgctgggattaccggagtgagccaccgcgcccagccaggggagaaagttctatgaagaaaaataaagctgggaagggagagagaacatgtttgggggtagggtgagcttacaaatttatacaagatggtagagaaagcctctttaagaaaatggcatttaattgaagactggacccatgtagatatctagagaaagcacattccaggcagaggcaccagcaagggaaaaggtcctgcagtggaagtggtcccgtggctggggctgtgtgagaaggaggacagtga

SEQ ID NO: 796801 - DNA, 548 bp, Homo sapiens
ccttttatttttcacactaatattgttctttttcacttatcactggacatttaagaacttggagtgcttgatccttagcatacatttgtgtccacttaggtcttttaggggagcccttgaagggcactaagtataagcagacaataaaaacaggaatgcctatatccataaataaataaatatatgtatatacaggcctcatttatgctaaattacacaattatactatatagtagacttgaaattatatttttgtggaaagaaggaaagtaaggagacaaatctagtgaaggctgccttgacttaacagtgcagaatcactgtgcagcaatgtgcttatatggccgcgttgcgattataatcckcctacatgcataagtcaatggggtctttgctccaaacttgtggaagaatgaatgagccaagtagtggtgggagttcagtttagttccactgttttgtaaattgggctaattttcaaaggtattcagacatttaccttttcaagtgatagaagcaagagcagagaattcatcctttcttgctac

SEQ ID NO: 796802 - DNA, 636 bp, Homo sapiens
aaaaacaaagtgactgtaactttagctgggattctgagaaggctaatacaaaggaagaacatgtaagctgaatctcaaagagtaagttcacaaagcctggaaggtgggaacgagtattcaggcagagagctgtgtgtgtgtgtgtgtgtgtgtgtgtgtgtgtgtatcattagaacacgtatactcggatatttgatcaattctttgtttgtgttctgtgggtcttcttttccctattgccattacccctgccttgggttaggcacctaaccactctcagttgagccactctgaatgtgttctgatggtccagttaaggacccgacccaaactatcatctatatggtgcctgtagttgcacctagccttcacacctgacgatcacacttyttgacttaacaatctctcaatggctctgcatcgtctttccagcatggacaagatctaagctccttgacatgacacacaaggcccaacatgatgggtccttttccaacctttgcaaatgtatctacccatcttccttatgcatgctgtattccagctataaatattgcttgccagttctcccctatattatgcctttctgcatccccacatatattcacatgtgaaggttgcccttctctgactttt

SEQ ID NO: 796803 - DNA, 442 bp, Homo sapiens
tgagtctaattcaggccctactggttacaaagatatcacgagcccaacttgaactaatcaaggtaggaaagtggaaaaggaaggatgaggagcagtgagtagtagagtggaaagagctctggattctagctctccctctctacctgtcacttctttggttgcaggcaaattacttatcctctctgttctctgagctataatatttaatacaagcagtcagcaactgatgatttytaagttctcttctaacatgccctgattctgtaccaattgatactgattaacaaggattagcacatgcctcttacattttaagagaatggttctgctcaccctgttgtgtgggaaacttacagtgtcaagagtggcacttcacctcttttaatatcatctgccaaaacaacatatatgaatgtgccatcctttgagactggagaagttt

SEQ ID NO: 796804 - DNA, 563 bp, Homo sapiens
taacaggcacccaccaccatgcccaactaatttttgtatttttagtagagatagcgtttcaccatgttggccaggctggtctcgaattcctgaccacaggcgatccacccacctcggcctctcaaagtgctgggattacaggagtgaaccactgcgcccagacacctttatgggaatttttacttgagccacaccataacggagaaaatcaggacaatccaaaccaacatccacccccctacctgtaaaaagcataataaaattaggtggttgcacagagatagtttcctttatcacttccctagagtttttactgagattaacaggctttgtacttcttttttccatcccaagatgaaaatgacccacastgagggactatgttttctggcagcagtgaacgacggcctcttctttgccactgaaagtgagcaagtaaccacaagttcgtgtatgtcattaccgtgattgctacacccaactggaaaaagaatattcctactgtgactccattaaagtcttttcaaagcaaaatatagcatagaacagaaaaatggacctta

SEQ ID NO: 796805 - DNA, 634 bp, Homo sapiens
tatattatatattaaaatatatgctattctttctttaaaaattcaaataaacatatttagttcacatcattactcatgtttgtgttcaagggtagataaaagaggagtagggaaagtagtactcacttgagctgataaatatctctaagaaaattttaaaatacatgtttaaatttatgtgtaagttttattaatttttatttgacatttaaatgtaaaatattttatcactcaaatatatttcagctataaaataaataacagttaaggatttaaaaatatttatactctgaactgtagaaatattagtcccttgaaagatctctttatttccaaaatatttctattgcaagtgtcagaaatggtaactatataacaattgagaacgtaggaaattatttattcatatatgaattcccactcataaattttggctgccttcactgaaggctttcaccaaagtgctatcaattttcacytctccttcattcccatgatgtcttgcagaaacaaaaggaggaagaaaaaataatctaaagattgaatggctgtcccacagattcacagccaaaattaaaacaagaacatttttggcctacttaatatacttactttccccaaaaagaatctcata

SEQ ID NO: 796806 - DNA, 491 bp, Homo sapiens
ttatttgtcctacataaaacaaatactgttaagtaaaagaatataagaaacacatgaataaatttagacctttcttttaagagtgattaaaatgtttctcttagaagagtagtatttacttctttaggtaactaatgactaatatttttrctttctccaggtaactagtgaaagtgtttaaatatctagagttagaaccaaaagacaggaaattatttaagttgtaaaataatactataattgatatattataccaaaatcaattacaatctcccataggatcagaaaccatgaaaaattatgtatttcaacaatgggaacatttttaaactgaagaaaataattttaataaaaccttattaataattttaataaaaatacacctagctcaaaacctttccctagtaacactttagtatgtgtactgaactgttcatcttaagataatggtaagaaatttttatatgctgtgtttcagtcacaaaaagagg

SEQ ID NO: 796807 - DNA, 538 bp, Homo sapiens
aaaatatttgcctagacaaatgtcctgaagagttttccctatttttacttctagtgaagttttggcttttacatttaagtctttaatctaccttgagtttacttttgtataaggtgagagataaagatgtagtatcattctgctgcatgtggttatccagtttttccagcatcatttattgcmgaggttttcctttctccaatgtatgtttttagcagctttgtcaaatattgtttgactataaatatgtagctttatttctgggttctctgttctgttccattggtctatgtatctatttttatacctataccaatctattttgatattactatatccttataatatgttttgaagtcaggtgatgtgatgcctctagctttattcttttgctcaagattactttggctattctggctcttttttggttccatacaaattttaggattgctttttccatttctgtgaaaaatagcattggtattttgacagggattgcattgaatctatagatcttgggagcagtatggtcatttta

SEQ ID NO: 796808 - DNA, 645 bp, Homo sapiens
ttaattagagcgtactggattaggactttattattagtcattccattagctcaatactcaagcacactgcagatatgactaagaagattgtgtttcctcatggacaaaagatgtgaccttggagggaaaagcaaaagatattctcaattttatgacatttgaaaatattttataattaactttttgtgagtgctggagatacaataatctccacacttccaatcctttaatgagaggaaatttgagcatggataatacacaaaggactaatattttgggattcctctaaaaataatagagtataaaatgccattccaaactgtagtgtttataagctgtatcgtgtgtgagaatcattttctctctgttcatagtatatacctcttcattttattatgtgaaaagcttataacatgtatatcagatattgtgtttcaatgccatgtatttaaatgtgatttaatgtgccatttatattttaaaattaacgkaggtaaaaatttatgggacctaagatgttttatagggtaataacagtaggcaacattgttacatgtaaacttggaatgctacttgatatgtgtgtgatgatgaagattgaaagataatggaagaatcttattctaactcgggtaatttattaga

SEQ ID NO: 796809 - DNA, 618 bp, Homo sapiens
ggatacaaaacctacaaaattggtagcatttctataggtcaacagtgaacaatctaaagaagaaatcaagaaagtaacccctttacaatagctgcaaaaataaataattaaaatacctaggaatatatttaaccaataaagtgaatgaccactacattgaaaactttaaaagtttgatgaaagaaattgaagaggacacacacaaaaatatggaatggtayatcatgctcatgaattggaagcattaatattgttaaaatgtccatactacccaaagtgatctaccaatgacatttttcacaaaaacacacaaaaaaatccatcctaaaagttatatggaaacaaaaaagactgaataatcaaagcaatcctgagaagaaagaacacagctggaggcatcacactacaatttcaaagctattgtaaccaaatctgtatggtactgagctaagaacagacacatagatcaatgaaacggaatagataatccagaaattaatccacatatttacagacaactgattttcaacaaaggtgccaagaacatacaataggaaaaagacagactcttcaataaatggtgctgggaaaactagataaccatatgcagaagaagga

SEQ ID NO: 796810 - DNA, 629 bp, Homo sapiens
ctagaaaactaagccaaataaataaaaccactgtgtgtacacattggacagcaggcagtgcaggactacgatccctgaaagcagagaaacaaattacttgggccctaaaatcactctggcttcctgccaggagacacatttcaggccctggagagagasggggatccccagcagagcacgccacccacttaagttgaagagacagagatcagagttcagggaggccaaggcagctgaaagctgcaggacagacttcagaaagaaagagctatgcagaaaaagtggtccagaaatctgtctggaggttccctcaggtctctgctgaatactaaaatttgtgcatgcatagggtgaaactccacagtgaagaagaagctaggagctgacatttcttagaactctcaggggaatcatgagtcccaagcagccagactggagtgtcctcacagggcattcaggagagaccagaggtcaaatgatccctagattaaagattatccagatccactctaacaaagctaaaaaacaggactcaaaatgataacagtaaaccataaaaaactgcacagaagaaaaaagctttaagcactctttaaagaccacaaaatccataacctcaacaatactga

SEQ ID NO: 796811 - DNA, 629 bp, Homo sapiens
ctagaaaactaagccaaataaataaaaccactgtgtgtacacattggacagcaggcagtgcaggactacgatccctgaaagcagagaaacaaattacttgggccctaaaatcactctggcttcctgccaggagacacatttcaggccctggagagagacggggatccccagcagagcacgccacccacttaagttgaagagacagagatcagagttcagggaggccaaggcagctgaaagctgcaggacagacttcagaaagaaagagctatgcagaaaaagtggtccagaaatctgtctggaggttccctcaggtctctgctgaatactaaaatttgtgcatgcatagggtgaaactccacagtgaagaagaagctakgagctgacatttcttagaactctcaggggaatcatgagtcccaagcagccagactggagtgtcctcacagggcattcaggagagaccagaggtcaaatgatccctagattaaagattatccagatccactctaacaaagctaaaaaacaggactcaaaatgataacagtaaaccataaaaaactgcacagaagaaaaaagctttaagcactctttaaagaccacaaaatccataacctcaacaatactga

SEQ ID NO: 796812 - DNA, 615 bp, Homo sapiens
ggagcccagctggcttcacccagtggatcctgcaccaggctgcaggtggagctgcctgccagtcctgcgccatgcgcccacactcctcagcccttgggtggtcgatgggactgggcgccgtggagcagggggccacgctcatcggggaggctcgggccacacaggagcccacggagtgggtgggaggctcaggcatggcgggctgcaggtcccgagccctgccccacaggaaggcagctaaggcccagtgagaaatcgagcgcagcgccggtgggctggcactgctgggggacccagtacaccctccgcagccgctggccygggtgctaagcccctcattgccccgggcgggcagggccagccggctgctccgagtgcggggcccgccaagcccacgcccacccggaactccagctggcccgcaagcgccgcgcgcagccctggttcccgcttgcgcctctccctccacacctccctgcaagctgagggagccggctctggccttggccagcccagaaaggggctcccacagtgcagcggtgggctgaagggctcctcaagtgccaccaaagtaggagcccaggcagaggaggtgccgagagcgagcgagggctt

SEQ ID NO: 796813 - DNA, 641 bp, Homo sapiens
ctgtcaccctggctggaaaacagtggggcaatcacggctcaccatagccttgaactgggctcaagtgatcctcctgccttggtctccctaagtgttgggattacaggcttgaaccaccacacccagttccattttctgtaatgaatacctcarccctcgacctatttctcagacctttttttttgagacagagtctcgctctgttgcccaggctggagtgctatggtgcgatctcagctcactgcaaccttcacctcccgggttcaagcaatcctcctgccttagcctcccaagtgctaggattacaagcatgtgccaccatgtctggctaatttttgtattttttggtagagacagggtttcatcatgttggccaggctggtctcgaactcctcacctcaagtgatctacctgcctcggcctcccaaagtgcaggaattacaggtatgagccactgctcctagcctctgaggctcttaagtgcctctgtattgcacacatgtcactggaatactgttctttaatcctgggaagcaactgctttaaaatgagggaacacacaggtacaaagcacaggaacttcctgggacgaattgttacaatttctttagctcttatgtgaggcaattgtttaaaacctg

SEQ ID NO: 796814 - DNA, 651 bp, Homo sapiens
tgcctgagtggcacatcggcctcctcctctctccctgcttctgctcttttctcttcattccccttccccctgccatgcacacacacatcccttgagccagagtgatcatcctaaagctaaaacgaaaatctgcctcagagcctgtctgtggctgcccatacctcagccttcccaagtgctgggattataggcgtgagccaccacacccagccgacatagagtaggttctttattggatggatgaaggactccggcatggccagatggcaatgagtgtgcaaggagcaaggagagacccacctatagctgggaggggatagggaaggtaggccactgcccctgttggccctgaatctgtccctcccaaagccccctgctctctacctcagttctcactcttcctgagttcccaagrgcaatctatcactatgacccactcctggcctgatatgggactacagaatgtcctgctttcctgtaatatggggagaaataccctttcctttcatctgagacagggttagactcttttgcaattctcacattatttcttttcttttgagatcaagtctcactctgtcacccaggctggagtgcagtggcgtgatctctgctcactgcaacctctgcctcgcaggttcaagcgattct

SEQ ID NO: 796815 - DNA, 560 bp, Homo sapiens
gacttaacctttggcatgtctagccacatgccacactgccttgttaatataggctacctctcaacatggacatgcatggtgaggattttccagatgccaattccctacaagactggtcttttatagagctccagtccacagaattctccagctcagctcttaaagctaacattttacattcgaaggatactttcgaagagtacttcctcaagcccccactgcaggcactgaaaagccctgacctattatcctcaaaattgcctctaagagtgagaattcccccttaaaaaagaaagttcagtaactaagggtagcggtcctgctaggaaacaagcagatactcaaaaaaaggggaggccctattttgctttgctttttagaggaaactagaaaaagatgygaataaaacaagatggtctaccattatactaagtgaaaaagtcaggcacagaaagataaatattacatgacctcagttatatgtagaatctaagagtcaaactcacagaagcagaaattagcatggtggttaccagggctagaggcctggaggagatgtt

SEQ ID NO: 796816 - DNA, 535 bp, Homo sapiens
aggacacagtaggtggggagggttaagacccttctgtgagttccctgtgcggggctgtacttgcctcttccaattcgtggcctttccctgcttggtccctactagacagacaaaccagccacagtccagcctgcagccagaccaccttgttcaytcattctcctttgcctcagagctaagacaaaaatgagacagaaggcagggctccctgggagtccactgtgctccagggttctggggaatcagggttagccagcagctcctggctgcttccctcagagactagggctctcatcctccccaagagaagcagcaagcccagcctggaccacactgtccatattgctggacagtggcctgacagaaagtgactcctccaagtcccaggaggccagggcttttctcatccttgcctttcagccctaacccatgggactgcccacggattggagacttcaagggctgaggtctgggagctgcataaagggcattgcttcagcccaagttagaaatctgcctgggcaagctcttcctg

SEQ ID NO: 796817 - DNA, 627 bp, Homo sapiens
ggaacacctggcctacccagagtggaaaactgctcaaaccacaaacaacagcatgagcggcctgttccataacaacatgtttttgctgcagatgatcatccagggactgtttctctgctcctcactaagaatgtttgtttcctgtaaagaatgcttttagctaatctataacctatagaaacaatgcttatcactggcttattgtcaataaatatgtgggtcaaactctgttcgtggctctcagctctgaaggctgttatccccctgattcccactttgcactttatttctgtgtgtttgtcttcattcctctagcactactgggttggggtctccacgaccgagctggtctcatcaagtggcgttcaacaaggggctcaaacccgggttgaggggttgctggagcgacggagaacgtggtaactacactggaggacaccagagtactyttaagcaatcccttggtaagtaagacggtgagcttggaagcatcagggtaacaatgggacaagggtcgagcaggcatgagtcttatttgagtctgttttggcagctcctcagaaaagggggaaggaaggttagtactagccgacttatgcagctttgtagtgttggtagagaaatatt

SEQ ID NO: 796818 - DNA, 622 bp, Homo sapiens
aaattaaccgggcatggtcgcaggtgcctcgaattccagctactcaggcagctgaggtgggagaattgcttgaacctgggaggcagaggcctcaatgagcagagatgtgcaccactgcactctaacctgggcaacacagcaaaactctgcttcaaaaaaataaaaattagtctgggcatggtggctcacacctgtaatcccagcacttttggaggttgaggtggttggatcacctgaggtcrggagttcgagaccagcctgaccaacatggagaaatcccatctctactaaaaatacaaaattagccacatgtggtggcgcatgcctataatcccagctacttgggaggctgaggcaggacaatcacttgaacccgggaggcagaggttgcggtgagccaagatcacaccattgtactctagcctaggcaacaagagcgaaactctgtctcaaaaaaaaaaaaatagaatgatattaaatgttaaaaatacaatgcttcattagctcacccaaaaaagattccaaagcacataagacaagcctatgccttatttgtaggcccttgacataaatgaagttaagggcaccaccacttagctttcacataaacatgggtcacaaa

SEQ ID NO: 796819 - DNA, 615 bp, Homo sapiens
aagtagttgcctcagtgactgttcaagcagcacctcaagcgaccactctcagttctattcaggcatggatccagcaagctggatgagagggtgatatggatgcttggcagttccctgttagaatacacccacctgatcaacaggggaatattatagctatgtttgaggcttttccttttaaaatacttaaakaatttaaacatgctattaatcaatatggaccaggttctccttttgtaatgggactgttaaggaatgttgctgtctctagtcagatgattcctactgactgggatgcttttactcgagctagtctgactctggctcagttcttacaatttaaaacttggtgggcagatgaagcttccattcagtctgctcgcaacaccaaggcccaacctcaaattaatataactgcagaccaacttttgggggtttgtggctgggcttgtttagatagatgcacaagtggccatgcaggatgatgccatagagcagcttagaggagtgtgcattagaggttgggaaaaaaatcacttcaggaggagaacaatacccttcttttagtgctgtcaagcaggggcctaaagaaccttatgcagattttatagccag

SEQ ID NO: 796820 - DNA, 615 bp, Homo sapiens
aagtagttgcctcagtgactgttcaagcagcacctcaagcgaccactctcagttctattcaggcatggatccagcaagctggatgagagggtgatatggatgcttggcagttccctgttagaatacacccacctgatcaacaggggaatattatagctatgtttgaggcttttccttttaaaatacttaaataatttaaacatgctattaatcaatatggaccaggttctccttttgtaatgggastgttaaggaatgttgctgtctctagtcagatgattcctactgactgggatgcttttactcgagctagtctgactctggctcagttcttacaatttaaaacttggtgggcagatgaagcttccattcagtctgctcgcaacaccaaggcccaacctcaaattaatataactgcagaccaacttttgggggtttgtggctgggcttgtttagatagatgcacaagtggccatgcaggatgatgccatagagcagcttagaggagtgtgcattagaggttgggaaaaaaatcacttcaggaggagaacaatacccttcttttagtgctgtcaagcaggggcctaaagaaccttatgcagattttatagccag

SEQ ID NO: 796821 - DNA, 546 bp, Homo sapiens
gcgatgcccaacttgccaagtggtacattcctcatcttttacaggaggagttaatcctagaggactggaacctaactcttttggcaaatggatgtcacacatgttccctcgtttgggagactagcttatgtacatgtatgtgtggacaccttttctcactttgtctgggctacatgccaaacaggagagtcttctgcctgtgttaaatgtcacctttgcagtgttttgcagtgatgggcattccagcttccattaaaacagataatgccgcaggctatactagccaaactctagctacatttttctttatgtgggatattaaacacattactggcatcccatacaattctcaaggacaagccatagtggaaasaatgaatctctccctaaaacagcagtcgcaaaagcagaaagggggaaacagaaaatatggaaccctacagatgcaactgaacctaggattattaactttaaattttttgaagctgtccaaaggccagatgttatcagcagctgaatagcatctacagaaaccagctgcaaaca

SEQ ID NO: 796822 - DNA, 614 bp, Homo sapiens
attgcttcctctctcctatgtttatcttatgtaaaaatgcagattcactgagctagattaatgcacaagtgactatttctctactccgctatcacatgtgaatggttgatcaaaggctcaaaagaatgcaaccctttgcttctcgcctacccacacctcttaaaaagtattcctcggctggttgcagttactcacacctgtaatcccagcacttttggagkcagaggcagttggatcacgaagtcaagagatctagaccaccctggccaatatggtgaaaccccgtctctactaaaaatgaaaaaattagctgggtgtgatggtggtcccaactactcgagaggctggggcaggagaatcacttgaacctgggaggtggaggttgcagtgagccaagattgcaccactgcactccagactggcgacagagcgagactccatctcaaaaaaaaaagttattcctctttccccaatatccactctttcccctttaaatattgaagccctcaaactcatctttggagaaagacacagacctgtctcctgggttcacatccctaaccataggaacataaacttctaaattgattgagaactgtctcagatattttttg

SEQ ID NO: 796823 - DNA, 573 bp, Homo sapiens
actggatccctaaaatgaaatagaatcatacacataattttttaaaatgttggcctggtttcagagagattagacattttggggagagcacagtcatctccactgtcctcattttacagaggcagaaacttgagtgcaaagatgaggagtgacagtcagtgttgctcagctagtcgggacttgacttcttttactcgctacctctgctggatgaccagcagcttccaatattagttatgtgctataaacaaaaaacacataaacaaaaaaaaaccctgtgtatgccctgcaatctcgatcagtaaagaaggaaatggagatttaaacctctatatctgaaaataaaaagtgaaattcacagtttttgcctaagtgttgtttccaaagttcayatataagcttctctcactttaatttagttcaaattgacttatcaatgccttagcacaccagcaggcaccatgaaaaactaggtgaacagatgctggttggtaaaccagtaattgatcagataaataatgtgtgggaaaacactgaaaatctgagaaagattgaataataagtagtatgatt

SEQ ID NO: 796824 - DNA, 473 bp, Homo sapiens
cataggagacacaatatgtaattttccgctctgagttttaatttctccatctatgaggagataataatctgtgttttataatgttattgtgaagcaaaatgagttaacacaagtacagcacctagaataatatataattcaataaataataaattaacaatgtcatgaacaagggattagaaaatattatttttggttgggactagctactatggatgactcttctgtataactcttaatctcaaaaccatccataaatttgcactgctgtcgtctttttctttcctcccttccttcatccwttccttgccttcttctttcctttcatccttccacaaacaagttctaataaagaaaggtcttatggtactgtttcttaaagtgttttcttcagaacatgagtctttgcagatggtctttgaatattttttaaaaaggattccatgatagtagtctctttctttgagattaat

SEQ ID NO: 796825 - DNA, 627 bp, Homo sapiens
ttaatgcttttgagtttcaatgtagctgaatgaagaccctccctttttttaaatttctaggttattaaagcccaggtcaaggacttgatgattccacggtataaactaattgtgattgttcacattggacaactgaacaggcagagcatamttattggaagcagatgcctctgggatcctaaaagtgataccttttcatcttatgttttcagaaattcttctctcttcgctcttgcaaatgtctatgcagtttaccttgagtgattgaaaataagaaatctagctcttacttttgaaaattctgaggcaggctgtatgtctgtacacaaaagttttactgccaaaaactttgagaaagaaacaacactgatatttcaagcaactggaagcttttgaattttttcatattctagtaaagatttggggaggggagggtagccacagaaagaatcttgtttatctaaagcaggaacttgatcttggttttgctggattgctttccatagacatagattcttattaaatatttgttttggtactaattattttaattattctttaattagagtgttacaatttcctgcattgttttttaataaaaagaagctttagaaaaactatggctat

SEQ ID NO: 796826 - DNA, 627 bp, Homo sapiens
ttaatgcttttgagtttcaatgtagctgaatgaagaccctccctttttttaaatttctaggttattaaagcccaggtcaaggacttgatgattccacggtataaactaattgtgattgttcacattggacaactgaacaggcagagcatacttattggaagcagatgcctctgggatcctaaaagtgataccttttcatcttatgttttcagaaattcttctctcttcgctcttgcaaatgtctatgcagtttaccttgagtgattgaaaataagaaatctagctcttacttttgaaaattctgaggcaggctgtatgtctgtacacaaaagttttactgccaaaaactttgagaaagaaacaacactgatatttcaarcaactggaagcttttgaattttttcatattctagtaaagatttggggaggggagggtagccacagaaagaatcttgtttatctaaagcaggaacttgatcttggttttgctggattgctttccatagacatagattcttattaaatatttgttttggtactaattattttaattattctttaattagagtgttacaatttcctgcattgttttttaataaaaagaagctttagaaaaactatggctat

SEQ ID NO: 796827 - DNA, 500 bp, Homo sapiens
gatgtgaatccacatctgtctgactccagaccctgagcacactgccacaatgccatatagccttttagatggggacactgaggcccagagagtggaaggtcttgtccaagatcatgaagccagtttgattaattgtccattaattcatcaattattgaggatctgctatttgtcaggaagcaggctagccaatgggaacacaggcatgacctagatatagttgtgcacttgagagtaattaagggrgaagataagaagtgactataaattacttgaataaaagatagtaaatgacaaatatctcagggaagatagtgaagaggttgtcaaagtttggaggaggtatgcacgactttcatttgggaaaaatttgaaaattcttcacagagaaaatggtttaaaggtcttgtttgaaagaagagtagaatttgcatattggcaatgggaaagaggaagaagttcaagctgcaaaaagcgcatagaggtggaggtaaaaggag

SEQ ID NO: 796828 - DNA, 605 bp, Homo sapiens
ataaaatgtttcaagtttctacaacaccatgaaaatcacacaggatctaagttcctagggggcaggggtccagtcaaagggaggcatctgtggtgacacagaagtggtatagtattatgtgacctggagcaaggtagttcctcattgtcacttttcccatccatataaatcacaataacacaggaccaatctccctaaaaaggccactggagggtaatcacaataacacaggaccmatctccctaaaaaggccactagagggtgactatgatgcctataacaagttttaagaaatggaatgcttctttgtatgctcatgtcctatcaacttgttctgctttattcttcattaaacatattatatatttatttttattatttttcctcccttgagtttccaaatgtatgctaaatgaatataatgactttctatttcattaacttttatattgcccatacctaaaacactgactagaatgtagtaggcactcagtaagatttcttaataagtgaaatgcaaggtgtgcaaaccccagcttataaatatcctgtatatgtaacacaaagaatgatacaaagaactgaacttgcactaactaggtact

SEQ ID NO: 796829 - DNA, 600 bp, Homo sapiens
aactcctggcctcagatgagccacatgtgctttagctaaagtttttataccagataaaatcaaaatggaatctgcaatcatactgtgatagtgctcatctttattctatgtccatgattttcaaacttttttttttagtttagtaacctttggttcaaaagaaatctaacatgaatgtaaaaaagtaaaataatcaaagctaagcttttgtggctgaaaatagtagtatttgagggrcagaaagactatgtctccctgaggcagctcttaggtgccagtagaatacagtttgaaaaacaaccctctcctgttgtcattatcaagactatcccattccatcccccactctttgcagggaagtacagaagacagcacatctgtagtatacaagatagatttctcttgcttgcaaaattttagaaaactgtattgtcctcaagatgctgctggttttataagtttgcaaaagtaaaaaccaaaaagaaaaaaaagatctagcccaattgcaacatttcccaatcccctttcttctagttcagcccccttccattaccatcctcccacaaacagccaaggcgctatccagaagaaataagaagg

SEQ ID NO: 796830 - DNA, 600 bp, Homo sapiens
aactcctggcctcagatgagccacatgtgctttagctaaagtttttataccagataaaatcaaaatggaatctgcaatcatactgtgatagtgctcatctttattctatgtccatgattttcaaacttttttttttagtttagtaacctttggttcaaaagaaatctaacatgaatgtaaaaaagtaaaataatcaaagctaagcttttgtggctgaaaatagtagtatttgaggggcagaaagactatgtctccctgaggcagctcttaggtgccagtaraatacagtttgaaaaacaaccctctcctgttgtcattatcaagactatcccattccatcccccactctttgcagggaagtacagaagacagcacatctgtagtatacaagatagatttctcttgcttgcaaaattttagaaaactgtattgtcctcaagatgctgctggttttataagtttgcaaaagtaaaaaccaaaaagaaaaaaaagatctagcccaattgcaacatttcccaatcccctttcttctagttcagcccccttccattaccatcctcccacaaacagccaaggcgctatccagaagaaataagaagg

SEQ ID NO: 796831 - DNA, 590 bp, Homo sapiens
tatcaaaccttaatattttgccatatttgattcacatcttctgttttaaagacgtaagttttaaaggtagggctggattccctccaacatagacacatgcatacacacgcgcgagcgcgcgcacacacacacgcgcacacacacacacacacacattcactttyttcccccagcagtaatcaccgtcctgcagtctgaatatatctttcttattcaggttttatattttgctacatatatgacttctataaacagtatataagttacatgttacataagtggtatcataacatacatattctttttgcaattcggtttttttttccactcagcatgatattttcaagtattatcaaggaggttacatttggctttggtttgttcatttcaattgctccttagtattccattacatgatggaattaactacaccatgattcattttctcattctcctctccatagacatttagaatgatcctgctatgaacatttgttatatgggtccctgtgcaccttgtgcaattatctcctagagcagaaaacaagaaatggatttatagggctctgggaacacaaactctcaacttc

SEQ ID NO: 796832 - DNA, 631 bp, Homo sapiens
gacttgggtagagtgttgggatatttcccctgtcttctccatggggcaaggaatggggaggaatactgccttaaaccaagtggcagggcttcagacaaccactcatagaacattggcagggggaagggggtgcctacagaaaaggagaccagcatcccattcccaggctggatgcttgctgggcagaagaaatccatagattcaccccmatgtgaggagtgctgggtgaggccgacacccatgccttggagtttaggggcacatatgaatgtagacaggtggctgcatctctcctggtgaattttgaaggcaggaggcttatttgagcaatatggacagactgggaggaaggctgttctgaaaatgtgtcagcctgcactcccagttgttggcatggtgaagtgacataggctgaaaggggagatggtagtacttgagttgttctgccctacactctgctctaggggttttgagaggttgtgggatgtatgacagtgcttggagctaaggggaagggcagcagaggtcctgccagaatgcaccttcatggcagggaactgtaaggggttggggagggggtggtgcttctacagggcctcctgcagaatgtgcacatggactacacaagaga

SEQ ID NO: 796833 - DNA, 631 bp, Homo sapiens
gacttgggtagagtgttgggatatttcccctgtcttctccatggggcaaggaatggggaggaatactgccttaaaccaagtggcagggcttcagacaaccactcatagaacattggcagggggaagggggtgcctacagaaaaggagaccagcatcccattcccaggctggatgcttgctgggcagaagaaatccatagattcaccccaatgtgaggagtgctgggtgaggccgacacccatgccttggagtttaggggcacatatgaatgtagacaggtggctgcatctctcctggtgaattttgaaggcaggaggcttatttgagcaatatggacagactgggaggaaggctgttctgaaaatgtgtcagcctgcactcccagttgttggcatggtgaagtgacataggcygaaaggggagatggtagtacttgagttgttctgccctacactctgctctaggggttttgagaggttgtgggatgtatgacagtgcttggagctaaggggaagggcagcagaggtcctgccagaatgcaccttcatggcagggaactgtaaggggttggggagggggtggtgcttctacagggcctcctgcagaatgtgcacatggactacacaagaga

SEQ ID NO: 796834 - DNA, 552 bp, Homo sapiens
cagaaatgagacttcttgcttctttctttccctggcattcattatatcacttaagtctcttaaagtctctgcatttttgtcctaagcttaagagtggatcttgcccttataattcaaggaaaggccaatgaaaagcacaacaccagtataggaggaaaactcggtgagacagatgcaaaaatgtgtgtatgtacacatggtaagcatgtggcttawataaggcccaggaggcttacattgtgtgcagggcaatggtctgtgctaggcagccccaagggaggagacagttaagagggactggagaaggaaataaactttaatacactaataaggccagcagcatcttgagaagtggaagaagacggtaagacaggtcatattttacaaaggccatgacttgaacagagcgatgccatccttgactggaacaagacacagggcatgtagatctatgccaatcaactccttggggaaaagaaatagaaaataagtaaagagagataagatgagtgctgacttcttgttctgctctacaacagtctgaaaaccctc

SEQ ID NO: 796835 - DNA, 574 bp, Homo sapiens
aatactgtgtttttccaacaggcttaaaaaacagcaaaccaggagattatatcccgcacctggctcagaggtcctatgcccacagagtctcactcattgctagaacagcagtctgacatcaaactgcaaggcagcagcgaggctgggggaggggtgcccaccattgccgagacttgattaggtaaacaaagcagccaggaagcttgaactgggtggagcccaccacagctcaaggaggcmtgcctgcctctgtaggctccacctctgggggcagggcacagacaaacaaaaagacggcagtaactctgaagacttaaatgtccctgtctgacagctttgaagagaataatggttctcccagcacgcagcttgagatctgacaacaggcagactgcctcctcaagtgggtccctgacccccgagtagcctaactgggaggcaccccccagtaggggcggactgacacctcacatggccgggtattcctctgagacaaaacttccagaggaatgatcaggcagcagcatttgcggttcaccaatatccgctgttctgcaccctctgctgctgatac

SEQ ID NO: 796836 - DNA, 574 bp, Homo sapiens
aatactgtgtttttccaacaggcttaaaaaacagcaaaccaggagattatatcccgcacctggctcagaggtcctatgcccacagagtctcactcattgctagaacagcagtctgacatcaaactgcaaggcagcagcgaggctgggggaggggtgcccaccattgccgagacttgattaggtaaacaaagcagccaggaagcttgaactgggtggagcccaccacagctcaaggaggcatgcctgcctctgtaggctccacctctgggggcagggcacagacaaacaaaaagacggcagtaactctgaagacttaaatgtccctgtctgacagctttgaagagaataatggttctcccagcacgcagcttgagatctgasaacaggcagactgcctcctcaagtgggtccctgacccccgagtagcctaactgggaggcaccccccagtaggggcggactgacacctcacatggccgggtattcctctgagacaaaacttccagaggaatgatcaggcagcagcatttgcggttcaccaatatccgctgttctgcaccctctgctgctgatac

SEQ ID NO: 796837 - DNA, 600 bp, Homo sapiens
gttcttagaagtaaaaaatgtcctatctctaagagaaggacaagggcagatgaatggaaggaatgctgttgaaaactatattagtaatttaaaagaccaaactgagagtttcctcacaatggagaactgaatgagtaaacaaagaaagtgcttgaatttcccaattgatcaaacsaaaaagatggaagttgagggatgccagtggcagaaggaaaaaccccaatgtccatttaataaggagttccagaaggagagaggagaggagatggagaaaaatttctctaccaagagaagaaaatttctctgagctagagaatggcttaatcctttagaccacaaataactcctgagtgttgggttggcatactttgactactcctagtgaaatttctgagttgcagagttaatggaaaaatcttaaataacttttcatggagaaagaaagaaattgcacaaaagaaacaagaattagactcacgttacctatttcatttacaactttaaatgccacaaggaaatgtagcaatgtgtacaggatatggagagcaaataaatataaactttagattccaggtccagtcaagctattgtttaagcatg

SEQ ID NO: 796838 - DNA, 621 bp, Homo sapiens
atgtacatggttagtattcatatacattaagatgcacttaaatattatgttatttctacacttacctgtaaatatatataagttggaccaatcaggatacactgggggcggcgggggggatgcagagcgcaacatagaaaaaatagctgttccgatcattgtgttgaatatacttacaatcaaggtagcttttaaatctgatttgaaaagggcaaatgtgatttctagggctgaatgcactttaggtggtttgtgtgttgaacagtctctcatgtgtgatatttccaccacatctttttcttttcactctgaccctcctgccttccccttataaggacccttgagattacattgaacccatctggataactcaggagaatctcctaattttaagattctyaatttagtcgtgtctgctaagtcccttttaccatgtaaggcaacgtgttcacaggttccagggattagaacatggatgatctttgggggggccgttattcagcctactacatgggggaagaacttgaatgtgcttaaaagaataaaaatagaaatggagagaaccaattgagatggagaagttgaatatacaaggaaaagagggggcaattcattgtgaat

SEQ ID NO: 796839 - DNA, 588 bp, Homo sapiens
ttgggtttcactgctgttcatgtttctggccattctcgatagacataggttacagaataatagctttccccatttgtacctcctccacttatctctcttccagacctgaatgctggtacactagtcttgacagctatgtttgtcttttcttttcttctcaccctttttgatacagggtctcattctgtcacacaggctatatagtgcagtggtgtgatcacacctcgctgcagcctccacctcccaggctcaagtgatcctcccacctcagtcttccaagtatctgggacaacaggcatgtaccaccatgcccagctaatttttttaaaaattgttattgtttttgtagagacagggtctcactgcrttacccaggctggacaagtaggttttccttgctccctaacttgctttactgccaaataaacctgtggtccagtgtctcagagctgagtcctaagggcctgtgttacagatcttttacccacaccacagtctattggaaggagcttaccagggtacctggctgcactggtttctttcccttggggctggaatcttccctttgctttgcccctatctttatgc

SEQ ID NO: 796840 - DNA, 618 bp, Homo sapiens
acaatgttatgtgttattaaattttatttttaaatgtccatagtatgaagaacacacaacacagaagtttcaagttagacagacagctgagatctgaaggatgactagacgatagctgttttattacttaaggagaggatgttaaatttcattctgaatagttggaattctgagtatttatcctcactgcagaaacaatgcctttcagaaggaaatcattcccttttagatccagaagtaaccctagagattatctgctctaaacccctcattctacaagaggaaattgaggcctcaggaaagatgagtatgttgctcaagataacatacccaaacatcagcagaaccccgggaagaaccccagacacttttctctaagtcctawattatttccaagatatcacactgctgtcttcccccatgtttgaaaataacatcttatatacattgcttctcagagacaacagacactgaactgtgttcaaaatgtttcgcaacacagaaagagctggcttaaattcagcctctgccaattacaaactgcatggctatgagcaacttaatttcttctgttctgagttttttctgtaaaatgggcttaaattatagtataatttt

SEQ ID NO: 796841 - DNA, 652 bp, Homo sapiens
tgatgaaagtagttttcttcaggaaggatatgtatctgctagatgggcactatttttttttttttttttttttttagatagagtcttgttcttgttgcccaggctggagtgcaatggcgcgatctcggctcactgcaaactccgcctcccaggttcaagcaattctcctgtttcagcctcycaagtagctaggatttcaggcgccagctaccacgcccagctaatttttgtatttttaatagagatggggtttcaccatgttggccaggctggtctcgaactcctgacctcaggcaatccacctgccttggcccaccaaagtgctgggattacaggcgtgagcctctgtgcctggcctagatgggcactattaactcagaacctggtttttaaaaagactcagtttgaagtttttctagccataaaaatagtatggatttgggctacaaaactatctgagaactaccatgaggttatgaatccctgagtttttttctcccatccatataatgccaatttatgagacagcaattttcttcatagtctactctgggtgagggcaggcttacttatgatttgctcttgcactgagagtatacccctttgggatcctagcattatgatggtatctctctctctctctttctttttt

SEQ ID NO: 796842 - DNA, 528 bp, Homo sapiens
tgatttctcctgcctactctgtgagagaggcgttaattagcagtgaactagccaaaaaagcaggcaggaggcagtgccaaatcaaagaccacagaaactggataaatagatgttaacaaagcatgaagttaacaatggtgaaggggattgtgatatttttgcttaatagccaggaaaagactgccagctctaagttagggatttgcaaaatgtgttttcattttattttatttcattttatttatttatttattttgagacagagtctcgctctgtcgcccaggctggagtgcattggtgcgatctcagctcactgcaagctcygcctcctgggttcacgccattctcctgtctcagcctcccaagtagctgggactacaggcacccaccaccacgcccagctaattttttgtatttttagtagagacggggtttcaccgtgttagccaggatggtctcaatctcctgacattgtgatctgcccggcttggcctctcaaagtgctgggattacaggcgtgagccaccg

SEQ ID NO: 796843 - DNA, 626 bp, Homo sapiens
aaaagcagccaaagtacatgacaaatctaatgatgttacaaccaagcctaaatcaccccaaccctcatgcaggttgtcccctcttgccatcactcttcctcagttcccctaaacagatggagagttccctgaggacaggccttatctttgaaactcatcataaaaataacgtgagtgctatctagcttcttggaattcttgagagtttattttaagctcgtgatctttttgaatttctactttaatactgttttacagcacagaaaaactgcttttctatacaaaatcttattaacatggaagagtgtggcacaatctacagaatggctctytacattacttactatgcttgactacataaagaaaactttcacaaatgctctatttgcaaacaccactgcagacagaaataggatgtcctgttctcaaaataagggataagacgttttcccatgcttatcactgttcctgaaactgaattcaaatgcagtacatgaggatttgaagacgcttcattaaaacatttatgtgtgtgtgtgtgtgtgtgtgtgtgtctcaaagtggatggaatgatcttcaatttttcattccagagcagtactgtccaagaggacttttggcaaacg

SEQ ID NO: 796844 - DNA, 563 bp, Homo sapiens
agcatatacaatacatacttgaagataatttttaagagggaaggctgcctggtttcttcatgctttctgtaagtgctgtctaagctttgagatttggaataaaatgcccaactctactaccattttccttttgaaatcacgggcagatagggaactgccaagactttatcttaataaaaaataaaagtaaaataaaataaaaataaaagtctttctttttaattttgaaataaggtcttgctctgtcaccgaggctggagtgcagtggcacaatcacagctcactgcagccttgactgagctcaaagatcttcctgagtcagcctcctcagcagctggggctacaggcatgcccaccatcacacctggttagttaaaaaaaaawtttttttttgtagagacggagtctcactacgctgcccaggttgatctcaaactcctgtgctcaagtgatcctccgaaagtgctgggattatcggcatgagccaccacacctggccctactttaaacataatactatactactataggcacaatctttccaaggagctaatctgatgtta

SEQ ID NO: 796845 - DNA, 479 bp, Homo sapiens
ctcattatttagaggatgaaaaattacaatcattccactgaactggaagttaagacagccacccagccactttgggctcctcacacctctgaatcaataggcaaggaagggagttacagtgttggctggggtaattgatcctgcccaagaggaactggaactgctacacaatggaggtaaggaggagtatgtctggcttaaggagatcccttaggacatctctgtaccctgccctgtgattacagtcgataaaaatgacaacaatccatacaggactatgaatggcccacacccctgaagaatgaaggtytgggtcaccccaccaggtaaaccacgatcagcttgcgagatgagtgcaaagggaatacagaatgggtagtggaaagaggcaaccatgaataccagcaaccaccatgtgaccagctacagaaacgaggactgtaattgttgtatttcttgttttgttacgaatgttttgg

SEQ ID NO: 796846 - DNA, 535 bp, Homo sapiens
tatcatggaacatcggattactgactttatttttttgagatggagtctcgctccgtcacccaggctggagtacagtggcgcgatctcggctcattgcatcctctgcctcctgggttcaagtgattgtcctgcctcagcctattgagtagctacaggcgtgtgacaccacgctcagctaatttttgtatgtatatatatatatatatgtattttttttttagtagagatgaggtttcatcatggtggccaggttggtcttgagctcctgactttaagtgatatacccatctcagccttctgaagtgctgggattaagggtgtgagccactgtgcctggccagattactgactccatatcatagtatttaagtattgttaactttacctcacygtatcaaaattatggaatatcacggagaggagtaaacatcatccaaggactttgcattctcctccggggaaaaggttagtgtgttttttggttgtacacaggataattttattaggttaggtggaagtatgaacttgttattct

SEQ ID NO: 796847 - DNA, 626 bp, Homo sapiens
ggtggacaggcttgttgaatgcaccctagttgataccccttgagggacattatcaaacacccaacttacagatggagaagatgaagttcagaccagtggagaagcatttgcctaaagtccaaagaggagtaggtcacaaatcagaggactgtggtgagggaagggggygttggaggggggctggtggccaaggctgctcctggaccctgtatggtcgtgggaaagacactccaccctgggaatatggtcagctggacacgtttggctgggaagcactttgaagctgggcagcatccaacatgctggccagtccctggggctcccaaggctggggacacaggcctccactctgacaagctgttcagagcactccccaagcctttgtgtgggaagggacagcccagcagcagagcaactggagtgtagatgagagaggaagaaccacattccagagattttatattttatattggggtgttccacaaagaaagggccctggggtcaaagcaacctgtcccaaggtttttcagcaaatgtcccataagcagcagtgggggctgctccaaagtagatgttctgatccctgctttctgctccgtgcaggaagcagcacagggactgtaggc

SEQ ID NO: 796848 - DNA, 626 bp, Homo sapiens
ggtggacaggcttgttgaatgcaccctagttgataccccttgagggacattatcaaacacccaacttacagatggagaagatgaagttcagaccagtggagaagcatttgcctaaagtccaaagaggagtaggtcacaaatcagaggactgtggtgagggaagggggcgttggaggggggctggtggccaaggctgctcctggaccctgtatggtcgtgggaaagacactccmccctgggaatatggtcagctggacacgtttggctgggaagcactttgaagctgggcagcatccaacatgctggccagtccctggggctcccaaggctggggacacaggcctccactctgacaagctgttcagagcactccccaagcctttgtgtgggaagggacagcccagcagcagagcaactggagtgtagatgagagaggaagaaccacattccagagattttatattttatattggggtgttccacaaagaaagggccctggggtcaaagcaacctgtcccaaggtttttcagcaaatgtcccataagcagcagtgggggctgctccaaagtagatgttctgatccctgctttctgctccgtgcaggaagcagcacagggactgtaggc

SEQ ID NO: 796849 - DNA, 592 bp, Homo sapiens
tggatgtggaactcagagactccagtctaaagctttgcccagagagagactctccctcaaccttccagtaaattccccttcggaggtcagcctctgctacttgcaaacctaagaaccatggttaaggtgctctgacatcgtggttaagtcactaagcttcttaaggcctgatctcttcatcagtagataggaaaggcagcccagggtctactctccctgcattcactgtttctactgtgcattcagcatcatgccagacaggtgctgcttcctacagggctcaaagcaccttgaaaacatcatcagcgtggttaggaattsgaggctgcatgtgtacactgctttaatattacctctcatcattgcttctcctaagggccattgaatctctagcacacagggacccttggagtcagtttcattagagaaagagccaggttaattccagcccagcgaggaggctctgaatcaaacagccgcctcttccctccagagcttcttcaggctgacccccaggcgcctttctatcaggggaaagattggacagcccggcagttatcgacagagacggccgacggacattgattgggac

SEQ ID NO: 796850 - DNA, 658 bp, Homo sapiens
cctttgaacaccaccatttcaggtgctattctggatggggatggtgcagtgaagagatgaacaaggttcccgccctgcaggagctcaccttctggtgtggaggaagcaggagaggtggcagacaggagcacgcgcagagagaaggccatctcagagaggcctgagggcagcagggctggacggcgggcaaaacctcagctgctgggctcagggggcgaggatcgaagttagagtggtcctcactgatgaaggacacatgcgcctgagatgtgaaggggcttctgcagatcaagggaccccaaggtcctgttgtcttcaaataagaggcctgccctgccctctaggccagcggttctcactcagcacatctggagacatttcagttgtcaccacttggaggggagatgctactggcattcagtggggagaagccagggaagctgctaaaacgccctgcagtgcagcaggcaaccccccacaacagaaaattwctgggctcagatgtccacagtgccaaggtttggaaaacccactccagtggaaagatgaatgtaccagaatgttccagaaacacagatgcaattcatatcacctggagactgtctggctttgtgaccagggtaagccacttgcctgccaaggacctgcccccttcctc

SEQ ID NO: 796851 - DNA, 621 bp, Homo sapiens
tgaatactgcaggcagtcgcaacacatggtgagtgtttgtgtatctaaacctatctcaacacagacgaggtacagtaaaatatggtataaaaaatttaaaactgctacacctgtataggatacctgcatgaatggagctcccaggactggacgttggtgtgggcgaaccagtgagtgagtgyggagagatgtggtgacctgggacattaccgctccctgcttcacactttataaacactgtacactttggcaacgcaacatgtgtaaaaacatatttttctttcttcaataataaatcaatttagcttagtgtcaatttttacttttttaattttttaactttttgatgcttttctagtaacacttagcttaaaacaaacacattgtacagatgtacaaaaatattttctttctttctttcaacaagcttgcagttgtgttttctttctttatatctttattctataaacttttttcgactttaaatatttttttaagttttacttttactctttaaacttttttgttaaaaactaagacacaagcacacacttgagcctaggcctagacagggacaggatcctcagaatcactgttttccacctccacatcttgtcccac

SEQ ID NO: 796852 - DNA, 621 bp, Homo sapiens
tgaatactgcaggcagtcgcaacacatggtgagtgtttgtgtatctaaacctatctcaacacagacgaggtacagtaaaatatggtataaaaaatttaaaactgctacacctgtataggatacctgcatgaatggagctcccaggactggacgttggtgtgggcgaaccagtgagtgagtgtggagagatgtggtgacctgggacattaccgctccctgcttcacactttataaacactgtacactttggcaacgcaacatgtgtaaaaacatatttttctttcttcaataataaatcaatttagcttagtgtcaatttttacttttttaattttttaactttttgatgcttttctagtaacacttagcttaaaacaaacacattgtacagatgtacaaaaatattttctttctttctttcaacaagcttgcagttgtgttttcyttctttatatctttattctataaacttttttcgactttaaatatttttttaagttttacttttactctttaaacttttttgttaaaaactaagacacaagcacacacttgagcctaggcctagacagggacaggatcctcagaatcactgttttccacctccacatcttgtcccac

SEQ ID NO: 796853 - DNA, 614 bp, Homo sapiens; identical to SEQ ID NO: 794929

SEQ ID NO: 796854 - DNA, 563 bp, Homo sapiens
atgatgtctttcctgttctctggacaaatatgctgtttcacacaacagtgcctgcacatatgctgctaccatttgtgagaaatgctctatcattttcatgtactggaaaaatccctactcatatttcagaacttctgcagattgttctagtctctcctctcgcccttaaatattcactaagaccatctattagagcctttaccaatttatcttgtaaaacattmtctaacctaactgggtcatgagttttcaaaggacaatgtattgttcatttttgtatcaacagtaaactttgtttgaatcaaatgtaatgacaaaatttagagtctctctaaacttcaaagaacaaatgtaggtatgttccaacagcaggagactttaaaagggaaaatgattcgagaatgatgggaggctctcaaaatgaaattctgaagatagcctaacatataaccttactaaggaaaaaaaaatgcctctatttgaagaggcttatgtagttgtacagcctgttggccaatgagttaagatattaatgagcaagtatacaaaatgaaaaaataacc

SEQ ID NO: 796855 - DNA, 563 bp, Homo sapiens
atgatgtctttcctgttctctggacaaatatgctgtttcacacaacagtgcctgcacatatgctgctaccatttgtgagaaatgctctatcattttcatgtactggaaaaatccctactcatatttcagaacttctgcagattgttctagtctctcctctcgcccttaaatattcactaagaccatctattagagcctttaccaatttatcttgtaaaacattctctaacctaactgggtcatgagttttcaaaggacaatgtattgttcatttttgtatcarcagtaaactttgtttgaatcaaatgtaatgacaaaatttagagtctctctaaacttcaaagaacaaatgtaggtatgttccaacagcaggagactttaaaagggaaaatgattcgagaatgatgggaggctctcaaaatgaaattctgaagatagcctaacatataaccttactaaggaaaaaaaaatgcctctatttgaagaggcttatgtagttgtacagcctgttggccaatgagttaagatattaatgagcaagtatacaaaatgaaaaaataacc

SEQ ID NO: 796856 - DNA, 405 bp, Homo sapiens
aaatggtgaaagcctccacatagtgtcttacaccttctgtttttttctacttaatgtatcttgaagatcctttcatagcagtacacatcaaaatgccttattctttttaaatacagtcatgtgttgcttaacgacagggatacattctgagaaatgggttgttaggcaattttgtcatttttaggaatgccrtaaagtgtatgacacaaacccggacggtacagcctactacacacctaggccatttgctacagcctattgcttttaggctataaacctgtactgcatgctactctactgaatactgcaggtaattccagcataaaggtatgcatttgtgtatctaaacatagaaagggacagtaaaactacggtattataatctcatgggatcactgttgtaca

SEQ ID NO: 796857 - DNA, 613 bp, Homo sapiens
agtgtcttacaccttctgtttttttctacttaatgtatcttgaagatcctttcatagcagtacacatcaaaatgccttattctttttaaatacagtcatgtgttgcttaacgacagggatacattctgagaaatgggttgttaggcaattttgtcatttttaggaatgccataaagtgtatgacacaaacccggacggtacagcctactacacacctaggccatttgctacagcctattgcttttaggctataaacctgtactgcatgctactctactgaatactgcaggtaattccagcataaaggtatgcatttgtgtatctaaacatagaaagggacrgtaaaactacggtattataatctcatgggatcactgttgtacatgcagttctttgttgcctgaagtgttgctatgcaacacatgactatggttgcatattatcattgcctgatatatcatcatgtatttaatcaaaattctgttaattaacatttaaattacttcctcttcttcagcattataattctacagtaactaaccttgaaaatatctttttgtacatgtgtaactatatttatatgataaatctctagaaattaaattacttcgtc

SEQ ID NO: 796858 - DNA, 551 bp, Homo sapiens
ggccagtgcctctgagaaacctagcatacaacatagctgagaaagaagattgttccataactggtgctgagtcaactagttaaccatatgcagacaaataaacctgaatccttttttacgccatatagaaaaagcaatttsagttgggttatgttactaaatatgacaaaacagtattagcagtgtgtttttataaccacaaagtaatgaaagttttcttaaagaagacgcagaaaaaaagaaaaatgcaaacaagttagaaaaaattaaaaataactaattattttaaaaatattttgttgttaaaaggtaccatagaattgcaaaaataagccatgaactaggagaagatgtttgatacatgcttaaccaacaaaagattattatgcaaaatatattaataactttgactaattaaaaagaaaagatggaccacccaattgaagataagtagagaaatgagtaggcattccatgaaagaaaaaaatacaaatgacaattaaatatattaaaatgagaccttactggtttgaaaattaaaatcaaaatta

SEQ ID NO: 796859 - DNA, 551 bp, Homo sapiens
ggttattttttcattttgtatacttgctcattaatatcttaactcattggccaacaggctgtacaactacataagcctcttcaaatagaggcatttttttttccttagtaaggtcatatgttaggctatcttcagaatttcattttgagagcctcccatcattctcgaatcattttcccttttaaagtctcctgctgttggaacatacctacatttgttctttgaagtttagagagactctaaattttgtcattacatttgattcaaacaaagtttactgytgatacaaaaatgaacaatacattgtcctttgaaaactcatgacccagttaggttagataatgttttacaagataaattggtaaaggctctaatagatggtcttagtgaatatttaagggtgagaggagagactagaacaatctgcagaagttctgaaatatgagtagggatttttccagtacatgaaaatgatagagcatttctcacaaatggtagcagcatatgtgcaggcactgttgtgtgaaacagcatatttgtccagagaacag

SEQ ID NO: 796860 - DNA, 633 bp, Homo sapiens
aactgtgcatccattaaacctcttttctttataaattacccagtctcaggtagttctttatggcagtgcaagaacggactaatacaggcataatgtatgttcaacgttccatcaagtcatggcagaaaagtcagtttttaactttctctggggtacccttggacaaaaagagacacattcagtcagttggggggcttacaatttcattttcatttctcagtgggtattttgcaaattygtggaattgttttgtcaaaataaatggaggtgctactgacattttgtggacaggcattaagacttctagaagtcctgcaacacacagcaaaggctgccaatgaacctgcctttgcaaaattatgatggtaacataaatctgaggtagttgactccatcttgcttctaacctccaaagctgttcttggtcattcttaggggtaggccaagctaactttgggagaaatttagttgatagtttaaccttaaagcgaggataataattaaaagtccaaaaagttagggttatcagaggggcctgaattctgccactatgtagcagaatgtatgtaggcatagttaaatgataaccagccattgttccagaggttgcaagatttgtaacacccccactta

SEQ ID NO: 796861 - DNA, 633 bp, Homo sapiens
aactgtgcatccattaaacctcttttctttataaattacccagtctcaggtagttctttatggcagtgcaagaacggactaatacaggcataatgtatgttcaacgttccatcaagtcatggcagaaaagtcagtttttaactttctctggggtacccttggacaaaaagagacacattcagtcagttggggggcttacaatttcattttcatttctcagtgggtattttgcaaatttgtggaattgttttgtcaaaataaatggaggtgctactgacattttgtggacaggcattaagacttctagaagtcctgcaacacacagcaaaggctgccaatgaacctgcctttgcaaaattatgatggtaacataaatctgaggtagttgactccatcttgcttctaacctccaaagctgtycttggtcattcttaggggtaggccaagctaactttgggagaaatttagttgatagtttaaccttaaagcgaggataataattaaaagtccaaaaagttagggttatcagaggggcctgaattctgccactatgtagcagaatgtatgtaggcatagttaaatgataaccagccattgttccagaggttgcaagatttgtaacacccccactta

SEQ ID NO: 796862 - DNA, 620 bp, Homo sapiens
aatatctgttggctatttagcacagtgcctggcacagtaaataatttatccataatatttcatccatttgtatatcaaatgtgaagaatgtattattattcttctcattttacaatgagaaactgaggcttggagtaagcaacttgctcattttcaaggagctcatgagtgaaggagctagatttgaacccagacccatgactctaaaaatcccagctctaaaccacaaggttctaattcctttttttttttttttttwaaaaaaaacatagtctcgctctgtcgcgcaggctgcagcgcagcggcgcgatctccactcactgcaacctctgaccctgggctcaagcaattcttgtacctcagcctttagagtggctgggactacaggtgtgcaccaccatgcccggcaaattttttgtaatttttttttttttttttaggagagacagggtttcaccatgttgcccagggtggtctcgaactcctgagctcaggcaatccacctgccttggcctcccaaagtgctagaattacaggcatgagccaccatgcccggccttctactgtattttaaaggcagatgcttctcttccagtcctgtgtacaatcttttttcactc

SEQ ID NO: 796863 - DNA, 503 bp, Homo sapiens
ttgacctgtaaagacacacataaatttaaagtcaagggatggaaaagtatttatttctcataaacataaacccaaagcatacaggagtagctacacctatatttgaaaaaaagtaaacattaagtcaaaaataaacatamaaagagacaaagaaggtcattatataattataaagggaccaatttagcaagtaaatataaaaattataaacttatatgcacccaacatggtagcatcaagttgtttaaagctaatttatttgagctaaagagagagataaactccaatacaaaataattagacatttcaacatcccacattctgcactgggtagattattttatcagaaaatcaacaaagaaacattggacttaatctgtactatcaatcaaatgttcctaacagacatttatttacagaacatttcatctagctcctacagaattcatgttcttctcatcagcacgtgtaacattctttaggatagacccgtatattaggat

SEQ ID NO: 796864 - DNA, 574 bp, Homo sapiens
atccaaaaaataatattttataattctgtgttaagccagtgtgagcatgcataatcatggagctaaaacatatgtttaagattaaatgctttgtgggcgggcgcggtggctcacacctgtaatcccagcacattgggaggctgaggtgggcggatcgcttgaggtcaggagtttgagaccagcctggccaacatggtaaaaccccacttctactaaaaatacaaaaattagcagagcatggtggcgggtccctatactcccagctactcgggaggctgaggcaggagaatcactagaactcaggaggcagaggttgcagtcacctgagatcacgctactgcactccagcctgggtgacagarcgagaccccatctcaaaaaagaaaaagattaaatgcactaacttctataatagggacacacacagtgttttaagatacatatctttttatactaaataaggcacagaataattttatcttatattccttattcaataaaaaatgggcatgctgatttgacaaatgaaaggttttattgaattatctttaaaagcaatgttttcagaatataa

SEQ ID NO: 796865 - DNA, 574 bp, Homo sapiens
tgattaactcagatagtttttttagttcacatctagaatattatacatcatactagttttaaaaactagtttaaaaaaacataattgagctagaaacaatccaaatatgtaccaatgttcaaaggaattggtagctccccaaatatattaggactcttcactttgaaagacaaaatcttaaagatatgattataatctttaagaaggctatagacgagataaacagatttatttaccaaattttaatttactagatttagggggcacgccctgacactagagttacattaaagataataaaatactgctktatccaataaagtaaatgtatggaagtcattattccaagaccaaacacaggtttagataaattaatgactataagagtcataagataagtattattgaggacatgtttctatcattgaatgtgattgtaactaattggcatgactacctctttggcatacctcttggtgacatgatgagagacggaatattaggctgggtagatgagggatgtgatttaatgtggtaactcagatgcttttatttcaaattattttaagactgt

SEQ ID NO: 796866 - DNA, 564 bp, Homo sapiens
gggggacccaactactgccgcccaggtttccaccagaacaaatccaagcagaacagccaccaaggggtaccacaacccatgttgcagccacatggccaacctggaatcagtgggggaccaaaggctcactctcctcaggatcctgttcatgatgccaattgtcagattctaactgaggtctgaggggagtcggtgggcaagtggtaggtagctggaaaaacattgaggaatcatagacagttttgacatggctttaytctctctctctggatgcgagcaagctgtatatacagtgttagcaaggtaattataccttttacagacaataatggctccaagccaagcacgagctcacatgggtgatcacctaatgcacctcgtgtcacgtggttacataatgtgcagggttgtgccctgtgctccaaacccactgagtcatgctgcaccagaaggccacctcggcctgctcttgactaaagtgcagctatttcccttacaagaatgttgccattttcactgactgcttaagttttatttttttctgtgatataaatacctctccag

SEQ ID NO: 796867 - DNA, 596 bp, Homo sapiens
ctgagtcagaatctgcatttgaataggtgattcttgggtataataaaacttgaaaaacactgttctggacagcttttggtacattttagaagggaggtctgtgcaggcccattctgttgctgagaatttatttagagattcatagccccagatacctgcascccaagaacagaagggggagccctaatcccccagttgccagttgaaaaactggttatagttgcttcctgttcttcacagggcaggtaatgtgaaatggagtattagaagcagcagaagtagaggaaggagaacaaaaaatacgtgctactccttcccagtggggttgcgagcaagaggagaatctggcaaatccctggggtctcagaaacatacggaggccactgtcagagcaggaagcaatcaaggggaaactagggaagaacagagtcgaaatcttgttcttctacttctgtgtactgttctgagtctccctggttatttttcatctctttaataaattgcctacacttctgctttctcttttttttttctctcaaaagtaacagtagtaataatgataatatcttatatccacatgatgctatatactctct

SEQ ID NO: 796868 - DNA, 631 bp, Homo sapiens
aatcttgttcttctacttctgtgtactgttctgagtctccctggttatttttcatctctttaataaattgcctacacttctgctttctcttttttttttctctcaaaagtaacagtagtaataatgataatatcttatatccacatgatgctatatactctctggtatatagtagatataacagtcttttacraaaggcaagtttaggctgttttgcaaatgataaatgttccatacactttctcccatttttaattgggttatcattaaaagtatttcttgtttttcattcattttggcaaattttggagggtttcggtgtgtttgtgtgcacacaggataatttgttgagttattgccaaagtgaattgaatgaggaaagtgaggaaaaatactaccattaagtagatcaacccccttattttgaaggtgacaaaaccaagccacaagagtttaggtgatgtgacttggatcctatagcaagtgaataaaaccagtatctcccattctttacattccacagtacactctactgatatgcatggaataaattttagagaacctgtgagctaaatcttaaccttgtgtccaagacagatctcacctaaatggtcctttaagaagataacta

SEQ ID NO: 796869 - DNA, 622 bp, Homo sapiens
cattcatttcacacctaatttcctactgaatgataacttaacagctggctacggatcacgaggtaagtgggaccaataaaacaatagccattggacaatactacttataatattctgtgcttggtgctgaaagggactcactcacaaaacctgaaacttgtcaaggacttaccactcaaagggggagataggtcatatgcccatgcaaagatgaggggctaaagtgaactcgaaagagtttagcaccagattagtggcccagagaggagtgctataagaattcaatcaaggaaacgtcatttagagycaagggtggtcagaaatgtcctcacaaaggaaaaggtcttcaagattgaacatcattttgataaatggaaagaagggagaaaatagtgggaagactatgaagaaaactgtggcagcagaaaaattaaaggcatataggagagacagagaccctgatgatggtgcagggagactgtgggcagtgggagaaaacgttgaaacatacatgagggccaggtgatgcactaaaatggccacattttcaagtcaccactcaaggtttctaagcacaggagtgactccatcaaagcagtgttttaagattaatctggcttcc

SEQ ID NO: 796870 - DNA, 540 bp, Homo sapiens
acacttcctgatgttgtgctttctaaagaaaaaaggaaaaaaatgcagataagcaataatagcattcattccaaaggaccagagtcataatattaaaaacatatatacaataactagataattctttttgattttttaaaataatactyacatctgatgtgttcattcttagagctcactctttaaaattaataattaaagcatacacatggttgatcttcactgatataatttataatatacattcatttagccccaaattattacatatttaacatgattaacttaataggttaacaactgtcataatttcacatgtaacatgatatattttcatactagtttttgccattttctgtctaaaaattcacattttattccaaataattaaatgtcttaaaagttgatagaattctagttttgataatgtgaacattttcttagaatctcttaaaaaataaaaagaattcttcatattacagtggttgaggaaaaaatttaaaaccacaatacattttttttaactaaggtgcatatgaa

SEQ ID NO: 796871 - DNA, 540 bp, Homo sapiens
acacttcctgatgttgtgctttctaaagaaaaaaggaaaaaaatgcagataagcaataatagcattcattccaaaggaccagagtcataatattaaaaacatatatacaataactagataattctttttgattttttaaaataatacttacatctgatgtgttcattcttagagctcactctttaaaattaataattaaagcayacacatggttgatcttcactgatataatttataatatacattcatttagccccaaattattacatatttaacatgattaacttaataggttaacaactgtcataatttcacatgtaacatgatatattttcatactagtttttgccattttctgtctaaaaattcacattttattccaaataattaaatgtcttaaaagttgatagaattctagttttgataatgtgaacattttcttagaatctcttaaaaaataaaaagaattcttcatattacagtggttgaggaaaaaatttaaaaccacaatacattttttttaactaaggtgcatatgaa

SEQ ID NO: 796872 - DNA, 633 bp, Homo sapiens
ttcttgagccgcacctcgtctgagaagtactcaccaggggcctccatggtgatggccagcagggagcccatcatcactgtggagactccaagggccagggccttgactatgtgccccatggtctggatgctgccattggctatgatgggcacaccaaagcgccrggcatacttggcctccttgtacacagcagtgccctggggctgaccacaagccatcacttcccgggtgacgcagatggagccgcagcccatgcccacacacagcccgtccacaccagcgtcaatcaggttcttggcctgggctgctgtcaccacgttcctgccaatcacctggaggtgggggtacttctgtttgatgtaatgcaccatggcgatctgatacaccaagttcccttgggacgagtccaagactatgatgtcgacgcccacctgggtgagcaggtccaggcgatatttgtcatcctcacgggtgcccacagctgccccgcacagcagctgcttgttgggaatccttggaggccagagggtagtcttggttcttcttcaggtcgctgccggtgataatggccaccagctcattgcgatcattgatgataggcagcttccctttcttgctacgctgcaggatctc

SEQ ID NO: 796873 - DNA, 503 bp, Homo sapiens
ttagaatttctttttttttcttttctttctttctttcttttttttttttttttttgagatggagtctctctctgtttcccaggctggagtgcagtggcacaatctcaggtcattgcagtctccacctcccaaggtcaakcaattctcctgccccagcctcccaagtagctgggattacaggcatgcgccaccacgcctggctaatttttttgtatttttagtagagatggagttttaccatgttggccaggctggtttcgaactcctgacctcaggtgatccacccacctcagcctcccaaagtgctaggattacaggcgtgagccaccacgcccagcctatcttagaatttcttaatgcaaatataaacaaatataactaattatttcctccttaccacaaaagataacccactaaacacactgttcaacactatactttttcatagttaacagtttatcttggataccttttcactatgagagctccatgattcttttttt

SEQ ID NO: 796874 - DNA, 633 bp, Homo sapiens
ttatgatgaaacttttggtggtaatatagtttttaattatttaatggttttataggatccagggttgttactgtagaggatatttaaactgtacttgaaaggataacataaatctataggaacatttgattcaagttaaattgtattttggtgcatagagtycatattgtgggatataacatcaattttcttatgagattccttgttttatcttttttttgtaataaaggaagaatttttaactttgaccatagagcataggaaggggactcaaggatagacttcaaaagatctgtgatctactccaaaacagtaggtaaaatattttatatatatattttaacagagtgtcaagattctcatcccagggacactgagagaagttttacgtagtgggaagaacactggatatagtacaagacaaacctggattgaattgtagctctgccatttgtgacatctctgagtgatcatggcaaattacttaaaccctttcatttgcttatgtatgatgtatacacattgttgagatataggagacatttgataaatagaattgcttgtattattattaatacttacctgcagaatttatatgtatttgtttaaattttctctttctttctttctttc

SEQ ID NO: 796875 - DNA, 643 bp, Homo sapiens
agttttcccgaatacattcaaatcatgtcttagatattacagtatcatatgggatagttttactgcctaaagtctcctgtgatccacttcttcatctctctttacctccctctgaacccttaataaccttccctcctctgtaatggactctgcctgatagtcacatagccactctggctttctttgaattagtgttagcgcataatatatctttctccatccttttatttttattttattttattttttgagatggaattttgctcttgttgcccagactagagtgcagtggcgcgatctcggctcactgcaacctccgcctcctggattcaaacgattctcaccttgtgcctcagcctccctagtagctaggatcacaggcatgcaccagcttgcccagctaatttttgtattttcagtasagacgggatttcaccatgttggccaagctggtctttaactcctaacctcaggtgatccacccgcctcagcctcccaaagtgctaggattacaggcgtgagccaccacgtccggcatccctttatttttaatctaactgtgtctttacatttaaggtggttttattatagaaacatatagctatgtattgttttggatccaatcagacagctgctacctttt

SEQ ID NO: 796876 - DNA, 643 bp, Homo sapiens
agttttcccgaatacattcaaatcatgtcttagatattacagtatcatatgggatagttttactgcctaaagtctcctgtgatccacttcttcatctctctttacctccctctgaacccttaataaccttccctcctctgtaatggactctgcctgatagtcacatagccactctggctttctttgaattagtgttagcgcataatatatctttctccatccttttatttttattttattttattttttgagatggaattttgctcttgttgcccagactagagtgcagtggcgcgatctcggctcactgcaacctccgcctcctggattcaaacgattctcaccttgtgcctcagcctccctagtagctaggatcacaggcatgcaccagcttgcccagctaatttttgtattttcagtagagamgggatttcaccatgttggccaagctggtctttaactcctaacctcaggtgatccacccgcctcagcctcccaaagtgctaggattacaggcgtgagccaccacgtccggcatccctttatttttaatctaactgtgtctttacatttaaggtggttttattatagaaacatatagctatgtattgttttggatccaatcagacagctgctacctttt

SEQ ID NO: 796877 - DNA, 609 bp, Homo sapiens
gatttgggtatattgtagaaaataaaaagttcctcttcaaagcttcccttcttgttaaagaataaatcataagtgttagaattaacagtttcttttaaagactaactttatgctagacatgctcacagacacgtagtacattctatgtcctcgtactttaaccaagatatctgtgctagacgtgcacacaggcatgtctcagctcrcagcctatgccctttccttatttgggaatgtttattccttatttggaaatgttattacttttctaagtcctttcgtaagcaacttcattttttttcctttgtttttctattgcctttacctgtttaaaaaagttttaaactgttagccaatcgggttttagtttagattgtgaggtctggctccagccaatggagacaggacacagtagcagggacaaactgggtaagggataaaaattgcttcgctccattgttccggggtgctctcgccattgttccaactgccataaacaccctttctgcagaaagcaaaaatggccttgctgagagaattaaatttatgttcgagtgctatttctttgtggcactggggaacaagcattctatttctaaataaacattt

SEQ ID NO: 796878 - DNA, 698 bp, Homo sapiens
tggttttctcacttctactttggacccaggaagacttccaggccagcacctctcaaactgaaatgtgtatataaaccagaaagacttagaacagcacttctcacagtataatgtgcaaattgcttggggctctcattagtttcagattctgattccacaggytggggacatggcctgcaattctacctctttgacatgtgcccaggaggtgcagatgctgctgaccccggctgttacaggctgatttgtgtcccccaacatttatatgttggagtccggccacccagtacctcaaaaggtggctgtatttggagatagggactttgaagaagaagtaattaagttaaaatgggatcattaggataggccccgatgcaatacaataggtgtccctatacgaacaggaaatttagacacagagtcacacatagggaagaccatgtgaagacacctcagaagaagccaaaccttccaacaccttagtctcagatttccagcctccaaaattgtgagaaaattaatttctgtcgtttcactcagactgcggtactttgttatgtcaaacctagcaaaccaatactaattttggtactgagaagtgtggtgctgctgtaacaaatacctgaaaatgtggaagtcacttttgaactgggcaatgggcagaggaaagaagagttttgaggcacctgatagaaaag

SEQ ID NO: 796879 - DNA, 590 bp, Homo sapiens
atttattgatttggatatgttgaactatccttccatctcagggatgaatctcttctggtccatggtgggtctagaaacatcggccaggggctaaggcctggaattaggggctttaggaatctacttggtgctttattttactgcagctgagctggtaccaagttgcaagacaaagtcctctgtattcttccctatcctttccccaagtgaaaggagtctctcatagagtggccctgctagagttgggggaggggttatgcaggcactcaatatcccctatagctggtgttgaactggactgcactcaagtcccattgcctccaagaccagtgtggcmccaggactttcccaaggactggagtccttgtagcttaacttccattcaaatgcattcagggccccagaccactttacttagctggtggtgaagtcatccaaggcttgagttcctcctgcttaggcagaagattcccctctggcccatggctggtctaaatgctcattctgtgggcactggcagaattctgtcttgtgttgtgttctgctgtgaaagggcagccctgaattacaatgcaaagttccacagtact

SEQ ID NO: 796880 - DNA, 648 bp, Homo sapiens
aagcttcctttttctccatatcctcactagcattcattattggctgtcatttggataaaacctattttaattgggrtggaattatattaatatttcattgtagtttctatttgcactgctctgatgatcagtgatgttgagcacctttttatatacctgtttgccctttgaatgtcttcttttgagaaatatcttttcagatccttgcctatttttaaattgaattattagggttttttttttcctgtagagttgtttgagctccttacatattctggttaccaattccttgttagacaagtaggttgcaaatatttttttcccattctatggattttctcttcagtttgttgattgtttcttttgctgtgcagaagcttttacattgatgtaatcccatttgtccattttcagtttggttgcctgtgcttgtggggtattactcaagaaaactttgcctagtttcatatcctagagagttttcctagtgttattttttagtagtttcatagtttcacattcgtcaaagaaatagaaaattagtcctaaaatttatatggatctacaaaagacccagaatagccaaagccatcctgagcaaaaagaacaaaattggaaaaatcacattaactgacttcaaattttact

SEQ ID NO: 796881 - DNA, 648 bp, Homo sapiens
aagcttcctttttctccatatcctcactagcattcattattggctgtcatttggataaaacctattttaattggggtggaattatattaatatttcattgtagtttctatttgcactgctctgatgatcagtgatgttgagcacctttttatatacctgtttgccctttgaatgtcttcttttgagaaatatcttttcagatccttgcctatttttaaattgaattattagggttttttttttcctgtagagttgtttgagctccttacatattctggttaccaattccttgttagacaagtaggttgcaaatatttttttcccattctatggattttctcttcagtttgttgattgtttcttttgctgtgcagaagcttttacattgatgtaatcccatttgtccattttcagtttggttgcctgtgcttgtggggtattackcaagaaaactttgcctagtttcatatcctagagagttttcctagtgttattttttagtagtttcatagtttcacattcgtcaaagaaatagaaaattagtcctaaaatttatatggatctacaaaagacccagaatagccaaagccatcctgagcaaaaagaacaaaattggaaaaatcacattaactgacttcaaattttact

SEQ ID NO: 796882 - DNA, 635 bp, Homo sapiens
tgataggtattttattgagcctataaatcaatttgggaagaattgacatcttaataatattgagtctttaagaacattgagtctgtgttcattcattaagatcttcttaaaatctttcagcaatattttataaatattagtgaaaggttgtgaatattttaaatgtactactttgtatagaatatttttgatgtcttttaaatggtgttttaaaaaatatgtttactattacctgttttagcmtcagaatttttacatatttttgaaaaattttatacaaggtcaattggctggcccattctttgtgtttgtttatagttttctttctctctgtcttattctttctttcagtatttcttatgtagctttttttttttttttggcaacttatcacccagggtccccaatgtacaaccccattttgtaatgttgctttgggttcttgtcttcttttgatattacagatatagttaactactgaatggggagatgagttcatactctcgaggcaagcctgcttctttccatgtcttattgcctcctgatacatagaactttctgtaaatgataaccaagcctatgattggactgggaattttatttattctccattgtagagcatgggccagctccac

SEQ ID NO: 796883 - DNA, 562 bp, Homo sapiens
taacaaattatcaatatcattactaatacagccaggtaaagtggagcaacaaaaactgaaggatattatttgtctgagaaatttaccctttctcagagactccacactgcattatttgctgttaaaaaggaagagagcacatccctccacatttagatgtgtcacttgctgacatcattttacataattaattgccaagactcctctgttgtaagtcagttaaaggcaaaaattgtctttagtattggcatatggagtatttgttatattaacatttttctccatgcagtcatccaaaatgagagatataattatctttttttttccctaagtttatgccttcatctcctgcastgggtggtccatcggacttaagtttaatttgaaaattaaattgctatagaaaggctttctagtttcaaattatgttgtataactcagaaaaacagaaaagtaagcattttcacaactattaatatattatagatattaacatcctaatccattaacaaattatacagcagcagcactaattgatgaattatcatttctaagctgctac

SEQ ID NO: 796884 - DNA, 636 bp, Homo sapiens
agtaatggccaaagattgtcaatttcctgaattgccatttgttttttggttgttttatcttcccagtctagttttctgcattgcttgcacttggatagatttaggtttaattataacatgttaaatctacatctcagatcctgtgtgttggcaatgtttttacagactggtctactacatttactgatttaatatatttgcatgctgaagttaaagggacagtacctctgccaaaggtaaaacaaatggaggaccaggcataagatacttttgmtaaaatagcaatatatggtaacttaatatgtgttattattatcattaattttagtgtttcgggaagtaattttcatcttcctaatattgtttttcatgccttgcttacgtttaaatttgagattttaccccctcgagtttatgtgataacagaactgtttgtctatgtgagactgggaaaaagtaattgaaggattcttagaaacaattaaggaaggctttatatatgcaatctttccaaaagttacatttactaaaaaaacaaaaacaaaaacaaaaaaatgtctgacatttgctccattttcttggccagattaaaactagaggctatagtaatagtattttgaagatgatgtgagcaac

SEQ ID NO: 796885 - DNA, 636 bp, Homo sapiens
agtaatggccaaagattgtcaatttcctgaattgccatttgttttttggttgttttatcttcccagtctagttttctgcattgcttgcacttggatagatttaggtttaattataacatgttaaatctacatctcagatcctgtgtgttggcaatgtttttacagactggtctactacatttactgatttaatatatttgcatgctgaagttaaagggacagtacctctgccaaaggtaaaacaaatggaggaccaggcataagatacttttgataaaatagcaatatatggtaacttaatatgtrttattattatcattaattttagtgtttcgggaagtaattttcatcttcctaatattgtttttcatgccttgcttacgtttaaatttgagattttaccccctcgagtttatgtgataacagaactgtttgtctatgtgagactgggaaaaagtaattgaaggattcttagaaacaattaaggaaggctttatatatgcaatctttccaaaagttacatttactaaaaaaacaaaaacaaaaacaaaaaaatgtctgacatttgctccattttcttggccagattaaaactagaggctatagtaatagtattttgaagatgatgtgagcaac

SEQ ID NO: 796886 - DNA, 565 bp, Homo sapiens
ttgacactttgcatttctggggtaatgttggggaagatgaaaattagtccaatttgcaaagttttttttaatatcaccacaacatgaaagtaaggttaaaagcaatgatcagcgttgctcagaagtaaatctagacttaggtttatgtaaactaaaaccttttttttttctaaacaagactctttccattagagaggcagcacacctagaacatgctttgaataacatgttaataataataaatgttattttacagcagaaccttttctcatgtattgtgatacgggatgtcaagagaagaatctaatgaattgatagctttggaattatgcsaacctcaaaatgtgttttaaaacttgctttttcctctcttgctcttgctttcagccttgaaacactttaaaactctgcttctccctttcccaccaggcacttctgtaaacagtgctttcttatctaattatgtgcttgcttagaaattccaagggccaattttgaaacaaaccagacagaattacccagctatggaatgctcccacgtaggtggtgttagggacagttagcc

SEQ ID NO: 796887 - DNA, 589 bp, Homo sapiens
ttgccacacctttctccttaaaccccttcgcccagcccaaaaagttggtatgatctgataaaggcatgaggctggccattccccaactgctggcatttgaataaagttgctttcctttcactacaccttgcttctgatttttgccactgagcatccagcagccaaacttgagccagatacatrtttacaaattcaaatgtttagaactaatgaacaattttactttagagaggatattattaatatggatcatgtggtgttcttgaaagaaatcttgacaaaataccaattatcaatacttatatttattttttcctcaaaaccacacaatggcttaaatacgtagggcaaaagaaacatttattagaaagaacaaatgttttttatatcatttttcaaactgaattgcattataataatcacaagtaaaaataaacattttagccttaaaaagatggcaaaattattaacccaatgttttattcttgaacattagagcaatataaactctaatgctattccaactctatttttgacttctttgtaacatgaaatgatgccagataaatatataaaatataattgcaaa

SEQ ID NO: 796888 - DNA, 621 bp, Homo sapiens
acttcacatgtttgccacacctttctccttaaaccccttcgcccagcccaaaaagttggtatgatctgataaaggcatgaggctggccattccccaactgctggcatttgaataaagttgctttcctttcactacaccttgcttctgatttttgccactgagcatccagcagccaaacttgagccagatacatgtttacaaattcaaatgtttagaactaatgaacaattttactttagagargatattattaatatggatcatgtggtgttcttgaaagaaatcttgacaaaataccaattatcaatacttatatttattttttcctcaaaaccacacaatggcttaaatacgtagggcaaaagaaacatttattagaaagaacaaatgttttttatatcatttttcaaactgaattgcattataataatcacaagtaaaaataaacattttagccttaaaaagatggcaaaattattaacccaatgttttattcttgaacattagagcaatataaactctaatgctattccaactctatttttgacttctttgtaacatgaaatgatgccagataaatatataaaatataattgcaaagtcattgttttgaagtttaag

SEQ ID NO: 796889 - DNA, 621 bp, Homo sapiens
acttcacatgtttgccacacctttctccttaaaccccttcgcccagcccaaaaagttggtatgatctgataaaggcatgaggctggccattccccaactgctggcatttgaataaagttgctttcctttcactacaccttgcttctgatttttgccactgagcatccagcagccaaacttgagccagatacatgtttacaaattcaaatgtttagaactaatgaacaattttactttagagagratattattaatatggatcatgtggtgttcttgaaagaaatcttgacaaaataccaattatcaatacttatatttattttttcctcaaaaccacacaatggcttaaatacgtagggcaaaagaaacatttattagaaagaacaaatgttttttatatcatttttcaaactgaattgcattataataatcacaagtaaaaataaacattttagccttaaaaagatggcaaaattattaacccaatgttttattcttgaacattagagcaatataaactctaatgctattccaactctatttttgacttctttgtaacatgaaatgatgccagataaatatataaaatataattgcaaagtcattgttttgaagtttaag

SEQ ID NO: 796890 - DNA, 621 bp, Homo sapiens
acttcacatgtttgccacacctttctccttaaaccccttcgcccagcccaaaaagttggtatgatctgataaaggcatgaggctggccattccccaactgctggcatttgaataaagttgctttcctttcactacaccttgcttctgatttttgccactgagcatccagcagccaaacttgagccagatacatgtttacaaattcaaatgtttagaactaatgaacaattttactttagagaggatattattaatatggatcatgtggtgttcttgaaagaaatcttgacaaaataccaattatcaatacttatatttattttttcctcaaaaccacacaatggcttaaatacgtagggcaaaagaaacatttattagaaagaacaaatgttttttatatyatttttcaaactgaattgcattataataatcacaagtaaaaataaacattttagccttaaaaagatggcaaaattattaacccaatgttttattcttgaacattagagcaatataaactctaatgctattccaactctatttttgacttctttgtaacatgaaatgatgccagataaatatataaaatataattgcaaagtcattgttttgaagtttaag

SEQ ID NO: 796891 - DNA, 664 bp, Homo sapiens
agttttgatacatgcatacattgtggaatggtcaaattatgttaatagacatatctatcacttcatgtatttgtcatttttttataatgagaacatttaaaatttattcttttagcaattttgaaatacacattattattagctatagtccctgtgctgtgcattagatcatcagaactaatttcccgtgtttaactaaaacatggtatcttttgaacaacatctcctctttccctttagccataccttaccctgccctgccccctcagcctttggtaaacacccttctactctctacttgtataaggtccactttttaaaattctacatataagtaagattatgcaggatttgaatttctgtgcctggcttgacactgcctcatgccacactttcactgcacttaggagtaaactgtaagttaacatttaagatctgatttgagttggtactgagtggaaaactgaagttctggatacacacaatrtgaacttttcctttaacaatagaacatattacgaaagacataatcattatattactggtattattagtcatttatacattaatatatgtttgtttaaacttatactaagagcaggcaagattttaagaaagtaatactaaaaaatatatcttgtaaataataaattgctttgaactt

SEQ ID NO: 796892 - DNA, 622 bp, Homo sapiens
cttaatatacagttacagaaaacagatctatagttgcctgaggatcaggatggggatggcagagaggaatgtgaaagaaagattacgaaaaaagaaagattttttgttgtgtggataagttccttatgttgattgtgatgtgccatttaatgcatgttaattatacttcaataattctcataataagaaagtatatgaattttgatgtggcaaactttcaaacacatagatttttaataaaagtgccaactagaaggataaggtatacttcagaaataggctggtgttatgggttacactgtgttcccccaaaatgcatatgttgaaaccctaacyttcagtgtgattgcgttaaaagataggccttttaaggaggtaattaaggttaaatgaggtcataaaggtggaggttctaatccaatagtcctcataagaagatgaagagacaccagggatgtgtgcagaagagaaaaggccatgggaggacacagcaagaaggcagccatctgtaaagcaaagagagagctccaggagaaatgaagccttctgacacctttatcttgggtttctgaccttcagactgggagaaaatgaatctacattgcaaaaattttgtttttgc

SEQ ID NO: 796893 - DNA, 587 bp, Homo sapiens
tatatattcagtaagttactgtatctggattctgctatatgacaggaggataccatgaagttagagagattgcaatccattccaatatacaaatcgtcaggaaaagcaaacttatactgatatattaacaaagaaaacaaagaaaaaagacacattaaatcagccctccccaatatracaattaagcaaaagagaactgtaagataaaactccaaactgaatatacacttggcccttgaacaacacagggtttagggctgctgacctcctacgcagctgaaaatttccatataaattttgactccctcaaacctaacactaataggctacttggtgactggaagcctgataacacaacaaattaagatatattttttgtgtcatatgtttatgtactgtattcttagaataaaataagcaagagaaaagaaaaatgttattaaaaaatcataaggaaaataaactatatcaataattgtacattttaaaataacttatagattataattgaatatttgtaactcaaagtataaatgtttgaagggatggataactcattctccatgatgtgcttatttcaaattgca

SEQ ID NO: 796894 - DNA, 492 bp, Homo sapiens
tccttgaaattttttttaatctgatctgtgaaatccagaagtctgggaatgtcaggagacgtctggtggcattctgtaggtgggagtgtcacggtgtcgtaggaagttcaggaatctgaagtctgtgtcccagccatcctctgttccagacatgctgggtgacagtaggcaaggaatttctatttctgggtttcacttttctagtctctaaaattsagagagcagctttaaagaatcctgaaccgacgagggcatgaaggacatggaaagcctgagaggaaagtcaaggagtcaggcaggtggacttcccggaggaggggacctggggagctgctctgggcaggctctttgtgaagggagagcagccctgctcagtttctccgtggaaagtctcagggttaccatctccgcctcaaatttttcaaaaagaaacagaaatcatggtttttatgttaaatctctccgttcataaatattagcaaccgctttaat

SEQ ID NO: 796895 - DNA, 609 bp, Homo sapiens
tgttggatgcataaagtcttcttttaaaaaatatcagttcatatccctcccctactttttgatggggttgtttttttcttgtaaatttgttcaagttctttgtagattctggatattagccctttacagatagataaattgcaaaaattttctcccattctgtaggttgcctgttcactctaatgatagtttcttttgatgagcagaagttctttagtttaattagatgccatttgtcaattttggcttttgttgcaattgcttttgatgttttagtcatgatgtctttgcccattcctaggtcctgaatggtattgcctaggttttcttctagggcttttatggctgtaagttttacatttragtctttaacccatcttgagttgatttttgtataaggtgtaaggaaggggtccagtttctgttttctgcatatggctagccagttttcctagcaccagttattaaattaaatagggaaccctttccctattacttgtttgtgtcaggtttgtcaaagatcagatggctgtaaatgtgtggtgttatttctgaggactctgttctgttccattggtgtatgtatctcttttggtaccggtaccatgc

SEQ ID NO: 796896 - DNA, 633 bp, Homo sapiens
agtaaatgctcttaaaagaaagggatgtcagtggccaatagtcaggagaaagcctgtttacagtttagaaaagctaaggagaatatgaagaccatcttggtcagaacatttttatactgccttatacttagaaaatgactgaaatatatttgcaaatgragaaagggaccagaagatctggtacttttctgtgccctacctttatatttttaccaggatttgtttctggcagatgggacaagttgagatgaactacttaacatgagggctgaaatgtgcagtagacctttgcaattttgccagaatttataatcatctggaagccatagactatattttggcaagaaatcaagaatcctagcagctgtttggatatcttaaaagaccatcttacctatgtaacaaatctgcacattctgcagctgtatcccagaacttaaagtataatttaaaaaggccatcttaatagataaagtatcagccttttttccaataactttcagcctcaaatgacagcatttgtatgccttaaccttcttagaagtggctgggtgtatctgattatatgagtatcatgttcaaagatgacattccaggcaaggctctgcttgtataataaattattttaattat

SEQ ID NO: 796897 - DNA, 588 bp, Homo sapiens
tgatctggcacctccctcttttttttttttttttctttgagatggagtcttgctctgtcacccagtctggagtgcagtggcgcaatctcggctcactgcaagctctgcctcctgggttcatgccattctcctgcctcagcctcccaagtagctgggactataggcgcctgccaccatgcctggctaattttttgtatttttagtagagatggggtttcaccatgttagccaggatggtctcgatctcctgacctcgtgatccacccgcctcggcctcccaaagtgctgggattacaggcgtgagccaccgcgcccggccaactccctccttttttatttgatccatgccactctaatgcatgtgacatttaaagccaatgggacatctttgtgtgcaccaaactggccagttccttackgatttcaggtcttcacatttgctgtatctttctgcttttctttaagaacatcaaatagctctctctctcttttttgtctgaatcccaaagtcacttcctcaaagagatcgtcagtgaaagctctttattaaacactatcccatccccaacaatctctgcttttaataaa

SEQ ID NO: 796898 - DNA, 578 bp, Homo sapiens
ttaattcaaaatagccccctagaagtcatcagtaaaatcatttgacaagtaggattcaagacactcatatagataaatggagagaaagagagggaaattggcagatggcagaaaagttatcattaatgagaacaaaatatatgtatttaaaagtttacatattaattttcttgattatcagagtagataaataaacagaaagaattcccaaaatgtatktaaacattgcttcaccagatagtctatctggttcttaaaatatattccaccaccataataaaaattattaaaagcatagattttataattttaatatattttatccagtttctatattaaatatttaaaatagttctaaactctacttttagagagcaatacttaattccagggttgaatgtttttatattattttcttctttgatatggattagaaaaagtgtattcaaattctgcagtaacaaaatcccatttttcaaaactagtttttgttgagataaattttttgctcaccagcaatataatcatggtttatatataactgttttgtttttatttaacttttcttcttatctata

SEQ ID NO: 796899 - DNA, 603 bp, Homo sapiens
atattaaatggggcattttcgatccatgcttcacatacctgaattttaaagcagaagcaattcaatcagatcccattgttgtcttacaatattttaaatatacaattacttaaacatatataaatataaaaggcagcataaatatattttacttataaacacatgaatcaaacaaacttatacattaaatgaaataaacccaagaataaactcaattaatactatattatggttgacgatgttttgctgaaactaaattacagcttacagaatgaaaatagtcatgactgttctagtcaggctcttatatttgacatgcctatactactgtctagttgtgatgtaaaattttcactactttgccatttctaaactactgtgaawtactctacagaatattttaaagttatgtggcatttatctggcacaagagcatagtttacctaaacatcatatattaaatctttctcagtgctttcccactaatgagccaattcaagtagaaggttttggcatcaatgttaatgcaaaccaaaatgcaaacttggatattaaaatttcaatgcaatattatgaggtgtttgaactaaataaccaaggaca

SEQ ID NO: 796900 - DNA, 576 bp, Homo sapiens
tttacaaatcaagtgagattaaatgcactgggtgttagtaagttcatttttctcttcgttataaagccgaatcttttaaaagctgcagctatagggaaagagagaaaggaaaagaaaaagaaatgaatagatgcatttgtacaatacaccagacacatcagttaattatttcaggcatgtaagtctgataaagcagattttatatgttcatcagttttttgttttgttgtgttttgttttttgtcttagaaagaaagtgttgattataagttcaaagtcagtttctaaaaagaatatttcaagtataactgcaattccagaaaagtattacattgagctttaggaaattgactgttgaagtacatgaactgctcagagtccagtagtatagcaagycaatttattattgtgtatcagtcaggattcaaccagagaaatagaactagtagaataaagattcaaagatgcattgcaaggtattggcttatgctattgtataggctggtaaagcaagtctgaaatccagcaagtacctcatcagaaaggcaggcaggaactgtcagatacaagctaaag

SEQ ID NO: 796901 - DNA, 646 bp, Homo sapiens
tgtcagaggcattttatcatttcacatcaacacaagaagggtgagtaccgtacaacaagatactttgagagagagaccacagttacataattttttacagcatattgttacaattgttcttttgttttttgtaagttattgttgttaatctcttattattcctggtgcattaattaaactttattataggtatgcatmtgtaggggaataatggcatctataggatttggcactatccataatttcaggcaatccctgggggtcctggagcacatcactcatggataagggcagatgactgtatattatgctacatgattattactcagaataaatagtatactacatatgtttttacttgaatcttttaaatgttctattgtgaaataagaatgtggaaagctgcatagaatcaaaccatacaatttagccaataattatgaagcaaacacccgagtaaatactatttacttccagaatttgccttcacctgtcctgtcagttataactcgtccctcctctatttagctagtcactataatggatatatttttcttgcgtagctcacttttaagcataataacacctggcaagtgtgttttcaaataatatatataaatatgaattgcaaattaagctctagcaa

SEQ ID NO: 796902 - DNA, 605 bp, Homo sapiens
aacctgtctttcttttattgacctccccaagaagctaacatcttccccagaagctatcatagctaacatctcatttgcatgtgtagtctgcagggtgcttactgataaaacatgagtctgcagggaaagctagctactccgggttgttgcctggggtcatagaagtaggatgctgctttctctgtcaggaatctggttttaattttataaaaaacaaggcatggcaagaaagaggatcaaaatgaaaaaacccagaagaaatgagtaagatagcaattcattcccacaactaatacatatattcaatttttcagaaacaaagtttataattactttgataagactgttccttaccttgtgagaaggaacgaggtgcccagtttccagtcagtgaggtcactgaaaatgcaggaagaktataggctaggggaaagcaaatttgtgcaggaaatcttagtggaacagcattatgtggagtacataaagtatatgcaaacgtttaaaagagtggattagtattgtattgcataatgtaaatctaaatctatttatgtaatttattatttctttgtatctttttaggcaataatcacatttatcagcaa

SEQ ID NO: 796903 - DNA, 645 bp, Homo sapiens
tatctaacattattctaaagtttatgtcaaaaagtaaaaaacagtagatcatatgttattttaaaaatttgaattcagaataatggttgccggagctagagagtgggggcaatagggagattctggatgaaggataaaaagttttatttaagcaggatgwatatgttctgagaatctaatgtattgcatgggaaatagagttaataatactgtattgtaatttgaaactcactaatgcagtaggttgttaatgttctctttctcccccacaatgcaaaaaaatataactactgagatgatgaatatgttaagtagcttgattatggtagtcatttcataatgtttttatacatcaaaacatcacatgatacattatatacatatatatacacacacacaatttttagttttatatctcagtaaaaccagaaaaaataaaaagaaaatgaacaacttgattaaaaataaacaaaagagctcaacagacactccattaaaaaagatacacagattgcaagtaagtttataaaaaaacttaatgtcatatattattaggaaattggaaattaaaacagcaataagataccactatgcatgtattagaattgccgtaacctgaaacagagatagtgtcaaatgctactg

SEQ ID NO: 796904 - DNA, 483 bp, Homo sapiens
gtgtcataatacaggttagcaaatttaaagctatttgaagtttgacaggaatgaacctgctttgttgaacgcagtttttctctgactatatttaattaacgaacccatcattcacagcgtgtctattaatttcctgtggaactagtgagaaatgcttttctacagcagagcgtgaggccatggctataagcagagataaattggctcaagttgctgagaaaattaaactcttcggtcaaaaaacaaaacgaktcaataatttaatgtgttggcattgatccattgacactcttctttccaaattttatttttgacttagttgaatatgtgtgagaatgcaaatgaattattcctggaaaaataattaaataactcaatagtggccacagtgaaaaccactacaacaaattcattttattgaaacaaccaaagcatactcttttataacatttttgcaaaagattattgaatgttttcctaggg

SEQ ID NO: 796905 - DNA, 619 bp, Homo sapiens
gagcctcagtcaccttagtgattatccaagttgtcatgatcagaatgctggtagaaatataaataaaatgagataaataaatcaataaataaataaaagagaaataaataaaaaatgcttctgatgcagacttagacgtaaataaggaacaaggtattggaaactgggaggaaaagtcattcttgttataaagtggtgaggaatgtggatgaattgtatctataccctgttgttttgtggaargcagaattccacaatatccttagcaataaactaggatatttggcagaagaaatctctcagcaaagtgttcaaggttctgcatgatttattttaactgtttacagtaaactactgtaagataaaagatttaaagacagaatttataatcaaaagggaaacaacataaagatttaaaaatttttcagtttcgctatgtaaagaattaaaaagcatgcttagggctgggtgtggtggtttatgctggtaatcccagaacttcgggaggctgaagcagaaggtttgcttgagcccaggagttcaagaccagcctgggcaacacagagagaacctgtcttctaaaaaacaaaacaaaaacaaaaaattagccaggtgtggt

SEQ ID NO: 796906 - DNA, 623 bp, Homo sapiens
cctcagaggcccaagggtcagaaattttgatttcttaaaatctgggtgcctaggaatctgcactttgacacacacataggaaaactcggtgctttttaaccatctctggtttttatgtaaatgtatgaatacatgtataaatttacataaatatgtaaaattaaaattttttaaatttttaaaaaattatactttaagttctgggatacatgtgcagaatgtgcaggtttgttacataggtatacacgtgccatggtggtttgctgacccatcaatccatcatctacattaggtatttctcctattgctatccttcccttagccccatatcccccgacaggccctggtgtgtgatgttsccctccctttgtctatgtgttctcattgttcaactcccacatatgagtgagaccacgtggtgtttggttttctgttcttgtgttagtttgctgagaatgatggtttccagtttcatccatgtccctgcaaaggacatgaactcatcttttttatggctgcatagtattccataaaattaaattttatttgcagaatccatgattttaatttacctcctgtgatggttaatattgagtgtcaactcgattggattgaaggatgca

SEQ ID NO: 796907 - DNA, 617 bp, Homo sapiens
taaacctctttcttgattaagccattgtaatctggtttacagttacttataccactgtttcattttaatgtagtgagatggtgagggcgcaggtggaagatggggtggcggccggattcattttaatgatacagtgcctcttcagtttttttagatattgcaaattgctcacaaaatgctattttactctttcatcaggaacatgagataatttcaagttttatttttctacgtctttgctggttcttgtcactttcaamcattttaaagttcttgcccgttcaatagtgagaatggcatctaattgtgttttaattttcatttctgtgattactagctacgttaaacagattttctgtgctcactgctcattcagatatcctctgtgttaatcgtttttattgttgtaaattttctcattgggttgtcattttattatgggtttatttttattggagatgttcttatcaaataatttattgctgggttttatgtatacccagtagaaaatatcttcttttagatcatgattggtcttttcactttgtttatcatgtctctagttagacaaagtttaaattaattatgatccaatttattaataaatttgcgtacat

SEQ ID NO: 796908 - DNA, 539 bp, Homo sapiens
agatataaaatgcatataagttaacataaaataaggcccaaagttatggcttatttgaaattaaggttctggggagtatataggtaaaggctcaatttaagaccagggtctaaaacagtccacctctgatttgagatctggatttgcaatayccctagtgtgccttagtccatacaggctgccataaataaaataggtagcttataaatagcataaacttatttctcagagttttggtagcttataaacaacaaacttatttctgagttttggaggttgggaagttcaaggcaaattcagtgtctgatgagggcctgcatttgaattatagacagtctttttctcactctaaccttacatggtaagataggtgccagagctctctaggatctcttttatcaggtactaattccattcataaggaatccatccttatgacctaattactttccaagggcccacctcctaataccatcaccttgagggtcaggattttaacttatggattttgtggaggacataaacattcagaccacact

SEQ ID NO: 796909 - DNA, 539 bp, Homo sapiens
agatataaaatgcatataagttaacataaaataaggcccaaagttatggcttatttgaaattaaggttctggggagtatataggtaaaggctcaatttaagaccagggtctaaaacagtccacctctgatttgagatctggatttgcaatatscctagtgtgccttagtccatacaggctgccataaataaaataggtagcttataaatagcataaacttatttctcagagttttggtagcttataaacaacaaacttatttctgagttttggaggttgggaagttcaaggcaaattcagtgtctgatgagggcctgcatttgaattatagacagtctttttctcactctaaccttacatggtaagataggtgccagagctctctaggatctcttttatcaggtactaattccattcataaggaatccatccttatgacctaattactttccaagggcccacctcctaataccatcaccttgagggtcaggattttaacttatggattttgtggaggacataaacattcagaccacact

SEQ ID NO: 796910 - DNA, 539 bp, Homo sapiens
agatataaaatgcatataagttaacataaaataaggcccaaagttatggcttatttgaaattaaggttctggggagtatataggtaaaggctcaatttaagaccagggtctaaaacagtccacctctgatttgagatctggatttgcaatatccctagtgtgccttagtccatacaggctgccataaataaaataggtagcttataaatagcataaacttatttctcagagttttggtagcttataaacaacaaacttatttctsagttttggaggttgggaagttcaaggcaaattcagtgtctgatgagggcctgcatttgaattatagacagtctttttctcactctaaccttacatggtaagataggtgccagagctctctaggatctcttttatcaggtactaattccattcataaggaatccatccttatgacctaattactttccaagggcccacctcctaataccatcaccttgagggtcaggattttaacttatggattttgtggaggacataaacattcagaccacact

SEQ ID NO: 796911 - DNA, 615 bp, Homo sapiens
ttatttatctctaatgtaaatcatggttaatatggagactctgacatgagtctgtctatgatgctagtgccttctgttttgctgtaaaacattcctcttgggatgacctgacatcagagtttaagatgactcaccaccatgtgtacactctacccactggggaaggggaaaggggaaaagagaaaaagcatgtataactcggtcatatttttctttaagcacacaaccttgaaggttaacaaatttttttaagttacatttaacatcacactagtcagaaattagtcacatgtcccatctgggttcaaggatgatgggaaatatagtcttcattccaagcaactttgatccyggccaaacttaatgttggatgattacagatactagaggatggttagcactttgccattttactgtaagttgaatactgacatttatagtaattaatcttagcagcctaataaaaatgcctatgtcatagttccctgttctcctcattctcttaaaacatatatacctgataagaaatgatatgatacagctgtctagaaaatcacttctgaaaatatatgtcctttgattaaatcctggttctactactttcttgctattctt

SEQ ID NO: 796912 - DNA, 603 bp, Homo sapiens
ccgtctgcagatggcttgtgtgttaatcagctcaatgaactctctgccttttcacaagggcagagggccaaggtgatagctttctgtatctgagctcttgtccagtgtcttggaaaaatcaggtcacacatggactccaagkatgaatggcaggttttattgagtggtggaggtggctttcagcaggatggatggggaggcagaggaaggggatgaagtggaaaggtgatcctcccctggattctggctgcccagtggctggactcctctctgactgcccccagctgaactcattttggcattcagatgttcctcctcttctccctttctctgccacatcgttctgccatccttctgctggtctgcgggcttgctggtctgcttctggagtctggggttcgggattcatatgggtgcaggatagggggtgtggcaggccaaaagataacttttggagcatgaacacagaaatgcctgttttcgttttcgtttaagacagcaggtatccaggcttgagggtgaggctttgccagggaactgcccttttctacccagtatttccgtctcctgtccatatcactaagaggaagagaacgcaaagat

SEQ ID NO: 796913 - DNA, 603 bp, Homo sapiens
ccgtctgcagatggcttgtgtgttaatcagctcaatgaactctctgccttttcacaagggcagagggccaaggtgatagctttctgtatctgagctcttgtccagtgtcttggaaaaatcaggtcacacatggactccaaggatgaatggcaggttttattgagtggtggaggtggctttcagcaggatggatggggaggcagaggaaggggatgaagtggaaaggtgatcctcccctggattctggctgcccagtggctggactcctctctgactgcccccagctgaactcattttggcattcagatgttcctcctcttctccctttctctgccacatcrttctgccatccttctgctggtctgcgggcttgctggtctgcttctggagtctggggttcgggattcatatgggtgcaggatagggggtgtggcaggccaaaagataacttttggagcatgaacacagaaatgcctgttttcgttttcgtttaagacagcaggtatccaggcttgagggtgaggctttgccagggaactgcccttttctacccagtatttccgtctcctgtccatatcactaagaggaagagaacgcaaagat

SEQ ID NO: 796914 - DNA, 634 bp, Homo sapiens
taaaatacacgtttaacaacactgaaaagttggtcctgatggaattctattttatcaattctaaaaggcgggtttttccacatactacatttctgaaactggaatacatcttttataatggaggtatcttaccataggtctagactagaggagaattttcccagagaagrtgtgcatctgcttctgctgtcatctgggaacactatcagcccaacaccatctgaattaatcctttgtggcaggcctttgtggaccacactggtggtaaggctgcacacccaaagcttagggcttgtggttcaaattctcagagaaatgtttttttctttctctatttagtgtcaaggttgagacttgcatgcttctttatggtcccttttctggatggtcaagttaatttctcatttatccctaggtgtaccagccttgtgggttaggtctcctactaaactccctgtcctgagtgtttttcccttcttagaggtatataatgtaatagcactttttaaaaataatctatgacatcttagattcgatgaaatatggtaccttaaataagcttctccagtctattgagtaggctccagaacttctacacaacgactcattatactgcaacctcttttattctctt

SEQ ID NO: 796915 - DNA, 635 bp, Homo sapiens; identical to SEQ ID NO: 788906

SEQ ID NO: 796916 - DNA, 624 bp, Homo sapiens
ctttggagaggctcatcagaaactcaaaagaatgcaaccgtcggctgggcgcggtggctcaggcttgtaattccagcactttgggaggcggaggcgggcggatcacaaggtcaggagatagagaccatggtgaaaccctgtctctactaaaaatacaaaaaattagccgggcgtggtggcgggcgcctgtagtcccagctactcggagaggctgaggcaggagagtggcrtgaacccggcgggcggagcttgcagtgagccgcgattgcgccactgcaccccagcctgggcgacagagtgagactctgtctcaattaaaaaaaaaaaaaaaaaaaagaatgcaactgtttgtctctcatctaactgtgacctggaagccccctccctgcttcgagttgtcctgactttctgaatggaaccaatgtacatcctacatatattgatttatgtctcatgtctccctaaaatatgtaaaaccaagctgtgccccgaccaccttgggcatatgtcatcaggacctcctgaggctgtgtcacaggcgtgcatcctcaaccctggcagagtaaactttctaaatcaactgagacctgtctcagatattctgggttcacattttggtaacca

SEQ ID NO: 796917 - DNA, 624 bp, Homo sapiens
ctttggagaggctcatcagaaactcaaaagaatgcaaccgtcggctgggcgcggtggctcaggcttgtaattccagcactttgggaggcggaggcgggcggatcacaaggtcaggagatagagaccatggtgaaaccctgtctctactaaaaatacaaaaaattagccgggcgtggtggcgggcgcctgtagtcccagctactcggagaggctgaggcaggagagtggcgtgaacccggcgggcggagcttgcagtgagccgcgattgcgccactgcaccccagcctgggcgacagagtgagactctgtctcaattaaaaaaaaaaaaaaaaaaaagaatgcaactgtttgtctctcatctaactgtgacctggaagccccctccctgcttcgagttgtcctgactttctgaatggarccaatgtacatcctacatatattgatttatgtctcatgtctccctaaaatatgtaaaaccaagctgtgccccgaccaccttgggcatatgtcatcaggacctcctgaggctgtgtcacaggcgtgcatcctcaaccctggcagagtaaactttctaaatcaactgagacctgtctcagatattctgggttcacattttggtaacca

SEQ ID NO: 796918 - DNA, 627 bp, Homo sapiens
ggactaacaaggttctacaaggcaagttctctctctctcctttgcacattaccaaatacctagcaagtgataagacttgaatctaggggatcctggcaggtcttcaacgtatagctgagtggaccaatacctccactgtttcctccatatcctttctaagtaccatgttctgwccaggaactaatgaaaattttccttctcctggccaggtgtggtggctcatgcctataatcccaacattttgggaggcctacgcaggtggatcacttgaggtcaggagtttgagaccagcctggccaacatggtaaaacccatctctatttaaaatacaaaaattagcccagtgtggtggcaggtgcctgtaatcccagctactcaggaggctgaggcagggaaatcacttgaacacagaaggcagaggttgcagtgagccaagatcatgccagtgcactccagcctgtgcaacagagtgagattccatttcaaaaacaaaacaaaaaaaattttccttctcccttaccccattaaaagaaagtgttctaaagtttccaagcttaaccactgtatactttctgttaaagtagactattttccaaaatagtaatccataaataattcaaactattt

SEQ ID NO: 796919 - DNA, 627 bp, Homo sapiens
ggactaacaaggttctacaaggcaagttctctctctctcctttgcacattaccaaatacctagcaagtgataagacttgaatctaggggatcctggcaggtcttcaacgtatagctgagtggaccaatacctccactgtttcctccatatcctttctaagtaccatgttctgaccaggaactaatgaaaattttccttctcctggccaggtgtggtggctcatgcctataatcccaacattttgggaggcctacgcaggtggatcacttgaggtcaggagtttgagaccagcctggccaacatkgtaaaacccatctctatttaaaatacaaaaattagcccagtgtggtggcaggtgcctgtaatcccagctactcaggaggctgaggcagggaaatcacttgaacacagaaggcagaggttgcagtgagccaagatcatgccagtgcactccagcctgtgcaacagagtgagattccatttcaaaaacaaaacaaaaaaaattttccttctcccttaccccattaaaagaaagtgttctaaagtttccaagcttaaccactgtatactttctgttaaagtagactattttccaaaatagtaatccataaataattcaaactattt

SEQ ID NO: 796920 - DNA, 434 bp, Homo sapiens
gtcttttacttttggcaaaaacatcttagaagtggtgccagggcacacaggtgcaggtaatttttattggtaacaagttctacactcaatggctcatcttgctttccctgctgagatgcaggctaatatcatatagtagcatatgggctctgggagcacacagaggtttgaattgtggctttaccactcactatctgtgctagcttaagcagaagaattaccctaagatccaatttcttcatctatgatatagagataatggtagttcttacctttcagggttactgtgaggattwagcaaaataaaactgatagaggtcttagtgcctacccatagaaagcactaaatgaacattagctctaattaatattaactccctagaaggaaaactagatgggtccagaacactcaatagaggcctctctataactgg

SEQ ID NO: 796921 - DNA, 502 bp, Homo sapiens
ttctggatggaccgttgtgagggatgcacaacaaggtgaatacacttaatgccactaatatgtgctaatatgtgcaatttaaagagggttaaaattataaattttgtgttatgcctactttaccacaacaaaaaataattttgattgtctgtactagaccttagtaggacacattgtaatgycccaaattttattcctacttacgctttaattttgtcctgggccggctgaggtatgctagcatcttagattcatttcgcttaaatacaggctcttaagtgttactggacaccaagtagtctcatattaactctgagtttgttcattgcataggttttttttctggctttgcacttcagaaaccaatatttcatttaaccctgggtagattatattgataaataaggaatgaatatttgaaaaagaatatatcacctgttgagggtgaataaaaaattcaaaagcccaaaaatgcaattaaaaatggtagttcttggacctc

SEQ ID NO: 796922 - DNA, 502 bp, Homo sapiens
ttctggatggaccgttgtgagggatgcacaacaaggtgaatacacttaatgccactaatatgtgctaatatgtgcaatttaaagagggttaaaattataaattttgtgttatgcctactttaccacaacaaaaaataattttgattgtctgtactagaccttagtaggacacattgtaatgtcccaaattttattcctacttacgctttaattttgtcctgggccggctgaggtatgctagcatcttagattcatttcrcttaaatacaggctcttaagtgttactggacaccaagtagtctcatattaactctgagtttgttcattgcataggttttttttctggctttgcacttcagaaaccaatatttcatttaaccctgggtagattatattgataaataaggaatgaatatttgaaaaagaatatatcacctgttgagggtgaataaaaaattcaaaagcccaaaaatgcaattaaaaatggtagttcttggacctc

SEQ ID NO: 796923 - DNA, 502 bp, Homo sapiens
ttctggatggaccgttgtgagggatgcacaacaaggtgaatacacttaatgccactaatatgtgctaatatgtgcaatttaaagagggttaaaattataaattttgtgttatgcctactttaccacaacaaaaaataattttgattgtctgtactagaccttagtaggacacattgtaatgtcccaaattttattcctacttacgctttaattttgtcctgggccggctgaggtatgctagcatcttagattcatttcgcttaaawacaggctcttaagtgttactggacaccaagtagtctcatattaactctgagtttgttcattgcataggttttttttctggctttgcacttcagaaaccaatatttcatttaaccctgggtagattatattgataaataaggaatgaatatttgaaaaagaatatatcacctgttgagggtgaataaaaaattcaaaagcccaaaaatgcaattaaaaatggtagttcttggacctc

SEQ ID NO: 796924 - DNA, 502 bp, Homo sapiens
ttctggatggaccgttgtgagggatgcacaacaaggtgaatacacttaatgccactaatatgtgctaatatgtgcaatttaaagagggttaaaattataaattttgtgttatgcctactttaccacaacaaaaaataattttgattgtctgtactagaccttagtaggacacattgtaatgtcccaaattttattcctacttacgctttaattttgtcctgggccggctgaggtatgctagcatcttagattcatttcgcttaaatacaggctcttaagtgttactggacaccaagtagkctcatattaactctgagtttgttcattgcataggttttttttctggctttgcacttcagaaaccaatatttcatttaaccctgggtagattatattgataaataaggaatgaatatttgaaaaagaatatatcacctgttgagggtgaataaaaaattcaaaagcccaaaaatgcaattaaaaatggtagttcttggacctc

SEQ ID NO: 796925 - DNA, 618 bp, Homo sapiens
caactggtgccagtacagtgcctggaacagagaagtcctcaacatgcagttgtgatatctataaaacatgaatgtcttcagcgctcttgaatctcaagtgaaactagctttttgtaagtctcttgtaaactgaccagcaagcttttttttgataatagaaaactgtggaatattaactttattctgatttcaaagaaaatgaagtatagtttcggacatttaaaagaaaaaaacctccttcagaattcagaaaggcatttcatcaagaaaaattccaccattttcctagattagctgagtctagaacattaggaaaattacctacctgtatcagggatgaagaggaccacctcataagtaactatgcagggaaaatgtaaacacaggtagaccttatcaaaccatcacattcagagaataaattcaagtctcttcaatgcrgttgtgcagccttgcagtgtttggggctccattactgaccctgggaacacggttctaaaggaagctaccttgcaatatcttgggccacaaccagaagttaagacaataaataaataaataaataaataaataaataaataaataaaacagaacaaaataagctatacaaaatacaaa

SEQ ID NO: 796926 - DNA, 674 bp, Homo sapiens
acttttattgtgagatctgtcaacatggaaactgcaaaacaaacttctgaaagagatgatgtgtaatgctgttttttttttttttttgtatgggtggccatgaaatgatttcacatttagtggaaaaaggcacagaatattgttcttgatacaaagagaaacttcctcaaccatttggctaatatatttggaaaacttgagttctttaaagaaaatggaaaatccagttaacggttacttaccccatatctcctgcatgcttgtcaagcaaggtgttacactcagtacattgatgtgtttggaaatgaaagaaggaatggttggatgtacatacatgggtgctaaaatgraggaaattaatatgttgaagaactgtttgtaggaaaaacatttggaaagtgtggaatctcaaagaagtatgtgataaaaaatccttcatgtattgagaggacataaggcttgatgaaagttagtaaatcttaatttatgccaaagtggagtcactacaattaataccaaggcaatgaactgtgtgacgtattcatcagcattagtgggcctttaaacttttgatgaaactcagaaattttaagaggtgagtagggaaaatttttagaagttgtaataaaatatttagattagattattttggtgtgtttcatatgcatatgtat

SEQ ID NO: 796927 - DNA, 551 bp, Homo sapiens
aatatatatactagatattacatataaatgttataatccccagaatctgtggctaggtgggcataatgtaatcccaaggatccttgaaagcagaagagggacacagaaggggtggaatcacagaagtgagagtgtgaaaaggacttttcctgatcttgttgactttgatgatgaagcaaggggtcacaggctaaggaatgtgtgcagyctctcaaagttgaaaagggcaagggaaaaagttctccctaaggcttccataaagaaaatagttctgctgaaaccttgatcagtcttctgaaactacataatgataagataattcgtgttgctttaagccactaaatttgtagtaatttattacagtagttggtcacagaaaattaatacaatggccagacacagtggctcatgcctgcaatcccagcactttggaaggccaagatgggcagatcacctgaagccaggagtttgagagcaacctggccatcatggtgaaactccgtctctactaaaaatacaaaaatttgtcgggcatggtggcatgcacctgt

SEQ ID NO: 796928 - DNA, 620 bp, Homo sapiens
tggtcctcaaccttttcggcatcagggaacaattttgtggaaaacaatttttctacaaacgggtgggagaatggtttcaggatgattcaagcacattacctttattgtgcactttatttctattattactgcattgtaatatataatgaaataattatacaactcatcataatgtagaatcagtgggagccctgagcttgttttcctgcaactagacagttccatctgggggggaatgagagacagtgacagatcatcaggtattagattctcataaggagcatgcaacctagatcctttgcatgtgcagttcacaacaggattcatgcttctrtgagaatctaatgccaccactgatctgacaagaggtggagctcaggaggcaaagctcactcacctcctgctgggctacttggttcctaacaggccatggaccagtactggtccatgacctgagggttggggaccactgacttagattctagtggaaaaagatgggctgtaaacaaactatgtaagaaaataatacaagcatattagtgggccagctgtagcatggtgggaaaacagggccatgaggaaatgaacaagcccattttaccagctggggtcaggaataa

SEQ ID NO: 796929 - DNA, 542 bp, Homo sapiens
attatgcaaagccggtattgttcagcagcaatgaaaatccactgcaagtgtatcatccatcctggccccctaacattataggactggaaggcaagggaaaaccatgctaatatattgatgctaatactgtttgtggtgtcatagtaatagtcttttatctctgacccaagagttttgtgtcttctgataacatccattaaagagtacaagctaatttctttgcttataagtggggtaaaagcaaaccccaggcctgttaggaactcagcagttggtgtttactttggtcgagttgtgtttgagagctgtttattaaacattcaagtgaagatgtctagtacatctcggggttgcagttctggagttgaagggaaaggtcyatgctatagaaaacactggaaagtcatcaggataaatacagcattcgaaatgagttcagcaagggtgtgaactatttagataaggactgagacctgagacaatgttgatatgatagcaaataccagtaaatgcaatggagtgtttagggctattttattgct

SEQ ID NO: 796930 - DNA, 569 bp, Homo sapiens
ctgcatttttgaaattatatatttatttttaactagaatctttattgtcagtgtcttttctactttttaaaaactcattattacaattacatagcatcctgcaataaattctgtagtcatggcaattgtacttattggcaagctttagttttctgttcctcattttacaattcaatggttgctactcaaggatgtacttcagcatcagccagaattggtgccttggaattcatacttttaataaaatactccccagattatgctgatrtatagttggtgctaagaattgtagctatacttttatggctatttatctgtgttttctactgaaaacagcaaaataaacagttttaatcttttattttctttttcttttttgtttgtttggttttggtaagggtagggactaaatgtttttcagagcaatcctttgcttaatatgaaacctgaaatagacagccattttttttttccaaagtcaacttgaaactacctgtgaaaataccaataagcacacagtctagccttctctcacagcccagggaggttgtctgcctatttaatctcca

SEQ ID NO: 796931 - DNA, 521 bp, Homo sapiens
acaaatctgtctctatgcttatactattacacaagtagaatctgtctgatataaccattttagaatttctgagtttatttcaggcttgtaattttctaaagaagacttggattataaagtgaggttaatttcagctcttagcactcaccctgtacacatgtttctggaaattctgcacaaattttgttgtggggcaagacaggtatattaaatccttttcaccaagtattggggatttatgctctgattttttattgctgcttttgaatactgaggtgaagacagataagttgggagycattgaggttgtactgctccttttgttgcaagctgctccaatttcagctcaagggacttcccagaggttttaaagggataggacccccatttttgctttttaaattttttccctttttctcatttttgggagtcagacattaaagattagaaaattcaataacaactacatatatgggtaaaattagagaataaccacacatacctaggtaaaagcaaaagct

SEQ ID NO: 796932 - DNA, 610 bp, Homo sapiens
tattaatattgtaaccacaaataaaatatttatagaatgtagataagaaaataaaaatgaaacatacttttcaaaatcaaaacataacaaaaaaatcaactaaacacacaggatggtggtaatgcaagaactgaggaacaaaaaatatcaaagtgaaggaagtaagttagtctttatctgcaattactttaattgtaaatgaattatacttcccaattaaaagatatagattagtaaaatggataaaaataaacgatctaaacttatgttttctacaggagactcaatttagctgctaggaaacaaataagttgaaaatgaaaagatattccacacaawttttaacgaaaatagaacaagggtggcaatacaaatgtaaacaaaatatacataaatcaaaaagtttatgagacaaagaaagatattataattaataaaataaaaatattataattaataaaacatttaataaagaagataacaatgataaacatttgtgtaccttataacagaccatcaaaatttgtaaagaaacaactgacagaattgaaagaagaaataaataattctacaataatatttggagacttcagtactccacattcaataa

SEQ ID NO: 796933 - DNA, 644 bp, Homo sapiens
ttaggtattgagcatagctggtttttcacattctaccctacgttgctttgcttttcacagatactactgcgctgtgttttattttattattttggaaagtggcactatttccccctgaactctcctgccagggctgactttcagttgatcactgagccttagcctctgctccttaagaagccctgatgtcgttgccatgtgtcttargcatcccctcttcttttccctgcctccctgggattggggggagagaggatctgtgcctgggaccatggcctgacctggcccagctcctgcagtggagttgaagacaaagtatgaggctttctgaggacaactgaagctcctcaatgctgtcttattgttctccttttgtggcatgaggattctgactttgggatgtttgatcacagtcctgcctgtggcagctgcactgccaagctcgtgtagcaagtgtctgagtcaatcatgcagggcgttaagactcttcataactcttcagtcttctgtcagcagctcctttcctacaagtatcctggaggctgggccaggacaggggatgtgttccagtggccagtctgggtgtggaccagaggctgagcacacacctgccccacaagagaggggaagcttgagccatggct

SEQ ID NO: 796934 - DNA, 606 bp, Homo sapiens
tcagttgtaagtgggagctaaactatgaggacccaaatgcatatgaaggatgtaatggactttggggattcaggggggaagagagaaagggagtgaaggataaaagactacacattgggtacagtatacactgcccaggtgatgggtgcaccacaatcccagaaattaccactaaagagctttccatgtaaccaaacaccacctgttccccaaaaactattgaagctgaataaatgtatttctaayttcctttttatgactcctttcatccgtggcttattttaaagtatcgaatttgatttccagatatttgcgagttttctagatgtctgtctggttgatttctaatccattgattagaaacagagaacaacaacagaaaaaagaaaatgaagggagtaacttggtaggtcatgtaacacagaaccaacctgccaggggaatgtgtgattcccccttgatataagatgcagaatggcagccatcacttgggagtgtgtcttttgagagcctccagctgttgacatctctaagcagattccagctgtgagggggttgggatgacgttattgcagtgaggcccctgatggagctaacaggcactga

SEQ ID NO: 796935 - DNA, 596 bp, Homo sapiens
aatagtggtgcaggggactgcttgagcatagatctttattcatgagagttgattgtctgaacctacacatataaatgtacatttatcactttaaaaatgccttatcttgttacatttggcctgtttttataatgtagtcattgggtagattttgmccctgtcatcagtggattcactgtctttggtattgcttcattttaaaaattgtgatcaacctactttcgttaacatcttgaaaatcatggattaacacaagacagaattctgtagttgccaccagagggctcctgttatgttgaaactgattttataggtataatcattcacccaggtataaatctactttgggtattatcttctaactatatttctccattgtatgtatagaaatgtcgagacagaccttgtcagatgccttcatggaatcttgttaagaaagtagtcatttagtgagtaatctttgctacccagtctggaaggatgacactatattctatatttggagaaacttgaaatataaacgacagatgtctatactttggaaagtgtctgaaaaatgtctaaaaatgcccactgttttattgccaagagaagga

SEQ ID NO: 796936 - DNA, 596 bp, Homo sapiens
aatagtggtgcaggggactgcttgagcatagatctttattcatgagagttgattgtctgaacctacacatataaatgtacatttatcactttaaaaatgccttatcttgttacatttggcctgtttttataatgtagtcattgggtagattttgaccctgtcatcagtggattcactgtctttggtattgcttcattttaaaaattgtgatcaacctactttcgttaacatcttgaaaatcatggattaacacaagacagaattctgtagttgccaccagagggctcctgttatgttgaaactgattttataggtataatcattcacccmggtataaatctactttgggtattatcttctaactatatttctccattgtatgtatagaaatgtcgagacagaccttgtcagatgccttcatggaatcttgttaagaaagtagtcatttagtgagtaatctttgctacccagtctggaaggatgacactatattctatatttggagaaacttgaaatataaacgacagatgtctatactttggaaagtgtctgaaaaatgtctaaaaatgcccactgttttattgccaagagaagga

SEQ ID NO: 796937 - DNA, 596 bp, Homo sapiens
aatagtggtgcaggggactgcttgagcatagatctttattcatgagagttgattgtctgaacctacacatataaatgtacatttatcactttaaaaatgccttatcttgttacatttggcctgtttttataatgtagtcattgggtagattttgaccctgtcatcagtggattcactgtctttggtattgcttcattttaaaaattgtgatcaacctactttcgttaacatcttgaaaatcatggattaacacaagacagaattctgtagttgccaccagagggctcctgttatgttgaaactgattttataggtataatcattcacccaggtataaatctmctttgggtattatcttctaactatatttctccattgtatgtatagaaatgtcgagacagaccttgtcagatgccttcatggaatcttgttaagaaagtagtcatttagtgagtaatctttgctacccagtctggaaggatgacactatattctatatttggagaaacttgaaatataaacgacagatgtctatactttggaaagtgtctgaaaaatgtctaaaaatgcccactgttttattgccaagagaagga

SEQ ID NO: 796938 - DNA, 626 bp, Homo sapiens; identical to SEQ ID NO: 757866

SEQ ID NO: 796939 - DNA, 575 bp, Homo sapiens
tttgtagttgaggaaaccagatccagagagggaaagttggctgtgctcctctgtgtgatgaagccaagttttctaattcctgagcaagtatggcatatatacagtagatgcttaataaatgttccatgacaatgaaaaccaaaattaaaatatgaagcccctccaccaatggaatggacctctcctctcagccaaggcattcctaaactatcctgatgggaagtggggttggacrtgcctcattataccctcctccactgggaattcaggcacagctgaccatcttttaaagacattaaaacagagaccttaaggctgacaaagcagactcttggcagcaataagataccaacatgacagatagcaggccctagaagaaatcaaagcattttaccccaaaatatatttctttgacatattttgaaatggccttgcaaagctgtctcttatggggaaaacccttcctttccaggaattttcctgatccagtagagaattaattaagagtctgccaccttttaaagtctaataagaaacatttacaatttagtctctctgaagcctgcaacctggag

SEQ ID NO: 796940 - DNA, 684 bp, Homo sapiens
gaaatgcctgatctcccttggtctgatgtagaggaaaggatccaaaggcttagggagattggtatggtggagaggattagtcactttagacctactcatcccagctgggagggtccagaaggtatgtccttgaccaatgttttacaaaatagatttgtgagggcaccasctgcatttttgaagatccctgtaattgctcttctctgtacgtcagatctaacagtgggaatcacaggcactcaactacaaaatttaaatgcaataggaataattggatcccgaggtggcagaggccaggtggaggcactcaactgttaaaggcaaagtgggcatcgctaccgtaatggacagcaaaggcaaagcagcaatcagaatattctcactcatgtggcactggctaattaattatggtgttcctagaagtgaaattgatagaaagcctactgcattcctacttaatttatataagcagaaaacttccaggtcaaatggacaaaagactaatttgaattataaaaacagagaatcatggcccctcaatcaatttccagacttgagccactttacagacccaaaaccccttgaatgaatgggaaggctgggtccccttgaggaagggccccactacattatcgacaatttatgctgttaatctttctcccatcctcccccaaggagacctcc

SEQ ID NO: 796941 - DNA, 654 bp, Homo sapiens
gcagttgaattgcttgaacctgggaggcggaggttgcagtgagtagagattgcaccactgcactccagcctgggcgacagtgccagactccttcaaaaaaaaaaaaaaagtaataaatcaaaaacaatattgcatcactggagggatttcaaaaaaaaaaagtaataaatcaaaaacaatattgcatccctggaggaatttcagagattagtgccaccatcaaggacttgaaagatgcaggggtggtgatttccaccacatcccctttcagccatcccatttgacctgtgcagaagacaaatggatcttggagaatgacagtgaattattggaagcttaaycaagtggtgactccaattgcagctgctgtaccagatgtggttttattgcttgagcaaattaacaatctcctggtacctggtatgcagccattgactcagcaaatgttttttctccattcttgttgataaggcccaccagaaacaatttgccttcagctggcaaggccagcaatatacctttactgtcctacctcaggggtatatcaactctatggctttgtgtcataatcttattcagagagaccttgattgtttttcacttccataagatatcgcactggtcattgatgacattgatgacattatgcttatt

SEQ ID NO: 796942 - DNA, 615 bp, Homo sapiens
ggaaggctccagaaactgtctctccttctgctccttttgaccctcttctctctgaacttccttttctgggcaatttcatttttcctcctccttcccctactctcttgcttcaagccacagagggaccagaaatagctggagaaaataacattgtagttgttccttttagagtaagacccacaggcagaggggatcctaacataatgtataaaccctggaccaagtcagagttaaaggccctggtatctggattccccaatccgagtgaagatccctttggatttgctaaggaattccaattaatgctttagacttatgatccggggttctctgacctgtatcagctgatcgagttagtggtccccaaaaamaaaactgaagaatggtttagagcagcagattagaaatagcctttagaagattttgacaaaatagatgcaactggaagagagagatgcagagaagctttgcatttgcctccatgaaactgtatcacggatattccccaaggtcatagattgggcaaaggtgcaacaatgtaaaatacgcccaaatgaaaccgtacctgacttttatatcaggtttgaaaagacattcaaacagttttcaggaata

SEQ ID NO: 796943 - DNA, 495 bp, Homo sapiens
gtctgtcgtccaggctggagtgcagtggcgcgatctccgcctcccgggttcaagcgattctcctgccttagccttccaagtagctgcgactataggcgcccgccactacgcccggctaatttttgtatttttgtagagacggcgtttcactctgttggccaggctggtcctgaactcctgaccttatgatccrcccgcctcggcctcccaaagtgttgggattacaggcgtgagccaccgcgcccggcctcatagaggtcttatacggatttctgggtagtattctaagcatgtaccaagtacttttccagcattttctcatttattacaacagttccctcgaggtaattactactgtcctcattttgataaggaagaaatggaaacacagtaagtggctgtgctggaacacaagccccatcgttttttttctagaacagtagagaaacacccaggttttggcattcagcaaacctgaatgtgattcctggctcc

SEQ ID NO: 796944 - DNA, 495 bp, Homo sapiens
gtctgtcgtccaggctggagtgcagtggcgcgatctccgcctcccgggttcaagcgattctcctgccttagccttccaagtagctgcgactataggcgcccgccactacgcccggctaatttttgtatttttgtagagacggcgtttcactctgttggccaggctggtcctgaactcctgaccttatgatccgcccgcctcggcctcccaaagtgttgggattacaggcgtgagccaccgcgcccggcctcatagaggtcttatacggatttctgggtagtattctaagcatgtaccaagyacttttccagcattttctcatttattacaacagttccctcgaggtaattactactgtcctcattttgataaggaagaaatggaaacacagtaagtggctgtgctggaacacaagccccatcgttttttttctagaacagtagagaaacacccaggttttggcattcagcaaacctgaatgtgattcctggctcc

SEQ ID NO: 796945 - DNA, 628 bp, Homo sapiens
tagctgccttttacaagcatcggctgctttgtaaatctagcgaactatcaggatcatctactttgaggtctagtctgcttttttcccttggcattttcatatgtaggaggaaagatcaaaagtggatgatctgagggggaccccgatgtcagtaggaaccttggaagagatcattgatgacaatcatgccatcgtgtctacatctgtgggctcagaacactacgtcagcattctttcatttgtagacaaggatctgctggaacctggctgctcggtcctgctcaaccacaaggtgaggtgatagtctttttcagaaagcccacggaagtgctttctcttctcacttaggttcatcttcctgtcccgtggaagtagatcaccaaagcactcctcaggcagaaggatgccatgactggcattgctttgctgtaaacagatccagcaaacctcacgttcctgtgttaaaccttgatgtttcctgttaggtgcaygccgtgataggggtgctgatggatgacacggatcccctggtcacagtgatgaaggtagaaaaggccccccaggagacctatgcagatattggggggttggacaaccaaattcaggaaattaaggtatgattgattgg

SEQ ID NO: 796946 - DNA, 546 bp, Homo sapiens
ggtgctgatggatgacacggatcccctggtcacagtgatgaaggtagaaaaggccccccaggagacctatgcagatattggggggttggacaaccaaattcaggaaattaaggtatgattgattggtaaccatctctgggtttcagttttggtttctgttgtcccatttaggatactttgcaggtgttttgtatgtttgcttatttattaatcaaaccagtagctgagtcagagcttgccagttgtggtatttttgtatttgttaatactgagttaggtgatagaaataacagtcagttgtgtgatagttcctgcagcagctgcagcttccttctttttagtgtaatgttgaatgcattgtctgtgtgaatatgtaatgtttctgattatgttgacttcagttgtgtttatctggaagcctccagtgctttgtggagatagcatgtgtayttgcacacatttagacagcagtggggttggagcataatcccagtgccttcagcagccctgggggctggaccatatgcagggcatatggtcattgag

SEQ ID NO: 796947 - DNA, 621 bp, Homo sapiens
agtacttatattttgggtgattttttatttttgtgtttgggtagatggaaatgttaattttttttctaattagaaatgtaatactcatgcctgtaatcccagcactttgagaggccaaggcgggtggatcacctgaggtcaggagttcaagaccagcctggtcaacatggtgaaaccccatctctactaaaaatacaaaaattagccgggcatggtggcaggcacctgtaatcccagatgctctggaggctgagacaggggaatcgcttgaacctgggaggtggaggttgcartgagccaagatcgcgccattggacaccagcctgggtgacaagagcaagactccagttcagaaaaaaaaaaaaaagaaaaagaaagaaagaaatgtaatacctttcccctgctatctgccactaataatcagttgtgaaaaaatattaaatattcttttttaatatgtacccaaaagaattaaaagcagagactcaaacagatattttcacacccctgttcctaacagcattattcacagccaaaaggaggaaacaacccaagtgtccatggatggataaatggataaacaaaatgtggtctatacatacaataaaatgttatgcagcc

SEQ ID NO: 796948 - DNA, 505 bp, Homo sapiens
attacaggcgtgagccaccgcacctggcctcaatcattttaagagatttatttgccaaagttaagcatgcgtgccagggagacaggtctatgcctttctctgaagatgattttgagggcttcaaatctaaaggggaagggcgggatattgagaagtatacaattttcctgtaagagtaggatagggaaaaaatagacattcatgcctttgtctggctcaatgaatctgtrtgttttacataagatgacgtaaacaaatggggcagaggaaaaatgcagggaatctgcattttctgtcagatagcatagacaaaatggggcaggggaacaatcagatatgcatttgtgtctgttggacagggctgactgcacctgtaaagataagctatcaatttgcattgctgtggtgaaattttaacagctcactaggaatttccttgtgggcaaaatatgggggaggatgtagcttttcatcttgtagccatcttatttaggaaccaaaaggc

SEQ ID NO: 796949 - DNA, 674 bp, Homo sapiens
actgaggtgcatcttgggggcttggatccagcagcacaaacatggctgccacacgaagtactcagggaaggggagtgggagatgaaactcaaaccttgttttctatattttgttctacctcttaccgtaaaccctccttcctatacacccagaaatgcctctgcccaatagaaccagctatcttagttcatcctgtgttgctataacagaactgagactgggtaatttataaagaaaagaggtttctttagtttatagttttggaggctggaagttcaagggcatgaccctggcttctggcaagggcttctgtggtgcatcttaacatggtgaaggtcaaaggggaagcagacaggcatgaaccccaggggyattctggctttataacaacccactgtcaagggaactgatccattcccatggaaactaatccagtctcaccaaagcgagaactcactcaatgccacaagaatgacatcaagccattcatgagggatctgccccctgtgacccaaacacttccctctaggccccaccttccaccaccaccacattggggatcaaatttcagcatgaattttggtggggacatattcaaaccatagccaaacaatagcaccagccatctcattgactgccacaaactgtattccccatccctgatgggagaatat

SEQ ID NO: 796950 - DNA, 674 bp, Homo sapiens
actgaggtgcatcttgggggcttggatccagcagcacaaacatggctgccacacgaagtactcagggaaggggagtgggagatgaaactcaaaccttgttttctatattttgttctacctcttaccgtaaaccctccttcctatacacccagaaatgcctctgcccaatagaaccagctatcttagttcatcctgtgttgctataacagaactgagactgggtaatttataaagaaaagaggtttctttagtttatagttttggaggctggaagttcaagggcatgaccctggcttctggcaagggcttctgtggtgcatcttaacatggtgaaggtcaaaggggaagcagacaggcatgaaccccaggggtattctggctttataacaacccactgtcaagggaactgatccattcccatggaaactaatccagtctcaccaaagcgagaactcactcaatgccacaagaatgacatcaagccattcatgagggatctgccccctgtgacccaaacacytccctctaggccccaccttccaccaccaccacattggggatcaaatttcagcatgaattttggtggggacatattcaaaccatagccaaacaatagcaccagccatctcattgactgccacaaactgtattccccatccctgatgggagaatat

SEQ ID NO: 796951 - DNA, 510 bp, Homo sapiens
agggaactagagatggaagtggggacggaactttaactttccatttgtggttcagccgaatctcctttcaaaaactccagggtgcaaaacaataaaatgagcaaaatagtgagactgtccttttaaggataggacagtctcactatgttgctcaaataaactgtccttatttttctgtttatttttggcttgagatctcttttaaaaaaaatctgagtcaattctgagtttccccactcctttccttgggggcttatatagggcaacgacatgagcaaagtgtattgggcacagaagccatcattttttaygtgtttgtcacactgacgtccagtgagatattgttgtcctttttggccctggattgttagtcattcaggtcttcttggaagtgttctgtacttttgtccctaagctttttcacactaagtttaggtggttgacttaacaatattattcccaaaatatttacatatgaatgagagattagcctttgtccaaataagtaag

SEQ ID NO: 796952 - DNA, 555 bp, Homo sapiens
taatggatcctactccaaccccagacaatgcttgagcatctgtgtgccacaaacagcagaaaaagcagcagactggcctccctctatggagctacaacctcttccctattttgtatctggagcttccttagttctttaagtgtctgttaggggctcttatctaactggtcgaaggttastagcttccaagtagaagttggcctgagaaaaccctgtctaaaaaaatcaggacctaggtgaagtctccagcccctgtagcagccaagtgctgggacatctgcagttcctttgttattacatatttggggctggctgtactttctttgatgcacttcctttcttagtggagagtctgctagccaaactgataatggacctcctcggggtttattgtttttatcaattccttgttgcttcccatatttaaagcagtcccagtttgggctatgacttgggaaaaaatccaggtgtggttcaggcgcccataaagaccacacgagacttcaggtaggggaggaggcactgcccctttgctggaagcaaagttgagacagg

SEQ ID NO: 796953 - DNA, 416 bp, Homo sapiens
gggatcccatttgtccatttttgctttgattgcctgtctggatagatatttgaggtattaagcaattgggcagaattttcaggagagagatggtctgtttcgttctgtattcccctcaggcctcaaagtcttcctttccagtgtccctcacagtccctgggccagactgcatttgtctgttgggcttttctaatcctggatgtcacagtattatccttggctmtccctattctagttcactttcttttttcaattttgatttatcttcagtggtgacttcctggaggccttaaacctaccttgacttatataataacaggaccaggcaaaggagggggatgctggtctgtctgtgcatatggctggttgccaaattccctgccctttgaaactgtgtcctttgggttgtgtttctg

SEQ ID NO: 796954 - DNA, 643 bp, Homo sapiens
ttgttaactaatttgtcctatttctcagctggtggaggacttgggttggtagggggtgttactgggccccctcaaatacctcacatgggtagatagcctccctggccgctcaggaccactgggtggaagaggctgtcacatgagcccttatgtaatggctattaggaaactctctttaagatagctgtggcttctcttttcccagtggtatcctgccctttccagaggaggctgccgtgaggtgattggaaggaaygtgtcctggtctccatcagagctgttgagtcagtcacttggccgctcagcagaattgctcaagtagactgggaaggagaccccaggatagttcatgagtggctatgttactgtcccatggcagtgccgagaggagacgctcatgcacaaaggggatcagaagcaggcttaggaagcccagccctgcaagccaagggcaaaggccagcctgctgtcacctgcaggaagggagtgcgggttcatatcctcctcctcaggagggaggccagaagataagagatcatgctcatgtaatccacacaggtcaccccgtgggtatagagctggctgaacaagggcaaaggggagatagctgctgcgtcctcctccctgggaaggcatgactaca

SEQ ID NO: 796955 - DNA, 614 bp, Homo sapiens
ccttaggagagtgccctgcccagggattactaaggaggggccgtattctagtctctcagtgaagaggagtgggcagttgtacaggggaagagccccgacaaccctctgagcttccaggtcctgttgtccagccagtgggttacccaggggaactctttgctcttttgccttcttctaggtcctgcctctgctactagtgtttggaaatgctcattaattttaatactaacatggggaaagctaattaggaaggtgaatccactgcaaaataaattatctgatgcatttacaaaggaatgaattatctattgttcaggattgctctgctccrctccccttccattagcacagctcagagccagccgggtgtgagctgcacttgttcttccactgtgggggccagaggatgctgtagacaataagcatgaataagcttcaaggaggaagaggtcctgttaggccagggcagacagaaagccttcatagagctgggaattgaactaatttttagctgggggagatattctacaacataatttgtcatgactattcatgattccattgtatagtttttacaatttggtcaatcacctattgttgagtcaatcccctat

SEQ ID NO: 796956 - DNA, 625 bp, Homo sapiens
tgcttggcagggcagtccctgctaatgatggctagctttgaattattctccaaatgtgtttacacaatcctgaggacttaggggtcatggtggagagaaggagattaatgtcaagggctgatctgtgcttagtctataccttacttgaagtccttgaattaatttgactcctttgtcagaaaaccaaaggcatttgttcacagcctttgtaagaaaaagccagcagaggatgttttgttaacaccagggttagttccctaatatgcattgtaagtttgttgatggaagtygatcgatcactttggctactgttaataatatacaatagattttatatgatacaggataaattttaatataatggaataatattgcacccattataatatgtcccatgctatagtcaaagcccaacttacaaagaacaaacaaacaaaaaatcacagatctttaatggagatgtttgaggttgaacaataacttctttttttttttttgagacggagtttcactcttcttgcccaggctggagtaaaatggcacgatctctcggctcactgcgacctctgcctcccgggttcaagcaattctcctgcctcagcctccctagtagctgggactacag

SEQ ID NO: 796957 - DNA, 624 bp, Homo sapiens
tttgtttagctggaggaacagtggcatatcagggactcagtgtcggtctctgatgctggcaaattgaacactcagtggtggctgtagccaaatcagccttggtaagtgcagtccatgttgttgagcctatgcataaccttcatctctgccaccatggccattttatccatgagcccattgggtgatgatgggatgattgtggaaagaggctgactggtgtccatagaattagtcatcctatctatttgattattaaaatcctcctctgtggcagggtgcagcagctcacacctgtaattccagcattttgggaggtcaaggtgggtggattgcttgaggccaggagttttgagtccagctgggcaacatggtgaaaccctgtctytactgaaaatacaaaaaaaattagccgggtgtggtggtgtgtgcctgtcatcccagctactcaggaggctgagatgggagaatcacctgagcctggggaagtcgaggctgcagtaaacctaaaccaaaatcatgccactgcactccagcctgggcaatcggagtgacaccctgtctcagaaaaataaataaatgaaaggggccaggcgcagtggctcacacctgtaatcccagcacttt

SEQ ID NO: 796958 - DNA, 659 bp, Homo sapiens
tctatactgcatgaatatgaccccagtcacacacttagatattaagggtatctcctcattgaccccgagaggttttattatctacagaaattgactgtcatgccttgggctgagagtttatcagatgaaatgccttwgaaagaaagtattgattcctccctttcttgttaggcacgagccaggtgaagcaagaattgcagaccccaaacttcctgttttcatcgtgtagaaagctctactgcaaatatggtcaatgtgcctaaaaccagaagagctttctgtaagaagtgtggcaagcatcagccttacaaagtgccccagtataagggcaaggattcctcctatgcccaggggaagatgcgctgtgatcagaagcagagtggttacggtgggcagacaaaactgattttctggaagaaggctgaaactacccagatgattgtgctaaggctggaatgtagggagcctaactgcagatccaaggggatgctagccattcagaaatgcaaactttttttttttttaagacagggcctcactctgtttctcaggctggagtgcaatcatggctcactgcagccttgacctccctagctcaagcaatcctccaacctcaacctctcgagtagcttggtctacaggtacacatcattatgctt

SEQ ID NO: 796959 - DNA, 602 bp, Homo sapiens
atcattatgcttggctaactttatttattttttgtaaaggtaagggctcaatatgttgcccatgctggccttgaatccctgggctcaagtggtcctcccacctcggcctcccaaagcactgggataataggtgtgacccaccacacctggctgggattttttggtggtgtttttttcattttgaggagaaaaggttgaagctatagaaaaattacctgtttgtaccccaaacctcagcatcttgcaatctacacaggtaacgaagctgcacatgtacctgaatctaaaataaaagttgaaaaagaaaaaaagaaaaatcaccagtaggaaaatacagtgatattcttacttaaaaaaaaaatcctatgctgacttaragaattttgaaggtcccgtttctccttcaaattgcctttttgtcttgtttatacaggaattaatttagatgggaggtcctgaaagggtttgcaatatttgcagaagctactaatgctctagaaacaggtgcagtggctgagcatgggctgaaaggaggtagcaaggagagatcactggtcaaggtagagagggtgggtgaatatcaaactatccctcatctaaaa

SEQ ID NO: 796960 - DNA, 459 bp, Homo sapiens
gcaagcttgaggagcaaggagagccagtccaagtctcaaaactgaagaatttgaatgtccgatgtttgagggcaggaagcatccagcatggcagaaagatgaagggtgggaggctaggccagtctcgccttttcacgtttttctgcctgctytatattcgctgacagctgatgagatagtgcccaccagttaagagtgggtctgccttccccagccaactgactcaaatgttaatctcctttgacaacaccctcacagacacacccaggattaatattttgcatccttcaatccaatcaggttgacgctcagtattggccatcacacagatcttttgcccgttttaaaatcagattattatatatttttttcctatagagttgtttatatagtctggttattaatcccttctcagatgcatagtttgcaaatattttctcccattccttggattgtctc

SEQ ID NO: 796961 - DNA, 608 bp, Homo sapiens
tctgctcgtccagcatagcaatgcgttcacatgcacattctgaatccctcttccccaccacacctctaactcacctgcagtctcttcactctcagttctatttcctggatatcagagggaggctttgccatctttaacatttccagctctgcttcagtttttttcagccaagtagtgatggcgctgatatcagagttcagctgttgcaaattttgttttattttgagcttattgtgaagctcctgtgcttgaatcatctcccatctgtcgaaggcacctggaattaaaaaatcgccaattaaaaaaagcaataatgcaacagatttctctgcctccagctaattaggggtcagggtggttwaaaaaaaaaaaaaaaaaaacaaaaaaactgtaggggattcccctgacagaagggtctggttttgggagttctctcttctcctggaatgtggaatagcacatgatctgaggcgtacactcccacagaggctggaatgaagtggaaggtctatgtgctacagtttcaagctcaacagttcagttcctgctgaattttttcagttttctcctttggtccacaaatgaccaggtcgatgctgtcagcttta

SEQ ID NO: 796962 - DNA, 555 bp, Homo sapiens
gggagctgagggggctggggattggaaaacacagttgtatagctaatgatctttactgtaatccttgcctcattcccctttccagcataaaataacatattgtttaatgaacataagaggatgagattttaacatggaattgaattatactgataacatcaactagaaaattttatatcctacgttttaaaacaaatggaaaatatactagtcgtcattgaagattgcagacaagtaataaaggtagataattattcccctgagagaamatttctagctatcagaagcagcctttggaagatagttggttcaagtcttattgtgaaatgaaatacaaacaaaatagcaataaatagtttattttggaatttttttactgctagcaataggatcttatgtttttattttttgtcaaattaaaatttgaacaatttccttttggagtacatactctctaaatataatgttacagggattgtaatttaaaaagaaaattgatgattattttagaacaccgatggaaagcctttacctactagactaattcctttgtag

SEQ ID NO: 796963 - DNA, 488 bp, Homo sapiens
tgggaaaatttattctaaaaaatcagttctgagaaatattatagtgggtctactgattagaaagataaaatataaattctcaaggcctgtgctggggggttgagggcagaggagaagggacaagaagaaaactgaaaagaattagactgatgtcagactttccaaaaaaaaaaagaaaaaaatatacaaagcaagccagaaakgtagcagagttttattttttaaattttaataaaacaaatgtaagtgcagtgaggctaccaagattcatcatgaatcaatacaaacattggctgttattttcaacagatctccaaagaaagagcagcaaatgtggagcaaactcaaaacgaccctgagctccagtcatccatgtaaatggctacacaagcaacatgttagcacctcttctccccactaccccatgttgagctgagtccgctcagagacgtaagggggtaaggagaggataaagaggaatgttttcc

SEQ ID NO: 796964 - DNA, 617 bp, Homo sapiens
ctgactaaatttaagtgctcatttttggtctattcagggattaaatttcttcctgtttcagtcttaggagggtgtatgtgtcaggaatttatccatttcttctagatttttgagtttatatgcataaaggtgttcacagtagtctctgatgaaataagggacggatggaataaatttttacttctatgggtcagtagtaatatcccccttgtttcagattatgtttatttgaatcttctctcttttcttctttattagtctagctagtggtctatctattttattatttttttttttcaaaaacagctcctggatccgttcatcttttgaatggtgttttgtgcctcagtctccttcagttcaggactgatttgggttatttcttttcttctgctagctttgctcttargtctctagttctattagttgtgaagttaggttgttagcttgagatctttctaactatttgatgtgggcatttagtgccatacatttccttcttaacactgccctagctgtgttagattctggtatgttgtatccttgttcatatcagcttcaaagaacttcttcatttctgtagaataggcctaatctttatcattcttcaacattgt

SEQ ID NO: 796965 - DNA, 630 bp, Homo sapiens
ggggtcatacaacacatgagttacccttccctgccctccctcttggcctcagcaatgttcctaaagtcactggaatttgggagtacgtgtacttttgaataaaatgataaaagatattttcatcacagggacgtgaacaacaccaaacatagcacaggttgttactkgttctcaaccatataatcataagccttagaagggaaaccaaaacatttttgggaagagatttggactctcccacactatgcaagtaattcctatctcattatacacagatttccaagagttcagtatacaccagatgatgcctgcatcagagtcacaaactgagcaggtaacaccatgaacattagaaaataaatagggcagcacgtttctcattatgaggaacaacattttccacaggcctatttccaagatggtgctacaggtattaggtctgtggaatatgctgattaataatggtgttgtaaagcctgatgatacttgtggcttttctactttaatgccttttaagatgctgctgacaacagataattaactttgttgtggacaggaaattcagattggatggggctttaccaaaagcccatgttttgcccactaccactagtgaagtgcacacctccc

SEQ ID NO: 796966 - DNA, 647 bp, Homo sapiens
ttacaagactgtagaaggctggtcttaccttattcccattttatgaagaaaccaaggcacagagaagctgaatattttgccctggtcctgtgctccctgaagctaatgcccaaatgggaaccctacgcgagggcacagtctcagccacgcggccccaggcggcagtgagaatgaagagaaacgcctggtatgtgctaggctggggcctggaggccccttccctggcttctcccaaccaagagcgcctgtttctcaacacctgccagggaccgggktgctggcagagggcatggccagtgttgtgaccttggagatggagaaaggaaaccagtgctgggtgccttcctccctagcatccccgggagccctggtccttctcagagtggccgcaggaagcctggtgtggttctggatgaggtctgggagagggcgatgaaggaggaagaaatggcatcccggtgagtcctttcctgctcctttaaggcttatggagaaaggaaattcatgtggtggcgaggacgagctgacgtggaaagattgctggcttccaagcaggaggctgtggtttcagactctctgattttgtggccttgggcttgtttctgaacctctttgaggcgcagttgagttatttgcaaatcagggat

SEQ ID NO: 796967 - DNA, 616 bp, Homo sapiens
attttgtttctttcctaaatgcttggtggaattctctagttaagccaagtggccctgggattttctctgtgagaagattttaaacagcaaattacatttctttaatagatatgaagctgggctatttggataacctgttcttgagtgagatctggcagttcatgtctttcaaggactttttccattttattgaaattattgagtttatttatwgaaagttgctcataatattctctcatagtcattttattgtctgcagtattttcagtgatatcctttttctctcttatttctgatattggcaatttgcttttttctctttctttttccagatctgtctggagagtggtttatcaatttgatccttttttttttttttaaagagatgaggtctcactatttttcccaggctggtctcgagctcctgagctcaagtaatcctcctgccctggcctcccaaaatgctaggatgacaagcgtaagtcaccatgcccagccttttgctacatatattttttaaatagaggttgctttaggactttcagtataaatcttaaatttataacagtctgtctttgagtaatattagactacctcccatacagcacaaccatct

SEQ ID NO: 796968 - DNA, 616 bp, Homo sapiens
attttgtttctttcctaaatgcttggtggaattctctagttaagccaagtggccctgggattttctctgtgagaagattttaaacagcaaattacatttctttaatagatatgaagctgggctatttggataacctgttcttgagtgagatctggcagttcatgtctttcaaggactttttccattttattgaaattattgagtttatttatagaaagttgctcataatattctctcatagtcattttattgtctgcagtattttcagtgatatcctttttctctcttatttctgatattggcaatttgcttttttctctttctttttccagatctgtctggagagtggtttatcaatttgatccttttttttttttttaaagagatgaggtctcactatttttcccaggctggtctcgarctcctgagctcaagtaatcctcctgccctggcctcccaaaatgctaggatgacaagcgtaagtcaccatgcccagccttttgctacatatattttttaaatagaggttgctttaggactttcagtataaatcttaaatttataacagtctgtctttgagtaatattagactacctcccatacagcacaaccatct

SEQ ID NO: 796969 - DNA, 604 bp, Homo sapiens
agattttaagctcatgagaggcacgtcctgccctgtgcctcattgccagcaacctctgtaaccctctagaacctgaaacttaatgataactgtgtggggagggcctgccagagggcttggctttgacacttgtttatggagcaggcaggcgtgttgcacccctgtttgcaaaaatggggctgattttattcttactgtgaaggtctttagctattttcttccagagaagtactacctttcctgttctctctcttttctaaacgtttctttgaaatataatacataggcagaaaagtgcataggagtgtacagcttgatgccttttcattgayggaacacacctgtgtaactggcatccagatcaagagacagaatatcccataacctctgaaattgccccactcccctgctccccaccacggtaaatcactagcctgccctccaatgatacagagcagttttgcctgttcttgtactttacataaacggagctacacagtatgtgccttcttcgcgcctgtttcttttgttgcaacatttagtcatttagtcagatttagccacagtcttgcctgtggttttcaatccttcattctggttgtta

SEQ ID NO: 796970 - DNA, 590 bp, Homo sapiens
cagtgggcccaaactatctctagaacaaaggatcctctagacctgtcctataaagctaaaaacgagcctagaaagtgtgtaactgaactggaagtaactaaactgccaagcaggacaaaccccaaagctccttaaaagaggatggcaaattacagacactcaacawtgaaacattcacaacattcagcatctgatcaaaatccatgtgccaaaaagccagaaaatgtgaaccacagccagggaataaggccgtcaatagaaacagaccaaaggatgatacgaacaacggaaatgccgggcaacaatgttaaaaacaattattataactatgttcaagtacttaaatgaaaagataaccatagtgagaaaataaatggaagatataaaaagaaactatgtggaactggtagagctatgtctaaaatgcaaatttcactggataagcttgacagctggttcaaagactagtgaacttgaagacatagttctataagtgatctgagacacagcacacagagaaaagagactggaaaacaataaacagattcgcagtgactatggggcaatagtaagtcatctaaggtatggaa

SEQ ID NO: 796971 - DNA, 567 bp, Homo sapiens
tcctattcaggctgtcaactgattggatgaggcccacccatattagggaggggaaactgctttacctggcccactgattccaatgtgagtctcatccccaagcccctcacagaaacacccagagtgatgtctggtcaaatatctgggcgctgtggccccrccaagttgacactgaaattaaccctcgcagaggccgcctctttatcacgggacacatgcttggagcccctcttctggaactttctctaagcgagtgacagtatggggcagatgggtgtcattgctctgtggtcacttgatgggtgacctgggttggccctgtgtacctacccactgggcttggctcagaatggcatcctgctgtttccacaagtcagctggctctccagggtcaggatggaacctgctgaggagatcacagatggccctgactccacacgctgccccagagggccccaaggcaggcatctgagccagccccggctgcagaggttgactcaggaaagcaccagggaaagttggttgttaatatcccagtccaattttttttgactgggcctaaaggca

SEQ ID NO: 796972 - DNA, 567 bp, Homo sapiens
tcctattcaggctgtcaactgattggatgaggcccacccatattagggaggggaaactgctttacctggcccactgattccaatgtgagtctcatccccaagcccctcacagaaacacccagagtgatgtctggtcaaatatctgggcgctgtggccccgccaagttgacactgaaattaaccctcgcagaggccgcctctttatcaygggacacatgcttggagcccctcttctggaactttctctaagcgagtgacagtatggggcagatgggtgtcattgctctgtggtcacttgatgggtgacctgggttggccctgtgtacctacccactgggcttggctcagaatggcatcctgctgtttccacaagtcagctggctctccagggtcaggatggaacctgctgaggagatcacagatggccctgactccacacgctgccccagagggccccaaggcaggcatctgagccagccccggctgcagaggttgactcaggaaagcaccagggaaagttggttgttaatatcccagtccaattttttttgactgggcctaaaggca

SEQ ID NO: 796973 - DNA, 555 bp, Homo sapiens
ttggaatgccttcatttttagaccttttcggctttctctcaggatgtctgtatcagtattgtctttaattcatttattcaagaaacatttattggcatctaataggcccagagcactggcccaggtattagggcacaaaaggagggcgcggtttctgccatcacgtcacggggcttacgatctgcagagaaggacatttcacagcaacaatgtggcccaggtgactgtttaatgcctgttgttttagcagctcagaagggaaaaaaagaccttcagcaaacatccccgggagcctgctctgtaccagtaactgtgtgaggtgctggggagtgtgtraggtggtcctcaatgagttcggagccaaattgggtgagacaggcaaggccattttagtgttaacagtggtagatgtcttgggggcacacaagatgggaggatcaatgcttaatgcatggggtataccaggaggagagaggagcaccaaaaggctgagtatctctgggaaaccgtcgaccccaatgggggctggggtatggggcaggtcggggcagcagc

SEQ ID NO: 796974 - DNA, 642 bp, Homo sapiens
aaaaaaagaaaaaaggagaggttgcaatcctagtctctgacaaaacacactttaaacgaacaaagatcagaaaagactaagaagggcattacataattgtcaaggcaacaattcaactagaagatctaactattctaaatatatatatgcacccaatacaggagcacccagactcataaagcaagttcctaaagacctacaaagagacttagactcccacacaataatagtaggagactttaacaccccactgtcaatattagacagatcaatgagacagaaaattaacaaggatattcaggacttgaactcagctctggatcaaatggaactaatagacatctgcacaactctycaccccaaatcaacagaatatacattcttctcagtgccacatcacacttattctaaaattgaccacataattggaagtaaaacattcctcagcaaatgcaaaagaatggaaatcataacagtctctcagaccacaatgcaatcaaattagaactcaggattaagaaactcactcaaaaccacacaactacatggaaactgaacaatctgctcctgaatgactcctgggtaagtaatgaaatcaaggcggaaatcaagaagttctttgaaacccatgagaacatagag

SEQ ID NO: 796975 - DNA, 485 bp, Homo sapiens
acaccatggatgaaaggcccaaaagtaagatcagaaactataaaatttctagaatagaacataaagggaaagctcctagacattggccttggcaatgattttttggatatcacaccaaaagctcaggccgtaaaagcaaaaataaataaatgagactataacagactaaaagcttctgcacagaaaaaaaaaatgaaatggcaaactacatgtcaaaaaataatatttgcaaaccatatatctgataagaggttaatatcatacaactcaataatagaaagccaaataacccaatttwaaaaaaaaaatgggcaaaagacctaaatagacatttctctaaagaaggtataaaaatgaacaatagataaattaagaagtgctaaacatcattaatcatcagggaaatgtaaataaaagccactatgagatacaacttcatgtgcgttaggattattgactgttatcaagatttcaaaagataacaa

SEQ ID NO: 796976 - DNA, 613 bp, Homo sapiens
ttgatatggaattcacacagcataacactcacactttgaaggtgtgcaattcattgttttttaatatagtcacaaaattatgcaaccatctcctatatcaaattcaggaatatttttatcactcagaaaagaaatcctatacttgttggcaatcgctcttcattcttcactcccaccagctcctagcaaccactaatttactttctgttgktatggatttgcctaactggaacatttcatgtaatggaatcttataatatgaggtattttgtatctgacttctttaacctagcataatattttcaagagtcaattcccttatagtatgtatcagtatttcattccttttcatgactggaaaatgttccattttatggatataccatattttgtttatctatatatctgttgatgggtatttgggttgtttctactttttggtgattatgaataatgttgctacattcatgtatatcatttaatgtggatatgttttcttttctttttttttttttttttgagtatacaccttagtgtggaattgccagatcatacggtagctctatgtttagacttttgatgtactgaaaactgttttccaaagcagttctac

SEQ ID NO: 796977 - DNA, 613 bp, Homo sapiens
ttgatatggaattcacacagcataacactcacactttgaaggtgtgcaattcattgttttttaatatagtcacaaaattatgcaaccatctcctatatcaaattcaggaatatttttatcactcagaaaagaaatcctatacttgttggcaatcgctcttcattcttcactcccaccagctcctagcaaccactaatttactttctgttgttatggatttgcctaactggaacatttcatgtaatggaatcttataatatgaggtattttgtatctgacttctttaacctagcataatattttcaagagtcaattcccttatagtatgtatcagtatttcattccttttcatgactggaaaatgttccatyttatggatataccatattttgtttatctatatatctgttgatgggtatttgggttgtttctactttttggtgattatgaataatgttgctacattcatgtatatcatttaatgtggatatgttttcttttctttttttttttttttttgagtatacaccttagtgtggaattgccagatcatacggtagctctatgtttagacttttgatgtactgaaaactgttttccaaagcagttctac

SEQ ID NO: 796978 - DNA, 674 bp, Homo sapiens
gggagaccctgcttcttggagcagggagaatgttttgttctatgcatactgccatgcatattcaggaaagcagcagaaggaagccaggagagggatgctaagatgctttattcacctagaaggaaaagtaagaaaggagaagtagcattgtcctgacttaaaccagattagcatgctcctaacacagtgggcttgaaaattctgtgtgtgacgccactgtgcccagaaagaaggtgaacagatcagcaatctatctggttgatccgtcccacattcataggctccttgcctgataccaaccccattctcctgtctgggcccctggggctactggggtgcagtttagattttgccactagaaggctctgaggtgggttaacagcaaggaggcttcatctgtcgaggctgaacttgactcatttctctcttcctgctctgaaagatctccagctgcgttgccaaaccagcasagaccctacagggagatgaatgacccaggaagacaggaaggtaacaagcacacaaggtcactccactgagcaaacggcaacatttgagcctccccaaatttgaatataaacctctcctattatcaaggtcccactgagaaggtacaatttgaagattacatccccttgcaagttggatcccaaagaaattaaggactgatatcg

SEQ ID NO: 796979 - DNA, 498 bp, Homo sapiens
gacacgatttaaaaagagtaaagcatgctggtcagttttcatttggattttgttttatttcattttattcccaattctcccaaagcccaggaacagcagttcacgataaaaaataatggcctgagaaatgtccttctgtaacatccccacagctgtgtgagtttgcataactcgaatgtgcctagtgggacccattttgttctctggccctgctgagagtgagttggggtgcctacatgtgagtggcttggatccccacaactgctaccctggsacagcccagaagatggtcttaagagaacaatatcttcccttttgcttctctgctttattgcacttgttcaagtgacagcattccagagttcccatcctcttgtctggatgtcctgccagggggcccttgaaaaagtctttatatctccaaagataatagagcaacttgccactgccacttgtctttctacccccgccgtgtagatttcccctggatcctggaat

SEQ ID NO: 796980 - DNA, 588 bp, Homo sapiens
tgtaatctcagcactttgggaggccgaggcaggcggatcccctgaggtcgggagtttgagaccagcctgaccaacatggagaaaccccatctctattaaaaagacaaaaattaggccgggtgtggtggtgcatgcctgtaatcccagctactcaggaggctgaggcaggagaatcgcttgaacccgggaggcagaggtttcagtgaaccgagattgcgccattgcactccagcctgggcaacaggagcaaaactctgtctcaaaaacaaaacaaaacaaaacaaaacaaaaaactgtggaaaggagacatcacccctagggcaggggaaacaaaatgagaagtagcattaatagaatctaggggcttagagggggkgccccaagtggctgtgctcagtccttgagagcagatactccacagctgaaacctctggggggcgccatgggactggttctctggtgcaccacagatgttgctcagttgggtgcattctgagattgatgttggaacttctggaaagaaggggccaagtagttgaagctgtgagcccctaaaaaagcaaaaggctggatgtatagctgtcctca

SEQ ID NO: 796981 - DNA, 648 bp, Homo sapiens
gaaggtaagcttgttccttgggtgagtcatcatgttgtcttgcagtcggtcatgtgttttcttagcaactgctgttgatttcaggtttgagcagggtgagcatgttttgaagtgatccaacagattcttttaggttatatatggctgctaaatcttatacacttactgttactattatgtgtcttacaaggagtgaaagattgaattctttttttatctctaccttccaaatcatttctyttctaatttgtttttcaggggtagtgaggactgggagtgggggtaaaaaaggagaaaaataaatgaatctgggatatcatgagtctgcctgtttatgcccctggactagagcagaaccaaaaggacctccatgtgctgatagggttaaatatgatttcctggggtgttgatcttgagtaatactccgtgtgcatacattctataggaacaagtgaattttagaaatgtctgtggtatagtgtagtggttaaaagcttgggttctgaaatcagtctgacccctggttcaaattctagctttgccatatactagaggtgttattttgggcaaattacttaacctctctgagtagagtttcctcatctgtaaaagtgaaactaaaatcccacgtacttatattactgagat

SEQ ID NO: 796982 - DNA, 547 bp, Homo sapiens
cagactagggactcagtatgtacatcacactttctttttctaggtttatggccaaaatcttactctcaaagtatttcttgtccaagagcacatggctggagtagaaacttcatgatctataggaaaaaattgtaaaccagatgtctggtttttttctgctttttcttttgtttgttttgttttaacatttctgttcartggctccctatcacatgtgggatgaagtccagacttcttggcgtggttcaggcttttactggtccagtgcttgcctttctctctgctcttatctcccaccatgccccataagcactctgtgctccaaccccatggttccttaaggggccatattctccctggtccgccagcctgtgtgctttcattcagattgtttcccttgtagctcccccggcccctcctccagcagcagaagtcatcctctcatccatccttcatacatcctttatccatccccaggacgattagaatcagtttcctgtgagctctgctctctcttaggctgagataacgtgctccctcctctgtt

SEQ ID NO: 796983 - DNA, 609 bp, Homo sapiens
tgtataatgatatttcttggtggccttaatttgcatttctctattggctagtgatattgattgtgttttttttgcactcattttccatcagtgtatcattttcagaaaaatatctcttcatatatttgtcattttccaattgaatatatgcrtatatttactgttgagctttgaggatgagttacgtattctaaatatgaatcctttgttgaatgtatggtttgcaatagtttctctcaatctattgtttgtcttttcattcttttgacagtctttcatacagcaaaggtatttaattgtgattaagtccaatttacagattttaaaaaatatctagtgcttttagaatcatgtctaagaacttttcatgaagttccaggtcctgaaggttttcttctaggttaactcctaaaagttttagactttttatgttttacacttaaatctacgacccctgttgactcagtttttctaaaaggtatgagatttagattgaggtttactttttttgcccaaagatgtccaattattattccagaaccatttgtgaaaaagttcatcctttttccattgaattgtctttgcatttttataaaacatcagctagcc

SEQ ID NO: 796984 - DNA, 486 bp, Homo sapiens
tgtgacagtttttgacttgaaatctattttatctgatgtaaatatagccactcctgctctcttttggctactgtttgcatggaatatcttccattctttaactttcagcccatgtgtgtccttaaatctaaaatagttcttataggtagaatatagttagatcttgtttcttttttaatatccattcagccaccctgtcttttgattggataatttaatccatttacrtttaagggtattgataggtaaagacttattcttgcccttttgtcattgttgcttggttattttgtaggtccttttttttccttcttgtgacttacttactgtaagttacttactgtagctatggttatttttgaccattttgacttttaaccttcatactagagatttggaagatttacatactgctactatagtaatggaatattctgcttttgactgtgtatttacttccaccagtgagttttatactttcatata

SEQ ID NO: 796985 - DNA, 606 bp, Homo sapiens
acatttttaatgttcacatatttgggatgatccttaaatattcatattgtaccttaaaatctaattataggtaaagttaccacaaatctaagttcttcttgaaccctttacttctcctgtccaatttattccctctgtctggaatgcccttacatcctcyccctttctctgcctgttgaagtcctttaagacccagctaaagtaacaccatctctaaagacttccagatttcctcattcagaattcatcttttgcttctccataatgctctttctatgtgcattccttttattaagggcccttttaaagtctaatttgtattgaggcatatgactgtatatttctaactggattgcgaactgctataaacaagagacatgttttattaatcactgcaccctccattaggcacagtgcctgatggtacttaaggaaatgcttcttgtttaactgtttgatgaatatcgagttgatatcagatgccctaagtatgattgtaggatctgatagcgatataaacacaaactacatattatccatggaatccttacttggcagtttattagcatatgtaaatcataatggtcaaggtaaattaaagaaatc

SEQ ID NO: 796986 - DNA, 644 bp, Homo sapiens
actcttctactgtccctccttccactctgatatcatcaattgactgtgaactctcatactttcccattcttacaccatgctgtcctcaactagaaatactcaattgtctcttcagagattatctttccttcagggtcacaactccctggagtttcaactgggccaaaggaaactgtgctttagaaaatggcaaaaactcttctcacactrcccaaagataataggagactacctctaattacagaaatatatggaatttgaggttcttccacccaaaagtaacacaactaaagataagtagaatatgacagtgggagatctattttgactgtataaagacatgttctttctttctttttaaatttcaatcgctttgggagtacaagtggctttgagttacgtggataaattgtatagtggtgaaatttgggcttttaagacatttttgaatagaataaatcacagatacatatgtgttttttaaacgttggatttggtaacaattatataaagatctttaggaagatttcagtgaaattatatattctaatgtgttagaatattatttttcatgcctcaataatgcacagagctcaaatctctttaaccagactttccaatgatgacagctcaaggtgtacttc

SEQ ID NO: 796987 - DNA, 639 bp, Homo sapiens
tgcttattatatggttacaacctccagtgcaggattcagtagaagagatgatagcatatatgttgccttactcctggtctttagataaaaatattaactacttcaccattaagtatgatttggccgtagtattttatttatttttttttttttttgaggcagagttttgctcttgtcgcccaggctggaacgcagtggtgccatctcggcccactgcaacctctgcctcccagattcaagtgattctcctgcctcagcctccccagtagctaggattacaggcacccgamaccatgcccagttaacttttgtgtttttagtagaggtggggtttcaccatgttggccaggctggtctcaaattcctgacctcaggtgatctgcccacctcggcctcccaaagtgctgggattacaggcatgagcaacctcacccgtccggctgtagtatttttaataaatgtcctttcctcaaacttttctgataattttattatgaatgtgcatttaattttgtcaaatgcttttttggtatcttttttgtatttattaaaattatcatgtgtttttctcttttatcttattaatatggcaatatatacgatttgatttttaaaggttaaatcaattttgtacttctg

SEQ ID NO: 796988 - DNA, 548 bp, Homo sapiens
aaggccctatccattgcctgataaatcaaaatacttaccctggccatctttgggcaagcctagagagcttagagcctcctactactacagcagctgttgctctcctgaaagcagcacctcctggctggaggccaaccaactcaggtcattayaacaactcaggacagaatgaccttgatcccaggaaggagaatacaacacctaattttgctgcctgcaatatcttggctaaccagaggtcctgcgggtgtccacatgaaacctcatcactagcataaccggcattcaagaaagtcagcacactaaacatatctacaaccaaagactctcacagagtgggcactggtatccacggctggaagacctgaagacaggtcacatcataggactctgcagacatcttccagcacaagctcagagcctggtatccccactgggtggctagacccagaagagcaataataatgagaaggaatcagaaaagtaattctagtactatgacgaaacagggttctataatattcccaaaagatcacatcagctcttca

SEQ ID NO: 796989 - DNA, 518 bp, Homo sapiens
atgtacatatcattacaaagaatttttgccatgtaaatacaataaaaatatgccacaatgtcacaggtgactcaggctggccgggcagggagggccagaatccctgaacactgagcgcacccagtctgcccccagctgctgctcccaccagtgagacccacctgcctgggtggccagtggagacctaatcccctgtgacaccatgtggcagtttctatccactttggcaaatctccgtcttcaaccaaggactcagatgggggctggctgaaagacgacactctttcaaacaacttgacttttattctccraaatggggattttttttatgattttatgtaaacaacatattttatttgtaaaaattcaaatagaatgataaataaaaacaggaaagttttctgcccttcagtcatttcccactcctcacaaagaatcacctctaatcatttgttatctatccttccagacaatattccatgtgagcgtgtgtgtatacatttaaacgggatgatatg

SEQ ID NO: 796990 - DNA, 605 bp, Homo sapiens
gaaaaaaaaaaaaaaaaaggaaaccctgtgtctactaaacatttaaaaattagttgggcacagtggcaggtgcatgtaatcccagctacttaggaggctgaggcaggagaattgctttaaaccgggaggtggaggttgcagtgagccaagatcgtgctgcaataagccgagatcacgctgcggtgagccgagatcgcgccactgcactccagcctgggtgacagagcaagactccatctcaaaaaaaaaaaaaaagtacccacaggacagagttgaagacagatcccaggctacaggaacagaacagattatcattagaacagagatgaaggcaaggttggggtactgggcacgaccaattcttccaaaaccccaaggatgaacaagckgtcccctgttgactccaatatctcctctgttctcaagtggataatcgggaccgaggttaagggtacctagtaagattggctcattctggaaccctaaggatgaatgggggatgccatgttcagaaaaggataacagaggggacaccttctttttccttttcctcctctgttctctctttgcagatgaggaattgtgtctccataccacaggacacc

SEQ ID NO: 796991 - DNA, 642 bp, Homo sapiens
acttggatccctttcaaactgatactgtttacatttttgctaactatgtaggaatggctgaaggctgaagaaggaaaggctggagaacaccaactcctggtgacaattcagttttggcccccaacttttcattttggcccagcaaaacaaaattcctgtgattaagtgtttgtgcttcttagaagacaatttagcagtagttcattgcccttcatagcatgccctttggggatgcttacttaaagcttcatacttggccaggtgcagcagctaatgcctgtaatcccagcactttgggaggctgaggtgggcagatcayaaggtcaagagatcgagaccatcctggccaacatggtgtaaccctatctctactaaaactacaaaaattagctgggcatggtggcacacacctgtagtcccagctattcaggaggctgaggcaggagaatcatttgaacccgggaggcggaggttgcagtgagccgagatcgtgccactgcactccaacctggtgacaaagcgagaatctgtctccaaaaaaaaaaaaaaaaaagcttcatacttacagctgttcaattaagaattccttccaacctgttgcatatctttacctgaaaagggggtctagtttctccatctcct

SEQ ID NO: 796992 - DNA, 638 bp, Homo sapiens
tcaagtgaagtaaaaacctaaagacacctgtaaagcaacctaagttcagaatccttttgaagttttttatgattttcccacaagctttaactttactttgtccatacctagtacatctgcaatatttttttagggctcacctttatcaggttttacaaaggtattcaacttggttttcataaaaacaactctttgtctttgtgagctcacatttcatcagcttatgtaatatttaataaaattgcataattaaaacaaccaggtgtgaacaggtttgggaactgtattagtccattctcacactgctaataaagatatacccaagactaggtaatttataaaggaaagagttgaattgactcacagctcagcatggctcaggaggtctcaggaaacgtacaatcatggtgtaaggsgaagcaaacatgtccttcttcacacagtggcagcaaagagaagtgcagagtgaagcaggggatgggggagaggggaaaagccccttataaaaccatcatatctcgtgagaactcgctgacgatcacgagaacagcatgagggtaacggccctcatgattcaattacctcccgctggggccctcccacggcacatggacattacgggaactacagttcaagat

SEQ ID NO: 796993 - DNA, 638 bp, Homo sapiens
tcaagtgaagtaaaaacctaaagacacctgtaaagcaacctaagttcagaatccttttgaagttttttatgattttcccacaagctttaactttactttgtccatacctagtacatctgcaatatttttttagggctcacctttatcaggttttacaaaggtattcaacttggttttcataaaaacaactctttgtctttgtgagctcacatttcatcagcttatgtaatatttaataaaattgcataattaaaacaaccaggtgtgaacaggtttgggaactgtattagtccattctcacactgctaataaagatatacccaagactaggtaatttataaaggaaagagttgaattgactcacagctcagcatggctcaggaggtctcaggaaacgtacaatcatggtgtaaggggaagcaaacatgtccttcttcacacagtggcagcaaagagaagwgcagagtgaagcaggggatgggggagaggggaaaagccccttataaaaccatcatatctcgtgagaactcgctgacgatcacgagaacagcatgagggtaacggccctcatgattcaattacctcccgctggggccctcccacggcacatggacattacgggaactacagttcaagat

SEQ ID NO: 796994 - DNA, 638 bp, Homo sapiens
tcaagtgaagtaaaaacctaaagacacctgtaaagcaacctaagttcagaatccttttgaagttttttatgattttcccacaagctttaactttactttgtccatacctagtacatctgcaatatttttttagggctcacctttatcaggttttacaaaggtattcaacttggttttcataaaaacaactctttgtctttgtgagctcacatttcatcagcttatgtaatatttaataaaattgcataattaaaacaaccaggtgtgaacaggtttgggaactgtattagtccattctcacactgctaataaagatatacccaagactaggtaatttataaaggaaagagttgaattgactcacagctcagcatggctcaggaggtctcaggaaacgtacaatcatggtgtaaggggaagcaaacatgtccttcttcacacagtggcagcaaagagaagtgcagagtgaagcaggggrtgggggagaggggaaaagccccttataaaaccatcatatctcgtgagaactcgctgacgatcacgagaacagcatgagggtaacggccctcatgattcaattacctcccgctggggccctcccacggcacatggacattacgggaactacagttcaagat

SEQ ID NO: 796995 - DNA, 325 bp, Homo sapiens
tgtgaataaatgagaactcttttcaccagaactcacagatatatcgctaatagtttaaactattttctattttaacttgagaacactttatgataaattagatatgagaaaaaaatgttttccattctcaatctaattcttacaaagcctmaacagagcaaggtcaaatgaggtattccttcaaatgaaatacatattttaatcatctaatctgacttacagaaagataaaaatcatattaggtcatatgaggaaaagatcacaatcttcaaccaccaccactatgataattttaataacacagcccttgtattataaaagacac

SEQ ID NO: 796996 - DNA, 598 bp, Homo sapiens
aagagcttcacattattctctatggcaataatctaaaatactctttgagctggaaaatccaaatgtcccttaagcaagagattccgcattctctaaggtatggtattttaattttctattctttattgaatggaatcttagctgaagctctaagaatagcagacacagtgctcagaatcaagtcttcgccttctaaaatttaatcaaattaatttttagcagcaacacgatgtttaaaaatatataagttataaaattacaaaatccatgagttaaatactggcacaaaacaatctgccagaagatatttaaggattactgaaattgatcgtacrttctttgtagtaagcaaagtttcaatatacctttaatattattaatattcctatattctaggtaatctacttgacgttaagagagctgatgtcttactgcacaatattaatgatgttaggaagtatttttatgtgagtttcctgaaactacacctttttgaaaaaatatttgaaaaactgcctatttaatagtaactttgtattactttctttaaaataagcactgaattttgattataaaaaataagagctttactttcaat

SEQ ID NO: 796997 - DNA, 601 bp, Homo sapiens
gtcaattatttgtattcaaaataatgaagtattttcatattaaaattatgtaagagataatattgttagatcccttttctgaaagaaagcaacttttccaaagcacatactatattattaaaactactcaaatacctaatttagtcatattaagagattcaatttaaagcacatgtcagcaagtataaaatatatcattagccatgcatattaaaagaaaagcgttacaggctagtgtgctaatctaaaccattataattaatcataataattaataaaagctatttttaaagaaaagtactgtccagagctatccagattctgtaaatttttaagacttttatttacgattcttacagtagttctcatatggaatggtatcaacaattaataatgttgaaaaacatggaaaagttttagaaaatgaatccctttacttgcacaaagagctatttatagctatataacatttaaatatatgtctatgttacatamatgatctaaaatacagactatcaaaatgaatatattagtcttctttaaatgtttttgttctaaagtatcttgtgaaaattaataatatactcattcaatacagaac

SEQ ID NO: 796998 - DNA, 603 bp, Homo sapiens
tgcatattaaaagaaaagcgttacaggctagtgtgctaatctaaaccattataattaatcataataattaataaaagctatttttaaagaaaagtactgtccagagctatccagattctgtaaatttttaagacttttatttacgattcttacagtagttctcatatggaatggtatcaacaattaataatgttgaaaaacatggaaaagttttagaaaatgaatccctttacttgcacaaagagctatttatagctatataacatttaaatatatgtctatgttacataaatgatctaaaatacagactatcaaaatgaatatattagtcttctttaaatgtttttgttctaaagtatcttgtgaaaattaataatatactcattcaatacagaacaaggaagttcccrttcaacctagatatttaaaaacaaaaaacactttttctctcagtggaaatactgacagattattaattacaaaagactcagaaggaacaattctaataaaaattatcctaaccattgagaaaaagaaaaatattaatagtactaatgaatctaagcagaaacattattttaaatatttcataaagactaaaat

SEQ ID NO: 796999 - DNA, 521 bp, Homo sapiens
acaaaaaccagctccctttatatcatacttctcaatattaattagactagactgtcacacatcacatctgttaaagacagtatctttgaaataaactcacgtacaaactaatttagtgaaggccagattcctaccccctccccgaaaagcaccacaagcaccctgcccataaatgaactgtgtgtgtcaagtggtacaaaaaataattttggcaagacsacacaatgtgatgaatctatggagtaaaatgtaagacttatcaggaagaagaatacatgctttatactggttttgagatgtgttctgtttattgatgaaaatataattcataaacattcaagaatagtgcattcaacatgtaaacacaattatcaaatatacgataaagcaaattttccatattggcatatacttggaaaacagtttatcattcccaaaaatgaacataaaaatattagaagcaaccactatttaacatcaaaccaaacaaaattaaagcacctaaagtttggtaactcaag

SEQ ID NO: 797000 - DNA, 602 bp, Homo sapiens
gttctattgtgtttagatttaaaatatggaactatttagaaagaattaaagagattatgtttatttgatttcaagttatctcagcaagaaacatatttttcatacctctttggaagaacagcaggtcaaatgacacatttgtgagtgactgtttgaaatatttcagccacgccgcagggtccgcctgacctgggcaccgtagatcgagggaacaaaggcttatgttttaaaagttcctttaagagcytttctgggggaggggaaagggggacacgggaagctgtcacaacctcgctttttatttttatcctatgacactaatcagtttaattatatttctaacccatgacttgggatcataattaattcttccaaatgcaaacattatattgcataattctgcaactttgcaagaatcaacacagtttgtttcaaagtcacccacattctttgaactccagagtttcccagtctgtgcaaattcattcctccctttgagtaggttttgtttctggctatgttcaatagcaaaggtgggtctttattcttaatgataaaacaagttgcagaacagtttcattaaagagatccaggatctgaag

SEQ ID NO: 797001 - DNA, 606 bp, Homo sapiens
atctctctgtacttcagttttgccacatgtaaaaaggggataatgacagtacctccttgtagagttattgttggcttaaatgagtcaattcaaggagaggacttagaagactatctcgtccatctaactcaatggctattactattcttaccacaccttagccatgagaggctgtctcagcagttgtgtccatcctctgttctgttcagcctgttgttggacctccagctcaatccaatgtggctgttttctagcccagacacttgagcttctaaagggtctgatacttccgggttggaatgcactgtagtaggaaaatgggccaaacagaatcctgccatcttgaattggcttactcataaaatcattaacccagayctgcagacatagccaaaacctcaggcagttttttccattcttactggaaaactattgttgctgtctctccaaacttctcaccaccaatcttatttgcatcctctagctaatgaattctctccatggaatcctagtggactttccaccacaatttacttgagtttcaaatattattttctgttgggtacaaaggcaaaattctcatttaaataagttgttttcatgttt

SEQ ID NO: 797002 - DNA, 626 bp, Homo sapiens
actttttcaatgtggttactagtaaatttaaaactatatatgtggttcaaattggatttctattgaaaagtgctatcatagaactttgacaaaagtctctaatgaagtagaagatggtaaaaattgttaatgagaagatatggaaatcctgaaagggaatgatgtggttacttgagtacacatatatacattttaggaaaaagtttttaagagttactaaaagtacaggtgtgcggaatgtctttctgttaaatactcattaagagctcatgtccactcaaggatgccaaaaaagagcctatgaagaacatatagaatgaatatatctyattaatggactatgaggcattgtgcttggcacactgaggttcaaaaactttatccatctctttacatctcgttggctggaattaggtcattaaacacagcaaaggataataggattatcccaaggacccagggtaaagagttcacctttcttgaaatcaagtcatctcacccatatacctgaatgcaatttgagtttttaagcaggcaataaaggcgacaattgctgtatgtaacaatcagtgcgtgtcacggtgtccgggttaaaagataagtatacttcacaggattcaacctga

SEQ ID NO: 797003 - DNA, 613 bp, Homo sapiens
ttaaaattggtcctttcttggttgatttggggtgtggggggagggaatgaaaaatgtgttgctcattcattatatgtacatggcaacatctgttccctgctaatgtttcagctgcggtgctgccattagagtatgttaagtaaccatagaaatgaactttctggttgaaattactaaggtaaaggtaaaaataggtaggcacgttacttgggctaatgttcagctgggatgcaccagctgctgaaacactacacgttttcatgttgttcggtaaatagttatcatcctgacacctccaagtgcaatctgccccggctgccccagctcctcccttgggaccctctagattttactataatccagccactaaagggataatgcctggtacagcaagggctccaggaccctgctggagcattargttcaatattttgaatggcacccctgtaaattgccacactttctggaaaggagacttccaataaaagactggaatgtttctacccctcaatattgagcagtatagaattatccattcaagttcctaacaggaaagggatgcccactgaaattaagataatttgatcagagtctatttataagggaactattt

SEQ ID NO: 797004 - DNA, 583 bp, Homo sapiens
taagtcacctctatctttttcttaaactactgtaaaactactaaactactatcccctaaaattggtttccctgcttccattcttactcccctacactctgttctccaaaaaataaccattgtgatcctttaaaatcctgactctctcctgctcagagtcatccagtggcttcccatatcacgtaaaatgaaaccccaatcgctccttactctggcctgcaggggcctgtgtgatgggccttctccagcttcgttcttcctttccttctgttctcccctctgcttacctactccatctccagggcttctttccagctcaagccctttcctgttgagagcatttgctttccccagcgctacgaggctcagtccatttcagcccctgatcccatacmctctctcagggaccaccttgcccaaacagtacctctgcctccatcattctcctttccctttccctgattcattttccttattagagtaattagtcttctgtaacatgactgtatttttatttatgtacatatttatttgcttgtttatttgtaccctgtgatctacgtcttcccattctcccacccctg

SEQ ID NO: 797005 - DNA, 639 bp, Homo sapiens
tctattactccttttctaactgttttcacatttgtcagtactttcacattagcatactatgctatactatactgtactataccataccataccataccataccataccataccataccataccatactatactcatactataagctctatgaccacctgtctctctcgctgtgcctggaagatgtagtttctcgctaaatatatactgagtgaatgagtggagtaggattttcataggcatatctagggactagggagggacagaattcagtcttgaaagaatcaggaatacacaagttgtgttcaggattgttcagtttgtctatagttgagatagttacgcattggtgtattgccaggtttggtagagccctaaacagtaggctaaggaatttgtactttcttcttaagattataagaggagttcataaagaatgctggatgggaagtaracatcattaggatagagctttacaaagttttaatctgatagagatgaataaaaagaataggagccaggaaacatagaggaagtaagggaacatttgcaatgatcaaagttattcatgctgcagattgtgacccaccaacagatcgtgaaattgatacagtaagagatgtaaccaaaaatgcttaaac

SEQ ID NO: 797006 - DNA, 601 bp, Homo sapiens
ttgataaattcgtctacattacaattaatatctcttcagtgaagtacatcatataatcacgaactgggaggacatttgaagtgcctataactatcaaagagctggtcatttggaataatttgagaactcctacaaatcaataaagaaaaaaaggataatataacttaattgaaaactgagcaatagaaacaacagacatttcacagaagagaaaacatgaatggccaataaatgtaagaacaaaagccaatcctagtactaatcaggaaaatgcaaatctaaagcaatgaggtaccattttacactcactaaattgtaaaaattatgaastctgaaaaagtgtgagaagcaatgtgtttcagacatagctaaaaggagtggtaaagtggcacagtcattttggggaacactttgttataatattcaagtcacataacttactgtacttctgggtatttcctggaaaatttcttgcacatgtgtcccagaagacatatataagaatgttcatagtgacactgttcagagtagcaaaaacctgcaagtaacccatttgtctggtgccatggttagaatgtttttgtccccttaaaattcatat

SEQ ID NO: 797007 - DNA, 601 bp, Homo sapiens
ttgataaattcgtctacattacaattaatatctcttcagtgaagtacatcatataatcacgaactgggaggacatttgaagtgcctataactatcaaagagctggtcatttggaataatttgagaactcctacaaatcaataaagaaaaaaaggataatataacttaattgaaaactgagcaatagaaacaacagacatttcacagaagagaaaacatgaatggccaataaatgtaagaacaaaagccaatcctagtactaatcaggaaaatgcaaatctaaagcaatgaggtaccattttacactcactaaattgtaaaaattatgaagtctgaaaaagtgtgagaagcaatgtgtttcagacatagctaaaaggagtggtaaagtggcacagtcattttggggaacactttgttataatattcaagtcacataacttactgtayttctgggtatttcctggaaaatttcttgcacatgtgtcccagaagacatatataagaatgttcatagtgacactgttcagagtagcaaaaacctgcaagtaacccatttgtctggtgccatggttagaatgtttttgtccccttaaaattcatat

SEQ ID NO: 797008 - DNA, 603 bp, Homo sapiens
cttctcccttgccagttagcacagtgctgtgggtattggcaagctgaggaactctgggttggattgacatgttctcgtgaaaatcgaggaggcttataaggaaggtgcctgtatgcttaccttccaggtggtccaagggtttttcactagcaggtttataattgtaatcagcaagtagtttagggccagtgttctatgtcgtgaactttaggttggaaaatttttaaaacagtgataaccaaatgcctgcctcacaccgaaaactctctctaaagcacctaatttgagcagtgttactttgtattatgccctctaagacaaactagacacaagtaatgcctacccagataactaaataaggttacttgttataggggattttaaaatataaatcagcaaaaagttagraggttatctaccaaaaattatgacattgacttaagtaatctataatccttctttctggcagaaattagataacagtgccaattgtctattaagatcactccaaagtcaggataatagccattctatttgcacataagtgaatgcttaacttctcattctgtaagatgagagttgagggtgttcagctcacccaaa

SEQ ID NO: 797009 - DNA, 620 bp, Homo sapiens
aagggattcttctgcctcagcctcctgagtagctgggattacaggcacctgctaccacgcccagctaatttttgtatttttagtagagatggggtttaaccgtgttagccaggctggtctcaatctcctgacctcagtgatccacccccctcggcctcccaagctgtcggagttacaggcatgagccactgtgcccggcctatttgttcttttaattcaaacctttatttggttcagtggagttcacctaactatgattactaagatctgcgggttgactggaaggaaatacactacgaagttataatggttattgctatagtgggattacaggatatttataattttccatctgtgttttgagaaggttactaatgggaaagcaaaaaattagagctacagccctggcatcaccacttttattatgtgcgctggggcaaatcagcatctytgcacctctctttttctaagttaaagggggtcaccaaggtgatctccgagtttactttcaagtttaacgttctgtgggtctaatggaaaagacagtttagcttgatataacccttgtggagcacaatttggctgtgcctttcaaaactacgaatgggtatacctgctga

SEQ ID NO: 797010 - DNA, 433 bp, Homo sapiens
attgcccaggccggagtgcagtggcatgagagagatcacttttaccatgacgtgcaaattatgggagagataaactgttcacatcgagatgattggccacactatgttttaagaagatacttgtaacatttgagctcamtgcaggggcaacgggagctggctatgaaattatgataatggtacagtgtacactacagttaatactgcatttttacatttgcttatatttctctcaatggcaaatggcaccatgtacaatctattagtgttaaattttaaccataagcatacttcaaaataataagagccatatatgacaaacccacagccagcatcatactgaatgggcaaaagctggaagcattacccttgaaaactggaacaagacaaggatgccctctttcaccacttctatccaacatagtactggaag

SEQ ID NO: 797011 - DNA, 636 bp, Homo sapiens
gtctcactgtgttgccagggctggtctcaaagtcctaggctctagcaattcttccaactcagcctcccaaagtgctgggattataggtgtgagccacaatgccctgccctcttttttatttccttcattttttctctttttttctttctctttctttctgtcttttctttttcttctctctttttcttcctcccttttttctctcatttctcattctttttttttctgtttctatgtcttttggttttctttttcatctttcttccctttacatctctgtctgtytattttctttttcttgatcttccttactctctctctcttttcttcatttctttctttccatccctctgtctgtctgtctttgtgtggattttggaaaattctccttattctgtatctccctgtgtatcacaagcctctgtgactttcactttgttgtttttcctccttgtcgcgtaaaaggcattcactgctcttttattttggtgctctgtggatgttcgaagggtggggaaaaagtggtccacgaatgtgattggtttcatgagagacacgagagacaaaagaacatatgatgattacttcgctaaatgccctgtttattctttcaactgcactcatacaagtaaggac

SEQ ID NO: 797012 - DNA, 613 bp, Homo sapiens
ctctctctctctctctccctccccctccctccctctctccccttccttggtgccttctcggctcttgacacttagccgctgtctcgccgtgtcccgggtcgaccggcgggccttctccaccgagcggcgtgtaagagtgcccgtcgggacgagccggacccgccgcgtccccgtctcggtcggcacctccggggtcgaccagctgccgcccgcgagctccggacttagctggcgtctgcacgtgtcccgggtcgaccarcaggcggccgccggacgctgcggcgcactgacgcgagggcgtcgattccggttcacgcgccggcgacctccaccggcctcggcccgcggtggagctgggaccacgcggaactccctctcctacatttttttcagccccactgcgagtttgcgtccgcgggacttttaagagggagtcactgctgccgtcagccagtaatgcttcctccttttttgctttttggttttgccttgcgttttctttctttctttctttctttctttctttctttctttctttctctctctctctctctctctctctgtctctctcccctccctccctccttggtgccttctcggctcgctgctgctg

SEQ ID NO: 797013 - DNA, 486 bp, Homo sapiens
ccgcctcggcctcccaaagactgctgggagtacagatgtgagccaccatgcccggccgattccttccttttttcaatcttattttctgaacgctgccgtgtatgaacatacatctacacayacacacacacacacacacacacacacacacacacacacacacacaccccccgtagtgataaaactatgtaaatgatatttccataattaatacgtttatattatgttacttttaatggatgaatatgtatcgaagccccatttcatttacatacacgtgtatgtatatccttcctcccttccttcattcattatttattaataattttcgtttatttattttcttttcttttggggccggcccgcctggtcttctgtctctgcgctctggtgacctcagcctcccaaatagctgggactacagggatctcttaagcccgggagggagaggttaacgtgggctgtgatcgcacacttccactccag

SEQ ID NO: 797014 - DNA, 613 bp, Homo sapiens
tttggttttgccttgcgttttctttctttctttctttctttctttctttctttctttctttctctctctctctctctctctctctgtctctctcccctccctccctccttggtgccttctcggctcgctgctgctgctgcctctgcctccacggttcaagcaaacagcaagttttctatttcgagtaaagacgtaatttcaccattttggccgggctggtctcgaactcccgacctagtgatccgcccgcctcggcctcccaaagactgctgggagtacagatgtgagccaccatgcccggccgattccttccttttttcaatcttattttctgaacgctgccgtgtatgaacatacatctacacatacacacacacacacacacacacacacacacacacacacacacacmccccccgtagtgataaaactatgtaaatgatatttccataattaatacgtttatattatgttacttttaatggatgaatatgtatcgaagccccatttcatttacatacacgtgtatgtatatccttcctcccttccttcattcattatttattaataattttcgtttatttattttcttttcttttggggccggcccgcc

SEQ ID NO: 797015 - DNA, 610 bp, Homo sapiens
agacggtgacattttcacgaaggagccacagcccgcatcaccccctgaaagctctgaagttgcgcacgggtgggtcacgcagcaggtggatgtctcagttcccatagagtttagcagagcaggcggctccctgggctggaagaggtgcgatgctctggaaaccccccgcgggtgtgtatgtgagaggacaccgagatgttcagcgggctgttcagtgaggaccagacccctccgatttgagcaagggaggtgcacttcgcagggtcacaccgtcctcatcgcccagcctagacctgcccctcaagtccttctgcggactcccttggcgagggggtggcacagaatcagcatgtggcatcgcttaggaaaggacgagtccacaccgccctgtccctccctccagggctgcgcaccacggggkaggacagacagcgcatgctggttttgtagttagcaggtcggcgaccaatgggctggaaaccgttaagacaccataactcccagcactcctagctagggacgcgcctccctatccttcgcttccatactacacaccgcccccaaacccagcgcatgctgagattgtagtccgttagcctcgcgaccaatg

SEQ ID NO: 797016 - DNA, 538 bp, Homo sapiens
tgaggattagggggtgtgttggggctgaaaactgggtcccctatttttgatacctcagccgacacatcccccgaccgccatcgcttgctcgccctctgagatcccccgcctccaccgccttgcaggctcacctcttactttcatttcttcctttcttgcgtttgaggagggggtscgggaatgagggtgtgtgtggggagggggtgcggggtggggacggaggggagcgtcctaagggtcgatttagtgtcatgcctctttcaccaccaccgccaccaccgaagatgacagcaaggatcggctaaataccgcgtgttctcatctagaagtgggaacttacagatgacagttcttgcatgggcagaacgagggggaccggggacgcggaagtctgcttgagggaggaggggtggaaggagagacagcttcaggaagaaaacaaaacacgaatactgtcggacacagcactgactacccgggtgatgaaatcatctgcacactgaacacccccgtcacaagtttacctatgtcacaatct

SEQ ID NO: 797017 - DNA, 587 bp, Homo sapiens
ctgtggcgagcccgattctccctcttgggtggctacaggctagaaatgaatatcgcttcttgggcggaggggcttccttaggccatcaccgcttgcgggactacctctcaaaccctcccttgaggccacaaaatagattccaccccacccatcgacgtttcccccgggtgctggatgtatcctgtcaagagacctgagcctgacaccgtcgaattaaacaccttgactggctttgtgtgtttgtttgtttctgagatggagtcttgctytgtcccccaggctggagtgcagtggcgtgatctcagctcactggaacctctgcctcctgggttcaagtgattctcctgtctcagcgccaccatggccggctcattttttttttttttttttttggtagacacggggtttcaccctctttcattggttttcactggagattctagattcgagccacacctcattccgtgccacagagagacttctttttttttttttttttttaagcgcaacgcaacatgtctgccttatttgagtggcttcctatatcattataattgtgttatagatgaagaaacggtattaaacac

SEQ ID NO: 797018 - DNA, 598 bp, Homo sapiens
tctccctcttgggtggctacaggctagaaatgaatatcgcttcttgggcggaggggcttccttaggccatcaccgcttgcgggactacctctcaaaccctcccttgaggccacaaaatagattccaccccacccatcgacgtttcccccgggtgctggatgtatcctgtcaagagacctgagcctgacaccgtcgaattaaacaccttgactggctttgtgtgtttgtttgtttctgagatggagtcttgctctgtcccccaggctggagtgcagtggcgtgatytcagctcactggaacctctgcctcctgggttcaagtgattctcctgtctcagcgccaccatggccggctcattttttttttttttttttttggtagacacggggtttcaccctctttcattggttttcactggagattctagattcgagccacacctcattccgtgccacagagagacttctttttttttttttttttttaagcgcaacgcaacatgtctgccttatttgagtggcttcctatatcattataattgtgttatagatgaagaaacggtattaaacactgtgctaatgatagtgaaagtgaagac

SEQ ID NO: 797019 - DNA, 587 bp, Homo sapiens
ctgtggcgagcccgattctccctcttgggtggctacaggctagaaatgaatatcgcttcttgggcggaggggcttccttaggccatcaccgcttgcgggactacctctcaaaccctcccttgaggccacaaaatagattccaccccacccatcgacgtttcccccgggtgctggatgtatcctgtcaagagacctgagcctgacaccgtcgaattaaacaccttgactggctttgtgtgtttgtttgtttctgagatggagtcttgctctgtcccccaggctggagtgcagtggcgtgatctcagctcactggaacctytgcctcctgggttcaagtgattctcctgtctcagcgccaccatggccggctcattttttttttttttttttttggtagacacggggtttcaccctctttcattggttttcactggagattctagattcgagccacacctcattccgtgccacagagagacttctttttttttttttttttttaagcgcaacgcaacatgtctgccttatttgagtggcttcctatatcattataattgtgttatagatgaagaaacggtattaaacac

SEQ ID NO: 797020 - DNA, 670 bp, Homo sapiens
tcaccgcttgcgggactacctctcaaaccctcccttgaggccacaaaatagattccaccccacccatcgacgtttcccccgggtgctggatgtatcctgtcaagagacctgagcctgacaccgtcgaattaaacaccttgactggctttgtgtgtttgtttgtttctgagatggagtcttgctctgtcccccaggctggagtgcagtggcgtgatctcagctcactggaacctctgcctcctgggttcaagtgattytcctgtctcagcgccaccatggccggctcattttttttttttttttttttggtagacacggggtttcaccctctttcattggttttcactggagattctagattcgagccacacctcattccgtgccacagagagacttctttttttttttttttttttaagcgcaacgcaacatgtctgccttatttgagtggcttcctatatcattataattgtgttatagatgaagaaacggtattaaacactgtgctaatgatagtgaaagtgaagacaaaagaaaggctatctattttgtggttagaataaagttgctcagtatttagagctacctaaatacgtcagcatttacactcttcctagtaaaagctggccgatctgaataatcctcctttaaacaaacacaatttttgata

SEQ ID NO: 797021 - DNA, 575 bp, Homo sapiens
tggatctgcccgccccggcctcccaaagtgctggggtgacaggcgtgagccatcgtgactggccggctacgtttatttatttatttttttaattattttacttttttttagttttccattttaatctatttatttatttacatttatttatttatttatttatttacttatttatttattttcgagacagactctcgctctgctgcccaggctggagtgcagcggcgtgatctcggctcactgcaagctccgcctcccgggttcacgccattctcctgcctcagcctcccaagtagctgggactacaggcgcccgccaccgtgcccggctaactttttgtattttgagtagagatggggtttcactgtggtagccaggatggtctcgatctcctgaccccgtgatccgtccacctcggcctcccaaagtgctgggatkacaggcgtgagccaccgcccccggcctatttatctatttattaactttgagtccaggttatgaaaccagttagtttttgtaattttttttttttttttttttttttgagacgaggtttcaccgtgttgccaaggctt

SEQ ID NO: 797022 - DNA, 616 bp, Homo sapiens
cagtggatctgcccgccccggcctcccaaagtgctggggtgacaggcgtgagccatcgtgactggccggctacgtttatttatttatttttttaattattttacttttttttagttttccattttaatctatttatttatttacatttatttatttatttatttatttacttatttatttattttcgagacagactctcgctctgctgcccaggctggagtgcagcggcgtgatctcggctcactgcaagctccgcctcccgggttcacgccattctcctgcctcagcctcccaagtagctgggactacaggcgcccgccaccgtgcccggctaactttttgtattttgagtagagatggggtttcactgtggtagccaggatggtctcgatctcctgaccccgtgatccgtccacctcggcctcccaaagtgctgggatgacaggcgtgagccaccgcccccggcctatttatctakttattaactttgagtccaggttatgaaaccagttagtttttgtaattttttttttttttttttttttttgagacgaggtttcaccgtgttgccaaggcttggaccgagggatccaccggccctcggcctcccaaaagt

SEQ ID NO: 797023 - DNA, 594 bp, Homo sapiens
aatacaatacaatacaatacaatacaatacaatacaatacaatacaatacaatacgccgggcgcggtggctcatgcctgtcatcccgtcactttgggatgccgaggtggacgcatcacctgaagtcgggagttggagacaagcccgaccaacatggagaaatcccgtctcaattgaaaatacaaaactagccgggcgcggtggcacatgcctataatcccagctgctaggaaggctgaggcaggagaatcgcttgaacctgggaagcggaggttgcagtgagccgagattgcgccatcgcactccagtctgagcaacaagagcgaaactccgtctcaaaaataaatacataaataaatamatacatacatacatacatacatacatacatacatacataaattaaaataaataaataaaataaaataaataaatgggccctgcgcggtggctcaagcctgtcatcccctcactttgggaggccaaggccggtggatcaagaggcggtcagaccaacagggccagtatggtgaaaccccgtctctactcacaatacacaacattagccgggcgctgtgctgtgctgtactgtctg

SEQ ID NO: 797024 - DNA, 510 bp, Homo sapiens
cgccgccggcggcaccgcgcggcacccggggcggccgaccggccctcggcgatccccgcggctccccccaccaccgccgccgccgcagtcgcggccggtcccccggaaccgtctcctcccccgcacgcgccgcaggccgacccccggaaccctccgggaagcccaccgggccccacgcggggcgccaccgacccggtccccaaggcgcgcgccgggggacgcggacgccrggccgatcagtggccggcggcggcgccccacgaggcggtgccgggttcggtcccaggcggggccaccaacggacgtgaagccggtgagccgctcggggggaagaagaggatcggcgggcggcgggcggggaagagggcacagacgggcgagggccggggaccgcgagggcaagggcacccgggagcccgcagaggcggcggctcggggagaaacctcaggcacggccgggccaccaggaaaacacggccgcgggatcccaccgccacagacacgagggcg

SEQ ID NO: 797025 - DNA, 336 bp, Homo sapiens
ggaaccctccgggaagcccaccgggccccacgcggggcgccaccgacccggtccccaaggcgcgcgccgggggacgcggacgccgggccgatcagtggccggcggcggcgccccacgaggcggtgccgggttcggtcccaggcggggccaccaacggacgtgaagccggtgagccgctcggsgggaagaagaggatcggcgggcggcgggcggggaagagggcacagacgggcgagggccggggaccgcgagggcaagggcacccgggagcccgcagaggcggcggctcggggagaaacctcaggcacggccgggccaccaggaaaacacggccgc

SEQ ID NO: 797026 - DNA, 510 bp, Homo sapiens
cgccgccggcggcaccgcgcggcacccggggcggccgaccggccctcggcgatccccgcggctccccccaccaccgccgccgccgcagtcgcggccggtcccccggaaccgtctcctcccccgcacgcgccgcaggccgacccccggaaccctccgggaagcccaccgggccccacgcggggcgccaccgacccggtccccaaggcgcgcgccgggggacgcggacgccgggccgatcagtggccggcggcggcgccccacgaggcggtgccgggttcggtcccaggcggggccaccaacggacgtgaagccggtgagccgctcggggggaagaagaggatcggcgggcggcgggcgsggaagagggcacagacgggcgagggccggggaccgcgagggcaagggcacccgggagcccgcagaggcggcggctcggggagaaacctcaggcacggccgggccaccaggaaaacacggccgcgggatcccaccgccacagacacgagggcg

SEQ ID NO: 797027 - DNA, 470 bp, Homo sapiens
ccataggttgactccttgagtcccctaggccattgcactgtagcctgggcagcaagagccaaactccgtccccccacctccccgcgcacataataactaactaactaactaactaactaactaaaatctctacacgtcaccyataagtgtgtgttcccgtgaggagtgatttctaagaaatggtactgtacactgaacgcagtggctcacgtctgtcatcccgaggtcaggagttcgagaccagcccggccaacgtggtgaaacccccgtctctactgaaaatacgaaatggagtcaggcgccgtggggcaggcacctgtaaccccagctactcgggaggctggggtggaagaattgcttgaacctggcaggcggaggctgcagtgacccaagatcgcaccactgcactacagcctgggcgacagagtgagacccggtctccagataaatacgtacataaataaatacac

SEQ ID NO: 797028 - DNA, 470 bp, Homo sapiens
ccataggttgactccttgagtcccctaggccattgcactgtagcctgggcagcaagagccaaactccgtccccccacctccccgcgcacataataactaactaactaactaactaactaactaaaatctctacacgtcacccmtaagtgtgtgttcccgtgaggagtgatttctaagaaatggtactgtacactgaacgcagtggctcacgtctgtcatcccgaggtcaggagttcgagaccagcccggccaacgtggtgaaacccccgtctctactgaaaatacgaaatggagtcaggcgccgtggggcaggcacctgtaaccccagctactcgggaggctggggtggaagaattgcttgaacctggcaggcggaggctgcagtgacccaagatcgcaccactgcactacagcctgggcgacagagtgagacccggtctccagataaatacgtacataaataaatacac

SEQ ID NO: 797029 - DNA, 606 bp, Homo sapiens
tagctatattaaaaatttaatcaacagtcacaaaagcagactaataaaggagaaaaaattacacaattgatgacattgtagttataaatattgagtgatgaaaacaaattttttaagcagaatggaggaaaaagtatgggaagtactgcacatggtcaagtggaccattatatttatgaaaggagtcttacaaaaacaatataggagaaaagtaataaagaggttatttttaaaaagtagctgagaaatccccacatggcaagataattaaacaagaagaaatacttccaaacaaaaaccttcaactggagtaatatcacttcagaaataaaaaaactaaacctttccaaataaataaaagttgattgtgttactaaccactagaacagtcctaaaggaagtgtaaaagagtctatcacgtccaaaaawgaaatgatgctgcagagcatcataacagcacatgaaaatagaaagctctctattaaaggtaaatatataaacaggtaaagaaatctctactgtcataatcatggtgcacaaaactttcaaaatattgccatggagtttaaaacatgaggcagaaatctgcataaatttgtgatcata

SEQ ID NO: 797030 - DNA, 636 bp, Homo sapiens
aaaatgattactcagtgaaacagtaggaaagtgtaaaggtttaataggagaagccggaatatattccaaaagggttgtgaaagccgtactgtaaatagtagtttctgaatttatctgcttttatgtatccagaacctcttggttgtcaacattcttttaatttttttgtcaatctgctatctatgtggcaaaaaaacatgtttctatttcaatttttcaactgatatatttgagttacctttcagttgatttatacttatttgagttttctgttccctcagttaatccgctcaattccttggccctgtgaggggtttctctcaccttggagtccccaagcactgacacctttgtcaggtgtrgggttgctgtagttatttctcaacactccctttaaggttttaaaagacccagttcagttgctttaagtcaaaagggttgtcttagggtatcttatcctgtgccctgtctctaaaacagaaagaaagtgagccttccccatgcccttccccctaagtcagggacagacatagagcctcaggtagcttaaagggaatttcatgcaacccccaccgtggaagattctctttcttacttgtgtttttctgagcagccatttgacatcacaaagcttta

SEQ ID NO: 797031 - DNA, 587 bp, Homo sapiens
tcaggtgtggggttgctgtagttatttctcaacactccctttaaggttttaaaagacccagttcagttgctttaagtcaaaagggttgtcttagggtatcttatcctgtgccctgtctctaaaacagaaagaaagtgagccttccccatgcccttccccctaagtcagggacagacatagagcctcaggtagcttaaagggaatttcatgcaacccccaccgtggaagattctctttcttacttgtgtttttctgagcagccatttgacatcacaaagctttattttctcatttgtaggctgagtatgtttttttgggaattctctgggataatgctcttcataaagattattaatacaagtgggtgctgttgtcttacagctgatatgatatcgtgaaggccttgamtgtattcatggattaattattctctacctccacattaaatttgatatcagaggcctaaaacctttttcaccataaacacccatgtcctccacatgcccaagtctctgaaggatggagatttcctcatccaagctccacattccaagcctctggtgtttcatggtcttgccatgaaaagt

SEQ ID NO: 797032 - DNA, 595 bp, Homo sapiens
cacagccactttgctgcacccaacccggaccttccagcctccttggcaccgtcaggggaaaactgtctactaaagcctcagtaatggtggactccactccctccaactgacctcaattggcccaggtcaacttcagactgctgtgctggcagcgagaatttcaggatgaggaacgcattagctgtttgtgattttcatgtctgttgcagggatttgacccattgttagtgctagatttggagtcttaaaaaacagatttatcttactgaactcaaagtacaacttgaagatgtactcagctgtttacttaaattaaagcrggagaaaatgtatctttgcagatctatttttatgtcacttgcttttagacacgagattgtctctggcacagtaattcaacttagtctatgtcaaaaacatagcctgaaaatgctcaaaaaaaattatgaatagcggattgtattctatgtgttctcaaatttcttctatgatgtaaaatatataacataatgttttaccttggatttctaacctcagccctcagccattttcccaattttttttttttttgttttgagacggagtcttgctctgt

SEQ ID NO: 797033 - DNA, 610 bp, Homo sapiens
ttaactacagagaacagaactctgtgcttccttttagtatgtccttgacctcacaaaaataattcatgaaatcttatatttattttataaattaatttaatgaaacaaaatttgtgcatggctaaatattacttgttgagtacaatttagaatttctactgtcattttagtgtcctaaaagatatgagctgttgaatttctgctctcataaaatgaatgatattgttaggcctaaacccttgccatttattttccccctctgtcatacagtgtgtatctttggttcactgctgaaaaattttattaatttttctytcttgctagtagtcatactttctaataaagttatcattacttgtgtttatttagttactgtatgttaaacatttgatttctgatggtcttaatgtcatttaatataattgtaaatatttcaatttgtcattattaacaaatttctgtattatatgttttagactcagctattaagtatatgtgggtaaatgacttagaataatttctaaaacattgtaggggctactaagtactaataaccctgattcattaaatttttattccttataatattctttattgactaaattatttt

SEQ ID NO: 797034 - DNA, 629 bp, Homo sapiens
aacttctaaattaatggcctgacaattagatcagcagctaagataaatttcagtttgcagccccaaagaagatgttcttaattagacagttaatcattttcaatatggaagcctaaacacgtagaatgtggcaataacccggaactctcagttctgacaattgagtgaagtaatcaccccagattcaggttcctcattggctgacaatgagatcaaacacccacaccagcccagtgaacaccatgaggtgtcatcttccctggcccattagtgaaccaggaacagatatttagaaaatattcagtaaattggggagtcccacagagtcagaaagtttgcttgagatagtagagggtggcataaaatttctaccgaatatgaattttaatttttactttagtgycgtttctattttagtctaatttccttctagaatatgttatttctatttaccaagtggcctcctgtggtctttttcatagagttcaaatcgacccatctaaaaacagaaagatcaagctaacgacctccctcaggggtcagaattcagtttcacagctctgtagcaagctcattgttgacttacaaattagtgtaaccaatagtaacgtcatggtgaccataactcc

SEQ ID NO: 797035 - DNA, 609 bp, Homo sapiens
aattttaatgaaagctctttctgcatctattacaataatcatgaggtttttgtctttcgttctgtttgtattatgaatcacatttattgatttgcatatgttgaaccaaccttgcatcccagggaaaaagcctacttgattgtggtggataggctttttggtgtgctgctggatttggtttgccagtattttatggagaatttttgcatcaatattcatcaaagatatgaaatttttctttcttttgcttttcttccaggttttgatatcagaagggtgctggcctcataggatgagtgaggaagatgatcctcctcaaatttttggkagtttcagtaggaatgataccaaattcttctttgcatatccagtagaatttggctgggaattcgtcttttcctgggctttttaaaattgatagtctatttattacagattcaattttggagcatgttattggtctgttcagggattcaatttcttcctggttcagtcttggaaaggtgtacatgtccaggaatttatctatttgttctaggtgttgtagtttttttgcataaaggtgttcatcatattctccgatgtttatttctatttctgaggagccag

SEQ ID NO: 797036 - DNA, 605 bp, Homo sapiens
aactggtctgtatacctcagtgtgtttttttagtggctaataaaggtttttttcacctatatttagttcttccttcaggagctcttgtaaggcatgtcttgtagtaatgaatttcctcagcatttgcctgtttaaaaagaactttatttctcctttacttatgaagcttagtttggccaaatacgagattgttgattggaatttattttcttcaaggaggttaaatattggtattggtctcttctggcttgtaggatttctgctaaaaggcgtacttttacactgataatctttcctttgtggttgacctccctttcctctctagctgcatttgacattttttcttttatttcatgcttgaacaatctgataactatgtgttttggtgattattatattrtgaagtatcttactggagttttctgcatttcctaaatttgaatgctggcctctctagccagcattccccaggttggggaagttctcatgaatgatatcctaaaatatgtttttcaaatggcttccattctccccacctgtttcatgaacaccagtgggtcatacctttggtctctttacataatcttatatttttcagaggcttg

SEQ ID NO: 797037 - DNA, 530 bp, Homo sapiens
atatttttcagaggcttgggggtttttattactcttttttatttctgtctgtatgtcttacttcacataaacagtcttcaaactctgagattcttccttagctttgtctattctactattaatagttgtgaatttcttataaaaaaatttagtgtgatttttttagctctctcaggttagttatgctcttaatactggctcttttgtctctcagctcctgtatcatttcattatgattcttaacgtttttgaattgagtttcaagttacttctgcattttaatgatctttatttctattcatattctgaatttgatttctgtaattttagctatcttggactgatttataaccttactggagaggtastgtgaccatttgaaggaaaagaggaactcaggttttttgagttgtcagaggttttgtgcttgttctttcttatctttctggggtgatatttctttaatatttgaagttgtcaacttttggatttttccttttattctgcttgatgaccttaagggtttaatt

SEQ ID NO: 797038 - DNA, 588 bp, Homo sapiens
gcttgatgaccttaagggtttaattgtgttataaggttggctcagtcaagtggttttgtgtgtattcatgcaggcgaaggtggctgctcagggctgaggagagtatgctgttttttgtgcttagttgtactcaaatgacagtgttgacaaaggagcagggtgctggtgttgtggggcagatggcctctgtttcccccaagattctgtctgcagtggtggtatagcaggagagggrgcctggagtacactcctaccaacagcagtgccagggcagaatgcatatgcacatgtgcactgacaggacagggaaagcaagatccttccatgcacacacacacacacacacacacacaccagcatagtgatgtgtggggtggcaatgggccttggggggaagctgcagtgaggagaggcagcaggcaggctgatgcctggatggggtcaccccactggagctgtctactagtcagacatgatctgccagttcaggatctatgatgcaggcccccagggtactcaaggctgcactgcaagcatgcagggccgaattggggtcgcaggagaggccagcacaccaacgcaagctca

SEQ ID NO: 797039 - DNA, 585 bp, Homo sapiens
tatgtcaggaaaaaacctcaaaatcactaaagtaagtaaaataaaccaaatgcaaaagggcagataatttatgatttcacttaaaataacttttaataaaaggcttatatataaaaacaggctaatgattgcctatgaccagggtaatgaaatcagtaagtacaaaagagattaatttctttttccatagtgataaggtgatttcaaaattagattgyggttatgggtgtctgtaaatacactttaagaacttggaattgtacacttaaaacatgtgatggttttgttataagattatatccctctaaaatgtttccaaatgaaactgttgacttttggagaactaagtcacagactgtaaaaccaaacccatttattgttcatctcaaggcatgttaaataaagaggaaaagacaaagatatagttataacattaaaatcttcatggcaaatagttataagaaaaaaattacaattgtaaaatgtattaatagacataaattacctgcttagatttaccaggccagaaatgtaaattaaataatagtacactattgaagaccactctgagtcactgattattag

SEQ ID NO: 797040 - DNA, 631 bp, Homo sapiens
gcacgtcaccagcaggtctcatttttcagctctgtgcaccaggtggcatgtctagcaaaatgtcccctctcatgtcaggttttttctatgaactcagaatgaccactgtcccttagtatgcagccctgcagtggacccaaaaatgacaatcaatcaggtccagagttgctcattatggcctttccagaatgtaattatctaaggacaattctcccccttgtaaaattaagaaagtatcagaatatttgcctaatttttgataacatcatactgtgagccacaaaaaagcaagaatttaaaatgtaagggattayctggatcctagggcacagaaatacacctcaaatagaatagtttcacacacgattttatatgtggacttcctgtgtggaagaaaagaatgtgggggtcaatagtagagaagtctgtatgtagtggaattttaagaaatcagagaggccgatggggttcaggagggtatttattaattatttaggtgcactggtccagtggattaacatccaaagaatgagtcctgaacaaagagttaagttaccttttaagcatttcatgggtggggagagatttgtgcagggagaatcatactacagaagcaagaaacaaagacagt

SEQ ID NO: 797041 - DNA, 631 bp, Homo sapiens
gcacgtcaccagcaggtctcatttttcagctctgtgcaccaggtggcatgtctagcaaaatgtcccctctcatgtcaggttttttctatgaactcagaatgaccactgtcccttagtatgcagccctgcagtggacccaaaaatgacaatcaatcaggtccagagttgctcattatggcctttccagaatgtaattatctaaggacaattctcccccttgtaaaattaagaaagtatcagaatatttgcctaatttttgataacatcatactgtgagccacaaaaaagcaagaatttaaaatgtaagggattatctggatcctagggcacagaaatacacctcaaatagaatagtttcacacacgattttatatgtggacttcctgtgtggaagaaaagaatgtgggggtcaatagtagagaagtctgtatgtagtggaattttaagaaatcagagaggcygatggggttcaggagggtatttattaattatttaggtgcactggtccagtggattaacatccaaagaatgagtcctgaacaaagagttaagttaccttttaagcatttcatgggtggggagagatttgtgcagggagaatcatactacagaagcaagaaacaaagacagt

SEQ ID NO: 797042 - DNA, 621 bp, Homo sapiens
ttctaagaatttcccttgctttagaggaattagaaagaaggatggcttgattgcttttaacagacatgcccctgcccattttgctggcagttgccaatatgcccatgctccacagatccaatataggccagagggtgcctttcaagcatttgaatcatctacctgatgccaagtgcagctkagagtaaggaatccagagaaagtgtttggatctggtaagtaggagtcattctgggcatttcttcatagagttttgtttttagtctcgtaataatactgttgccctaggcaggttgtttttcctactgcctctgtgaaagcctttccccatcgagtgatacagtactttccagttatggagatttctaacaatcaaacactggctgaggctgttggttcactggcagggttaagcagagtgaagttatcttgtggcattaattcctttgcctcccattgccactcattctccatattagtttctctacatacatagcatgaagaaatttttaagctgccatctgtgtcttcacctagttgagcaaataagtttttggttgatgggggaacctcgggcactggctgatcaaaatgcttacagaatgacttggtattgagggg

SEQ ID NO: 797043 - DNA, 533 bp, Homo sapiens
ggcagttgccaatatgcccatgctccacagatccaatataggccagagggtgcctttcaagcatttgaatcatctacctgatgccaagtgcagcttagagtaaggaatccagagaaagtgtttggatctggtaagtaggagtcattctgggcatttcttmatagagttttgtttttagtctcgtaataatactgttgccctaggcaggttgtttttcctactgcctctgtgaaagcctttccccatcgagtgatacagtactttccagttatggagatttctaacaatcaaacactggctgaggctgttggttcactggcagggttaagcagagtgaagttatcttgtggcattaattcctttgcctcccattgccactcattctccatattagtttctctacatacatagcatgaagaaatttttaagctgccatctgtgtcttcacctagttgagcaaataagtttttggttgatgggggaacctcgggcactggctgatcaaaatgcttacagaatgacttggtattgag

SEQ ID NO: 797044 - DNA, 621 bp, Homo sapiens
ttctaagaatttcccttgctttagaggaattagaaagaaggatggcttgattgcttttaacagacatgcccctgcccattttgctggcagttgccaatatgcccatgctccacagatccaatataggccagagggtgcctttcaagcatttgaatcatctacctgatgccaagtgcagcttagagtaaggaatccagagaaagtgtttggatctggtaagtaggagtcattctgggcatttcttcatagagttttgtttttagtctcgtaataatactgttgccctaggmaggttgtttttcctactgcctctgtgaaagcctttccccatcgagtgatacagtactttccagttatggagatttctaacaatcaaacactggctgaggctgttggttcactggcagggttaagcagagtgaagttatcttgtggcattaattcctttgcctcccattgccactcattctccatattagtttctctacatacatagcatgaagaaatttttaagctgccatctgtgtcttcacctagttgagcaaataagtttttggttgatgggggaacctcgggcactggctgatcaaaatgcttacagaatgacttggtattgagggg

SEQ ID NO: 797045 - DNA, 600 bp, Homo sapiens
ttgacaattagtagtggaactccaagacctgctccttgtctatcaactcgtaatagtgctgtctgtcctgtagaccaaaaaggtagctctggctttaagatagtaaaatttaaaggatcgcatgtccttgtcttacaatctggtttttaggattatgaacatacgtggcatggcagtcatcaaagaagaaataggccctttttagaagggtgggatttctttggtttgagctataagctttccttctgtttctccctctgatttaatatgtacctcaaaatagaattaatagggtaagagcccaggctcataacatacatatagctgattatttcctcagtcacagactgaataggtggtctggttgtatgtgcatattcctaatttgcttcctgtacattcatagtaggtatggtacagtagagttttaactgtggtattttttatccaggtaatrtgtacacagcgtggacatccttcaagagatttatcccctttcagtataagcataaatggtaacaacattgttgtatgtaatagaaacatgcttacactacacatgggcacaaaaactttcctctgggcatagacatttgcagc

SEQ ID NO: 797046 - DNA, 420 bp, Homo sapiens
ttccattcataatcaggtatcttaagtagacaaactcatagaaaaaaaaagttagaatggtgtttgtcaaggactgaagagatggtaaaatgggcaattgtcttaaaagacatttaatgttagttttgcaagacatagaagttctacagatcttttgcataactatgtgaatgtacttaacgctaatgaaatatacacttaaaaagaattaaaatggtaaattttacattatgtgtttttaccacaatcgcartttttaaaaggaaaaatatggacttataaagctttccaaaaattaaattttgttcacaaaagattttctctcacacaaaggaagtatagatttataattaaacacattgtgaaattaagattatttcaatgactattcatccacacaagataagacaaccactgaaa

SEQ ID NO: 797047 - DNA, 631 bp, Homo sapiens
taagagtatgataccaacctggggaacatggcaaaaccctgactctactaaaaacacacaaatttgttgggcatagtggtaggcacctgtaatcccagctacttgggagactgaggcacgagaatcgcctgaactcagaggtggagcctacagtgagccgagatagtgccactacactccatcctgggcaacagagcaaggttctatcttaaaatatatacacatacagagtttaaagtctgtgctctcctctcctyagctgccttttgactgtgtaagtgtatgtttgggaagggaggggtaggatgaggacaggccagcagagagtcaccagcactggctaaaggtctcagaccaaattttatactcttgaccaggagaaacttctctgttattctaatcacattaaactcaagcattttctttttttctttctttttttttgagaaatcacatcgaacttccaaaattataaagttgaaaatatgtaataattgacaattggaaacaagaaagaggattagctataaaaataactcaggacaatgtatttatcatgaaaagatggtcttggtggaagaaagtttcatgcccagccagcccattcttcaatatctgctaaaaaaaaaaa

SEQ ID NO: 797048 - DNA, 631 bp, Homo sapiens
taagagtatgataccaacctggggaacatggcaaaaccctgactctactaaaaacacacaaatttgttgggcatagtggtaggcacctgtaatcccagctacttgggagactgaggcacgagaatcgcctgaactcagaggtggagcctacagtgagccgagatagtgccactacactccatcctgggcaacagagcaaggttctatcttaaaatatatacacatacagagtttaaagtctgtgctctcctctccttagctgccttktgactgtgtaagtgtatgtttgggaagggaggggtaggatgaggacaggccagcagagagtcaccagcactggctaaaggtctcagaccaaattttatactcttgaccaggagaaacttctctgttattctaatcacattaaactcaagcattttctttttttctttctttttttttgagaaatcacatcgaacttccaaaattataaagttgaaaatatgtaataattgacaattggaaacaagaaagaggattagctataaaaataactcaggacaatgtatttatcatgaaaagatggtcttggtggaagaaagtttcatgcccagccagcccattcttcaatatctgctaaaaaaaaaaa

SEQ ID NO: 797049 - DNA, 631 bp, Homo sapiens
taagagtatgataccaacctggggaacatggcaaaaccctgactctactaaaaacacacaaatttgttgggcatagtggtaggcacctgtaatcccagctacttgggagactgaggcacgagaatcgcctgaactcagaggtggagcctacagtgagccgagatagtgccactacactccatcctgggcaacagagcaaggttctatcttaaaatatatacacatacagagtttaaagtctgtgctctcctctccttagctgccttttgactgtgtaagtgtatgtttgggaagggagggrtaggatgaggacaggccagcagagagtcaccagcactggctaaaggtctcagaccaaattttatactcttgaccaggagaaacttctctgttattctaatcacattaaactcaagcattttctttttttctttctttttttttgagaaatcacatcgaacttccaaaattataaagttgaaaatatgtaataattgacaattggaaacaagaaagaggattagctataaaaataactcaggacaatgtatttatcatgaaaagatggtcttggtggaagaaagtttcatgcccagccagcccattcttcaatatctgctaaaaaaaaaaa

SEQ ID NO: 797050 - DNA, 588 bp, Homo sapiens
tctcccatgcagaacacatgcctgacaaatttttatatttttagtggagactgggtttagccatgttggccaggctgatctcaaactcctgacctcaggtgatccttccatctcggcatcccaaagtgctgagattataggcatgaaacacccagccaggaggaggcatttctacaaagaaaacrtacaaatggcaaacagacatataaatgttgctaaacatcattaaacctcagagaaatgcaaatcagaactacaataagatattatctcactccagttaaaatgtcttatatcccaaagacagacaataacaagtgctgacgaggatgtggagaaaactttagtgcactcttggtgggaatgtaaattagtataaccagtataaaaaagtgtggaggttcctcaaaaagctaaaaattgagctgccacagctacaatgcaacctaacaatcccagtgatgggcattgacacaaaagaaagaaaatcggcttgttgctgcactgtttacaatagctaagatttgaaagcaaactgtctacaaatgaatgaatgtataaaaaaagtagtacatatatacattggag

SEQ ID NO: 797051 - DNA, 560 bp, Homo sapiens
attgagctgccacagctacaatgcaacctaacaatcccagtgatgggcattgacacaaaagaaagaaaatcggcttgttgctgcactgtttacaatagctaagatttgaaagcaaactgtctacaaatgaatgaatgtataaaaaaagtagtacatatatacattggagtagtattcagccataaaaatgagattttgtcttttacgacaacatggataaaagagaagagtatgttaagtgaaataagccaggcacagaaagataaacactgtgcgttctcacttattcgtgggatggaagaattaatacaactgaattcacggacatagagagcagaaggatggttttcagaggctaagaaagacagtggaggctgggggaaaggtgggsactgttaacgtgtacaaaaaaatagaataaataagacatattatttgatagcacaacgagatgactctggtcaataataatgtaattgtacattttaaactagctaagaaggaataatcacattttaacccaaagaataaatgcttgagtgggtgggtatcccactctc

SEQ ID NO: 797052 - DNA, 632 bp, Homo sapiens
agggatccagtttcagctttctacatacggctagccagttttcccagcaccatttattaactagggaatcatttccccatttcttgtgtttgtcaggtttgtcaaagatcagatggttgtagatatgtggcattatttctcagggctctgttctgttccattggtctatatctctgttttggtacaagtacaatgctgttttggtcactgtagccttgtagtatagtttgatgtcaggtagcgtgatggctccagctttgttcttttggtttaggattgacttggcaatgagggctcttttttagttccttatgaactttaaagtagttttttccaattctgtgaagaaagtctttggtagcttgatggggatggcattgaatctataaattaccttgggcartatggccattttcacgatattgattattcctacccatgagcatggaatgttcttccatttgtttgtatcctcttttatttcattgagcagtggtttgtagttctccttgaagaggtccttcacgtccttgtaagttgggttcctaggtattttattctctttgaagcaattgtgaatgggagttcactcacgatttggctctctgtttgtctgttattggtgtataaga

SEQ ID NO: 797053 - DNA, 566 bp, Homo sapiens
tgcagtgggactaatgaaggaaacagctcaacccatgggaaaaagaagggcatggcaaccgcccacccgggagtaacacagaccaaagggaacctaccctgcccaaggaagtggtgagcaaatacgtgaccctgagaaaccacacttctcccatggatctttgcaactctcgggtcaggagattttctcgtaaacttattccaccagggcctttggtctgatacacagagctgcgtgttcccggcagaacaactgctcagacacaaacagaatcgcaggagctttacatackttggctctgagatctctggcaaaggtgactgcaactcagacaaggtgggaggttggatctccgtaaatgcccctagaaaggaagctgaatccatgggcctgagcagcatcagtgggccccacttccatgacgcctcacaggataagacctactggcttggaattccatccagcccccagcaacagcattgcaattacctgggatggaacaacgttcctggaggcaggggctggctgctatatttgctgtttggatgactcagccattccagcct

SEQ ID NO: 797054 - DNA, 214 bp, Homo sapiens
atcaagtaggctccatgtgtgggatgcaactttaattcaacgtacacaaatcaatatgtgatttatcacataaacagaactaaagacaaaagccacatgattgtctgaatagatgcagataaatctttgcatccataaaattcarcatccattcttgtaaaaactctcaataaactaggtattgaaaaaaacatacttcaatataataagaacc

SEQ ID NO: 797055 - DNA, 479 bp, Homo sapiens
cgcatcagaaagcttatccaccacaatcaagtaggctccatgtgtgggatgcaactttaattcaacgtacacaaatcaatatgtgatttatcacataaacagaactaaagacaaaagccacatgattgtctgaatagatgcagataaatctttgcatccataaaattcagcatccattcttgtaaaaactctcaataaactaggtattgaaaaaaacatacttcaatataataagaaccatgtatgacaaacccacagccaatatcatactgaaagggcaaaagctgaaagcattcccttttaaaacgggcacaagacaaggatgccctctctcatgamtcctatttcagatagtattggaagtactgggcagagcaatcaggtaagagaaaaaggcattcaaattgaaagaaaagaaattaaacaacacctgatgtcagacgacatgattctatatcttgaaaacccctattgtctca

SEQ ID NO: 797056 - DNA, 624 bp, Homo sapiens
tatagagttctacatactatctaatataaagtgtaaaattcagtgcttttcagtttatttacaatgctatgcaactgtcacccttatcaaattccaaaatagtttcatcaccctttcaccaaaaaaactccatatccattaagcagtaatttatcattcatccaccgaatttccttggtaaccactgattgactttctatctctagtactctctttctttctttccttttttttttttttttttttggtgtctcactctgtcacccatgctagagtgcagtggcacgatctcggctcrctgcaagctccacctccctggttcacgccattctcctgcctcagcctccagggtagctgggactacagatgcctgtcagcacgcccagctatttttctttgtatttttagtagagacggggtttcaccatgttagccagcatggtctcgatctcctgacatcgtgatctgcctgcttcggccacccaaagtgctgggattacaggcgtgagccatcacacccggcttctatttctagttttctattctagtcactttatagaaatataataatataatatgtgaccttttttctttggcttttctctttgagcgtgttttcattat

SEQ ID NO: 797057 - DNA, 624 bp, Homo sapiens
tatagagttctacatactatctaatataaagtgtaaaattcagtgcttttcagtttatttacaatgctatgcaactgtcacccttatcaaattccaaaatagtttcatcaccctttcaccaaaaaaactccatatccattaagcagtaatttatcattcatccaccgaatttccttggtaaccactgattgactttctatctctagtactctctttctttctttccttttttttttttttttttttggtgtctcactctgtcacccatgctagagtgcagtggcacgatctcggctcactgcaagctccacctccctggttcacgccattctcctgcctcagcctccagggtagctgggactacagatgcctgtcagcacgcccagctatttttctttgtatttttagtagagacrgggtttcaccatgttagccagcatggtctcgatctcctgacatcgtgatctgcctgcttcggccacccaaagtgctgggattacaggcgtgagccatcacacccggcttctatttctagttttctattctagtcactttatagaaatataataatataatatgtgaccttttttctttggcttttctctttgagcgtgttttcattat

SEQ ID NO: 797058 - DNA, 610 bp, Homo sapiens
acggccgggtactcctctgagacaaaatttccagaggaacaatcaggcagcaatatttgcttttcaccaatatccgctgttctgcagcctccactgctgatacccaggcaaacagggtctggagtggacctccagcaaactccaacagacctgcagctgagggttctgactgttagaaggaaaactaacaaacagaaagtacatccacaacaaaatcccatctgtacatcacaatcatcaaagaccaaaggagagaaaactamaaagatggagaaaaaacagagcagaaaaacggaaaattctaaaaatcagagtatctctccacctccaaaggaacacagctcctcaccagcaatggaacaaagctggacagagaatgactttgacgagttgagagaagaaggcttcagacgatcaaactactccgagctaaaggaggaagttcaaacccatggcaaagaagtgaaaaacctttaaaaaaattagatgaatagctaactagaataaccaatgcagagaagttcgtaaaggacctgatggagctgaaaaccaatgtacgagaagtacgtgatgaatgcacaagcctcagtagccaattcgatgaactgga

SEQ ID NO: 797059 - DNA, 610 bp, Homo sapiens
acggccgggtactcctctgagacaaaatttccagaggaacaatcaggcagcaatatttgcttttcaccaatatccgctgttctgcagcctccactgctgatacccaggcaaacagggtctggagtggacctccagcaaactccaacagacctgcagctgagggttctgactgttagaaggaaaactaacaaacagaaagtacatccacaacaaaatcccatctgtacatcacaatcatcaaagaccaaaggagagaaaactaaaaagatggrgaaaaaacagagcagaaaaacggaaaattctaaaaatcagagtatctctccacctccaaaggaacacagctcctcaccagcaatggaacaaagctggacagagaatgactttgacgagttgagagaagaaggcttcagacgatcaaactactccgagctaaaggaggaagttcaaacccatggcaaagaagtgaaaaacctttaaaaaaattagatgaatagctaactagaataaccaatgcagagaagttcgtaaaggacctgatggagctgaaaaccaatgtacgagaagtacgtgatgaatgcacaagcctcagtagccaattcgatgaactgga

SEQ ID NO: 797060 - DNA, 610 bp, Homo sapiens
acggccgggtactcctctgagacaaaatttccagaggaacaatcaggcagcaatatttgcttttcaccaatatccgctgttctgcagcctccactgctgatacccaggcaaacagggtctggagtggacctccagcaaactccaacagacctgcagctgagggttctgactgttagaaggaaaactaacaaacagaaagtacatccacaacaaaatcccatctgtacatcacaatcatcaaagaccaaaggagagaaaactaaaaagatggagaaaaaacagagcagaaaaacggaaaattctaaaaatcagagtatctctccacctccaaaggaacacagctcctcaccagcaatggaacaaagctggacagagaatgactttgacgarttgagagaagaaggcttcagacgatcaaactactccgagctaaaggaggaagttcaaacccatggcaaagaagtgaaaaacctttaaaaaaattagatgaatagctaactagaataaccaatgcagagaagttcgtaaaggacctgatggagctgaaaaccaatgtacgagaagtacgtgatgaatgcacaagcctcagtagccaattcgatgaactgga

SEQ ID NO: 797061 - DNA, 619 bp, Homo sapiens
atgatgtcatatcaaagactcagtgtagatctgtgctgctgtcaaattaaacattcagaattgactgtagccagactggcctttgggattcaaagttcatattgcttagcccgtgcattgcttctatttctgctactatgttcacctygtttataagcccattgggtgatgatgggggtgacagggaagtaagaatgacccatactcacggaacaagacattctgtccacatcattatcaaaatcatgctctgatacggttaccccttagtagggattcatatagaacagacatatctttatgtaatttacccagtgagagaagtttatccacaaaagtttttctatttttttttttttgccaggaattttgtaatcatgttccttccgtgtcattggtcatgtagccaattcatgggccacagcagtgttgcaggagtgagtatcataggatctcaaactcctgttcttaagcaatccttgcctcaacctcttaagtagctgagactataggtgcaccccacaacgcctagctaattttgttttatttttagtagagattagattttgctatgttttccaggctgttctcacactccccacctcaagcgattctccca

SEQ ID NO: 797062 - DNA, 611 bp, Homo sapiens
gatgctcaagctggagcccagtggagcaatctcggctcactgcaacattcgcctcctggtttcaagcgataaatgtatatttgattgcctcctttggagaggctaattagaaactccaaagaatgcaaccatttgtctcttaactacctttgaccaggaagtcccctcctcactttcagtcttcccgcgtttgctaatttgtcccgcctttgcagaccgaaccaatgttcatcttgcatactttgattgatgtctcatgtctccctagaatgtataaaacgataatgttctctgtttaccttaggcacatgtcctcagaacctcctgaggctgtcacgggtatgcgtcctgaaccttggttacgtaaactttctaaattaactgagacctctctcaagttttcagggttcacaacggaaagtgcattgtagctccaccctagggcttatcattaagaaaaactatcctawatctctgcagatacagtcaaaccggttgtatgtaaactgtatgaaactaaatgcacttattacaagtaaatgaataaatgctgagaaaaaaaatcatgaaccgctcacctttcaaagaagcaataatactatgaattatgt

SEQ ID NO: 797063 - DNA, 619 bp, Homo sapiens
aaaaagataaagatgcccgctttcactactattccacacaatactggaagtcttagccagagcaatcagggaagagaaaaataaaaggcatacaaattgaaagagagggagtcaagttatctctgtttctaaagtatgatcttatatctagaaaagtctaaatactcctccaaaaaactcttagatttgataaatgatttcagtaaagtttcaggattcaaaattaacatataaaaatcagtagtattttatacaaccataataatcaagctgasaacaaaatcaagaaggcaatcctgttcacattagccacaaaaaaatgcagggaaaacatatttaggatgtaaaatacccaggaataaagtgaaggaagtgagagatctctacaataaaaattatgaaaaattgatgaaataaatttatagaggccacaaatgtgagcagaatatctcatgctcatggatctgaagaattaatatcattaaactgaccatactgcacaaagcattctacagattgaatgccatccctattcaaaataatattgtaattttcacagaatttgaacaaacaatcctaaaattaatatggaaccaaaaaaaaagagcctgaatagcca

SEQ ID NO: 797064 - DNA, 508 bp, Homo sapiens
tttggatcccttgtaattccatatgaatttcagaataagcctatcaatttcaagaaaaatgacagcttggattttgagattgccctaaatatgtagctcaatgtaggaggtattgccatcttaacaacattaacaatccatgaacacataatgtctttgcatttatttaggtcttctttagcttctttcaacaatattttgtagttttcagtgtacactycttgcacctccttggttaaatttattcctaagtattttattatttttgatactattctaaatagaatcacagtttggattttgtcatttgcctcctcacagcatagtttaacaagcttctctgacctttgtaggtcagagaaattgcaaattggtaggtggaatttgtggtttcatcaaattcagcttttttttttttggtaaaacgatttctatttcataggtgtacctatcttaatgcacaaaatatttgtctctgctgtggcaaaagccattgatgatcattgcc

SEQ ID NO: 797065 - DNA, 599 bp, Homo sapiens
cacaagggcctttggtcccaagcacggagctgtgcagattttacgcagctgtttggctgcagactgcttaagactacctagttcctggggggaggggcagacgccatcccttcagctgcccgctgcttaagaggactgaattcccagggggagagggagcaccatcacttcagctgcctactgcttaagaggattgagctctcagggggaggggcagccgccataacttcagctgcccgctgcctaaggcaatggagctcttggggagaggggcagcagccatcactgccgctccagtctgccattttcccttgccggtgctggggagactgggcagtttggacccaggaggaattccccacagcgcagcacagyggctgtggcagattgtggccagactgcttctttaggccggtcacagacccatccctcctcaccagacagggcttacctgcaggaacttcaggaactccagccagaggtttacagaactctgaaatccctgggacggagcccctgggggaggggcagccacagcctctgcggatcagtggacttagtctgttccactgctggctctgaggaatcccggcagaatg

SEQ ID NO: 797066 - DNA, 585 bp, Homo sapiens
catttcctaaatttctttagattctaacactttctcttagtgctttccaatgtttgatattatttttaatgctttgtgtctagaactgaaatgtggtcttcctactgaggttagaaaatgacttatattttatttgttatagacaatttctaacaattctgcttaagaaaactagtagtccagcaaagtgtattttaagcctgtatatcacaaatatattcactctcacacacaaacacatacatgtattcatgtgcrcacacacacgctgcctgtagaaactggtatttgcattttttatgtctagggcagcatgcacactactcctttttatcttgcaattactgctttctcacaatgaaaatgaccatagagtcaaaccagaaagataatggaagctaggtacgcaaaataagtagaagaagaatgtaatgttctttcccttagatcagcggtccccaagatttttggcaccaggagctcgttttgcggaagacaatttttccatggaccagggagttggtggggtcgggggatggtttcaggatgattcaagcacattacatttattgtgcactttatttc

SEQ ID NO: 797067 - DNA, 613 bp, Homo sapiens
aatttgctgaagtcttgttcataaacttcctagttattgaatgtctattaagttgttttgacattcaagtttatttagcagatatttattgaggacccattatgttccaggaacactgttctaggtgcttgagaaacaagaatgaagaaaacaaataaacaaaacaaaaacatagatcccctgcatttaaaaagmtttgattctagtagtgagattaggtgataaatatttaagtatttaagtataataagtaaattatttactattttagaaaatgataagtgttatgaaagaaagtagaccattgtacacaggatgtggaatgtcaggaaatagagcaggatgagcaggatttagagtgatcaggatggctgttttagagtggcaggatgggcctcagtaacaatgtgagaattaagtcaagacttgaaataaatgaagggcctggccaagttcatgtccagaaaaaagagtccagtggacctgaaaatagagtgagagaataggatagcagtatgtaaaacgatagcagtaaagataagacccatcatgtaagcctgtataaagactggctttttctctgagtaacatgaggaattatttgcaggttatg

SEQ ID NO: 797068 - DNA, 622 bp, Homo sapiens
gttactcaggctggactcaaagtcttgagctcacctgattcttccacctcagccttccaagtagctgaaactacaggcacgtgtccctgtgccctggtcttttttgtaataaaagaatttattcaaaagcatgctttaaaaaaggttaaagttttcagttttataagggtggggtatgagtatttaggaatctgcaagttttatttaaatttatagttgagtattatccattctcttgtaacacaaactctgtgggataatgataaaattttattgatatttatttaatgagagacatgaatgtgtacaataatccctgagatcatggctgtcagtttctgctaaaccacagcctttttagtcaagcaattggctgagtttttctgtatttcactgtcagaaaccttcattyatgttaggtaaagatgatagacctaaatggaaaattaacactttccacttgtcataattcttaatgatagatcctaaagatcacagagcgggacactgaagggacaagcaatgtccatgttctctgggccccaagagctctgtgtgttttgcttctctccattcttgacctcactttcacaagccagtgcttgctcctcagtttttctga

SEQ ID NO: 797069 - DNA, 622 bp, Homo sapiens
taatttataaagagaaaaggtttaattggctcatatttctgcagactgtacaggaggcatggctacagaggcctcaggaaacttacaatcatggtggacggtgaagggtgaaagggaagccacaatgtcctacatggctggagcaggaggaagagagtgaaggaggaagtgctacacacttttaaatgaccagatcttgtgagaactcactcactatcatgagaacagcaaaggggaaatcacccccacaattcaatcacctctcatcaggcccctcctccaatactggggattaaaattcatcattagatttgggtggggacacaratccaaaccatagcaccatatgttctcattatttatctcccacatgtaagtgagaatattcggtattgggttttcagttcctgtgttagattgctaaggataatggcctccagcttcatccatgttcctgcaaaggacatgatttcactctttttgtggctgcatagtattccatggtgtatatgtaccacatttttgttatccagcctaccattgatgggcatttaggttgattccatgtctttgctattgtaaatagtactgcgatgaacatatgcatgcatgtgtctttatg

SEQ ID NO: 797070 - DNA, 669 bp, Homo sapiens
tatgagggattttttttttttttttttgagacagagtctcacttttttgcccaggctggagtgatctcgactcactgctagctccacctgccgggttcacgccattctcctgcttcggcctcctgagtagctgggactacaggcgcctgccaccatgcccggctaattttttgtatttttagtagagacggggtttcaccatgttagccagaaaggtctcgatctcctgacctcatgatccacccaccttggcctcccaaaatsctgggattaccggcatgatccaccgcacccagctgggaaatttttaaatttacgttttaatcttatatgtatctactttttatttatttcattttactttattttgtgagacatattcttttttttcttccaacttttatcttaggttccagaggtacatgtatgagtttgttacgtggataaatttcatgttgccagggtttgcagtatacagattattttgacacccaggtgctaagcatagtactcaataggtagcttttcaatcctcaccctcctctcaccctccatcttcaagtaggacccagtgactattgcttccttctttgtgtccatgtgcactcaatgtttagcccccacttataaataagaagatgcagtatttagttttctgttcctgattaa

SEQ ID NO: 797071 - DNA, 643 bp, Homo sapiens
tttaagtggcatacaaaaatggctacaaagagatcactaaggtgacgctaataatgatgacgaagggaaagggaaacaatggctctcctgtgccctgtagaaactctcatcaaccaagttaggagctaaaaacaatgaatatttaatcccatatgagacaagaagtccaaataatcaaacaaaactatttaacatatggatttaaagtcattatggttgagaatgaattgcacttaaagatatatacatatatctgtgctttcagatagcagccatcacacaattagcaagacatttaaaagttaagaatcyaaaacattaacaatatttcagtgggttctaaaaactattgtgctgccattaataaatagaaaataaaatcattaacaaaatggtaccaataaataaaaattcgctttaaaaatattttttacttttatccttttacacttcaatttttctgtgcatatcttatatatatgatataaatataagtgtattatttataaataatgaactgtttttacatatgtgtatttcttgaatatttttgaacacatgaccaaaaaagatgctggagttagtgtctttgaaaggaaaaagaaaggcagcacattcttagataaacgtgtattcagaacat

SEQ ID NO: 797072 - DNA, 643 bp, Homo sapiens
tttaagtggcatacaaaaatggctacaaagagatcactaaggtgacgctaataatgatgacgaagggaaagggaaacaatggctctcctgtgccctgtagaaactctcatcaaccaagttaggagctaaaaacaatgaatatttaatcccatatgagacaagaagtccaaataatcaaacaaaactatttaacatatggatttaaagtcattatggttgagaatgaattgcacttaaagatatatacatatatctgtgctttcagatagcagccatcacacaattagcaagacatttaaaagttaagaatctaaaacattaacaatatttcagtgggttctaaaaactattktgctgccattaataaatagaaaataaaatcattaacaaaatggtaccaataaataaaaattcgctttaaaaatattttttacttttatccttttacacttcaatttttctgtgcatatcttatatatatgatataaatataagtgtattatttataaataatgaactgtttttacatatgtgtatttcttgaatatttttgaacacatgaccaaaaaagatgctggagttagtgtctttgaaaggaaaaagaaaggcagcacattcttagataaacgtgtattcagaacat

SEQ ID NO: 797073 - DNA, 618 bp, Homo sapiens
ggttcaaagggcatgccatttaaaaaatattccttgtatatgagatagcttttaggaagaagtcaaaagatgctgtctattgtgtcacatacttcatagcactatcattatccatagcactatcattaaggcactgcaagttgtgckgtagtggtggctttggatacatctgaggtatgatagaaaaagaatctttaagatacacaggagctaaataaaaatgggcccagcatgtcatgacacaatgcttgcatttttttgcagtaagtccttccttttcaaactgggttactcccaaggcacgtaggcacagggaacaagtgctacttaaagcaacagaataaacacacgtcatctctagtaaagtgctattttatttgaaaaactttatttgaaaaaaaaaagaagtagatgtattaaaaaatagattgtaaagttgcttatattttaaagaggaaacactaggtattatcttggtcttctggtggcctgctttgtacagtatctcctgatcctgggtaaataattaacttttctttccatttaggttaccttagtggagaagtttagtgactcagttagttgatgaggagatactgaaggatttaagggaggtta

SEQ ID NO: 797074 - DNA, 632 bp, Homo sapiens
  misc_feature 221, 231: n = A,T,C or G
aaaatccagggctctttttgggagcggatccaatgcttttggagaccataaattcctccagacaggaaccattgattggcataacaaaaggaagccctaggaaagcatctgtgaaggaaycaaaatgcatcagagtcttaaagaatttgatgacccccaaaatgttaagccacactaaacttgactgtgagtggaaaaaaggcccccgcacaaaaggttcngtggttctcnaaaaaaaaaaacatggggtcgcagggagtttttgaaaaataccagtgcctgaacaaccccatcccctgcccatcatccatccttccctaccaccctgtagagattctgatccagttggaaggggcaggagctgtattgttaaaagccaggtgattttgatatgagtcagggccaagaaccagtgacatcatcagtattttatcacacgtatcagtttccttctgattagaaaggttaaatgcaagctagaaaaaccgaaaataaaaatcacttgaggaaacaccaccccttgtggacaaacattgttattttttctgttcacctacagttcacataaacgcacactttttatacagagtacagacttataatgcatgtacatactattttgtaaccattac

SEQ ID NO: 797075 - DNA, 617 bp, Homo sapiens
agtgcagtggcgtgatctcagctcactgcaaaagctccgtctcccaggttcacgccattctcctgcctcagcctcccaagtagctgggactacaggtgtccaccacctaattttttgcagtttagtggagacggggttcactgtgttagccagatggtctcgatctcctgacctgtgatccgcctgccttggcctcccaaagtgctgggattacaggtgtgagccaccrtgtctggcctaatagtcaaccttttgagaagggttgtttaccaatttattcccagcacaatgtcagtatgtagtaggttcttatttgatatttgaagaatcactaggatcttatctataatgagtaaatgacatctatttaattctattttggctaggccagtgctgtggcacttaaaatttaatgctgagacactaactaaatattcagtttaatttttttgctgttgataaatggtttgtttttattaacaatgaagtctgttaaatggaacgtactatgaaacaacccataagatagtagaacataggtctgacccatctagcttgttaggtaagcacaaagtcatttgtttgtcttaattacagtgtttcaccttatactttaa

SEQ ID NO: 797076 - DNA, 613 bp, Homo sapiens
aatatggatgatcctgatgcagccaattataatggtaagaaaatttgaaaagtctgaagtctttctaattaattcataagcaccaccatacttaacctataatgacagaattgtaagcccttaccttcaaactgttaaaggatggaggaacaaagcactggacaagcattatttctatgactgcacttgtaattaactaagtaaactttctccttcattccaggaaagaaaaaatctggtaggttcttactgtttttttggtcctttccttccccacataccagcactcagttggtatgtttatttattttaaaacatttaattgagatattcacatatcaaagagtcaccattgtaaaatgtacaattcagtggtttttagtatattcactaagttgtacaaccatcaccactctctaattgcrgaacatttcatcagcccagaggaaatcctgtatccatgggcaatcactccctgtcccccttccctcagtccctgatgactgcagatctactttgtgcctatggatttgcctatgctgttatttcatgtaaatggcatcatataggtggcctctgtgtctggtttatttcacttagcgaagtaagtgtc

SEQ ID NO: 797077 - DNA, 613 bp, Homo sapiens
aatatggatgatcctgatgcagccaattataatggtaagaaaatttgaaaagtctgaagtctttctaattaattcataagcaccaccatacttaacctataatgacagaattgtaagcccttaccttcaaactgttaaaggatggaggaacaaagcactggacaagcattatttctatgactgcacttgtaattaactaagtaaactttctccttcattccaggaaagaaaaaatctggtaggttcttactgtttttttggtcctttccttccccacataccagcactcagttggtatgtttatttattttaaaacatttaattgagatattcacatatcaaagagtcaccattgtaaaatgtacaattcagtggtttttagtatattcactaagttgtacaaccatcaccactctctaattgcggaacatttcatcagcccagaggaaatcctgtatccatgrgcaatcactccctgtcccccttccctcagtccctgatgactgcagatctactttgtgcctatggatttgcctatgctgttatttcatgtaaatggcatcatataggtggcctctgtgtctggtttatttcacttagcgaagtaagtgtc

SEQ ID NO: 797078 - DNA, 597 bp, Homo sapiens
aatgcatgcagctggaaaccctgcaggccaaggaggtggtggggctccttgagatggacagggattgcttctacaccttggatgggtgcacccttagctttctcagatgctctcccaaagggccaaaaaagttgagggaggcagggccagtgcccaaggagtccaagggagtgttcttggcctcctctcctctctcttccactctagctgtgtagtattgggcaaggcatttcccttgattccttcatctgtaagataggagcaatggtgacttgtttgactgaaagactctgcatccaaggttcagggcagagaagcgccccagccctgcagtcaggtgaactttggagaaaagcatgatctgcaatggagaataatgttgccttargtttcctgggagctgctttggggtagggaggtatcttggtttgctagggctgccataacaaaataccacagacttaaacccaacgtttttggcaccagggactggttttgtggaacacgatttttccacggactcgggggtgggggctgatggtttggggatgaaactgttccacatcagatgatcaggcattagactctcataaggag

SEQ ID NO: 797079 - DNA, 566 bp, Homo sapiens
atgttgtcccacatcatctagaccatactttcaacaatatattgcttccattttaaatatctaaagaagttaatttaaatatttaaatttaacaatctaaataaaaagaaacaattcacatactcacatatgacagtgagtttgtaaaacacaatgaactagtaacttataaaaatgctgrtctaaaagcaactaaaaggaaaaggagtttagaatcttcctacatacttacttttgtgcagtgcaaggaaaagcaccatactgtctttctcaaaacaagttctctctgaacactttttaatttgatgaatttatttaaacttatggacagatctgatatgaaaatgtacttcgcccaagttactaagacttgagaatcaaatccttagagttactgacttaagataaaacttaagtatcatctatgtcatacttcaatcaaatcataaaacaattcagaacacatttattggtttatgattggaattcatgttcttttttttttttttttttgcaaaaaaatacaaaactcagtacaggagaacatactaaaagcacaggaagga

SEQ ID NO: 797080 - DNA, 646 bp, Homo sapiens
aaaacaattcagaacacatttattggtttatgattggaattcatgttcttttttttttttttttttgcaaaaaaatacaaaactcagtacaggagaacatactaaaagcacaggaaggacaaaaaaaggaggagatccataaatggctccttgatgcagccccaacaatttccttaagattatgaggcctccgaacttgagcttcactcagattttcacctctccaaccttggatttaaacgcacttgtcaatcataggatccaatcwtaggatccaccatctgaccaacctggagttggatagactccagcatggatgaagtagggctattttactactgtcctatacatttttttcattattaaaaaaagccaaagaaaaatcttatgtttcttcttgaaactaagatcattagtcaagactagacaatgaaatataatagaataggaaaaattaagagaaaacaggtagctgaagatatgtttgaagtaaaaagaaagctagaacaatgccagcaccccccattattgccttctgatacagactctaggcaattcatcagatgtggtacccattcattcattcattcccaacatcagctcctaaccaaaaataatttatctttaaaacattaaacaaaatctt

SEQ ID NO: 797081 - DNA, 646 bp, Homo sapiens
aaaacaattcagaacacatttattggtttatgattggaattcatgttcttttttttttttttttttgcaaaaaaatacaaaactcagtacaggagaacatactaaaagcacaggaaggacaaaaaaaggaggagatccataaatggctccttgatgcagccccaacaatttccttaagattatgaggcctccgaacttgagcttcactcagattttcacctctccaaccttggatttaaacgcacttgtcaatcataggatccaatcataggatccaccatctgaccaacctggagttggatagactccagcatggatgaagtagggctattttactaytgtcctatacatttttttcattattaaaaaaagccaaagaaaaatcttatgtttcttcttgaaactaagatcattagtcaagactagacaatgaaatataatagaataggaaaaattaagagaaaacaggtagctgaagatatgtttgaagtaaaaagaaagctagaacaatgccagcaccccccattattgccttctgatacagactctaggcaattcatcagatgtggtacccattcattcattcattcccaacatcagctcctaaccaaaaataatttatctttaaaacattaaacaaaatctt

SEQ ID NO: 797082 - DNA, 421 bp, Homo sapiens
ggtggcccaccacattaaggccatggtaatagacaaaatgtttagaaattatccttctagttgctgaaggtcaaggaggcctgggggccggggcaagggcagtcaggaacactcaaaggggtcagggtagtaggtacttatcagctagtatcaaagaatttctatattattaactagcgagagaygaaaaccctaacacagggatagaaaagcaaatactgcatgttctcacttctaaatgatgagactacgtggaaagaaccacagacctggagcctctcagaaggtggaggattggaggagggagaggatcaggaagaataaccaatgggtactaggcttaatacctgggtgacgaaataatctgtacaacaaactcccatgacacaggtttgcctatgtaacaaacctgcacatgtac

SEQ ID NO: 797083 - DNA, 581 bp, Homo sapiens
aaaaaaaaaaaaaaaaaactagccgggcatggtgatgcacacctgtagtcccagctactcaggaggctgaggcaggaggatcacttgagcccggaaggtctaggctgcagtgagctatgactgcaccactgcactccagcctgccaagaccctgtctcaaaagaataataacaataataatgataataattttaaggttatttcatgtacgtctattggaaatgattaattcaaacccaatctgatttccaatcaaatcctcactcccaacttaatggaaaacattatagctaactccatttatccaacyccagcagtatcactgaaagcagaaaatcattttacatccttatagaagaaaaaagaagccaggcgcagtggctcatgcctgtaatcccactactttgggaggccaaggcgagataaatgcttgagcccaggagttgaagaccagcctgggcaacaaagaaagaacttgtctctacaaaaattaaaataattagccagatgtggtgcgctcacctgtagtcccagctacttgggaagctgaggcaagaggatcacttgagcctagaagttca

SEQ ID NO: 797084 - DNA, 651 bp, Homo sapiens
aagggggaaatccacccccaggatccaatcgcctcccaccagacccttcctccagtactgaagatgaatctcataattcatcatgagatttgggtggtgatacagagccaaaccatatcattccctcccataccctcccaaattttgtgtccttctcacatttcaaaacacaatcatgcctttccaagaatcccccaaatcttaactcataccagttttaactcaaaattccaagttcaaagtctcatttgagacaaggcaagtcccttccaccgatgagcctgtaaaatcaagagcaagttagttacttccaagatgcaatgkgggtacaggcattgagtaaatgctcctgctccaaaagggagaaaccagccaaaacaaagggtctgcaggctccatgcaagtccatgtctcacatccagggcatgctgatgcaaaggttgggctcccaaggccttgagcagctctgcccctgtggctttacaaggtacagcccccatggctgctttcatgagctggcattgagtgtctttggcttttccaggggcatgttgcaagctgttggtggatcgaccattctgaggtctggaggatggtgtgcctcttctcacggctccaataggcagtgccccagtggggactctgtgtggg

SEQ ID NO: 797085 - DNA, 623 bp, Homo sapiens
attgccactacctctgtgctctcctacaatttctacctcccctctgtctttttttttttaatagaggcttttactgagataactgtagattcacatgcagtcaaagaagtaatacagagaggtctcatgtaccattgatccagtttcccccaatggtaacattttgcaaaactgtagaacaatatcacaaccatgatactgacattgatacacccctaattttgctgagatttcaccagtttttccttgtactcgtgtatgtatgcatttggttctacacaattttatyacacttgtaggtttgtttatcctctgctatagtcaagatacagaacggttccatcaccatgagaaacttggtgtggcacttttataagcacatttacatcttttcccattccatctctacccccaggcaaccaccaatcggttttccatgcctacaattttatccctctattctttcatctctataattttatcactgcaagaatgtcatacaaatggaatcatatggtatgcaagcttctgagattggcttttctcatccagcacaattttcttaagatcatgcaagtctttgcatatatggatagttctttccttttatggctgagtagtat

SEQ ID NO: 797086 - DNA, 694 bp, Homo sapiens
attgtacctttacagacataattacatattcagtcataatatctatctatctatctctctctctatctatctatctatctatctacctctatattgtatgtactgctctacaatttgctatctaaaatgatacactttttaaaatttttttctgggggtggctagcaagatgactgaataggaacaactccagtctgcagctcccagtgagatcaatgcagaaggcaggtgatttctgcatttccaattgaggtacccagctcatctcrctgggactggttagacaatgggtgcagcccatggagggcaagccgaagcagggtggggcgtcgcctcacgcaggaagcacaagggggtcagggaactccctcccctagccaagggaagccctgagggacttccgtgccaagaggaaaggtgccttctggcccagaaactatgcttttcccactgtctttgaaacctgcagcccaggagattcctacaccaccagggccctaggttttaagcacaaaactgggcagccgtttgggcagacaataagctagctgtaggagtttttttccataccccagtggcacctggatcgcaatcgagacagaacaattcacttccctggaaagggggctgaagccacggagccaagtggtctagaggatcccaccaccactgggcccagcaagctaagatccac

SEQ ID NO: 797087 - DNA, 591 bp, Homo sapiens
atagataataacagaataccataaatgacactttatccacaaatttaataactacaatgaaatggacaatttcctgaaagacacaaacttccagaactcattcaaagagaaatagataacccaaatggctctaatttaataaataaattaatgattaaaaatattctaagagaaaaaaaaaagaaggaaagaaagaaccaggcccagataacaaacaccagtggttgcactcataaattctaccaaataactaaagaagaaataatatcaattcttcacaatttttttagaagcagagggagcatttcctaatcaactcttttgaggccagcattaccctaatactaaaaccatagaaaaatgttacaaaactacagaccaatatgtcttaagaacawggctgcaaaaatctttaacaaaatattagaaagtttgttaagcaatatctgaaaaggataactcattgcaactaagtggcattaaatccagcaatggaaggctggttcaaattaacaaactaatcattggaattcaccatattaacatattaaagaagaaaaacatgtaatcatatcaattaatgcagaaatg

SEQ ID NO: 797088 - DNA, 625 bp, Homo sapiens
tgagtctttccaaaaatggacacagctgggaagtgacaaagtgaggattcggacatgagtctgtatggctccaaacctaagcctgtaaccataggacccccctgcctcccctctaggttctctataccttccccactgccctaccaggtggaggccttaggctaccctggctgctgctggcttggcctaaaggctgatgctcccagccagacctgagcaagatggccaacctccggggaggagctgaggcaagggccaagagctcaggactgtggctggcagcggtggctgtgctcagctttcccaggcagtggccaaactcaatgctgcagccagagaagctgatggggaggaggagcgaccagscttggtcagtctggaaggtcccagatgcagccacgggctacccttgtcctttccccttcccaggcacttccccaaacgtgggaccctcagcctgggtcacatgggcttgtaggccgtgaggaaacaaccattctgggcattcctgagccttgggggaggcggctttccttccgcccactatgggaaccctccagggccctgtcggtgccttcgctggggaaggaggcctgccagggaccagctcgttccagttcctcct

SEQ ID NO: 797089 - DNA, 550 bp, Homo sapiens
tgttcaggacagagctcctgctggggacagaccaacacctaggtcatgtgccttccagggcagcctgtgcctgccaggcccacacaggactttcaggtaccatctcttccagttgtcctgataatcccatgagctaccagccctctccatgtgatggacacagacaaggagcttcagagtagccgtgagccccacgtctcagagctgagatatggcaggcaggagcccctccttgggctgtttggggccaatgcactaaataaccttctcttgtggtttgcagtctccggccttgttctccggccttggtcagtctggaaggccccagatgcrgccacatctggggccttccagatgtgccagcacaggggctgccaggctcaggtccatggtttgccttggatggcacagggatatttctggggtttaagtgagaatccatgtatgggaaatgctggacaaagtcaggctgtgaaattaacataaactagtagaagcagcaattttaaaaaacaaaatagaaaagaaagaagaatgtgttttcaaatag

SEQ ID NO: 797090 - DNA, 550 bp, Homo sapiens
tgttcaggacagagctcctgctggggacagaccaacacctaggtcatgtgccttccagggcagcctgtgcctgccaggcccacacaggactttcaggtaccatctcttccagttgtcctgataatcccatgagctaccagccctctccatgtgatggacacagacaaggagcttcagagtagccgtgagccccacgtctcagagctgagatatggcaggcaggagcccctccttgggctgtttggggccaatgcactaaataaccttctcttgtggtttgcagtctccggccttgttctccggccttggtcagtctggaaggccccagatgcggccacatctggggmcttccagatgtgccagcacaggggctgccaggctcaggtccatggtttgccttggatggcacagggatatttctggggtttaagtgagaatccatgtatgggaaatgctggacaaagtcaggctgtgaaattaacataaactagtagaagcagcaattttaaaaaacaaaatagaaaagaaagaagaatgtgttttcaaatag

SEQ ID NO: 797091 - DNA, 541 bp, Homo sapiens
ggtcttccatggtgtgctggagggcctttctgggtttgagaacagcacagcctcttgtcccctagacctgtcttcttgatggggaaagttctgagactggacaaggtgagcagagaggacggcctggtggagtgtgaggaggggagagcattcaccacagcccctgggccagcctcacccacccttcctagaggacagcacaatgaggggrcagaggccagcagctggccatggcaggctgagtccaaggctgattgattctgggtgcctcgtcttctctgataagtggtagcttgggaccagaattaaatttatttgaaacacgtaaaggaaaatgatgctttcccactgcaatctggacaggcagattcacacctgatacctatacctgcttctctatgaaggcagcagcaagtattgccaaacagaggtaaggagcatgatacatgctctccctccctttccacagaccccggtgaggaaagctggtcacgtctactgtcaggcaaatagcccagaagcttttgagtgagctgagggc

SEQ ID NO: 797092 - DNA, 553 bp, Homo sapiens
aatgtgtttattaatgagcttgggcttaatggattactggaataagatgcaaggaataggagtgagttgaaaatgttaactgttacatacagctaagaatcttttggttcatggaattattgttccagacttctcatccttccctgtatccatatcttttgatatgggattttgtggtttctcaaaatagaagtggaatatatttccatggcccattggatgtgtgactttggccaatagaatatggacaagaataaaatatgcccagttcagatgccaaatcttaagaggcactgtgtatttccacttacctttttgtgcttctatcattgccaggagaagattatgctctgtgtagtctgttggtcccagaaaaatgagaacaacrtggaacaccacttaaatcaatttcacagtcggcagccaaagtatagatgagcttggaagagccattcaagcagccctacaaatgggtgaaccatataaaatattgttgtttgaagacattgagttaggatctttttgaagcattattactacaacagctaactga

SEQ ID NO: 797093 - DNA, 652 bp, Homo sapiens
agtcttgctctgtcgcccaggctggagtgcagtggcgccatctcggctcactgcaagctccgcgtcccgggttcacgccattctcctgcctcagcctcccgagtatctgggactacaggcgcccgccaccgtgcccggctaatttyttgtatttttagtagagacggggtttcaccgtgttagccaggctggtctagatctcctgacctcgtgatccgcccgccttggcctcccaaagtgctgggattacaggcgtgagccaccgtgcccggctaaacaaccattttcttatttaaaacacagacaattaacaatatgccaagtagattaaaagttatttttttcttaaattcaaaaatggtattgctaacatgaaatgtgtttttggattgacttttcatttgtgatattaaatttggcagttttttttaaccatttgtgattagtgttatgcatttttcataatggtaggccaatattttactctaatgaacaatctagtgtttcttttttttaagttatagcaacgatgtaagctttgaagcctggattgtaacataaccacattttacttaaccagtggagctagtttgtcccaatttaacacttttataatgccaagttaaaattgaacccttgggcttcctagtca

SEQ ID NO: 797094 - DNA, 626 bp, Homo sapiens; identical to SEQ ID NO: 786619

SEQ ID NO: 797095 - DNA, 638 bp, Homo sapiens
ctacaactcctatcttctgtaatgaatcaatggtgtatcagttagctattgccataaagctgctgcataacaatttgctccaaaattcagtggcttaaaacaattcatctattttgcttttgagggttgacttaactgggatttggctggcctagactgatcatggctagtgttggctctatcccatgtgtctcttgtcctcttcttgggacttttggattagttagacatatccttcttttagtgatggcagagtcaccaaagattgagtccaatcacccagtcatttttcaaacatctgcttgcatcacatttgctgacactgtactgaccaaagtacatcatttagccaaakccagagtcaggctggatggggcactgcagagttacagggcaaacagcataaatgcggggagtggggaagaagaggggctcttagggtaatctaccctaaatggctgtggcatttactacaaagaagaatggagtctaaattcagtgggtttttattttttaattatcatgtatttaaagccttctgtattccaggcattgaatttttacctcattatcttcctgcaagcctacaaaatatatttcaacatctcaattatgcagatgaagaaatggaggctcag

SEQ ID NO: 797096 - DNA, 636 bp, Homo sapiens
tatagattgtgaagattttctcccactctgggttgtctgtactctgctgatttcttttgttgctcagaagctttttagtttagttgagtcccatttatttatttttatttttgtctttgcatttgcttttgggttcttggttgtgaagtctttgcctaagccaatggctagaagggtttttccaatgttatcttctagaatttttatggttttgggtcttagatttaagtcagtagccctatacaccaacagcaaccaagctgagaatcaaatcaagaactcaaccttttacagtagctgcaaacaaaaaacaaacaaacaaacaatacttaggaatatacttgaccaagaaggtgaaacacctctacaaggaaaactacaaaacacggctgacagaaatcatagatgatacaaacaaatggaaacacgtcccatgctcatggatgggtagaatcaatattgtgaaaatgaccatactgccaaaagcawatctacaaattcaatgcaattcccattaaagtaccaccatcattcttcacagaactagaaaaaacaatcctaaaattcatgtggacccaaaaaagagcccgtatagccaaagcaagactaagcaaaaagaacaaacctagaggcatt

SEQ ID NO: 797097 - DNA, 615 bp, Homo sapiens
caaataagatgttcaagtacaaatgttaagtattctgtttaataatttaaaatgctctttcagatatagctggaaggtgcatctctgcagaaaattatttttcctaatgcttcacatccttctggtggtatggatatttataaagtgtgtgtgtgtgtgtgtgtatacaaacatgcatatacacatatctatatataaatatatatctatacatatataacattttttatatatatatatatatatatatatatatagtttgaggtacagatrtatgttattcagtagttgctcccaaacttttaaattccaaccctgttaatataaatatttcctctcccctacctccttgatagctgaaatctatatattcattaagaagtgagaaaagccacatagtattgacctgtgtgtcaaatacctttatcctttacttttcacaacataatctaaatacatataaatagctattgtctgttaggtgtgtgaaatgcactgtgccatttacttagctcactgaaaatgttatttgtacacatggagtcactgtctaattgagatagttgtcaatgcccactgaggtccatggcctacagcttggaaacaactattgag

SEQ ID NO: 797098 - DNA, 615 bp, Homo sapiens
caaataagatgttcaagtacaaatgttaagtattctgtttaataatttaaaatgctctttcagatatagctggaaggtgcatctctgcagaaaattatttttcctaatgcttcacatccttctggtggtatggatatttataaagtgtgtgtgtgtgtgtgtgtatacaaacatgcatatacacatatctatatataaatatatatctatacatatataacattttttatatatatatatatatatatatatatatagtttgaggtacagatgtatgttattcagtagttgctcccaaacttttaaattccaaccctgttaatataaatatttcctctcccctacytccttgatagctgaaatctatatattcattaagaagtgagaaaagccacatagtattgacctgtgtgtcaaatacctttatcctttacttttcacaacataatctaaatacatataaatagctattgtctgttaggtgtgtgaaatgcactgtgccatttacttagctcactgaaaatgttatttgtacacatggagtcactgtctaattgagatagttgtcaatgcccactgaggtccatggcctacagcttggaaacaactattgag

SEQ ID NO: 797099 - DNA, 596 bp, Homo sapiens
cagaattgaggttctggctgtactcatagtcttcccttgtactgcatgagtagattcatggcagtttgtatgctttagtgggcaatattttaaagcttagattgcaattatattaatacatatatatgtgtttatatatgcactcactaaactacacatacatgcatgctcttggctttaaaatattcaaactctgccaggtgccatggctcacacctgtaatcccagaattttgggaggccaagggaggaggagttcaagacaagcctgggcaacatagtgagatgccgattctacaaaaaatgaaggaaaaaaaaaaagctagatgtggtggcttgamactgtagtcccagctactcaagaaggctgaggtgggaagattgcttgagaccaggagttcaagctgcagtgagctatgatcacagcactgcactccaaattgtgcaacagagtgagaccctgagaccctgtctctaaaataaaaaataaaaaataaaaatatccaaactctggaagattaatttggaatagaaacaccattattctgagtaaatgtgatcccataatataaccatatgaaaaatgtaatgagagtt

SEQ ID NO: 797100 - DNA, 625 bp, Homo sapiens
ttcaaaaccccagagactacctaatgataaaacttggaaaacattctttttaagataagacaaaaacagcggtttcctgctgccaccacttctagtcgggcatttgtcagggcagcaagggaagctaaaagatctatgaatttaggggggaaaaataaaactcttatttatcatagatggtatgattttttaaaagctagaaactctaaagaataattgagtacatttatcaagactgccagacacatgaattaataaaaaactttagccacacttctatatattagcaacaaagagaaaatggaatcaaacaaatataacctttcacataacattaaaaaattaagaatcaattaccaaaaataggcaagacattaatgagaaaaaytatcaaacttaacagaaaagtattaggtaagaccaagacctaaataagtggagagacacaccatgtttatgattgaaaaatacgatattataaaggtatcagttgtcttttccatttatctatgaattcagagcaattctagtaaaagttctgacacatttttttttgtttgcttgtcttttatttatgatgaacttaacaaactgattctaaaatttatactgaagagcaaagagc

SEQ ID NO: 797101 - DNA, 611 bp, Homo sapiens
cacatgcaaaacaacaacaacaaaaagaacctagaaacagatcttatactctttacaaaaattgacgcaaaatgtatcataggcctaaatgtaaaacacaaaactgctagaaaataacataagagacagggaggagccaagatggccgaataggaacagctccggtctacagctcccagcatgagcgacgcagaagacgggtgatttctgcatttccatctgaggtaccgggttcatctcactagggagtgccagacagtgggcgcaggccagtgggtgcgcgcaccgtgtgcgagccgaagcagggcgaggcattgcctcacctgggaagcgcaaggggtcagggagttccctttctgagtcaaaaaaaggggtgacggacgcacctggaaaatcgggtcactccgacccgaatattgygcttttcagaccggcttaaaaaacggggcaccacgagactatatcccacacctggcttggagggtcctacgcccacggagtctccctgattgctagcacagcagtttgagatcaaactgcaaggcggcagccaggctgggggaggggcgcccgccattgcccaggcttgattaggtaaacaaagcagccag

SEQ ID NO: 797102 - DNA, 671 bp, Homo sapiens
aatagatgagagaaattatcaaataactaattgaaggtaaatctccagggttaaaagatttgactctttaaattgaaagaggctactgaatctcaagaacaattaattaaaataggtcacatctggattcctcaattctgaaattttggagcacaaatacatagataagggttttaaatcttttgaaaagtaraagtcatgatatgtacaaaagagagaattctaggcatgagattctcctatttgtttgtttgtttgtttttctgcaacagtggatactggaagataatgaatgtcataggagttgtgagagagcattatttttggcttacaactctgtatgcaaaagttctaccagatgagtcaataggattaaaagaaaatcagacaaataaagaatcaggaaaacaatcttcccaaactggtaggtgaaggaaaatctccagatagcagctgtgcctcaggttttaagaagaacaaggcagataagagcagaaggacagaggatgagcatgtagttctgtatgaggtaattaatatgtccaatcatatgtaatggttaaataaatcaaggcccatccacagagcctgataaatgtcttctaagactatttgttgacacgcccataatatcttaagtaataaaagcagtttacaagataatgatttgc

SEQ ID NO: 797103 - DNA, 540 bp, Homo sapiens
cagtagacacatagtaaacatttgttggaatgaatgaatgaatagcacgcttcagtttctcatctccaagagaatgcactctcatgaaacaggcttgtaattaaccagactcctatgtggccacaacaaaacatttttcaccttttcgatttcttctgctggtacacctcgaagccgggcataaaggtaaagatgttctcgtcctgtgagcagctcatcrattgcatcaaactgaggacagtagcccatattttgatggacttcagaaatattggttaaaatactgcaagaaaaaaagcaattactgagtatccttcaaggagtggagggatgaccatagagctagggctggagaagcttctgccaacgggaaaaggaagctgcttcttctcttctcctatttggcttcagaaatgcatgggatatttgggaatcaaaacaggggcccttcggttagaaactgaatcctgtcagattcttccatgtttccatgtctaggattaattgaatccctgttacgccaaaagtcagctttcattt

SEQ ID NO: 797104 - DNA, 625 bp, Homo sapiens
ggttttcctgggcaagataagctattcctccctgtctttgcagagtttaaatgactcacttgttcaagtacccaccgttgccatgtgggaccgtgagcaaagtacttaatctcactaagcttcacgttcctcatctgtaaaacagcaaatatggacctcacaaaattgtagtgaggctaaaatgaaataacatatgcaaaagcagtttataaataataaacttactataaaatattattttgtaattctgcaagcttgtcttaaatgccatcacctccaaggagcctttttgccatcataagcagaaactmtctctctcttcttggaagctccaccatgcacagcctatgggccctcatcacactccttgagttattcgagttcaagtcccgtgtttacaaccagaccgcaaactctatgaagtcagcatccattcctctctgtggttctccctccgccccatccaggtctcaagggtctagagtctttcaaagagaacacattctgagatttgaggaggcagagacaaaaagttccactgcgaagtgccagggaggcttctgtttggggtgtcccttgggatcacagatcccccacctggtgatgagtcaacccagcaccaccc

SEQ ID NO: 797105 - DNA, 686 bp, Homo sapiens
cgcttccttaggatcctctctcctggcatggcatgcccctgtcaagctgcttgttctgatacgggctgccaaagctgttccatcctggatggggctgataagaacagctggagagccaagagaactagatatttcttgaaaagttcattggcatctcaaagggcagtgatcamagatgataattcacagttagaatatgacagctgcagttgacctggctcgccctggcgtgtgctggactcagacactgtcccgctgcctctttcccaccctatctttttcctttctcttttttgccacttacttattttctctttttcttctaccttttcccctatactcctccacctccctccaaatttttactctctcttttaactagttaaaatatgtggctgcatttttgaataacttctatggtcttctgatataacttttaataatacgtgggttaaaatttaagactgcttgccctaaatgtaaaaacaaacaaacaaacaacaaaaaaagaattaatcttaagttacattttacttgtatgtgcctcaattgctttttatgttgaatggggccctcaaatcagataaaaaagaaaaaaatctactgccctgatcatacataaattgagagagaaaattatcttctgtccctagttaatatcttctacagggagccaggataaaaag

SEQ ID NO: 797106 - DNA, 549 bp, Homo sapiens
agatagatagagacagagagattgagagagaaagagagagagagaaaaagagtgagtgagagagacagagcgcgcacagctcctgtgcatatgcgtggcattcagttttgctccaatggaaggcacgtataatagtgaggaaatgcagaagtgaaagaaaatggcaggaactggcttgcctttttcyaggactttggctgttacattttgtccagggaccaaggaccaacactactgaaaataagtttctaagctggacagaccgcgtggaagtaagggttcgtttaggaaatgaaacaccatgtaggtaggcttggcctcccctccctcgccctggccaagagctcagggtacagtatcacagccttgacgtcctgatgctggagggttttgagtggaggcagccacaggagccctcagcattgacagcaaagcaaacaagcaaagcttcctcttggggcacagaggactgagacaagttccttgggtccttcttttgggatccctatgatgcagcagatgagctgtgattcaaagagagaaaatatt

SEQ ID NO: 797107 - DNA, 608 bp, Homo sapiens
atctttcccctgccatggtatgatatctctaccctgccatgactccttttgtcaccatgaggaagtcacctgcgtggtcacttgcaggtgaagctggatctgttgagatggactcagccatgacctggcttcacccctgcctgtcccttttctgtaaacccagtagggctggctatggaggccaaagaatcaaattcatcctgtctgagccagtgaagcgtgctcaggactcgtcctgcccactgggcattgggccatgctgaggatggctttcaggagagaggaagaggccccagtcaagcagatgctggacagatgtcagcagcacctaactccacttataaaccagggcagaggcttcctctgggcacctctattgtgtgtgctgaagttttactgttcaagcttttcctgcagccaggaaagaggcagaygagtgagagctcatcctctctgtcctgcccataggggaccagtctgtttaaacacattttattacagagagcagcagtcaccctccagaatccaagggcacacgccagttttccctctatgctccttggtctggcaaagccaaatatcagcctacaaatagccaatgcaggtta

SEQ ID NO: 797108 - DNA, 570 bp, Homo sapiens
gctttttcctctgctgtcaacacagtcaatacatgtgcataactccttattgtctacatggtgattatcttgctgatgaattctcaaaggccagagatttggactattttttctctgtaaccttgcatgttcctggccacatgccaccaccacccaaacagaatgtacgcagggaatgtatttttcaggataacctaagaaaaaataggattaagaagataaagctgctgatcatgtaatgtactttagastcagatatataaatatttgtgaattatctgtcctatttctttcttctattaattcattgactctagatgtgcattggaaggctagggagaaatcaggggatcgtgagaaagagcacagaagtctgcatcacacaaacaatattatttcaagagccatgaactagatcctaagcaactcataggcaatgacctcatttcatacctctagtctctaagaaacatataactggcctgaggaaggaaaatgtgggcaaggggtagaccggggtcatgggtggaggtccaaatagtaatcaatggagctcatagggtggactga

SEQ ID NO: 797109 - DNA, 581 bp, Homo sapiens
caagtgccctgcagttgtcagccaggtgattctcttcctttggacccagttagacgcaggcattacctcgtggctttgccccagtgtgaatctttgtcctccaacttgatctttttatttgtttcattattgtatttaagttgtttattttagagacagacattttttaacagctgtgcatttcctgtccctttgttttccagtcgtcatgtgtttccttactctctgtgggtgaacgtttcagatgtctgtttgcggtgcccagcgtgcaagataaaatttattgcagtgccttcggcctctaactcaccattccaaccaattcagatagcccaaggctgttttatccagtggatttttccatgtagtgggaaataaatcttgaatgttactgtttagattagccaggaaactcattctgggatgtttgcccacatccaytggcatttctcaaaaggaaccccaggtgtctaccttgacaccagcagggccacttgagccctccgctggcattcatcgcccgctttgttctcagcctgagtttaggagttacagatgtgagaggcgggattatacagcca

SEQ ID NO: 797110 - DNA, 608 bp, Homo sapiens; identical to SEQ ID NO: 785621

SEQ ID NO: 797111 - DNA, 608 bp, Homo sapiens; identical to SEQ ID NO: 785622

SEQ ID NO: 797112 - DNA, 522 bp, Homo sapiens; identical to SEQ ID NO: 785623

SEQ ID NO: 797113 - DNA, 581 bp, Homo sapiens
tggccaatttgtcttcctttaaatgacaggcttatttggcttatttttgagaaaatatctgccaaatactcaaacctgaataaccattgtttgtcagttggttattctttcaagttaaatagatgtaccatgaaaaaagcagctacttcggtagcaacttaattccaggagtgattttccataagacatctgttatactttgatgtccagcagaagtgttttgtgtatacatcccattttgttgtacagaacactaaaaagacatacactacagggtcaaaacttattaaagtaatttttactacttcatcaaggatgtacttaagtgaaactggcaaattttttaactggaaatgagtggcagtgagggctrcaaggatatagtttgctgctgctgccttggtaagtgctaagatgccaacagtttgacctaccattgtctttgtatcatcagtgcaaatgccaaagaagtgaaaagggcaagtactgccttagtattattataaaaatggttttgaccttgctgaaaagacaataatggaggaaagaaattgcttttagttcaaataagttaaagaaga

SEQ ID NO: 797114 - DNA, 596 bp, Homo sapiens
tttttttgagacagggtcacctagactggagtgcagtggtgtgatctccgcttactgcactcaccgcttgctgcatgacagccaagatgtcgagggttgaggtgtaggggcagggaaggtgactttattccagagagccaccaaactgaacagatggtgaagtaacatcctgaagaaccatcttaaattaatacgattttcmggctccttgtacgttagggaagggaggaagaaggaggcgcttgaggtgaagaggtctgacaatgacagacatgggctgcagtgggagcccaaggggatggtgaaaattgttcgtcctttgtcaggtcacactgctcttataaatcttcagcataacactgttacttgtgtatacaacctctctatcttctcaggagttagtttggggaagggattattatcatctgtgctttaaagttaaactgtaagctaaatccctcccatagatagcttggcctatgtgcagaaataagaaaaagcagttagcctggaagatgtcaccacagggtaggaagggttaggagcaaaatgcagtcagtcatgctaggcctcattttcattgccatatatttaat

SEQ ID NO: 797115 - DNA, 596 bp, Homo sapiens
tttttttgagacagggtcacctagactggagtgcagtggtgtgatctccgcttactgcactcaccgcttgctgcatgacagccaagatgtcgagggttgaggtgtaggggcagggaaggtgactttattccagagagccaccaaactgaacagatggtgaagtaacatcctgaagaaccatcttaaattaatacgattttccggctccttgtacgttagggaagggaggaagaaggaggcgcttgaggtgaagaggtctgacaatgacagacatgggctgcagtgggagcccaaggggatggtgaaaattgttcgtcctttgtcaggtcacactgctcttataaatcttcagcataacactgttacttgtgtatacaacctctctatcttctcaggagttagtttggggaagggattattatcatctgtgctttaaagttraactgtaagctaaatccctcccatagatagcttggcctatgtgcagaaataagaaaaagcagttagcctggaagatgtcaccacagggtaggaagggttaggagcaaaatgcagtcagtcatgctaggcctcattttcattgccatatatttaat

SEQ ID NO: 797116 - DNA, 588 bp, Homo sapiens
gccaaagagctcaatttctgctcatgatacttaatagaacatagggaacatgagccaatagctcaatgggttcagatctgcaccaagtgcctgttggacgcaggattctactgtctccaataatatgtctcagatgcactatttttttttctttttttgagacagagtcttactctgttgcccaggctgcggtgcaatggcgcgatctcggctcacagtaacctccacctcccgggttcaagtgattctcctgcctcagcctcccgagtagttgggattacagacasacaccactgcaccaggcaattattattattatcattattattattattgtgcgtgtgtatgtgtttttagtagagatggagttttgccatgttggacaggctggtcttgaactcctgacctcagctgatcaaaagtaggtgaggtcagaaaacataccctgggagaggctggcacaatgcccagaaccgccatcgctaggcctggggttttcctctgtagtggaatactagtattcatgtagtgcagggacaaaaccaattagatagttctgggagttaaaaagaggtgatttacagtgct

SEQ ID NO: 797117 - DNA, 588 bp, Homo sapiens
gccaaagagctcaatttctgctcatgatacttaatagaacatagggaacatgagccaatagctcaatgggttcagatctgcaccaagtgcctgttggacgcaggattctactgtctccaataatatgtctcagatgcactatttttttttctttttttgagacagagtcttactctgttgcccaggctgcggtgcaatggcgcgatctcggctcacagtaacctccacctcccgggttcaagtgattctcctgcctcagcctcccgagtagttgggattacagacagacaccactgcrccaggcaattattattattatcattattattattattgtgcgtgtgtatgtgtttttagtagagatggagttttgccatgttggacaggctggtcttgaactcctgacctcagctgatcaaaagtaggtgaggtcagaaaacataccctgggagaggctggcacaatgcccagaaccgccatcgctaggcctggggttttcctctgtagtggaatactagtattcatgtagtgcagggacaaaaccaattagatagttctgggagttaaaaagaggtgatttacagtgct

SEQ ID NO: 797118 - DNA, 588 bp, Homo sapiens
gccaaagagctcaatttctgctcatgatacttaatagaacatagggaacatgagccaatagctcaatgggttcagatctgcaccaagtgcctgttggacgcaggattctactgtctccaataatatgtctcagatgcactatttttttttctttttttgagacagagtcttactctgttgcccaggctgcggtgcaatggcgcgatctcggctcacagtaacctccacctcccgggttcaagtgattctcctgcctcagcctcccgagtagttgggattacagacagacaccactgcaccmggcaattattattattatcattattattattattgtgcgtgtgtatgtgtttttagtagagatggagttttgccatgttggacaggctggtcttgaactcctgacctcagctgatcaaaagtaggtgaggtcagaaaacataccctgggagaggctggcacaatgcccagaaccgccatcgctaggcctggggttttcctctgtagtggaatactagtattcatgtagtgcagggacaaaaccaattagatagttctgggagttaaaaagaggtgatttacagtgct

SEQ ID NO: 797119 - DNA, 536 bp, Homo sapiens
gaagctcagacacctctccttatactctctccctttgtggtttagacacaactgaccagcattattgttaaaatagagatcctaagactgacagaacagagtccttacagtagtaagataccatattataaacaagacctaaggccatgccaggcaaggttaagtcatgcacccctcaacttaaagaataaactatgttctaattgccacaggtttttttcttcttcctttttttcctctagctaaacaagcactggccttgagataagcaatgctgaagcacttgcagctcacccattascataaactgactgagccctccctacacaagccataactacagctttgattggacaagagactgatttcagtaacttccccttgataagagagcactggctgtggacgggttctggacggtttacagaggctgtgcacttgactgcctttgtgtccctacttccccttttgaagcatagggcctaattataatgtatttaaatgtcatctccaccccaaagtgaacatgggttgca

SEQ ID NO: 797120 - DNA, 553 bp, Homo sapiens
tgatggttcttcgggtttgcagggatccttccagtgaatagatgaaagtcacaggtaccagtatgaaaactgcagtgactcaccggaaacacttcatgcttgtcagcttgctaagctgtttgagtccaacaactgcatggggtcctgagttagtctcctgaatgtctcctgccgctactttcgtgagtgttgtcgtcactttaccttgtggtggccaagcccctaaatgcactattaggttatgcagtatgattttcagcgtaaaagacagataaagagcaacagcggggtgaaaaagaccctcttgcattggccgggaattgaacccgggtctcccgcgtgggaggcgagaaytctaccactgaaccaccaatgcctctgcgtaacaaccgcctgcaggataacagaaaacagtatccacaaagacttagaaaccgttccaagcggttttttcaagtgtcgactaaaagctaacaaagacatccaaaccaaatgtgtttttacaggaaacttttactagacaacgttataaatatcaaaatagctcatttgt

SEQ ID NO: 797121 - DNA, 586 bp, Homo sapiens
tccagcacgcgaatcaggaacctgatggttcttcgggtttgcagggatccttccagtgaatagatgaaagtcacaggtaccagtatgaaaactgcagtgactcaccggaaacacttcatgcttgtcagcttgctaagctgtttgagtccaacaactgcatggggtcctgagttagtctcctgaatgtctcctgccgctactttcgtgagtgttgtcgtcactttaccttgtggtggccaagcccctaaatgcactattaggttatgcagtatgattttcagcgtaaaagacagataaagagcaacagcggggtgaaaaagaccctcttgcattggccgggaattgaacccgggtctcccgcgtgggaggcgagaattctaccactgaaccaccaatgcctctgcgtaacwaccgcctgcaggataacagaaaacagtatccacaaagacttagaaaccgttccaagcggttttttcaagtgtcgactaaaagctaacaaagacatccaaaccaaatgtgtttttacaggaaacttttactagacaacgttataaatatcaaaatagctcatttgtcggatcaaact

SEQ ID NO: 797122 - DNA, 626 bp, Homo sapiens
aggtccagcacgcgaatcaggaacctgatggttcttcgggtttgcagggatccttccagtgaatagatgaaagtcacaggtaccagtatgaaaactgcagtgactcaccggaaacacttcatgcttgtcagcttgctaagctgtttgagtccaacaactgcatggggtcctgagttagtctcctgaatgtctcctgccgctactttcgtgagtgttgtcgtcactttaccttgtggtggccaagcccctaaatgcactattaggttatgcagtatgattttcagcgtaaaagacagataaagagcaacagcggggtgaaaaagaccctcttgcattggccgggaattgaacccgggtctcccgcgtgggaggcgagaattctaccactgaaccaccaatgcctctgcgtaacaaccrcctgcaggataacagaaaacagtatccacaaagacttagaaaccgttccaagcggttttttcaagtgtcgactaaaagctaacaaagacatccaaaccaaatgtgtttttacaggaaacttttactagacaacgttataaatatcaaaatagctcatttgtcggatcaaactcttaactctgaaaaaggtctttctttctacctgcatt

SEQ ID NO: 797123 - DNA, 586 bp, Homo sapiens
tccagcacgcgaatcaggaacctgatggttcttcgggtttgcagggatccttccagtgaatagatgaaagtcacaggtaccagtatgaaaactgcagtgactcaccggaaacacttcatgcttgtcagcttgctaagctgtttgagtccaacaactgcatggggtcctgagttagtctcctgaatgtctcctgccgctactttcgtgagtgttgtcgtcactttaccttgtggtggccaagcccctaaatgcactattaggttatgcagtatgattttcagcgtaaaagacagataaagagcaacagcggggtgaaaaagaccctcttgcattggccgggaattgaacccgggtctcccgcgtgggaggcgagaattctaccactgaaccaccaatgcctctgcgtaacaaccgcctgsaggataacagaaaacagtatccacaaagacttagaaaccgttccaagcggttttttcaagtgtcgactaaaagctaacaaagacatccaaaccaaatgtgtttttacaggaaacttttactagacaacgttataaatatcaaaatagctcatttgtcggatcaaact

SEQ ID NO: 797124 - DNA, 574 bp, Homo sapiens
gctgatcatgatagagattcctgggtttttgtcccagaaactgtgggtaaaattccctattctggtagatcgttatcccaagatcatttgtcccaagtttgtgcaaatggttatgccatatttttccaatcgatttaaagcaaatgcccccaaatggttgctgggagaaaaactgcaatattcagccctgtctcatcaaatactcagattcttcatggtagcgaggattttagatgctgaaattagagtgaaggatgaaatctacaagatctacaaaattgagacaaaatcagagttgtgtgaattygtcacatctgcccagatccaacatcttgagagtgggattagggtgccacaggcatggcctgagactaggaagagagccctgctcactgacccatcccttgcctgggcttccaagtggaactagagtttcattcaacctacatgtgcctataggtcctccctgtggcaatgacatctctcagctcagtaagggccatttgcagtaggaatatgaccctaaccagaagactcagtggatccttatcaccttcatagaaaggtactcacc

SEQ ID NO: 797125 - DNA, 591 bp, Homo sapiens
tgggaggtcaaggcagggggatcacttgggctcaggagttcaagaccagcctgggcaacaaagtgagacctcgactctacaagaaataaaaaaatcagcaagcctggtggcatgcacctgtggtcccaattgcacaggatgtgaggtaggaggattgcttcagaccaggaggccgaggctgtagtgagccataaagaaaagaaaagattactaactaaaatgttctyaacgcactaaatgaaataccttggcctcctgccttggggctctctccgcagcctccccgacactactgttgagctgactgctcacaccaatcagacacccctgctcaaagatcaggcaggcccaagctcccccgctgaggcaggctctcctttccctgtaccagctcttccttgcaaccccctggctgtcatgggctcccacctccatgcctttgctcatgccttgctcctgcttggagcgcctgctgctctgcttcaaccctacccatcccttgatgctctgagcaaattccatctccacaaattggtttttctgacctccccacccctcccatccttctgagcctccaggacattccttctg

SEQ ID NO: 797126 - DNA, 562 bp, Homo sapiens
aaatttccactgagatgatgcgtcagaaattaaggtagaataagatggccctagggcatcaaaacaacagaaactaaatcttgggctgggtgcggtggctcacgcctgtaatcccagcaattttgggaaccaaggtgggggactcacttgaggtcagaagtttgagaccagtctagccaccatggtgaaaygctgtctctactaaaaatacaaaaattatcctggaggttgcactgagccaagattgtgccaatgcactccagtctggacaacagagggagattctgtctcaaaaaaaaaaaaaatagaagaagaagaaacaaaatcttaatttcttcatcaaatgtaaaaactatggactgtactctggaggaataatacacaaaaagacacataggcgctttttttttgaagttttattgagaaatattgataacataccacagaagccactgatttaaagtgtaaaattcaatgtttttcagtatatttgcactgttatgcaaacatcaccacaataaattttagatcatttttattaccctgaagtaaacaccatatc

SEQ ID NO: 797127 - DNA, 562 bp, Homo sapiens
aaatttccactgagatgatgcgtcagaaattaaggtagaataagatggccctagggcatcaaaacaacagaaactaaatcttgggctgggtgcggtggctcacgcctgtaatcccagcaattttgggaaccaaggtgggggactcacttgaggtcagaagtttgagaccagtctagccaccatggtgaaacgctgtctctactaaaaatacaaaaattatcctggaggttgcactgagccaagattgtgccaatgcactccagtctggacaacagagggagattctgtctcaaaaaaaaaaaaaatagaagaagaagaaacaaaatcttaatttcttcatcaaatgtaaaaactatggactgkactctggaggaataatacacaaaaagacacataggcgctttttttttgaagttttattgagaaatattgataacataccacagaagccactgatttaaagtgtaaaattcaatgtttttcagtatatttgcactgttatgcaaacatcaccacaataaattttagatcatttttattaccctgaagtaaacaccatatc

SEQ ID NO: 797128 - DNA, 610 bp, Homo sapiens
ttttattgcaaagaatggcaagatttttaggcttattttctgaaaattctccctgtgtttggggaacagtcacagaatgtggaggaatgggcttctaggctctgtggctggagattcgcgtccaggagaactcaggtccsagggtaggcagagaaaaacagtgtaagagtgccaacagaatgctttgaaatggaaaattttaaatgttccctccaaaaggagtcccagataaccacacaaaagaggactttgctgggcaggtccattgcaattgttcaataacaagacacagacagactgggaaagaaggaagtttatttctgcagccacttacagggagaagcgccaggtaattcaccagatcaactcaaagttacaagttttttttttctagtgcttatatacgtcttaagctccacgtgggattgcacctacaagtaggagtgtttcattcaatcaacatcttatctttaactcgggtctagcgtctggaaagatttctctagagtcttggaaagtttctgaatcttaagacaggccgaggtgaatgtgtaccaatgctatcattattcgatcagactttagggtctgagaaaacccaggtggggtc

SEQ ID NO: 797129 - DNA, 610 bp, Homo sapiens
ttttattgcaaagaatggcaagatttttaggcttattttctgaaaattctccctgtgtttggggaacagtcacagaatgtggaggaatgggcttctaggctctgtggctggagattcgcgtccaggagaactcaggtccgagggtaggcagagaaaaacagtgtaagagtgccaacagaatgctttgaaatggaaaattttaaatgttccctccaaaaggagtcccagataaccacacaaaagaggactttgctgggcaggtccattgcaattgttcaataacaagacacagacagactgggaaagaaggaagtttatttctgcagccacttacagggagaagcgccaggtaattcaccagatcaactcaaagttacaagttttttttttctagtgcttatatacrtcttaagctccacgtgggattgcacctacaagtaggagtgtttcattcaatcaacatcttatctttaactcgggtctagcgtctggaaagatttctctagagtcttggaaagtttctgaatcttaagacaggccgaggtgaatgtgtaccaatgctatcattattcgatcagactttagggtctgagaaaacccaggtggggtc

SEQ ID NO: 797130 - DNA, 594 bp, Homo sapiens
tttggatattatgattctctctttcctcttattgtctagacatcttggatagtatccagtgaggcctgtgggcaagaatgggtgtttcttatatttgggaacacctaatatccatgaaagcagggtcttggcacatgtctgctttcgtattaagtacatgtactagctggaattttcctccctctgttgttactgagttggggctgctccctcctttatcaattctccctttttatcatgattgctrtgttggaaacttgctgactcttcagactaggggattcagatccttctcttggggcttcagagacatggagtggatgaatgaatgacttcccatgagggaggagttccctgagtctggtctcaagtgattatccagtgcctcacagtggaaggaaggtctgtgaagactccagggtcgagggaaagttatgttcttggaggtatgactgagcccagaatccaggcctccagtgtccatctccttgcctggcccatttcagtcttcagacatgctttgaggtcaatccagtcactcacccagcaacagacactgcctctgccctcatggaccttgcagttctagtggtg

SEQ ID NO: 797131 - DNA, 604 bp, Homo sapiens
aagtccctcagtgtagagatgagtctgtagaggaggttgacacaagcttgtgaaagacccagtatgccaggctaagggggtgggaacagtgagggacactgagggttttatggcttaaattttgacaagtgtatctacatatagacaactaatgtaacactccttttttttttttttttttttttttttagagatggagtctcactctgtcgcccaggctagagtgcagtggtgagatcttggctcactgcaacctgcgcttactgggttcaagtgattctcctgccttagcctcctgagtggctgggactacagactgatcccaccacatctggctaatgttttgtatttttggtggagacagggcttcgccatgttggccaggccggtctcgaactcctgagctcaagtgatccacctgcctcagcctcccaaagtgctgggattacaggcaacacttttttwaattttcttttttgagacagagtcttgctttatcatccaggttagagtgaagtggctcagtcatagctcactgcagccttgacctcccgtactcaagcaatccttcctcctcagcctcctgagttgctttcaatttttt

SEQ ID NO: 797132 - DNA, 493 bp, Homo sapiens
ggatacagattaaaatcagcagcagaaaaaggtgcatagggcagagtccaggagaaaccaagcacaagcttccagttgtcctctgccagtggtatcatgtgaacagtgcttaattcacccaacgatatgtggcagaaagtacagaaaatactccccaacaagaagcttacctgagccttggggttgagggttttactggagrttggtctcatggacaagagcacccatttggatgaccttagtttcctgtctccacctttcccaaggtcaagctgacactgcatggtccaaggtccccacaataaatcacattattaactaactcccagataggcaggagattccaaggacttagaggttatttcccaggagccaggctagagtcacaccattctttggagtatgccaggtttggacaattcaggcctactaagtttccttgactgcacccaagtgatagtgagtatgtaggaaatgagtagtcgcatatatt

SEQ ID NO: 797133 - DNA, 493 bp, Homo sapiens
ggatacagattaaaatcagcagcagaaaaaggtgcatagggcagagtccaggagaaaccaagcacaagcttccagttgtcctctgccagtggtatcatgtgaacagtgcttaattcacccaacgatatgtggcagaaagtacagaaaatactccccaacaagaagcttacctgagccttggggttgagggttttactggaggttggtctcatggacaagagcacccatttggatgaccttagtttcctgtctccacctttcccaaggtcaagctgacactgcatggtccaaggtccccacaataaatcacattrttaactaactcccagataggcaggagattccaaggacttagaggttatttcccaggagccaggctagagtcacaccattctttggagtatgccaggtttggacaattcaggcctactaagtttccttgactgcacccaagtgatagtgagtatgtaggaaatgagtagtcgcatatatt

SEQ ID NO: 797134 - DNA, 541 bp, Homo sapiens
tcctctcttataaggacaacaatcattggattcaggtccattcctaaatccagaatgaactcatctctggatccttaattgaattatatctgcaacagccctgtgtcccaaataaagtcatagtcacaggtacttaaattaagacatggacatatcttttgaaggatacagtacaagttactgtaagtgtgtaagtgtcatttgcttccaaattacggatgctaraaatttgtactaggcggtgggaaccttatttaccaaaactttttctctagaactttcaataagtgtatctggctgacaatattcctctctccctgtgtaccaaatcacccatattatatatatacatatattatatatgtatatattatatatatataaattgtatatattcatatgtgtgtatgcatgtatttttttcctgagtcagattttctaataagcagcaattcacttagtacagtgactccacagaatcacagttcaaaaggagttttaaaatgtcatccagcaattaaaagaactagtgtgagttgtt

SEQ ID NO: 797135 - DNA, 541 bp, Homo sapiens
tcctctcttataaggacaacaatcattggattcaggtccattcctaaatccagaatgaactcatctctggatccttaattgaattatatctgcaacagccctgtgtcccaaataaagtcatagtcacaggtacttaaattaagacatggacatatcttttgaaggatacagtacaagttactgtaagtgtgtaagtgtcatttgcttccaaattacggatgctagaaatttgtactaggcggtgggaaycttatttaccaaaactttttctctagaactttcaataagtgtatctggctgacaatattcctctctccctgtgtaccaaatcacccatattatatatatacatatattatatatgtatatattatatatatataaattgtatatattcatatgtgtgtatgcatgtatttttttcctgagtcagattttctaataagcagcaattcacttagtacagtgactccacagaatcacagttcaaaaggagttttaaaatgtcatccagcaattaaaagaactagtgtgagttgtt

SEQ ID NO: 797136 - DNA, 595 bp, Homo sapiens
gcaaggatgcaatttagtacagacattatggaaaagtctggaagttcctttaaaaactaaaaatggaactaccatatgattcagcaatcccaccactgggcatatatccaaagaaattgaaatcagtagtttgaagagatatctgcactcccatgttcattgcagcattattcacaatagccaagatgtggaatcaacctaagtgtacatcaaatgatgaatgaataaagaaagtgggattatatgtacaatggaataccattcagtcttacaaaaatagaatggaattctgttttgtgcaacaacatggataaaacttggagggcattaygccaagtgacattaagtaggcacaaaaagactgttaccgcatgagcttacttgtatgtggaatctaaaaatgtcgatctcataaaagttgagaggagaatggtggttatcgaaggctggtttggggctggggcattaagtgtagacatgtgcattaaagggtacaagtttcagttaggaggaatacgtttttgaggtttattgcacagcagagtatagttaataataacatatttcaaaattgctaagggagtacatttcagat

SEQ ID NO: 797137 - DNA, 588 bp, Homo sapiens
  misc_feature 370, 371: n = A,T,C or G
tttatgtggtgtcagttgtgatgtccccattttcatttctaattgagcttatatgaatcctctctcttcttcgttaaactatctagtgctggatcaattctatttatcttttcaaataatcaactttttgtttcattgatgtcttcttttyttctgtttcaatttcattcagctttcctctgatctttgttgtttgttttcttctgctagtttgttcttgtttctctagtactttgaggtgtgacatcagattgctaatttcagactttttggtgtaggcatttagtgctgtaagctgtccacttatcactgcttttgctgtatctcagaggttttgataacttatgttacagttattattcatttcaanntatttttagtttccatcttgatttcactgttaacccaaaaaagtcagtcaggagaggattgtttaatttccatgtatttgtatagttttgagggttgcttttgaaattgatttttagttttataacactgtggtgtgcaaagatacttgatataatttcaatttttaaaaaattattgagatttgttttgtggcccattgtggtgcaccttgaagga

SEQ ID NO: 797138 - DNA, 649 bp, Homo sapiens
atccactactggagagttactgtattattctgggggttttatagaaccctcgttttttcatactgccagaattatttttctggtttctttttatttgggtagactatttttttcctatttgtttttgatttattttttatttaactggggtttttttgtttgtttgtttgtttgctttttctctttttttctcctgaggatgtgactttcatgtttgtagtttattgttaactagttttggctcttggtmctttcagcagcaaagactctgtttgagttttctagttatagagaacatttgtgtgatggctttctcagaggctggttgtaatagcaatgtgctggacgtgtgagtaagttcacagtctcttgtggggagttttccttgtgtttcacagtttaggctgctccttcttttaaagcgtctgtggtttattgcagtttttctgttaagttcccatgttgcttcttggaaaaaagttcacagcatgaagctctacacactattttatctttacaagtaaaagaggcatactacaatgcccccaacccaccatcttggaaaaaatatttaattatttaaaaatacatatcaaaatctcattactttctacttattttactatattttaatattagacaaactctt

SEQ ID NO: 797139 - DNA, 643 bp, Homo sapiens
agaaaagttgacttctttcttgacactggattgtgggttttctttcaaccaaatagtcccctctcaacttcccctttttaaaatattttgctacagtgtccactcccacccgctgggaacaaacatctgagactttcctgcctcctcggtgcccwttgcgtccttagccgtccctctgcacctcaatccctgttcaacgttttgagaacaatgacttatgtttgagctttgatttggggagtgggggagggagttgatatttatttgatgactggttatcatccgctgcctacatgaccttggtttgtaatgtcccatcactgagcctcagtttcctcctttgcagattgttgtcatgaatcccactggtcacagtggttgttgggtcagtggtgcctgggacattcggaagggctcatttgtgcttgatttccaaccagggtaagacctgaactgtttgggatgtgaaaggatctcgatgttggaccccccagtctgtgtagatgattgatgtgtccactctggatctcacatctgaccctaatggagaaatgtacatgaggcatttctgaaatacccagagcatcaatgtcatgagcagaaaaagaggtgaggaagttcccaagtgtaggtggatccacaa

SEQ ID NO: 797140 - DNA, 643 bp, Homo sapiens
agaaaagttgacttctttcttgacactggattgtgggttttctttcaaccaaatagtcccctctcaacttcccctttttaaaatattttgctacagtgtccactcccacccgctgggaacaaacatctgagactttcctgcctcctcggtgcccattgcgtccttagccrtccctctgcacctcaatccctgttcaacgttttgagaacaatgacttatgtttgagctttgatttggggagtgggggagggagttgatatttatttgatgactggttatcatccgctgcctacatgaccttggtttgtaatgtcccatcactgagcctcagtttcctcctttgcagattgttgtcatgaatcccactggtcacagtggttgttgggtcagtggtgcctgggacattcggaagggctcatttgtgcttgatttccaaccagggtaagacctgaactgtttgggatgtgaaaggatctcgatgttggaccccccagtctgtgtagatgattgatgtgtccactctggatctcacatctgaccctaatggagaaatgtacatgaggcatttctgaaatacccagagcatcaatgtcatgagcagaaaaagaggtgaggaagttcccaagtgtaggtggatccacaa

SEQ ID NO: 797141 - DNA, 497 bp, Homo sapiens
actctggtccctaaggagaccccaggggctcacaaagatcccagggaggggaggacctgcccaggcttcagggggcaaatccctcaccgggaactctcttccagggctgagtctgggccccaggacccacgtgcaggcaggtgagtctgtccccagctcttccaggtccctcctcctcactggggacaaggggccacccccgtgccgctggggatggggaatagcagttctgggctgactgatgggggcrtctggagggtcctgggctgagagctggaatctgctgggttgggtgggaaatgagttagaatccgactcctgatttccttccagggcacctccccaagcccaccctatgggctgaaccaggctctgtgatcacccaggggagtcctgtgaccctcaggtgtcaggggggccaggagacccaggagtaccgtctatatagagaaaagaaaacagcactctggattacacggatcccacaggagcttgtg

SEQ ID NO: 797142 - DNA, 625 bp, Homo sapiens
attatttatttacttgaatggctagaaatatgtaattactctggattttttaattgaggaaaacaatggttaacttttggtttgagaaacctcatgtttatcattctccccaagtatagttgcacagggaagacaaaggaggaagttcatgtcagtaagttgctaagcctgaggaacaatagatttttaagaggtgttgagggattcagcttcaaagagaaccaaaattatgtgcctagagaaacaaaaactgaataaagggcatttctgatatgatagaagtggtgaagaaaaccaaagaagtgaactagaagaagccacaggttgctatactattcccttttttaaaaagtgcctccaaagtgtggatagagctactttttcattctgctatttgactgaaccacaaatgcatgttcaaaaagattaaaattaaaaaraaaaatgaatagatgcattttgtctatttcctaatgtaaaataaagcaattgcatacacattgcaaaaaaacataatcatggcacagtgtatttgcttagcaatgctattctgaatgttttattatattctagaaatactatcttaatagttttcaacaaaatatctgtgatgtaaagaaacaag

SEQ ID NO: 797143 - DNA, 550 bp, Homo sapiens; identical to SEQ ID NO: 748094

SEQ ID NO: 797144 - DNA, 543 bp, Homo sapiens
tttagtctcttcattaacaaggagactttggccaagtcattaactaatctctgcacatttcctcatctttctgaaaactaaagaaacaattgagattattgttaggtttaaatgagataaatgtacctggaagggaatttttttgaagtgatatttacataatttgttttattgyttaattagtgatatttattcaaatgaaatacaatgtagttgaatacaaaaaatacttttattccttttactccttttcaatttttctttcatttttattcctcattgactgtttttttccctcatccagcaattgcattactaccatgtcattattatacatattttgggtagaaaaattagagtaggtagaacagaggttggtgttactcaggtcaacgtaaattcaccataaaatcgttcttcatctattcttgctaccttcttttgagagaggcaactctgtgactttcaaagcttatcttgtctgaagaaatgtctagtgcatcatatgattattataattgcatcctcatgtcaatgacagta

SEQ ID NO: 797145 - DNA, 555 bp, Homo sapiens
tattgaagtataggtacatatatacacattttaaattcggctttccaaaaatgtattcacagaaacaccaccatatagcatttcaaatgtgcatcttccgggtatgatgcttctgtgagggtcagtactgacaccacggttttgtctctctgacccactggctgagtgtgcaattgctgctcatcctcttaggcatttggcaactgtaacgccacaaaggaaccagacaacctttctcctcattatgtgcagttaagtttatctttgcgagtgttatttgtaagaaaggcagcaggactgggaaacaaaccaaagaaaataatgttagcataaatgcttcaaaggagacatgtgttgctaatggtttttcagaaaccatagggagkgagggagtaacacttccactccattgagctggcttaattttttcaaaccatgtgaactatttgaagagctttatagaatttcacttctgaatcaggactttgctactttaaaagtggctgttactattctaatagtcagcatgaatgacaataagaaaatacaaagaaa

SEQ ID NO: 797146 - DNA, 645 bp, Homo sapiens
agaggaatttctaggtgtatatattatgaacaattggtccagtataagaaaacagtaacattttacatacgtaatgttttccagaaattcccaactctttctaatatgtacaattcccaaaataaatgcagagctagtagctgttctgaggaatcttcaagcaaatttttcaatactagctttgttattaatcatcccaattttgttcatgttgtattacattggggaaaaatagttgtacaatgaacaagtatactactaaacaaaatgctcatctttttcttaagagtcaaaacggaaggctaataaagaccatttaaaataaaagggcccattactcctcagttttatatgagcttacatgctttcattgkgcagagtgtgttattaatttaacatgccagattcataggtttctgcaatatcaggtttgatgtattcattatcggcactcagtacattaattcacgctgaagtccggtaaatcaaaattataccatctggcttcctgttcttaatgatgaatttgatgtaggggtgattaagattgttaggcttttgaattttaatgtaaaaattaggggattaaaaaggcatttagaaatgaccaatagttagaataaacttactgacaggatctaattt

SEQ ID NO: 797147 - DNA, 518 bp, Homo sapiens
gtataacaataaaaaaattggaaactttatgttttaatcaccataaaaatggagatacacatgaccaaattttaacaaaatggaatattatagagcatagctacatttttcaccattaagaaagctcacatataaaatgagcaaaaaattgttttatatttgctattgtgaatagtgctgtgatgaacatactcatgcatgtgtttcattcaccatatatgaatatacataatgattttattatagttttaaagcatgcaaaataatgccatatatattttgcatgcttyaaaaatatatatgcaatatataatggatatataatatacattattaattgtaaaaacatataaacaccaaattcgggatgatggatacctgttggaagggagggaaatgcaattagggaagaataaaccaagggcctcaattatatttgtaatattttatttcctatgttgtgtggtagttaatgcggtggttaatgaactcagatgttcattaaataaatatataat

SEQ ID NO: 797148 - DNA, 381 bp, Homo sapiens
  misc_feature 13, 19: n = A,T,C or G
aatctctttgagnggaagnagttttcagtttcatttgccaatgaatcttcattacctagaaaagtgcatggcacaaaacagatgcttaacacatatttgttttttcttttccaaattttaagattcacggggtacatgtgcaggtttgttatgtgtgtgtgatgctgaggtggctcaacaaatatttgttgactgactgactgaacattctcacaagttaccaggtgagtaaatcatttaatytcatttacttttggggtattttctttacttttagtagtcatgtgttggtcctaggggcttaacagatattaacagagtctttcagccttcagtatatactggcatggtagccagactacgagatggtctctaatgatt

SEQ ID NO: 797149 - DNA, 690 bp, Homo sapiens
atagtttctaatgattctttctctttctgtggtattagttgttatgtcttcattttaatttctgagggtgttttcttctgattgagttgcaagagttacttatgtattctgataaaggatgcaagtcctttgtcagaaatatattttgcatgcattttcttccagtcagtgggttgcttaacagtgtttttcaaaagagcggaagcttttaattttgatgaaatgcragttatcagttttgtcttttatggtttatgctttttttgtgctctttaagtcaactttctctaactcaaatttgtgaagcaatattcaaatgatttctcttagcagctttatagttttagcttttacactaaagtctgtgatccgtttcaaattaatttttgtgtatgctatgaggtaggggttgagcttcattttttcctgcatggatgtctggtggttgtttcagcataatttgttgaaccaccccccaccccacaaactgccttaatgtctcatcaaaaataagttgacaatatatatttggatctacttctggactctattctgttccattcgtatttttgtctctatgccaattccacaccaatttaattatcatagccttattgtaagttgtagatacaagtagtatgagtttttaaaaaaatccccaaaattattttggccaatttagatactttg

SEQ ID NO: 797150 - DNA, 657 bp, Homo sapiens
taaagaaaataagatttaggggcacagtgcaacacgtgccctgaatgatctcatggtagaaatctaattttgcttctatttatttggggttatagataggattatatttctcaggcagagaaagtcattaatcaagaaaggggcctcttaatccttttccctattttaatgagacactttaaaatgccttgcgttggtgaatggcaagtgtcagctgggtgtgattagcaggcttttgtggcaggtttgccgtggtactgtgtgctcaggtattcaccggcctaatcctgcctgcctatcacgggggcagaaatggacaaagatggctttatggcctcactcaagttgcaggctggtgagtgggcatttgagagctttggtgccacagtctggacaatggcatatgggatacrttcttagaaatcagccccccagtattagcgtagcccctaagcagaatctccaaagtaaataatacataccagcaacagagtttcaccgtcagtgtatgggtgggtccctccttcattgaaatcagaacgtctaacctggtagaaaggtgccagagaactgggagtccccctgttccctctgtcccctctcttccctccctccttctttcctttcatggccagcagctgtgctcatcactgggga

SEQ ID NO: 797151 - DNA, 613 bp, Homo sapiens
tggcatgtgcctatagtcctagctactctggaggctgaggaaggaggattgctggagcccaggagttcaaggctgcaatgagctacgctggtgccactgtactgcagcctgggcaacagagtgagaccttgtctccaaaacaaaaaaaaagaaaaaaggaaaaaaaaagaataagtgcttattttgttcatgcccctgagaattggctggaggttggctgatctaggctgggcacagatggggtggcttggctggggcaggtcttctccatgtgcctttcgttctcctagactggcaggccagccagagcatgtcctccgcatgtgtagaagttcaccagcgtgggcagagtcaagccaggctgcttaaggcctgggcctggactgggcatgccgtggcttctgcattattctattggccaaagtaagttacacgactcagctgaaaaatcaaagggcmggtaaatatgctcctccttaatgggaaaaatcccaaagttacatgacaaagtgtgttgatgtaggaaaagggtaaagaattggggccagtaatgcaactgatcacctatgttaaccaattagagcaataaagcatcgtattagcactcttttag

SEQ ID NO: 797152 - DNA, 619 bp, Homo sapiens
atatgaaaaatgacagaactaactcaagaatacaaagaaaaggaatctcaaagggacaactcaggagagaaatgtttgcagcaacatggccaggattattattttataaggagtagggtcgacattatgtttataggaggaataggaattacttaggcaagagtagactgtttggtctttgaaagaaagtaatacttataaatcatccttgcyctttgacagctcagggggtattacagatggaaagattaatccgtcaaagtacccactactgcctccatccactatcccctctggctactagtctagagctcagaactttttcgcttagagccagaataagcttgggcagagtcccattgagattgcctaacaagatgcttgatgctataagaatttccagaaccaataagaggcatcaggctggggctccattatgaatggaggagggtagactgttcagagggagagaagttggaataccaagatggaagaaggatctaagtgtgggactttccagaagaggaggatcaggaacacagaaggaatgagaaataagagagtgtttaaacatgagactcttaatgactaatcagaaaggctatgagctccttcagtg

SEQ ID NO: 797153 - DNA, 622 bp, Homo sapiens
gagtggtacttgtggtctagacttcgagttgagggttcctggggtgaggctaaggttgggttcaaatcatagctgaacgatgtattgagcagatagtcttagataagtagtttagcctccctgagtctccatttcctcacctgtaaaatggractaagaatacctcccccataggattgtggtggtgatgaggtgaaacgatgcaggcaaaatgttcagcccaggccctggaagaggacgcatttgctatgtagataagatcctctctccttatcttcctgttccccaaaagcaatactcaattttagtctcactgatttaggcctcaggcaggaggatgaaaagactttgacatcttcatggtattcagaatcagtcaccatggaggaaaatagatggggatggtggacaaaaatccccaaacaccatggtccagaataatgagtgttgtagctgacatggggcatcaagcagacatctggttggggcagaccagactgaggagagagaatcccaacagattccaagcagaggccaggggtcctgtgaatgcacgtacatcctgaaagtggtgcacaggtacacgccatccctgctacataagctgaatatctcctgggtg

SEQ ID NO: 797154 - DNA, 476 bp, Homo sapiens
gcttaaaattgtctgtttcctgaatgcttgataaaaggtcacctgttaaaatcttttgagtctgtttttttctttgtaaaaggatttttgattactaattatatttctttagtggaaataagagtattcctttattcctaactgcsatttaatatcatactgtgtattatcattttgggagtttatatttctctgtttctcttttcctatatcaccaaatcacatattgagatgaataaacatgactttccacacaagagaaaaaatatatgaaaagtgcaaacctttctaaaattaagatttaggtaaatttttgttatgcttatccaacaaatgttagttttctgttttgtcatataacttccttcctttaaggattaagttatttattttcttgtttcctatattatttttccctatttattgacagtaacattccttgacagtgcaatgataattggtgctcataaatggaa

SEQ ID NO: 797155 - DNA, 618 bp, Homo sapiens
tatagaaagagaaatgcctgtcttaatggtccagacaattgcatgttccatcccacacggggagcatatttcccctaagtgagtataagctggagatgtgagtccagtcggctgctctcaactgccccgcttggtgaaaacatcccaccactgcatgtcattctgatgtttacccatacgtrttcttcacccagcctgggccctccacagagaccaacgactgggcgaggcccttgccctaagacccaagaatctgtcccctgagcccgggaggtggagggaaaccagccgtgccagtctgcaccatagtgtttgcctagggtatgtccaagggaaattttggtgaagcaaggtacatgcccgatgcaaggccttagaacctcagcccatgaggaaggagctcctctgtcctttagccaggagtggtcggagcagggagaaggagtggtgaggctcttggaagtgggacctccatggcttgagaataaagtttgttcctagccgacctaacgtcaccatcaggctggccctcaccttgcccataaggagaataaaccagtactaccagtgtgcctgcttggaggttcttgggtgagtatcttgggcatttccagaggc

SEQ ID NO: 797156 - DNA, 618 bp, Homo sapiens
tatagaaagagaaatgcctgtcttaatggtccagacaattgcatgttccatcccacacggggagcatatttcccctaagtgagtataagctggagatgtgagtccagtcggctgctctcaactgccccgcttggtgaaaacatcccaccactgcatgtcattctgatgtttacccatacgtattcttcacccagcctgggccctccacagagaccaacractgggcgaggcccttgccctaagacccaagaatctgtcccctgagcccgggaggtggagggaaaccagccgtgccagtctgcaccatagtgtttgcctagggtatgtccaagggaaattttggtgaagcaaggtacatgcccgatgcaaggccttagaacctcagcccatgaggaaggagctcctctgtcctttagccaggagtggtcggagcagggagaaggagtggtgaggctcttggaagtgggacctccatggcttgagaataaagtttgttcctagccgacctaacgtcaccatcaggctggccctcaccttgcccataaggagaataaaccagtactaccagtgtgcctgcttggaggttcttgggtgagtatcttgggcatttccagaggc

SEQ ID NO: 797157 - DNA, 505 bp, Homo sapiens
ttcatcatcgtggttgtcatcaaccgtcccgtgcggtgcagagctttgcttcttggttctgcctgcttggtggttgccaggtcccgccagcttaagtttatctgttcgttcattcattcatttatctgttaagcccctcttccttcttccaggccagggagccagggtgctgccaggtggtggggagcggctttcagaagtggctcttggcagcgcaggctgggctacatttatggcctttatgtaaccccttttccctgagccccattcctgcccctcagatctttatttactgactctcggcagacttagaggtcytgaaaggcaccccccaacgccctcatctcattcatccttctgcctccaggcaggagggtcctcagccatggcagacatgtggggtgatagccaatcccagccatgagcccctattcagctttcaccctgggcaagatcctgtggagggtcccagtgtggggctgggggagggatgtgggatcagctg

SEQ ID NO: 797158 - DNA, 457 bp, Homo sapiens
gagccctgcttttctgactggccaagaaggcaccctccagtcttccccagctgatgcacacatgtgcttctgtggaggaagcacagacgccattctgttggattcactgggaggtcggggtgctagcctgccctaacccgccttggccttctcaccttgatccactgaaagggaggagcaggtgtgagccccttatcagccaaggaggccgcaggcagggtcaccgcagaggccatctgggtgcaggggagcagggtgaggctcctctgttccctcacaccccagctcccasgatcctgaggagggaagtggaagtgagtggccattgtcacaacctccccatggcactgttcttgtgctcccaggtcaacctggcctatgcctacgagaccaaggatgcactgtgcttggtcctgaccatcatgaatgggggtgacctgaagttccacatctacaa

SEQ ID NO: 797159 - DNA, 529 bp, Homo sapiens
tatcagatcatgatttggcttctatgatgcttactgtagttaaagctgtgtaatatggatttggaaggtgtttttttttttctccccctcaccccgcaagactgggatggtgttttgaagggttccttgatacctgagcttagtaaacacttgtccaccttggggatctttttacctgaggcaaaggagaagcgggttattattttgaaattagcagtctatttctgaaagtaaggaaatactarctaccctgaaaaaccagttgtttggtaattgaaactggtttaaaagcactgtgtttgggcatcgaaactagtttaaagggattgtgtttcctgcatactttgcaaagaactatgtgtttatgtggatacagccccttgcccccaaccataattggtaaatgcagcgttattttttgagattgaggaaggcattgagtttttgaacttctgatcaatttatggtggtagttgaggattacaaatccttttaaagacacactgaatttgaagaaaatttagactag

SEQ ID NO: 797160 - DNA, 623 bp, Homo sapiens
aatgcttgcacgcatctagcagatcagtttttttcacccatggttcattgagataagcaaaaatagtccctgattcaagccttattactttctctataaaaaatgacccctcattaagatcacaacataattttaactcaacactaattgttatctttaactaacagtgcttgaagaaatacgcaatttgaaattagatccaagcaaggtaagtattgtcttgattttcaagatggaggaaaggcagaacatttcaccctgatagggatcactgttggcttctactcctccagggctgctcagctctacttgcagaattgaccgcctctgctcccaagagcacctgccattgctcacccatctaccaggacatcaggattgactgggtggagaccacgaacctgggaccttagcatcttgggtacaaagcaggagctagggcacrtgttgcatcgttacccagacttctgacttgttgaccctgtttacctggtttctgcctttggtcttttgattagtaactccagttttctggtgcaactggaatcccactctaccctagaatctgtttgtttgagattctgatagttttcctaacactcttgccagctcgacctctccag

SEQ ID NO: 797161 - DNA, 602 bp, Homo sapiens
tcttctacagatgaaatgcataggttgaggttagggagagggacacagagcatccatgtactttacagtcataccaccttccaggagccttcatgtgttcagctgtctggaagcttctggaaccctgtcgtttcggactgttagagaagcttcattacataggcattattgattaaaccattggccattggtgatcaaattaaccttcagcccctctctcctccctggaggctgtgggatggggcagaaagtcccaaccctcygattaggccttggtctttcagttgaccagccccatcctaaagctacctcagggctgccatccatcaattaactcattagcatacaaaaagatgtcactggaaattttaagtattttaggagttgtataccaggaaatggggttgaagttcaaatatatattttacactatcacagtccaatacgctggtttctcatggactagttcatgctaatcaggctcaaaacaaactcctttataacttggaaatttttttttattggcaagggaggatatgctttacttgttaattagaaatttatttattttccttccatttttccaatttctgttcttacca

SEQ ID NO: 797162 - DNA, 573 bp, Homo sapiens
gacaactttatgattaatactgaatgtatttaactcctttctgctgctgttacagacgcatgtgcctccttggcattcaaaatgtgcagttgacatatctgccactctgtaaggacaagcctgggcagccttgccaagggcagcattttggttttcctaactacatttgggtcattttccccatttctcctcatcagtacttctccagtgtcctctgccctccaaaactcctggggatttgttggtgrtctcagcaacttatccatatttgatgccgtatttactcgctcagggcctctcagagcagctggcgcggtgggacccatcaggtggttggctttatggcctcctctttacctctggccctggaaaaggtttagtaatcgctaagcctccatatcaagagtcacctgaggcctttgccgaagtacccatgcccaggtgcattccacacgctgccctgtgtatccctctctcctgctcctgcattttgactcagtaggtataagctggggctggaaagcggaattttctttcatcaagaccattcccatcaaagcctggcaatgataa

SEQ ID NO: 797163 - DNA, 573 bp, Homo sapiens
gacaactttatgattaatactgaatgtatttaactcctttctgctgctgttacagacgcatgtgcctccttggcattcaaaatgtgcagttgacatatctgccactctgtaaggacaagcctgggcagccttgccaagggcagcattttggttttcctaactacatttgggtcattttccccatttctcctcatcagtacttctccagtgtcctctgccctccaaaactcctggggatttgttggtgatctcagcaacttatccatatttgawgccgtatttactcgctcagggcctctcagagcagctggcgcggtgggacccatcaggtggttggctttatggcctcctctttacctctggccctggaaaaggtttagtaatcgctaagcctccatatcaagagtcacctgaggcctttgccgaagtacccatgcccaggtgcattccacacgctgccctgtgtatccctctctcctgctcctgcattttgactcagtaggtataagctggggctggaaagcggaattttctttcatcaagaccattcccatcaaagcctggcaatgataa

SEQ ID NO: 797164 - DNA, 621 bp, Homo sapiens
gaatattttgccaatgctcaatgaacttctgaattttatttatttttttactttattatttatttatttatttattttgagatggagtttcgctcttgttgcccaggctggagagcaatggtgtaatatcagctcaccacaacctccacctcctgggctcaagcgattctcctgcctcagcctcctgaatagctaggattacagttatgtgccaccacgtccagctaattttgtatttttactagagacagggtttctccacgttgttcaggctggtctcgaactcccaacctcaggtgatccgcctgcctcagcctcccaaagtactaggcttacaggcgtgagccaccacgcctggcgaacttctgaattttaagtgttccacatactayctaaagatactgactttgccattcattggctattgcatcaaagattaagcagctgttatgtacatcacacgtttctagatgctgcttagtacaatggtgatgtttacttttacaattgtccttctcaagtcaaatatattttccaaactaaaagttaaaatatgtgtgttagtcagggttctctagagggacaggaatgatactttgtatccttcaatccaatcaagtt

SEQ ID NO: 797165 - DNA, 559 bp, Homo sapiens
aggctggagtgcattagtgtgctcttggctcactacaacctgcacctcctgggatcaagtgatcctcctgcctcagcctcccaagtatctgagactgtaagtgcaagccaccatgctgggctaatttttgtatttttagtagagacaggtttttgacatgttgtccaggctggtctcaaactcctgacctcaactgacctgcctgcctcagccacccaaagtgctgggattacaggcatgaaccactgggcactttctaactgattctatgagagcagcattaccctgataccatagccatacaaagacactccaagaatagacctcacaccaatatccckgatgaatattgttgcaatattcaaaaacaaaattcagcagcatatcaaaaggattacataccatgaccaagtcaaatttattcatagaatgtactgaaggttcagcatatgtaagccaatcaatgtgggggtgggggttggaggaaaggtgggggtggttaacgggtacaaaacaatagttagaaagaatgaataagacctagtattaggtagcacaa

SEQ ID NO: 797166 - DNA, 657 bp, Homo sapiens
gggcttctttgtttaatctcaacacacagattgttttgaaagttgagttttgtcatctaatacattactatggtaaaatatggctttcatatgcttgattttctaaagcatgtattcacctataagatattctcattcttgagtcctacttggtctactgatgcttggtccactggttttagtataaaactaaagacattaggtattattaaaatataataataccaacttattgaaagataacgcctcccctcccctcttctctcctctcctgcccttccttccttccttccttccttccttccttccttctttccctccttccttccttcttgtgagggtggggtattgaagggatwaaatgcccagaggaaaactccaagatgggatgggagacataggtccaatatatcagaaggttaaattgagtgggcttatgagagaagcaggagaaagggaggctagagagccaataaaacaaagttcatagtgataactggaacagaatagacctcaaaggcttaaagatgtcaaagtccctgcattttttcctaccttcagaatctaccaccttcagtcatggagaagtcttgatgaagttacccaatctataacaattctatgctgtgcatgctgattgaattatcttcatcaatg

SEQ ID NO: 797167 - DNA, 582 bp, Homo sapiens
gttaggtaaaagcaatatgtgtgactccccagcaagtcatcaatcacttgttggggctggatgtgtgttgcattagttggtgttcaacagtttgtttttttatgtcaggcaacaaaagggttcctcctgtcatcctgagattagaatgctctctgtacatcaacatggtaggtatggacaattagattcacaggagtgttggaagattagaagagtcctcaccacctggtccagacagaggagccaggatattcagcattcctttagattttaaatgaaagccaaagtaagaggcatagctcctgattttcatttatacagtcaataacacagaagaaatgaatctaccctagacattcttaaccatgaagccatataattytttccttcttgtgatttttcatgtacagtgagctcatgctatgttttgatatctaaggactgaaatgacctaagaaggagcaataaatttagacataatccttatagatttggattctaataaattatttactcatttatggggatagaaaaatcattaatagcagacatgctgtgaaaatttagacctgagttcctgtg

SEQ ID NO: 797168 - DNA, 634 bp, Homo sapiens
tgaggccaaaagcctgagaacctgaggggagcaactggtgcaagttcctgagtctgaaggccagagaacctggagttctagtggccaagggaaggagaatatgggtgtcccagcagcagcagaaagagtaagagcaaattagcttttcctctgcctttttgttctatccaggcacccagtcaactggatgatgcccatccacattcaatacagaaagatgtttcttacttagtccactgattcaaatatcaatctctttcagaaacaccctttcagacatatacagaaataatatgttaccagctatctgggtatctcttaatccagttaagttgacacctaaaattaactatcacaaaggcaaaaatgtgacacccaaagttaatgatcataaaaacaaaattaaagaaacagggggctaacrtggtctttctgataaaaatcatgatccttgctcaattcccggacctgagccaatttttggatttgcaactcattgactgacagtggaaggaccctgcaacatcatcacaggcatatactgcaacggcaactatggccacttactccagtgactgtacaactgaaggaagcgggaattcccagacatttcagacacttggatacagggtct

SEQ ID NO: 797169 - DNA, 564 bp, Homo sapiens
tggtgtgaacacgggaggtggagcttgcagtgagccgagattgcgccaccgcactccagcctgggtgacagagcgagattccgtctcaaaaaaacaaaaagaaaaagaaaagaaaaacattttgtaaagctgtagctaccatagagagtgatacctctgatggatctgggcaaagtaaattcaaaaccttctagaaaggattcaccattctagatgccattaagaacatccatgaatytaggaacaggtcaaaatatcaacattaacaggaatttggaataagttgattccaaccctcatgggtgattttgagggtctcaagacttcaataggagaggaactgaagatgtggtggaaataggaagggaactagaattagaagcggagcctgaagatgtcactgaattgctgcaatgtcatgatgaaacttgaatggatttggagttgcttattaaggttaagaaaaggatgtcttccaatggaatgttactcctgatgaagatgctatgaacattgttaaagtaacaacaaagggtttagaatattatagccacccattggata

SEQ ID NO: 797170 - DNA, 656 bp, Homo sapiens
ggcaacggtaggcagttgggatccataatattggtttcataatgcaaatgccctataattccctattaattttctttaaatttaataggctgcagtggtaaaaccttagaagacttacatggaaagaattattctgtttccttcacattagcttttgacaatcagaaccctgggctaacattctggcaytttctggtcatgtgagcccgagcctgtttttagtatttaatgggagaacatgaccctcattgccagaatcatgtttttctggagcacagggatagcgtggagttggaaaggcatatctctgtacttaatctatatgcctgtctgtcccaaattatatttccagtcttgatgtctttactgagtaccagacttgtatgtccctctctagttgacatatctttttggattttagtaggtatctcaaacatattttgccccaaacggagctcttgatttcgtacgtcctctcctactccacccatctacttccttgctttctctttccctacatccatgctaacaaactctgcctgcaaaacgcagccgcagtccttcttctcttgtatccccagtgcctggagcagtgcacagcacattatgaaccctggaaatactgtggaatggcggacaggactgggggtgactac

SEQ ID NO: 797171 - DNA, 612 bp, Homo sapiens
attgtggaaagcagtctggctatttctcaaagaacttaaaacaaaattaccattcaactcaacaatcctattgctgaatatatacccaagaaaatataaactgttctaccataaagacatatgctatatgttcatcacagcattatccacaataggaaagatgtgtaatcaacctaaatgcaaagacatggaatcagttatcaacggtaaactgaataaagaaaatgtggtactcatataccatggaataccacacagccataaaaaagaacaagatcgtgttttttgcaacaacatgggtggagctggaggccattatcttaagtgagctaacacaggaacagaaaaccaaatactgtatgttctcacttataagtgggagccaaacattgagtacayatgggcataaagaaggaaacgacagacaccagggcctgcgtgagtgtggagggagggagaatcaaaaactacctatttggtactgtgcttatcgcctgtgtgatgaaatgatttgaacatcaaacccctgtgacacacaatttacctatatgacaaacctgcacatgcgtacctgaactaaaataagagttaagaaaaaaaaaaaaccctgaa

SEQ ID NO: 797172 - DNA, 625 bp, Homo sapiens
atatgtatatatccataagaaaaagattggaatggaatattcaaaatgttagtggtgcctgtctccagaacatagagttatcgatggtgttaattttcattttaaacctctccatgggtttttaaaaattgagctataattcacatatcataaaattcacatttcttaaagtgtaaaattcagtggtttttagtatacccacaagggtatccaaccatcacctctgtctaatgccaaaacactttcatcacaccaaaaagaaactcagtaccatttagcagtcattccctattyctccttgcccccaagcccctggaaactactgagttacattctgtctctatgagatttcccggtctagatattttctataaatggacacaacttgtagtcttttaggtctgttatctttcacttagcatagtgtttccaaggtttttgtatgttgtatcatgtatgagtacttgattactgtttatggctgaataatgttccatttggatataacgtattttgtttatccactcatcagttgatgaatatttgggttgttttcacttaatgactattatgagtaatgctgctatgaacatgcatgcataagtttttgtatggacataagctt

SEQ ID NO: 797173 - DNA, 580 bp, Homo sapiens
ctaagcatctgaggatccctagataaacaaacaaacaaattatactgccaacaggaggatatttttttctcccgtggtctctctttaactgatgatgaaaatcttctaattgggtcttcgaggaattatcatagcaagcagtcatccactaaggttgtggagattatgtggttgtttcacaacacaaagggaaggttcttrtgtgttagttttgttttgtttttaacaaatgcattttcagagaccagtatctagaggaactactggctaggagaaagggtggttttaggattagctgttattgaactgaaatagtaatgccagttcatttcacaaaggtataactggtatttttgtaagaaagaaaataaagttggatttgatttaatggaaagcgatttaaagtacagtactaaatatttaaatgcagtgtgacaaccagatcaaagatgtttcatattgacatgatttataaaatgttatatataatatatatctcatatataaattttaagcaattgtgcaaatattctgtaaaaagggtcatttcacattactaaattctagtggtccagaaatg

SEQ ID NO: 797174 - DNA, 594 bp, Homo sapiens
acaggatatactatgtttttatttactgaatctggcaactctaattcagccttttggccttgaacctgattgaatttgtttctcttcttttctcaaaatacgattaaactattttaatagtgtttatgccctattaaatgaagactgtataatcatgatcctcttgaccttctttgaagacatacagaaaaagaaactccagagcatatgtaattctggatcaatgtgtagaatggcattatccacagggcctagtraagcccagtatgttgaattttgctaaaaaagaagaaaaaaaataaaggaatagggtttcagcattttctaatgacatggccagatgatgccacaaaatcttggcattactgataagcacacgctgtgctggaaaatcaatagtttctgaaggggatcctgaagggaactttccattattgaagttagaaataacttagccccacactcataaattcctggagttcagggtgctcagtgttcctaagcaagaaagcacgggacttgtcctaacttcataacctgctgagctggaattattgcttttacaaattacagagtacctacttttttaaaact

SEQ ID NO: 797175 - DNA, 588 bp, Homo sapiens
aaacccaatcaagtataaataacttccatttcatgatggaaggctgctgaagtgtgcatgccccactttatggctagatgggtcagaaagcacccagttcatgataggcggttcaggtcacatggtgacttgatgastcatagtcaaatgttcagtttctaccaaaacccagtaacaggccaagagctgtctctcaaaagcagagtagttatctgtagaagatggcagagccttgctccaaaatccaagaggcctttgcagtgacctatgggggcgtgccaaaggctccaaacaatatccctatctgccactgacatctcaagtcccattggatctgctgggtaatatggtccaagtggcagagcagcttgcatagcagccagaacctgtggcagagccttctcttgttctggaccccactcaaaactgacagccttcaggttactcgataaatgggctggaataacaaacctaaatgaggaatgtgttgcctccaaaatccagataggcccactaggcattgtgcttctttcttggttgtaggaggggccaaatgcagcaacttatccttcacctcagaaagaatat

SEQ ID NO: 797176 - DNA, 524 bp, Homo sapiens
gtctaaccccatgtgcctgtcacacaaccacaacaattagtgacttatgaactattttgttgcgtatctattcccactcacttccccttcccttccttattttgaagcaaaatcctgacgtgatttcatctgcaagtctttcagtatgtatctccctaaagtgaggacttattcttttgaacggaracataattacacctaaataataatcatttcttaatatcattatatatctagtcagtgttcaaatttccagttgcctcatgaatggtagacttcacaaacttgtaagtgaaataactaagactgtccagacttctgacttcagatgtgtgaatctgttttctcccatacacagctgctttgctgctcccaaattggagaaaaaaaagttagttactagcatgatgttaggtagatacaaaagtttctacaacctgctttttgtatatatcctcaaactactacatcctgagctgcccaagtgttttcttttgtgctagtaagtgctactttaggcagtt

SEQ ID NO: 797177 - DNA, 605 bp, Homo sapiens
atgaaatgatggcattcatattggaaagaataaaggctttgcaattgaataaacttaaatttaattccatctcatcccattattagccatgattttagtggatggggacaaaattaaaatccagcccgaggatttttttattttctccaaatttctatctttcaaaatttcctgccttagcatgctctgtgtatcaaactgtggtttccacctgatagtgggttgtcaaaacaacttgtaattcccaaagtgtggtctatggggccctgggggtcccaagacttttcaggaaatctatgaagtcaaaattgtcataataatattaagatgcragttgccttttccactatgctgacatttgcactaatggtggtaccacactgtaccaagtatttattcttcactgctgtaattcacagtttcaaagaaaaatgcctttcactttaaaatgtccttaaaaaaacagaaaaagtattattattaatctcaacctttagtatatatctttccaatattctttgtgacaaaatgggaatagtgaagtaagattttatcttgagagaaattattcaattcaattgcaagctgaactaggtacttttttt

SEQ ID NO: 797178 - DNA, 568 bp, Homo sapiens
atagtacagtatattgattgaagaggagtcactatgttccagaatttgattaacatatttgcaagttcagaaacttaacattatctatcatcaaaagatcatgctctgagatataaagtacctacttgtcaacttacctccttattttctactgtatstagatgctaccttccacaaggcaatctatttttgctgataaacagttctgttactgttatgtaacagtgggctcactgcagcctcaacttcctgtgctcaagtgagcctcgtgcatcagcctctcaagaccacagacatgcgccacaccaccacacccagtagtttttgtattttttgtagagacagagtcttgccatgttgctcaggctggtcttgaactcctgagctcaagtaatccccctactttggcctctcaaagtactgggattagaggcatgagccactgtgtttggcccaaaattttgaatcaccactgagcactgagacatacccacctggtgtttgtcttccatgagttgactcatttaaggaagatgactctgcctaagtgagatgacattataatatt

SEQ ID NO: 797179 - DNA, 592 bp, Homo sapiens
gcccacagacaaggatattttgaaggaaagcaacatgcagatcttcaaattcaatatctgctttttattaaacacccatttccctttcacagtggcttctattccacttacaaaagagaagcgtccctctcctgcatttccagtctttctgggatgccttgctctggggtttaaaaaaccctcctggacaccaaataaaagaaaaatggaaaatattggtgtaggtataagggagtgagtggctctaagtttaccttaacaaaggaccacaagyggcagggcttaaacaacagaaacctatggtctcgcagttctgaggccagaagtccaaaatcaaggtgttggcagagttggttccttatgaggcccctgaggaagacgctgtaccaggcctctctccttggctggtagatggccatcttcctcctgtgtctctgcacatcatcttccctctagatgtgtctgtccctatgttcaaatttcctctttttataagaacaccagtcatagtggattagggcctaccctaatcaccccatcttaaccaattatatctacgatgaccctatttccaaatacaggcccattctga

SEQ ID NO: 797180 - DNA, 520 bp, Homo sapiens
gggatttaatgctgaagtttttatttaccccaaaataaatccaagttttagtcaagatatactaacagattgggaatgtaaccaatctgttattagattattgtatttctttaaaagttactccattttacattttgatttatttataaggcaaagatggtttggggggaaatgtcagtactggtagtttaataaakaattttttgtttatgtaacagaatgattgttggttgtagccctcattgctctctgaggatacattcttgtagctggagagccttcagtttacaggatgccgtgataaaataagaaaattaggctggatgactgaattactctcctaatagtgcagggccgaagggcaggtgacaagttccccttggagaaagtcctggaggaataagagtgcagtgaggctgtgctggtgagtgtcccagaaaaggtgactcctgatgcctggggacctgggagaaaggataaagtaagaaatgttcaacaggcctggaggtgaaagtttgca

SEQ ID NO: 797181 - DNA, 628 bp, Homo sapiens
ataaataacctgaaaatccttccactaaaagtataccttaaaaatgtgaatagggttggagccaagatggccgaataggaagagctgcagtctacagctcccagagtaagcgacgcagaagacgaatgatttctgcatttccaactgaggtaccggatgaatctcactggggattgtcggacagtgggtgcaggacagtgggtgcagcacatcgagcatgagccaaagcaggatgaggcatcgcctcacccgggaagcaaaaggggtcagggaattccctttcctagccaaggaaaggggtgacagatggcacccggaaaaatcgggtcactcccaccctaatactgcacttttccaacgtcttagcaaacggcacaccaggagattgtatcccgygcctggctcgaagggccctatgccacggagcctcgctcattgctagcacagcactctgagatcaaactgcaaggtggcagtgaggctgggggatgggtgcccgccattgccgaggcttgagtaggtaaacaaagcagccaggaagctgaactgggtggagcccaccgcacctcaggagacctgcctgcctctgtagactccaccactgggggcagggcatagccaaacaaaa

SEQ ID NO: 797182 - DNA, 566 bp, Homo sapiens
agggacatggctccccaaaggaggagaaagtgaatgggaacaccccggagaggatgctggaaacagaaagttagttgtgctgttggtggagcgaatggaatgtaaagaggctccagggatgactaagtctagattctagttggaagttaagaaactgagcttcacttctggatagagtcagctttcaccatcaattacatgtcaagctcagtagccagttcaaggaaacagctcaggagggaggagtgggcctgagcgaaaggaggcaggaacctcctgagtaaggtcaaaggagttggcagcagagaagtccggggctgcacagagcccaaaggcagcctccaggagctgggagataagcagtactccccacacggtggaagtgcagcccccacaagmcccatccactcactcagccttggtgccaccaatagcctggtcctggggcagtctccccaggtggatggagacagcttgtctcttggagccacagcgctgaccacttccattctcgttgggccctttgtgtgtgtcagactctaccctcccctcccatcagggctgat

SEQ ID NO: 797183 - DNA, 540 bp, Homo sapiens
taagataattgtatataggactatagtcttgggaaaccacaatatgctaatcacttgatttaattttgtgactatctgcagatgtggatatgaatttaaattgcaacctcacaatgttgtgtctacaggtacaggttaaactgaaggaaggtggaagggtttaaragcctatctgttaaatttcaagtctcaagtaagccaagtcaatgtaagtcattgctgatttggagcaagtctttgtaaaacgtacctgatttgctttagcattgtgagttctcttaattgatgcttgcctaattttgtgggacttggtttcaaattttacaatggcttttgactccactccccattcttgtacataataggtacaacaaaaattgcttgaataaactagtagagcgaaagtatttccatagctcctaaagaccagattctgaatatggtaaatatggcagcaaccaaagggccaagccaaaactaggttctgctcagtcattctacctctcttgggagcctttaaaataatgaacctacagcttt

SEQ ID NO: 797184 - DNA, 601 bp, Homo sapiens
gcaggcagagcttattcctacagtagcagctgttggataggaactgttgagagaaagaaaggagaagatgacaatgcacttaacagtcactaatcagaaacttgtaccttgagtattcctaaagaaggtgtttatatttgaggtggtggtcctggcacattttaaacatctaaacatcactstaaagagagaattccatttggatccagttcatgttgacctttactccaggggcttcctagcagaatagctcttgtgatttgaaagcaagagccacatgtaggaagctgactccgcaagcccttagtagcattctgacatcaacacgtgtaagaccagaaactgagctaaaccttggctgttgagcacagtaagaaaaaccgtggctttggcattagaaagacttgggtttaaatccagactcagccacttactggctgtgtctccttggcaaggtacttaacctcctccagcctcagttgtctcatcagtaaaatgggaatagtaattcctgttttacaggattcttaggaggatcagaaatgacctatgtaaatgtgagttagcattatgacccagcaattccactcctgggtatctg

SEQ ID NO: 797185 - DNA, 601 bp, Homo sapiens
gcaggcagagcttattcctacagtagcagctgttggataggaactgttgagagaaagaaaggagaagatgacaatgcacttaacagtcactaatcagaaacttgtaccttgagtattcctaaagaaggtgtttatatttgaggtggtggtcctggcacattttaaacatctaaacatcactgtaaagagagaattccatttrgatccagttcatgttgacctttactccaggggcttcctagcagaatagctcttgtgatttgaaagcaagagccacatgtaggaagctgactccgcaagcccttagtagcattctgacatcaacacgtgtaagaccagaaactgagctaaaccttggctgttgagcacagtaagaaaaaccgtggctttggcattagaaagacttgggtttaaatccagactcagccacttactggctgtgtctccttggcaaggtacttaacctcctccagcctcagttgtctcatcagtaaaatgggaatagtaattcctgttttacaggattcttaggaggatcagaaatgacctatgtaaatgtgagttagcattatgacccagcaattccactcctgggtatctg

SEQ ID NO: 797186 - DNA, 601 bp, Homo sapiens
gcaggcagagcttattcctacagtagcagctgttggataggaactgttgagagaaagaaaggagaagatgacaatgcacttaacagtcactaatcagaaacttgtaccttgagtattcctaaagaaggtgtttatatttgaggtggtggtcctggcacattttaaacatctaaacatcactgtaaagagagaattccatttggatccagttcatgttgacctttactccaggggcttcctagcagaatagctcttgtgatttgaaagcaagagccacatgtaggaagctgactccgcaagcccttagtagcattctgacatcaacacgtgtaagaccagaaactgagctaaaccttggctgttgagcacagtaagaaaaaccgtggctttggcattagaaagacttgggtttaaatccagactcagccacttactggctgtgtctccttggcaagrtacttaacctcctccagcctcagttgtctcatcagtaaaatgggaatagtaattcctgttttacaggattcttaggaggatcagaaatgacctatgtaaatgtgagttagcattatgacccagcaattccactcctgggtatctg

SEQ ID NO: 797187 - DNA, 593 bp, Homo sapiens
gtggaagaatgtatcagtttgctagagctactctaacaaacagcacacaacagaaacttttttgccccacatttatgttgattaaaaactgacataaacaaaacctgtacaaaaaatatcccaaatcccatatcactttgaagagtcatcttgagagacgttatgacctmtgaccccctcttccgctgccacagccacgtcctcttcctctaccgctgccttggtttcttcctgcaacagaaatttattatttcccagttctggagagtggaaattggagatcaaggtgttgggaggattgattccttcgaagggctgtgagggagaatctattccaggcctctctcctggcttttagtggtttgttggccatctctgatgttcctcggcatgtagacacatgaccctggtctctgctttcatgctcacatgatactctccctgtgtattagtccattctcgcattgctataaatatctgatactgagtaatttattaaataaaagaggtgtaattggctcacagttctgtaggccatacgggaagtatgatgctggcatctgcttgacttctggggagtcctcaggaaactt

SEQ ID NO: 797188 - DNA, 647 bp, Homo sapiens
aaagataaattaatgataactaaagtcaatgaaatagaaattgaataaatgacacataatatcaacagtcacgcattttcatttaaaattgaataaaaataataaattactagtaatactgatagagaaaaggaataacattatgatatggtttagctgagttcccaccaaaatctcatcttgaattcccatgtgttgcgggagggacctggtggaaggtaattgagtcacgggggcaggtatttcctgtgatagtctcatgatagtggataagtctcatgagatctgacggttttataagggggcgtttccctrcacaagtgctcaagtgctttttttttgcctgctgacatccatgcaagatgtgacttgctccgactttctcctcctcaccttctgccatgattgtgaagcctccctagccatgtggaactgtaagtccattaaacccttttacctgtgtaaatttcccagtcttgggtatgtatttatcagcagtgtaaaaacggactaataccgtaagttggtaccagtagagtagggcactgttgaaaagatacccaaaaatgtggaagcgactttggaactgggtaacaggcacggactgaaacggtttggagggctcagaaaaagacaggaaaatgtgg

SEQ ID NO: 797189 - DNA, 647 bp, Homo sapiens
aaagataaattaatgataactaaagtcaatgaaatagaaattgaataaatgacacataatatcaacagtcacgcattttcatttaaaattgaataaaaataataaattactagtaatactgatagagaaaaggaataacattatgatatggtttagctgagttcccaccaaaatctcatcttgaattcccatgtgttgcgggagggacctggtggaaggtaattgagtcacgggggcaggtatttcctgtgatagtctcatgatagtggataagtctcatgagatctgacggttttataagggggcgtttccctgcacaagygctcaagtgctttttttttgcctgctgacatccatgcaagatgtgacttgctccgactttctcctcctcaccttctgccatgattgtgaagcctccctagccatgtggaactgtaagtccattaaacccttttacctgtgtaaatttcccagtcttgggtatgtatttatcagcagtgtaaaaacggactaataccgtaagttggtaccagtagagtagggcactgttgaaaagatacccaaaaatgtggaagcgactttggaactgggtaacaggcacggactgaaacggtttggagggctcagaaaaagacaggaaaatgtgg

SEQ ID NO: 797190 - DNA, 581 bp, Homo sapiens
agtaatgtaggaagagcaatcagttcaacaccaagggttggatacttggcaatgctcaatacattcttaaagaatcattcattttaagtgagagtcacttcttttttgcttctagttcttaaagtagctcctcatcttgttgtgggtatactattcagcaagcagtaacagwcaccatcttttaaaggttctaattttcctctctgatttttttttcttgcatagtgtatagtaccagcatatacagtttctgagtgcatgaaaaatcgtcaaaaaagatacaggtagaacagaaagcccagaaataaaccctgctgtaattgcaaatgtttttcaatgagggtgccaagacctttcaatgaggcaaggatagtcatttcagcaaatggtactgagaaaactggatatcaaagtgcaaagaataaggttgcactgttaccgtacattatatacaaaaattagctcaaaataggtaacaaatctaaacctaaaactgtaaaactcttagaagaagacatagaagaaaaactttatgacattggatttggcaatcatttctttgttatggcaacaaaagtaca

SEQ ID NO: 797191 - DNA, 596 bp, Homo sapiens
tgatctctctcctgttagggatattaggagagaaaggactgggaaacacattttccatggagtcctctgtctatttgagcacagcagtctattctagctgggctgggtgaaaaggcagctcatcttctgggatttttgcttttttgctggaccctagagggaagagatgagttttacgtctgttactggctgtggtaacactcggctgggaagttcatgtccccggaagacacaggccttttggctccatcacaacagtgcttcctagggatgcacagtctcaccctggaggccccagttgcaatrttgggtgtcacaaatgtgagagtgaaagcagctgatagaagacacagaatgcagaaactcaaggccttagtcccaaacacactcaagttgcatgaccgaaaaaaaaaaaaaagagagagagagagagatagttgaatgtaataaggatgtaatatgctaacttctcagtgcttggcagaggccccctcaccagctgggccacaccagacatagaagagaccagacactggcttaggcttccagaaagaacaagtcacaacaacaccccctctggcatctcccccaaagcc

SEQ ID NO: 797192 - DNA, 600 bp, Homo sapiens
aaattactgtcttttgggtaaatagcgtttacttttccagactgaactgccaaagaccttaagaaaattaaagaaagaaaagaaaaactgagttgccatgtctggtaaacagtgtttctctaattaggtggctgcatggttattaactagagcagttgtgtatcctgacgtatgatttatttaccttggcacacagagttagggtgctgagcaacagagccaaatacggtgacagggtgaggaaaatgagaggatgcaaaaccatggtgaggactgagttctgtacatcttacagaattggttttcccagaggagggaaacaggaatattatctcattgcaaaatagtcattaaactataattgastgctcacagctaacaatgtctaacttcactttcagtcaaaatgaaaatgaaaatcaatatcctgacacaaagcaataatacaaattagagagcaatactagaaaggttctctagaaggatttagaatatgctgtagttgaaaaaatatataagaaaagaaaaaaatgattatttgccattactcgtcccattgctggaagggtgacttgtgaaacagaaggtcttcttggagat

SEQ ID NO: 797193 - DNA, 602 bp, Homo sapiens
catacaagcatggatatatgcctcagccttccacaatatctgtattgtcataaaaactgaatatttaatcaaaacattcatcactttcttattgggaggatggagaatgaacataattttgtagtatagagtttgtgtaaaagaactaaatccttttccttcacaatggcaagttaaatgagaatgtccaaacctaacatttatttaggaatattgatgtacaaaaagaaycagataaatgatggaatccagttgcctctagagaggaagacttgggaatgtccattctcataccgctataaagaactacctgagactgggcaacttataaagaaaagaggcttaattggctcacaattccacaggccaggaaggcctcaggaaacttacaatcatggtggaaggtgaaggggaagcaggcacatcttacatggctggagcaggaagaagagtgtgaagcggggaggctacacacttttttgttgtatttattaagttctggggtacatgtgtgggtgcgcagttttgttatataggtaaatgtgtgccatggtggtttgctgcacctatcaacctatcacctaagtattaagctcagcatg

SEQ ID NO: 797194 - DNA, 633 bp, Homo sapiens
caccagcaacagggtggagcctgcctgagatgggatagagcccctgaaaaggggtgggctgctatctctgctgtttggtcaactcaatcattccagcctgcgggctttggagactccaaatggtcccgatgaggaaaggtccccccagtgcagtaccgctgctttgcctgaacctggtcagactgcttttttttttcttttagacggagtctcactctgttgcccaggctggagtgcaaatggcaccatctaggttcactgcaacctctgcctcccyggttcaagtgattcttctgtcccagcctcccaagtagctgggattacagatgcctgccaccatgcccaggtaatttttgtatttttagtagagacgtagtttcgccaatgttggccaggctggtctcgaactcttgacctcaggtgatccgcccacctcggcctcccaaagtagactgcttctttaagtgggacctcaacccactccccctcactaggtgggacctcccagccagagcctccagctacccttgcctacccatattctacggacagagctctgatctctccctgggacagtgcctgcggggaggggaggccccatcaccttggctatttgggcaactcagccattcc

SEQ ID NO: 797195 - DNA, 633 bp, Homo sapiens
caccagcaacagggtggagcctgcctgagatgggatagagcccctgaaaaggggtgggctgctatctctgctgtttggtcaactcaatcattccagcctgcgggctttggagactccaaatggtcccgatgaggaaaggtccccccagtgcagtaccgctgctttgcctgaacctggtcagactgcttttttttttcttttagacggagtctcactctgttgcccaggctggagtgcaaatggcaccatctaggttcactgcaacctctgcctccctggttcaagtgattcttctgtcccagcctcccaagtagctgggattacagrtgcctgccaccatgcccaggtaatttttgtatttttagtagagacgtagtttcgccaatgttggccaggctggtctcgaactcttgacctcaggtgatccgcccacctcggcctcccaaagtagactgcttctttaagtgggacctcaacccactccccctcactaggtgggacctcccagccagagcctccagctacccttgcctacccatattctacggacagagctctgatctctccctgggacagtgcctgcggggaggggaggccccatcaccttggctatttgggcaactcagccattcc

SEQ ID NO: 797196 - DNA, 611 bp, Homo sapiens
aaagaggaggatttatgaaaccaggtcatgaatttatagcaggaacccagtcatcatttttcccttctgtcattaaggtctctttctgcagagattccctgttccagacagaaaaattccaaattataaatattttctrtaggagttgcccagtcaaaccctattcaatgagcaggtaagttctgtggcaatccgtgtcaactgaggaagaatagatgtgttcatgtgctcattttactgtgtgtggcctctagctgagaatctttactcagttttcttgctcccatccttctcttccctttctgttctcccctagcacacacgttgaagggcccagatggaagggaccctccctatgtgagaaggggaagcccagctgagatggagaaaatcatagcaaaagtggtcactgaggaggtggaagaggcaggtggtggaagaggaggacggcctggcaagcccctgtagaggatgtgagacttcatcctctgggcaaggggtaatgattgaagtagctcccaggggataagcatggcaggggcaccctgagagcagtgtctctacacgatctctcagactgcagagtggaggtcacacagatgcggggtcca

SEQ ID NO: 797197 - DNA, 630 bp, Homo sapiens
aatttttaagtgaaaaagtaggccgggaggtttagtgaattgggttaaatgtctcagccacaagggctagattgcttgttctgtgtgacttcactgtgattagaactatacgaaatggtttcataggtgattggttacaagtcaagtaaaatgctttgattaaagtggaaytggtaaaaatttcctgcatgtcctgtaattggagctgccaaataaatgcatgatgccagctaaatttgaatttcagatacacaataaatatttttttagtacaagcatgtcctaagcattgcacatgacatacttatacgaaaaaattattcaatgtttatctgaaattcaaatcaaactgcgcattctctatttttatttgctgaatctggcaagctcaccagtaacacatataaaataggcccatgtttttcacactcccactctcaaactcacactgaattcatatttgaataagtatggccaggctctatgtctagaaccattaagattaagtattatttatgagatgaaaatccaggcagggttttctatgtagttaattctaagagttactttggggaattgagtttcttaaggtttcttctaggttgtattttataactatccagggagttt

SEQ ID NO: 797198 - DNA, 426 bp, Homo sapiens
aaagatcataaatgagatgcctcaatatttaagatatcaattctccccaaaatgatctttagaattaaatcagaatccagaaggactttctacagaaattaagaagctgattttaaaatggatatgaagaggcataggaactggaatcgccaaagtaactttgaaaagggatraagatggagaactcacactacctgatttcaagtttactataaagctacaataatctcaggtaagtgtcacattggagaaagggtaaacatttagatgtatgaaacgcagtaagagtccagaagaagactcacacatatatgaacaactgattttcaagaaatgtataaaggaaattctatgaaaaaagagagtctttccaaaaaatggtgccgaaacaagtggaaattcatttgcaacaaaaactgtatccat

SEQ ID NO: 797199 - DNA, 590 bp, Homo sapiens
gagtggggggatttggagtcatggtcagggtttggatcccagatctgctgtgttccggtaattatgtgacttcaggggccttaagtgagccttcagaacccatttccttatctggaacatggagggaaccatctcttcaggtagctgtggttcatggaacaccagcaggtggaagccacccaaggaatggtggctgctgtgttatcacagaacgttagttctccagcagacytgagaagtcattgagtccagtggcttacatgtcttgacctgcagagcctcgtgtggacacttgttgtgtggaccagatagtagcagcacacctggggtggaggggcggggctggggcactgcgggaggcctggagccttgctcttcagtgctcttctctccccatcgaagctttaaggaatacagttgaaaagtgaagatagaattactatacaaagaggaaagtgaagaccagaggaggaaagtaacatgtctgtggtcacacagccaaaatccagttgcccagttcccaatatttctctccctactgcatcgtaagcctcagaaagtaacttataataaaaagctgttgctacagt

SEQ ID NO: 797200 - DNA, 551 bp, Homo sapiens
gatctcaaatgtggtgcttaaaatcctaagctcagggtttgctccttgtacttgaccctgagctccctgactttgaagttgcgtgggagccctggatgatgtggcaatgaaatggtctgaaacagaaatactgagaggtcacttttggtgctgaaaggccaagcagagtgggggaattctgctttgggcccttcctctcttctgaaggggtaggagccctgsgagctgggctgcttccagcacaattaaagggccaggaaaggccaaggagcttcaaagctgaggaagctgtgccagttttcttccaattccctttcataacgggaaatgtttctttaaaggcttctgtcattcagagaagggagactttcctcaagccaagggaggatggctttttctgtccagagccctggctgagacatgaaggcagtcatggtgcaatgaagaaagtagtggctcaggaacctggagacccacaggcttcatttccttgggcaaactgctgagctctccaggcctcagtttccccatctggaaaacaacctccagtg

SEQ ID NO: 797201 - DNA, 526 bp, Homo sapiens
gttgaaggtgcaaacagtgactcaccgcagtgagcacttccttgctcccaggtgtggccgggccagcaggggcatgcatgccagacgcaccagggggccggtttgtgggtcagacactccatctcgacacaaacaagtggtcagaaaggccagcgcttcttggttttgtctctcaactgtgagttcatattggtcgtagccgggactaggggtcatcccaaggacagcttgaactcactgtgtggagtgggtcaggaaagctccragatggaggaaaaccagctgcgaggtgggagggaacatagccctgcctgtcctgccaaggagaggcctggggatgacttggggagaagcagtcatggtcagcacagagggaggccttcacctgccttacaagctggcctgacctcaggtcctgcctggtcaaacagtgtgacatgcaggttgtgactggaggaataggcgtggggccccagccccttgctatagttggcggccatagcgatttgctgacttcttgcaaaag

SEQ ID NO: 797202 - DNA, 656 bp, Homo sapiens
ccgagccacttggaggggttcctagagttgtggcccccagcttttctaaagggatggatgatagggtcaggggtagaggatttgtgatccttcaagtttgcagggcttcccgtgttctaagtggtaacgatctgtcttctgcaaatgggttacagcgtgctgctgccagttctgaatccccagtagcccggacttgggtgcagttgaaatccatttccctttttgcctttagtgaggcatccccctcctccttattaaagaagaatacatgtcgctgccatttgccacgyatttgccatagacccaggactattagcatctttaacccacgtaaccacactggggatggctggggaatgttcatgtccccattttacaggagtggtgattaaggctcaaaggatggaggtgatggatcaaagtcgtctgccaagtggtggcagcattggttctcagaccgaggcccgtctacacagtgctgtgcctcctcccaccacgaatgcacgtggcccactctgcccacgcgtccctgggtgtgattatgaggcacttggggaggggcttgcttgcctcaggtgaaagctgggcttgatgcttccagcggatgtaaagtttgcaccaggaatggatccccagttccagagggacctccaaac

SEQ ID NO: 797203 - DNA, 535 bp, Homo sapiens
tgcataggtgtgtgtgcacaccctggggaacaatataaaatacatttcttaccatgtatataaaatacatttcttactatggtcacaatcaaaaagtttgaaaaacatttatctgaaactcccaaagccagagatattttgaaattcagtgtattttggaacagtaacatggtgcatattcccccagcagagtctgrggaaatactcaggaataaagtacattaatatttctataataaaatacacaattatttatagtaagtgggataaacagataatgagtcgcctcacatcatttcagggccgtttttatctccaaattagtttgtgcctgctttccaaaaaacttctggtttccaagaaacttcggtttcccccgccaaacaaacaaaaagaatgtaaaataaacatttttaaaatattgatgacatgttgaaatgatgatattttggatgtgttgagttaaatagtctattcttaaaattaacttcatctatttttcatgtttaaaaatgttaaatgtaatttaaattta

SEQ ID NO: 797204 - DNA, 656 bp, Homo sapiens
tgcaaaaacataccagattgtaaagaccaccaatagtatgaagaaactgcatcaactaatggggaaaataatgggctagcatcataatgacaggatcaaattcacacataacaatattaaccctaaatgtaaacaggctaaatgccccaattgaaagacagagactggcaaattggataaagagtcagacatatcagtgtgctgtaatcaggagacccatctcaagtgcaaagacatatataggctcaaaataaaagagacggaagaatatttaccaagcgaatggaaagaaaaaaaaaaagcaggggttgcmatcatagcctctgataaaagagactttaaaccaataaaaatcaaaaaagagacaaataagggtattacatagtggtaaagggatcaatgcaacaagaactaactatcctaaatatatatgcacccaatacaggagcacccagattcataaaagaagttcttagagaccttcaaagagacttagactcacacacaataatagtgggagactttaacaccccactgtcaatattaaacagatcaacaagagagaaaattaacaaggatattcaggactttgaactcagctctggaccaagcagacctaatagacatctacagaactctctaccccaaatcaacag

SEQ ID NO: 797205 - DNA, 625 bp, Homo sapiens
aactatagtcatgtagtataatttgaagtctggtaatgaaatacctccagatttcttctttttgcttagtattgccttggctattgaggcccttttgtggttccatatgaattgggaatatggccatttttatactattgattctttctatccataagcatgggatgtgtttccatttgtttatgtatcatttctttttagtagtgttttgtatttttttgtagagatctttcatctctttggttaagcatattcttagkgattttatttgcagctgttgtaaatggaattcttaatttgactctcaacatggttgttgttggtgaatagcagtgctactaatttctgtaaacggattttgtaacttgagactttactgaatttgtttgtcggaggagctttttggatgaggctttggggttttgtaggtatatgatcatattactggcaaacagcaatactttggcttatccttttccaatttggattccctttattttttttaccttgcctgattactctggctaggacttccagtactatgtttaatagaagtggtaaaaattgggcatccttgtcttattccagttttcaggggaatgctttcaatttttctccattcagt

SEQ ID NO: 797206 - DNA, 625 bp, Homo sapiens
aactatagtcatgtagtataatttgaagtctggtaatgaaatacctccagatttcttctttttgcttagtattgccttggctattgaggcccttttgtggttccatatgaattgggaatatggccatttttatactattgattctttctatccataagcatgggatgtgtttccatttgtttatgtatcatttctttttagtagtgttttgtatttttttgtagagatctttcatctctttggttaagcatattcttagggattttatttgcagctgttgtaaatggaattcttaatttgactctcaacatggttgttgttggtgaatagcagtgctactaatttctgtaaacggattttgtaacttgagactttactgaatttgtttgtcggaggagctttttggatgaggctttggggttttgtaggtatatgatcatattactggcaaacagcaatactttggcttatccttttccartttggattccctttattttttttaccttgcctgattactctggctaggacttccagtactatgtttaatagaagtggtaaaaattgggcatccttgtcttattccagttttcaggggaatgctttcaatttttctccattcagt

SEQ ID NO: 797207 - DNA, 611 bp, Homo sapiens
agatatcaagaggaaaaccacatgaataaatacctgtttctttaaagctgatgtaatcttgaccctattgtatttcctccttctggatacatgcccttcattattttattctaaaatttattctcaggatctgttgacattgtcttttgttgttcatatggaaaactcaagcttttcagtttgccaacattctcaactcttcagaatttctactgatgtctagattatacttcaggcaatggatcccatgtttactacttaaacgtgcttcatctatgaaaccttcagttggacacatcttatattaatgaagtctcttaactctgcrgtttctactataccttgatttatcaagttcttgattcatcaagagttgtcattaggtctctcttctttcctctttgcattctttcaatacccatagaagtttacgtatgaaaattaggctaaataatatactaaattgaaattgatcagactccacttattctacacaagtaagtttggaaacatctaatttaaagaaaagcactttctcactatggtttcagcagtcaagatgattgcctttccaacatcagttttactttaaataatttgtttaggtcagc

SEQ ID NO: 797208 - DNA, 605 bp, Homo sapiens
tgttgaggacatcaatggctttcatgtcctctggagtctactcaacaatttttcttcaaagtctaaaggagattttttcttccagcataatattccgtgcagtgcagaaagtcttttcttttgccttttggtaaatggcctaagagattttacagtttattgagagaattcctatgccattatcattaagttttggtttgcttagaatgtaaaaaaaactgagatkagaacaaatttttaaaaaagtaaggttattacatctgtatatctttctgtatgtgcttttaaagtccttgtgacattgagttacagggctttgactcctggatctataaaggacaccaagtcctgctacatcttaaacactgacaacaattaaagcctcatcttcaggcgcagtagaagatgccaatcaaaataaattgcattcctgagacatagggccagaaataaaagctattcaactcctcaaggccccaggactattgtggaagaggtgggtgtgtgagattgaaagggccaattttgagagacaaaataagttcaatttctctgtaaattaatcattaatgtcaaaggcacactgatgcaagacaagaatatgg

SEQ ID NO: 797209 - DNA, 632 bp, Homo sapiens
tcctttaagcacttctctgtatttgttattctagttatacattcatctaaatttttttcaaagtttttaacttctttgcctttgttttgaatttcctcctgtagctcagagtagtttgatcatctgaagccttcttctctcaacttgtcaaagtcattctccatccagctttgttccgttgctggtgaggaactgcgttcgtttggaggaggagaggcactctgctttttagagtttccagtttttctactctgttttttccccatctttgtggttttatctacttttggtctttgatgatggtgatgcacagatgggcttttrgtgtggatgtcctttctttttgttagttttccttctaacagacaggaccctcagctgcaggtctgttggagtttgctagaggtccactccagaccctgtttgtctgggtatccgcagcagagattgcagaacagcggattttcatgaactgcgaatgctgctgtctgatcattcctctggaagttttgtctcaaatgagtacctggctgtgtgcggtgtcagtctgcccctactgggggctgcctcccagttaggctgctcgggggttaggggtcagggacccacttgaggagacagtctgcctgttc

SEQ ID NO: 797210 - DNA, 632 bp, Homo sapiens
tcctttaagcacttctctgtatttgttattctagttatacattcatctaaatttttttcaaagtttttaacttctttgcctttgttttgaatttcctcctgtagctcagagtagtttgatcatctgaagccttcttctctcaacttgtcaaagtcattctccatccagctttgttccgttgctggtgaggaactgcgttcgtttggaggaggagaggcactctgctttttagagtttccagtttttctactctgttttttccccatctttgtggttttatctacttttggtctttgatgatggtgatgcacagatgggcttttagtgtggatgtcctttctttttgttagttttccttctaacagacaggaccctcagctgcaggtctgttggagtttgctagaggtccactccagaccctgtttgyctgggtatccgcagcagagattgcagaacagcggattttcatgaactgcgaatgctgctgtctgatcattcctctggaagttttgtctcaaatgagtacctggctgtgtgcggtgtcagtctgcccctactgggggctgcctcccagttaggctgctcgggggttaggggtcagggacccacttgaggagacagtctgcctgttc

SEQ ID NO: 797211 - DNA, 605 bp, Homo sapiens
agaagtcatttataaatagtaaatctaaaaaaataaaaaataaatagtaaatctgctacaggcttattctacttgtttacccttcattttcacagaaatcttattttgaaaagaaagtttaggccaggtgcggtggctcatgactgtaatcccagcactttgggaggccgaggcgggcagatcacgaggtcaggggatcgagaccatcctggctaacacggtgaaaccccgtctctactaaaaatataaaaaattagccaggcgcggtggcaggcacctgtagtcccagctactcaggaggctgaagcaggagaatggtgtgaccccaggaggtggagcttacagtgagcagagatcgtaccactgcactccagcctgggtgaaagagcaagactgcgtctcaaaaacaaacaaaaaaamagttacttggaattttttaaagcttaaattgggaacacacagaggttacagaattttgttacatccaattcctcatgtcattatattttttctataagaaatgctaaagtgaggctggaacagtggttcacgcccgtaatcccagcaatttaggaggccgaggtgggcagattacttgaggttag

SEQ ID NO: 797212 - DNA, 625 bp, Homo sapiens
gcttgtaattggtgtatagatatacttgtgatttttgcacactgattttgtatcctgagacactgctgaagttgcttatcagcttaaggaaatttgggatgagatgatggggttttctaaatatataatcatgtcatctgcaaacagagacaatttgacttcctcttttcgtaattgaataccctttatttctttctcttgtctgattgccctggccagaacttccaatactatgctgaataggagtggtgagagagggtatmcttgtcttgtgccagctttcaaagggaatgcttccagtttttgcccattcagtatgatattggctgtgggtttgtcataaatagctcttattattttgaggtatgtcccatcaatacctagtttattgagagtttttatcatgaagggctgttgaattttgtcaaaggtcttttctgcatctattaagataagcatgtgggttttgtcgttggttctgtttatgtgatggattacgtttattgatttgcatgtgttgaaccagccttgcatcccagggatgaagccaacttgatcatggtggataagtttttgatgtgctgctggattcggcttgccactattttattgaggatttttgcat

SEQ ID NO: 797213 - DNA, 491 bp, Homo sapiens
tcgaagggctcataatctagacaggaagtgtttaccatcttttctgggtgaaattcttcttctgtttatacttattgaacattcatttgtgctgttcccgtaagacatgcactggtaggtatttggaggtgaaagtaagtaatgataaagccagactgtgcccctaagatgtttagaatgtggtgggtagttcagttaattggcatgctgtggtaggaaaataatgggctttcagtcagaagaccttagttcatattcagrcctcaaaacatacttgtggaatgatgggttgggcagggaaggcccttgtgttctaagcaagaaaatgaaaagagttaaaatccagttattcattcatccatttggcaagtatttattgagtacctgggattcagcagggaataaaatatacaaaaatccctgccctcatggagcatagattcagtgggggtgacgaaggatgtaaaaactgctgccatgaaatttttaaa

SEQ ID NO: 797214 - DNA, 565 bp, Homo sapiens
ggtaaatatctatgcacaaaagcagggattctaaatcacattctgcaaaccacacatttgatggtgcagttagcccatctcctcaaaaatgtttgtggtgaagtttccttgaaaaagcttgggcttaaagcatgtcacttagatgacagatttagaaagaatttcggtcattacagtgagaagtcctctttggctcagtcaggctaacccgctccaagggtaggagaggataattcaccaggcggtgcatctaatggacatcgtctctggatgagggaggtagagagagcctgtggttcttttaaatgcattgatttctstacggagtagcattcaaatatgtaactgatcatggactccaggtaagtgatgatggactcccctggttgtagaattgctaccgggtgttcagatgtctcaggcaaggaaagcagtgaaaacagaggcaaaggaaacccttgtgggattcactcatctggtttcatactgagtcactgtctcacggggatgaagtaccgttggagttcactcttgataacagggagaaagaattatgcgctgttaa

SEQ ID NO: 797215 - DNA, 492 bp, Homo sapiens
gaagtatgcagaaattgagtggcttaagttcataagggaagtgaatggcaatcatttacacaattctgtgcaagtcaatacttggcctctagaatataacctttctgtataattcttattgttctgttttagtctaagtgattattgcttgattttcccccacttctccatttacttcattgtttcatacccactttttccactcatgcctttgaattggattatagactggctatggccggcattttgaaattactaaaggaactggtmtcttcaatcaagaagcctaataaagagtgaaaatcctagaccaatactgctaccaggcaaaaaatttaaaaaggtgaaggtatataaatcaagatagatagaaaatgaagaaattacaaacaggccaacttcttaagcactttatcgatagatgagaacaaacatttagtaggcaaataaatatttgagcatctgctctgtggttgtcattatgcctttcat

SEQ ID NO: 797216 - DNA, 517 bp, Homo sapiens
acctccaaaagaacatgataattgtggcattgaatacattcataatatttcacaatatatcttcaggatgtttttatcttgcaaacttaaactctatacccatcaaacaactctcattttcccttcctcccagctcctggcaaccaccattctactttctttttctatatgtttggctactttagatacctcatataagtggaatcatgcaatatttgtctttgtggtttattttacttagtataatgtcctcaaggttcatccatgttgcagtttgtgtcagaatttccttccttttttcaaggctgaataacattcccttataagtatataccacattaaaaaaaatctattcatctgatatgagratttgggttgcttccaccttttggatattgtcaatactgttgctataaatatggatgtgcaaatacctcttcaagatcttgctttcaattcttttggatatatatccagaagtacaattgctagatcacatggtaattttattttattt

SEQ ID NO: 797217 - DNA, 577 bp, Homo sapiens
tccttgttaaaaataatgtagaaaatgcaaaaacataataaaaaaatccataatttccagacaccaaatataggcagacacccaattttccataatttccataatttccagacaccaaatataacccccataaaaatatagtatgttttctgaaacctgttttggtcctatacatgcaaagacatattcaatttctccatttgtatactcacaaacaaccctatatggtatagtagatttcataacgcagagacacayttacagtatacttgttaaaaaaacttctggcactataacttcaaaaacttatttttaatatattgatatttcatcttatggctgcacatagtttatttttttgttgttggatatttagctggtttccaattatttacctcagtaaataatactgtataaatctatgtgatcatggctataaaaatacatctggttttggtgtattccttttatgttaagatactagacttcttgtccaatattttcataaattgccatgaagttgtcacagagtaaattcacagttctatagatagggagtggacttctcctgaataaa

SEQ ID NO: 797218 - DNA, 527 bp, Homo sapiens
gcaaaagttgattattgaacctttgtgaagaggggtagatatatttgccacagagggtgtgttgaaaataagattaaaaaaaaaaaagaaaagaaatgtagctttgagaatgtgacttctgagatcactgataggaaatgtagcttcgagaatgtgacttctgagatcactgatagaatgcctatagrcgttttgaaggttgcactcatatgatcaagtgactcccagtggaaaacaatgttgtacttcccttttttgtaattttttaagaaatttaagtaaaataaaataagtattcatgaaatttgttcttcctttaaaatcaaattatatttactttgctaagtttgagctacagatgatgtgcaaaatcagaattgtcactggaaatttgcttcaaaatttgctctacttaaccttacttgaaagatgtataggagatattatatttagtggccttcaagtatataatcacaagtaacaaatatacttgaataatttagaactactttgaagaagttcaaaat

SEQ ID NO: 797219 - DNA, 604 bp, Homo sapiens
ccttaaagtgtttcctttttttttttcttctcagtttcagaccttcactagttggtagcataaccctaatgtgtcttttggctaatttttaatgaaattaggatttttatgtctttcactcagcattttcttaaaatgctcctgacagcattaatgtgcatcatcccacatcctaactgaataagcaattagaagcacaatagaaaacaaaatttgaattcatgggttatacatagcyatccaaattctcttttggagtataaaaatggcagcatattggatatctggaatcattcagaagagatttggttttcctggagcaatagtagctatcaagagacttattttcttattaaagaacaaaaaagcaaccacaacaaaaacaaaaacaaaattcacatggccaagtaaaataggctgtaataaatctcttgctggaggaaactatttttgaaaagctgtttttgaattctaagtgctagcacatataggtagatagacacagatatagacatagttaacttttgttatgtgagaattgatgacttggataggtgtttcagccccttgggaggtctttgcagtttgtaatggaattggttgg

SEQ ID NO: 797220 - DNA, 619 bp, Homo sapiens
acacataatcgattatgtgtattataaaatatatgatacacataatcgattatgtgtattataaaatatatgatacatataatcgattatatgtattataaaatatatgatacatgtaatcgattatatgtattataaaatatgtaatacatgtaatcgattatatgtattacatattacatatataatagatgtattacataatatataatagatttgctaatgtagcaaatgcaatatgaaactgtcaagttaggagaaattgggagaaattgtctgaaggagtgacacttatctttcacatctggaatctagtacaatacattgctttattcttgtaaatatgttagtcaaacacacgttttgggtattaatgtttattctctacagtgtaaaaagagaatgcagggctgmtaacagattccagtataaaagattgataatagagtcttaacaaactgctgggctgatgtgccactctaactttataagcctaaatttccctgaaaaaaaatttaagtaacggtataaaacttcaagtgccactttgtcattgttgttggttttaattattacagcaatcagtagccctcaagctatttcccccatcttcctgcag

SEQ ID NO: 797221 - DNA, 525 bp, Homo sapiens
ctggtggcttccatatacgtctcctctcctgggctgcaagtaataactgctaattgcctggcattgctttaaagggatagttggaaatcacagccttcaggagaggcatctttaaactaaatgaaatgttgtgtggaaaagggtttagtcagtaagcttaaactgaagagtttaaaaaatactgatgtggctgggcacggtggcacacacctgaaatcccagcattttgggaggctgaggcaggtggatcacctaagstcaggagttcaagaccagcctggccaacattgtgaaactccgtctctactaaaaatacaaaaattagctgggcatggtggcaggggcctgtaatcccagctagtcgggaggctgagacaggagaattgcttgaacccgggaggcagagtttgcagtgagctgagagcaggccactgcactccagcctgggagacagagtgagactccatctcaaaaactaaataataaataaataaataaataaaatactgatgcttgggtccccct

SEQ ID NO: 797222 - DNA, 619 bp, Homo sapiens
gaaaacaaggaccttaggaacctggatttcccactatctgtgtcctgttcatgtctgttccccacacctgaaacagggcacacaggaggtgcttaatgcatgtttcttgagtgcatgagtttgcaaaatacagctttcatgccctttctgcatccattcagaaacatgcagacagtgtttaaaactgagagtcatgmcctaccaagaagatgttttggaggtcagtccgttcctgaaccagctgcctggcccaagccctggtccttggtagagttggtggtaatgagttaattcactcctgagccacagggccttccacacatttccccaaccccaaacctttctctgtcaagccagagaaagactgagctttcaaactactgggtgaaggttggtttataggcccacgagtaaataaagtttgaggactagttaggagtgctccataattttaggagggagagttaagttcagtcttctcacacatggtttttaatttgctttgcgaggaggggttattggtatcaattagagtttataaacccataaggtaaagctgcatgattcactcatcaaattgctgtgaatctgctgggggagccctgagtcagggtggttt

SEQ ID NO: 797223 - DNA, 619 bp, Homo sapiens
cctttaacgctcaataaccactgatccttttattattcctgttgttttgccttttccagatggtcatgtagttggaattatacaaaatgtagccttttcagattggsttctttcacttagtgatttgcattaaaatttcctccatgtctttttcatgacttgatagctcatttcttcttaatgctgaataatattctattgtctggatgtaccacagtttatttatccattcacttactgaaaaccatcttgattgcttccaagttttgacaagtatgaataaagctgctataaacatctgtggtggaaggtttcgtgtggactttagcattcaactcatttgggtaagtacctaggggcagggttgctggattgtataagaatatgattcgttttgtaagaaactgccaaactatcttacaaagtggctatagcattttgcattcctaccaccgataagtaagagtcactgttgttccacattctcaccagtatgtggtattgccagtgttttggattttggttattcaatggttaattttttttaaatgtgcacacactaaaattctctctttgtgatgtgcagctccatggattttgacaaaaacagtgttattta

SEQ ID NO: 797224 - DNA, 583 bp, Homo sapiens
gttgagcaccttctcatgagcttgttggcaatttggatattcatttttcggaaatgcctgttcaagttttgactcattttttaatgggccgtatttctggatatatagtttttggagaaaagacctttgttgatttgtaataagttctccctgctgggcatcacctgaattcctaacccacaaaatcaacaactatttgtgataacacagcttgggaactgctgagtgggagaaccttctggtgaagcagctcacagtagagcttgsgtcctagagatctaagctgtgatggagtcagtcagtgtggaagacagaaggatcctggttctctgtgatgggaattccaccacctctgggcatctaagatgtactcactgagacctagctctgcctaaccatggaaagcactgaataatactgaatacataaaaataaatgaagatctaggcccagaaagaggcatcctttctatagagcactttatgtggcttcctgctctaaggcagtcagaaaagagatcaagaagttggaaacagggccaggcgtggtggctcacacctgcaatcccagcaatttgggatgc

SEQ ID NO: 797225 - DNA, 583 bp, Homo sapiens
gttgagcaccttctcatgagcttgttggcaatttggatattcatttttcggaaatgcctgttcaagttttgactcattttttaatgggccgtatttctggatatatagtttttggagaaaagacctttgttgatttgtaataagttctccctgctgggcatcacctgaattcctaacccacaaaatcaacaactatttgtgataacacagcttgggaactgctgagtgggagaaccttctggtgaagcagctcacagtagagcttgggtcctagagatctaagctgtgatggagtcagtcagtgtggaagacagaaggatcctggttctctgtgatgggaattccaccacctctgggcatctaagaygtactcactgagacctagctctgcctaaccatggaaagcactgaataatactgaatacataaaaataaatgaagatctaggcccagaaagaggcatcctttctatagagcactttatgtggcttcctgctctaaggcagtcagaaaagagatcaagaagttggaaacagggccaggcgtggtggctcacacctgcaatcccagcaatttgggatgc

SEQ ID NO: 797226 - DNA, 628 bp, Homo sapiens
tatagattgtgaagattttctcccactctgggttgtctgtactctgctgatttcttttgttgctcagaagctttttagtttagttgagtcccatttatttatttttatttttgtctttgcatttgcttttgggttcttggttgtgaagtctttgcctaagccaatggctagaagggtttttccaatgttatcttctagaatttttatggttttgggtcttagatttaagtcagtagccctatacaccaacagcaaccaagctgagaatcaaatcaagaactcaaccttttacagtagctgcaaacaaaaaacaaacaaacaaacaatacttaggaatatacttgaccaagaaggtgaaacacctctacaaggaaaactacaaaacacggctgacagaaatcatagatgatacaaacaaatggaaacacgtcccatgctcatggatgggtagaatcaatattgtgaaaatgaccatactgccaaaagcawatctacaaattcaatgcaattcccattaaagtaccaccatcattcttcacagaactagaaaaaacaatcctaaaattcatgtggacccaaaaaagagcccgtatagccaaagcaagactaagcaaaaagaacaaaccta

SEQ ID NO: 797227 - DNA, 595 bp, Homo sapiens
tattgattgatgtctcatgtctccctaaaatgtgtaaaagcaagttgtaccctgatcaccttgggtacatgtcttcaggacttcctgatgttgtgtcataggtgcatccttaaccttggcaaaataaactttctaaattcattgagacttttctcagatactttttggtttacaacgccaatactaaataatctaaaaaagaaattaaaaattaatgccatttatgataactacaaataaatacctargaattaaccaaagaagtaaaagatcttgctaatgaaaactataaaacactgatgcaagaaattgaagaggacaccaaaaaaaatggaaagatatttcatgttcatatattggaagaatcaatattattaaactgtccatactacttgaagcaatctacagattcaatgcaatccccatcaaaatactaatgacattcttcacagaaattaaaaaaatactatcttaaaacttatacggaaccacaaaaaacccagaatagccaatgttatcttgaacaaaaagaacaaacctggaggaatcacattacatgacttcaaattatactacagagctgtagtaaccaaaa

SEQ ID NO: 797228 - DNA, 636 bp, Homo sapiens
gcatgtgggggacttgtcgggccaataaatggtgctggaaaaactggatacccattcttcatgcagaagaatgaaactaggcccttatcttttgtcttacacaaaaatcaaacaaaatgcactaaagacttaagcctaagacctcaaactatgaaattactaaaagaaaacattggggaaaatctccaggacattggactgggcaaagatttcttgagtaatatcctacaagaacaggcaaccaaagcaaaaatggacaaatgggatcacataaggttaaaaagcttctgcacattgaagggaacaatcaacaaatagacaacccacagaatgaaaaaaatatttccaaactacccctctgtaaagrgattttagccagaatataacggagctcaaccaattctataggaaaaaaatctaataagttgattaaaaaataagcaaaacatctgaatagacatttctcagaagaagacataaaaatagcaaacaaggatacgaaatggtactcaacatcattaatcatcagataaatgcaaatcaaaactacaattagatattatctaaccccagttaaaatcatttttaccctaaaggcacataatagcaaatgctggcaaggatgtggagaaaaag

SEQ ID NO: 797229 - DNA, 636 bp, Homo sapiens
gcatgtgggggacttgtcgggccaataaatggtgctggaaaaactggatacccattcttcatgcagaagaatgaaactaggcccttatcttttgtcttacacaaaaatcaaacaaaatgcactaaagacttaagcctaagacctcaaactatgaaattactaaaagaaaacattggggaaaatctccaggacattggactgggcaaagatttcttgagtaatatcctacaagaacaggcaaccaaagcaaaaatggacaaatgggatcacataaggttaaaaagcttctgcacattgaagggaacaatcaacaaatagacaacccacagaatgaaaaaaatatttccaaactacccctctgtaaagggattttagccagaatataacggagctcaaccaattctataggaaaaaaatctaataagttgattaaaaaatragcaaaacatctgaatagacatttctcagaagaagacataaaaatagcaaacaaggatacgaaatggtactcaacatcattaatcatcagataaatgcaaatcaaaactacaattagatattatctaaccccagttaaaatcatttttaccctaaaggcacataatagcaaatgctggcaaggatgtggagaaaaag

SEQ ID NO: 797230 - DNA, 636 bp, Homo sapiens
gcatgtgggggacttgtcgggccaataaatggtgctggaaaaactggatacccattcttcatgcagaagaatgaaactaggcccttatcttttgtcttacacaaaaatcaaacaaaatgcactaaagacttaagcctaagacctcaaactatgaaattactaaaagaaaacattggggaaaatctccaggacattggactgggcaaagatttcttgagtaatatcctacaagaacaggcaaccaaagcaaaaatggacaaatgggatcacataaggttaaaaagcttctgcacattgaagggaacaatcaacaaatagacaacccacagaatgaaaaaaatatttccaaactacccctctgtaaagggattttagccagaatataacggagctcaaccaattctataggaaaaaaatctaataagttgattaaaaaataagcaaaacatctgaatagacatttctcagaagaagacataaaaatagcaaacaaggatacgaaatggtactcaacatcattaatcatcagakaaatgcaaatcaaaactacaattagatattatctaaccccagttaaaatcatttttaccctaaaggcacataatagcaaatgctggcaaggatgtggagaaaaag

SEQ ID NO: 797231 - DNA, 566 bp, Homo sapiens
ctaagaaaaattcttctgccttgggatcctgttgatctgtgaccttacccccaaccctgtgctctctgaaacaagtgctgtgtccactcagggttaaatggattaagggcggtgcaagatgtgctttgttaaacagatgcttgaaggcagcgtgctcgttaagagtcatcaccactccctaatctcaagtacccagggacacaaacactgcggaaggcctcagggtcctctgcctaggaaaaccagagacctttgttcacttgtttatctgctgaccttccctccactattgtcctatgaccctgccaaatccccctctgcgagaaacacccaagaatratcaataaaaaaaaataaaaataaaaaaaaagaactgaataaacataccacatttaaattaaaaaaaaaaaaaaaaagaaaacagccaatgccaaagagaaagatagaacgaaaatgccctattccatggaacaattaaaaaaaaattaacaactacttattccagtcactaaaagtggatgaccagacattatggacctcctgatatgatgcaacaggaaggacca

SEQ ID NO: 797232 - DNA, 623 bp, Homo sapiens
tcccctgtcctggacctcacctgcatctttgtctcacaggtggtcactctctttgcttcaacttcactataaaatcattgtccagacctggacagccctggtgtgaagcgcaggtcttcttgaataaaaatcttttccttcagtacaacagtgacaacaacatggtcaaacctctgggcctcctggggaagaaggtawatgccaccagcacttggggagaattgacccaaacgctgggagaagtggggcgagacctcaggatgctcctttgtgacatcaaaccccagataaagaccagtggtaagtgtggaatggggtgggcaaacagaggcaggcagtaagagaggggagggaagaacacagatggggaggggctttaggtatatctgtgtattgatcattggcccaaccatagaggcacatgggacccaatgggcaggaaagggcaagtctgggcagaaagaatacagacccctaaatgtgcagagaaacacttgacctattggaggatgatggacttctcaaagagtggaggatgatggctttgtgtttggattgcagatccttccactctgcaagtcgagatgttttgtcaacgtgaagcagaacggtgcactggtgca

SEQ ID NO: 797233 - DNA, 584 bp, Homo sapiens
caatctatttatgatctctccttttgctttttgataatcagcctttggatttggttatgaagatgtaaagagtggtctttcacagatgcagagagattagatgtacagttattatattagggctttttctaattattaaaataatatggatttactgtagaaaatatagaaaaatacaaagaaagttaaaagcatctagcaaaactcaccattaaaattttgtcgcattttcttctggttacttctattcatacacatatacatatttattcatttttaacaaaagcaggataatgcttttataaaacttttttcttactcatgagcattttcatgtattattaactattcatcaaaaacacactttttgaaagtcctggggtgaagaaagtgggaagaaaaaaacaaaactgaaaatgttagaaagagccmtcacatcctgtagtttctgttcagacagtagctgtccctgccctccccctctgctgtccctaagaccaccagagtagagtcctcagcctctgatttcatgtaagttaaagacccataagtagatttaaaagtgcattattggccgggcacgg

SEQ ID NO: 797234 - DNA, 652 bp, Homo sapiens
cacctatcacattgacaatgatgaagaattataataattaatgtttctaagagtagagagaaacaagtctcacactctgctggtagcaatgcaattagtacgtccttccagaggccagtttctgaaggcttaaaactatgtatatgatcgggtgcagcagctcacacctgtaatcccagcactttggaaggccaaggcaggtggattgcttaaggccaggagttctagaccagccctagcaacatggcaaaaccccatctctacaaaaactacagaaatcagcttgtggtattcacctgtaatcccagctacttgaaaggctgaggtgggagaatygcttgagcttgggaggtcgaggctgcagtgagctgtaatcccaccactgtactccagcctgggtgacagagtaagacctcatctctaaaacaaaactatgtgtgctttgacccaattgtcccacttttggggatttattccacacaggttactgaggataaaatgaaggtatgtgcagacattcagttacaccagcgaatgcatgctcagtacactctgagccaccgggcaggaggagcacagagctccagtgtggcctgtgtttgctcagcatgtaaaggcacaatggctggattgttgaccatggtcatagccg

SEQ ID NO: 797235 - DNA, 584 bp, Homo sapiens
ttatttgtactatcctagcaacttgttggcaataaaaattaaagttaaaagttttgaaaaagttgttaagataaatttgaagggaagaagaaataaagagctcataatttcacaagtaagtgggggtaaattactggacaatttttttaaactaaattttgtaaattgtgcaagaaaatatttttaaaatcatttctccaataagctgcctttatcctatartattggattatctattaaatgacaaatcataagtctgcttcctcttaatatattcttccaaataacaatgttataattctcatagaacagcttttacttaactcatgcaggcattaaaatatttggtcaacaaagaattatttgcaaagtgctctattcataaagtaaaattcacttctgctttttagaatatgaactgaagatattgtttttcttgttttggctttttttttttttttttttttttgagacagagtctcgctctgtcacctaggctggagtgcagtggtgtgatcatggctcactgcaacctctgcctcccaggttccagcaattctcctgcctcagcctcccgagtcgct

SEQ ID NO: 797236 - DNA, 514 bp, Homo sapiens
aaatcacaatatcactgtgtctaactaggcttagaatacttgtactttatacttacctggtccaatttgcataatgttatattctctttcactgtagacagagtgacattctgcagaatgtaaagatgattatgcatcctgtgtactgtattatgaaagagacagacagcaagcaatttaacatagcctggtccatgatcatagcccgctgcccttcctatgtaagagcataatgatttatttattgtatttattgatggggattgccatatatatatataaatacataaatatatatatatatatatatatatatatatatatatatatatgccagatcaatagatatacactaagtatcatatgttgygttcatgtgttcaaataaaaacaacacatccacattgcagctgcaatggaggccacccggttaagtctgtggtagaccattgccagccatagagtttttgcaaaagccgttcaaatgaattaaatgggaatgtcaggataacca

SEQ ID NO: 797237 - DNA, 590 bp, Homo sapiens
ggctcctttttcatttctgatttcatttatttagatctctgtttttttttttcttggctagtctagtcagtggtttatccattttgtttatcttttcaaaatcctaacttctcatttttttagacttcattttgtttagctctgatctttattgtttcttccttctatttctgagtatggcttttctagttctttgaggtgcatcattaggttgtttacttgaaacttctccatttatttgatgtaagcatttattgccatgtagtttcctttcagcgctgcttttgctgtatcctataggttttggtatgttgtatttccattttcatttgtttcagattttatttttatttttttctttatttctttattgacccagtggtcattcaggagcatgctgtttaatttccatrtatctgtagtttccaaagttcctgtttttcactgatttctagttctatttcattatgctctgagaagattttggtataattttgattttcaaaaatttgttgagacttgctctgtgttctaacctatgatctatcccgaagaatgttccatgtgctgatgaaaataatgtatattct

SEQ ID NO: 797238 - DNA, 607 bp, Homo sapiens
agctattataagcctgaacttgttagtcttgctgggccctgcccaaggttgccctcatctccagctttccacaaactggaatattcactgatgctttgtttcttctcccagaccaggatacatgttgttatgtggttcctaggaggactgtaaagtcctctaacaaagacaaaggatggaatgaatcaagggaattactatgagaaagtagggatatccctggagaggggactgtttctgtgtgcttttagacatcacagagtaattgtttctttttttaaaggaaggaaccagggtgaagagcagctcatttttaagctggagaggttaacaaacactggctgcaagatttactttggtttaggaataccactgtctcacaggagtgtcaatcaaaattccacagccattcttcgacactaggaggtgggactgactgatgtacagcagtgatytgacccagcacttggggcaaacacaaccagagtcttcggtgttaattccctggtcttcccaactagcattctgaaagtgcattaacatttgtggccttgtgctctttcatcggacttctaatggtaattatgcctgtgtaatcacagtaaag

SEQ ID NO: 797239 - DNA, 452 bp, Homo sapiens
gtacaaatcttggattttgtagatgatttgggaaaggaaggtacaagaaggaaaaaaactgatccaagtctatgaagtcaatgatttgaagtactattttgtataagtctgtaaggaatcttcaattgcttaaccaattccccccaaattgaatgaatactaattttaaactgaagtaatactcataagataactataaaaaccaatttgtgagacagtttcttatactaacatatgtaaataaayatttgcatttttattgctatactcttacataaactaaaagtgtaaatataactctggcaggttataataactctggcaggtgtaactatctaaagtgatatttccttggaacaatattcaaaccgttgtctttatattgtgcttctagtcatgattttccattttacatattagtagtttttgttattttctctataaagctgaac

SEQ ID NO: 797240 - DNA, 616 bp, Homo sapiens
gtttgtggtaatttgttatgcagcaacagaaaatgaatacattagggttgctattttattttttttgctattcattcctatcattttgtgtatcatgacaaacaattttttttttttttttttttttgagacggagtctckctctgtcacccaggctgggagtgcagtggcgcgatctcggcccactgcaatctccgcctcccgggttcacgccattctcctgcctcagcctcccgagtagctgggactaccggcgcccgccaccacgccaggctaattttttgtatttttagtggagacggggtttcatcgtgttagccaggacggtctctatctcctcacctcatgatccgcccgcctctgcctcccaaagtgctgggattacaggcctgagccaccgcgtccggccgacaattttaagctatgtatcggactatagatttttcattcttcacagatattatttcatagaattaaggttcatcattaaactgtgaacatttttcattgtgagttaatgtgataagtaaatatacgagaaatagtttattcaactggccaacagatatttctggtgtgttttctatgtgctgagtagtcttctaagtagtgtgga

SEQ ID NO: 797241 - DNA, 612 bp, Homo sapiens
atctttgtgatgtttgtattcaggacacagagttgaacattccctatcatagagcaggtttgaatcactccttttgtagtatctggaagtggacatttggagcgctttcaggcctatgttggaaaaggaaatatcttcccataacaactagacagaagcattctcagaaacttatttgagatgtgtgtactcaactaagagaattgaaccaccgttttgaaggagcagttttgaaacactctttttctggaatctgcaagtggatatttggctagctttggggayttcgctggaagcgggaatacatataaaaagcacacagcagcgttctgagaaactgctttctgatgtttgcattcaagtcaaaagttgaacactccctttcatagagcagtcctgaaacactccttttttagtatctggacctggacttttggagcgctttcagggctaaggtgaaaaaggaaatatcttcccataaaaactggacagaagcattctcagaaacttgtttatgctgtatctactcaactaacaaagttgaacctttcttttgatagagcagttttgaaatgctctttttgtggaatctgcaagtggatatttggctag

SEQ ID NO: 797242 - DNA, 618 bp, Homo sapiens
catagagcaggtttgaatcactccttttgtagtatctggaagtggacatttggagcgctttcaggcctatgttggaaaaggaaatatcttcccataacaactagacagaagcattctcagaaacttatttgagatgtgtgtactcaactaagagaattgaaccaccgttttgaaggagcagttttgaaacactctttttctggaatctgcaagtggatatttggctagctttggggatttcgctggaagcgggaatacatataaaaagcacacagcagcgttctgagaaactgctttctgatgtttgcattcaagtcaaaagttgaacactccctttcatagagcagtcctgaaacactccttttttagtatctggacctggacttttggagcgctttcagggctaaggtgaaaaaggaaatatcttcccataaaaactggacagaakcattctcagaaacttgtttatgctgtatctactcaactaacaaagttgaacctttcttttgatagagcagttttgaaatgctctttttgtggaatctgcaagtggatatttggctagttttgaggatttcgttggaagcgggaattcatacaaattgcagactgcagcgt

SEQ ID NO: 797243 - DNA, 596 bp, Homo sapiens
agatgtgtgtactcaactaagagaattgaaccaccgttttgaaggagcagttttgaaacactctttttctggaatctgcaagtggatatttggctagctttggggatttcgctggaagcgggaatacatataaaaagcacacagcagcgttctgagaaactgctttctgatgtttgcattcaagtcaaaagttgaacactccctttcatagagcagtcctgaaacactccttttttagtatctggacctggacttttggagcgctttcagggctaaggtgaaaaaggaaatatcttcccataaaaactggacagaagcattctcagaaacttgtttatgctgtatctactcaactaacaaagttgaacctttcttttgatagagcagttttgaaatgctctttttgtggaatctgcaagtggatatttggctagttttgaggatttcgttggaagcgggawttcatacaaattgcagactgcagcgttctgagaaacatctttgtgatgtttgtattcaggacacagagttgaacattccctatcatagagcaggttggaatcactccttttgtagtatctggaagtggacatttg

SEQ ID NO: 797244 - DNA, 576 bp, Homo sapiens
atcatagagcaggttggaatcactccttttgtagtatctggaagtggacatttggagcgctttcaggcctatgttgaaaaaggaaatatcttcccataacaactagacacaagcattctcagaaacttgtttgtgatgtgtgccctctactgacagagttgaacctttcttttcatagagcagttttgaaacactctttttgtagaatctgcaagaggatatttgcatagctttgaggatttcgtgggaaamgggattgtcttcaggtaaaatctagacagaagcattctcagaaacttctttgggatgtttgcattcaagtcacagagtagaacattccctttggtagagcaggtttcaaacactctttttgtagtatctggaagtggacatttggagcgctttcaggcctatgttggaaagggaaatatcttcccgtaacaactaggcagaagcattctcagaaacttatttgagatgtgtgtactcaactaagagaattgaaccaccgttttgaaggagcagttttgaaacactctttttctggaatctgcaagagtatatttgcctagcctt

SEQ ID NO: 797245 - DNA, 401 bp, Homo sapiens
ttctcagaaacttgtttgtgatgtgtgccctctactgacagagttgaacctttcttttcatagagcagttttgaaacactctttttgtagaatctgcaagaggatatttgcatagctttgaggatttcgtgggaaacgggattgtcttcaggtaaaatctagacagaagcattctcagaaacttctttgggatgtttgcattcaagtcacagagtagaacattscctttggtagagcaggtttcaaacactctttttgtagtatctggaagtggacatttggagcgctttcaggcctatgttggaaagggaaatatcttcccgtaacaactaggcagaagcattctcagaaacttatttgagatgtgtgtactcaactaagagaattgaaccaccgttttg

SEQ ID NO: 797246 - DNA, 582 bp, Homo sapiens
gactgcagcgttctgagaaacatctttgtgatgtttgtattcaggacacagagttgaacattccctatcatagagcaggttggaatcactccttttgtagtatctggaagtggacatttggagcgctttcaggcctatgttgaaaaaggaaatatcttcccataacaactagacacaagcattctcagaaacttgtttgtgatgtgtgccctctactgacagagttgaacctttcttttcatagagcagttttgaaacactctttttgtagaatctgcaagaggatatttgcatagctttgaggatttcgtgggaaacgggattgtcttcaggtaaaatctagacagaagcattctcagaaacttctttgggatgtttgcattcaagtcacagagtagaacattccctttggtagagcaggtttcaaacmctctttttgtagtatctggaagtggacatttggagcgctttcaggcctatgttggaaagggaaatatcttcccgtaacaactaggcagaagcattctcagaaacttatttgagatgtgtgtactcaactaagagaattgaaccaccgttttg

SEQ ID NO: 797247 - DNA, 571 bp, Homo sapiens
gcagttttgaaacactctttttgtagaatctgcaagaggatatttgcatagctttgaggatttcgtgggaaacgggattgtcttcaggtaaaatctagacagaagcattctcagaaacttctttgggatgtttgcattcaagtcacagagtagaacattccctttggtagagcaggtttcaaacactctttttgtagtatctggaagtggacatttggwgcgctttcaggcctatgttggaaagggaaatatcttcccgtaacaactaggcagaagcattctcagaaacttatttgagatgtgtgtactcaactaagagaattgaaccaccgttttgaaggagcagttttgaaacactctttttctggaatctgcaagagtatatttgcctagccttgaggatttcgttggaaacgggattgtcttcagatcaaatctagacagaagcattctcagaaacttctttgggatgtttgcattcaagtcacagagtagaacattccctttggtagagcaggtttgaaacactctttttttagtatatggaagtggacatttggagcgctttcag

SEQ ID NO: 797248 - DNA, 639 bp, Homo sapiens
agacagaagcattctcagaaacttctttgggatgtttgcattcaagtcacagagtagaacattccctttggtagagcaggtttcaaacactctttttgtagtatctggaagtggacatttggagcgctttcaggcctatgttggaaagggaaatatcttccygtaacaactaggcagaagcattctcagaaacttatttgagatgtgtgtactcaactaagagaattgaaccaccgttttgaaggagcagttttgaaacactctttttctggaatctgcaagagtatatttgcctagccttgaggatttcgttggaaacgggattgtcttcagatcaaatctagacagaagcattctcagaaacttctttgggatgtttgcattcaagtcacagagtagaacattccctttggtagagcaggtttgaaacactctttttttagtatatggaagtggacatttggagcgctttcaggcctacgttggaaaaggaaatatcttcccataacaactagacagaagcattctcagaaactagtttctgatgtgtgtcctcaactaacacagttgaacatttctttagacagaacagttttgaaacactctttttgtggaatctgcaagtggatatttggctag

SEQ ID NO: 797249 - DNA, 598 bp, Homo sapiens
cgtgggaaacgggattgtcttcaggtaaaatctagacagaagcattctcagaaacttctttgggatgtttgcattcaagtcacagagtagaacattccctttggtagagcaggtttcaaacactctttttgtagtatctggaagtggacatttggagcgctttcaggcctatgttggaaagggaaatatcttcccgtaacaactaggcagaagcattctcaraaacttatttgagatgtgtgtactcaactaagagaattgaaccaccgttttgaaggagcagttttgaaacactctttttctggaatctgcaagagtatatttgcctagccttgaggatttcgttggaaacgggattgtcttcagatcaaatctagacagaagcattctcagaaacttctttgggatgtttgcattcaagtcacagagtagaacattccctttggtagagcaggtttgaaacactctttttttagtatatggaagtggacatttggagcgctttcaggcctacgttggaaaaggaaatatcttcccataacaactagacagaagcattctcagaaactagtttctgatgtgtgtcctcaactaacac

SEQ ID NO: 797250 - DNA, 571 bp, Homo sapiens
gcagttttgaaacactctttttgtagaatctgcaagaggatatttgcatagctttgaggatttcgtgggaaacgggattgtcttcaggtaaaatctagacagaagcattctcagaaacttctttgggatgtttgcattcaagtcacagagtagaacattccctttggtagagcaggtttcaaacactctttttgtagtatctggaagtggacatttggagcgctttcaggcctatgttggaaagggaaatatcttcccgtaacaactaggcagaagcattctcagaaacttatttgagatgtgtgtactcaactaagagaattgaaccaccgttttgaaggagcagtttkgaaacactctttttctggaatctgcaagagtatatttgcctagccttgaggatttcgttggaaacgggattgtcttcagatcaaatctagacagaagcattctcagaaacttctttgggatgtttgcattcaagtcacagagtagaacattccctttggtagagcaggtttgaaacactctttttttagtatatggaagtggacatttggagcgctttcag

SEQ ID NO: 797251 - DNA, 638 bp, Homo sapiens
agcagttttgaaacactctttttgtagaatctgcaagaggatatttgcatagctttgaggatttcgtgggaaacgggattgtcttcaggtaaaatctagacagaagcattctcagaaacttctttgggatgtttgcattcaagtcacagagtagaacattccctttggtagagcaggtttcaaacactctttttgtagtatctggaagtggacatttggagcgctttcaggcctatgttggaaagggaaatatcttcccgtaacaactaggcagaagcattctcagaaacttatttgagatgtgtgtactcaactaagagaattgaaccaccgttttgaaggagcagttttgaaacmctctttttctggaatctgcaagagtatatttgcctagccttgaggatttcgttggaaacgggattgtcttcagatcaaatctagacagaagcattctcagaaacttctttgggatgtttgcattcaagtcacagagtagaacattccctttggtagagcaggtttgaaacactctttttttagtatatggaagtggacatttggagcgctttcaggcctacgttggaaaaggaaatatcttcccataacaactagacagaagcattctcagaaactagttt

SEQ ID NO: 797252 - DNA, 488 bp, Homo sapiens
agacagaagcattctcagaaacttctttgggatgtttgcattcaagtcacagagtagaacattccctttggtagagcaggtttcaaacactctttttgtagtatctggaagtggacatttggagcgctttcaggcctatgttggaaagggaaatatcttcccgtaacaactaggcagaagcattctcagaaacttatttgagatgtgtgtactcaactaagagaattgaaccaccgttttgaaggagcagttttgaaacactctttttctggaatctgcaagagtatatttgcctagccttgaggatttcgttggaaacgggattgtmttcagatcaaatctagacagaagcattctcagaaacttctttgggatgtttgcattcaagtcacagagtagaacattccctttggtagagcaggtttgaaacactctttttttagtatatggaagtggacatttggagcgctttcaggcctacgttggaa

SEQ ID NO: 797253 - DNA, 624 bp, Homo sapiens
agtggatatttggctagtttggaggatttcgttggaagcgggaattcatacaaattgcagactgcagcgttctgagaaacatctttgtgatgtttgtattcaggacacagagttgaacattccctatcatagagcaggtttgaatcactccttttgtagtatctggaagtggacatttggagcgctttcaggcctatgttggaaaaggaaatatcttcccataacaactagacagaagcattctcaraaacttatttgagatgtgtgtactcaactaagagaattgaaccaccgttttgaaggagcagttttgaaacactctttttctggaatctgcaagtggatatttggctagctttggggatttcgctggaagcgggaatacatataaaaagcacacagcagcgttctgagaaactgctttctgatgtttgcattcaagtcaaaagttgaacactccctttcatagagcagtcttgaaacaccccttttgtagtatctggaactggacttttggagcgatttcagggctaaggtgaaaaaggaaatatcttcccataaaaactggacagaagcattctcagaaacttgtttatgctgtatctactcaactaacaaagttga

SEQ ID NO: 797254 - DNA, 494 bp, Homo sapiens
tatctactcaactaacaaagttgaacctttcttttgatagagcagttttgaaatggtctttttgtggaatctgcaagtggatatttggctagttttgaggatttcgttggaagcgggaattcatacaaattgcagactgcagcgttctgagaaacatctttgtgatgtttgtattcaggacacagwgttgaacattccctatcatagagcaggttggaatcactccttttgtagtatctggaagtggacatttggagcgctttcaggcctattttggaaagggaaatatcttcccgtaacaactatgcagaagcattctcagaaacttgtttgtgatgtgtgccctctactgacagagttgaaccttgcttttcatagagcagttttgaaacactctttttgtagaatcagcaagaggatatttgcatagctttgaggatttcgtgggaaacgggattgtcttcaggtaaaatctagacagaagcattctcaga

SEQ ID NO: 797255 - DNA, 636 bp, Homo sapiens
ctccctttcatagagcagtcttgaaacaccccttttgtagtatctggaactggacttttggagcgatttcagggctaaggtgaaaaaggaaatatcttcccataaaaactggacagaagcattctcagaaacttgtttatgctgtatctactcaactaacaaagttgaacctttcttttgatagagcagttttgaaatggtctttttgtggaatctgcaagtggatatttggctagttttgaggatttcgttggaagcgggaattcatacaaattgcagactgcagcgttctgagaaacatctttgtgatgtttgtattcaggacacagagttgaacattccctatcatagagcaggttkgaatcactccttttgtagtatctggaagtggacatttggagcgctttcaggcctattttggaaagggaaatatcttcccgtaacaactatgcagaagcattctcagaaacttgtttgtgatgtgtgccctctactgacagagttgaaccttgcttttcatagagcagttttgaaacactctttttgtagaatcagcaagaggatatttgcatagctttgaggatttcgtgggaaacgggattgtcttcaggtaaaatctagacagaagcattctca

SEQ ID NO: 797256 - DNA, 655 bp, Homo sapiens
tataaaggagctaaagtggctatatgaatatcaaagtagactataaaataaagaaacaattattcaataatagtagttgaaaatcttcataccctacttttattaatgggtagaattatgctgaagattgacaagaaaatgaagactggagcaacattataaacaaactagaccaaacagacatttgtagaacattttatccaacagcagattatactttcatctcaacatgtaatgtatgtagactattctccagaacagactatgkgttagaccataaaacaagccttaaaaattaaaatggattctaatgatgtaacatacattcttgtcaaatatgaaaatcatgaagaaactagaaaatatagatttatgcaattacctaaattagctgagaaaaggagggaaaaatatatgtgccactacactctattttgtaattctataaataattaacttttccatgactctttgcttcttatttggatttgagtgactgctcagaatcacttaatcacttaatttcagtctgaagaatttcctccaacatattttataaggcaggtcagctgccagccagttatttcatttttgtttacataaggatgtctttattttgccttcatcttttgaaagagctttgctagatactaag

SEQ ID NO: 797257 - DNA, 648 bp, Homo sapiens
gaccaatagagaacctaaacaaaggtgctgagaacatatattgcggaaagaacaccctctttaataaatggtgcagtgaaaactgagtctcaatgggcacaaagaaggaagctagacccctatctctcaccatataaaaaatcaactcaaatagattaaaaattaaatatactcaaaactataaaatwctagaaaaaatcatgaggggatgatgtaagagattggtgtgtgcaaagattttatggccaagacttcaaataaacaggtaataaaaagaaaaaaaaggcaaatggtactatattaaactaaaaagcttctgcatagtcacagaaacaatcagcagagtgaagagaccacatgtaacatgggagaaaatatttacaaactcttcatttgacaaggtactgacacctggaatatataagggactcaaacaactcaccagcaaaaaaataaaaatataaaaataaaaaagcccacaaatattcccataaaaaactaggcaaagaatctgaataggtattcttcaaaagaaggcattcaaatgtccaacagtcaacatcacttcaaaagaagacattcaatccgttaacagtcaacatcactaattatctgagaaatgcaaatcaaaaccacaatgagatatca

SEQ ID NO: 797258 - DNA, 648 bp, Homo sapiens
gaccaatagagaacctaaacaaaggtgctgagaacatatattgcggaaagaacaccctctttaataaatggtgcagtgaaaactgagtctcaatgggcacaaagaaggaagctagacccctatctctcaccatataaaaaatcaactcaaatagattaaaaattaaatatactcaaaactataaaattctagaaaaaatcatgaggggatgatgtaagagattggtgtgtgcaaagattttatggccaagacttcaaataaacaggtaataaaaagaaaaaaaaggcaaatggtactatattaaactaaaaagcttctgcatagtcacagaaacaatcagcagagtgaagaraccacatgtaacatgggagaaaatatttacaaactcttcatttgacaaggtactgacacctggaatatataagggactcaaacaactcaccagcaaaaaaataaaaatataaaaataaaaaagcccacaaatattcccataaaaaactaggcaaagaatctgaataggtattcttcaaaagaaggcattcaaatgtccaacagtcaacatcacttcaaaagaagacattcaatccgttaacagtcaacatcactaattatctgagaaatgcaaatcaaaaccacaatgagatatca

SEQ ID NO: 797259 - DNA, 644 bp, Homo sapiens
tgtgcccgttcctcggccagctggtccccgctgcgttgaaacagggcttggatctgcagcagctcggcgtcctggaagatgttggccgaggcctgcttgcggccccgggcctcaatcggggcctgccaagggggtggctcactgaccaccgaggctggggtacccattgtggatgctctgaggatgcaaagcrtggagacatcatcaactcagctggtccttcccagacctgggggtcctggctaatcctagggcttctgatgtttccattctccaagagctaaactggaggaagtctcctgccttaaaatcacttaagcacttatgtgtcagacccccatattatctcatttaggattcaaagcaacccatgaggtaagaattattgtttatcctcattttaccgatgaagaagtgcaactcagaggggttaaatgacttgccagcgtcacaaagccacgtgcacatgcagagccagcagttgaacccaggtctgtctagctgtagattccatgcagacgccaggatgcccagtagcagctcaactgtgttgagtacttataccaggcacctgtaacagcttgcttcacatagtatcaatgagatgtaacaagcacaacagccctgtaaggtaggtattttaa

SEQ ID NO: 797260 - DNA, 644 bp, Homo sapiens
tgtgcccgttcctcggccagctggtccccgctgcgttgaaacagggcttggatctgcagcagctcggcgtcctggaagatgttggccgaggcctgcttgcggccccgggcctcaatcggggcctgccaagggggtggctcactgaccaccgaggctggggtacccattgtggatgctctgaggatgcaaagcatggagacatcatcaactcagctggtccttcccagayctgggggtcctggctaatcctagggcttctgatgtttccattctccaagagctaaactggaggaagtctcctgccttaaaatcacttaagcacttatgtgtcagacccccatattatctcatttaggattcaaagcaacccatgaggtaagaattattgtttatcctcattttaccgatgaagaagtgcaactcagaggggttaaatgacttgccagcgtcacaaagccacgtgcacatgcagagccagcagttgaacccaggtctgtctagctgtagattccatgcagacgccaggatgcccagtagcagctcaactgtgttgagtacttataccaggcacctgtaacagcttgcttcacatagtatcaatgagatgtaacaagcacaacagccctgtaaggtaggtattttaa

SEQ ID NO: 797261 - DNA, 644 bp, Homo sapiens
tgtgcccgttcctcggccagctggtccccgctgcgttgaaacagggcttggatctgcagcagctcggcgtcctggaagatgttggccgaggcctgcttgcggccccgggcctcaatcggggcctgccaagggggtggctcactgaccaccgaggctggggtacccattgtggatgctctgaggatgcaaagcatggagacatcatcaactcagctggtccttcccagacctgggggtcctggctaatcctagggcttctgatgtttccattctccaagagctaaactggaggaagtctcctgccttaaaatcacttaagcacttatgtgtcagacccccatattatctcatttaggattcaaagcaacccatgaggtaagaattattgtttatcctcattttaccratgaagaagtgcaactcagaggggttaaatgacttgccagcgtcacaaagccacgtgcacatgcagagccagcagttgaacccaggtctgtctagctgtagattccatgcagacgccaggatgcccagtagcagctcaactgtgttgagtacttataccaggcacctgtaacagcttgcttcacatagtatcaatgagatgtaacaagcacaacagccctgtaaggtaggtattttaa

SEQ ID NO: 797262 - DNA, 609 bp, Homo sapiens
tgggcttccccaccagcagggcctagcctcagggaggtatgccgagacaactggatatacattggcctccaaatccatgcccctggaggtggagaaaggaactgggccctttccccagaccagttctcatatatgacctggaaataaactgctactagatctagggataaccctttcaagatttctagaaccctgaattctggctgtgctgctaactgggtgaccttggataagtctcagtttcccctgccacaagttgctcgtcatcaaaatagtataaggccaggcctggtggctcacgcctgtaatcccagcactttgggaggctgaggtgggaggattgcttgagcccaggagttccagaccagcctggtcaacatagcaagactgcctctataaaattttaaataagctttttaaaataaatgktgagtataaataactcttaacaggaaaagggagattaagtttgtgacggcattccttctagtacctggtataccacagacattctatgcatgctggttgaatgaataaatgatgaagggaaaggctgtttgactaccaggggctatagaatcattgtcattttcatcatcacagccatca

SEQ ID NO: 797263 - DNA, 542 bp, Homo sapiens
ccttcccatggcagcttttaatagccaaaaactgaagataacccagctgttcttcaacaggtgaatggttaaacatactgtggggggccagccgtggtggctcatgcctgtaatcccagcactttgggaggctgaggaaagatggcttgagaccaggagtttgagaccagcctgggcaacatagcgagaccttgtctctactaaaaataaaaaagaattagccaggtgtgttggtgtgcacctgttgtcccagctacttgggaggataagctgggaggattgcttgagccaggrggttgaggctgcaatgagcaatgatcctgccactgcactcatccccggtgacagggcaagaccctgtctcaataaataaataataaataaacatgctgtggtacggcaataccatggtatcctactcagaaataaaaaggaattaactattgatacatgcaacaaacaacctggatgaatatccagagaattatgctgagtggaaaaaagccaatccccaaaagttatataccatgtgattccatata

SEQ ID NO: 797264 - DNA, 652 bp, Homo sapiens
tataaaaacaacttttcttaacacccatttactaatctccccttttaacaaaggaggggtgaggtacagatagcttaagcagtagcagtccatgaagttgggaataaaaaccaaatcacacaagaaagcaagaggccatgcaccagctggtgtcagaacccacaaycaattactggaacctgagcccagcgcagtggctcacacttataatcccagcacttgggaggccaaggcaggtggatcatttgaggtcaggagttcaagaccagcctggccaacatggtgaaaccccatctctacaaaaaaaaaaaatagaaaaaattagccgggcatggtggcatgcacctgtagtaccagctactcaggaggctgaggcgggagaatcgcttgaacccaggaggtggaagttgcagtgagccaagatcacaccactgcactccagcctgggcaacagagctagacccccctctcaaaacaaacaacaacaaaaaattactggaacctggaacccagcggggttcctatatctaatcagcaatgacaaggaggagggtgtcatgctatgctaaaagaggtcctttctccaagaacctaaaatgtaagacagttcaagcatatcattcacatcgcacagtgaaatatacagaaatta

SEQ ID NO: 797265 - DNA, 609 bp, Homo sapiens
gagctggggaagctgagtggccacccagcccgatttcattgtgtgcctttgcccctagtaccatatcctcagaagccgtctggtccttccccaggtgaaggggaagatgggatgcagggagcctccacccatatacactggagcttgggtcacccaatggatgacgccaatggatggagagcgtcaccagatggatgaccaggaaaccctccttgtccttgtcctgccctgggtgagaccagcagccaccagtgctcctcccctcctgttaccagcaatttgccttattcttatcctccagccctagcaacaccctcagttggagagtgagtttgcagggcatacgggctccggttcccattggttgagagtygcctgtggggctgttaagtgccccaaccctccaggctgagagaaagcctgagaagcttcagagaagccttgaggcagaaagctgagagcaaaggggcagtcggcatgggtcctgtcacttcttcaactgtgctgaggtcatagctgagccagggagcatggcacggcatcctgagagtgtccactgtacttgacaaagacacaggaggcaacgtcatcagccgtaagcatggaagg

SEQ ID NO: 797266 - DNA, 658 bp, Homo sapiens
acatgggagtgcagatatctcttcgacatactgatttaattctctttagatatatacccagtagtaggattgatggaccatatagtgtcctatttttaatttttgaggaatctgcacactgatttctgcatgactgtactaatttactttcccacgtacagtgtatgagttccctttcctccacatcctcaccagcacctgttatcttgcatctgtttgatattagccattcaaayagatgtgagatgctatctgattgtgcttttcatttgcatttctgtaatgatgagtgatactgggcatgttttcatatactggctggccatttgtatgtcttcttttgagaaatgtctatctggccctctgcctttttttgaaatcaagttgtgtgttttcttgctattgagttgtttgagttccttatatattttggatattagccccccattagacataggatttgcaaatattatcttccattccataggttgtctcttcactctgttgattgtttccttgcctgtgtagaaactttctagtttgatgtaatcccactcgtctacaatagtccgtgcttatcgatgaggatacgttttaagaccccaggtggatgcctgaaatctcagagaatacccaaccctataaatactacattttt

SEQ ID NO: 797267 - DNA, 530 bp, Homo sapiens
catagcaagagtcaagaatacaaggggccgatccaagtgtactgtgctggtaaggcatccgctcaggtcccattcactaacattccattgagcaaggcaagtcacatggccaaggccaacctaactggagaagaagagtctgctggcagggtaggggctgcagagtaacctggcaggggtggagaggcrcagaatcccatcacagacggcgaaggagcagaatcagtggtccaatctatctccatcacactccaaaatggaagtggttttcctctgacttcagaaacccaatactatttcacagtgaagatggccattttttgttgctccaatttatttgatttcttggacgatcttttccataaccagcccttaattttcatatgacagcgttcgttttgctatttgggtaaacaaatcacggcctcctggagaagccactgcttctctgtttgttctatttctgtctgtgaaagtggctcacagaatctgaactccctgacttacgtgtgctccgcctgcatccttcc

SEQ ID NO: 797268 - DNA, 612 bp, Homo sapiens
tatcaagaagtctcagaggcaaattttgtcaaaacttcaaaatacacataatcaaacttctttatcaaagccagagtaacatggaaaacaaaacttgtcaaacacagcaaaacaaaacaatacagatgactagggcaatttcacttaaaaatattgatacagtaattcgaaattaaatattagcaacagattccagcaacttattatacaaatgaaatctactactataaaatgtgtttttcccaaggatgtatggataacatgacatatcaaagatatgacagaagactagggcaatttcacttataaatattgatacagtaatttgaaattaaatattagcaatagattccagtaacttgttacaaaaactgaaatctactactatcaagtgtgttttttycccaagaatttatggataacatgacatagcaaatccactcatataatgcaagatattaattaatcaaagaaggatcaaatgaccttctccatggatggcaaagtacatacacgaaaaagttcatatccaatttttacaatacaaatacttcttaataaactaagacatcatggaaatctttctacattgtacaaccaaaagctagcatc

SEQ ID NO: 797269 - DNA, 631 bp, Homo sapiens
cggaggcttctgtagcttttgtaacagagtatcctctcaacaattaccttcagctaatggcatgctaaactggacaggaaatcaagtcttggaatgaatggatccattgggccaagtgacagagggtctagcacggtttttacatggcctcaaaggaggaatgttctcattatgcaattatagctccactaaattaaagaatattgatatcttctctgattttatattattgctttttcaattcagtattagtaaatggcataccttattacttcagaatgtaaatgtctgctgtttctttttatcactctaacacctctactttgtttctcggatcacatggtgtttgtgagctaacataagacttaaggtgaccactcacaaaatactgtcattgttatataaaaagtactgtaaaaatctgaaattattttytgaacatagatctagaagcatcaatttaggtgaatcttacaaagggactcaagaaaaatattatcaattaatgaaggttgaggccaaataatttatatctaagacgttttatttttcagtgaatcaaagtttaatcacatttagccctcaaaaggatatatatatatatatatatataaaaatattaaaaaataat

SEQ ID NO: 797270 - DNA, 588 bp, Homo sapiens
ttttaaatctggtcataaacagaaagattataggcagtgtctatgcatacaaggctcaataagaccataccaaaatttgttctaattttatttgcacatctgtgaaatggccctatgagtgaccctgcacagtgcctattaccactgctgttttaagaagacctttgataactaagtctgcaaatataaaaaaggcctctgatcaatttargaaacgtgtcttctcccaagggttctgagttctacctcctaaagctgtttccttttccacctgatagtgtagcaaaagttttaagatgggtttaactgtcctataactttgaggttttatctttctatacagatttctccttcaggaaaatagtcttgtgaacaacagcacacctacctatttaaaaaataggttaaatgtttcttcctgccattctacactcccttcccttaggcaaaaattgttcccaaatgcaatgtactctctattcctaataaacttgcttttgcctttgtcatgctacttttatagaagaaaggggaaaaaaagaggtgggatagggaaagtacagatattgctgaaaggtgaatgccacc

SEQ ID NO: 797271 - DNA, 625 bp, Homo sapiens
ttgaccaacagcagacttctcaacagctacaacaaaggccagaaggcagtgcagtagtgtaacatactacatgctagacattgttctaagtattcagtatacattaatgaaaaacagatataaattttggcttgcatgaaacttaattctaggtaaagaagagagagataaacataatacaataagtatagggtatgtgagaaagagataagtactgtggggtggagggaaaaacagggtaagcagaattaagagtgctagtgagaaaggaggtgtactattaaataagggtcaaggtataaggctcattgggaatgtgacatatgagcaaagacttgaaagaggtgagggagttaaccatgtaaaaatctgaggaaagaacackgcaagcggatggagcagcccatcctgagcccagagtgcgtgtgttgtgttcagggagtagcaaggaagtgcatttagctagaactccatgattgaggagtaaagtagtaggaggtaaagtaaaagaggcagccctctcactccaacccaccaaaatctatatttttcaatactcaatactcacacaaacaaaaaaaacttcgtaagtcaactcagtgccagagaataaagcataattaaa

SEQ ID NO: 797272 - DNA, 625 bp, Homo sapiens
ttgaccaacagcagacttctcaacagctacaacaaaggccagaaggcagtgcagtagtgtaacatactacatgctagacattgttctaagtattcagtatacattaatgaaaaacagatataaattttggcttgcatgaaacttaattctaggtaaagaagagagagataaacataatacaataagtatagggtatgtgagaaagagataagtactgtggggtggagggaaaaacagggtaagcagaattaagagtgctagtgagaaaggaggtgtactattaaataagggtcaaggtataaggctcattgggaatgtgacatatgagcaaagacttgaaagaggtgagggagttaaccatgtaaaaatctgaggaaagaacactgcaagcggatggagcagcccatcctgagcccagagtgcgtgtgttgtgttcarggagtagcaaggaagtgcatttagctagaactccatgattgaggagtaaagtagtaggaggtaaagtaaaagaggcagccctctcactccaacccaccaaaatctatatttttcaatactcaatactcacacaaacaaaaaaaacttcgtaagtcaactcagtgccagagaataaagcataattaaa

SEQ ID NO: 797273 - DNA, 620 bp, Homo sapiens
ttgtctccctatgatgtttttataagaaacactattttatcccctctttctcaatttaataaattttagagcatacttaactacagaatatgctgcttgcttggacccatttatgtgttataatctaccataaaatggtcaagtagtattctctttycataaaacatttgttaatctctctcattagcattacaaacaactaaagttggtatcatgaagaaataaattgcttaaaataaaatagagcagcaaaggaaaacaatgcctgtgctttaagcttattctttcattgttgaaaaacataatacacacttgttggttgctgacagtgaagggattagcatttggatggctcaacaaaatgaatcccaatttaggtgcttgatgttctttattctctatattaaatactttaaaaagcagttttacatattgaaatttcagtttttctcactcagtcttcctgcatgttcaaaatttcttgagacttgacctttaaacctgacttttttcctacaaaactaaaaatctgacttaaacaaaaggctttcttttatgacctgtttgtttcttcttttcactaaaagatttatctgataacaattctttgtgtgagactg

SEQ ID NO: 797274 - DNA, 620 bp, Homo sapiens
ttgtctccctatgatgtttttataagaaacactattttatcccctctttctcaatttaataaattttagagcatacttaactacagaatatgctgcttgcttggacccatttatgtgttataatctaccataaaatggtcaagtagtattctctttccataaaacatttgttaatctctctcattagcattacaaacaactaaagttggtatcatgaagaaataaattgcttaaaataaaatagagcagcaaaggaaaacaatgcctgtgctttaagcttattctttcattgttgaaaaacataatacacacttgttggttgcygacagtgaagggattagcatttggatggctcaacaaaatgaatcccaatttaggtgcttgatgttctttattctctatattaaatactttaaaaagcagttttacatattgaaatttcagtttttctcactcagtcttcctgcatgttcaaaatttcttgagacttgacctttaaacctgacttttttcctacaaaactaaaaatctgacttaaacaaaaggctttcttttatgacctgtttgtttcttcttttcactaaaagatttatctgataacaattctttgtgtgagactg

SEQ ID NO: 797275 - DNA, 588 bp, Homo sapiens
ttcagtttttctcactcagtcttcctgcatgttcaaaatttcttgagacttgacctttaaacctgacttttttcctacaaaactaaaaatctgacttaaacaaaaggctttcttttatgacctgtttgtttcttcttttcactaaaagatttatctgataacaattctttgtgtgagactgcagttattcctctcaactaataatatatgctcatttactttctctgtgaataattgtctgtaaataggtctataatcattaagtttttatactaaagtgagccatgactcattactgttgttgtctagggaactagaacacatgtagcttycttcttcatgtagtaatttttaactgtgattattagtttatcatgaagtatttattacaaattgttttacaaagaagaagagtaatctacattcagaaaatgtagatttttgctgacaatggtagttgtgaattatactgaatatgaaaacagatgaagctaagttttgaaaggtatttccttataatataaagtatgattcttatagggacacacatctgaattatagagtatcagcaataatttacctcttaaa

SEQ ID NO: 797276 - DNA, 590 bp, Homo sapiens
actcccttttcattacacacagccgaagtgcagggctgtgcggtcagagttcttacacaagagccgggaccacgccctgtagcctttttgtccaaacaacttgaccttagtgttttagcttagctctcatgtctgygtgcggcggctgccgctgctttaatacttttagaggccctcaaaataaaaaactatgctcaactcactctctacagttctcaaaacttgcaaaatctattttcttcctcacacctgacgcatatactttctgcccccttccaccacctctcagcaagctgaactcattgccttgactcgagccctcactcttgcaaaagactacatgtcaatatttatactgactctaaatatgccttccatatcctgcaccaccatgctgttatataggcaaaaagaagtttcctcactacgcaagggtcctccatcattaatgcctctttaataaaaactcttctcaaggctgctttacttccaaaggaagctggagtcattcactgcaagggccatcaaaaggcatcagatcccatcgctcagggcaacacttctgctgacaaggtagctaaagcagcagc

SEQ ID NO: 797277 - DNA, 729 bp, Homo sapiens
gtgcttgaaccaagacttctccagggatccaaaagtagatgtttatgcaccttctatttacgacattggcaccaaccagccaattacagcagtggagataaggccatgaaatacagacataacttctggggtctactgctagaaattaaaagatagttcctaaagaatggggaactgctttaagttgagaaaccaatgcaaaagtatattttaaacgatttctgaaaaaatacactccatgcccatattacagaaattctcggtattatcctaatwaaaaatctggaatagtctgtgagacagattcaactgcagtgtagtatataataaaaatagagtacctggttttaaataccatatatactgtgataataattagattcctatctccagaccagatattccctctgagtaaacagactcacagtgaacttccaacttcatatcctatgtgagtatctcaaagtcctaacatgtccagaaaatccttatgcctaccctactctttctcatactatgtttgttgctcaaacaaaaacccagaaatctatcctggatttctcaatttctgtcagcccccatactgcatccaaacttgttaattctggttccaaaatatatttcaaattcttacttctatccccagtgttaccacggtagtagagacaactatatgccatttggattaccataacaacattttccaattaacccaacttgcacttattt

SEQ ID NO: 797278 - DNA, 599 bp, Homo sapiens
ctaaaagcagacttcccagcagaaactgtataagcaagaagagagtggggtcccattttcggacttaaaaacaaaactgtcaaccatgaatttgttattttactagtataagcttcataaatgaaagagaatagtctttcccaaacaggaaagtgctaacggaattcatcaccactaaaccagtcctataagaaatactccagggaattctaaacatggaaacgaaagattgatactcaccatcataaaagcacacaaaagtataaaactcatagatcttayaaaataattagacaaatgagactgcaaagtaactaggtaacagtaaacattatgacaagaagaaaccctacatatcaatattaatcttgaccataaatgccttaaatactccatttaaaagacaaacattggcagaacagatttgtaaaaaacatgacacaaccagatgctgcttacaagaaacccacctatctggaaaggacacttgtaggctgaaggtgaagaagtggaaaaagatactccattcaaatggaagccaaaagtgagtaggaatagctacatttatatcagataaaacagactttaaaatcaacaac

SEQ ID NO: 797279 - DNA, 627 bp, Homo sapiens
tcctaaagactccaccaaaaggctgcaagaactgatgaacaattttagcaaggtttcaggatatgaaatcagtgtacaaaaatcagtagcatttctatacaccaataatgcctagactgagaatcaaatgaagaacacaatctcattcataatagccacacaaaaaatgaaatacctgggaatacatctaaccaaggaggtgaaagatctctataaggaatattaaaaaacactactgaaagaaattggagatgatacaaatagaaaacactctattctcatgaattggaagaattaatatcgttaaaatggccacactgcccagtgcaatctacaggttcaatgctatcrctattaaactaccaatgtaattcttcacagaattaaaaaaaggctattctaaatttcgtatggaacgttggatactcagggacataaatatgagaacagtggacactgcagactactacagagggcatgggggcatgggttacaaaactacctattgggtactgtgctcactacctgggtgcaatataaataaccatgtaacaggcctgtatatgtacccccctgtatctaaaataaaagttgaaagtaaaaatttattatttaaaattgctttat

SEQ ID NO: 797280 - DNA, 616 bp, Homo sapiens
ctgcccaccttagcctcccaaagtgctgggattgtaggcgtgagccaccctgcctggccctagtagtcatgttttaaaaagtaaaaagaaagagacaaaatgaataatgcttcatcgagtataccagtatcatcaaaatataatgtcaacacataatcaatagaaaaatggtgagtgatgtggttcacattcttgcttccatgtactgactctttgaaatctggtgtgtgtgacgtgaccccagcccgtcttggctgcaccacaccagccacatttcaggtgcttaacagcccacagagaggtttcagatgagccacctacggcagggagggctgcagctttgacgcggagccrtgtcttgtgtgtgaagaaggcccaagggcggcagctggatggtcaccctgttggcacagccactgctgagggtgaaactcggccaaagttattgtgtaatcttagatggccccctgatgaaaggagttcgggtaataagtaacgttaacatcatttcagttaaaatgtacccagcaaatgattgagtttgtactgtgtgccaggcacttgcccaggcttgaaggaaagagtgatgtttgagacagggtacgggctaggcaca

SEQ ID NO: 797281 - DNA, 616 bp, Homo sapiens
ctgcccaccttagcctcccaaagtgctgggattgtaggcgtgagccaccctgcctggccctagtagtcatgttttaaaaagtaaaaagaaagagacaaaatgaataatgcttcatcgagtataccagtatcatcaaaatataatgtcaacacataatcaatagaaaaatggtgagtgatgtggttcacattcttgcttccatgtactgactctttgaaatctggtgtgtgtgacgtgaccccagcccgtcttggctgcaccacaccagccacatttcaggtgcttaacagcccacagagaggtttcagatgagccacctacggcagggagggctgcagctttgacgcggagccatgtcttgtgtgtgaagaaggcccaagggcggcagctggatggtcaccctgttggcacagccactgctgagggtgaaactyggccaaagttattgtgtaatcttagatggccccctgatgaaaggagttcgggtaataagtaacgttaacatcatttcagttaaaatgtacccagcaaatgattgagtttgtactgtgtgccaggcacttgcccaggcttgaaggaaagagtgatgtttgagacagggtacgggctaggcaca

SEQ ID NO: 797282 - DNA, 465 bp, Homo sapiens
aataactatgacttccaaatcaagcctttagagagaactctcatttgaaataccgtatgtctatgctattgtagtacaaagtattcacatatctgtgtaaagactgcttgtaaacagattccagtaagttttatggaatggagtgggaggcaaggttgtgaatatgtaggtatcatacagcataaacaatctcctgagttcttaacaaagctctagattgcctatgctgggtatggttctaccattgagaactcttccactaattcagtcctatcacaaaaacttggtttttaaaagatgagccctmcaaatacagagaaatgtgcatcatgaatattcttgtttaaaagtgttccattttaggccgggcacggtggctcacacctgtaatccaagcagcactttgggaggccgagatgggcagatcatttgaggtcaggggttcaggaccaacccggccaacat

SEQ ID NO: 797283 - DNA, 597 bp, Homo sapiens
aaagaagagaggaagtgtattttagtggtcaagggaccagaagagatagaggtaccccaaggtttggggtacctctcacaggtctcacaggacacaaatgtcctggctgcatagtgttcctgggcacggctgtagctgaatgcttgtatgtcaaaggggagttccctagcaatggaacaaaactgatgatttaaagagaaggccctgaaaggaggtcatgtgtctgaaaatctggaaccacttgtcaatctcactcctactttgaacgggagtcttccttgtacggaaagtacttttctattatctttgagcattcaataggggctcaatacatgctygttaaataatcattgtgaaaggtgagcacactcccttgcaaacatctcccactccagtgcacactcttccttttaggtttgaatttgtttgttttttctcaccaaacaaacacagaggcctttttatgaaaggatcgttttctaaaaattacccaggaatcaaatgtgaaatggatactttctttggtaaactaacattttacaatgttatagggacattgttttatttatttatttatttatttatttatttatttat

SEQ ID NO: 797284 - DNA, 605 bp, Homo sapiens
ctgtgcccctcttgctccctgcctggtagagccaaaagagtcagcaagaaaataagaaaaagtagtttgagacatatttgaaaataaattcacaatacaaaaaggatctcttgcccaatcattaaagaataataaatcaataataaattatgcaagtaacatctgccaatataaatatgcagtgtgactagaaaccaataacaaaaagtaaaatctacctgattggagacaagaatccttttaaaaataaatcttgagtcaaaggaaatatacaaatcaaaattatagaatttytacaaaaaaagcttatagaaaccatgttaacatttttaaaagaaagaaaataaaagcaataaacatacaattcaaaagttaagaaaacacacaaagacactaaaaagtcaaaataaggaaagagggagaaatacaagtggaaaaatcagtaaagtaggaaaaaaaaaaaaacagaaaaaaaatgcccaggtcatttattgttcacagttttaaacccaggatgtatgtatctgatatgcagtagcaggggcttttgagggccctggccacttaaatagtagcatgctctcttcagggtaaattggatggga

SEQ ID NO: 797285 - DNA, 609 bp, Homo sapiens
taagtatcagttaataggttgagaatcaatgggctaggccaggcactgtggctcacgcttgtaatcccaatgctttggaaggccaagagagggagatcacttgaggccaggattttgagagttaatgggctacctatggagttgacttcactgtcattaagagaaaaggcaatagtttgggtcaaggamgttcaagcgtttctgaaagtttaactggagtttgagaattctatttgtcctttctatattacttgagatttgggaaattctgaataatacaaagaatgattgcaactcattgagcaaataaaaagctgaggccacagtggggtgtgtgtgtgtgtgtgtgcgcatgtgtgtgtgtgtgtgcgacagagagagacagatgggagagtaaaaaagaaaatgtcttctttacaggatgttagctaacgaatatagaagaaatgacagaattagggccaggtgcggtggctcatgcctgtaatcccagcactttgggaggccgaggcggatggatctcctgaggtcaggagttcaagactagcctggccaaaatggcgaaaccccgtctcgactaaaaatacaaaaattagccaggcatggtgg

SEQ ID NO: 797286 - DNA, 609 bp, Homo sapiens
taagtatcagttaataggttgagaatcaatgggctaggccaggcactgtggctcacgcttgtaatcccaatgctttggaaggccaagagagggagatcacttgaggccaggattttgagagttaatgggctacctatggagttgacttcactgtcattaagagaaaaggcaatagtttgggtcaaggaagttcaagcgtttctgaaagtttaactggagtttgagaattctatttgtcctttctatattacttgagatttgggaaattctgaataatacaaagaatgattgcaactcattgagcaaataaaaagctgaggccacagtggggtgtgtgtgtgtgtgtgtgcgcatgtgtgtgtgtgtgtgcgacagagagagacagatgggagagtaaaaaagaaaatgtcttctttacaggatgttagctaacgaatatagaagaaatgacagaattagggccargtgcggtggctcatgcctgtaatcccagcactttgggaggccgaggcggatggatctcctgaggtcaggagttcaagactagcctggccaaaatggcgaaaccccgtctcgactaaaaatacaaaaattagccaggcatggtgg

SEQ ID NO: 797287 - DNA, 602 bp, Homo sapiens
ctcaaaatcctcagctcaagtgttcctcccacctcagcctcccaaagttctgggattacaggtgtgaactaccacacctggcctaaacattttctttatctgttcatctcctgctggttaggttgtttgcatatcttggcttttgaaaataatactgaaatgattatgggagtgcatgtatctctctgagatactgatgtaattttctttggatataagctcagtggtgggttggctggatcatatggtaatgtacargggttccctttcctccacaccttgttatctatcaactttttgatcatagccgttcaaacaggtgtgaggtaattttcattgtggttttgagttgcattgctctgatgcttagtaatattgatcatttttcttgtacttgttggccatttgtatgtcttcttttgagatatgtctggtcagttctttggcccgtttattttcttgttactgagtttttgagttccttatttaatttggatattagctccttattagatgtatcacttgcaaatattttctctcattcagttagttgtctcttcactttgttgattgtttcctttgctgtgtagaagcttttcagt

SEQ ID NO: 797288 - DNA, 602 bp, Homo sapiens
ctcaaaatcctcagctcaagtgttcctcccacctcagcctcccaaagttctgggattacaggtgtgaactaccacacctggcctaaacattttctttatctgttcatctcctgctggttaggttgtttgcatatcttggcttttgaaaataatactgaaatgattatgggagtgcatgtatctctctgagatactgatgtaattttctttggatataagctcagtggtgggttggctggatcatatggtaatgtacaggggttccctttcctccacaccttgttatctatcaactttttgatcatagccgttcaaacaggtgtgaggtaattttcattgtggttttgagttgcattgctctgatgcttagtaatrttgatcatttttcttgtacttgttggccatttgtatgtcttcttttgagatatgtctggtcagttctttggcccgtttattttcttgttactgagtttttgagttccttatttaatttggatattagctccttattagatgtatcacttgcaaatattttctctcattcagttagttgtctcttcactttgttgattgtttcctttgctgtgtagaagcttttcagt

SEQ ID NO: 797289 - DNA, 679 bp, Homo sapiens
ttgtttatggtgtgagatataggtctaatttcattcttctgcacgtggatatccagctgtcccaacaccatttattgaagagacttttctttcactattatgtattcttggcacccttgtcaaaaattagttgaccatatatgcgtgggtttatttctgtgctttttattctcttccattggactatatgtctgttttcacatcagtatgatattgttttgattactaaagcttcgtaatatacttggaaatcagggaacgtgatgcctccagttttgttcttctcaaaattgctttggctatttggtgtcttttgtggttccaaattttagaattgttttctgtatctatgaaaaatgcaattggaattttcatagggattgcattaaatccgtagattgctttaggtagtatggacatccaatttcacatcttaagagactagaacagcaagagcaaactaagctcaaagttggcagaaggaaggaaataatgaagatcagagcagaaataaatgaaatagagattagaaagataatakaaaagattaattaagagttttttgaaaaaatcaacaaaattgacaaacctttatttagactaaccaggaaaaaaagatgaatcaaatgaattatgaatgaaagaggagacattacaactgataccacagaaaaacaga

SEQ ID NO: 797290 - DNA, 543 bp, Homo sapiens
ataatgacaacaaattggataaccaagaagaaacaggcccaggagtggtggctgatgcctctaatcccagcactttagagacctgaggtgggaggcttacttgaggccaagagtttgagaccagcctggacaacatagcaagacactgtctctacaaaaataataataaaaaggttagccagccatggtggtatgtgtctgttgcytgagaggctgagggaggaggatcatttgagcccaggagttcgaggctgcagtgagctatgatagtgccattgcactccaacctgggtaacagagtgagaccctgactcagaaaaaaagaaaaaaacctaagaaggaagggacaaatttctagaaatccgcaaaaccaaatcacaaagaaacaaagtctaaacaaaccaataatgaataaggagattgaatcaatagtcagaaaacttcccaacgaagaaaagtgcaggaccagataacttcataaataaaatcttacaaacatctaaagaattaataccaattatctcagactcttccagaaacttc

SEQ ID NO: 797291 - DNA, 551 bp, Homo sapiens
ccagggggtgacagatccaaggagccaggaaaggacagtcccaggaagggacagtcccaggaggaaatgggctcagaatagtgggtgcagagaggaaaccacggagacagcttctacctggaagggaaggagagtctgtwtacgtgcaaagagaatctcctggaactaggaagtgctttgaagaaaagaatggattttactttatgccagcccctaagagtcttctcaatgaaagtcctcaaagaataagggaatgacatttgtgaaaagcattctgaggttgctctgaaaaatatttccagataattccaagatgctacaagcgatcatactgacacagtttacaaatagagcaaacaccaaaggatacagtcgcatgcacaaaaacagcttatttgtgacctcaggattaccacaaaattgagctgcatttctggactgtcaccttcaggtgggccaaggtggttacagatcactttgcaagtagaatttgtagcttccaggatagattagaggatcattctgtcatagggcacctattatctaagtct

SEQ ID NO: 797292 - DNA, 551 bp, Homo sapiens
ccagggggtgacagatccaaggagccaggaaaggacagtcccaggaagggacagtcccaggaggaaatgggctcagaatagtgggtgcagagaggaaaccacggagacagcttctacctggaagggaaggagagtctgtatacgtgcaaagagaatctcctggaactaggaagtgctttgaagaaaagaatggattttactttatgccagcccctaagagtcttctcaatgaaagtcctcaaagaataagggaatgacatttgtgaaaagcattctgaggttgctctgaaaaatatttccagataattccaagatgctacaagcgatcmtactgacacagtttacaaatagagcaaacaccaaaggatacagtcgcatgcacaaaaacagcttatttgtgacctcaggattaccacaaaattgagctgcatttctggactgtcaccttcaggtgggccaaggtggttacagatcactttgcaagtagaatttgtagcttccaggatagattagaggatcattctgtcatagggcacctattatctaagtct

SEQ ID NO: 797293 - DNA, 629 bp, Homo sapiens
gccagaaacaggttatcctgtgttctttgaaaaacttttactgatttctactgccatcattgtcacctcatggaggcattaacaattggaattgcggttatctaggggcagcttttgctccctggcccctgtgtatatcagtaaaattggggtgtgggcaattggtaaaggcagatttggcctgatgagtctattgcagctgcctgagtagaaatgccaatgcaaagctgagctgytaattggaaatggaataaactaaaatcttggttcaaatggcagctatattttttaaagaaaagatttcagttgaaatgccaaaggagacagttagccaaaacatttgtctatggaaatttctcttctcatttttactcagatttacagctgggtgttaagcgaagcatttcttgagaacacatgtcacggataaaccaagatgtttattttcctaagtagcagatcagattgaactcacaacaaatagttcaattagtatgattactaagaggctgattaattcgggctgcaataaatgaaatagggtgtgttagaactggggtcctaggaaggccatgtcaacaagattatgttattagctgggcaaagcagctgcagtacattttaagttt

SEQ ID NO: 797294 - DNA, 558 bp, Homo sapiens
attagctatttatcctgttgttcttccaccccctgaccccaaccaacagtctccagtgtgtgttgttcccttccttgtgtccatatgttytcattgttcaggttccacttatgagtgaaaacctggtgtttggtgttctgttcctgcattagtttgccgaggataatagcttccagctccatccatgtacctgcaaaggacattatctcattcttttttatggctgcatagcattccatgctgcataggtaccacattatccagtccatcactgatgggcatttgggtggattatcgggggaacccgcccccaatatttcaacgtaggtcctattttccctaagtgtcagccagtctgagcaataaagagaaagagtacaaagagagaaattttacagctgggccactgggggtgacatcacatatcggtaggtccatgatacccacctgagccgcaaaaccagcaggtttttattaaggacttcaaaatgggagggggtgtatgaacagggagtaggtcacaaagatcacatgcttcaaagggcaaaaaggagaaca

SEQ ID NO: 797295 - DNA, 633 bp, Homo sapiens
taagttccagggtgcatatgcaggatgtacaagttgatacatagggaaacatgtgccatggtgctttgctgcaccaatcaatccatcacttagctattaagccccacatgcattagctatttatcctgttgttcttccaccccctgaccccaaccaacagtctccagtgtgtgttgttcccttccttgtgtccatatgttttcattgttcaggttccacttatgagtgaaaacctggtgtttggtgttctgttcctgcattagtttgccgaggataatagcttccagctccatccatgtacctgcaaaggacattatctcattcttttttatggctrcatagcattccatgctgcataggtaccacattatccagtccatcactgatgggcatttgggtggattatcgggggaacccgcccccaatatttcaacgtaggtcctattttccctaagtgtcagccagtctgagcaataaagagaaagagtacaaagagagaaattttacagctgggccactgggggtgacatcacatatcggtaggtccatgatacccacctgagccgcaaaaccagcaggtttttattaaggacttcaaaatgggagggggtgtatgaacagggagtaggtcac

SEQ ID NO: 797296 - DNA, 687 bp, Homo sapiens
ttagctatttatcctgttgttcttccaccccctgaccccaaccaacagtctccagtgtgtgttgttcccttccttgtgtccatatgttttcattgttcaggttccacttatgagtgaaaacctggtgtttggtgttctgttcctgcattagtttgccgaggataatagcttccagctccatccatgtacctgcaaaggacattatctcattcttttttatggctgcatagcattccatgctgcataggtaccacattatccagtccatcactgatgggcatttgggtggattatcgggggaacccgcccccaatatttcaacgtaggtcctattttccctaagtgtcagccagtctgagcaataaagagaaagagtacaaagagagaaattttacagctgggccactgggggtgacatcacatatcggtaggtccatgatacccacctgagccrcaaaaccagcaggtttttattaaggacttcaaaatgggagggggtgtatgaacagggagtaggtcacaaagatcacatgcttcaaagggcaaaaaggagaacaaagatcatgtgcttttgggaaaacaggaccagggcaaaatcagaaactcctgataagggtctatgttcagtggtgcatgtactgtcttgacaaacatcttaacagacaacagggttcgacagcagagaac

SEQ ID NO: 797297 - DNA, 632 bp, Homo sapiens
cttttcagaggatgtctcaaacaaaagtcaccaatttacttagggtcaatatagcagaaaaaaataaagagtttgtcccttaatatagtctcggcagaattactgtcaaatctaacaattcataatgatagtagtgttgtttaggtttctattgctttcttttcatcattttcgtaggatcatgcttcctcgatttttctcagactgtgttgctagtggttcactgatttcaacccagctgcaattcttcggatatctgtcaggaccctttccagggtctgagcaggtcttatttgcagagtgctcactcggaccaatgaagcagaggcagccagctgggcgcatcagcagttggcatgccttccccactcggtttctaaccatatgcctcgttccacgttttggcacgggctccgcgcgtgtgtgtaggagcagcctaatggacagctgcagcctactcraaggaggtaacccttctgagataatcagatctgcttcctccacggctctgtgaattttaccttgcccctccacagggcgagagtctgtgatgattgccatggtgatcaatttgtcccctgggaaccagctagagaccatcacactgattctatgtaggccattaggtaatg

SEQ ID NO: 797298 - DNA, 549 bp, Homo sapiens
ccagaacactgagctgtttctcttccacctatcactagatgctgttacatccgctagttttccctgcagcccccctcaagagatgagagtaaagctgaccattccctttacagggagcaagttaaactcagcggcccctttccttgatgccatcttgataatctatgtcttaatttatgttatcaagatgtattcatttgaacagctactaarcaacatgttttagaccatttctgataaagttttcctcttctatattcctataactgatgatctttgtcagcctaacaaaactagcaaagtattatgcactaaatgtgtaacaaagtaatgtgctaggtaaaaactaagaacatgtaatcactgcaaatgcacatatacaccaaataaacaggacctaaacagtcacgcttaatggacatttagtagatgcttccagaagatgatggtgatgattcatgagatttggttaagcaaatcacagctgctcaaaatatgattgaaaattccttaattttagctgatggcctcaaaactatttggattgta

SEQ ID NO: 797299 - DNA, 541 bp, Homo sapiens
ttacctggccctcttccctgtgtatctctgtgtatcttctagtcttcctcttcctcctcctcctcctcttcttccttcttcctcctcctcctcctcttcttcctcctcttcttccgttgttgtcatcttgctctgtggcccaggctkgagtgtgcagtggcgggatcatagctcactgtagccttgaactcctgggctcaagtgatcttcccacctcagcctcccaagcagctgggaccacaggtgtgcaccgccacacccagctagtttaatttttttgtacaaatggggtctcactgcattgcccaggctggtcttgaagtcctaggcttaagtgatcctgttgcctcagcctcccaaagtgctggagttacagttgtgagccacaggccaaatctctccctccttctaaggacactagtcattagattcagagctcaccctaatccaagatgaccccgttttagcttcattacacctacaaagaatttatttttaaataccatcattttctgactttcctagtggacattaattttgg

SEQ ID NO: 797300 - DNA, 531 bp, Homo sapiens
cttgatgtctgtctcattgatctgctggtctattcctgctccagttctgatttaattactgtcgcttcctaatacattttaatattttgtatttttctttccagcaatttgattgaatatttcttgggattggcatacttttctgggaaggatttagaatgttggagatgggtcagaagtatattttaaacctyctatagcacaagctccttttttaacagagaagctttttttcttttccatctagaacaattgtaattttagagaatgagtagtaaggaatcttgagtgttcttccagtgagctcccttctctctttctctcattctgtctttgtatcttaattatattaaagttgagcctcaaacacttcatagtttggaggagatcggcaaccattccagtgaggcacagcatctgctatgcttttggattcctttcaatctccccttaattgtacccacagctctctttactcagaaaggatcagtccagatttctctacaaatgttattccatagacatacacat

SEQ ID NO: 797301 - DNA, 590 bp, Homo sapiens
ttggtgcttgtataaggaaaagattttagtttttactgagaataaagtaaaatatccacctaccagcaataatacaatgctctgtgctgtacaaatacttaatatggtaattccttctctggatagaattgaaaatgaccatttttctgtgaagtaattctcttttgtttctagggatgagtaaaggaaaatatgtaggcttaccaggacactaaggaatcagtctccattcccacaaggaattctaattttcatcacgttggatttargaaattccttagcattctttaactctgattttttaaaaaaattacttcttcaattagctaaagctttctaaactaaatccaagaggatgttaagtcctagaagctgacaaaatcaaaagtatgtaataaaggccttttgccctttgatgcattaaacgtttgtaagcatcagaattctatgtgtataattagtaacgtacaaatgtaatgtctcatcttgaatatctgcatagttcagcccattatgaaaagatagcaggcagagtctgacattagaagaatcagaccgcccaggggaaaacgaatgaaatacattttaca

SEQ ID NO: 797302 - DNA, 514 bp, Homo sapiens
acaaataaagactttatagctttaattttttaattttagccatgagacaggtaaagctcactagtttaaaaggacagttggattcaaactgtgcttttgtaaatagaaaaggtcttgctaaagacgtcactgagttttagagaaaatggggtagcaaatttacatctcaaagtacagatgtaacaggacaagctgcagacaaaacccctcagacaccaagttaaagaaggaagggctttattcagccgggagcttyggcaagactcacgtctccaacaaccgagctccctgggtgagcaattcctgtcccttttaagggctcacaactttaagggggtccgcgtgagagggtcgtgattgattgagcaagcagggggtacatgactgggggctgcatgcacctgtaattagaatggaacagaataggatagggattttcacagtgcttttcttacaatgtctgcaatctatagataacataaccgtttaggtcaggggtcaatctttaactacc

SEQ ID NO: 797303 - DNA, 514 bp, Homo sapiens
acaaataaagactttatagctttaattttttaattttagccatgagacaggtaaagctcactagtttaaaaggacagttggattcaaactgtgcttttgtaaatagaaaaggtcttgctaaagacgtcactgagttttagagaaaatggggtagcaaatttacatctcaaagtacagatgtaacaggacaagctgcagacaaaacccctcagacaccaagttaaagaaggaagggctttattcagccgggagcttcggcaagactcacgtctccaacaaccgagctccctgggtgagcaattcctgtcccttttaagggctcacaactttaagggggtcygcgtgagagggtcgtgattgattgagcaagcagggggtacatgactgggggctgcatgcacctgtaattagaatggaacagaataggatagggattttcacagtgcttttcttacaatgtctgcaatctatagataacataaccgtttaggtcaggggtcaatctttaactacc

SEQ ID NO: 797304 - DNA, 603 bp, Homo sapiens
atcatttctcctttaaaacaaacatgaaattattaagctttctgggtagagggcaccaaagggacactgaaggagaaaggggctctcctgtggtttccagctgctgcagagtggatcgggtagaagtgtgaggacatccagtaaaattctgcttagctcgatgcccagactgcagcccctcagcaaacctgcagccttgctgaacctgcagcctcaacctggagatggcgttcctgcagcctgctcaacaaaaaaawtgactccaccaaaggcttcctgccagcaacagtgtgccaatttcctctgcaagccccacacaggccagacagttctcatcaagtcatattccctctacaattcctacgtgacctgcctgcaccctaaaggtttcctatctacccacacaaataaacacaagaaaaaatctttgtcaccatggtttaagaaaataattattggatatgacacaaaaacatgatctacaaaagaaaaagttgatgaactgggcttaactaaatttaaaacatttgaacttcaaaagacatcatggatgcaaaatgacagaatagaaagatctaggggtcagtctccccaccaaagtaa

SEQ ID NO: 797305 - DNA, 584 bp, Homo sapiens
cattggaatatgtttccattagcagggaatcagttgggtaagctgtggtacattcagcttccaattttgtacagcagattgagcacgcatgtttatctctcctcctaaaacattgctggtggtaaaggaatcaaaggaaataaaccacaaggataaagagaacaggagagaacataatagcaaacaaaagatgtcaaacacattttggaagccggaaagtgaatgaacagatgggatctgatttagcaaaacagagaacactgaaacctaatccaacatggaagggagacggtaagaaggaagccaaactgsagaatcccagaaagactcaggaatgaaggaacagaagatttctaaagacagcaagtgtgggaatgaagctaaaaataggactgatggaaagtttgtagaagttcccacccctcagacaattagccttcccctccctggaagaaaactggtatttagtctgtggaaatgctacatactgttcttggagatagcagatacagcggaagtagcaagggaaggcagagcaccacacaaaaacaagaggattaaatgaatatcatactgaatggtga

SEQ ID NO: 797306 - DNA, 584 bp, Homo sapiens
cattggaatatgtttccattagcagggaatcagttgggtaagctgtggtacattcagcttccaattttgtacagcagattgagcacgcatgtttatctctcctcctaaaacattgctggtggtaaaggaatcaaaggaaataaaccacaaggataaagagaacaggagagaacataatagcaaacaaaagatgtcaaacacattttggaagccggaaagtgaatgaacagatgggatctgatttagcaaaacagagaacactgaaacctaatccaacatggaagggagacggtaagaaggaagccaaactgcagaatcccagaaagactcaggaatgaaggaacagaagatttctaaagacagcaagtgtgggaatgaagctaaaaataggactgatggaaagtttgtwgaagttcccacccctcagacaattagccttcccctccctggaagaaaactggtatttagtctgtggaaatgctacatactgttcttggagatagcagatacagcggaagtagcaagggaaggcagagcaccacacaaaaacaagaggattaaatgaatatcatactgaatggtga

SEQ ID NO: 797307 - DNA, 540 bp, Homo sapiens
tttgcagatgacataattgtatatttagaaaaccccatcatctcagccccaaatctccttaagctgataagcaacttcagcaaagtctcaggatacaaaatcagtgtgcaaaaatcacaagcattcctatacaccgataacagacagagagccaattcgtgagtgaactcccattcacaattgctacaaagagaataaaatacctaggaatccaactaacaaggggtgtgaaggacctcttcaaggagaactacaaactgctcaatgaaataaaagaggacacaaacaaatgaaagaacattccatgctcatggataggaagratcaatatcgtgaaaatggccatacagcccaaagtaatttatagagtcaatgctatccccatcaagctaccactgactttcttcacagaattggaaaaaactactttaaattgcatatggaaccataaaagagcctgcatagccaagacaatcctaacccaaaagaataaagctggaggcatcctgctacctgacttcaaaccatactacaaggcta

SEQ ID NO: 797308 - DNA, 537 bp, Homo sapiens
aactcctgggttcaggtgatctgcctgcctcgtcccatcgaagtgctgagattacaggcgtgagccactgcagcctcctctcctgcaacctgcagcctgggaagcagagcctaccacagcaaccaaaagcaggctcttggaggaagggagggtattacagaagttttatggttggtggattggctagacacacatagttaacaggttatggggggctatgaatattcatgaggggcagtcacacaatagtggtatgtaaacatgtatgtcacatgcattctgtgttcactctgtggtggagacttaacattaaaatacagcaaaattagcctttctatrtcaaaaggtgaaacaaaggacatagaggcaccctgtgtgcagcctccatggactggccagaaccagtctgtgggcagtggtcacttatcaggagggaaggctgatcagttgtcatgtggaaaccgcaagaggggaggggagtctggctgtggcgctacgtggagtgagctaggtgaagtcagccaaggagtgagtctt

SEQ ID NO: 797309 - DNA, 523 bp, Homo sapiens; identical to SEQ ID NO: 794892

SEQ ID NO: 797310 - DNA, 523 bp, Homo sapiens; identical to SEQ ID NO: 794893

SEQ ID NO: 797311 - DNA, 634 bp, Homo sapiens
tatagtgagagatggagtctaattttattcttctgcctatagttaacagttttcccagcaccatttattgaagagactgtcctttccccattgtatattcttggtgcctttgtcaaagatgagttggttataaatgtgtgaatttttatctggattctctgttctgttctactggtgtatgtgtttttttgtttttctttctttcttaagccagtaccatgctcatttggttgttagagctttgcagtcaattttgaagtcaggtatagtttgatgcctccaactttgttcttattgatctatacctttggctattcagggtcttttgtggttttacataaagtttagaacaccttttttttcctatttttgtgaggaatgtcattggtattttgatagggattgcattgaatctgtaaattgctttgsgtagtattgccattttaacaatattaattcttccaagccgtgagcatggaatatctttccattttctaatgtgtcctctttggtttattttatcagtgtgttacagtttttatcgcatggatcttttacttctttggttaaattgcttcctagatattttacattcattgtagctattgtaaatgggattgcctacttgatttca

SEQ ID NO: 797312 - DNA, 611 bp, Homo sapiens
agagtggggcaaaaggtgtcaggcagtggagtggcactgtgctgggtgtatagatacaagggcctggtcccaagtgacacaagttcaacagtttacatggaaaatgtataacagggtacataattttctgtaattytatagaatcttttttttttctttttttttcttttttttttttgagacagagttttgctcttgatgcccaggctggattgcaatggtgtgatcttggctcatcttaacctccacctcccaggttcaagcgattcccatgcgtcagcctcctgagtagctgggattacaggcgcccgccaccacgcccggctaattttgtatttttaatagagacggggtttcaccatgttggtcaggctggtctcgaactctgaccttaggtgatccgcttgcctcagcctcccaaagtgctgggattacaggtgtaagccaccacggctaatctcaattttttagaatcttaaagacagtaacttacacccctgagcggaactgttgctcaaccaggatatgccatttaaactccaaagtacaaaatagttttaacgaggaagccaaaactgccaagaagaatgcaggaggtggaaggctttggg

SEQ ID NO: 797313 - DNA, 611 bp, Homo sapiens
agagtggggcaaaaggtgtcaggcagtggagtggcactgtgctgggtgtatagatacaagggcctggtcccaagtgacacaagttcaacagtttacatggaaaatgtataacagggtacataattttctgtaattctatagaatcttttttttttctttttttttcttttttttttttgagacagagttttgctcttgatgcccaggctggattgcaatggtgtgatcttggctcatcttaacctccacctcccaggttcaagcgattcccatgcstcagcctcctgagtagctgggattacaggcgcccgccaccacgcccggctaattttgtatttttaatagagacggggtttcaccatgttggtcaggctggtctcgaactctgaccttaggtgatccgcttgcctcagcctcccaaagtgctgggattacaggtgtaagccaccacggctaatctcaattttttagaatcttaaagacagtaacttacacccctgagcggaactgttgctcaaccaggatatgccatttaaactccaaagtacaaaatagttttaacgaggaagccaaaactgccaagaagaatgcaggaggtggaaggctttggg

SEQ ID NO: 797314 - DNA, 611 bp, Homo sapiens
agagtggggcaaaaggtgtcaggcagtggagtggcactgtgctgggtgtatagatacaagggcctggtcccaagtgacacaagttcaacagtttacatggaaaatgtataacagggtacataattttctgtaattctatagaatcttttttttttctttttttttcttttttttttttgagacagagttttgctcttgatgcccaggctggattgcaatggtgtgatcttggctcatcttaacctccacctcccaggttcaagcgattcccatgcgtcagcctcctgagtagctgggattacaggcgcccrccaccacgcccggctaattttgtatttttaatagagacggggtttcaccatgttggtcaggctggtctcgaactctgaccttaggtgatccgcttgcctcagcctcccaaagtgctgggattacaggtgtaagccaccacggctaatctcaattttttagaatcttaaagacagtaacttacacccctgagcggaactgttgctcaaccaggatatgccatttaaactccaaagtacaaaatagttttaacgaggaagccaaaactgccaagaagaatgcaggaggtggaaggctttggg

SEQ ID NO: 797315 - DNA, 611 bp, Homo sapiens
agagtggggcaaaaggtgtcaggcagtggagtggcactgtgctgggtgtatagatacaagggcctggtcccaagtgacacaagttcaacagtttacatggaaaatgtataacagggtacataattttctgtaattctatagaatcttttttttttctttttttttcttttttttttttgagacagagttttgctcttgatgcccaggctggattgcaatggtgtgatcttggctcatcttaacctccacctcccaggttcaagcgattcccatgcgtcagcctcctgagtagctgggattacaggcgcccgccaccacgcccggctaattttgtatttttaatagagacggggtttcaccatgttggtcaggctggtctcgaactctgaccttaggtgatcygcttgcctcagcctcccaaagtgctgggattacaggtgtaagccaccacggctaatctcaattttttagaatcttaaagacagtaacttacacccctgagcggaactgttgctcaaccaggatatgccatttaaactccaaagtacaaaatagttttaacgaggaagccaaaactgccaagaagaatgcaggaggtggaaggctttggg

SEQ ID NO: 797316 - DNA, 638 bp, Homo sapiens
ttttcatctgctaatcattcttggagaatacttgtaacctgcacaaacctatttttatacaataagtacattacgcccatttctataacacagaaaggctgttgtgagggaggggccgtgtgcattttaaactatttcactctaattgatgcatcatataacagcccaacagtgagtcaccctaattcaaaatctgttaagtctggaataaagccagtcttacttgaacatttttttagaggacactttggcttgccaaaaatgaaagcttttcataacgaacgtctggatgagtaatagtgagtcttacacggcctttgaagggaggtgtttgtcatggagattgtgacaacaaagtccccactaaggctcagatggcggcaaccccrgaagcttcattgcagaaattgtgacagcccctgggccttggccccttcttctggaaaattggcttggggtattccaactttctgtggcagtgagtgaatgcagtattgtcatcttagtcatgagctgtaaactgaaaaaaaaacctaaaaaaccccaaaaaaccccaaaaccaaaacaaaccccctaatattgttttcttaaatggaaaatatgaatgaaacagcttactcttcaccacagtatggtaa

SEQ ID NO: 797317 - DNA, 601 bp, Homo sapiens
acctgtaatcccagctactcgggaggctggagcaggagaatctcttaaacccaggaggcggaggttgtagtgagccgagatcgcgccactgcactccagcctgagcaacagagcaagactccgtcaaaaaaaaaaaagaaagggaaaggaatggaagggaagggaagtcattgtccaaggcaaacacttcagatacagacagtaagtacaagattttttttttttttaaagatggcccatcattaatgtgcaatctggacaccacagattaggtccatgggcttcatccttttgcactgcacaaattaaaaaaaaaagcacacacattcactggacattcaacttcttggtaggaaagttaggaacaayccaataaggaagataacccaacaagtgggtcttggaggatgagtaggattccattagatgaagaaaggaaagagaaggccgtgcgcggtggctcacgcctgtaatcgcaacacactgagaggccaaggcaggcagatcacctgaggtcaggagtttgagaccagcctggccaacacggtgaaaccccttctccactaaaaaaatacaaaaattagctgggtgtggtggcggg

SEQ ID NO: 797318 - DNA, 639 bp, Homo sapiens
atctggacaccacagattaggtccatgggcttcatccttttgcactgcacaaattaaaaaaaaaagcacacacattcactggacattcaacttcttggtaggaaagttaggaacaacccaataaggaagataacccaacaagtgggtcttggaggatgagtaggattccattagatgaagaaaggaaagagaaggccgtgcgcggtggctcacgcctgtaatcgcaacacactgagaggccaaggcaggcagatcacctgaggtcaggagtttgagaccagcctggccaacacggtgaaaccccttctccactaaaaaaatacaaaaattagctgggtgtggtggcgggcgcctgtaattccagctacttgggaggctgagacaggagaaacacttgaatccaggaggcaaaggttgcggtgagtcaagatcacgccactgcactccatccygggcaacagagcaagactccgtctcaaaaaaaaaaaaaaagaaaaagaaaaagaaaaagaaaaaagaaaaataaaggaaaggaaagaaaggaattccagggaacagaaaatggcttgttcaaagacacggtgctccataaccacttgctggatccctgaaggaccgaatccacaagagaatacatgg

SEQ ID NO: 797319 - DNA, 625 bp, Homo sapiens
ttgggatcctgcttacagtgccaattgtcagtttctagaccaaactgggtccgagggaagtcagagggcaggtggcaggtagctggaaaaacacttaaggaattgtaggcaattttgacatggctttattctctctgtgggcatgagcctgggcaagagctgtacatacagcgtcatcagggtaatgataccttttatagacaacagtggctctgagccaagcacaagctcacatgagtggtcacctaatgcaccttatgcagcatggttacataatgtgtggagttgtgcgcttgcactccaaacccattgagtcatgctgcactggaaggccaccrcagcctactcctgactaaagtgcagccatttcccctacactgccccatccccaccctgggggacagcaaacaaatctgacctctaccctggagacaagatctttatcttccaaggccatgtccaatctgtttgctgtacaaaaatccttgaaaagatagtctggaacaaaagctgtgacacgacacaaaagatccaagggaattgtctcccaacagatactgtggggggctaatgtgagcctgtgagctgagagggaagaggcctcccgtctccttaagtacaaggg

SEQ ID NO: 797320 - DNA, 625 bp, Homo sapiens
ttgggatcctgcttacagtgccaattgtcagtttctagaccaaactgggtccgagggaagtcagagggcaggtggcaggtagctggaaaaacacttaaggaattgtaggcaattttgacatggctttattctctctgtgggcatgagcctgggcaagagctgtacatacagcgtcatcagggtaatgataccttttatagacaacagtggctctgagccaagcacaagctcacatgagtggtcacctaatgcaccttatgcagcatggttacataatgtgtggagttgtgcgcttgcactccaaacccattgagtcatgctgcactggaaggccaccacagcctactcctgactaaagtgcagccatttcccctacactgccccatccccaccctgggggacagcaaacaaatctgacctctaccctggagacaagatctttatcttccarggccatgtccaatctgtttgctgtacaaaaatccttgaaaagatagtctggaacaaaagctgtgacacgacacaaaagatccaagggaattgtctcccaacagatactgtggggggctaatgtgagcctgtgagctgagagggaagaggcctcccgtctccttaagtacaaggg

SEQ ID NO: 797321 - DNA, 562 bp, Homo sapiens
gccctcaccctctccaaggctggggacaggtaacagagaaaggccacctggccaaggagcagcaagagaggaagtggctcaggagaggggttgggagaggatgtgtgggtgcaggggaggctgtggggcatcgatcttttaagcaagcaagcctgagcatcttcatgggaaatggcaccaggccacgtgctggggcggagagggacagcaaagccaattaaagagagatttcccagagagtgtgggagtgccgctgggccgtggaggcctggtggatttgcacagacagaacgtggaccagatgggggaaacagaggtgaggctgctgcctggagtktgggggctgagaggggctggcctggctggagggaggatgaggagggacaagacggggagctgggctggatctattatggaagccacctgtcacctagaaagtttatcccaggtcagcggttcacaaccttgctgtccatgagaaacatgaggaactttaaaatgcagatgcctgggccccacttagaaaaatccaatgagaatctcagcagggtgtagcctgggc

SEQ ID NO: 797322 - DNA, 620 bp, Homo sapiens
agaacaatttgcctccaaattttaagctggaaagttaatggaataactttccagcactttgggaggccaagggtgtggattgctttagcccatgtgttcgagattagcctgggcaacatgccaaaaccccgtttctactaaaagtacaagatattagccaggcgtggtggcatgggcctttagtcccagcagctcaggaggctggggtaggaggatcacctgaatccaggaagttgaggcttcagtaagccctgatcatgccactgcactcctgcctggatgacagagtgagactttgttttcaaacaacaacaacaacaacaacaataaatgtcaatggaataactaaaaaggaatcataatccatgccttttttagatattcggtacaaattcaatgtctgtgtactgatcctcarcacaaccaataaatcccaattgtggaggaaaaagaaaagcatctgggtagcctggccccggagatgttcaggatccccctgtcctccctcagtctgagaactgaggagcaggcagggctctctgttcagcgcctgggccttaggcctggtgtggccttttggtgagggtgcaagcctggtgcttgggctgagggctcttacc

SEQ ID NO: 797323 - DNA, 648 bp, Homo sapiens
ttaaagaaggcagtcacaccgccatgattgcctcttaaacaatggacagtcgctacttaccagcaaacatctggtcaatgtttagatgtttccactaatctcacaggctttttgcagctggatcaggatccaaacaagatccacatgttgcatttggttgacgtggccctaagtctcttttaatctcatacagttctccttttcccccctgaaatatatttgtgaggtaaactggttgtcttcctgggcttcctggagctaattttcctagttgcacccctaggtttaagttggcctgtgcttcctggaaatggttcgcatccaaggcttcataagattccrgctcagtgtggccggaatggttactgggggtgccgtatgctgctgttggggctggaagatcctgtcgtctctcctattatgactggcttgcagcagtgtgcatcgccagcttgcagaatggtgatctgctggctctctcattccatctacattaattaactgcgatacttccagaacgagagacttcccctcaggtgtgttggggacagacaggcaggttccatgtttgctgtttcctttgatttccctgtctccagtggatgggttggtttgggagatgcttgtctaaaaatgagggaaagatgt

SEQ ID NO: 797324 - DNA, 628 bp, Homo sapiens
tttttaaaaggtaaacatacatacacctaagagcaagcagtcccactcctgcccccatagaaataattgcttatgtccaacaaaggatatgtacaagaatggtcatggcagtgctgtgcataaatagcccaaatggaaacaacccaaatgcccataaacaataggatgggtgaataaatgatagaatattcatgcaatggaattttatacagcagcaaaaaaatgatgaatgactgatacaagagacaagtatggatgaatctcacataaaaatgttgaatttgagacmagcctggccaacatagtgaaaccctgtctctaccaaaaatacaaaaaattagctgggtgcagtggcgggctcctgtaatcccagctacttgggaggctgaggcaggagaatggcttgaacccaggaggtggaggttgcagtgagtcgagatcacaccattgcactccagaccgggcgacagtgtgagactccgtctaaaaaaaaaaaaaaaaaagttgagtgaacaaaaccagacacaatagaatacaaactgtatgattccatgtaaatgaaatttaaaatggggaaaatgaatctgtggcgacagaagtcagaagactggtcattttgtcaagccgt

SEQ ID NO: 797325 - DNA, 606 bp, Homo sapiens
aaacaagatttttccatttataatagcattccctagcattgtttttgttcccccctggtttgactttggtattcagaatacatcttttttcataactcccatgtgtctgaggtcaggattttcacatgtggtgcaaacacccattcccraatcaaccccttgacttccaaccgcaggtttactaggagtaattaaatactctgcaatgcaaagatcatgtctgggccagataaagcaagggcagggtggaacttggccgccatgttttgtttttcagtgcatatactgagactacacggccggcaactttcacctcttatattacttttctcctttgccaattattgaccctgggaccagtaaacaaaaacttgtcttccttgctgctctgaagcaaatatacaattaaaacacaggtgtgtttgtcttattagaatctttgccatggaaattctaaaacattaccaaggcagggtcatgttatcttgctgtgttactgaacaggagagatggggaagtctaaatagagacactaagcccagaatgtgcctagcccaggggcacctgcaaagaggagtatgtaaaacaggttctctgaccacaagc

SEQ ID NO: 797326 - DNA, 589 bp, Homo sapiens
tagatgtcttagttcttcatatcacccctcatgttctagtaggctatactaggttatttcacaacatggcgtcttagtattccaataagggaacagtgaaagccatgaacatcttaaggcctacatattttattggtcaaaacaagtcacaaagccagatgggattcaagggggtgggaaataggtccatcctcttgctgaccggagctatagtgccacattacaagggcatgtagacactggggacataattcattggtggtcgctattttatctactgaccagagaaggcaggtggaattaggtgacacctgcctcgcaagtccactaggagttctgtgcagaccagcttccaaacatcacagactatttcagaagcatcatctctatcatggaatgtctcattgtttgggaattactgaaacagtgrttataaacatatctgaatttgtttgggcttcgtgatattggagacaagtatcttgagttctatcccaaattggagatcagacttctgttgaagttggccctgctaaagagcctcctgataaaagaaatcccacgtgtgaactgaagcacaggtctctga

SEQ ID NO: 797327 - DNA, 585 bp, Homo sapiens
caaatatttatacaattttacaactactttggaaaacagtgtttgagatttccaattgctccatattttcaccaacacttggtattttcggtcttttttattttaattattctcaataatatgtaaagtcatctcactgtagttttaatttacatttccccaaagtctagtgatgttcaacaacttatgtgatcactagccattcataaatcttatcaatatgtgttttcctcattttttgtcttattattgagtcrtaagagttatttttgtagtctagatataagccctttattaaatatatttttgatacataactgagagaaaaagagggaaagttttgatattaaaccttttctattgttctttaattagtatttttaaaattccactgtaatacatattgactcatgagttacttacaaatgaattttgaattttcaaacatgtaggttcttttacattatctctttgttattgattactatcaattgtatcgtggtcagagaacatggtctgttttatgctggttctgaaatgtgttcacatgtaatcatttatgttactttatgtgacaaatttcac

SEQ ID NO: 797328 - DNA, 576 bp, Homo sapiens
cataaaataagtgagaataaactattctctaagcagccctctgagggtcatacgtgaaacaggactgggagaaagcacagcagccctgacatcacagatgaaataaaatgtgtgttttccagctgtctcattcgtggctccaacaagagagacaactctgtataccccaaaaggcccagccagcagcagggcaggcaaggcccaggctccttcaggcccaggacatccttccttakacctggccctctcagccctgttagagcacaaaatgcaccggacatttgttttgatgatagacataatttggtaaaagaattcagactctgatgtagaaccaggcagtcactggagaagttgcgttgcaggtgagcacatgctgtcattatcagagtgacttttttttaacctgttactaataagcataggggcgtgtgtgtgtttaatggtttcattttactcaagacaagatatttttcacaaatctccagaatggaatcatactcacttacaatactaaaaccaagagataaaaacattttatagcctttcaatcagcgcaaaaggataataacaaag

SEQ ID NO: 797329 - DNA, 611 bp, Homo sapiens
cggtggctcatgcctgtaatcccagcactttgggaggccgaggcgggtggatcatgaggtcaggagatcaagaccattctggctaacacagtgaaaccccatctctactaaaaatacaaaaaattagacgggtgtcgtggcaggcgcctgtagtcccacctactcgggaggctgaggcaggagaattgcttgaacctgggaggcggaggttacagtgggccaagattacaccactgaactccagcctggacgacagagtcagacttgtctcaaaaaaaaaaaaaaatttagccgggcatggtggcgggtgcctgtaatcccagctacaggggaggctgagggaggagaatagcttgaacccrggaggtggagattgcagtgagctgagattgtgccactgcactccagcctgggtgacagagcaagactccatctcaaaaaataaaattaaattaaaagtaaaacaaaatgaaaagggaaattatgtcatttgtgacaatgaacctggagggcattatattaagtaaaataagccaagcacagatagacaaataccgcatgatctgacttatgtgtagaatctaaaagagttgaactcatagaagtggaaa

SEQ ID NO: 797330 - DNA, 547 bp, Homo sapiens
attatgtcatttgtgacaatgaacctggagggcattatattaagtaaaataagccaagcacagatagacaaataccgcatgatctgacttatgtgtagaatctaaaagagttgaactcatagaagtggaaatgagaatggtggttgccaggagctggagggaagtgggagggagagatgatggtcagagtacaaagtttcaattatacaggaggrataagttcaagagatctattgtacaacatggtgactatagttaacaacaatgtattgtattcttgaaaattgctgaaagagtagactttttaaattatcagtattatttattctgcttttgaaattataaaatacttagcgctaagaagtaggaaacaaacatattaatttaaaggtgtggtccaatgaccacttactgtataaattctcaggactcttatttaaaatgcagtctttcttaaaagtatagattttaaacattctcaacacacaaaaaaagtatgtgaggtaatgtatatggtaattagctcaatatagccattccacaatgt

SEQ ID NO: 797331 - DNA, 552 bp, Homo sapiens; identical to SEQ ID NO: 787270

SEQ ID NO: 797332 - DNA, 605 bp, Homo sapiens
aggttgataggatataggtcccgtgggtgatattttaccaataacctaggaattctaggccttcctctggacgtggaaaatttatatattcaagacagggatgcatttaacctgttagatgtttttaagttcctgaaggagttttgctaaataaatcgtccttttatgtagtcagtgcatttctgaggagcaaataagtagcagccactaatgtaggttctggggagacagtggaggaaagttctgatccaggggagttaaagtgcatgtagatgactagatccctacacttgttcatgtaatgtaatggtaaacaacaattaaagaaacatttcaataaaatagtaygcaaggatcgaagccttctttaatactctctgaatcagtgcatgctcaattcaactttgatcctttttgttggtttaaaatatttaaattatttacaatataataccagttatttagtggctgctgctttttgttttatttttaaagtgttaaattctacatttttgttttagaaagaaggacatttgctatatttcttcatgagaaaatccctcctagaaattctcctatatttttccccaaattaaaatgctgtg

SEQ ID NO: 797333 - DNA, 538 bp, Homo sapiens
aaaaaggtcttttcaagttcattattttaatttaatgttggagaaattaaggttaggagagtaactgactaaagtcacaccactggcaatgccaatcatagatttgctgactttccctacaactctttttccaatggatattgcaaggagagaagaaaaggcacaaatgcacttaaacatgggccttccaggtcagtcatctggcacccatgtggatctgaggttcaggattttctaaaattacagggagtaagctgagagcatgatatatgagaatgtttgagcccttatgtcaagtacatatrcccacgaggtttctgtggcccaaatttctcctcttatctttcctcctctgaaacttaatggccatctagaagctgcacacaatccctgccacatcctctaccttttattttttagttaatgacactcctaaggaagcaaatgtttgtcagcagcataaacaaaatgaaggaccctagttttcctttatttatcagagtagtttctttttggaaacaggattgatagaaatcat

SEQ ID NO: 797334 - DNA, 538 bp, Homo sapiens
aaaaaggtcttttcaagttcattattttaatttaatgttggagaaattaaggttaggagagtaactgactaaagtcacaccactggcaatgccaatcatagatttgctgactttccctacaactctttttccaatggatattgcaaggagagaagaaaaggcacaaatgcacttaaacatgggccttccaggtcagtcatctggcacccatgtggatctgaggttcaggattttctaaaattacagggagtaagctgagagcatgatatatgagaatgtttgagcccttatgtcaagtacatatacccacgaggtttctgtggcccaaatttctcctcttatctttcctcctctgaaacttaatggcyatctagaagctgcacacaatccctgccacatcctctaccttttattttttagttaatgacactcctaaggaagcaaatgtttgtcagcagcataaacaaaatgaaggaccctagttttcctttatttatcagagtagtttctttttggaaacaggattgatagaaatcat

SEQ ID NO: 797335 - DNA, 610 bp, Homo sapiens
gaataatgacattgataatttttaaaaagttgtaaggtattaaagtaacataaatataggacacctaggcctaaaagatgtgaaaggtatgtagaaatatattaaactttattgacagtaattaaagaagagctaagtaaatagagatataggccatgaacaagacaaataactcgatatcataaagacgttaattctttcccaaataatatatcaattctatttttatgtgggaaaacaagaccaaggtaagctaagatggtaccaaagagaaaaatgaaccaagacatgttgtgtgaccagtgccaagattcaattaaaaagatatgaaaattaagttggtgttatattggcttatagaaagaaaaacagagaccagaaaacttggaatctgatcttcacatctataaaactgctctatatgagatggttttgcacatttataggtgaaagaatagactaaatacrttgcactgataaaactggttatccatgaagggggaaaaatgaaacctaaatatcttcacataccatgtgtaaaatctgttcctgctgaattaacctggaggagaaacaatatcattttaaaaagataacataggagaagatt

SEQ ID NO: 797336 - DNA, 599 bp, Homo sapiens; identical to SEQ ID NO: 730889

SEQ ID NO: 797337 - DNA, 778 bp, Homo sapiens
cttcatccaccggcttctagattaaccacccacacccacacaggcgagagtttccctgaatattggaggtgacaggacatcaggacaaagtacaactattgtgccttggcccaatcactactttctttgtctggggccgccgctggctcctggctgcctttcgcacttttctccacccccacccctttctccccttccccctcacctggaacaccttccccttcctccttggctccttctgaactgccttcagagccacagactgtggggagtggccactgcgctcccaaggtgaggccctccaagcggggccgagtttgcccctcaactgggagccagcatgacctctgtgtgggctgctctctgcttcactgccccttcccccaatctgctaggtgaccctgggcccctttgtgccctctctgggccttcggaggattctttgggkagacagtctgctctgacgccccttcccctgcagcaagcagcctggggagggaggtgaggataagtgaagtcaagttgttcagggggctaagcccatggaagggaagatgccacagagatacatgtggtcttgtgattgttgttttgtgctttttccccttttttgaaagctcaggtgactaggtgacttgagcttttaatttggtgacaatgtgggcactggctgagtccttaagagtacattgttgtaaatgccggtgacaacacactggggcatgggatccagagttaacccctccaggtcacagccaggttatatctccacaatgaa

SEQ ID NO: 797338 - DNA, 499 bp, Homo sapiens
ttctattctgggcttctttgctgacattccttcgactttgggattgcccggctccctcttgcctgacccttttgtctgtgccttactggcagtgagatcctgcagccctggggtgggagagagggagctcctgggaggaatggtgtggtgggggaagtggatgaagtggaatgaaagtaggtagcacaggcatctctttagggacatctaytctaatttctctcgcaggccaccatcactatctctgcggtgggagaaggtcaggttggagggtatggcctgttctttggaagtgaggctctgagcaggggcctggctttccttgaggcaaccaggggctctgtgggtatgttctctggtcttggttttgggagggtggtaatttttgttgggggagtgggacaacaggagcagtggtgaccagctggggcatgggggcaggagcacagggaatggtggaagggagtcaccaactgctgcaggcttagactggagtgac

SEQ ID NO: 797339 - DNA, 499 bp, Homo sapiens
ttctattctgggcttctttgctgacattccttcgactttgggattgcccggctccctcttgcctgacccttttgtctgtgccttactggcagtgagatcctgcagccctggggtgggagagagggagctcctgggaggaatggtgtggtgggggaagtggatgaagtggaatgaaagtaggtagcacaggcatctctttagggacatctactctaatttctctcgcaggccaccatcactatctctgyggtgggagaaggtcaggttggagggtatggcctgttctttggaagtgaggctctgagcaggggcctggctttccttgaggcaaccaggggctctgtgggtatgttctctggtcttggttttgggagggtggtaatttttgttgggggagtgggacaacaggagcagtggtgaccagctggggcatgggggcaggagcacagggaatggtggaagggagtcaccaactgctgcaggcttagactggagtgac

SEQ ID NO: 797340 - DNA, 544 bp, Homo sapiens
ttaagagtatagtgcagcaattaagagctcagtttctggaattagacagtttagcggtcccaatcttggaggtgccttctgcctccctggagacagctgtttctggacaggggccagcgggccatgtcagggagacatgagagagggaggagggagacaggcggcagcaggagcagagctggctggacagggctttgtccacttgataaagctggcatgttccttccagctgtccctgtgatgctcgcttatgtctggttttctcatgactcagagccacagggcaggcctctccagcagtagggagaatttggatttggatatggtttgagawgaaatgaggtagaagactgtcttcctttgctgccacccaccacaactccccaggccagtgctggatcccttctggtgatcagtgagcctggggacagcctgccagttagagctggtgaccactttggctggaggtctgcaggagtgtacaggacccaagagccagagaatcattcctttctcctaggaagaggcaatgagaagccagaga

SEQ ID NO: 797341 - DNA, 607 bp, Homo sapiens
tatttatattgtaaatttaaatagccaaagcattccctagcaaccttttctttccttgatttttcctgaattcttgaatccctagccaacctatcattccaatggataaattagtataaatctgaaatgatggtggttgatatttttgtctacattgatgagcaaaatgaaagtaaaacagcaaagacatacattgggccctcatttgctcttaataacataatgacttccttgctgattaaataatcgttttcaaatactggaaaagagagccttagttgtttgtgctattcacagtgtaatggttgcaagcagaacatacttttattaatatttctctcataattttattgagtctatacaaccaatcaaacaataaataaggcctttatttatagtatttgccctatggtgttcayacttccaccgtggccaatttaaacctaccaatatgatgtcactgaatgcagaattagaaagcattttacattgttcagtttttcaccattacacagtcaatcttcaatatttgtgtattctatacgtgtgaattacacttctggttaaaaatttatttgttaccccaaagtaatgtttatggtcattt

SEQ ID NO: 797342 - DNA, 651 bp, Homo sapiens
tgtaatgaaaatggtagatgttaattagcttgactgtagtaatcatttcactatctacacatatgtcaaaagatgttgtataccttaagtatatgcaatttttatttagagaaaagaacagatctccatttccacttgtgttgaatatgttgcttaagcaagaaataaatcttcattgamaataagtaaaaataaaaataaaaaacggttgaaagaatgccaaagttgtgtatagttattgatgatacatcatagtatgttttctgttactgttaaagcattaactattttacacatatattaagagtaattcattctgtgacttgagttattttagataatactattctgaatttcacatagactatattcagtgagttggagaaatactttatacaggtaatactagaaaatatatataaggatttacatttgataaagtgtactcgcatagcatatgtgtctttttccaaatgccctataacaatgtgacataacactgttatttgtaggtacaccaaatcttttattttattttaaatcacagacatagtatatgttgaaacaaaagtcaaagcaatatagaagtatccattgtgaaaagtacctttctttataaccctccctcagctttcttccatgtttagaaat

SEQ ID NO: 797343 - DNA, 623 bp, Homo sapiens
tatatgcacctaacactggagctctttagtttataagacaattagtaataggcctaagaaatgagatagtaagacaataatagtgggggacttcaatactccactgacagcattagacaggtcatcaagacaaagtcaacaaagaaacagtgaatttaaactataccctggaacaaatggagttaacaaatacttatacaacattctacacaaccaccacagaatatacattctattcaacagtgcatgttctttctccaagatagaccatatgataggccacaaagtgaacctcagtaaatttaagaaaattgaaattatatcaagcactctctcacaccacagcgaaataaaactggaaatcaactccaaaaggagccttgaaaaccatgcaaatacrtggaaattaaataacttactcctgaatgatcattgggtcagaaatgaaatcaagatggaaattaaaaaattcttcttactgaacgacaatagtgacacacctttcaaaacctctgggatagcaaaggcagtgctaagaggaaagttaataacctaacttttaacttaaaagtcaacttaaaagttaaaagttgatgcctacatcaaagactgtgaaagagcac

SEQ ID NO: 797344 - DNA, 623 bp, Homo sapiens
tatatgcacctaacactggagctctttagtttataagacaattagtaataggcctaagaaatgagatagtaagacaataatagtgggggacttcaatactccactgacagcattagacaggtcatcaagacaaagtcaacaaagaaacagtgaatttaaactataccctggaacaaatggagttaacaaatacttatacaacattctacacaaccaccacagaatatacattctattcaacagtgcatgttctttctccaagatagaccatatgataggccacaaagtgaacctcagtaaatttaagaaaattgaaattatatcaagcactctctcacaccacagcgaaataaaactggaaatcaactccaaaaggagccttgaaaaccatgcaaatacgtggaaattaaataacttactcctgaatgatcaytgggtcagaaatgaaatcaagatggaaattaaaaaattcttcttactgaacgacaatagtgacacacctttcaaaacctctgggatagcaaaggcagtgctaagaggaaagttaataacctaacttttaacttaaaagtcaacttaaaagttaaaagttgatgcctacatcaaagactgtgaaagagcac

SEQ ID NO: 797345 - DNA, 623 bp, Homo sapiens
tatatgcacctaacactggagctctttagtttataagacaattagtaataggcctaagaaatgagatagtaagacaataatagtgggggacttcaatactccactgacagcattagacaggtcatcaagacaaagtcaacaaagaaacagtgaatttaaactataccctggaacaaatggagttaacaaatacttatacaacattctacacaaccaccacagaatatacattctattcaacagtgcatgttctttctccaagatagaccatatgataggccacaaagtgaacctcagtaaatttaagaaaattgaaattatatcaagcactctctcacaccacagcgaaataaaactggaaatcaactccaaaaggagccttgaaaaccatgcaaatacgtggaaattaaataacttactcctgaatgatcattgggtcagaaatgaaatcaagatggaaattaaaaaattcttcttactgaacgacratagtgacacacctttcaaaacctctgggatagcaaaggcagtgctaagaggaaagttaataacctaacttttaacttaaaagtcaacttaaaagttaaaagttgatgcctacatcaaagactgtgaaagagcac

SEQ ID NO: 797346 - DNA, 507 bp, Homo sapiens
gcttagctgtctccccagccatgctgggaggaagtcaagtaagtttccccagatctaagacctcctgctttttaggctgaagactggagacattctctccacatcttccttttatttcctcccagttccttttcagtccctgtcctggtatcctccatccagaccttagagggaatgtytttattggacccaggtttggggaaagtcttcccagtcttcctgattccctccatcctgaccccagaggaaactttccctgtctgtcctgggttgggggaggtgtttcccagtccagtcagactcagctggaccctaatattttgtaagaatactcatgtgaaaggtaatcaaaggtactccttcataaggttagtgaagtttggaaaatcttggttcttttttttttttactttaagttctgggatacatgtgcagaacatgaaggtttgctgcataggtatacatttgccatggtggcttgctgcacctatcaacctggcatctagg

SEQ ID NO: 797347 - DNA, 570 bp, Homo sapiens
cccaaagtgctgggtttataggtgttagccactgcacctgacccataattaaatcttaaagctccaaagtaatctcctttgaccccatgtctcacatccagggcacactggtgccaagagatatactcccaaggccttgggcagctctgcccctgtggctttgcagcatttagctcttgcagctgctctcaagggctggcgttgagtgcctgtggcttttccagccacagggrtcgagctcctgctggctctaccattccaggatctggagggtggtggccctcttctcatagctcctctaggcagtgccccagtggggactctgtatgggggctccaaccccacattttccctctacactgccctaggagagtttctttatgatggcactgcccctgcaacaggcttctgctgggacgtccaggcttttccatacatcctctgtaatctaggcataggttctcaagcctcaactcttgcaatctgcacacccacaggcttaacaccacgtggaagtcaccaaggccctctgaagcagtggcccaagctgtacctgggcccctttgagcc

SEQ ID NO: 797348 - DNA, 570 bp, Homo sapiens
cccaaagtgctgggtttataggtgttagccactgcacctgacccataattaaatcttaaagctccaaagtaatctcctttgaccccatgtctcacatccagggcacactggtgccaagagatatactcccaaggccttgggcagctctgcccctgtggctttgcagcatttagctcttgcagctgctctcaagggctggcgttgagtgcctgtggcttttccagccacagggatcgagctcctgctggctctaccattccaggatctggagggtggtggccctcttctcatarctcctctaggcagtgccccagtggggactctgtatgggggctccaaccccacattttccctctacactgccctaggagagtttctttatgatggcactgcccctgcaacaggcttctgctgggacgtccaggcttttccatacatcctctgtaatctaggcataggttctcaagcctcaactcttgcaatctgcacacccacaggcttaacaccacgtggaagtcaccaaggccctctgaagcagtggcccaagctgtacctgggcccctttgagcc

SEQ ID NO: 797349 - DNA, 570 bp, Homo sapiens
cccaaagtgctgggtttataggtgttagccactgcacctgacccataattaaatcttaaagctccaaagtaatctcctttgaccccatgtctcacatccagggcacactggtgccaagagatatactcccaaggccttgggcagctctgcccctgtggctttgcagcatttagctcttgcagctgctctcaagggctggcgttgagtgcctgtggcttttccagccacagggatcgagctcctgctggctctaccattccaggatctggagggtggtggccctcttctcatagctcctctaggcagtgccccagtggggactctgtatgggggctccaaccccacattttccctctacactgccctaggagagtttctttatgatggcactgcccctgcaacaggcttctgctgggaygtccaggcttttccatacatcctctgtaatctaggcataggttctcaagcctcaactcttgcaatctgcacacccacaggcttaacaccacgtggaagtcaccaaggccctctgaagcagtggcccaagctgtacctgggcccctttgagcc

SEQ ID NO: 797350 - DNA, 592 bp, Homo sapiens
agtctctagggagttccaaatgttccctgatcttcctgtcttcttgtgagccctccagacttttccaacctctgcctgttatgcagttccaaagtggcttccacattttcaggtatctttatagcaatgccccattcctgcrtaccaattttcagtattagtccattcttgcactgctataaaaaaccccagaaactctgtaatttttaagaaaaagagatttaattggctcatagttctgcttctgcttctgcttctgcttctgcttctgcttctgcaggctgtacaggaagcttaacagcttctgcttctggggaggcctcaggaaacttccaatcatggcagaaggtgaaggagaagcaggcacatcttacatggctggagtgggagcaagcaagaaaacaagcaagcaggaacaagaaaaaaagagagggtgagggaggtgtgacacacttttagacaaccggatcttgtaagaatttactcaccatacaataccaagggggaatggtgctaaatcattcatgagaactccacccccatgatccaatcacctcccaccaagccctacctccaacaatggggattacaa

SEQ ID NO: 797351 - DNA, 592 bp, Homo sapiens
agtctctagggagttccaaatgttccctgatcttcctgtcttcttgtgagccctccagacttttccaacctctgcctgttatgcagttccaaagtggcttccacattttcaggtatctttatagcaatgccccattcctgcgtaccaattttcagtattagtccattcttgcactgctataaaaaamcccagaaactctgtaatttttaagaaaaagagatttaattggctcatagttctgcttctgcttctgcttctgcttctgcttctgcttctgcaggctgtacaggaagcttaacagcttctgcttctggggaggcctcaggaaacttccaatcatggcagaaggtgaaggagaagcaggcacatcttacatggctggagtgggagcaagcaagaaaacaagcaagcaggaacaagaaaaaaagagagggtgagggaggtgtgacacacttttagacaaccggatcttgtaagaatttactcaccatacaataccaagggggaatggtgctaaatcattcatgagaactccacccccatgatccaatcacctcccaccaagccctacctccaacaatggggattacaa

SEQ ID NO: 797352 - DNA, 592 bp, Homo sapiens
agtctctagggagttccaaatgttccctgatcttcctgtcttcttgtgagccctccagacttttccaacctctgcctgttatgcagttccaaagtggcttccacattttcaggtatctttatagcaatgccccattcctgcgtaccaattttcagtattagtccattcttgcactgctataaaaaaccccagaaactctgtaatttttaagaaaaagagatttaattggctcatagttctgcttctgcttctgcttctgcttctgcttctgcttctgcaggctgtacaggaagcttaacagcttctgcttctggggaggcctcaggaaacttccaatcatggcagaaggtgaaggagaagcaggcacatcttacatggctggagygggagcaagcaagaaaacaagcaagcaggaacaagaaaaaaagagagggtgagggaggtgtgacacacttttagacaaccggatcttgtaagaatttactcaccatacaataccaagggggaatggtgctaaatcattcatgagaactccacccccatgatccaatcacctcccaccaagccctacctccaacaatggggattacaa

SEQ ID NO: 797353 - DNA, 517 bp, Homo sapiens
ctatttaatttataaagggactgctaaatggagttctgagtcttctttctagaatacagatacccatgatgtgattttctggatatgatttttataaagtggagtaagaacttatacagatttgtggaacaagtacagaatccatctagatgtcagtgattttcccctaatcttttactgttatttatagatttcttaagcttttgtttgggttctgggtttttttttttkttttttttttggcaactcacctctgtagagatcagagatcctccaaagtattcaatttactacagtaaactttgaccacgtgtgtgtgtgtgtgtgtgtgtgtgtgtgtgttggttcataactttttatattatgaaactttaactatttttgtttctgcactcatgttatatttgtttacataatgtttaattaaaatctataagggtttgggtttagagaagggtaagcacactcctcccagtctttctcactgaatgcagctgtaaaatctggacagaatgca

SEQ ID NO: 797354 - DNA, 531 bp, Homo sapiens
gaaagagaacaaacctcaaatcaaataagctgtgtgatggccacctgaaactgaaaaatttgctttaggggtgatctgagtcagtgttctccccgcactgtgcctcagaaccacctggagggctcctacgacatacaggtatgggagccccattcctaaagattctgaatcatggacccaaacatttcctttctaggagggcagcataagatattttacatttcatctgatgacttttttatatattgttttaattgttcatgtttgtaaattatcatttttataatttgaaaagcatttgtcctcaatgtggtctttcctaacyacaccatacttgccagtagttatagttttattatggatacccaaaatgcctgccacaccaaaacaaatcaatgtacagttttaaatacattgaactggtatgataaacttgataaaaatgaatttgaaagccttgctctgctgttgtaaaaatttaggcaagttctgtaacctctctgagcctcagattcaattgtgaaatgggga

SEQ ID NO: 797355 - DNA, 571 bp, Homo sapiens
tcttatactgaaatatatttttgttaatttttgtgtaatttttaatattttgtcatctgctataataaaggttaacactcaatagtatactgtgatcagtgatataatatagagaaggttaatttgacagactcagttagatgccattgtgatatttatctgtattgtgttgaccagaattaaaagtaaacattctgtaktcaatgcccatacaacttatgcctatttggaatttgtgtaaattgtttatttttttgaagtgattttttattgtcaaaataatgcatatttattaaagcagactagtagaaaatcttttataatattgccaccaatatttttgcatgtaataatttaaaaaaattatggattttaagatttttaagcttgatcttcagatatcctttttgtttaaatactgattttttttaaaaaagttattaacaactagtaaacccattaaaagaatacctcaccagcacccccaaacagaaccaagttaagcaaaacttttttctttttaggtaaggattaagttcttagagtttgctgtacttcattttaagtaatg

SEQ ID NO: 797356 - DNA, 561 bp, Homo sapiens
ggaaagttcatagccctaaaggcctacatgaaaaagacaaagagcacaaactgacactctaaggtcacacctcaaggaactagagaaaaaagaacaaaccaaacccaaaaacccagcagaagaaaggaaacaacaaacatcagagcagaactaaatgaagctgaaacaaacaaaaaaccrcaaaagataaacaaaaagctggttatttgaaaagataaataaaattgataggccattggcaatatgaaccaagaaaagaagaaaattcaaataacctcactaagaaatgcaacaggaaatattacaactgacaccactgaaatgtaaaagatcattcaaggctactatgaacacctttatgcacataaactagaaaacctagaggagatggatacattccttgaaaaatacaaccctcctagcttaaataaggaagaattagatgccctgtacagaccaataacaagcagtgagattgaaatagtaataaaaattaccaacaaaataagtccaggaccagatggattcacagcagaattctaccagacattcaaagaagaa

SEQ ID NO: 797357 - DNA, 629 bp, Homo sapiens
gcaaatcccctaaaatgcagcatataaaaagtgtacagaacagattacaaatgagaagctagctatgcttaaagtagaaccagatgttaaaaaattagaagaccaacttcaagatggccaaatagaagaggtgattcatcaggctgaaaatgaactaaatgtggtgagaaaaacgatgcagtggaaaccatggggggcawtagtggaagagcctcctgccaatcagtgaaaacagccaatataattattaaatgactttggtgggttgagggaaacagatgtaattaaatattctgttacattaagagtgtgttcatattattgacattttataatcaagaaaactgatacagaaaatacttaggagacttgttaaatgagtgattatggtaatatcatcttgtgagttaatttttgatttgtaaatttttcacacaaattatttccaagacaatatttctttgaataaagaggttgtgggaagatttgaaaattagaaaaattcctaccaatcttcaatgcagagactataatcaaaaagtcatttctttagtagtatcttcaatacatcatttaatattcttattatcctaaagaagaaaaagcccttaattattgtctaaacaaat

SEQ ID NO: 797358 - DNA, 662 bp, Homo sapiens
tttatttgtttggtgggctgaagcatgaatcaaaaggtggcccacagtgagtgagttgaaaatgctggacctgcctttgtttaatgtagaggaaagcattcaaaggtgtagaaagattggaatgtcagccttgatttgtcatttaagatctaatcatccaccctggatgggtccagaagacatatctttcatcactattgtgaaaaataaatttgtgagagaaggcccagtatcctagaagagctctatgatcacattttctgtaggccagaccttacaagtgagaactgkggtcattagattgggaaatttaaatgtaataagagagtagttggatctcagaatgtctggggccatgtgttggtactcaatcaccaaaggcaaagtaggtatggttaccataatggacagcaatcagaatagttgacatggtgtctctaggagtgaaatagattgtatgcctactaaatttttacttgatctatataagctgaaaagttctagggcaaatgaacaaagtctaacctgaatcatgaaaactgagagtcatgaaccttcaatcaatttctagacttgaaccagtttacagactcaaaaccctttgaatgaggaagaggacaggctcccttgaggaaggatcctgctgtactaccacaatttat

SEQ ID NO: 797359 - DNA, 819 bp, Homo sapiens
attatctccagcttctgtacctgggtgaaaacagctgagggctttatcgtaagagcttctcttaggctgtcactttggagagttttcttgaagttggtacagatgtcattattagtacatggaaatgatgttttgattttcataattttgtttattttgtwatatatttgtttattttggtatgtgttagaaaaactaccaccagcttttcaagaatgttatttaatggatagtattgcctaggaattgatttaaaagtgagttggtttaaagaaagtattaagtgacaaatactaggttggtacaaaagtaattgaggtttttgccattacttttaattaaattactgttaatggcaaaaaacacaattacttttgcaccaacctaataatataaatggttgtactggataatttccttcccccaaatttatgtcctccccaaaatttcaggatgtgaccctatttagaaacaatgcatatgtaactggctaagatgagatcttactggaggagggtgagcctttaatccaacaaagacttaaaattcagtatgttcttatgagaagaggagaagaaagacagagacacaagaggaatgccacgtgattgataaaaaccagagactggagtgacacctctaaaaatgtaggaaagccatttccagcagccaatggaagctaagaagaggcaaggaagtatcctccctgctaacacttttattttagatttctagcctctggaggtaagaaagaataaaggtttgttgtttcaagccatccagttatggtactttgttaaggcaatttgaggaaaataa

SEQ ID NO: 797360 - DNA, 574 bp, Homo sapiens
ttggggtaccatttggaaaattgtttgcataactgtacctgctataaaatgacaacttttacatttcttaatgtctgttgacctgctgcttttacagcaatcataaggtgtttttgttgttattaatacagtaattgttcatgatgggtttctcccagaaaagctatcatttacattgcttgatgataattctcactattgcactttgtgtaatgagagagctatgtagagctatttgtctatgtagacaaaggcacctgtttttcacattttcctgtccaaagtactaatttttcttctatacaatatacctttctctagtgttatattgataccattctcactgggcatcatatttaggctactagtctttaaataattaaaacwtatgtgctccaagttgacagtaaaatgtttttccaaagctaaaggacaatagtagtttttcaccacccaacatttaacttatgatcatcaatccctagattccaaaaaattgaaaaaagtcaagcatcaagaccacttcaaaggttgacaatgaagacagaaaaatatttagcacttagaaagcact

SEQ ID NO: 797361 - DNA, 602 bp, Homo sapiens
atcggcacataatacaagaaagtatcctaagcaaagtcccaggcccttcataactgctcttagaatatgcggagtgttagcgtgttctgattaacaaaagtctaacatctattcttactggaataaaagagtgatcataacagcaattctgacccctcccctaaggttaaggaacaatgttgactgcttctgacataacatggtgtatttatcctgggtaggataatttgatgcttgccttcccacagaaaaagaaacgcttaaagtttttgggtttttttaagaaaaaagcagcaagtaggccaggcacggtggctcackcctgtaatcccagcactttgggaggctgaggcaggtggatcatctgaggtcaggagttcaagaccagccaggccaacatggtgaaaccccctctctactaaaaatacaaaaattagccaggtgtgatggcacatacctgtaatcccaactacttgggaagctgaggcaggagaatcacttgaaccctcggaagtggggattgcagtgagccgagatcatgccattgcactctagcctggtctacagagtgagactccatctcaaaagaaaaaaaaaaaaaa

SEQ ID NO: 797362 - DNA, 617 bp, Homo sapiens
gcctagcattaatcaattagaatgattctttaaaatgtcacaaaaagaaagagatgaaagttacactccagtctacagaaaacacgtagggctcaccagcaagtctccgttgccaccctcacccctgacagtgaccasaggtccagtttcatctcagtgggtcccagaataacagagaaggaatgatttgtgtgtagttgttaacacactccaaggcaagacagccctgtgaaatgaaaatgtcagactactgtctttgtatttctgccctaacttttgtaaacatggtagagcaaaaaagatgagaattggctgagcaccacggaactattggacaaactgtatttcatgataaaaatttctttaaaaagcctgctcaaacacttgggctctttttcctttggagaacaaagttctggttttgaatagttttatagatggtttctcagtatctttcctaattaaaaacatgaaaccctaagtttctctgtatcgagaagggcactctctcagtctcactggctttatttagaaactacacttctctggaaatacatacatatatataaaaacttaatctagctgaaccactcaagccaacacaaagcaagacgtgt

SEQ ID NO: 797363 - DNA, 561 bp, Homo sapiens
aaatatgccagagcattctgttctcttaaaaaggcctactgttgtgagatattgttttatcaaaccctgttgacctggaggaagggaaatatccaacccagccctgcagaggcttcctcctgtcacctgagagggagtggggagaaacctaagatgtactgttaaaaggtcacagcctggaggcacaggctcactaaaagactgagaccttacttatcacaggattgtagaatgtttctcctcccctctacaccttaccatcacatcagtagggcccctgtataataatagrgttacaaatgaaaaaactgtgtgtctcagatcttatttaagaagatacctgtatggaaacccaaaacaacaagggaaacaaaaacaataacttcagaggaaattttagcctctgatacttgtggaaaaagcaaatagtaaacacatcctaactcccggccaaataaatgtaaaacctcacactgaaggcctgtttacttacattccttttaaccagtgtatcttgccaggctttcaacaaatattgtaaggcatcacaaagacaaaaac

SEQ ID NO: 797364 - DNA, 572 bp, Homo sapiens
caaagtggctttcacccatgttaaaaggagggcctaagggatgggaatatccgctcttacccacatacgccctgtctcccctgctgtcagtagcctgtgaattccctagacctcatttatgccgtggatactagcatgacctttatccgtgtaatgggaagcttggcttaagcagcaggaattagtcatgctcacctgtgctgtgtcttttaactkccattatcatctgtctctggattcctcagatccagttttctttcctagggctttgagctgaagtttggaattgaatttgggacaaaaatacgtcttgagggggggttgcgtggactccttattataagctgaatgctgagatgaagcggtggaattgagtcctcctccaaccagggagagaaaaggatgtcttgtgacacccctagatcactggtggctatagttatgcttgctaagatttggacgcatggggcttggctttggttagctccctttgtcttactttcccaaaaaggaaacctctgggtggtgggcatcctatttattttcatcacctggaaggatttgcaggataa

SEQ ID NO: 797365 - DNA, 572 bp, Homo sapiens
caaagtggctttcacccatgttaaaaggagggcctaagggatgggaatatccgctcttacccacatacgccctgtctcccctgctgtcagtagcctgtgaattccctagacctcatttatgccgtggatactagcatgacctttatccgtgtaatgggaagcttggcttaagcagcaggaattagtcatgctcacctgtgctgtgtcttttaactgccattatcatctgtctctggattcctcagatccagttttctttcctagggctttgagctgaagtttggaattgaatttgggacaaaaatacgtcttgagggggggttgcgtggactccttattataagctgaatgctgagatgaagcggtggaattgagtcctcctccaaccagggagagaaaaggatgtcttgtgacaccccyagatcactggtggctatagttatgcttgctaagatttggacgcatggggcttggctttggttagctccctttgtcttactttcccaaaaaggaaacctctgggtggtgggcatcctatttattttcatcacctggaaggatttgcaggataa

SEQ ID NO: 797366 - DNA, 539 bp, Homo sapiens
aagcttgaggacatgtgcctgtgacacagcctcaggagatcctcacgacatgtgcccaaggtggtcagggcacagcttacttttatacattctagggagccatgagatagcaatcaatacatgtaagatgtacactggtcctggctaacatgatgaaaccccatctctactaaaaawatataaaaaattagccgggtatggtggtgggtgcctgtagtcctagctactggggaggctgaggcaggagaatggcgtgaacctggaaggcggagcttgcagtgagccaagatcaggggccactgcactccagcctgggcgacagaatgagactctgtctaataaataaataaataaaagacatacactggttctgtcctgaaaggcaggacaactgaagtaaggagaaggcttctaggtcacaggtagatgagagacaaatggttacatccttttgagtttctgatcagcttttcccaagggaggcaatcagatatgcatttatctcggtgagcagagggatgactttgaatagagtggga

SEQ ID NO: 797367 - DNA, 609 bp, Homo sapiens
ttaatttttctacatgaagggtaaggatccagtttcattcttctgcatgtggacagccagctatcccagcaccatttattgaatagggagtcctttccccattgcttatttttgttgactttgttgaagatcagatggctgcaggtgtgtggccttatttctgggttctctattcggttccattggtctatgtgtttgtttttgtaccagtactatgcagctttatattatagtttgaagtctaataatgtgatgtctctgttttggttccatataaattttagartagcttttttttctaattttgtgaaaaaaatgacattggcagtttaatagaaatagtgttgaatctgtagattgctttgggcagtatggccatttaacatatcgagtcttccaattcatgagcattggaagtttttccatttgtttgtgtcatctatgatttaaaaggaaagctcttacatgacttctaacaatgtttcccatggaatctaaatgccatagcaatttcatatcaaacataattcaatttaaacatacacgaacaagctcatctttaacaggcaaaaaattactccatttactgcttaaacttgtatttccatt

SEQ ID NO: 797368 - DNA, 538 bp, Homo sapiens
aatgctaagtgcagaccgtgcagtgttataaaacatgaagcactcatattcttcaaactttcacttaaagcttaagaaaaaaaaatgaagccaagaaacaaaattaaactcccatttaaaaactacacctttgttcaaaatgttctatgtaaagactataggccttttagaattaatttctgtagtatcctcccactaaagcagtttgtaaaagctgtaggttattaaggtatgatgaggaaagtactattgtatataatttcaggccacacctaattatcagcgcctagttataaagtgggtgggagagtgaccctttaattcttcttaaayagtgaagttttttattttttaaattatttatttttatttatttttgagacagagtctcattttgtcacacaggctggagtacagtgtgtgatctcggctcactgcaacctctgcctctcgggttcaagcaattctcgtgcctcagcctcctgagtagctgggattacaggcacacgccaccaagcccagctaatttttatatttt

SEQ ID NO: 797369 - DNA, 667 bp, Homo sapiens
cttccctaatgctctggtcccctcagacagcactaagcctaggtgtacttcactgaggttttgcagagctgggccttgggttttgaaactttatattctctgttagctaacatattgagaagagcttcagtgccttcctgaaaagcatcctcagttggggcacatagcagaatatcatcaacatactgcaagaccttaacttaaggttgagagaactcagagaggtcttgtgacagtgcctgtccaaacagatgaggactatttcaaaatccctgaggcagcaccgtcagtgttaactgggcgtctggctggaggaatatttgaaggcmaaccggtattgacagtcaggatgtaacggtgtacagaaaaaggcatcctttaaatctaggactgtaaaccatttagttccctcaggtatttgagttaacagggtatagggattagggaccactggatggattggaactacagcttcattaatgaggcgaaggtcctgaaccaggcttcattccccattgggtttctgtgctcctaatattggggtgttgcaggggctattacagggtttgaggaggccctgcatctttaggttattaataatggcttctagccctttcctagccactggccttagggataatatctctggttaggaaaagaagtggga

SEQ ID NO: 797370 - DNA, 604 bp, Homo sapiens
attctgaaattgtatgaagtcatttacatatctgatacttttcaactattctaacttgagaaatcttggcttcagtgaagtttataaataaacactcagcttctgagcatttagagttaatattttaaagttgatgctttgcagwtataaaaagtcataacatcgttccttccttgacaattattaaactacatcctatcaattatattatcaaagcccagcaaatgggatattagaaattataaatgtaatataaatagaatataaatttaattgttttttaatgtaaatatttcaaaggcaaataagaatttagtgaatgtatgtaacttgaattaagtctcatttaaattaaaatattatccatctcaaaaaataaaaaaaggtttctgaatagaatagattgtgggggatgaaaattcagtttttgtacccttcttattctttcttacttcggttgtatgataccagacacatttgttaataaacaaataaagcaattctggagaattgctttgttatgtgcctcataatttatcttaataaatgaaccaagtgctgtttttggagtggtaaaatctataaaactcccatggaaaagacc

SEQ ID NO: 797371 - DNA, 627 bp, Homo sapiens
aggaattagacatattaaattcttaaagttttatcttggaggtgggacgatgctcatatttctgcattgcgtaattatgctttttttcagagatacaatttccttcagttttctcacttgcacaaagcatggaattctggtacttaaaaaatttattagacttttagtttgttttatttctttgcatacatataaaccatgggttaccagctgtttacaagtttactcatgaatctcaactctcctgcactgacctatcatcaaacggtagccatatcacctaccagttcctcagggaacacatgttattgaagctacttttttctctttaaatgtgttacaagtagtaaactatataattattttccggaaaaamaatccttgaatttcttgtgaatgaagataaaaatatcagttgaattaaatagtgaaaagtaaaggtgagtcttgtttttatatttacaaagaaaccctaattaattaatcatcttagccaacaacatcttagcacacaatctcataacacaatgtttagacagtgacccaatcctagaacatagtatggacttcatttatggttactgaaccaaaggtgatgacatagattttgtaaaataactcagagga

SEQ ID NO: 797372 - DNA, 576 bp, Homo sapiens
catcagcgagctagtgaaacattaaaacgtataaatagcaattaataagatctagagaagcattggaagcccctggctaaagtatggtcaggtacacagaaccacaacagaggcaagaatgtgaccatgtttagaaatcaaatgtcagaatatggtaaattagtcagcagtaagtgaagaagtcaaaggtatggtacatagtattaaaattcaggacaagcaccaagtttaggtttcaagtactctaagcttaaggaactagacaggtagtaaatgagttgtgacagcagtttataaactaaagagagtatatggaattaaatttaaaaactgaaaatttggggacaggytaacatttaggtggcactgtgacagcaatttatatagataaattcatataatcctcaaaatgactgcacaaaattagtggtagccctatattatagatgagcaaactgaggctatgtcatagaacttttctaaagacaaagagctagtaagttatagaatggaaattctgagatttattcaccttccaagcttctgtcatattaccaggcactgaaattgaacaac

SEQ ID NO: 797373 - DNA, 643 bp, Homo sapiens
tgtataatttatttagtgggtacatgtgcttacctgaattattttaatatcaggttactctaggtttgtaggtagatgtgaaaagcaccttttttctatgttctgagacagtttatacaacatgaatttacatatttcttaaaatttttatagtacacatgatactagagctcaggcttggtgactgtaggagtcaaaatttttactatattctctgacaatttgtgctttccaattttccccctttcctcaaaacaatattgtaagtttatattttctttgaaaaagcattcacttagtataggtttataagcatactgctgtataaagttaaattctcctatgaatctttcatttaatccacattttcaccagctcatctttcatgtaattaatgttatttatttctttttggggtttctctttgtttttagtcacactggctaaaagttttctactcattgttcaagggataaatacaacaactaaaaatctargttttgttaagtatttttaaattaatgttaaattaatgtgttaccacttttattaatataattttaattcttattttattcattttgtagctacttaaagatttagtttacttaatttttaatattttcttatagatgcattaaaa

SEQ ID NO: 797374 - DNA, 576 bp, Homo sapiens
ttagctggacaagtgttatctctctggcaggaaccctggctactcaaaaattgaatgtaagttttcctcacaggaagcatttcatttatgatttctccaaagaagaggaaaattatatatgttgaaataaataatgtggacaaaatgatatggagacaagagcacagcacagaaagggctatgtcatatctctcatcttcactcacagtaggataaccttataagctaggggaagaaaagaatatatcgattgtaagtataggaaaatatgtgtatataaccatggagaaatacagagcataatatataatggcacattaaatctcagctaccataatttttcaaatatcatatttctatgtgttctgaaaactggkaattattaaaaaagtttattaagatgaatgttaaatataaagataaattacgaatgaaatttaaaacaaaaatgttataattcaagatgcttttaactttaagtaaccaccagaacaacaaactgactaatggacaaacaatacagattaatttttttccccaaaatcagaaacttaagagttggtgattccagatttc

SEQ ID NO: 797375 - DNA, 606 bp, Homo sapiens
gaaacattaataaccccaaactgtttaattttaaaggatatttaaatcttaatactagtcataaggtgacctatttgaccactggatggcttattgcaggcttcaataattttgttgccatcattagtaaaagtcgttaaccaagaaaaggcttaaatatgtatggattttctgctttatttacccttggattgcgtactgctttgaaattatttttccatagaacaggaatacagagatgctatgcagtgatgttttaggcttggatgcagaggaggctggctgtgaaaagggtgctggcctgccagtaagagaccatgctttctgtccagagtttctaattctgcaagtcagttcatcaagtcagatgaccaccttgtaaacatcaggccatcagtaaacatcrgggcatgtttttcactataatgggaaaaagaatgaagaggtgactcccacttggagcagcacgttctccagtgaacacattgggacatttatttatatgatgatccaccctctgggttgcttcataacagagaataggggactgagaggacaagctgcatgacagaaaatgttctgtgagagagagaggtaagcaggcag

SEQ ID NO: 797376 - DNA, 617 bp, Homo sapiens
ttgtttttacgctaaagactcagcccaggttagaggcggtattgactttgtaattaaaccattttaccttcagaattttgtaatcactgcatttaaaaccatctgttgtagtgagaaggtaaactatttttcccctcaaagtacagaaaaaaaaaactacagggctttttttttttccttaaacgtcagagttctgattttagggcattgatttgcttaacatatcagttaaaaaaaaaaaaggaaaaaatttatctctgagagatggaaaagaaagactgtcatagaattcaaaataaatggaggtgaaagtatcttcttacctgctgctgtttttcaaaggtgttttgtttcctctcgtacatggagagttattattaatggattagagaatgaatgtgatgttaaaggcaagttttggtttttgtgtgtgtgttttggtcaaaacggatattttactgcttacataacaggaagaytggaaatgtgcatcccaggctggttcagaagttcaatgcagctagataactgggttgccttttctagagttctcttggcctcttcttcatggtcccaaaatagctgcagcagtcccatgtggtgtgtcctgacatcaa

SEQ ID NO: 797377 - DNA, 504 bp, Homo sapiens
tgggaaataattgccagctatcacagaattcattattagttaagacttttcctttcttcctttctctttctttctttctgtgttttccttcttccttccttccctttttaaaaaataatttgaagactttgagccaaaggtgaaattgagagaktcctctgaaatagctcgtgccaagccaacaataactgaccataaatcttggatagggatgtgatgggagtgaggagtagagagaccacagtgtccatctaaggcagaattgtcatagctcagaatgaaacctttattcaaggtgcctagctttaacttctagcttccactacctactagctatagagtctggggaaacctgcctgtcttccgtacacagttttgtcatctgtaaaatggagatagcaatagcacttacctcataaggctgatgggaaggtttactcatgtgtataacacacttagcacagtgcctggcacatagcagacacatgtagatgtattatttat

SEQ ID NO: 797378 - DNA, 512 bp, Homo sapiens
aaagcagaaggcagacaagttgctaggctattgagaggtgtgtttacatgaagaaataatttcaagggaggaagccatgtgtttatacctcatcaatattaactgaacttgaaataatgaattgtgacattgcccttgatagtggatcaaatcacgacctccatagtgcctgaatttcactaagcatggttgcttaatgctatttcccctcacttaaattttacttgctcatgttctccattgtgcattgtgttcatcatctcttacctagactgttgccatattctcacacatctrcctgtctccaaagataagcccacagttaatttgagtgcaaatggatgttcatctttcaaaaggtctttttttggagaggggggcggcgaatttaggccaacaaggttattttgctatgtctaccctaaaactatcaaaaagcaggttcttctgacattcatcatgaatagaaatatattaatagagttgttgtaaggactagaggaatacatcca

SEQ ID NO: 797379 - DNA, 512 bp, Homo sapiens
aaagcagaaggcagacaagttgctaggctattgagaggtgtgtttacatgaagaaataatttcaagggaggaagccatgtgtttatacctcatcaatattaactgaacttgaaataatgaattgtgacattgcccttgatagtggatcaaatcacgacctccatagtgcctgaatttcactaagcatggttgcttaatgctatttcccctcacttaaattttacttgctcatgttctccattgtgcattgtgttcatcatctcttacctagactgttgccatattctcacacatctacctgtctccaaagatawgcccacagttaatttgagtgcaaatggatgttcatctttcaaaaggtctttttttggagaggggggcggcgaatttaggccaacaaggttattttgctatgtctaccctaaaactatcaaaaagcaggttcttctgacattcatcatgaatagaaatatattaatagagttgttgtaaggactagaggaatacatcca

SEQ ID NO: 797380 - DNA, 587 bp, Homo sapiens
ggcagacaagttgctaggctattgagaggtgtgtttacatgaagaaataatttcaagggaggaagccatgtgtttatacctcatcaatattaactgaacttgaaataatgaattgtgacattgcccttgatagtggatcaaatcacgacctccatagtgcctgaatttcactaagcatggttgcttaatgctatttcccctcacttaaattttacttgctcatgttctccattgtgcattgtgttcatcatctcttacctagactgttgccatattctcacacatctacctgtctccaaagataagcccacagttaatttgagtgcaaatggatgttcatctttcaaaaggtctttttttggagaggggggcggcgmatttaggccaacaaggttattttgctatgtctaccctaaaactatcaaaaagcaggttcttctgacattcatcatgaatagaaatatattaatagagttgttgtaaggactagaggaatacatccattgatcaatattattaatattttggaaagaattcccatttaagaatatttaaacaatttaattatcccctaagaatttcacttt

SEQ ID NO: 797381 - DNA, 493 bp, Homo sapiens
caatactctgacaggtccacagataattgtttattgcttgctgaaaaaaattccacagtttgttttaccaaattccatcatgatgtataatgagtatctggggcttatagatccttttacgatgtacctggggtttatagtgtaacctaatccttaatacaaataatatgaggcttgtcataagactataggagaagcctgtaaagtttatggaagtctcctaccacaggccaggaactttacaacagacctttcagtgaagacatatggaaaagaaaaagaaacagaggtagaaagatagatagtgttatcaaattgtattaatttataygtaatgattccttcacttctgaattaggctttgcatctagctaatccctgaacactcattgactttcaatgtataagaaagtacttggtaaaagactgcttctaaatctgaaaaggttcaaatagtctacaattcacaatttctttatatgtataggcatgg

SEQ ID NO: 797382 - DNA, 592 bp, Homo sapiens
gacctgtatgattgcagccacttacacaatgcctggacttgacctccaaagtctagaagctctccttgttgtaatagaaatgaacacctctggggtcagctgatgaatacaagtggcacatcttttgaagtgtcctcgagagagctttaggtccacagaagaacacgccaatactgctgctgcagtaggggtaagaaaaggaaataaaatgtcaccaggaggcaaggccagccagaagccaagacaatgataagattaatgaagtggttgtggctttacttatttatttttctccctccatgtcgttttttcttarattctttttttctacctactttcagcaccatgctctctcctaggttcccagcatcctcccctaaattaatcagggaggtggagccaagaagactgaggctggaaaggggccatgaaactgttgaggggttttgatacaacaccctgcaatgttggcactttacaatggcagagttcagtagttgagagtgggaccatacagtccatagagcctaaaatgattactatttggccccttatgggaagagtttcccaatccctgacctatatgattgca

SEQ ID NO: 797383 - DNA, 604 bp, Homo sapiens
gcagagttcagtagttgagagtgggaccatacagtccatagagcctaaaatgattactatttggccccttatgggaagagtttcccaatccctgacctatatgattgcagccacttacacaatgcctggacttgacctcctttttggccaggtgaccttgattcatgtcttcttggatacgtgaccagatgttaacttcctgagaacataaacctggtctgttttattccagcacctggaacagtgcctggcatacagtggacaatcaacacacatttgctgaatgaatgactaaatggctttcctgagtagtatctgygtggtcttgggcaagtcactagacctcagtttctgcatgtggaaaagatgataaggactacgttgtatgttttatcaaaagcaagatgagataatacattcaaaagggttttaaaaaggttagttatcactaatatcctgttcagccctgcctttttatagataataaaattaatgctaaagtaatagcaatttaattaatttctcctgttggaattactttaattttcaaagaaggccagaagggagagctggaaaagaaaaagacattgctgaaaatatagtc

SEQ ID NO: 797384 - DNA, 646 bp, Homo sapiens
aaccaaatattttgccaaactaataatttgatagataggtaatgccattgaagaaattttgcagtataatgataaatccaccctgtactcacccatctctccaatcccccctaccacaaatggagtaatttcagcaatttttattgaatcttcacttgggtctaaccagagagattgatgccctctcatgggaaggaactatgggaatatgctgacaatttcctcatcataagtttatggtgtctttatttttcccatgaagctgtaacttatcatgtgttgtatttccatttaagtctatttctttgagtattctgaacattttagtcacataatgaatgtttaggatatcctgttagataaagggccctgtatgctataatcagaatgctaatttcttaaaaatatcattttaaaacattttgcacatatgcacatacaaatgagaattgaagggtgcatacayaagcaaatgtgggtccagatggacacatttactcaatttagtataaaggtattttcacgtttctgaaaacaatgggtggtctaaaatacattcatgcaatatggattagaagcccccaatcatatggtaagttgacacctttcttcatcgttaggttgggttaaactgttctaacaaatg

SEQ ID NO: 797385 - DNA, 603 bp, Homo sapiens
actttcatagtaataaaattatttttttttacaggactcatccaacacttttttttcttttcttttcttccttttttttttttttttttttttgagagggagtctctctctgttgcccaggctggagtgcaatggtgggatcttggctcactgcaacctccacctcccgggttcaagtgattctcctgcctcagcttcccaagtagctgggattacaggcatgtgccaccatgcacgacgaagtttttattttttagtagagatgggatttcaccatgttggccatgctggtctcgaactcctsacctcaagtgatccacccacctcggcctcccaaagcgctgggattaccagcatgagccatcgtgcccagccacattcttgtagatatagtggatgcctagatgttttgggagaccactctgggactgtcatggcgttgagggtttctgtgtgcatgtggcccgtcatagaccttagtttcacatcattcccaagcgctaatgatcagcccaaactcagccatgtccatttgcaaggggcttgggtctgagcgacagtcacaagtttgggctctctgtgtgtcccttctcattttcatgt

SEQ ID NO: 797386 - DNA, 537 bp, Homo sapiens
gctctaggcaggaaaagcccccttgagcaaaagagaaagaatggtaggagcagaaaacatggaagagggaatgaggatatacagggaatgtaagggacagaaaggaagaaggaaatagtgagactatgaactctttaggaaaaggagagggtttcttcctttctttttttttttttttttttagatggagtcttgctctgtccgcccaggctggagtgcagtggtgggatcttggctcactgcaacctccgcatcctgggttcaagtgattcttctgcctcagcttcctgagtaastgggattacagacgcccatcaccatgtccagctaatttttgtattttcagtacagacagggtttcaccatgttagccaggctggtttcgaactcctgacctcgtgatccacccgccttggcctcccaaagtggtgggtttacaggcatgagccaccacactcagccaggaggtggtcttaaacgaaccaggcacatggacaaatttgtcctgcgcagcttgctgtgctcactcggagcgaa

SEQ ID NO: 797387 - DNA, 635 bp, Homo sapiens
actccaaggatgaccagattcccaggtcactcactgcctcccatgctcaaaaacctcatgactccggatcttccaatgcttcaaacttcccgtgtaccctccggacgtcacagtgcatgctaggacatctccctgtgtgtcctcctcttctgtccatgctcctttccttctgtctctaaaggaattctggatcccctcctaagacatcgcatgcctgtggtcatgccgtggaccttgttgttaccaataattcccatcccccaatcgcaagttcaagcttttcactggttacctccccmtctcctccttccagccctctccccggtaccctttccccacagtccatgtctttgggagctaaaagtatgggctctgtcacttcggctctgtctccatggttaaccatcacaatcaccctcctaccctgctctcattttatctgacatgattagatgccttggaaaacgacaagcacggttaaatctgcctccgcttactccatacctgctcccgtacagccaaacataggatgagaaaaaactcacgagctctctggatgatctaacttgagattcgtaaccacagacttagcaaaaggacattcctcccgtttattcacactgtcattatcctca

SEQ ID NO: 797388 - DNA, 598 bp, Homo sapiens
aaagttccggagatttctttcacaccaatgggaatctatttaatgctactgaaggctacagttaaaaatcattaagatggtacattttatatggtgtgttttctttttatcacaattagaatttttaaaataaaaattaaataatgaagaatttcccgtctgtgtcctctccagtagttttgcactcattytcttttaaatgctctcctctgtgccttccttctttttttctttcttttttttttttttttaaacagagtctccatcttgttgcccagactggagtgcagtggctcgatctcgactcactgaaacctccatcccctgggttcaagcgattctcctctctcagccttccgagtagctggaattacaagggtgtgccaccacgcccggctaattttttgtatttttagtaaagatgaggtttccccatgttggccaggctggtctccaactcctgacctcaggtgatccgcccacctcggcctcccaaagtgctggtattacaagcatgagccaccacgcccggcctcctgtgtgcttttcttttcacagatcacgaaacctgctttggccaagtttggcaatgatctct

SEQ ID NO: 797389 - DNA, 598 bp, Homo sapiens
aaagttccggagatttctttcacaccaatgggaatctatttaatgctactgaaggctacagttaaaaatcattaagatggtacattttatatggtgtgttttctttttatcacaattagaatttttaaaataaaaattaaataatgaagaatttcccgtctgtgtcctctccagtagttttgcactcattctcttttaaatgctctcctctgtgccttccttctttttttctttcttttttttttttttttaaacagagtctcsatcttgttgcccagactggagtgcagtggctcgatctcgactcactgaaacctccatcccctgggttcaagcgattctcctctctcagccttccgagtagctggaattacaagggtgtgccaccacgcccggctaattttttgtatttttagtaaagatgaggtttccccatgttggccaggctggtctccaactcctgacctcaggtgatccgcccacctcggcctcccaaagtgctggtattacaagcatgagccaccacgcccggcctcctgtgtgcttttcttttcacagatcacgaaacctgctttggccaagtttggcaatgatctct

SEQ ID NO: 797390 - DNA, 598 bp, Homo sapiens
aaagttccggagatttctttcacaccaatgggaatctatttaatgctactgaaggctacagttaaaaatcattaagatggtacattttatatggtgtgttttctttttatcacaattagaatttttaaaataaaaattaaataatgaagaatttcccgtctgtgtcctctccagtagttttgcactcattctcttttaaatgctctcctctgtgccttccttctttttttctttcttttttttttttttttaaacagagtctccatcttgttgcccagrctggagtgcagtggctcgatctcgactcactgaaacctccatcccctgggttcaagcgattctcctctctcagccttccgagtagctggaattacaagggtgtgccaccacgcccggctaattttttgtatttttagtaaagatgaggtttccccatgttggccaggctggtctccaactcctgacctcaggtgatccgcccacctcggcctcccaaagtgctggtattacaagcatgagccaccacgcccggcctcctgtgtgcttttcttttcacagatcacgaaacctgctttggccaagtttggcaatgatctct

SEQ ID NO: 797391 - DNA, 576 bp, Homo sapiens
tgaatgcccatcaaatgatggacaccacgttaaggtgggaagtgacttaacatgtttcacatctttaggaagccatcaatatcacaaaaaatcatcaggaaaccataaaaaatccaaatgcagtgtgtgaaatgctaatagatatacatattaatataaaattatgtcagtgacaaaaatgagaaaaaaagacatttcggcatcatttgtgttataatatttccaatgcaaacaatgagttatcttgagggagaaaagatttctcggcaaagggaagaccaagaatgagatcaccctccttcccaatgcacacacccttccttccttgccctgcaacctggaaggtcccttcggacaaccacaactttgcaggcctttcaccctcctggggccakgctccttcccctcacctacctgagtgagactcagctcagactcctcctggggctgaccagcctggaggggaacatgcagccaacctacaggttacgttgaacatcagttgtgtcaccctcaagtgaccctcacccccaaagtggcatatttcccagccccatgcatttccactttcctagg

SEQ ID NO: 797392 - DNA, 638 bp, Homo sapiens
tggaaacaacgacccctcccacactgccccttggagaccttcactcataagctctccaccctccacacgtggacatctgggcctactgcaggttgttgtaaagaattctccctgaggcatgtcattattaatggacattagcactgacawtgtcctccctagccattcattcgcagtggctttccctgaagggaacggccatcgaaacccctcctggaaggtcctgaagattaactgatggggcatattttaaaattaataagatttcctaaaatttcaagaacaacattttgggctttttaaaaattaaatagagtattcattggaagagaagaagaaatgctacatgtaggcaggatttgggagaatagcaaagtgatgatagcggactctgttatgctccgagatagactgcgtggttaagactcctctcctgcagcaccctgcgacctcgacagtcactgtcggaggcagaaaaggacaggtgactccacagaccaagggacccgcacacttagtgctgagggccagggactcctgctgctcccggggactggtatgtgtggacacctgagctgcatgcttcctagggactgcctgcagagtctgggtggtgcagcttgaacttgcgagaaaat

SEQ ID NO: 797393 - DNA, 640 bp, Homo sapiens
acagacaaacagaaggtaaaataaatcctaaagactgttatttacagcctggttattgttcagtgatgtagtcaagagcttttataccatctgaagaaaagttcttccttgaggtgattcttaagaattaagtgaactctccatgttttagatacacttttttttaagtgtgtatctggttgctgtgatcaatgtacccaattgctcctcccacatctacctcatggctcacctagaatccacatttgcagcttcccttcggctgggagcggcaatgcaagtcatttgggccaagaggatttgaacaaaagtgaaatgcctaagccatctccagctgaaagaggagccactttctctcatttgagctttttattttttcccgaaggcaggtcactagatgtgacrtgaacccgatttcatccaatctacagaaaagaccaacagccagaggatggagccaccagttaaagcaaaaacgtgacagagaacaaacctctacttacgtaaaccattgaaccaatcagctgcctagcaattgtgtgggagcaagatttcaccatctgcagatcctacaaaaacattccacctacgtgccagggtatgtggacaagaaagttcaaagcagcagcattgggaagag

SEQ ID NO: 797394 - DNA, 640 bp, Homo sapiens
acagacaaacagaaggtaaaataaatcctaaagactgttatttacagcctggttattgttcagtgatgtagtcaagagcttttataccatctgaagaaaagttcttccttgaggtgattcttaagaattaagtgaactctccatgttttagatacacttttttttaagtgtgtatctggttgctgtgatcaatgtacccaattgctcctcccacatctacctcatggctcacctagaatccacatttgcagcttcccttcggctgggagcggcaatgcaagtcatttgggccaagaggatttgaacaaaagtgaaatgcctaagccatctccagctgaaagaggagccactttctctcatttgagctttttattttttcccgaaggcaggtcactagatgtgacgtgaacccgatttcatccaatctacagaaaagaccaacagccagaggatggagccaccagttaaagcaaaaacgtgacagagaacaaacctctacttaygtaaaccattgaaccaatcagctgcctagcaattgtgtgggagcaagatttcaccatctgcagatcctacaaaaacattccacctacgtgccagggtatgtggacaagaaagttcaaagcagcagcattgggaagag

SEQ ID NO: 797395 - DNA, 700 bp, Homo sapiens
tggattgcaagaagggatgaaaaaataggatccaattacatggcatttataatagactcactttggatttaagggtatataggttgaaaaaaatggaactatatatattttatgcaaatggtaaccagaagtgggtggacatgactgtactaatatcagacaaaatcaactttaagtcaaaactrttacaagagacaaagaaggaacttatatattaataaaatctttaatacaacaataaaatataataattataaacctatatgcagcaaacatcagagatctaaaacatataatgcatatatttccataattgtaaaggagaaatagacagctgtttaataatgaatagaaaaaaagacaggagattaataaaaacattgaataacaacactatagagcatgtggttctaacagacatacacagcacactccactttgtaacagtataatacacatttttctcaagtgcacagggacattttccaagactcaccatatgctagactacaaaacaagtcttaataaatctaaaaatattgttattatacaaggcattacattgatcacagtagagtaaaactataaataaattgcagaacaaaaactagacaattcaagaatacatgaaattaaacaacccattccttataaaaacaatggaccaaacaagaaatcacaaggaaatttagaaaatacc

SEQ ID NO: 797396 - DNA, 700 bp, Homo sapiens
tggattgcaagaagggatgaaaaaataggatccaattacatggcatttataatagactcactttggatttaagggtatataggttgaaaaaaatggaactatatatattttatgcaaatggtaaccagaagtgggtggacatgactgtactaatatcagacaaaatcaactttaagtcaaaactattacaagagacaaagaaggaacttatatattaataaaatctttaatacaacaataaaatataataattataaacctatatgcagcaaacatcagagatctaaaacatataatgcatatatttccataattgtaaaggagaaatagacagctgtttaataatgaatagaaaaaaagacaggagattaataaaaacattgaataacaacactatagagcatgtggttctaacagacatacacagcacactccactttgtaacagtataatacacatttttctcaagtgcacagggacattttccaagactcaccatatgctagactacaaaacaagtcttaataaatctaaaaatattgwtattatacaaggcattacattgatcacagtagagtaaaactataaataaattgcagaacaaaaactagacaattcaagaatacatgaaattaaacaacccattccttataaaaacaatggaccaaacaagaaatcacaaggaaatttagaaaatacc

SEQ ID NO: 797397 - DNA, 535 bp, Homo sapiens
tcttacatggatggtggcaggcaaagagagagcttgtgcagagaaactcccattttaaaaaccatcagatctcgtgagacttattcactagcacaagaacagcacagaaaagacccacccccatgattcaattacctcccaccaggtccctcccccaacatgtgggaactcaagaagagatttgggtggggacacagccaaaccatatcactggtatatacccaaaggaatataagtcattctgtcataaagacacatgcacacatatgttcatcgcaacactatgcacactagcaaagacatggaatgaagctaaatgcccatcaatggtagactggataaagaaagtgtggaaygtatagaccatggaatactctgcagccataaaaaggaacaagatcatgttctttacaagaacacagatggagctggaggccatttgccttagcaaactaatgcaggaacagaaaaccaaatattgtatgttctcacttataagtgggagctacgtgatgagaacacatggacacacaga

SEQ ID NO: 797398 - DNA, 652 bp, Homo sapiens
gtgaagcagagttgacaaatttaatgtacctagcaggtgaagtactgtatgccattttcccagcatggaggaagctccctgcttgccttgctgaaagtcaggactggagcatagttcttgtctgagaaggcattttctttcacagtgggaagccccctctccttkcctgggggtggatgggaatcacagctggggtctactgtgattagcaatgtgtgtgggggtggagatggggtctgtgagagcctaataaaaccttaaagccaaatgggctttacctaccgggtttaatagttttaaacacagacagcaagctaccctgcctgttttcatttcttactattaccattgacttgatttttttctttgaagtggcccagggcttccaacccaatcctgtttatttgtgtttccgggggactatatcagcaacttggtgccctttcttttgtgtaatcctttggacgtcacttccccacaaaaggaagcatggtccccattagccaggtaataaaatgtaaacactgcagaaaattccagctttctttgcagtttgtgtgttttcttctctgaaaacccatacactgtgccagctcaggtttgtatcatctccagtgttttaggtttttaaagcgaattaattgttttttga

SEQ ID NO: 797399 - DNA, 652 bp, Homo sapiens
gtgaagcagagttgacaaatttaatgtacctagcaggtgaagtactgtatgccattttcccagcatggaggaagctccctgcttgccttgctgaaagtcaggactggagcatagttcttgtctgagaaggcattttctttcacagtgggaagccccctctcctttcctrggggtggatgggaatcacagctggggtctactgtgattagcaatgtgtgtgggggtggagatggggtctgtgagagcctaataaaaccttaaagccaaatgggctttacctaccgggtttaatagttttaaacacagacagcaagctaccctgcctgttttcatttcttactattaccattgacttgatttttttctttgaagtggcccagggcttccaacccaatcctgtttatttgtgtttccgggggactatatcagcaacttggtgccctttcttttgtgtaatcctttggacgtcacttccccacaaaaggaagcatggtccccattagccaggtaataaaatgtaaacactgcagaaaattccagctttctttgcagtttgtgtgttttcttctctgaaaacccatacactgtgccagctcaggtttgtatcatctccagtgttttaggtttttaaagcgaattaattgttttttga

SEQ ID NO: 797400 - DNA, 652 bp, Homo sapiens
gtgaagcagagttgacaaatttaatgtacctagcaggtgaagtactgtatgccattttcccagcatggaggaagctccctgcttgccttgctgaaagtcaggactggagcatagttcttgtctgagaaggcattttctttcacagtgggaagccccctctcctttcctgggggtggatgggaatcacagctggggtctactgtgattagcaatgtgtgtgggggtggagatggggtctgtgagagcctaataaaaccttaaagccaaatgggctttacctaccgggtttaatagttttaaacacagacagcaagctaccctgcctgttttcatttcttactattaccattgacttgatttttttctttgaagtggcccagggcttccaacccaatcctgtttatttgtgtttcsgggggactatatcagcaacttggtgccctttcttttgtgtaatcctttggacgtcacttccccacaaaaggaagcatggtccccattagccaggtaataaaatgtaaacactgcagaaaattccagctttctttgcagtttgtgtgttttcttctctgaaaacccatacactgtgccagctcaggtttgtatcatctccagtgttttaggtttttaaagcgaattaattgttttttga

SEQ ID NO: 797401 - DNA, 558 bp, Homo sapiens
tttcaatacattaacacatttaattcttaaaataaaagaaggaggtattattatcccccttttgtaaagaggaaaagcagtttcaaagagtttaagtgaggtgtgttcaaagtcaccaaactagcagggatcagaggtgagtctctgaaacagccatctgttggcttcaagatttttctgctctttttacctcatcactgggtaagagagggtaggtcagataagagctatctaaggactcaggaaaccgtgggcacgctgcctggatcgggcacagaatcagagctgatctagaaaagagaacacgcatttccctgaaggcatggagaacaggaggaattcagaaaataggacacgaactttttcagagcctcacactgaaagcagacttcttcttgyagccaataaacagaaaatgtgtcactactaagtgcttgcttctgagggaaggctagaagagctaacagaagggccctgtctccaagttcagaaacaaaggaagcgtcccaaagtccgcagcacaaataccgaaggcaggagacgcctcgtttcaagaga

SEQ ID NO: 797402 - DNA, 366 bp, Homo sapiens
taggaaatatcctgttgtactgggtgtggttgctcatgcctataatcccagcactttgggaggctgaagcaggaggatcacttgcccaggagctggagactagcctgggcaacatggggaaaacccatctctacaaaaaatamaaaaaaaaaaaaaaaaaaaactagccaggtgtggtgatgcacacctgtagtgccggctgttcaggaggttgaagtaggaggactgcttgagtccagaaggtggaggctgcagtgagccatgatcacgccactgcagtccagccttggtgacagggtgagaccctccaagagagagagacagaaagaggggaagaggggaagaggggaaggggagaagagggga

SEQ ID NO: 797403 - DNA, 512 bp, Homo sapiens
ataattattacatatataattattgataattatataattactaattgaattatgttgttataatatatattttatattctattaatatactatcttgagagcagtactgtccaatagaaatataatataaaccacaaatacaagccacatatatatctttaaattttctagaagccacattaaaagcataaaagaaatagaggaaattgtagtattatatttaacctaggatcttcaaaatattrtaacttcaatatgtaatcaacataaaaaattactagtgagctatttattttacacgttttacattaacccttcaaaagctagtgtgtatgttaaaccatccacacatctcagttcatttcagccgtatttcccatgctaacatagcaaagggctagcctactggacaacacactagagcaaccactaacataaaacaagaaggtatagttaaactgctagaggagataaaatggaataccgaataaatactatattaatccaggagg

SEQ ID NO: 797404 - DNA, 582 bp, Homo sapiens
ccctgaaatccttcggtacagatgtgttttataaatcagaatttcttgattttagaaaggtaatagagttcacattttataacactcctaacggagtctggtacagtacccattaaccacaaatcaatcacattaatagtatgcagcaaaacatagtgaaatacacccagttgagataaattaaaactataaacagtctcatcagtttagatgagatttttccaccaaaakaactacctttaaaaaaaagaatttcctcctctgtagacttggaagactttggaatttatttcagagttgcagagccaggggttgggcagggaggtggggtaaagagtggatgacagagctgtgtttaccttgtaaggctgctgtgaggatgaaatggatcaaagaatacatggaatgcacttagaagaatgcctgagacataacagaagtgcatttcggatattcttattcaatccaaaaaagaaaaaacacaggctacttcaaaggccattatttgtatgtcaaaattactgctaggatgtttactactacagggaattagaagacatcttcagaagaattctgaacaag

SEQ ID NO: 797405 - DNA, 624 bp, Homo sapiens
cactggtttcctgctctctatttcccactacattaaggataccttatttgttttggtctctgaagtacctagcacacagcctggtatataaatatttaataactaattggaagactaataggaagattgaatagatgatataaaaaattacaataaagaataaaagaaaaaaagaaacaagacctcagagtcttagaatccaaccattaggcacattgtttttttttttttgagacggaatcgctctgttgcccaagctggagtgcagtggcgcaatctctggtcactgcaagctccgcctcctgggttcacgccattctcctgcctcagcctcccaagtagctgggactacaggcgcccrccaccacgcccagctaatttttttgtatttttactagagacagggtttcaccatgtaagccagggtggtctcaatctcctgacttcgtgatccacccacctcggcctcccaaagtgttggaattacaggcgtgagccaccacgcctggccaggcacattattatttaacttgacttctgaagagagaaaaggaaaactgaataagtgatgagaagaggtgtgactttgtgtgtgatattaaccagttaatgaagctccacgtt

SEQ ID NO: 797406 - DNA, 586 bp, Homo sapiens
aaatgttacgcagaacagttaattttctgtgattatcagttggcttggaagatctctatgttttttctcaacttctaaatttcttaaccccaagttttcataataatggtagtataagcaggatctacatgagcagcacagtgtagaaaaatytataatttagtatacatttttatttgataaaatatataaatttagcaagagcatatttttctcttattttttccagttacttaaagatttttaactaaaatggtagattcaactgtaaaaagacaaaatacttataaaatatggatttgaaacaactatttaaatgtaagaagaaaaaattcaatctgccaaatggtcttttaaaaaaaccagagaggaaattcctgaaattgaccaatagtgattcttagttatagtaggatgcaaaatatttgctttgagaaaaaaaatcataatttgtttaatctttcttcagtaagaagaacttgagaacatagcacatgtatctgaaactgttttcctagaaacatgacacctatgctttacagaaaaaatatgccagttatagatggacttagttttaaaagatcat

SEQ ID NO: 797407 - DNA, 572 bp, Homo sapiens; identical to SEQ ID NO: 781478

SEQ ID NO: 797408 - DNA, 598 bp, Homo sapiens
ttttagatgctgccatgactatgtgaagaatatgctggaaaatgccagctattaccttgccaggtataataaaatgccaagtataatgccaagtatactatatagatagatgataggtaggtaggtaggttagatagatgacagctagctagctagctagctagacagacagacagacagatagacttcatgtattgctgggaggtgaagtaaagacgcatttaaagattcaacagttccactccagcatgtgtatatgtatgtgtatatgtatgtgtatgtgtgtgtgtatgtatatatatcccaaatatgttcttgcaaaggtctataaggatattcattgcaatgttacttgtgatgatggggcctcagaggcaacctgctgttcacgggagggtggataggtaaagacatggggtttgtgcagcatggggtagcatccagtagttagactgtatgaygggaagaacacattcttttgtcactcagaatagaaggcaccgataaggaactgagggtagagaaagagaaacttaaacgtagcatctctaatatgggtatacgacagaagaaacggagagatggaggctgcgatggt

SEQ ID NO: 797409 - DNA, 556 bp, Homo sapiens
tttcaaggtccttggacattggaggctttctttgcaacacccacagcagtgactacctttcccttatgatagacctaacttcattcattttatagtggaactatgtgagttgatatttaccatatagagtacaatgaaacagatacgagcaaggaagactaggaaacaggaaagacaggasagataattccttttcttcttttctcctgactggtggtaataaaaagtcatttgaaatataccactaaggagttttgagaaggtgacagttatagggataaataaatcccactctatcagtctttaaagcatcattgtcaaacctccttgaaaatttttagacaggaaagtttgtgattctttctgaatttaacaagttctttaagcacctgaaacatagaagtgggaaaaggatgtggatttccaaatgtacattgtattctttgcagagtgaggtaggaaccattgctcccttggtgattcttagctctacagacacactgaaccaggtcaagttggaattccagcagtttcttgacagcaaagtgaaaataga

SEQ ID NO: 797410 - DNA, 665 bp, Homo sapiens
acagcgcttggcatgctgtaaactgttcatatagtaatattaatcttttgaaatgagactggatgttagggtggggttgaattaaggaagaccttgaaacctgggtggaggttgtcttagggttctccataaaaacaaaaaataggagattatatatatacatatatatataaataaataaataaaatgtattataaagattgaccacagaattatagaggctaggaagacccaggatctgcagtctataaactgaattcccaggaaagctggtgttttagttccagcttgaatccaaaggcctgggaacaagaagagctgatggggtaagttccagttccagggcagaagaccaatgtctcagctcaagtggygaggcttgaagctctctcgttctcagcctttttgttctatttgggtcttcaattgatcagatgagacccaatctgctttactgaatctgccaattcaaatatatatcttatacagaaacaccttcacagacacacccagaataatgtttggccaaatatctgggcaccctgtcacccagtgaaattgacacacaaaactaacgatcacagaggtatctggcctgagccattggatgtatttgacagatgagtgatatacacaaggctgtgtcaagaaagatactgaattag

SEQ ID NO: 797411 - DNA, 665 bp, Homo sapiens
acagcgcttggcatgctgtaaactgttcatatagtaatattaatcttttgaaatgagactggatgttagggtggggttgaattaaggaagaccttgaaacctgggtggaggttgtcttagggttctccataaaaacaaaaaataggagattatatatatacatatatatataaataaataaataaaatgtattataaagattgaccacagaattatagaggctaggaagacccaggatctgcagtctataaactgaattcccaggaaagctggtgttttagttccagcttgaatccaaaggcctgggaacaagaagagctgatggggtaagttccagttccagggcagaagaccaatgtctcagctcaagtggcgaggcttgaagctctctcgttctcagcctttttgttctatttgggtcttcaattgatcagatgagacccaatctgctttactsaatctgccaattcaaatatatatcttatacagaaacaccttcacagacacacccagaataatgtttggccaaatatctgggcaccctgtcacccagtgaaattgacacacaaaactaacgatcacagaggtatctggcctgagccattggatgtatttgacagatgagtgatatacacaaggctgtgtcaagaaagatactgaattag

SEQ ID NO: 797412 - DNA, 608 bp, Homo sapiens
tcagtgcacatttctattttttttttttttttgaaattttgaaccattgtttttatgaaatggatttgtctacagcatgaatgagactgatgtgtggaagatggtagctcacatgtgccacaagcaatatttttttgctgtttgtcttattcagtaccctatatattttcagaaacagatgaattaaatcccatatgacctcatcatgaaatcatggtatccttttttttttttttgagacagagttactctcttgtcacccaggctrgagtgcaatggcgcgatcttggctcactgcaacctccacctcctgggttcaagcaattctcctgcctcagccccccaagtagctgggattacaggtgcccgccaccatacccggctagtttttgtatttttagtagagacggggtttcaccatgttggccaggctggtcacaaactcctgacttcaggtgatccacccacctcggcctcccaaagtgctgggattacaggcatgaaccactgtgcccggccaatgatatcctatattctattccttataatgagattacagagtttcctggccacttgatatagcaccacttttggaataaccctgcaaa

SEQ ID NO: 797413 - DNA, 638 bp, Homo sapiens
ctgctctcttcagagccagcagacaggaatgtttaagttagatgaagctgtgcccactgccaccccttcccccaggtgttctgtcccagggagatgggagttttatgtataagctcctgactggagctgcttcctttctttcagagatgccctgcccagagaggaggaatctagagaggcagtctgtctacagtggctttgcggagctgtggtgggctcygcccagttcgaacttcctggaggctttgtttacactgtgaggggaaaaccacctactcaagcctcagtaatggcagactcccctcccccaccaagcttgagcatgccaggtcgactttggactgctatgctcacagcgagaatttcaagccagtggatcttagcttgctgggctccgtgggagtgggatctgctgagctagaccacttggctccctggcttcagcctcctttccaggagtgtgaacagttctgtctcgctggcattccgggcaccactggggtatgaaaaaaacactcctgcagctagctgggtgtctgctgaaatggccccccagttttgtgcttgaaacccatggctttggtggtgtgggcgcctgagggaatctcctggtctgcgggttgcaaagaccgtgggaa

SEQ ID NO: 797414 - DNA, 628 bp, Homo sapiens
caggccaatgatatgactaaaggaatataaaaattagagaaagcctgaactagctgtggaaaatagtaaaaggtggcatttacataccagaaacgtaacaaaatttctgctaaatataacgggaatggaaacagactaaaggaagtcatgaagggtcaactgtaaatacagttttacaaactgcttttatcatctagcagcatgacttgaaagtttttccaggtgaatatcaatattaccacttcaattgcttataaacatttcattatttgtatgcataataatttaattcttgccaatatttagattgcatcaattttcatttttacaaaaatgtcattgaacatcaaaaatcttatttttaaaggcaactgttgcagaatgaagwttataattttcaaaaatcataagaaaaaagcaaatcaaatatgtataacaaaaggttgaaagcaaaagaaactgcaaggaagttgaaaatagcaaaatacgagaacggaagagcaaatatattattaaatgaatgcaaatgaatgaatgcacctcttaagaggtcaaaaaaacaaccctctgtatttaggtccaaagcaactcaattttattcagtttaagcaaggctctaaaagaaaag

SEQ ID NO: 797415 - DNA, 491 bp, Homo sapiens
ggcactgctactttcttgattcccaggattccattgtcatcttcacagtgatgcagggtgcattctggcccctctgcttccaccctccctttttatctgaactttcttagtccttcatcccagtgtctctgcgttgctcaatttggatgatgctattccstgtagtttctcttctgtgcatggctttgtcccagaaaaggcttcagtttgtagttttaccaattcatggaactcaggcctaacagaacaccccagcaccatcagactttgtggcattgtagtcttatccgttcatcacagcctgaaaagtccattcgcagctgcttctgctgctgttctggaactttccagtgagaacttcatggccctttggggtttcttggctctcaagaccttcacaaatgcctctgccttcccactgtggttgctagtttgtccctccaagtctgcttgtgctttggggtcagttgtgggtatcttgttcacctact

SEQ ID NO: 797416 - DNA, 491 bp, Homo sapiens
ggcactgctactttcttgattcccaggattccattgtcatcttcacagtgatgcagggtgcattctggcccctctgcttccaccctccctttttatctgaactttcttagtccttcatcccagtgtctctgcgttgctcaatttggatgatgctattccgtgtagtttctcttctgtgcatggctttgtcccagaaaaggcttcagtttgtagttttaccaattcatggaactcaggcctaacagaacrccccagcaccatcagactttgtggcattgtagtcttatccgttcatcacagcctgaaaagtccattcgcagctgcttctgctgctgttctggaactttccagtgagaacttcatggccctttggggtttcttggctctcaagaccttcacaaatgcctctgccttcccactgtggttgctagtttgtccctccaagtctgcttgtgctttggggtcagttgtgggtatcttgttcacctact

SEQ ID NO: 797417 - DNA, 657 bp, Homo sapiens
agcagctcctatggcatgaagacagactgaaccagatccacagaagctcctatggtataaagacagacttgaaaactataaataataaattcaggaagctctaaaataaaatcaagattttgtcagagaattgaaaaatagaaaaagaactaaatggaattctagaactgaaaaatacagtaatcaaaattaaaagctcaatggataggtttataagcagattagacgcaactgaagagagaattagaaaaatggttagaaatgagattaaaagaaaacagaacaaaaggcagacaagaaaagagagaaggtgaaagatcataaatgatagtaaaaatatcttytaaaatatgaataactgaaatcccagaaagagagaaaagagaaaaggagcagaacaatatttttagagataatggctcagaattttccaaaacaaaccaatggtgttaagtgaatatctgagaagccctccaaggagaatttaaaaaaaaaaaaaaaaaagacaccaggtacatcataaatcgaagatgaaaaaccaaagacaaagagaaattagtaatctcagcaaaacagattatcctttaaagaacaattatactgataactgaattttcaacataaacaatagaaactagactatagtgcagaaaataa

SEQ ID NO: 797418 - DNA, 636 bp, Homo sapiens
tggaactttctttaaaattgacaatatgcttggtcacaaagcacatttcaatagatttttaaaaatcaaaataatatcaggtatcctctcagaatatagcagaataaaattagaaatgaatgctgaaaggaactctcaaaaccacatacgtaaatggaaaccaaacaacttgctcttgaatgactttaacaaaattgargccgaaataaaaaagaattggaaatgaatatagacatgtaacatatcaaatctaggatacagcaaaagcagtgttaagaggaaagttcatagtactaaattcataaatcaaaaagatagatctcaaattcgcaaccaaatgatgtacctaacaaactagaaaaacaagaacgaaccaaacccaaaactagcagaagtaaagaaataaagatcagagcagaactaaatacaattgagactaaaatatcacacaagggatcaacaaagccaaaagttggttgtttaagaagataaacaaaaattgatagactactaactagattaaacaagaaaaaaagaggactcaaataagcacaatcagaaatgataaagataacattaaaattgataccacagaaatacgaaacatcatcagaaactactatgaacatctctatg

SEQ ID NO: 797419 - DNA, 636 bp, Homo sapiens
tggaactttctttaaaattgacaatatgcttggtcacaaagcacatttcaatagatttttaaaaatcaaaataatatcaggtatcctctcagaatatagcagaataaaattagaaatgaatgctgaaaggaactctcaaaaccacatacgtaaatggaaaccaaacaacttgctcttgaatgactttaacaaaattgaggccgaaataaaaaagaattggaaatgaatatagacatgtaacatatcaaatctargatacagcaaaagcagtgttaagaggaaagttcatagtactaaattcataaatcaaaaagatagatctcaaattcgcaaccaaatgatgtacctaacaaactagaaaaacaagaacgaaccaaacccaaaactagcagaagtaaagaaataaagatcagagcagaactaaatacaattgagactaaaatatcacacaagggatcaacaaagccaaaagttggttgtttaagaagataaacaaaaattgatagactactaactagattaaacaagaaaaaaagaggactcaaataagcacaatcagaaatgataaagataacattaaaattgataccacagaaatacgaaacatcatcagaaactactatgaacatctctatg

SEQ ID NO: 797420 - DNA, 480 bp, Homo sapiens
taatacattctctaattgaacccttttccctcagatcacttcttcactgctggcaactagcacattttagaacaaatccagtaactttcaacgccatcagcctaagatcccctgtttgaaaacgtctgtttttgaactatgtgccaaacagagctctcattctcctatcatgcatatttgtggctgggatgtggtgaactaactcacagttgtcagggacaaataccattggctcaccactcctggtttacttmctgctatcccacccactccccttagggaacatgttactggtgtgaagtctaacaaacagttgtcccaaagtctggtgtggattacaaataaaatctaagagtccgtttactaactcattaaaaatcaaggttaatttaaatacacccaaatatttgaattctaaacttagagtcatatatttaaagtaatatagaaaaccaggagaaactcatgaaagttggtgtt

SEQ ID NO: 797421 - DNA, 605 bp, Homo sapiens
gtagccaagtgaaagcactaaacaatacagagaaggaaacagctctgactggagctgcagaaggaaggtatcgcaaaggaggtgtgatttgtatgtctgaccttaaataagaggtaggaagtcaccagagaggaaagggagaaggcattctacatatatctatgccactcaaagtgtgatcttccaaccagtagcatctgcttcaccagacaagttatttagaaatgcagaatctaaggtttcaccagggcctctgaatcagaatctccattttaacaagatctctaggtgattcacgtgtacatkaaagtctgagaaacacggatgttgacagaatagcgagaacaaaaacttgatataagaataaaaggcaatcatttcagtaggagtaaagggtacttttatggagatagagttaaggaagatggaaaggtaatttaggaacaagactgtacaattagccttaggatgctatatggaatggaagccaatgagatattgtgtgcatgtgattaaatatatttgtgcctaagtaaataataaaaaaagatgtgggaaattttaaagaactcaaaaatagaagtctgtgctaatgaaaagtgaag

SEQ ID NO: 797422 - DNA, 605 bp, Homo sapiens
gtagccaagtgaaagcactaaacaatacagagaaggaaacagctctgactggagctgcagaaggaaggtatcgcaaaggaggtgtgatttgtatgtctgaccttaaataagaggtaggaagtcaccagagaggaaagggagaaggcattctacatatatctatgccactcaaagtgtgatcttccaaccagtagcatctgcttcaccagacaagttatttagaaatgcagaatctaaggtttcaccagggcctctgaatcagaatctccattttaacaagatctctaggtgattcacgtgtacattaaagtctgagaaacackgatgttgacagaatagcgagaacaaaaacttgatataagaataaaaggcaatcatttcagtaggagtaaagggtacttttatggagatagagttaaggaagatggaaaggtaatttaggaacaagactgtacaattagccttaggatgctatatggaatggaagccaatgagatattgtgtgcatgtgattaaatatatttgtgcctaagtaaataataaaaaaagatgtgggaaattttaaagaactcaaaaatagaagtctgtgctaatgaaaagtgaag

SEQ ID NO: 797423 - DNA, 602 bp, Homo sapiens; identical to SEQ ID NO: 786345

SEQ ID NO: 797424 - DNA, 583 bp, Homo sapiens
tggaattataacccagagtataaaataaccatcaatgagtctgatataaataagtgattaacaagtaaataaatggggagaagagactaatctaccacacaaaatatttccaaaatagtttatgcacacattttaccttcaagaaggtagagcatgaatttttactccttaagggtagcctgtgcattgtacttccttacaaagagtacagtatggaaagggggggggggaagagtaactttgcagtggrgcaacctgacaaatactgtcctggccaaatcatccaggtcaacatcaacagtgacccttaatagtatatacccttaatataacatgagagtggcactttatctccatggtcttccacccaataacacataacccagtctaatgaaaaagtcagacaaatcccaattgaaggacattctacaaaatatctaactagtactccataaaactgtcaaagttaccaaaaacaggggaggtctgaaactatgtcacggtcaagagtaacctaaggagacataaccagtaaacgtaatatggtatcctggatgggatcctggcacagaaaagagacatt

SEQ ID NO: 797425 - DNA, 624 bp, Homo sapiens
gcctgtatttgaaagtgatcataatctggggggcttaaaatggagtttcttttacaaagagttataatcataaccgtttatttgaatataaatttgacattaaacataaatatgcaaaatttaaatttccctttggtcttgcatttttctaaggattaacaccattattctcacactccaacaaactaatatattgtactgataatcactatcaaatgaattgtaagagctaactgactcgaatagacaataactaaccttacttttaaagtattttaagagacagtagcatagatgcctgcacatagctgattattgctcctgtgctgcagtgaattaccacatgaacacattttgaaaagatttgttagcttcatgtccacaggcattatgaagcaggaaccacttttagattaagattgtaacctgaggaaaagaacatatgcatcagtttaraaattaaaatcccctgagatatttctttcagtaatgcttaaaagcctaaatttgtgctcgtgtgccagtcacctctacgtaaggaaaaacattttgctactctttgttaaaagtgaagaggaaatattgtccacttgttttgtagatgttggccaaattatataaact

SEQ ID NO: 797426 - DNA, 582 bp, Homo sapiens
tgatggagatggaaaaggaactggttcttgaagatgggatacaattttcttggcaggaaaagaatgagtgaattcttggttggggaaaaccacgaggcatgaaagaaggctgaatatgctatagtgtgaaggtttgggtcatgttttggaccagataacttgaaaaccttcctgatacaaacatttagaaaaggagatgaatcgaaacacatcttgctggtaaggaagacacaatctaagagtctcagaatgaaaagaggacggagaaggaaaacgcggagcgtgtgagttaagtgatatcccccaggagagttaccactcgctgggtcctcgggcctgaggctttcatgaccctgtgggaacagcagatgagagcttgggcgctctgaggtggggggttgaacctgagacccytgatgaagctggctccatcaaaggactgcacccttaggggagagtaggcagaggaaacctccacccactgatgcaggaagacaacatagaaggttgcccaactctgtttggctttggaggttggggggcaagggaagacttcccttataaccatgggacccaaatcaa

SEQ ID NO: 797427 - DNA, 600 bp, Homo sapiens
tgacatatgtataatgtgtatatatattgaatttcctgttatgaatgtttattatgtgtctgtccttttaaaatattgtttttttcaagctttcagtggtatagagaaaactgttatgacaaaatgtgaactgtatgttatccaagagcatttttttctttataagttgcctttcataatggacaaagtacaaaaaactacttctgaaggggaagaggatggagctagtatgtattgagcacctactgtctgccaggcaccacacggggtaccttacatatgagatctcastacatctcaacaatgattctgtgactgtggaattgtttccatgtaacagatgtgggactgaagctcaggaatattaagtcagtcgttttgattcagtcacactctagaacccactctctttggtattctgtagtttgcaaagataacacaaaacttcttgctctaaaatactgggctttagaaaagaagagagccccctgggagtcctggtggcctgagaggcagggaagagtcagtgagtggaggaagagcatgaatgaattttcccgagggcaggagaggcagttgtgtgtccctggggttgtcttg

SEQ ID NO: 797428 - DNA, 587 bp, Homo sapiens
tccctgtccttgataagtgcaaataatagaagaatctgttctaccttgtggttcctgttaaggttacacctaaattgtctctgaaaaataattgcctattttgttaaaggaaatgtttaaacttcctttgacttgtgtgtctaataaaccctcagcagaaggaagtttatttttaaatacaaattactgtggccacttaacgcctcatttcctttttcattctgctaattggagatgggaaatggctggtcagcctatttcatgctatcaacttgagtacatttaaaaagataatcagaggctttgcagcagttttaagtctggctttgattcaatatctggataaaaagcctccacatgcccttatgattaagaattcttgtttatgttttcatgttctccagggtgcatgcagacctcatcttttggggttttattgytaagtacatagatatggtgttgtttgggtttataaacgtgagtagtttgctaaataattctctgtgttctaacaggaaatgaaggtcaggactaaaagatgggatgctctttgcttaatctgtcatcacactaggttttcataaatt

SEQ ID NO: 797429 - DNA, 612 bp, Homo sapiens
tttgttccttatctttctatggtaagaagctatgaaaacagcagagtgagtgaaatggtagaagaagacagtcttgtaggctcctaaaattcttatcactttgtcgagtgttctctcctcaagggtacaaacgatgtcttcattgcctggaaatgatggcgcccttgttctttatccaaagactgatgggggaaagagtmattcatttaataacatggggtcctcattacagactggccaccaatataaagcttcgaatttttttaaaatgcccactttgttttagagtggttcatggaagcttttcatagttttcacaaatgatgatcaatataataaatttataaagcccatttctttcaagtagaatcagtgatagaattattatacatattcattttaaaataaacatcttctctctatcttcagagtcaaattattaactgaggaacatactgaaaagaagaataaaatgagtaaattaatttttcctccagagatagttactagtaatactttggtatacgttcttccaataagtttttctattcatatttacacatttttaaaggttatctaaaatataccatctgtaacattttttcactacac

SEQ ID NO: 797430 - DNA, 609 bp, Homo sapiens
gtgagccagtctgcagactctgccagatgcctatggagacatccttgtgaaattagaatagctcttctcagtttatttatggaatcttcttgaagatcaaagatgcagcaccgctgttggttttggtttcccctattataacggagtctgaatgaaaggtgagcaattctatttaggttctagcctagatgtggggggaaagatgtctatgctaagcatgaccattgaggtttacaaaaacaaaagtagggtcgcaagctaacaaagaaaaactagagaaaagattctcctggccatgcccacagctgttcccagaagcttcctgaaactggtgattttatgttcctacctttcctcttagactcctgatgtacgtccatttccctgagttaatataaagtgaccaactkccaaggttttcagtttctctcaaaatttcagccaaacgccttggagggagggcctgaagtcctcccactagaattcagcagatcaactctcgaagctgctctcttgaccactgaatagtttcaggttccttaggcagtaatgaaaatatataataatcattaacgtttggagggtgctctatatttggaattattttca

SEQ ID NO: 797431 - DNA, 580 bp, Homo sapiens
ttaagctttatgtatgtcagtttttgaggaagccaaagaattgttgaacccaacccttcaaacctgtcaagggaattgatcaaagttgtctgttggtgaaatttccaccctcacctccacctctggctctttgagtctcactctgtcgcccgggctggagtccggtggcgccatatgtatcactacaacctccaccccactcgccacacaccacacgtggtgcacaccaccctgccccctgccccgccgcgggttcaagcgattctcctgcctcagcctctgaagcagctgggattacagccacccaccaccatgcctggctaatttytgtatttttagtagagacagggttttcaccatgttggccaggctggtcccaaactcctgacctcaagtgatcctcctgcctcagcctcctaaagtgctgggattaaggtgtgagccactctgcccaaccccactctggctcttgatcacattatagtagattgtagtttagagatgaaaggacttcttgctccttgtacattctcatttcatgtacgacattatgcaagctcagcaattcttcaagtggcca

SEQ ID NO: 797432 - DNA, 588 bp, Homo sapiens
cacgctgtctctcttctgctgtgtgtgaagaaggtgctggcttcccctttgccgtctgccacgactgtaagtttcctgaggcctcccagtcatgcttcctgtacagaccgcagaactgtgagtcaaacctcttttcttcataaattacccagtctcaggtagctctttatagcagtgtgagaatggactgatacasatataacactagatatttgattatgccaatttcagaaaagggaaggattaatatgaacaaacagaacaacagattctgaagaaaatagatataactcagggaactaaaaataactaaaaaaaaaaaaaacccctttttttagtgttctcggaacaatttaggatgatatggatgacattacattcctaaaataagaacaagttgttgtgacccaagaacagtcagagaacaagaagagctcctgataattaaaacatgaactttttctttgagacagggtctcgctttgtcacccaggctggagtgcagtagcatgatcacggcttactgcacccttgacctcccagccaccaggcctggctaatttttttatttctattttttatagagat

SEQ ID NO: 797433 - DNA, 552 bp, Homo sapiens
tggctaatttttttatttctattttttatagagatggtgtattagttgttatttcactgttataaagaaatactgaagactgggtagtttataaagaaaagaggtttaactggttcacagctgcacaggctctgtagcaagcatggctggggaggcctcaggaaacttatgatcatgacagaaggcgaagggaagcaagcacatcttacaagsctggagcaggaggaagagagagaggcaggtgctgcacacttttaaacaaccagatcccaggataactcactcactgtcatgagaagggcacagaggggatggtgctatagcattcatgagaaccctactcccatgatccaaacacctcccacgaggtcccacctccaacactggggattacaatttgacatgagatttgggtggcaacacagagccaaaccatttaagatggggtcttgctatgttgcccaggctggtctcaaactcctggcctcaagcaatccacctgcctcagcctcccgaagtgttgtaattacaggcatcagacactgtgcccag

SEQ ID NO: 797434 - DNA, 552 bp, Homo sapiens
tggctaatttttttatttctattttttatagagatggtgtattagttgttatttcactgttataaagaaatactgaagactgggtagtttataaagaaaagaggtttaactggttcacagctgcacaggctctgtagcaagcatggctggggaggcctcaggaaacttatgatcatgacagaaggcgaagggaagcaagcacatcttacaaggctggagcaggaggaagagagagaggcaggtgctgcacacttttaaacaaccagatcccaggataactcactcactgtcatgagaagrgcacagaggggatggtgctatagcattcatgagaaccctactcccatgatccaaacacctcccacgaggtcccacctccaacactggggattacaatttgacatgagatttgggtggcaacacagagccaaaccatttaagatggggtcttgctatgttgcccaggctggtctcaaactcctggcctcaagcaatccacctgcctcagcctcccgaagtgttgtaattacaggcatcagacactgtgcccag

SEQ ID NO: 797435 - DNA, 644 bp, Homo sapiens
aattttttcttgcgagagatccaagaatcccctcttggggtctagttcgggatccctttctagaaacagaattgcaataccacacatggtaagcatttaacaaacgcctgttgagtgaatgggtgaaaaatagtaattcaatgtaccgtcaataaacagttagagaaagtcttgaaaatattttaagtggggtgtggtggttcatgcctgtcatcccagccctttgggagacctgatgtgggaggagcgcttgaggccagtagttccaggctgcagtgagctatgatcacatcactgaactccagagtaagaccctgtcaacaaaaaagaaaagaaaagaaagagaaaaagaaagaaaamgtaatttagttatggtggtaaaagaattgaaagaaagaaagaaagaaagagaacgaaagggagaaaggagggaaggaggaagggagggaggaaggaagcaagcaaggaaggaaggaaggattttagttaggtggtaaaataattgactcttcctctgcctccacacagcctgcaagcagcagctggtgcccagcgtgcaaatgtatcactaccagcaccagaggttaacagatactacagctggagctgcagaaagagcctcctgaggagctggactctgcaga

SEQ ID NO: 797436 - DNA, 420 bp, Homo sapiens
tcttccacaaaaaaattataaggagaaaagttaaagcaatggagcagaatctatgtattaaaagagcattaagagacatttcaactacttgaagtttgtgggctgtatttgtattctgattccaacaaacaaattatagaaaataaaaatagggggtcgggcgtggtgactggccaggggtggtggctcatgcctgtaatcccagcrctttgggaggccgaggcaggtagatcatctgatgtcaggagttccagaaaataaaaataaatttataagccaatcaagggaatgtaagcactgattgggtatttgatgatatgaagaaactattttgaactttctaggtttagtaatggtagctctgtcactgtaaaagcttgtatatgttgagatgcatactaaaatatttaatggtataaa

SEQ ID NO: 797437 - DNA, 650 bp, Homo sapiens
ttctggcactggggaaatgaccacaggatgagtccggggtcccactggacccactgtaagtcaaacctgagctaaaattccattaattacctgacctccataagcccctattttaactgggggaccacaatgacgttttgaaaccagcgtcacctcagagccagtgtccactagtcctcgaaatgtctgatcatttccctttccccagtgcacagttaccctggtaaaaggccggaggtctccttggggaaggatggrataaagactaacagcataaattgtcatcaatgtattggggtccttcctcaaggggacctggcgtttccttcattgaaggggttctgggtctgcaaacaggctgaagtctggaaattgattgtggggccatgattctctgtttttataattcaaattagtcttttgtccattcaacctagaagttttctgctcatataaattaagtagaaatgcagtaagcttcctatcaatttcacttctaggaacaccataattaattagccaatgccagagctatacacaagtcagactatactgattgccactttgcctctactgtccattactgtaactatgcccaccttgcctttgatggttgagtgccgccacttggcccctgccacctcaggatc

SEQ ID NO: 797438 - DNA, 650 bp, Homo sapiens
ttctggcactggggaaatgaccacaggatgagtccggggtcccactggacccactgtaagtcaaacctgagctaaaattccattaattacctgacctccataagcccctattttaactgggggaccacaatgacgttttgaaaccagcgtcacctcagagccagtgtccactagtcctcgaaatgtctgatcatttccctttccccagtgcacagttaccctggtaaaaggccggaggtctccttggggaaggatggaataaagactaacagcataaattgtcatcartgtattggggtccttcctcaaggggacctggcgtttccttcattgaaggggttctgggtctgcaaacaggctgaagtctggaaattgattgtggggccatgattctctgtttttataattcaaattagtcttttgtccattcaacctagaagttttctgctcatataaattaagtagaaatgcagtaagcttcctatcaatttcacttctaggaacaccataattaattagccaatgccagagctatacacaagtcagactatactgattgccactttgcctctactgtccattactgtaactatgcccaccttgcctttgatggttgagtgccgccacttggcccctgccacctcaggatc

SEQ ID NO: 797439 - DNA, 504 bp, Homo sapiens
aggaataaaatacagacaaaaggcaatcatgttgtcaatgagaagtattcaatataatatggttttggttgttttaacattacaacctaactgacctgaccttggttattagaacagttgaatagacatatataactctgatttcacaagaggatacaagaatcattaaaacataaaatatrtgcatacatcatctaactacctctctgtagttaaatgtaattgcagttttccagcaaagaatttgtggagaattaaaatgaaaagaaataaaggcttggggaaaatagcaacaaatggatggaaaatatgaaattaattatctctatctgaaaaatctgtttcttataaagaattagagatctgttgcacttcagaattatttacatttgagaaaagttctcgccgtcagtggaagaacattacatgaagaggtatctttgggcacatgagccatctaacatagagttagaagagtccaaagagctcatcctgcctggtcgt

SEQ ID NO: 797440 - DNA, 602 bp, Homo sapiens
tttggtgtagatgtcgtttctgtttgtggaccctcagctgcaggtctgttggagtttgctggaagtgcactccagaccctgtttgcctgggtatcagcagcggtgtctgcagaacagcggatattcgtgaactgcaaatgctgctgcctgatcgttcctttggatgttttgtctcagaggagtacccggccatgtgaggtgtcagtctgcccctactggggggtgcctccttgttwggctactcggggttcagggacccaattgaggaggcagtctgcctgttctcagatctcaagctgcatgctgggagaaccactactctcttcaaaggtgtcagacagggacatttaagtctgcagcggttactgctgccttttgtttgtctgtgccctgcccccagaggtggagcctacaaaggcaggcaggcctccttgagctgtggtgggttccacccagtttgagcttcccagtggctttgtttacctactcaagcctcagcaatggcaggcgcccctccaccagcctcgctgctgccttacagtttgatctcagactgctgtgctagcaatgagtgaggctctgcgggcataggaccctctgag

SEQ ID NO: 797441 - DNA, 467 bp, Homo sapiens
acttgagaacaactgctctatattctatataattacccgtgcaaatatccaaataccaactgcctgtcatactttattcaggctcctcttgtcaggtttgaatgatcccaatatcccccatccctaacccgtcttcctacacattcttttytaaactctatcatgacagctgtcctctgaactgtctcttaatttctcatgtctttcttaaactatgaagccctttatctgacacccatgggccaccactgctatttgatcccttttgaaggggtaagacagccttcaagccaggccaggtctcctttcaattatacaggagaaggtaacctgccttgaggataaaatctgccaagagatgccccttcctcctctctttgatatgcagtctcagtcaagctttcatctaataaatatttactgctggaaactaggagacacaagcatctgtaagccaccggctctgc

SEQ ID NO: 797442 - DNA, 501 bp, Homo sapiens
tcaaccacaaattgttttctcccactgggcaccatttaataagccatatcaggtgcacaatggaaacagcaaaccacagatagaaagggatcacatcttgtaaggaagtgcatgggtcagacctgccttcccacttcccagctctttggtttgggcttggccaagtcacttaacattgccccaactgaggctcctcgtttgggccttggtttctccacttgggaaatggagttgtcctgcaggtcagggacactatgtgaawatccaaatcacctggtactatcacctatcacccacctcactcagcaggtgttcaataaatggcagtcgtgatggacccaggcagtaaatgaaacatatgatttttctcccaaagaagctcagaatctttgtctatgttttaccagcttaattttgtttttccctggctgagaaccactttgtgtatcctactctcaattcctgctaaactagagaaaggcaaagttacatgaacacgaa

SEQ ID NO: 797443 - DNA, 513 bp, Homo sapiens
atatgaaaactaaatagcatgctttgaaataatgcttgggtcaaagacaatattacaacagaaattaagatacattttgaatggaaaacaacaaaaataaaacatgccgacatttgtggaaagcagtgtctaaagggaaatttataggtttaaatgtacatattaaacattaaaaatgacttaaagttctatcttaaaaagcaataaaggtagaaagtaaacctaaaacaagtaaaaggaagaaataataaatgtaagtacagaaatcaatgtaataaaaacacagawaaacaatgaggaaattaacaaagccaaaacttagttctttgaaaagataataaaatcaacaaattcttagctagattgatcagataaaaagaaagagaatacaagtctccaatattaggaaagaaaaagagatttacaccacagatccctaagatattaaaaggataataagataatatacaatattatcttatatataatatattataacaatatatattataa

SEQ ID NO: 797444 - DNA, 526 bp, Homo sapiens
ctctattaaaaatacaaaaaaataaaaaataaaaaaataaaaaattagccaggtatggtggtggaagcctgtagtcccagatatttgggagtttgaggcatgagaatcacttgaacccgggacgcagagattgcagtgagctgagaaggtgcccctgcactccagcctaagcaacagagcaagactcagtctcataataataataataataataataataataataataataayaactaaaaaacattgattttacactaaattttacaaaaaatagagaatattacaattacaaataatacaatagaggtattttatgcctttagataaaaaaaatccttaaccaaatattcacaaacttaatccaataatgcatcaatactaattaatgtattataggaactcaaggttgctttaacatgtgaaaatcaatgtaatttactatattaagaataaaagagaaacctatttcatcacttcaatacacgtacatataccatttgacaaaattcaatctaaaatctct

SEQ ID NO: 797445 - DNA, 663 bp, Homo sapiens
catggaaagtcaagggcatagaatacataaaactatttttataaataagaacaaagttggaagacttgccttatctgatttcaagactaactacagagttgtaaaaatcaagacagcttggtgttagtgaaaggccagaaataagtcaatggaacaatggagtacataatgggagatacccatactttcaatataaacctgcaggaaaaccatgccctaaaaatgttgagggcccatctaaaactttaatttggggagattgtgttaactcacatgcagtaatattaaggcaccagatatcgggcaaaattcacccccgatatttcatgtaggttcttttctattttccctaagtgttggccagtctgagaaataaagagacagagtacaaaagagagaaattttaaagctgggtgtctggcggagacatcacatgtcggcagsttccatgatgccccctgagccgtaaaaccagcaagtttttattagtgattttcaaaaggggagggagtgtatgaatagggtgtgggtcacagagatcacacgcttcacaaggtagtaagatatcacaaggcaaatggaggcagggtgagatcacaggaccacaggaccggggtgaaattaaaattgctaatgaagtttcaggcatgcattgtcactgat

SEQ ID NO: 797446 - DNA, 559 bp, Homo sapiens
tccccacagagagcagcagggtcccagcaacagagggaagacaagtcacaaagctatctgctctggactggaggaagagcctttgccccaagcccgtttcagaggtagctgccagaggggcattcctgcagactttagttgcactgcagctgggagycagaagacaatgtctatatgaactgaagcttgtgagctctgcaacagggggatgataggaaagtggattgcattcctgtctgtctatggcaagttgcttgtgaggccccctgtgttacccctatcccagagacttcagtgcatcccaatataaaatctcctcaccactcccccacccatgatggtgggtgcttccactcattatcaacctacctaaggatgagccagatcttaactttaagcaccacctacctgactgaagattgaactgcaccaccaaacaaaaaactttctgtaagaagggcatagttctagtgtccaagaaaagcatcctgagacttctgcactcctagcctcacagaagatagtgagtcagctcatatatccaatacttctctataac

SEQ ID NO: 797447 - DNA, 559 bp, Homo sapiens
tccccacagagagcagcagggtcccagcaacagagggaagacaagtcacaaagctatctgctctggactggaggaagagcctttgccccaagcccgtttcagaggtagctgccagaggggcattcctgcagactttagttgcactgcagctgggagtcagaagacaatgtctatatgaactgaagcttgtgagctctgcaacagggggatgataggaaagtggattgcattcctgtctgtctatggcaagttgcttgtgaggccccctgtgttacccctaycccagagacttcagtgcatcccaatataaaatctcctcaccactcccccacccatgatggtgggtgcttccactcattatcaacctacctaaggatgagccagatcttaactttaagcaccacctacctgactgaagattgaactgcaccaccaaacaaaaaactttctgtaagaagggcatagttctagtgtccaagaaaagcatcctgagacttctgcactcctagcctcacagaagatagtgagtcagctcatatatccaatacttctctataac

SEQ ID NO: 797448 - DNA, 448 bp, Homo sapiens
tagttctagtgtccaagaaaagcatcctgagacttctgcactcctagcctcacagaagatagtgagtcagctcatatatccaatacttctctataacaaggagcatttgagaaagccacttaacaaaagctacccataaccaaggaacccatacagagtcttggccctgaaagcatrcagaaacaaagtcaaatgatcagaaaaaacatataccatagtcacaccctcaaggggaaaaaatgtaacaattaaaaagcctcaatgaaatgacagtaaattcaaacttaagaagcaacaggtacttcacatgagaaggacacagcacaagaactccagcattacaaaaagacagagtattttcacacctccagaagaccgcactagcttttgggcaacgcattctaaccaaaatgaaaattttgaaatgacagataaagaattctaagta

SEQ ID NO: 797449 - DNA, 448 bp, Homo sapiens
tagttctagtgtccaagaaaagcatcctgagacttctgcactcctagcctcacagaagatagtgagtcagctcatatatccaatacttctctataacaaggagcatttgagaaagccacttaacaaaagctacccataaccaaggaacccatacagagtcttggccctgaaagcatacagaaacaaagtcaaatgatcagaaaaaacatataccatagtcacaccctcaaggggaaaaaatgtaacaattaaaaagcctcaatgaaatgacagtaaattcaaacttaagaagcaacagstacttcacatgagaaggacacagcacaagaactccagcattacaaaaagacagagtattttcacacctccagaagaccgcactagcttttgggcaacgcattctaaccaaaatgaaaattttgaaatgacagataaagaattctaagta

SEQ ID NO: 797450 - DNA, 640 bp, Homo sapiens
catacacaaatcaataagcaaaatacattatattaacagaatgaaggacaaaaaccatatgatcatctcaagtaattttagacctcacttctagtataatcatttaaagctatacatttttttaaatcactacattaactgcatctcataaattttgatatgttgttttaatatttattatttttggaatatttttaaatgcatataatttcctatttgacccatagatcacttaaaatgtattaatttctaaatgtttgaaggtttcctagataactcatttttattaatttttattttaatgcaatcagtgtaaaaggacatgctcttcatgatttcaattcttttaaatgtactgagtcttttttcatgaccccataaatagtacmtcttggacagtgtatcatgtatcatgtgcacttaaaaaaatatgttttgtagtttcttgtcaagttagctgatagtgctgttcagatcatgtaggtctttactgattgttttgtctagttgtcctgttaagcacaaagagataagggtatggtttcatccttttgtaaatggatatccagttttctcagtactatttattgaagagacagtcctttccctaatgtatgttcttggtatctttgtctagtgc

SEQ ID NO: 797451 - DNA, 640 bp, Homo sapiens
catacacaaatcaataagcaaaatacattatattaacagaatgaaggacaaaaaccatatgatcatctcaagtaattttagacctcacttctagtataatcatttaaagctatacatttttttaaatcactacattaactgcatctcataaattttgatatgttgttttaatatttattatttttggaatatttttaaatgcatataatttcctatttgacccatagatcacttaaaatgtattaatttctaaatgtttgaaggtttcctagataactcatttttattaatttttattttaatgcaatcagtgtaaaaggacatgctcttcatgatttcaattcttttaaatgtactgagtcttttttcatgaccccataaatagtacatcttrgacagtgtatcatgtatcatgtgcacttaaaaaaatatgttttgtagtttcttgtcaagttagctgatagtgctgttcagatcatgtaggtctttactgattgttttgtctagttgtcctgttaagcacaaagagataagggtatggtttcatccttttgtaaatggatatccagttttctcagtactatttattgaagagacagtcctttccctaatgtatgttcttggtatctttgtctagtgc

SEQ ID NO: 797452 - DNA, 593 bp, Homo sapiens
gtgttcccgtgaagaagcaaattgtttcttttaccagaatattcatcagagatttgtaaaattttgaaaacaacacaaaaccaccagtgactttcttgtgattcttcccttggactgcatctaatttcagcttctttctttctgctctttaaaattgctaatatctgtaagagtatgcaatatcatgccagctttaattcaagtgaagcgaaaattagaggtaaacttgctgattaagtggtctcatatcacatatcacacagaagctaaatgtagacacttagrtttaaattgttacaagggctctccaaaattgcattcacaaaaccttcattggtatgcatgagcagctgtctcgttatccattccacccagtagcaagctggtgacttccttatcaaaggctatatacatcgtggactaagactgtaattgccaattgataaagcattgatgcattgaccacaaaattgcaaccagcggactcttattcattgtgctgagatcaactaatctattttgacaatcaaccgtacactcaatatttgaacttttctgtaaagcctgcccttactctgacttgatggtgtgca

SEQ ID NO: 797453 - DNA, 593 bp, Homo sapiens
gtgttcccgtgaagaagcaaattgtttcttttaccagaatattcatcagagatttgtaaaattttgaaaacaacacaaaaccaccagtgactttcttgtgattcttcccttggactgcatctaatttcagcttctttctttctgctctttaaaattgctaatatctgtaagagtatgcaatatcatgccagctttaattcaagtgaagcgaaaattagaggtaaacttgctgattaagtggtctcatatcacatatcacacagaagctaaatgtagacacttagatttaaattgttacaagggctctccaaaattgcattcacaaaaccttcattggtatgcatgagcagctgtctcgttatccattccacccagtagcaagctggtgamttccttatcaaaggctatatacatcgtggactaagactgtaattgccaattgataaagcattgatgcattgaccacaaaattgcaaccagcggactcttattcattgtgctgagatcaactaatctattttgacaatcaaccgtacactcaatatttgaacttttctgtaaagcctgcccttactctgacttgatggtgtgca

SEQ ID NO: 797454 - DNA, 593 bp, Homo sapiens
gtgttcccgtgaagaagcaaattgtttcttttaccagaatattcatcagagatttgtaaaattttgaaaacaacacaaaaccaccagtgactttcttgtgattcttcccttggactgcatctaatttcagcttctttctttctgctctttaaaattgctaatatctgtaagagtatgcaatatcatgccagctttaattcaagtgaagcgaaaattagaggtaaacttgctgattaagtggtctcatatcacatatcacacagaagctaaatgtagacacttagatttaaattgttacaagggctctccaaaattgcattcacaaaaccttcattggtatgcatgagcagctgtctcgttatccattccacccagtagcaagctggtgacttccttatcaaaggctatatacatcgtggactaagactgtaattgccaattgataaagcattgaygcattgaccacaaaattgcaaccagcggactcttattcattgtgctgagatcaactaatctattttgacaatcaaccgtacactcaatatttgaacttttctgtaaagcctgcccttactctgacttgatggtgtgca

SEQ ID NO: 797455 - DNA, 646 bp, Homo sapiens
  misc_feature 631, 632, 633, 634, 635, 636, 637, 638, 639, 640, 641, 642,643, 644, 645, 646: n = A,T,C or G
gttttttattttctaccaactagatgtttaccttaatcaagtcatcgattgctctgggactctgtttttcatctttacaaggtgattgaattagtcgatctcttaggcgagagcatctcacttagaagatccgagatgtggtaaggccttgacactatttaactgtttgaccttgggcaagtcacttaaccttggtcaagtcgtgtttcctcatctgtgaaatgaggggattgttgtcttctgggaggtcattttcaacttcattaatctatcagcctttaaaacttcttttttaaaaacttatratttacttctccccaaccctccaactttgttttttcagttaagaggaactaatacatacatatttacattgtgtaaacttttgaagaggacacagaagttttcttttttactttcaaacatgactctaaagattttattaaaaggatttttttttctgttttgttttcagacatggctttaaatatttatatctggaaaaccacactgaagttacaattagtcagtaataaaaataatgtgtgacaaatatcccactacccaaaccatccaacatccctttcagagttgatgagttgaatacatgaagtttgacgcagggagctcnnnnnnnnnnnnnnnn

SEQ ID NO: 797456 - DNA, 568 bp, Homo sapiens
agcacccaaaattactgcagcttcacagacatcacacacttaaaaaaagactcctggcttcctttcaaattccatcagtcaacttttatcaaccataggggaagcagaggaggataaacactgcctgcgataccatttgggttttaggttttgggtttcttccagttaagtttgcaaaagtgtgaaagtactaaagaacagaatattgttcctcattcttactatacaataaatacttccaaatatgtccttaaatgcaatcctttgtgattcccttaattaatcttgactaatccttgaaggaaccatgatagcaaaaatttagtgtctagcataaccttactacagtttccctttttaagttctcatttgaatttgataagttaatatktactttaaaaaaatccacatcatttctattcaatggcacttgaacttttaaaaaatgtttcaaagaaattaaagctagatatgattggaaataagcaaaacgagaaagagttgtcctatgtgtatgtagcacaaccctccctgtgtcctttaataaaaagcaggactctggtcattc

SEQ ID NO: 797457 - DNA, 629 bp, Homo sapiens
  misc_feature 512: n = A,T,C or G
caagttgcaacccacttgccgtgcagacatgtcagaacacagatctgtagtatctatattcatcactgccaggcgtattaaaatagaggcagaatgtcagtggcaggagttggcatgtgtacgaaatgtttaagcgccctacatgattctgatctgccccactaggtcaaaaatcactcayctattcccatcacggtagttcactcagcggttcactgtctcacttagtgcttaattgcgggatgttttcataggtccactggcacctaactaggttcagactgttttaagtctctcccaatctacaaatggttatctcctgcctattcataggcacctgcacaccagcagcctaatgacagtggcctaaactagttaaactagttgattcttcataactgtttgcttttgatcaaaaagggcagcaagaaaagggccagtggttccactgggaggaaagccatgtgggacaaattaggtgccgctgcaagatttaaaagctcgggggtggngatggggggggaaacagagctaactagaggcagctgttagcatgtggtttctgtgttatattcttctccttcccccttatgcctcttatgggtattaggaaggtaagcatatatatg

SEQ ID NO: 797458 - DNA, 624 bp, Homo sapiens
aaacataaacaagaaaaaaaatctgagccccaaagagattacaagacttgcccaagcttacaccgaaatattcgaagttaagcctaaaactcaagttttaacccccactcccggcaactgtactacataatgccacacagattatactgttttttttttgttgtttattttttgtttttaagtaaytcgctttttttcctttgccttttgcattttacactgaacaataatttcctagctttcaggaaatagtaatttttaaatgcttaccacctgattatattcattaaagatttccaaaatagtccctagtctagcaaagtagaaatcacaccattattatattattacagagctgaagaaagagaatatatttctcttccaaaacttctatgagagtcaatataattcctattatactttctctgctattttattatccttttctttattagaggtttagatttgaagccactcaagaaaaaggataggaatggaaagagatttaaattgctctttgtccatattaaggccaaagctttagcagataagggcaaagggaaggttaagacacaatggtcaaatgctgtgacctaattacgtctggacttacttattttcttg

SEQ ID NO: 797459 - DNA, 617 bp, Homo sapiens
aaaatcatgatctaaaaattgtttagaataagttcctggatatgtatgtaatgaaaatgcacctatatgctccaaatctagggttcaggaatcaactacaatattaccattggtaatgtggacaaagatgaagacaaygatgacaattagtaatcatgagcagtaagcctacaaaaattattacggatttcttcaaaattgcttcagactcttctaatacagattttctaatccctacattattgtaagatgtacagtaattaaccgtatgacttaaaaaataattgccaaatatcctccactctgaactacctttggagtctcctttctcaagacagtcataaagcatacttgagagtgaacagcatggtccagggctttaaagtcacctaagtgacagccagttagttgcaatcagcaccacacaatcacagcgtccacaagttaacaaatgcatttgtttctcaaataggaacacattgagcagaaactgaactactttttcaagtctgagcctgagttgaggtttcaatctgagttaataatgataagaatgaatgaaaataaaagtggtataaagtggagggtggttagctctgacaacagaaaacaattct

SEQ ID NO: 797460 - DNA, 617 bp, Homo sapiens
aaaatcatgatctaaaaattgtttagaataagttcctggatatgtatgtaatgaaaatgcacctatatgctccaaatctagggttcaggaatcaactacaatattaccattggtaatgtggacaaagatgaagacaatgatgacaattagtaatcatgagcagtaagcctacaaaaattattacggatttcttcaaaattgcttcagactcttctaatacagattttctaatccctacattattgtaagatgtacagtaattaaccgtatgacttaaaaaawaattgccaaatatcctccactctgaactacctttggagtctcctttctcaagacagtcataaagcatacttgagagtgaacagcatggtccagggctttaaagtcacctaagtgacagccagttagttgcaatcagcaccacacaatcacagcgtccacaagttaacaaatgcatttgtttctcaaataggaacacattgagcagaaactgaactactttttcaagtctgagcctgagttgaggtttcaatctgagttaataatgataagaatgaatgaaaataaaagtggtataaagtggagggtggttagctctgacaacagaaaacaattct

SEQ ID NO: 797461 - DNA, 632 bp, Homo sapiens
ttgagagggtcttgaattatctaataaccatcatttttagcaaaggtatctgaggcaaattcacactcataatgctctaatccccattccagtatctttcaaattcttttttactggggaaaaaaactatgtatttgaaatacctaaattaatgtgttgcttaaaaactcaaccatattgayccatgacatcttctgagacctagatgggtggatcaatttattttatggcaacccatgaacagctgtccacaataatttctaatgagttcatttgattctgacacacaatgtcttgacctcatgatctgggcccatctgtgagaatggcaggaagccctcaagcaaggtggcaggccacaggccatctgcagcctggcacaggtaggagggtgggtggagtggagctggcagaacgatgttgccaccaagccaagtcctttcatagcggcagcttggccacctctcaaatttgcctttttaatacatttattttttatttttattttttacttttattcgtgaccagtaacaaccagggaaaaataaaagagtgtaaaataaaatctagtgaaggctgtgaaataaaaggaactaaaactcaccaaaatgtagactgggttgcgattaaga

SEQ ID NO: 797462 - DNA, 447 bp, Homo sapiens
tagtgtcaaaagctcctgaaaactccttcatctgccaggcacttaggatgaggaaaggagagaagggtggggaagacgtgggtctgggtcagtgtgcacaagcccagagtggggaggactcacttgctgtgtcctctataatcctggtctagacccccaagtgggaccagtgggccaagagactcattaaccctgtgtgcccagaacttgakaatattaaggaactccccacaaacccagctcatcccaagcctagccctccccaggcaaagttggcagatgagtggcagagttggacccggtcaaggggagaagttgaaggccagaaattggggttacctgtggcacccacactgtccctgatagaggaagaggtggcagggaaaactgcccagctcaaagccctagtcgcccagtttgggtccaagtcagcctcccaaaggatga

SEQ ID NO: 797463 - DNA, 516 bp, Homo sapiens
tgggatccttgtagctttcattgctcactcctttctgccaggatggcagtgggaccctgcagaggagtggctctcttggcaagatccgggatgtgctccgcagaagcagtgaactcttggtgaggaagctccaggggactgagcctcggccctccaggtatacatggaagtcaagatacagtaaagtggccgggtgcagkggctcacgcctgtaatcccagcactttgggaggccgaggcgggtggatcacctgaggtcaggagtttgagaccagcctggccaacaaggtgaaactctctcctaaaaatacaaaaattagtcgggtgtggtggcaggtgcctgtaatctcagctacttgggaggctgaggcaggagaattgctggaacccaggaggcagaggttgcagggagccaagatcatgccattgcactccagcccaggcgacaacagcgagactccgtctcaaaaaaaaaaagaaaaaaaaaaaagatatggtaaagcaggcaagtaaagt

SEQ ID NO: 797464 - DNA, 586 bp, Homo sapiens
ggggatccgagggtcccaggctgtcgcggtgactaatgtgtgaaggccgctgccaaaatcgggcatggcctggctgcaaaggtgcggacggggtttgttctgctccttcctggatttccatcctgactgtcctcacagaggaaaggaagtatttctaagggaagaaaggcaaaaagagctcattctggcttttcttgggggggggccttagcattttaacgagggtgtggccctcatcaccagggcagacagcaccgyccccccaactcccgcagcttttatttcctggcttggtcacacctaagagtcatcactgaggtgttgaagtgccttacaggaaagcaccaagccacccgcacatcccaaatagcccggactggaaataaagcccccgaccctccacaacactccttggtggtcctcgaagcagctttctcttggggagctctgtcgaggagacctgtcctaggtgatcaccttccatctcctttgaaggtggcaatgggaagggcatgggtaaggaattgcctttctaatatctttctggcctgccagctgtggaggggttttggtgctggtggaatca

SEQ ID NO: 797465 - DNA, 635 bp, Homo sapiens
aaacatgtgcttgatacagcaatggaggatccagcattgcacggctaagaagcagagctctcggcagcggaggggccttctctcccagggtcttttggccagtcctcaatccaggtgagggaactgtagagccctaagggagcctacttattctgaagacaagtgggaagtttagtggcaaaagttctggttggctccttccatgaagtgcatgccagaggagtagcccaggcatctgaaggaagggcatacacacactcatccaagcacccagatgtttggaggacaagatgccgggctgtctggctcaatccactgctgaattatttaacacatatttgtgtctggggctgatatggtttggctgtgtccccacccagatctcatcttgtagctcccataattcctacatgttgtgggagggaaccaatgggagataattgaatcatgagagcagtttcccccatactgttctcttggtagtaaatamgtctcacgagatctgatggttttataaggggtttccccttttgcttggctctcattctctcttgcctgtcaccatgtaagacgtgccttttaccttctgccatgattgtgaggcctccccagccatgtggaactgtgtgtccatt

SEQ ID NO: 797466 - DNA, 611 bp, Homo sapiens
tttacatgtagaagcagaattgctaggtcatatggacatcttgtttaacttttgtggaactgccaaaccaactggctacactattttacatgcccaccagcaatgtaccagggttcctattactccacatcatccccgacccttgatattttcaattttttaaaaatcttttttctttttactttccttagtctttcctgtgtcgtatctttttttttttttttgccttgttaaagaacctagcttttagttttattcatcaattccatattaattttttttttttgagatgaagtttcactcttgttgcccaggctggagtgcagtggcgtgatcttgtctcactgcaacctccacctcccgggttcaagtgattctcctgcctcagccacctgagtagctgggattacaggtgcgygccaccacacccaactaattatttgtatttttagtagagatggggtttcaccatgttgaccaggctggtctccaactcctgacttcagatgatttgtcggccttggcctcccaaagtgctgggattacaggcgtgagccaccacacccagccttccttttgggaaaatttatattgttttcctcccttacttt

SEQ ID NO: 797467 - DNA, 512 bp, Homo sapiens
cccaggactcaaggatcctacacttggtggatctcagaaagaggagtgtgttcagcttgcgcccttcacccgggtgtccctctgtccaggttggtgagcagggtagaagggcggctctcccgggggttgcttgcgacccaccgcctgcctacctgctttagggccacctgttgcacccagcctccgccctggggccacagcctcraccgcagatccctgaaggtgcctgccagagcctgccggggctcccgcctcaggagacagtacagcacagggttgaggcagctattgctgtgtgccaagcaagtagtgacagggaagacatacgtctggatagtatagaaagtactgttccagggcaccaggtcaaacttcaccaggacaccccagagagtgaccacatggttgggaaaccagcagaggaagaaggaagccaccaggatgcggacagagcgggccacgaccctgctgtcctgccgccgccgttgccgccgctgcaggaaggccagcag

SEQ ID NO: 797468 - DNA, 538 bp, Homo sapiens
ttctcatgtgacccccaagaccaggcagagatggggtacaggaaggagacatgtgtaaacttaaaggccactctccctccccactcatcaccttcccagcagccctggggctggggcactggtcgcatgctattcttcaccccgagggtctccctccggctcctcctgggaggcaatgatcatgacagctgctgcagtgagatggctgggcctcacacacgcagccaaatctgacttcagttctcagggtcgtaatattaatagcatctccatccatacacctctcatcagggaccagaatwggctctggtgctttaggtgcattacctcattcagtttaattcccacaatgaccccatgcggaaagatgatcccccatttacagataagaaaaccaaggctcagagaagccaaacagcccagttggagaggggtccctggcatgagaggacaggcttgtctgcccccgggccactggccgtactgccatgttgtttggtctctccctctcacactaggttgtatgtagagcaaaaag

SEQ ID NO: 797469 - DNA, 595 bp, Homo sapiens
acttcaaactatgtattaaatattttttttggacacatctgctggaaaaccaatagtctccttgaatttgctgtgtctgaaactaaactctttatcttatctcactctcatcttcaaacggaatcctgcttcttcattaactagttaataacgttaccatatatttagtcaaccaatatagaaatctgggagtcatcctaaaatactgtttgtttttcacaattctctcccttcctatgccccacttcccattaaaaatcaacctctaaatagcattcttttgaagtattttacaaactatttcatccactgtttcaagaaccttattttatsttaataaaatggttatttattatattcctctttatgatacaaaagcagatgcatatactgtgatggtaaattttaggggtcaacttgactggatcatgggattcccagatagctggtaaagcactatttctgggtgtgtctgtaagggtatttctggaagagatcagcactgattcagtagactgagtaaggaagatctgccctcacccagtgagggtaggcaccatcccattgcctaaggcccagataggactaaaggagg

SEQ ID NO: 797470 - DNA, 595 bp, Homo sapiens
acttcaaactatgtattaaatattttttttggacacatctgctggaaaaccaatagtctccttgaatttgctgtgtctgaaactaaactctttatcttatctcactctcatcttcaaacggaatcctgcttcttcattaactagttaataacgttaccatatatttagtcaaccaatatagaaatctgggagtcatcctaaaatactgtttgtttttcacaattctctcccttcctatgccccacttcccattaaaaatcaacctctaaatagcattcttttgaagtattttacaaactatttcatccactgtttcaagaaccttattttatcttaataaaatggttatttattatattcctctttatgatacaaaagcagatgcatatactgtratggtaaattttaggggtcaacttgactggatcatgggattcccagatagctggtaaagcactatttctgggtgtgtctgtaagggtatttctggaagagatcagcactgattcagtagactgagtaaggaagatctgccctcacccagtgagggtaggcaccatcccattgcctaaggcccagataggactaaaggagg

SEQ ID NO: 797471 - DNA, 613 bp, Homo sapiens
ccccttgcccctcctaaattatttttcaaaataattgagaaataggactgtaaggctgtcttttttttcctgatagacaacataattgtacatgtagaaaatccaaaagaatttacaagtaaactattagaacttagcaacattactgaattaaaagtcaatataagaaataaattttatttttctattacagtaacaaataataaattaaaaattaaaaaataccattcacagtagcatcagaggaatcaaatatctagcaatgaatctaagaaagatatttaagacttctacactgaaaataatgttattagagttattaaggagaaataaaataagtagatatatcttgttaatggattggaagactcaaaattatttagatgtcaatcctttacaaattgttgtayagattcatcacaatctctattaaatcctcagcaagttgtttgtggaaaatgaccatacttaaacatttatatggaaatgcaaaggcaaaagttagctaaatcagtttgaattcaaaaaactaagaggacttacactcccagctattaagacccatcgaaagctcttctagatagttgttattggctcaatgataggcaactaa

SEQ ID NO: 797472 - DNA, 636 bp, Homo sapiens
ctttataggttacctgatgcttttgcctcacagctattaagattcttttctttgtcttgactttaaataacctgatgactatatgcttaggtgatgactttttgtgatgaatttcccaggtgtcctttgagcttcttgtatttggatgactagatttctagcaaggccagggaattttcccctgattattccctcaaatatcttttccagacttttagatttctcttcttccttgggaacaccaattattcttaggtttggatgcttaacatattctcaaacttcttggagtctttgtccattttttcttattctttgttctttgtctttgacagattgggttaattcaaaagcygtgtcttcgagctctgaaattctttcttctgcttgtttgagtgcattgctgagactttccaatgcattttgcatttctgtaagtgtgtccttgattccagaagttgtaattggtttttatttatactatctgtttcactgaagatttttcctttcacatcctgtattatgtttttgatttcttcaagttggagttcatctttctctggtgcctccttaattagcttaataattgacctttggactcctttttctggcaattcaaagatttcatcttggttt

SEQ ID NO: 797473 - DNA, 530 bp, Homo sapiens
ggatattagggcaagaggaactgatgtggttattactataagtaataataatttgccttgatccagaaacctcatgtttgtatcctgtattagtctgttctcatgctactatgaagaaatacccaagactgggtagtttataaaggaaagaggtttaattgactcacagctccgcgtggctggggaagcctcaggaaagttaaaatcatggcagaaggggaagcaaacacgtccttcttcacatggtggcaggagaagtgcagaacaaagggaggaaaagacctttataaaaccatcagatctcatgagaactcactcagtatgagaacagcatggggaatcatgatctaatcacctcccacaaggtccctcycccagcacatggggattacaattgggattacgattcaagatgaaatttggctggggacacagagccagaccatatcattataaataagataaatatatacattaaaaacttattaagaaatatttcttcctcttaatctctactactgtagtccatt

SEQ ID NO: 797474 - DNA, 534 bp, Homo sapiens
cccaaatctcatgttgaattataatttccaatattggaggaggtacctagtgggaggtgactggatcattgggggaaatttcccccttgctgtcctcatgatagtgagtgagttctcacaagatctgatggtttaaaagtgtgtggcatttccccctttactctttctctctcctgctggccatgagaataagtgcttgcttcccrttcaccttctgccatgcttgtgtttcctgaggcttcccagccatgcttcttgttcaagctgcagaactgtgagtcaattaaacctcatttcttcataaattacccagtctcagctctttatgggagtgtgagaatggactaataaaatatctctagaattatgtttttggagataatttaaagataaacaaatattggaaacctcatttgatcacacagagaacagtaaatggaagttctactttttctccagggcctttctcatgcttatgcagggattattcacccagatatcctgaaataagacatccaattaaggtacctgcta

SEQ ID NO: 797475 - DNA, 662 bp, Homo sapiens
agaagaaagaggggaggctaaatgccaagagctaaattccacagctatgaccattttcgtgagctgattcactcctgtttgtactttggaggaagaagcttggaatacagagaagcatgcaggcagcaacccaggttaactgctttgaagaactcacagtatagtgaagaaattggctaaaataccctataatttttatgtaatgattttgcattacactaggaagagaaaggcagttttgcaaaatttctttgttaggagaggaggagggtgtggtgcagtaaaaagaaggacagaggcaatgcttattgtttatggttgcttgtcatttcataggtttcctatgtaggaaccacatgtgcaaaaatggcaaaagaaagagaggagcaagagatccgcttatgataatccaacaaaacrataactggaacagaaaagaaaacgacggccaatcaaacccctgagtgactccacattgtctttaattctcctctaatcaaagagcagcacacagttgtgagaggtggtccgagccggggagattatgcagagagtgactccattcagagaaattttggcatgattcctaacctcttagcctgagggagaatttcttaaattttatttgtggttctcacctgagagaattgatgccttcaaga

SEQ ID NO: 797476 - DNA, 595 bp, Homo sapiens
acttcaaactatgtattaaatattttttttggacacatctgctggaaaaccaatagtctccttgaatttgctgtgtctgaaactaaactctttatcttatctcactctcatcttcaaacggaatcctgcttcttcattaactagttaataacrttaccatatatttagtcaaccaatatagaaatctgggagtcatcctaaaatactgtttgtttttcacaattctctcccttcctatgccccacttcccattaaaaatcaacctctaaatagcattcttttgaagtattttacaaactatttcatccactgtttcaagaaccttattttatcttaataaaatggttatttattatattcctctttatgatacaaaagcagatgcatatactgtgatggtaaattttaggggtcaacttgactggatcatgggattcccagatagctggtaaagcactatttctgggtgtgtctgtaagggtatttctggaagagatcagcactgattcagtagactgagtaaggaagatctgccctcacccagtgagggtaggcaccatcccattgcctaaggcccagataggactaaaggagg

SEQ ID NO: 797477 - DNA, 567 bp, Homo sapiens
tcctcctgcctcagcctcctgagtagttaggactacaggcttgtgccactatgcctggctaatttttaaaattgttattttttctttttctgtgcctaacgtagccatggctcgtggtcccaagaagcatctaaagcaggtagcagctccaaagcattggatgctggataaattgactggtgtgtttgctcctcatccatccaccagtccccacaagttgagagagtgtctccccctcatcattttcataaggaacagacttaagtatgccctgacaggagaggaagtaaagaagatttgcatgcagcggttcattaagatcgatggcaaggtccgyactgatataacctaccctgctggattcatggatgtcatcagcattgacaagatgggagagaatttctgtctgatctgtgacaccaagggtcactttgctgtacatcgtattacacctgaggaggccaagtacaagttgtgaaaagtgagaaaaaatatttgtgcgcacaaaaggaatccctcatctggtgactcatgatgctcgtaccatctgctaccctgatcccctca

SEQ ID NO: 797478 - DNA, 522 bp, Homo sapiens
gtcttggatattagcacttggatcctctttacttatgcaaatttctgcagcctgcttgaattccttccctgaaaaaaatgggcttttcttttctaccacacggccaggctgcaaattttccaaatttttatgctctggtttcccttttaaatacacaygtggttgtgcatgcctgtaatcccagctatgcaggagcctgaggcgggagaatcacgtgaacccaggaggtggtggttgcagtgaaccgagatcatgccactgcactccagcctggcaacagaatgagaccccatctcaaaaaaagaaaaaaaaaaaaaagaagaagtgtagcctgaaaatgtgactaaattgctgcaacctcatgatcaaacttgaatagatgaggagttacttcttacagataagcaaagaaagcagtcaatccacactaagacatattctatagatgctcattgagttatgatggggttacatcctgataaatccatcagaagttgaaaatatcaccagtcaaaaatgcat

SEQ ID NO: 797479 - DNA, 522 bp, Homo sapiens
gtcttggatattagcacttggatcctctttacttatgcaaatttctgcagcctgcttgaattccttccctgaaaaaaatgggcttttcttttctaccacacggccaggctgcaaattttccaaatttttatgctctggtttcccttttaaatacacacgtggttgtgcatgcctrtaatcccagctatgcaggagcctgaggcgggagaatcacgtgaacccaggaggtggtggttgcagtgaaccgagatcatgccactgcactccagcctggcaacagaatgagaccccatctcaaaaaaagaaaaaaaaaaaaaagaagaagtgtagcctgaaaatgtgactaaattgctgcaacctcatgatcaaacttgaatagatgaggagttacttcttacagataagcaaagaaagcagtcaatccacactaagacatattctatagatgctcattgagttatgatggggttacatcctgataaatccatcagaagttgaaaatatcaccagtcaaaaatgcat

SEQ ID NO: 797480 - DNA, 562 bp, Homo sapiens
atctacagagaataagcaggtgatacaatcacacagatatcctttggggagatagaggctcaggaggcaaactgataatttcagaagaatttagagcccacccacctaaattccccagagaacatcacatagtcttttgagatgaacttagaagactccttccctcctggagagacgccttggaagaactagactcttccaggaagctctcccagggcagggctgaaagggaaatgctgagacctaacaaacaataaagacaatgcttggaagggagcatctgtgaaaaaagcaagctcctccctctgagaataattccaaagggtgtctccgatcccagctttcagacctccacccttgattactcagacytgacactagccttttgagaccagccctaacaagggggtttcatctgggagcacttccctgaccttacaactgtttcctctgccaccccagacaagatgtctgctatctctgaatccagttgttatttaaaatgtcaagtgacaagggcgggcgtggtggctcatgcctgtaatcccagcactttgggagg

SEQ ID NO: 797481 - DNA, 611 bp, Homo sapiens
gatgtgttcggagtttcttccttctggtgggtttgtggtctcgctggctcaggagtgaagctgcagaccttcgcggtgagtgttacagctcataaaggaagtgtggacccaaagagtgagcagcagcaagacttattgcaaagagagaaagaaggaagcttccacagtgtggaaggggaccgaagcgggttgccactgctggctcgggcagcctgcttttattctcttatckggccccacccacatcctgctgattggtctgttttgacagggcgctgattggtgcgtttacaatccctgagctagacacaaaggttctccacctccccaccagattagctagatacagactgtggacacaaaggttctccaagtccccactggagtagctagatacagagtgtcgattggtgcattcacaaaccctgagctagacacagggtgctgattggtgtgtttacaaaccttgagctagatacagagtgccgattggtgtatttacaatccctgagctagacataaaggttccccaaggccccaccagagtagctagatagagtgtccattggtgcattcacaaaccctgagctagacacagggtgcagattggt

SEQ ID NO: 797482 - DNA, 611 bp, Homo sapiens
gatgtgttcggagtttcttccttctggtgggtttgtggtctcgctggctcaggagtgaagctgcagaccttcgcggtgagtgttacagctcataaaggaagtgtggacccaaagagtgagcagcagcaagacttattgcaaagagagaaagaaggaagcttccacagtgtggaaggggaccgaagcgggttgccactgctggctcgggcagcctgcttttattctcttatctggccccacccacatcctgctgattggtctgttttgacagggcgctgattggtgcgtttacaatccctgagctagacacaaaggttctccacctccccaccagattagctagatacagactgtggwcacaaaggttctccaagtccccactggagtagctagatacagagtgtcgattggtgcattcacaaaccctgagctagacacagggtgctgattggtgtgtttacaaaccttgagctagatacagagtgccgattggtgtatttacaatccctgagctagacataaaggttccccaaggccccaccagagtagctagatagagtgtccattggtgcattcacaaaccctgagctagacacagggtgcagattggt

SEQ ID NO: 797483 - DNA, 626 bp, Homo sapiens
gagtttgaagttatagtgagctatgatcacaccactgcattccagcccgggcaacaggatgagatcctatctctaaaaaagtaaaaagtttcaattaggtacagttggttcatagtggttttgttttttgtttatttgtttctctttttaaattttactttaagttctgggatacatgtgcagaacatgcagatttgttacataggtatacatgycaagtcttctacatatctctactgacttcctttctactctttttccatcagttctgaaagcagagtattaaacgttctgcctatgattatgaatttatagttatcctttcaattctgtcaatcttcacgtattttgaaggtcatttgttaggtttattcatatctaggatttcacatttgttatgtatcttggtcaattgaactatttatctttatttaacatccatatttatctctggtaatattccttattctgaagtctactttgatattagcagacattatttattcacagttacatttttattcaccttcgaaaggccacatacaagaagggactcttgagctagatattgaaagctgaggtgcttcccaggtgaatcatggcagcgggcaaggaggtgggatggg

SEQ ID NO: 797484 - DNA, 610 bp, Homo sapiens
gatgtgttcggagtttcttccttctggtgggtttgtggtctcgctggctcaggagtgaagctgcagaccttcgcggtgagtgttacagctcataaaggaagtgtggacccaaagagtgagcagcagcaagacttattgcaaagagagaaagaaggaagcttccacagtgtggaaggggaccgaagcgggttgccactgctggctcgggcagcctgcttttattctcttatckggccccacccacatcctgctgattggtctgttttgacagggcgctgattggtgcgtttacaatccctgagctagacacaaaggttctccacctccccaccagattagctagatacagactgtggacacaaaggttctccaagtccccactggagtagctagatacagagtgtcgattggtgcattcacaaaccctgagctagacacagggtgctgattggtgtgtttacaaaccttgagctagatacagagtgccgattggtgtatttacaatccctgagctagacataaaggttccccaaggccccaccagagtagctagatagagtgtccattggtgcattcacaaaccctgagctagacacagggtgcagattgg

SEQ ID NO: 797485 - DNA, 610 bp, Homo sapiens
gatgtgttcggagtttcttccttctggtgggtttgtggtctcgctggctcaggagtgaagctgcagaccttcgcggtgagtgttacagctcataaaggaagtgtggacccaaagagtgagcagcagcaagacttattgcaaagagagaaagaaggaagcttccacagtgtggaaggggaccgaagcgggttgccactgctggctcgggcagcctgcttttattctcttatctggccccacccacatcctgctgattggtctgttttgacagggcgctgattggtgcgtttacaatccctgagctagacacaaaggttctccacctccccaccagattagctagatacagactgtggwcacaaaggttctccaagtccccactggagtagctagatacagagtgtcgattggtgcattcacaaaccctgagctagacacagggtgctgattggtgtgtttacaaaccttgagctagatacagagtgccgattggtgtatttacaatccctgagctagacataaaggttccccaaggccccaccagagtagctagatagagtgtccattggtgcattcacaaaccctgagctagacacagggtgcagattgg

SEQ ID NO: 797486 - DNA, 560 bp, Homo sapiens
attgggaagacagaattagagacctagatttggaacaggtgctaagcaaagtcctgaaagttggtgagatcactgtgaaaacggaaatggggacttccgtagcactggtcaggccataatttctgggctaaggccatagccacttgctgagttttggcaaggagggtgaatgggaaatgagatcccaaagaaatctgctattttagattcaatagtcttacatgtggtccaragagtactcgtgtttctactgggatgatcaaagtactaaggcaaaggggttcccagtcaaacaatggatatggagaagctactgtgcccaactttgttaggaaaaaggaagagttatgaattctatcactgttccggatgttttacatttgagatctcctttagtcatcgctgttgcttattttgtctaagccagtttcctcatccgtggtatggaggtataatgtctaattcatatggtggttgtgagaactcattaaaaacaatgcacgttaaagtaactagactgtggaagttacttaataagttaaagctattgttaatgattt

SEQ ID NO: 797487 - DNA, 578 bp, Homo sapiens
gttggtttattgtagaacagttttttaaattttaagttctgagatacatgtgccatggtgggtggtttgctgcacctatcgacccatcatctaggttttaagccccacatacattaggtatttgtcctaatgctctccctccccttgttccctaccctctgacaggccctagtgtgtgatgttatcctccctgtgtccatgtgttcccattgttcaacccccacttatgagtgacaacatgtggtgtttggttttctattcctgtgttagtttactgaggatgatggtttctagcttcatccatggtcctgcaaaggacacgaactcattcctctcttttttgtggctgcatagtattccayggtgtatatgtaccacattaaaaagcatgaagaataaatgttattacctttctgtgtagtgccttccagttttttaaaatatgcaatattgataaaactaggatcagggtatacatgaaattattacatattttcacatgctattaaatggctttcaaaaatgtgacttttaatagctgcataatctaagagttttagaagttaacctggcaactt

SEQ ID NO: 797488 - DNA, 581 bp, Homo sapiens
ttggaagaaaggaaatgatatgcagacaagaaaaattaccctacttttaagcttctgggaatgtttgctacccatggacatacgtccaaaacaaaccatgtggtgaatacacagaagagtcactgggtctagtttttactttgtagtgaaagacacggcacacaacatcaatgtgtagaagcttctccagtcctaagtcactgctgtctctttgctgtcacattgactggcagccataaaatgtaaatagccattagggaatttaatcaatttaatcagcatcttttattatagtatttacaaaaacagatactaggctttaacaccagtgtacagattgatacagtcactttggaaaactggcaacttgtactaaacctaaacatttacttagcctgkgaaccagcagttccacccctaggtatatgctcaaaagaatggctgtattatgttcaaaaaagacatcttcaagaatgttcagagcagttgtattcatagtagccccaaactgaaattaactcaaatgtccatcaacattagaaaggatacactaatcacaaattgtagtatattcatatgta

SEQ ID NO: 797489 - DNA, 638 bp, Homo sapiens
aaaaataaaatagtagattactaagaggaagcctttgtagcaatttttaaacccttgtagaagtatcacagactgacattaatggctgtaataaaatgtgcatctgctggtttaaagaaaggggtggccttattttatcatacaaggaaagcattacttgaacaaatttacttacagcactgccctcctttctagcctaagtgaaatgtgtactcagacttatctaacttaatattggcatgatctgcctccagttaggggatactgcttcttactggctttattatcctgaccttggacaacttcctaagtcgtcacttagtcaatagaatttactttaggcctattatgtttcagcccctgttctaggcactgggaatagagcagtgaataatacagggggaaaaagactcaccatggagcttacattcccacagggagataaacagtgrgcaaataaataagtagaatgtacagttcacgaaaatgctgagtgtcttggagaaaattaaagcagaaatgggggtagagaatgctggggcagggctggagtggtgactgtaattttaaatagggtaatcaagccttcctgagaagatatttgagcaaagacttgaaggttatgtctaaggaaggtg

SEQ ID NO: 797490 - DNA, 638 bp, Homo sapiens
aaaaataaaatagtagattactaagaggaagcctttgtagcaatttttaaacccttgtagaagtatcacagactgacattaatggctgtaataaaatgtgcatctgctggtttaaagaaaggggtggccttattttatcatacaaggaaagcattacttgaacaaatttacttacagcactgccctcctttctagcctaagtgaaatgtgtactcagacttatctaacttaatattggcatgatctgcctccagttaggggatactgcttcttactggctttattatcctgaccttggacaacttcctaagtcgtcacttagtcaatagaatttactttaggcctattatgtttcagcccctgttctaggcactgggaatagagcagtgaataatacagggggaaaaagactcaccatggagcttacattcccacagggagataaacagtgagcaaataaataagtagaatgtacagttcackaaaatgctgagtgtcttggagaaaattaaagcagaaatgggggtagagaatgctggggcagggctggagtggtgactgtaattttaaatagggtaatcaagccttcctgagaagatatttgagcaaagacttgaaggttatgtctaaggaaggtg

SEQ ID NO: 797491 - DNA, 519 bp, Homo sapiens
tctataagatgtttaggtgtcattaggtagatgggagaggaaagagcatctctggacaaggggaacagtgtgcatgtgtaacagtagagattgagctgatttgtagctagtgtagtttatgttgggtttggagacatactgatcctttcgatgcctggtcctgactgcmtccaggctctccccatatcttgttttactgatcccaggctaggcaaaatcagatgtgcctggacattgtaaagcttgactttaaagttttattcctagtttcctcaaagtctctatgatttggggctcccttcctatctactcattcaagaatcatagggttggtcattgagaggttgatccctccctcccggagatttgtccagactttcacagtggcatctccacctagattagccagtgggtggaacaaaaccaggagcacttgagggacctttctcagctctccagagcaggtgttctcctaggtcatgcatttatgagaccagccctgccctagatcccaaggac

SEQ ID NO: 797492 - DNA, 545 bp, Homo sapiens
gttttttttttttgagctggagtctcgctctgtcacccaggctggagtgcagtggtgcgatctcggctcactgcaacctctgccttctggattcaagcgattctcgtgtcttagcctcctaagtagctgggattaaaggtgtgcgccattactctcgactgatttttgtatttttagtagagacgggattgcaccatgttggccaggctggtctcaaactcctgacctcaggtgacctacmcgcctcaatctctcaaagttgtgggattagaggtgtgagccactgcgcccggcctatagtcttatttttaaaagagacttgtttcatagtaaaattgagctcttaatagaggccataatgggaaataacagctttgaaattctgcagactttctgcattaggaagtgtagttgttataaatcaacttgttgataatcacaaattatcagaattgtctttgggaatacggaactgcattttttgtgtttcgatgtcagggatgttattcattgcactatgatcacacatcagattctcctgagag

SEQ ID NO: 797493 - DNA, 545 bp, Homo sapiens
gttttttttttttgagctggagtctcgctctgtcacccaggctggagtgcagtggtgcgatctcggctcactgcaacctctgccttctggattcaagcgattctcgtgtcttagcctcctaagtagctgggattaaaggtgtgcgccattactctcgactgatttttgtatttttagtagagacgggattgcaccatgttggccaggctggtctcaaactcctgacctcaggtgacctacccgcctcaatctctcaaagttgtgggattasaggtgtgagccactgcgcccggcctatagtcttatttttaaaagagacttgtttcatagtaaaattgagctcttaatagaggccataatgggaaataacagctttgaaattctgcagactttctgcattaggaagtgtagttgttataaatcaacttgttgataatcacaaattatcagaattgtctttgggaatacggaactgcattttttgtgtttcgatgtcagggatgttattcattgcactatgatcacacatcagattctcctgagag

SEQ ID NO: 797494 - DNA, 545 bp, Homo sapiens
gttttttttttttgagctggagtctcgctctgtcacccaggctggagtgcagtggtgcgatctcggctcactgcaacctctgccttctggattcaagcgattctcgtgtcttagcctcctaagtagctgggattaaaggtgtgcgccattactctcgactgatttttgtatttttagtagagacgggattgcaccatgttggccaggctggtctcaaactcctgacctcaggtgacctacccgcctcaatctctcaaagttgtgggattagaggygtgagccactgcgcccggcctatagtcttatttttaaaagagacttgtttcatagtaaaattgagctcttaatagaggccataatgggaaataacagctttgaaattctgcagactttctgcattaggaagtgtagttgttataaatcaacttgttgataatcacaaattatcagaattgtctttgggaatacggaactgcattttttgtgtttcgatgtcagggatgttattcattgcactatgatcacacatcagattctcctgagag

SEQ ID NO: 797495 - DNA, 575 bp, Homo sapiens
ctttgtttttcatttctctctttactctcttttgggcagtttgaacattatttagtattccatttaaattcagcctttttttgtgtgtgtgtggttgccttaggattgcagtacatatactttgtacagtctctttggaattaatatttaccacttgaagtgaatatagaaacttcccttctgatagggcccttccccctttcccctgtctatggtagttgtcttatatttacatttgttgaaaagcctacaagacaatgttataatttttgcttttaaccaacaaacaaattttaaakaactcaagagaaaagggcctgttatatttacttagatgtttacaggtctcttttgctcttcctttgttcctgatattccaaatttccctatggcatcatgtcctttttgttcaaaaaaacttcttttagcatttcttttggaacacatttgttgcagtgagttctcttagtttccctcatctgagaatatctttatttcaccttcatttctgaaggatattttttctggatataaaatcctggcttgatagatcttatctttcatcagtttaaaaa

SEQ ID NO: 797496 - DNA, 475 bp, Homo sapiens
gtaaaagatgctattatttcaactggtcataacttgtattaagtgcctacttgggtatagaattatgtctttgttttgaggctttcaattaaaagaatataaattattagttaactttaaccttggggatttaattttttttctatttaaaacctgttgttctttatcaaatgttttttatggaaagacttgttcaggatgtacagaccttcatagaaaaccttggacatgactgtgcggcaaatattgttatggaaaagtragtatggtagattttctctgtcttcacataaatgagatactaaaaatttaacatcatatgacaaacattctgtatttgctaaatttaataagtgacatctaatatattaataagatgggatgagcctttaaaagtatgttagaaattatagtcccttgctaatacattgtctttacatctttcagtattcactagaatttgataaaattttaa

SEQ ID NO: 797497 - DNA, 646 bp, Homo sapiens
tccgtctgccttagtatgccaaagtgctgggattacaggcgtgagccaccgtgcccagccctaatgttaatttctttaaagaagcatcataagatcttaaagactcatgaaaagcaatttcagcacagaggccttccttattttcattatattmccctaatcttccgtacacttaattgaaagcaaatgtataagtcaatctgcccttagtgagtctttctaaatcattcaacttagttttcaagaaacaactttctttttgtgctcattatattggtttacataatttgcttacataatctgtaattaaatgactgaatcacaataacatgtattacaggcataagctgatgtagggacaaacaccactcaactcaaaagcgtgcagctgagcaggaaaactgcctgtggtcaccgggccatggggatctgctggcacatttgctccatgagtcagcttagaagaggttggatgacagagctggttctgtagtatgcaaatcctggatacaggcacatgctcattctgatgcggactggcatgccacccacagaaaagaataggaaaagcaaaattagagcgcgaaatgcgacaaggatccaaacaagaaatttccctcagcctttcccagccaaggaaaattcc

SEQ ID NO: 797498 - DNA, 612 bp, Homo sapiens
cctgaaggatggctgggttttgaaactaagaagttggggtggggtgggagtgctccaggcaggagaaatgacacgtgcacatgttcagtggggagaaggctcacgcacattgccttccagggactcaatccagcaggagctcactaagttcaagatcaaacattaccattccccaataggaattcatcctcccctgttctctaggtgtaggtgctattaactagtcacccaagccagaaatgagaagtccagttacccactcgttcatgtattcatttgctattccttaggcacatgcagacaagatgcacacattgctcacagccctgccctcacaatgcggaatccactgaggtagggaggctgtctgctggtggtggtgtgaggtcatgagstggcagccgggtcaacaggcagtcacatctcagtgtggaggtgctgggacggaggaagtgctggggctgtggaaacactcaggagggaatcaggaaagacttcctgaggtggcgacataagctgaaacctgaaggatggctgggttttcaaagtaagaagttggggtggggtgggagctttccaggcaggagaaatgacacatgcacatggtttagc

SEQ ID NO: 797499 - DNA, 574 bp, Homo sapiens
cactgacagctcattctgatcctgtattgtcttgtttggtttccatttttttttttcattaatttccttgtcaaaaagtcccaaattgagtctcaattttctgttagtctctggctttaattccrgggatggtagattggctagccaacagcaggcaaattaatgttcccaggaatatttggagaggaaagaaacactgatttatataagtgagagcacagcttatgttttctaacataacaaagaggtcacaagtttgcagactggtttccagataaatggtagaaataggcttagggagcattcttcatgaaaggtccttaatctctaggagttgaaggcaaagatttacacaggtaatctgtttcagtaccattagcaattgtacattttagatactcctgttgaaagcagaccccataaatatatacacctactatatgcccaaattaaaagtaaaaataaatgaacaatttaaacaaattttaaagaaaaaagaaagaaaacagacccacatagtctaagcaggtaaatcagtactctccagtgctggaatgtgtactaataatggtgg

SEQ ID NO: 797500 - DNA, 595 bp, Homo sapiens
acagagtaaatggacagcctacagaatggaagcaaatatttgcaaactatgcattcagcagaggtctaatatccagaatctgtaaggaacttacatttacaagcaaaaaacaaacaacttcattaaaaaatgggcaaaggacatgagcagacacttttaaaaagaagacctccatgtggccaacaatcatatgaaaaaatgctccacattcctaatcattagagaaatgcaaatcaaaaccatagtgagataccatctcacaggagtcaaaatggctataattaaaaagttaaaaaaataatagatgctggtgaggttgtagagataagggaatgcttatacattaccggtgggagtgtaaattagttcagtcattgtggaaagcagtgtggtgatttgccaaagaattaaaaatggaattaccrttcaatccggtaatcccattattgtgtacacacccaaagataaatcattctatcataaagacacacgcacacatatgttcatcgcagcactattcagaatagtgaagacatggagtcaatcgaaatgcctatcaacggcagactggattaagaaaatgtggtacatatac

SEQ ID NO: 797501 - DNA, 575 bp, Homo sapiens
cgggcaacccccgatgccccttccaggtagaggaagagagagcagccggcgacacgccacgggttctccctgcgaggctggaagggtagtgaaatcatttgagataaaaatgtaagaaggactgagcttcccacggatccagaggccgcccagtgtgtggcaaattctagagacttttttyccatacctggacttctcgttttcggaggcagacctcaattcatccccaaagagaaatctgaaatagcagaaagaatttcaaacaggataggaatttgggttctgccaagatccagggaagacgcagggtgtgaggatttcaggggaggtgatggaggggtgggtggaaagcggctggtgtcccccgtcccctctcaggaggccttgctgggacaggcgagctcagggtgtgcagcttgtttacttggggcatgtgactcgccagcttcatgtccgttttctagtcggtaaaattagggcatgggtgatcatttccaatgtgtgctacacaccagaatctggggctgaaggggcagggcttgcttttttttttttcttttttcattgtaatcctt

SEQ ID NO: 797502 - DNA, 575 bp, Homo sapiens
cgggcaacccccgatgccccttccaggtagaggaagagagagcagccggcgacacgccacgggttctccctgcgaggctggaagggtagtgaaatcatttgagataaaaatgtaagaaggactgagcttcccacggatccagaggccgcccagtgtgtggcaaattctagagactttttttccatacctggacttctcgttttcggaggcagacctcaattcatccccaaagagaaatctgaaatagcagaaagaatttcaaacaggataggaatttgggttctgccaagatccagggaagacgcagggtgtgaggatttcaggggaggtgatggaggggtgggtggaaagcggctggtgtcccccstcccctctcaggaggccttgctgggacaggcgagctcagggtgtgcagcttgtttacttggggcatgtgactcgccagcttcatgtccgttttctagtcggtaaaattagggcatgggtgatcatttccaatgtgtgctacacaccagaatctggggctgaaggggcagggcttgcttttttttttttcttttttcattgtaatcctt

SEQ ID NO: 797503 - DNA, 534 bp, Homo sapiens
aatcgaaaatggagacatgcctgagcaggtttttatttatttgctagttacacatttatctttgaaaagtgaagtcttgtgacttttaaattttaactgtatcctttgattctttttacagattgttattcacgcactgcagtgtactcactatgtaatcctttggcaacttgctaagataactgaaagcagctctacaaaggtttgtggtggttcagtagtgtttttattagactaaatatcattaactgttttcagcaaactcacacatttaatgagatcagttatttcagtgaaatgttgcttgtttmtaatgtactgttatttgtagtttgatgtatattcagtggagaggatatcgatatggtttgtttcaaggtatgatttttaattaaaaattgttgttcacatttgaaggtggcataatctgtggttttctgtattctcaaagttggtgagcaagagcctttgaaacagatataagtattagattacataaattgaagataataaaccaactccccctagatcttc

SEQ ID NO: 797504 - DNA, 524 bp, Homo sapiens
ctaaaggttctccacgtaaaggaaccgcaaaataactgttactctaaaaattgttaggcaagttgggtgcagtggctcatgcctgtaattccacatactcaggaggctgaggcaggaggatcacttgaaggcagcagttcaagacaagcctaggcaacactgcaagaccccatctctaaaaaataaacmaataaataaacaaacaaaaattttaaatccttaggaaacaaaaattctctatatcatatccacaaaaattcctttctttatccatctccactttctaataatgtctcccaattaaatatgctaagcatacatctgtctgcagtaaatgtatttaaagcttccctccactattcaatgcaacatacatttatagacactttgagctggacactgtcctaaacatcagagatacaaagataagtgagatgttctcgcagctctcaaggtgctcacagtcttatggagggaaaaaaaggcaaataacttgttattcagagggatctgacatcaaaaag

SEQ ID NO: 797505 - DNA, 559 bp, Homo sapiens
taacatgccccaaatcacactaagtgatagagtatgattcaaggtcagatcagtacagcaggtcctttgggaactactgttttgggtagatttcataaaagacaggaagaaagaaaggctagtagaagcaatgaccaaaaactgggtagattttgttgctgttkttaatctctgcacaaatgtgcggtaaagcacgattaagtctcccttagttctatttagctatcattccttcccctacaccccttaaatacggcaccttcagaggctctgaagtcttcccacaacagcttaagaaaaaaaaaagagagagagaaaaggcagccttaatcaaaagcgcttttcttctggcaaacaaaaggccttggtatttccacagacagactagttattcttaaccctaaccaaagattctttggcagagaaagaaatatgaaaatgttaggcttctgggaatggcctgtgctttgggctcttgtatcccactcagtaaagccagcctactgaaaaacaaacacagccgcccctcagtaactctggaccttcagttaactccagg

SEQ ID NO: 797506 - DNA, 636 bp, Homo sapiens
agccagccctacagtcacaatcacaagcctgcaaacaagtgcctaccaagtgggggacaagttacatagctaccaggcgccagaacagcaggtgtgtgtgctatggcgtgagggaaagaggtctcaggccttcctcagcccagtcctctaatccctcttaaaaacattccctagtgcaaagaaaccatctgtttcaacaaagcctggagccctagaagcattttaactccttcactgctgtcctcccacagatgggcttcatccaatattaggtgctttgcttttcaaaaatgcctctaaatgatagaatataagctctacaagggaaaggactttgctttatttactgrtatatccctaatacctgggaatacatttgtatcagtggatattcaataaattacctgctgaatgaatccattaaacacctttttcctataatagtcgtttcactgatatcttattttctaaattctccctcttcttgtcatttgtcctcacttagagtcctgcctggcttccacaaattctgttgaccaacaaatatttgtctagtgtctccttctctacagtataacctgtcttgtttctgtgttgtttattgctgggatcccagtgcagagcacagcacacatg

SEQ ID NO: 797507 - DNA, 653 bp, Homo sapiens
taacctactaccataattatcttggtagtgtagagtaggatttgcctctaggggatgccaaagtctatgtaaattttatctcatataatataaatgaaaacatacctttattaatggacaaacacccaatgaacatgattttacagacaacaaattctgaatattccagaggtagccttctrtagctgagtaaatgttgtaccttttttacaggagttgtccagctccctgtagtccatagaatacatctcacttagtcctggccccatgcccaaaggaatttattttttcttagcaaaacatgtaggcatttcctttgtcagagaataaaccatatcagtagctttacgattggaagaaaatgagatgagataatcaaggattcagtataatgtaggaacctgctcacggagcctacacacaatcaatttaacacttatgacatcatgttggaagcttgaactttgtttccttcaaattaggactttgtttttcagatctggttgttaaacatttaccagcctacttcaaatcaaagtacagtacttgaaaactacatgaagaaaataataaaatctacatgttttactgttttatagtctgtgaatattgtctaattaatttcagatattcatagcatcaagtatcttttt

SEQ ID NO: 797508 - DNA, 653 bp, Homo sapiens
taacctactaccataattatcttggtagtgtagagtaggatttgcctctaggggatgccaaagtctatgtaaattttatctcatataatataaatgaaaacatacctttattaatggacaaacacccaatgaacatgattttacagacaacaaattctgaatattccagaggtagccttctatagctgagtaaatgttgtaccttttttacrggagttgtccagctccctgtagtccatagaatacatctcacttagtcctggccccatgcccaaaggaatttattttttcttagcaaaacatgtaggcatttcctttgtcagagaataaaccatatcagtagctttacgattggaagaaaatgagatgagataatcaaggattcagtataatgtaggaacctgctcacggagcctacacacaatcaatttaacacttatgacatcatgttggaagcttgaactttgtttccttcaaattaggactttgtttttcagatctggttgttaaacatttaccagcctacttcaaatcaaagtacagtacttgaaaactacatgaagaaaataataaaatctacatgttttactgttttatagtctgtgaatattgtctaattaatttcagatattcatagcatcaagtatcttttt

SEQ ID NO: 797509 - DNA, 517 bp, Homo sapiens
aaaaatattgtagttatttttaataattttgtcttttcacatttgtactagaattaaaatcatttatgtatatcactacagtattaaagtattatgatttttatattatttttacctttactatgagttgtccacttgtatatattttcacattgtatttgaaatccttkcatttcaagttatggaattatctttagcatttctttaatggaggtctactagtgatatctcacgttttgtttgtctgggaaaatctttatctctctttcatttctgaaaaatagccttgccaggtatactgttcttgattggcagcattttttttttcctgcgctttgactatgtcatcccattctctcctggtctaaaaggtttctgcttataaacacctgatagtcttatggaggttcttttgtttgtgacaggttgcttttctcttgctgctttcaaaattctgtttttggcttttgagaatttgatcataatatgatcttggcgaatttttaaaaatatttaa

SEQ ID NO: 797510 - DNA, 544 bp, Homo sapiens
catatacatgtatgtttattgcagcaccgttcacaatagcaaatacttggaaccaactcaaatgcccatccatgatagactggataaagaaaatgtgaaacatatacatcatggaataccatgcagccataaaaaagaatgagttcatgtcctttgcagggtcatggatgaagctggaaaccatcactctcagcaaactaacacaagaacagaaaaccaaacaccacatgttctcactcwtaagtgggagttgaacaatgagaacacatggacacagggaggggaacatcaagcaccagggcctgtcagaggatggggggctaggggagggatagcattaggagaaatacctaatgtagatgataggttgatgggtacagcaaaccaccatggcacgtgtatacctatgtaacaaacctgcgtgttctgcacatgtatcccatgacttaaagtataataaaagacaaaataataataaataaataaaaattaaaaacggtgaatacgaatgagacaggagaatttccttgaccccttcatggga

SEQ ID NO: 797511 - DNA, 590 bp, Homo sapiens
tataaaaaaatcaatatgaaatgaagtgcaatgtgtcaatatttgttgtctatataatacaataaaccaatattttccaatgtacagtgctcaatgtgacaaaatcactcataggttaacaatctgttccatgtacaggatagagaaattgattaaaataaaattgactaaaaaaagttcattggcatgctctcaggtcacattttaaataacttgtaagaaactatcactcgttaacctttttgtatgcctaagaatatccacaattgtctgaaaatattattaaaatattttccctttcccaaatacytaagtgagaacggaatttgttcatttacttcaaccaaaacaatatataacagattgaaaggagaagcagatatgagattccagctgttgtctatgaaactatgcactaatcatatttttcaaaatgtaaaacaatgcaaatcttttcaataattgtttttacttttgagaataatatggtgttcttcttaaaatataatgaaattattatttttataaattagtaaggcttcaaatttttcagttttaacttataataatgccaatatttataactcatg

SEQ ID NO: 797512 - DNA, 528 bp, Homo sapiens
atgaagctgtcatctcctatgataacaatgccttcttctgggatatctcctgaaggacctgtttgaggctgttttacagttaacttttatacaaaaaaaaaaatataaggaatacactctaaaagattaaaagtatagtatagtaaatacataaaccaataacatgtttactatcaagtattataatacgtaattatatagtacaagtattactgtacataattgtatgtgctatacttttgtacractgccagcatagaagtttgtttacaccactatcaccagaaatgtctgagtaatacattgcgctactacactatgaagtctacaacgtctctaggtgataagactttcttagctccattaaaatcttatgggaccactgttatatgtgccgtccatcattgactctaatcattatgaagcctatgactatatgctgttacagcagcctgaaccaagacgcaacttccttcattttatcctatgtcaaaatttgggtaaatccaagtaatttcagatctttga

SEQ ID NO: 797513 - DNA, 613 bp, Homo sapiens
gcctgtaatcccagctactcctaaggctgaggcagaagaattgcttgaattcgggagacaggggttgcagtaagccgagaccgcgccactgcactccagcctggccgacagagcgagactctagctcaaaaaacagagatttaacccactaagccgcggtctgaaagcttttccaagtcccaaagttcttagttcacaataccacaagcaaaagaaattttktaagcatggatcttagcaaacttttaactgttttttaaaaagtccttaacacctttaacgacaaaaaacaaaaaccaaaaactaaggcatgctgcaacttggtgcccccaaatggccttctcgtccaatccttctttcccaagtggcccccaagtacaaaacccaaccaattcggggtaaaggctgctgggattcaggccgccaccgggccccttcaggggatctgcccagcgtagagggccacatccctaaaccccacttcaggtgccccctgtccctccccagcactggagaaagcaccagcagagagagtgcttcagcggggacatttgggctcatcgctaactccattccacgtacaggaaaataaagacggggaaagggtacccga

SEQ ID NO: 797514 - DNA, 562 bp, Homo sapiens
tagtgactattagaattaacattttaaaaaataactggatcaggctgggcgcagtggctcacacctgtaatctcagcactttgggaggcccaggcgggaggatcacttgaggtcaggagctcgagaccagactggctaacatggtgaaaccccatctctggtaaaaaacagaaaaattagccaggcgtggtggtgggcgcctgtaatcccagctacttgggaggctgaggcaggagaatggcttgaacccagaaggcagaggttgcagggagctgagatgataccactgcactccagcctgggcaacagagaaggactgtctcaaaaacaaaacaaaactgaatcagacatayctattgcccagataggacatgaacatccatttataatttttattctgatccagtagtcctcagagcatggttctagaaaccagcagtgtgtcacctgggcagttgttagaaatgcagattcttcaaccttacctcaaaccttctgactcagaaactgtagggggtggagctcaaactgttataaccgttcctccaaatggtttgcatac

SEQ ID NO: 797515 - DNA, 595 bp, Homo sapiens
ttttgttgtattcctctggtgaaattcagtgaagggaggtggggatgaagacatttcagtgtgtgtgtgtatgtgcatgcatgtgtgtgtttgtgtgtgtgcacgtgtgtacactagagagatcttttttagacatcctgatacacttctgaaataactctgttctcatttaatttgacccattaccacatgtagagagtgaaaaaaaaagaccttaatcaatttgaaaccattatgctaaagaaatgctatgcagttgagaactgcagatgtggaggagttcaactgaaggaaatcatttttctgtttcttcttaaataggactcaggtctaaaatatcttggcccaagaaaccactytgagaaaggaaatcagccttatggtgtctgtgattaatagggttaggcaagactcaaggaaaacagaaaaatgctggctgtttagaaaggacaatcatctaaaacccacatttttaaccttaaaaggttacattttttttcaacttacagaatattatctttatgtgaagagactccaagaacatatttaagttgatttaaatgaatttagataacctacagtttgtattcagatt

SEQ ID NO: 797516 - DNA, 595 bp, Homo sapiens
ttttgttgtattcctctggtgaaattcagtgaagggaggtggggatgaagacatttcagtgtgtgtgtgtatgtgcatgcatgtgtgtgtttgtgtgtgtgcacgtgtgtacactagagagatcttttttagacatcctgatacacttctgaaataactctgttctcatttaatttgacccattaccacatgtagagagtgaaaaaaaaagaccttaatcaatttgaaaccattatgctaaagaaatgctatgcagttgagaactgcagatgtggaggagttcaactgaaggaaatcatttttctgtttcttcttaaataggactcaggtctaaaatatcttggcccaagaaaccactctgagaaaggaaatcagccttatggtgtctgtgattaatagggttaggcaagactcaaggaaaacagaaaaatgctggctgtttagaaaggacaatcatytaaaacccacatttttaaccttaaaaggttacattttttttcaacttacagaatattatctttatgtgaagagactccaagaacatatttaagttgatttaaatgaatttagataacctacagtttgtattcagatt

SEQ ID NO: 797517 - DNA, 599 bp, Homo sapiens
caatatagtttttttttcaattgattctgttgaagtttcaaggcagatgattatgttgtctgcaacacattttaagctattttgtcctatattttaatttttatttttgtttccatatcaaggttatgctagcttgtaaagtgagttgggtagcaatttatctttttatacatctttttaaattttctagaagaactgtaaaaatattgaatyatctattccttcttttttgatgtcattttacagaattcatctataaattatgagtggtgtgtttcgagtggtaaatctttgagtatcacatacattcatcttaaagaaatgatccaaggagaataaaaagattgattataccataaaaataaatagagatagggccttgctgtgttgcccaggctgttctgaaaatcctggccttaagcgatcctcctgccttggcctcccaaagtgctgagattacagacatgagtcactgtgcccagcctgctgcctcttcttaaatcacatttccatttttgctactgtttacatgtgcttttatttttgttttccttcagcatacttctcaagaatttattaatcttttaaaaagttgattc

SEQ ID NO: 797518 - DNA, 591 bp, Homo sapiens
gctcccacttttaagtgagaacatgtggtatttgtttttctgctcctgcattaattcacttagaataatggcctctaattccatccatgttgccactaaggacatgatgtcattctttttcatggctaggtagtattccatggtgtatatgtaccacttttttttttttttytcttgagatggaatctcactctgtcaccagcctggagtgcagtagtgcaatctcggctcactgcaacctccgcctcccgggttcaagccattctcctgcctcggcctcccaagtagctgggactacaggcgcataccaccacgcccagctaatttttgtatttttagtagaaacagggtttcaccatgttggccaggatggtcttgatctcctgacctcgtgatcagcccgcctcggcctcccaaagtgctgggattacaggcatgagccaccgcgcctggccaccacattttctttatccagcctaccattgatgggcatctaagttgattccatgtttttgctattgtgaatagagatgcagtgaacatgcatgtgcatgtgtctttatggtagaatgatttatattcctttaggta

SEQ ID NO: 797519 - DNA, 591 bp, Homo sapiens
gctcccacttttaagtgagaacatgtggtatttgtttttctgctcctgcattaattcacttagaataatggcctctaattccatccatgttgccactaaggacatgatgtcattctttttcatggctaggtagtattccatggtgtatatgtaccacttttttttttttttctcttgagatggaatctcactctgtcaccagcctggagtgcagtagtgcaatctcggctcactgcaacctccgcctcccgggttcaagccattctcctgcctcggcctcccaagtagctgggactacaggcgcataccaccacgcccagctaatttttgtatttttagtagaaacagggtttcaccatgttggccaggatggtcttgatctcctgacctcgtgatcagcccgcctcggcctcccaaagtgctgggattacaggcatgagccaccgcgccyggccaccacattttctttatccagcctaccattgatgggcatctaagttgattccatgtttttgctattgtgaatagagatgcagtgaacatgcatgtgcatgtgtctttatggtagaatgatttatattcctttaggta

SEQ ID NO: 797520 - DNA, 642 bp, Homo sapiens
atatttggtgtttataaaaatactaatgtctactaaattagaaataaattgctaattgaattattacacagatttaaagtgtattctttgttattacatgtgttaacacaaattgctttgcagtgtatcatatgtaaatctgatgcaaattgacatgagcaaatattcagtggattgtctggaccagttattcagttattgtgaagaatttttaaaatgccaatagagaaaatgtttctcagttagtaaatattaaaattagaaaaacatttttaaaaaggtcatccttccatccacccattttaactgccttaccttaaaaacattagcaattccttcttcatagttcagtgcaaagacatttgaaaatacaattcagtatctcaaaagtactgtgaaggtaaactgcctcttggggattcratcaccatttgatttaatgttgactgtttaatcatattataaacttgtccaacaggactgcataattgccttcttagcagaagaaaaaaaaaaagtaaacagcttaccttgcaactccagtttcttaagaagcccattacattcctgaaaacatcaaaagatttgtcagcacttccattatcaatctccattttctagagttgcaagttggctatgaaa

SEQ ID NO: 797521 - DNA, 564 bp, Homo sapiens
ttgctttgacttacagaaagctcacatctgcttttagttgctttaattctgcttttgtctctgcccgaactaagtcttagagaacttcctactgcaattggaagagctaaactttaggacaagtttgtgtgtgtctgccttcttgctgttatagckgaaaaggtcttggttgccttactgaggtgtcagaaactgaagatccaatttctacttaatttccccagaatggtctgaccagaaatggttatggcctcaaagaaccacagaggggcggcaattatccattttggtgacacagaagctccaattctcttaatataaaggaggtggagtggaatgtgaggtgggttacaatggtatttagcacagtggaggctggctaattgctcaccaaacccattttctcttcttcatgggaacatatcaatccacatttcccagccatctttgtaggtaagtgtggccatataactgagttctagccaacaaaatctaaactgacttgatatggactattaccatgttgggcagataaaatcttcctaccttgaattctccatactc

SEQ ID NO: 797522 - DNA, 572 bp, Homo sapiens
ctgccactcatccattgatggctgttccagttcactttgggagtaaaaaatttgataattacttgttttgaggaaataaaatacatgtgctcacctaccgtattcagctagaagctggtgttgatattttgattaatstaggatagatgctttttccaaataagattggaagtctgtggaagtgcatgatttattttgctttccagccaaactatcaattaagtcatttcgtcttcatatgatctctcattagatcaagcattggctaatttctgtaaagaactatatagtaaatattttaggctttgtggccatatgatttttgtcgtatgtgttcaactctgatgtagcatgaaatgaatgaatgtaactaataagtgtggctctatccctgtaatgtacaattttactaaaaatgtagcacgaattagaacgtacatgaatttgaattttacataaatgtaaaaatgtaaaatgaattttacctatgagccatatatttttggaaccctgcagtagatgatgattgacttactttgggggcactgttgttattattgtctcatattata

SEQ ID NO: 797523 - DNA, 652 bp, Homo sapiens
atatgcacattacaattttgatattcattaccaaatacccatcagaaagatcagagcagcctacaactctactaacaaggctggaaaatgcctatttccccaaatcctagatgcttctaaatactgccagttttattcatttttgccaaattaatgggacactatgttatctagtttctgttatcatgtctttgagcactggtgtggtttgtattagttgtctattggtttttctttttcagtcatgaatttcctattcatttcctttacctttatttatattttttgaaatattcaaaagttatttgtaaggcctttttgtatattggagacatttaacactgtgtctatatatrtattttagactgtttcatggtttattacctttaaaccttgtttctggttttcttcccccaagacaaaaattctttattgttatgtaattgaatatatatttattttcctttatggtttttacattttatgttctgtttaaaacactttttccaccttaatattatacaatatttatttctatagaacaatagttcaatgataattatagaattgtattttgtttcatctatttagtatatataacgacctcctttgtaatttagtttaactcagtggtttttcaactttagctact

SEQ ID NO: 797524 - DNA, 652 bp, Homo sapiens
atatgcacattacaattttgatattcattaccaaatacccatcagaaagatcagagcagcctacaactctactaacaaggctggaaaatgcctatttccccaaatcctagatgcttctaaatactgccagttttattcatttttgccaaattaatgggacactatgttatctagtttctgttatcatgtctttgagcactggtgtggtttgtattagttgtctattggtttttctttttcagtcatgaatttcctattcatttcctttacctttatttatattttttgaaatattcaaaagttatttgtaaggcctttttgtatattggagacatttaacactgtgtctatatatgtattttagactgtttcatggtttattacctttaaaccttgtttctggttttcttcccccaagacaaaaattctttattgttatgtaattkaatatatatttattttcctttatggtttttacattttatgttctgtttaaaacactttttccaccttaatattatacaatatttatttctatagaacaatagttcaatgataattatagaattgtattttgtttcatctatttagtatatataacgacctcctttgtaatttagtttaactcagtggtttttcaactttagctact

SEQ ID NO: 797525 - DNA, 615 bp, Homo sapiens
ttggtgataggaaaatgtaatgacagggcttgtcttcaagcttggcattgccccactcattccataactagcagcatgaattccttcttcctatgtcccagagccctcctgccaatagcacgggaacatacacctaaaacttggtattcattctacactggggtttcattttatatttaaggaagcttactctgttctgaacatatgtgttttttttattttaaaatttggtaaatacagaaaagcctaaagaactaagaaaaccttgccatatgcctaccacactgccagttattcattaatttaggaaacactactgagcatcctctagaygccaggctgcagatacagtggtgaaaaagcagacgctgaccccgcactcatggggctcatcaacattgcaggactctctgatgtctacccttctagaatattttctccccatgctcagcaagtctaattgttaatgctattgaagcagagaacttacagaaatacaaagtggtagctaaatccagagaccactgcagtcctcattaaaagcaaagcagtagttctcaaccttgattgtgcattagaattacctggggagctttttaaaaaatgctccatctt

SEQ ID NO: 797526 - DNA, 615 bp, Homo sapiens
ttggtgataggaaaatgtaatgacagggcttgtcttcaagcttggcattgccccactcattccataactagcagcatgaattccttcttcctatgtcccagagccctcctgccaatagcacgggaacatacacctaaaacttggtattcattctacactggggtttcattttatatttaaggaagcttactctgttctgaacatatgtgttttttttattttaaaatttggtaaatacagaaaagcctaaagaactaagaaaaccttgccatatgcctaccacactgccagttattcattaatttaggaaacactactgagcatcctctagatgccaggctgcagatacagtggtgaaaaagcagacgctgaccccgcactcatggggctcatcaacattgcaggactctctgatgtctrcccttctagaatattttctccccatgctcagcaagtctaattgttaatgctattgaagcagagaacttacagaaatacaaagtggtagctaaatccagagaccactgcagtcctcattaaaagcaaagcagtagttctcaaccttgattgtgcattagaattacctggggagctttttaaaaaatgctccatctt

SEQ ID NO: 797527 - DNA, 592 bp, Homo sapiens
cttcaaaaatacctattttgaaattcaaagcagaacattgatttctttggtcttggcagtgtctgccctctgctgcccttggaaataagatcaggcttaagtctgaaccttcacagcagaagggctgccagggacaaaccttcattactcagaggaayaatgcaataggttatacttaagctattatattatcccaaaataaatgtctttattctccttggcgcagattccagcaatgaaggtgatggctttggacggaactcccattgtcctagttaccaaggcaagtaacaatgacattttgtttaactgctttctctgatttcatattcaattaaatatcaagtattgtcaattccatcactgtacttttccaaccacttttccctcctcccagtttccattaattctccccttacttctcacctagaagtctttacaccttcagtttctttcagagattctttcttcaggtttggaatgtgcaacttggggtgctgtaaaccttagatccaattctacctctacatttgctagtttgtgaatttgagcaagtttttaaacctatatttcctcgcccttataaggctct

SEQ ID NO: 797528 - DNA, 625 bp, Homo sapiens
tttgaagctgaaagttttctaaactatcagtaactataaatattggctaataatattaacccctcacaatggtggaaagacagaatttgcatactattcttgccaaaatagtgatataaaagttgttataggccaggcacagtagctcacacctgtaattcctttaggagactgaggtaagaagattgcttgaggtcaggagttcaagaccagcctaggcaacatagtgagaaccccatctctacaaaaaaaaaatgttgttacgtgcagcacaaattacagtagaagtagtataagatgtatcagcagttaataaataaaatattttttctggattttctgatttggagaaagtctttgaaaactgtaatgttatttgttttgtaaccttttataaatatttgtttcatacctaatgtttttttcyatccttaaagagagttccacaaaatgtataacatttaggactggccaggcatggtggctcacacccgtaatcccagcaccttgggaagctaagtcgtgaggattgcttgaactcattgttccagaccagtctggacagcatagcaagaccccatctctaaaaaaataattttaaaaatgagctgggtgtggtgacata

SEQ ID NO: 797529 - DNA, 655 bp, Homo sapiens
gttgctctttattatttcctatatgtctggattaccatatgatgcagttttccttagttggaaggactttctatagcattttacatagtgcaattctacactatttaatagcaattattttaatcaaaaataattttagctttagtgaagtattttagctttagaataatttctgtgactataggtatcttgaattataggcctttttaatttcagcattttaatatatcattccactatcttctatcctgcattgtttctgatgaaagtcagatgctaatcatattgtttactctctatgtaatacgtcatttttcttttgctgctttctaattttgattatttttggttttcattagtttgaatttgatgtgcctgagtatgattttctctgttttccttctacctgagtttcacaaasattcttgcatttgtaagctgatgtttatcaacacatttagaaagttctattctattatttatgtaaattttttttctcttatttatttcagtcctctccttctcggactctaattacatgtgtgctgtaccagttgatattgttgcaaaacgtttttattttcttctatatttgcttcctttatatgcatcagagggaataatttttatagatccatttgcaagcacactaatt

SEQ ID NO: 797530 - DNA, 597 bp, Homo sapiens
attttgagacaaagtcttgctctgttgccaggctggaatgcagtgatgcaatctcagctcactgcaacttctgcctcctgggttcaagcaattttcctgccgcagcctccctagtagctgggactacaggtgcctgccaccacacccagctaattttttgtatttttagtagagacagggtttcaccgtgttggccaggatggtctcgatctcctgatctcatgatccacccacctcggcctcccaaagtgctgggattacaggcatgagccaccgtgcccggccgatatatattttacctctagaagtttcatttggattcgtttgtgtatattccayttctcctttctattcatggttttctttaaatgctttctatagttctctagtatgttaatgtcactatcttctgtttttattattttgtcattgtttgatctcatactgttggcttatattttttcttcttatggatcacattttcctatctgttggcctctttagtaatttttgactggcagtagggcattgtgaattttacattcttgaatgtctggagtttgtcatctttctttgaagggattcaatctggccaac

SEQ ID NO: 797531 - DNA, 630 bp, Homo sapiens
agaattatgctttgaaaatgtttttgtatgcagacaatgaagatcgtgctggacgatttcacaagtaagtaaagagaaaaataaaaattattttattaattttgtaactgtataaccaaaattaactagttttctctggaacactttctaacctgctgattgatttaggtttttttagaaaaaaattatcaaacctcacggtgattttagattacaaattcgggcctttctcttataagaaaatggctgaaagaagaaatacccagggcagatttatttacttagtaaatatgctctacttagctattttttaacatttagtaaaatctgagttgattttagccaaaatcacagccccgcctgatgattttkattttgaaggtacccaccccaatcaattcaaatgatttatcagtataatatttacatttaaagaaatacattatggtttgatatggagtcagataatactataattacatttttctaaagtcaaaaacatacaaaaaatcttgacgtagcgcatttacttgtaatgtgagtcttgttactttctcatagtaacagattagaaaaccatttttgttattttcttgaaatctaattttatttaaaacatgaatttcagag

SEQ ID NO: 797532 - DNA, 624 bp, Homo sapiens
tatatattaataactaagaaaaactatataaaattctgttgaatgtaatacaaaaaatgtaatacaaaaaatacaaatacaaaaaaaaatacctgggaaccgatctaactaaagaagttagttattaataactaactataatattccattgtgtatatattaataacagaaaaactataaaaaattctgataaatgtaatagaagtagacacataaaaaatggaaagatactccatgcttatggattggaagaattaatattattaaaatgacaatactacccaaagcaatctacagattctgtgcaatccctatcaaaatgccaaagacattcttcacagaatgacatttyaccaaaaaaaagaaccctaagatttatgtagaatgatagaagaccctgaatagtaaaagcaaaactgagcaagaggagcaaagctaaaggcatcacactatgtgacttcaaaatttactacaaagctatgataaccaaaacaacatggtactggcataaaaaacagacacatggaccagtggaacagaatagagaatcctgatatacatttatgcatttacaaccaacttatttttgacaaagatgccgagaacatacaatggggaaaggac

SEQ ID NO: 797533 - DNA, 639 bp, Homo sapiens
tgggactacaggggcaccccaccacacccaactaatgtttgtattttttgtaagaactgggtttggccatgttgcccagactcctagactcaagcagtccacctgccttggcctcccaaagtgctaggattacaggcatgagccaccacacccggccccatccttatctttggcacttaagattcttcttccctgatgtacctcaaaggctcttttttctccagctcatgggcctcctgagtgacccagaattaggtccagcagcagctgatggcttctctctgctcatgtctgactgcactgatgtgctgactcgtgctggccatgcygaagtgcggatcatgttccgccagcggttcttcacagataatgtgcctgctttggtccagggcttccatgctgctccccaaggtgaggagtctgaaagaaggtccccacatatacacatctctcctttgcttggccacattccctaagataatttagggcccgcttgcttctttagagctatattgtggtctgtgcctagaagactaaacttctagattcttgtcccacttcttcctttcatgggcgtatcttgcttattctgagcgtgaagggctctttcacccgtttgtaggctgatgtctcagcctc

SEQ ID NO: 797534 - DNA, 606 bp, Homo sapiens
  misc_feature 373: n = A,T,C or G
acacctcccctgtcctccagaaacatttccaggcattctactgtctgttcctaagctggctcttcatgtaataatagttagcactttctttttaagtctctttttaattaaaaaatactaagctgtgcgtatttccctactgccaattatgaggagaagtagcttatttcatttcctgctttcgcyttttctctttgaccctttaaggtctgtattatgtttatactattattgataaagtggatagttttttttgttttggtggttggtgtggttggtacagggtctcactctatcacccaggctagagtgcaatgccaggatgatggctgtttgcagcctccacctcccgagctcaagtgatcctcccacntaagcctcccaagtagctgggaccacaggcgtgcatcaccacacctggctatgtgtttttattttttttataggatctccctatattgcccaggctagtctcaaactcctggcctcaggtgatcttcctgtctctgcctccccctcccaaaatactgggattacaggcgtgagccaccatgcctggcagtggatattttctatttgtgattcccctttagtattgtctgctta

SEQ ID NO: 797535 - DNA, 389 bp, Homo sapiens
gtaagctgaaactccacagatttcgacctccattttgagaaataattgtttacacaattgggtatgtgaaaccaaatattattccatgcaagtaacttggcttttagtaatatgcacgagggaaaacctttggaggtactaaaagataytgccatgacaaatcagagtctcattccttaacaatgctatgaatgaggtctttgtgtacaactccacactaaactctgtctactttgcttcccactgaacactcattatctagaacagtgactatcacagtgtaggggatcaggacatatctactgtaccaagaaatgaatggactcatatgtgcattcttccagagtataccatggcttttcaaggatgtgccatatcttttccttggc

SEQ ID NO: 797536 - DNA, 639 bp, Homo sapiens
attttctgttttgctcagtgtgatgcctagaacatgcctggttcttagagtgtatttgataaatacctgttgaatgaatgaacgaacaaatggtgtcttttcccttttactagactatcaggttctcaagagcaggatgtctgctctatctctgtattcccttaacayatccaatacctagtccaaatatatccagcaattctatttttttttttttttttgagacagagtctcgctcggtcacccaggctggagtgcagtggcgcaatctctgctcactgcaagctctgcctcccaggttcatgccattctcctgcctcagcctcctgagtagctgggactacaggcgcctgcaaccacacccggctaattttttttttttttaagtagagaaagggtttcacagtgttagccaggatggtctcaatcccctgacctcgtgatccgcctgccttggcctcccaaagtgctgggattacaggcgtgagccatcctgcccggcctatccagcaattcttaagaatgatctgttaaattacttatgagaaaattgaggtacaagtctttaagtgacttggacaactgattttcccttaacagacgctcagtgtcaggcttttaatggcaagtctcttttgc

SEQ ID NO: 797537 - DNA, 639 bp, Homo sapiens
attttctgttttgctcagtgtgatgcctagaacatgcctggttcttagagtgtatttgataaatacctgttgaatgaatgaacgaacaaatggtgtcttttcccttttactagactatcaggttctcaagagcaggatgtctgctctatctctgtattcccttaacatatccaatacctagtccaaatatatccagcaattctatttttttttttttttttgagacagagtctcgctcggtcacccaggctggagtgcagtggcgcaatctctgctcactgcaagctctgcctcccaggttcatgccattctcctgcctcagcctcctgagtagctgggactacaggcgcctgcaaccacacccggytaattttttttttttttaagtagagaaagggtttcacagtgttagccaggatggtctcaatcccctgacctcgtgatccgcctgccttggcctcccaaagtgctgggattacaggcgtgagccatcctgcccggcctatccagcaattcttaagaatgatctgttaaattacttatgagaaaattgaggtacaagtctttaagtgacttggacaactgattttcccttaacagacgctcagtgtcaggcttttaatggcaagtctcttttgc

SEQ ID NO: 797538 - DNA, 639 bp, Homo sapiens
attttctgttttgctcagtgtgatgcctagaacatgcctggttcttagagtgtatttgataaatacctgttgaatgaatgaacgaacaaatggtgtcttttcccttttactagactatcaggttctcaagagcaggatgtctgctctatctctgtattcccttaacatatccaatacctagtccaaatatatccagcaattctatttttttttttttttttgagacagagtctcgctcggtcacccaggctggagtgcagtggcgcaatctctgctcactgcaagctctgcctcccaggttcatgccattctcctgcctcagcctcctgagtagctgggactacaggcgcctgcaaccacacccggctaattttttttttttttaagtagagamagggtttcacagtgttagccaggatggtctcaatcccctgacctcgtgatccgcctgccttggcctcccaaagtgctgggattacaggcgtgagccatcctgcccggcctatccagcaattcttaagaatgatctgttaaattacttatgagaaaattgaggtacaagtctttaagtgacttggacaactgattttcccttaacagacgctcagtgtcaggcttttaatggcaagtctcttttgc

SEQ ID NO: 797539 - DNA, 621 bp, Homo sapiens
aatagattgcaaggagtatgctgtattaggaaggaagtttgtacactttcgtggcttatgggtatcttagtataaccttttctggttgagtgaactgtgtcatttcaaaagcctgaagacattgtgatgactgctgcctccataatggctacattctaggggctttgccctgaatcgcatatattaactcaaaaaacaaacagtacccagtttttattgggaaaattacagtaccrgaagttatgtttctcagtcattgagaccttatgaagccttaataatatttagaagattctggttccttgtcttccttttttgagtcagcagttggtcacagttcagaaatgaattacaaattacaatttattagtaatgataatatttaagtagtaatgatgatgataaatagtaacagcttattttttaaaaagataccaagctaaatgctttcatggattatctcatttaattgtctcaacaaccttttaagtcttatatttttatcattgccgttttatagatgaagaaagtcaattttcagagaacttaaataacttctcatagatgtctagagcaaataagagacaccaggaaatattacacccaattaaacatgttttc

SEQ ID NO: 797540 - DNA, 641 bp, Homo sapiens
tttccctgctgatatgccgggcagaatttggcccgcatcaccaaagtacggtcagctcacctgtgtaggggtggctcaggaaggaatgactgaagggtatacaaattactctgtggcttcagggggttgagtctctaattcaaggtcttgctgctaattctaaagtcatgcttggcaaagcacatcactctagagtttctacttttgcttcctgcattcccttgacatttcacatgccgctgcaacagaggggtggctggtctcctttttgcttgaatagctggagtccatacgctgggctggctttgacgctgcgcctggctctctcggctgcctacgccaccatgtggagaccatgtaaacacacaaaatgccatgcggccagcccgtgcctggaacacccaccaggcagcagagctcctccaagacagtcttcagcaggtggctgaacagcaacaaacagaaaagggacgtcctaggctgtatcagggragggatctgatgtgaccatccacccaatgtctccaccagatcaaatccaaactgctgatatgcggggtagaatttggcccgcatcacacaaagtagagtcagcttacctggacccagggggctggcctcggaggtactgaagagcacag

SEQ ID NO: 797541 - DNA, 513 bp, Homo sapiens
ccgtccactcagcctcatagtttcatgacatttcaaaactaaaaggaaacttggaaccttagaaagaaatttggagcctaagaaagttcttagaaaggaacctagaagcctcttgttgaatcccatcatttcatagctgagaaatctggtatttggaagacaggagttgctgatggctgagagctagtcagggcctgaacctggagccrgagccaggtgttcagaggtgaacagtgtcgagattatggtttggtggattaattatgctcttgaatcagcagattggagagacagccatctcaagacactaggtttagagttttcaacttccacatcagtcatatttaaataaaccagcaagatcatatgccttaaagttggtgctcattttgatgaaatactgacagaaaaggccaaaatacaagtctggggtatacatgtcccatcaatctgtagctatgcccatgaaaagagtgctagataagaaatctttacaatgccaaactttgtttt

SEQ ID NO: 797542 - DNA, 612 bp, Homo sapiens
tactgtttcccaaatgaagagtttgacaaaagctgactaactagctgggctgaggccctaggctggcgggtagcagagtggggatgtgtctgtgtccctgtcctgacccccagggcctggctctgcactgccaggttacccagatcctgttacacaaaaaaagccaaaacaacttgcagaaaagaagtctgcagaaaagctccataacagtattccaataaatgaacagacttgtgacatctcttccctggggacagaayaagaggatacaggtttccatcccagcaagagggattctgcattaagtacaaagaaagctttccggctcggagaagtgagatgagcaacacaagaggagccaaaactgctgccctcgtgctgcattctcgctcgatcctgtcatttcctgagtgctgagaggtttcatatttggacgactgaccagtctgggaattgcttaagtcttgcccaaactccaggactctctggcatggtcctcctcctcctccccacatggcttcaccctcacagtctcttacgatctcaacttggtgccaccatcttatcagtgtctcctaggctcccaaaccgtcactcccatctgcttattct

SEQ ID NO: 797543 - DNA, 530 bp, Homo sapiens
tccttccaacgaagagtcatgtatggagcacctgctatgggccaggctggattagatgctaggaacaagacagtgaacaaacagcctgacctcagtcttcatgatctttacaatttagtaggcagtaaaaattggtctggcaaagttttaaaaatgatcaaaataaaagttaaaaataaaagtttttctattaatttttatgttttctaaaagttgccagcagttttctgtcactggagataggtacactttgtttcaggaaaaatcacacattcgagtcacacaaatacatggtaagatcccagacactgtttgggagggagctgaagcctgattgggccacctgtggtgggaggktcttgtccctcccctgtcctctccatgcctggagcttgaaggtggctgattggtggggtgaatggatttggattggattcaccctgtgggtaagaccccctcccttaggtatccaaggcatagcaacacaatggaaagtgggctagtcctgctgagtgcagaggtgaggaagt

SEQ ID NO: 797544 - DNA, 615 bp, Homo sapiens
gaagtcaataaattataagtgttgttttctaaacagcaaaataactatgttagtatttataatgtttagaacaattgttttagttataggaaggctttctgatctttacttttatgccagaccagtgaaactgactcatctagaaatagtttctgaggtttttgtgctttgccctggctgagctctctccttccagcacaatccctgggaaggttgggatggggtarggacagatagcttatgctatggcagcctcctagaatgtggacaatctgcagtgctttccgagcttgaagattcaagttgtgacacattctgcattttctttcagcagtgtgtagtctgaatttgaggtctttacatatatttctccgttttgactctttagtacacaagtctaccaaaggaacaaaatatcttgccacggcaccactacagctaataaaagaaagagacttcagaactttaaatttaatttcaaaaattagatatctagaaatagtctattaggcaaggcagtagttttatttttttccccaatgacagtacactgcacacaaatacatttaaataattacaatttttaaaactttccagagtgaagctctgaaagtg

SEQ ID NO: 797545 - DNA, 307 bp, Homo sapiens
cccctacccttgtgcaatcccatacaggagaagtaccccagggaagcatcgccttggtaggcataccccaagggagccacagcatccccttcacttcctgctggactgtagtgattagccagaggttaaagctttgagtttgtgcagttmttttctgagtacgtgtcctgccctgagcatgtgcatggctttaaaatttctagtatacagatcacctgaggtcggtagttcaagaccagcctggccaacatggcaaaaccccatctctactaaaaatataaaacttagctgggcgtggtggcgcccg

SEQ ID NO: 797546 - DNA, 446 bp, Homo sapiens
aatgtggatgtaattaatgccaccgaattttacacttaagagtggctataacatcatatgttatgtcatatatattattatattttaccacaataaagtatttttcataaagtaagagatttaaaaactaatcaaagctttttacctaaagcatgatgtgactgcaaacagaatgatgagaatgtatgccaggtgaaacacagggatcacagtcacagaagttgcctcaaattccagttgtytggaaagcgatgtaaagtggactacctgccacaaaaatatactcagataaatagcttttaattacaatatttgtgtgtgagttacaaaaactattgaaacactttatcttagtgatgaaacaatatgtatgttaaaattcagcaaaagataaaaatacatggattatgacttcagaatagagaaaataatgtagatttgcttct

SEQ ID NO: 797547 - DNA, 521 bp, Homo sapiens
taaagagtgtgagtcatcttcattgataggtaaggtcacgtgggtcacgtgtccactggacagggggcccttccctgcctggcagctgaggcagagagaggagacaaagagaaagacagcttacgccattatttctgcatatcagagacttttagtactttcgctaatttactactgctatctagaaggcagagccaggtgtacaggatggaacatraaggcggactaggagcgtgaccactgaagcacagcatcacagggagatggttaggcctccggataactgcgggcaagcctgactgatgtcaggccctccacaagaggtggaggagcagagtcttctctaaactcccccggggaaagggagactccctttcccggtctgctaagtagcaggtgttttcccctgacacttacgctaccgctagacttcggtctgcctggcaacgggtatcttcccagaagctggcgttaccgctagaccaaggagcccttctgctggctctgtctgggcataacag

SEQ ID NO: 797548 - DNA, 599 bp, Homo sapiens
ccaccccagcccccctcagaaagagatgctataatctttccagacagcaggtttccttgtatgtcactcagctttgtggcctcacctttaatactcccctgtcttttttggaggtaatatcctctccctgctcagcaacagtggctgtggggctttcttcattgttcttggcaccttcatcagtagtcattgtcttttaagtagagaacctggtaagaagaaaaatattttagctgggaaaaatatcacttctttatgaatcttgaatgyccctgggaactgagctctacctaacctaagatttacttagggccaataagcttagatactgaaaatgaaaacaaaggcatttgctatgagcatgtattgatgtcatcaggcatgtaaataaaacatcatccaattctttaatttcccatctagctctggtctcaaaacagagaacagtacaagtcaagttgggtagtgattacattccttaacataacatggtgagaagcagtcccttcacaactttgaaaacatcctttttctacagccatattcttgacagaggattaagaccttatcagttcttaataaaagaagtgacaatatat

SEQ ID NO: 797549 - DNA, 522 bp, Homo sapiens; identical to SEQ ID NO: 766572

SEQ ID NO: 797550 - DNA, 606 bp, Homo sapiens
atagtacctggtacgtagtaagtatttaatggcttaatacgtaactactaaaattactaaacatagttcattgattgccaatgtctctgaatgtcagatacccttagctttttctgcatcaaaatgatcgtgtcatgtctctgttcaaatatctgtattttgtaaaaatagtcaaggwtttagaagggatactcaaaatcaaatgctgttaagcaaaagagatgatgtttaatgttgtttttcaaatagccaaacactgaagtaagtatttgctggtaaatgaagatattttcaacaaaaataaatattttgcttgggctccatcttttttgttagaagtcatccaatattttacattaatctttatcattctaatcccaataatgtttaagatagttttgttcatcactaacacaatattttttcaaatgcaaataataatttaaaacatttgtattttacttgtacaagatcttagatttacagtgaactttttttaatactggcaactcaatgattgcagaaagtactttattattataatcatttttattttgcatggtaaatttgtctctggggtattatggaacttgagatgaaaatgta

SEQ ID NO: 797551 - DNA, 643 bp, Homo sapiens
agtgaagcgtgctcaggactcgtcctgcccactgggcattgggccatgctgaggatggctttcaggagagaggaagaggccccagtcaagcagatgctggacagatgtcagcagcacctaactccacttataaaccagggcagaggcttcctctgggcacctctattgtgtgtgctgaagttttactgttcaagcttttcctgcagccaggaaagaggcagaygagtgagagctcatcctctctgtcctgcccataggggaccagtctgtttaaacacattttattacagagagcagcagtcaccctccagaatccaagggcacacgccagttttccctctatgctccttggtctggcaaagccaaatatcagcctacaaatagccaatgcaggttaggctaccccaaaggcccatgcatgagcccctatctagaaactcaacccagaggaaggattcttcattcatcacaggggttcttaacctgggattcaagagctcctgcaggatcataaatgtgacctggggctcagtaaactccctgaaacgttttgtaaaaatgtgtggagggaggtaatgggaagcaatggtgcatttttataggaataggctacaaatattcatcagatgcttaaaaggttccg

SEQ ID NO: 797552 - DNA, 554 bp, Homo sapiens
agttcagaatcacatgttgcattgagttgacaggtctttttgatctcctttagtttggaacagctcctcagtcttttaacgatgacaggtcagttattttttagtgttcttcaatgtgggcatgtttgatgtttcctcataatgagatttatgttatgtatctttggcaggaatatctcagaagcgatactgtgttctttcatttcattgcatcctattagatggcgtgcaatttcaatttgacccattactaatgatgttcactttaatcacttgattacggaggtgtctgcaggcttccataagatgattctcttttcctttgtwattaacaagaattttatttatttatacgtatttatgaattcatggcttcctattttattcaatgggtttaattctttactatttaacttaatgtccaatttgtctcttatttagctagtagaaatccatcaaatggctcttgtgtccttttgatgtgtttcacatcattctttgagcacttacctgctttctggcacaacaagatattccaggtttatcttgccatt

SEQ ID NO: 797553 - DNA, 557 bp, Homo sapiens
gcttttccacaatcaaagaagtagaaagaaaatgccttttgctgggatttcttgttcagttaaaacttgtgcaggaattccatccattagcaccgagagaaagtggcagaaggtgttaagaaaaatggctggccgggcgyggtggctcacgcctgtaatcccagcactctgggaggccgaggcaggtggatcatgaggtcaggagatcgagaccatcctggctaacaaggtgaaaccctgtctctactaaaaatacaaaaaattagccgggcgcggtggcgggtgcctgtagtcccagctactcgggaggctgaggcaggagaatggcgtgaacccgggaagcggagcttgcagtgagccgagattgcgccactgcagtccgcagtccggcctgggcgacagagcgagactccgtctcaaaaaaaaaaaaaaaaaaaaaaaaaagaaaaatggctgctgggatcatgagcgaaggtaatgagtggcctgagatgttgagccgacaatgtcctcatcatctgctgggggcctctgggcttgctaaggcttgaactcct

SEQ ID NO: 797554 - DNA, 657 bp, Homo sapiens
cccataggggctcagacctgaggctggtaatgaggggtctgcaccctcactcagggcctgctcctccctttcatagaagggtctagaggacctgggggagccctgtccaaagagaggtctctggatccatgttccctggccttgggtgggtttgtaggcaaaccttctttctccttcgctctcagcctctcctcaccctgggagctgcacccatagctctgaatgggactgtccctgcccygccccattcattcctggccaagctcagtggtgaccacggacctctagcagcagctcagctgccctagctgagtccactctgctccaggcagggccatcagctggctcaggatctggagtgtgcacgaggcagaatggcagtggcatcgtcccagggcctagccaggaatcccatgggtccaaggggctcggccatttcctaaacctcatcctggacacgctctactcttcaccttccaccttaactgctgggactcaaggtgctctctctgggaatgcagccttaggaactgggtgggccaaggccctcacagccccctcgtcctgggattcccccaggtttctctcttcttagcctcctccagggacaccccttcccttgacatccttggtgaagtggccatgctactcctctcc

SEQ ID NO: 797555 - DNA, 657 bp, Homo sapiens
cccataggggctcagacctgaggctggtaatgaggggtctgcaccctcactcagggcctgctcctccctttcatagaagggtctagaggacctgggggagccctgtccaaagagaggtctctggatccatgttccctggccttgggtgggtttgtaggcaaaccttctttctccttcgctctcagcctctcctcaccctgggagctgcacccatagctctgaatgggactgtccctgccctgccccattcattcctggccaagctcagtggtgaccacggacctctagcagcagctcagctgccctagctgagtccactctgctccaggcagggccatcagctggctcaggatctggagtgtgcacgaggcagaatggcagtggcatcgtcccagggcctagccaggaatyccatgggtccaaggggctcggccatttcctaaacctcatcctggacacgctctactcttcaccttccaccttaactgctgggactcaaggtgctctctctgggaatgcagccttaggaactgggtgggccaaggccctcacagccccctcgtcctgggattcccccaggtttctctcttcttagcctcctccagggacaccccttcccttgacatccttggtgaagtggccatgctactcctctcc

SEQ ID NO: 797556 - DNA, 603 bp, Homo sapiens
aatcgcgaggcgcggaaggatcgcggggctggcggccgctgccattgtagaccaggagcgcccgggacacaaggcgcagtcgatgtggagaccagcgtatgaatcacttcggccctcgcatgccagctagtgattgagtgtgctcggccccgtccsgtcccgtcccgccccgggatccaggggagcctacgcctgcccacgtttggagggatgctccgccctatcccgccccgtcccgcccttccccgccccaccccaggctgggacccggggagcctatgcctgctgtggctccgcttcgtcccgccccgggctcgtggcctgacagcggccccctctggccaacccttaccctccaccccaggctccgcgcgggccaggacacgattccttcttgaccgcctcatttaattttttaacacaccatttattattaccccaatgtaagcactgatgcacaggaaagcgaagaaacttgcacagggatatccagtggcggctgtgtccccccgtcactgcctccgccagcgacacctgccctccttcagcctgcgccaaggagtccccgcccctctccgtccagggcgcagctgcttcccagtc

SEQ ID NO: 797557 - DNA, 618 bp, Homo sapiens
cttctgtccactaggtactactatttgtctcacaccgttttaggaagtggagatactgaggtgaacactgacatcctgtcctcatgaaatttgccttctgtcgggagagtaagacaatgaacaaaggcatatatagtttccaagctgtcataagagcgagaaagagaaataaagagggcaggaacatagagggtgcagggagaagatctgtggagggaacatttgagcagagaccagatcccacacaggtttggtgggtgatatgatagagccaggggtggtggccaataagaagcatgagggggacacctccctaaaactagggacgtcagggagagctttgtcagggaggtaaggagcacgttcagcctgggcagatgggtgtcttagtccctttgtgctgctataagaaaataccacaaactgggtgatttgtgaagaacagacatttatttccytatggttctggaggttgggaagtccaatgtcaaggtgctggcattttctgtcttgtgagggccttctcgctgtgtcctcatgaggcagaaaggatgaaagggcaaaaggggagaggcagctcctttgtgcctctttaacaagggcaccaatccacttatg

SEQ ID NO: 797558 - DNA, 588 bp, Homo sapiens
tggaatgaagcttagggatgcctattgctgaaggccagggttgggggtaggagatgctgttcctgaaatctgctcccagagtaatgggatgaacaattctgaaattccaaattccaggtggaggctgtcaactgtcaggagcaaggagggtgcaatgatggaaatgattagagaagtcacaatgccagctggggacctcagttatacaaagttatgcccatggctcatagaacaaaggggtccaargtccaaaagagatggaaacccaccccggatactgctggatttaaataattacaagaaacagagataaaccaaatcaggaggctgaaagtagccagtccatcaagaacgaggctgctttgcctaatttgcagaatgaagccacttctcagaccctgaacccatgactataagaagacaccagtttctagtgaggaaggaccctttaaccctgcagccaggacagtgagtccttgtggccttctccagagatatttatggccaatagagtttgctgtgaagggcaattttgtaaacatgtaaaggtgttcagggaatatattctccattgtaactactcaactc

SEQ ID NO: 797559 - DNA, 627 bp, Homo sapiens
cagctgtggttagatttgctgttggaaggagaagtatattgtggatgataagaacatttctttctctctttcttttttcacagtacttccagtcctttattgaacaatttgcaggggaagagcagaaatcacatttgagcttaaccctggaatatgtaattgttaatttcccttgatcagagatgggctaggaaatggggagctacccacatagacttttaaataacatttgtatagcagaaccttgtttctgatctggctgctgagaattttaggtgagaatggttaaagttattctcctttaaaatgttatgtattgtgtatctccagacctgttgatagctatatgattatttatatcaatcattcttacctttgctactatttggatrtattatgcagttgctgcttcttcctaaattgaatgtaagctaccagtaattctaattctctagctgcagagtacatgtttggctctaaaactaaagtgttgtattagtgggatgaaaaaaaagaaagagatgagaaaaatgaaacagactgcaatgccaagctcttttttaaaagtaatatttaattactctttcaggctgctgttaagagtgtatatgacatctaaacagattg

SEQ ID NO: 797560 - DNA, 569 bp, Homo sapiens
ggcttctgcctattttattctatttcctttattttagtggcatttcaagggagggcagggccagcctgccatgttgcctggcagtcccctgcggtttcagggtcagctgccctctcagcccagtggccaggccccgcgtcaggcctgagactagcgtggactgcgcagggatgtgggggaggggcttttgtgttaaccaccagttcccttgaacttcctgcctgcctgctttctgctttgcagcgttgtgcctgcaccaaagcctggaggtgtgtcagggaggctcgcaggggaggttcttgcccatatgtgcaggaatgacactggctgataagaaacatacttttttattactctttaagcaaaactttcaatagtcaaaatccccctcccctcgcctctctttctctcttgtgtttctataataacttcaytggatctgggcatctggattataggtgttcattgaaaacctcaaaataacagggtctgtttcccttctcctgggaaggccccatgtgaactccacagcccgtcttctaggatcccagtccctcattctctgcttg

SEQ ID NO: 797561 - DNA, 650 bp, Homo sapiens
aagagaacatcttggaaatatctatttagaaaaggtcaatgagaagaaacaaaataaaatgtagctgggagctcgcttgacctcttcgcctggtgtgaagaagcctcaccaacttagagaaattcacattctccctggttactcagcatcggcattggagatggtgaataatgcagtggaatccttccacgcagaggctgcactcctggcatagggtcggccatgccactaacagctgggagtgaatctctgcagccactgaaaataggsatttgtaatggaaatgctgacagacccttaaccatggcagtgctagcaagagctgcgataatacagtaaataaggtgaatgggctcggcttatctcatttcacagctgagctgtgtattgccagataaatcaaatcagggtaaacggcttcatctaataaactgggtcaacatataatgtatttgttcaggttcgcgctttcattgattctcatttgatttaagaagagatatttcagctcatgtttgaacatttttactattcatccttccttctggtaaggagagactgagaggcagggacacacagctgggattttttttttcctttaaattaattaagttttctgattcttgtaagttcttctgcttttcatcttt

SEQ ID NO: 797562 - DNA, 656 bp, Homo sapiens
tagggagagaattcttgaaatttcacacaggaactactcaccatcttcctgctatcaaatatatgaatatgcctacatctttatcaaccatgtcctccttctcacttgttaaaatagaaattctatctgttctttaaatccagtctcttcctgggtgcttacgattcgatttgcctctattttccaggaatttgacagagccccttctctctattttgtatttgacccctcctttcaatttttcttttttatttattacttatyaattttttttttgagatggagtctcgctctgttgcccaggctggagtgcaatggtgcaatctcagctcactggaacctctgcctcctgggttcaagcaattctcccgccgcagcctcccgagttgctgggattacagccacccgccatcatgtctggctaatttttgtatttttgtagagctggggtttcaccatgttggccaggctggtcttgatctcttgacctcaggtgatccacccgcctcagcctcccaaagtgttgggattacagttgtgagctaccacgccaagcctcaatttttctttttttaatagactttattttttagagcagttttaaggtcacagaaaatttgaatggaagccacagagaatttttatgaaccctgttc

SEQ ID NO: 797563 - DNA, 538 bp, Homo sapiens
tctgtcccaaaatcttgggagaaagctacgaaataatatggtggagagactctgtggatgtaaagaaggagtcaatgtggagaaacccgcagccagaaagcagattgtcatctgaacaagaaaattcgtactggagtaaaaccatgcaaggcagtgtgtgtggaaaagtctttgtacatcattcattccttcataggcacatgagctcactctggacacaaacaatatgagtgtggtggggaatatggwgaaaagccccataaacataaacaatgtgggagagcctccatttctcccagaagtggtccaagactcatggtaatatgcactagaaagggatgttataaatgcaagctatgaggcaaagcccttaatttcagtatttatttcacaatgaactcacactggaaagaggttctataaatgtagagaaattgtgagagccttcactgttttcatttactttcaaatacatgaaaacattcacactggagaaaaatgctgtgaatgtaaacactgtggaaaaacatttgattgt

SEQ ID NO: 797564 - DNA, 551 bp, Homo sapiens
aaaggatttgaatgttgagaactttaaggttttttcttaaaacttcattacattaacttcatatccttttattatggcactgagattttctcagtagggagcacatcgtaatattcgtctcattaaactatgtgtagtgcctgctgagaagtagattgggacttgaaaatgtttatcaccataggaaacaacagaaaagtattttaaaacacagacgcttctctaagaattctgtttgggataatactactctgtttcagaattcttaaaaacaggttggcataatattctaataactgaattaattttattggcccttatctttgtatttagtaaagcaggtggttgtcaatcatttttccactcagttacctccctttgtgggtgtgtgggtggccataggatrgagaatgggaatgaatgtgtagtctttttaaagggccacttagtgattcttatactacatcctacctctaccctaaattgaaaatattgccatagtgatcaaaaggtattaatggaagtgtaatatccccttggtcattgggcag

SEQ ID NO: 797565 - DNA, 625 bp, Homo sapiens
ctttatggtggaatgatttatattcctctgggtatatacccagtaatgggattgctgggtcaaatggtagttctgtttttagctctttgaggaattgccacactgctttccacaatggttgaactaattaacactcccaccagcaatgtataagtgttccctyttctctgtaacctcactagcatttgttgttttttgactttttaataattgccattctgactggtgtgagatggtatctcattgtggttttgacttgcatttctctcatgatcagtgatattgacctttctttcgtatgctggttcactgcatgtatgtcttctttggaaaagtgtctgttcatgtcctttgtccactttttaatggggttgtttttgtcctgtacatttaagttccttatagatgctggatattagatctttgtcagatgcatagtttgcaagaattttctcccattctgtaggttgcttgttcactctaatgatagtttcttttgctgtgcagaagctctttagcttaattagatcccacttgtcaattttggcttttgtcgtgattgtttttggtgtccttgtcatggaacctttgcccattcctgtgtcctgaatggtattgcctaggt

SEQ ID NO: 797566 - DNA, 635 bp, Homo sapiens
gtcttaccatgttttagtgccttacatatatatttttaaatagttacataacatcaatttttgaaatttcagtgatcagttgatcttatatcaatggtgctgctaaggtagataatatgatctttatttaatatttgagaaactcaaagcttgaagaaattaagtgattttatctagtgtcaaacctttgttatatcttctgtatgttcaaagaacatagggaatttttatattaccttgatctgaaaaatagtgttcagagaaggacactaataaatagttacctttataattacatagaaaaatgaacaattagaggatactatatccagttaagctcaacttgaaaattcatatgtagcattcttacttamaaataagttagtagtggtgtatttcaagtgatcactaatgaaagcagtattaatttgttattatgtttggcttcattttgttatttctttttaagtttttagaaacttatttaacatggctttccttgggaaataccaatatatggtcagcatgaatatatattcttttataaaatatgcttccagaatctcttaattggttttctcagtgtatgagtggtagtggaaagaaccctgtactatttaatagggagtaaacca

SEQ ID NO: 797567 - DNA, 585 bp, Homo sapiens
catgctgtgtacaaaccatccctagaaatgaactgtctggagtattttatttcttaattaatccagttttgctatttggtataaacaggatgatgttcaggctgaatgaaagaacaggaaagtttaggggatacaattcaaggaggagtttcaactccctccacatctgctgctctattttgctttaaattagattttaaaattaatttaatttttcatttgaaactgctgcrccctccaccatctctctttcttttcttccagtaactggtcctcctctctgtggccctggtacttcccagagcaaacactgcatcatctgacagttctttttccatcattttttttttcattacttagccagactggtaatttattagtaagaagaagatggtatcagctgacaggactaggcttatgggcatatgagaaagacaaagatctctctcgccaattatagaaattccaagttgtgatccacttctttctagcaagcaccaccctcttttaacatgaaaagactcaaaacacaacagtagataatttgacacgtcaccttaacttctgcatctggaaaactgagac

SEQ ID NO: 797568 - DNA, 585 bp, Homo sapiens
catgctgtgtacaaaccatccctagaaatgaactgtctggagtattttatttcttaattaatccagttttgctatttggtataaacaggatgatgttcaggctgaatgaaagaacaggaaagtttaggggatacaattcaaggaggagtttcaactccctccacatctgctgctctattttgctttaaattagattttaaaattaatttaatttttcatttgaaactgctgcacyctccaccatctctctttcttttcttccagtaactggtcctcctctctgtggccctggtacttcccagagcaaacactgcatcatctgacagttctttttccatcattttttttttcattacttagccagactggtaatttattagtaagaagaagatggtatcagctgacaggactaggcttatgggcatatgagaaagacaaagatctctctcgccaattatagaaattccaagttgtgatccacttctttctagcaagcaccaccctcttttaacatgaaaagactcaaaacacaacagtagataatttgacacgtcaccttaacttctgcatctggaaaactgagac

SEQ ID NO: 797569 - DNA, 635 bp, Homo sapiens
attcctaaataaataaaaaaccacgtttactgtctcttatccgggagcatggaagacaaagtgagcaattttagcagaattctacagatccaagtagatctgtgcaacaaacctgcatttggggggctcctggttaatggaaccatctgtatttaattgcttactgtagcatctctctgaaacagtggtttccaatctttctcaggtcacaggctctcctcctcctcttttgagaatctgattaaacttttgtatcttcattcctgaaaaatacacatatacgcacaccccctgagaccccagtcatgggcccctgggtcaataatcactcatctgacaccatgccaaaaatttgttgtgtttatatgttctttggtgtgcactctaraaatgtaccagaattgtgctgtttatgttaaaacatgtgcacatactacctacatatgtgaatgacattttctctactgaatgattacatgaaataatgtgtatgaagatatatcctaaaaagtcaaatgtgagaatgtcaacattgttcttcttatttgcactggccatttaaacattcaacactaaagctgctgggtgacgttgcagctggtaagttatggaaactgctcttaaatatgatcttt

SEQ ID NO: 797570 - DNA, 640 bp, Homo sapiens
aacatcccaatttacatcactttggaaaggaagttcctagtaggttacatgaatagcattagtctttggagctacttgaggatttcagtgagttgatgaactgtgctagaaccattagaaccatgatttagtagccagtaaatttgatgcccaatgccaagtaatgtccatggataagacaagaartgtattctagtaagcataaaatgttactgtgggacgatagaaccctaggtttgttttgggaaatttctgtctatttcatcttttatgactgtcatctctacctggatgtctgctatgacctcagtactacgtgtccaaaatctaattaatcttcttcttcatcagacatcccccatatcccaaataacaaataaaccaaaaacctagtttcttgtctcaatctagcatttctgtctgaccctatcttaaatgaaatcttttagaatagaacatttgaattaaaatttcctcttttttcttttaagtatttacacttctttctttgaaatatcttttagattttccttttccatttccccaagtaggaatcaatgtagaccttatttttgcaaagtttcctttcaggctcttctattcagtatcctgcttagtgatatggtagactaataaaata

SEQ ID NO: 797571 - DNA, 620 bp, Homo sapiens
acatgggcaatgcccctgtaccatgctgacctacagtaccaccgaaggcaaacagcgtataaggtggttggggaaaactagctagatctccagcatgttgggagaataagagaaggaaaagagccctccccaagagctgcctatgactgatcttctcttctggtttccaccctgtaaattggatccccactccscacccccaactctatctctggaaggccccatgctgcaatcagagcaaggtcagagttgatcatggaggttgggggtgtgtaggcagagcccggatatgctctcggcgggtgtggccaaggggatccacccttgagcctcagagtcctgtccatctgcatttgagtcacaccactctgccactttttagctgtgtgtgtcctggggcagctcacttaaccttctccacctcattttctttacctgtgaaaggggtactaaaacttactttgtaaggttgttgttaagaactagaaacaatgtctcaatacaagggactgttactctgtctagggcagaagcatctgccaggtgtccttaaagatgctgaatacctgtgggttctcactccgaaggcaaaccaggaaaacttcatgacccctttctca

SEQ ID NO: 797572 - DNA, 620 bp, Homo sapiens
acatgggcaatgcccctgtaccatgctgacctacagtaccaccgaaggcaaacagcgtataaggtggttggggaaaactagctagatctccagcatgttgggagaataagagaaggaaaagagccctccccaagagctgcctatgactgatcttctcttctggtttccaccctgtaaattggatccccactccgcacccccaactctatctctggaaggccccatgctscaatcagagcaaggtcagagttgatcatggaggttgggggtgtgtaggcagagcccggatatgctctcggcgggtgtggccaaggggatccacccttgagcctcagagtcctgtccatctgcatttgagtcacaccactctgccactttttagctgtgtgtgtcctggggcagctcacttaaccttctccacctcattttctttacctgtgaaaggggtactaaaacttactttgtaaggttgttgttaagaactagaaacaatgtctcaatacaagggactgttactctgtctagggcagaagcatctgccaggtgtccttaaagatgctgaatacctgtgggttctcactccgaaggcaaaccaggaaaacttcatgacccctttctca

SEQ ID NO: 797573 - DNA, 621 bp, Homo sapiens
ctgttggatcacgggatctgtctgagcatcagtttccttttctgaaaagtagggatgataacagcctaggacggtgggtgaatcagtgaggtaatgcacaggaacacgcatagtaaatagtttttgccagagtgggtggttatgagtatttagagtggcctgagcctcccaattgaaatatcctggccttttgtcaagtcctaagagaggatgtgtgggggaagctacagactaatgaagaggtgaccggatcgtcagagggtgcagacatgcttagcaagctggtggtgcgactcagggctagctgcccctggtcacgctccccctgtgcatccgcggcagcaggaaacatttgtcctcaggaaacagcccctcraagagcgtccggacgccgggacccagcctggatggcagagggggcgttaactcgtcccacaggtgccactgacccaacacgattttttttctggtgtatctttctgggagatgtatctttctgggagatgttggacctgggcccagagaaaagcatacgagaccacaatccccaagacactgcttggtggggtaccccacatgtctgcttcaagtgccacaggtacagcaaggaaagcctgcagg

SEQ ID NO: 797574 - DNA, 621 bp, Homo sapiens
ctgttggatcacgggatctgtctgagcatcagtttccttttctgaaaagtagggatgataacagcctaggacggtgggtgaatcagtgaggtaatgcacaggaacacgcatagtaaatagtttttgccagagtgggtggttatgagtatttagagtggcctgagcctcccaattgaaatatcctggccttttgtcaagtcctaagagaggatgtgtgggggaagctacagactaatgaagaggtgaccggatcgtcagagggtgcagacatgcttagcaagctggtggtgcgactcagggctagctgcccctggtcacgctccccctgtgcatccgcggcagcaggaaacatttgtcctcaggaaacagcccctcaaagagcgtcyggacgccgggacccagcctggatggcagagggggcgttaactcgtcccacaggtgccactgacccaacacgattttttttctggtgtatctttctgggagatgtatctttctgggagatgttggacctgggcccagagaaaagcatacgagaccacaatccccaagacactgcttggtggggtaccccacatgtctgcttcaagtgccacaggtacagcaaggaaagcctgcagg

SEQ ID NO: 797575 - DNA, 626 bp, Homo sapiens; identical to SEQ ID NO: 782450

SEQ ID NO: 797576 - DNA, 611 bp, Homo sapiens
accttgttggccaggctggttagaactcctgaccttgtgatctgcctgcttcagcctcccaaagtgctgggattacaggcatgagccattgcacctggcctatttattttattgtttctaatttttttgcgattacaaaccgtgctgctatggaaattcttgtaaagatcttattgtgtacatttgtgtttctccagtagtctacccaggagtgaaaytgatggccgcagagcctggacactttaactttaccatattcatcctaacactggtattgtcagaccctttttttggacaaccagatggatgtgaaattgtagattatcatgattttaatttgtatttcaccaactattaataggattgagcatcttttcataagtttgttcagattagaattgccttctattcctatttcctaatctttttccaattatattgttggttattttctcttggatatataataattctatagtgtggccaattgccctttttctgttacatgtttttctcttatcctttccaaactggtggcttctgtctcagcacctttttaatagctttattaaggtataattaacatagcctaaaattcacccatggtaaag

SEQ ID NO: 797577 - DNA, 611 bp, Homo sapiens
accttgttggccaggctggttagaactcctgaccttgtgatctgcctgcttcagcctcccaaagtgctgggattacaggcatgagccattgcacctggcctatttattttattgtttctaatttttttgcgattacaaaccgtgctgctatggaaattcttgtaaagatcttattgtgtacatttgtgtttctccagtagtctacccaggagtgaaactgatggccgcagagcctggacactttaactttaccatattcatcctaacactggtattgtcagaccctttktttggacaaccagatggatgtgaaattgtagattatcatgattttaatttgtatttcaccaactattaataggattgagcatcttttcataagtttgttcagattagaattgccttctattcctatttcctaatctttttccaattatattgttggttattttctcttggatatataataattctatagtgtggccaattgccctttttctgttacatgtttttctcttatcctttccaaactggtggcttctgtctcagcacctttttaatagctttattaaggtataattaacatagcctaaaattcacccatggtaaag

SEQ ID NO: 797578 - DNA, 504 bp, Homo sapiens
tgtccagagggctgagttccctctggggtttctatggaagaatcccttttcttgccttttccagctcctagaggctgtacgcttggctcacggctgtctcttccatcttcagagtaggttgggtcattctcgtatcacattactgtgacctacccttcggcagtctcttccacattkaagaacccctgtgattacattagatgtacctggatgatccaggataatctccatattttagggtcagctgattagcaaccttattccatctgctaccttaattcccctatgctgtgtaacctaacatattcacaggttctggggattagcacgtagacatctttggagggccattatttttcctaccgcgtgcacctataagattaaaaaaacaaaaatgaaaggctctctcctaacataatgtgaatggctacttgaggcctgggataaatcccctctgacagtgccatgtgtcaagcaacacatattaccaggaagttaatctac

SEQ ID NO: 797579 - DNA, 564 bp, Homo sapiens
tctattttaaaatgtgaaggtgaaatgtcaaatgaatgaaaaaatagctgaaagagttgaaagggttaaaaccaaaggattgattatttttgaattaacctttcaacattgtttgactttttaacttgggtgtaagttaaaagaagtacatgtcaataagtcttagttcaaagtgcaaaaggattatatcttcctaagaggagaaagaaagaggtgggaagagctaccgacagattcagcagcagagacaaaggtataggcaaatatattttgaggtgagaggctgactggggttgaggcaaatgacaggaaacttaaaactaatratttatattttcttgtataataaaagattaagtcaactgctgaaagtaagcaagctgagtgagtatgaagaaagcaaaagagcctatagtgaatttcctgaatagtcaacaaaagggtattgaagcatcactgaacagcaggattgaagctgcacagcatgccttgttgaagtaactgtctatataaaccatatttatttcaaatactttaaacaatatttcaagttgtctatgtgct

SEQ ID NO: 797580 - DNA, 707 bp, Homo sapiens
tgaagtaactgtctatataaaccatatttatttcaaatactttaaacaatatttcaagttgtctatgtgctggtgtttaaaactcacagttttaggacctatttctaacttagataacaaaacagctatacttttctttcacataatacaaaggcaaatttgctgtttctttgaatacggtcagtctcttttgttgattaaggactaaggtcaacggttcagaatttggatggcccaattagcatttgttgagctcattctcacagattgccattcttgctgaccgcaggcttgaaattggtgtcctgagtcatcagggccactggttggaataatatgtgaattaattaatcagactgtatcactagcatagaaaatagcayaaaacacatccctctgcaaatgtgactaataaaacttgggtgttagggtctgaacccctgaccaagtgtcagcagagctgtctacaaatcctcacccctatggtattgatattgtgcctgtgccatttttgtcatctctccctaaagagagacgctgaagatcttattttttcagcaagaacctcctatgtggcccagcgtttcgatctttataatttccttcctaacctgtggatcttgttgattctggcttggtgaggagtttcttcttcctcttgtctgctatcctcatctcctaaaccttggcccttcattcatttctct

SEQ ID NO: 797581 - DNA, 612 bp, Homo sapiens
tgcagggaaacagccctttataaaaccatcagatgtaagacttattcactatcactagaaaagcatgggaaaaacccacccccatgatttgattacctcccaccaggcccctcccacaacacatggggattatgggagctacaattcaagatgtgatttgggtgaggacacagccaaaccatatcattctgccccggcccctcccaaatctcatatcttcacatttcaaaactaatcatgccttcccaacagtcccycaaagtcttaactcatttcagcattagctcagaagttcacagtccaaagtctcatctgagacaaggcaagtcccttccactcatgagcctgtaaaatcaaaagcaagttagttacttcctagatacaatggaggtacaggcattgggtaaatacacccattccaaatgggagaaactgaccaaaatgaaggggctacaagccccatgcaagtctgaaatctgatgggggtcattaaaccttaaagttccaaaatcatctcctttgactccatgtctctcatccaggtcaaactgatgtaaaatggtggctcccacagccttggacaactctgcccttgtggctttgcagggtaca

SEQ ID NO: 797582 - DNA, 629 bp, Homo sapiens
aataaattatcagggaacttgcaggttaatacatgaacactgtcaattctgaaaaagaaagagaaaatagattgaaaagagattgacttgtgggacaagatgaaaaagtctatacacatgtagctggagttccagacagagaaaaaggagaatatagggcagaaaatattatttggaatacatgacttaaactttcccaaatttaaacttacagaccyacgtaactcagtaaacccaagaaaaataaagacaaagacattcacaccttggcatgtcataggcaagctgttgaaaattgaagataaagagaaaatatttgaaatgggagaaaaaaacaactaataacagtgagaaaccacattaactacagggaagcaacaacatgaataatgactcacatcagaatgattcacatcagaattaatggagggagaatactttgaaaaaaacttctttaaagttcaggggaataaaaacaaccttcaacccagaattctgtacctagcaaaaatttcattcaaaaatgatgatgaaatacagactttttcaggtgaatgaaaatagaatcagtcaccagcagattcacattataaggaatagcaaaaaaagttattcaggctgaaaaaaat

SEQ ID NO: 797583 - DNA, 629 bp, Homo sapiens
aataaattatcagggaacttgcaggttaatacatgaacactgtcaattctgaaaaagaaagagaaaatagattgaaaagagattgacttgtgggacaagatgaaaaagtctatacacatgtagctggagttccagacagagaaaaaggagaatatagggcagaaaatattatttggaatacatgacttaaactttcccaaatttaaacttacagacccaygtaactcagtaaacccaagaaaaataaagacaaagacattcacaccttggcatgtcataggcaagctgttgaaaattgaagataaagagaaaatatttgaaatgggagaaaaaaacaactaataacagtgagaaaccacattaactacagggaagcaacaacatgaataatgactcacatcagaatgattcacatcagaattaatggagggagaatactttgaaaaaaacttctttaaagttcaggggaataaaaacaaccttcaacccagaattctgtacctagcaaaaatttcattcaaaaatgatgatgaaatacagactttttcaggtgaatgaaaatagaatcagtcaccagcagattcacattataaggaatagcaaaaaaagttattcaggctgaaaaaaat

SEQ ID NO: 797584 - DNA, 559 bp, Homo sapiens
acaataaatttctattattaaagccacccaatctgtggggttctctgttgcagcagctctaatgatctaatacaccatctttagaggtgtctgctgaggctgcgctgctacttggcagggatattgtccagtagagacattatgctagccacgtatataattcaaaattttctagccrggcatggtggcgtgcacctgtagtcccagctacataggaggctgaggcgggaggataacttgagcccaggggttcaaggccagctttggaaacatagggtgaccttgtctctaaaaaagaaaaacaaataataagtaaaataaaaatgtctagtagctacatttaaaaagcaaaaagaaacagatgaaattacagttgacccttgaacaatgaggggattaggggtgccaacccctatgaggtcaaaaatccaagtataactttgactcccccaaaacttgactataactagcctgctattgaccagaagccttgccattaaaaaagaaaatgttattaagaaaattataaggaagagaaaatatatttactcttcattaa

SEQ ID NO: 797585 - DNA, 571 bp, Homo sapiens
cagctactccagaagctgaggcaggagaatcacttgaacctgggaggtggaggttgcagtgagctgagatcgcgccactgaatgctgtgtcacaatatacagaaacaagacaacctgaagctaaatgtatgccctctgcagaggcaacaggtccagcctcacagtgcatgccctgagctatggcccttccaaaaggcamcttccccacagcctcaaccccaagcaaagagcttcaagagtttgtcttggtcgttttgttctttttacaaactatagatatatacagttgataacttaggtttccagccaattaccatatagttaagaccaccttacaaattaaaaaaaaaaaaatgccagaaacatctttaaatgccttgtcacaccaaccgcaaagtgcacagagtgaggagaacatgagagtgccttttcattttaaaaatgtttggaaatatgtacaactttgatacagtttcagggtgctctggacacccatggccacttcatgtaaaccaccgacaatttctagagcactttgagagactacaatatgatcgtgatcaaattttgt

SEQ ID NO: 797586 - DNA, 566 bp, Homo sapiens
atttttttatttcaattttatttatttgtgttctgatctttatgatttcttttcttctgctaattttgggtttggtttgctcttgcttttatagtctttgaagctgcattgttagattgttcatttgaagcttttcctctttttcratgtaggcacttttagctataaacttccctcttagtattgcttttgctgtatcccataggttttgttatgttgtttttccattattatttgtttcaagaagttttttcattccttttttctttttctttctctctttcctttctttctttttttcttttcttttcttttcttttcttttcttttcttttttttttttttttttttgagatagggtctggctctgccacccaggctggagtgtggtggtgtgatctcgactcactgcaaccttaacatcccacctcagccccctgggaatacaggaggaaatacaggcatgtgccatcacacccagctaagttttgtattttttgtagtgacagggttttgtcatgttgcccaggctggtcttgaactcctgagctcaaggaattggccca

SEQ ID NO: 797587 - DNA, 602 bp, Homo sapiens
cttgcacaagttgctcacccctttgggatttgttgcctcatctgtgaaatgagtggaccgcactaggtaaccggttccctatctgggatctgcagataggctttagggaatctaagaatccctaaaactgtaggtaaaatttggtagacttgagtagrcattgttctgggggaggttccataactctcattcaattctcaaaggcaaccaagaccccaaaaatgttaggaacacctgccctgggtgatgtccaccagcccacagctttcagaagcctcatccgaggtgctcttaccataaagatgaagagacacaagcttccgttgcccaagagagcagggagactctgggagtgttctaggcagggaaaggaaggcaggtgacaaacaggaagcattgctgtgtgcgcatttctggtaaactgcctacatagattgctgaaggaaggggccaatctgtagggtgtcagcaatttgctgtgattccccaccccctcctcctaggtaaatacccacttttgtacttaattttgttttcatacttttgtattctttttattaaggagtgtcccaaattgtaagtctttgggccccacacaacat

SEQ ID NO: 797588 - DNA, 587 bp, Homo sapiens
gccatgtcaggtggtgtccagctgagatgtaagagttctgtgactaaagatagaggacggggtggttattgaagaactaacagcatcggaaacaattcctactatgaaagacgagtttatggccgggtgtggtggcttacacctgtaatgcccatacctgtaatcccagcactttgggaggccaaggctggcagatcacttgagcctagaagttcaagaccaggctgggcaacatgggaaaacgtcatctctacaaaaaatacaaaaaattasctgggcttggtggcaggtgcctgtagtcccagctacttgggaggctgaagtgggaggatcatctgagcccaggagattgaggctgcagtgagctgtgattgcaccactgcactccagcctgggcatcaaagcaagaccctgtcaaaaaaaaaaaaaaaaaaaaaaaaaggaaaggaaaaagaaaaagaaagaaaagagatgaacttagcaaaggtaacttccctccagagtttggttagatacaaatatttccagctgttttttcttgtgccattaatttcatgcactatctgttaactccccactgtgtaaga

SEQ ID NO: 797589 - DNA, 514 bp, Homo sapiens
gattatgtgggatcattgataaataaatacaggagaaatgaaatgacttgatcaggctcaagaaaagaccattcatggatgacttaaaaaataatctcaacttttattttagatttaggggagtacattcgcaggtttgttagatgggcatattgtgtgatgctggggtttggagtatggatgatcccattacccaggtagtgagcatagtacccagtaggtagttttacagctcacarcaccccttttctacctcctcgagtagccctcagtgtctattgtaaggatgacttttttatttcaaccttgacacgctcaagttgcccttgtgtgtccccacccctgagggtggtcaggcaggaagtaggtctgccagtcagtgctatgagctgaggggaagaatactaatgttaagacgctgaccaggcatggtggctcacacctgtaatcccagcactttggaaggccaagacaggcggatcacgaggtcaggagattgagaccatcctggcta

SEQ ID NO: 797590 - DNA, 703 bp, Homo sapiens
cgtggaggagctatgtttgccctccagctgcccatcactagaaatgtaactgaggctgtcttagatcattctctccagtcaaccaagctgactacagctgcaggagtgagcccaggccagaccaactaaagctcctctcagttgagccaagcccacagattgtgagctaatttaagccactatgttttaaggtggcgttttatgcaataaaagttaactgatatattacctcacagcattgccacgagcactaaatgagacagtatacataaaagtatgtaaaacggggtctgacacaataaaagacagttattactaaattattagctcattacacacacactatgaacctgtctaacttggctattcactactacctgaactcattctgttctttcttacctctgcactttgcgtatgaattttaaaactgggggaatacacttccctctctccctccaatttatctaawcctacccataattcaagcctcatctcaaatggctgcttctttataaaacctttcttaaatcactaactagataaaagatagttctttaaagccagaactggatctgaatattgacttttcattatcatttaatcaactatacaaacatagttaatttttttttttttttttttactttcctgaaccctaccttccacccctttaaaaggagttgttgtgaggatttaatga

SEQ ID NO: 797591 - DNA, 628 bp, Homo sapiens
tgttggattgcagcatcacttttattaggttaccagttaagcaccaagtcgaataccatccccagactgctcaaaggacagggcagtgaccaacacatgctatgatcctccagagctcatgcatgggactgggggtccattataatggaaagaagagcttgcctttttcacaaagccaaccctcrtagctacactccactgccctcacagccgaacttcttcacacttgctatgtttattttttctacttagctcacactcaccaagtgagcgacacaggaccaagtcatggaaggctttgtaaacatggagacgtgtttttattacactccttaagatacactttttttattttaaaagacaccaaaatataccattttctttttttctggacagtagtgctacactgtctttatcccacccactctactttaaaaactgatgagagagaacataagcaaattttttatgagtacatcactttttattgaagtatatcatatttataagtctagaaggaataagtcatgtcttgataaattatcagaaatggatcacacacatgtaatcagcaccaagatcagaaatatcagactcccaaaagttgcccatataggtacatttgtct

SEQ ID NO: 797592 - DNA, 628 bp, Homo sapiens
tgttggattgcagcatcacttttattaggttaccagttaagcaccaagtcgaataccatccccagactgctcaaaggacagggcagtgaccaacacatgctatgatcctccagagctcatgcatgggactgggggtccattataatggaaagaagagcttgcctttttcacaaagccaaccctcgtagctacactccactgccctcacagccgaacttcttcacacttgctatgtttattttttctacttagctcacactcaccaagygagcgacacaggaccaagtcatggaaggctttgtaaacatggagacgtgtttttattacactccttaagatacactttttttattttaaaagacaccaaaatataccattttctttttttctggacagtagtgctacactgtctttatcccacccactctactttaaaaactgatgagagagaacataagcaaattttttatgagtacatcactttttattgaagtatatcatatttataagtctagaaggaataagtcatgtcttgataaattatcagaaatggatcacacacatgtaatcagcaccaagatcagaaatatcagactcccaaaagttgcccatataggtacatttgtct

SEQ ID NO: 797593 - DNA, 669 bp, Homo sapiens
gctgtagaaacatctcttcaaggccctgtttccatttctttgggtatatactcagaagtggaattactggattatatggtaagtctgtgtttaattttttgcagaatcatcatactgttttccatagtggctgtagcattttacattgccaccaacaatgtgtaagactttcaatttctccacatcctcaccarcactttttattttctggttttgtggttaatagtagtcatcctaatggtgtgaagtggtatttcattgcggttttgatttgcatttctataatgattagtggtgttgagaatctttctatgtgcctgtcggtttcttctgtgtcttctttggagaaatggctattcaagcctcttgcttattttgaatcagagtttgttgttgttgttgagttttaagttatctgcatatataacttgcaaatactttcctccattccatgggctaggttgcttttttatcctgtggacagtgtgttttgatgtgcaaatttaaaattttttttatgaagtacaatttctctatttttatcttttcttgtctgtgtctttggtatcatttgaccaagaaatcattgccaaacccaatgttgtgaaactttagtccataggattttttaaattcatgtaaaccatcagcgtaatttttattacactc

SEQ ID NO: 797594 - DNA, 665 bp, Homo sapiens
acatgtctgtgctgatgctggtgtaaacagactgtgctgccaaggctataaaagtctagcacatacaattacttacagaacataatagatgataatgataagaagtgactatattagtggtttatatatttactactctattctttttttgtttatttatttatttatttatttatttattttcaggttggagttgcaatggcgtgatttcrgctcactacaacctccacctgctgggttcaagcaattcttctgcctcagcttcccgagtagctgggattacaggtgctcgccaccatgcctggctgatttttgtatttttagtagagatggggtttcaccatgttggccaggctggtcttgaactcctgccctcaagtgatccacccgccttggcctcccgaagtgctgggattacaggggtgagccaccacgcccagccctggttatcactttttgagaatgtactacttattaaaaaataaataaataaactgaacagtagagcaacttcaggcatgtccctcaggaggtgtccagaaagaaggattgttatcataggagatgacagcttcatgcgtgttgttgctccaaagagcttccagcgggacaggatatgaaggtggaagacaatgatgttgatgatcctgatcctgtataggccc

SEQ ID NO: 797595 - DNA, 613 bp, Homo sapiens
aataacacaagcaaggcttctggagaacactcatgagtctgctggattagaggctcacacccaacagactcagagtgcaaagggtccttcctgtggatgagaagctcttctagaacaaaattaagctgcttccgtccctgggcacttttkctctggtgtcatggccgtgctcaacttcctcatgaggacaaacatctgaagatgtgacctgagattaggacattctttttcacttacgtattgtttcagcaaaccccacattgactccagcacttccaaatgtcctttaggcaaagagagacatctagtggccaagattcacaacgttgtagcggccacctgtttacaaaatcactatgcggtacaatcacttaatttaccatgaaggtgactgagggacttaatggaggaggcaggagaaggagcagtccaaaccaggtaacctctgtgacctgagttgccttgtccagtttttcaggacatagattctgcttggagcagagttcattcattcatctatttattcatttgacaagcatttatactgtctactaggtacaagacactgtgttaagcctcaggacttcaaaatctataaatacactcttcaagc

SEQ ID NO: 797596 - DNA, 588 bp, Homo sapiens
cactgtgttaagcctcaggacttcaaaatctataaatacactcttcaagcatctataatggagaaggtaggccagcaacaatcagttaaaatatgttacgataggggctgaacacactgtgccacagaaggctgtaggagaggcacttacatgaatctttgaggataagaaaaagcgtttaaaacacaggtctcaaactggcaccctgtgggccccatctggccagcagatgtgttttgtttggaccatgctttgtttttctaactctgaattagttgccgacatttaaacatcaggggatttcacatraaaatccaaatttcagcttcttttggaaaataagaagatctgaaaacattggtttgtattcctgcagggtcacattcaattggagctgctttcttaatgtttttacataacagtcaataatgtctctgcataacagcttcttttaataaaatgttggtaaattttacatgaacaaggtagaaaactcaaaattacaaaagcatattcagtaaactacccttgttccacaactaaccaatcttcacctacaaaagcgcccactttaccagttagaaattg

SEQ ID NO: 797597 - DNA, 466 bp, Homo sapiens
aaggaagctttcatcattgccttatcacatggcccatccagtcatctgaattgccctccaaatgcaaataaagacaaaaacaaggtaataatagttctgcctgacataatgcaactaacatgatgcaacaaccctgcttacagctgaaaactcattcataccttccccagaattcaggtttcagggtttcaacatttgggatttattgtgattttcaagattttagactagagattttgatccttcggtayttcaacccaaattatgattgaaattacagattatcatgttcaaaattgcatctttcagaattatgatcagcactgcttaattattttattttatttgatcatgtagaaaatcaagccatattcttctttagaggaactcaaaagacattaattatccccaaatttacctatacacttaacataatctcaataaatatatcaataggtttttgtgg

SEQ ID NO: 797598 - DNA, 530 bp, Homo sapiens
tttttttttttttttttttttgagacagagtctcactctgtcacctcgggtggagtgcagtggcatgatcttggttcattgcaacctccgcctcccgggttcaagcaattctcctgcctcagcctcccgagtagctgggattacaggcacctgccactacgcccagctaatgttttgtattttaagtagagacagggttttaccatgttggccaggctggtcttgaactcttgacatcatgatttgcccgcctcrgcctcccaaagtgctgggattacaggcgtgagccaccacacccggcgacttcatccactgtctgtccgcttcctgtgtaaggccgaccacccagcccccaaacaacccttaaaatgagacccaaaccaaagacctaacatataagcctcaaatcagtaaacctctcctgaaacaggcagaggaactgcctgcccagaaatactcacaataggctgtgcagattgtaaagagatcaacagcttcacccacgctctgcataaactctggtactggct

SEQ ID NO: 797599 - DNA, 615 bp, Homo sapiens
tcgaactcctgacctcaagtgattcacccacctcagcatcccaaagtgctgggattataggcatgagccactgtgtccgtctgcaatttttttttaattttagttttaatttttatttctttttattttattatgtatttatttatttattygagaaaaggtcttgctctgttcgcaggctggagtgcaatggcacaatcttgactcgctgcaatctgcacctcccaggctcaagcaattcacctgtgtcagcctcccatgattttttttttttttttagacggagtttccatcttgttgtccaggctggagcgcagtggcatggtctcggctcactgcaacctccacttcccaggttcaaaggattctcctgcctcagcctcccaagtagctgggattacaggcacacgccaccacgtctggctaattttttttttttttttgtatttttagtagagacggggtttcgccatattggccaggctggtcttgaactcctgacctgaggtgatgagcctgcttcaacctcccaaagtgctgggattacaggcatgagccacctacgcccggccatcccacacaattttaaattgagttatttgccttcttattagt

SEQ ID NO: 797600 - DNA, 528 bp, Homo sapiens
tagccttagcctcagctgattggaccagggaggtcatctgatcccagggcagccaatccatagactggccaaaaacctcttacttgcgtcgtttggaaaggtaatttaaccaatcaagagttcaaacaaggaaatgctgagagtcaacaggtggtgttgccagaaggtgactgggctgtagaaacgaaataagacagtcctatggtaaagaaaagctagagcggaaaggaggggaaccaagtcctgtgaatagaggtagcaccctgagaaacccatgtcatcccaagggtgcccaaacccatagctgsccccaggtctgtgcacttaaggctgggatgcttagactttcctgggtttctgtgtctgtatagcctcttaatgtttcttgagataatttgaatgattttactttcatctacaataacccaactgattgggcaggttcttatgggtagaattacatggtcaaaaataggaacatatttaagttgttgatatcttaaatttcctttgaaaaatataaattta

SEQ ID NO: 797601 - DNA, 482 bp, Homo sapiens
ctccagagcgtggagggctggggctgcccccagggaagtctcccctggcagctcctgtctgagcagctggggccagctccaggaacactaaattctggctgcgtttccagtcaaggccgggttactttagaatccctcttctccccccttgtcttttcaagcaggagccagccaaggtattcgtcatgtttccgagctaccctgctgcttgatttatgtgcacgcagggctgggacgaagatgccagagcggggtgaaggctaaccccgagggtgaggggaagtggggtgctggacyctcccgtcaccccaggggccactgaaagggtccctggtttttgtatcaactgtgttcagctcaaggttggagaccatgtggacgccacagccccgggagcagaggaacagagacaacatgctctccagctctcttgctcttgctctcttttttgtgtctcacactgtgagatcttggccataaaa

SEQ ID NO: 797602 - DNA, 626 bp, Homo sapiens
ccagcatatattctatgggaatgggggtgggtgcatgatcaactttgtattttgcacggacgcccctgtagctgggtcaaggctggatgacaggacagaggtcaggacagagaagcaggaaggtcactcaagagtgggctgcagggccaggcgcggtggctcacacctgtaatcccagcactttgggaggccgaggcgggcggatcacgaggacaggagatcgagaccatcctggctaacatggtgaaaccccgtccctactaaaaatacaaaaagttagccaggtgtggtggcatgcgcctgtagtcccagctacttgggaggctgaggcaggagaatggcaggaacccggggaggcggagcttgcagtgagccgagwttgtgccactgcactccagactgggtgacagagtgagacgccgtctcaaaaaaaaaaaaaaaaaaaaaaaagagtgggctgcggccgtccagaatgagagccttgaaccagggaggcagcagtagaggtggagaggaggacatggagctggggattatttggtgtctggacagaggagatcaaggtgcatcccatgtccctggccctagtctccaggtggaaggaggtgccagcccagggagagaac

SEQ ID NO: 797603 - DNA, 588 bp, Homo sapiens
ggttgatttggctcaagttgcacagttttgcctcagtgataatatttagaagggctgaaagtgacaagtggaaaaagctctgtcagggatgttcagaggccaggtgaagccagaggaaaaagctggtctattcagggagacatccagcatgacctgacaccttctatccctgatcactcaaggcrgacagcactgcagttacgtggagttgtgtttgtgtttgtttgtgtgcatttttttttttgagatggagtttcacttttgttgcccaggctggaatgcaatggcacaatctcagctcactgcaacctctgcctcccaggttcaaatgattctcctgcctcagcctcccaagtagctgggattacaggcatgcgccaccatgcctggctaattttgtatttttagtagagatagggtttctccgtgttggtcaggctggtcttgaactcccgacctcaggtgatctgcctgcctcggcctcccaaagtgcagggattacaggcgtgagccacctcaaccggcccatttgtgtgcattttaaatccccagactttctcacgatattttttaacacagggcttcaag

SEQ ID NO: 797604 - DNA, 601 bp, Homo sapiens
cagttgctcaagccagacccaactgagagtcacccttgagcctacccttctcttaccaccaatctactgccagtattgttgattctatctccaaagtacatttcaaacaaatctacttctctgcatctctattgacatcatctagctcaagctgacaacttcctctctcaaacccacarccagtgaccccgagtgcaggctcacacagcctctgtcaactccaccttacttgtctgttttctgttcctcaagtacaccaagttcattcccaccccaggacctttgcacttgcaattctctctgctctgtcttctgatcttctcatgcctggttccttcctgtcactctgatagtagcttaagtatcacctgttttgagatcttccttgcctactcaatctaaaaaattatgagagacttaagttcaaattctagctccctactttctaacagtaaggaaaaaataaagagtgagcataggaagcaggagagtgaacaacatgtaacactaactgatatggtttggctctgtgtccccacccaaatctcatctcatagctcccataattcccgcatgttgtggaagagactcggtgggagat

SEQ ID NO: 797605 - DNA, 601 bp, Homo sapiens
cagttgctcaagccagacccaactgagagtcacccttgagcctacccttctcttaccaccaatctactgccagtattgttgattctatctccaaagtacatttcaaacaaatctacttctctgcatctctattgacatcatctagctcaagctgacaacttcctctctcaaacccacagccagtgaccycgagtgcaggctcacacagcctctgtcaactccaccttacttgtctgttttctgttcctcaagtacaccaagttcattcccaccccaggacctttgcacttgcaattctctctgctctgtcttctgatcttctcatgcctggttccttcctgtcactctgatagtagcttaagtatcacctgttttgagatcttccttgcctactcaatctaaaaaattatgagagacttaagttcaaattctagctccctactttctaacagtaaggaaaaaataaagagtgagcataggaagcaggagagtgaacaacatgtaacactaactgatatggtttggctctgtgtccccacccaaatctcatctcatagctcccataattcccgcatgttgtggaagagactcggtgggagat

SEQ ID NO: 797606 - DNA, 614 bp, Homo sapiens
taatatgtattttttttaatgtaaagaagaaggcggccgggcgcaatggctcacgcctgtaatcccagaacttggggaggccgagacgggtggatcacgaggtcaggagatcaagaccatcctggctaacacagtgaaaccccrtctctactaaaaacacaaaaaaattagccgggcgtggtggcgggcgcctgtagtcccagctactcaggaggctgaggcaggagaatggcgtgaacgcgggaggcagagcttacagtgagccgagttcgcgccacctcactccagcctgggtgacagagcgagactctgtctcaaaaaaaaagaaggcaaagcttgtgtaccctgagttatactcctcgatatccacaggttttccaacctggtgaggtatcgacccttccttgaattaactcctattctactttcaagaggattacagctatcacacttggggcctccctttgggatgttcctcacatgtaactggtaggcccctggccccctattttctgtccgctcttcatgaagagtggttgagctccccaacctcttcctgtactctttgggatagggaagcttcccacatctcattcaacaacatgttaaaaata

SEQ ID NO: 797607 - DNA, 614 bp, Homo sapiens
taatatgtattttttttaatgtaaagaagaaggcggccgggcgcaatggctcacgcctgtaatcccagaacttggggaggccgagacgggtggatcacgaggtcaggagatcaagaccatcctggctaacacagtgaaaccccgtctctactaaaaacacaaaaaaattagccgggcgtggtggcgggcgcctgtagtcccagctactcaggaggctgaggcagragaatggcgtgaacgcgggaggcagagcttacagtgagccgagttcgcgccacctcactccagcctgggtgacagagcgagactctgtctcaaaaaaaaagaaggcaaagcttgtgtaccctgagttatactcctcgatatccacaggttttccaacctggtgaggtatcgacccttccttgaattaactcctattctactttcaagaggattacagctatcacacttggggcctccctttgggatgttcctcacatgtaactggtaggcccctggccccctattttctgtccgctcttcatgaagagtggttgagctccccaacctcttcctgtactctttgggatagggaagcttcccacatctcattcaacaacatgttaaaaata

SEQ ID NO: 797608 - DNA, 588 bp, Homo sapiens
atggattataggttttgttttgtttttaagttttcagaatgttttcatgatagtttaagcccatacaaatatcattctttagaccacagattggcaaagtatgacctgtgggccacatctggccagcggcctgtttttgtaaataaagctttattggaacacagccacactcgcttgtgtacatactgtctgtagctgcttttgtgccacaaggcagagttgagtagttrcaacagagaacatatgtggtccacaaagcctaaaatatctgccatccggccttttacaaaaaaatttgccaactccctttttagaccaacattgacacaatctcattttcctcactaatttaacaggaggaagtttatatattaatgcaaaaatagaacacatggcccttcctcaaaatgtaccccctctcatatcttataagcatgtcactgcttttctatacaagaagcattttttagagtagctgtaaagaacagagaatttgagtcctgactccatgctctccagctgtgtgactttgggccagtccttcagtctctcatgcctcagtttttctcatctgtatagggggattgt

SEQ ID NO: 797609 - DNA, 608 bp, Homo sapiens
tagatgggagctatggctatagatgtgaagtgtcagggaacatgcaaaataattgccattactgacttaagcagaccttacagctaaataagttacattgtataagtgaagtcagagtcatcacttctgattgtaagtgtgtacgtgtgtgttctaccatttttgaagtttggggaaaagttttatttttaattgtatrttggttctccttgatcattggaaattatattgcctttgaatctttataagtaattcatctgtggaagcacacgtacatcttttaatggcaatagaaatgaaccacaaaagtaaccatttgtatgtccttataacctatgcacaaacaagccaaattttatgtaagtgtgattactaactataaacattttatgctttgaccaaatagctacatctagattatgatctctctgctacccctcatctccatttcatagctttaaaaaaaaaaacaataaatttggaagagctaagagaaagagaatatatggaagcatgcaattttctaggtagaatcatacaggttactagatacatatgatatgtatgtatatcatataatatatataatgtatatataatatgtatat

SEQ ID NO: 797610 - DNA, 480 bp, Homo sapiens
atttttattgaaacaattaaccattagaaagctttcgcatctgcatcacttcttggccttttggctaagatcaagtgtaaaattttcacatgtggctaattgttttattccactacatctatcattattttggcaacttcgatatcagtgaaaatggtcagttcaacactctggcctctgaggtccrtgacttccttagttcttttgttctatcccacttgagctacccgcaatggacttattccagaccagtgtttttcaggctccagattgggacctattagtgggtcttaataatttagcaacaacattttaaataagaatggatcagaattaaacatatcaggtatcagagtgcatttaagtgtaagtattgttttgtgaacgcttgtgtatgtacatttaatgtctatgtaaaattcctttctgaggattgtgatctaaaagtttgttaaatatgacttaataacttaatcacct

SEQ ID NO: 797611 - DNA, 452 bp, Homo sapiens
gctcttcatatccctttttctcaatcgcaaacagattgtaacactctagctgggccaatactgtttatttgtttgtttgttgtctgttttagtttattttgctttctgtcttgctgagtatgatagcaaggggattgagtaagctggagaagaatgggtggtgctctatgtacatcacaatatgttgctgtgggcagctggggtaacccagtgtcactctgtgcccatggagtctccataaagggaaaaacagataggaaagaagagagggaggatatgaatacacctttgcttctcaaatgttctgaaagcwggcccttcatctatattataattagataacatgctttcctgctgaaattatcaagcatttgtgggaaagtataacactattcttctccttgtccctacaggcaccattgtctctttaaaataagatctgtacttctcct

SEQ ID NO: 797612 - DNA, 614 bp, Homo sapiens
aagttaaattttagaagacacaacattctcttccaactatcaagtttagcctattcttgtttaattcatgagcactcttttatttataagccaatttgatagcatgctggacacaacacacatcacacaaatgaagtgacctatatacaagacagctggatccaagttatttacaaaattggaacgtatccacctgaccaaattgtgtttgccccaataggtatggaagacaggctgaggcagggaaggggacgctatagaagggaatggatgaaccacattgctccagaggagacctcagagtccccagtccaccagaaaacttacccagatgtggagacatcaaagaataatgttcagatgcctgcttcactgccactgtgggaagctgcccatcagaagaagggtccaggacccccagtagttttacttaagcaaggcagcttgctgcaactagtgcaagaaagctagttctagtatcagaaagcctatgagtctccttcccacagcaattattacccagaatttttagaacatggaggaagccctgggtttcatttctgkctggacagattgatgaagagtctttttttccatgcaccagggacagttag

SEQ ID NO: 797613 - DNA, 637 bp, Homo sapiens
aaagtacagcaaaagtcagatggtgcaagtcagtttgtatcatatgaaaacttgaaatatgatagttcctttttaggtcaaagaccagaattgagaagaatctactatgagtagaatttaaatttagcaggatagagacatgtaggaccaaagaaaagatccagataaaagtaggggaagagaacagagaaagtaggtcacagaaagaaggagatatatataatttttatttttttttttgagacggagtctcactctgtcacccaggctggagtgcagtggcacgaggagatcatatatctaaccacttcacaacaataagaaaagagacctctacatctgtgaagcaatgtgaaccccagatatttgagacaagtctcggttaatttagaaagtttattttgctaaggttgagaatgygcacccatagccttaggaggtcttgacaacatgtgcccaaggttgtcagagcacagcttgctttcatacattttagggatacatgagacattaatcaacatatgtaaaatgaacactggtttggtccaaaaggtgggacaactccaagtggggagggggcttccgggtcatagatagataagagacaaatggttgtattctttagaatttctgatta

SEQ ID NO: 797614 - DNA, 537 bp, Homo sapiens
ccagcagcccacaatgcaacagggctctttctttgttcccaggtggatcggcaggtcaagaaataatagacacacacaagatagtgaaagctgggtccaggggggtcaccgccttctagtcccgtgatgccgccaatgcactggatataccagcatttattaytgagtttagtgagggcaggggtaggttagtgagggatttagggttgtttgattatgaggtgagatggtcacatgaggatgaagaaattctttaacataacatctgtatgcagaagtacagtatacagagataagaatttacaatatagtgtgtgcatcagtaatttctaacagagtcttaaaatagaaacacagtcttctcgtaacctatgactagcaagatattaatcagcagtaacagttgcagcaaaagctggttacaaacaatccatagaaacaggatgtgaagctagacaaccggttagaccagaaattctcagaagggagtatgccttaaccctaaagaggcctcgaagagccatggcaagatgaggg

SEQ ID NO: 797615 - DNA, 608 bp, Homo sapiens
aaagcagaatgataaaaacatattagtaagtatgaacaaatttgaaatgaatgaaaaaaatagccacatcaaagaaataaaagatgtaaagaagaaccaaatggaaattttagacctgaaaaatccaatagctaaaatacaaagctggacaggcacggtggctcacacctataattccagcattttgggaggctragaagggcagattacctgaggtcaggagtttaagaccaccctggccaacatggtgaaaccccatctctactaaaaatacaaaaattagccaggcatggtggtgcacgcctttaattccagctgtttgggaggctgaggcaggagaattgcttgaacctgggaggcaaaggttacagtaagccaagatcacaccactgcactccagcctgggcaacagatcgagattatgtcaaaaaaaaaaaaaaaaaatacaaactcagtggatgcaatcaacaacagaatggagagaacagaggatctgtaaactaaatctgtaaactaaaagataaaacatcttttatctgtaaactaaaagataaaacaatagaaattgtgcaatttgaacaagagaaaaaatactttattttttttaa

SEQ ID NO: 797616 - DNA, 548 bp, Homo sapiens
tatattatagccacaggttacccaataccctcaggttgccttgtgacctgcaggaagatggagctaccatgtatcatttaaaaaaaatccattttgccatctatggaaaatctacaattaacatgaagtatctgccttagaaacatgacaagataagccaaaataaaataaggaccatgttatagaataatggagaatatwcaagatatcatgttctgatttctatcttctttgcctctatatacttaacaaaaatcaacaacaaaaagaaaaaggaggatcaggaaaaaataactaatgaatactaggcttaatacctagatgatgaaataatctgtacaataaacccccttgacacacattacttatgtaacaaacctgaacatcctggacatgtacccctgaacctaaattaaaaggtaaaaaaagacaaaggaaatgatattgcacttttcttttggagaaaagttgaataattttgttaaaatgatattacgaagtgattttatttgcttaaaccttgcctcaaattatttctgagcttttaa

SEQ ID NO: 797617 - DNA, 599 bp, Homo sapiens
agattaaaccacccttgcagggcccgagcccctttccacttgtttgttacctggaaactggggtctttgtactctgctatttacgacaagagcaaggaatgaagcagattccctaagagaagagccagtgatggggggaagaatggggaggtaccacaaaatatttcgaggatttctagtcaaatgtttactactcctaacaacttaacactgattgtatactatcatttgttttctatacttgtttgcctaaaatggtgttactgttttgtgtaagcaaagaattttaaaatttactccacataataccttccatagtgttaactgttaacatttattcctcaatattcattaaatatttattgagcacctacatgtcaagcactatcatgaagggtatgktaataaacataattcttgacctcagggagcttacgttctgaaatttttattttatatataatcccagttaggcatacaaaattgtagaagttttcatgattttatataatcatcaccttcagaatagagcccttctcaccactcaatttaaaaatacacccactaccactagtataccctttcaatatttatcccct

SEQ ID NO: 797618 - DNA, 583 bp, Homo sapiens
aatatacagcttgatatgctttcataaactgaatgtaactgggacccagatcaagaaacagaacatttagaactccagaagcctccccatgttctcatcccatttcttctataaaattatttattacaaaacatttgagaaaaaaagaaaatcatcaaaagaaaaggaaaaaaamctctgctatccacagataacttttaatatcactggtgtttattcttccatcatttatcagagttgagttttgttttccgttttgtatagtttttctaagccacagattcttgataaagattttcttccctgctctatttcagtttcaatgtttaccattgtgttaattgattttaatgcatttttgaagtaggtaaattaggagcccaaattccagttaatgaagaaatattgatatacgttcatgaaaaaatattatgcccacagatgcctgaaatttcctacttagaaatttattttttattttagcattatcttctgtctttaaaatgctaatattgtttacataatattcagtaccttactttgaatgaataactcagatgaggttatctcatgacaagtgatc

SEQ ID NO: 797619 - DNA, 565 bp, Homo sapiens
tactttctgctcacttttgagtatttaattctgaacactatggtggaagttaaaatatgaactctctttatgtgaggcaatcttttcaaaaaatatttcatcttcaaaaagtacccttcccctgtccttgccccattacatacataaagggcaatgaacaataccaaatcaatcctgcaagtgaaagatccagagaaatcataggttaattgcctatgcttcttttaataaatattaacattartagaatgggaggacattagtcagctcctttggaaaagctgatgattcttgcttcttatattagctttatgaaaactaaatttaacaatttttttattatctcccacatacaaggcattgtcctcagtcttacagttagttgaacaagataaagctcctcttgtcctaaggagactacactagggagataacgtacgtaagaacacctaatacagtacaaagaaagtttagtatctcttcccatgaaagggacccaggggtccttgattcaaaatttcaaaaaagggataacatttagctgatcacactgaggaactggcat

SEQ ID NO: 797620 - DNA, 559 bp, Homo sapiens
ctgctcacttttgagtatttaattctgaacactatggtggaagttaaaatatgaactctctttatgtgaggcaatcttttcaaaaaatatttcatcttcaaaaagtacccttcccctgtccttgccccattacatacataaagggcaatgaacaataccaaatcaatcctgcaagtgaaagatccagagaaatcataggttaattgcctatgcttcttttaataaatattaacattagtagaatgggaggacattastcagctcctttggaaaagctgatgattcttgcttcttatattagctttatgaaaactaaatttaacaatttttttattatctcccacatacaaggcattgtcctcagtcttacagttagttgaacaagataaagctcctcttgtcctaaggagactacactagggagataacgtacgtaagaacacctaatacagtacaaagaaagtttagtatctcttcccatgaaagggacccaggggtccttgattcaaaatttcaaaaaagggataacatttagctgatcacactgaggaactggcat

SEQ ID NO: 797621 - DNA, 645 bp, Homo sapiens
aggaatttttttaattaagaaaaagttacatatgccaatcatgcataaaacttacgcagatactagtctattgtatcatttgctaccacaaaatgcacagaaattattattgaaacttaaaatttataaaaacttacatgctggccggccgcggtggctcacgcctgtaatcccagcactttgtgaggccgaggcgggcgcatcacgaggtcaggagattgagaccatcctggctaacacggtgaaaccccgtttctactaaaaatacaaaaaaaattagccgggcgtggtagcgggctcctgtagtcccaactgctccggaggctgaggcaggagaatggcgtgaacctgggaggcggagcttgcagtgagctaagatcgcgccattgcactccagcctgggcgacagagtgagactccacctcaaaaaaaaaaaaaaaacttacatgtttacataccatacatastgcgatttgcagttgagagaaatttaaacaaacacaaagatgcagtattaaattgtaattgcacaaaattaaccgtagtatattgtactactgtaataatttcttaggcattttctgctgctattacagttagctcaagctatttttgtgagtatccacttaaagcactgtgtgatgc

SEQ ID NO: 797622 - DNA, 566 bp, Homo sapiens
tactcatacagagtgccactaatgatgctgtaagtgcttccaagaagcaaaaaaaagtcaggacttttacaagaaaaagttaaattgcttgatatgtactgtagattgaggtctgcagctatgattgcctgtcatttcaagataaagaaattcaacataaagtccattgtgaaaaaaagaaattcgtgaatatgtgaaaggcakgcagatagactctaatatgatttgagaaaaagcaaagtcattatatgacaacttaaagcaagaggaaggtgaaggaagtttaaagctggataatttaatgccagcaaaggatggtttgataattttaggatgaggtttggcttaaacaatgtcaagataacaggagaaccagcttctactgaccaagattcagcaaattcccaaaaagtcattaagaagaaaaaagatctgcctgaacagatttttaatgtccatgaaagtgccctattctggaaaaaaattggtaaaggactttagtaaggaagagaagtgaacaccaagatttaaggcaggaagggataggttaactactgttttgtgca

SEQ ID NO: 797623 - DNA, 587 bp, Homo sapiens
ttttaagtttatattttagttttgaagagacatctttattttggccaaacccttggtatctgaaattataatcctttcatgaaagaaattaactagacattcataaattaatataattcttatggaaatggatctaacctagggaatcaaagctgttctgaaattttacacagacttttaatattagtttaatcaaaggtaacactttctaagacacatgatatttgactttataatatttgaattattcataatctaaactagagggctcaaataacatggtgtgccattttcccaacattgtatattaatatttcaaagataacttttgctaacagtaatgatcctgaaatctgcaagatccttctagatcagaaaagtcagagaggctgttaggtttagtggttaagagtgtagcctttsaagtaatgcaattctggattcaaatccctactctgtcacttacgatgacatcttaaacaaatcatacagcatcacccaccccagccttagtttctccatctgtaaaatggaagcaggggaaggttgcttactaacattattaccttatagagtttgaagatcaa

SEQ ID NO: 797624 - DNA, 520 bp, Homo sapiens
gattcactgtatatcagttctgattattcaatttatttgccatgccaactattaaatattttgaatgtaattcctatgagcaagtgtgtttatgaaagtattgtttgtagtggtgaactcctttcccactactatctgttacacgcacacatacacaccccacatacacatacacaggaaactgcaaaaaaagtaaaaaaatctatcaataaccaggtagttgaatacttctgttttactcatattatggaatattagatcacyattgaaaacagtgaattagatctatatttgctatctttgatggatatccaggatacatagttaagggacaaaagcaagttagagatcaagtatgaactatgttatataaaaaataaaaaaagtattgtgctgtttgagcatggagaattttgtgatgaaatacaccacactattaacatggctaatctcaggaggtgagattggaaggagaataaagaaaagattattatctttatatatttttgcattgtttact

SEQ ID NO: 797625 - DNA, 612 bp, Homo sapiens
ggaatcttggctcagaggttgaaatctcaagggttcagaaagaaagtggtaaagaattaaatatgaataacattatgtctgatgcacctttcctggaagggtgatggtgcagaatctttgttgtaaaattttaaaggctttcttaagagttaaaaattactttctgttcaacatgttatgttttctaagtgaaaattcagtaggtgctatccgaacttttttaactggactacctrgaacaaaattgtttattttactacttagaaggtgtaaaagtgctgaatcctcaattttcaaatttgttgatttactaaatcaatatttattaaacataaactgtatagagaagtactggtacagacattgcctacatagcagttaacaaaatgcacacaatccctgtccttgtgaatctcactttctaatgtgcgggtagttggaacagatactaatcaatataaatacataaaatatatggcatgtttatgtaacataaagcaaagaaggagaataggaagtgctgggtgtgtggtgaagtgctgggtatggatacatggagggatgctggacagggccaggctagagtggtcaaggaggccctcccaagaagat

SEQ ID NO: 797626 - DNA, 583 bp, Homo sapiens
aaccctccaccatccctgtgccctgactgaattcctgacccacagatttcatggacgtaacaaaatgggtattttgtaccattagaactggagtggtttgttatgctgcagtagtaattggatagtaagtttcaatatctgawaaaagcaggccttaatcattattcctttttttcccagaaattttctgactattcttgttatcttttcatatacatttttgaaacatactatagtctctgaagtcccttttctaccaccactaccatcatatatatgtatatatgtaatataatatatgtaattttattagggtggcttaaaaattgttttctcataataataatgttagattttctgttcaaaaacagggtacatatttctatttattaaatattctaaaatgcccccacaaaaatttaaaattttcagtgatataagtcctatatattatttgttaaaggcattcttaagtattttacctttttaaaaatagactttatttttagagcagtgttagattcacagcataattgagtggaaggaacagagatttccctttctcccctgccctaacacatgc

SEQ ID NO: 797627 - DNA, 583 bp, Homo sapiens
aaccctccaccatccctgtgccctgactgaattcctgacccacagatttcatggacgtaacaaaatgggtattttgtaccattagaactggagtggtttgttatgctgcagtagtaattggatagtaagtttcaatatctgataaaagcaggccttaatcattattcctttttttcccagaaattttctgactattcttgttatcttttcatatacatttttgaaacatactatagtctctgaagtcccttttctaccaccactaccatcatatatatgtatatatgtaatataatatatgtaattttattagggtggcttraaaattgttttctcataataataatgttagattttctgttcaaaaacagggtacatatttctatttattaaatattctaaaatgcccccacaaaaatttaaaattttcagtgatataagtcctatatattatttgttaaaggcattcttaagtattttacctttttaaaaatagactttatttttagagcagtgttagattcacagcataattgagtggaaggaacagagatttccctttctcccctgccctaacacatgc

SEQ ID NO: 797628 - DNA, 614 bp, Homo sapiens
atatctatgacatttcgttatccattcgtctcttgatgggcacttaggttacttccaaatcttggctattgtgaatagtgctacaataaacatgggagtgcaaatctctctttgatatcctgctttcccttcttttgagtatataagcagtgggattgctgattgctggatcatatggtagctctatttttagttttttgaagaacctccaaactgttctccatagtggttgtactaatttatagtcccaccaacagtgtatgagggttcccttttctccacatcttcaccagcatttattgcctgtcttttcgatacaaagataaaatattttatctttttattattatcgtaaattggatattttctttyattatatttgtgattagttttatttatattttataaaactattgactttttataataatgtggtagcatccacgttgcctaattttgttattgtttttaatagattctcttggtgttttcaggagtaaaattataccatctgaagataatggtagttttacttattcttttacaatttttatgactcatattccctattacattgtctagtgttttcattttattcattactttaacatgaa

SEQ ID NO: 797629 - DNA, 626 bp, Homo sapiens
gtaatccacttcggccacccaaagtgctgggattatggtgtgagcaaccatgcccggcccaaatcttctacttctgaaagtcttccaatgaaaaagagaagcatatctatgtacccatattggtaaagtatctgacctttagggataaaggggctgggctaggtggctcacacctgtaatcccagcactttgggagggtgagacaggcagatcacctgaggtcaagagttcgagaccagcctggccgacatggtgaaacaccatctctactaaaaatacaaaaatcagctaggcatggtggcaggtgcctgtaatcccagctactcgggaggctgaggcaggagaatcgcttgaacccagacagyggaggttgcagtgagccgagactgtgccactgcactctagcctaggggatcgagtgagactctgcctccaaaaaaaaaaaaaaaaaggataatagtcagcaatcaaagtttccagaaataaaggactgagacacagactgcatcagatcttcaactgacagaactgcatgctagaagacaaaggagtgaggtcttcaatattctgagggaaaaaataggaatttgtacctagaatcctctactcagccaaattagcatgtg

SEQ ID NO: 797630 - DNA, 538 bp, Homo sapiens
ggaaaccaactcctgccatggtggctaggctgaagccctgcctgatggggagagttacaccagtcagcagcaaaccaatgcaactggacccttctgctctcaggaaccaccaataaccaacaccaggtgctcacagagaaggtgggaccctggaactcgggtcaaaacctggactgcactgcactgagttggaagcctaaggtcccagcacacgtccagctagcagctgagatcatttcctaaaaatcttgcttcccgtggggcctcacagcaaagctctatygctgagatcatttacgtgggcttcttccttgcagcccagagaggcaaaccagtacacacagatgtacacacctaaacatgtcccaaaaagaactccaggatgaccagcagcctccgttcccacaataagaaatagccatcatggccgggcacagtggctcacgcttgtaatcccagcactttgggagtccgaggcgggcagatcacttgagatcgggagttcaagaccagcctggccaactaaaaatacaaaaat

SEQ ID NO: 797631 - DNA, 594 bp, Homo sapiens
agaacctttacctcttcgaaaattacagagctcttgagatttttcccctattaattgcataattgcttttcctgccaaagtaatttgaacccttgggggttaagaaaatcacttactgtgaaatagtggcaatttttaacccattcagctggagtttctttgcctaattaaatgtaaaatggctgtttgctgcccatggtgtgtatgtgtttctgatgctgctcaaattgctttgccttggtagtctctgagtatttaaaccttagtagaattattrcacttagtttctgtgtgtcctgaagacttaaatcattattttgtgcaggagaacactttatttaatcattgactgatctctaatatttgtgtctatctttctgtgcatgaaaaaaacaagccatcattagttatagagaatgttttggctgctgggaaaatatcttgtcagatgctggctgtgagagcagctcaaagtgttttcataacaatccaaattatcattccatggtgtaaaaacttgagcccagaggcttcatgacttttccacggtcacacctgaagtcagctttgggattttcaaattatccctgcatt

SEQ ID NO: 797632 - DNA, 622 bp, Homo sapiens
tagctagtcctctctgaacgttagccatgaaaatctagacaaattatttgatgttgggactttctttcctgcataatattgttttactcttacgtactgctgattgcatgtccctatagatctactgcagctggttccccaggtgaggccactgttgtttcctattcagttgtacagctgtcactcaatcacagtgtgtattgttgcgagcagctcactcatttctgccaaaatttccatttgctcatggtcttatgggtacatttgtcaccagtttttacttgtatctgacattcctggttggggaatgttggggtcacccacatgtgtgggaaagtaagtgacagcatggggttgggccagcttggacctctttgtgcctgacctcctgagctccatatcttattgcagcatagccagggtgatatactctctctttaatasagggtcttctcctacatttgcaacataccatggccaaagtgcaagtctctgtgcactctaccacttagactccagtatctatttggatttcagcctccagggtcaatctttggagaactttgaatgacaggctgaggaatttaaacttaattcaataaaccataaaaagctgttaaag

SEQ ID NO: 797633 - DNA, 610 bp, Homo sapiens
aatgggagatactaggagaaggctggaagacatcactggatttagggaaagggtagtagcatgcttacagtctgagaggaaagtttcagtagaaaagaataattgcacaaagaggtaagaaagggcacaactgaagaaagrtgatgtaagagaagaaaggacaagttttaggtgtgctgtgataacagtatctaaagcaagaacatctttcacaaccacaatgtaaagttgtttagaaaaatcatgctttgtcaatttattcactgaggtcagaatttgtctcagttcaaaatacacctagaatacacaatcaaagggatgcttactttttctaatctagccattctctagcgcttattttatgctagtgtctctaattaatatccaaatgccttgatggatgtattggaattgttttaattcagttctttgtagtcattcagtccattttattcttataattatggggggcaggattaactagaaaatcctctccttctatcaggattaagccccagctaaatgaaaacacaaacaccacaggactaactaagaggcagctattttcagcaaatgtggtgacttttgtaatgcaagccaagctctggag

SEQ ID NO: 797634 - DNA, 610 bp, Homo sapiens
aatgggagatactaggagaaggctggaagacatcactggatttagggaaagggtagtagcatgcttacagtctgagaggaaagtttcagtagaaaagaataattgcacaaagaggtaagaaagggcacaactgaagaaagatgatgtaagagaagaaaggacaagttttaggtgtgctgtgataacagtatctaaagcaagaacatctttcacaaccamaatgtaaagttgtttagaaaaatcatgctttgtcaatttattcactgaggtcagaatttgtctcagttcaaaatacacctagaatacacaatcaaagggatgcttactttttctaatctagccattctctagcgcttattttatgctagtgtctctaattaatatccaaatgccttgatggatgtattggaattgttttaattcagttctttgtagtcattcagtccattttattcttataattatggggggcaggattaactagaaaatcctctccttctatcaggattaagccccagctaaatgaaaacacaaacaccacaggactaactaagaggcagctattttcagcaaatgtggtgacttttgtaatgcaagccaagctctggag

SEQ ID NO: 797635 - DNA, 643 bp, Homo sapiens
catgttatgatgcagcaagaaggctcttatcagacaccagcatcttatattgggcttcccaacttccagaattatgagccaatacatttctgttcgttataaattacccagtctcaggtattttgttgtagcagcacaaaacagactaatataacctatgaaacttttattaaaaaataaaatgcactaggcatggtggtgcatgcctgtagtcccagcaacttgggaggctgtggcaggaggattgcttgagctcaggagttggaggctgtagagcactgtgattgcacctgtgaatagccagtccagccyggacaacataataagactctgtctgtaaataaacaagtaaaacaaaaataaaatgtcaggaattcaaaagttatgtcagcctaaatatcaaagttaaatctataaaacttctggaagaaggcaaaggagacaatctttgcaactttataataggcacattttttaggctgtaaaaagccaaaccataaaaaatagataaatttggctttaccaatattataaacttttgctcgtaggaaaataccatctaaacaacaaaagagaagccacagactagaagaaaatatccacaatacgagtttctgatgaaggatttatatcaacctagaaa

SEQ ID NO: 797636 - DNA, 643 bp, Homo sapiens
catgttatgatgcagcaagaaggctcttatcagacaccagcatcttatattgggcttcccaacttccagaattatgagccaatacatttctgttcgttataaattacccagtctcaggtattttgttgtagcagcacaaaacagactaatataacctatgaaacttttattaaaaaataaaatgcactaggcatggtggtgcatgcctgtagtcccagcaacttgggaggctgtggcaggaggattgcttgagctcaggagttggaggctgtagagcactgtgattgcacctgtgaatagccagtccagcctggacaacataataagactctgtctgtaaataaacaagtaaaacaaaaataaaatgtcaggaattcaaaagttatgtcagcctaaatatcaaagttaaatctataaaacttctggaagaaggcaaaggagacaatctttgcaacyttataataggcacattttttaggctgtaaaaagccaaaccataaaaaatagataaatttggctttaccaatattataaacttttgctcgtaggaaaataccatctaaacaacaaaagagaagccacagactagaagaaaatatccacaatacgagtttctgatgaaggatttatatcaacctagaaa

SEQ ID NO: 797637 - DNA, 476 bp, Homo sapiens
ctattctggaccttcataggactggaataatatgatgtgttgatgttatgtgactgacttgttttccttcacataaagttttcaaggtttgtctgtgttgcagcatctatcaataccttaattcttttttagatggaataatattccattgtatgggcataccatattttaaaatccatttgtctcttgatagtcatttggkttctttccaccttttgactattatgaataatgctgatatgaacgttcatgaacaagcttttttgtggacatatattttcatttctcttggatatatacctagaagtagaattgctaggtcatatagtaactctatgtttaatcatttgagaaacggccagattgtttttaaagtacatgtaccattttacattcccatcagtagtgtatgagtgttatgctttatccttatcctcttcaacacttgttactttctgactttttaattctagtca

SEQ ID NO: 797638 - DNA, 619 bp, Homo sapiens
ccagcaatcccactactggatatatacccaaaggaatacaaatcattcttttataaaaatacatgtacttctatatccattgcagcattagtcacaatagcaaagacatggaatcaacctaaatgcccatcagtgataaactggataaagaaaatatgatacatatacaccatggaatactacacagcgatgaaaaagaacaagataatgccctttgcagggatatgaatggaactggaggtcattatccttagcaaactaacacaggaacagaaaacaaaatacctcacgttctcacttataagtggtagctaaacaatgagaacacagagacacaaagaagggaacaacagacacaggtgcctataatagggtagagggtgggaggaggaagaggatcaggaaaaataatggataataggcttaatacttgggtgatgaaataatctgttcaacatacccccttgacamaagtttacctatgtaacaaacctgcgcatgtacccctgaacttaaaatagaagtaaaaaaagaatataatctttcaaaatgaatatttttgtacatgctatatgtgagtgctaaaggtgccacattctcataccatctttgaacgttt

SEQ ID NO: 797639 - DNA, 579 bp, Homo sapiens
tctctgttaaagctttcttgtgcatcaagaccaaaccttttctttctctcaaatcccagtaattaagatcagtatttttatcttctattacacctgttcacctatagtgtgccccagctatcttgagctaatcaaccaaacaaactttatctttgctcaggctgtccttgtgacctgaaatgagttccttctttccctattgggaatgttacwtgtctttccacacacagctcaaagatttcttcattttaagccctgtttcattcttagcttaagattcccagctcttcccttacagcttgtccactataataattgtttttttaatttcttatctagttgctatttgtttacatgatttttccccacaaaggcttacaactattaagacccaatagagcagctcctgcgtcctcaattcataattcatcaaatcatagctttctctctgaaaagaagtttcactgattatctcatcgaatcctccatttaataagagaaataataagcctgcaggcaggtggctactcgcatagtcacaacattccattcctgggtcagggcccaatcctgtgaatg

SEQ ID NO: 797640 - DNA, 573 bp, Homo sapiens
aacaatcttataatgtagcatttttatcccattttcagctaagagaactgtggttttgcaaaatttgtaacttgcctttcacagagctagtaggcaataaatagaggccgatgactagtttctctattaccaggtttttttttttttttttttttttttttggatgggggacagggtctcactctgtcacccaggctggtgtgcagtggtgcaatctcggctcactgcaacctctgtttcccaggctcaagtgatcttcccaggtactttaaaagatagaaagatgctcatcctagtgacagaccaagagacaatacaacccaaattggacaattaaggtgccrtgattccctacaagtattgctttattcccctctgttgccaaagtcctatactgagacattcataagtccctcatggggactaatagatcaatttaaagaataataaataagaagtcaggaaatattcagtgaaatatagaaaatattttttctgtatcccctaacaattgtgtacttatttatcctttaaacttgaatatggcatatattacagactagcccaaatcta

SEQ ID NO: 797641 - DNA, 613 bp, Homo sapiens
agagatcaagaacttgggggcagaaatgtgcaccaatgtctgacctgacagacctcaagagcttgcctgatacagaactcatgaaagacacggcacgtggccagaatctcctccaaacccaagatcatgccaaggcaccaaagagtgagaaaggcaaaatcactaaaatgccctgccagtcattacaaccagaaccaataaacaccccaacacacacaaaacaacagttgaaggcatccctggggaaagtaggtgtgaaagaagagctcctagcagtcrgcaagttcacacggacgtcaggggagaccacgcacacgcacagagagccagcaggagatggcaagagcatcagaacgtttaaggagtctccaaagcagatcctggacccagcagcccgtgtaactggaatgaagaagtggccaagaacgcctaaggaagaggcccagtcactagaagacctggctggcttcaaagagctcttccagacaccaggtccctctgaggaatcaatgactgatgagaaaactaccaaaatagcctgcaaatctccaccaccagaatcagtggacactccaacaagcacaaagcaatggcctaagagaagtctcaggaa

SEQ ID NO: 797642 - DNA, 593 bp, Homo sapiens
tccagctttcctgtcattgaaagcttcggaagtttactggctctgctcccgcctgttttctttctgactctatctggcagcccgatgccacccagtacaggaagtgacaccagtactctgtaaagcatcatcatccttggagagactgagcactcagcaccttcagccacgatttcaggatcgcttccttgtgagccgctgcctccgaaatctcctttgaagcccagacatctttctccagcttcagacttgtagatataactcgttcatcttcatttactttccactttgccccctgtcctctctgtgttccccaaatcagagaatagcccgccatcccccaggtcacctgtctggattcctccccattcacccaccttgccaggtgcaggtgaggatggtgcaccagacagggtagctgtcccccaaaatgtgccctgtgcgggcagtgcccygtctccacgtttgtttccccagtgtctggcggggagccaggtgacatcataaatacttgctgaatgaatgcagaaatcagcggtactgacttgtactatattggctgccatgatagggttctcacagcgtcatccatg

SEQ ID NO: 797643 - DNA, 609 bp, Homo sapiens
gggttgttccccaattcctaggctgctgcagaagcatgtgtccttagaaatgccccagaatggcaggaaatcaggaccagaatggaaagaaaagcaggaaagcaaggtgcacttacaattacttggtagatttgctcatgtggtttggacgcaatgttccttgatgcgtattcatcttaagcccacctcagcttagaccatccacatttgctaagccctttcctcagcatcctgcagccaggttgtcgctgttctaccatcaagggcaagcagagggtgatgtgttctgagctcagaaaggctgcaagscttgtccgagaccatgtcccatggagggagctagggttaccctacaccctgtctctccttctccaggaacagaccacacacctcacatatggagggggcccttcatcaactgtccctgctccccagtcttaatccatcctcccaattccagctccttctctgccagagacacttccctcccttccttccccacctttgctccccctattgtgttggtccctccaggagcagtggagatgtctactctctctaaccccagcttccagggcttgggggtccactatgtgtagccatagcaac

SEQ ID NO: 797644 - DNA, 611 bp, Homo sapiens
agttcctcctgtgttcattatcctccctgccaccctttgtagaaggtgccttccttccccttccccttccgccatgattgcaagttccctgaggcctcctcagccatgctgaactgtgagtcaattaaacccctttcctttataaattactcagtcttgggcagttctttatagcagtgtgaaaacgggctaataacatatgttgtcttttgagaaaagttctattcagatcttttgcccatttaaaaataagatctttttttccctattgagttgtttgacaactttgtatattctggttattaatcccttgtcagagggtactttgaaaatattttctctcattctgtgggttgtctcttcactgtgttgattgtttcctttgctgtgcagargatttttttagcttgatgtgatgcctttgcccattttttgctttggttacctgtgcttttgaggtcctactcaagaaatctgcccagaccaatgtcctggagtgtttctccagtgttttcttctagtattttcatagtttcatgtgttagatgtaagtctttaatccattttgattttattttcgtatatggtgagaggtaggggtctagtttcat

SEQ ID NO: 797645 - DNA, 476 bp, Homo sapiens
acccttgtaaaaaacgagttgactgtaaatgtgtgaatttatttctggagtctctattctgttgcattggtctatatttctgtttttatgccagtacaatgctgttttgactattatggctttgtaatataatttcaagtctggtaatgtgatgcctcctgttttgttctttttgctcaggatggctttggctattctgggtcttttgtggtttcatataaattttagratcattctttctgtgaagaatgtcattagtattttgataggcattatgtttaatctatagaacctttgggtagtttggacattttaacaatatttttccaaatccgtttttttgtgtattctcttcaatttctttcatcagtgtcttataatttcaattgtagagatctttcacttctttggttaagttaattcccagacattttatttcacttgtagctattttaaatgggattacttttttttgg

SEQ ID NO: 797646 - DNA, 534 bp, Homo sapiens
ctagaactttaataacaaaccttgggccaggcatagtggctcatgcctataatcacagcacttcgggaggctgaggctggtagattacttgaggccaggagtttgagaacagcctggccaacatggcaaaaccctgtctctactaaaaatacaaaaattagccgggtgtggtggcgcatgccagtaatcccagttactaggtaggctgaggtacgacaatcgctggaacctgggaggcggaggttgcagtgagctgagattgcactactgcactccagcctgggtgacagagaaagactctgtctcaaaaaaawaataataataataataataataataaaccctgatgaaaggtttctaaaatgttttcatctaatggttttcttgacaattaaattttctatataatgtcagttcataaaaaaactgagaacgaccacatgtcatatcgactgcttaaaagaaaatacgtatatttacaaacatatacacaatactgtcttttgtctggttagtttagaggttagaataaac

SEQ ID NO: 797647 - DNA, 624 bp, Homo sapiens
attggggtttttttgtcctttttttttttttttttaaatctaaagcttcccagttgattccaatatgtagccagaattgagaccagaaagctgttaatacccaagtagtatactaatattaataatgatcataatagattaataactaacattgaatgaactttaaatgtgttagctgatttaattctcaatgactctgaggcagttactattattattaatgtaccccttctacagatgaagaattcaagataccaaaaatctacataatttggcaaacaagtaaatgctaaagttggaattcaaacacaggtagtttagtgtccgagcccacactcttcaccacyacactggtggattgcccacctgcaatgttaaaaatcgcagaggatagtgatgatactgcagacacactgcctgcattttatctcctccttgttaggctgagccattcatacctcagtggtccacaccttaaaggcaggatataaaggtaaatatatgtaccttctctgatatgaactagagactccatcccttctttttaagtaatgtaaatgattaaccagctttctgttattcctttcagaatctcattcatagaataaactcctggcataaatt

SEQ ID NO: 797648 - DNA, 624 bp, Homo sapiens
attggggtttttttgtcctttttttttttttttttaaatctaaagcttcccagttgattccaatatgtagccagaattgagaccagaaagctgttaatacccaagtagtatactaatattaataatgatcataatagattaataactaacattgaatgaactttaaatgtgttagctgatttaattctcaatgactctgaggcagttactattattattaatgtaccccttctacagatgaagaattcaagataccaaaaatctacataatttggcaaacaagtaaatgctaaagttggaattcaaacacaggtagtttagtgtccgagcccacactcttcaccaccacactggtggattgcccacctgcaatgttaaaaatcgcagaggatagtgatgatactgcagacacactgcctgcattttrtctcctccttgttaggctgagccattcatacctcagtggtccacaccttaaaggcaggatataaaggtaaatatatgtaccttctctgatatgaactagagactccatcccttctttttaagtaatgtaaatgattaaccagctttctgttattcctttcagaatctcattcatagaataaactcctggcataaatt

SEQ ID NO: 797649 - DNA, 567 bp, Homo sapiens
aggcaatgttgagaggaggcccgtggggctgcatgttcttcagtgtaatgtgaagtactgagctgattatagtggttattcaattaaaagatatgtattttaaaattattattatactttaagttctgggatacatgtgcagaacgtgcaggtttattacataggtatacacgtgccacggtggtttgctgcacccatcatcccgtcatctacattaggtatttctcctaatgctatctctcccctagccccccaccccacaacaggccmtggtgtgtgatgttcccctccctctgtccatgtgttctcattgttcaactcccacttatgagtatatttttaatgggcaagctctgctcaaatacaggctacagtcagtatgtgactgagctgtgatctctctcgtcaaagggactacagcgcaccctttgaattaccttcacactcactgacggttttaagagtttggccactttccccacgtctgaaagcgactctaccttagatgtgagaaagatgcggctgactttggctggcagatggagaagaatggaaaagcagcagaca

SEQ ID NO: 797650 - DNA, 656 bp, Homo sapiens
tctcaggatcctagatgggaggggcagcccaggagacctctgaaatgccttcaagatctctttctatcttgatgaatagcacgtgacttccttttatccatgctaatccccttatgcaagggttccttggccacacccttgcatgctttgcttttttgttctttacatatacaaactgtgacttttccaaatcattactttctgcttcccttttcataatatgttttgtttttaaatcattctaccttctcgcatctttactatatgcagttaaaagtagccacgcagctctttcaatattttgcttagaaatttcttccaccagatatcctagtgaagtggctacattgtctggggtatataccctggggttcatcatcatgcaccaggaaaatttagggcatggacacacacaaggggtttaggagtagaggtttartaggtagaagataagagaaggagaaacagcctcctttataaagggaggggtctctgatcggaaaggactggctggtggcaaatgtgccgagttttatagtccagtttgaggaggcagtgtctgatttctgtaggggtcacagattggttagatcaggtatgaagtttacatagtgcatggggaaggctggttgccccaccataatcttcttatgaaa

SEQ ID NO: 797651 - DNA, 656 bp, Homo sapiens
tctcaggatcctagatgggaggggcagcccaggagacctctgaaatgccttcaagatctctttctatcttgatgaatagcacgtgacttccttttatccatgctaatccccttatgcaagggttccttggccacacccttgcatgctttgcttttttgttctttacatatacaaactgtgacttttccaaatcattactttctgcttcccttttcataatatgttttgtttttaaatcattctaccttctcgcatctttactatatgcagttaaaagtagccacgcagctctttcaatattttgcttagaaatttcttccaccagatatcctagtgaagtggctacattgtctggggtatataccctggggttcatcatcatgcaccaggaaaatttagggcatggacacacacaaggggtttaggagtagaggtttaataggtagaagataagagaargagaaacagcctcctttataaagggaggggtctctgatcggaaaggactggctggtggcaaatgtgccgagttttatagtccagtttgaggaggcagtgtctgatttctgtaggggtcacagattggttagatcaggtatgaagtttacatagtgcatggggaaggctggttgccccaccataatcttcttatgaaa

SEQ ID NO: 797652 - DNA, 604 bp, Homo sapiens
ctatggaactgaacaacaaacaagctgtgctaataagtaaataaataaataaaagataacgaagaactgaaatccacacttcaaatagagcactacaggaagcagaacacattccccaagccaggactctggcttcacctgtattcaccacagcatctgctccctgcacagctgrgccccccaaagccagatgccaggggcacagtgccagcctgcactgcaaggccacagccagccagaagtaggggcatagccagagcttaggaatggcaagatccttcaggaaaaggctgacaatttgagtttcctttgcaacaatcataaaatccctgtgaacttgatatattttgcagatctacaatccacagcatgaattggtgagttagacagaagtaaatttaaccttttctatctaccttttctatgtccccccatcagtagccacataagccaatttggtgaggtgtgggccagcggggctttcagcaagaaatgtcttgcaaggcccctaaatcaacagagacctccaaacagtctcagagagctatcttagcctgaaaagcagcaaagagtatggttctgagagatgtagctggtgtccaac

SEQ ID NO: 797653 - DNA, 604 bp, Homo sapiens
ctatggaactgaacaacaaacaagctgtgctaataagtaaataaataaataaaagataacgaagaactgaaatccacacttcaaatagagcactacaggaagcagaacacattccccaagccaggactctggcttcacctgtattcaccacagcatctgctccctgcacagctgggccccccaaagccagatgccaggggcacagtgccagcctgcactgcaaggccacagccagccagaagtaggggcatagccagagcttaggaatggcaagatccttcaggaaaasgctgacaatttgagtttcctttgcaacaatcataaaatccctgtgaacttgatatattttgcagatctacaatccacagcatgaattggtgagttagacagaagtaaatttaaccttttctatctaccttttctatgtccccccatcagtagccacataagccaatttggtgaggtgtgggccagcggggctttcagcaagaaatgtcttgcaaggcccctaaatcaacagagacctccaaacagtctcagagagctatcttagcctgaaaagcagcaaagagtatggttctgagagatgtagctggtgtccaac

SEQ ID NO: 797654 - DNA, 565 bp, Homo sapiens
ggtgacaagaaacatcagtgggtggtgtttcctatcaccagtgattcagattactgtgtggcttccttcacccccttctctcctaattctacaagctccacttcatatccagtggaacttacatttatttgtaatctcactgcttacaytccactgaacaataaaagtacaataaacttaataaaaagcgcaagtgattggaaattgctctgggaatggcagtccagtatgaaagctataaatttacttgtgtgctcatgacaatgtcagctaatttttatgaaaagcctatcacagaacatggcaccaaaatgctgtgatcattcgtgtgtcagccatcacacttcccatgataacaaaatagaaaatgcgtcataaaatgatgtttcaagtcacaaattcatcttgaaatgctcactctatccaggagtatttcttttctgaccctgtcttgcacctgaactttgaattaatcattccttttctgtagtgttacacaatacccgctggtaccgttgttgggggggcgtggagaatctagaaaacaaccaccagaaatatcatc

SEQ ID NO: 797655 - DNA, 679 bp, Homo sapiens
tgttttgtcttctaggctgcagaattttgcaagtcctaattttaacctggtaaaatccactttgtttttttgtgtataaaaataggtatttagctataatcattataaaaggaacatatagagagatgaataactgatttataatccattcttatgtaattaagagacagtttttgatttcartgaaatgacaattgcataatggattttgaaagcaagataaatatgaagtgaagaggaagcgacatttatgaagtacacagggagaaaagcggtgagatttatttttcaagttataaaacatcatccaatcacgatattcacttttatggttacaatttgccaaatgatctcaaatcttgttaattaaaaaaaggcgggagggtgacatggctaaaaacagaagagaagccttttgtgctttgaaatggaaagatgcctgctaattttctcagggccaactcacctagagaaaaggacttgatcagaagtatttaaccagtgagtatttctcattgattgattgtacttgtatatacctctagttattaaaacttgatttataatagaccatcaaaatatttgaatctcccttttgttaaagtttcttgttctcagtactcaatttctaaaaactgaaaaaaaaaagtgaactggtataaagtaatacaattttttt

SEQ ID NO: 797656 - DNA, 643 bp, Homo sapiens
ataaactgaggtacaccaactcaatggaataagtactatttattaaaaagaaatgaactctctacccaagaaagaaaacacatgaaagaaaataaaattaatattactcagtgcaagaagccagtcttgaaagactacttactgtataattctaactgtatgatattctggaaaaggcaaaactatggagtcattaaaaaaaaaaaagtgattgttatgggttaagaagaagggagggggcccggtgcagtgtctcacgcctgtaatcccagcacttggggaggcagaggggagaatcatgaggtcaggagatcgggaccatcctggctaacatggtgaaacccagcctcyactaaaaaatacaaaaaaattagctgggcatggtggcacatgactgtagtcccagctactggggaggctgaggcagaagaatcgcttgaattcaggaggcggaggttgcagtgagcctagattgcaccattgcacttcagcctgggcgacagagtgagactctgtctcaaaagaaaagaaaaaagaaaaagaagaagtggggggaggaggaggaggaggaaaggagggcgggatgaatagggagaacacaggattagggcagtgaaattattttgcattacactataatggt

SEQ ID NO: 797657 - DNA, 511 bp, Homo sapiens
gacagacatggaggacaaatagagggaggagggaggaagggggttgaaacactaactgttgggtaccatgctcactacataggtgacaggatcattcatatcccaaatctcagcattatgcaatataccattgtaacaaacttgcacatgtgccccctgaatctaaaataaaagttgaaattatttaaaaaaaaaaaaaatgtggcygggcatggtggctcacccctgtaatcccagcattttgggaggccaaggcgggcggatcacctgaggccgggagttagagaccagtctgaccagcatggagaaaccctgtctctactaaaaatacaaaactagccaggcgtggtggcaggcgcctgtaatcccagctactcgggaggctgaggcgggagaatcacttgaacccgggtggtggaggttgcagtgagtcaagtttgtgccattgcactccagcctgggcaacaagagcaaactgtctcaaaaaaaaaaaagaaaagattttgttatt

SEQ ID NO: 797658 - DNA, 604 bp, Homo sapiens
cacattctgggccaaactcctgttgttggggcgggaggtgggaagaggaaaaaagtacaggaattcacatgaatctgctgtatggaaatgtgctccatacgatctggcagggagagtacgctgacatggcaatgtggcccagtggtgacaggccagggctgtgagctagggacctcagtggaaacatggctctgtttcaaatactctccgtgtccttgggcaagtggctaaatatctctgagccttggtctcctcatgtatctcccatggtttgtgaggatagatgagacaatgcatccaagcccctagctgtggcctgagcacacagtagccttctatcactgatggcaaaattgctacataagaacctcctggttaggcaatttgctcctctcaaatctctgaccaaactaaacccagtgaaatatttccrttccctggaactgcacctagttaatttatccacgttatcaaatccaggcacatctgatttatagaaaactggaaagtcatccaggtttctgccaattttccttacgtagagaatgtttcttcctaagattctccacccgttaaaggggaggatcttcaaaatctctaaaga

SEQ ID NO: 797659 - DNA, 591 bp, Homo sapiens
accaatccatgtaaatacatcaaacacctgtaaaagagaaagctcctctccactacctcccacctcccatcaaatctgccttttgttatattttatactatttaacactttacttcttaattcataaagaaaccttccgactacatttatgttaaaatttggggacttgattttaggattgcattttttaaagaagttgtattctcgtaaaagctctagtatttattaacagccacttgagtgacttggcaacacccaatatatcaatttcattaatgatatcattgcagtgttcartggggaatgtccattttcatacatttgttttctcaatgccattatttcagatttcactgccggaggatgctcaatatctgttcattactcaattaaatagaatttgctaagtgtgtttcatgtccgagtctgtggagcactgggaaggtcaaagaagtggaaactatggtggggaaataatacagacccttaaatactgagagacaaggacaaaccctagtcttcaaactatgccgagacccgtccaattccccttgcctctgagaggtaattcattaaaaaccatagacagaa

SEQ ID NO: 797660 - DNA, 635 bp, Homo sapiens
agccacagcacagaagatgacagccgcctctgggctttcacagcttgggggaattggaagactttactaggacccagaaaacctacttggtctggagcatgaagcatggttgggtgggtaaccaggaaggaatctctccttgctccyctgtggcctgccggggaggctccccatatggataaatgcacccagaaaccttctcaggagaggagctgtaagggggtcagtgaggcgcatgtttttagggtgacccctagacctgcggctggtgacatcagagacctgctggctggcagcagcagccctgggacaaaaacaaatgccacccagccacagccacagccagcaagtgggagcagcggaaggctgaagagctggaggcacaggctgctcccaagggacagggacaggctccacagccactgtgtgaccagggcccaggtgcctgccacggcccccaaacagctgagctacaaagcgtgtctctgaaaggagcccttcctggagagaggagacgcgtgcattcttctttgcttgcccggtgtgttcaaggtgccccgtacctctttttcctaggactccatgccaacgaagaatgctgacttgctgccaaggcccacaggaacattctccac

SEQ ID NO: 797661 - DNA, 646 bp, Homo sapiens
tgcctgcatggtaaggtcttaaccttttaggttgacattaaattggaagaaactgctcgcgttagaaataattactgctgataatgaatacaattaagcataaaagaatctttataactctggtaccatttgtgcacttagaaatcggctcatatttttcccttcacagatgttacaataatggtgtcaacacttttatttctttgtccataagctgaaaattatggctgtttcataaattgctaacgtgctcagaagatggaggcccagctgcagggcacatgagttcagacttctgctmgagcctcatgtttcacaatgacctcagtttcctgtgctgaatgggaaccgatgcgagtaagtacttgtaaaactgtttttgaagagtgaagttatgaagaggtgctgcgtgtcaaacatctgcttcatccattacactcagctaggagctgggaatgtacagtaggggcaagacgcatcaataaattaaaattctcctgtgagcacactttctaagtgtgtgccaatttgagccatgaaaaaaaaaagatgctaaacaagaaaagggaagtttttttgctcactttaccagagctggcttgggtggcaatcactataatctgagtttctttatgtaactgatggg

SEQ ID NO: 797662 - DNA, 616 bp, Homo sapiens
attaaatgttctctgaaaagaacgtctacccacgcttattatcccattatacggtggttgtcacttaaccatcgtctcactgttggatctttaagtcacgttgttttgagaccccatacgctgcactgaccacacatggggtccccgtgggcgctctggccgtcctgcggtgtctgccccatttattcacagcctgagcgcccctgcatgagacactgggcagtgccgggtgtcgagcctgcagcaaggcacagtcagtcaggcctcggagtccgtggagagtgaggaccgctgcggascagtcggcagccaccaagtgaaggcaccaagggctgcaaggtcatatttgagaggagctccagaaaccaaagaccgggtgccttaagcaaggatggggagctcaagctggttgacagagcctggaggcttcactgtccactcctggagctgctcatcagcagagcagagaaaagattagcaggaaaaaggagggatgagtgtgggcccgtgtgtgcatgtgtgaatatgtatgtgtgtgcacatctgtgcacatgtgtgaacatgtgtgtgcctgtgtgaacatgtgttcgcctgtgtgactatgtgtgtacctgtg

SEQ ID NO: 797663 - DNA, 589 bp, Homo sapiens
ccgctccacccctgtgccttttctggcccacttgaaatttgatgtcttgggttgtagcctatttttaaggttgagtctcactcttagactatgagctcttgaaaaataataactgtgtcttatttgtctttgctcttccacttacatataggaactactaatgacatttagcaaatgtctctttatcttttgatggagcagagagaggtcygaggatgaactgctttcatcttctcgctgtgtgatcttgcacgggtcctttcctatccctcctctgccactcttctaggaccgaaggggttcgagggtgacctttctggccacttgcaattgctaagagtgtattgatttgagaattaaaggaacgtggctcttgaaatgtgtgtgcggtagaggccatccaaaatagctaatgaagaaacatcctggggattacgccaagttcacaacgcattttaatgagccgtgagtgtgtgtgaatgcgtgtgtcgaccacatgcacattgatggctgtggcagggaggacgctgtttctgagagtagagtcctcacttctgagaaacttacagaaggtggaacagatcacgcc

SEQ ID NO: 797664 - DNA, 589 bp, Homo sapiens
ccggggttcatttctgtctgctttctttgatcatcagcgcagttttgaccatcgctgttttctcagttttcccatcttagagccaaggaagaaaaagttgaagtcacaacttttaatcccaaggaacaagaaccaggagacgagggctttccgaggagggaattagcaaagtatcattttcctttgggtctagaatcgagaaaagtaaacaggacttgctgctgaaacctgaaatcccatcaaagagaattcccggcggccgagagcgktcatgaaaaacgcggaaactcggacaatgagtagggcgcagagtcagaaatttatagactttggcctctgccgctacatatcctggaagggggaaaaaaaaaaaaaagtgttaagaaaacaaatgctgcttgtggatgtgtggattccgacactggccgcctgacaaatcggcccttggcctgaccctcacaatatgtttccacaggtaattccataactctctggccaacttttaaaggcttcctgtttgacagccaagagaaaggaagtaccccggccccggggagccgggcgctgcgcaccccggaccatcagcatg

SEQ ID NO: 797665 - DNA, 633 bp, Homo sapiens
caggtgtagaaaataataatactatagtaaatgctattgagcattaacctggctttgcccatatcatcacctccaatttttatagcaatccagttaagtaggtagcatcatccccagttaacattaggaaactatggttcaggggttgggtaagaatggaatgagttatggcattagccagctacttcctggtacagggcttcagtgktcatgacggtgtgtactaggctctgggggcatacatgtacttgaagcttctttgtggtctctggaaactcttggtcatattgagaagacatacgcagtgagaaaggctcaaactggagccttgagggcacaggaaggtggaatcaccgagacttgggagttcataaaaagaagcaagcactgaattggctgaaaagggggaagtgttgaagggcctaaattctgggggacagaaggtaaacagtagatttagacggaaaatattatttattagcaggaaaaaagtgaagtgcaattacaaacaagatttcctaatgtgggtatgtgggtaaaaggtcatcaggctgggaaagccaatgtagggattgcaattggaagcacattcaagtccaggtaataatagctaatacttattgagcccggctt

SEQ ID NO: 797666 - DNA, 488 bp, Homo sapiens
tatacatatgaaatatagcagtattatagagtgtattttttccaaaagctttaaagtaaaaagtgcttttaattaaacatttatcttaatatattaccaaaagtcactttatttcagaacaattcggcaatattttaagtagatcttgacaaaaatgcactaaatctattttttaaaatgttttattacttgcaagtttcagcctgatgtgattttaaaatagccaagttataagtccctgaaaattggagtttataatggaaatactgacagacccttaacttttaggagagcgagtgtgctgtcataataacatttgctgttgctgcctcagtcagtgtagmaatatgactagggtgctagatatggtatttcaaatatgaagctggttgaaaacttgctgaaatacttttctatgtttctgaatttttagaaaacttgaatcttgttttggaaactccttttctctccagttattgcaatgaaca

SEQ ID NO: 797667 - DNA, 513 bp, Homo sapiens
tggtctcccatgagaatagtgccatatcaggagctccactagctccatgttgttctctgcagctgttgtctgctataattgagtactcaacagtgagtatagtcagataagcctggtgagaggaagttcataatgctgggtctacatataacctctatctctgttatcatagtcattagttcatgagcccaccaagcaatgacagcagtgactgaaaaaggaggctaactttgtccacagaatgggttctactatccatctggttataaaratccttctctgctgaggtcatcctttgatgcacactcacagggaacataaatcttcaacctctctgcctgtttggaaaggtctcctaacaagcaattttccaatggtgttcctttgaagtccctgacaaaccagtcaaaccattagccacagcttataaattagtatagacttggctgagcacagtggctcacacctgtagtcccgacacttttggaagcccaggcaggtggattgcatgag

SEQ ID NO: 797668 - DNA, 614 bp, Homo sapiens
tgtcagaaaaatggtggaatagaaagctccaagctcccaaactccccacaaaaacataaaacacaagcaaaaactatgagaaccaactttgtcagaagtctgtgtccggaatttattccttccagtggatccttggtctcgctgacttcaagaatgaagcgacagaccctcgcagtgagtgttacagctcttaaagatggtgtgtccagaatttgttccttcagatgttcagatgtgtccggagtttcttctttctggtgggttcgtggtcttgctaacttcaggagtgaagccgcagaccttcgcagtgagtgttaacagctcttaaaggtggcgcatctggagttgtttgttccttccagtgggtttgtggtctcgctgacttcaggaatgaagccgcaaaccctcgcagtgagtgttacagcttayaaaggtagtgcggacccaaagagtgagcagcagcaagatttattgtgaagagcaaaaaaacaaagcttccacagtgtggaaggggacccgatcaggttgccgccgctggctcgggtggccagcttttattcccttatttggccccgcccacatcctgttgattgatccatttcacagagtgctga

SEQ ID NO: 797669 - DNA, 644 bp, Homo sapiens
tcattataaaaagtaatcaaatcacaaagtaaagcagaaagagaggaagatagggcacagctataaaacagagagaaaacaatataattgcaatagtaagtcttcacctagcaataataattttaaatataaataggttaaagttaacattcaaaagatrcagagaagctgaaaggatgagaaaagcaagatccactatatgctatttgcaagagacttgctttagagttaaggacaaactgaactaaaagtgacgggcttaaacactaaaagagaaggagaggaaaagatatcccatgcaaacggtatcaaaaagagagcagaagtggctgtacttagataactaagatgtcaagagacaaaaaaaaggtcaccacacaaaaataaaagggtcaattcaccattaaaatgggcgacagagcgagactccatctcaaaaatatatatatgtatataacaatgataaatatacctgtgtccaacgtcagagcacataaatacataagaaaagtaataataggtatgaagagagagacttcaatactccactttcaaaaatggatagatcatccaaacagaaaatcaataaacaacagatctgaacaacactgtagaccaaatggacctaacagccatttaaagaa

SEQ ID NO: 797670 - DNA, 620 bp, Homo sapiens
cagaaaaaaaaataaaattagaacagaaataaataaaataggaaaaaaatatagaaaaaattgatgaaaatgtgagttcggtttttgaaaagataaagaaaattgacacactattagctagattaattattaaaaagagaagactcaaataaataaaactagatgaaagaggagacactacaactgatgccatggaaatgagaaaagatcacaaatgactattatgaacaatttatggaccaacaaactggacaacaaagaagaaattgttaaattcctagaacctaccaataacctaccaagactgaatcaagaaaaaatggaaaacttgaaaaggtcaatagtaaataataagactgattcatggttttcatgttcagagattctggttactggttcagtctcactatttgttattgattttttaatgtagaaaaccctaaactacacacacacacacacacacacacacacacacacacrtgcacaatggttagaactaataaattcagtaaaggtacagaatataaaattaacatacacaaattggttttgttttaatatactaacaacgaactatccaaaaaggaattcaaaatcaatcctacttacaatcacat

SEQ ID NO: 797671 - DNA, 567 bp, Homo sapiens
aaacaccatattgtaccccatgaatgtgtaccattatgtcaattataaattaaaatcttaaataaaaaggaagagaggcttagactacaatagtgacaccatttaattgtgaagcctctgaattgttaaaaatatgccagaaatcaaagtttccattcatttttataaaaatttaagtaaaagaccacaattcaattaaatgaattgaaaagaccaattaattttcaaaataattttgaaaattaattttcaaaatwattttgaaaattaattttcaaaaaaagaccaaattaattttcaaaataaactatgaagttacatgtaaaaatcatgaaagtgtttctactgcaaggatatggaaacactctattacttcatatactatatgcacttaaaaagttgaaagtcaattttatttttccaagagtattaatcttttttaaaaagtttaaacattttaaaacagaaataattgatttaaaaatcagaatgaataaaaaaagattccaacataaagaaataaattaaagagaagtaaacatggattgggtagaagaaacaaaaagc

SEQ ID NO: 797672 - DNA, 584 bp, Homo sapiens
gtgtagaggtgtttacagtattctctgatggtagtttgtatttctgtgggataatgggtggtatcccctttatcattttttattgcgtctatttgattcttctctcttttcttctttattagtcttgctagccatctatctattctgttgactgtttcaaaaaactatttcctggattaattgattgtttgaagggttttttgtgtctctatctccttcaattctgcwctgatcttagttatttcctggtttctgctagcttttgaatgtgtttgctcttgcttctctagttcttttaattgtgatgttagggtatcgattttagatctttcctgctttctcttgtgggcatttagtgctataaatttccctctacatactgctttaaatgtgtcccagagattccagtatgttgtgtctttgttctcattggtttcaaagaacatatttatttctgccttcatttcattatttacccagtagtcattcaggagcaggttgttcagtttccctatagttgagcagttttgaaagagtttctcaatcctgagttctaatttgattgcactgtggtctgagagaca

SEQ ID NO: 797673 - DNA, 694 bp, Homo sapiens
gccaaggaaaagactctgggaggatcctgaggaccccccggttgcagccatgttgagagtgatgctgaggaggaccccaactgtcatgagcaacacccattgaacacagccacccacctggggacaaatcaagaagctgtcawaaatggcagaaaaaaacctgagaaaagcgagacaaccagtcacaacgaataatttaatggtagctatgatagtggttatcaccactgctgtgagtattccttcaataagggctgacacagagaacaattatacttattggttatatttatcagtcttggctggcaataatgcctggatgcaatcactttatgacacagttacacatgctttctgatctcagtatttaccataataaatctgcttctataattgaggcataccaccctcaaaaacctatttgtaaacaggattggacccagttagaaaaaatgaacctactagtttaggaagattgcattgcagagcaggcagaggtgctgcacaatgattcctatggaatcattattaattggtcccctaaggggatgtttagcttgaattccacctctcagtctgcatgccaggcccacactatgttcagctggtctgaacaaaatggtcagatggtagatataataagaagtacagcaagagttcctattatctggaaccatggcagtatagtggcacc

SEQ ID NO: 797674 - DNA, 694 bp, Homo sapiens
gccaaggaaaagactctgggaggatcctgaggaccccccggttgcagccatgttgagagtgatgctgaggaggaccccaactgtcatgagcaacacccattgaacacagccacccacctggggacaaatcaagaagctgtcataaatggcagaaaaaaacctgagaaaagcgagacaaccagtcacaacgaataatttaatggtagctatgatagtggttatcaccactgctgtgagtattccttcaataagggctgacacagagaacaattatacttattggttatatttatcagtcttggctggcaataatgcctggatgcaatcactttatgacacagttacacatgctttctgatctcagtatttaccataataaatctgcttctataatkgaggcataccaccctcaaaaacctatttgtaaacaggattggacccagttagaaaaaatgaacctactagtttaggaagattgcattgcagagcaggcagaggtgctgcacaatgattcctatggaatcattattaattggtcccctaaggggatgtttagcttgaattccacctctcagtctgcatgccaggcccacactatgttcagctggtctgaacaaaatggtcagatggtagatataataagaagtacagcaagagttcctattatctggaaccatggcagtatagtggcacc

SEQ ID NO: 797675 - DNA, 617 bp, Homo sapiens
agataacattggaaaaacttctctggacatcggcttatgcaaaaaactcatgactaaaaccccaaaagcaaatgcaacaaaaataaaaataaataaatgggacttaattaaattaaaaatcttctgcacagcaaaagaaataatcagcagacaagccacagagtgggagaaaatattcacaaactattcacccaacaraagactagtatccagaatctacaaggagctaaaacaaatcagcaaggaaaaacaaataatcctatcaaaaagaggcaagaggacatgaatagaaaattctcaaaagaaggtgtacaaatggccaacaagcatatgaaaaaacacccaacatcactaattattagggaaatgcaagtgaaaaccatactgagataccaccttactcctgcaggaatggccataattaaaaagtcaaaaaacagttgatgttggtatggatgtggtgaaaagggaacacttttacactgctggtgggaatgtaaattagtacaaccgctatggaaaacagtatggaggttccttaaagaactaaaaatggaaccgccatttgatccagcaatcccactactgggtgtctacccaatgaaaagaagtcatta

SEQ ID NO: 797676 - DNA, 643 bp, Homo sapiens
  misc_feature 154, 367: n = A,T,C or G
caagttctcaccaacttctgaatttctttctcttcaggtgtattttaagcagtgattagtaatcaaaaattccagttgggcaaatatttattgaactcggggcaaagcacactgcttgagattggggatctatgcgtgaatagagctcctaatntagtagatgactcagtggagcatgtaactaaattgtaactcagtgcagtaagagacttaagtaaattcctaaggggagctaagaagaaggaattcattctgacttgaggaattaggaaatgtttcacggaggtaacaggggcctttgtgctgctccttgaattagggaaaacaaacatcctgggtgaccagagatattcccctcccacactgntatccaggtgtatttgatttttttaagataaggtcttgctctatcacccatgctggagtgcagagacatgatcatggctcactgcatcctcaacttccyaggcttgggtgatcctcccacctcagccttctgagtagctgggattacaggcacatgccaccatgcccagctaattttttttttttttttttttggtagagatgggtcttgctatgttgctcagtctggtattgaactcctggcctcaagcaatcctcctaccttggcctcccaaac

SEQ ID NO: 797677 - DNA, 643 bp, Homo sapiens
  misc_feature 154, 367: n = A,T,C or G
caagttctcaccaacttctgaatttctttctcttcaggtgtattttaagcagtgattagtaatcaaaaattccagttgggcaaatatttattgaactcggggcaaagcacactgcttgagattggggatctatgcgtgaatagagctcctaatntagtagatgactcagtggagcatgtaactaaattgtaactcagtgcagtaagagacttaagtaaattcctaaggggagctaagaagaaggaattcattctgacttgaggaattaggaaatgtttcacggaggtaacaggggcctttgtgctgctccttgaattagggaaaacaaacatcctgggtgaccagagatattcccctcccacactgntatccaggtgtatttgatttttttaagataaggtcttgctctatcacccatgctggagtgcagagacatgatcatggctcactgcatcctcaacttcccaggcttgrgtgatcctcccacctcagccttctgagtagctgggattacaggcacatgccaccatgcccagctaattttttttttttttttttttggtagagatgggtcttgctatgttgctcagtctggtattgaactcctggcctcaagcaatcctcctaccttggcctcccaaac

SEQ ID NO: 797678 - DNA, 643 bp, Homo sapiens
  misc_feature 154, 367: n = A,T,C or G
caagttctcaccaacttctgaatttctttctcttcaggtgtattttaagcagtgattagtaatcaaaaattccagttgggcaaatatttattgaactcggggcaaagcacactgcttgagattggggatctatgcgtgaatagagctcctaatntagtagatgactcagtggagcatgtaactaaattgtaactcagtgcagtaagagacttaagtaaattcctaaggggagctaagaagaaggaattcattctgacttgaggaattaggaaatgtttcacggaggtaacaggggcctttgtgctgctccttgaattagggaaaacaaacatcctgggtgaccagagatattcccctcccacactgntatccaggtgtatttgatttttttaagataaggtcttgctctatcacccatgctggagtgcagagacatgatcatggctcactgcatcctcaacttcccaggcttgggkgatcctcccacctcagccttctgagtagctgggattacaggcacatgccaccatgcccagctaattttttttttttttttttttggtagagatgggtcttgctatgttgctcagtctggtattgaactcctggcctcaagcaatcctcctaccttggcctcccaaac

SEQ ID NO: 797679 - DNA, 627 bp, Homo sapiens
ccatatggggagtgggggaggaagggggagcggtgaggtcatggccatcgttatgaactcatagagcacctttcaggagcacaaagagcttgctgggagacagggcatagggacacatgggcttggagatgacctcctctggctgtgatttggcatttcctccgtatctaacttgcctgggrgactcctgccaagccagaggagcagggcacaaatggaggcagatcctgctggagatgggcatggggagggggactgacagagcacccttggctgctgttagacagttgttcagtcatcacacctgttaacccaagttggtcaggtctgtccaggtgctgtgactcaccttgccggctcagaagagacactgaatgatacggtggggagcacaggcctaggggaatcctgcagctgagtatctggcttttgctctgccaatggtccagtagattagggggtctgtggcctgtttcctcatgctctgagattctgtgcccagcccaggtctctctgttctggaaacaaaggcccagatccccatatttccttcttgctgttttgttttggtttttgaagagtctcgttctctctcctggagtgcaatggtgtgattttggctccctg

SEQ ID NO: 797680 - DNA, 608 bp, Homo sapiens
ggacacatcagactttgtcatgattgggcatcaaaggcatgagcttataggaccttgatgtaagatcctctcaataacaggcatctctgttacatacaattttcaactgtctattcaataatcagtcaatcaaaaaacaactgccatgacatactacgaatgctccagatggtagtaagctaccaaagatacacaaaataaagtctctggtcaagcacatgaatgttytgcatattcaaaaaaaataaagttaaatcacgaaagatgaagggggaaaactcaaacaaaatgcaaatagaaacaaatgaacccagctgtatttcaaatgaataataggctgaataaaggtgcaggagggagagaactaatccatgtaattaattttttttttttttttaagaaattggatctggctctgttaccagggctggagtgtggtggtgtgatcatagctcactgcagccttgaacttctgggctcgggtgatcctcccacctcagcctcccaagtagctgggactacaggcataagccattgtactcagctccccaggtaatttttgaacaaagtactttaaccattagactccagtctaggaaaataaaaga

SEQ ID NO: 797681 - DNA, 608 bp, Homo sapiens
ggacacatcagactttgtcatgattgggcatcaaaggcatgagcttataggaccttgatgtaagatcctctcaataacaggcatctctgttacatacaattttcaactgtctattcaataatcagtcaatcaaaaaacaactgccatgacatactacgaatgctccagatggtagtaagctaccaaagatacacaaaataaagtctctggtcaagcacatgaatgttctgcatattcaaaaaaaataaagttaaatcacgaaagatgaagggggaaaactcaaacaaaatgcaaatagaaacaaatgaacccagctgtatttcaaatgaataataggctgaataaagrtgcaggagggagagaactaatccatgtaattaattttttttttttttttaagaaattggatctggctctgttaccagggctggagtgtggtggtgtgatcatagctcactgcagccttgaacttctgggctcgggtgatcctcccacctcagcctcccaagtagctgggactacaggcataagccattgtactcagctccccaggtaatttttgaacaaagtactttaaccattagactccagtctaggaaaataaaaga

SEQ ID NO: 797682 - DNA, 564 bp, Homo sapiens
  misc_feature 558, 564: n = A,T,C or G
ctatgacacttgaacatactgcatttttattcagtaaaaaatgtttttcatgttttgaagatgaaaaagtgaagaaaactgccctaaatgttttatgatctccagaagcaaagttcatataatgttctaataaattatctctaatttttatgctacatgcccaaaaagttgtagtttcttatgaagtggcaraatttgtattgccttcttggtagacagattccatttcctggggtttattgccccaattaaatgattggggacaatcaaaagtctcagacatcaactttcgataatgtttcataaaaaacaatgaactcgaacccttatttttgacacaagaagtaaagaattatgaatagttcggtgaaattttttcattcccatatattatttctatagagcaaattcacagcataactaactggatgggtataaatgtgttgtttttttcttaccatttagaaatgatattgggaagccgaggcgggcggattacgaggtcaggagatcgagaccatcctggctaacacggtgaaaccccgtctctactattanatcaan

SEQ ID NO: 797683 - DNA, 564 bp, Homo sapiens
  misc_feature 558, 564: n = A,T,C or G
ctatgacacttgaacatactgcatttttattcagtaaaaaatgtttttcatgttttgaagatgaaaaagtgaagaaaactgccctaaatgttttatgatctccagaagcaaagttcatataatgttctaataaattatctctaatttttatgctacatgcccaaaaagttgtagtttcttatgaagtggcagaatttgtattgccttcttggtagacagattccatttcctggggtttattrccccaattaaatgattggggacaatcaaaagtctcagacatcaactttcgataatgtttcataaaaaacaatgaactcgaacccttatttttgacacaagaagtaaagaattatgaatagttcggtgaaattttttcattcccatatattatttctatagagcaaattcacagcataactaactggatgggtataaatgtgttgtttttttcttaccatttagaaatgatattgggaagccgaggcgggcggattacgaggtcaggagatcgagaccatcctggctaacacggtgaaaccccgtctctactattanatcaan

SEQ ID NO: 797684 - DNA, 524 bp, Homo sapiens
caattctctttttttttttaagatggaatctcactgtcacccaggctggagtgcaatggcatggtcttggctcactgaaacctcctcctcctgggttcaagcaattctcccgcctcagcctccctagtagctgggactacaggcgtgtgccaccacaccyggctaatttttctattttttcttttaatagagacggagtttcactatgttggccaggctggtcttgaactcctgaccttgtgatcctgccacctaggcctcccaaaatgctgggattacaggtgtgagccaccacacccagccctttctgcccaattttttatgaacacgaaactgcttcaaaaaataaagtctattaaaaatgttgaaagtgtcctacataatcaaagttcaatgagcataagtaggaaattaacattgctgcattattgacatctcatctgcagattccaatctcatttggcctactgtccaaatagtgccctttatttgtccaggatccaatcagaatcacacattgcatt

SEQ ID NO: 797685 - DNA, 615 bp, Homo sapiens
aacctggaagtcatcacttcatcctattaacaagtaaaaagctgcacagactgaaaatcaataacctttccttagatcaggggaagaaatgaggtcacaggacaaacctcaaatacggagaatcaaaactcacatgagcaaaaacccagcagctaaaacctccatggaaacccatgcggggataggaaacctgtawctgtaactgatgaatcactgggggctcagtgtggatgagtctgagagacaaaacccccaaaaggacctggtcattagagacccacgacttttgtgagttctacatcctggagttctaccaggttctcacagtgaatatcaaagggaaaaaaatcaatcccgttgtgcttccacagggagaaggaaaaaggaaatatcttaaaatacaccagagaattctgttattattaacaaggtctgcccttaggacaagctgcttaaccagagtctaacctactgggaaattatcagagcctaacttgcctgggagaagggaaatacacaattccagccctttctaactttcctcgtggaggaagagaagtaaatacccaattttagccatccagtcccactcaggggcgagggggcagggatcct

SEQ ID NO: 797686 - DNA, 522 bp, Homo sapiens
tttcttgttgtttagagcttctatatttaggaatttgtcatacagcaatagaaaatgagtctagcaatgttcatcccctgtctcacttcttcccttcctctttttcttcttttctttcttcctctaaaaagtacatatagtatctagaaaattgacaggcataggaagaggctttagatgcttgatttgatttggatttgtatctaagcccaaatctcatgtcaaattgtagttctcagtgttggaagaraggcctggtgggaggtgattggatcatgagggaagatttcccccttgctgcttgtgcgatactgagtgagttcttagaagatctgattgtttaaaagtgtgtagcacctccccttttcttctcctccttctgctccagccatggaagacatgccttcttccccttccccttctgccataattgtaagtttctttagtcctccccagccgtgcttcctgcactgcatgtggagccatgagccaactaaacctcttttctctataagttaccca

SEQ ID NO: 797687 - DNA, 522 bp, Homo sapiens
tttcttgttgtttagagcttctatatttaggaatttgtcatacagcaatagaaaatgagtctagcaatgttcatcccctgtctcacttcttcccttcctctttttcttcttttctttcttcctctaaaaagtacatatagtatctagaaaattgacaggcataggaagaggctttagatgcttgatttgatttggatttgtatctaagcccaaatctcatgtcaaattgtagttctcagtgttggaagagaggcctggtgggaggtgattggatcatgagggaagatttcccccttgctgcttgtgcgatactgagtgagttcttagaagatctgattgtttaaaagtgtgtagcacctccccttttyttctcctccttctgctccagccatggaagacatgccttcttccccttccccttctgccataattgtaagtttctttagtcctccccagccgtgcttcctgcactgcatgtggagccatgagccaactaaacctcttttctctataagttaccca

SEQ ID NO: 797688 - DNA, 522 bp, Homo sapiens
tttcttgttgtttagagcttctatatttaggaatttgtcatacagcaatagaaaatgagtctagcaatgttcatcccctgtctcacttcttcccttcctctttttcttcttttctttcttcctctaaaaagtacatatagtatctagaaaattgacaggcataggaagaggctttagatgcttgatttgatttggatttgtatctaagcccaaatctcatgtcaaattgtagttctcagtgttggaagagaggcctggtgggaggtgattggatcatgagggaagatttcccccttgctgcttgtgcgatactgagtgagttcttagaagatctgattgtttaaaagtgtgtagcacctccccttttcttytcctccttctgctccagccatggaagacatgccttcttccccttccccttctgccataattgtaagtttctttagtcctccccagccgtgcttcctgcactgcatgtggagccatgagccaactaaacctcttttctctataagttaccca

SEQ ID NO: 797689 - DNA, 673 bp, Homo sapiens
gagcacagtgcttgcaaactacacagaagacggttctgctgggatccctgcctccctctcctgtgaaccaagcagccatcacagcatcatggagctggtaaatgctcacagctcaaaactaaacactgcagacaaaactaaaccaccagacaaaactaaacactgcagagctggcttccagttcacagcttctccttatcctgctcatttcccttgttttcaaatcattcttcttgtctgcaatccatttttactagacattatgaaagcattttaggatattctattctggcaagcccatcctctcaattactccagatttaaagtgggttttccawtacatgcacggtagaaagccataaactaacgccaaatatgaaaaaatgagagaacctttcatgtaacagttaaaattattattaaaatattaaggtactcaataaaaagcagtgccttttgatggtgtcttttatttaaattgtgaagcattttctccttcctcattactacctccttcttgctcaccaaatacttgtgtcatgctgcccttgttattaagaatccaactcccttcccacgtagcagctggactcactctacagcaaggctgtagccattctgtgttgagaagatattgtccagagctgttttattctctatgactcacttatga

SEQ ID NO: 797690 - DNA, 631 bp, Homo sapiens
ctcttcaattcccttgggagagagtggagcacaaatctggccgtggcacaattggctgttcgtccctggatgtccttcaaacagatgctgtgcttgctgggacagggcttcttgctacacagtctccaggaaaaatgtcacacaagtgaaaaagggraggttaatgatacgaagggggtggggagtatgttcaaactcctagaacacatttttgctgagacatgcaatattaattgatctcttttcatttaattaatgggttttcatgaagtatactaataatatgggaattatatataatactcaaggtgcataatgtaatatatgtgtaataatacaacataattcacttatatagtatcatttgttttctatctcatggagatgaaaaatatacactattattttaatctgaaaagtatacactattgtttatgtaatagtatatgttctctaccaatccattgcaaatcagcctttgaattttactcattccttttccatcatgaattactgtcatccagtattatcctactacagtttcaagtgttttaaatagtagatagactagaaaaaagccccactttagagaaacttgatgaagtagaaaaggtcgagtttaacaaaaata

SEQ ID NO: 797691 - DNA, 601 bp, Homo sapiens
taaaatacaagttaatttctcaaggagatttattattatttaatatgatattgataaaataatttcacagataaatttttacttaaaatgttaacattactattgataaaataatttatttttctttttataaggtcataaatccaagacttggagaatatgcatacaattatgaatatacaaaattaaaagtggttgtgaaatgtattttaatatattcaratgtggtgtacagagtagttttaccaatttagtgatgatattagaaatattggcaattcacatgtaatgttaagcaaatgacttcagtggaaagcatagcactgtagattcagttagttgtctctgttagaatagttaacgttcagtgtatcaatgtgttgaacattagtgttcaatgttaacctctcttggtttagttattttgcgtgcataatgaaggtatatgtgcaatcatctagcaatgaattatgtctataggaaccagaaattctgaaattactggagcatattcaaaaccacttggacctattgaacagtttaagcaatctcagtgcaataattttgctcacattattaatttgctcagcaagtgataaga

SEQ ID NO: 797692 - DNA, 619 bp, Homo sapiens
atctttgacagttcatagttgtcaatcacaccagattttcacaagctgcttacatggcctgagaaatgcacagaaatgaagaggtgatcccagactgacagatcatttcaggtggcttgagtagactttaattgactcttggtttgctgtctatactgctctccaaggaatgcacgaattaatgaagctacttaataaaaatcttggctagatcttatctgtttctgccactaaccaatagagcatatttacactacacatattttacatccaggcattcagtttttggattgcttgtgtagagaacakgatttactccccctttacaaaattttagttctgttaactataaacaggacagtgggtagccaggacaatgaataacctctgcaaacaacgaaaatataaagacaatgtccacatgtataggaaatagcacatacaaagtgaaatttaaagtaggaaatatgtagacaatttcccagtaagttcaagtaatctctattctgatttagaggtaaaaactcattctaacttttagggggaaaatgcttctctccaaccttcttttgggatatttaaaactattttattggcaataaaaactgcctcttttgta

SEQ ID NO: 797693 - DNA, 648 bp, Homo sapiens
gtgcaaagtacataaggagaggttctgtgcttattaacagcagtacaatcagaaatcagcaggcagccagcaagtaggacttttccactttgggggctcatacaaaaggattttgttttcatttgtttagctcacacttaagcagaaatatctcgttttctaagttcaaagatgagacagaggaggttagragattgagatgagatgttttggcaaagaggtttcaaccttgaacatagaaattcagaccatgcaaaagcaatggggattttgcccaagaaggaaaaaattcactgcactgtgaatagttaggaagtgctcattttgaattgtcacaaatatttatacagaatatagaacagccttcctgtatttaattgcattttaggagaaaaaggaaaatctaacagaagtcataagcagttgttgaaatgttccacagtagagtatatgcctttgctgagaaatgaaagttatattatgtgctaccttttcatctgttgcatgtctctgccagctgcagagacatgtcagatgccattattctacaaatttgactctctccctccatcgctaacctcttgttgacagtaatcagaacttgatggagaggcctacgcaggtgtgatatgatagttggtgctagtg

SEQ ID NO: 797694 - DNA, 553 bp, Homo sapiens
aaaagagtttacagttttattgcaacttcgtacaaatgccatttgtttcaaaattctaacagttattaatttgcttatcaataccatagatatcacagatacgtcaattatttaattgattaatgttaatttttgttgataattaaccaggtgttaaattgaatgtttcttttataaagytcgattttaaaaaacattctgaacatgaattctcatcttctacctgcaaacctgttcaagccctagggtaaaagcaattgtccccatgggtcttaactctgtctttgaggaaaggcagcctcacagggattacaaggagagttgtgagtgctgcagctaatgtgagagatggccaatgctttggagcctttggagggtttgagcaacttatgcaaggacaagacaaattcattacttggcaaatcctttatctcagataacagatactaatctgttcctagtactgccattttctcacttctcttcttgttccaagttgtggatttataggaattcaggagttaggtcgttattcacaacacttgtacacagg

SEQ ID NO: 797695 - DNA, 568 bp, Homo sapiens
caaaatcagtttgttgtatgtgtgtggctttatatctgggttctgtgcctatttttatagcagtaccatgctgttttggtcattatagctctgtggtataatttgaagtaatttgaagtcaggtaatgtgatgcctgtagcttgtttttttttttttttttcctttgcttagggttgctttggctcttcaggctcttttttggtaccacatgaattttaggattttttcccaattctgtagaaaaatgacattggtaatttgataagggttgcattaaatctgtaaattgcttttggacagtatggtcatgtcaacaatgttgactcttccagctcatgagcawggggtgtttgtgtcatctctgatttctttcatcagtattttatagttctccttatggagatcttttacctctctggttaaatatattcctagatttttattttttgatagctattataaacaggattgccttctcgatttgatacttagctagatcattactggtgtatggaaatactactggtttccatataataattttggatcctgaaactttattgaatc

SEQ ID NO: 797696 - DNA, 600 bp, Homo sapiens
atctttgatggtctgctgactgttggccagggcagcaaggcgataaagccaggtgcctttctcattcttcagaaggctgaactgaggaacacagaaacaagcaaaggcaaacccaagcacacaagcactcttcaagcctctgcttgtgccatatctaatatcccattaagcaaagcaagtcacatggctgatacaggaggcacaatgaagctacacagcraagtgttcaaatatacgggggtagaagaattgggcccattagtaaaagtaacctaccagaacctacaacttttaatcttatttctcaagtttcccttcacctttggcattccaaggctatgaatgtacaagaaaagtgttaaatgataatgatatgaagtgataaatacagatgtacccacaaaaatgacattctaggactgccaggactctgtcatcaaggaagcatttattaccttgctattcaaaggtggcagttggaccagcagtatcaacagcttgcaggatcttgtcagaaattcagaatattgggccacaccccaaacctactgaattgtgaagtacattttaacagggtactctagtgacttgtattaacat

SEQ ID NO: 797697 - DNA, 626 bp, Homo sapiens
cttgaacaacatgggtttaaactgctctggtccatttatttatatgcatatttttcaataaaagcaaagtaacttaggaacagaaaaccaaatatcctatgtcctcacttataagtgggagctaggctatgatgacgcaaaggcataagaataatataatggaaattgggaacttgtaggggaaggttgggagtcggggtatgggataaaagtctacatattgggtacagtgtacactgctcaggtgacaggtgcgctacaatctcagagatcaccactaaagaacttatccatgtaaccaaaaacctgtacccccaaaactattgaaaattttaaaaatgttgggcatggtggctcacgcctgtaatcccggcactttgggaggccaagccgggtggatcacctgaggtcaggagttccagaasagcctgagcaacatggtgaaaccccatctctactaaaaacacaaaaattagctgggtgtggtggcatatgcctgtaatcccagctacttgggaggctgaggcaggagaattgcttgaacccgggagggggtggttgcagtgagccgagatcgtgccattgtgctccagccattgcgctgcagcctgggcaacaaggggaaa

SEQ ID NO: 797698 - DNA, 423 bp, Homo sapiens
aagcaataaagaaaagtaaaacaaaatcattaattggtaaaaaaaaaaagcaacaaacacaagacacagtgggatatcttaataaataaaaggaacttttgaacaaataagatgaatactcataaagattataaaaacattagtccccccaaattacaatcaaccaaaaaatccaacaattattcaacatcattattaataaaagaaaggccaattaaagtattagcatgccatttggcctttaacaatttggcagyttttaaaaatatgcattctattttagaggatactttttatgtactatttatatacaataacttaaaatcaagaaccttaaaatgatgcatactctttaatccataattcaagttctaagagtctctgctaagaaaaatatcagagatatagaaaagaaacccatat

SEQ ID NO: 797699 - DNA, 657 bp, Homo sapiens
caatgctactgctacctacaggatgtggtagctgcatcctcagaagactcaccagtgctctcaaggccatagcacttcatgttcacctccacatgacacataaccatctcccttctttgtgccttagtttacctttctataaaatgggcatagtaatagcatctacttcaaaatgttgccaagtggattaaatttggtattatgtaaagtccttggkggaatggctaataaaaattcatggttattaatagcatcgggtagttaattctcactcaagcaagtctccggctacatagatctctgagatgtttaaggaatagaatcagctatgtcacatagctggattcagaaattgtgaaatgcctcttcttagctttaatcttgctcccttcttaactgtatttcaaggccaccaaggtgacacatgcaagctgttgatagttaggttttgatgtacacatatacacacgctgaacattaaatagatattccctgcaaaacactaggtcccagaaaacagtctcctctgtatttgatgaaataatttcctttctaggatgatactttaaaagacctgaccttcactgacatcacccacatgccagatgagattagtgagccacatagcaaagtttctgatatgaaatagtaatagaa

SEQ ID NO: 797700 - DNA, 601 bp, Homo sapiens
gggtgtggtgtctcatgcctgtaatcccagcactttgggaagctgaggcgggtggctcacttgaggtcaggagttcaagaccagcctggctatcatggtgaaactccatgtctactaaaattacgaaaattaagcaggtgcagtgtgtgtcacaggatccttggggtgtcgcttcaccygccagaaacctctgtggccggtggtgcctttacccaagttttgctcgtgcctgctgggctcattccacccgttcggcccagcaggctgtgccaggtttgcactaccggcccggatcccacacctctgagggtgagccaggcacagagcagcaaggggtgtgtgagcgagcaagctccaggcccagccactgtgcacagccaggcacactggctgcagtggggtgggcagctccaggcactggcacaggcgccggctccctgcagggctgcagctgtaccaggcatacctcaagcagcttctgctgacactgggaaacacggtggcacctggaagcttggagatgccaggaactgcagagccccaaagaaggtgtcacagccccggctcacggacctcctgggtctgggatccccgaagggct

SEQ ID NO: 797701 - DNA, 550 bp, Homo sapiens
ccatgagcagaggccacctagagtcgtgcaggctgcccccgtggggacaggtgtgtagcccgacctttcctcattcacaatggctccctcgccaaacccctccatgctgcccttgaggcttgtccgcaccccagcccctggtggccacaatggaaatgattctctgtcccccaagtttagtttcctggacaatgtcatacaaatgggatcaccagtatgtaatcattttacgtcttctgtgtaacagcacgatttgagatccatccaggttgtgtgccaatcatttgttccttttcacagccaagcggtaacacgtcatgtggatggttcacagtgtctttatctgcatgcccattgcaggacatccgggctgcrtctagcctggggcattcaagagtagagacgggataagcgttcctgtgcaggctgtctttggagataaactcccatttttcttgggcaaatacctagaagtataattgctgggtcataagtgtatgttgaacttgacaagaagccaccaagcagttttccagagtggccatgccac

SEQ ID NO: 797702 - DNA, 563 bp, Homo sapiens
aaaatacccattctggttatgtgctttgcgctacaatcccgcgccgccctataaacataatctattcgcgtgcctctttcagctgattccagagcctgctctgcactgtggagtttaatatcaccctgttctcaactgcacagggaagtgattaaataagaaataaattcggctgtcattgcatttaaaatcaaatcaaggatcatttgttactccaaatgaagcagttctccttccctgcccgtaagtaggctgctgttcgctgaaccatttaggaatgtatatatagtaaactygccgcataatgccttgtactctgatatgatctttatggggccgctccgagcgcggggagcgcccataagcagcacatggcttttttaatttgaagttacaggtatgagacttcgcagtccatccaagtcttattggaggggacccatgtgagatgtgggggccactgcccaggacccctccccctgcacccctgctcagctacaaccagccctcctgtcctcagaggaggacaggggaggggaaggagctaagtcaggtcctcagcg

SEQ ID NO: 797703 - DNA, 590 bp, Homo sapiens
aaattggaagcaggaagaaataatgatataagctactgtataaatgacaaaaatacccattctggttatgtgctttgcgctacaatcccgcgccgccctataaacataatctattcgcgtgcctctttcagctgattccagagcctgctctgcactgtggagtttaatatcaccctgttctcaactgcacagggaagtgattaaataagaaataaattcggctgtcattgcatttaaaatcaaatcaaggatcatttgttactccaaatgaagcagttctccttccctgcccgtaagtaggctgctgttcgctgaaccatttaggaatgtatatatagtaaactcgccgcataatgccttgtactctgatatgatctttatggggccgctccgagcgcggggagcgcccataagcagcacatggcttttttaatttgaagttacaggtaygagacttcgcagtccatccaagtcttattggaggggacccatgtgagatgtgggggccactgcccaggacccctccccctgcacccctgctcagctacaaccagccctcctgtcctcagaggaggacaggggaggggaag

SEQ ID NO: 797704 - DNA, 552 bp, Homo sapiens
cacagaaaatgagggtgtccatggcgcccgcctcggggggttcctgggaggaagcacccagggccagcctggggggcacgcggtgggcggttggtgcacacacaggcccttggctctgacaggcctggagcagtgcaggggtgccgtgccgggtcctcagcaccggctcccaggcagccagggacttcccggagctccctggtcaccaacccaggcttgatggaggccccggctgcatctctgacccctgacccctgaccccagcctgcaccaagccccacacgtgactggaatttcgcctgcacgttcggcctggtactcacaggaggctccgagcagcccaccctttcggacaagctggycggggcctctggtggtccagccctccactgccattcccggggggcctgggcccctgcccctcccctggctggagacatgggggtgcagcccctctgtccaggcccagcaagccgggatcccatccggccagagtccacactgcctctgccaagtacgtgacggttaatgtcatcaccgtgtgcacagccc

SEQ ID NO: 797705 - DNA, 624 bp, Homo sapiens
tgtctcacactgtcctttcttatctcctcaacagccctgtgggactcccaggaaaggcggtgcagctcccaggtcgtggttgtgggaaggcagacaggagacctgccccaggccaactgcccaccagaggcctctggctcctagtccagagctctacctgctacagctgcaccacgccttagtgcagcttcctcattcgacaggaatgacactctcttcaaccaccgcacggcacccgcagtctcaccgggaacgccatgggagcaaccaaacaaaggcagtgcaggaggcaccgagaatggccctgacccagaaygctctggaaaaggcacaccagtagcaaggcttcagagaaagatgggggtgggatacttgggggagaaaaaggcagactgagttattttagcacaaagtatgcatgaaacaacctaacagaatgggtgcaacaattacatttctcatctgtaaaaagtctgcttcaagtatttttattaacaggcctcactccaatctcagcattcacagagcattcccaatgagaaaaagagctcaatgaaagctctcttttccccattctccacaacagtcatgtgctttaaaagatatgcagtttcctaaggaacg

SEQ ID NO: 797706 - DNA, 612 bp, Homo sapiens
gtttggcccttaccttaccacagatagattcaaaatggatccaagacctaaatgtaagatccaaaactataaaattctaagaagaaaataaagggcaaagccaggcacagtggctcgtgcctgtaatgccagcactttgggaggctgagaaaggaggactcatcccccraggccgggtgtggtggctcacgcctataatcccagcactttgggaggccgaggcaggtggatcacgaggtcaagagatcaagaccatcctggccaaagtggtgaaaccccatctctactaaaaatacaaaaattggctgggtgtggtggcatgtgctggtagtcccagctactcaggaggctgaggcaggagaatcgcttaaacccaggaggtagatagaggttgcagtgagctgagattgcaccaccgcactgcagcctggcaacagcgagactctgtctcaaaaaataggaggacctcttgagcccaggagtttgaaaccaacctgggcaacagagagagagaccctgtctctacaataaattttaaaatgagccaggtgtggtgcacacctgtagtcccagttactcaggaggctgaggtgggaggatcacttgagtccc

SEQ ID NO: 797707 - DNA, 612 bp, Homo sapiens
gtttggcccttaccttaccacagatagattcaaaatggatccaagacctaaatgtaagatccaaaactataaaattctaagaagaaaataaagggcaaagccaggcacagtggctcgtgcctgtaatgccagcactttgggaggctgagaaaggaggactcatcccccgaggccgggtgtggtggstcacgcctataatcccagcactttgggaggccgaggcaggtggatcacgaggtcaagagatcaagaccatcctggccaaagtggtgaaaccccatctctactaaaaatacaaaaattggctgggtgtggtggcatgtgctggtagtcccagctactcaggaggctgaggcaggagaatcgcttaaacccaggaggtagatagaggttgcagtgagctgagattgcaccaccgcactgcagcctggcaacagcgagactctgtctcaaaaaataggaggacctcttgagcccaggagtttgaaaccaacctgggcaacagagagagagaccctgtctctacaataaattttaaaatgagccaggtgtggtgcacacctgtagtcccagttactcaggaggctgaggtgggaggatcacttgagtccc

SEQ ID NO: 797708 - DNA, 589 bp, Homo sapiens
cacttggaactgacccccctctgaggtcacgaggcctgagaccttggctgagaggctgaggccaaagctcatgggagacttgtgtggtgaagatgggtttggcctgccctgggcaaggacagggtgggactgttgaggccgggcagggtgacgaggacatgccctgtcctagcgaatgcctataacctcttcgtgggtgcagtgagttgagtaggggaccccaaaactcatgtytacctgtagcctccaaatgtggctttatttggaagcagactctttgcaaatatcattagttaagaatctcaagatgagatcatcctggatttagagtggaccctgaattcaacgactggtatctgtataagaagagaagaggacacagagaagaggccacgtaggacagaggcagggattggagtgatgcaaccacaggccagggagtgccatgaaagctgggacagacccccccttcggagccttgaaagcagccaagccagccagggccttggcttagggtttttggcctccagacaggggaggatgcgtttctattgttttaagaaccctggtttgcagggccttgttccag

SEQ ID NO: 797709 - DNA, 589 bp, Homo sapiens
cacttggaactgacccccctctgaggtcacgaggcctgagaccttggctgagaggctgaggccaaagctcatgggagacttgtgtggtgaagatgggtttggcctgccctgggcaaggacagggtgggactgttgaggccgggcagggtgacgaggacatgccctgtcctagcgaatgcctataacctcttcgtgggtgcagtgagttgagtaggggaccccaaaactcatgtctacctgtagcctccaaatgtggctttatttggaagcagactctttgcaaatatcattagttaagaatctcaagatgagatcatcctggatttagagtggaccctgaattcaacgactggtatctgtataagaagagaagaggacacagagaagaggccacgtaggacagaggcagggattggagtgatgcaaccacaggccagggagtgccatgaaagytgggacagacccccccttcggagccttgaaagcagccaagccagccagggccttggcttagggtttttggcctccagacaggggaggatgcgtttctattgttttaagaaccctggtttgcagggccttgttccag

SEQ ID NO: 797710 - DNA, 527 bp, Homo sapiens
atctcaggccccgaggccctgagtcattcacacacacaggcacacatgcacccatatatacatgcacagcaacatgcacacccccccacataaacatgcacacatatgcatacatggcacacacacatgcatgcagacatatgcatgcacacacacagcacatatgcacagtgcacacatgcacacaacacgcccacacacaggtgcacacccccccgcacacatgaacatgcacacatatgcatacatggcacacatgcacacgcacacatatacacacacggacacatgcacgcatacacatggcacatatacacagtgcacacatatgcacacatgcacacaacacgcccacacacaggcgcgcgcgcgcgcrcacacacacacacacacacacacacgcctgcacactcacccccaccacctcgcccctccaggcaggctgacagctcaactgcaccctctagtggctggcttgaggcaccacggccaggctgctgcttgttgagtttcgggttgggtccagg

SEQ ID NO: 797711 - DNA, 518 bp, Homo sapiens
cagttctgcaagctatgtaagaagtgtggcacgggcatctgcttcttgtgaggacctcaagaagttcacaatgactggggaaggcaaaagggagcaggaagtgtcacatggcaagagaaggagtgaggagggagaggtgccacattcttttaaacaaccagatcctgcatgtatagaacaagaactcactcattatttcgaggatggcaccaagtcattcatgagggatctgtccccttgasacaaacacttcccaccaggccccacctctaacactgaggatcatatttcaacatgagatttggatgggacaaacatacaaaccatatcagaacctattttgaaatgaggtcttattttgaggtactgggagttaggattttaacccatcttttttgggtagggacacaattcttaatactttctttatattctataactataataagaaaaattttaaaaagtagtaggggtgctaaatattgaattgatataatatttaacctaactttttaata

SEQ ID NO: 797712 - DNA, 518 bp, Homo sapiens
cagttctgcaagctatgtaagaagtgtggcacgggcatctgcttcttgtgaggacctcaagaagttcacaatgactggggaaggcaaaagggagcaggaagtgtcacatggcaagagaaggagtgaggagggagaggtgccacattcttttaaacaaccagatcctgcatgtatagaacaagaactcactcattatttcgaggatggcaccaagtcattcatgagggatctgtccccttgagacaaacacttcccaccaggccccacctctaacactgaggatcatatttcaacatgagatttggatgggacaaacatacaaaccatatcagaacctattttgaaatgaggtcttattttgaggtastgggagttaggattttaacccatcttttttgggtagggacacaattcttaatactttctttatattctataactataataagaaaaattttaaaaagtagtaggggtgctaaatattgaattgatataatatttaacctaactttttaata

SEQ ID NO: 797713 - DNA, 609 bp, Homo sapiens
gaaaactccatcgtctcagcccaaatctccttaagctgataagcaacttcagcaaactctcaggatacaaaatcaatgtgcaaaaatcacaagcattcctatacactaataacagagagccatatcatgagcaaactcccattcacaattgctacaaagaaaacaaaatacctaggaatacaacttacaagggatgtgaagaacctcttcaaggagaactacaaaccactgctcaaggaaataagagaggacagaaacaaatggaaaaacattccatactcatggatacaaagaatcagtatcatgaacatggccatactgcccaaagtaatttatagattcaatgctatccccatcaagctaccatggactttyttcacagaattcagaaaaaactgctttaaatttcatatggaaccaaaaaggagaccgcatagccaagacaatcctaagcaaaaagaacaaagatggaggcatcacactgtctgacttcaaactatactacaaggctatagtaaccaaaacagcatggtactggtaacaaaacagatatatagacccatggaacagaacagaggcttcagaaataacaccacacatctacaacta

SEQ ID NO: 797714 - DNA, 605 bp, Homo sapiens
gtcttactccttggaagccacactgtgggcagaggtccaccaccctgttgctgcagccaaattcattgtcataccaggaaatgagcttgacaaagtggtcgttgagggcaatgccagccccagcatcgaaggtggaagagtgggtgtctgttgaagttggaggagaccacctggtgctcagagtagcccaggatgcctttgagggggtcctctgacgcctgcttcaccaccttcttggtgtcatcatatttgktaggtttttccagacggcaggtcaggtccaccactgacatgttggcagtggggacacggaaggccatgccagtgagcttcccgtttagctcagggatgaccttcctcacagccttggcagcaccagtagaggcagagaggatgttctggagagccccatggccgtcaccccacagtttcccataggagccatccatagtcttctgggtggcagcgatggtcatgagtccttccacggtaccaaagttgtcatggatgaccttggccaggggcgttaagcagctggtggtgcaggaggcattgctgataatcttgagctgttgtcatatttctcatggttcacacccatcacg

SEQ ID NO: 797715 - DNA, 512 bp, Homo sapiens
actaagacattaattagagggttaaatgttgataggattacaaaaacctgtaataggttatgggagaatgaattacagcaaggcagaaggatacaaatcagaggagcagaaagaaaagaacattgatataaagtaagcttcaaagagaagaatttcaaaatggggagatgttgatcaatgtcgaatgctgcggagtcaaraaaaatgatgatggcacatactatgctgctgttcaacagatactaattaaatatgcggaataaatgagataccatagtaagttctgagaaatagctttcaatagatggtgacagacagaagtcagatttcagcgttttagacaagattatgtagtaaaataaaataaatccttgaggtcaactatgctgacttatattctaaaggtagcatctaatatggtctctggaagtaacttggaggttagtgagtaattatacatcctgaaataagaagaaaaaacaggatggtattttttaaaaatgtatagaaaa

SEQ ID NO: 797716 - DNA, 609 bp, Homo sapiens
gcctgtaatcccagcactttgggaggccaaggcgggcaaatcacgaggtcaggagatcgagaccatcctggctaacacggtgaaaccccgtctctactaaaaaataataataaaaaaatagccgggcttggtacggtggttacctgtagtcccagctacttgggaggctgaggcaggagaatggcgtgaacccgggaggcggagcttgcagtgagccgagatagcgccactgcactccagcctgggcaacagagcgagactccgtctcaaaaaaaaaaaaaaaaaaaaatgtaagttaacagtggaaggacaggaacaaacagaggaagctgtgtactgcaactgtataatttattatacaaatgggaatatttgtgagtaaaagtggtcactctttataattcagctaaraaaacagatgtaagctggtgctacaactggaaacaaaatatttatgttcaccctaatgatatgggagcacatgcaagcacctcagaatgaaaacaagaggagagtcaggaaaagttccagggaggaagtgacatctatactgcattaaaaagatacattcatgtacaatcaatcaggaaaatgtgagtaggagaagag

SEQ ID NO: 797717 - DNA, 394 bp, Homo sapiens
tgtctccagagttctgccaagattcctagaattccaaggcttgaagtggtcattgattacatcaataccttggggcattcagttaaaacactgcggtaattaaccaaagcaagctgtcgatgaaatcagctctgattaactggagggatggtagaaagataaagcttggatttagacaaaaaatgttatataaagtagamgaatttgataaaaatcacctcgttaccttttcttcataaagtttcgccaaccttttggcaacactatcccatccaccttatctatgcccagtgccatccaactatctgaacatctctcatgtgaactggaagaactcatactgtaaggatagcttatgtgtttaagtgatttttgtatttctgcacccctggag

SEQ ID NO: 797718 - DNA, 604 bp, Homo sapiens
tggaagcttttctccccgcactctattctaagtgacccattgctcagtgcctattgcccagtggacattatgaagtcctggaggctgccagtctcctcactgtgactggagtcatggctccaggctctgccggcttcatgcacctggggagagtgaccagcagcactgcccagagtcccgtgctggccctgcaggaacaaaggccttgcaggatacgcagtcgtcgtgacatgctgatggcagattatgtgctatttgcacttttttttctctctctttcatgtagggatgcccaggttggtcgggacatttctgatgctccacctccatccctcagtgctcgctagtctgggcctgcaagcagtgttattgaacaaaactggggttcgctaacccagcgcagttaaatccaaacatccacactgaggtttgcaatgggagaaaggagagcatttattggcaaggygccaagcaaggagaattaggcagctcccatttaagatctgacctcccctgtgacttggaagtaagggtatttaaaggcagagggaaatttcaggaaagcagaagttacaggcaaagtcataaatcaatacatggaggt

SEQ ID NO: 797719 - DNA, 485 bp, Homo sapiens
tggctatgactgtcatagggaagctgttagggcagcagaggtgctgatcatttagtgacaggtgcaatcgttactacttctttctagcatgggtgttgtctgacttggtgggagtgagcaggaagggaagatggtggtgttggggttggaactacagaatggatgaagtgagaggagggcagaggagtcacaaggaaggacaaagtagtcaaagtataaaaacatctcaactaccatttggggccaaggttgagtctcttatggattttgcttggaggayactttggccagctgtttttatgttaccagaagtgggaagattaatacatgggtattggtccagatggaaacagggcatatctggcttctgcatacttatcttccaaaagctcatttataaagcagttgtgtggaactcggtatgtgtgttctcatggaagcaaagtaataaagggtggccataaaagctcaagttaagccggatc

SEQ ID NO: 797720 - DNA, 610 bp, Homo sapiens
atatagacctctcccttcttcctataaaggtgacttttcctgctttctcaatgcctctatggttaccatcccatgttgctatatcacttagacaataagaatgtattcacttgatttatcaaccacagattatgaacattgcagcagacactacacatcttttacttttgatcaccttcattctcaactaactcaacaggagatgctagatacatatggttgcataatatcatatggataaataagagctgagtcaatgacaaatattttcttcacactataatttgtattcttattatactgcaacmgtatgcattgatcttgactatttgtggattttatggttacaaatttacctgcttcttaaaatgtatttataaccataagtaatattctcagtgatttagtggtcatttgggtacatgcacagtggtgaaacgtttgagtcacacagttctcccatttccaactgaagttgatgatggtctgcctttgttctttagctctcatattataaacaagtggactgctcacagactgcttagtagcacatttttcaaatttgtgtgctgtttgttggtgatttaactggttcaaatgaccccaaaca

SEQ ID NO: 797721 - DNA, 605 bp, Homo sapiens
gctgggccgaagtctacacacggatcccctggggatccttggctgagagccgagacttcacacagtgttgctaataagaattcaggctaggtgtggtggctcacgcctgtaatcccaacactttgggaggctgaggcaggcagatcacttgaggtcgggagttcgagaccagcctggccaacatggtgaaaccctgtctctactaaaaatacaaaaattagccgggtgtggtggcacacacctgtaatcccagctactcaggaggctgaggcaggagaatggcttgaacctggaaggcagaggctatagtgagccgagattgtgccactggactccagcctgggcgatggagtgagattctgtctcaaaaaaaaaaaaaaaagawttctggcccagtgtgtagagaccctgcagaacacctcagcattcatctgagactccagaaaacaatgcctcatgagtgagaaccatgcctaagtttgagccaggaccttagctaggactaaggacaaacaacaaaacagaattgccgaaagaaatgataaaatcaagtctgacaggaccagaagatccaccataatttatctgcctatcagaacaaaatt

SEQ ID NO: 797722 - DNA, 605 bp, Homo sapiens
gctgggccgaagtctacacacggatcccctggggatccttggctgagagccgagacttcacacagtgttgctaataagaattcaggctaggtgtggtggctcacgcctgtaatcccaacactttgggaggctgaggcaggcagatcacttgaggtcgggagttcgagaccagcctggccaacatggtgaaaccctgtctctactaaaaatacaaaaattagccgggtgtggtggcacacacctgtaatcccagctactcaggaggctgaggcaggagaatggcttgaacctggaaggcagaggctatagtgagccgagattgtgccactggactccagcctgggcgatggagtgagattctgtctcaaaaaaaaaaaaaaaagaattctggcccagtgtgtagrgaccctgcagaacacctcagcattcatctgagactccagaaaacaatgcctcatgagtgagaaccatgcctaagtttgagccaggaccttagctaggactaaggacaaacaacaaaacagaattgccgaaagaaatgataaaatcaagtctgacaggaccagaagatccaccataatttatctgcctatcagaacaaaatt

SEQ ID NO: 797723 - DNA, 575 bp, Homo sapiens
ataaataatgaaaggatcagatttgtaaccgtttgggtaaaatgggaattgattaacctgtagtgatagaaataagtaagtaaatatatgtggaagaaaagaaactatcttaaaatagaaagccaactaatccatgtagaaagaaaggaattagaaagtcaccatttggcactttgtagtagtacttgattcaggccagaatcattaatggatgtggaatctgatggatcaaagttatacaaggaacaagatattgacataaactcaaggtatctcctcataaaatacaacatatattaattttacgtggaaaaacctggtgaattccatttctaatcaagtaataaaarttatctccaatactgggaccagttaccattttgtgcttccggacacagtgagaaatgctaatattcttgccagaaatgcataaatcttgaaatatcataaaacttccaaggagaaatgttctacaaagtaactggcctccacttttcagaaaccgtcaaggaaactaacaagttgtttcagactggagactagagaggcgtggtatctaaatctcatatgggatc

SEQ ID NO: 797724 - DNA, 602 bp, Homo sapiens
aggatccacttcttgaaaaaccaaaattaagagtgctactcattccaaaaatatatctacctgtcagcacaatttgaaacactatgttctgagagtatacagtttacgagttcaagtgatagaatcaaaaaaaataaggtctacatgttggttttcctcctttctggatgtatgactttgracaagttacataaccctaaacctccttttcctcatctgcgaaaagaaagatcataactgtacctggttcataaaactgaggcatcacaaaaaaacaattagcaaatgctagcacttagcatttattgctcctttattatttcttttactaatggtatggcatgaaaggggcacttgatactatttgctaagataaccaatatttttaatgaaaaaattacaatatttttcaagatgctttttgaaggaattggccagtaggaagataaagagagagcatttcagagatgtggtacaagcttcaggtcatttgatgcgtgacacgagctgagattactgtgccaagcttctgattggcagagacagggctggctgtccttcaggaaggacagcacaatgagttttccaaacttcaaagtctg

SEQ ID NO: 797725 - DNA, 553 bp, Homo sapiens
ttccgaatagccgagactacaggcatgtgccaccatgccagaatttttttttttttttttttttttttttttttttttttgagacacagtcttgctctgtcacccaggctggagtgcagtagcccgatctcggctcactgcaacctccgcctcctgggttcacgccattctcctgcctcaacctccggagtagctgggactacaggctcccgcaaccacgcctggctaattttttgtatttttagtagagacggggtttcaccgtgttagccaggatggtctcgatcgcctgacctcatgaaccatccgccttggcctcccaragtgctgggattacaggcgtgagccactgcgcccggccaattttttttttttttttttaattgtagagacggggtctcactatgttgcccaggctggtctcaaacttctaggctcaagcgatctacccaccctggcttcccaaggtgctgggattacaggtgtgaagacccttattttaaaaagattatacacatatatatgtatttatatatgtgtatgcatgtgtgtg

SEQ ID NO: 797726 - DNA, 672 bp, Homo sapiens
cttctgtttaccatatatcctcacaagcttctttggtttgattttattattaagcattaaattcaaaattaccaaagattacctgctacatagaagattgaaaagaagagttcccaataagatgcaggaaagaaaaatgtttaaaatatttgtaatggggttaaatattattttaagagttgtgttaaaaaaaaagcatatgtcttaaataaccagattaaaagaccagtagttattactccaaaatatattgaactgtcaaagtacccatgatgtacttagaaatgattcaaaatgtgtacttggaactaacctgaaataaaaataaaattcacctattattatgtagtgttttgctcagtaatttgaagaatctcatcctgaaagaataacagagacttagtttaacaaggggyatggggatagtcaagaaatgtgtcaatttattattaagcataaaaataaaggaagaataactaatgttaaatgagtgatttatgatgatatggaaatacattattataatgtagtatctttgttgtggcttatgtaaaagttaaactatgactttgaaaataaattccaaaaattgctaatgaatcactagcattaattagtatgtagtcacatgtagtttaatgtttttatagtgaaaaccaaaggaaaaattga

SEQ ID NO: 797727 - DNA, 498 bp, Homo sapiens
ctgtggtgtctgtgaagcctgcgtggggagcctgcactttcagccccaactgctattgatgaggcacacactcttattctgctgaggtggtgccagaggaggcctagagaaaagtagggactctcagaaatacccagcagtaaggagtctacccctcactacatagtgtcagggggaagcctggtagggagtaataaatgagcactcctccacttcccacagtgtggattcttgtagggagctgaaagtctcactctcacccagcaataatgacgatctcctttctccctctggtatcaaaggaagccaagkgaggaacctgaactttaattccgcatacagtagtaacaaggcagtggccaagttacactaccgaagaggtgtcagaggaagccagctaaaacagaaagttttaaaagaatccagtgtctgataaaaacatggatacccaggtttaattccataaacacttaacatataaaaaatagaataatctca

SEQ ID NO: 797728 - DNA, 508 bp, Homo sapiens
tatagaaattttaagtttcaggctgggcgctgtggctcacacctataaatcccagcactttgggaggccaaggtgagggtggatcacctgagctcaggagttcgagaccagcctgaccaacatggtgaaacctcgtctctgctaaaaatacaaaaatagctgggcgtggtggtgggcatctgtaatctsagctacttgggaggctgaggcaggagaatcgcttgaacccgggaggttgcagtgagcggagatcgcatcattgcattccagcctggatgacagagcatgactctgtctcaaaaaaaaaagaaatttgaagtttcaaataggtatttctaagtcagtggaagacatattaacatgctaaagacactaagttaaattataagaatgtgcatgattatacaagtctttatacagttttaagagctatgcaggcactcaaatattatccatatatcattttctatcatttgaggcgatttttttcctttgtatgcacagctaa

SEQ ID NO: 797729 - DNA, 564 bp, Homo sapiens
tgcaatgggtatctattaactttgatcgtcaatattaaagaaatcttcccccagtaaacagcatagaaattcttctctggtcaccacataatcctctaattttaaatcataaatttcatgtacagttaattctgcttccaaactccaggaaaagacaagagctatgggcttaatgaaacaaacaaacaaaaattattttctccagcactagggattggattcagatatgagcattatgacctattcaatgacaagaagaactacctcgattttagctggatcttttaaaagagaagcttattatcttttkggggaaagtgaactcgttggaatattcactatagtctatagttgcaaaaaaatcatcacatagaatcctagactaaagccatgagctaaaatgactgaaatagaataaaacaaagtcctaattttataaattagaataacccaaatctgaagcttagatacacataaaaatctgtcatttcagtaaatatttgtgtgtgtgtgtgtgtgtgtagggcagtttgagttggatttttccagttacttaccaaggag

SEQ ID NO: 797730 - DNA, 560 bp, Homo sapiens
tgtgtccccacccaagtctcaccttgcattgtaataatccccatgtgtcggggtggggccaggtggagataattaaatcatgggggatgtttcacccatactgttcccacggtagtgaataagtctcatgaaatctaatggtcttataacgggagctcccctgcacaagctctcttgcctgctgtcatgttaagacctgactttgctcctcattcgccttccaccataattgtgaggcctcyccagccatgtgggcctgtgagtcaattaaacttctctcctttataaatgacccagtctcgggtatgtctttattagtagtgtgaaaagagactaatacatatttcacagcatggatgtgccagtttgtttaaccattcatccattgttggacacaaagttgtttctagttactgactaacaaataaagctgctataaacattcatgtacaagtttttgtgtaaattttcatctctctaggataaatgagcagaagtacaatggatgtatcatatagtaagcataaatttattttttaggtaaacactatgctattttc

SEQ ID NO: 797731 - DNA, 410 bp, Homo sapiens
ggtcttataacgggagctcccctgcacaagctctcttgcctgctgtcatgttaagacctgactttgctcctcattcgccttccaccataattgtgaggcctccccagccatgtgggcctgtgagtcaattaaacttctctcctttataaatgacccagtctcgggtatgtctttattagtagtgtgaaaagagactaatacatatttcacagcatggatgtgccagtttgtttaaccattcatccattgttggacacaaagttgtttctagttactgactracaaataaagctgctataaacattcatgtacaagtttttgtgtaaattttcatctctctaggataaatgagcagaagtacaatggatgtatcatatagtaagcataaatttattttttaggtaaacact

SEQ ID NO: 797732 - DNA, 410 bp, Homo sapiens
ggtcttataacgggagctcccctgcacaagctctcttgcctgctgtcatgttaagacctgactttgctcctcattcgccttccaccataattgtgaggcctccccagccatgtgggcctgtgagtcaattaaacttctctcctttataaatgacccagtctcgggtatgtctttattagtagtgtgaaaagagactaatacatatttcacagcatggatgtgccagtttgtttaaccattcatccattgttggacacaaagttgtttctagttactgactaacraataaagctgctataaacattcatgtacaagtttttgtgtaaattttcatctctctaggataaatgagcagaagtacaatggatgtatcatatagtaagcataaatttattttttaggtaaacact

SEQ ID NO: 797733 - DNA, 620 bp, Homo sapiens
aggttctcttagcctatgccactaatgtagactatagctgaagaaactacttggagactacactactgcctctacctagaaccaagaccaacacaccccacaaaagcaacaccccaagacccattcatacaaatacatctttttatatgatacctactccataaaattggaagcattcagcaactttccacctgatgtatagaagtcaatctaggaacacatcaatcatgaaaaagcaaggaaatgtgtcacctctaaaggtaaataataattctccagtagccaaacccaatcataaggaaacatatgaaatgtcagaaaaataattcaaaataataatcttaaggacatataagcaaaggcaggtagacaactcaatgaaattaaaaatgcaattcataatttgagtgagaaatttgacaaagaggtggatacaaaaagaaccaaatagaaatcytaaagttaaagaattcaatgaattaaataaaaattacaattgagaactccaactacagactaaaccaagcagaagaaagaatgtctgaacatgaaaatagtcttttccaaaaacacaggcagacaaaatagaaaaaataatgaaaaaaataaagaacgcctac

SEQ ID NO: 797734 - DNA, 562 bp, Homo sapiens
ctaaaacctcagataagtctaatgcttatacttgttctttttgaccttttctttaatttttttcttttttcttttttctttttcttttttttttttttttttttttgagacagtctctcactttgttgcccaggctgcagtgtgcagtagcaggatcatagctcactacagtctcatactaccyggctcaagtgagactcccacctcagcttcctgagtagttgggatcaaaggcttgtgtcactatgctcagctgattttttgctggggtcaggggcagggtttgactttgttgtccaagcttgtcttgacctcctgggctcaagtcatcctctcacgtcagcctcccgactagctgggattagaggcacatgtcatcacgcacagctaattttttaaaaattgtgtgtagagatggggtctctctatgctacccaggctggtctcaaacttctggcctcatgtgatactcctccctcagcctcccaaagtactgggatttcagacatgagccactgtgcctggccatttttttacttttgttaaaccctatatgacctaa

SEQ ID NO: 797735 - DNA, 601 bp, Homo sapiens
taagtgaagggagaaatattcaaggaaatagataaagaaaaaacaatccaaaattcaggaaatattggacaaacttatagaatgcaaaatgctgtggaaagtctcagcaatagaattaaacaagctgaagaaataaattcaaagcttgaagacaaggtcttcgaattacccctatccaacaaagataaagaaaaaataatgagaaaatatgaacaaagcctccaagaagtctgggattatgttaaatgacctaatctaagaataatcggtgttcctgaggaagaggagaaatctaaaagtttgaaaaacrtatttgggggaataatcaaggaaaacttccctggccttgctagagaccgagacatccaaatacaaaaagcacaaagaacatctgggaaattcattgcaaaaagatcatcacctaggcacattgtcatcaggttatctagagttaagatgaaggaaagattcttaagagctgtgcgacagaagcaccaggtaacctataaaggaaaacctgtcagattcatggcagatttctcagcagaaaccctacaaactagaaaggatccgggacctatcttcagtctcttcaaacaaa

SEQ ID NO: 797736 - DNA, 642 bp, Homo sapiens
ttacctgaaaaataattcaggagattagttattaagctaatcagggaggcaccagagaaagggaaagcacagtgcaaggaaatccaacaaatgataatgtaagtgaagggagaaatattcaaggaaatagataaagaaaaaacaatccaaaattcaggaaatattggacaaacttatagaatgcaaaatgctgtggaaagtctcagcaatagaattaaacaagctgaagaaataaattcaaagcttgaagacaaggtcttcgaattacccctatccaacaaagataaagaaaaaataatgagaaaatatgaacaaagcctccaagaagtctgggattatgttaaatgacctaatctaagaataatcggtgttcctgaggaagaggagaaatctaaaagtttgaaaaacatatttgggggaataatcaaggaaaacttccctggccttgctagagaccgagacatccaaatacaaaaagcacaaagaacatctgggaaattcatygcaaaaagatcatcacctaggcacattgtcatcaggttatctagagttaagatgaaggaaagattcttaagagctgtgcgacagaagcaccaggtaacctataaaggaaaacctgtcagattcatggcagatttctca

SEQ ID NO: 797737 - DNA, 634 bp, Homo sapiens
ttgttttcaaagtggttttaccattttccttcctcaccagcaatcacaccatcacaatcactgtattgttaatcttttaaaagacaccctcctgatataaagtgacatctagttatgatttaatttgcatttctgtgatggctaaatatattaagcatcatcttgtatgcttgttggtcatttgtataacatctttttgtgaagtttctgtgtcaagttatttgtacattttaaactctcctgaaaaatctttaattattgaattatagaagctctttatatattttggataaaaatcctgccatatgtgtgtgtttttgtgtgtgtatcaatttctctcagtttggcttttcattgacttaatgatatctttcaaatagtaaaaatttttaattttgaccaatttaaattttccagtttattgctagtactttatgtgtgcttcaaaagctcckgactacaccaagattatacagatattttccaatattttcttctaaagtttttattactttagctttcacatttagacccatgattcatctaaacaaatgcttttgtacagtataagatagaggcttgatttcattctttttcactcaaagatctagatgttcttcactctttctttttt

SEQ ID NO: 797738 - DNA, 587 bp, Homo sapiens
ccaaaaaattcctcaattccatctgagacctcatcagccttgccctcactatccgtgcctctatcagcaatttggtcacagccatttaaccagtaattaagaagttccagtctttgatttatcttcctatcctcttttgagctctctaaaatcttcaacctctacctgttacccagttccaaaaccacatccatatcttcatgtatcttcatagtaacaccccacttctagtaccaactttctgtgttagtctatttttgcatcactatmaggaaatatctgagaaagagtaatttgtaaagaaacaagttgtaattgtctcacagttctgcaggctgtgcaaacaaggcttcagcatctgcttctggtgaagacctcaggaatcatggtggaaagtgaagggaaagcaggcaatgccacatgggaagatatgaagcaagagagaaaagagggaggtcccagactcttttgaacaagatgatttcatgtgaagtaactcaatgagaactcaaatattaccaaggggaaggtactaaaacattcacaagggatccttccacatgatacaatcacctctgaccaggccc

SEQ ID NO: 797739 - DNA, 587 bp, Homo sapiens
ccaaaaaattcctcaattccatctgagacctcatcagccttgccctcactatccgtgcctctatcagcaatttggtcacagccatttaaccagtaattaagaagttccagtctttgatttatcttcctatcctcttttgagctctctaaaatcttcaacctctacctgttacccagttccaaaaccacatccatatcttcatgtatcttcatagtaacaccccacttctagtaccaactttctgtgttagtctatttttgcatcactatcaggaaatatctgagaaagagtaatttgtaaagaaacaagttgtaattgtctcacagttctgcaggctrtgcaaacaaggcttcagcatctgcttctggtgaagacctcaggaatcatggtggaaagtgaagggaaagcaggcaatgccacatgggaagatatgaagcaagagagaaaagagggaggtcccagactcttttgaacaagatgatttcatgtgaagtaactcaatgagaactcaaatattaccaaggggaaggtactaaaacattcacaagggatccttccacatgatacaatcacctctgaccaggccc

SEQ ID NO: 797740 - DNA, 622 bp, Homo sapiens
aatgtttctttgttgatttcctgcctagataatgtgttcaatgctgagagtagggtgttaaggaccccagctattattgtattgaggtctacttctcccttcagttttaataatatttgccttacatgtctgggtcrtccaatgttaggtgcatatatacttgctaaatataataattgctaaattgattcttgtattattatataattttcttctgtgtctccttttacagcttttatcttcaaatctactttgatagaactatggctgctcctgctcactttccattttcatggagtatgtttttccatcccttctctttcagtatatatgagtcttctgaggtgagataatttgttataggcagcataggttaggtcttgttttgttttaatctgttcagctattctatatattttaactggggaatttaatccatttgcatttatatttaaggttattatggataggtggagacttacttttgtcaatttattgttttctggttgttttgcatatactttgattcttacttcttgtactgtttttttttgacttctgcatttgggtgattttctgtaactatatgttttattcatttctctctcttctttgtgtatca

SEQ ID NO: 797741 - DNA, 629 bp, Homo sapiens
tatatttttgcttgttaatttgtttaagttctgggtagatgctagatattagacttttgtcagatacatagtttgcaaatattttagattgtctctttactgggttgatagtttcttttgttatgcagaagttctttaattgggtttcacttgttaattttgttttccttgagttgattttggagtcttcatcatgaaatctttttcaggaactatgttcagaatggtatttcctatgttttcatctagggattttatagctttgtagtatatttgaagcaagatagtgtgatgtctccagctttgtaatttttgcttaggattgctttggctatctgggctcttttgattccatgtgaattttagaatacttttttctaattctgtgaaaaacattgttggtagtttgataggaatagcattaaatctgtaaattgttttgagccgtatgaccactttaaaaatatkgattctacttatccatgagcattgaaagtttttccatttgtttgtgtcatctattatttatttcagcagtgttttgtaatttttattagagagctccttcacttccttggttagctacattccttggtattttgttatttttgtagctattgtgaatggat

SEQ ID NO: 797742 - DNA, 629 bp, Homo sapiens
ttgctctggggttgagcgtattgagcatctttagagattttgaagatcctcccctttaacgggtggagaatcttaggaagaaacattctctacgtaaggaaaattggcagaaacctggatgactttccagttttctataaatcagatgtgcctggatttgataacgtggataaattaactaggtgcagttccagggaayggaaatatttcactgggtttagtttggtcagagatttgagaggagcaaattgcctaaccaggaggttcttatgtagcaattttgccatcagtgatagaaggctactgtgtgctcaggccacagctaggggcttggatgcattgtctcatctatcctcacaaaccatgggagatacatgaggagaccaaggctcagagatatttagccacttgcccaaggacacggagagtatttgaaacagagccatgtttccactgaggtccctagctcacagccctggcctgtcaccactgggccacattgccatgtcagcgtactctccctgccagatcgtctggagcacatttccatacagcagattcatgtgaattcctgtacttttttcctcttcccacctcccgccccaacaacaggagtttggcccagaatg

SEQ ID NO: 797743 - DNA, 530 bp, Homo sapiens
aggctccacagagcagaccagggaaggcgaggcattctttattcccctccacggcccctgtccctcagcagacacaaagcaaaactggctgggattaggagctgttccaaatatctacatttcaaatctctagttagctgcagtttctatggctaccaggcctcctagtaacaagacagctgagygttaataatgcccccttcctttgctgaccctcacaagaaacatggaaggcagctgagacaacagaacacccaaggcagaatgaagcagcagcaattaggctgtagttaacaacatcacaaaacgggggcgggtgggaggggtgtgaggaaaaatagtctagtggggtttgtaaatgaggccccagcacagagacagggtgttcagggagtaatcattctttactccaagaatacatcttgtttttggaatactgcagcttagaaggagggcaggctacagcaggaaaaagctattcagagatgagaagggcttatgactgcatgtagctcactgagcaatagctg

SEQ ID NO: 797744 - DNA, 551 bp, Homo sapiens
tcaccatcaggaatacaaagactgtttagaagaacaaatgaattcttaatccccaaaatcaacagacagccttccctgtgaagaaacgttctgtcaagtgctgtatgtggccagtgcccataagccctgatggtgaagcattagtaaaccggcctcttcccaccggcctgaaagctaagatttagtttcctaagctaaagatttagttaaagcagcagtcagttttatttgaatacaacaggaaaccacagatttcaactcagatctgttgctaatacccaggaaaatgctaacctttcagtttctctaccacacacagcacattttgggaagatacctatagtgccttggtcctcccctgcggttccaggacaagcagcrccagcatcacctgagaacttgttagacatgcaaattcttgggccccaccccagaccctctgcatcagaatctctgcgggtggttcacggcgatctgttttaacttgttccttggtgattctgatgcaggtaaactcttgagacccactgcagcagtggatgcaacagaat

SEQ ID NO: 797745 - DNA, 596 bp, Homo sapiens
aagaccttatggccttactttcaacactatcttactgcacagccttcacattagctgcccatgttgcttgactttatttatttattcttgcttgtggtttctagaccttgacttctactgtggtctctggccttcgggtcagccttctgtgaggcgtcaacgtgtcttcattcagaaatgctcagtggctcactattatttcacaaatcctgttatcccggcattcctagccctctacaatatgacttcataatatatatgtaacacgacgtctcagtactccccagcataaactctttgagcagacctagaaggtctctttgtcctctgaacactccaaatctttttatatttttattttttttgagacagggtcttggtctgtcacccaggctggagtgttgtggcacgatcktggcacactgcaacctctgcctccagggttcaactgattcctgtgcctcagccatctgagcagcagagattacaggcatgagccaccatgcctggttaatttttgtaattttagtagagatggggttttggcatgttggctgggcttgtctcaaacttctggcctcaagcaatccactcac

SEQ ID NO: 797746 - DNA, 618 bp, Homo sapiens
actggcagtggaaacaagtgaaattatcctggaagggctgacaagtgagcgagaacgaaaggaggaacaggcttaagtgttcattcaggcaaagatgaaagagggagggagcccaggacaaaagcatattgtgggaaagttccggagtgtggagcgtatagttacagccagtwagacaagaggaatcatgtaaagaaagctttaaaacagatggagccagatcattgtaagctttgaataatagggtggagaattcagattttattccaggagcagtatacatggcattaaagctctctgagttgaggtcagcagtgtgtgcaccagggaatccatccggctacagcacggaagagcataggttgggctatggaaaggggagagactgaaggcgagaggaccagttggaaggaaaaaagaaaaaccaagttcatcttccccaccaaacattttcctatttcttattccactgtctgtcattgcagttcccaaatggcaactgatgggatctttctcatcacctcacttccctgcttagaacctttcagtggctctcaatactcttaggaaaaagtcaaaattatttaagatggttagcaagagtcttcacacttggag

SEQ ID NO: 797747 - DNA, 605 bp, Homo sapiens
attgatggggttgtttctttcttgtaaatttgtttgagttctttgtagattctggatattagccctttgtcagatgagtaggttgcgaaaattttctcccattctgtaggttgcctgttcactctgatggtagtttcttttgctgtgcagaggatctaattaaactaaaattcttatattttctatatttggcaagagatgtgcttccrtacgtgggacttatttagtgataaaaatgcatgtccttcaaatcttactataggttcatttttgattccatagtaattttggattcaaaataacaaaagtacctaatgcagctttacatttatacaattaccacatacatgagaatggctataattgtgattatgtgtctttatacaaccatggtctagaacttaatatttggctcctattaccccaaaacaacaaaaattgaatagcttccatagtaatacagaagtaacattttaaaaattataaaatatacaagatttgggggttaatgtggcagcagatgctatgctgtaccccaatacatcctctccaaaattcccatagaatacacctgaaaatgtccaaaaaaaaaaaaaaattaaaag

SEQ ID NO: 797748 - DNA, 491 bp, Homo sapiens
aaataaataagagcacagattttgtataaactagttaaaaatatgaaataaaaactggggaatgagagaaacttcttaatctaagaattatcaagctttagaaaagaaaagaaaaactgtgtcactaaatggcttcaggaaataaagtgcaacttaaagaaatactcaagtaactcccagaaaacattagtaaacaaaaaatatgttagggaacatctgaagagaagaagatgtttctctggacctctctttgttttcccgttctgctgttgctgtagactagatctttgtctgattacctttctttcacsagctcctaccaccattttatcctttatcattctgaaatttccaagggggcttgcatagtgaaatgcagtcttcaaaaatgtctccgttttttctcactcctaaagatgaacactaaactttttgtttgtgtgtgtgcattttgttctttatctggaatttaaactcattcattatggaaa

SEQ ID NO: 797749 - DNA, 617 bp, Homo sapiens
attgctccagcatacaatggagtacagatggttatatatccttcttcttagggaaaagggagatagggaagtgtggattattttaggggggatataaatgatttttaggacaattccacaggcttgaagaacatacagtggcttgggacaaagtttgttgggcccacaaagcacataatggtttgtaacaaaagtatgaccctgtgtgttggcagatttcagtctttattcctgtaagtttagttaatgcaaactaactaaagagggaaacagctaggagtaattgttttctttgacagttccaaactttagtcagagagggaacttcagagatcaacttcattctatgctttaggagagacagaggattaagagacaggaggtgagtggtgcaggttagagagaacttgaagtttcttcaatacagcatgtcaaagtaccatatttyggggtattggtttctgattcccaacattctgaagactgctttgtctgaaattaatataggcattcaaattgtcaattgattggtgttagcatgatatatctttttccattcctgtagctacaacatatctgtctttatatttaaagtgagatcttataaataacatata

SEQ ID NO: 797750 - DNA, 572 bp, Homo sapiens
taaaatagaaaaattttaatatcttactaatatatgaagaaaaagcatttggcaaaatccaaaaccaacttgtgacaaagctgctcagtaaactaggaagagaggacaacattttaaacttgataatgaatatctctaacaaacctacttgggttagattggaaatttgcagaagagacctctgccatctcttggtcatgcagtacagtggtttagatagaagttggaactgttctcagaactytggcagcaacagtagttataaggtaactgtagaatttgcttttcatttgggatgggatgtgggaatagagtgagatatggatactgattatttctgtggggtatcagagttacacgtgaatttgtgaatgagaagatttaaggaaggagatataaatatgaatcacagaccttagtctaaagagttccatttgaagagagattcccatacaaatgttctctgaactaaagaggctgcattttcagaaaatttggcagaatggtaatagcctcagaactttatacaacttggcgtttggtagaatttgtaactcctctttaagatcact

SEQ ID NO: 797751 - DNA, 627 bp, Homo sapiens
ttgcctcccaagtttatcatagccagctccgtgctataaggccctgggggctaccactttctttaggctgtctttccttttcctgagccggcatcggtgcctcttccatctattcccacaccctcaaacatcagctcataaccctgtagccattacgaacacagccgcctctcctcggcccattcacaaaaggttaaaagcagcagccgccgtrtggagctgtagctgccagggctgggagcgagatattctgtcagcacgtcctgaaattcttttggaagtttgacaggattaaggggattaatacattaaagcattattacagcattcacaggggattttcaaaagactttacactgtgatctatttgtcctgttacataaaactcgcgttaataggctgatggtgagggccaaacagaatatctgtggaatcaataaccttattttttggtaaacacatttagcaggcagagctggtcattaaggcctgcagaccctcccacggcgcgcatcaacgaaattacccttggagaatccatttgccaattaagctgagggcttgtctgagtcctcaagcctgctgatggcagggggcaggagagagagtgtctgccttccgccctcc

SEQ ID NO: 797752 - DNA, 628 bp, Homo sapiens
ctgataatgaagctcactaagcgtaggccttggagtcagacagactcagcaccgggaccttgggcaagtggcttcgtgtctctgagcctcaagttctctgtccttaaaataaggataaaaatacctccttcagaaggtagttgtgagaatttaaaagtttctcctttaggaaccagcttagaataaggactcagtaaatattggccaccctttctgcctgactcccccsctatttataaagtttggaaaagaaagtgccttatatgttgcgaaaaatgatgccacaaagcaagtcaatggtggggagagaacaatagctcccggaaggaatggtgctagtaatggaccaccgcacccataatattctgcaagtgctcccctaccccattcttgcattacaaaaaaaatttaattccatttattggtcaacttttcccatgaggacacatccttaatttaatcatgtaaatcaatgagaaaatctaattcactttagagaaatttgcttcaaggctagccttatgggaatgaatctgttccttaaagtgtatccatagcaagtgacgtgtgtctttatcacagttacaaagggatataaattaatctctagcccattttagaaaataga

SEQ ID NO: 797753 - DNA, 568 bp, Homo sapiens
cactggagtgtgacaattgggtccagaagctcaggctctgagaacgctctcctccttcttctccagtccctttcttactcaacacctcaagtaatttatttattccacaagtgtctattaaatacctattactgccagagcaccatatgtcagtgagcaaaacaaaaaatttcctgccccagtggataagagggaggatacacacaactcttagtatgtttaataaatcagcacattacatgtattcacagggtgttgagggctaagggaaaaacaagcacaggaggaaaagggtgattgagagtgtgggataggagtggggagtttgcaatttttgataaggtgaacaaggtagcccttattgaaacagtgatgtgggggtggtgtcytgaatgcatgcactcaatcactcactaccccatgcattcatgacaccgttcattcattcactccttcatccatgcaggtatccattcattcactcaatcactcattcctcatttactcattcactattcattgccccattttcttgctcactcattcatacattcgttcatgagctcac

SEQ ID NO: 797754 - DNA, 563 bp, Homo sapiens
gggtctgccttgaagagaaagtttgttttatcttctgttgagaaaataaactgtctaaaatgaattgtggattccacagtaattcaatgtgaatattatgtgaatgaagataaccatagagaatagagctgcctgtgaaaaccaaaatgacagcaagtgctacacagaccaagagtctggaaaaccagcatgtcaggagggtgttatgagaactcccaagaaagggtgataactcaccatgggaggacttcccatttcttcagtgaccacacagggaatgtatytggaaattgaaaattactttctatttttatatgtcatctactcactctacttttattctgaattattgtctcttcttttaataatttatttactcagtgctcgaggtcaaggatagattaaaatggttcctgccttagagaagctcaagattttagtggaattatgaactggtcaatactatgtcataaacttatgtatttccctaagacttggcccaatatcagaaacataggtgataatttaaaaatgtttattgaataaatgaacacaataaatga

SEQ ID NO: 797755 - DNA, 608 bp, Homo sapiens
tagttttcaaagagatagttagaaactgacgtgtactactaagaggaaaccaaacatgaatagggtatacagaaaaagaaaccaagttcttgttcaaagggacataatttcagtctctctagttttttggtttttgttgttgttgtttgttttttgttttttgttttttttttccttaagagacagggtcttgctctgtcacccaggctggaatgcagtgttgtgatcatagctcactgctgcctctgacctcctggtctaaagtatcctccttccttggcctctcaaagtgctggkattataggtgaaagccacctgcctggaccgattttagtttctatacagatactaaacaggtgtttgacttccaccatgttacctaccaaattttatagaattcagttattacatttgcaatataaaataatatttacaatgtaggatgacgatgagagttaaaataatcttattttgtatgtaagtattttgtaaggtctaaattttaattaatcttatttgggaagagggttccaagccactaaggacactttttgtgtgtgtgtgaacatactgtgaattagggaccatcattattttggaagttatta

SEQ ID NO: 797756 - DNA, 608 bp, Homo sapiens
tagttttcaaagagatagttagaaactgacgtgtactactaagaggaaaccaaacatgaatagggtatacagaaaaagaaaccaagttcttgttcaaagggacataatttcagtctctctagttttttggtttttgttgttgttgtttgttttttgttttttgttttttttttccttaagagacagggtcttgctctgtcacccaggctggaatgcagtgttgtgatcatagctcactgctgcctctgacctcctggtctaaagtatcctccttccttggcctctcaaagtgctggtattataggtgaaagccacctgcctggaccgattttagtttctatacagatactaaacaggtgtttgacttccascatgttacctaccaaattttatagaattcagttattacatttgcaatataaaataatatttacaatgtaggatgacgatgagagttaaaataatcttattttgtatgtaagtattttgtaaggtctaaattttaattaatcttatttgggaagagggttccaagccactaaggacactttttgtgtgtgtgtgaacatactgtgaattagggaccatcattattttggaagttatta

SEQ ID NO: 797757 - DNA, 607 bp, Homo sapiens
gggttgaggtagaaagacttttactgaagtgcagctttcttactagttctttaaccctagtcaagtacttaacttctctgagactggattacaaactgctttgaatcttcagaggtttttgattttttaatcttcagggttatttgagcaatgcaaccataaagagttaagccaattgtgtgttgtacagaggccaagaaaaagaacaaacaggcttgaaactcagaccgctcttcaatagccaaattgtgagtactgatgttgaactccccaatatggattactcttaagtgtaaaacacaaaactgtaaaaactctggaagacaacctaggcaataccatactggacataggggtgggcaaagatttcatgacaaagacaccaaaagcaatcacaaacaaaagcaaaaaytgacaagtgggatttaattagacctaagatcttctatagagcaaaagaaactatcaatagagtaaacagccaacctactgaatgaaataaaatatttgcaaactatgatctgacagaggtctacaatcgagcatctataagaaacttaaatttacaagagaagaacaaacaaccccactaaaaggtgggcaaagg

SEQ ID NO: 797758 - DNA, 606 bp, Homo sapiens
catactatataccttctgtgagagaccttggagcagaggttatgtgaaagttatgacccagtcatgggcaaaactaaaatgaaatgcatgttaactgttaaagctaggatttagctgaactttcacttgtgggaaaagcttttcaaattgtctgatgacaggaatagggaacacaaccccctcttcttttaatagatacagcatggatgaagctaggttgcgtgttctcgaagtgttagtagattcgtcaagggatgaacttctgactttgtgtcatttaagacaaaaaaattatttaaatagatttctgttcaataaatatattwctttgttcataaaatgtacatcatacatattttactcacatttaattttatcttagggaaatatatatgtaccaataatttcccccagattaccaaacattttaatgcatgtaataatgaacaactaataaaaaaaagtcaatagaaaatcaatggttagttataagggatatagttttagactgtaaaacatcagattgttttcaatgtgtaaagccaagagcttaaatctagaatacatgtagacagatcacttcccaattatttgggagggagaagg

SEQ ID NO: 797759 - DNA, 683 bp, Homo sapiens
gattgctcttattcagtttacagttctaatccaggtaacaaaactagcacttcctcccttgataaggagacagattctttggcaaaaattctattagattggtgcacaagtcattgcagcttttgcccttgaaagtaaggacaaaaccataatgacttttgcaccaacctaatactatattgccacagggaaccgcacccatttatcaggataactgcgtccagaggaaagggaagtatccagattgcctgtctatcagtagagtggccacaagctgcagctgctcaggggtggccctcctgtatgcccattgtcacagcattggtccagtcaatgtcttcttcactcyaaaaggcatcctggtttatgcgatgagttgtgcggctattctagctattagataccatttctgaactgatactcattactctagaccataaatgccactgtggggtttatggagttaaaaggatgagtgtagctttggcctgagatcatgtctaacatttgtaacatgcccatcctacaatcatttctccagccccaaaatatactaggagaatagatacaattaatagctggcaaaatcactgctgtgagacataacccacagagtgaggattgtcttagaaagggccaagtggaaggtcctcaaatcgccttccctgctcactgttatgaaa

SEQ ID NO: 797760 - DNA, 598 bp, Homo sapiens
ttcttagggaaggggggaaataaactatgacaaaatcccaaatcacatattgattagatatattttaaaataagtgacatatcgtcctaattctctaaagcagaccctatcagttacttccaaatgattttggaggactttccattgtaccacattgactgttcaattagatgcttaaccactgaattagagggtttattttttctttataaactttagcccagggaacaaatacttttaaggtcaaaatcatcgtggctataatcattttgaagcttcagtagtttctgtgtttgtatataggaaagacycaaaacagttaaaatattgactcttcttgttgtcaccattagagaaagttgtccttccatgtatatgagagtgtgggttaagtgcttcatttttaatgagtatgtcaatccttctttcaatttgatttttgaagtttttagttttgccgttaatgggaacatggagggcctgcaattgatatacatacaggcaatataactaccatttgtattcctaatcaaatctccctaaatgcttgttttatgtgaaaaaaattaatattattccctgaaaagcaaaccagcca

SEQ ID NO: 797761 - DNA, 566 bp, Homo sapiens
aatcaagggaaaaatgaattggcccacctttcaaaggttttgtaaatcttgtcaatttgaggaatctaattttttttttttttttttttttgagacggagtctcgctctgtcgcccaggctggagtgcagtggcgggatcttggctcactgcaagctccgcctcccgggttcacgccattctcctgcctcagcctcccaagtagctgggaccacaggcgcccgccaccacgcccggctaattttttgtatttttagtagagacggggtttcaccgttttagccgggatggtctcgatctcctgacytcgtgatccgcccgcctcggcctcccaaagtgctgggattacaggcgtgagccaccgcgcccggcctgaggaatctaattttaagcaaacaagatatgtgaaaatccagacttacaaaagaaatcagttaggagttgattattcacattatataaggactctcctttatgaaaggatccatcacaggctttctttaaatacagaattccactgctgtgattagcatggggtctaatttacaaaacaaacaccctttggct

SEQ ID NO: 797762 - DNA, 600 bp, Homo sapiens
ggctttctttacactgtgggcataaaaccgcctactcaagcctcagcaatggtgggtgcccctcccctctccaagctccagtgtcccaggttgatctcagactgctgtgctagcagcgagaatttcaagccaattgatctcagcttgctgggctctgtgggcatgggacccaccgagccaggcaccagagggaatctccttgtctgccagttgcaaagaccatgggaaaagcacagtatctgggcagtagtgtactgttcctcctggtacagtctctcrtggcttcccttggctaggaaagggaaatcccctgatcccttgcacttcccgggtgaggcaacgcctcgccctgctttggctcgccatctatgggctgcacccactgttcaaccagtcccaatgagatgaaccaggtacctcaggtggaaatgcagaaaacacccatcttcttcatcaatcttgctgggagctgcagatcggagctgttcctatttggatatcttgccggaaatccccatcagtctcttttattttagctattctggaggatgtgtggtgatatctcattgattttgatttgcatttacatgattattgagg

SEQ ID NO: 797763 - DNA, 626 bp, Homo sapiens
gcaatttgtctggattatgcaatttggcatcaatactttttaaatgttttccagtgatttaaatgtgcagcagggttacaaactactgaaggaaaggcagcagagcacacaattcagagggtagacttacctccggggccacctgasctcccattctggttttatcatccaatggctatgtgacctcagccaagtgtctacagtgtctgaggctccctcaatcacacaaaacacataacaggctgcttcatgaggctgtgtgacagttaaatgaagcactgtttgtgaagtgcttagcaagtatgcaataaataatgattattattattagcagctgtgagaatcttataaccatatattatttaacaatattttcagtattcttgctacttaaaaaaaatttttaaacatccatattaaagtcctattgaattagtcacacacacacacaaacatttatatacacacatataaactaacttagtaaaatgtgtactcatttcaaaatactgtttcaataaaccattttcacgacagcatagaaattacagttaaagaaaccctttgagcattgtgatatgtagatacctgagcagaataatgtcatcaatttgttaaacatagtt

SEQ ID NO: 797764 - DNA, 427 bp, Homo sapiens
gtttagaatactcctattccaggtcactcagtcttcagtgggtgaggcggggggcggggggcggtaggaggagaggagactatactgagattgtcagtggagagtgagccaaggtggccccaagcaaggcatggggcctactacttagaacagaggttggggtgcagtccccacacatgcccacaaggggtcacagtgattcaaaataaggctattcctcaccgccttcatgagaaaaarcaagaaactgccttagagctagcagtcttcaaagatacaagaatctccttggtacatcagaaaacaagctatgagagggggtgcagaggccatgtgagcagagcctccaagtctacttgagatgtgcgtactattcagtaggagccacaatttaagatggaatgccatagatgtgttacaagtttac

SEQ ID NO: 797765 - DNA, 605 bp, Homo sapiens
aagactgcccgaaacttaaaagtgttgaggaaaatagagggcaagttgctgggtcagttatctctgttattcctcattttatccattaaggtgcttttccagaaaacctttccaagcagtaaggaaccttttaatgttttcctacaacagactgaaaaggaacaggggtgtcaatggccacatgcttccatctgggtgaatgtcaccgctgaaaacctgtcggcytggcactttgagatgagtgtcttgaagacctgctgtttccctgaccctggtagtgtccctgagaggcttggagcgggacggcgaagttcaaggacaactagcattgatattggtattgaaattagacagggcgtcattcccaccatcaggactgggaccgctgcctttgttgaactttgtcactaactaggactcggggctgagctctagctttgagagtaggtgctctttccgggatgcccggggaaaaaatatcaaaacattgactaatctaagcctcatttttcccagaccatgcccatcttgggacaatcaaggacttggatgacaatcccactagggtttgtcgccagcagccacctagacacccccatcccttg

SEQ ID NO: 797766 - DNA, 605 bp, Homo sapiens
aagactgcccgaaacttaaaagtgttgaggaaaatagagggcaagttgctgggtcagttatctctgttattcctcattttatccattaaggtgcttttccagaaaacctttccaagcagtaaggaaccttttaatgttttcctacaacagactgaaaaggaacaggggtgtcaatggccacatgcttccatctgggtgaatgtcaccgctgaaaacctgtcggcttggcactttgagatgagtgtcttgaagacctgctgtttccctgaccctggtagtgtccctgagaggcttggagcgggacggcraagttcaaggacaactagcattgatattggtattgaaattagacagggcgtcattcccaccatcaggactgggaccgctgcctttgttgaactttgtcactaactaggactcggggctgagctctagctttgagagtaggtgctctttccgggatgcccggggaaaaaatatcaaaacattgactaatctaagcctcatttttcccagaccatgcccatcttgggacaatcaaggacttggatgacaatcccactagggtttgtcgccagcagccacctagacacccccatcccttg

SEQ ID NO: 797767 - DNA, 608 bp, Homo sapiens
cctatctccagacaaacactgaagtgccttctgtctttatggatttgcctgttcaggatatttcatgtaaatggaattatataatacatagtctttgtcttatgtaatttccttctttcccttaacataatgttttcaaggttcattcgtgtcaaagcgtgtggtagtacttcctctttttttttctttttttttttttttttgagacagagtctcactttgtcgcccaggctagagtgcagtggcatgatctcagctcactgcaacctccgcctcccgggttcaagcaattctcctgcctcagcctcccragtagctagcattacaggcctgctccaccatgccaggctaattttttgtatttttagcaaagacggggtttcaccatgctggccaggctggtctctaactgctgacctcgtgatccacccacctcggcctcccaaagtgctgggattacaggcatgagccactgcgcctggctgcagtacttcctttttatggccaaataatgtttcatcgtatggatggatgtataatgttttgtttggtcattgatcagttgatagacatttgggttgtttctaccttttggctattatgaataa

SEQ ID NO: 797768 - DNA, 602 bp, Homo sapiens
gtttaccccatagattcaggggaaatagagaaatagagatcatgttttccctgatgagcagagctagcctattctgccagaaccagaactttcccaggttgggaagaccatctggtcaacacgctggtttccaaatgatagaacagaaggatgaaataaatcttgctattctgtagacagcgtgcaagaaacactggaaagaacaaagaggtgtatgcaggccttctctgtgagtggactgggtccttgctagcactggctctttggagacaaggctctattcccatctgttgttggtgaaagttacrtctttgaaatctctacccttaagagtctaacaatacatttctataagtatattaccaacccatatcaaactgacggggtgtcttgtcctttatcttgactaatttataaagaagcatgaatgtgagggagaagggtgtaaaggtcaaccatgttgagttgtatattggatgttgttgtatgtatgaagagttgcaaaataaaaattaagatggtgtcctccgaatgttggacaactttgaccatctgggtcacctaaatatagatgttatactgctagtctctatgggctatgt

SEQ ID NO: 797769 - DNA, 546 bp, Homo sapiens
tctaaacaatgcaacattaggcaacttcatcattatgggaacatcatagagtgtacttacgcaaacctaggtagtatagcttactacacacctaggccacacacctattgctcttaggctacaaacctacatagcttgtaactggactgcatactgttagcagctgtaacacaatggttaagtatttgtgtatctaaacatatctacataatgaaggggyccaataaaatacagtattataatcttatttggaccgccaatgtaaatttctgttgttcaccaaaatgtcattctgtggcatatgacaatacttgccatggattatgaagcagaaagttgcaagaatgacaggttttgctgcatttagggtgttgagtataattcagtaatttaactttggacagtctgagtttgaggcactagttagaaatctaggtagagatgtggaataagctattggaaaactgaggctgaagttcaagggtgaggtctatgcttgagatagaaatttgagagttgtcaaaatatatgttacttaaggttgtg

SEQ ID NO: 797770 - DNA, 612 bp, Homo sapiens
gttttctggtatcaaagagttaaaattttatatagcaatattacagagtgagtgggaccacgtttcttttagaattaagaatatttggtctggcacagtgactcatgcctgtattctcagcactttgggagtttgaggcrgccagctcacttgagctcaggagttggagatcagcctgggcaacatggtgaaaccctgactattcaaaaaatacaaacattgttcaggtgtggtggtttgcacctgaagtcccagctactcaggaggctgaggtgggaggatgaggtggaaggatcacttgagctctggaggtgggtgttgcagtgagtcagttgcaccactgcactccagccagggcaagagaaccagaccctgtcttaaaaacaaaacaagcaaacaaaaagaataattaacaataaatgttgattttttttcacaaagaactttgaatcatgtaggcaaatagaagtccagaactaccttaatattttaaaatcataagtgatataaatatcctgatactaaaatgaaaggtacattaaagaatgagaaaataaaatctaaattcgaaatttaattccagaaaactaagctaataagactttaatagta

SEQ ID NO: 797771 - DNA, 612 bp, Homo sapiens
gttttctggtatcaaagagttaaaattttatatagcaatattacagagtgagtgggaccacgtttcttttagaattaagaatatttggtctggcacagtgactcatgcctgtattctcagcactttgggagtttgaggcggccagctcacttgagctcaggagttggagatcagcctgggcaacatggtgaaaccctgactattcaaaaaatacaaacattgttcagktgtggtggtttgcacctgaagtcccagctactcaggaggctgaggtgggaggatgaggtggaaggatcacttgagctctggaggtgggtgttgcagtgagtcagttgcaccactgcactccagccagggcaagagaaccagaccctgtcttaaaaacaaaacaagcaaacaaaaagaataattaacaataaatgttgattttttttcacaaagaactttgaatcatgtaggcaaatagaagtccagaactaccttaatattttaaaatcataagtgatataaatatcctgatactaaaatgaaaggtacattaaagaatgagaaaataaaatctaaattcgaaatttaattccagaaaactaagctaataagactttaatagta

SEQ ID NO: 797772 - DNA, 612 bp, Homo sapiens
gttttctggtatcaaagagttaaaattttatatagcaatattacagagtgagtgggaccacgtttcttttagaattaagaatatttggtctggcacagtgactcatgcctgtattctcagcactttgggagtttgaggcggccagctcacttgagctcaggagttggagatcagcctgggcaacatggtgaaaccctgactattcaaaaaatacaaacattgttcaggtgtggtggtttgcacctgaagtcccagctactcaggaggctgaggtgggaggatgaggtggaaggatcacttgagctctggaggtgggtgttgcagtgagtcagttgcaccactgcactccagccagggcaagagaaccagaccctgtctyaaaaacaaaacaagcaaacaaaaagaataattaacaataaatgttgattttttttcacaaagaactttgaatcatgtaggcaaatagaagtccagaactaccttaatattttaaaatcataagtgatataaatatcctgatactaaaatgaaaggtacattaaagaatgagaaaataaaatctaaattcgaaatttaattccagaaaactaagctaataagactttaatagta

SEQ ID NO: 797773 - DNA, 535 bp, Homo sapiens
atgttgggtgcatatatctttacaattgctatatcctcttgttagtttgaccccttcaacaccacacaatgacttgttttgtctctcgtgacaacttttcacttaaaatttatttggctaatttaaatacagtcacctctgctcacttttgggtgccactttatagattctctttttccatcccttcactttcagcctatgtgtgtccttaaagctatagcmctctcttaagagcagcatctatttagatcttgttttttttttttcaatccattaactaccatgtcttttcactggaaaattttatccatttacataaggcaattattgatagatagggacttaactattaccatttggttatatttttcctgagtgttttgcatttccttttttcctctcttgctgtcttctcttgtgatttgattatttttgatagtagtatgctatcatactatcaaaaatcatacatattaatcacactatcatacatattatattatcatactatcatacatatcatattaccatacta

SEQ ID NO: 797774 - DNA, 470 bp, Homo sapiens
aagttttgtccaatcaccaaatcaagccaaagtccattaatccttggtgatctgtggcagtgacttttcttgattaactaaggcaacaaacaaaatgaataaaccttcattttcaattaccaataatcacaccctggagaaacctcattgattacgatactgccaatgtacaaagtggtatgcagccttttcagattggcttctttcacttagcaatattcatttaatgttccccatgtctttttgtggttaaayagctcatttgttttgatcatgcaattatattacaacatattaatgtatcacagttggtttatccattcccctacttaaggacatcttgattgcttccaagtttggggaattaagaataaagttgctataaacagtcattgctgggttttgtgtagagataaatgttcaacacatttaagaaatagcaaggagcatgactggtggatcacatgata

SEQ ID NO: 797775 - DNA, 602 bp, Homo sapiens
atttacttttgtaagaaactgccagactgtcttccaaaaacgttgcaccgttttgcatcgccagtagcaattaatgagaattccagctgctccccagcatttgggatattcagtgttttttctttttttttttttttttttttttaccattctaatagatatatawtggtatctcattgttactttattttgcaattcccataatgacatatgatgttgagtattttttcatatgcttatttatcatctgcatatcttcttgggtgaggtgcctgttggggtcttttgaccatttttttaattgggttatttgtttcctttttgttgagtattaaggttctttgtgtattttgaatatcaattctttatcaaatatgtattttcagatattttctcgcagtttgacttgtctttcagaatgatttctagttgtgtgtgtggtaggcagaataatggaccccccaaaatgtccatcctctaatctctgtaaccagtaactgtgttacctcatatggtaaccctgtagacacctgactttagcatagagagacccatttcaggtttctaattccagaattattaggtaataaataataagcctg

SEQ ID NO: 797776 - DNA, 602 bp, Homo sapiens
atttacttttgtaagaaactgccagactgtcttccaaaaacgttgcaccgttttgcatcgccagtagcaattaatgagaattccagctgctccccagcatttgggatattcagtgttttttctttttttttttttttttttttttaccattctaatagatatataatggtatctcattgttactttattttgcaattcccataatgacatatgatgttgagtattttttcatatgcttatttatcatctgcatmtcttcttgggtgaggtgcctgttggggtcttttgaccatttttttaattgggttatttgtttcctttttgttgagtattaaggttctttgtgtattttgaatatcaattctttatcaaatatgtattttcagatattttctcgcagtttgacttgtctttcagaatgatttctagttgtgtgtgtggtaggcagaataatggaccccccaaaatgtccatcctctaatctctgtaaccagtaactgtgttacctcatatggtaaccctgtagacacctgactttagcatagagagacccatttcaggtttctaattccagaattattaggtaataaataataagcctg

SEQ ID NO: 797777 - DNA, 602 bp, Homo sapiens
atttacttttgtaagaaactgccagactgtcttccaaaaacgttgcaccgttttgcatcgccagtagcaattaatgagaattccagctgctccccagcatttgggatattcagtgttttttctttttttttttttttttttttttaccattctaatagatatataatggtatctcattgttactttattttgcaattcccataatgacatatgatgttgagtattttttcatatgcttatttatcatctgcatatcttcttgggtgaggtgcctgttggggtcttttgaccatttttttaattgggttatttgtttcctttttgttgagtattaaggttctttgtgtattttgaatatcaattctttatcaaatatgtattttcagatattttctcgcagtttgacttgtctttcagaatgatttytagttgtgtgtgtggtaggcagaataatggaccccccaaaatgtccatcctctaatctctgtaaccagtaactgtgttacctcatatggtaaccctgtagacacctgactttagcatagagagacccatttcaggtttctaattccagaattattaggtaataaataataagcctg

SEQ ID NO: 797778 - DNA, 572 bp, Homo sapiens
gccatgtaattctcctgtggaaattaaatactttaataactgtaatacacttagcacaatgcctggccatatacttagaactcagcacctgctgaaagttaagtatttatgaagggatggcacacatttcttcctgtatttactagtgctctccttttcattctaacaggctacaaagtccatcccatgaattttccataaaacaaaaatttttcattaaaataggagtattcagtgatagataagtaagttaagagctaattgattgacttaatttttagcccgatggactgatgttgtgtaraagtaccttcccatgtatccacccacagcacattctatcaaaatccagtataacaaagtacaccttcttcttaacaggcaataaaacaggaaataggtgttctggcttattcttaaagttgtggatttgtagcatccaaagaatctttaaagttctgcaattggaaatgcatacctctgaacaattaaccagaatgcacatgttgtatctaattttatgtctctctcatgaatatggaagaaccgtgaaggatcaccagccattggag

SEQ ID NO: 797779 - DNA, 587 bp, Homo sapiens
acatttataggaatctgggtccactttcagatggctccttaaaagggaatatttccaactcttgcttctgtttctttataaatttgctgtgatttaattcacttatctgtatgctgtaatcaaacaatacattgttactcttattactgtgaacaaaaaattaaatagtagataaagtaagaattatatacatttagtttcatgccttratcactttctttagctctgaagaactttcagcatttctcacagggctgggcttcttgcaactaatatccttagcttttgtctgaaaaggtcttcagttctcttccaattctgaaggacaatttctctggatatagaactctgggtcagtggtgtccttctttcaacacttaaatacttcatttaactcttctagcttacatagaatctgtgaagacgtctggtgggattgttattcttttcgtttatggatgaggcattttttttctttttttctttggctactttccagatttttctgttgggctgtagttttggggtgacttgaatactttatgcccacctgtagccttttttgtttgtttttcatttggcttggt

SEQ ID NO: 797780 - DNA, 592 bp, Homo sapiens
cgtgccactgcactccagcctgggcaacaaaagactctgtcttgcaaaaaaaaaaaaaaaaaaagaaaaggaaaaaaaagtatttttcttaattttctatttgttctgagaatagactccacctctatgtggatagaaagctcatccgttaaatgtgtttttcctaatattcaaatttctcaattgggcttttagcggagttacttatcacytgaggtgaggagttcaagaccaactactaaagtccaagaatactgttcaggaagggcaatgtcttgagacgtcttaatagtcacaactggcggtggttgctactggcatctaatgggtagaagctgaggatgctgctaaactgctaaaccacctgcagtacacaagacagccccatgactaagaattatccaacccaaaatgtcagtagtgcagaggctgagaaaccatggcctaaaatataccatgtcatataatagacgatatttgttacagaatttcaacattatccaagtataacatttttacctttgcatctcatcttgtgtgagattctttctcatttctctagagagatggtaaagacgatggagtgtagatg

SEQ ID NO: 797781 - DNA, 551 bp, Homo sapiens
tgaaacctagaactgggatcaggaaaatgcctcccctggcaggtgggccctggcagggtgggcttcatggggcagatggggctttccttcctcactctggaccatgcagtggctgtggaaacaatgagccctcactaggcctgaggccacactcacaggtcttggctgtgcccagcaggtttagaatggctcagcaggggatgcccakaacctagtgctggcattggttaatattagaatgaatgaatgagggaatcagaatgtcagcatgggaagggatctttgggatcattctgttcgatcttttcttgcctttttcttttcttttttaatagatgggggtctcgctatgttgcccaggctggtcttgaactcctggcctcaagtgatcctcctgtcttggcctcacaaagtgctgggattgcaaatgtgagccactgcacccagttctgtccaatccttacagatgaagaaaatgagacctagagaagagtaggatttctttttttttttttgagacagagtctcactctgtcgcccagactggagtg

SEQ ID NO: 797782 - DNA, 551 bp, Homo sapiens
tgaaacctagaactgggatcaggaaaatgcctcccctggcaggtgggccctggcagggtgggcttcatggggcagatggggctttccttcctcactctggaccatgcagtggctgtggaaacaatgagccctcactaggcctgaggccacactcacaggtcttggctgtgcccagcaggtttagaatggctcagcaggggatgcccagaacctagtgctggcattggttaatattakaatgaatgaatgagggaatcagaatgtcagcatgggaagggatctttgggatcattctgttcgatcttttcttgcctttttcttttcttttttaatagatgggggtctcgctatgttgcccaggctggtcttgaactcctggcctcaagtgatcctcctgtcttggcctcacaaagtgctgggattgcaaatgtgagccactgcacccagttctgtccaatccttacagatgaagaaaatgagacctagagaagagtaggatttctttttttttttttgagacagagtctcactctgtcgcccagactggagtg

SEQ ID NO: 797783 - DNA, 632 bp, Homo sapiens
agtgagctgatatcgtgccactgcactctagcctgggtgacagagcaagactccatctcaaaaaaaaaaaaaaaaaaaaaaggtgatctcttagacttagatttaatatactgcaatatgttgtcccagaagcgaaagacatttacaattggctggaagtagaatttgagccactaaaactctgtgagcaagtcattcggtgatcactgatgggtagcattggaccaacaactagggcatctagattagagtcctcattgtgcccacagagtgtagacttctagaaggataccagttagtgtcmagtgaatggattagctgactgccaagaggcatttgtcaacttcttgagttgaccatatatccaaggtcaatacctgagcgttaggcttccataaccaaatttatgagacagagtgattccattatctcaggaaaagactcaaacattcctaagagtgacttttaaatcggaaagtaaaccaatcatgtattttagtgagaaatataatttagtagattatggcagcctttcacatttccctattcggaaggggactgcatgaagaatctaaaataacttgataggaatgaaattagagctgggaatttttttttttctcttaaaggca

SEQ ID NO: 797784 - DNA, 592 bp, Homo sapiens
acggcgtctctgcgtcctaggagccgcccaggttgcgtttcctcctcctgttccagggacattttgcgctggttagagtggccgccgccgccaggccgcgcgtggaggaggagccgggcggcgagccccgccccgggccgcgcgcacccgcagttcccgccccaggcccgcgcgcccgacgtcccgtgtcacagcgcctcggggcccttgcgcgcccactgttccggcgagcgcagctctcccacgggccacgtcctcccaaccctgcttgccctgctccgcacctttggggagccgggccgtctccaggccccaaggggtcactatcggaacccstcatcacagtacctaatgcgaagacccggaaaggttgtgagtgaggccgtccgcaacctcaccctgcgcttctgccgcgccctacccctggtcattaccctcgaaaatccctccgatggcccacgaattccagtgtgcatggtgttgcgcagtcaggccggctgcatcatggtctcagcccagggaaaatgtcaaatgcggtgccccttattcatgttactgagaatttcaagagagtaacaccagagcatcaaac

SEQ ID NO: 797785 - DNA, 592 bp, Homo sapiens
acggcgtctctgcgtcctaggagccgcccaggttgcgtttcctcctcctgttccagggacattttgcgctggttagagtggccgccgccgccaggccgcgcgtggaggaggagccgggcggcgagccccgccccgggccgcgcgcacccgcagttcccgccccaggcccgcgcgcccgacgtcccgtgtcacagcgcctcggggcccttgcgcgcccactgttccggcgagcgcagctctcccacgggccacgtcctcccaaccctgcttgccctgctccgcacctttggggagccgggccgtctccaggccccaaggggtcactatcggaacccgtcatcacagtacytaatgcgaagacccggaaaggttgtgagtgaggccgtccgcaacctcaccctgcgcttctgccgcgccctacccctggtcattaccctcgaaaatccctccgatggcccacgaattccagtgtgcatggtgttgcgcagtcaggccggctgcatcatggtctcagcccagggaaaatgtcaaatgcggtgccccttattcatgttactgagaatttcaagagagtaacaccagagcatcaaac

SEQ ID NO: 797786 - DNA, 613 bp, Homo sapiens
aaagtctaatttccttaatatatagaacacttctacgaattggaaaaatagggaccaacaaataaatagaaaaaaattcaaagtattataaaaagatagcaaagaaaagacaatttgaatttttgatatggggagagattctaaaccaaactatctctttaataagagaaataaagaataaatctacagtgagatactatttgtcacatttcaggttaccaaggatacaaaaggttaatagttaatctgtggatgagggtgagaagaaaagctactctggtttkttgcttgtgagaatataaattagcataatccctgtgagggataaggtctatgaaaattacacagcgcataccttaatacccagcaatcccacctctgcaacgtattctattatgtatcaagtgaaaggattattcattgcagctatccttttttaatagcaaaatattacaaaaacatcaaaatgtttatcagtagagaactaggtaatgaaattatcgtacatcacactatggatactatagctataaagcataacgagaaaagtctttatgtgggggtatggaaagaccacctgatttaaaaagaaaatacaacaagatgtataaca

SEQ ID NO: 797787 - DNA, 643 bp, Homo sapiens
gtaaaaaattttcaaaatagggttaagtttgtaatttgtggagtgtgtcaaggtgagtgcaaatgagttattaactgaatggatcagggaatgttaggtgtggaatggaagcctaggaaaatggcatccacaactgatgggtagaataacacttacggttctgaggcatgtttgaatggagggtaaaacctgattgggcagcttaaaaatgttgtgatttaaactaaccatccttagatcattttgttaattgagaacttaagcgagaacaaggtttgatcatatattgtttcctgactagcagaaacggattttaccttattaatgtttgcatttggctgtgtcttgtttacgtctttgtcagaagtcatttcaaatttttttttgtttttttttatttgaggtcagcaattcccttttctattctgtgactttgtattaattatattttctctctgtagactggmtgtgatacttattaataaaaactaacttctcttttcctcaagtatagccatatacatatcctattagtgtctattgaggcaacttatcccaactgagaaattagggactgttggtttgcagctccattaatgagcaaataggaaagagctaaagtgttgcatatcatcttttctgt

SEQ ID NO: 797788 - DNA, 643 bp, Homo sapiens
gttcaattagcaagtgagaaaagtaaaaagggattttcaagataagtgtttgttattagactctgagttaatagactatattttcttagggcagtttatccctgcaatgaaagtacagaatgtgactctaagtaaattataggaactggaatacggttacaaggaaacttaaatgtaaagtgtttaccactaattgtgtttatgtaactccagaccagaacaaaatcacgcaagcaggatatctttgatatgtgtgggggtcattagtgctactcacatcggttccagttctcattctgggcacaaagaatgattgyattttatctcttcttttgaagttggatgtgcccatgtaatttgctttgatcaataaaatgtttgtacaattatgcaaatcatttgaagatggaagcctgaaaaaccaatgcaggatcactatgttcccttccccaagtctaacattgaagaagcacatgtaaagatggaatttttgtcatcctgggtacatgggtgattgataaatggatgctctcatagaccaatcatgtgagttttaatttaatttaatttttttagagacagggtctcactctgtcgcccaggtaggagtgcagtggtgtgatgatagtagcttactgcaact

SEQ ID NO: 797789 - DNA, 623 bp, Homo sapiens
aaatgttttttaaatttatgtgtgatttcttccttgacccatgaattatttagaggtatattgtttaatttccagatatttgaattttctagatatcttattacaccttattcctaatttaattatgttgtgagaaaaaaactgtgtagtttctgttttttgaattcattgaaacttgtttaatggcaacatgtggtatatttttaaatctgttttcatgtgtacttcaaaggaatgcacattacactgttgttaggcaaaatgttctatgtatttttcagatcaagttgattaagaatattgttctggtcttctatatctttaataaattattgtctacctgttctgctaattactgacagaaacatgttgaaattaccaaatacmattgtggatttaacaatttattcagttctgtcaatattactttcatgcacttttaagctctgttattaattgcatcatatttatatttactaagtctaattaatgaattgaatatcatttatctctgttccttgtgaggccaactttttaggattattgcttacatggcatatcttgtttcattcatctaatttgaatctatctgtatctttgtataaggaaatttattgaagaca

SEQ ID NO: 797790 - DNA, 614 bp, Homo sapiens
ttcatttgtcttgagtcctattggtttagaaattctggggaataagaggttaatttttctgattatatcccaacattagaactactgattgtccctcccgtaattcagcatcttttcaaactgtgggccaacaaatcaatatcttattattaaaataataagacttgaatctctacttgttttctaggatcgccctaataaagtacacaaactgggaggctttaaacaacagaaatggactttctcacagttctgtaggctggaagtttgagatcaccgcagcagctgggccgtgctccctccaaaggggctaagggaggatccggccttgctgcttccagcttctggcagctggtggcagcatcactccagkccccgcctccatcttcaggtggctgtcctcctcctgtatcagccaaattttcctcttacaaggacagcttccctaatctagtatgacccatcttaatcatatctgcaaactccctattttcaaataaggtcacatttacaggtaccaagggttaggatttcatcacctttttggggagacacagctcaacccgtaacaatccgccctctggttcccaaagttgatttccttcacctgtgca

SEQ ID NO: 797791 - DNA, 561 bp, Homo sapiens
tatatagagtgtcctgacttgtgggaatacctactaaagtaatcaggagtgctggcctaatgtcagcaatttactctcacatgcttcaggggaaagagttacttgtattaaaacttggaacttttctataatttcaacagtacttccaaaaagttcataaatataaagatagatagatagatagatagatagatagatagagtgaaaagccttagggaaactttatttttcctgaagaaaagatstgtataaatcagtgcttaaagctgaaattatctaagtttgatggcactgtaactattgaaatacattgaaacattgcaatggccacagtatcagtataccaaaatgatgtctgtctaaatcagaatctatcactatatatatagtgataaaaattataaaataagaataaatcatcacttcactaaagtattagtgacaacttagttatttgactgtttaaacagctgacattttggcagtttgagtatgcaaaactcaaaaatactagttttcatttgcaagatctgcttgaaaattagttaaggaggccaagaa

SEQ ID NO: 797792 - DNA, 654 bp, Homo sapiens
tgtctccaaagccaggtgtctctcaaacatgcgtcactgatcacaagtggaggtgaagcagtgagagtaatgaaaagtagttgcagccaggcacggtggctcacgcctataatcccagcactttgggaggcagaggggggtggatcacgaggtcaggagttcaagatcagtctggccaacatggtgaaacaccgtctctactaaaaatacaaaaattagctgggcatggtggcgcgtgcctgtaattccagctactcgagaggctgaggcaggagaacccgggaggtggaggttgcagtgagctgagattgcgccattgcactccagcctgggcaacagagcaagacttcatctcaaaaaacaaaaacaaaacaaaacaaaatgaaaaaaaaaacaaaaaaaggaaaagcagttgcyactgctactgcactgtgtatgtttttaaaagctcctcagtttataacccccaatgttaaatcaatgaaacaagcatattcttccaattaccctcatatttttgatgttcaataagactaaaacaaaaaaagatatgtagtaccatagtaagctgtcatctggaggaatcaggtcttacattttattaatcaggaaaactaaatgtacaattgagtaaattcatgtatttatgtctct

SEQ ID NO: 797793 - DNA, 647 bp, Homo sapiens
aagattcccttcaatggtggatgtgactctatcttggctggaaatttgagtatttttcaaaagaattctcagattctcttatacgttgtcaaattctccagccatcagtctgtttcctttacctcttatataactcagttttaaaaagacawaagtcattctaatcaatcatcagttcagccatcaatttcctctctatgcttagacataatcttgcaattgttatctgtatttaaatttgtagcctgttaaaaataaagcccatgtgagtttactggtattttccagattttgacaatgaatgtgtcacttcagtaaatagaaaaaaaaggtattaacatatacagggaattggataagatttcagaaagtatttttccaaaaaaactattttctcctatttctgctaggctgaagaactcatctagctagagaaactcactcccaagaggttctagttggttttgctaaattttttattatctttactgcttattaagtcattgatatctgttcactacggttggataagttctatctgtcaacatgggatgatttacttatgctgcttcctgcaaatagcgccctaataaatgaatgtcctctacactgtatttttagaaattagcattttattataaaagatg

SEQ ID NO: 797794 - DNA, 647 bp, Homo sapiens
aagattcccttcaatggtggatgtgactctatcttggctggaaatttgagtatttttcaaaagaattctcagattctcttatacgttgtcaaattctccagccatcagtctgtttcctttacctcttatataactcagttttaaaaagacaaaagtcattctaatcaatcatcagttcagccatcaatttcctctctatgcttagacataatcttgcaattgttatctgtatttaaatttgtagcctgttaaaaataaagcccatgtgagtttactggtattttccagrttttgacaatgaatgtgtcacttcagtaaatagaaaaaaaaggtattaacatatacagggaattggataagatttcagaaagtatttttccaaaaaaactattttctcctatttctgctaggctgaagaactcatctagctagagaaactcactcccaagaggttctagttggttttgctaaattttttattatctttactgcttattaagtcattgatatctgttcactacggttggataagttctatctgtcaacatgggatgatttacttatgctgcttcctgcaaatagcgccctaataaatgaatgtcctctacactgtatttttagaaattagcattttattataaaagatg

SEQ ID NO: 797795 - DNA, 625 bp, Homo sapiens
acatagctatgcagaatggagctggggatggaaacgctctctgctcggcatccaagtttatgcctctaatcactaggatatagcagctcatttacatgtatggaatattcaggtttttaatgtgctctgcatctatgaacaaaaagctagttgacacataattatccataaaatagagaaaaatatagtatctacttggaaawgatttaccaaaagtttatatattcagcatttattttcataaaatattttgccacttatctctgtccagtctcagcatccagcctcttagcaggataccattggcgttcccagattcagcagattgcaacgtgcttcatctaacacttaaggaatcactgcagtgagcctgctgcattatggcacatctgcagaagtagccgcactcagtgtacaaatcgagcaggctctgaaaaacatgacactgccaagtgaagctacgcggttcttgctgtctccaaaataaaagatgattcttgtatcgttcaagagaagattactgccaaagacaaactagtattcggagctctgtcctctgataagcatgtactgcaatcctgccacatgaatactaattttaccactaagggtagctctagctacc

SEQ ID NO: 797796 - DNA, 655 bp, Homo sapiens
acccacagaaattcaggaccgtggattgctttgctaatcctggtatgtccatgggcaggtcttgcatgtgagtgagcattgttcaaggtgcaaagaacaccgctaagcagcaccacagagctttcaaagggggctttgcatatttgcacaggccgctgcagacatgagagtggcgctttgagtgggagmcccaggatgatttggcccaggtgtaacatgtcccctcctcagccaagtggcagccccagagagcagagtggaagagcttattgctgtcttgctctaccatgttttccaaagacatgaaatttagtccatatgtttaaatctctctttggctgattgccttgtgcagttgatacatacagtacaacaaaataaaaattaaaaaataaatccgtttgggagcaaacttgaaggggagaaaatgctgcagccctgtgcagagagcgcacgtgagcatctaaacacgccattgtgtgtgcgtgtaagtgcgcacgtgtcgagctgtgctttcagagagccgtttataaaatatttgtcatagtttcactgatgaggttcaaaaagagcctttgttatagaaaaggagccaaagcactttgctaatttaggaggccatcgttgggttacaagaatgaggacccaggtagac

SEQ ID NO: 797797 - DNA, 642 bp, Homo sapiens
aggcgtagcaacttcagggaacttcccaaaggtgtgcgcaggttggggggcggggcgcggcgccccgggaggtggcggcctctgcgacagcggaagtataagagtggacctgcaggccggtcgcgaggaggtggagtgggtggcgcccgctttgtgcctgggatcggcatgctggggcaggagggcagccgcgtgtcaggtgaccagaaccatgtccagccaggtggtgggcagtgagcctctctacatcatggcagagccggccaggcctgacagtccaaagggctcctcggagacggagacccgagcctcctgtggccctggcccctggtcyagctcccacccactgcctcccaggccacaaggaagaggaggatgggaaggggctgggcctggcgagctgggcggtgggaagctggtgctcagctccctgtccaagagcctctgcctggtctgtggggacgtggcctccggctaccactacggtgtgtcatcctgtgaggactgcaaagccttcttcaagaggaccatccaggggagcatcaagtacagctgtccggcctccaacaagtgtgagatcatcaagcggagacgcaaggcctgtcaggcctgccgcttcaccaagtgcctgcgggagtgcgc

SEQ ID NO: 797798 - DNA, 642 bp, Homo sapiens
aggcgtagcaacttcagggaacttcccaaaggtgtgcgcaggttggggggcggggcgcggcgccccgggaggtggcggcctctgcgacagcggaagtataagagtggacctgcaggccggtcgcgaggaggtggagtgggtggcgcccgctttgtgcctgggatcggcatgctggggcaggagggcagccgcgtgtcaggtgaccagaaccatgtccagccaggtggtgggcagtgagcctctctacatcatggcagagccggccaggcctgacagtccaaagggctcctcggagacggagacccgagcctcctgtggccctggcccctggtctagctcccacccactgcctcccaggccacaaggaagaggaggatgggaaggggctgggcctggcgagctgggcggtgggaagctggtgctcagctycctgtccaagagcctctgcctggtctgtggggacgtggcctccggctaccactacggtgtgtcatcctgtgaggactgcaaagccttcttcaagaggaccatccaggggagcatcaagtacagctgtccggcctccaacaagtgtgagatcatcaagcggagacgcaaggcctgtcaggcctgccgcttcaccaagtgcctgcgggagtgcgc

SEQ ID NO: 797799 - DNA, 655 bp, Homo sapiens
gccaccaacacttgtatcacaggaaatcttcaaagagggtatactgtaacaagtacctgatagtcatttatttactcaacaactacttagcaagatcctaccatgggcccagttgggggtgggtgggcactgagaactagcaagatggacctagtgcctgactttgggaagttttcagtctagcatggaagggttaagtaaattgttacataattaatacaaaaataaaatggccctttaatagctgatactggccaggtggggtggttcacacctgtaatcccagcactttgggaggctgaggcaggcrgatctcttgaggtcaggagttcaagaccagtctggccaacatggtgaaacctcgtctctactaaaaatccaaaaattagctgggtgtagtggcacatgcctgtaatcccatcactcaggaggctgaggtgcgagaatcacttgaacctggaagatggaggttgcagtgagcagagatcgtgccactgcactccagcctgggtgacagagtgagactctgtctcaaaaaaaaaaaagaaaaaatagccgacaccttctcattttcatgcctttgcaatatgagggaactagggcatggtagaagaagcactgttgcattcttaggaggcatttactagagttatga

SEQ ID NO: 797800 - DNA, 571 bp, Homo sapiens
gaaaaagatcagagatgtaatataatcttcctgtggggtaatgttttcataatccagaaagccatggaaagacagatctatgcatgtagtgccatttctttgtaatttattacccattgagacaaatatctatgttaagcagagcttcttctaagagaaaatacctgtggcactaaaactgtattttaaaaaaattctagcatcttaggaagaattccccaaatggcagtgtttttcatgcatttctctctgcccagaaagttcaatcccaactcatcatccatcaaggcctagatctaggtctccctttttatacaaattgcccttcaataactccctaaaagtagagatccttctrggttattttgtttttggttttggggtttttttgttttgttttgcaaaataatacatactgatgcattctcttcacaaattatttcatctgtcagtgaaactataaccttcctgagagcagagaatgcagaaaagtacttaattatgagttaagctccagttttctcggtggctttccatgtgattttaaatatatcactattcccctttgcta

SEQ ID NO: 797801 - DNA, 704 bp, Homo sapiens
aaggcttgtcaccacacactcaactatttttaagcttcctgaccagatcctctagataggccctttggggacagtaagtagcggcagcgaggtaggagttgctcttggctttgggtacattgggtcttctgggagccctgggatttggtttggccagagaacatttctgggggaggcagcaggaatgaagtgaaagcaatcagcccccttttctgtgtgctttatttttccatgaccaccrggaaccctaccccttcacagaagctgccaagagaaatgaggctggaatttcacctccctcaatacccccatgtgatggatcaggccacagataaaggggctttaattggttttataccataagctagacctgggtcatgactcagctaagtagattcctcctgttctcccacactgaccaaggcctcaaccagatggggatggtgggcgggtggctgaaaagtcagaaagggcaaggctgtgggggtgacaggtcatcctcagaatttctgacaatggtgcttctcagctaatggctcacagaggggaggggaattctcagctaaagaggtcccaacgccagtccaaatacaagataaagtaaaaactatccagggttgtctggaaactaaggttgacttagtcacattttatctaaatagtggtgaagtgtggctgtttacaaaacataagacatgacaatg

SEQ ID NO: 797802 - DNA, 479 bp, Homo sapiens
aaagttgctcaccaaaccccatcacaatacgcatgattgaagaaagaaggaaacaagcacaaagcaggattttctttgaaggaaaggacatacaatgtgtggcaatataccactttctggtcactttgcaaggatgacarcttagtccagagaccaaatctagctgcaaaggaggctgggaacagaatctccaactgcgtagtgagaggccctgttaaaattcagagaaagcagaattgtattgctaaaaagaaaaggcatgaaatagatgccgaagggttgattaacattctctgccagaggcaataatactgaactcataggttttctgggaacatcaaatgagaagggtatgtaaagttttgcatgtacagggcacgtgttgtctaaaaccacctgaaattgatttatttccatcatcatctcattctcaggtaatgccagttcaaccaccatcaatgacaataatcatgctttta

SEQ ID NO: 797803 - DNA, 604 bp, Homo sapiens
ctagagagggatgggtgaagatcatactgtggttagtgtgttcagaaggcagtgatgtctgagcagatgcatgaattcctgaaagggagtcagccacacgaagagctggggaggaaggggttttaggcagaggaatagttagggagaaggccctaaggtagagtcaagcttagtgtattcaaaggacaggaaggcagccaaagtgtctggcacctggagtacaaaggtgagaggagtyggagatgaagttcaagaatagatgtggtgtgcaggtggctcctggtgattccacctcctgggattcatgcccttgtgtaatctcctcccttatctctgagctggacttggtgactctcttttaacaaatggcatatggcaaaagtgatgcaatatcactctgggattagtttataaaaaactaagactttttgctctctccctgtgttagtctgttctcatgctgctaataagacatacccaagactgagtaatttatgaaggaaagaggtttaatggactcacagttctgtatggctggggaggcctcagacactcaatctctgaccttcctctgtttttatctccatgtggatatattatctac

SEQ ID NO: 797804 - DNA, 604 bp, Homo sapiens
ctagagagggatgggtgaagatcatactgtggttagtgtgttcagaaggcagtgatgtctgagcagatgcatgaattcctgaaagggagtcagccacacgaagagctggggaggaaggggttttaggcagaggaatagttagggagaaggccctaaggtagagtcaagcttagtgtattcaaaggacaggaaggcagccaaagtgtctggcacctggagtacaaaggtgagaggagtcggagatgaagttcaagaatagatgtggtgtgcaggtggctcctggtgattccacctcctgggattcatgcccttgtgtaatctcctcccttatctctgagctggacttggtgactctcttttaacaaatggcatatggcaaaagtgatgcaatatcactctgggattartttataaaaaactaagactttttgctctctccctgtgttagtctgttctcatgctgctaataagacatacccaagactgagtaatttatgaaggaaagaggtttaatggactcacagttctgtatggctggggaggcctcagacactcaatctctgaccttcctctgtttttatctccatgtggatatattatctac

SEQ ID NO: 797805 - DNA, 518 bp, Homo sapiens
atttcacggttgagaggcacaggctcactgtaaaactgagacctaatcaaagactatagaacccattccttccacctacaccttaccaccacattactaaagacctactaataaacttatttttacccagtacatcatttctggccatcagggaaaaaaattacaaggcatactaaaagacaaaaaaatacagttcgaagagatagaccaagcatcagaaccagactcatatatggccgrgatgttggaattatcagactggcaatgtaaaatagttatgattaatatgctgaggttattgttatggtttctttctaatttgatcttaaagtctcactcttgaaagtgttcataaggcaaaatattcactttccagaggaaagtaaggtttggatgtgttggtgaggtgagacacaatgaggaagtgaaacagaaatgcttacaacagaaaaaaaaaaaaaaaaaaaaaaaaatatatatatatatatatataacttacagattcctgagaggttaga

SEQ ID NO: 797806 - DNA, 585 bp, Homo sapiens
ctgagaggttagaagtgccatccaaagggcaaaggaatcctggaggcgacaaggagttcaaccagcaggtgggaagtgagaaagaaatagaacctgtgagtctatgcctttatttataggcatgtgggtttacggacatccctcaggctttgccatgggatttgtagattgcttagtttaaataaacacatgtcaaggaacgggcttatttacaagactctggtgttaaccattatgtttgattatggtcagcagctttgaagtgtgttgagttttggatctgttagataagaaacaagtggactatattatctacaaccactaagtgatgggaagttttgactaatccaaaggtgacaaactatcactgagtttcagaaaaattaatgtcaggcttaaaaatgggtgctgaggcagcaaatatatcacacamatttataagaaaagagctctagtggataaagtagacagcttgcagaaacaggaaaaaaagtaaagagatgaacattataataaagaacaacaacaaaaaggctggtgatcaaaaatgttataacagaaatagagatgcctttgacaggcttg

SEQ ID NO: 797807 - DNA, 633 bp, Homo sapiens
aggtcagacacgtcgattttggtatcacaagtaagaccacagacttttagtatctcattggcacaaacaatggggctgtatttagacataactacatttcaggttatagaaaagttcacttcatcaagagcttcataaagatccactcagaggcttgacggagaagtaaatttagcggttaattttgtgtaagggtctcagatgagttgagcacaaaacacctgtgctcagcaatctcttggtgacttatttgtttgcaggtgaaaagcgaagtgatagcatgatgttaagtttatttatgttactacatacagactatgtctgagctttactttctcaataatttcttttctaaagttctgatgactttttatattaaacattaggaattgttttgttagattgtagtggattaagagtcaagtaactttgtgaattttcatgccttggtatagttattgcagctgaggcactaaaaatatgtcatccaatggtaytgatgaatgcttatatttgtggaacgttagcatgatgctagggatacaaaaatgaaaggagttcttgctttcaaattaagttattaatatattctagtgatagaatgaaatgcacagtctatcattccatggtata

SEQ ID NO: 797808 - DNA, 669 bp, Homo sapiens
ttatatatgcatatgtatatacagtatatcctaggtattttgtcattatattcataaaggaaactacttacttatattcaaaacatacagagtacgacgatgtaaaatttgtctattatttatgatgagtacgcaattgttctacataagtaaagataatattagcagaatgtgcactctaagtattttttccaaaattgggaattttttttgctgatccaatcatattttatggtctctcccagggtcattaaaggatatgttattggtaacttctggaatggagcaaacacactatggcttgtgcaagatcagaatgtggtttcattcattcatatcagaattgtattaaccaagctaaccaaattgaagacaacgttaataggcaagargttggaaattgtagagaagaggaaaatagaaagccactgatgttgagatgtatttaatgataatacaaaatttagaagtgtaataagccttcaagatcacctatttaacctgtttattttaatatattagaaaacagatttctcccgctcaataaaatatgtaaccttctcaaatgtatacatctcataaggattaaaggcagaggcaggggaaactagagctcaattgtctttattcatatattttttttaatttgcccttctaatattgtttact

SEQ ID NO: 797809 - DNA, 659 bp, Homo sapiens
tcttcatccttcggcctgactcttcccctcaccttaaggcccctgccatgcgtatctctacatctcatttgtcttggagtgcaacactttttatatgggctgcctctatccatcccttgcacttttacatacattatttctctattgggtgcttttcaaattattcaatttgggtgggctatttgtttccatctatgactatgacatatgtgaaagtaaaggaaaggatatggaaaggagttgaagatttcaagggtttgcttttttgtttgtttttaacataaaatagaatattggtttctccctgtataaagacatgaaaaaattcagtatcaggtctggtccagaattgatggtgtttcacttcttaacatctatctacatacctagatttatctcrtctccctttctcacctctacctcaggttccaaccatagcaggctaaatgtagccatattttttgcttgcacaacattttatccataaggttccctctgtcttataccttctccaaatagtctacttaaagtctgtttaaatgacaccctggccttctgacactggccatatttaccttttctctctatttcatagcaaattaaacataatacttctaccactgtttttctataattcagcctctacaacaattagccaa

SEQ ID NO: 797810 - DNA, 461 bp, Homo sapiens
gtttactgcagctctgctcccacacgctgccgaacacgcctctgggctttccagatggtttctcctgttgattctgtgctgaaagccctgccccttggagaaatacctggaggatccaagtggcttccattcagagaaggacaaattcaagaagctatgctatgacctctgtgtgcaatgaaaaatcaaactggattgatgtaccacagtcaacaagaaggttaaacggaagatatgaaaaatgcaatcatgccttggacaacacatactggacacttaccatgagtgrggcagtggagtcaggaaagcatgcgatgttaactcacacgcccagccgctgctctcatccagtgtctcatggcttcgagggaaataatagcaacagcaagccacgttaagacagagtcttgctgcttctttgagtgacactggaagaaagcatccctgttcaataatgggag

SEQ ID NO: 797811 - DNA, 443 bp, Homo sapiens
aaacccatgctttgattcagggagaggtaatgcttctaagcttcattaggaactgaataatggcaaggtgcccagggagcatgcctggattctggctccttgcccaaccctcaccctgccccagggcaaactcagaaaaccaagtcagatcatcataatgacgtgcatggctgctgttacctgagacagaagccatgatgtcakcttgtcataattgacttcaggtttgtcactctcagatcttctctggttggagccaatggtttctttcagacctgagatatcctgatgaagcagaccacacctgccctcagagatgacctcatgaggaagctgagctgcataacaaacatctctgctgctcagccacctccactctttttcaacagaccttggagatagcacagcacccacaccaaaaaatcaggaagctctcttatcag

SEQ ID NO: 797812 - DNA, 443 bp, Homo sapiens
aaacccatgctttgattcagggagaggtaatgcttctaagcttcattaggaactgaataatggcaaggtgcccagggagcatgcctggattctggctccttgcccaaccctcaccctgccccagggcaaactcagaaaaccaagtcagatcatcataatgacgtgcatggctgctgttacctgagacagaagccatgatgtcatcttgtcataattgacttcaggtttgtcactctcagatcttctctggttggagccaatggtttctttcagacctgagatatyctgatgaagcagaccacacctgccctcagagatgacctcatgaggaagctgagctgcataacaaacatctctgctgctcagccacctccactctttttcaacagaccttggagatagcacagcacccacaccaaaaaatcaggaagctctcttatcag

SEQ ID NO: 797813 - DNA, 607 bp, Homo sapiens
aatttattgtcattctccaagaatcgcctgtcctctgcatgaagaggacacgagagtcgcctcccctgcatcttgcaagtttctgatggtgcaccatctttgaaattcaccagatatgcttgttgattttggttttatagggaaaggtagttccaggggtttccatgtgaccatttctaccagagggaccctagccccaccctccacattgataaggacatcagtgtagagatttgagcagttgtcgagtatttctatctcaactttacattcaggagctagaaaaataaccacaagatgggctcccagagccactggcctactgtgaaatagacttcggccaaaattctatttctcccctgaccatctcacctcccacatyaatctccaatctggtttggattcgtatcagcccagagcctgtgcctatgtatccctgaaaatctgagtttctccctttcccctgtgcatggccaccctagttaatggcttcaggtaatttcttggatggtaggaggaagatagagtatgctcttgtggcagtttctctagggtctgggctcaaggggaacaaaccacctcttctctcagggactttccatagtgt

SEQ ID NO: 797814 - DNA, 604 bp, Homo sapiens
atcctgttgtacccttttccctagtttcctccaatgggtaggatttttcaacgctaaaataaagtatctcaaccagtgtatgcacactgatagtcaggatcagaacatttccaataccacagggtccctccagtcaccctttaatagccacacatggtcccccactccactgtccttaacctctggcaacaaccaatctattctctatttctatgattgtgtcgtttcaagaatgctatatagaaatcacgtagtgtgtaaccttttgcagtttgctggtgaagrcccagcaccatttcctggagattcatccaagttcagtagtttattcctttagattgctgattgatacaccttgtgtaaatcaaaaataaaattctaagctctcctaccaactgaatggacccctcgtctcggccaagggcagttgaaagtaaacctgcaacattagttcggccatgatggaactaggtggttggacatgtctcattataccttcctccctttggaattcaggcatagctgactggcattaacattaaaacagagaccttaagactaacagagcggactctttatagcggcaaggtaccaacatgacagt

SEQ ID NO: 797815 - DNA, 604 bp, Homo sapiens
atcctgttgtacccttttccctagtttcctccaatgggtaggatttttcaacgctaaaataaagtatctcaaccagtgtatgcacactgatagtcaggatcagaacatttccaataccacagggtccctccagtcaccctttaatagccacacatggtcccccactccactgtccttaacctctggcaacaaccaatctattctctatttctatgattgtgtcgtttcaagaatgctatatagaaatcacgtagtgtgtaaccttttgcagtttgctggtgaaggcccagcaccatttcctggagattcatccaagttcagtagtttattcctttagattgctgattgatacaccttgtgtaaatcaaaaataaaattctaagctctcctaccaactgaatggacccctcgtctcggccaagggcagttgaaagtaaacctgcaacattagttcggccrtgatggaactaggtggttggacatgtctcattataccttcctccctttggaattcaggcatagctgactggcattaacattaaaacagagaccttaagactaacagagcggactctttatagcggcaaggtaccaacatgacagt

SEQ ID NO: 797816 - DNA, 581 bp, Homo sapiens
ggtcccaaagcacaaattctggactttgcctaagtttgaatcctgactcttctagttcctagctgtgtgacctagggtacattacctgacctcactgggcctccaattactcttctataaagtagaaacaataatacagttggccctccatatctacaggttccgcatccatgaattcaaccaacctcagatagaagatatttgggggaaaaaaataaatgattgagtctgcactgaacatgtacagacttttttttttttttgccactgtatgtaatgtatgtaaacaatacagtacaacamacattgcatttacactgtattagatgtcataagtaatctagagatgatttaacatatacaggaggctatgcataggtcatatgcaaatatcacaccactttatatgagatttgagcgtccgtggattttggtatctgcagtgggtaccagaaccagtctcctatggatactgagagatgactgtacttaccttctaagggaattggattaaatgagattatctatagacagcacttagagagcacctgagggtacagtaagcattctataagtgtttc

SEQ ID NO: 797817 - DNA, 602 bp, Homo sapiens
tcctgagtagctgggactactagcacatgccaccatgcctggctaagtttttgtatttttagtagagatggggtttcaccatattggccaggctggtctcgatctcctgaccttaagatccacccaccttggcttcccaaagtgctgggattacaggcgtgaaccaccacacccggcccagatgtctctcttgtaaaagggagtgctctggagctgacatagaaagattcttcttttggactttatggcagctacggagtccaacgtttgcyatgccagcataccaactttatcctcagtctaacattttacctgaaatagattcttcctctataatcttataaagaaaattttatatcactactgaaggcgtaggtttgctataccagttctattgtttataatatgctctaaaatagatatacagttcttagggtataatatttgtcagtgtaacatctgaaacattttgggaaaccttactttaatatgaagaatagattggtttcagcaaatttcactaggaaaaccccatatagttgtatttcctttgctatatctagggcaatttgtttagaaagtattccagtgaaagttattct

SEQ ID NO: 797818 - DNA, 537 bp, Homo sapiens
atttggagacccagggaggattcaatgtgaccatgtatcacccacagggggctgccccaccattggaggatcgactcaaattcaagatggaacactgtaattattctgtggaaaaatacaaggctgtgtccttacaggtgagtccagctctgaggggcgaactttttcatgtcaatggattttcaattctctccactggaagaagctggaacttgaggaaaaragggtttggaggaagggtgtgtaaacatgctgagctggtctgtgctggccaggtctaggaggagaggagaggaggcccaggcccctaaaggctctgtgtgctggcacacgtccagtggaccttactaggatggagagctgggctccgttttatatttgcttttgttgtttgtttgtttacactgaaattttccttgatacaaatgttcaatagcatcaggtaaacaaacccccacttcttgagtttcaggctttggggaatcaacagacagaccacaccatacctgaaggatcatttctcagagagcttggcag

SEQ ID NO: 797819 - DNA, 537 bp, Homo sapiens
atttggagacccagggaggattcaatgtgaccatgtatcacccacagggggctgccccaccattggaggatcgactcaaattcaagatggaacactgtaattattctgtggaaaaatacaaggctgtgtccttacaggtgagtccagctctgaggggcgaactttttcatgtcaatggattttcaattctctccactggaagaagctggaacttgaggaaaagagggtttggaggaagggtgtgtaaacatgctgagctggtctgtgctggccaggtctaggaggaraggagaggaggcccaggcccctaaaggctctgtgtgctggcacacgtccagtggaccttactaggatggagagctgggctccgttttatatttgcttttgttgtttgtttgtttacactgaaattttccttgatacaaatgttcaatagcatcaggtaaacaaacccccacttcttgagtttcaggctttggggaatcaacagacagaccacaccatacctgaaggatcatttctcagagagcttggcag

SEQ ID NO: 797820 - DNA, 537 bp, Homo sapiens
atttggagacccagggaggattcaatgtgaccatgtatcacccacagggggctgccccaccattggaggatcgactcaaattcaagatggaacactgtaattattctgtggaaaaatacaaggctgtgtccttacaggtgagtccagctctgaggggcgaactttttcatgtcaatggattttcaattctctccactggaagaagctggaacttgaggaaaagagggtttggaggaagggtgtgtaaacatgctgagctggtctgtgctggccaggtctaggaggagaggaraggaggcccaggcccctaaaggctctgtgtgctggcacacgtccagtggaccttactaggatggagagctgggctccgttttatatttgcttttgttgtttgtttgtttacactgaaattttccttgatacaaatgttcaatagcatcaggtaaacaaacccccacttcttgagtttcaggctttggggaatcaacagacagaccacaccatacctgaaggatcatttctcagagagcttggcag

SEQ ID NO: 797821 - DNA, 537 bp, Homo sapiens
atttggagacccagggaggattcaatgtgaccatgtatcacccacagggggctgccccaccattggaggatcgactcaaattcaagatggaacactgtaattattctgtggaaaaatacaaggctgtgtccttacaggtgagtccagctctgaggggcgaactttttcatgtcaatggattttcaattctctccactggaagaagctggaacttgaggaaaagagggtttggaggaagggtgtgtaaacatgctgagctggtctgtgctggccaggtctaggaggagaggagaggaggcccaggcccctaaaggctctgtgtgctggcacacgtccagtggaccttactaggatggaragctgggctccgttttatatttgcttttgttgtttgtttgtttacactgaaattttccttgatacaaatgttcaatagcatcaggtaaacaaacccccacttcttgagtttcaggctttggggaatcaacagacagaccacaccatacctgaaggatcatttctcagagagcttggcag

SEQ ID NO: 797822 - DNA, 591 bp, Homo sapiens
gcaggttctgacagtcaggacagtgagtggatgagatgagataattgttttctacacattcagacagaaaccatgtgcctgtgaatccaccgtgaaaaagccgagaagggaaatcatttgctcaacttaagtgtgagacatctcccaagataaggtgtttccagtcccagaacccacaggaacatataagtccctctggaagaactgtcacatggccagaccagagcaggcatcatgtagatttttccagaatagcacgcttaaggaaaaatcagtgctcttacctattagggaggagagctaatagcagcaagggttagtgtgtgcatcgacaggccacgtaaatctgggctatgtgttggaccacatacatcttcgtagtagaagatcttgccctatttgtccagtatgtatgamtatctagagaaaggttcagatctccggggacggcagggaaaggaaccctctgctggacccacagctcctcctactgtgaggtctagagcagggctgcttggcctcacactggtaggtgtggagcacgtacgagctctacatcctcactctccattcctctctacactcacatgg

SEQ ID NO: 797823 - DNA, 613 bp, Homo sapiens
acttactcatcacccaattccactgaactattcttatatcatcaatgcccaatagactctccctccttgagggtcacaatcaaaaatccttaggagaagagtgtttagcacttaataagggctaaaaaatgttagctacgaatttttaagttagatattgatttatcatcatcatcatcattattgataggaacaggatctaattcatccttcagctgctctgaaaaaaaagaaaaaaaacaacaaacaaaccatgagccakccttgacagcttgctttctctcccactcctcattcagttcatcagaaaatccttccaaagtcatccaacattcaaccctttgcagtccctctacatcagccacatgggacaaggcgtcatgctgtcttgcctggcttactgcaaggactccttaacttgactctcttcttccacccttgtccattctattctcagccaggagccagaggaatcctgccaagcaaaagtcatctcacatcactaagccctccatttacagtctttgcatggcctcctactcattccaagtaaaagacaaagtggtgagaacatagtaagttattaggccaagcaaacacatgcttgggcttc

SEQ ID NO: 797824 - DNA, 613 bp, Homo sapiens
acttactcatcacccaattccactgaactattcttatatcatcaatgcccaatagactctccctccttgagggtcacaatcaaaaatccttaggagaagagtgtttagcacttaataagggctaaaaaatgttagctacgaatttttaagttagatattgatttatcatcatcatcatcattattgataggaacaggatctaattcatccttcagctgctctgaaaaaaaagaaaaaaaacaacaaacaaaccatgagccatccttgacagcttgctttctctcccactcctcattcagttcatcagaaaatccttccaaagtcatccaacattcaaccctttgcagtccctctacatcagccacatgggacaaggcgtcatgctstcttgcctggcttactgcaaggactccttaacttgactctcttcttccacccttgtccattctattctcagccaggagccagaggaatcctgccaagcaaaagtcatctcacatcactaagccctccatttacagtctttgcatggcctcctactcattccaagtaaaagacaaagtggtgagaacatagtaagttattaggccaagcaaacacatgcttgggcttc

SEQ ID NO: 797825 - DNA, 329 bp, Homo sapiens
tgggtgcccctgcctgtctcagtgatatctcactcccaaatgaaaatttgcaaaccccagagtcttgttgacacccatttgtttatttacacggcttcactttttatgtggctttccttctttctgcctaatgcttgacaaaggaaataatgccmgaatttaggaacccacgttcagaatcctcactcattagagcacttaaggtgttcacacgtaacaccagggtggcaatctcaatctcctctgccctcactacctgcactagagtcccctgtgcagtgtttgatggaaagagccttgaggagggcacacaggtgcttctgacagat

SEQ ID NO: 797826 - DNA, 603 bp, Homo sapiens
ataaaatgtttcaagtttctacaacaccatgaaaatcacacaggatctaagttcctagggggcaggggtccagtcaaagggaggcatctgtggtgacacagaagtggtatagtattatgtgacctggagcaaggtagttcctcattgtcacttttcccatccatataaatcacaataacacaggaccaatctccctaaaaaggccactggagggtaatcacaataacacaggaccmatctccctaaaaaggccactagagggtgactatgatgcctataacaagttttaagaaatggaatgcttctttgtatgctcatgtcctatcaacttgttctgctttattcttcattaaacatattatatatttatttttattatttttcctcccttgagtttccaaatgtatgctaaatgaatataatgactttctatttcattaacttttatattgcccatacctaaaacactgactagaatgtagtaggcactcagtaagatttcttaataagtgaaatgcaaggtgtgcaaaccccagcttataaatatcctgtatatgtaacacaaagaatgatacaaagaactgaacttgcactaactaggta

SEQ ID NO: 797827 - DNA, 573 bp, Homo sapiens
actggagacctttagcaatgtctgaagacatttttttttgtcatgactagggaggggttaggccagggatgctgcttaacattctacaatgcacaggaccgccccccaaccccagcaaataattacccacctcaaaatatctatcaaatcaaggctgagaaaccctgctccaagccttggttgtcacattggtaaaatggagattccagtttcacaagaacgtgggaggaacaaacaattataaaggtgaatgctttttgtaactgtaacatactacacagatgtaggatagcaatgttattgttccattgtgtcttagtstgttttctgtttaactgaatatctgagactaggtagtttatggagaaaataaatttatttcttccagttctgcagactgggaagtccaaggtaggagggctgcatctggtgagggccttcttgctgatggggactgtctgcagagtcctgaggcagcgcagggcatcacatgaccagggagactcgtgacagacagccaacctagtttttaaaacagattcactcttgtgataactaacctattctcatgac

SEQ ID NO: 797828 - DNA, 527 bp, Homo sapiens
tgttaaccccatgtgagaaacaagaaaactagaggcacagagaaattaggtaaatcccccaagatcacatggtggcgaacagcagaataggtgtagagcctagggtctgattttagtccatgcacctctgtgaagaaaaaagtttgtttttttcctctaytctcacaccacaagcatcaacacattagacttctgttacctctggccaccaagaagtgtgtgggatttcttctcaccaacaaccaaccagtcaattctgtggcagacaccagatcggacgtaatctacctggagatagcgtcagttcccacaggttgagggctcagtcccacatgactgctcccgacttgcaatgccaatggcaagccccaggttgttttgtgcttctgacctactgactataagttgggattcccacaaatacctgtttgggttccattaatttgccacagtgactcacagaactcaggggaaaatgattaccagtttacttaaaaggatatcacaaaggatacagatgaaaaggg

SEQ ID NO: 797829 - DNA, 557 bp, Homo sapiens
gatcactgatgtggaaaagtcagggggcatggactcaggtggcagaagtagctggagagaggttttggatgaagactttggtgacagaaagtgtagcattcgaaaataaatgctataatatgaataaatgagtcctggctgatatttaaaagtgaccaatagaaggggtaattttctcaccaaaacttcatattatctcttyatggtaacaggaacatagatatcacaggccaccctattacctcctttacagatgatctcttttcgtagtgtcaccctggcaggaaagatttgacagaagccatatagttaaataataattttactaactactcttcaggggctaggtgctatctgaagtgctttataatattaactcacttaagcctcttgacaaccccatgatacagctattattatcttccccatataaatgaagaaactgaagccaagaggatttaagtctctagctaaaggccacatggtaacaaaatagcagtggctggatttggactctgacagtcagacaccaaaccccatagcatcctcctctggtg

SEQ ID NO: 797830 - DNA, 475 bp, Homo sapiens
attttcaaaaaaaaaatctagagaagatcttattatgctaatgggattgctccttaaagagtgaacataattatggaccacagtaaaggagttggagacgctggaagggccatagcagaaaattaaagaaggaggtgggaagcttaagagttaggcatcttggaaagaattgattatatgagaccagaaaatctactctctacctatgttccccaggaggatcctaaagacacttccttcattaatgcaataaagaatgtcattatattttwaaaatatcacctttgagaaactcagtagtgcccatcatgctatgtaagtcatacttgataatacgagagaccaccattgagttaaactaaaataggcattttctaaaaagaaattaaaaagatatttaccatatgatctagaaattttatgtctgggtatatagtctaaaaattgaaagcagggattaacagatatttttaaa

SEQ ID NO: 797831 - DNA, 605 bp, Homo sapiens
  misc_feature 289, 293: n = A,T,C or G
gagaaaacctctggtcaccaaatgtatggtcatttttaaaattatactgtttatttacttcttgttaattttcttctttattttacaccttcttttaaactgtcctacttttgtattattcatattccaaagaggatcttttttcctgagttatttgtaaacgaatatattctgagaggagtcagcagaatgttcctgaataggcaggtgatctccataaataaaaagtgtgttgatgggtgtgtgtgtgtgtgcatgtatgcgtgtgtgtgtgtgtgtgtgtgtgttnattntgcctctactatctgctgatgaaaaatatcagcaaaatagcttctcatacatrtggataactcttaatcctcttcttctgctgttctctgttacttcagagtaatatgaaatgaatcaggtccattcattccgatctatctgttcaaacaacagacagatctgttgtttttgttcactttttgttttcagggtgtgtcacctactttggagaacttacttcaccctccgccccaccgccattttattatttctaaaacataggtgtctacccttcatcatctcttattacaaagtgcatttttcttcattga

SEQ ID NO: 797832 - DNA, 607 bp, Homo sapiens
cacaaaagatttatgagacaatggattgtttctgatccatctttttataatcagttgaaaataactaaaggattaaacaatttaatagaatgtgaatatctgtaatgaaaatggtaataaataagaaaattcattgttataatattatgtatatataacttaattagcataatagatgtgttatactgtatcactcttcttttctarcgctttgttgcaatagtttgaaactggtaaaaagtaaggactccagaactctgttgtctaagttccgccccccgtccatcacttaagagctataagaactcagtcatgttactcagcctctgtgttttaggtgtaaatggaggatatattggcaataactacttcacaatgttttatgaaaattatctctctgtgatctcaacacattctgctcaaagaaaaacttgttcatgtccaaatttagctatttcctccaagaatgttcttctggacctaaagtgtgacctccaaagctcagttaagtgtactcctctctgtggtcatcacaatatcatttatcttataaggcatttatcagattaaattgcaattccctagcaaactgagaggttgaggaaag

SEQ ID NO: 797833 - DNA, 544 bp, Homo sapiens
acttaaatcctctgctactagatttattcaacagttcacttttagcctttaggttgcagttgtttaaaatttggcaaacatctcaagagaaataatggctctgaatctcagtatcactcttaaactttgctttgtaatcttgacccctcaaaatcttgaggtcttggtgatgctcaaatagaatttaatttgcaatagttttatatatattttcttgttattcacagaaaggtctgatacgagctagaacaccacaataaaaaacaggaattctagttaccttttaaaatgattagttttaatcagagttttagaagtaaygacttcatataatgatttctttcaaagtaacttaataacattctacgtggaggcttagtaatagctcttatcacataataaccagaagaccctgattcactatatatatatatacacgtatatgtatatgtagccagagctttacaataatttaaaaaggaagtgataaaagttgtatttcatatcactatttgaatctttatttttaattcagataaaataa

SEQ ID NO: 797834 - DNA, 577 bp, Homo sapiens
aggcagttgttgctaccttttagagatggaaattcaagaactccatgtggtctccactgacaccaaagtgaggagggttttcatccttgtgaggataaatccaggccctctattcaggcttctctgaccccaccccaatattgtcgttggacaaccttattttaatctgatgctggtggaaatgtggctatccacttagcctttgctaatgtgttygataatgaggctacagtttttcctgtgatgtttggctggaatagagtggctgtttttacaagttttggtcctcagctagagagcaaaatattgttcaggctttttttgtctgtatccattgacctatgtaggttgctggcttttccagcacccagtcttggatatatggggcaaacataaaactgagaaaattcaccatcatgtcgttctttgaatccaaagatccctagctgatcagccttctctccaaatttcagaggattcttaacatttcttttatatataacgtccatagtttttagttgtgtttggctagaagaataggaaacatacatgtacttcatcttcacagaaatagaaa

SEQ ID NO: 797835 - DNA, 531 bp, Homo sapiens
actatacttcatgaaccttcaatttcaacttggtatataatctatataatgtctgttgttactgatccacccatgcctcacctcactgagatcttaaattatatcagtctttttttattgttaaaataacttccatgaaaaatctggagtagctkggctgtaatgatcataaagaactgtttctcaaatataatcctcaaatttgcaattcataaataactttagagaggcctcattttgtcatgccttttcactattaaaaatttgtatgatgaacctaattaggattacatcattttacatattcatgtgaaaaagatggcatgtcaaataatgtgtggacaaaaagtataataatgctatggatgcttttcttaatattctgaaagagtccctttatgatgccacaaaggatttcgagtggtttgattatgaccatagtctgtcaaaataacaaaatcaatttggtcaaacttcaaccaaaaggggaaaaggttgaaactgttattgaatcttaattgatttgagggt

SEQ ID NO: 797836 - DNA, 615 bp, Homo sapiens
ccactctccaccctcaagtaggccctggtatctattattctcctgtttgtgttcatgtaaactcagtgtttagctcccacttataagtgacaatacacagtatttggttttctgttcctgtattaattcacttagaataatcgccaccagttgcatccatgttactgcaaaggaaatgacttaattatggctgcatactagtccatgttatatgtataccacattttctgtatccagtccaccagtgatggacaatccaggttgattccatgtctttgctattgtgaatagcgctgcaataaacacacaagagcatctgtctttttggtggaaatatttatatttgtttgggtatatacccagtaatgagattactcggtcaaaaggtagatctgttttaagttcactgakagatctccaaactgcttttcactgtggctgaactaatttccattcacagtatcagcatttccttttctctgcaacctcaccaatatctgtattctctgactctttaataatagacattctgactgataggagatgatattttattattattttgatttgcagttatgtggtaatcagagataatgagcattttttatatgcttg

SEQ ID NO: 797837 - DNA, 614 bp, Homo sapiens
tatcttattaattaaaacaacataatatgaaattctaacttcttaaattacattgtaacatttctctcaggccaacagggatctcttttggtggttttgttataaatatagcttccactctgttatagtaccttactatttstaatgcaattataagccaacaaaatgtaggatttgattgagattcactgacatattgctaagcatatactaagttgttgcagtggtcccaagaagatggatggacttatcattccttatcatgtcgcttcctgcttaaaattcttccatggcatcctgttgcaatgaaaataaaatccaaactccttatcttggccaataaggccggggaacatcttggccctgcctccctttctgacctcatctctggctctctcactctcactctgctccaggcacactggctctatctccctgtccttatcatgagctggttctggctgtaggatctgtggactggctgttttccctgctactgggagaatactctgcaccaggtctttgcatggccacctgcttcttgtcgttcaggtctcagttcaggtatcccctctgaggagaggcccaacctgaccccccttcttcacatcacc

SEQ ID NO: 797838 - DNA, 620 bp, Homo sapiens
ttacacagaggtacgtacagtatacactcagggcagaagcagcagccctttctctgctggggcagtgctagactcaacagataaggtctggatttaagatatgtcagcaaagttgagcacagatgggtatccacattgaaactgcaacctggtgttttgtacaaatgagaaaaactcgaagaagagttcagcccttagaaagagctggcaggattcagataagcaaagtgatcaatatataggatggractctctgggtactggagaccacagtaccacagtagggaatatgggaatgatgcccaacttttgtgccagaaaccaacgcagtaggcattagaggtgcagaggtgtcctctggaggaggcaagttgcagcctgttgacgtcattgccgttgctagtttatttcactctgtgtgcttcagaactctggggttaggtggcacaaggccatttctatacccatcttgctgggcagcaaccagctcttaacctgaagtcctgcaatggcagctttaaatataggtaagatgtctggaaggtagaaccttaaaagcaatcaggttggaaccaggactgggcaagagctgctggttttaatggcaactatgtattttt

SEQ ID NO: 797839 - DNA, 605 bp, Homo sapiens
ttgagtagcctgtaattgcacctattctggagactgaggtgggaggattgcttgaggccaggagtttgaaactagccttgataatatagtgatccgtctcttaaattttttttttttaaacttagcctggtgtaacagtgcacacctctagaatcagcttctcaggaggttaaggtgggaggatcacttgagcccaggaattcaaaactgcagtgagctatgatcacgccackgcactccagcctaggtgacagagcaggaccccatctctttttaaaaaagaaaaaaaatatgaactgttgatacaattacttggatgaatcccgagggaattatggtgagttataaaaaaagactacatattatatgattctacttatgtaacattcttgaaataacaaaattatagagatgaagaacagattagtggttgccagggggtagggagtggaggcgatggggaagggaggtggttgtgcctctaaagagttatcttaagagatgctcgtaatggaactgttctgtatgttggctattcagtgttaatgtggtcacacgagtctgcacatgtgaaataattgcctagaagtaaatacacatagaca

SEQ ID NO: 797840 - DNA, 605 bp, Homo sapiens
ttgagtagcctgtaattgcacctattctggagactgaggtgggaggattgcttgaggccaggagtttgaaactagccttgataatatagtgatccgtctcttaaattttttttttttaaacttagcctggtgtaacagtgcacacctctagaatcagcttctcaggaggttaaggtgggaggatcacttgagcccaggaattcaaaactgcagtgagctatgatcacgccactgcactccagcctaggtgacagagcaggaccccatctctttttaaaaaagaaaaaaaatatgaactgttgatacaattacttggatgaatcccgagggaattatggtgagttatraaaaaagactacatattatatgattctacttatgtaacattcttgaaataacaaaattatagagatgaagaacagattagtggttgccagggggtagggagtggaggcgatggggaagggaggtggttgtgcctctaaagagttatcttaagagatgctcgtaatggaactgttctgtatgttggctattcagtgttaatgtggtcacacgagtctgcacatgtgaaataattgcctagaagtaaatacacatagaca

SEQ ID NO: 797841 - DNA, 602 bp, Homo sapiens
gttctttttaagagttgggacagaaaaccaatgtggactcttagtgtttctgcttcacctttctcaatatttagaggaatctagtttgcgcagatgtctgatgagccatttagtcatgaagagctctaaccaacagactttttttttttttgtagatcattggagggtgattttaatgatcacatacatagtgtgaatgtgagtgtgggtgttttatcgygagttccctggtggtggtttgagcattttctctgggtggttccagtggcagtgttgatactgctagaaatggttcctgctcagggcacagtggtttttctcttttggtgaaaaaaaaaaaagtttttttgagtgaggtgagtgagggtatttctggtaagctcagtcatgtatgtttaaacaaaatgattatcattatttgctagttagtatttcattaatatgaaatatgagaaggtgagcactgggctagaaagaggtcaggagaccaaagttcttatcctgggctcttcctgactcttcaaccttagttgagcctgttgctcagggctgtgagttgcatccttaggttccttgagtgtatagaaatttctctctgtata

SEQ ID NO: 797842 - DNA, 547 bp, Homo sapiens
tggatagggaatggcgactgtagttacaacatgtaccatgtgggaaggtgattgttacagtggaggcccttgaagcaaggaagtgttgggtgtttgagcttttgaacataggggagttaggaaggccccactgcatgggtgacattggagccaagatggcaaggggttgaggaagcgagccctgtgctgacagagggagcatcgaggcagagggcagagggctgggctgggcatgttggaagtttgggtggaaagagcaaagtgggagagccaaggagatgaagacagaggagggtcgtcagggcagggtctgcgggactgctggtgagatgggaagcctttgagggttgtggrtaggactagggagacacgatctggtttaggtccataggttctccctgacagctgcgttgggaggagactacgcaccatttcatgtggaccatggttctcagtaagcctgcgtttgggcatcgattagactttcttattgctcacacagtctggatcctactggtgcagggtgatggtggggtggtctttattt

SEQ ID NO: 797843 - DNA, 571 bp, Homo sapiens
atcagtggtaggccaggcgcagtggctcatgcctgtaatcccagccactttgggaggccaacgtgggcaaatcacttcagccctggagttcaagaccaacctggcaccatctctataaaaaatttaaaaattaggctgggtgtgatggctcatgcctgtaaccccagcactttgggaggccgaggcgggtggatcacctgaggtcaggagtttgagaccagcctggccaacatgacaaaaccccgtctctactaaaaataaaaaaattagctgggtatggtggtgcrggcctgtaatcccagctacttgggaggctaaggcaggagaatcgctagagcccgggaggcagaggttgcagtgagccgggatcgcgccattgcactccagtctgggtgacagagtgggactctgtctccaaaaagaaacacacaaaaatttaaaaattagctgggtgtggtggtgtgtgcttgtagtcccagctactcaggtggctgaggtgggaggatcactggaacccaggagttcaaggctacagtgagctatgatcacaccacttcattccagcctgggc

SEQ ID NO: 797844 - DNA, 479 bp, Homo sapiens
gtgggggctccaatgccacatttcccttccaaactgccctagcagaggtcctcaatgagggctccacccctgcagcagacttctgcctggacatcaagtgtttccatacatcctttaaaatccaggcagagcttcccaaacctgaattcttgacgtctgtgtacctgcaggctcaactgttgaacctkccaaggctaggggcttgcaccctctgaagcaacagcctgagctgtaccatggatccttttagccatggctggagctggagaagctgggatgcagggaggcagggtactaagtcttgaggttgcacacagcagtggggccctgggcccagcccatgaaaccattttttccttctaggcctccagatctgtgatgggaggggctgctgtgaaggtctctgtcatgccctggagacattttctccattgtcttggctattaactcattactcaggcaaatttctgcagtcagct

SEQ ID NO: 797845 - DNA, 609 bp, Homo sapiens
ttacttagtgataacttggtcacatggccacacctagacaaaagaagtgtgtatgtgtgtgtgtctgtaggtgtctgtgtgtgtgtgttcgtatcctggcctatatactgcccatagacaatcatttaatgtgttttacgtgtatgcttatatttgaaggtattaaaaatgtgcattatttgtgtcaaaatgtcttttaatgtgttagagtgaagaacagtgcatttgaattaagtgccagctgccccagcatgaaaaagtacatgtcttctgtcccttagaaaaatkatattataaatattaataaataatgaattttcttccacctttgtgggccatatcaaatgaaattttacaaaatacaccaatgttctatctcatactctaatatgtttagtttcttcaaagtttggataatgttgtcgaattaattagaaccttcaatcaaaatatcagttacacaaatcttctcacaagagccacaatagtggctctcagccagacatgctttgcattatgttactataatatatcatacaattataaaattactcatgtcttggaagacaaaaaataaaattaaggctctggtcactttcttttaacttt

SEQ ID NO: 797846 - DNA, 616 bp, Homo sapiens
ccagtatgcctcacaatgaatcaaatgtgattatagactcatcctgtggttacttatctggtcctctcaatgtgttgtgggaataattagttatatctagaagatgagaagattcctaattggtttctcgatctatggaatcagggctactataaaacatagggcaagtgaaaacccttcaaactactgacttttgccaggaaagtaagacaagagcaatatcacatctctaggataattgcagagattaaagagggttacaggagatgatgattcttaccatatccctatgagaattatattttgcccagtgcaaatagcacatggataataatgattagttattggaaatgtagacacattcatatgccaatctcagctgtgtttccagatgaagtattcttattctaacaaattaatgcaatatctgatacttaatacacaratatatgcagttattgacctaaattatgctttaattcctatttatatcagaataataatcagaagcagtttggtttaatagtgacagaaggcagtcaaatgcctagtcagataggggcaggtccccagtgaaacctcaccttcaagccaaagacaatttaaagcctgaaag

SEQ ID NO: 797847 - DNA, 641 bp, Homo sapiens
acctagtaaattataaaggaaagaagtttaattaactcaaagttccacatggctggggcggcctcaggaaactcacaattatggcagaagggaaagcaaacatgtcctttttcacataattgtagaaaagagaagtgccaagcaaaaggggaaaaagccccttataaaaccatcagatctcatcagaactcactcactataatgagaacagcagcatgagggtaatctcccccatgattcaattatctcccaccaggtccttcccacaacaagtggggattatgggaactatattcaatatgagrtttgggtgcggacacagctaaaccatatcaggcaactatgtctccagcagagcatgctagaaattgtttctcaaaaggcctataatactttgttgcaggtagcatggccttactctaaaaccccagaagcctttgttgtgattatttcacaagcactttccatgagttccacaagatatttaatcctggcagtactgctacctctaatatcacagggtctatgagaacatatatggatatgctgcagagctctttcctattttgggcccacttcacactagtagagttttgtgtcacatagtgtactaccctggacagtattacccagtgtagaag

SEQ ID NO: 797848 - DNA, 641 bp, Homo sapiens
acctagtaaattataaaggaaagaagtttaattaactcaaagttccacatggctggggcggcctcaggaaactcacaattatggcagaagggaaagcaaacatgtcctttttcacataattgtagaaaagagaagtgccaagcaaaaggggaaaaagccccttataaaaccatcagatctcatcagaactcactcactataatgagaacagcagcatgagggtaatctcccccatgattcaattatctcccaccaggtccttcccacaacaagtggggattatgggaactatattcaatatgagatttgggtgcggacacagctaaaccatatcaggcaactatgtctccagcagagcatgctagaaattgtttctcaaaaggcctataataytttgttgcaggtagcatggccttactctaaaaccccagaagcctttgttgtgattatttcacaagcactttccatgagttccacaagatatttaatcctggcagtactgctacctctaatatcacagggtctatgagaacatatatggatatgctgcagagctctttcctattttgggcccacttcacactagtagagttttgtgtcacatagtgtactaccctggacagtattacccagtgtagaag

SEQ ID NO: 797849 - DNA, 586 bp, Homo sapiens
tatacggacaataactccaaatggtttaaaggcttacatgtgagaactgaaactgtaaaactcatagaagaaaacataagagaaaagctccttgacaagagtctttgcaatgattttttaaaatataaccccaaatcactggcaacataagcaaaaataaacaaatgagactatatcaattcaaaagatttctgcacagcaaaggaaacaaataacaaaataaaaagacagcctatggaatgagagaaactatcgcaaatcatagrtctgaggggctaatatccaaaatgtataaggtactcacaactcagtaacaaataaagaaataaactgatttaaaaatagacaaaggacctaaatagacatttttcagtgaagacatatgaatggccaacaagtctatgaaaaagtacttaatataatcatgagagaaatgcaaatcaaagcctcagtaaattatcccttcacttccattaggatggctattatcaaaatatgatgaatgttagcgagagtgtaaaggaaagggaacccttgtacactgttaatggaaatgtaaattggtacaaccattatggaaaacagc

SEQ ID NO: 797850 - DNA, 586 bp, Homo sapiens
tatacggacaataactccaaatggtttaaaggcttacatgtgagaactgaaactgtaaaactcatagaagaaaacataagagaaaagctccttgacaagagtctttgcaatgattttttaaaatataaccccaaatcactggcaacataagcaaaaataaacaaatgagactatatcaattcaaaagatttctgcacagcaaaggaaacaaataacaaaataaaaagacagcctatggaatgagagaaactatcgcaaatcataggtctgaggggctaatatccaaaatgtataaggtactcacaactcagtaacaaataaagaaataaactgatttaaaaatagacaaaggacctaaatagacatttttcagtgaagacatatgaatggccaacaagtctatgaaaaagyacttaatataatcatgagagaaatgcaaatcaaagcctcagtaaattatcccttcacttccattaggatggctattatcaaaatatgatgaatgttagcgagagtgtaaaggaaagggaacccttgtacactgttaatggaaatgtaaattggtacaaccattatggaaaacagc

SEQ ID NO: 797851 - DNA, 627 bp, Homo sapiens
aaaattgaatcatgagggcagtttcccccatactgttcttgtggtacagaataagtttcatgagatctgattgttttatatatgggagttcccctacacaaactctcttgcctgccaccaggtaagatgtccctttgttcttcctttgtcttccaccatgattgtgagggttccccagccacatggaactgagagttcattaaacctctttcctttataaattacccagtcttgggtttgtctctatcagcagtgtgagaacaaactaatacagttactttccgtaaattatctgccaatgctgagaaattagggaattaagrcctgacctccttcaaggtaatggcatagtcaacccaatgattttttttttcctcctagcaagttggttcaacccacggcccatggaccacatgcagcccaggagggttttgaatgcaacccatcacaaatttgtaaactttcttaaaacgtgttacgaggttttttttgtgtgattttggtttttttctttttagctcatcaattattgtaattgttagtgtattttatgtgtggcccaagacaattctttttcttccaatgtggcccaggaaatcccaaaaaattagacacccaaaaaattaa

SEQ ID NO: 797852 - DNA, 627 bp, Homo sapiens
aaaattgaatcatgagggcagtttcccccatactgttcttgtggtacagaataagtttcatgagatctgattgttttatatatgggagttcccctacacaaactctcttgcctgccaccaggtaagatgtccctttgttcttcctttgtcttccaccatgattgtgagggttccccagccacatggaactgagagttcattaaacctctttcctttataaattacccagtcttgggtttgtctctatcagcagtgtgagaacaaactaatacagttactttccgtaaattatctgccaatgctgagaaattagggaattaagacctgacctccttcaaggtaatggcatagtcaacccaatgattttttttttcctcctagcaagttggttcaacccacggcccatggaccacatgcagcccagsagggttttgaatgcaacccatcacaaatttgtaaactttcttaaaacgtgttacgaggttttttttgtgtgattttggtttttttctttttagctcatcaattattgtaattgttagtgtattttatgtgtggcccaagacaattctttttcttccaatgtggcccaggaaatcccaaaaaattagacacccaaaaaattaa

SEQ ID NO: 797853 - DNA, 618 bp, Homo sapiens
taaattttctccatgtcttttcatgacttgatagttcatttctttttattgctatgtaatattccatcacgtggatttgctacaatgtgttaatacatttacatatgtataaaccttctggttgtttgggaaattgtgactttagcagctataaacacttacatgcaggtttttgtggagacatagctttttaactaacttggttacacaacaaggaactattactgtgtagtattacttttatttgcaattctcccattataaatgatattgagcattttttcacatttgtcttttttgctgagctatctttatttttacttgagttttttttttgctttcttattgagttggaaaagttctttgtatattttcgatataatttcttaattagatatattttacaaataytctctcccagtctgtggcttgttttgtaactctcttgacagtgtctttcagaaagtatattttaattttagtgacatgaaacttgtcaatgtttttatttcatgggttgtacttttcttattgtattaaagaactcatatgtaagctttcaactttccaaatagaaattgacattcttatgtttattccttaatgtcttgattcata

SEQ ID NO: 797854 - DNA, 613 bp, Homo sapiens
tggtctaaaactcctgggctcaagggatccgtacaccttagccgcccaaagtgctgggattacaggcgtgagtcaccatgcccgaccagtattctacttttcatcagtactattctccatggaattccttagcaccatgagtgctgtgattttgccttgtatttgctctttctttgtctctcttgccctgccctcctcatgcattcttcagcaacctcttccaccaacatgcacatacataaaaacagaaacatgcataygcacacattcattcccttataaatttacaccttcgcctaaagtctctattcatccttgctggctatgttttgcacttcaaaggaggtagctcttctctctctctctctctctgtgtttgtgtgtgtgtgtaaaataaattatatacatacaagtattgtataattctttgtaattattttcatgtaattgtttccaaatctattttgtgatcttcttcggggcaaagatataattttggcacatcagtgatactccatttataatttataaataaacagcttttttgatcatttgcttttgttttctcaattcagtaaatacaggccaacaattcaaaattatcagtagttca

SEQ ID NO: 797855 - DNA, 602 bp, Homo sapiens
taattatgccagggggccaggattctgttcagaagattgtttcaaattggcttcagtgcctgcacaaatgggcaataaaacccccaagatatactccatattatatcacagaaataattatacctgaagaatttaaggcaagtaaaatcacacgcttgcctggacaaaagtaaaatatccataaactatccataaaatgctaagctttcagtagtgctattttctggtgtaccctccagaataaactgtgagtgaatatgcaccaaaataactaaacaaggtaattcattgtatgyggttgttatttatataccaattaaaagtaatagaatggcttccaaaaataactactttagttttagaataatttctctgcactcccttttggcaataatcagcaaacagaattgatgattcaggccacagtagtatgaaataataaaactatgctgtctttatataataaaatatttgccttttttgtgccagttttgcctttttttcttaaaagtaaaataagctaatatttattaagccctgtacttacttaaatctcttgacaccaatgacatagacactatcttcaaaatgttaagtgactc

SEQ ID NO: 797856 - DNA, 611 bp, Homo sapiens
agttgctcggcctcctgccgtaactggtcaagctcactcatcttccgatcttagtgctcttcaatgccaccttcaagaatgtgagatctgaaacagaaagacaagcacaatcaataaacaactgttggataatttaatgaagcaggtgagaaaagtaaattgaaagtttaaggtgggcgtggtggctcaagcctgtaatcccagcactttgggaggccgaggcgggcagatcacgaggtcaggagatcgagaccatcctggctaacacggtcaaaccccttctctactaaaaatacaaaaaaattagccaggcatggtggcaggcgcctgtagtcccagctacttgggaggctgaggcaggagaatggcrtgaacctgggaggcagagcttgcagtgagccgagatggcgccagtgcactccagcccgggcttcacagcaatactccgtctcaaaaaaaaaaaaaaggaaagtctgagaactatggtctcattacaaaccagagaacttttcttcagcattcatcagaacttatacaatggctaagtagggccaggtaaataaaatataattatgattatttattggctttgcataatattacaatgtcta

SEQ ID NO: 797857 - DNA, 611 bp, Homo sapiens
agttgctcggcctcctgccgtaactggtcaagctcactcatcttccgatcttagtgctcttcaatgccaccttcaagaatgtgagatctgaaacagaaagacaagcacaatcaataaacaactgttggataatttaatgaagcaggtgagaaaagtaaattgaaagtttaaggtgggcgtggtggctcaagcctgtaatcccagcactttgggaggccgaggcgggcagatcacgaggtcaggagatcgagaccatcctggctaacacggtcaaaccccttctctactaaaaatacaaaaaaattagccaggcatggtggcaggcgcctgtagtcccagctacttgggaggctgaggcaggagaatggcgtgaacctgggaggcagagcttgcagtgagccgagatggcgccagtgcactccagcccgggcttcacagcaatactcygtctcaaaaaaaaaaaaaaggaaagtctgagaactatggtctcattacaaaccagagaacttttcttcagcattcatcagaacttatacaatggctaagtagggccaggtaaataaaatataattatgattatttattggctttgcataatattacaatgtcta

SEQ ID NO: 797858 - DNA, 605 bp, Homo sapiens
gttagtagtaattacagaacagaatataaacaaaaccattcacatgacaccatttaaagtagagtttaggaatggctggggggatttagaatattttaagcaactgtaatgtacaattgatgaaacaattttaaggcaatatcaaaaataaatacaattaagtacagatattgaaaaattaattgatataacawtgatgcaggaggccacagtaaatataacagtaactatataagaaactgttatatagtataagaaactcttatacagtaactatataagaaaacttttttatcactatctggagcaccatgaatcccttcatttattccataactattgttgaccatttaatgtatgaaagacactacgtattacatctatgagtgactatagccctgctctgccatcttggagttatagtctttcagggagaaaaccaggaaatgggtcattttcataaaatatacttgttattaaataagtaaaagtccattattctgtgggaaaactttgaggagctccattgaagagactattttctctcttggttgcaagtgcctctgtttccacagattacaatgaaccagagttttcaaaattga

SEQ ID NO: 797859 - DNA, 519 bp, Homo sapiens
ttccacccttctaagtatttctttttttattcatggtcagatttaccctctgctaaacacagctggcaaaaatccacaaagctgaaaactacttgattatattaagggaaaaaaagagaagtattttctgtagcagaatgtttcaattttcttctttactgtttgaaaaataaactccagctgttgtgaaataggggaaaaaagaaaaataaatacaatgattttagctgtataacttggttcatgtgatctcagagcaggttttctaaaaawactgatctaccttcaggatcagaactatttagtatttgctgatatttagattcctgattcataccatttctccctctctttttttttttttttttttttttttttaatagagatgggctctcactgtgttgcccaggctggtcttgaactcctgggctcaagtgatcctcctgtctcagcctcccaatgtgctggaaatacaggtgtgaaacactgtgccaggcccaaaccacttctcatttgagt

SEQ ID NO: 797860 - DNA, 437 bp, Homo sapiens
atatatataaaatgaaggagtcaggtttatctcagcaatgcagagttgacttaacctgcaaaaattacatcacataatataatctgttcgtagaaaaagaggaaactaaatcacattagcatctccaaaggtgtgaaaaaagatttaagaagattcaacacatattcataactctcacagaaaaaggratagaattgaatttttttcatctaacaaagggattttagaaaattatactctccctctctctctttttctcaacacacacacatacactgcaaactacagaacactgacgtgcattaaaaaagactgaaataattgaaaagatatataatatcaacaatttggaaaataaaatttcaatttacaaaaatttgccaacatacagaggtcaactccatgcaaatctagcaggcattttggttgaaattggc

SEQ ID NO: 797861 - DNA, 642 bp, Homo sapiens
tctgcaagaacagtgagactctggaaactgaaccaggacccactccttcctttcttcctcctccttcccacgtcagcacaatgactatccaaactgagtaagtacagccaaataaagagggcttcctctcaggtcccaatcaagggatatggtatttcaccaggaatgcagctgtcagcgtttatcattgcaccagctccaaattgcagggagtaarttcttagcaattgctgtttaaagattggaggcttccttcctctacccagctaacactaataaagtagatgctcaactctaggtatgccaggctcaggacatcactacccagcttgccttggggtacaggtttcatgccaggagtcacaatctgagaaaatcagaagctttaattcccttccagcaccctgctcgtaaagccgggtatgactacaaaaagatgagttatcctggttcagaaaataaactcaaaaactttcctaaaaaactgtatctgcaaaggagttagagtttagttatatcagatggtgtagcaatttattctgcatatggctataaagttatgccagcaccgtttactgaataaggagtcctttcctcattgcttgtttttgtcaactctattgaagatcagagtgcagcatc

SEQ ID NO: 797862 - DNA, 607 bp, Homo sapiens
taagtccttatttaccaataataatattgctgtaaatggacttttatccttacagagtagctgaatggataacaacaaaagaaggcccaaagatctcctgcctacaagaaacacacttcacctataaagacacacacagactgaaaataaagggctggagaaaggtatttcatgcaaatggaamccaaaaaaaaaaaaaaaaaaaggcagcagaattagttatacttatgtcagacaaaattgatttcaagacaactataaaaagaaacaaagaaggttattacataattataaaagggttaatccagcaaaaggatataacaatttaaaatatatatccacccagtactggagcacccagatatataagctaaatgttattagagctaaagagagagatagaccccaatataataatagctggagaatttaacaccccactttcaacattgaacaaatcttccagacagaaaatcatcaaataaacattgggcttaacctgcactgtagaccgaatggacctaatagatatttacagaacatttcatccaatggctgcagaatatacattcttctcctcagcacatggatcattcttaaggatagg

SEQ ID NO: 797863 - DNA, 607 bp, Homo sapiens
taagtccttatttaccaataataatattgctgtaaatggacttttatccttacagagtagctgaatggataacaacaaaagaaggcccaaagatctcctgcctacaagaaacacacttcacctataaagacacacacagactgaaaataaagggctggagaaaggtatttcatgcaaatggaaaccaaaaaaaaaaaaaaaaaaaggcagcagaattagttatacttatgtcagacaaaattgatttcaagacaactataaaaagaaacaaagaaggttattacataattataaaagggttaatccagcaaaaggatataasaatttaaaatatatatccacccagtactggagcacccagatatataagctaaatgttattagagctaaagagagagatagaccccaatataataatagctggagaatttaacaccccactttcaacattgaacaaatcttccagacagaaaatcatcaaataaacattgggcttaacctgcactgtagaccgaatggacctaatagatatttacagaacatttcatccaatggctgcagaatatacattcttctcctcagcacatggatcattcttaaggatagg

SEQ ID NO: 797864 - DNA, 498 bp, Homo sapiens
atagtgactattcagttccccattcagggatcctgcacatctagagctgttctggtataggtgtatggtgctgagaacccatctgagaatgaagtcagttcatagggaggcagagctaacaaatggtaggaagaacagaacctyttctgttaatattgggctcatggagctagttatatctgacccagattgtccttgaactgcctagttatttgaactaataaattcctttttctgtctaagcaaatttgagttgggtttctgtttcttacaacaaaaggagttctgaataatatatatgtgtactatgaggtagtattagaaaagcactggcttatgcacatactaaatgggtgccctggggaggttcttttaaagctctgggcccaggtttctcatctctaagtagaagtgattggagtgggacaatagtttcccagaagagttgcacaaaacaaaggcaccacagtgacctcaataggaaacgagggagaagca

SEQ ID NO: 797865 - DNA, 693 bp, Homo sapiens
gcctacttacataggaagtacctaaaaagcagctttggtccacagctccaataacagctctccacctacactgacttccagctggccttccataatcccttggcttcattctctagttcccatcacttgccccaggccatcttcccctttcccatgacccactctgctgtggctcagcagctgctgctcagacaaagaggtgccttctctgctggctgtaatcaccagcaccccttactctacccactgaatactccatcccttacctcaaccctcaagagaggagattcatgatgcagggcaaagtggaggaktgcctgtaatgagcttttggtttggactatggctaaggaaccaatatattctacttatctgagagatttgttgtgaggactaaataatatatgtaaagtgctctgaatagcttatttatttatttatttatttatttatttatttatttatttgagatggggtcttgctctgtcatgcaggctagagtgcagtggcatgatcacagctcactgtagcctccaactcctcggctcaagagattctccctcctcagctttctgagtagctaggactacaggcatgtgccactatacccagccaatgtttttactttttgtagagatgggatcttactagttgcccaggctggtcttgaactcctggccccaagggatcctc

SEQ ID NO: 797866 - DNA, 614 bp, Homo sapiens
cttatctgagagatttgttgtgaggactaaataatatatgtaaagtgctctgaatagcttatttatttatttatttatttatttatttatttatttatttgagatggggtcttgctctgtcatgcaggctagagtgcagtggcatgatcacagctcactgtagcctccaactcctcggctcaagagattctccctcctcagctttctgagtagctaggactacaggcatgtgccactatacccagccaatgtttttactttttgtagagatgggatcttactagttgcccaggctggtcttgaactcctggccccaagggatcctcctgcctcagcctcccaaagcactgggattacaggcatgagccactgtgtccagtctaaaaawtaatgtatatattattatatttcgccatttgaaatcctcttggcaatctcctgagctgcttatccttttagagcaggatctgctgtgtgctgtagtccaatttatgcagaacaattatattaccaagcaatgagcacaaaacattacatttcgaaaaagcatagatgttactaataatagctagcatttattgagagttttaaaaatatcagaccctatgctaagt

SEQ ID NO: 797867 - DNA, 639 bp, Homo sapiens
gggtgatccagctatctggcaaatgtgccaccctccctgcctaagggggcccagcaagtctatgcatcatcgagcagttccccaggaaggacatctttttgcgggggggctctgaactttgtttcaagcaactcctgccatctgaaatacgcttcttgatcagtgaactcctcatttcgttctcacacacttcccacctacctctctctcagcactatactataacttacatatttgtcttcactattgggcattgaacttatggagtgtgcttctcttagcactttgaatgactaaatatcaatgtctgctccttacaataccatttytaaggagtcctcgatggaccccagaaggggtggtgatgtctggcccaggccttattgtctttgtatgacctgaatttggcacttaccaggcatacagcaggcacttgagatgaatgggtgaatgtgtccacctgcttggggagcctggggatggatcagggattgattttagcctctggcttctcttattcaccctaccttctaccttcaaaaccttaggcaagatagtgaacctttctttaagtttttttttttttttttgtctatgaaatgggaatgatagtgttgcctacttcataggatgttatga

SEQ ID NO: 797868 - DNA, 569 bp, Homo sapiens
tcaaaagaagacatacaaatggcaaacaggcatataaaaaggtgcccaaaggctggaaacagtggctcacacctgtaatctcagcactttgggaggccgaggtgggcagatcacctgagatcaggagttcaagaccagcctggacaacatggctaaaccccatctctactaaaaatacaaaattagccaagtgtgatggcacatgcctataatcccagctacaagggagactgaggcaggagaattgcttcagccagggagatggaggttgcagtgagctgggatcttgccactccactccagtctgggcaacagagcgagattacgtctcaaccaaaaaaaaaaaaaaaaaaaaaggtctaaacgtcattgatcatcagagaaatgaaaatcaaaactacaatgagatgtcatctcaccccagttaattggmttttatccaaacaacaggcaataacaaatgctggtgaagatgtagagaaaagggaactctcatacactgttggtgagaatgtaaattattacaggcactatggagaacagtatggaggttcctcaaaaaactcaaa

SEQ ID NO: 797869 - DNA, 485 bp, Homo sapiens
ccggctttccctggcccctttctaccttgtccaggagcctcttaccccctgaggcagcgttgaggctgctcccccacgtccacagtacatgtgcatttgtagcctggagctgacaaggcccaatatgatctggtcctgttctaacgtcatcttgtctgcccgtctcagccttcatctccactgtgcatgttgggagaacctccagtctctcataaaagcccactctctcactatttcaatattcttctgttttagcccattcagctgccatgtggtacstggcagtttcctccagtccagttcccagtggagtgtctgtgctaaagtttctgaggcccgccaagcccatgaaggcccgccacagctgccatctccctcagagttcacctacatcgtgtgatgtcaccttcactgagccacagtgggcaccaagggctcaatgacatcggtgggcccctcttccctgttccgtgtggccagaatgt
